United States Patent Application Publication US 2021/0199660 A1 - sequence listing, part 40

SEQ ID NO: 568915 - DNA, 120 bp, Artificial Sequence
  ENSG00000170500_29 (sequence is synthesized)
gaactgtgtttaatgtcctgttgtagtcccaggtgttgtaaattgcatgttgtaatcaaacgaatgtcaaaacataagaaagtataccttggatatagaaaaacctgagaacagtatcat

SEQ ID NO: 568916 - DNA, 120 bp, Artificial Sequence
  ENSG00000170500_30 (sequence is synthesized)
tcacttgaggatatatatatatatatttacacacaataaagtgagttaaaattgtatatgcattgggatgtcaaacataaaaccaccaagtgcaaagaatgctttgaaagtagaaccttg

SEQ ID NO: 568917 - DNA, 120 bp, Artificial Sequence
  ENSG00000170500_31 (sequence is synthesized)
tctcattgatcagtggttactaagcatttaggaaacagtcatctttttctattgggatttgcattagaaattagccccatcagtaaatttcagtttactatccatttattaatatacaaa

SEQ ID NO: 568918 - DNA, 120 bp, Artificial Sequence
  ENSG00000170500_32 (sequence is synthesized)
aacattaaaaaatctgccatgccatggtaatctatctattccaggaaaatagatcagaatatatgaagggaggatggccggtatgggatgtaaatattcagtaagtttttctccaacacc

SEQ ID NO: 568919 - DNA, 120 bp, Artificial Sequence
  ENSG00000170500_33 (sequence is synthesized)
aacctaaaattatctttatttttttgaaagaaagttttacggtgatcagaccaggtgttatctgttaaaggacagtagtatgacttccatcctgtaatgcacgttggtgatattgattgg

SEQ ID NO: 568920 - DNA, 120 bp, Artificial Sequence
  ENSG00000170500_34 (sequence is synthesized)
aataactgaatctgagatactcatatgttctctctggcccaaccagctggtgcatttggttggcttcctcgtctgtaaggtggacattcttaaccagagggtcacgaccacatcacagct

SEQ ID NO: 568921 - DNA, 120 bp, Artificial Sequence
  ENSG00000170500_35 (sequence is synthesized)
gcaagttttgctttgttcattgaaggtgattttttagttttaaaatatatatatctcataatatacaatgttgatggtatatcaatccatcaagcattttattagaaagactttataata

SEQ ID NO: 568922 - DNA, 120 bp, Artificial Sequence
  ENSG00000170500_36 (sequence is synthesized)
ttattaatttttctttagttttcagtagataaagtagtttcagtagataaagactttataatattattaatttttcttttagttttcagtctcatcatgggagttagaaaataccagcat

SEQ ID NO: 568923 - DNA, 120 bp, Artificial Sequence
  ENSG00000170500_37 (sequence is synthesized)
cacttaattgtaaagagaaaatgtgaaagtattttccaatccaatgtttcaagtgcctcacttattgtgaatctcaaatatcatcttgagatggtttaatggcagtttggccaagtgatt

SEQ ID NO: 568924 - DNA, 120 bp, Artificial Sequence
  ENSG00000170500_38 (sequence is synthesized)
tctaagagattttattaatttatgcattaacaatagtattcaactttcttaggcattataacctaacccgatcatttgattggaataactgaatcattcattgattggaataaaataaag

SEQ ID NO: 568925 - DNA, 120 bp, Artificial Sequence
  ENSG00000170500_39 (sequence is synthesized)
aaaacaaaatgcatctcacatgccagaagacctttaccagaagtggttcatgaaaatcagtatgcattgaccattctctgcctttcccttttggaaaatttttttgtaccttcatatcac

SEQ ID NO: 568926 - DNA, 120 bp, Artificial Sequence
  ENSG00000170500_40 (sequence is synthesized)
agctgaatagttatcaatgccatttccatttggaagtatctaaataaccacaatgtgatcacagcttctccacgagccttcctgaagtaaagctggtatgcttgctataatacttggaac

SEQ ID NO: 568927 - DNA, 120 bp, Artificial Sequence
  ENSG00000170500_41 (sequence is synthesized)
ctgttgctttctcttcctcactctttaaatgtcataaggtcacacagttcttggaatcagaactattcagttatttcttcatgattctgcctggctttctgagtcttctccttcggcatg

SEQ ID NO: 568928 - DNA, 120 bp, Artificial Sequence
  ENSG00000170500_42 (sequence is synthesized)
ttatgtaaaagtctgaacaacaatgatgacgcagacgagagcaacatacgtttttattttttgataggtttttatttttttgataccagagggaattaactatgatcacatcgtgctctc

SEQ ID NO: 568929 - DNA, 120 bp, Artificial Sequence
  ENSG00000170500_43 (sequence is synthesized)
tctgttcagcatcacacgcccacatactgcagtgtgggagtagattggtacttactgagcacttagaaacatcacgcatcaggaaccgggtcagggtgacagcatcctacggtcatatca

SEQ ID NO: 568930 - DNA, 120 bp, Artificial Sequence
  ENSG00000170500_44 (sequence is synthesized)
tgaaggaagcctcccttacaaacctaaaaaaaaaaaaccccagcttcagtttgctaccaattaagctaaagcagaacggtctgcttcctcctccgcctgcccccttctgcctcttttctg

SEQ ID NO: 568931 - DNA, 120 bp, Artificial Sequence
  ENSG00000170500_45 (sequence is synthesized)
ttggggagatgccaattctaaggatttctcagaaaataatgtaatctctcattcaatgtcaggacattccagcttaattgtactgaaagtgctccaataggcatgctctcgttacattgg

SEQ ID NO: 568932 - DNA, 120 bp, Artificial Sequence
  ENSG00000170500_46 (sequence is synthesized)
aatcaaagcagaaaagagtaatagcagcgtgggggagtcatttttcttcttgaggaacaatacatgctgttctgtatttttccattcatcgcccaaacctgcctgtgtctttgaaatgca

SEQ ID NO: 568933 - DNA, 120 bp, Artificial Sequence
  ENSG00000170500_47 (sequence is synthesized)
agtaagatcccaaaggcagctttctgaaagcccgtggcatttttagcttatcccatcccccgtgtgtgtcctcatcttcagaattgaaagttaggatactttttaaagtttcaaaagaaa

SEQ ID NO: 568934 - DNA, 120 bp, Artificial Sequence
  ENSG00000170500_48 (sequence is synthesized)
ataatttaaaatgttaaggtttatccatagaaacacaataattcttaaccaattcatgtaccaaattcaacagtattatctcatttttagggtcacaaatgtgtcctttttgcacttaaa

SEQ ID NO: 568935 - DNA, 120 bp, Artificial Sequence
  ENSG00000170500_49 (sequence is synthesized)
aaaacaaaaacaaacaaacaaacaaaaaacacaccaagactgtttaacaaattgtatctcaactcttaatatatgttaagtcttaccacaggacatttgaatcatcaaggaacagttgaa

SEQ ID NO: 568936 - DNA, 120 bp, Artificial Sequence
  ENSG00000170500_50 (sequence is synthesized)
tcaaggaacagttgaagtttatggatggtagaataacaatgaactatgatattatcactttattataaactttttggaaaattggcagttgctaccatcgaaatactccattgcctgtgt

SEQ ID NO: 568937 - DNA, 120 bp, Artificial Sequence
  ENSG00000170500_51 (sequence is synthesized)
tacatagaatttgttataatttttaagggctttaaaaaaatacccatctgtttcttctccttcttgttttcttttgtgccccaccacttaaattacttgggtaaataccactcttcaaaa

SEQ ID NO: 568938 - DNA, 120 bp, Artificial Sequence
  ENSG00000170500_52 (sequence is synthesized)
tttgaatactgtctatcaaataagaagaagtgtgaaagatatgaagaagaaaggtgatagcaaattagaagaaaataaatgtgggtgatttcttttagttgaaagcacagagttttattt

SEQ ID NO: 568939 - DNA, 120 bp, Artificial Sequence
  ENSG00000170500_53 (sequence is synthesized)
gtgggtgatttcttttagttgaaagcacagagttttatttttccccagtataactattgagtagggtagggaggtccctgtatccccatttttattttttttgagatggggtctcactct

SEQ ID NO: 568940 - DNA, 120 bp, Artificial Sequence
  ENSG00000170500_54 (sequence is synthesized)
gttttagcatagacagcagcggcattcagtggaaggagttcttccccttcaacatcgtccttcccaaaggccacattctgattctattgttcaccaaaaactaattcccagggaagcccg

SEQ ID NO: 568941 - DNA, 120 bp, Artificial Sequence
  ENSG00000170500_55 (sequence is synthesized)
ctggctctgactcccaggggaaagtctttttccctttacaactcctcacctcagcctcaccttgactttcacttctcaactgctgaattctataaaatagccttttagcagtgactcagc

SEQ ID NO: 568942 - DNA, 120 bp, Artificial Sequence
  ENSG00000170500_56 (sequence is synthesized)
ttttaggtgagcacagataatgaagaaattgaagtgccaccattgcactcccccaagttggggacataaactcgaatttgcacccaggtctgataaaagtaactgattgaggacgcagaa

SEQ ID NO: 568943 - DNA, 120 bp, Artificial Sequence
  ENSG00000170500_57 (sequence is synthesized)
aggtggatgccattgacagcgttgactgttctcacaattcctacagaaatgaaagaaggagaggcccagcagaccacaccgggccatgaggggaagcatgggagacaggcagaagcagga

SEQ ID NO: 568944 - DNA, 120 bp, Artificial Sequence
  ENSG00000170500_58 (sequence is synthesized)
gtgaggaggaacgtggctcagaccctctactgtatgttctgcaggaaagggcagggaaatagctaagactggctggtctgaataacagctcagactctaggctatacaggtggtctctag

SEQ ID NO: 568945 - DNA, 120 bp, Artificial Sequence
  ENSG00000170500_59 (sequence is synthesized)
ccatctggcacctagccccgggtcgttagggtgggggatattgcttcctaggttgtaagagccagatagaggaggatgggctctggattggtcactttgctcccagggtagccctttgct

SEQ ID NO: 568946 - DNA, 120 bp, Artificial Sequence
  ENSG00000170500_60 (sequence is synthesized)
gtatctaagaattggctcaccctgggatgggcagtttctcctgggtcagcgaggcccctgagatgtcaaaatatcataaaatatagaaatcatgattaatacaattggtcctctgctgtt

SEQ ID NO: 568947 - DNA, 120 bp, Artificial Sequence
  ENSG00000170500_61 (sequence is synthesized)
ttgacatactaaggtcacttttgatagcagaaacttttaaagagtagggcatacgttgccctgaagagcatagaaaacattttattctgagagtagaaaggaggaagacacgtggagata

SEQ ID NO: 568948 - DNA, 120 bp, Artificial Sequence
  ENSG00000170500_62 (sequence is synthesized)
caggagtcccttaggctggcccatagctgagtctctcatgtgtgtggcattagtcaagaatgtagttctgcagtttgcggggggggggtctctaacatttcttggtgcagttgttaacat

SEQ ID NO: 568949 - DNA, 120 bp, Artificial Sequence
  ENSG00000170500_63 (sequence is synthesized)
gtgttaaacatatgagtctgatgatgatatcgcggtgtttctcggctcggggtggcaggtctggcggttgtgtggctgggggtgtgcactgatagttcagtaaaggataagtagagactc

SEQ ID NO: 568950 - DNA, 120 bp, Artificial Sequence
  ENSG00000170500_64 (sequence is synthesized)
gtggtgttcatgtgtcaccacagggagggagtggctgtggagacccaggacaggaagtcgcggtggaaagcaggctggggtggtaggagaaggcaccgggggtgggtgctcctcccccag

SEQ ID NO: 568951 - DNA, 120 bp, Artificial Sequence
  ENSG00000170500_65 (sequence is synthesized)
gggttgaggagttgactgatagggggcagttacctcctgggaaagcaagacgctcccttaagttttagaatggtacagagagtagtcccttctaccagagtttccatttagacatgggag

SEQ ID NO: 568952 - DNA, 120 bp, Artificial Sequence
  ENSG00000170500_66 (sequence is synthesized)
tgtagggggccatgtttcggcagaagcagggcatgtatcagcattagtggactcctcagtattaaaaggaagaacagcaaacatgtcatgtgcccactttgtgcctcaggagaggtagcc

SEQ ID NO: 568953 - DNA, 120 bp, Artificial Sequence
  ENSG00000170500_67 (sequence is synthesized)
cgtggacatcgctagggcagaggttttaatatctgggacaaagttatctcccacggcgaggtcgtggctgggaccatgtcatcttcagccgtgagctgctgggctgggcaatgtcttctg

SEQ ID NO: 568954 - DNA, 120 bp, Artificial Sequence
  ENSG00000170500_68 (sequence is synthesized)
ggatgtgagacgtggggtctcctttctaagcggacccccactcgtgctgatgtgggtcccagcatttgccgcgtttggttgaaacagtggcttacctggagggtctgggtctctggatca

SEQ ID NO: 568955 - DNA, 120 bp, Artificial Sequence
  ENSG00000170500_69 (sequence is synthesized)
taaaccagcgaaagcccccacatcagtggtgacaagatcaatagaccccagaatgtgtgcagctgtgcttgatagggttttggttcttgctttttggtggaagtttaggctcaagtgggt

SEQ ID NO: 568956 - DNA, 120 bp, Artificial Sequence
  ENSG00000170500_70 (sequence is synthesized)
cccgtatcggatgagcagctgcacggcctgtgggagccctggggttagtgggtccaggagagaatgtgttctctctctgggctccagccctgatggggtggggataagatgcaagattta

SEQ ID NO: 568957 - DNA, 120 bp, Artificial Sequence
  ENSG00000170500_71 (sequence is synthesized)
taggaatagggggaaacattatggaaggccccaatatgtaatgagcttttatatacaagaatgcaagacatagccctctttttatgtttaaaggggactatggtaatgttttttaaagtt

SEQ ID NO: 568958 - DNA, 120 bp, Artificial Sequence
  ENSG00000170500_72 (sequence is synthesized)
tgtgtgaggtgtgagtcaaccgaaaggccctaaattaagagagattcaggtttgtggtgcaagatagaggcccatttcggggtctgtttgcagaccagaatttgaaatggagttgtttga

SEQ ID NO: 568959 - DNA, 120 bp, Artificial Sequence
  ENSG00000170500_73 (sequence is synthesized)
ggagaccattgtgtgtcttcgtgaaaccgattgtgtggaacctatcagggctgtggaagttgtagcgaatgccttttcccagagcccagcattgtggattccgagaagtggcatgtgtgt

SEQ ID NO: 568960 - DNA, 120 bp, Artificial Sequence
  ENSG00000170500_74 (sequence is synthesized)
ctcagtgacttccagtgatgcctgccactctgaagagatgaaggagtgtcctggcaagacctggaatcccagctgtagcacctgtggagagatgtgatttagatttggatttggggtatc

SEQ ID NO: 568961 - DNA, 120 bp, Artificial Sequence
  ENSG00000170500_75 (sequence is synthesized)
tgtgaggaagagtcccagagtttttcatcctgaagggggcaactcttgggcagtggtccaacagttggccataaatgtgaagctggggcgctgtgctgaccagggcatccagcgttaaga

SEQ ID NO: 568962 - DNA, 120 bp, Artificial Sequence
  ENSG00000170500_76 (sequence is synthesized)
cgactgcctaactttggccacatgcgttgttttttgggttccgtttcgtatcagggcatgctggctaaaagatgggaagcagcaacattctcttgggctccatcatttatatgagggttg

SEQ ID NO: 568963 - DNA, 120 bp, Artificial Sequence
  ENSG00000170500_77 (sequence is synthesized)
gcaatgccatctgtaccctctgtgaactcccactgctgttcactcagttaatctaagggacaccaaggggtctgcgggaggatgacctcacaagggactgaggacatgggagaccaccct

SEQ ID NO: 568964 - DNA, 120 bp, Artificial Sequence
  ENSG00000170500_78 (sequence is synthesized)
cctgtgggtagaatacaccagagggcccaggcttgactctgtcctgtgttaaggaggcatcggtagttttgctgagcttgtcaggtgtttataatggacagttggagattggggtcctag

SEQ ID NO: 568965 - DNA, 120 bp, Artificial Sequence
  ENSG00000170500_79 (sequence is synthesized)
gcttaggtctttgagagcctctgtgtccaggagagcccagtaggcatccagccatttactgctttaatagggtagcatgaggctgagagggatagtttcttgcatccaaagcccttaggc

SEQ ID NO: 568966 - DNA, 120 bp, Artificial Sequence
  ENSG00000170500_80 (sequence is synthesized)
accttatgtccatcctaagtgggccagagactccagggctgcatagagcttgccagagcttctataatgaaggggtctctgagggcaccaacaggagtgcccatggattttaaggtttga

SEQ ID NO: 568967 - DNA, 120 bp, Artificial Sequence
  ENSG00000170500_81 (sequence is synthesized)
ttatagaggttgtttatggagggtgccccatttaaagcaagctgatttgtaagcagcagcaagaagattaagtaaaatttgtaaatgaggactacattgccatcagaacctcgaaagtat

SEQ ID NO: 568968 - DNA, 120 bp, Artificial Sequence
  ENSG00000170500_82 (sequence is synthesized)
ctaaagatgttggacttgtatgtccttaatgagtgtgacaatgagtttcctcatttgtgctcctggagaaggcggatgtggtgaagaccctgtctgcagacattgtgtgccatggcaaag

SEQ ID NO: 568969 - DNA, 120 bp, Artificial Sequence
  ENSG00000170500_83 (sequence is synthesized)
ccgtggagctccctgtgggtggcctgcaaaggtgtatgtgcccctcagggcagaaggcaaacggcagccaagaagctgtgcaagtagacacttaatgggacatgttagccaaatctgtaa

SEQ ID NO: 568970 - DNA, 120 bp, Artificial Sequence
  ENSG00000170500_84 (sequence is synthesized)
gagcaaaatattggccagttatttattgtgtagaattaataattttaataataatggaaattgggtaatggatgggactgcagcaataaggttgtagtaatccaccatgaggcacacttg

SEQ ID NO: 568971 - DNA, 120 bp, Artificial Sequence
  ENSG00000170500_85 (sequence is synthesized)
tttttttccaggtttaaggataggaaagattgggctgttcaatggagaaacaagggtataatcacccctttattaattagtaagttttaatccttgaatacctcatattaactgttttaa

SEQ ID NO: 568972 - DNA, 120 bp, Artificial Sequence
  ENSG00000170500_86 (sequence is synthesized)
ctggaggtccatggggcatcattttatcaagctagtttataactgccaaagactgactttaattttaatttattatttgttttattagagtgtctgtgttcaatatgggatattagggcg

SEQ ID NO: 568973 - DNA, 120 bp, Artificial Sequence
  ENSG00000170500_87 (sequence is synthesized)
ttgggtactatgaccacaggaaatttagacaggctacagttaaagtgaagcataccttacccatccaccccccattttatatttagttgcctttttaaaaagattataggggtacaatgt

SEQ ID NO: 568974 - DNA, 120 bp, Artificial Sequence
  ENSG00000170500_88 (sequence is synthesized)
ttagatttagtgggatctccaggtataactgtaatttgagccccagtgttaagactatgaagctttgtcaatgggtacattttagcaaatgttacaattaatttagaacctaagttatgg

SEQ ID NO: 568975 - DNA, 120 bp, Artificial Sequence
  ENSG00000170500_89 (sequence is synthesized)
agacacaaaagccaataggcacccttttatgttttggttaaatgtttcagtatatacatcttatttatttgtaatattagtatataatttgttgtatacatttttagtgtataagcgttg

SEQ ID NO: 568976 - DNA, 120 bp, Artificial Sequence
  ENSG00000170500_90 (sequence is synthesized)
gatttctaattggatcagattagggaccttccgtttagctgcatatgtacatatacatgtacaatttattatatatttgcgttaaaatagcctatctgcatgtgtatatatgtgtgtatg

SEQ ID NO: 568977 - DNA, 120 bp, Artificial Sequence
  ENSG00000170500_91 (sequence is synthesized)
tgtatgtatatgcactcacacgcataaatacacagtctatttagttacctttaatgttttttcccttgtacctaggctttttctcgctttttcctttttttctgattttgtggcaattta

SEQ ID NO: 568978 - DNA, 120 bp, Artificial Sequence
  ENSG00000170500_92 (sequence is synthesized)
gttggaaggaggcggtcccagcatgttgacaggcagggtgttcagagtgcccaggcacactggtggggggtggttacaggctcacgtagctcaggggcttctgcaggtctcaggggagtg

SEQ ID NO: 568979 - DNA, 120 bp, Artificial Sequence
  ENSG00000170500_93 (sequence is synthesized)
ggaacaaagtgtcccaccccttccccttttcctcaaacctcaagccactggtctctatggatagatcctttgcatcccaccggattgaggaatgagtcacaacagctgcaaggctcttaa

SEQ ID NO: 568980 - DNA, 120 bp, Artificial Sequence
  ENSG00000170500_94 (sequence is synthesized)
agcaacatttaaaccttttggcggctgtcatttctgtgaggagggtgcctctcaccggccgcatggccggaggatccctgcagcgctttggagaccaacacccagatcctttgcccagga

SEQ ID NO: 568981 - DNA, 120 bp, Artificial Sequence
  ENSG00000170500_95 (sequence is synthesized)
gtgcgattaattcctcactggatgctgggggagggcccctcaggtgagcagcccaccactgacttcagcgttgctggctcggttatcagactctcatccaacacaagctcacagggaaag

SEQ ID NO: 568982 - DNA, 120 bp, Artificial Sequence
  ENSG00000170500_96 (sequence is synthesized)
ccgttccttgctccttgtggagggagctaccgtcattgccctgagaccaccagccaagaaagtaggtatgtccaggtagggaattcagagggacccagtgcatccaattatacaattata

SEQ ID NO: 568983 - DNA, 120 bp, Artificial Sequence
  ENSG00000170500_97 (sequence is synthesized)
cccagaaggtcctgtgtaggggactgcgattgacatcaccctagtctgcagcaccaaggactgaatgagctcagtcctcttataatttaggctggactgtcacagacactggcagacaca

SEQ ID NO: 568984 - DNA, 120 bp, Artificial Sequence
  ENSG00000170500_98 (sequence is synthesized)
gcatacgtggtgcagccaaagtgcaaacatgccagcagcggccatgctccccagggtgggggtccagttagtaagccacgcgcagccaagaggcgaggcatgccctgtgccacacacgga

SEQ ID NO: 568985 - DNA, 120 bp, Artificial Sequence
  ENSG00000170500_99 (sequence is synthesized)
ctcaccctgctcactgtgcccgtggtatcgaaatgtacccacgtttaattcataaaggagaggctgctgtcattgaaagaaaagtttgttacttgcatttctggagaaaaggagcgcacc

SEQ ID NO: 568986 - DNA, 120 bp, Artificial Sequence
  ENSG00000170500_100 (sequence is synthesized)
aggccacgcagggccacaggaggaggacgcaccagagtggtcaggaggcagaactaggcgagcagctttccactgtgtctccatggcaaaggcgaagatgggcgggggcagagtgtagga

SEQ ID NO: 568987 - DNA, 120 bp, Artificial Sequence
  ENSG00000170500_101 (sequence is synthesized)
ttggcaggtttgaatgtcttgggcagtagctacaggggtggtctccagctgcctggtgcctggccctgggtgatcagggtgaggggatactgccttctgcagtggaagagtcaaatcgag

SEQ ID NO: 568988 - DNA, 120 bp, Artificial Sequence
  ENSG00000170500_102 (sequence is synthesized)
gagatggactctgagttggttagtgtgcaaaggtgcactcccaagggacccctttgctatctctaagaattggcctgccctgggaagggcagtctctccccagtcagtgaggtccccaag

SEQ ID NO: 568989 - DNA, 120 bp, Artificial Sequence
  ENSG00000170500_103 (sequence is synthesized)
atgtgaaaacattatacattataaaaaagcatgattaatataagctcattctagcatttcaggttacagcttctagaagaggtttgtagtctcaaatgagtaggtttttcctctagagag

SEQ ID NO: 568990 - DNA, 120 bp, Artificial Sequence
  ENSG00000170500_104 (sequence is synthesized)
gggcgggcctggaccttcaagcaccccttggtgtgtttaggagctcaggagcagaagcacctgcctgcagccctgcagctaaggaagttctctcagtcactcagagcagggaggggctga

SEQ ID NO: 568991 - DNA, 120 bp, Artificial Sequence
  ENSG00000170500_105 (sequence is synthesized)
gagagtcatgtgaggctcccggggtactacgacagccctcgaggtgaaggattggccctgatcataatagagaaccctgaggaagtttactgtcatgagtctcggctggttggcgcatgt

SEQ ID NO: 568992 - DNA, 120 bp, Artificial Sequence
  ENSG00000170500_106 (sequence is synthesized)
gacctttgaaggatgaagatggagtttgcaacatgagtatctctaaccttttgcttttcagggatcattttcaaaaattgcattggggccttcgttatttaccatagtattttcactttc

SEQ ID NO: 568993 - DNA, 120 bp, Artificial Sequence
  ENSG00000170500_107 (sequence is synthesized)
atagttttgtcacctttttgtactgtgaacagttcaaccagtgaccgacttctctctcatgctgtttaccccacacacaatttcccactcaattctgaaaataagaacctgttaataggt

SEQ ID NO: 568994 - DNA, 120 bp, Artificial Sequence
  ENSG00000170500_108 (sequence is synthesized)
tggaaagctgtgtactctattcatatattgttctttcatgctagtggagagtggtgtcattagcatcttaattttagagttgtgaaatgattttaccaattaggaattgaatgtgtattt

SEQ ID NO: 568995 - DNA, 120 bp, Artificial Sequence
  ENSG00000170500_109 (sequence is synthesized)
tttttctgtttaataagaagagcaaatttgaataaataagctggtgtagataaacttaataatcatgctttttcttgtttggagataggtgatgtgttgtcatatcctgtgatacaggtc

SEQ ID NO: 568996 - DNA, 120 bp, Artificial Sequence
  ENSG00000170500_110 (sequence is synthesized)
actcatctggccttctgtttctgaagtttaagtctggtttgaatatgtaataatactactcagcatttcttgttgcctaagtgagacgaaacttaaatgttatgatatttacttcatgta

SEQ ID NO: 568997 - DNA, 120 bp, Artificial Sequence
  ENSG00000170500_111 (sequence is synthesized)
ttcttgtactgttcatttcaattaattggtattgtatatctaatatgtgatatttgaactgaataaaacttacagtgttgtaaatgttctttaataaataatcacacctaagtaataggc

SEQ ID NO: 568998 - DNA, 120 bp, Artificial Sequence
  ENSG00000170500_112 (sequence is synthesized)
tagactgatgagaaattagatcaaatcagtgcctaggcctttgtgtttgtgtcgtagggatgtactaacacatcaccacagactgacggcttttcacaataaatcagttttcttcgctca

SEQ ID NO: 568999 - DNA, 120 bp, Artificial Sequence
  ENSG00000170502_0 (sequence is synthesized)
gcggcgcggccgtaaagcgccattacgcagagagaaagttacgaggttcgtggccgcggtttccccaggcagctggcgctggaggcttcggcgtcacgtgctggtctggatttttctcga

SEQ ID NO: 569000 - DNA, 120 bp, Artificial Sequence
  ENSG00000170502_1 (sequence is synthesized)
tgcactggggaaagcggtggactcttatcgtgggagggctcttgatctgtgatttatagataggcacagctactcccgttcgggaacccaacggcagacaggtcctagtgcccatcagat

SEQ ID NO: 569001 - DNA, 120 bp, Artificial Sequence
  ENSG00000170502_2 (sequence is synthesized)
acccgcggccgggactcggagctgtggggtgtggggaggcggaggcaccaactaagagcgacctagcatcgcaaagccgccctcggggcgctcatggcgggacgcctcctgggaaaggct

SEQ ID NO: 569002 - DNA, 120 bp, Artificial Sequence
  ENSG00000170502_3 (sequence is synthesized)
ttagccgcggtgtctctctctctggccttggcctctgtgactatcaggtcctcgcgctgccgcggcatccaggcgttcagaaactcgttttcatcttcttggtttcatcttaataccaac

SEQ ID NO: 569003 - DNA, 120 bp, Artificial Sequence
  ENSG00000170502_4 (sequence is synthesized)
gtcatgtctggttctaatggttccaaagaaaattctcacaataaggctcggacgtctccttacccaggttcaaaagttgaacgaagccaggttcctaatgagaaagtgggctggcttgtt

SEQ ID NO: 569004 - DNA, 120 bp, Artificial Sequence
  ENSG00000170502_5 (sequence is synthesized)
gagtggcaagactataagcctgtggaatacactgcagtctctgtcttggctggacccaggtgggcagatcctcagatcagtgaaagtaatttttctcccaagtttaacgaaaaggatggg

SEQ ID NO: 569005 - DNA, 120 bp, Artificial Sequence
  ENSG00000170502_6 (sequence is synthesized)
catgttgagagaaagagcaagaatggcctgtatgagattgaaaatggaagaccgagaaatcctgcaggacggactggactggtgggccgggggcttttggggcgatggggcccaaatcac

SEQ ID NO: 569006 - DNA, 120 bp, Artificial Sequence
  ENSG00000170502_7 (sequence is synthesized)
gctgcagatcccattataaccagatggaaaagggatagcagtggaaataaaatcatgcatcctgtttctgggaagcatatcttacaatttgttgcaataaaaaggaaagactgtggagaa

SEQ ID NO: 569007 - DNA, 120 bp, Artificial Sequence
  ENSG00000170502_8 (sequence is synthesized)
tgggcaatcccaggggggatggtggatccaggagagaagattagtgccacactgaaaagagaatttggtgaggaagctctcaactccttacagaaaaccagtgctgagaagagagaaata

SEQ ID NO: 569008 - DNA, 120 bp, Artificial Sequence
  ENSG00000170502_9 (sequence is synthesized)
gaggaaaagttgcacaaactcttcagccaagaccacctagtgatatataagggatatgttgatgatcctcgaaacactgataatgcatggatggagacagaagctgtgaactaccatgac

SEQ ID NO: 569009 - DNA, 120 bp, Artificial Sequence
  ENSG00000170502_10 (sequence is synthesized)
gaaacaggtgagataatggataatcttatgctagaagctggagatgatgctggaaaagtgaaatgggtggacatcaatgataaactgaagctttatgccagtcactctcaattcatcaaa

SEQ ID NO: 569010 - DNA, 120 bp, Artificial Sequence
  ENSG00000170502_11 (sequence is synthesized)
ttgtagctgatggtctccgtgtaagccaaaggcccacagaggagcatatactgaaaagaaggcagtatcacagaatttatactataaaaagggcagggtaggccacttggcctatttact

SEQ ID NO: 569011 - DNA, 120 bp, Artificial Sequence
  ENSG00000170502_12 (sequence is synthesized)
ttcaaaacaatttgcatttagagtgtttcgcatcagaataacatgagtaagatgaactggaacacaaaattttcagctctttggtcaaaaggaatataagtaatcatattttgtatgtat

SEQ ID NO: 569012 - DNA, 120 bp, Artificial Sequence
  ENSG00000170502_13 (sequence is synthesized)
tcgatttaagcatggcttaaattaaatttaaacaactaatgctctttgaagaatcataatcagaataaagataaattcttgatcagctataacttctgtttcatctagttcttgtttgtc

SEQ ID NO: 569013 - DNA, 120 bp, Artificial Sequence
  ENSG00000170502_14 (sequence is synthesized)
aatgccttccctcccgctccccatcttctgaggcctgaaggatgttcctgccacatcaaactcctttaggcagagtaccgccactggatgtatagtttaatgtttcatctgatttttctt

SEQ ID NO: 569014 - DNA, 120 bp, Artificial Sequence
  ENSG00000170502_15 (sequence is synthesized)
taaattatttccttcacattttgcttcacatgatcttgttgaagctaattttgaaaatggaaactatgttttcttgactttagaagcattagttttaagaggaaatttcagccactagtc

SEQ ID NO: 569015 - DNA, 120 bp, Artificial Sequence
  ENSG00000170502_16 (sequence is synthesized)
aatagagatcaaaatcagtgaacaagagctgatactctcattttcaaaaattctgaattaaaaaaagtccaggaagttagtaatttaaatcagtatgttcatttcactctagtgaaacta

SEQ ID NO: 569016 - DNA, 120 bp, Artificial Sequence
  ENSG00000170502_17 (sequence is synthesized)
ctatatgttgtaaattagttaaaaatggatgttcagaaaagaattgaaatcaggacaaaaaattacagatgctagtgaggttgtagagaaaaaggaatgcttatacgctgttagtgggag

SEQ ID NO: 569017 - DNA, 120 bp, Artificial Sequence
  ENSG00000170502_18 (sequence is synthesized)
tgtaaattggtccaaccattgtggaagagagtgtagagagtcctcaaatatttaaagatatttgacccagtaatcccattactaggtatatacccgaaggaatataaattgttctattat

SEQ ID NO: 569018 - DNA, 120 bp, Artificial Sequence
  ENSG00000170502_19 (sequence is synthesized)
aaacacatactcacgtgtatgttcattgctgcactattcacaatagcgaagacatgaaatcaacctaaatgttcatcagtgatagactggataaagacaatgtggtatatgtacaccatg

SEQ ID NO: 569019 - DNA, 87 bp, Artificial Sequence
  ENSG00000170502_20 (sequence is synthesized)
gatagactggataaagacaatgtggtatatgtacaccatggaatactatgcagccgtaaaaaagaataagatcatgtcctctgaaaa

SEQ ID NO: 569020 - DNA, 90 bp, Artificial Sequence
  ENSG00000170502_21 (sequence is synthesized)
ttataagtgagagctaaatggtgagaacacatggacatgggaacaacacattctggggtctattggagggtgggaggagggagaggatca

SEQ ID NO: 569021 - DNA, 120 bp, Artificial Sequence
  ENSG00000170502_22 (sequence is synthesized)
ggcctacacttgtttttatggtttgagttttcataacaaacttccccttccacaacagataacacacaaaaactcgttttcatcttcttggtttcatcttaataccaacgtcatgtctgg

SEQ ID NO: 569022 - DNA, 120 bp, Artificial Sequence
  ENSG00000170502_23 (sequence is synthesized)
ggggcgatggggcccaaatcacgctgcagatcccattataaccagagtatattcattctactggagaatcacccaggcactttcagagccaagatttcacccccctttctttcaagtatg

SEQ ID NO: 569023 - DNA, 120 bp, Artificial Sequence
  ENSG00000170502_24 (sequence is synthesized)
cacttcatgattcaaaacagcgttgttcaggatttcataaactttttcagaagctccggggcaggtgttaaattttcggattcccaggcatctctcctagagattgtccagatggaaaag

SEQ ID NO: 569024 - DNA, 120 bp, Artificial Sequence
  ENSG00000170509_0 (sequence is synthesized)
acacaaggactgaaccagaaggaagaggacagagcaaagccatgaacatcatcctagaaatccttctgcttctgatcaccatcatctactcctacttggagtcgttggtgaagtttttca

SEQ ID NO: 569025 - DNA, 120 bp, Artificial Sequence
  ENSG00000170509_1 (sequence is synthesized)
ttcctcagaggagaaaatctgtggctggggagattgttctcattactggagctgggcatggaataggcaggcagactacttatgaatttgcaaaacgacagagcatattggttctgtggg

SEQ ID NO: 569026 - DNA, 120 bp, Artificial Sequence
  ENSG00000170509_2 (sequence is synthesized)
atattaataagcgcggtgtggaggaaactgcagctgagtgccgaaaactaggcgtcactgcgcatgcgtatgtggtagactgcagcaacagagaagagatctatcgctctctaaatcagg

SEQ ID NO: 569027 - DNA, 120 bp, Artificial Sequence
  ENSG00000170509_3 (sequence is synthesized)
tgaagaaagaagtgggtgatgtaacaatcgtggtgaataatgctgggacagtatatccagccgatcttctcagcaccaaggatgaagagattaccaagacatttgaggtcaacatcctag

SEQ ID NO: 569028 - DNA, 120 bp, Artificial Sequence
  ENSG00000170509_4 (sequence is synthesized)
gacatttttggatcacaaaagcacttcttccatcgatgatggagagaaatcatggccacatcgtcacagtggcttcagtgtgcggccacgaagggattccttacctcatcccatattgtt

SEQ ID NO: 569029 - DNA, 120 bp, Artificial Sequence
  ENSG00000170509_5 (sequence is synthesized)
ccagcaaatttgccgctgttggctttcacagaggtctgacatcagaacttcaggccttgggaaaaactggtatcaaaacctcatgtctctgcccagtttttgtgaatactgggttcacca

SEQ ID NO: 569030 - DNA, 120 bp, Artificial Sequence
  ENSG00000170509_6 (sequence is synthesized)
aaaatccaagcacaagattatggcctgtattggagacagatgaagtcgtaagaagtctgatagatggaatacttaccaataagaaaatgatttttgttccatcgtatatcaatatctttc

SEQ ID NO: 569031 - DNA, 120 bp, Artificial Sequence
  ENSG00000170509_7 (sequence is synthesized)
tgagactacagaagtttcttcctgaacgcgcctcagcgattttaaatcgtatgcagaatattcaatttgaagcagtggttggccacaaaatcaaaatgaaatgaataaataagctccagc

SEQ ID NO: 569032 - DNA, 120 bp, Artificial Sequence
  ENSG00000170509_8 (sequence is synthesized)
cagagatgtatgcatgataatgatatgaatagtttcgaatcaatgctgcaaagctttatttcacattttttcagtcctgataatattaaaaacattggtttggcactagcagcagtcaaa

SEQ ID NO: 569033 - DNA, 120 bp, Artificial Sequence
  ENSG00000170509_9 (sequence is synthesized)
aacttctgtgcttacataaacatacttaaaaggttttctttaagatattttatttttccatttaaaggtggacaaaagctacctccctaaaagtaaatacaaagagaacttatttacaca

SEQ ID NO: 569034 - DNA, 120 bp, Artificial Sequence
  ENSG00000170509_10 (sequence is synthesized)
gggaaggtttaagactgttcaagtagcattccaatctgtagccatgccacagaatatcaacaagaacacagaatgagtgcacagctaagagatcaagtttcagcaggcagctttatctca

SEQ ID NO: 569035 - DNA, 120 bp, Artificial Sequence
  ENSG00000170509_11 (sequence is synthesized)
acctggacatattttaagattcagcatttgaaagatttccctagcctcttcctttttcattagcccaaaacggtgcaactctattctggactttattacttgattctgtcttctgtataa

SEQ ID NO: 569036 - DNA, 120 bp, Artificial Sequence
  ENSG00000170509_12 (sequence is synthesized)
ctctgaagtccaccaaaagtggaccctctatatttcctccctttttatagtcttataagatacattatgaaaggtgaccgactctattttaaatctcagaattttaagttctagccccat

SEQ ID NO: 569037 - DNA, 120 bp, Artificial Sequence
  ENSG00000170509_13 (sequence is synthesized)
gataacctttttctttgtaatttatgctttcatatatccttggtcccagagatgtttagacaattttaggctcaaaaattaaagctaacacaggaaaaggaactgtactggctattacat

SEQ ID NO: 569038 - DNA, 90 bp, Artificial Sequence
  ENSG00000170509_14 (sequence is synthesized)
aaagctaacacaggaaaaggaactgtactggctattacataagaaacaatggacccaagagaagaaaaggaagaaagaaaggttttttgg

SEQ ID NO: 569039 - DNA, 120 bp, Artificial Sequence
  ENSG00000170509_15 (sequence is synthesized)
ccagcctttttttttttaatagaaaaaataatccgactcccactacatcaagactaatcttgttttgtgtgtttttcacatgtattatagaatgcttttgcatggactatcctcttgttt

SEQ ID NO: 569040 - DNA, 120 bp, Artificial Sequence
  ENSG00000170509_16 (sequence is synthesized)
tcttgtttttattaaaaacaaatgatttttttaaaagtcacaaaaacaattcactaaaaataaatatgtcattgtgctttaaaaaaataacctcttgtagttataaaataaaacgtttga

SEQ ID NO: 569041 - DNA, 120 bp, Artificial Sequence
  ENSG00000170515_0 (sequence is synthesized)
agcccgcgcgctcgcagcttctcgctctcgcctgcctgcccgctcccttgcttgctcgcgctttcgctcgccctctcctcgaggatcgaggggactctgaccacagcctgtggctgggaa

SEQ ID NO: 569042 - DNA, 120 bp, Artificial Sequence
  ENSG00000170515_1 (sequence is synthesized)
gggagacagaggcggcggcggctcaggggaaacgaggctgcagtggtggtagtaggaagatgtcgggcgaggacgagcaacaggagcaaactatcgctgaggacctggtcgtgaccaagt

SEQ ID NO: 569043 - DNA, 120 bp, Artificial Sequence
  ENSG00000170515_2 (sequence is synthesized)
ataagatggggggcgacatcgccaacagggtacttcggtccttggtggaagcatctagctcaggtgtgtcggtactgagcctgtgtgagaaaggtgatgccatgattatggaagaaacag

SEQ ID NO: 569044 - DNA, 120 bp, Artificial Sequence
  ENSG00000170515_3 (sequence is synthesized)
ggaaaatcttcaagaaagaaaaggaaatgaagaaaggtattgcttttcccaccagcatttcggtaaataactgtgtatgtcacttctcccctttgaagagcgaccaggattatattctca

SEQ ID NO: 569045 - DNA, 120 bp, Artificial Sequence
  ENSG00000170515_4 (sequence is synthesized)
aggaaggtgacttggtaaaaattgaccttggggtccatgtggatggcttcatcgctaatgtagctcacacttttgtggttgatgtagctcaggggacccaagtaacagggaggaaagcag

SEQ ID NO: 569046 - DNA, 120 bp, Artificial Sequence
  ENSG00000170515_5 (sequence is synthesized)
atgttattaaggcagctcacctttgtgctgaagctgccctacgcctggtcaaacctggaaatcagaacacacaagtgacagaagcctggaacaaagttgcccactcatttaactgcacgc

SEQ ID NO: 569047 - DNA, 120 bp, Artificial Sequence
  ENSG00000170515_6 (sequence is synthesized)
caatagaaggtatgctgtcacaccagttgaagcagcatgtcatcgatggagaaaaaaccattatccagaatcccacagaccagcagaagaaggaccatgaaaaagctgaatttgaggtac

SEQ ID NO: 569048 - DNA, 120 bp, Artificial Sequence
  ENSG00000170515_7 (sequence is synthesized)
atgaagtatatgctgtggatgttctcgtcagctcaggagagggcaaggccaaggatgcaggacagagaaccactatttacaaacgagacccctctaaacagtatggactgaaaatgaaaa

SEQ ID NO: 569049 - DNA, 120 bp, Artificial Sequence
  ENSG00000170515_8 (sequence is synthesized)
cttcacgtgccttcttcagtgaggtggaaaggcgttttgatgccatgccgtttactttaagagcatttgaagatgagaagaaggctcggatgggtgtggtggagtgcgccaaacatgaac

SEQ ID NO: 569050 - DNA, 120 bp, Artificial Sequence
  ENSG00000170515_9 (sequence is synthesized)
tcccttcgagcctgacctctacaagtctgagatggaggtccaggatgcagagctaaaggccctcctccagagttctgcaagtcgaaaaacccagaaaaagaaaaaaaagaaggcctccaa

SEQ ID NO: 569051 - DNA, 120 bp, Artificial Sequence
  ENSG00000170515_10 (sequence is synthesized)
gactgcagagaatgccaccagtggggaaacattagaagaaaatgaagctggggactgaggtgggtcccatctccccagcttgctgctcctgcctcatccccttcccaccaaaccccagac

SEQ ID NO: 569052 - DNA, 120 bp, Artificial Sequence
  ENSG00000170515_11 (sequence is synthesized)
tctgtgaagtgcagttcttctccacctaggaccgccagcagagcggggggatctccctgcccccaccccagttccccaacccactcccttccaacaacaaccagctccaactgactctgg

SEQ ID NO: 569053 - DNA, 120 bp, Artificial Sequence
  ENSG00000170515_12 (sequence is synthesized)
tcttgggaggtgaggcttcccaaccacggaagactactttaaatgaaaaaaagaaattgaataataaaatcaggagtcaaaattcatcgtcttcaagcccctctttctagccttttctac

SEQ ID NO: 569054 - DNA, 120 bp, Artificial Sequence
  ENSG00000170515_13 (sequence is synthesized)
tactctctgcttggtcaaggtttgtgccccactacagaacagggctaaattagccaccaccactgaaaactcagccgaatttttttataccactctgatgtcagcattttttccatctgt

SEQ ID NO: 569055 - DNA, 120 bp, Artificial Sequence
  ENSG00000170515_14 (sequence is synthesized)
ttggggctttttcctcttttttccattctccccaaatattttatctggcttcaaaattaagaggattatttttcagattgtttttattcagtgtggccgattcctcatctgattcaggct

SEQ ID NO: 569056 - DNA, 120 bp, Artificial Sequence
  ENSG00000170515_15 (sequence is synthesized)
gtccagtcaggcccctcccattttaggagctggagccttcatttatgaagagattctcatctatgaaatggatcctcatttgtaaatcttttttcttccattttcacaaagctgtaaaga

SEQ ID NO: 569057 - DNA, 120 bp, Artificial Sequence
  ENSG00000170515_16 (sequence is synthesized)
aataatccatctcaaccttaccctttttctctggagtcagtggggtctttcctcgctccatcttacacagacctgagctggaagctcaactggttttgttccctgtttgaaatattgtga

SEQ ID NO: 569058 - DNA, 120 bp, Artificial Sequence
  ENSG00000170515_17 (sequence is synthesized)
tctccctcccatgaaagaaaaaccaagaaccagaggcgtagactgactgaagacacaactcctggctttctgaagctatggacttggattggattgctgggggtttgtagagaaaggtga

SEQ ID NO: 569059 - DNA, 120 bp, Artificial Sequence
  ENSG00000170515_18 (sequence is synthesized)
caaatttcagtacctctggcatgctgtcccaggaaactagggctcccactaacttatgaggtttttaaacacattgaaaatgacatgacattaaaataaatttggatttgctcataatga

SEQ ID NO: 569060 - DNA, 120 bp, Artificial Sequence
  ENSG00000170515_19 (sequence is synthesized)
aaagaggggtgactgagagtgttcaccagaccaaatgttacttaaattactctttcaggccaaggatgcaggacagagaaccactatttacaaacgagacccctctaaacagtatggact

SEQ ID NO: 569061 - DNA, 120 bp, Artificial Sequence
  ENSG00000170515_20 (sequence is synthesized)
actttaaggtactaagcaatgatagtacttggaaccagtctgactcacagaccatacacccaggaacactttttcctctcccttcctgcctagacttgtagcgtgcatgtgctcactccc

SEQ ID NO: 569062 - DNA, 120 bp, Artificial Sequence
  ENSG00000170515_21 (sequence is synthesized)
tccctctctctccccatctccttctcattgaaggtaatgtaaaagagcaatcctaagcatgatttctgcctgagggtaggagctattttaaaatatgagcaaaatggtaagacttgatgg

SEQ ID NO: 569063 - DNA, 120 bp, Artificial Sequence
  ENSG00000170515_22 (sequence is synthesized)
aggctcggatgggtgtggtggagtgcgccaaacatgaactgctgcaaccatttaatgttctctatgagaaggagggtgagttccaaaaagagcttcactttggattccctgattataaga

SEQ ID NO: 569064 - DNA, 120 bp, Artificial Sequence
  ENSG00000170515_23 (sequence is synthesized)
tatccttcctgtaagttcagaagagctaagtatgacaaaggaactttttatcaaaacacatcttcatttttgccataggtgaatttgttgcccagtttaaatttacagttctgctcatgc

SEQ ID NO: 569065 - DNA, 120 bp, Artificial Sequence
  ENSG00000170515_24 (sequence is synthesized)
tgagctactgaggggcccgcaccggtccgctgggcacggcgtggtgggaagacccggtgtcgcgcctgggacctgagcgggcaggcccaggctgaagtctatggaggtgcgggtcggcga

SEQ ID NO: 569066 - DNA, 120 bp, Artificial Sequence
  ENSG00000170515_25 (sequence is synthesized)
tggtaaaaatgtaaggttaaaccgttttaaagcatttttctttttttaaagcatttacaaaatgccagttcctaatgcagtactctgatcttgcctttcagtgaccttggggtccatgtg

SEQ ID NO: 569067 - DNA, 120 bp, Artificial Sequence
  ENSG00000170515_26 (sequence is synthesized)
tatagattgagattcctaacacctaattagagtgtctgagaaaggaatgcggtaacatttaacagtgcatcggcttcgagtcagcaattctgtctaccttcttgtccctgatgcctataa

SEQ ID NO: 569068 - DNA, 120 bp, Artificial Sequence
  ENSG00000170515_27 (sequence is synthesized)
atttcatctagtctttgcgtgtatgtggggataccatggcaagaaccctctgaagttcataactctgtcctgtcacaccaaaggtagcatctttggaaagtctgaggccttgcctaggga

SEQ ID NO: 569069 - DNA, 120 bp, Artificial Sequence
  ENSG00000170516_0 (sequence is synthesized)
acccgacccctccaggctgtaaaacggaaaggttcggaatttgcctctgcgccgtctttttttgcctgttacctgtgacgtccttggaagcagaatctgaaactttctgaggagagcatt

SEQ ID NO: 569070 - DNA, 120 bp, Artificial Sequence
  ENSG00000170516_1 (sequence is synthesized)
tgagcttcagatttctaacagcctctttgcaacaaaatagaccagtagctgaaggcaactgcaatccttcatgatgtttcccttggccagaaatgcactaagcagtctcaagattcaaag

SEQ ID NO: 569071 - DNA, 120 bp, Artificial Sequence
  ENSG00000170516_2 (sequence is synthesized)
ctagccagtggaactgctttctgtgttgctacatgggtgtttacagccactcagattggaatagaatggaacctatcccctgttggcagagttaccccaaaagagtggaaacatcagtaa

SEQ ID NO: 569072 - DNA, 120 bp, Artificial Sequence
  ENSG00000170516_3 (sequence is synthesized)
ccatcacagttgctgtaatgacagaattgtttaaaaaaccaacttgtcatgtaagcactctactgcttattaaaatatagcacaattgaaaaaataaaatgtgttttaaatctttaaaaa

SEQ ID NO: 569073 - DNA, 85 bp, Artificial Sequence
  ENSG00000170516_4 (sequence is synthesized)
atttgcctctgcgccgtctttttttgcctgttacctgtgacgtccttgaaaatgaaaagctttcttaagacaataggaacactct

SEQ ID NO: 569074 - DNA, 120 bp, Artificial Sequence
  ENSG00000170516_5 (sequence is synthesized)
tccaggctgtaaaacggaaaggttcggaatttgcctctgcgccgtctttttttgcctgttacctgtgacgtccttgatgattattcttttggctctttacaatgtagctaggaaaaattt

SEQ ID NO: 569075 - DNA, 120 bp, Artificial Sequence
  ENSG00000170522_0 (sequence is synthesized)
cacgagggggaggagatttccctgtagacgagtaaaaagggtgatggacaaacgtgcgggcactaagaccgcaaggcattcatttcctcctacggtggatgcggacgccgggaggaggag

SEQ ID NO: 569076 - DNA, 120 bp, Artificial Sequence
  ENSG00000170522_1 (sequence is synthesized)
agccccagagagaggagctgggagcggaggcgcaggcaatgctcagccctggatgtagctgagaggctgggagaagagacgaccgctggagaccgagcggcgtggggaagacctaggggg

SEQ ID NO: 569077 - DNA, 120 bp, Artificial Sequence
  ENSG00000170522_2 (sequence is synthesized)
gtgggtgggggaagcagacaggagaacactcgaaatcaagcgctttacagattattttattttgtatagagaacacgtagcgactccgaagatcagccccaatgaacatgtcagtgttga

SEQ ID NO: 569078 - DNA, 120 bp, Artificial Sequence
  ENSG00000170522_3 (sequence is synthesized)
ctttacaagaatatgaattcgaaaagcagttcaacgagaatgaagccatccaatggatgcaggaaaactggaagaaatctttcctgttttctgctctgtatgctgcctttatattcggtg

SEQ ID NO: 569079 - DNA, 120 bp, Artificial Sequence
  ENSG00000170522_4 (sequence is synthesized)
gtcggcacctaatgaataaacgagcaaagtttgaactgaggaagccattagtgctctggtctctgacccttgcagtcttcagtatattcggtgctcttcgaactggtgcttatatggtgt

SEQ ID NO: 569080 - DNA, 120 bp, Artificial Sequence
  ENSG00000170522_5 (sequence is synthesized)
acattttgatgaccaaaggcctgaagcagtcagtttgtgaccagggtttttacaatggacctgtcagcaaattctgggcttatgcatttgtgctaagcaaagcacccgaactaggagata

SEQ ID NO: 569081 - DNA, 120 bp, Artificial Sequence
  ENSG00000170522_6 (sequence is synthesized)
caatattcattattctgaggaagcagaagctgatcttcctgcactggtatcaccacatcactgtgctcctgtactcttggtactcctacaaagacatggttgccgggggaggttggttca

SEQ ID NO: 569082 - DNA, 120 bp, Artificial Sequence
  ENSG00000170522_7 (sequence is synthesized)
tgactatgaactatggcgtgcacgccgtgatgtactcttactatgccttgcgggcggcaggtttccgagtctcccggaagtttgccatgttcatcaccttgtcccagatcactcagatgc

SEQ ID NO: 569083 - DNA, 120 bp, Artificial Sequence
  ENSG00000170522_8 (sequence is synthesized)
tgatgggctgtgtggttaactacctggtcttctgctggatgcagcatgaccagtgtcactctcactttcagaacatcttctggtcctcactcatgtacctcagctaccttgtgctcttct

SEQ ID NO: 569084 - DNA, 120 bp, Artificial Sequence
  ENSG00000170522_9 (sequence is synthesized)
gccatttcttctttgaggcctacatcggcaaaatgaggaaaacaacgaaagctgaatagtgttggaactgaggaggaagccatagctcagggtcatcaagaaaaataatagacaaaagaa

SEQ ID NO: 569085 - DNA, 120 bp, Artificial Sequence
  ENSG00000170522_10 (sequence is synthesized)
aatggcacaaggaatcacacgtggtgcagctaaaacaaaacaaaacatgagcaaacacaaaacccaaggcagcttagggataattaggttgatttaacccagtaagtttatgatcctttt

SEQ ID NO: 569086 - DNA, 120 bp, Artificial Sequence
  ENSG00000170522_11 (sequence is synthesized)
agggtgaggactcactgagtgcacctccatctccaagcactgctgctggaagaccccattccctctttatctatcaactctaggacaagggagaacaaaagcaagccagaagcagaggag

SEQ ID NO: 569087 - DNA, 120 bp, Artificial Sequence
  ENSG00000170522_12 (sequence is synthesized)
tagaaactgtgcgagcacaacacacacaatcctttctaactttatggacactaaactggagccaatagaaaagacaaaaatgaaagagacacagggtgtatatctagaacgataatgctt

SEQ ID NO: 569088 - DNA, 120 bp, Artificial Sequence
  ENSG00000170522_13 (sequence is synthesized)
ttgcagaaactaaagcctttttaagaaatgccagctgctgtagaccccatgagaaaagatgtcttaatcatccttatgaaaacagatgtaaacaactatatttcaactaacttcatcttc

SEQ ID NO: 569089 - DNA, 120 bp, Artificial Sequence
  ENSG00000170522_14 (sequence is synthesized)
actgcatagcctcaggctagtgagtttgccaaaaccaaagggggtgaatacttccccaagattcttcctgggaggatggaaacagtgcagcccaggtcccatgggggcagctccatccca

SEQ ID NO: 569090 - DNA, 120 bp, Artificial Sequence
  ENSG00000170522_15 (sequence is synthesized)
gagcatttctgatagttgaactgtaatttctactcttaagtgagatatgaagcattatccttttgttcagttgccccgggcttttgaacagaagagtaaatacagaattgaaaaagataa

SEQ ID NO: 569091 - DNA, 120 bp, Artificial Sequence
  ENSG00000170522_16 (sequence is synthesized)
acactcaaccaaacaatgtgaaaacgggttctgtagtatttgtaaaaaggcccggcccaggaccactgtgagctggaaaagggagaaaggcagtgggaaaagaggtgagccgaagatcaa

SEQ ID NO: 569092 - DNA, 120 bp, Artificial Sequence
  ENSG00000170522_17 (sequence is synthesized)
ttcgacagacagatggtgtgtatgcccctccctgtttgacttcacacacactcataactttccaaatgaaaccccacagtatagcgcatattttcgatatttttgtgaattccaaaagga

SEQ ID NO: 569093 - DNA, 120 bp, Artificial Sequence
  ENSG00000170522_18 (sequence is synthesized)
aatcacagggctgttcgaaatattgggggaacactgtgtttctgcatcatctgcatttgctccccaagcaatgtagaggtgtttaaagggccctctgctggctgagtggcaatactacaa

SEQ ID NO: 569094 - DNA, 120 bp, Artificial Sequence
  ENSG00000170522_19 (sequence is synthesized)
caaacttcaaggcaagtttggctgaaaacagttgacaacaaagggcccccatacacttatccctcaaattttaagtgatatgaaatacttgtcatgtctttggccaaatcagaagatatt

SEQ ID NO: 569095 - DNA, 120 bp, Artificial Sequence
  ENSG00000170522_20 (sequence is synthesized)
catcctgcttcaagtcagcttcagaaatgttttaaaagggactttagctctggaactcaaaatcaatttattaagagccatattctttaaaaaaaaaaagctggataatattctctgtaa

SEQ ID NO: 569096 - DNA, 120 bp, Artificial Sequence
  ENSG00000170522_21 (sequence is synthesized)
tatttcagtcctttacaagccaaatacatgtgtcaatgtttctagtatttcaaagaagcaattatgtaaagttgttcaatgtgacataatagtattataattggttaagtagcttaatga

SEQ ID NO: 569097 - DNA, 120 bp, Artificial Sequence
  ENSG00000170522_22 (sequence is synthesized)
ttaggcaaactagatgaaaagattaggggcttccacactgcatagattacacgcacatagccacgcatacacacacagacacacagatgtggggtacactgaacttcaaagcccaaatga

SEQ ID NO: 569098 - DNA, 120 bp, Artificial Sequence
  ENSG00000170522_23 (sequence is synthesized)
atagaaacacattttctggctagcagaaaaaaacaaaacaaaactgttgtttctctttcttgctttgagagtgtacagtaaaagggattttttcgaattatttttatattattttagctt

SEQ ID NO: 569099 - DNA, 120 bp, Artificial Sequence
  ENSG00000170522_24 (sequence is synthesized)
taattgtgctgtcgttcatgaaacagagctgctctgcttttctgtcagagatggcaagggctttttcagcatctcgtttatgtgtggaatttaaaaagaataaagttttattccattctg

SEQ ID NO: 569100 - DNA, 120 bp, Artificial Sequence
  ENSG00000170522_25 (sequence is synthesized)
gaaagctgttacatctatgttaaatgattgtgagcagtctataatgtcttgatgttggttcataggtgagacacaactgatggaggaatgtattataaattatgcaaaatctgacatgag

SEQ ID NO: 569101 - DNA, 120 bp, Artificial Sequence
  ENSG00000170522_26 (sequence is synthesized)
ttttttccttataacagaaaatgagaataattaaaatgaggagaaggccacataacagttgacttgaatttaattgaaggacccattggaggctcatctggttgatttaattatttaatt

SEQ ID NO: 569102 - DNA, 120 bp, Artificial Sequence
  ENSG00000170522_27 (sequence is synthesized)
gagtgatttattgcagatctcttaatgcaggttagaaacggaagtgagcataaaccttaaaaagactctaaatgatgcttccaaagcactttcattttggtattaggttcatgtttgttt

SEQ ID NO: 569103 - DNA, 120 bp, Artificial Sequence
  ENSG00000170522_28 (sequence is synthesized)
gtctttacttgtaaaataatttggaatttttgtttacagggtgaatgtcttaatagttttaaaattagctaaatatatctaaaggcatttccaatgtttatcatgggaggaaaaaagcca

SEQ ID NO: 569104 - DNA, 120 bp, Artificial Sequence
  ENSG00000170522_29 (sequence is synthesized)
cattttttttaaaacaaaacaaaacaaaacaaaattttggtaatataggttcaatacactgtttttaacatctcagcttagccgctttaatcatatcaagatatgaggctggatcactgg

SEQ ID NO: 569105 - DNA, 120 bp, Artificial Sequence
  ENSG00000170522_30 (sequence is synthesized)
cccatgacaaatctgaaacctaccagagaattgactgctgcatagataatcctgctgccagttaacattccagaaaaacttgggcaggcaagtttttatagctgccccactatgctgcaa

SEQ ID NO: 569106 - DNA, 120 bp, Artificial Sequence
  ENSG00000170522_31 (sequence is synthesized)
tagagtatctttctattgaagattttccactgcatcccgatcctactatggtgaaagcattgttcttgggctaaaaaaaaatcctttatttcatacacacatgatttcatacactaggtc

SEQ ID NO: 569107 - DNA, 120 bp, Artificial Sequence
  ENSG00000170522_32 (sequence is synthesized)
tgagcatcaagccaagtccatgagtttgcaatgaagttctagtgagaaatgctctattcataaagcagggggtttacgtggaccttctagtgttgcttatgggaaaagagtaactaccat

SEQ ID NO: 569108 - DNA, 120 bp, Artificial Sequence
  ENSG00000170522_33 (sequence is synthesized)
attacatctaacgcaaggccaaagtaccaaattaaaaccatggattgaggtggttattcgaagtcacttactcccatccttctaattatgctccactacaaaagtaaggggagaagaggg

SEQ ID NO: 569109 - DNA, 120 bp, Artificial Sequence
  ENSG00000170522_34 (sequence is synthesized)
aatactttacatgtacattgctagagggaaaagaaaggcttgattatatcccctcgcttctccacctctctgctcatgtaaagaaactgatgagaaaagagactaatatgtctagactga

SEQ ID NO: 569110 - DNA, 120 bp, Artificial Sequence
  ENSG00000170522_35 (sequence is synthesized)
tgtctagactgagttagaaacttcatatgagtgggttttgtagaattgatgggaaagacagtgggaacctagaagaacagaaagagacccacagaatgtctttctttttttttttttttt

SEQ ID NO: 569111 - DNA, 120 bp, Artificial Sequence
  ENSG00000170522_36 (sequence is synthesized)
ataggcgtgagccaccgtgcctggcccagaatgtttttttaaatcagatgtagcatcttcataaggtaaagcctgtcacatcagagtaacaaagctcctggagtacagtgatgctagagt

SEQ ID NO: 569112 - DNA, 120 bp, Artificial Sequence
  ENSG00000170522_37 (sequence is synthesized)
tgatgctagagtagaatgttccagaagtctggccatagccccagcttctgaattacctgggagagacaagatgctcaggttactattttttctttattctgatagtacagcctctactca

SEQ ID NO: 569113 - DNA, 120 bp, Artificial Sequence
  ENSG00000170522_38 (sequence is synthesized)
gagaccacggtgtgtgtcacacaaccgaggcagctagggcatattctgagggcttttttttttttttggtttccttaatgattctttaacagagtaactggattggccaaggtctgattc

SEQ ID NO: 569114 - DNA, 120 bp, Artificial Sequence
  ENSG00000170522_39 (sequence is synthesized)
aagaggctgtgaggagagtagagaacaaatagactttgcctctcagagttcagagctttaagttgtataagcatggtccatgtccacctcttgtagacacttattccttaaaagtttcca

SEQ ID NO: 569115 - DNA, 120 bp, Artificial Sequence
  ENSG00000170522_40 (sequence is synthesized)
tcatgaaaaataatatcatgtcaaaattttataagcacccagaatgtcccagtagtcaaatgtagtgtctttctccagtctctgttttcgataataaataccttgctctcaatttaggat

SEQ ID NO: 569116 - DNA, 120 bp, Artificial Sequence
  ENSG00000170522_41 (sequence is synthesized)
gatcgtaaagcctatgttcatgctgtgagtcattgtctcccacagcttttgaaacatcgttctttgtcttttctatacaacacctgattctttgtgcctcagactcattgctatcaggaa

SEQ ID NO: 569117 - DNA, 120 bp, Artificial Sequence
  ENSG00000170522_42 (sequence is synthesized)
gagactttgccaagatccaccaccacatttggccagtagtgtatacacattaaagtgagagctgatgaaatcacaatgctctattttgttccgacaatcagtatgaaggggtaggtccca

SEQ ID NO: 569118 - DNA, 120 bp, Artificial Sequence
  ENSG00000170522_43 (sequence is synthesized)
gtttgccaatgagcaacagcctctgtatgctggtgtccaagacttacacaaaacaagtgtcagtgcagtcacagcattttcttgaatgctgttgtgacagactccagttataaacatctg

SEQ ID NO: 569119 - DNA, 120 bp, Artificial Sequence
  ENSG00000170522_44 (sequence is synthesized)
cgagccatatggcacaactcatagctaaagaggccggtacagggcacatgcacagagctttgaagaacatacacaaacctgttgaatcaagttactttcctcatcctcagagactttgac

SEQ ID NO: 569120 - DNA, 120 bp, Artificial Sequence
  ENSG00000170522_45 (sequence is synthesized)
aattcagagctcacagatggcagggggaattctcaggcttcccttcctcctgattgacactttttaaaggaagtgatgtggaagttgttctagaagttagatggacagtgggagcacatt

SEQ ID NO: 569121 - DNA, 120 bp, Artificial Sequence
  ENSG00000170522_46 (sequence is synthesized)
cgtgagtggggcttgggagagctcaaaagtggcactttgattttaggctgggcaggcagaagtctcacagtaaaatatatttcactagacgtccaaaccaacactgcattgtagtaacct

SEQ ID NO: 569122 - DNA, 120 bp, Artificial Sequence
  ENSG00000170522_47 (sequence is synthesized)
cttctgaagtaactggttaaattaataactggtcccataagtcagggtcaagccacatttataacccattcgggccggccatgaagggttctgactcgacattggtatttaaatgctgtt

SEQ ID NO: 569123 - DNA, 120 bp, Artificial Sequence
  ENSG00000170522_48 (sequence is synthesized)
actttcccaatgcttagtagcacttgagactttatttccatcgacaaaaactaagaaggccacagaagtagcctaacagtcctccctggtcatactcgtttcaaacaggtctgcctgtct

SEQ ID NO: 569124 - DNA, 120 bp, Artificial Sequence
  ENSG00000170522_49 (sequence is synthesized)
agacatattcaggcaggaggttgcttgctgctatcttgaaaaccactggaagattcagcttcttggggacctcagagcccatattcatatggaagcccacccatataagcctcacagagc

SEQ ID NO: 569125 - DNA, 120 bp, Artificial Sequence
  ENSG00000170522_50 (sequence is synthesized)
aaatcacagcaatgttgaagttgttattttcaagtgcttatttcacgacattaaaaaaaatattttttcctggtgtattaaaattaaaaataaaatcataacttttgatttaaaatcaaa

SEQ ID NO: 569126 - DNA, 120 bp, Artificial Sequence
  ENSG00000170522_51 (sequence is synthesized)
ccacttccggctactagcctctctcgcctatccactatcctcacactcagcatcccctgtctgtacgagattaaggagctctgccgtccgcagggcctggagaacacgtagcgactccga

SEQ ID NO: 569127 - DNA, 120 bp, Artificial Sequence
  ENSG00000170522_52 (sequence is synthesized)
attcttcatgagatcctgctctgaatctgttaccctttttcatgacctctttttggaacagtgatgaagaggaagtggtatcatatatggtttcagaataaagcccttgagtcattgtat

SEQ ID NO: 569128 - DNA, 120 bp, Artificial Sequence
  ENSG00000170522_53 (sequence is synthesized)
tagctcttgtttacagaacattttaagatgctttcaaggaaatacaaataatatgattcttatgcctatttcctgccagtggccaaccagtcttctaagtatggttgatgtgagaagtga

SEQ ID NO: 569129 - DNA, 120 bp, Artificial Sequence
  ENSG00000170522_54 (sequence is synthesized)
attcccttcactggtgatctcaacgtagatttgcccggagttctcttgcaagagagctggcaggttttactatttcccaatcgtttactcgccaagctctcgggtccacgcgccgcgggg

SEQ ID NO: 569130 - DNA, 120 bp, Artificial Sequence
  ENSG00000170522_55 (sequence is synthesized)
cgagaatgaagccatccaatggatgcaggaaaactgggtgatgtctgcgcgacagggaaggcgggagagatgccacagtccagatcgcctacctgtgctcccctcccctcccccggtttt

SEQ ID NO: 569131 - DNA, 120 bp, Artificial Sequence
  ENSG00000170523_0 (sequence is synthesized)
acaggcccttggttccatcctctgccatctactccactgttcagacacctcctaacctccgtcatgacctgtggcttcaactccataggctgtgggttccgccctggaaacttcagctgt

SEQ ID NO: 569132 - DNA, 120 bp, Artificial Sequence
  ENSG00000170523_1 (sequence is synthesized)
gtctctgcctgcgggccccggccaagccgctgctgcatcaccgccgccccctaccgcggcatctcctgctaccgcggcctcaccgggggctttggcagccacagcgtgtgcgggggcttc

SEQ ID NO: 569133 - DNA, 120 bp, Artificial Sequence
  ENSG00000170523_2 (sequence is synthesized)
cgcgccggctcctgcggacgcagcttcggctaccgctccgggggcgtgtgcggacccagccccccatgcatcaccaccgtgtcggtcaacgagagcctcctcacgcccctcaacctggag

SEQ ID NO: 569134 - DNA, 120 bp, Artificial Sequence
  ENSG00000170523_3 (sequence is synthesized)
atagaccccaacgcgcagtgcgtgaagcaggaggagaaggagcagatcaagtccctcaacagcagattcgcggccttcatcgacaaggtgcgcttcctggagcagcagaacaagctgctg

SEQ ID NO: 569135 - DNA, 120 bp, Artificial Sequence
  ENSG00000170523_4 (sequence is synthesized)
gagacaaagctgcagttctaccaaaaccgcgagtgctgccagagtaacctggagcccctgtttgctggctacatcgagactctgcggcgggaggccgagtgcgtggaggctgacagtggg

SEQ ID NO: 569136 - DNA, 120 bp, Artificial Sequence
  ENSG00000170523_5 (sequence is synthesized)
aggctggcctcagagctcaaccacgtgcaggaggtgctggagggctacaagaagaagtatgaagaagaagtagcacttcgagccacagcagagaacgagtttgtggctctaaagaaggat

SEQ ID NO: 569137 - DNA, 120 bp, Artificial Sequence
  ENSG00000170523_6 (sequence is synthesized)
gtggactgcgcctacctccgcaagtcagacctggaggccaacgtggaggccctgatccaggagattgacttcctgaggcggctgtacgaggaggagatccgcattctccaatcccacatc

SEQ ID NO: 569138 - DNA, 120 bp, Artificial Sequence
  ENSG00000170523_7 (sequence is synthesized)
gcacagtatgatgacattgccacccgtagccgggctgaggccgagtcctggtatcgcagcaagtgtgaggagatgaaggccacagtgatcaggcacggggagaccctgcgccgcaccaag

SEQ ID NO: 569139 - DNA, 120 bp, Artificial Sequence
  ENSG00000170523_8 (sequence is synthesized)
gaggagatcaacgagctgaaccgcatgatccagaggctgacagccgaggtggagaatgccaagtgccagaactccaagctggaagctgcggtggcccagtctgagcagcagggtgaggcg

SEQ ID NO: 569140 - DNA, 120 bp, Artificial Sequence
  ENSG00000170523_9 (sequence is synthesized)
gccctcagtgatgcccgctgcaagctggccgagctggagggcgccctgcagaaggccaagcaagacatggcctgcctgatcagggagtaccaggaggtgatgaactccaagctaggcctg

SEQ ID NO: 569141 - DNA, 120 bp, Artificial Sequence
  ENSG00000170523_10 (sequence is synthesized)
gatatcgagatcgccacctacaggcgcctgctggagggcgaggagcagaggctgtgtgaaggtgttgaagctgtgaatgtctgtgtcagcagctcccggggtggggttgtgtgcggggat

SEQ ID NO: 569142 - DNA, 120 bp, Artificial Sequence
  ENSG00000170523_11 (sequence is synthesized)
ctctgcgtgtcgggctcccggccggtgacgggcagcgtctgcagtgccccctgcaacgggaacctggtggtgagcactggtttgtgcaagccctgtggccagctgaacaccacctgtgga

SEQ ID NO: 569143 - DNA, 120 bp, Artificial Sequence
  ENSG00000170523_12 (sequence is synthesized)
gggggctcctgcggccaggggaggcattaagtggcccaaaagagagccaggggagccccttctgcctgccagacgtgccactgccccaccaccagctgaaaacagcagcacatcgctggc

SEQ ID NO: 569144 - DNA, 120 bp, Artificial Sequence
  ENSG00000170523_13 (sequence is synthesized)
ttttccccttgtgttctgagaatacaccatcggctcattcccaccagcggctcctccccacctttcatcccactggaaaggggcctgtggctggggaatagacccattccttcccctgtc

SEQ ID NO: 569145 - DNA, 120 bp, Artificial Sequence
  ENSG00000170523_14 (sequence is synthesized)
tcagccttcagcccctcccggggagaagggccttgcttccctggaagaagcactgtgagactgttccccctgcctctctggcctcttgtctccccttttccaataaacttggggacctgc

SEQ ID NO: 569146 - DNA, 120 bp, Artificial Sequence
  ENSG00000170525_0 (sequence is synthesized)
agccaagccggagaggaggcgagcagcagggcctggtggcgagagcgcggctgtcactgcgcccgagcatcccagagctttccgagcggacgagccggccgtgccgggcatccccagcct

SEQ ID NO: 569147 - DNA, 120 bp, Artificial Sequence
  ENSG00000170525_1 (sequence is synthesized)
cgctaccctcgcagcacacgtcgagccccgcacaggcgagggtccggaacttagcccaaagcacgtttcccctggcagcgcaggaaacgcccggccgcgcgccggcgcacgcccccctct

SEQ ID NO: 569148 - DNA, 120 bp, Artificial Sequence
  ENSG00000170525_2 (sequence is synthesized)
cctcctttgttccgggggtcggcggccgctctcctgccagcgtcgggatctcggccccgggaggcgggccgtcgggcgcagccgcgaagatgccgttggaactgacgcagagccgagtgc

SEQ ID NO: 569149 - DNA, 120 bp, Artificial Sequence
  ENSG00000170525_3 (sequence is synthesized)
agaagatctgggtgcccgtggaccacaggccctcgttgcccagatcctgtgggccaaagctgaccaactcccccaccgtcatcgtcatggtgggcctccccgcccggggcaagacctaca

SEQ ID NO: 569150 - DNA, 120 bp, Artificial Sequence
  ENSG00000170525_4 (sequence is synthesized)
tctccaagaagctgactcgctacctcaactggattggcgtccccacaaaagtgttcaacgtcggggagtatcgccgggaggctgtgaagcagtacagctcctacaacttcttccgccccg

SEQ ID NO: 569151 - DNA, 120 bp, Artificial Sequence
  ENSG00000170525_5 (sequence is synthesized)
acaatgaggaagccatgaaagtccggaagcaatgtgccttagctgccttgagagatgtcaaaagctacctggcgaaagaagggggacaaattgcggttttcgatgccaccaatactacta

SEQ ID NO: 569152 - DNA, 120 bp, Artificial Sequence
  ENSG00000170525_6 (sequence is synthesized)
gagagaggagacacatgatccttcattttgccaaagaaaatgactttaaggcgtttttcatcgagtcggtgtgcgacgaccctacagttgtggcctccaatatcatggaagttaaaatct

SEQ ID NO: 569153 - DNA, 120 bp, Artificial Sequence
  ENSG00000170525_7 (sequence is synthesized)
ccagcccggattacaaagactgcaactcggcagaagccatggacgacttcatgaagaggatcagttgctatgaagccagctaccagcccctcgaccccgacaaatgcgacagggacttgt

SEQ ID NO: 569154 - DNA, 120 bp, Artificial Sequence
  ENSG00000170525_8 (sequence is synthesized)
cgctgatcaaggtgattgacgtgggccggaggttcctggtgaaccgggtgcaggaccacatccagagccgcatcgtgtactacctgatgaacatccacgtgcagccgcgtaccatctacc

SEQ ID NO: 569155 - DNA, 120 bp, Artificial Sequence
  ENSG00000170525_9 (sequence is synthesized)
tgtgccggcacggcgagaacgagcacaacctccagggccgcatcgggggcgactcaggcctgtccagccggggcaagaagtttgccagtgctctgagcaagttcgtggaggagcagaacc

SEQ ID NO: 569156 - DNA, 120 bp, Artificial Sequence
  ENSG00000170525_10 (sequence is synthesized)
tgaaggacctgcgcgtgtggaccagccagctgaagagcaccatccagacggccgaggcgctgcggctgccctacgagcagtggaaggcgctcaatgagatcgacgcgggcgtctgtgagg

SEQ ID NO: 569157 - DNA, 120 bp, Artificial Sequence
  ENSG00000170525_11 (sequence is synthesized)
agctgacctacgaggagatcagggacacctaccctgaggagtatgcgctgcgggagcaggacaagtactattaccgctaccccaccggggagtcctaccaggacctggtccagcgcttgg

SEQ ID NO: 569158 - DNA, 120 bp, Artificial Sequence
  ENSG00000170525_12 (sequence is synthesized)
agccagtgatcatggagctggagcggcaggagaatgtgctggtcatctgccaccaggccgtcctgcgctgcctgcttgcctacttcctggataagagtgcagaggagatgccctacctga

SEQ ID NO: 569159 - DNA, 120 bp, Artificial Sequence
  ENSG00000170525_13 (sequence is synthesized)
aatgccctcttcacaccgtcctgaaactgacgcctgtcgcttatggctgccgtgtggaatccatctacctgaacgtggagtccgtctgcacacaccgggagaggtcagaggatgcaaaga

SEQ ID NO: 569160 - DNA, 120 bp, Artificial Sequence
  ENSG00000170525_14 (sequence is synthesized)
agggacctaacccgctcatgagacgcaatagtgtcaccccgctagccagccccgaacccaccaaaaagcctcgcatcaacagctttgaggagcatgtggcctccacctcggccgccctgc

SEQ ID NO: 569161 - DNA, 120 bp, Artificial Sequence
  ENSG00000170525_15 (sequence is synthesized)
ccagctgcctgcccccggaggtgcccacgcagctgcctggacaaaacatgaaaggctcccggagcagcgctgactcctccaggaaacactgaggcagacgtgtcggttccattccatttc

SEQ ID NO: 569162 - DNA, 120 bp, Artificial Sequence
  ENSG00000170525_16 (sequence is synthesized)
catttctgcagcttagcttgtgtcctgccctccgcccgaggcaaaacgtatcctgaggacttcttccggagagggtggggtggagcagcgggggagccttggccgaagagaaccatgctt

SEQ ID NO: 569163 - DNA, 120 bp, Artificial Sequence
  ENSG00000170525_17 (sequence is synthesized)
ggcaccgtctgtgtcccctcggccgctggacaccagaaagccacgtgggtccctggcgccctgcctttagccgtggggcccccacctccactctctgggtttcctaggaatgtccagcct

SEQ ID NO: 569164 - DNA, 120 bp, Artificial Sequence
  ENSG00000170525_18 (sequence is synthesized)
cctgacaggaggccgctggggacactgtgctgttttgtttcgtttctgtgatctcccggcacgtttggagctgggaagaccacactggtggcagaatcctaaaattaaaggaggcaggct

SEQ ID NO: 569165 - DNA, 120 bp, Artificial Sequence
  ENSG00000170525_19 (sequence is synthesized)
cctagttgctgaaagttaaggaatgtgtaaaacctccacgtgactgtttggtgcatcttgacctgggaagacgcctcatgggaacgaacttggacaggtgttgggttgaggcctcttctg

SEQ ID NO: 569166 - DNA, 120 bp, Artificial Sequence
  ENSG00000170525_20 (sequence is synthesized)
caggaagtccctgagctgagacgcaagttggctgggtggtccgcaccctggctctcctgcaggtccacacaccttccaggcctgtggcctgcctccaaagatgtgcaagggcaggctggc

SEQ ID NO: 569167 - DNA, 120 bp, Artificial Sequence
  ENSG00000170525_21 (sequence is synthesized)
tgcacggggagagggaagtattttgccgaaatatgagaactggggcctcctgctcccagggagctccagggcccctctctcctcccacctggacttggggggaactgagaaacactttcc

SEQ ID NO: 569168 - DNA, 120 bp, Artificial Sequence
  ENSG00000170525_22 (sequence is synthesized)
tggagctgctggcttttgcacttttttgatggcagaagtgtgacctgagagtcccaccttctcttcaggaacgtagatgttggggtgtcttgccctggggggcttggaacctctgaaggt

SEQ ID NO: 569169 - DNA, 120 bp, Artificial Sequence
  ENSG00000170525_23 (sequence is synthesized)
ggggagcggaacacctggcatccttccccagcacttgcattaccgtccctgctcttcccaggtggggacagtggcccaagcaaggcctcactcgcagccacttcttcaagagctgcctgc

SEQ ID NO: 569170 - DNA, 120 bp, Artificial Sequence
  ENSG00000170525_24 (sequence is synthesized)
acactgtcttggagcatctgccttgtgcctggcactctgccggtgccttgggaaggtcggaagagtggactttgtcctggccttcccttcatggcgtctatgacacttttgtggtgatgg

SEQ ID NO: 569171 - DNA, 120 bp, Artificial Sequence
  ENSG00000170525_25 (sequence is synthesized)
aaagcatgggacctgtcgtctcagcctgttggtttctcctcattgcctcaaaccctggggtaggtgggacggggggtctcgtgcccagatgaaaccatttggaaactcggcagcagagtt

SEQ ID NO: 569172 - DNA, 120 bp, Artificial Sequence
  ENSG00000170525_26 (sequence is synthesized)
tgtccaaatgacccttttcaggatgtctcaaagcttgtgccaaaggtcacttttctttcctgccttctgctgtgagccctgagatcctcctcccagctcaagggacaggtcctgggtgag

SEQ ID NO: 569173 - DNA, 120 bp, Artificial Sequence
  ENSG00000170525_27 (sequence is synthesized)
ggtgggagatttagacacctgaaactgggcgtggagagaagagccgttgctgtttgttttttgggaagagcttttaaagaatgcatgtttttttcctggttggaattgagtaggaactga

SEQ ID NO: 569174 - DNA, 120 bp, Artificial Sequence
  ENSG00000170525_28 (sequence is synthesized)
ggctgtgcttcaggtatggtacaatcaagtgggggattttcatgctgaaccattcaagccctccccgcccgttgcacccactttggctggcgtctgctggagaggatgtctctgtccgca

SEQ ID NO: 569175 - DNA, 120 bp, Artificial Sequence
  ENSG00000170525_29 (sequence is synthesized)
ttcccgtgcagctccaggctcgcgcagttttctctctctccctggatgttgagtctcatcagaatatgtgggtagggggtggacgtgcacgggtgcatgattgtgcttaacttggttgta

SEQ ID NO: 569176 - DNA, 120 bp, Artificial Sequence
  ENSG00000170525_30 (sequence is synthesized)
tttttcgatttgacatggaaggcctgttgctttgctcttgagaatagtttctcgtgtccccctcgcaggcctcattctttgaacatcgactctgaagtttgatacagataggggcttgat

SEQ ID NO: 569177 - DNA, 120 bp, Artificial Sequence
  ENSG00000170525_31 (sequence is synthesized)
agctgtggtcccctctcccctctgactacctaaaatcaatacctaaatacagaagccttggtctaacacgggacttttagtttgcgaagggcctagatagggagagaggtaacatgaatc

SEQ ID NO: 569178 - DNA, 120 bp, Artificial Sequence
  ENSG00000170525_32 (sequence is synthesized)
tggacagggagggagatactatagaaaggagaacactgcctactttgcaagccagtgacctgccttttgaggggacattggacgggggccgggggcgggggttgggtttgagctacagtc

SEQ ID NO: 569179 - DNA, 120 bp, Artificial Sequence
  ENSG00000170525_33 (sequence is synthesized)
atgaacttttggcgtctactgattcctccaactctccaccccacaaaataacggggaccaatatttttaactttgcctatttgtttttgggtgagtttcccccctccttattctgtcctg

SEQ ID NO: 569180 - DNA, 120 bp, Artificial Sequence
  ENSG00000170525_34 (sequence is synthesized)
agaccacgggcaaagctcttcattttgagagagaagaaaaactgtttggaaccacaccaatgatatttttctttgtaatacttgaaatttatttttttattattttgatagcagatgtgc

SEQ ID NO: 569181 - DNA, 120 bp, Artificial Sequence
  ENSG00000170525_35 (sequence is synthesized)
tatttatttatttaatatgtataaggagcctaaacaatagaaagctgtagagattgggtttcattgttaattggtttgggagcctcctatgtgtgacttatgacttctctgtgttctgtg

SEQ ID NO: 569182 - DNA, 120 bp, Artificial Sequence
  ENSG00000170525_36 (sequence is synthesized)
tatttgtctgaattaatgacctgggatataaagctatgctagctttcaaacaggagatgcctttcagaaatttgtatattttgcagttgccagaccaataaaatacctggttgaaataca

SEQ ID NO: 569183 - DNA, 120 bp, Artificial Sequence
  ENSG00000170525_37 (sequence is synthesized)
cccggaggtgcccacgcagctgcctggacaacctttgctagggcaagcctgtctgtaagtatctctccgatcatcgctgctgcttgcactgctttcttcctgcttgctcatttggcctcc

SEQ ID NO: 569184 - DNA, 120 bp, Artificial Sequence
  ENSG00000170525_38 (sequence is synthesized)
gctgcctggacaagagttaaagagtggaattcctggaagggaccctgagccaccagtccagccccctgaagggcagagcattctctggatacccagagaggtgaccgtggcatccaggag

SEQ ID NO: 569185 - DNA, 120 bp, Artificial Sequence
  ENSG00000170525_39 (sequence is synthesized)
tggacccggggctgcaccaagcatcccggagcccagactggtctcgcttcctcacctttctggctctgcggcaagcggctcctaatgatacctggctgaaagagaccaattaacctgagc

SEQ ID NO: 569186 - DNA, 120 bp, Artificial Sequence
  ENSG00000170525_40 (sequence is synthesized)
tgctgaggactctgagaagcttcccttatgctgtggttatgtgggatttcccaggtcagtgtcagttgtgtaaaatacagaggtctccaatggatgatgggtagtttatgacacttccac

SEQ ID NO: 569187 - DNA, 120 bp, Artificial Sequence
  ENSG00000170525_41 (sequence is synthesized)
tttacaatgatgcaagagagatacgcattttgtagaagtggaaatagtgcttcgagttcccatacaaccattctgtttttcactttcagtacaatgttcaataaattacatgagatattc

SEQ ID NO: 569188 - DNA, 120 bp, Artificial Sequence
  ENSG00000170525_42 (sequence is synthesized)
gccgcttggacgtcgtcctgtctgggtgtcgcgggccggccccgcggggagcgcccccggcgcgatgcccttcaggaaagcctgtgggccaaagctgaccaactcccccaccgtcatcgt

SEQ ID NO: 569189 - DNA, 120 bp, Artificial Sequence
  ENSG00000170525_43 (sequence is synthesized)
gtgcgccgcgcggccccagcctgctctgcggcgactgtccggctcgtgagctccgcgtggatccggcgctgggccccctacgctctggggacctggggttgtgtttccggcaaaggatgt

SEQ ID NO: 569190 - DNA, 120 bp, Artificial Sequence
  ENSG00000170525_44 (sequence is synthesized)
agcgtgggctcctggcggtgaagggggtggctgctgactctcctgtcccgttggggtagagagatgggggagggtggccagaaggaaggtgacagccagcaagcaggggctctgccactc

SEQ ID NO: 569191 - DNA, 120 bp, Artificial Sequence
  ENSG00000170525_45 (sequence is synthesized)
cgttaaaccctgctccttctcaaccactgctgatgatggatgattgattttgcgtggctctctggccggtctgatgcagtctgtggccagcggcagagcccctcccgagtgccctgagct

SEQ ID NO: 569192 - DNA, 120 bp, Artificial Sequence
  ENSG00000170525_46 (sequence is synthesized)
gcctgcccccggaggtgcccacgcagctgcctggacaagtcagtgcactcccctttccttcctgcctgggggacgcatgccgggcgtgatgccacagatctgggattgcgtgcgtgtgtg

SEQ ID NO: 569193 - DNA, 120 bp, Artificial Sequence
  ENSG00000170525_47 (sequence is synthesized)
atctacctgaacgtggagtccgtctgcacacaccgggagaggtcagagggtctcagtctgttccccaggctggagtgcggtggcgcagtcacggctcactgcagcctcaacctcctgggt

SEQ ID NO: 569194 - DNA, 120 bp, Artificial Sequence
  ENSG00000170537_0 (sequence is synthesized)
actccggcttctgtgatgtcagcgccggaacctggaatcccggctccgcgagggaaggccggggaggcggcggcggcggcggcggctggagagggtcctcggcagcctctgaggagcgcg

SEQ ID NO: 569195 - DNA, 120 bp, Artificial Sequence
  ENSG00000170537_1 (sequence is synthesized)
gggcgcggccatgagcgagtccagcggcagtgcgctccagcccggcaggcccagccggcagccggcggtccatccagagaacctctctctagactccagttgcttctcttctccacctgt

SEQ ID NO: 569196 - DNA, 120 bp, Artificial Sequence
  ENSG00000170537_2 (sequence is synthesized)
gaacttcctccaagaattgccaagctaccggtccattgcacgtaggagaacgactgtccattcccgggacaagcaaagcggaactttgctaaagccaaccgactcttacagctcccagct

SEQ ID NO: 569197 - DNA, 120 bp, Artificial Sequence
  ENSG00000170537_3 (sequence is synthesized)
ggaggacagaatcgctgaaaacctcagcagccattctcttcgaaattatgcactgaacatctctgagaagcggagactaagggacattcaagagacacaaatgaagtatctctccgaatg

SEQ ID NO: 569198 - DNA, 120 bp, Artificial Sequence
  ENSG00000170537_4 (sequence is synthesized)
ggaccagtggaagcggtatagcagcaagtcttggaagaggttcctagagaaggctcgagagatgacgacccacctggagctgtggcgggaggacatccgcagcatagaagggaaatttgg

SEQ ID NO: 569199 - DNA, 120 bp, Artificial Sequence
  ENSG00000170537_5 (sequence is synthesized)
cactgggattcagtcctatttctccttcttgagattcctggtgttgctgaatttggtgatatttctgatcatctttatgctggttttgctcccagtcttactcacgaaatacaagatcac

SEQ ID NO: 569200 - DNA, 120 bp, Artificial Sequence
  ENSG00000170537_6 (sequence is synthesized)
caacagcagcttcgtgctcattcctttcaaagacatggataaacaatgtacagtctatccagtaagcagttctggactcatttacttttacagttatatcatagacttgctttctggcac

SEQ ID NO: 569201 - DNA, 120 bp, Artificial Sequence
  ENSG00000170537_7 (sequence is synthesized)
tggtttcctggaggaaactagcctcttttacggacattacaccattgatggggtgaaatttcagaacttcacctatgatctgcccctggcgtatttgttaagcacaatcgcctccctggc

SEQ ID NO: 569202 - DNA, 120 bp, Artificial Sequence
  ENSG00000170537_8 (sequence is synthesized)
cctgagccttctttggatagtgaaaaggtcggtggaaggattcaaaatcaacctgattcggagtgaggagcactttcagagttactgcaacaagatatttgccggctgggacttctgcat

SEQ ID NO: 569203 - DNA, 120 bp, Artificial Sequence
  ENSG00000170537_9 (sequence is synthesized)
cactaaccgcagcatggcggatctgaagcacagcagcttgcggtacgagctccgagcagatctggaggaagaaagaatgcggcagaaaatagcagaaaggacctcagaagaaacaatacg

SEQ ID NO: 569204 - DNA, 120 bp, Artificial Sequence
  ENSG00000170537_10 (sequence is synthesized)
catttactctttgagactgtttttgaactgtattgttctggctgttttaggggcatgcttttatgcaatatacgtagcaactgtcttctcgcaagagcacatgaaaaaggaaatcgacaa

SEQ ID NO: 569205 - DNA, 120 bp, Artificial Sequence
  ENSG00000170537_11 (sequence is synthesized)
gatggtttttggagagaacctcttcatattgtatctaccgtctattgtgatcacgctggccaattttatcaccccaatgatctttgccaagatcatccgctatgaggattattctccagg

SEQ ID NO: 569206 - DNA, 120 bp, Artificial Sequence
  ENSG00000170537_12 (sequence is synthesized)
ctttgagatccgtctgacaatccttaggtgtgtctttatgcggctggccaccatatgtgtcctggtgttcacgctgggctccaagatcacatcctgtgatgatgacacatgtgacctttg

SEQ ID NO: 569207 - DNA, 120 bp, Artificial Sequence
  ENSG00000170537_13 (sequence is synthesized)
cggctacaaccagaaactctacccgtgctgggagacccaagttgggcaggaaatgtacaagctgatgatcttcgacttcatcatcatcttggctgtgacactcttcgtggattttcctag

SEQ ID NO: 569208 - DNA, 120 bp, Artificial Sequence
  ENSG00000170537_14 (sequence is synthesized)
aaagctcctggtgacctactgttcctcttgcaagctgattcagtgctgggggcagcaggagtttgccattcctgataacgtcctggggatagtttacgggcaaaccatctgctggatcgg

SEQ ID NO: 569209 - DNA, 120 bp, Artificial Sequence
  ENSG00000170537_15 (sequence is synthesized)
agcctttttctcaccccttctccctgcaattgcaaccctgaaattcattatcatcttctatgtgaaagagtggagtctgctttacacctgcagaccctcccccaggccgttcagagcatc

SEQ ID NO: 569210 - DNA, 120 bp, Artificial Sequence
  ENSG00000170537_16 (sequence is synthesized)
caattctaatttcttcttcctgttggtgttgttgatcgggctgtgtttggcaataatacctctgacaatcagcatatcacgcatcccttcctcgaaagcctgtgggccgttcaccaactt

SEQ ID NO: 569211 - DNA, 120 bp, Artificial Sequence
  ENSG00000170537_17 (sequence is synthesized)
caacaccacctgggaggtcatccccaagacggtgagcaccttccccagctcgctgcagtccttcatccatggtgtcacatccgaagcctttgcagttcctttcttcatgattatttgcct

SEQ ID NO: 569212 - DNA, 120 bp, Artificial Sequence
  ENSG00000170537_18 (sequence is synthesized)
tcgtgacaagtgctacctaatccagaaactaacagaagcccaaagggacatgaggaactaactagactgagcgtgaagatggtgctgcctgttgcttctaagctgacctagtgattctgc

SEQ ID NO: 569213 - DNA, 120 bp, Artificial Sequence
  ENSG00000170537_19 (sequence is synthesized)
tgagcctacagagtctacctgggttttgagtggacatttaaaaatatatttttcttgagtttaggcttttccatatgtgcagctgtgtttacctaacccagcccttaattagggcttcag

SEQ ID NO: 569214 - DNA, 120 bp, Artificial Sequence
  ENSG00000170537_20 (sequence is synthesized)
tgacttagaaaagcaggggaaacccaaggctttgcctgcagaccggccactctgtgacaactctaccaaaaaccaacaagccattcaagcttttacaagaatgaaagagcggagacggta

SEQ ID NO: 569215 - DNA, 120 bp, Artificial Sequence
  ENSG00000170537_21 (sequence is synthesized)
gtttagtatttgagccacgagtttatgtgcacaagtgttttgggttgtggactgaagctcagcctgttaatcagaccagcccatgagtgtataacaaacagaattggaggctggtttctt

SEQ ID NO: 569216 - DNA, 120 bp, Artificial Sequence
  ENSG00000170537_22 (sequence is synthesized)
aaacacacacgtccacattttttagggttgttttcctgtgcttacaatttttaatgcatgtgcctttatttcacaaaacatgtggctgggcgcagcggctcacgcctgttatcccaacac

SEQ ID NO: 569217 - DNA, 120 bp, Artificial Sequence
  ENSG00000170537_23 (sequence is synthesized)
cctaaaaaaaaaatgtagaatatctcttaagatttccgttatggtaaaaaccatatgcaataaatacctcattgtaagcttacccaaaattgatagatgtcaaccttttaacagaagaac

SEQ ID NO: 569218 - DNA, 120 bp, Artificial Sequence
  ENSG00000170537_24 (sequence is synthesized)
agaagtttaagttattgtttaatgtaatcagttttcattttaatatctttgaaatctttttcaaaggactgtagttttgtaatggacttttcaagccttccttccattgtttttcttccg

SEQ ID NO: 569219 - DNA, 120 bp, Artificial Sequence
  ENSG00000170537_25 (sequence is synthesized)
ttcactggctccacacgtttcctggggagtagcctggaatttaaagttgggtgcaggttttagaaagctgttgctgttaacaataattctcccggccatctccactccactactcaaaaa

SEQ ID NO: 569220 - DNA, 120 bp, Artificial Sequence
  ENSG00000170537_26 (sequence is synthesized)
tgcctgaatccttgctcagaggagcaaaggtatcttctcgtccctttcttacagccattttcttgcttttccacaaagatattatttaaagtggaatatttttgtaactgggataccaat

SEQ ID NO: 569221 - DNA, 120 bp, Artificial Sequence
  ENSG00000170537_27 (sequence is synthesized)
gagcttttcggtcttttcctgacttggtaaggtttatgggtttctaaatctaataactacagtcataccaccctgaaaatgcctgatctcgtctaaatctaataactggtgtcatggaat

SEQ ID NO: 569222 - DNA, 89 bp, Artificial Sequence
  ENSG00000170537_28 (sequence is synthesized)
gcctgatctcgtctaaatctaataactggtgtcatggaattttgagtaaccaaagattcattccagtctcacttaaaaaaataaattct

SEQ ID NO: 569223 - DNA, 90 bp, Artificial Sequence
  ENSG00000170537_29 (sequence is synthesized)
gaccgggagaccctatctcaaaaaaaaagataggtgaaaagaaaaaaaaagttgtaattgtaaacatttctgcccagtgcctttatattt

SEQ ID NO: 569224 - DNA, 120 bp, Artificial Sequence
  ENSG00000170537_30 (sequence is synthesized)
aaaaaaaagttgtaattgtaaacatttctgcccagtgcctttatatttatataacattttcactgtgaccagacttgatgatattcaagttttctatttgtgtgtgtgtgtgtgtgtgtg

SEQ ID NO: 569225 - DNA, 120 bp, Artificial Sequence
  ENSG00000170537_31 (sequence is synthesized)
acacaacgaaaacgtactgcgttttttttcctattataaaagtgatactgaaatatgctaattaatatattaattttagttaaatgctgctaatatgcatacctcttacttgaaggtttt

SEQ ID NO: 569226 - DNA, 120 bp, Artificial Sequence
  ENSG00000170537_32 (sequence is synthesized)
taatatgttttgataactttaataacttcaggtgatgtctgtataacttttaaagtgcagctctctctaacaaatgtgccttacaactcctgattaaacggcgtcttgaaggttttaaaa

SEQ ID NO: 569227 - DNA, 120 bp, Artificial Sequence
  ENSG00000170537_33 (sequence is synthesized)
ttccttattcctgctccctccacaaacgcgtcctcatccaatccagtggaacccagccgggccaaaaggacacgagaactgcagtctggaccgtggtgggtttgtcttccagctgttgac

SEQ ID NO: 569228 - DNA, 120 bp, Artificial Sequence
  ENSG00000170537_34 (sequence is synthesized)
cgagacagtctttcaatagcctcatctgctgttaaatgaaaggatttgagcaccccctccacgcctaacattctggtatgaggtgcctgcctcccggacatttcagccttcacatacagt

SEQ ID NO: 569229 - DNA, 120 bp, Artificial Sequence
  ENSG00000170537_35 (sequence is synthesized)
ggtcatggctggggacatttacccaggacactgcaaggaaagtgctgttttcctgggagggagtgaaattactgcagccttctctcaccaccacctccccaaaactctgccttgaggccc

SEQ ID NO: 569230 - DNA, 120 bp, Artificial Sequence
  ENSG00000170537_36 (sequence is synthesized)
caccacctccccaaaactctgccttgaggcccagccgcgtccagcttcattaattcactgattcatccattccttcaagatgtgtattaagggggatgtggtggctcatgcctgtaatcc

SEQ ID NO: 569231 - DNA, 120 bp, Artificial Sequence
  ENSG00000170537_37 (sequence is synthesized)
gcgttcggctgggtgggtccttctggaatacagtgtcatggtcaagagaacagcggttgaagccatgggtttgaactgcatttgcttcgctttcttgttctagtgatgagacagagtctg

SEQ ID NO: 569232 - DNA, 90 bp, Artificial Sequence
  ENSG00000170537_38 (sequence is synthesized)
cgtgtgcttatagtttgagctatgcttggtgaggctgaggctgcagtgagccatgatcacactgctgcactccaccctgggtgacagagt

SEQ ID NO: 569233 - DNA, 120 bp, Artificial Sequence
  ENSG00000170537_39 (sequence is synthesized)
gacagagtgagaccccatctcaaaaagtaaaaaataaaataaaatgtaggtctggtctgaatcagaggcttgcaactgagatgggtcagcatgagctttataacatggcatatttctgga

SEQ ID NO: 569234 - DNA, 120 bp, Artificial Sequence
  ENSG00000170540_0 (sequence is synthesized)
gggttgtggttggtgtgcgggtttcggttggaggactcgttggggaggtggcctgcgcttgtagagactgcatccccgagacgatggcggagggagataatcgcagcaccaacctgctgg

SEQ ID NO: 569235 - DNA, 120 bp, Artificial Sequence
  ENSG00000170540_1 (sequence is synthesized)
ctgcagagactgcaagtctggaagaacagctgcaaggatggggagaagtgatgctgatggctgataaagtcctccgatgggaaagagcctggtttccacctgccatcatgggtgtggttt

SEQ ID NO: 569236 - DNA, 120 bp, Artificial Sequence
  ENSG00000170540_2 (sequence is synthesized)
ctttggtgtttctgattatctactatctagatccatctgttctgtccggcgtttcctgttttgttatgtttttgtgcttggctgactaccttgttcccattctagcgcctagaatttttg

SEQ ID NO: 569237 - DNA, 120 bp, Artificial Sequence
  ENSG00000170540_3 (sequence is synthesized)
gctccaataaatggaccactgaacaacagcaaagattccatgaaatttgcagcaatctagtaaaaactcgacgcagagctgtgggttggtggaaacgcctcttcacactaaaggaagaaa

SEQ ID NO: 569238 - DNA, 120 bp, Artificial Sequence
  ENSG00000170540_4 (sequence is synthesized)
aacctaagatgtacttcatgaccatgatcgtttcccttgctgcggttgcttgggtgggacaacaagtccacaacctgcttctcacctacctgatagtgacttccttactattgcttcctg

SEQ ID NO: 569239 - DNA, 120 bp, Artificial Sequence
  ENSG00000170540_5 (sequence is synthesized)
gactaaaccaacatggaatcattttgaagtacattggaatggccaagagggagataaacaaacttctcaaacaaaaagaaaagaaaaacgaatgattcatctgctttaatcagtgtgatt

SEQ ID NO: 569240 - DNA, 120 bp, Artificial Sequence
  ENSG00000170540_6 (sequence is synthesized)
aatgcagcacccattgccccgggaaccgtttctgctgtactatctggatactaaaatgttacggaagtagctctttgttctccctcactctgcccttagttaatagaaattcagactcgc

SEQ ID NO: 569241 - DNA, 120 bp, Artificial Sequence
  ENSG00000170540_7 (sequence is synthesized)
caagtaaggcttcgtgcatagtgtcttcatgtcgcgtatagttgagcgcgttcttagcagttggcttcatggacaactcattagtgttttgacttttcttacccagcgttaattgaattc

SEQ ID NO: 569242 - DNA, 120 bp, Artificial Sequence
  ENSG00000170540_8 (sequence is synthesized)
ttgcttttagacaacttcctttttgtagtggtgaaccttgccctttagtacagttcaagtgaatctggataattgttcatctttgctttagcttagataccatgtagtggtctgtggcta

SEQ ID NO: 569243 - DNA, 120 bp, Artificial Sequence
  ENSG00000170540_9 (sequence is synthesized)
tgtttctttccagtgggagaagagtccccatgaaataagatgaaactgattccatgcactagtacatgtaggcttctcccttgtgcaaagcttagcaatttgtaggaaactttgatcttt

SEQ ID NO: 569244 - DNA, 120 bp, Artificial Sequence
  ENSG00000170540_10 (sequence is synthesized)
ttgtccaagaaaaggaatgtctgacaggcttaagctttcgtccccttgcacttagactcgaagttagtaaatccttaaaggctttttaatagcagacttccaaaagattgcatttaggat

SEQ ID NO: 569245 - DNA, 120 bp, Artificial Sequence
  ENSG00000170540_11 (sequence is synthesized)
ttctagcatgcttttaatttcagattttcagctgacattagctatagtatacagtaggttaagactcatgtctatgactttcactctaagactggcaaaaggacagcagtcttctatgtt

SEQ ID NO: 569246 - DNA, 120 bp, Artificial Sequence
  ENSG00000170540_12 (sequence is synthesized)
tagtcaatattcatttcagtagaagataatcttatctaatttttgagaccagaataagccttttaaggtaaacctcaaaattatcattttatggtaatactgaccattttagtcccctag

SEQ ID NO: 569247 - DNA, 120 bp, Artificial Sequence
  ENSG00000170540_13 (sequence is synthesized)
gtttgacatgggagatagtgactacactggtgtctgacttttttcctagagatttctccctgaaaaatacaagggctgttggtgagagcagacttgaggtgatgatagttggcctctggt

SEQ ID NO: 569248 - DNA, 120 bp, Artificial Sequence
  ENSG00000170540_14 (sequence is synthesized)
ctacaaagatttcataactccttggaaagcttcttataatcattcttaacttcttggtagctagaaatttagagtagttgaaatctttaggaatgaacttctgagggccaaaaaatgtga

SEQ ID NO: 569249 - DNA, 120 bp, Artificial Sequence
  ENSG00000170540_15 (sequence is synthesized)
ctgacgggaacaattcttaaactgattaactagctgtaatatagttttgtgaatttattgcactgatgttgtaccttgtggtatatctgtccctattaaataagtgttgttttctcctct

SEQ ID NO: 569250 - DNA, 120 bp, Artificial Sequence
  ENSG00000170540_16 (sequence is synthesized)
ttaatattgctgtgaacagtggtgcccattgtagcatatgtttgatttttttttattatttcataagaaaactacgttaattttaccttactttcattgtaaataagcctgtcttcctat

SEQ ID NO: 569251 - DNA, 120 bp, Artificial Sequence
  ENSG00000170540_17 (sequence is synthesized)
ctggattttttgtgtgcatacatattctactgattaactacttttgcagttttaatcctgtattatttcttctactttgttttgtgtaaaaggggaaaaaataaaaaaagctggaatctt

SEQ ID NO: 569252 - DNA, 120 bp, Artificial Sequence
  ENSG00000170540_18 (sequence is synthesized)
tctaaccatcagacacctaagcattagatttattgcttttatgtgaagaatattgtaactgatttgaatataaactatgaattttctgtactccatagttcttttatggtaaatgcacat

SEQ ID NO: 569253 - DNA, 120 bp, Artificial Sequence
  ENSG00000170540_19 (sequence is synthesized)
cctggctgcctgtcccccgggagccgagcgaggcctccagacgtccgtgggctcaaacaccgcggcctcgtccctgtcacccgccgcgggcccggcccttctctccctgggcaggcgacg

SEQ ID NO: 569254 - DNA, 120 bp, Artificial Sequence
  ENSG00000170540_20 (sequence is synthesized)
tcaattcgcctttttgtcttaatagctataatttgaaaattattcattggttaattcctaagtacattcataaatgtttacctgtattaattagactgaatcattttaaagttaaaaatt

SEQ ID NO: 569255 - DNA, 120 bp, Artificial Sequence
  ENSG00000170540_21 (sequence is synthesized)
acatttttgcatttaattttttattctaataaaacaaaattcttctgtttcatttttcttactgaaataatagtaaaagacatatacttagaaagcatctgtttaggccgggcacagtgg

SEQ ID NO: 569256 - DNA, 120 bp, Artificial Sequence
  ENSG00000170540_22 (sequence is synthesized)
tctgtaaacttggtaacctaaagcacttgagtaaatcagtgactcgcaaactttttgtcctccagacacttaaactctttttttgttattatactttaagttctgggaaacatgtgtaga

SEQ ID NO: 569257 - DNA, 64 bp, Artificial Sequence
  ENSG00000170540_23 (sequence is synthesized)
ttttgttattatactttaagttctgggaaacatgtgtagaatgtacaggtttgttacataggta

SEQ ID NO: 569258 - DNA, 120 bp, Artificial Sequence
  ENSG00000170540_24 (sequence is synthesized)
cctaaactcttaaaaaagtgctgagaactccaaagagcttttgtccattgatatatacttaaccactgcagctatgatatcagcatgtcacaaagcctctggaaagccacttgtgagaaa

SEQ ID NO: 569259 - DNA, 120 bp, Artificial Sequence
  ENSG00000170542_0 (sequence is synthesized)
gggagtccgcggcgagcgcagcagcagggccgggtcctgcgcctcgggggtcggcgtccaggctcggagcgcggcacggagacggcggcagcgctggactaggtggcaggccctgcatca

SEQ ID NO: 569260 - DNA, 120 bp, Artificial Sequence
  ENSG00000170542_1 (sequence is synthesized)
tggaaactctttctaatgcaagtggtacttttgccatacgccttttaaagatactgtgtcaagataacccttcgcacaacgtgttctgttctcctgtgagcatctcctctgccctggcca

SEQ ID NO: 569261 - DNA, 120 bp, Artificial Sequence
  ENSG00000170542_2 (sequence is synthesized)
tggttctcctaggggcaaagggaaacaccgcaacccagatggcccaggcactgtctttaaacacagaggaagacattcatcgggctttccagtcgcttctcactgaagtgaacaaggctg

SEQ ID NO: 569262 - DNA, 120 bp, Artificial Sequence
  ENSG00000170542_3 (sequence is synthesized)
gcacacagtacctgctgagaacggccaacaggctctttggagagaaaacttgtcagttcctctcaacgtttaaggaatcctgtcttcaattctaccatgctgagctgaaggagctttcct

SEQ ID NO: 569263 - DNA, 120 bp, Artificial Sequence
  ENSG00000170542_4 (sequence is synthesized)
ttatcagagctgcagaagagtccaggaaacacatcaacacctgggtctcaaaaaagaccgaaggtaaaattgaagagttgttgccgggtagctcaattgatgcagaaaccaggctggttc

SEQ ID NO: 569264 - DNA, 120 bp, Artificial Sequence
  ENSG00000170542_5 (sequence is synthesized)
ttgtcaatgccatctacttcaaaggaaagtggaatgaaccgtttgacgaaacatacacaagggaaatgccctttaaaataaaccaggaggagcaaaggccagtgcagatgatgtatcagg

SEQ ID NO: 569265 - DNA, 120 bp, Artificial Sequence
  ENSG00000170542_6 (sequence is synthesized)
aggccacgtttaagctcgcccacgtgggcgaggtgcgcgcgcagctgctggagctgccctacgccaggaaggagctgagcctgctggtgctgctgcctgacgacggcgtggagctcagca

SEQ ID NO: 569266 - DNA, 120 bp, Artificial Sequence
  ENSG00000170542_7 (sequence is synthesized)
cggtggaaaaaagtctcacttttgagaaactcacagcctggaccaagccagactgtatgaagagtactgaggttgaagttctccttccaaaatttaaactacaagaggattatgacatgg

SEQ ID NO: 569267 - DNA, 120 bp, Artificial Sequence
  ENSG00000170542_8 (sequence is synthesized)
aatctgtgcttcggcatttgggaattgttgatgccttccaacagggcaaggctgacttgtcggcaatgtcagcggagagagacctgtgtctgtccaagttcgtgcacaagagttttgtgg

SEQ ID NO: 569268 - DNA, 120 bp, Artificial Sequence
  ENSG00000170542_9 (sequence is synthesized)
aggtgaatgaagaaggcaccgaggcagcggcagcgtcgagctgctttgtagttgcagagtgctgcatggaatctggccccaggttctgtgctgaccaccctttccttttcttcatcaggc

SEQ ID NO: 569269 - DNA, 120 bp, Artificial Sequence
  ENSG00000170542_10 (sequence is synthesized)
acaacagagccaacagcattctgttctgtggcaggttctcatcgccataaagggtgcacttaccgtgcactcggccatttccctcttcctgtgtccccagatccccactacagctccaag

SEQ ID NO: 569270 - DNA, 120 bp, Artificial Sequence
  ENSG00000170542_11 (sequence is synthesized)
aggatgggcctagaaagccaagtgcaaagatgagggcagattctttacctgtctgccctcatgatttgccagcatgaattcatgatgctccacactcgcttatgctacttaatcagaatc

SEQ ID NO: 569271 - DNA, 120 bp, Artificial Sequence
  ENSG00000170542_12 (sequence is synthesized)
ttgagaaaatagaccataatgattccctgttgtattaaaattgcagtccaaatcccataggatggcaagcaaagttcttctagaattccacatgcaattcactctggcgaccctgtgctt

SEQ ID NO: 569272 - DNA, 120 bp, Artificial Sequence
  ENSG00000170542_13 (sequence is synthesized)
tcctgacactgcgaatacattccttaacccgctgcctcagtggtaataaatggtgctagatattgctactattttatagatttcctggtgcttagccttataaaaaaggttgtaaaatgt

SEQ ID NO: 569273 - DNA, 81 bp, Artificial Sequence
  ENSG00000170542_14 (sequence is synthesized)
atattttatcttttatctttttctttgacatttaccaatcaccaagcatgcaccaaacactgctttaggcactggggacac

SEQ ID NO: 569274 - DNA, 120 bp, Artificial Sequence
  ENSG00000170542_15 (sequence is synthesized)
ttgacacctggtcttcagttctgtgcccaacgtatatagttttgacaatgaccaggttggactgtttaatgtctttcaacttaccacgtaatcctcttgtagggatcacatctttcttta

SEQ ID NO: 569275 - DNA, 120 bp, Artificial Sequence
  ENSG00000170542_16 (sequence is synthesized)
tgatattgtatttctctacctctaacagtaaaaattccattcaacccttaaagctcacttcaaattcttctttgagaagtttttcctttctccgcaaccagatgtacatatttgaactct

SEQ ID NO: 569276 - DNA, 120 bp, Artificial Sequence
  ENSG00000170542_17 (sequence is synthesized)
ctttgtacttggagggcacttctttcgtggtagttcttttatttttattaatctctgtatccttagatagtcctccaacaaccaaaggttgggactctgtcttacatatctgggtgcccc

SEQ ID NO: 569277 - DNA, 120 bp, Artificial Sequence
  ENSG00000170542_18 (sequence is synthesized)
tcatagtgcagtaataagtaagttgattatatacgagctatgtaacttatattttttaatggttggatatcactgagtttttttttttaagaatttttttattgaggtaaacttcacata

SEQ ID NO: 569278 - DNA, 120 bp, Artificial Sequence
  ENSG00000170542_19 (sequence is synthesized)
acataaaattaactattttaaagtgagaagttcagtgccacttagtattgttaacaatgttgcataaccaccacctttatttaaagttccaaaaaaaatgttctcctctaaaaggaaacc

SEQ ID NO: 569279 - DNA, 120 bp, Artificial Sequence
  ENSG00000170542_20 (sequence is synthesized)
ccatcccattaagcagatactctccattccttccttcctccagcccccagcaaccaccaatctgctttctgtctctatggatttatctattcttgctattttatataaattgaattgtat

SEQ ID NO: 569280 - DNA, 120 bp, Artificial Sequence
  ENSG00000170542_21 (sequence is synthesized)
gagaccttttgtgtctggcttctttcacttagtacaagtttttgagatttatttacatagtagcatgtatcaacacttcatttttatggccaaataaaattgtattatgtgtttatagca

SEQ ID NO: 569281 - DNA, 120 bp, Artificial Sequence
  ENSG00000170542_22 (sequence is synthesized)
caatttatttatccactcattcattgatggactttgggttgtttctgacttttggctattgggaatagtgctgctatgaatgtttgtgtacctgtatttgtttgaatgcctattttgcat

SEQ ID NO: 569282 - DNA, 120 bp, Artificial Sequence
  ENSG00000170542_23 (sequence is synthesized)
tctcttgggtatatatctaggagtggaactgctgggtcatatgttaattctatgtttagctttttgaggaacagacaaactgttttccacagcagttgaaccattccacattcccaccag

SEQ ID NO: 569283 - DNA, 120 bp, Artificial Sequence
  ENSG00000170542_24 (sequence is synthesized)
caatgtatgagaattccaatttctgtccacttcctcaccaacacttattattttccttttcctttttttaaaaaaaataagttatggccatcttagtgggtgtgaagtggtatctcattg

SEQ ID NO: 569284 - DNA, 120 bp, Artificial Sequence
  ENSG00000170542_25 (sequence is synthesized)
tgttttttatttgcatttcctatgtaatgagctagaaactaaagtacaaactagatgggacatccagtccctttgatagataatgctgagtaaaaaatgagatgaaagacatttgtttgt

SEQ ID NO: 569285 - DNA, 120 bp, Artificial Sequence
  ENSG00000170542_26 (sequence is synthesized)
ttttagaacacgagtgacagtttgttaaaaagctttagaggaggaatgaaaacaaagtgaagtacacttagaaaagggccaagtggacatcttggatgtcaagtgcctagttcagtatct

SEQ ID NO: 569286 - DNA, 61 bp, Artificial Sequence
  ENSG00000170542_27 (sequence is synthesized)
tttttttgagacagtgtcctcctggattcaagcaattctcttgcttcagcctcccaagtag

SEQ ID NO: 569287 - DNA, 90 bp, Artificial Sequence
  ENSG00000170542_28 (sequence is synthesized)
tcagcctcccaagtagctgagactacaagcacccaccatcacacccagctaagccacattggccgtgttggtcttgaactcctggcctca

SEQ ID NO: 569288 - DNA, 120 bp, Artificial Sequence
  ENSG00000170542_29 (sequence is synthesized)
gtgctaggattacaggcataagccactgagcccagccctagttcagtatcttttatgtaaattacaaacatctgcaacattatgtatcatatgcagatacttattgcatttcttttatta

SEQ ID NO: 569289 - DNA, 120 bp, Artificial Sequence
  ENSG00000170542_30 (sequence is synthesized)
gcagatacttattgcatttcttttattagtggtgaaagtgttctatgcatttattggctcttgaatttcctcatctatgaattgtcattcatacacctacttttctgcttcgtttttaca

SEQ ID NO: 569290 - DNA, 120 bp, Artificial Sequence
  ENSG00000170542_31 (sequence is synthesized)
tatgtctttgcctattaaagatattatccctctgttttatattttctctcattcttgtattgccttttaaattttgttatgatgtttcattaataaacagtgttttgttttcctctataa

SEQ ID NO: 569291 - DNA, 120 bp, Artificial Sequence
  ENSG00000170545_0 (sequence is synthesized)
gaaacccggagcggccgaagctcagcgctccgctggggcagagggtcgcggcggctgggaacgccgctccccgacgcaccggccgcccccagcgcagcgcgctccgcggggtgctgatct

SEQ ID NO: 569292 - DNA, 120 bp, Artificial Sequence
  ENSG00000170545_1 (sequence is synthesized)
gcgcgctccgcggggtgctgatctgcctcttctccaagaaactcaaccactagtgacaatgaccagcctcctgactactccttctccaagagaagaactgatgaccaccccaattttaca

SEQ ID NO: 569293 - DNA, 120 bp, Artificial Sequence
  ENSG00000170545_2 (sequence is synthesized)
gcccactgaggccctgtccccagaagatggagccagcacagcactcattgcagttgttatcaccgttgtcttcctcaccctgctctcggtcgtgatcttgatcttcttttacctgtacaa

SEQ ID NO: 569294 - DNA, 120 bp, Artificial Sequence
  ENSG00000170545_3 (sequence is synthesized)
gaacaaaggcagctacgtcacctatgaacctacagaaggtgagcccagtgccatcgtccagatggagagtgacttggccaagggcagcgagaaagaggaatatttcatctaatgactccc

SEQ ID NO: 569295 - DNA, 120 bp, Artificial Sequence
  ENSG00000170545_4 (sequence is synthesized)
aaatccaagctccagccaggtcgcagtcccaaatgccgacatcactgactccagggaccagggacatggagaaagctgtttatgatatctttaaccaggccctcttactagagctggtgt

SEQ ID NO: 569296 - DNA, 120 bp, Artificial Sequence
  ENSG00000170545_5 (sequence is synthesized)
ttgtgactggccaacaagatgtggctatgccaggggacatctgagtatgtgcccagtcatcttttttcacaggttgaagggagagaaaagattttgagttaaggtcattggctgctctac

SEQ ID NO: 569297 - DNA, 120 bp, Artificial Sequence
  ENSG00000170545_6 (sequence is synthesized)
tctgtcccctacctggtcacctagtgatagccccagtggagatactgtccatacaaggtcttcccagaggctggataccacagtaaaaggccaggccaggaggggtaggagactatggag

SEQ ID NO: 569298 - DNA, 120 bp, Artificial Sequence
  ENSG00000170545_7 (sequence is synthesized)
atcttacctcctgataaatgtgctacaccccctaatctgagcccttcctttccgtgttccccaacaacctcatgcttacgtgatttttattcaaattaaaaattttcattgctacagaaa

SEQ ID NO: 569299 - DNA, 120 bp, Artificial Sequence
  ENSG00000170545_8 (sequence is synthesized)
ctctgcgccaaccccgcgcgccacccgcggcttcctccgctcggggtcctcgttcggcctctgctggcctccgcgactccgcggtgcccgcccccgttgagttcaaaaggacgcgcggag

SEQ ID NO: 569300 - DNA, 120 bp, Artificial Sequence
  ENSG00000170545_9 (sequence is synthesized)
cctatttaacgcctttacatatgttctcttccaagcaataagaaccctaggaaagttctagaagtttgcagaactatctcagggatttgagacaaagatggtgcaggaaagcttgttcca

SEQ ID NO: 569301 - DNA, 80 bp, Artificial Sequence
  ENSG00000170545_10 (sequence is synthesized)
agggatttgagacaaagatggtgcaggaaagcttgttccaggggaacatcattagaaacataccctgggagggccgggtt

SEQ ID NO: 569302 - DNA, 60 bp, Artificial Sequence
  ENSG00000170545_11 (sequence is synthesized)
ccctgggagatgagttggttcaagcctccatcctggcaagggccagaatttcccagaatc

SEQ ID NO: 569303 - DNA, 120 bp, Artificial Sequence
  ENSG00000170545_12 (sequence is synthesized)
caagcctccatcctggcaagggccagaatttcccagaatcccttctacatatatacagaaggaaccagaaaaaatcaacctaccacctttcccagtgtatcctcagaatcaagccaagaa

SEQ ID NO: 569304 - DNA, 120 bp, Artificial Sequence
  ENSG00000170545_13 (sequence is synthesized)
gcttcttggattttagtctcaagataagttgtgtttaaaaggcacattttggtataaattattagctcatcagatattgttcactttggaattaaagctagatctcctttgaagtcttaa

SEQ ID NO: 569305 - DNA, 120 bp, Artificial Sequence
  ENSG00000170545_14 (sequence is synthesized)
cgcgggctggggcccagtgaggcttggcaggctgtgcgcggaccgcgccctggacggcgaaagcaggcccggagggggcggccagtccggcgtcccagcgtccgaggcgagccagaaggc

SEQ ID NO: 569306 - DNA, 120 bp, Artificial Sequence
  ENSG00000170545_15 (sequence is synthesized)
gagccagaaggcggcccacggccgtcgcctcccggtcccggcccggctactgcgctgcgcccactccgctctggagcctgggcgcgggtcctgaccttcccggccctctcctgacacctg

SEQ ID NO: 569307 - DNA, 120 bp, Artificial Sequence
  ENSG00000170545_16 (sequence is synthesized)
gtggatggcgtcaccagaactcctagctgtggaaccctagggtacctgttaccgcgctttggcgaaactgggttcgctgctgatttgcgaacctttgcctgactttctcaggccttgaga

SEQ ID NO: 569308 - DNA, 120 bp, Artificial Sequence
  ENSG00000170545_17 (sequence is synthesized)
gatctaagtaaatttggtggcccattgaaaggacctggagagagcgtatgaaggtaacaccccgtcaaactgcatgcggcctcagacctgctcctgtggagagctgttggtacctggagc

SEQ ID NO: 569309 - DNA, 120 bp, Artificial Sequence
  ENSG00000170545_18 (sequence is synthesized)
ctgaggagatattcagggaaaccagaagaggacaagagaaaaaggggaagggacttgggagaacctggcaccagaggctttcctgggacttccaggactcaaagccataggggcccaccc

SEQ ID NO: 569310 - DNA, 120 bp, Artificial Sequence
  ENSG00000170545_19 (sequence is synthesized)
tgagccaactccaagggaccttctggatcaagggcatctctctccagagggagcctgaccaaatccattaatgggctcactctggcttgtaagttatattacacacacacacacacacac

SEQ ID NO: 569311 - DNA, 120 bp, Artificial Sequence
  ENSG00000170545_20 (sequence is synthesized)
tctgtcagaggcactaccagtaaatgacaggttgggaggtggccgcaaatagatatgcatacggacgttacacttgagtacgtgggtagggacgaggatatatgtggttggttgagtggg

SEQ ID NO: 569312 - DNA, 90 bp, Artificial Sequence
  ENSG00000170545_21 (sequence is synthesized)
acagatctgcctcttctccaagaaactcaaccactagtgacaatgaccagcctcctgactactccttctccaagacagtggcacaatcac

SEQ ID NO: 569313 - DNA, 120 bp, Artificial Sequence
  ENSG00000170545_22 (sequence is synthesized)
cttcaccagcagcccgtccgactggaaagatctgcctcttctccaagaaactcaaccactagtgacaatgaccagcctcctgactactccttctccaagagaatttccttcctctttaag

SEQ ID NO: 569314 - DNA, 80 bp, Artificial Sequence
  ENSG00000170549_0 (sequence is synthesized)
gtgtctgaaagccccgccgccgagcggagggcggccgccgcagtcggcgcgcgattgcggatccgggcgcagccgggagc

SEQ ID NO: 569315 - DNA, 120 bp, Artificial Sequence
  ENSG00000170549_1 (sequence is synthesized)
ccgcccgctcctccctagacccctcgcggcgccccctgcaaccccctccggccggcctccgcctccctccccgcgcctttaatactcgcccgctgcggcggtcgccgagtccgcggacat

SEQ ID NO: 569316 - DNA, 120 bp, Artificial Sequence
  ENSG00000170549_2 (sequence is synthesized)
aatactcgcccgctgcggcggtcgccgagtccgcggacatgtccttcccgcagctgggctacccgcagtacctgagcgccgcggggccgggcgcctacggcggcgagcgcccgggggtgc

SEQ ID NO: 569317 - DNA, 80 bp, Artificial Sequence
  ENSG00000170549_3 (sequence is synthesized)
ccgaccgggggccgcggagctgggcggcggggcaggcgcggctgcagtcacctcggtgctgggcatgtacgcggcggcgg

SEQ ID NO: 569318 - DNA, 120 bp, Artificial Sequence
  ENSG00000170549_4 (sequence is synthesized)
gtacgcgggcgcgcccaactacagcgccttcctgccctacgccgcggatctcagcctcttctcgcagatgggctcgcagtatgaactgaaggacaaccctggggtgcaccccgccacctt

SEQ ID NO: 569319 - DNA, 120 bp, Artificial Sequence
  ENSG00000170549_5 (sequence is synthesized)
cgcagcccacacggcgccggcttattacccctacggccagttccaatacggggaccccgggcggcccaagaacgccacccgcgagagcaccagcacgctcaaggcctggctcaacgagca

SEQ ID NO: 569320 - DNA, 120 bp, Artificial Sequence
  ENSG00000170549_6 (sequence is synthesized)
ccgcaagaatccctaccccaccaagggcgagaagatcatgctggccatcatcaccaagatgaccctcacgcaggtctccacctggttcgccaacgcgcgccggcgcctcaagaaggagaa

SEQ ID NO: 569321 - DNA, 120 bp, Artificial Sequence
  ENSG00000170549_7 (sequence is synthesized)
caaggtgacatggggagcgcgcagcaaggaccaggaagatggagcgctcttcggcagcgacaccgagggcgacccggagaaggccgaggacgacgaggagatcgacctggaaagcatcga

SEQ ID NO: 569322 - DNA, 120 bp, Artificial Sequence
  ENSG00000170549_8 (sequence is synthesized)
gaggatgacgaggacaaggccgaggctccgcacgcgcccgcagccccttctgctcttgcccgggaccaaggctcgccgctggcagcagccgacgttctcaagccccaggactcgcccttg

SEQ ID NO: 569323 - DNA, 120 bp, Artificial Sequence
  ENSG00000170549_9 (sequence is synthesized)
ggcctggcaaaggaggccccagagccgggcagcacgcgcctgctgagccccggcgctgcagcgggcggcctgcagggtgcgccgcacggcaagcccaagatctggtcgctggcggagaca

SEQ ID NO: 569324 - DNA, 120 bp, Artificial Sequence
  ENSG00000170549_10 (sequence is synthesized)
ccccgacggtgcgcccaaggcttcgccaccaccacccgcgggccaccccggcgcgcacgggccctccgccggggcgccgctgcaacaccccgccttcctgcctagccacggactgtacac

SEQ ID NO: 569325 - DNA, 120 bp, Artificial Sequence
  ENSG00000170549_11 (sequence is synthesized)
ctgtacacctgccacatcggcaagttctccaactggaccaacagcgcattcctcgcacagggctccctgctcaacatgcgctccttcctgggcgttggcgctccccacgccgcgccccat

SEQ ID NO: 569326 - DNA, 120 bp, Artificial Sequence
  ENSG00000170549_12 (sequence is synthesized)
ggccctcaccttcctgcacctccaccaccgcagccgccggtcgctattgccccgggggcactcaatggagacaaggcctcggtccgcagcagccccacgctcccagagagagacctcgtc

SEQ ID NO: 569327 - DNA, 120 bp, Artificial Sequence
  ENSG00000170549_13 (sequence is synthesized)
cccaggccagattcgccggcacagcagttaaagtcgcccttccagccggtacgcgacaactctctggccccgcaggagggaacgccgcggatcctagcagccctcccgtccgcctgatta

SEQ ID NO: 569328 - DNA, 120 bp, Artificial Sequence
  ENSG00000170549_14 (sequence is synthesized)
agggtcttcttttacttttgcgggggggaggggggaggagttggggagggagggaatgtgggaggaattaagacaaatatttcagactggtgtaaaggacaaatatgacaacgacgtcaa

SEQ ID NO: 569329 - DNA, 120 bp, Artificial Sequence
  ENSG00000170549_15 (sequence is synthesized)
ggactcgcatccgtcgctttctgcagaaaggggcttcttcggtcccgagctcgcgtccaggtggccaggcctctgccggcggctccagtggctgcgattatcgggttcggtaaatgcccc

SEQ ID NO: 569330 - DNA, 120 bp, Artificial Sequence
  ENSG00000170549_16 (sequence is synthesized)
cacgtgcttgtgtctctttccccccttttctgtatatagagtggtttcagattgtaaatagcgcgtcagcgaacttgtctaaatcatatatttttgtctaataaactaaatgaaatgaca

SEQ ID NO: 569331 - DNA, 120 bp, Artificial Sequence
  ENSG00000170558_0 (sequence is synthesized)
gccgtttctccgcgccgctgttggtgctgccgctgcctcctcctcctccgccgccgccgccgccgccgccgcctcctccggctcttcgctcggcccctctccgcctccatgtgccggata

SEQ ID NO: 569332 - DNA, 120 bp, Artificial Sequence
  ENSG00000170558_1 (sequence is synthesized)
gcgggagcgctgcggaccctgctgccgctgctggcggccctgcttcaggcgtctgtagaggcttctggtgaaatcgcattatgcaagactggatttcctgaagatgtttacagtgcagtc

SEQ ID NO: 569333 - DNA, 120 bp, Artificial Sequence
  ENSG00000170558_2 (sequence is synthesized)
ttatcgaaggatgtgcatgaaggacagcctcttctcaatgtgaagtttagcaactgcaatggaaaaagaaaagtacaatatgagagcagtgagcctgcagattttaaggtggatgaagat

SEQ ID NO: 569334 - DNA, 120 bp, Artificial Sequence
  ENSG00000170558_3 (sequence is synthesized)
ggcatggtgtatgccgtgagaagctttccactctcttctgagcatgccaagttcctgatatatgcccaagacaaagagacccaggaaaagtggcaagtggcagtaaaattgagcctgaag

SEQ ID NO: 569335 - DNA, 120 bp, Artificial Sequence
  ENSG00000170558_4 (sequence is synthesized)
ccaaccttaactgaggagtcagtgaaggagtcagcagaagttgaagaaatagtgttcccaagacaattcagtaagcacagtggccacctacaaaggcagaagagagactgggtcatccct

SEQ ID NO: 569336 - DNA, 120 bp, Artificial Sequence
  ENSG00000170558_5 (sequence is synthesized)
ccaatcaacttgccagaaaactccaggggaccttttcctcaagagcttgtcaggatcaggtctgatagagataaaaacctttcactgcggtacagtgtaactgggccaggagctgaccag

SEQ ID NO: 569337 - DNA, 120 bp, Artificial Sequence
  ENSG00000170558_6 (sequence is synthesized)
cctccaactggtatcttcattatcaaccccatctcgggtcagctgtcggtgacaaagcccctggatcgcgagcagatagcccggtttcatttgagggcacatgcagtagatattaatgga

SEQ ID NO: 569338 - DNA, 120 bp, Artificial Sequence
  ENSG00000170558_7 (sequence is synthesized)
aatcaagtggagaaccccattgacattgtcatcaatgttattgacatgaatgacaacagacctgagttcttacaccaggtttggaatgggacagttcctgagggatcaaagcctggaaca

SEQ ID NO: 569339 - DNA, 120 bp, Artificial Sequence
  ENSG00000170558_8 (sequence is synthesized)
tatgtgatgaccgtaacagcaattgatgctgacgatcccaatgccctcaatgggatgttgaggtacagaatcgtgtctcaggctccaagcaccccttcacccaacatgtttacaatcaac

SEQ ID NO: 569340 - DNA, 120 bp, Artificial Sequence
  ENSG00000170558_9 (sequence is synthesized)
aatgagactggtgacatcatcacagtggcagctggacttgatcgagaaaaagtgcaacagtatacgttaataattcaagctacagacatggaaggcaatcccacatatggcctttcaaac

SEQ ID NO: 569341 - DNA, 120 bp, Artificial Sequence
  ENSG00000170558_10 (sequence is synthesized)
acagccacggccgtcatcacagtgacagatgtcaatgacaatcctccagagtttactgccatgacgttttatggtgaagttcctgagaacagggtagacatcatagtagctaatctaact

SEQ ID NO: 569342 - DNA, 120 bp, Artificial Sequence
  ENSG00000170558_11 (sequence is synthesized)
gtgaccgataaggatcaaccccatacaccagcctggaacgcagtgtacagaatcagtggcggagatcctactggacggttcgccatccagaccgacccaaacagcaacgacgggttagtc

SEQ ID NO: 569343 - DNA, 120 bp, Artificial Sequence
  ENSG00000170558_12 (sequence is synthesized)
accgtggtcaaaccaatcgactttgaaacaaataggatgtttgtccttactgttgctgcagaaaatcaagtgccattagccaagggaattcagcacccccctcagtcaactgcaaccgtg

SEQ ID NO: 569344 - DNA, 120 bp, Artificial Sequence
  ENSG00000170558_13 (sequence is synthesized)
tctgttacagttattgacgtaaatgaaaacccttattttgcccccaatcctaagatcattcgccaagaagaagggcttcatgccggtaccatgttgacaacattcactgctcaggaccca

SEQ ID NO: 569345 - DNA, 120 bp, Artificial Sequence
  ENSG00000170558_14 (sequence is synthesized)
gatcgatatatgcagcaaaatattagatacactaaattatctgatcctgccaattggctaaaaatagatcctgtgaatggacaaataactacaattgctgttttggaccgagaatcacca

SEQ ID NO: 569346 - DNA, 120 bp, Artificial Sequence
  ENSG00000170558_15 (sequence is synthesized)
aatgtgaaaaacaatatatataatgctactttccttgcttctgacaatggaattcctcctatgagtggaacaggaacgctgcagatctatttacttgatattaatgacaatgcccctcaa

SEQ ID NO: 569347 - DNA, 120 bp, Artificial Sequence
  ENSG00000170558_16 (sequence is synthesized)
tacagcacttgattatgacattgatccaaatgctggaccatttgcttttgatcttcctttatctccagtgactattaagagaaattggaccatcactcggcttaatggtgattttgctca

SEQ ID NO: 569348 - DNA, 120 bp, Artificial Sequence
  ENSG00000170558_17 (sequence is synthesized)
gcttaatttaaagataaaatttcttgaagctggtatctatgaagttcccatcataatcacagattcgggtaatcctcccaaatcaaatatttccatcctgcgtgtgaaggtttgccagtg

SEQ ID NO: 569349 - DNA, 120 bp, Artificial Sequence
  ENSG00000170558_18 (sequence is synthesized)
tgactccaacggggactgcacagatgtggacaggattgtgggtgcggggcttggcaccggtgccatcattgccatcctgctctgcatcatcatcctgcttatccttgtgctgatgtttgt

SEQ ID NO: 569350 - DNA, 120 bp, Artificial Sequence
  ENSG00000170558_19 (sequence is synthesized)
ggtatggatgaaacgccgggataaagaacgccaggccaaacaacttttaattgatccagaagatgatgtaagagataatattttaaaatatgatgaagaaggtggaggagaagaagacca

SEQ ID NO: 569351 - DNA, 120 bp, Artificial Sequence
  ENSG00000170558_20 (sequence is synthesized)
ggactatgacttgagccagctgcagcagcctgacactgtggagcctgatgccatcaagcctgtgggaatccgacgaatggatgaaagacccatccacgccgagccccagtatccggtccg

SEQ ID NO: 569352 - DNA, 120 bp, Artificial Sequence
  ENSG00000170558_21 (sequence is synthesized)
atctgcagccccacaccctggagacattggggacttcattaatgagggccttaaagcggctgacaatgaccccacagctccaccatatgactccctgttagtgtttgactatgaaggcag

SEQ ID NO: 569353 - DNA, 120 bp, Artificial Sequence
  ENSG00000170558_22 (sequence is synthesized)
tggctccactgctgggtccttgagctcccttaattcctcaagtagtggtggtgagcaggactatgattacctgaacgactgggggccacggttcaagaaacttgctgacatgtatggtgg

SEQ ID NO: 569354 - DNA, 120 bp, Artificial Sequence
  ENSG00000170558_23 (sequence is synthesized)
aggtgatgactgaacttcagggtgaacttggtttttggacaagtacaaacaatttcaactgatattcccaaaaagcattcagaagctaggctttaactttgtagtctactagcacagtgc

SEQ ID NO: 569355 - DNA, 120 bp, Artificial Sequence
  ENSG00000170558_24 (sequence is synthesized)
ttgctggaggctttggcataggctgcaaaccaatttgggctcagagggaatatcagtgatccatactgtttggaaaaacactgagctcagttacacttgaattttacagtacagaagcac

SEQ ID NO: 569356 - DNA, 120 bp, Artificial Sequence
  ENSG00000170558_25 (sequence is synthesized)
tgggattttatgtgcctttttgtacctttttcagattggaattagttttctgtttaaggctttaatggtactgatttctgaaacgataagtaaaagacaaaatattttgtggtgggagca

SEQ ID NO: 569357 - DNA, 120 bp, Artificial Sequence
  ENSG00000170558_26 (sequence is synthesized)
gtaagttaaaccatgatatgcttcaacacgcttttgttacattgcatttgcttttattaaaatacaaaattaaacaaacaaaaaaactcatggagcgattttattatcttgggggatgag

SEQ ID NO: 569358 - DNA, 120 bp, Artificial Sequence
  ENSG00000170558_27 (sequence is synthesized)
accatgagattggaaaatgtacattacttctagttttagactttagtttgtttttttttttttcactaaaatcttaaaacttactcagctggttgcaaataaagggagttttcatatcac

SEQ ID NO: 569359 - DNA, 120 bp, Artificial Sequence
  ENSG00000170558_28 (sequence is synthesized)
caatttgtagcaaaattgaattttttcataaactagaatgttagacacattttggtcttaatccatgtacacttttttatttctgtatttttccacttcactgtaaaaatagtatgtgta

SEQ ID NO: 569360 - DNA, 120 bp, Artificial Sequence
  ENSG00000170558_29 (sequence is synthesized)
cataatgttttattggcatagtctatggagaagtgcagaaacttcagaacatgtgtatgtattatttggactatggattcaggttttttgcatgtttatatctttcgttatggataaagt

SEQ ID NO: 569361 - DNA, 120 bp, Artificial Sequence
  ENSG00000170558_30 (sequence is synthesized)
tttttgcatgtttatatctttcgttatggataaagtatttacaaaacagtgacatttgattcaattgttgagctgtagttagaatactcaatttttaatttttttaatttttttattttt

SEQ ID NO: 569362 - DNA, 120 bp, Artificial Sequence
  ENSG00000170558_31 (sequence is synthesized)
tagcacaaatgttttacataatttgtaccaaaaaaaaaaaaaaaggaaaggaaagaaaggggtggcctgacactggtggcactactaagtgtgtgtttttttaaaaaaaaaatggaaaaa

SEQ ID NO: 569363 - DNA, 120 bp, Artificial Sequence
  ENSG00000170558_32 (sequence is synthesized)
aaaaagcttttaaactggagagacttctgacaacagctttgcctctgtattgtgtaccagaatataaatgatacacctctgaccccagcgttctgaataaaatgctaattttggatctgg

SEQ ID NO: 569364 - DNA, 120 bp, Artificial Sequence
  ENSG00000170558_33 (sequence is synthesized)
agattgctgcagggaatctgtgagctcccagcatggaaaatgagatcaccaagcttcttttctgtggacctgtgactcccagatgggcggagtaggggacagggttgggcaccagctgct

SEQ ID NO: 569365 - DNA, 120 bp, Artificial Sequence
  ENSG00000170558_34 (sequence is synthesized)
aagcagaaggaattatgggaaatggaaacttgatggcatgtttttattaaggcgttatgtgtgtatcttcactgagaaattaaagaaccaagcagaattgtatgttttcctttcagtgaa

SEQ ID NO: 569366 - DNA, 120 bp, Artificial Sequence
  ENSG00000170558_35 (sequence is synthesized)
aagaaacacaaatacacattgattccttgtagacacagatgcagaagtgaagaaaggatactactttcttttatcctgcacatcagagcgggtacaccgtcagctacaagggagaccctg

SEQ ID NO: 569367 - DNA, 120 bp, Artificial Sequence
  ENSG00000170558_36 (sequence is synthesized)
agtaagagtgttccactcagataggctagcatgagcaaggcagaagcctgaaacagttggatgtgttccagaaactgtaagcaattgaatacaatggaaatgaagttcatttacaagacc

SEQ ID NO: 569368 - DNA, 80 bp, Artificial Sequence
  ENSG00000170561_0 (sequence is synthesized)
actcccgactccagactcccccaaaccccgaccgccggcctggcgcgcggctgcgcccaccggctccgcgctgctgccgc

SEQ ID NO: 569369 - DNA, 120 bp, Artificial Sequence
  ENSG00000170561_1 (sequence is synthesized)
cgggccccgcgccccgcgcccaccatgtcctacccgcagggctacctgtaccaggcgcccggctcgctggcgctctactcgtgcccggcctacggcgcgtcggctttggcggctccgcgc

SEQ ID NO: 569370 - DNA, 120 bp, Artificial Sequence
  ENSG00000170561_2 (sequence is synthesized)
agcgaggagctggcgcgctcggcgtcgggctcggcgttcagcccctacccgggctcggcggccttcacggcgcaggcggccaccggcttcgggagcccgctgcagtactcggccgacgcc

SEQ ID NO: 569371 - DNA, 120 bp, Artificial Sequence
  ENSG00000170561_3 (sequence is synthesized)
gccgccgccgccgccggcttcccgtcctacatgggcgcaccctacgacgcgcacaccaccggcatgaccggcgccatcagctaccacccgtacggcagcgcggcctacccgtaccagctc

SEQ ID NO: 569372 - DNA, 120 bp, Artificial Sequence
  ENSG00000170561_4 (sequence is synthesized)
aacgaccccgcgtaccgcaagaacgccacgcgggacgccacggccactctcaaggcctggctcaacgagcaccgcaagaacccctaccccaccaagggcgagaagatcatgctagccatc

SEQ ID NO: 569373 - DNA, 120 bp, Artificial Sequence
  ENSG00000170561_5 (sequence is synthesized)
atcaccaagatgaccctcacccaggtctccacctggttcgccaacgcgcgccggcgcctcaagaaggagaacaagatgacctgggccccgagaaacaaaagcgaagatgaggacgaggac

SEQ ID NO: 569374 - DNA, 120 bp, Artificial Sequence
  ENSG00000170561_6 (sequence is synthesized)
gagggcgacgctaccagaagcaaggacgagagtcccgacaaggcgcaggagggcacggagacctcggcagaggacgaagggatcagcctgcacgtggactcgctcacggatcactcgtgc

SEQ ID NO: 569375 - DNA, 120 bp, Artificial Sequence
  ENSG00000170561_7 (sequence is synthesized)
tcggccgagtcggacggggagaagcttccgtgccgcgccggggaccccctgtgcgaatcgggctcggagtgcaaggacaagtatgacgacctggaggacgacgaggacgacgacgaggag

SEQ ID NO: 569376 - DNA, 120 bp, Artificial Sequence
  ENSG00000170561_8 (sequence is synthesized)
gacgacgaggacgacgacgaggagggcgagcggggcctggcgccgcccaagcccgtgacctcgtcgccgcttaccggcttggaggcgccgctgctgagccccccgcccgaggccgcgccc

SEQ ID NO: 569377 - DNA, 120 bp, Artificial Sequence
  ENSG00000170561_9 (sequence is synthesized)
ggcagccggacgtctccgggcgcgccgccccccgccagcaagcccaagctgtggtcgctggccgagatcgccacgtcggacctcaagcagccgagcctgggcccgggctgcgggccaccg

SEQ ID NO: 569378 - DNA, 120 bp, Artificial Sequence
  ENSG00000170561_10 (sequence is synthesized)
gggctgcccgcggccgccgcgccggcctcaaccggggcaccgccaggaggctcgccctaccctgcctcgccgctgctgggccgccccctctactacacgtcgcccttctacggcaactac

SEQ ID NO: 569379 - DNA, 120 bp, Artificial Sequence
  ENSG00000170561_11 (sequence is synthesized)
aggccctgcacaccgcgccaaaggcggccagcgacgcgggcaaggcgggcgcgcacccgctcgagtcccactaccggtccccgggcggcggctacgagcccaagaaagatgccagcgagg

SEQ ID NO: 569380 - DNA, 120 bp, Artificial Sequence
  ENSG00000170561_12 (sequence is synthesized)
gctgcaccgtggttggcgggggcgtccagccctacctatagaagggccgagcacagcaatgcaagtaagtgggcaccctggtgcttcccagaccctgtggagcctcccagcaccaacttg

SEQ ID NO: 569381 - DNA, 120 bp, Artificial Sequence
  ENSG00000170561_13 (sequence is synthesized)
cttaatgtgtttttcttgcttctggtcatggggttagaagacagagcatttcaatcttgtccagcttttctttccttaagggggaaactatattttctgttttatagattccctcttttt

SEQ ID NO: 569382 - DNA, 78 bp, Artificial Sequence
  ENSG00000170561_14 (sequence is synthesized)
ggggaaactatattttctgttttatagattccctctttttggcacaagttctatcactcctttacctagggaaggata

SEQ ID NO: 569383 - DNA, 120 bp, Artificial Sequence
  ENSG00000170561_15 (sequence is synthesized)
tgtgtatatatatattacacactactgttgttttcttttgaaacaatagattattaaaatctgggcatttatatgcaatttagagccatttttactatgctagacacataatagacacat

SEQ ID NO: 569384 - DNA, 120 bp, Artificial Sequence
  ENSG00000170561_16 (sequence is synthesized)
gctttgatgagcttgggctaccaaaacttggagtagcaaaaacctttatagatgatgtttgcaaaataagactgaagagacacgaggcgtactagtcttttatcagccctgtccaacctc

SEQ ID NO: 569385 - DNA, 120 bp, Artificial Sequence
  ENSG00000170561_17 (sequence is synthesized)
ccctccacccatgtccaagtggacaggactctgacattctcccggggctcacaacagtatctcaaaaaatatgttgctttgcaacgagtcagaattactaatcatagatcttgaagataa

SEQ ID NO: 569386 - DNA, 120 bp, Artificial Sequence
  ENSG00000170561_18 (sequence is synthesized)
gaaagatttggaaccacttcagatcaactcgtttttataatggtgttgttgtggaactgaaagattggggatgatttggttttttccttggtccacaggtaggtgtcacaattgctttga

SEQ ID NO: 569387 - DNA, 120 bp, Artificial Sequence
  ENSG00000170561_19 (sequence is synthesized)
aaaaaaaaaaaaaaaaaaagtcagcaggccattctctcttcccaagctcataaatttacagatacaacaaacagatgtctaaatccagaccacatcttgtgccactgtaaaagagaagga

SEQ ID NO: 569388 - DNA, 120 bp, Artificial Sequence
  ENSG00000170561_20 (sequence is synthesized)
tccacacagcactgtcagcccacagactctaacaattggaacagactattgttggacatatgtgaatttgttggcatagtatagtttccccgatgtatgtgtgacttttgaaaacaatct

SEQ ID NO: 569389 - DNA, 120 bp, Artificial Sequence
  ENSG00000170561_21 (sequence is synthesized)
gtttttctcaggatatcttgaattgatcacttcattgccacggtatatattctataggtgtgataggatttactgtaaagtttatttgtaaaagatgtacacagtagaaataaaacgtga

SEQ ID NO: 569390 - DNA, 120 bp, Artificial Sequence
  ENSG00000170561_22 (sequence is synthesized)
tggaagaacttgagtacttcagaagtggaaacaaatttgatatttatttttataatgatataaagcttctagtaatttatgcaagttgtattgcaatggaatctaaactttttgtaaata

SEQ ID NO: 569391 - DNA, 120 bp, Artificial Sequence
  ENSG00000170561_23 (sequence is synthesized)
aattctgcctggtttttatttgaacattgctggttatacaatctttgttggttgtttaacacgaattctttactaatttatatcttaaattgtaaataaaaacagactagtctacaataa

SEQ ID NO: 569392 - DNA, 120 bp, Artificial Sequence
  ENSG00000170561_24 (sequence is synthesized)
cacctttttaatgaaaacctgtgtgaaataaactctcctttctctcctgagcattgaaaaaaaaaaaaaaaggcagatggaagagaagtatataatcgggagaaacatgtgctgtagatg

SEQ ID NO: 569393 - DNA, 120 bp, Artificial Sequence
  ENSG00000170561_25 (sequence is synthesized)
atttctatacaggtattgcaaaaaaaccaaaaaacataagatttttgtgccctgagtgtgctaattacttgttagtgtaaatttttaaaacttggcaaaataaaatgatctgacacccta

SEQ ID NO: 569394 - DNA, 120 bp, Artificial Sequence
  ENSG00000170571_0 (sequence is synthesized)
cttttcttcagcgtcctacccgcggcactggctgcgagcgccgggccacctgcgagtgtgcgcagggactctggacacccgcggcggcgagctgagggagcagtctccacgaggacccag

SEQ ID NO: 569395 - DNA, 120 bp, Artificial Sequence
  ENSG00000170571_1 (sequence is synthesized)
ccaggcggaccctctggcgccatgcgcgccctccccggcctgctggaggccagggcgcgtacgccccggctgctcctcctccagtgccttctcgctgccgcgcgcccaagctcggcggac

SEQ ID NO: 569396 - DNA, 120 bp, Artificial Sequence
  ENSG00000170571_2 (sequence is synthesized)
gtgccccagattcgccttttacaagtccacctctcagagaagaaataatggcaaataacttttccttggagagtcataacatatcactgactgaacattctagtatgccagtagaaaaaa

SEQ ID NO: 569397 - DNA, 120 bp, Artificial Sequence
  ENSG00000170571_3 (sequence is synthesized)
atatcactttagaaaggccttctaatgtaaatctcacatgccagttcacaacatctggggatttgaatgcagtaaatgtgacttggaaaaaagatggtgaacaacttgagaataattatc

SEQ ID NO: 569398 - DNA, 120 bp, Artificial Sequence
  ENSG00000170571_4 (sequence is synthesized)
ttgtcagtgcaacaggaagcaccttgtatacccaatacaggttcaccatcattaatagcaaacaaatgggaagttattcttgtttctttcgagaggaaaaggaacaaaggggaacattta

SEQ ID NO: 569399 - DNA, 120 bp, Artificial Sequence
  ENSG00000170571_5 (sequence is synthesized)
atttcaaagtccctgaacttcatgggaaaaacaagccattgatctcttacgtaggggattctactgtcttgacatgtaaatgtcaaaattgttttcctttaaattggacctggtacagta

SEQ ID NO: 569400 - DNA, 120 bp, Artificial Sequence
  ENSG00000170571_6 (sequence is synthesized)
gtaatgggagtgtaaaggttcctgttggtgttcaaatgaataaatatgtgatcaatggaacatatgctaacgaaacaaagctgaagataacacaacttttggaggaagatggggaatctt

SEQ ID NO: 569401 - DNA, 120 bp, Artificial Sequence
  ENSG00000170571_7 (sequence is synthesized)
actggtgccgtgcactattccaattaggcgagagtgaagaacacattgagcttgtggtgctgagctatttggtgcccctcaaaccatttcttgtaatagtggctgaggtgattcttttag

SEQ ID NO: 569402 - DNA, 120 bp, Artificial Sequence
  ENSG00000170571_8 (sequence is synthesized)
tggccaccattctgctttgtgaaaagtacacacaaaagaaaaagaagcactcagatgaggggaaagaatttgagcagattgaacagctgaaatcagatgatagcaatggtatagaaaata

SEQ ID NO: 569403 - DNA, 120 bp, Artificial Sequence
  ENSG00000170571_9 (sequence is synthesized)
atgtccccaggcatagaaaaaatgagtctctgggccagtgaatacaaaacatcatgtcgagaatcattggaagatatacagagttcgtatttcagctttgtttatccttcctgttaagag

SEQ ID NO: 569404 - DNA, 120 bp, Artificial Sequence
  ENSG00000170571_10 (sequence is synthesized)
cctctgagtttttagttttaaaaggatgaaaagcttatgcaacatgctcagcaggagcttcatcaacgatatatgtcagatctaaaggtatattttcattctgtaattatgttacataaa

SEQ ID NO: 569405 - DNA, 120 bp, Artificial Sequence
  ENSG00000170571_11 (sequence is synthesized)
agcaatgtaaatcagaataaatatgttagaccagaataaaattaattatattctggtcttcaaaggacacacagaacagatatcagcagaatcacttaatacttcatagaacaaaaatca

SEQ ID NO: 569406 - DNA, 120 bp, Artificial Sequence
  ENSG00000170571_12 (sequence is synthesized)
ctcaaaacctgtttataaccaaagaattcatgaaaaagaaagcctttgccatttgtcttagaaagttattttttaaaaaaaaatcatacttactattagtatctatggaagtatatgtaa

SEQ ID NO: 569407 - DNA, 120 bp, Artificial Sequence
  ENSG00000170571_13 (sequence is synthesized)
caatttttatgtaaaggtcatctttctgtgatagtgaaaaaatatgtctttactaagttgaaatgaatactttctgcctttgctaatgatagttattctacaatctccacaagaaaaata

SEQ ID NO: 569408 - DNA, 120 bp, Artificial Sequence
  ENSG00000170571_14 (sequence is synthesized)
taccttttatccggaaatattggtttaaggcaaataaataaaactgtgcttgctctaaagctctgcactacaaaagcaaattttccagtctttattccactcataaccactgctttcccc

SEQ ID NO: 569409 - DNA, 120 bp, Artificial Sequence
  ENSG00000170571_15 (sequence is synthesized)
accaggctaaagtgcttcttagtcttaaatagggtttttaacttcataaggtacaccattgtttatgttttagggtgcaggtccatatagtcgtaatacttaaaacactgctacactgat

SEQ ID NO: 569410 - DNA, 120 bp, Artificial Sequence
  ENSG00000170571_16 (sequence is synthesized)
gcttttgtggctcatggtttcctggttctttgatttaacacctggcttcctggtatctatggctggttaaatatctaaacctgcattattagtgctttacaataataattcccttgactg

SEQ ID NO: 569411 - DNA, 120 bp, Artificial Sequence
  ENSG00000170571_17 (sequence is synthesized)
gtccagaaatactaaagcacttcttttttattgctgtgaatgccttagacttatcttccaaaataggatacttcgtttctattgcatatataactgaaatattttataaactcactgtaa

SEQ ID NO: 569412 - DNA, 120 bp, Artificial Sequence
  ENSG00000170571_18 (sequence is synthesized)
tcaaatcttataaaatctgaatcaacatgaaaagttgtcaatgcttgaatgaatactaaaatcataccacaagatactagataacataaatgaccatgaagtgtcccactgctcaaaggg

SEQ ID NO: 569413 - DNA, 120 bp, Artificial Sequence
  ENSG00000170571_19 (sequence is synthesized)
caacaactttaagaacagaagcaaagagtggtggtgtggaacccaagattcttggcgactagggaatttaaaggttggggaggaggaattcaatgatttgacaagaaatactttataaaa

SEQ ID NO: 569414 - DNA, 120 bp, Artificial Sequence
  ENSG00000170571_20 (sequence is synthesized)
atttgctccatgtattggctaagaaaaatataataaaattttggtagtgaaaattgtatcactaatgtttaccaatattactagtatgaataatacacataaggtagtgacttggaagct

SEQ ID NO: 569415 - DNA, 120 bp, Artificial Sequence
  ENSG00000170571_21 (sequence is synthesized)
gctcaatactttgttgctataacaaaatgcaatattttgttgtaaagcatcttaactacacatataagtttgctgaacttgaatacatcccggtaatggcaaacttcattttattcttgg

SEQ ID NO: 569416 - DNA, 120 bp, Artificial Sequence
  ENSG00000170571_22 (sequence is synthesized)
ttttcattttattctggtctcagggccatacatttattttagtttaattaattattattttgacaacattacttgggtaatatctatataatggtagataaccaatcagttagcttaatt

SEQ ID NO: 569417 - DNA, 120 bp, Artificial Sequence
  ENSG00000170571_23 (sequence is synthesized)
aatctaagctatttgaattcagggaaatattagtcaaatctgctgtttgactaaatacaattcaaagcagtgtatttgtgacttggaatatagaacacaaacaaatgtgtaacccatctg

SEQ ID NO: 569418 - DNA, 120 bp, Artificial Sequence
  ENSG00000170571_24 (sequence is synthesized)
cagtatgcattcttccattttaccaccactaaccattgaggctcatacaattttcaagcaacaagcattgcttcccaaaggtaaaataatcaggaatatttctatagtaaatggagtttt

SEQ ID NO: 569419 - DNA, 120 bp, Artificial Sequence
  ENSG00000170571_25 (sequence is synthesized)
taattggcaatactgtttatttttttctagcaaagacaatttatctcagtaaccttaaataggaaaagtactcaaaaattaaagttgacttttggctttttgtagtctctctggaggact

SEQ ID NO: 569420 - DNA, 120 bp, Artificial Sequence
  ENSG00000170571_26 (sequence is synthesized)
tccagaaaattaccactgttggattttaatctgcttccattaaccaatcttacagagatgataaatgaattaactaatattgaccaaatataaattgactgcaaataataagccgcataa

SEQ ID NO: 569421 - DNA, 120 bp, Artificial Sequence
  ENSG00000170571_27 (sequence is synthesized)
aagttgaagtaggaaaactactccaagtttatatattaggcaccttggggaattctcttagtctttccagctaacaaggattttcagcataataagtagatttaatgatggcataaaatt

SEQ ID NO: 569422 - DNA, 120 bp, Artificial Sequence
  ENSG00000170571_28 (sequence is synthesized)
cccagatactttcatatacattttttgccaaagtgtaaatcttctccttttgcagtctttttgttattatcccaacatctagctgctcaggccctaatttagaactcattctgatatttt

SEQ ID NO: 569423 - DNA, 120 bp, Artificial Sequence
  ENSG00000170571_29 (sequence is synthesized)
cttcttctgtattaattaatacttatgggtcatgaatccctgctcctttgacctttttaatagctcatgaatccatcccattgcctccccaactctgcccacacctgctgcaacactaat

SEQ ID NO: 569424 - DNA, 120 bp, Artificial Sequence
  ENSG00000170571_30 (sequence is synthesized)
gccttgattttcctacctcagtctccttttctattaatccctcttttgcgtggctgcctgagtccactttctcaaacacaaacctcactatgcaactttggaatctctgtaggctcacct

SEQ ID NO: 569425 - DNA, 120 bp, Artificial Sequence
  ENSG00000170571_31 (sequence is synthesized)
ttgccatttcttaatattgcattctccaaattgctaatctctatccagtctcttgaactagacttggcacatggagattccgctcagaaagtgctcttcacacttctacctgcttgacta

SEQ ID NO: 569426 - DNA, 120 bp, Artificial Sequence
  ENSG00000170571_32 (sequence is synthesized)
accccagattatctttcaagactttaatctgatcttgtgtcttagagaagcccccatacctggtagagcatgtaccatcttacatgcttaaataactccacatttatttgtgtttattac

SEQ ID NO: 569427 - DNA, 120 bp, Artificial Sequence
  ENSG00000170571_33 (sequence is synthesized)
tctgtgttataaatatacatttgttggtctctctcttggattattttgtttctttgtcctgtaactaccactgaaagggtgcaatacagctttcttgaaatgtgtattgaacggatgaat

SEQ ID NO: 569428 - DNA, 120 bp, Artificial Sequence
  ENSG00000170571_34 (sequence is synthesized)
gaacggatgaatgtataaataaaaattaaattttgtaaatttctgcttattcttagaaaaagaatctaaattgtgacaaatcagaattgaaaaaagtattctaataaagaaaaacaagct

SEQ ID NO: 569429 - DNA, 120 bp, Artificial Sequence
  ENSG00000170571_35 (sequence is synthesized)
agaaaacaaatagcaacccaaactggcccgtcagccattttatcttctctgttccctggtgcccagtgctatctatttttttttttaattctctttattaaggtctgcctgtcgctcttc

SEQ ID NO: 569430 - DNA, 120 bp, Artificial Sequence
  ENSG00000170571_36 (sequence is synthesized)
tttcatcttctctctctgcctcttcatatctttccattttctggctctctcatctgattccttggtatcttcagtttatttatgttttgtaaagaaactataatagtagaataaaaatgg

SEQ ID NO: 569431 - DNA, 120 bp, Artificial Sequence
  ENSG00000170571_37 (sequence is synthesized)
tcatgaattcatactgatattgaaattcagtcaaaattcagaactactggatgcttatttaaattctctgtcttgtacctatgtctatatccagtccttacaggttctgaagaagactag

SEQ ID NO: 569432 - DNA, 120 bp, Artificial Sequence
  ENSG00000170571_38 (sequence is synthesized)
gaatggttagaatataatatatcactcaaatccatgttacacacaaaacattctctagtagttattagatccataaaacttaataactactaacaacatgattactcaaaattattgaaa

SEQ ID NO: 569433 - DNA, 120 bp, Artificial Sequence
  ENSG00000170571_39 (sequence is synthesized)
caggcattccattctcacccatgagtgtgtgtttgtatttacagttgtgctgtttttacactgtcagagcatacggcacatgttatagggtactctctaccctatattctgctcagtata

SEQ ID NO: 569434 - DNA, 120 bp, Artificial Sequence
  ENSG00000170571_40 (sequence is synthesized)
gagcttaaggagataactatcacagctttaggttttttttaattgtgttaatgttgaatcaaaacttttctttaggtgtgcatataaaagggaataagaaagggaaccaactatgttgat

SEQ ID NO: 569435 - DNA, 120 bp, Artificial Sequence
  ENSG00000170571_41 (sequence is synthesized)
agaggaataattcttcaaatgaatgttacattaagaaattgtcaatgaaacactgctgttaataatataaaaggttttatgtgttagattcctctgaatataactttcacattttgtcct

SEQ ID NO: 569436 - DNA, 120 bp, Artificial Sequence
  ENSG00000170577_0 (sequence is synthesized)
aagaaagctgagagccagctagacgggagggagaacgagtgagaagcgagcgagggaacggcgggcgggcgcggagcatgcggagcggcgccccgggcggcccccgggcttgggcgaggg

SEQ ID NO: 569437 - DNA, 80 bp, Artificial Sequence
  ENSG00000170577_1 (sequence is synthesized)
cttgggccaggcgcgcgggccgttggggttcggagcttcgtgggacccgcggccggcgcggggacgtacggcagtgactc

SEQ ID NO: 569438 - DNA, 120 bp, Artificial Sequence
  ENSG00000170577_2 (sequence is synthesized)
cccggcgaggaagctcccatgcgggaccgcgcggcccggtgagggcgcgcgcgggcgggcggggacgcagccggcaccatgtccatgctgcccaccttcggcttcacgcaggagcaagtg

SEQ ID NO: 569439 - DNA, 120 bp, Artificial Sequence
  ENSG00000170577_3 (sequence is synthesized)
ttcggcttcacgcaggagcaagtggcgtgcgtgtgcgaggtgctgcagcagggcggcaacatcgagcggctgggccgcttcctgtggtcgctgcccgcctgcgagcaccttcacaagaat

SEQ ID NO: 569440 - DNA, 120 bp, Artificial Sequence
  ENSG00000170577_4 (sequence is synthesized)
gaaagcgtgctcaaggccaaggccgtggtggccttccaccgcggcaacttccgcgagctctacaagatcctggagagccaccagttctcgccgcacaaccacgccaagctgcagcagctg

SEQ ID NO: 569441 - DNA, 120 bp, Artificial Sequence
  ENSG00000170577_5 (sequence is synthesized)
tggctcaaggcacactacatcgaggcggagaagctgcgcggccgacccctgggcgccgtgggcaaataccgcgtgcgccgcaaattcccgctgccgcgctccatctgggacggcgaggag

SEQ ID NO: 569442 - DNA, 120 bp, Artificial Sequence
  ENSG00000170577_6 (sequence is synthesized)
accagctactgcttcaaggaaaagagtcgcagcgtgctgcgcgagtggtacgcgcacaacccctacccttcaccccgcgagaagcgtgagctggcggaggccacgggcctcaccaccaca

SEQ ID NO: 569443 - DNA, 120 bp, Artificial Sequence
  ENSG00000170577_7 (sequence is synthesized)
caggtcagcaactggttcaagaaccggcggcagcgcgaccgggcggccgaggccaaggaaagggagaacaacgagaactccaattctaacagccacaacccgctgaatggcagcggcaag

SEQ ID NO: 569444 - DNA, 120 bp, Artificial Sequence
  ENSG00000170577_8 (sequence is synthesized)
tcggtgttaggcagctcggaggatgagaagactccatcggggacgccagaccactcatcatccagccccgcactgctcctcagcccgccgccccctgggctgccgtccctgcacagcctg

SEQ ID NO: 569445 - DNA, 120 bp, Artificial Sequence
  ENSG00000170577_9 (sequence is synthesized)
gaggtggagcggacccactgcaacaccaccatggcctgcaggactccatcctcaaccccatgtcagccaacctcgtggacctgggctcctagaacccatttgccttgatgagcttgcctt

SEQ ID NO: 569446 - DNA, 120 bp, Artificial Sequence
  ENSG00000170577_10 (sequence is synthesized)
ttgtgacttgacactggggacgtggagtggcggtgtccaggggcgccccgcccctgcggccccaccaggtactgaaagacccgcaggctgagcgggtagaacagccgggtagggcagata

SEQ ID NO: 569447 - DNA, 120 bp, Artificial Sequence
  ENSG00000170577_11 (sequence is synthesized)
gctgtctatgttggttcttgtttgggatttattttcaacaagttacttttaggatccttttggggctggagactgagtcttgaaccacagaagggaataaattatacaccactgtcattc

SEQ ID NO: 569448 - DNA, 120 bp, Artificial Sequence
  ENSG00000170577_12 (sequence is synthesized)
tctctctccctctgtctcttccttttaccctctcttgtcttgccttttccccctttcctcttcctttcccttccttctcttttcttttttctgctttctgtctttctccctctccttgta

SEQ ID NO: 569449 - DNA, 120 bp, Artificial Sequence
  ENSG00000170577_13 (sequence is synthesized)
ttgctttccttctagatttctagcttgccaccgttcattctctccttctgtctctccctttctctctccttctctgtttctcctctcttctctcctgccagtctcttgtactctgtgtcc

SEQ ID NO: 569450 - DNA, 120 bp, Artificial Sequence
  ENSG00000170577_14 (sequence is synthesized)
tggtccctccgtatgtacccctgtctttctcctcctgactggtggtctatctgcccctacctctggccctcgctttaccggagtagggggtgggagagggaagaggagagaaaatacagg

SEQ ID NO: 569451 - DNA, 120 bp, Artificial Sequence
  ENSG00000170577_15 (sequence is synthesized)
gactttgaacctaggccatctcctgaggccttttccctcgcccatgtgggtcagtgggagctgcaggtgtcagcttttcgtctagtaacttaagtgagagagaaagggcagcgccacaga

SEQ ID NO: 569452 - DNA, 120 bp, Artificial Sequence
  ENSG00000170577_16 (sequence is synthesized)
agcccctaaacgccgcctcgtcatacgcccctcctccttctctcttggcgaggccccgccacaccgcgctcttcctcccgggactgtgactacagcgctcccggctgagcgcgccccccg

SEQ ID NO: 569453 - DNA, 120 bp, Artificial Sequence
  ENSG00000170577_17 (sequence is synthesized)
agccgccgacttgccgtctccccgtaatgccctcatgtgaatgttcttcgggaaatatttctgcttttattttataataaaattagaaatcataaatatataaatggttatatgccacaa

SEQ ID NO: 569454 - DNA, 120 bp, Artificial Sequence
  ENSG00000170579_0 (sequence is synthesized)
acttagaatcggcaaatcatagagagaagctaaatgctctcagctgcactataccaaatcaaagctgagatgaataatgaacttaattttccataaagacattctgtttggcattccagc

SEQ ID NO: 569455 - DNA, 120 bp, Artificial Sequence
  ENSG00000170579_1 (sequence is synthesized)
taataaggttccacaagatgaatggacagggtacaccccacgaggtaaagatgatgaaattccatgccgaagaatgcggagtggcagttatatcaaggccatgggggatgaagacagtgg

SEQ ID NO: 569456 - DNA, 120 bp, Artificial Sequence
  ENSG00000170579_2 (sequence is synthesized)
agactcagacacgagtcctaagccttctccaaaagttgctgcgcggagagaaagctatctcaaggctactcagccatcccttacagaactcaccacactcaaaatctccaatgaacactc

SEQ ID NO: 569457 - DNA, 120 bp, Artificial Sequence
  ENSG00000170579_3 (sequence is synthesized)
acccaaactccagatccggagtcatagttacctgagggcagtgagtgaagtctccatcaaccggagcctggacagcctggaccctgcaggcttgctcacatcaccaaagttccgctccag

SEQ ID NO: 569458 - DNA, 120 bp, Artificial Sequence
  ENSG00000170579_4 (sequence is synthesized)
gaatgagagctacatgcgagccatgagcaccatcagccaggtgagcgagatggaagtgaacgggcagttcgagtccgtgtgcgagtccgtgttcagcgagctggagtcgcaggccgtgga

SEQ ID NO: 569459 - DNA, 120 bp, Artificial Sequence
  ENSG00000170579_5 (sequence is synthesized)
agcgctggacctgcccatgcccggctgcttccgcatgcggagccacagctatgtgcgggccattgagaaaggctgctcccaggacgacgagtgcgtgtccctgaggtcgtcctcgccgcc

SEQ ID NO: 569460 - DNA, 120 bp, Artificial Sequence
  ENSG00000170579_6 (sequence is synthesized)
gcgcaccaccaccaccgttaggaccatccagagcagcacgggtgtcataaaactgagttctgcagttgaagtgtcatcttgcattacaacatataagaagacaccacctccagtcccacc

SEQ ID NO: 569461 - DNA, 120 bp, Artificial Sequence
  ENSG00000170579_7 (sequence is synthesized)
cagaactaccacgaaacctttcatttctatcacagcccagagtagcacagagtcagcccaggatgcctacatggacggacagggccagcgaggagatattatcagccagtctggactcag

SEQ ID NO: 569462 - DNA, 120 bp, Artificial Sequence
  ENSG00000170579_8 (sequence is synthesized)
caactccaccgagagcctggacagtatgaaggctctgacagccgccatcgaagctgcaaacgcccagatccatggccctgccagtcaacacatgggcaataacactgccaccgtcaccac

SEQ ID NO: 569463 - DNA, 120 bp, Artificial Sequence
  ENSG00000170579_9 (sequence is synthesized)
cacgactaccatagccaccgtcaccacggaggacaggaagaaggaccactttaagaaaaatcgatgcctgtctatcgggatacaggtggatgatgctgaagaacctgacaaaacagggga

SEQ ID NO: 569464 - DNA, 120 bp, Artificial Sequence
  ENSG00000170579_10 (sequence is synthesized)
ataaagcacccagtaagttccagtccgtgggagtgcaagtagaagaagagaagtgcttccgcaggttcactcgatccaacagtgtgacgacagcagtacaggccgacctggacttccatg

SEQ ID NO: 569465 - DNA, 120 bp, Artificial Sequence
  ENSG00000170579_11 (sequence is synthesized)
ataatctggaaaattctctggaatctatagaggacaattcgtgtcctggccccatggccagacagttctcccgcgatgccagcacctccacagtcagcattcagggctcaggaaaccatt

SEQ ID NO: 569466 - DNA, 120 bp, Artificial Sequence
  ENSG00000170579_12 (sequence is synthesized)
accatgcctgtgccgccgatgatgactttgacacggattttgacccctctattctgcctcctccggacccctggattgactctatcactgaagaccctctggaggccgtgcaaaggtcag

SEQ ID NO: 569467 - DNA, 120 bp, Artificial Sequence
  ENSG00000170579_13 (sequence is synthesized)
tgtgccaccgggatggccactggttcctgaagcttctccaggcagagcgagaccgcatggaggggtggtgtcaacagatggagcgggaagaacgggaaaacaacctgcccgaagacattc

SEQ ID NO: 569468 - DNA, 120 bp, Artificial Sequence
  ENSG00000170579_14 (sequence is synthesized)
taggaaaaatccgaaccgcagtgggcagtgcccaacttctcatggcccagaaattctaccagttcagagaactgtgtgaagaaaacctgaatcctaatgctcatccaagacccacctccc

SEQ ID NO: 569469 - DNA, 120 bp, Artificial Sequence
  ENSG00000170579_15 (sequence is synthesized)
aggatttggcggggttttgggacatgctgcagttgtccatagaaaatattagtatgaaatttgatgaacttcatcagttaaaggccaataattggaaacagatggatcctcttgacaaga

SEQ ID NO: 569470 - DNA, 120 bp, Artificial Sequence
  ENSG00000170579_16 (sequence is synthesized)
aggagagaagggcccctcctccagtgccaaagaagccggcgaagggccccgcgccgctgatccgggagcgctcgctggagagctcgcagcgccaggaggcccgcaagcgcctgatggccg

SEQ ID NO: 569471 - DNA, 120 bp, Artificial Sequence
  ENSG00000170579_17 (sequence is synthesized)
ccaagcgcgccgcgtccgtccgccagaactcggccaccgagagcgccgagagcatcgagatctacatccccgaggcgcagacccggctctgagcgccccgcagcccggccgccgccgcca

SEQ ID NO: 569472 - DNA, 120 bp, Artificial Sequence
  ENSG00000170579_18 (sequence is synthesized)
agcatctgtcccctcctcccccggccgctcctctgccggctgcctctccccctccgagcccgtccgctcccgagctcggtgacttccactgtcgcggtgtagttgtccacctcgcaggag

SEQ ID NO: 569473 - DNA, 120 bp, Artificial Sequence
  ENSG00000170579_19 (sequence is synthesized)
ccgccccccgggcccccctcagccccccacttcccgtacccgtttgcccatctccttcttcaccgagcttcgccccctgtcctgatgccgtcgccctgcctcatactgagatccaaccct

SEQ ID NO: 569474 - DNA, 120 bp, Artificial Sequence
  ENSG00000170579_20 (sequence is synthesized)
ggtagaagtggagagagagagacagagggagcgagagagagagcaagacagaccgagaaggaaagcactcccagagatgaaattttaggaaagcaaaatgatcgacctttttaaggctga

SEQ ID NO: 569475 - DNA, 120 bp, Artificial Sequence
  ENSG00000170579_21 (sequence is synthesized)
tcgagctagtctgttcagcaatataaaaccatagggtatttcagaaatccagtatcacagggtgatcctttgggacttaccgtcttccacgtgaaagaaactaggcctccgattcccttt

SEQ ID NO: 569476 - DNA, 120 bp, Artificial Sequence
  ENSG00000170579_22 (sequence is synthesized)
caacctcagaaatcacaccatctcactggaatccatgagggacacagagagaggggaccaagcctggcctgggggtgggggacctggatgtgtagcaaggatgggagaagcgaaatctgc

SEQ ID NO: 569477 - DNA, 120 bp, Artificial Sequence
  ENSG00000170579_23 (sequence is synthesized)
aggtgctgggggcacctgcacactcacagctgcacaaactgcctcactgttacttcatcaatcacagcttcaaatgtctcaatcagcagaagattgtaaattcgatctttcagggaaatt

SEQ ID NO: 569478 - DNA, 120 bp, Artificial Sequence
  ENSG00000170579_24 (sequence is synthesized)
aatctattctgaaaggcaataacatgaagcaaggcaaaggaggcactgatggtttagtatactacataagggatttttttgttctattattaagaaaatctagacctgaaatgttttctc

SEQ ID NO: 569479 - DNA, 120 bp, Artificial Sequence
  ENSG00000170579_25 (sequence is synthesized)
aactcttattgtactgtgtatatttatattgttgtcgtggcggctgtttttaaagggaaagtgttggttctattaatttgttaagtgtccatccaggtgggcctacctgattccacatat

SEQ ID NO: 569480 - DNA, 120 bp, Artificial Sequence
  ENSG00000170579_26 (sequence is synthesized)
ataagtacatatctgcttataaagcgctgtaaatggcagcaaggctgtttttggagaagagtttgggttttcctaccatccctttgaatgctacacatccgtctattttaacccaagtag

SEQ ID NO: 569481 - DNA, 120 bp, Artificial Sequence
  ENSG00000170579_27 (sequence is synthesized)
ttcgtatttcagatatattttctcctttcatctcctctcactactgcagagtccagtaatacctagcataggattctgtcctgtgtcaaatggctaaaataaatttttgccccaatagac

SEQ ID NO: 569482 - DNA, 120 bp, Artificial Sequence
  ENSG00000170579_28 (sequence is synthesized)
atgctgcctcattcaaaagagctgccgctgtcatcttgaggttccaggtagtgagagaagaaactcgacctgccagggtcaacagccatgaagaggtggggggagtcatgattcataaac

SEQ ID NO: 569483 - DNA, 120 bp, Artificial Sequence
  ENSG00000170579_29 (sequence is synthesized)
actgaaagaagtcaaggcttttggcagagagtgttgatttagatttttagtcttgattgatgggcagtatgcatcggtgtctagctgaagttgtctttaaatgcccttactcgtcacagt

SEQ ID NO: 569484 - DNA, 120 bp, Artificial Sequence
  ENSG00000170579_30 (sequence is synthesized)
ttaaacacttaggatgtggcaatcttaagtatcaatggcattttatgtccagctaacatcctaaagcattagaaattaaaaacgaaagacttttaaaaacatacatcaaacatgcttgca

SEQ ID NO: 569485 - DNA, 120 bp, Artificial Sequence
  ENSG00000170579_31 (sequence is synthesized)
ccagagaagctttttaaaataatacactctcatagccaggtgctaatttaattttacttatgaaattaagagaggtgatgggttctagcaacagatattttcacggacatattctaaaac

SEQ ID NO: 569486 - DNA, 120 bp, Artificial Sequence
  ENSG00000170579_32 (sequence is synthesized)
cactagagaattcgctacctctcagagccatcgatgctttgagctacctttataaacagggcacaaatgtttactgctgtggtttacaagaaaagggctactcacttattttgaaaccaa

SEQ ID NO: 569487 - DNA, 120 bp, Artificial Sequence
  ENSG00000170579_33 (sequence is synthesized)
cgaaccaacttttaactagggtgaacaaagcactcaaagtgctttgtgaaattggagcatacagagattttgagcttcaagtatttgctagttttaaaaagaatacaccttttctttacc

SEQ ID NO: 569488 - DNA, 120 bp, Artificial Sequence
  ENSG00000170579_34 (sequence is synthesized)
ttgtagcagcaattaaaagtcacacaaagcttgcatcgagtagggccaactgccacttgggtagcctatggtcacattcaatactgagaatgacttggaactcacagattaatatgaaag

SEQ ID NO: 569489 - DNA, 120 bp, Artificial Sequence
  ENSG00000170579_35 (sequence is synthesized)
aagcagcgttcatcccaagacccatgctcacaattacagctccgtgccctgaggtagagttgagatttggattaagaaatagatttctaatacgactcaagatcatcctacaatattttc

SEQ ID NO: 569490 - DNA, 120 bp, Artificial Sequence
  ENSG00000170579_36 (sequence is synthesized)
tttggaaactaatttagcccatgatattttaaagagagacaagagaaggcctatttatcttgtctaagtgaacggcatttgtatattcataagctatttttggtaagaattttaaatctt

SEQ ID NO: 569491 - DNA, 120 bp, Artificial Sequence
  ENSG00000170579_37 (sequence is synthesized)
ttagctcaaggcctacagggcatcatgatctttgccttccttgaaaatacaatttaaattgtacaaacactttataaaaagctaattattggtgttagaacatgaccccacacaatgctg

SEQ ID NO: 569492 - DNA, 120 bp, Artificial Sequence
  ENSG00000170579_38 (sequence is synthesized)
cttgacccctgaaactgacattcatgagcataacctttgttacattgttctttttgatgtaatttgtagaaatgttttttagttcgtaatggaaaatgtatgtaccctgaaaaattactt

SEQ ID NO: 569493 - DNA, 120 bp, Artificial Sequence
  ENSG00000170579_39 (sequence is synthesized)
attttgtttaactttggtataaaggtgttgggcattttcttggggagggggggattacaaaagaagtttgtctcccacatcaaaaaacgttcaaagaaattaagtatttattatattttt

SEQ ID NO: 569494 - DNA, 120 bp, Artificial Sequence
  ENSG00000170579_40 (sequence is synthesized)
tgcagatgtttccatacaattcacataacctttttgtaaagagagatgaagaaatggattaaagatttttaatatttgaaatggtaaatagaactaatttattgtaatatatttctgtta

SEQ ID NO: 569495 - DNA, 120 bp, Artificial Sequence
  ENSG00000170579_41 (sequence is synthesized)
tttatagatgtttccttaatgttttactgtgcattaccactttcatttaagccttatccttgtgaatttaccatttcttttttaaaacatgtctagatgcatattttaaataactggaat

SEQ ID NO: 569496 - DNA, 120 bp, Artificial Sequence
  ENSG00000170579_42 (sequence is synthesized)
gtaaatcactagcatatctgaattcccaaatgtaatttttaaaaattattttggtttggaaaaaaaagattcatttgaaagccttcagatggaggggtgggaacatttttatggctttat

SEQ ID NO: 569497 - DNA, 120 bp, Artificial Sequence
  ENSG00000170579_43 (sequence is synthesized)
gaattggaatttcataggcttatttacctagattgtgtgtgaacaaaaaaatattgtaaatagatgaatgtttcccataatgtaaaaagaagaaattaataaaataattaatgcactgct

SEQ ID NO: 569498 - DNA, 120 bp, Artificial Sequence
  ENSG00000170579_44 (sequence is synthesized)
cctcctatttcatttgtatgtgaccaggagactaaaacatgcattatgctcccaacaggctaaatctcttctgggatccactgaatgccactagagggtctgctcgagagaattcctgat

SEQ ID NO: 569499 - DNA, 120 bp, Artificial Sequence
  ENSG00000170579_45 (sequence is synthesized)
caaaatcaaagttctcctctggactcttccaaaacatttagacatttactggcttccaaaagaaggaactcatggtgatattgaccatttttaaagaaaataaaagcatgaagccgagca

SEQ ID NO: 569500 - DNA, 120 bp, Artificial Sequence
  ENSG00000170579_46 (sequence is synthesized)
aaagaaaataaaagcatgaagccgagcatggtagtacacacttggaatcccacatatttggaagactgaggctagaagattgcttgaggccagaagttcgagaccagcctgagcaacatg

SEQ ID NO: 569501 - DNA, 120 bp, Artificial Sequence
  ENSG00000170579_47 (sequence is synthesized)
gctgtttagaactattgtaccgctgccagtgactgtctgtattagggttgggagcaggaacatggatttgaagacattaaaactgtttaattctcagttgagatgtggttggctcttata

SEQ ID NO: 569502 - DNA, 120 bp, Artificial Sequence
  ENSG00000170579_48 (sequence is synthesized)
ggagcgagaggcaaagcagcggtgagcaagccagcccttccagcaggacgaatatgtcacctttccatgacacagctcctgccatctgaaacagaacccctcagacatcccagacacagt

SEQ ID NO: 569503 - DNA, 120 bp, Artificial Sequence
  ENSG00000170579_49 (sequence is synthesized)
ctctcctaaatgggctaagaaaaggcatcactagtattccatccatctatcatgtcctatatgatactcacaccataacgacttctcagcacccctgcctctaagactccacagttacca

SEQ ID NO: 569504 - DNA, 120 bp, Artificial Sequence
  ENSG00000170579_50 (sequence is synthesized)
caagtcctgccgtcactgaccattacacattcttcctcttgaattaccttgtcactaacgagaaaaggctttgggtacctggcagacccaggttgaacttgaccaggcttttgctaagtc

SEQ ID NO: 569505 - DNA, 120 bp, Artificial Sequence
  ENSG00000170579_51 (sequence is synthesized)
tattaatttcattgtaatgacaatgtttacatagtaatcatttgggatattatctgtaatatgtttcaggcatatttttaaagaaaaacctgtctttgtgaattggaaaatgggaatgtg

SEQ ID NO: 569506 - DNA, 120 bp, Artificial Sequence
  ENSG00000170579_52 (sequence is synthesized)
gctttttttgttaattaaactttaagttaaaccattttagtcactggaaggaactgcctccattttgctttttaaactaaaataaatgacatcttcagtgcatgaatccatagaacaaga

SEQ ID NO: 569507 - DNA, 120 bp, Artificial Sequence
  ENSG00000170579_53 (sequence is synthesized)
agcccagccttgcagccccagcccgccgcgtcccggcgctcagcctccgctccagaggcgagcgctgcgcttcgggcgccgcaatctccaggacacggcctcgcggacaccttccgcctc

SEQ ID NO: 569508 - DNA, 120 bp, Artificial Sequence
  ENSG00000170579_54 (sequence is synthesized)
ggggaatcggcagcataggcggcgcgaacggccgccgccgcctcggctcctctctcgagtccttcccgtcacctcgctgagagccggtcctggtcgcggggacatctctctccttcctcc

SEQ ID NO: 569509 - DNA, 120 bp, Artificial Sequence
  ENSG00000170579_55 (sequence is synthesized)
gaggctcgtgggaccaacggacggacgcagccagcgagggccggactgcgggacgcggccagagcagttgaacatcagatacccagagtgacatcaggttaaaaaaaagcctgcaatttg

SEQ ID NO: 569510 - DNA, 120 bp, Artificial Sequence
  ENSG00000170579_56 (sequence is synthesized)
gatcttttcctgactcggaagcaaggaaaatggacaattgataatcaaaggctaaatctcttctgggatccactgaatgccactagagggtctgctcgagagaattcctgattgaatgac

SEQ ID NO: 569511 - DNA, 120 bp, Artificial Sequence
  ENSG00000170579_57 (sequence is synthesized)
aacggcgctaagaacaatccctgcccaagacgggtctggagcctgacttccgggtgtccatgaccctggcggctgcttccggtccgccatgaaagggctatcaggcagccgcagccatca

SEQ ID NO: 569512 - DNA, 120 bp, Artificial Sequence
  ENSG00000170579_58 (sequence is synthesized)
ccacggggtcacctgcgactcggcctgtgactcgctgtcgcaccactccgaccgcaagccctacctgctgagcccagtggagcaccaccccgcagaccacccatactacacccagcggaa

SEQ ID NO: 569513 - DNA, 120 bp, Artificial Sequence
  ENSG00000170579_59 (sequence is synthesized)
ctccttccaggctgagtgcgtgggccccttcagcgacccgctggccagcagcaccttcccccgcaggcactacacctcgcagcaagagctgaaggacgagtgtgccctggtgccccgcac

SEQ ID NO: 569514 - DNA, 120 bp, Artificial Sequence
  ENSG00000170579_60 (sequence is synthesized)
cctggccaccaaggcgaaccgcatccccgccaacctgctggaccagttcgagcggcagctgccactcagccgcgatggctatcacaccctgcagtacaagcgcacggccgtggagcaccg

SEQ ID NO: 569515 - DNA, 120 bp, Artificial Sequence
  ENSG00000170579_61 (sequence is synthesized)
cagcgacagccccggccgcatccgccacctggtgcactcggtccagaagctcttcaccaagtcgcactccctggaggggccgtccaagggcagcgtcaacgggggcaaggccagccctga

SEQ ID NO: 569516 - DNA, 120 bp, Artificial Sequence
  ENSG00000170579_62 (sequence is synthesized)
cgaggcgcaggcggcgcgctatggcaaacgcagcaagagcaaggagcggcgcgcggagcccaaggcccggcccagcacctccccgggctggtggagctcggacgacaacctggatggtga

SEQ ID NO: 569517 - DNA, 120 bp, Artificial Sequence
  ENSG00000170579_63 (sequence is synthesized)
catgtgcatctaccacgccccctcgggcgtgatgaccatgggcaggtgccccgaccgctcggcctcacagtacttcctggaggcctacaacaccatcagcgagcaggcggtgaaggcctc

SEQ ID NO: 569518 - DNA, 120 bp, Artificial Sequence
  ENSG00000170579_64 (sequence is synthesized)
ccggagcaacaacgacgtcaagtgctccacctgcgccaacctgccggtcagcctggacaccccgctgctgaagaagagcgcctggtcctccacgctcaccgtgagccgggcccgggaggt

SEQ ID NO: 569519 - DNA, 120 bp, Artificial Sequence
  ENSG00000170579_65 (sequence is synthesized)
gagaatagtctgagagggagagattggaaggtcgtttttaagcttgagaatggtaatagacatccaggtggagatgactaggcggcagatgagtctggagttcagggcagctctccatcg

SEQ ID NO: 569520 - DNA, 120 bp, Artificial Sequence
  ENSG00000170579_66 (sequence is synthesized)
gatggtgacagaaggaaaaaaaagaacaaagccctgccgggtgccccagtgggagaattggtcaccatgagaagggaccacaaactggcagctgaaacaacagaaattgatgtcctgaca

SEQ ID NO: 569521 - DNA, 120 bp, Artificial Sequence
  ENSG00000170579_67 (sequence is synthesized)
gttctggaggctgaagtccgagatcaaggtgtaggcagattaagaaaaatgattaagatcctgtgtgctttgtcttaggattttctgattatttttttctctttcaaaagactgcaaatt

SEQ ID NO: 569522 - DNA, 120 bp, Artificial Sequence
  ENSG00000170579_68 (sequence is synthesized)
ggagaagtttcagaagcttttccattccgtgaggatcttttattttcttttatctgtccccaagagcctctttttttcttcttcccattatttctgaccagataggctctctgtgcctgt

SEQ ID NO: 569523 - DNA, 120 bp, Artificial Sequence
  ENSG00000170579_69 (sequence is synthesized)
aagaaacctctaccacaagttgcagtttcatgttcccggggagcatttcagtggtaactcagtcattataggggtgttgtctaagaacttgcctagctgcaatggtcctgctgattctgt

SEQ ID NO: 569524 - DNA, 120 bp, Artificial Sequence
  ENSG00000170579_70 (sequence is synthesized)
tatctctttaaacaatgcggtagacgttagaatgggctgatgatttattttcccattctggcaagttttacaagtgcttctttcataataggagagtcttttttaaacgggggtaattta

SEQ ID NO: 569525 - DNA, 120 bp, Artificial Sequence
  ENSG00000170579_71 (sequence is synthesized)
gatttgtttgttcttggaaggagggtggggtatgaggaatgccataatcttacattatggtattaatcattctttgttcagtttgttcttttacaggtttaatcttgcattcagttttga

SEQ ID NO: 569526 - DNA, 120 bp, Artificial Sequence
  ENSG00000170579_72 (sequence is synthesized)
tagagaacataaagcatttttttaacctaatgatgtctcaagtagcggtggtacttgagatggctcattttgtacattacttcatggaaaatagattcttggcacccccaacaactagtg

SEQ ID NO: 569527 - DNA, 120 bp, Artificial Sequence
  ENSG00000170579_73 (sequence is synthesized)
tgagctggcaagccacagatccttggaggttcagctgcttcctctgttaaaagcagatactgacacatagtgagtacatcaggcaaatgagctttatttggggaatgttgaatttagggt

SEQ ID NO: 569528 - DNA, 120 bp, Artificial Sequence
  ENSG00000170579_74 (sequence is synthesized)
cctgttagaacatacaaataaatttgtccttatagcactgttttgagattatataagtacctggcataattaagtaatggcaatcactataattatcattattaattcaaggtacctttt

SEQ ID NO: 569529 - DNA, 120 bp, Artificial Sequence
  ENSG00000170579_75 (sequence is synthesized)
tctttttcctgatggataacccttacattcttacaaatactaaattaatgaataagaaaaaatgtgcatataattttgctttgaaatttcaaataaggaaaaataaatctaaaaaataaa

SEQ ID NO: 569530 - DNA, 120 bp, Artificial Sequence
  ENSG00000170579_76 (sequence is synthesized)
agagcagcacggactgaaatctcagtgttaggagaagagatgcttccagaccttgcgttggccaagcagctcagcagggagcccagcagctcagaccctggctggctacctccagaccag

SEQ ID NO: 569531 - DNA, 120 bp, Artificial Sequence
  ENSG00000170579_77 (sequence is synthesized)
agatggtagatgtccgtatattcttgctcactaggaaattctccaagaacaaccacaggttaataaattaaatgagagttatttatgaagagaaaaatatatatatttttgaaaaatcaa

SEQ ID NO: 569532 - DNA, 120 bp, Artificial Sequence
  ENSG00000170579_78 (sequence is synthesized)
caccaccaccaccgttaggaccatccagagcagcacggtggaactggagacatcgcgtacttccacccttgcaggctcagacgaaagaaaaaagagcaagatttatgacacaacctactc

SEQ ID NO: 569533 - DNA, 120 bp, Artificial Sequence
  ENSG00000170579_79 (sequence is synthesized)
tatccttgtctgctgttacattgaaggaaactgacagtgatgatttgcaggagacttttggttataacttctcctttcttctgtggggcactcgaggtaggattcctctataatattagg

SEQ ID NO: 569534 - DNA, 120 bp, Artificial Sequence
  ENSG00000170579_80 (sequence is synthesized)
aagtcataaaaatgcaaaagtcctatcaggcacagagcaagatttaaaatctgaagaataccatgtgcttccatctcctgcagttgttttgaagtacataaatcacctcttgggaacgga

SEQ ID NO: 569535 - DNA, 120 bp, Artificial Sequence
  ENSG00000170579_81 (sequence is synthesized)
gtgccaaccttgaggggctatgcctcacagacagccaacaagcaagtccacctttgcccacattcggggttattgcatggcaaacagtgaaggggcttccagggttttctggcacactgg

SEQ ID NO: 569536 - DNA, 120 bp, Artificial Sequence
  ENSG00000170579_82 (sequence is synthesized)
ccttaaaggctgttgtaaggttcacatgagatcattcacaaggaagcattatgcaaattacaaattagaatgccctactttggctttgattttaaatctctcaatgtggcttagtttaat

SEQ ID NO: 569537 - DNA, 120 bp, Artificial Sequence
  ENSG00000170579_83 (sequence is synthesized)
aataatgataatagctaacctttaagcacttattatttgacaagcatacaaacagctgcatacattgtctaatgtaaccgtaatgaatactctatgacttgcacatgatattatcattta

SEQ ID NO: 569538 - DNA, 120 bp, Artificial Sequence
  ENSG00000170579_84 (sequence is synthesized)
aatcaaacagagaaaaaaaaatgtaagacttagagaggttacacaacttgaccaggccacacagctagtaagtgaaattctctctgtaatcaccaataaatgccttggaaactatggtat

SEQ ID NO: 569539 - DNA, 120 bp, Artificial Sequence
  ENSG00000170579_85 (sequence is synthesized)
aatctgaaataatttaatacaaatccatttatagaataaaaggcctaggagcttttttctttcattctttcctctcgcaaatatgcatttagcttcctgccatatttgaaatctgtattt

SEQ ID NO: 569540 - DNA, 120 bp, Artificial Sequence
  ENSG00000170579_86 (sequence is synthesized)
tctatatcagtttctaaaaaattctcttttttaaagaaacatttgttcacatattattgacatggcctctcatgttggtttgtctgtgaaatatctgtttaaagaaaaagatgaaaaaaa

SEQ ID NO: 569541 - DNA, 120 bp, Artificial Sequence
  ENSG00000170579_87 (sequence is synthesized)
ctgcgggacgcggccagcctcaatcatcttggccagtttccaggacaacagggcacatgttaggagccgtgaagtaggagacaaagtcgctattgtaaggaagccacaccggtccttcac

SEQ ID NO: 569542 - DNA, 120 bp, Artificial Sequence
  ENSG00000170579_88 (sequence is synthesized)
agtccattccacaacatactcagcctaagcctgcagagcaatcgtcttcataggagccataggaaaacatgcttgagcaatgatctctgtcattgaccttggattattaatgagccaatc

SEQ ID NO: 569543 - DNA, 120 bp, Artificial Sequence
  ENSG00000170579_89 (sequence is synthesized)
ctgtacacttctgagagtaggtttaaattcctaatggcagctgatcacagggattacattcaccccagtccctcagccttggcaagtgctggtcccaggaatccaggcttggccatacca

SEQ ID NO: 569544 - DNA, 120 bp, Artificial Sequence
  ENSG00000170579_90 (sequence is synthesized)
caacagttgccatcagcctcccctacatcaagtggaggaccagcagctcagaccctcactctcacataaatgtatacaggttttactggtgaattatacctcaataaaactgcgggaaaa

SEQ ID NO: 569545 - DNA, 120 bp, Artificial Sequence
  ENSG00000170579_91 (sequence is synthesized)
ataacagagatgacagatggagatgtccagccaggctgtcctgtcacctactggcctatcaccattttgccaaccgttagagagaggagggccacacagattctacaacctcgaccaaga

SEQ ID NO: 569546 - DNA, 120 bp, Artificial Sequence
  ENSG00000170579_92 (sequence is synthesized)
cccctggtgaagaatggccatgctattctcttgagaaatggttcacatttcatgctattctcgtgggaaatagctccaccacctagtaagaaacccatggctgggcatggtggctcacgt

SEQ ID NO: 569547 - DNA, 86 bp, Artificial Sequence
  ENSG00000170579_93 (sequence is synthesized)
aagaccatttgagtccaggagttcaagaccagcctgaacaacatagcaagaacccatctctatttaaaaaaaaaaaagaaagaaag

SEQ ID NO: 569548 - DNA, 120 bp, Artificial Sequence
  ENSG00000170579_94 (sequence is synthesized)
ggaagacatgactcctccacccctgataccactcaggcaaaatgggtaaagatcaccccatatgaacttcaacttggtgaattcacagctctcacaataaaaaacattttgttttacaac

SEQ ID NO: 569549 - DNA, 120 bp, Artificial Sequence
  ENSG00000170581_0 (sequence is synthesized)
aagtcgcgaccagagccattggagggcgcggggactgcaaccctaatcagagcccaaatggcgcagtgggaaatgctgcagaatcttgacagcccctttcaggatcagctgcaccagctt

SEQ ID NO: 569550 - DNA, 120 bp, Artificial Sequence
  ENSG00000170581_1 (sequence is synthesized)
tactcgcacagcctcctgcctgtggacattcgacagtacttggctgtctggattgaagaccagaactggcaggaagctgcacttgggagtgatgattccaaggctaccatgctattcttc

SEQ ID NO: 569551 - DNA, 120 bp, Artificial Sequence
  ENSG00000170581_2 (sequence is synthesized)
cacttcttggatcagctgaactatgagtgtggccgttgcagccaggacccagagtccttgttgctgcagcacaatttgcggaaattctgccgggacattcagcccttttcccaggatcct

SEQ ID NO: 569552 - DNA, 120 bp, Artificial Sequence
  ENSG00000170581_3 (sequence is synthesized)
acccagttggctgagatgatctttaacctccttctggaagaaaaaagaattttgatccaggctcagagggcccaattggaacaaggagagccagttctcgaaacacctgtggagagccag

SEQ ID NO: 569553 - DNA, 120 bp, Artificial Sequence
  ENSG00000170581_4 (sequence is synthesized)
caacatgagattgaatcccggatcctggatttaagggctatgatggagaagctggtaaaatccatcagccaactgaaagaccagcaggatgtcttctgcttccgatataagatccaggcc

SEQ ID NO: 569554 - DNA, 120 bp, Artificial Sequence
  ENSG00000170581_5 (sequence is synthesized)
aaagggaagacaccctctctggacccccatcagaccaaagagcagaagattctgcaggaaactctcaatgaactggacaaaaggagaaaggaggtgctggatgcctccaaagcactgcta

SEQ ID NO: 569555 - DNA, 120 bp, Artificial Sequence
  ENSG00000170581_6 (sequence is synthesized)
ggccgattaactaccctaatcgagctactgctgccaaagttggaggagtggaaggcccagcagcaaaaagcctgcatcagagctcccattgaccacgggttggaacagctggagacatgg

SEQ ID NO: 569556 - DNA, 120 bp, Artificial Sequence
  ENSG00000170581_7 (sequence is synthesized)
ttcacagctggagcaaagctgttgtttcacctgaggcagctgctgaaggagctgaagggactgagttgcctggttagctatcaggatgaccctctgaccaaaggggtggacctacgcaac

SEQ ID NO: 569557 - DNA, 120 bp, Artificial Sequence
  ENSG00000170581_8 (sequence is synthesized)
gcccaggtcacagagttgctacagcgtctgctccacagagcctttgtggtagaaacccagccctgcatgccccaaactccccatcgacccctcatcctcaagactggcagcaagttcacc

SEQ ID NO: 569558 - DNA, 120 bp, Artificial Sequence
  ENSG00000170581_9 (sequence is synthesized)
gtccgaacaaggctgctggtgagactccaggaaggcaatgagtcactgactgtggaagtctccattgacaggaatcctcctcaattacaaggcttccggaagttcaacattctgacttca

SEQ ID NO: 569559 - DNA, 120 bp, Artificial Sequence
  ENSG00000170581_10 (sequence is synthesized)
aaccagaaaactttgacccccgagaaggggcagagtcagggtttgatttgggactttggttacctgactctggtggagcaacgttcaggtggttcaggaaagggcagcaataaggggcca

SEQ ID NO: 569560 - DNA, 120 bp, Artificial Sequence
  ENSG00000170581_11 (sequence is synthesized)
ctaggtgtgacagaggaactgcacatcatcagcttcacggtcaaatatacctaccagggtctgaagcaggagctgaaaacggacaccctccctgtggtgattatttccaacatgaaccag

SEQ ID NO: 569561 - DNA, 120 bp, Artificial Sequence
  ENSG00000170581_12 (sequence is synthesized)
ctctcaattgcctgggcttcagttctctggttcaatttgctcagcccaaaccttcagaaccagcagttcttctccaacccccccaaggccccctggagcttgctgggccctgctctcagt

SEQ ID NO: 569562 - DNA, 120 bp, Artificial Sequence
  ENSG00000170581_13 (sequence is synthesized)
tggcagttctcctcctatgttggccgaggcctcaactcagaccagctgagcatgctgagaaacaagctgttcgggcagaactgtaggactgaggatccattattgtcctgggctgacttc

SEQ ID NO: 569563 - DNA, 120 bp, Artificial Sequence
  ENSG00000170581_14 (sequence is synthesized)
actaagcgagagagccctcctggcaagttaccattctggacatggctggacaaaattctggagttggtacatgaccacctgaaggatctctggaatgatggacgcatcatgggctttgtg

SEQ ID NO: 569564 - DNA, 120 bp, Artificial Sequence
  ENSG00000170581_15 (sequence is synthesized)
agtcggagccaggagcgccggctgctgaagaagaccatgtctggcacctttctactgcgcttcagtgaatcgtcagaagggggcattacctgctcctgggtggagcaccaggatgatgac

SEQ ID NO: 569565 - DNA, 120 bp, Artificial Sequence
  ENSG00000170581_16 (sequence is synthesized)
aaggtgctcatctactctgtgcaaccgtacacgaaggaggtgctgcagtcactcccgctgactgaaatcatccgccattaccagttgctcactgaggagaatatacctgaaaacccactg

SEQ ID NO: 569566 - DNA, 120 bp, Artificial Sequence
  ENSG00000170581_17 (sequence is synthesized)
cgcttcctctatccccgaatcccccgggatgaagcttttgggtgctactaccaggagaaagttaatctccaggaacggaggaaatacctgaaacacaggctcattgtggtctctaataga

SEQ ID NO: 569567 - DNA, 120 bp, Artificial Sequence
  ENSG00000170581_18 (sequence is synthesized)
agccagagctcagcctggacttagagccactgctgaaggcagggctggatctggggccagagctagagtctgtgctggagtccactctggagcctgtgatagagcccacactatgcatgg

SEQ ID NO: 569568 - DNA, 120 bp, Artificial Sequence
  ENSG00000170581_19 (sequence is synthesized)
tatcacaaacagtgccagagccagaccaaggacctgtatcacagccagtgccagagccagatttgccctgtgatctgagacatttgaacactgagccaatggaaatcttcagaaactgtg

SEQ ID NO: 569569 - DNA, 120 bp, Artificial Sequence
  ENSG00000170581_20 (sequence is synthesized)
taaagattgaagaaatcatgccgaatggtgacccactgttggctggccagaacaccgtggatgaggtttacgtctcccgccccagccacttctacactgatggacccttgatgccttctg

SEQ ID NO: 569570 - DNA, 120 bp, Artificial Sequence
  ENSG00000170581_21 (sequence is synthesized)
acttctaggaaccacatttcctctgttcttttcatatctcttgcccttcctactcctcatagcatgatattgttctccaaggatgggaatcaggcatgtgtcccttccaagctgtgttaa

SEQ ID NO: 569571 - DNA, 120 bp, Artificial Sequence
  ENSG00000170581_22 (sequence is synthesized)
ctgttcaaactcaggcctgtgtgactccattggggtgagaggtgaaagcataacatgggtacagaggggacaacaatgaatcagaacagatgctgagccataggtctaaataggatcctg

SEQ ID NO: 569572 - DNA, 120 bp, Artificial Sequence
  ENSG00000170581_23 (sequence is synthesized)
gaggctgcctgctgtgctgggaggtataggggtcctgggggcaggccagggcagttgacaggtacttggagggctcagggcagtggcttctttccagtatggaaggatttcaacatttta

SEQ ID NO: 569573 - DNA, 120 bp, Artificial Sequence
  ENSG00000170581_24 (sequence is synthesized)
atagttggttaggctaaactggtgcatactggcattggcccttggtggggagcacagacacaggataggactccatttctttcttccattccttcatgtctaggataacttgctttcttc

SEQ ID NO: 569574 - DNA, 120 bp, Artificial Sequence
  ENSG00000170581_25 (sequence is synthesized)
tttcctttactcctggctcaagccctgaatttcttcttttcctgcaggggttgagagctttctgccttagcctaccatgtgaaactctaccctgaagaaagggatggataggaagtagac

SEQ ID NO: 569575 - DNA, 120 bp, Artificial Sequence
  ENSG00000170581_26 (sequence is synthesized)
ctctttttcttaccagtctcctcccctactctgcccctaagctggctgtacctgttcctcccccataaaatgatcctgccaatctaatgtgagtgtgaagctttgcacactagtttatgc

SEQ ID NO: 569576 - DNA, 120 bp, Artificial Sequence
  ENSG00000170581_27 (sequence is synthesized)
atgctacctagtctccactttctcaatgcttaggagacagatcactcctggaggctggggatggtaggattgctggggatttttttttttttaaacagggtctcactctgttgcccaggc

SEQ ID NO: 569577 - DNA, 120 bp, Artificial Sequence
  ENSG00000170581_28 (sequence is synthesized)
tcaacctcctgggttcaagcaatcctcctacctcagcctcctgggtagctagcaccatggcatgcgccaccatgccctattttttttttttaaagacagggtcttgctatattgcccagg

SEQ ID NO: 569578 - DNA, 79 bp, Artificial Sequence
  ENSG00000170581_29 (sequence is synthesized)
ctagcaccatggcatgcgccaccatgccctattttttttttttagggctcaagtgatcctcacgccttggcctcccaaa

SEQ ID NO: 569579 - DNA, 120 bp, Artificial Sequence
  ENSG00000170581_30 (sequence is synthesized)
ctgggattacaggcgtgagccactgttcccagcaggaatttcttttttatagtattggataaagtttggtgtttttacagaggagaagcaatgggtcttagctctttctctattatgtta

SEQ ID NO: 569580 - DNA, 120 bp, Artificial Sequence
  ENSG00000170581_31 (sequence is synthesized)
gggtcttagctctttctctattatgttatcatcctcccttttttgtacaatatgttgtttacctgaaaggaaggtttctattcgttggttgtggacctggacaaagtccaagtctgtgga

SEQ ID NO: 569581 - DNA, 120 bp, Artificial Sequence
  ENSG00000170581_32 (sequence is synthesized)
acttaaaaccttgaaggtctgtcataggactctggacaatctcacaccttagctattcccagggaaccccagggggcaactgacattgctccaagatgttctcctgatgtagcttgagat

SEQ ID NO: 569582 - DNA, 120 bp, Artificial Sequence
  ENSG00000170581_33 (sequence is synthesized)
ataaaggaaaggccctgcacaggtggctgtttcttgtctgttatgtcagaggaacagtcctgttcagaaaggggctcttctgagcagaaatggctaataaactttgtgctgatctggaaa

SEQ ID NO: 569583 - DNA, 120 bp, Artificial Sequence
  ENSG00000170581_34 (sequence is synthesized)
tggaagtgaacaggagaaagctccgatgagcagtagtcactgtcagacacaccccactgactacagtcctgctgccgtgcaaagctggaagtgctttgtggaggctgagctggaggtgca

SEQ ID NO: 569584 - DNA, 120 bp, Artificial Sequence
  ENSG00000170581_35 (sequence is synthesized)
gctgagagacagtaaatgttgaggaaatgcatggaaaactaacagtgttttatttgagggggtgtctggtccaagcatgaccattcagaatttgcctgagggtcccacaggtgcctgtgc

SEQ ID NO: 569585 - DNA, 120 bp, Artificial Sequence
  ENSG00000170581_36 (sequence is synthesized)
tgcctgggcttcagttctctggttcaatttgctcagcccaaaccttcaggacccctggcttccctcatcatctgtctgtggctatctgtcccacagggcagaactgtaggactgaggatc

SEQ ID NO: 569586 - DNA, 120 bp, Artificial Sequence
  ENSG00000170581_37 (sequence is synthesized)
gcccttggcttccctggctctgaactgaatccctcagctggtttgggactgggcagccagagcagagagctccaaggcccggcctcttccctcaagcccgcctgttcctgcattcactct

SEQ ID NO: 569587 - DNA, 120 bp, Artificial Sequence
  ENSG00000170581_38 (sequence is synthesized)
cctcctcaattacaagggtaggtgcttgacaaggacactgcaaacatctgtacagtgtatgacctgcagaaccacattcggcagccctggtggcacaaacaaggaagagggggatttggg

SEQ ID NO: 569588 - DNA, 120 bp, Artificial Sequence
  ENSG00000170581_39 (sequence is synthesized)
atatggacaaagggagatggcgagatctgaaatgaagtggaacttctgtttttttttttctgctgagtttttagaataattccattccttgtctccatgtatcttcctcctggaacagct

SEQ ID NO: 569589 - DNA, 120 bp, Artificial Sequence
  ENSG00000170581_40 (sequence is synthesized)
tgaaaatggagggcaaggagagagaaagcagctttggaagaaggcataagaaggggataaacagaagcctcttggggacccctggcttccctcatcatctgtctgtggctatctgtccca

SEQ ID NO: 569590 - DNA, 120 bp, Artificial Sequence
  ENSG00000170581_41 (sequence is synthesized)
tcacagagttgctacagcgtctgctccacaggtctagaggccaggcaggaaccctgggggaaagaaggaacaagggaagccattcttacagatactgagctatatattctctccacacct

SEQ ID NO: 569591 - DNA, 78 bp, Artificial Sequence
  ENSG00000170581_42 (sequence is synthesized)
gaaggggcagagtcagggtttgatttgggactttggttacctggtaagaatagtttgtgacctatgcttttattacta

SEQ ID NO: 569592 - DNA, 120 bp, Artificial Sequence
  ENSG00000170581_43 (sequence is synthesized)
tagctggcctgcttttagtccaaaggaacaggggttgggggaagttcccagggcttgagaggtcttgaagccaaacaggggttccagggacactagggtgcccactctggcattttctct

SEQ ID NO: 569593 - DNA, 120 bp, Artificial Sequence
  ENSG00000170581_44 (sequence is synthesized)
cttttctctcagcctttccccagccttagtcttttctgtccctctgtcctatctatcccaggacccctggcttccctcatcatctgtctgtggctatctgtcccacagggcagaactgta

SEQ ID NO: 569594 - DNA, 120 bp, Artificial Sequence
  ENSG00000170581_45 (sequence is synthesized)
ggactgaggatccattattgtcctgggctgacttcactaaggtaactccctgaatcctgtggagctgctggatctagcccacattccaaatactggccttcccacgtccctccttcccta

SEQ ID NO: 569595 - DNA, 120 bp, Artificial Sequence
  ENSG00000170584_0 (sequence is synthesized)
gcgcgtgcgctcggctccgcctggtgcggccgcggccgggagggactggattatgtcggccccgtttgaggagcggagtggggtggtaccgtgcgggaccccgtggggccagtggtacca

SEQ ID NO: 569596 - DNA, 120 bp, Artificial Sequence
  ENSG00000170584_1 (sequence is synthesized)
gaccttggaggaggtgttcattgaagttcaggtgccgccaggcacgcgcgcccaggatatccagtgcggcctccagagccggcatgtggcgctgtcggtgggcggccgcgagatcctcaa

SEQ ID NO: 569597 - DNA, 120 bp, Artificial Sequence
  ENSG00000170584_2 (sequence is synthesized)
gggcaaactctttgattctacaatagctgatgagggaacatggactttggaggacagaaaaatggttcgtattgttcttacaaagacaaagagagatgcagcaaattgttggacttctct

SEQ ID NO: 569598 - DNA, 120 bp, Artificial Sequence
  ENSG00000170584_3 (sequence is synthesized)
actagaatctgaatatgcagcggatccttgggtgcaagaccaaatgcagagaaagcttacattagagagattccaaaaagaaaatcctggttttgacttcagtggagcagaaatctcagg

SEQ ID NO: 569599 - DNA, 120 bp, Artificial Sequence
  ENSG00000170584_4 (sequence is synthesized)
aaactacactaaaggtggaccagatttctcaaaccttgagaaataactgctttttttcctgcattctgtggatcctagcagatattgccaacttaatcagataaacagattatgtaatgg

SEQ ID NO: 569600 - DNA, 120 bp, Artificial Sequence
  ENSG00000170584_5 (sequence is synthesized)
aagaaaaatgcggatgcctacagttaacagattgcaaaatgtatcttaaaatggttctaaaaattgcattcaaacataatttacataggaaatgtactgtgggaactattctatggatat

SEQ ID NO: 569601 - DNA, 120 bp, Artificial Sequence
  ENSG00000170584_6 (sequence is synthesized)
atggtaaagttgttttggacttgtttttgctcagcatgaagttttatatgctgcattttactaattccatatttaaccatatttttaatacaaaagaacattagagtatagatcatgtga

SEQ ID NO: 569602 - DNA, 120 bp, Artificial Sequence
  ENSG00000170584_7 (sequence is synthesized)
aatgaagggtgcctttggggaaaattaactttttcttttgataagtatgatattcaataaaattttctaaataggaattgtgtacccctttgtctaagtataacaattcacacaaaatta

SEQ ID NO: 569603 - DNA, 120 bp, Artificial Sequence
  ENSG00000170584_8 (sequence is synthesized)
tagtgctgaaaacaattttaataaaggaaaaagtccataaatgtattttaagtaaattaagagttaatgtaaatttcttaattagaatattattacttgagggattactttatgtcaaga

SEQ ID NO: 569604 - DNA, 120 bp, Artificial Sequence
  ENSG00000170584_9 (sequence is synthesized)
agtttaaaaatagttaaaaccctaacaatagaagtggattaacacaaaagagaagtgtgatcatggtaattaggtgagtcctttgtggcagaaagcaaagtaaggtcactaattgtatat

SEQ ID NO: 569605 - DNA, 120 bp, Artificial Sequence
  ENSG00000170584_10 (sequence is synthesized)
cagtggcatcattttgattgtaagtgatttaggcatataggtaggaattgtctatagacattttattcaatatcctatttatgtcctttttattttttgccctttttaactcttgaaaaa

SEQ ID NO: 569606 - DNA, 120 bp, Artificial Sequence
  ENSG00000170584_11 (sequence is synthesized)
attttaaatctcatgcatagaaaagttacagataatttttttctttctgaaccatttgtgatttagttgaagacatgattcctcattactgattactatctgcttcaaattatcttacat

SEQ ID NO: 569607 - DNA, 120 bp, Artificial Sequence
  ENSG00000170584_12 (sequence is synthesized)
gactacaatgcaaccattagaatcaggaaatttacgttgacacattactaccctctaatcctcagatcttcacttcattcacattgaactgattgtcccaataatgtccatatagcaaga

SEQ ID NO: 569608 - DNA, 120 bp, Artificial Sequence
  ENSG00000170584_13 (sequence is synthesized)
ggatccagtcagaatcatgcctttcatttagatgtcagctgtctttagtttacttcattctggaacaaattctcatttgtttccttttacaacttagtacttttgacaattatgggctag

SEQ ID NO: 569609 - DNA, 120 bp, Artificial Sequence
  ENSG00000170584_14 (sequence is synthesized)
ttttgtagaacaccccttattttgagttctgtctgatacttcatgattagattgaggttattcatctttggcaggaatgtgatagaagtgcatcctgtcattgtttaataatttcagttt

SEQ ID NO: 569610 - DNA, 120 bp, Artificial Sequence
  ENSG00000170584_15 (sequence is synthesized)
gtctcatttctgatggtgtttcttagatgactgattaaggtagtgtctgccagacttctccactgtagttatttttataattatttcttgagaagatagttgcaaaatactaccttgttt

SEQ ID NO: 569611 - DNA, 120 bp, Artificial Sequence
  ENSG00000170584_16 (sequence is synthesized)
ctgatcagactttaaatttatcgtatctctataaactcattattttctattttattcagcaggttaaaaaacctattatcattacattggtgctcaaaattattgtacatttggctggta

SEQ ID NO: 569612 - DNA, 120 bp, Artificial Sequence
  ENSG00000170584_17 (sequence is synthesized)
gaagtccattctgggtggcctctgtgtccttctgacacattcccatcattattcaatgaatttgttactctctggcataagatataccaggcttctcatgctgtcctcgacctaacccaa

SEQ ID NO: 569613 - DNA, 120 bp, Artificial Sequence
  ENSG00000170584_18 (sequence is synthesized)
gaatcagccatttttccgtagagcctgggttctctttagtgagtaatatttaaaagccaagatctgtgctagtgtgcaattgccgttggtgtgtatatataatgcatgtctttacatcta

SEQ ID NO: 569614 - DNA, 120 bp, Artificial Sequence
  ENSG00000170584_19 (sequence is synthesized)
tatttctgcatctatgtatattgaaaaccatgaattcacatataaattctgatcccatgggcttcattttcattttttccttctccacatttataaccgttttcagtaccagtgagaaac

SEQ ID NO: 569615 - DNA, 83 bp, Artificial Sequence
  ENSG00000170584_20 (sequence is synthesized)
ttctccacatttataaccgttttcagtaccagtgagaaacctgattcctatttgattatttgtggggttttttttttttaagg

SEQ ID NO: 569616 - DNA, 62 bp, Artificial Sequence
  ENSG00000170584_21 (sequence is synthesized)
gctgggattacaggcatgcgctgccacacctggctaatttttatcaggtgatccgcccgcct

SEQ ID NO: 569617 - DNA, 76 bp, Artificial Sequence
  ENSG00000170584_22 (sequence is synthesized)
ttctctattgtaggtcatctccccacatgaatgtcttcctcaccctgcttaggcttcgcatcctatgctgagcagg

SEQ ID NO: 569618 - DNA, 120 bp, Artificial Sequence
  ENSG00000170584_23 (sequence is synthesized)
tcctcaccctgcttaggcttcgcatcctatgctgagcaggaatgtcctcctcatcctgcctggaccctaatacctcactccaggccatggcagtccattcaccctgtgattcctatcttg

SEQ ID NO: 569619 - DNA, 120 bp, Artificial Sequence
  ENSG00000170584_24 (sequence is synthesized)
ctcattttaggaatgaattgtcgggggaagaggctatttttcttttaattttattctctttgacatttaacaaaattttttgagtaaagtaaaattaacttttttggtgtatggtttggt

SEQ ID NO: 569620 - DNA, 120 bp, Artificial Sequence
  ENSG00000170584_25 (sequence is synthesized)
gaattttaagtatagatatgtgtaaacacctccacagtcagagtattgaagagttcaatcaccgtaaaaactctcgtgctctctttgtactctacacaccctactcccagcccctaaacc

SEQ ID NO: 569621 - DNA, 120 bp, Artificial Sequence
  ENSG00000170584_26 (sequence is synthesized)
ttggaaaccactgatctaatccccatctccatatttttgtcttcaagcatgttataaatgggatcatatataattaagaaaaacgctttattgtaacaacatacatttcacccatttaag

SEQ ID NO: 569622 - DNA, 120 bp, Artificial Sequence
  ENSG00000170584_27 (sequence is synthesized)
gtgtgtaattcagtagcttttagtatatacacagataaatgcaaccattccaataatcaattttagaatgttttcatcacctcagatagaaaccttgtatagtttagcttttatccttct

SEQ ID NO: 569623 - DNA, 120 bp, Artificial Sequence
  ENSG00000170584_28 (sequence is synthesized)
cctgtcatcccccgccatccatactacctcttttcatctcatagatttccttattctggacatttcatgtacatggaatcataatacgtggtctttggttactggcttccttcactttac

SEQ ID NO: 569624 - DNA, 120 bp, Artificial Sequence
  ENSG00000170584_29 (sequence is synthesized)
atgtcttaagaggttcatctatattcgagcatgtatcagcacattcattagtatgtctgaaaatacttcattgtatggctgtagcactttgtttatacatttgtaagttggacattttgg

SEQ ID NO: 569625 - DNA, 120 bp, Artificial Sequence
  ENSG00000170584_30 (sequence is synthesized)
gtatttccaccctttggctgtcctgactaaagctgctataaacgtgtacaagtctttatgtgcatatgtgttttcatttcttacctaggagtagaatttttaggttatatgataactatg

SEQ ID NO: 569626 - DNA, 120 bp, Artificial Sequence
  ENSG00000170584_31 (sequence is synthesized)
ttaatcatttgaggagctgtcattgtttcccaaagcagctacatctttttactttcccaccagcagtgtatgcaggttccattttctctgcatccttgccaatacttgtttacctgacat

SEQ ID NO: 569627 - DNA, 120 bp, Artificial Sequence
  ENSG00000170584_32 (sequence is synthesized)
tttgattttagtcactctagtggatatgaaatgggatctctatctagttttggtttgctattctctgatactatgttgagcattctttcttgtgcttattggctatttgtgtatcttcct

SEQ ID NO: 569628 - DNA, 120 bp, Artificial Sequence
  ENSG00000170584_33 (sequence is synthesized)
attgggtagtaagagtctttatatattctgggtacaagtctcttaccaggtatatgatttgtaatttctcctattctctctttactttgttgatagtgtcttttgaagcacagacttaat

SEQ ID NO: 569629 - DNA, 120 bp, Artificial Sequence
  ENSG00000170584_34 (sequence is synthesized)
tttgatgaagtcttatccatcatgccattggtggatcatgtttttggtgtcatgtctaggaaccttaaccccaggtcatgaggaatttttcttttttctttttttgactcacattctcac

SEQ ID NO: 569630 - DNA, 120 bp, Artificial Sequence
  ENSG00000170584_35 (sequence is synthesized)
ccactcccagcccattttttttttattttttatttttagtagagttgggatttcaccatataggctaggctggtcttgaactgacctcaacggatctgcccgcctcagcctctgaagtgc

SEQ ID NO: 569631 - DNA, 120 bp, Artificial Sequence
  ENSG00000170584_36 (sequence is synthesized)
caggcatgagccaccgtgcccggcctatggatttttttcttctaaaaattttataaatttagttctacatttagatccgtgatccattttaggttaatttttgtataagctgtgaaattt

SEQ ID NO: 569632 - DNA, 120 bp, Artificial Sequence
  ENSG00000170584_37 (sequence is synthesized)
tgaaatttaggtaggtttatttttttgcatatggatgttcagttgttttaaaatcgtctgttgaaaaactctccattccccattgagttgtcttttcacctttgtcagaaatcaattgct

SEQ ID NO: 569633 - DNA, 120 bp, Artificial Sequence
  ENSG00000170584_38 (sequence is synthesized)
atttatgtgagtctggttttggactttattccatcgatctatgtgtttatcctttcataaataccagattgccttgattatcacagctttatagtaagtcttaaaactgggcagcatgat

SEQ ID NO: 569634 - DNA, 120 bp, Artificial Sequence
  ENSG00000170584_39 (sequence is synthesized)
tccttcaaaatttttttgaaatctttttcaaaattgttttggctaatttagtttctttgccttccatatgaattttagaattagctactctgtatctacaaaaaatcctactggggtttt

SEQ ID NO: 569635 - DNA, 120 bp, Artificial Sequence
  ENSG00000170584_40 (sequence is synthesized)
gaatgcaattttgtgtcttccaatccatgaacatgaggtatctatttaggacctctttcatttcagttatcagcattttatgtcatttttcagcatatattccacagtgttcattttgga

SEQ ID NO: 569636 - DNA, 120 bp, Artificial Sequence
  ENSG00000170584_41 (sequence is synthesized)
ggaactattgttaagttgtattatttttgaaacatgggtttccaattgcacatcgctagtatgtacaaatgtgtttgatttttgtttgttgaccttgtatcctgtgaccttgctaaactt

SEQ ID NO: 569637 - DNA, 120 bp, Artificial Sequence
  ENSG00000170584_42 (sequence is synthesized)
cattagttttgggagttattttgttgttaactcattaagttttctacataaactacgaatagaaacagttttattttattctttttagtctatgatttttcttgcctgattttgttgtta

SEQ ID NO: 569638 - DNA, 120 bp, Artificial Sequence
  ENSG00000170584_43 (sequence is synthesized)
actcattaagttttctacataaactacgaataggaacagttttattttattctttttagtctatgatttttcttgcctgattgcagtggccagaacaataacatggagaaagtggccatc

SEQ ID NO: 569639 - DNA, 120 bp, Artificial Sequence
  ENSG00000170584_44 (sequence is synthesized)
tcagtcttgttctggatcttaggattttgaaagcattgtttttgaccattatgtatgcaagctgtaggcttttcttaaattccctttgtcatgttgagcaagttcccatctattaatttg

SEQ ID NO: 569640 - DNA, 120 bp, Artificial Sequence
  ENSG00000170584_45 (sequence is synthesized)
ttgttagcagagtttcatgagtggatgctgaattttctatgctctttctgtatcagtttggtcattctttttgtttagactgttaaaatcatggattttactgattccagaattttgaaa

SEQ ID NO: 569641 - DNA, 120 bp, Artificial Sequence
  ENSG00000170584_46 (sequence is synthesized)
cagcttatatttcctcccaaccccaaacttggtcatggtacattattcagcttatgtatctagatttttattttttgaggatttttatgtctgtgttcattttggatattgtgcaattgt

SEQ ID NO: 569642 - DNA, 120 bp, Artificial Sequence
  ENSG00000170584_47 (sequence is synthesized)
ttttgtttgttttttccttgtgttatctttatcttggtatggtatcatgttaattctggtcttgtaaaatgaattgcaaagtgattattctttctggaagagatttgtagaatttgttat

SEQ ID NO: 569643 - DNA, 120 bp, Artificial Sequence
  ENSG00000170584_48 (sequence is synthesized)
atctttaaatgttttatgaatttgctagtaaggttttaaacaatggttcaatttttaaaaatagagaatttattgaggtttatttaagtttgggtactgtatgcctttcaaggaattggt

SEQ ID NO: 569644 - DNA, 120 bp, Artificial Sequence
  ENSG00000170584_49 (sequence is synthesized)
tcatctaatcctatgtgcatagagttgttcatggtattttctttgtgtcgttctaatgaggatctatactgttatcttttctttgattcctaagattggaatcaaagattggaattcctt

SEQ ID NO: 569645 - DNA, 120 bp, Artificial Sequence
  ENSG00000170584_50 (sequence is synthesized)
ctctttttttgtcaattttgccagaggtttatcaattttactgctcttttcaaaaattagttttttgattgttttctattaatttgtttacaattgcatttattttctgcctcttttttt

SEQ ID NO: 569646 - DNA, 120 bp, Artificial Sequence
  ENSG00000170584_51 (sequence is synthesized)
tttttttttcttctttctgcttgctttaggtttagtttgggcttcttttttttgtagacaggtctcacttcatcacccagactggagtagtgttatgatcatagctcactgcagcctcaa

SEQ ID NO: 569647 - DNA, 120 bp, Artificial Sequence
  ENSG00000170584_52 (sequence is synthesized)
gtggggtcatgatcctcctacctcagccttctgagtggctgggactatagtggtgtgccaccacacccagttagattttcctactttcttaaagtgggagcttagagtgttaatttgaga

SEQ ID NO: 569648 - DNA, 120 bp, Artificial Sequence
  ENSG00000170584_53 (sequence is synthesized)
actttttcttgtttagtaaaaagcagtcgattgttataaattgcagcaccagcatggctgcattccaagcacggtgatattttcatttattttaaaatattttttaagacttccctgtag

SEQ ID NO: 569649 - DNA, 120 bp, Artificial Sequence
  ENSG00000170584_54 (sequence is synthesized)
tatcatgagttatttagaaatgtgttgtttaatttccaagtgtttggagattttcttgctgttactgatttctagattatggtcaaaaaacatattttatatgatttcatctcttttaaa

SEQ ID NO: 569650 - DNA, 120 bp, Artificial Sequence
  ENSG00000170584_55 (sequence is synthesized)
tttgttaaggtttaagacccatgatgtggtttatcttggtgagtgttccatgtgtacttgaaaagaatgcttattctgctgttttaggtagaagggttttatgtcaattaaatctagctg

SEQ ID NO: 569651 - DNA, 120 bp, Artificial Sequence
  ENSG00000170584_56 (sequence is synthesized)
gttattagtattattccattttcctacatctttgctaattttctattaattctatggactactgagagaggaatgtttaagtttccaactgtaaatgaagatttgtccagtcctcctttt

SEQ ID NO: 569652 - DNA, 120 bp, Artificial Sequence
  ENSG00000170584_57 (sequence is synthesized)
ttttgcttcatgtttttttttttttttttgagtcttaccctgtcactcaggctggagcatagcaactctgtcatgcttcactgcagcctcaaactcctgggctcagacagtcttcccacc

SEQ ID NO: 569653 - DNA, 120 bp, Artificial Sequence
  ENSG00000170584_58 (sequence is synthesized)
agtcttcccacctcaggctcctcagtacctaggactacagatgtatatcactatgcctagctaatttttgattttttgtagagatagggtctccctatgttgagtaggctggtcttgaac

SEQ ID NO: 569654 - DNA, 120 bp, Artificial Sequence
  ENSG00000170584_59 (sequence is synthesized)
gcaatcctcccaccttggcttcccaaagcattggaattacaggaatgaatgagtctctgtacctggtctcttcatgtatttttaagatctgataataagtgcttacacttttagcactgt

SEQ ID NO: 569655 - DNA, 120 bp, Artificial Sequence
  ENSG00000170584_60 (sequence is synthesized)
ttttagcactgtcttggtgaattttatcattatataatgtccctaattatccttggcaattttggttgttcctaactctactttgatgaatataaaaatggctttttaatttattttttg

SEQ ID NO: 569656 - DNA, 120 bp, Artificial Sequence
  ENSG00000170584_61 (sequence is synthesized)
aatataaaaatggctttttaatttattttttgagacaagagcctcactctgttgcccaggttggagagcagtggtgtgatcttgtctcactgcctcacaggttcaagcaattctcctgcc

SEQ ID NO: 569657 - DNA, 120 bp, Artificial Sequence
  ENSG00000170584_62 (sequence is synthesized)
caggtgtgagccactgcgctcggccttaaaaattggcttatcttttaattcatcttgactcatgtttactgttttttggtttctgaaaaatagatttaataaataataacattttatcaa

SEQ ID NO: 569658 - DNA, 120 bp, Artificial Sequence
  ENSG00000170584_63 (sequence is synthesized)
tttatcaaagttattagtatagagaaataaattgagtgttgttattattctatgatcatgatgacagcacagaagttaatgtggccagcatatagttttgattaaaaattatacaagcaa

SEQ ID NO: 569659 - DNA, 120 bp, Artificial Sequence
  ENSG00000170584_64 (sequence is synthesized)
ggaagcgtaattcataaatagataaatataggaaaggacaacaaagaaaatagggatagaataacgggcagagaatttagagatgatgtcaggtgattagttttctcatctaaaagcttg

SEQ ID NO: 569660 - DNA, 120 bp, Artificial Sequence
  ENSG00000170584_65 (sequence is synthesized)
aaaatcctgcatgtttgtggagtggtcaagcaggtggtgaagaggtgtgtgcataaaataagtagtactccttttatttcttttcaccaatgctctttggatctggacccgctttttctt

SEQ ID NO: 569661 - DNA, 120 bp, Artificial Sequence
  ENSG00000170584_66 (sequence is synthesized)
agatgtttgatggcagtgtaatatggtgaagggagactacttgtttcctagttttgtaaacttgggcgagagattgttcagtgtctctatatcttccttatccacaagataaggtagtta

SEQ ID NO: 569662 - DNA, 120 bp, Artificial Sequence
  ENSG00000170584_67 (sequence is synthesized)
cagtttcctcttcccagacgcccccagccccgtttccctgaacgactgttgggtgtcccgacggctcctgtggctggcagaaagagaaagaggataacactgaccaggtttgggtctggt

SEQ ID NO: 569663 - DNA, 120 bp, Artificial Sequence
  ENSG00000170584_68 (sequence is synthesized)
cagagcccccgcctcttcagggcaggtgctgagttgtggaaatttgaggagcctattttcgtgtttagttttcaaactaagactgctgcttctgcttctctgacgggcttcagctgggaa

SEQ ID NO: 569664 - DNA, 80 bp, Artificial Sequence
  ENSG00000170604_0 (sequence is synthesized)
gcagaagaaggaggtggaggcggcggcggccgttgcagcggcggcggcgagagcggcgggagcccgaggcggcggcgctc

SEQ ID NO: 569665 - DNA, 120 bp, Artificial Sequence
  ENSG00000170604_1 (sequence is synthesized)
tcggagcccggaccgggcgggggcgccgacgtgcctcagcctgccttcgcgagggaggcgggagtgagcagaaaggcttagggcccagggggcggggaaggggggccgggcctggatccg

SEQ ID NO: 569666 - DNA, 120 bp, Artificial Sequence
  ENSG00000170604_2 (sequence is synthesized)
ggaggccgagccggaggccggaccgtggctcgcgctgtccccgggacgcggatcgaacgttggcggcgcggatcgcacgtcggcggccggtggaacgcgggagctgggcggcgcgcggac

SEQ ID NO: 569667 - DNA, 120 bp, Artificial Sequence
  ENSG00000170604_3 (sequence is synthesized)
tggggccatggcgtctgtgcaggcgtcccgccgccagtggtgctacctgtgcgacctgcccaagatgccgtgggccatggtgtgggacttcagcgaggccgtgtgtcgcggctgcgtgaa

SEQ ID NO: 569668 - DNA, 120 bp, Artificial Sequence
  ENSG00000170604_4 (sequence is synthesized)
cttcgagggcgcggaccgcatcgaactgctcatcgatgccgcccgccagctcaagcgcagccacgtgctccccgagggccgctcgcccgggcccccggcccttaagcacccggccaccaa

SEQ ID NO: 569669 - DNA, 120 bp, Artificial Sequence
  ENSG00000170604_5 (sequence is synthesized)
gccgcccccgcaggcccagccccagccgtcagggaccggcggcggcgtgtcgggccaggaccgctatgacagggccacatcatcaggccgcctccccctgccctcgcccgccctggagta

SEQ ID NO: 569670 - DNA, 120 bp, Artificial Sequence
  ENSG00000170604_6 (sequence is synthesized)
aggccgcctccccctgccctcgcccgccctggagtacactctggggtcccgcctggccaatgggctgggccgtgaggaggccgtggctgagggggcgcgaagggccttgcttggctccat

SEQ ID NO: 569671 - DNA, 120 bp, Artificial Sequence
  ENSG00000170604_7 (sequence is synthesized)
gcctggcttgatgccccctgggctgctggcagctgcagtgtctggcctgggaagccgaggcctgacgctggcacccggcttgagtcctgcccgtcccctcttcggctccgatttcgagaa

SEQ ID NO: 569672 - DNA, 120 bp, Artificial Sequence
  ENSG00000170604_8 (sequence is synthesized)
agagaagcagcagaggaatgcggactgtctggcagaactgaacgaggccatgcgaggccgggcagaggaatggcacgggcgccccaaagcagtgcgggaacagctactggcgctgtccgc

SEQ ID NO: 569673 - DNA, 120 bp, Artificial Sequence
  ENSG00000170604_9 (sequence is synthesized)
ctgcgccccgttcaatgtgcgcttcaagaaggatcacgggctggtggggcgagtgttcgccttcgatgctactgcccgtcctccaggatacgagttcgagctgaagctcttcaccgaata

SEQ ID NO: 569674 - DNA, 120 bp, Artificial Sequence
  ENSG00000170604_10 (sequence is synthesized)
gcaatgtgtacgccggcgtcctggcagtggctcgccagatgttccacgatgctctgcgggagccgggcaaggcactggcttcttcgggcttcaagtacctcgaatatgaacgccggcatg

SEQ ID NO: 569675 - DNA, 120 bp, Artificial Sequence
  ENSG00000170604_11 (sequence is synthesized)
gatcaggagaatggcggcagctgggcgagctgcttaccgacggcgtccgcagcttccgcgagccagctcccgcggaggccctgccccagcagtacccagagccggcccctgcggctctct

SEQ ID NO: 569676 - DNA, 120 bp, Artificial Sequence
  ENSG00000170604_12 (sequence is synthesized)
gtggcccacccccgcgagccccatcccggaacctggcgcccacgccgcgccgtcgcaaggcatcccccgagccggagggcgaggcggctgggaagatgaccaccgaggagcagcagcaac

SEQ ID NO: 569677 - DNA, 120 bp, Artificial Sequence
  ENSG00000170604_13 (sequence is synthesized)
ggcactgggtggcacccggcggcccgtactccgctgagacccctggtgtgccctcgcccattgccgccctgaagaatgtggccgaagccctgggccactcacccaaggaccctggcggag

SEQ ID NO: 569678 - DNA, 120 bp, Artificial Sequence
  ENSG00000170604_14 (sequence is synthesized)
gcggggggcctgtgcgtgcagggggcgccagccctgcagcctcctccacggcccagccgccaacccagcatcgccttgtggcccgcaacggcgaagcagaagtcagtcccacagcggggg

SEQ ID NO: 569679 - DNA, 120 bp, Artificial Sequence
  ENSG00000170604_15 (sequence is synthesized)
ccgaagctgtcagcgggggtggcagcggcactggggcgacccctggggcccccctgtgctgtaccctgtgcagggagcggctagaagacacccacttcgtccagtgcccctcggtgcccg

SEQ ID NO: 569680 - DNA, 120 bp, Artificial Sequence
  ENSG00000170604_16 (sequence is synthesized)
gacacaagttctgctttccctgctcccgggagttcatcaaggcgcagggcccggccggggaggtgtactgcccgagcggagacaagtgcccgctggtcggctcctccgtgccctgggcct

SEQ ID NO: 569681 - DNA, 120 bp, Artificial Sequence
  ENSG00000170604_17 (sequence is synthesized)
tcatgcagggcgagatcgccaccatccttgctggagacatcaaagttaagaaagaacgggacccctaggctaccactgcctccaggctactgccctctgcccctttgccacccaccgctg

SEQ ID NO: 569682 - DNA, 120 bp, Artificial Sequence
  ENSG00000170604_18 (sequence is synthesized)
ccgcggataaattattccctccccgacccagcccagtgccacctctatctgtgtacatactcccttcttccacccagatgggtcccctggggtagatgcattgtgggtggggggagaaag

SEQ ID NO: 569683 - DNA, 120 bp, Artificial Sequence
  ENSG00000170604_19 (sequence is synthesized)
cttgtggctcctgtccgagggggtgtttggggtcccttggcccctccagtttccctctgtcctccttggcttggctttgctgctgcttgtagttgggggagaggtgcccccctcctcctt

SEQ ID NO: 569684 - DNA, 120 bp, Artificial Sequence
  ENSG00000170604_20 (sequence is synthesized)
gagaagggacctcctgaaaactcgctctttataaacgaggcaaaagcatttaattcccacccccccaccccccgctcccttctgctccttcaataaaccgaaagatgggttttttttttc

SEQ ID NO: 569685 - DNA, 120 bp, Artificial Sequence
  ENSG00000170605_0 (sequence is synthesized)
agagctcaggacctctacttgcatatccatggcaatctatcctcttgccttgaaagcatacaagtttctgagaattcaggatagataatatcttgtggattgattcctcagaattaaaac

SEQ ID NO: 569686 - DNA, 120 bp, Artificial Sequence
  ENSG00000170605_1 (sequence is synthesized)
aataaacagaggaaaacattggaactctgctgattgatttttaccagaatctgaccagttactaaacaatacaaggtttctaccatgggtgacaggggaacaagcaatcactcagaaatg

SEQ ID NO: 569687 - DNA, 120 bp, Artificial Sequence
  ENSG00000170605_2 (sequence is synthesized)
actgacttcattcttgcaggcttcagggtacgcccagagctccacattctcctcttcctgctatttttgtttgtttatgccatgatccttctagggaatgttgggatgatgaccattatt

SEQ ID NO: 569688 - DNA, 120 bp, Artificial Sequence
  ENSG00000170605_3 (sequence is synthesized)
atgactgatcctcggctgaacacaccaatgtattttttcctaggcaatctctccttcattgatcttttctattcatctgttattgaacccaaggctatgatcaacttctggtctgaaaac

SEQ ID NO: 569689 - DNA, 120 bp, Artificial Sequence
  ENSG00000170605_4 (sequence is synthesized)
aagtctatctcctttgcaggctgtgtggcccagctctttctctttgccctcctcattgtgactgagggatttctcctggcggccatggcttatgaccgctttattgccatctgcaaccct

SEQ ID NO: 569690 - DNA, 120 bp, Artificial Sequence
  ENSG00000170605_5 (sequence is synthesized)
ctgctctactctgttcaaatgtccacacgtctgtgtactcagttggtggctggttcctatttttgtggctgcattagctcagttattcagactagcatgacatttactttatctttttgc

SEQ ID NO: 569691 - DNA, 120 bp, Artificial Sequence
  ENSG00000170605_6 (sequence is synthesized)
gcttctcgggctgttgaccacttttactgtgattctcgcccacttcagagactgtcttgttctgatctctttatccatagaatgatatctttttccttatcatgtattattatcttgcct

SEQ ID NO: 569692 - DNA, 120 bp, Artificial Sequence
  ENSG00000170605_7 (sequence is synthesized)
actatcatagtcattatagtatcttacatgtatattgtgtccacagttctaaagatacattctactgagggacataagaaggccttctccacctgcagctctcacctgggagttgtgagt

SEQ ID NO: 569693 - DNA, 120 bp, Artificial Sequence
  ENSG00000170605_8 (sequence is synthesized)
gtgctgtatggtgctgtcttttttatgtatctcactcctgacagatttcctgagctgagtaaagtggcatccttatgttactccctagtcactcccatgttgaatcctttgatttactct

SEQ ID NO: 569694 - DNA, 120 bp, Artificial Sequence
  ENSG00000170605_9 (sequence is synthesized)
ctgaggaacaaagatgtccaagaggctctaaaaaaatttctagagaagaaaaatattattctttgattattatttctctttcaccaattttattgtggctatttatttaatacacctgtg

SEQ ID NO: 569695 - DNA, 120 bp, Artificial Sequence
  ENSG00000170605_10 (sequence is synthesized)
ttcattaataaaagttactctcccgaatgtcataaaaatactcttagatgttttcatgtgatgtgctctttccatattttacttttttacctcccaagacatcattaattctgaaaatct

SEQ ID NO: 569696 - DNA, 120 bp, Artificial Sequence
  ENSG00000170605_11 (sequence is synthesized)
tggatattggagatatcctggacattagagaagtattttcatgataaaccctctcactggtcttcaacattttatttcacagaatttatatctattgattcttgtggcataatgtagaac

SEQ ID NO: 569697 - DNA, 120 bp, Artificial Sequence
  ENSG00000170605_12 (sequence is synthesized)
aatattttgtattttgttatagtgcttcagcaagattttatctggtgtttgtctttgggattgcccatccctcctacacacaatcatgggtagttgacaaagatgcccagattattttta

SEQ ID NO: 569698 - DNA, 120 bp, Artificial Sequence
  ENSG00000170605_13 (sequence is synthesized)
aataaaatatgtctttaattttatagctagtttcattagcatgctaaatgagtattcagttttcaccttatgtgtgctagataggaagtactaataataagaaacaaactataagtaatc

SEQ ID NO: 569699 - DNA, 120 bp, Artificial Sequence
  ENSG00000170605_14 (sequence is synthesized)
tttatacattaatttggaaaatgttgtacttcattattgtggagtgctctaaggtactgctagttgctgaatcccagtgcaaagaactaaaataggaaatagagatcttcaaacattttg

SEQ ID NO: 569700 - DNA, 120 bp, Artificial Sequence
  ENSG00000170605_15 (sequence is synthesized)
atcaatcatgccctcaattttgatcttcatgattttgtcttgtgttaataattgataaggaatagttaataaaggtatagaatcagggaagtcatcaaaacggattatgatccaaaattt

SEQ ID NO: 569701 - DNA, 120 bp, Artificial Sequence
  ENSG00000170605_16 (sequence is synthesized)
acttatctatgcctcttaatataggtatatatttgattaatcttattgaatatctgtataatatgttctggccttacagtgggctcagggataaataacctcattcttttgaaagtttaa

SEQ ID NO: 569702 - DNA, 120 bp, Artificial Sequence
  ENSG00000170605_17 (sequence is synthesized)
aagttagtgagatactgaaatccttgggcataaaaccaaaatccagacattttgccaaaggtactcatagagatcacaaagtggggtgcctgaaagaaggtggttggtaatcagagaaac

SEQ ID NO: 569703 - DNA, 120 bp, Artificial Sequence
  ENSG00000170605_18 (sequence is synthesized)
ccttcttgggctgcatggaacattgcgcaaagggggattagattgaagtcaggaaacctgctgcagtggtttataatattgatgtgggctcaatggtatgtcgatattaatgaacaaagg

SEQ ID NO: 569704 - DNA, 120 bp, Artificial Sequence
  ENSG00000170605_19 (sequence is synthesized)
cagattttttaaactgcaggtaaaagacccaaaatatattaactgactagtatgaagagaatgtacaaaagatggtatgttagcccatttttgaaattgagtgtgtgcatggtcatggtc

SEQ ID NO: 569705 - DNA, 120 bp, Artificial Sequence
  ENSG00000170605_20 (sequence is synthesized)
tgaatagataaaaagtataggagctctcagaaaacctgaaataaagggggaactttcttgccttgatgaacatgtatgaaaaacctacagtgaacattttaaatgacaagaaactagaag

SEQ ID NO: 569706 - DNA, 120 bp, Artificial Sequence
  ENSG00000170605_21 (sequence is synthesized)
ctttcctactattatcaggaaaaatgcaaggatgccttctctcaccacaccttttcaatattttaatggaagtgctagccaatgcaacaaaatgagaaaaggaaataaaagtgttatggg

SEQ ID NO: 569707 - DNA, 120 bp, Artificial Sequence
  ENSG00000170605_22 (sequence is synthesized)
ttgaatggtattccctcaaaattcatgtgttgaagccctaaaccctagtacttcagaatgtgactttaattagtgatagggtcttcaaagatgtaattgagttaaaataaggctgtaaga

SEQ ID NO: 569708 - DNA, 120 bp, Artificial Sequence
  ENSG00000170605_23 (sequence is synthesized)
taaatcctaattcagtatcatttgtgtccctatagaaagaggagattagggcacacagagggacaccaggggtgcatgtgcacagaacatcagtcatgtgaagaatcaacaagagggcag

SEQ ID NO: 569709 - DNA, 120 bp, Artificial Sequence
  ENSG00000170605_24 (sequence is synthesized)
ccatctgcaagctaaggaaagagggctcagagaaaaccaactctgctgacaccttgatcttgggcttccagcctctatcactaagaaaattaatttctgttgtttaagaacccagtgtgt

SEQ ID NO: 569710 - DNA, 120 bp, Artificial Sequence
  ENSG00000170605_25 (sequence is synthesized)
ggtgttttgttatgggatctccagcaaattcatacaaataggtctataaattggaaaagaagagaaaacgttccttgtttgcagataacatatctatgtagaaaattaaaaataataaac

SEQ ID NO: 569711 - DNA, 120 bp, Artificial Sequence
  ENSG00000170605_26 (sequence is synthesized)
tcacagtatacttatgaggcaaaaattaataataacattaatttaaaaatagctttgtaaatcctaataccataagagattatttgtaatgctaggatccaaaccaagagttcatttgta

SEQ ID NO: 569712 - DNA, 120 bp, Artificial Sequence
  ENSG00000170605_27 (sequence is synthesized)
agagctcaggacctctacttgcatatccatggcaatctatcctcttgccttgaaagcatacaagtttctgagaattcaggatagataatatcttgtggattgattcctcaggtttctacc

SEQ ID NO: 569713 - DNA, 120 bp, Artificial Sequence
  ENSG00000170606_0 (sequence is synthesized)
gagatcttctccgcccccgctaccggcgcctcctctgcggccactgagccggagccggcctgagcagcgctctcggttgcagtacccactggaaggacttaggcgctcgcgtggacaccg

SEQ ID NO: 569714 - DNA, 120 bp, Artificial Sequence
  ENSG00000170606_1 (sequence is synthesized)
caagcccctcagtagcctcggcccaagaggcctgctttccactcgctagccccgccgggggtccgtgtcctgtctcggtggccggacccgggcccgagcccgagcagtagccggcgccat

SEQ ID NO: 569715 - DNA, 120 bp, Artificial Sequence
  ENSG00000170606_2 (sequence is synthesized)
gtcggtggtgggcatagacctgggcttccagagctgctacgtcgctgtggcccgcgccggcggcatcgagactatcgctaatgagtatagcgaccgctgcacgccggcttgcatttcttt

SEQ ID NO: 569716 - DNA, 120 bp, Artificial Sequence
  ENSG00000170606_3 (sequence is synthesized)
tggtcctaagaatcgttcaattggagcagcagctaaaagccaggtaatttctaatgcaaagaacacagtccaaggatttaaaagattccatggccgagcattctctgatccatttgtgga

SEQ ID NO: 569717 - DNA, 120 bp, Artificial Sequence
  ENSG00000170606_4 (sequence is synthesized)
ggcagaaaaatctaaccttgcatatgatattgtgcagttgcctacaggattaacaggtataaaggtgacatatatggaggaagagcgaaattttaccactgagcaagtgactgccatgct

SEQ ID NO: 569718 - DNA, 120 bp, Artificial Sequence
  ENSG00000170606_5 (sequence is synthesized)
tttgtccaaactgaaggagacagccgaaagtgttcttaagaagcctgtagttgactgtgttgtttcggttccttgtttctatactgatgcagaaagacgatcagtgatggatgcaacaca

SEQ ID NO: 569719 - DNA, 120 bp, Artificial Sequence
  ENSG00000170606_6 (sequence is synthesized)
gattgctggtcttaattgcttgcgattaatgaatgaaaccactgcagttgctcttgcatatggaatctataagcaggatcttcctgccttagaagagaaaccaagaaatgtagtttttgt

SEQ ID NO: 569720 - DNA, 120 bp, Artificial Sequence
  ENSG00000170606_7 (sequence is synthesized)
agacatgggccactctgcttatcaagtttctgtatgtgcatttaatagaggaaaactgaaagttctggccactgcatttgacacgacattgggaggtagaaaatttgatgaagtgttagt

SEQ ID NO: 569721 - DNA, 120 bp, Artificial Sequence
  ENSG00000170606_8 (sequence is synthesized)
aaatcacttctgtgaagaatttgggaagaaatacaagctagacattaagtccaaaatccgtgcattattacgactctctcaggagtgtgagaaactcaagaaattgatgagtgcaaatgc

SEQ ID NO: 569722 - DNA, 120 bp, Artificial Sequence
  ENSG00000170606_9 (sequence is synthesized)
ttcagatctccctttgagcattgaatgttttatgaatgatgttgatgtatctggaactatgaatagaggcaaatttctggagatgtgcaatgatctcttagctagagtggagccaccact

SEQ ID NO: 569723 - DNA, 120 bp, Artificial Sequence
  ENSG00000170606_10 (sequence is synthesized)
tcgtagtgttttggaacaaaccaagttaaagaaagaagatatttatgcagtggagatagttggtggtgctacacgaatccctgcggtaaaagagaagatcagcaaatttttcggtaaaga

SEQ ID NO: 569724 - DNA, 120 bp, Artificial Sequence
  ENSG00000170606_11 (sequence is synthesized)
acttagtacaacattaaatgctgatgaagctgtcactcgaggctgtgcattgcagtgtgccatcttatcgcctgctttcaaagtcagagaattttctatcactgatgtagtaccatatcc

SEQ ID NO: 569725 - DNA, 120 bp, Artificial Sequence
  ENSG00000170606_12 (sequence is synthesized)
aatatctctgagatggaattctccagctgaagaagggtcaagtgactgtgaagtcttttccaaaaatcatgctgctcctttctctaaagttcttacattttatagaaaggaacctttcac

SEQ ID NO: 569726 - DNA, 120 bp, Artificial Sequence
  ENSG00000170606_13 (sequence is synthesized)
tcttgaggcctactacagctctcctcaggatttgccctatccagatcctgctatagctcagttttcagttcagaaagtcactcctcagtctgatggctccagttcaaaagtgaaagtcaa

SEQ ID NO: 569727 - DNA, 120 bp, Artificial Sequence
  ENSG00000170606_14 (sequence is synthesized)
agttcgagtaaatgtccatggcattttcagtgtgtccagtgcatctttagtggaggttcacaagtctgaggaaaatgaggagccaatggaaacagatcagaatgcaaaggaggaagagaa

SEQ ID NO: 569728 - DNA, 120 bp, Artificial Sequence
  ENSG00000170606_15 (sequence is synthesized)
gatgcaagtggaccaggaggaaccacatgttgaagagcaacagcagcagacaccagcagaaaataaggcagagtctgaagaaatggagacctctcaagctggatccaaggataaaaagat

SEQ ID NO: 569729 - DNA, 120 bp, Artificial Sequence
  ENSG00000170606_16 (sequence is synthesized)
ggaccaaccaccccaagccaagaaggcaaaagtgaagaccagtactgtggacctgccaatcgagaatcagctattatggcagatagacagagagatgctcaacttgtacattgaaaatga

SEQ ID NO: 569730 - DNA, 120 bp, Artificial Sequence
  ENSG00000170606_17 (sequence is synthesized)
gggtaagatgatcatgcaggataaactggagaaggagcggaatgatgctaagaacgcagtggaggaatatgtgtatgaaatgagagacaagcttagtggtgaatatgagaagtttgtgag

SEQ ID NO: 569731 - DNA, 120 bp, Artificial Sequence
  ENSG00000170606_18 (sequence is synthesized)
tgaagatgatcgtaacagttttactttgaaactggaagatactgaaaattggttgtatgaggatggagaagaccagccaaagcaagtttatgttgataagttggctgaattaaaaaatct

SEQ ID NO: 569732 - DNA, 120 bp, Artificial Sequence
  ENSG00000170606_19 (sequence is synthesized)
atcagctctttcaaaaacaaggaggaccagtatgatcatttggatgctgctgacatgacaaaggtagaaaaaagcacaaatgaagcaatggagtggatgaataacaagctaaatctgcag

SEQ ID NO: 569733 - DNA, 120 bp, Artificial Sequence
  ENSG00000170606_20 (sequence is synthesized)
aacaagcagagtttgaccatggatccagttgtcaagtcaaaagagattgaagctaaaattaaggagctgacaagtacttgtagccctataatttcaaagcccaaacccaaagtggaacct

SEQ ID NO: 569734 - DNA, 120 bp, Artificial Sequence
  ENSG00000170606_21 (sequence is synthesized)
ccaaaagaggaacaaaaaaatgcagagcagaatggaccagtggatggacaaggagacaacccaggcccccaggctgctgagcagggtacagacacagctgtgccttcggattcagacaag

SEQ ID NO: 569735 - DNA, 120 bp, Artificial Sequence
  ENSG00000170606_22 (sequence is synthesized)
aagcttcctgaaatggacattgattgattccaacacttgtttctattaaaacagactattataaagctttaagttgtcaactttgttctaaatatcaactagcgcaagtgaatactgaag

SEQ ID NO: 569736 - DNA, 120 bp, Artificial Sequence
  ENSG00000170606_23 (sequence is synthesized)
atttcttagtcagtttttaggggattttcggggaggggaaataggtaatgtatggagcattttcacttctaaatagttagatacagaaattaagtgcattgtatctttttcataatggta

SEQ ID NO: 569737 - DNA, 120 bp, Artificial Sequence
  ENSG00000170606_24 (sequence is synthesized)
ctatttagaagcccagttagtcttactgagcttatgcttcactcctttatgtttaaccatgtgtctacaagaataagtttgttttggaaagttgagctatagctacagctctagctatcc

SEQ ID NO: 569738 - DNA, 120 bp, Artificial Sequence
  ENSG00000170606_25 (sequence is synthesized)
agcagacttttcattatgacttacatggcaggagctctaattatgctttaaaaatctgttgtggagattgctttaaatgctccctgcctggtgtggggatggggtccccctctttgtgag

SEQ ID NO: 569739 - DNA, 120 bp, Artificial Sequence
  ENSG00000170606_26 (sequence is synthesized)
ggctggagcatggcacggcatggattaacacggcagaggaacaaaggtgtgctctgagcttcttcatatttcaccttcaccctcacctgtgttctcttccctctctcccaataaaagggc

SEQ ID NO: 569740 - DNA, 120 bp, Artificial Sequence
  ENSG00000170606_27 (sequence is synthesized)
tcccattataaatgccatgtacttctcttgggaaaatagacccccttgcctagagtaagttgttaactgagggctttaaacctggaggctcttcctgaaagtatgttcatgaatacccca

SEQ ID NO: 569741 - DNA, 120 bp, Artificial Sequence
  ENSG00000170606_28 (sequence is synthesized)
agcatcaaggtctaaataattttcagaagattagaattgggtagatatactgttggatatagccatggtaaatttaactgaggaattaaatccttgttaattttggtgtaaagatttgta

SEQ ID NO: 569742 - DNA, 120 bp, Artificial Sequence
  ENSG00000170606_29 (sequence is synthesized)
tcctggcctgtttattcaggtgggagatgttctgtataattttgaggtatagcttgaactcctagaacaagagttaaaagttctttttagctcattcacaatcacttgtgtgttaagtgt

SEQ ID NO: 569743 - DNA, 120 bp, Artificial Sequence
  ENSG00000170606_30 (sequence is synthesized)
taatatctgtcatgaacctgccaatttgtacgtgttaagcagctgacagatgatgcaaaaaaaactaagatacactggattgtactggatgagtctgaaattagtgttaaagaagtgtgg

SEQ ID NO: 569744 - DNA, 120 bp, Artificial Sequence
  ENSG00000170606_31 (sequence is synthesized)
tgcctgatgttataacaacacctcattcttaactgtgtggccaatgtcaggtataccaaagcattcctctgactgctttttggggcagtgttgacaggagtgaggcattttggaaactcc

SEQ ID NO: 569745 - DNA, 120 bp, Artificial Sequence
  ENSG00000170606_32 (sequence is synthesized)
aagggaagcctgtgtttgaggccagagttggtacctgctttaagaaactgttacagggcttgttggtaatgttttgaatctttgtaaaaattgatattctgtataacagagtgcctctct

SEQ ID NO: 569746 - DNA, 120 bp, Artificial Sequence
  ENSG00000170606_33 (sequence is synthesized)
gttacttttggcctatgttgttagaaataagatgctatcttgcatagttagaattaagcgtttgtccatctctagataacattgaaaagtttgagtgttacaggctctaaagtgcaatgg

SEQ ID NO: 569747 - DNA, 120 bp, Artificial Sequence
  ENSG00000170606_34 (sequence is synthesized)
agaacaattgcttaggaggaggaaggggaaagtatacttatgttggtgtgtaagcatgcatggaggcctcgaggcaccacaacaaggccaggttcttagcacatcctctgttctctacct

SEQ ID NO: 569748 - DNA, 120 bp, Artificial Sequence
  ENSG00000170606_35 (sequence is synthesized)
gtcatgcttcaagagttccagctggcctgctgtgaagccagtagctattttaaaagtgctggctgcaggattaagccaaccctttacaactggcccagaccgtaatggccatttcttctt

SEQ ID NO: 569749 - DNA, 120 bp, Artificial Sequence
  ENSG00000170606_36 (sequence is synthesized)
tttttttttttttttttttggtgtgtgtgtgtgtgtgtgtggggaagggtgtgggtgctgggatgggggtgaatttcaagttgaaacacgatgatgtggtctgcttgctctctgcttaga

SEQ ID NO: 569750 - DNA, 120 bp, Artificial Sequence
  ENSG00000170606_37 (sequence is synthesized)
cgatgatgtggtctgcttgctctctgcttagacaggctttaagaccaattggattttcatggaggccaggacagagagtggtaattgatggcttgtgtacagacaagcatttatccaggt

SEQ ID NO: 569751 - DNA, 120 bp, Artificial Sequence
  ENSG00000170606_38 (sequence is synthesized)
tgcgttatccaaactgatttgttaaagctccaggtcacgttcttacactaagaaaatcattcagtaaacatgagacaagtttaggaaaaactaataaaataaacctgtcttaaacttgaa

SEQ ID NO: 569752 - DNA, 120 bp, Artificial Sequence
  ENSG00000170606_39 (sequence is synthesized)
tcccctcctgaagtagcttcatatttccaaaggcctggagaaatatatttaacttcttatatatagcacacggagattaaatgtactttatcactagttttagtggaatcagtactctgg

SEQ ID NO: 569753 - DNA, 120 bp, Artificial Sequence
  ENSG00000170606_40 (sequence is synthesized)
atcgttgaactgccgtatgaagactgtgtattcttctgttaagaatctaggtcaacctattaagatacgtttccaggaatctgaagaacgaccaaaattatttgaagaactagggaaaca

SEQ ID NO: 569754 - DNA, 120 bp, Artificial Sequence
  ENSG00000170606_41 (sequence is synthesized)
ataaggatgtcatcacttatttagcctaacttctattactgaatctaattagatctagtttgcttctaatctgttagagatttgaaaacgggtaacccaggctaattagacttccaggtt

SEQ ID NO: 569755 - DNA, 120 bp, Artificial Sequence
  ENSG00000170608_0 (sequence is synthesized)
gggcgccggtgggagctcgggccgtgcccgctgagagatccagagcgctccgttcccccggggccggagcgggggcgggtgggggcgtaagcccgggggatgctgggctcagtgaagatg

SEQ ID NO: 569756 - DNA, 120 bp, Artificial Sequence
  ENSG00000170608_1 (sequence is synthesized)
aagcccgggggatgctgggctcagtgaagatggaggcccatgacctggccgagtggagctactacccggaggcgggcgaggtctactcgccggtgaccccagtgcccaccatggcccccc

SEQ ID NO: 569757 - DNA, 120 bp, Artificial Sequence
  ENSG00000170608_2 (sequence is synthesized)
tcaactcctacatgaccctgaatcctctaagctctccctatccccctggggggctccctgcctccccactgccctcaggacccctggcacccccagcacctgcagcccccctggggccca

SEQ ID NO: 569758 - DNA, 120 bp, Artificial Sequence
  ENSG00000170608_3 (sequence is synthesized)
ctttcccaggcctgggtgtcagcggtggcagcagcagctccgggtacggggccccgggtcctgggctggtgcacgggaaggagatgccgaaggggtatcggcggcccctggcacacgcca

SEQ ID NO: 569759 - DNA, 120 bp, Artificial Sequence
  ENSG00000170608_4 (sequence is synthesized)
agccaccgtattcctatatctcactcatcaccatggccatccagcaggcgccgggcaagatgctgaccttgagtgaaatctaccagtggatcatggacctcttcccttactaccgggaga

SEQ ID NO: 569760 - DNA, 120 bp, Artificial Sequence
  ENSG00000170608_5 (sequence is synthesized)
atcagcagcgctggcagaactccattcgccactcgctgtctttcaacgactgcttcgtcaaggtggcgcgttccccagacaagcctggcaagggctcctactgggccctacaccccagct

SEQ ID NO: 569761 - DNA, 120 bp, Artificial Sequence
  ENSG00000170608_6 (sequence is synthesized)
cagggaacatgtttgagaatggctgctacctgcgccgccagaaacgcttcaagctggaggagaaggtgaaaaaagggggcagcggggctgccaccaccaccaggaacgggacagggtctg

SEQ ID NO: 569762 - DNA, 120 bp, Artificial Sequence
  ENSG00000170608_7 (sequence is synthesized)
ctgcctcgaccaccacccccgcggccacagtcacctccccgccccagcccccgcctccagcccctgagcctgaggcccagggcggggaagatgtgggggctctggactgtggctcacccg

SEQ ID NO: 569763 - DNA, 120 bp, Artificial Sequence
  ENSG00000170608_8 (sequence is synthesized)
cctccacaccctatttcactggcctggagctcccaggggagctgaagctggacgcgccctacaacttcaaccaccctttctccatcaacaacctaatgtcagaacagacaccagcacctc

SEQ ID NO: 569764 - DNA, 120 bp, Artificial Sequence
  ENSG00000170608_9 (sequence is synthesized)
ccaaactggacgtggggtttgggggctacggggctgaaggtggggagcctggagtctactaccagggcctctattcccgctctttgcttaatgcatcctagcaggggttgggaacatggt

SEQ ID NO: 569765 - DNA, 120 bp, Artificial Sequence
  ENSG00000170608_10 (sequence is synthesized)
ggtgggtatggctggagctcacaccacgaagctcttggggcctgatccttctggtgacacttcacttgtcccattggttaacatctgggtgggtctattacttactgtgatgactgctgt

SEQ ID NO: 569766 - DNA, 120 bp, Artificial Sequence
  ENSG00000170608_11 (sequence is synthesized)
ctcagtgggcatggtgttgatccacggggtactgtgataaccaccatggatacattttggtggcccactgggtactgtgaggactgctacattgatggatgttattggctaatccactgc

SEQ ID NO: 569767 - DNA, 120 bp, Artificial Sequence
  ENSG00000170608_12 (sequence is synthesized)
atggtttgatggccaccatctcggttggccctttgggtgtgatggtgatagcatttcagtgacatcttctttggccccccccattaggtgctgtgcccacttcttttttggtgtacttgg

SEQ ID NO: 569768 - DNA, 120 bp, Artificial Sequence
  ENSG00000170608_13 (sequence is synthesized)
cacagtaggtgccaagttggccaccattctgtgtaacaccttttttggcccattgggtgctttgatggacatcatactgggtaggtgacaacgtcagtgggccaccatgtgccatgatgg

SEQ ID NO: 569769 - DNA, 120 bp, Artificial Sequence
  ENSG00000170608_14 (sequence is synthesized)
ctgctgcagccccgtgttggccatgtcgtcaccattctctctggcatgggttgggtaggggatggaggtgagaatactccttggttttctctgaagcccaccctttcccccaactctggt

SEQ ID NO: 569770 - DNA, 120 bp, Artificial Sequence
  ENSG00000170608_15 (sequence is synthesized)
ccaggagaaaccagaaaaggctggttagggtgtggggaatttctactgaagtctgattctttcccgggaagcggggtactggctgtgtttaatcattaaaggtaccgtgtccgcctctta

SEQ ID NO: 569771 - DNA, 120 bp, Artificial Sequence
  ENSG00000170608_16 (sequence is synthesized)
attcccctttcttccgccacggtcatgcagggctctggctcttcgtcctctcctgccgagatgatgaagccccctgaggtagaaaggctccagagttctgacctcggggcccttggtatc

SEQ ID NO: 569772 - DNA, 120 bp, Artificial Sequence
  ENSG00000170608_17 (sequence is synthesized)
tgcagcgtcgctgcgggcagctccctcactcctgaatcacccccagctgtcgcgtcctggggctgcggcccccggcgcctgaggtctactcgccggtgaccccagtgcccaccatggccc

SEQ ID NO: 569773 - DNA, 120 bp, Artificial Sequence
  ENSG00000170613_0 (sequence is synthesized)
agaagtcctgtagggagatgggcagttaccttctctccgtctctctctcggggactctatttgtggctggtggagctgtcttaaacgaagagaaccatgagcaatgaatcttgtttacct

SEQ ID NO: 569774 - DNA, 120 bp, Artificial Sequence
  ENSG00000170613_1 (sequence is synthesized)
tattacacagcccacagctactcttcaatgagtgcgttcaaaacctccatgggggacctgcaacgacaattgtacaacagaggagagtacaacattttcaagtatgcaccaatgttcgag

SEQ ID NO: 569775 - DNA, 120 bp, Artificial Sequence
  ENSG00000170613_2 (sequence is synthesized)
agtaattttattcagataaacaaaaagggagaggtgattgatgtacacaaccgtgtccgaatggtgacagtgggcatcgtctgcaccagccccatcctcccactgcctgacgtcatggtt

SEQ ID NO: 569776 - DNA, 120 bp, Artificial Sequence
  ENSG00000170613_3 (sequence is synthesized)
ctggcccaaccaactaaaatctgtgaacagcatgtcagatggggccggtttgccaaggggagaggtcgcaggcccgtcaagactctagagctcacgagactgcttcccttgaaatttgtg

SEQ ID NO: 569777 - DNA, 120 bp, Artificial Sequence
  ENSG00000170613_4 (sequence is synthesized)
aagatctccatccacgatcatgagaaacagcagctgcgcctgaaactcgccactggccgtactttttatctgcagttgtgtccctcttctgacacacgggaagatctcttttgctattgg

SEQ ID NO: 569778 - DNA, 120 bp, Artificial Sequence
  ENSG00000170613_5 (sequence is synthesized)
gaaaaacttgtctatctcctgaggccaccagtagagagttactgcagtaccccaacacttctatctggggacgcaccacccgaagacaacaaaagcctagtggctgcagagctccacaga

SEQ ID NO: 569779 - DNA, 120 bp, Artificial Sequence
  ENSG00000170613_6 (sequence is synthesized)
gaaggggatcagagtgagactgggctctacaagccttgtgatgtatctgcagccacctcttctgcttatgctgggggagagggaatccaacatgcctcccacggaacggctagtgcggct

SEQ ID NO: 569780 - DNA, 120 bp, Artificial Sequence
  ENSG00000170613_7 (sequence is synthesized)
tctccatccacgagcactccaggggctgctgaaggaggagcagcaaggacagcaggtggcatggcagtggcaggaacagcaacaggacctagaacagatgtggcaatagcaggggcagca

SEQ ID NO: 569781 - DNA, 120 bp, Artificial Sequence
  ENSG00000170613_8 (sequence is synthesized)
atgagtcctgcaacaggtgctatgagcatagcaacaaccaaatctgcaggcccaggtcaagtgaccacagcgctggcgggagcagctatcaaaaatccaggagaaaatgaatccagcaag

SEQ ID NO: 569782 - DNA, 120 bp, Artificial Sequence
  ENSG00000170613_9 (sequence is synthesized)
tccatggcaggtgctgccaacatatcctcagagggtattagcttggccttggtgggtgctgcaagcacctccttggaaggtacttccacctcgatggcgggggccgccagtctctcccaa

SEQ ID NO: 569783 - DNA, 120 bp, Artificial Sequence
  ENSG00000170613_10 (sequence is synthesized)
acatgagtgaacgagatggaagccagaaagtttcccagcccagtgctgaagtctggaatgaaaacaaggaaagaagagaaaagaaggacagacatcccagtaggaaaagttctcatcacc

SEQ ID NO: 569784 - DNA, 120 bp, Artificial Sequence
  ENSG00000170613_11 (sequence is synthesized)
gcaaggcaggtgaaagtcaccgcaggagagcgggggacaagaatcagaaagcgtcttcccaccggtccgcatctggccataaaaacacgagagatgacaaaaaagaaaaagggtacagca

SEQ ID NO: 569785 - DNA, 120 bp, Artificial Sequence
  ENSG00000170613_12 (sequence is synthesized)
acgtaaggggcaagcgacatggctcctctcgcaagagctccacccacagctccaccaaaaaggagtcgagaacaactcaggaactggggaagaaccaatctgcatctagcacaggagctt

SEQ ID NO: 569786 - DNA, 120 bp, Artificial Sequence
  ENSG00000170613_13 (sequence is synthesized)
tacaaaagaaagccagtaagatcagctcttttttaaggagcctcagggccactcctggttcaaaaacaagggtcacatcacatgacagagaggtagatatcgtggctaagatggtggaga

SEQ ID NO: 569787 - DNA, 120 bp, Artificial Sequence
  ENSG00000170613_14 (sequence is synthesized)
agcaaaacatagaggccaaagtggagaaagcccagggtggccaggagctggagatgatcagtggcactatgacatccgagaagacggagatgatcgtctttgaaaccaaatccatttaaa

SEQ ID NO: 569788 - DNA, 120 bp, Artificial Sequence
  ENSG00000170613_15 (sequence is synthesized)
gaggagccagggctacaaccgcccagggatctggaagtatccctagaggagcccatcccagctttctttactgcagttcaaataataaaggaaatcgtacaactccaaaagaaatacaat

SEQ ID NO: 569789 - DNA, 120 bp, Artificial Sequence
  ENSG00000170613_16 (sequence is synthesized)
ctcctgcttgaatttttctgcccatagcctggtggtgacctcacagtggcttctgtgatggtggctatgctacagctggagaccccagcctccaggcaagtagagctccaccacccgccc

SEQ ID NO: 569790 - DNA, 120 bp, Artificial Sequence
  ENSG00000170613_17 (sequence is synthesized)
acggccagcagagccaacgtgagtgttcagctttgcctcaatcccttttgcttccccgagactgtcaaagccacagactaagagctgggatgcatggccaccaccatgtcccctcgccca

SEQ ID NO: 569791 - DNA, 120 bp, Artificial Sequence
  ENSG00000170613_18 (sequence is synthesized)
ttctcctcttttccctgaatgcccctgaacatggacattcagtccagttcttagcctatgcagagacaggattcacatcccctcaggggatattcagggtaggaaggagcaatacagcag

SEQ ID NO: 569792 - DNA, 120 bp, Artificial Sequence
  ENSG00000170613_19 (sequence is synthesized)
tatttgtaggcaattagaataggaaatctattcttctagatcaggaattggcaaatcatgttctgaggtccaaatcttaccagctgcctggatttgtaaataaagttttattggaacata

SEQ ID NO: 569793 - DNA, 120 bp, Artificial Sequence
  ENSG00000170615_0 (sequence is synthesized)
cggcgcctcctcctagagccgcacctggaggcagcgcgcgcgtcgaagaggcagcggctgtggagcgcggcggggcggctccgcccagggcagcccgggctgggccaaggagcgagctct

SEQ ID NO: 569794 - DNA, 120 bp, Artificial Sequence
  ENSG00000170615_1 (sequence is synthesized)
cgagctctcccttctcctgctctcagcctcagtgatcaaggcttcagtgaactgcactggagctcccagcgggggatcttgtcccctgtcccgacttttgtgctgcacattggatctggt

SEQ ID NO: 569795 - DNA, 120 bp, Artificial Sequence
  ENSG00000170615_2 (sequence is synthesized)
gacactcaggaaatgcttgtctccggctgttaaggaataatttcagagtactatggatcatgctgaagaaaatgaaatccttgcagcaacccagaggtactatgtggaaaggcctatctt

SEQ ID NO: 569796 - DNA, 120 bp, Artificial Sequence
  ENSG00000170615_3 (sequence is synthesized)
tagtcatccggtcctccaggaaagactacacacaaaggacaaggttcctgattccattgcggataagctgaaacaggcattcacatgtactcctaaaaaaataagaaatatcatttatat

SEQ ID NO: 569797 - DNA, 120 bp, Artificial Sequence
  ENSG00000170615_4 (sequence is synthesized)
gttcctacccataactaaatggctgccagcatacaaattcaaggaatatgtgttgggtgacttggtctcaggcataagcacaggggtgcttcagcttcctcaaggcttagcctttgcaat

SEQ ID NO: 569798 - DNA, 120 bp, Artificial Sequence
  ENSG00000170615_5 (sequence is synthesized)
gctggcagctgtgcctccaatatttggcctgtactcttcattttaccctgttatcatgtattgttttcttggaacctccagacacatatccataggtccttttgctgttattagcctgat

SEQ ID NO: 569799 - DNA, 120 bp, Artificial Sequence
  ENSG00000170615_6 (sequence is synthesized)
gattggtggtgtagctgttcgattagtaccagatgatatagtcattccaggaggagtaaatgcaaccaatggcacagaggccagagatgccttgagagtgaaagtcgccatgtctgtgac

SEQ ID NO: 569800 - DNA, 120 bp, Artificial Sequence
  ENSG00000170615_7 (sequence is synthesized)
cttactttcaggaatcattcagttttgcctaggtgtctgtaggtttggatttgtggccatatatctcacagagcctctggtccgtgggtttaccaccgcagcagctgtgcatgtcttcac

SEQ ID NO: 569801 - DNA, 120 bp, Artificial Sequence
  ENSG00000170615_8 (sequence is synthesized)
ctccatgttaaaatatctgtttggagttaaaacaaagcggtacagtggaatcttttccgtggtgtatagtacagttgctgtgttgcagaatgttaaaaacctcaacgtgtgttccctagg

SEQ ID NO: 569802 - DNA, 120 bp, Artificial Sequence
  ENSG00000170615_9 (sequence is synthesized)
cgtcgggctgatggtttttggtttgctgttgggtggcaaggagtttaatgagagatttaaagagaaattgccggcgcctattcctttagagttctttgcggtcgtaatgggaactggcat

SEQ ID NO: 569803 - DNA, 120 bp, Artificial Sequence
  ENSG00000170615_10 (sequence is synthesized)
ttcagctgggtttaacttgaaagaatcatacaatgtggatgtcgttggaacacttcctctagggctgctacctccagccaatccggacaccagcctcttccaccttgtgtacgtagatgc

SEQ ID NO: 569804 - DNA, 120 bp, Artificial Sequence
  ENSG00000170615_11 (sequence is synthesized)
gacggcaatcaggagctcattgccctgggactgtgcaattccattggctcactcttccagaccttttcaatttcatgctccttgtctcgaagccttgttcaggagggaaccggtgggaag

SEQ ID NO: 569805 - DNA, 120 bp, Artificial Sequence
  ENSG00000170615_12 (sequence is synthesized)
acacagcttgcaggttgtttggcctcattaatgattctgctggtcatattagcaactggattcctctttgaatcattgccccaggctgtgctgtcggccattgtgattgtcaacctgaag

SEQ ID NO: 569806 - DNA, 120 bp, Artificial Sequence
  ENSG00000170615_13 (sequence is synthesized)
ggaatgtttatgcagttctcagatctcccctttttctggagaaccagcaaaatagagctgaccatctggcttaccacttttgtgtcctccttgttcctgggattggactatggtttgatc

SEQ ID NO: 569807 - DNA, 120 bp, Artificial Sequence
  ENSG00000170615_14 (sequence is synthesized)
actgctgtgatcattgctctgctgactgtgatttacagaacacagagtccaagctacaaagtccttggaaagcttcctgaaactgatgtgtatattgatatagacgcatatgaggaggtg

SEQ ID NO: 569808 - DNA, 120 bp, Artificial Sequence
  ENSG00000170615_15 (sequence is synthesized)
aaagaaattcctggaataaaaatatttcaaataaatgcaccaatttactatgcaaatagcgacttgtatagcaatgcattaaaacgaaagactggagtgaacccagcagtcatcatggga

SEQ ID NO: 569809 - DNA, 120 bp, Artificial Sequence
  ENSG00000170615_16 (sequence is synthesized)
gcaaggagaaaggccatgcggaagtacgctaaggaagtcggaaatgcaaatatggccaacgcaactgttgtcaaagcagatgcagaagtagatggagaggatgctaccaagcctgaagaa

SEQ ID NO: 569810 - DNA, 120 bp, Artificial Sequence
  ENSG00000170615_17 (sequence is synthesized)
gaggatggtgaagtaaaatatcccccaatagtgatcaaaagcacatttcctgaggaaatgcaaagatttatgcccccaggggataacgtccacactgtcattttggatttcactcaagtc

SEQ ID NO: 569811 - DNA, 120 bp, Artificial Sequence
  ENSG00000170615_18 (sequence is synthesized)
aattttattgattctgttggagtgaaaactctggcagggattgtaaaagaatatggagacgtcggtatatatgtatacttagcaggatgcagtgcacaagttgtgaatgacctcactcgg

SEQ ID NO: 569812 - DNA, 120 bp, Artificial Sequence
  ENSG00000170615_19 (sequence is synthesized)
aatagattttttgaaaatcctgccctatgggagctgctgttccacagcattcatgatgcagttttaggcagccaacttagagaggcacttgctgaacaggaagcctcggctcccccttcc

SEQ ID NO: 569813 - DNA, 120 bp, Artificial Sequence
  ENSG00000170615_20 (sequence is synthesized)
caggaggacttggagcccaatgccactcctgccactcctgaggcatagatgaggacctcaccctaggatggggttataagcctctcatgaagttcataatttacacgttttaaatactag

SEQ ID NO: 569814 - DNA, 120 bp, Artificial Sequence
  ENSG00000170615_21 (sequence is synthesized)
acgctagatttttttttctaagggtgaatactagtagtccaggcttgatttggagggtgaatgacgcctagcaagatgtattgtacttgtgtttttttaattgaatacttcaaagataaa

SEQ ID NO: 569815 - DNA, 120 bp, Artificial Sequence
  ENSG00000170615_22 (sequence is synthesized)
aagaatcatacaatgtggatgtcgttggaacacttcctctaggctttcatacagagatgaccagaagatggagaccgtaggggaaatgccgtgtaatccaagcagttcaggctttggggc

SEQ ID NO: 569816 - DNA, 120 bp, Artificial Sequence
  ENSG00000170615_23 (sequence is synthesized)
caggtggacagggtttgaatgccagctctggaatctgttagtggggtgacctcagccaagtcacttaacacttctgaactttgttttctcttttgtgaaataaagaaaaaatgaatctac

SEQ ID NO: 569817 - DNA, 120 bp, Artificial Sequence
  ENSG00000170615_24 (sequence is synthesized)
tgcccagattggaatgggtgtgaatgtcccggcagagatgacaatgttgactttaggtgtagaccaaagtttaagttggtagaagtggagccctttgatgatttctagttagcgtgagag

SEQ ID NO: 569818 - DNA, 120 bp, Artificial Sequence
  ENSG00000170615_25 (sequence is synthesized)
ggagctataacactcatgtagcctgttgactagatgaacaaaatgccaatttaaaaattccatataattttgccaaatgctcttctatgtcacaatttatgctcccatcaatggttatgt

SEQ ID NO: 569819 - DNA, 120 bp, Artificial Sequence
  ENSG00000170615_26 (sequence is synthesized)
taaaagagcctaatttccatcattgtttctgccattcctggtctagtgctatgctggtttatttatcctcttgtgatttgttttggcaccaagtactgacatgagtttcaatgacatgaa

SEQ ID NO: 569820 - DNA, 120 bp, Artificial Sequence
  ENSG00000170615_27 (sequence is synthesized)
gcaaactctgacaccaagttatcgtatgcattccttccactgtcatttcctccaccctgaaccactttcccttgttatctcttctccctagtaggaagctgagcccactagggaaagtat

SEQ ID NO: 569821 - DNA, 120 bp, Artificial Sequence
  ENSG00000170619_0 (sequence is synthesized)
gcttccggggaccaggcccgcttttggctgcatcagccggggattgccggcgccaggtgctgggggcgactcggacagcgggagcgtggggtggagtaggatggagtctccctcccgagc

SEQ ID NO: 569822 - DNA, 120 bp, Artificial Sequence
  ENSG00000170619_1 (sequence is synthesized)
tgggggtgtgggcctaggaaaggctgcttcgccgctgtgttcggagagctctggatactgcggggcttttccgcggaggagcgcccgccggcatctgcatctgggaccgacctcctgggc

SEQ ID NO: 569823 - DNA, 120 bp, Artificial Sequence
  ENSG00000170619_2 (sequence is synthesized)
tggctgatcaaagaggaagcagcagcaatgtctgctgtgggggctgcaactccatacctgcatcatcctggtgatagtcacagtggccgagtgagtttcttgggggcccagcttcctcca

SEQ ID NO: 569824 - DNA, 120 bp, Artificial Sequence
  ENSG00000170619_3 (sequence is synthesized)
gaggtggcagcaatggcccggctactaggggacctagacaggagcacgttcagaaagttgctgaagtttgtggtcagcagcctgcagggggaggactgccgagaggctgtgcagcgtctt

SEQ ID NO: 569825 - DNA, 120 bp, Artificial Sequence
  ENSG00000170619_4 (sequence is synthesized)
ggggtcagcgccaacctgccggaggagcagctgggtgccctgctggcaggcatgcacacactgctccagcaggccctccgtctgccccccaccagcctgaagcctgacaccttcagggac

SEQ ID NO: 569826 - DNA, 120 bp, Artificial Sequence
  ENSG00000170619_5 (sequence is synthesized)
gctgccgcatgttgctgactttcggtggcgggtggatgtagcaatctccaccagtgccctggctcgctccctgcagccgagcgtcctgatgcagctgaagctttcagatgggtcagcata

SEQ ID NO: 569827 - DNA, 120 bp, Artificial Sequence
  ENSG00000170619_6 (sequence is synthesized)
ccgctttgaggtccccacagccaagttccaggagctgcggtacagcgtggccctggtcctaaaggagatggcagatctggagaagaggtgtgagcgcagactgcaggactgacccctcac

SEQ ID NO: 569828 - DNA, 120 bp, Artificial Sequence
  ENSG00000170619_7 (sequence is synthesized)
ttgaccagtcccattcagatccggcttggacaggcacctgagatggtgccaaagtgcagctgactcttcccacgacagccctgcccttcccatgaggcaggctcttcagtgagtgtttga

SEQ ID NO: 569829 - DNA, 120 bp, Artificial Sequence
  ENSG00000170619_8 (sequence is synthesized)
acgtaattatgtagttttctgtttaattgaaaaagagagctatgcctttttttctttttggaagtaaagcagctaaaaacatgtttctataggtgagtgttggacctcacaccctcccct

SEQ ID NO: 569830 - DNA, 120 bp, Artificial Sequence
  ENSG00000170619_9 (sequence is synthesized)
tccctgtacatttgtctttggtgctggacgtggccatgtgaggccaggttgaggccctttgtagacaacatacagttgctcagcctggccccatgtagccaggtgcttttgtagatcttg

SEQ ID NO: 569831 - DNA, 120 bp, Artificial Sequence
  ENSG00000170619_10 (sequence is synthesized)
tgttttaggttgggcattttcactcttctgccttaaatccctgaccccatggagctgacattctagtgcggctgaggggaggggaaacattgtaaaataaatcataaaaattaactggaa

SEQ ID NO: 569832 - DNA, 120 bp, Artificial Sequence
  ENSG00000170619_11 (sequence is synthesized)
agttttattgggctataattcacataccatataattcacccattttgtacaattcaatgattttggcatattattttttaactatggtaaagtacatgttaaataaaatggctcggccat

SEQ ID NO: 569833 - DNA, 120 bp, Artificial Sequence
  ENSG00000170619_12 (sequence is synthesized)
tgtttcggaccgagctcctgcgctagggcccaacagagcagcccaaagcggaaccgagtcacgcgcgccggacgccacccgacaggaggggaaacggggcagctctcaaaaccctggagg

SEQ ID NO: 569834 - DNA, 120 bp, Artificial Sequence
  ENSG00000170619_13 (sequence is synthesized)
cgcagaccgtccacacgggacagggacgcccgctcggctccgctccgcgctgatcctcaaggtctcgcggtttccccgccgcccacccggacgccgacgaaagccagcgagctcctcagc

SEQ ID NO: 569835 - DNA, 120 bp, Artificial Sequence
  ENSG00000170619_14 (sequence is synthesized)
ccgaaccgtgggggcggcgacggccgagtgccaatttgactctgtgcaccaaggtccccgcgccccggaacgggcgacgccgcgcccccatcagagccgcgggcatctgcatctgggacc

SEQ ID NO: 569836 - DNA, 120 bp, Artificial Sequence
  ENSG00000170619_15 (sequence is synthesized)
gccgctgcttcccagctccttacatccctggggtgcgtccttggtgaaggtcttgggaaccacagtctcctcattcaaacagttattttggaaggtaaagcctgtcactttcagcccggg

SEQ ID NO: 569837 - DNA, 120 bp, Artificial Sequence
  ENSG00000170619_16 (sequence is synthesized)
actgcccagatgactgtctaaccagacctcagaatcagaaacgtctccaaagccaggattctgaggaaagtcctgtggggagattctgaccactgtcccataggattctgattttaggat

SEQ ID NO: 569838 - DNA, 120 bp, Artificial Sequence
  ENSG00000170619_17 (sequence is synthesized)
gtccatgtcctcacaggcctgctcattttcagtcctaatcgtagaatctgaaataaacaggaacaaagacgttccttaggccctgtgctcagagaaatgataagactacaaatgcggggg

SEQ ID NO: 569839 - DNA, 120 bp, Artificial Sequence
  ENSG00000170619_18 (sequence is synthesized)
ccagggctcaaggctcccaggatagttgcactgagcactgtgaggccccaggtggaaacgtgcaagagaaggcagagcctttgacagttctcaaaagtggtttcatactttttaccttgt

SEQ ID NO: 569840 - DNA, 120 bp, Artificial Sequence
  ENSG00000170619_19 (sequence is synthesized)
tcactcattcgatagcaatgaatgttcattgctggggcagggctgggttctgtgagcagagaggtccatcctacaggcactggtgtggggcacagtccatgcagaggcaaaggagacaaa

SEQ ID NO: 569841 - DNA, 120 bp, Artificial Sequence
  ENSG00000170619_20 (sequence is synthesized)
cccggatggctctttggagtgggaaggagctcctggtgctggcgggacggtgaaggagttggcagtgggtggtcgttgactcccagggagaatggggcgccgtgaagcccgtggggagct

SEQ ID NO: 569842 - DNA, 120 bp, Artificial Sequence
  ENSG00000170619_21 (sequence is synthesized)
cctgggctcccccagcgctgtgcagagtggcctgacaagtgcctcgaggacaggagctgtgccccgctgagctctgctccagtacctggtgtgctgaggtgggcacgtgcgtttcctctg

SEQ ID NO: 569843 - DNA, 120 bp, Artificial Sequence
  ENSG00000170624_0 (sequence is synthesized)
agagaggacttatctccagcatctagcactacagagcagaggctgtgtggagaatggctgaaaaatcagaattggttgtagaagcagttttctttctggttgtgagtatgagcccggcag

SEQ ID NO: 569844 - DNA, 120 bp, Artificial Sequence
  ENSG00000170624_1 (sequence is synthesized)
acaccatgagcgctgttgcaggggagtcggcctgtgcttgacacatgtgtttcccattgatagctggagacagcccagtagctgtgagtcggtctgacaaagccatattgaagtacggag

SEQ ID NO: 569845 - DNA, 120 bp, Artificial Sequence
  ENSG00000170624_2 (sequence is synthesized)
tacggtttcaaagcagtcagaaaaagaacgggaatgctgttcaggaaattcttcaggcatgggcagggacttggctgcagttctgcagttggaaaatctgactggggcagcttctgagcg

SEQ ID NO: 569846 - DNA, 120 bp, Artificial Sequence
  ENSG00000170624_3 (sequence is synthesized)
caggctgggcctgcacacactcagcgggccgagtggccacctccttcagagctgctcagcacgccctgggatcgcgggcggttttcatcggccggtttgtgaaacggacaagagagagac

SEQ ID NO: 569847 - DNA, 120 bp, Artificial Sequence
  ENSG00000170624_4 (sequence is synthesized)
attactgccgggagtgttgagtgaagggaccaggtggagatgatgcctcaggagcagtacactcaccaccggagcaccatgcctggctctgtggggccacaggtatacaaggtggggatt

SEQ ID NO: 569848 - DNA, 120 bp, Artificial Sequence
  ENSG00000170624_5 (sequence is synthesized)
tatggctggcggaaacgatgcctgtatttctttgtcctgctcctcatgattttaatactggtgaacttggccatgaccatctggattctcaaagtcatgaacttcacaattgatggaatg

SEQ ID NO: 569849 - DNA, 120 bp, Artificial Sequence
  ENSG00000170624_6 (sequence is synthesized)
ctgaattcttacaacctctctacgccaaagaaatccagtcccgaccaggtaatgccctgtacttcaagtctgccagaaatgttacagtgaacattctcaatgaccagactaaagtgctaa

SEQ ID NO: 569850 - DNA, 120 bp, Artificial Sequence
  ENSG00000170624_7 (sequence is synthesized)
ctcagcttataacaggtccaaaagccgtagaagcttatggtaaaaaatttgaggtaaaaactgtttctggaaaattgctcttctctgcagacaataatgaagtggtagtaggagctgaaa

SEQ ID NO: 569851 - DNA, 120 bp, Artificial Sequence
  ENSG00000170624_8 (sequence is synthesized)
gattacgagttttaggagcggagggcacagtgttccctaaatctatagaaacacctaatgtcagggcagaccccttcaaagaactaaggttggagtccccaacccggtctctagtgatgg

SEQ ID NO: 569852 - DNA, 120 bp, Artificial Sequence
  ENSG00000170624_9 (sequence is synthesized)
aggccccaaaaggagtggaaatcaatgcagaagctggcaatatggaagccacctgcaggacagagctgagactggaatccaaagatggagagattaagttagatgctgcgaaaatcaggc

SEQ ID NO: 569853 - DNA, 120 bp, Artificial Sequence
  ENSG00000170624_10 (sequence is synthesized)
tacctagactgcctcatggatcctacacgcctacaggaacgaggcagaaggtcttcgagatctgcgtctgcgccaatgggagattattcctgtctcaggcaggagctgggtccacttgtc

SEQ ID NO: 569854 - DNA, 120 bp, Artificial Sequence
  ENSG00000170624_11 (sequence is synthesized)
agataaacacaagtgtctgcctctgaaagactatccatagtggacattgttggcagcataaaggccttttttggctttagacactggctgccagctatttttactagaacacagaaagcc

SEQ ID NO: 569855 - DNA, 120 bp, Artificial Sequence
  ENSG00000170624_12 (sequence is synthesized)
tatcaaagaccttgtgtgtatgtgtacgtgtgtgtgcgtgcttgagtgtgttcgcgtgtgtgggtggatataaatatatataaatatatataaataaatatatatatcctctgtataaaa

SEQ ID NO: 569856 - DNA, 120 bp, Artificial Sequence
  ENSG00000170624_13 (sequence is synthesized)
acattccccagaccattcagaatcacacagcgtattaaacactgacagaatcttcatctagatattcgagtagcagcatatcttctcttttagtgtcattacgagggagtgatggcggga

SEQ ID NO: 569857 - DNA, 120 bp, Artificial Sequence
  ENSG00000170624_14 (sequence is synthesized)
atctcagtcgcactcaagctctgagacctttgtatcaaaaataggcatttgatttcctgttttagctttagtaaggctggctaacttccccctcttcaagctaggaactggcaatgctgt

SEQ ID NO: 569858 - DNA, 120 bp, Artificial Sequence
  ENSG00000170624_15 (sequence is synthesized)
agaagtcagccgtaggaattcaaaatggctggcctaccttggctaccagacatattggggtttttgtagttgaatgaatgaggaggatgaatttcagcaaattttgaactgctcacccaa

SEQ ID NO: 569859 - DNA, 120 bp, Artificial Sequence
  ENSG00000170624_16 (sequence is synthesized)
cttctgctatcttgctccctccaaactcacagattctcctacagtcaaattaggagctgtaaatcagcacaaaataagataacagctgttcctcagtgagctggaagctacttaatggcc

SEQ ID NO: 569860 - DNA, 120 bp, Artificial Sequence
  ENSG00000170624_17 (sequence is synthesized)
tgatgggcaatgaacaaacgggtgatatgtctctgtttaagggaaaaatggcttaaaagctgttctgttctcacttctgactttaaccaaaagatttcaacccacaatgatcaggtcaat

SEQ ID NO: 569861 - DNA, 120 bp, Artificial Sequence
  ENSG00000170624_18 (sequence is synthesized)
caaaatccctaagagcagaactcctaccccaaaagaagcctggaagtctaattaagagtagcataaggaacctaattatgtttaccatgtttcttgggattggtgggaaatgtcaaaaca

SEQ ID NO: 569862 - DNA, 120 bp, Artificial Sequence
  ENSG00000170624_19 (sequence is synthesized)
tgccctttatttttaaaggcattcacaaactctctgactttgttcttcttatatattttttcagtgccgggatattcatattcctaaagccactattgtgttttctctaagaagcactac

SEQ ID NO: 569863 - DNA, 120 bp, Artificial Sequence
  ENSG00000170624_20 (sequence is synthesized)
atgccaccagaattgtgcactgaaagataatacaaactgagtgtctttatgagaatcactgtgtcccctgaggcccagcagtacctgcttccctgtatgtggaagcagcacctcattccc

SEQ ID NO: 569864 - DNA, 120 bp, Artificial Sequence
  ENSG00000170624_21 (sequence is synthesized)
gccatcagctacctctcatcaccccaccttcatcatcatgctccagggtcaccctggccagctcttgtgctgggacaggggattacaccatctctgttcaaagagggggaaatgtgccta

SEQ ID NO: 569865 - DNA, 120 bp, Artificial Sequence
  ENSG00000170624_22 (sequence is synthesized)
tgccttaagtcaatgcactcagcaaggagaagcacatcttatttatcttgttacctatagtttactttgggtgattggaggggaatgacttagttatgactggacatcttaaaagctgat

SEQ ID NO: 569866 - DNA, 120 bp, Artificial Sequence
  ENSG00000170624_23 (sequence is synthesized)
agacaagccaaatggctggcagatgatgtggatttcaaagagcccagaatgaactcatcactggcttagacagtcctggatgccatttggaaagtagtggccctgcaagcctaaatgaag

SEQ ID NO: 569867 - DNA, 120 bp, Artificial Sequence
  ENSG00000170624_24 (sequence is synthesized)
tagtatttgtaggcctgggtggcatttggatttttcttttccctcaacaaggttttactttttcttactttacaagcaagggaagttttgtgataggagagaaataaaagatttgatatt

SEQ ID NO: 569868 - DNA, 120 bp, Artificial Sequence
  ENSG00000170624_25 (sequence is synthesized)
ttttgagatgacactcaagcatcaggctgagatttgcacacatgggatgtaaaagcaagctgtgtgttgcttagtcacttacttagaagtagatggtgggggacagcggcgtgggtccta

SEQ ID NO: 569869 - DNA, 120 bp, Artificial Sequence
  ENSG00000170624_26 (sequence is synthesized)
gcctggccagtgatgctgctggcgtccagaccccagactcactccaagcactcttgttcaatatctcatgcagaagagttgggctggtcactcttaggggtgagaccccgtgattggttg

SEQ ID NO: 569870 - DNA, 120 bp, Artificial Sequence
  ENSG00000170624_27 (sequence is synthesized)
gtttgtagcactaaggtctaaaaaggaaaaccataaaagacatcagattacgctggatcagtataattaatattccatagggccatgttgccagaatctgtatgtatcaatacagggttt

SEQ ID NO: 569871 - DNA, 120 bp, Artificial Sequence
  ENSG00000170624_28 (sequence is synthesized)
ttccaagccaggaaacgccctccttggctactaggagcacctatcccatatcattcagataaacaatgatagctacaaagtcatttgtggctagataggttaagacaggtgattttttaa

SEQ ID NO: 569872 - DNA, 120 bp, Artificial Sequence
  ENSG00000170624_29 (sequence is synthesized)
agtagactgtctttgcattttgccatctgaagttcattaatctttagatgacaaaaaagcaaaaagttcccagaacgtttttgcttagattttgttctaatcaccacgtgaaggaatgag

SEQ ID NO: 569873 - DNA, 120 bp, Artificial Sequence
  ENSG00000170624_30 (sequence is synthesized)
attagcaccacaagtttcatgccaataaaagagactggtgtgatcccacatgcaaaatttaatcctaagggtagtgagatcacaaacagaataaaaataagagcaatcaaccatataaat

SEQ ID NO: 569874 - DNA, 120 bp, Artificial Sequence
  ENSG00000170624_31 (sequence is synthesized)
caagtacctattgggaacagacataacattcaatttttcatttatgctaagtgaccacagtatacaaagtaataagcaggaaatttgatatgggttaaattatgcattttgttcagattt

SEQ ID NO: 569875 - DNA, 120 bp, Artificial Sequence
  ENSG00000170624_32 (sequence is synthesized)
tggaaattggtatgcattataagtttctcaatgtacatctttttatcccaacaccctcaaactagaatatttgtcagtggtcaagagaaaaaattttacctgaattcttgggggccggcg

SEQ ID NO: 569876 - DNA, 120 bp, Artificial Sequence
  ENSG00000170624_33 (sequence is synthesized)
gggagcttttacattaaaaatctactaacgcctactttttaaaaaatgagattctttctaatctttatatatgacattttctagacaatcgcacctttgggtatattaaacagctggtat

SEQ ID NO: 569877 - DNA, 120 bp, Artificial Sequence
  ENSG00000170624_34 (sequence is synthesized)
cataacaaagaatccaaatgaaccttcaatatactagaagttctagtaggttaatattgttcagaagatttttacaaattaaaaactgatttccaaatatgttcaacatttacttctatt

SEQ ID NO: 569878 - DNA, 120 bp, Artificial Sequence
  ENSG00000170624_35 (sequence is synthesized)
tgatatctgctcaagaagtcatagaagtcttgggaaactattcgagtatcacagaggttttcaaaagcccttatggtgacatctacctaggtaaaagcctgacatgtggctttataattg

SEQ ID NO: 569879 - DNA, 120 bp, Artificial Sequence
  ENSG00000170624_36 (sequence is synthesized)
ttatgttacccaagggataaacttgaactggctttgaacatcctttaggtcattttctctttggataattttcatcgcatatccagcaactatagaccaaagtttgcttaaggtttgacc

SEQ ID NO: 569880 - DNA, 120 bp, Artificial Sequence
  ENSG00000170624_37 (sequence is synthesized)
ctagagcagaggtgggcaaactatgacctggaaaccaaatctgacttaccaccttttcctgtagttaaagttttattgtcacatagccacatacattcatttacatgttttctgatttta

SEQ ID NO: 569881 - DNA, 120 bp, Artificial Sequence
  ENSG00000170624_38 (sequence is synthesized)
cactacagcagcaggatggagtagttgtgtcagagactatgtatcccacaaagcatagattacttactatttagtcctttacaggcaaagtttcctcacccctgacctagaggtttttgt

SEQ ID NO: 569882 - DNA, 120 bp, Artificial Sequence
  ENSG00000170624_39 (sequence is synthesized)
ttccaaacagcagggagtaagcttacatttctgtgtaggtttgggaatatagttacttggcaaagtctttcaggaaggaagcccttccttatgttacatgtggaaagcctgccttccaag

SEQ ID NO: 569883 - DNA, 120 bp, Artificial Sequence
  ENSG00000170624_40 (sequence is synthesized)
acatgtggaagtaattgatccacctgccagagaaacacaggctcagaggatgcctgggaacagggaggatgggattagtggaagcttaatggaaaaggaaagttatgatcctccaagacc

SEQ ID NO: 569884 - DNA, 120 bp, Artificial Sequence
  ENSG00000170624_41 (sequence is synthesized)
cttaattgatagaccataccaggttctgcaggtcagcatcattgtgtaatgagagtgaagtaggggaccctgtggttcaaccttagaatctgtttcctgtaggctctttctgctgtctat

SEQ ID NO: 569885 - DNA, 120 bp, Artificial Sequence
  ENSG00000170624_42 (sequence is synthesized)
attcattaaagttttccacttcaccctcccatagtctagagggatgcccattccatggtcctccagagaatagttttgacttaacatgtctgtttagcccacatcacgtcagttatcaac

SEQ ID NO: 569886 - DNA, 120 bp, Artificial Sequence
  ENSG00000170624_43 (sequence is synthesized)
accgccactgtgcttactgttcctacagccacaccaggcttgaagagttagtgagaccaacaaataattggaagtattggaaaaagcaaaatacatggggacaaaaaaaatacagtgaaa

SEQ ID NO: 569887 - DNA, 120 bp, Artificial Sequence
  ENSG00000170624_44 (sequence is synthesized)
ttctttttatcaaactgatgctgtgagaaaccagatgaatgccagtttggctttatttctaagaatctgggtcttcattctctggtgtagaaggaatgcaaaaaactataacaacaacaa

SEQ ID NO: 569888 - DNA, 120 bp, Artificial Sequence
  ENSG00000170624_45 (sequence is synthesized)
caaaaacatattttgaaaagacatattctgacatctctgcttgtgtgtggtaaggcaggttcctatcagacatttatccctttggtcaagatcccttttgctcatccagggtttcatact

SEQ ID NO: 569889 - DNA, 120 bp, Artificial Sequence
  ENSG00000170624_46 (sequence is synthesized)
caatatcgcttaaaaaaaaaaaagtatcagctagggatgactctggaagtatgagtatcatggtggggaggaaggaattttttttaaatgtaaatgacccccatttaccagaccctaatc

SEQ ID NO: 569890 - DNA, 120 bp, Artificial Sequence
  ENSG00000170624_47 (sequence is synthesized)
aaagtcacttaagggaatccctcagccttttatttggaaacagttgaaataaactggcagcagctagatcagagtatcttgctttattttataaaggccaaaggtagtatgaagtttgga

SEQ ID NO: 569891 - DNA, 120 bp, Artificial Sequence
  ENSG00000170624_48 (sequence is synthesized)
ccaaaaaggtaaatagatccattccagcacctgatactgatttttcaaggctctatgaaaggtcaaaaatttcattaaacaagaccagttctccctcttccccctgtcccaagaaatctt

SEQ ID NO: 569892 - DNA, 120 bp, Artificial Sequence
  ENSG00000170624_49 (sequence is synthesized)
aggcatgaaaaggataaggaaacagctcctggaatgatacatttgcatagtgccctagtagcaggttgggaaaaagttataatataagaaacaaccttcgaaaacaggccttttatctca

SEQ ID NO: 569893 - DNA, 120 bp, Artificial Sequence
  ENSG00000170624_50 (sequence is synthesized)
aagataaaatgtctttcttgtggtctttcatcactatctccgtggtggaaggttcccctagttccaacatatttccattaaaatagtcaaagccacggcattgggatgtcagatgcctct

SEQ ID NO: 569894 - DNA, 120 bp, Artificial Sequence
  ENSG00000170624_51 (sequence is synthesized)
ctttctttgtggtaatcggaatttaaaattatacagttgcctctgaatttctcatgcacaaagccaaaccactgataagagataaagcagtctgaagcctgctgcttcagccagcacagc

SEQ ID NO: 569895 - DNA, 120 bp, Artificial Sequence
  ENSG00000170624_52 (sequence is synthesized)
acaccacacacgctcgcactttcaaaagcaatgtgatttctatggttcttaaaagctttcttcataagggagtccctgaaatttctcaaggcaggtttgaatggcaaagggaaaataatt

SEQ ID NO: 569896 - DNA, 120 bp, Artificial Sequence
  ENSG00000170624_53 (sequence is synthesized)
acttgtgggaggtcctccttttgagtattgttagagcatacatgtaaaagaaaataacctttttggggcaactcatgctcacacatgctgttttctttggttctccccctaccttccttt

SEQ ID NO: 569897 - DNA, 120 bp, Artificial Sequence
  ENSG00000170624_54 (sequence is synthesized)
tgtagatattgacagaataggaggaaatgagcatccttatttgagaaagagcaagaatgtcatgagcccttgatgcaatagtaagtgtgatgtcatcatacagtgttaatgatgctatca

SEQ ID NO: 569898 - DNA, 120 bp, Artificial Sequence
  ENSG00000170624_55 (sequence is synthesized)
aatccatcaataaacagtctcaaaccttccaacaacagtgctcactgctgctcctcaacttcagcccagcaagcagtaatatcatcacccattttgagatatgcaggtggaatagaacaa

SEQ ID NO: 569899 - DNA, 120 bp, Artificial Sequence
  ENSG00000170624_56 (sequence is synthesized)
agaaacagccactgtaatcgagaagcatgtttactgtctaaatccacctgttgcagtaggaagccagagtggggttccaaatgcctcattaagtatgtggacagcctcactagtaagtga

SEQ ID NO: 569900 - DNA, 120 bp, Artificial Sequence
  ENSG00000170624_57 (sequence is synthesized)
gtgaatttggcttcatcactgaacattagctaaggtcagcttaataacacaaatatgaggccgacttctttgcgagaagagaaaagaaaacatctgcttgatttaaaatccaccccacat

SEQ ID NO: 569901 - DNA, 120 bp, Artificial Sequence
  ENSG00000170624_58 (sequence is synthesized)
gcctagagttgtctaatagtccctcactttccaatggcttcacatcctacttctacatttggggttttttggtgaaatcagagatagctcaggatttcataaaacgagaaactccaaact

SEQ ID NO: 569902 - DNA, 120 bp, Artificial Sequence
  ENSG00000170624_59 (sequence is synthesized)
ggtctattaggttccatgggaacacttgtagccaaaggattgtctgagggcaggaagacgacacttgtcaacaaggaagacagtgtttctttagttcccatattcatctaattcatgggg

SEQ ID NO: 569903 - DNA, 120 bp, Artificial Sequence
  ENSG00000170624_60 (sequence is synthesized)
ttctaacattttggggggccatagattcttttgacaatctgagccaatctatgaaacttctccccaaaaagaaccaccccacaaaatcttgcaaaacgtaagagattttcctggatctga

SEQ ID NO: 569904 - DNA, 120 bp, Artificial Sequence
  ENSG00000170624_61 (sequence is synthesized)
agctacccgaagacatgggaagagttgtattctattattcaattttaagaatatttattaatattcactgagctattgctagccactgtgctaaacattttacatacattctcctatttc

SEQ ID NO: 569905 - DNA, 120 bp, Artificial Sequence
  ENSG00000170624_62 (sequence is synthesized)
atcctcaaaacaatcctttgagttgggttttaatatagttccaatattcggatgtgaaaactgaggcttatagtggctaagaaacttgcccaaagccactacctagaaaatggcagagct

SEQ ID NO: 569906 - DNA, 120 bp, Artificial Sequence
  ENSG00000170624_63 (sequence is synthesized)
ggaatgtaggtttaactcctgaccactatgctataaagtcaccacatgtcaaactaattttcaagttgttgggacatgtcccctactaggttttaaactagatcttccttggtagatgaa

SEQ ID NO: 569907 - DNA, 120 bp, Artificial Sequence
  ENSG00000170624_64 (sequence is synthesized)
gctatagaacttctattttccctgctttctgtagtctctcacagtgacagcatctatactaaagtatagatacctaaggggaaaatatagaaagcctgcctgaataatagaatctagaac

SEQ ID NO: 569908 - DNA, 120 bp, Artificial Sequence
  ENSG00000170624_65 (sequence is synthesized)
aacaacaaaaatattaattttttctgtgtatgcttaggtcaagcttaaaaaaaaaaaaaaaagaccggaaaatacctgggttgttagcctcacatttaggaaaaaattgtaatactcagt

SEQ ID NO: 569909 - DNA, 120 bp, Artificial Sequence
  ENSG00000170624_66 (sequence is synthesized)
tatctgtgtgtgtggctaaacaagtcagcatttctgcacacatacatctctttcctttatacttcccttcaaaagacaaatatcttacttttgatctttgacactatttggtcagtattc

SEQ ID NO: 569910 - DNA, 120 bp, Artificial Sequence
  ENSG00000170624_67 (sequence is synthesized)
ttctttacctttacttgtggcaaaactcaaggaagcgatcaaatagagggaagctcatttctatcattgtctctgtttccctataagaaagaactaccagggactcactgactgcattag

SEQ ID NO: 569911 - DNA, 120 bp, Artificial Sequence
  ENSG00000170624_68 (sequence is synthesized)
gcatacaatgtcagagctgagctgaccactctggtcctgtaatgtctttggcctcacaccttggcagccatcattaatgggccatacccttccccaggtgcagaattctcctccccagag

SEQ ID NO: 569912 - DNA, 120 bp, Artificial Sequence
  ENSG00000170624_69 (sequence is synthesized)
cactcaggccgttactaccaatttatctgagttggaaataagactcatttgccagttcttatttttaaagtggcaccctttaactttgaacctgtgtattttacactggcatcctagatt

SEQ ID NO: 569913 - DNA, 120 bp, Artificial Sequence
  ENSG00000170624_70 (sequence is synthesized)
cagcaatgaggtttggtggtgtttcaactaggaagggagaaaatgagtgcatctgaagttccttacagcttggtttctttggaatgctttcatcttctaagcaaagggatcagggtttga

SEQ ID NO: 569914 - DNA, 120 bp, Artificial Sequence
  ENSG00000170624_71 (sequence is synthesized)
tctgtaagagttaaaaagacaaagtcattttgaagaattaactcagccagggatcatgcaaaaagattagaaaccataatgcccttgttaaagccctgctgtcaacctgccttcacccag

SEQ ID NO: 569915 - DNA, 120 bp, Artificial Sequence
  ENSG00000170624_72 (sequence is synthesized)
agcttagagggccacagcagcaaagaggttggggtccatccctctctgatgtgctttttccacaacacatatctggtcctctggcaggattgtggatagagctcctcaccatacccaaaa

SEQ ID NO: 569916 - DNA, 120 bp, Artificial Sequence
  ENSG00000170624_73 (sequence is synthesized)
gactcagccccagtgccagtgctttcctggttcaacaacccaccacaaaaccttagtaaaaggatgagccaaaaatgaaaaagactcgactctacagtaagtcagtcagggatttccttt

SEQ ID NO: 569917 - DNA, 120 bp, Artificial Sequence
  ENSG00000170624_74 (sequence is synthesized)
ttaatggtttaagacatccaaatggcaagccaggaatagataccattaaagggtctcataggactaaccttaccagagccagaaatctagctctctggaagagatgcaagattctagaaa

SEQ ID NO: 569918 - DNA, 120 bp, Artificial Sequence
  ENSG00000170624_75 (sequence is synthesized)
agtaaagggaagtgtcggcacatctaaatttagtgaacacaaaattaatttttatctagtctgtgacggagggaataaagtttttcatgtatcaaccacctcccccagtcaggtttctcc

SEQ ID NO: 569919 - DNA, 120 bp, Artificial Sequence
  ENSG00000170624_76 (sequence is synthesized)
ctttttgagattatgaagaagctgagacatacttcttaaggaggtcgtgttttagaaggaaaaggcagaggctatccatcattatgctggctagatgcgcttctgaagaagccggattct

SEQ ID NO: 569920 - DNA, 120 bp, Artificial Sequence
  ENSG00000170624_77 (sequence is synthesized)
gatgttcttaaccaaaatggtgaggtcatggaagtcccatttgcttggagattttgaaaaaaaaaaaaaaaaaaaacccattcccataaagtaattgagttcagcctttggattattttt

SEQ ID NO: 569921 - DNA, 120 bp, Artificial Sequence
  ENSG00000170624_78 (sequence is synthesized)
ggtttggtttttctctggttttgggtgtgatgtaagaagagctttttagttttgttttgaataacatcaatccttgcacactctatgcaaaaattttgtaagcatttcaataatgctatg

SEQ ID NO: 569922 - DNA, 120 bp, Artificial Sequence
  ENSG00000170624_79 (sequence is synthesized)
aaaaattttgtaagcatttcaataatgctatgaattacaaggaactattttaactttattacactttctgtataaaaaatttgtatttaatattatttcgaccacagtcttgtaaaatat

SEQ ID NO: 569923 - DNA, 120 bp, Artificial Sequence
  ENSG00000170624_80 (sequence is synthesized)
gtgatatctattgaagctgggagggtcacagtatcagtgagtggtcccccaatttcttcttgagcatcgatgaattagcagtggtgtaatattgtggatctgacttcatgtgtcactaag

SEQ ID NO: 569924 - DNA, 120 bp, Artificial Sequence
  ENSG00000170624_81 (sequence is synthesized)
aacaggagatccaagactgctcttctggggatgagacttggaagaaacctccatcctcagggatttgaagaaggttatactggaacctgtgtgaaggctgagacaaccgtcccttttgtg

SEQ ID NO: 569925 - DNA, 120 bp, Artificial Sequence
  ENSG00000170624_82 (sequence is synthesized)
gatggagaggtgagggatgagaaggacagaagttcaaagagctacagcttcaacaggccaacccttcccataactggttgacctcggagttggatcctacagtgtatcaacaaaaggagc

SEQ ID NO: 569926 - DNA, 120 bp, Artificial Sequence
  ENSG00000170624_83 (sequence is synthesized)
caagcaggttttatttctgaaacaattaattgagcagcatgattataagccaaacccacaatccatcaaagtgatgatttcttatttgtaaaatgcagagataatggcatgtattccaag

SEQ ID NO: 569927 - DNA, 120 bp, Artificial Sequence
  ENSG00000170624_84 (sequence is synthesized)
tacagaattatatgaccatgaaaatgaatgctattttcaaattctctcttgtcaccttaaaataagattttgttagccaacataattaagctgtatatattatacacatctggctcaaga

SEQ ID NO: 569928 - DNA, 120 bp, Artificial Sequence
  ENSG00000170624_85 (sequence is synthesized)
ccactttgctgctggatggaatgggaaacctgaggatcacagaaaaaggtctaaagctagaaggagactctgaattcttacaacctctctacgccaaagaaatccagtcccgaccaggta

SEQ ID NO: 569929 - DNA, 120 bp, Artificial Sequence
  ENSG00000170627_0 (sequence is synthesized)
gttgctggggcttgcgtgggaggaaggtgactgtgaggaaggtgtgtgtccaccgagcacttggattcagcttcttcatttccaacatggaagaaacttacaccgactccctggaccctg

SEQ ID NO: 569930 - DNA, 120 bp, Artificial Sequence
  ENSG00000170627_1 (sequence is synthesized)
agaagctattgcaatgcccctatgacaaaaaccatcaaatcagggcttgcaggtttccttatcatcttatcaagtgcagaaagaatcatcctgatgttgcaagcaaattggctacttgtc

SEQ ID NO: 569931 - DNA, 120 bp, Artificial Sequence
  ENSG00000170627_2 (sequence is synthesized)
ccttcaatgctcgccaccaggttcctcgagctgaaattagtcatcatatctcaagctgtgatgacagaagttgtattgagcaagatgttgtcaaccaaaccaggagccttagacaagaga

SEQ ID NO: 569932 - DNA, 120 bp, Artificial Sequence
  ENSG00000170627_3 (sequence is synthesized)
ggggcacaactcactactctgacaacaacagccctgcgagcaacatagttacagaacataagaataacctggcttcaggcatgcgagttcccaaatctctgccgtatgttctgccatgga

SEQ ID NO: 569933 - DNA, 120 bp, Artificial Sequence
  ENSG00000170627_4 (sequence is synthesized)
aaaacaatggaaatgcacagtaactgaatacctatctcatcaaatgccagaccctagaagactgttgcttcttcttctaccagtgggttctcattttcctcctaatctaattatagaatg

SEQ ID NO: 569934 - DNA, 120 bp, Artificial Sequence
  ENSG00000170627_5 (sequence is synthesized)
gtaaactccctgtgactttccaaactgacaagcacacttttttcctccccccttgaatcctcatttaatgcaagaaccctcatactcagaagcttccaaataaacctttgatacagattg

SEQ ID NO: 569935 - DNA, 120 bp, Artificial Sequence
  ENSG00000170627_6 (sequence is synthesized)
aattttcagaagtttcgtatggggatggttttatataaattcaggtttttcccacaataataaatgtatttagtctcagtgctcaatagaagagatttctaatagaaaaggattcaaact

SEQ ID NO: 569936 - DNA, 120 bp, Artificial Sequence
  ENSG00000170627_7 (sequence is synthesized)
gtgaaaccatttctcttttaatgtttcacattcctgttacagatttgttctcttgtgactctgttatccataatatggacagttcttgagtcctaacattgagaggttttcccttagtgc

SEQ ID NO: 569937 - DNA, 120 bp, Artificial Sequence
  ENSG00000170627_8 (sequence is synthesized)
atagagggaatgagtattaattggagaagcttaaagtattgccactttagcactgaagattgggatgagaggaggtgaaacctcactagaaaaagggacaatgttagtgtggcccttcct

SEQ ID NO: 569938 - DNA, 120 bp, Artificial Sequence
  ENSG00000170627_9 (sequence is synthesized)
gatcatgtttaagaaaagtcatgaaaatggtgaactagtgtttccaagcatattggaagggttgagtgtatactgtctgtcaaagacttccagcatttccaggtcctagagaggaacaag

SEQ ID NO: 569939 - DNA, 120 bp, Artificial Sequence
  ENSG00000170627_10 (sequence is synthesized)
actggtaacctgcctatctgtatttttaagaacccaggaggaaagctttataatagaacattatttctgtgtttatgtataaggggttttttgtttttttaaagacaggatctcactcca

SEQ ID NO: 569940 - DNA, 120 bp, Artificial Sequence
  ENSG00000170627_11 (sequence is synthesized)
gtttttttaaagacaggatctcactccattgtccaggccaagtgcaatggcacgaacctcatagctcctggacttaagtgatctgcctgcctttgcctcctgagtagctgggactacagg

SEQ ID NO: 569941 - DNA, 73 bp, Artificial Sequence
  ENSG00000170627_12 (sequence is synthesized)
cacttggattcagcttcttcatttccaacatggaagaaacttacaccgactccctggaccctgagaagctatt

SEQ ID NO: 569942 - DNA, 120 bp, Artificial Sequence
  ENSG00000170627_13 (sequence is synthesized)
tctgtgctactgtttgagctaatttttaggtggctagaggattcactttaaaacgtttctccctggatacttgcatttcccaaaaaatgaagtcaccaaattatatgtcaaaaggcttga

SEQ ID NO: 569943 - DNA, 120 bp, Artificial Sequence
  ENSG00000170627_14 (sequence is synthesized)
tttttttttcttaaatatcacctgggagtgtgttggaaatggacaatctcagcgctcatcccagacctactgaatcagaatcagcactttaacacagtccctaagtgatgtaacacctgg

SEQ ID NO: 569944 - DNA, 120 bp, Artificial Sequence
  ENSG00000170627_15 (sequence is synthesized)
accaacatttatagaaaggcatttgttcattccttaggataaattttttcttgttttggttttcttcccattaactagtgacaaagaaccctttataaacagcatctctagagtcttctc

SEQ ID NO: 569945 - DNA, 120 bp, Artificial Sequence
  ENSG00000170627_16 (sequence is synthesized)
accctttgtaaaacagactaattttggctaacaatgagaaatcctgcctatcttctaaatttgatgtattcatgagcctaacaatgattgagtgctataactcactttttctgattattt

SEQ ID NO: 569946 - DNA, 120 bp, Artificial Sequence
  ENSG00000170627_17 (sequence is synthesized)
tgtcctccccagactttagaggtcatgctgggtaaacaagtactaaatttgtatcatattaccgtcataatgaaatttccacatagagaacacccaagatactgtcatttttacttaata

SEQ ID NO: 569947 - DNA, 120 bp, Artificial Sequence
  ENSG00000170631_0 (sequence is synthesized)
aattcggggcgggacttccgggggtcagccggcgttggctgagacgtcttcgtgccacggtgctgcctcctttccaagcgcgacccgttgagatccccttgaccacaccctcattctcag

SEQ ID NO: 569948 - DNA, 120 bp, Artificial Sequence
  ENSG00000170631_1 (sequence is synthesized)
ctggtgctcatgaaggacagaagagtcaatgtcagtacaatgtgagtgaagggctgaggtccttgtcatgcccagcctcagaactcgccgtgaggaggcagagatggagctctcagttcc

SEQ ID NO: 569949 - DNA, 120 bp, Artificial Sequence
  ENSG00000170631_2 (sequence is synthesized)
aggaccatccccctggacccctgcagcccaggcccgtgtgagagatgctcctgctgtgacccaccctggatctgcagcctgtggtaccccctgctgtagtgatactgagctggaagccat

SEQ ID NO: 569950 - DNA, 120 bp, Artificial Sequence
  ENSG00000170631_3 (sequence is synthesized)
ctgccctcactatcagcagccagattgtgacaccaggactgaagacaaggagtttcttcacaaggaagacattcatgaagatttggaatcacaggcagaaatatcagaaaactatgctgg

SEQ ID NO: 569951 - DNA, 120 bp, Artificial Sequence
  ENSG00000170631_4 (sequence is synthesized)
tgatgtttcccaggtacccgagcttggagatctgtgtgatgatgtatcagaaagagactggggagtccccgaaggcaggaggctgccacagtccctctcccaggagggggacttcacacc

SEQ ID NO: 569952 - DNA, 120 bp, Artificial Sequence
  ENSG00000170631_5 (sequence is synthesized)
agctgccatggggctccttaggggccccttaggggagaaagatctggactgtaatggttttgacagtcgcttcagtctgagcccaaacctgatggcatgtcaggaaatccctacagaaga

SEQ ID NO: 569953 - DNA, 120 bp, Artificial Sequence
  ENSG00000170631_6 (sequence is synthesized)
gaggccacatccatatgacatgggtggccagagtttccagcacagtgtggacctaactggtcatgagggggttcccacagctgaaagtccactcatatgtaatgagtgtgggaaaacctt

SEQ ID NO: 569954 - DNA, 120 bp, Artificial Sequence
  ENSG00000170631_7 (sequence is synthesized)
ccaaggaaatcctgaccttattcagcgtcaaatagtccacactggggaggcttcctttatgtgtgatgattgtgggaaaaccttcagccagaactcagttcttaaaaaccgtcatcgatc

SEQ ID NO: 569955 - DNA, 120 bp, Artificial Sequence
  ENSG00000170631_8 (sequence is synthesized)
tcatatgagtgagaaagcttaccagtgcagcgaatgtgggaaagccttccgagggcactcagacttttctaggcatcagagtcaccacagcagtgagaggccttatatgtgtaatgaatg

SEQ ID NO: 569956 - DNA, 120 bp, Artificial Sequence
  ENSG00000170631_9 (sequence is synthesized)
tggaaaagccttcagccagaactcgagccttaaaaagcaccaaaagtctcacatgagtgagaagccctatgaatgcaatgaatgtgggaaggcttttaggcggagctcaaacctcatcca

SEQ ID NO: 569957 - DNA, 120 bp, Artificial Sequence
  ENSG00000170631_10 (sequence is synthesized)
tcacacaggagagaagccttttgagtgtggcgagtgtgggaaagccttcagccagagtgcacacctgaggaagcaccagagggtccacactggagagaagccttatgagtgtaatgattg

SEQ ID NO: 569958 - DNA, 120 bp, Artificial Sequence
  ENSG00000170631_11 (sequence is synthesized)
tggcaagcccttcagtcgggtctccaacctcattaagcaccacagggttcacactggagagaagccctataagtgcagtgactgtgggaaagcatttagtcagagctccagccttattca

SEQ ID NO: 569959 - DNA, 120 bp, Artificial Sequence
  ENSG00000170631_12 (sequence is synthesized)
gcatcggagaattcacactggagaaaagcctcacgtgtgtaatgtatgtggaaaagcctttagttatagctcagtgctccgaaagcaccagatcatccacacgggagagaagccgtacag

SEQ ID NO: 569960 - DNA, 120 bp, Artificial Sequence
  ENSG00000170631_13 (sequence is synthesized)
atgcagtgtctgtgggaaggccttcagccacagctcagccctcattcagcaccagggcgtgcacacaggcgacaagccctacgcctgccacgagtgtgggaagacctttggtcgcagctc

SEQ ID NO: 569961 - DNA, 120 bp, Artificial Sequence
  ENSG00000170631_14 (sequence is synthesized)
caacctcatccttcaccagcgagtccacactggagagaagccctatgaatgtactgaatgtggaaaaaccttcagccagagctcaaccctcattcagcatcagaggattcataatgggct

SEQ ID NO: 569962 - DNA, 120 bp, Artificial Sequence
  ENSG00000170631_15 (sequence is synthesized)
gaagccccatgaatgtaaccagtgtggtaaagccttcaaccgaagctcaaatctcattcaccaccagaaagttcatactggggaaaaaccctacacctgtgttgaatgtggtaagggctt

SEQ ID NO: 569963 - DNA, 120 bp, Artificial Sequence
  ENSG00000170631_16 (sequence is synthesized)
cagccagagctcacacctcattcagcatcagataatccacacgggcgagcgcccctacaaatgcagtgagtgtgggaaagccttcagtcagcgttcggtcctcatccagcaccagaggat

SEQ ID NO: 569964 - DNA, 120 bp, Artificial Sequence
  ENSG00000170631_17 (sequence is synthesized)
tcacactggggtgaagccctatgactgtgctgcttgtgggaaagccttcagccagcgatcaaagttgatcaaacaccagttgattcacaccagggaataggctgttgggctggcaggagt

SEQ ID NO: 569965 - DNA, 120 bp, Artificial Sequence
  ENSG00000170631_18 (sequence is synthesized)
gaaaccgagcatagtttcctctccaactcctctttggccattgtctcagcctctgccacttcccagaccgaaagcctggactcagctcactgcctacatccagtggccacatagcctggg

SEQ ID NO: 569966 - DNA, 120 bp, Artificial Sequence
  ENSG00000170631_19 (sequence is synthesized)
accctcctttgaaacatcctttacaggctcccttctcactgccactgctcttgcctcttgtgatgtcttgggtttgggcttgtttttacagcttgtgaacggactgcacgtttgttacaa

SEQ ID NO: 569967 - DNA, 120 bp, Artificial Sequence
  ENSG00000170631_20 (sequence is synthesized)
gggagaagattatggaggctgcatattcatgaatagagtttattattataatgaaaagttaccaaaaaagtaaagtgacgtttggtttgagataaccatagtagtttgtttgattggtaa

SEQ ID NO: 569968 - DNA, 120 bp, Artificial Sequence
  ENSG00000170631_21 (sequence is synthesized)
gcgggacttccgggggtcagccggcgttggctgagacgtcttcgtgccacggtgctgcctcctttccaagcgcgacccgttgaggtccttgtcatgcccagcctcagaactcgccgtgag

SEQ ID NO: 569969 - DNA, 120 bp, Artificial Sequence
  ENSG00000170631_22 (sequence is synthesized)
aaaatgaactaaataaatattgcagattattacatcaccacttggatggggagaggtttccctcgaggaaactgggcatctgcactgtaagggcaggcagatgcagtcacagagggcctt

SEQ ID NO: 569970 - DNA, 120 bp, Artificial Sequence
  ENSG00000170631_23 (sequence is synthesized)
gtcacccccatcgcccatgtctcctccatttctgctgccacgtggtaggcaccttagtgctgtacctgctttgaatctcatctcccaccattcctctgagcaccctgccaagttaatctt

SEQ ID NO: 569971 - DNA, 120 bp, Artificial Sequence
  ENSG00000170631_24 (sequence is synthesized)
gagatattagttttgtctctcctgacacagaaatgtggccagtgtttcaccttcatctggcagccaaggccccttatcattggtccatagtaaccatccctgtgagctctgttcatatct

SEQ ID NO: 569972 - DNA, 120 bp, Artificial Sequence
  ENSG00000170631_25 (sequence is synthesized)
gagtccaggagcaccacccagcccttctttcttccccacatggcctatgggtgacacgtaccatcacgttgactccctgcaccatccttctgccacctttcttcacatcccctttgcaga

SEQ ID NO: 569973 - DNA, 120 bp, Artificial Sequence
  ENSG00000170631_26 (sequence is synthesized)
tccccttgaccacaccctcattctcagctggtgctcatgaaggacagaagagtcaatgtcagtacaatgtccttgtcatgcccagcctcagaactcgccgtgaggaggcagagatggagc

SEQ ID NO: 569974 - DNA, 120 bp, Artificial Sequence
  ENSG00000170631_27 (sequence is synthesized)
ggaggcatctgtgtcatcacaggtagggagggtgacggggtactctgactcaaggagccaaggctggatgtcagcaaggaagttaacctagcctggcccctggcaccttgagcagaactg

SEQ ID NO: 569975 - DNA, 120 bp, Artificial Sequence
  ENSG00000170631_28 (sequence is synthesized)
tgatttccccacttgacacgaagaggtatgacatgatggccaccagcgtcctttgatttgccctatactcctgaccccttcccaattcaacaaccaggctggtggcagccctctcccctc

SEQ ID NO: 569976 - DNA, 120 bp, Artificial Sequence
  ENSG00000170631_29 (sequence is synthesized)
aggactctactctggtccagggctttgtactgtggttacccatacagttggccatctaaagcctaggaagaaaagctgaggagtttcttgtggggaaatagaggcattcaaaagcaccct

SEQ ID NO: 569977 - DNA, 120 bp, Artificial Sequence
  ENSG00000170631_30 (sequence is synthesized)
cactttgagaggccaaggcaggaggattgtatgaggccaggagttcaggaccagccagtataacatggcaagaccctatctctactaaaaaattaagaaaggctgggtgtgatcactctc

SEQ ID NO: 569978 - DNA, 70 bp, Artificial Sequence
  ENSG00000170631_31 (sequence is synthesized)
tcaggaccagccagtataacatggcaagaccctatctctactaaaaaattaagaaaggctgggtgtgatc

SEQ ID NO: 569979 - DNA, 86 bp, Artificial Sequence
  ENSG00000170631_32 (sequence is synthesized)
gccaggtgtggtggcacatacctgtaattccacctacttggaaggctgaagcacaagaattgcttgaacctggtaggcaagtagcc

SEQ ID NO: 569980 - DNA, 120 bp, Artificial Sequence
  ENSG00000170631_33 (sequence is synthesized)
gaggctctgtctcagaaaaaaatacataaatttgaaaaaaaaaaaagcacctatatattttggggaatccaggaagtcacatgcatgcgcaggactgggtgtgtgctcagaaaagacctg

SEQ ID NO: 569981 - DNA, 120 bp, Artificial Sequence
  ENSG00000170631_34 (sequence is synthesized)
ttaagaccataagctttctcaagaactctgtctaatctctaggctcagtgaaggcagtcaactcagaaagagttgtaaacagcgtttaaaaagtaccccaacacagagtcaatccacaaa

SEQ ID NO: 569982 - DNA, 120 bp, Artificial Sequence
  ENSG00000170631_35 (sequence is synthesized)
gactgggagaagtgttttgtgttggtttttctcttgataaaatctctgtcaaaacactggttgaacacaagctaaagaaaaagacttcagtgactgtactcgacaaagaatagtctttgc

SEQ ID NO: 569983 - DNA, 120 bp, Artificial Sequence
  ENSG00000170631_36 (sequence is synthesized)
aaaaatagtttggaaaagtcactaaatgaacatgtgactctagtcttcaacaatcaaaaacagcaaagcctggaggggggataccacattttaatattcagttgtgcagtttttaacaaa

SEQ ID NO: 569984 - DNA, 120 bp, Artificial Sequence
  ENSG00000170631_37 (sequence is synthesized)
gcaaaaatcatgaagcatataacgaagcaaaaaaatatgtcccattcaaaggaaaaaagtaaactgacaaaaagtgtcctggagaaagcacagacattggacttaagtagacaaaaactt

SEQ ID NO: 569985 - DNA, 120 bp, Artificial Sequence
  ENSG00000170631_38 (sequence is synthesized)
ggagaaagcacagacattggacttaagtagacaaaaacttcaaatcaactgcctcaaatatgctcagagaggtgaaagaaaccatagagaactaggctgggcatggtggctcacacctgt

SEQ ID NO: 569986 - DNA, 120 bp, Artificial Sequence
  ENSG00000170631_39 (sequence is synthesized)
ccagcaccacggtggctcacgcctgtaacccagcaccacggtggctcacgcctgtaacccagcaccacggtggctcacgcctgtaacccagcaccacggtggctcatgcctgtcatccca

SEQ ID NO: 569987 - DNA, 120 bp, Artificial Sequence
  ENSG00000170631_40 (sequence is synthesized)
agagcctctgggggctgcctccggtagggggtctccggggagaccccggggtaaggtcgccgcgaggggccgagccaggactccgcccacaggctggtggcgttcccgcctgtcggtgcc

SEQ ID NO: 569988 - DNA, 120 bp, Artificial Sequence
  ENSG00000170631_41 (sequence is synthesized)
accattcgagctcgggcggagcgacggggtgaaggggtggcctgcccttccacacctgtgggatatctcatcaggtccttgtcatgcccagcctcagaactcgccgtgaggaggcagaga

SEQ ID NO: 569989 - DNA, 120 bp, Artificial Sequence
  ENSG00000170632_0 (sequence is synthesized)
accgccccgcgctccgctgccaggggcgggagggaggaatggttgcttcacgccccgggggaagagacgggaagctcggctctgggttgcgggccccggcgtctccgcgtggggcgcacc

SEQ ID NO: 569990 - DNA, 120 bp, Artificial Sequence
  ENSG00000170632_1 (sequence is synthesized)
gtccgacccccccctcccggtgtgcagcgccccgcaccgccccgcctcgcctgggagaagccgccgggacgcgccgggctggagtgggcggttataggctttgagctaggccgtttccgg

SEQ ID NO: 569991 - DNA, 120 bp, Artificial Sequence
  ENSG00000170632_2 (sequence is synthesized)
gaggcggagctcagaccccatttcctttctccacatccaggtcaggtggcgtttgctgtggcggctaggcccgcgtgcgctggagacctccgcgctggcccccgcgagcctcctgccctg

SEQ ID NO: 569992 - DNA, 120 bp, Artificial Sequence
  ENSG00000170632_3 (sequence is synthesized)
cccccggggcgcgggctgggtggcggcgggcctgctgctcggcgcgggcgcctgctactgcatttacaggctgacccggggtcggcggcggggcgaccgcgagctcgggatacgctcttc

SEQ ID NO: 569993 - DNA, 120 bp, Artificial Sequence
  ENSG00000170632_4 (sequence is synthesized)
gtcggcggcggggcgaccgcgagctcgggatacgctcttcgaagtccgcagaagacttaactgatggttcatatgatgatgttctaaatgctgaacaacttcagaaactcctttacctgc

SEQ ID NO: 569994 - DNA, 120 bp, Artificial Sequence
  ENSG00000170632_5 (sequence is synthesized)
tggagtcaacggaggatcctgtaattattgaaagagctttgattactttgggtaacaatgcagccttttcagttaaccaagctattattcgtgaattgggtggtattccaattgttgcaa

SEQ ID NO: 569995 - DNA, 120 bp, Artificial Sequence
  ENSG00000170632_6 (sequence is synthesized)
acaaaatcaaccattccaaccagagtattaaagagaaagctttaaatgcactaaataacctgagtgtgaatgttgaaaatcaaatcaagataaagatatacatcagtcaagtatgtgagg

SEQ ID NO: 569996 - DNA, 120 bp, Artificial Sequence
  ENSG00000170632_7 (sequence is synthesized)
atgtcttctctggtcctctgaactctgctgtgcagctggctggactgacattgttgacaaacatgactgttaccaatgaccaccagcacatgcttcacagttacattacagacctgttcc

SEQ ID NO: 569997 - DNA, 120 bp, Artificial Sequence
  ENSG00000170632_8 (sequence is synthesized)
aggtgttacttactggaaatggaaacacgaaggtgcaagttttgaaactgcttttgaatttgtctgaaaatccagccatgacagaaggacttctccgtgcccaagtggattcatcattcc

SEQ ID NO: 569998 - DNA, 120 bp, Artificial Sequence
  ENSG00000170632_9 (sequence is synthesized)
tttccctttatgacagccacgtagcaaaggagattcttcttcgagtacttacgctatttcagaatataaagaactgcctcaaaatagaaggccatttagctgtgcagcctactttcactg

SEQ ID NO: 569999 - DNA, 120 bp, Artificial Sequence
  ENSG00000170632_10 (sequence is synthesized)
ttcattgtttttcctgttacatggagaagaatgtgcccagaaaataagagctttagttgatcaccatgatgcagaggtgaaggaaaaggttgtaacaataatacccaaaatctgattggt

SEQ ID NO: 570000 - DNA, 120 bp, Artificial Sequence
  ENSG00000170632_11 (sequence is synthesized)
catatttttccaaagagtaatgcagtctggatataaacgtattttctgtcttccttataaggggattctcccagctgctaaatttaaacagtaaatatcacattttgtcattaacacagc

SEQ ID NO: 570001 - DNA, 120 bp, Artificial Sequence
  ENSG00000170632_12 (sequence is synthesized)
tataacttgccgtggttctcagatttattttggactattttgatgccaagtgaatataagagcttgtactgaaaccatttatttctttctattttgctatttgcaaatgcttgttatctt

SEQ ID NO: 570002 - DNA, 120 bp, Artificial Sequence
  ENSG00000170632_13 (sequence is synthesized)
ccctacatgaagtggcagtaacctttttcacatttaagctacccttctaccttttgaagtgatttgcagttactcatctgagacagcatcagtatttgactaaatcattgtttcacaact

SEQ ID NO: 570003 - DNA, 120 bp, Artificial Sequence
  ENSG00000170632_14 (sequence is synthesized)
gaatagtcttgttcttttagtagcaacgaaatcctaagctcttgaggccattcacctgccaacctgaccatactgctttcaaaagtcttttctcatcagtagaatctattttggtcactt

SEQ ID NO: 570004 - DNA, 120 bp, Artificial Sequence
  ENSG00000170632_15 (sequence is synthesized)
ctagtcaatgaaaaatgtaaacttttaggagagaatgtttcttaggactcacccactccattcaatgttatatataaaatagtgtgatcaatcacaatgtccatctttagacagttggtt

SEQ ID NO: 570005 - DNA, 73 bp, Artificial Sequence
  ENSG00000170632_16 (sequence is synthesized)
agtgtgatcaatcacaatgtccatctttagacagttggttaaataaattatctggtctttgaaaagaccgtgc

SEQ ID NO: 570006 - DNA, 71 bp, Artificial Sequence
  ENSG00000170632_17 (sequence is synthesized)
gatggagctccgaatgtgcttaagtggaaagatatctatgaaatatggtggttttttaaaacacaaaaatt

SEQ ID NO: 570007 - DNA, 120 bp, Artificial Sequence
  ENSG00000170632_18 (sequence is synthesized)
atatctatgaaatatggtggttttttaaaacacaaaaattatagaatatgggatcccgtgtgtgtgtgtgtgtgtttgaatgaaaaatgcttatgtattgacagaacacttctagaatga

SEQ ID NO: 570008 - DNA, 120 bp, Artificial Sequence
  ENSG00000170632_19 (sequence is synthesized)
tacccaaactcctggagtgggagtggggaatgccttctacgtacacactgttctactgtttgaattttttaatatgagcccaaattgtataatctttttttaataaaggggagaaaaatc

SEQ ID NO: 570009 - DNA, 120 bp, Artificial Sequence
  ENSG00000170632_20 (sequence is synthesized)
cgagctcgggatacgctcttcgaagtccgcaggtgccctggaagaagggacgtcagagggtcagttgtgcgggcgctcggcccggcctcagacgggaggtacctgggagtcacagtggtc

SEQ ID NO: 570010 - DNA, 120 bp, Artificial Sequence
  ENSG00000170632_21 (sequence is synthesized)
ccaaaaatagtaagtgttcattggatgggtgtacctcgtttttaaaaggagaagcaaaatgttatcagcatttgagaagacttaactgatggttcatatgatgatgttctaaatgctgaa

SEQ ID NO: 570011 - DNA, 120 bp, Artificial Sequence
  ENSG00000170632_22 (sequence is synthesized)
tatacttaaaacataatgtttgtttacttctgaaaaacacagcctaatagtgatatgattattaatgtgattatagatccctatgaagttggtcactggcatcacattcgctattattcg

SEQ ID NO: 570012 - DNA, 120 bp, Artificial Sequence
  ENSG00000170632_23 (sequence is synthesized)
taataaattaaaaagaggcattctatttgagtcttgttattactgacttttcagttataagtgataagaatgctgatattttagctagtcacccattagataacatttatttgcttatta

SEQ ID NO: 570013 - DNA, 120 bp, Artificial Sequence
  ENSG00000170632_24 (sequence is synthesized)
tcacccattagataacatttatttgcttattatttatatcattgctgggcatggtggctcattgcctgtaatcctagttactttgggaggccaaagtgagaggattgcttgaggccagga

SEQ ID NO: 570014 - DNA, 120 bp, Artificial Sequence
  ENSG00000170632_25 (sequence is synthesized)
ccccatctcaatcaatcaaccgatctatcagtttttatcactgtgcttatttatatgattgtaaaacactttcacattaaaagataacctcaaaaattcatggtagcttaccaaaagggg

SEQ ID NO: 570015 - DNA, 120 bp, Artificial Sequence
  ENSG00000170632_26 (sequence is synthesized)
ccatattgttatttatttagtcttggtaaccaaacagttccaaaatttttactgtttaagtagaaatgagctgagctttgagagatttttttgttgttgttttaaagattatatttcttt

SEQ ID NO: 570016 - DNA, 120 bp, Artificial Sequence
  ENSG00000170632_27 (sequence is synthesized)
atttcttttttgtcgggggtgaagatggggtctaagggtctcactatattgcccaggctggagtgcagtggctgttcacaggcacaatcatagcttactacatccttgaacttgaacatc

SEQ ID NO: 570017 - DNA, 120 bp, Artificial Sequence
  ENSG00000170632_28 (sequence is synthesized)
cttgagatgggaaggctcaagagatcctcccccgctcagcttcccaagtacctaggactacaggccgacaccatcatgcctggccatacttcacttaccagtaatcataatgaagatcgt

SEQ ID NO: 570018 - DNA, 120 bp, Artificial Sequence
  ENSG00000170632_29 (sequence is synthesized)
attctatctccctgacattataattgggaaaaattaggtttaaataaccgtgtgatagaaaacctgtatctctgtgataagttctctaagagtggtacaagacatttgcaatattctctc

SEQ ID NO: 570019 - DNA, 120 bp, Artificial Sequence
  ENSG00000170632_30 (sequence is synthesized)
tatctccctaacgatgtaattggaaaaatgaggtttaaataacactgttctatgataggttctctaagagtgctgccaagtgttataagagttcagaatgagacctttaaagtagaatga

SEQ ID NO: 570020 - DNA, 120 bp, Artificial Sequence
  ENSG00000170632_31 (sequence is synthesized)
acggagaaggtttcctggagtagagagaatttgagccaggcctggaagcttaggcaggactttaacaggaagacatggtgagagaacagcatgcctgagagagaaaattcatgcttgcca

SEQ ID NO: 570021 - DNA, 120 bp, Artificial Sequence
  ENSG00000170633_0 (sequence is synthesized)
atcaccgcccagagggaaggaggtcggcagtgtgaggagctgctatggtgctgagtttcctggtagagccggccgagctgaggcggtcgcggccatgaaggtgggggagtggtactaagg

SEQ ID NO: 570022 - DNA, 120 bp, Artificial Sequence
  ENSG00000170633_1 (sequence is synthesized)
atcaagtatactgttaaaagaaaacaaaaacccaagcatgaggaaggcgggtgccacgtctatgtgggcttcgtgctgtgggctgctgaatgaagtcatgggaactggagctgtcagggg

SEQ ID NO: 570023 - DNA, 120 bp, Artificial Sequence
  ENSG00000170633_2 (sequence is synthesized)
ccagcagtcagcatttgcaggagccaccggtccattcagatttacaccaaaccctgagttttccacctacccaccagcagctacggaagggcccaacatagtttgtaaagcctgtgggct

SEQ ID NO: 570024 - DNA, 120 bp, Artificial Sequence
  ENSG00000170633_3 (sequence is synthesized)
ttcattttcagtctttagaaagaagcatgtttgctgtgactgcaagaaggatttttgctccgtttgttcagtcttacaagaaaatctccgtagatgttctacttgtcacttattacaaga

SEQ ID NO: 570025 - DNA, 120 bp, Artificial Sequence
  ENSG00000170633_4 (sequence is synthesized)
gacagcatttcagcgccctcagttaatgcgactgaaggtgaaggacctgcggcagtatctcattctgagaaatatacccatagatacttgtcgtgagaaagaagacttggtggatctagt

SEQ ID NO: 570026 - DNA, 120 bp, Artificial Sequence
  ENSG00000170633_5 (sequence is synthesized)
actgtgccatcatggactaggctctgaggacgacatggacacaagcagtctgaattcttcaaggtcccagacttctagcttttttacacgttcgtttttttcaaactatacagccccctc

SEQ ID NO: 570027 - DNA, 120 bp, Artificial Sequence
  ENSG00000170633_6 (sequence is synthesized)
tgctactatgtcttcgtttcagggagagcttatggatggagaccaaacatccagatctggagtgccggcacaggtacaaagtgaaatcacttcagcaaacacagaagatgatgatgacga

SEQ ID NO: 570028 - DNA, 120 bp, Artificial Sequence
  ENSG00000170633_7 (sequence is synthesized)
cgatgatgaggatgatgatgatgaagaagaaaacgcagaggatcggaaccccgggctctccaaggagagagtgagagcttcactgtctgacttgtcaagccttgatgatgtggaaggaat

SEQ ID NO: 570029 - DNA, 120 bp, Artificial Sequence
  ENSG00000170633_8 (sequence is synthesized)
agctgaaggaaattctggctcggaattttgtcaactattctggctgttgtgaaaaatgggaactggtagagaaagtaaaccggttatacaaagagaatgaagaaaaccaaaagtcctatg

SEQ ID NO: 570030 - DNA, 120 bp, Artificial Sequence
  ENSG00000170633_9 (sequence is synthesized)
gcgagcggctgcagctgcaggatgaggaagacgacagcctgtgtcgcatctgcatggatgccgtcatcgactgtgtcctactggagtgtgggcacatggttacctgcaccaagtgcggca

SEQ ID NO: 570031 - DNA, 120 bp, Artificial Sequence
  ENSG00000170633_10 (sequence is synthesized)
agcgcatgagtgagtgtcccatctgccggcagtatgtggtgcgagccgtgcacgtgttcaagtcctgaaacaggctcccctcaccaggacagtcacccccaaacttgacccccaacattt

SEQ ID NO: 570032 - DNA, 120 bp, Artificial Sequence
  ENSG00000170633_11 (sequence is synthesized)
caatgcacagaagggactggaaagttatgttcaaaggctgaagctattttaaaacattattttgactactaagtggggacagaaagatccatcctgagttgtggaaacattggtccatgc

SEQ ID NO: 570033 - DNA, 120 bp, Artificial Sequence
  ENSG00000170633_12 (sequence is synthesized)
cgtgagcctgtctgcctgtggacacgtgagcttcccgggctcagctgggctttatcacacatcccgtgaacactcattgaagtcagcctgtttgcgccatgtgggcatcagccactgctg

SEQ ID NO: 570034 - DNA, 120 bp, Artificial Sequence
  ENSG00000170633_13 (sequence is synthesized)
tcttgggaggacacttatcctgttctcttatttccccttcatcctatttttaacttaaactgctcagatgtttgaaacttctgtcctctttggatgagatcagtgtccacaagtggccga

SEQ ID NO: 570035 - DNA, 120 bp, Artificial Sequence
  ENSG00000170633_14 (sequence is synthesized)
catggaacatgctgagcagtggctcctctgaatgttcactttattagtcatgtatattttaaatgctaacatttgatgaatgtaagtttccacattgttgctgtttctgcatttaaacat

SEQ ID NO: 570036 - DNA, 120 bp, Artificial Sequence
  ENSG00000170633_15 (sequence is synthesized)
aattgggaacaactgacattctctagtcgactgccagggccttagactccacatgtccatttttgttcaggtatagctttttatagcaagggctgcatctagcttcttttattagaagtg

SEQ ID NO: 570037 - DNA, 120 bp, Artificial Sequence
  ENSG00000170633_16 (sequence is synthesized)
tgtgtgctaaattccttattaatgtgtaatcagtttacattgttttgtatagtgaaggtgtattttcagtgctacccgctagctgattttaactttaggaataaaattagttttaaaagc

SEQ ID NO: 570038 - DNA, 120 bp, Artificial Sequence
  ENSG00000170633_17 (sequence is synthesized)
gcgcttttaccggggcacgcggcgagcgtgaccacgccccttacgtccggacgctcggtcgcctcccggggcgcggtaatcaccgcccagagggaaggaggtcggcagtgtgaggagctg

SEQ ID NO: 570039 - DNA, 120 bp, Artificial Sequence
  ENSG00000170633_18 (sequence is synthesized)
cgcatgagaatgtcttcttgtaaaggccgccttagaaatggtccagaaagcagtgcagttacgattcagaaagaccaaaggaaagtgtcggctcactcatcccccaaacgggtggttgaa

SEQ ID NO: 570040 - DNA, 120 bp, Artificial Sequence
  ENSG00000170633_19 (sequence is synthesized)
cagcttctcccttggaaagacttgcaaaatggaattgcgttgtggtctgttgtcccacgttccaaatggaaaataaaagccctcatttttgtaaagtctctcccctcccagagcccgccc

SEQ ID NO: 570041 - DNA, 120 bp, Artificial Sequence
  ENSG00000170633_20 (sequence is synthesized)
cgtatttacatacttatccttggactaactcagtttttgcaggagtttttcttctacttgcccaaactggacactcacagacatctcggctatgaactgctcacagccttccttggtgac

SEQ ID NO: 570042 - DNA, 120 bp, Artificial Sequence
  ENSG00000170633_21 (sequence is synthesized)
ttgcttgcagtacctcaggtcaatatgacagatgtttccacagcgtttgaagaaggacaggcactgatcagtgaccttattgcagtctgcagagaagaaatagtaatgtgaggtgtgaag

SEQ ID NO: 570043 - DNA, 120 bp, Artificial Sequence
  ENSG00000170633_22 (sequence is synthesized)
gccaggagccagaagcccccccgccgccagacccaggcactcagcagtggggacaggtcagagctctacatattccagtccctgctgtgctgcactaaataaaatgttatttgcttaaaa

SEQ ID NO: 570044 - DNA, 120 bp, Artificial Sequence
  ENSG00000170633_23 (sequence is synthesized)
gtcccagctgaaacagtgtaggcaggaagaagacatcttccctttgactgagcaggtcttaagcttttaacctggcctgtatatcagaattacccagggagttttcaaaaaaattctggt

SEQ ID NO: 570045 - DNA, 120 bp, Artificial Sequence
  ENSG00000170633_24 (sequence is synthesized)
agacttgcctggtgagtccaacatgcagccaaggctgaaaaccattctcttaagggcagtttcacaaccctaggcaattccttagcaagaagtactgacagcagctacgaaggcgggtgc

SEQ ID NO: 570046 - DNA, 120 bp, Artificial Sequence
  ENSG00000170633_25 (sequence is synthesized)
ctagccatttgcaggtactttgataatgacacagtgctgtcccatatccttaatggctttggcattccattatgggaccttcctgagagagttaatactctggttagattttataacttt

SEQ ID NO: 570047 - DNA, 120 bp, Artificial Sequence
  ENSG00000170633_26 (sequence is synthesized)
acacacacacaggaatttgtgttttgagctaactttatggaaggtaggttcttcatgcaattttgtagggcccaactttttggaagggtcagcagcattctgaatccaaagatgtgcatt

SEQ ID NO: 570048 - DNA, 120 bp, Artificial Sequence
  ENSG00000170633_27 (sequence is synthesized)
atgctggctttctggtcatcatggggagcatcaatgacaaggttttctctagtgataaatacagattgattcctgacctaatcagatacgttgtataagtgtaggtacaaagtgaaatca

SEQ ID NO: 570049 - DNA, 120 bp, Artificial Sequence
  ENSG00000170633_28 (sequence is synthesized)
tgccggcacaggtacgagggggtaactaattacacccagggcccggcacgcttattcttggccgtatatggtggggcctttagtgcttgatgacttctgataaacttcaagtcatgtgct

SEQ ID NO: 570050 - DNA, 120 bp, Artificial Sequence
  ENSG00000170633_29 (sequence is synthesized)
ggagtgaagcttccacacccagctgaactctgcacttaaaggctgtcctgatgtatagtgtctgctgaggtgctaggtggctccaaagtctgctgtctgaagggtcccaaaatagctcat

SEQ ID NO: 570051 - DNA, 120 bp, Artificial Sequence
  ENSG00000170633_30 (sequence is synthesized)
cagtctcttggccttagttaatttctctgtcttacacagttagacactaactgttgaagaaatggctgtgaaaaagtagcacatacacatttgtagtgttatgtgttagtgcacgtgttt

SEQ ID NO: 570052 - DNA, 120 bp, Artificial Sequence
  ENSG00000170633_31 (sequence is synthesized)
cagtgaccacagaaaacaatcagtagtgtaagttagcctaatgcccatttgtcttgctacagtgaaattgttctaatttagttaatgaaagagccatctgaattagtgaaaaaatgtagt

SEQ ID NO: 570053 - DNA, 120 bp, Artificial Sequence
  ENSG00000170633_32 (sequence is synthesized)
tatttactaattgtaattaataatattgtcccagtgaggtccttggacatcctgattgaataacatgtaaaggcttgtaattaatatttacttgtacgtgagtgattctaaactgctgaa

SEQ ID NO: 570054 - DNA, 120 bp, Artificial Sequence
  ENSG00000170633_33 (sequence is synthesized)
agaaatgttttgaacaaattttttcacgcttaattttcttctctgaagaagggggttattaaaagtagaggaaagctggatgcggtggtgtgagcctgcagtctgatacttggcaggctg

SEQ ID NO: 570055 - DNA, 120 bp, Artificial Sequence
  ENSG00000170633_34 (sequence is synthesized)
aggcaagaggattgctttagttcaggagtacgaggctgcaggtgtaccatgattgcaactgtgaatagccactgtacccccagcctgggcaacatagcaagacttttttttttgtttgga

SEQ ID NO: 570056 - DNA, 120 bp, Artificial Sequence
  ENSG00000170633_35 (sequence is synthesized)
gaaagaaggtgagttggatgaaatgttacataacaacacacatgggtcagcattcttgattgtaggttattttgaatagctattgaattttcatttctgtttataaaaatatcaaaagct

SEQ ID NO: 570057 - DNA, 120 bp, Artificial Sequence
  ENSG00000170633_36 (sequence is synthesized)
tagttccattagccattttccatctagaaaaatacttaattggagggattatattactgctcaagttttatagacattgtttctcatgttcaggcatcctttctcctgaactttgacctg

SEQ ID NO: 570058 - DNA, 120 bp, Artificial Sequence
  ENSG00000170633_37 (sequence is synthesized)
acaaaaacccaagcatgaggaagggattctgaaaacatattagattatacacacacagaagcaaagacagctgaaccttgaggccatttgaaaatcctggcactgtgccagaaagagagc

SEQ ID NO: 570059 - DNA, 120 bp, Artificial Sequence
  ENSG00000170633_38 (sequence is synthesized)
tgggctgctgctcttgcaaagaaacagaacacctttcctcttgcttttgttgactgtaatgatgtttcatgggcttatattgtttgactctgactgaggaacctgagagagtccttataa

SEQ ID NO: 570060 - DNA, 120 bp, Artificial Sequence
  ENSG00000170634_0 (sequence is synthesized)
cggctgccctcgctcccaggccccgcagtctcatttgccgcttccgacgcgtgaccccggcgcgctagcgtccgggaccggtgacaggcgcggggtgcgccaagcagtcccatgtgtccc

SEQ ID NO: 570061 - DNA, 120 bp, Artificial Sequence
  ENSG00000170634_1 (sequence is synthesized)
ctccctctcgcagccgccgcagtcgctgcgccccgagcccctctccggctcctcaacagagggctcgccgccgccatgtctaccgcccagtcactcaaatccgtggactacgaggtgttc

SEQ ID NO: 570062 - DNA, 120 bp, Artificial Sequence
  ENSG00000170634_2 (sequence is synthesized)
ggaagagtgcagggtgtttgcttcagaatgtatacagaagatgaagctaggaaaataggagtggttggctgggtgaagaataccagcaaaggcaccgtgacaggccaagtgcaggggcca

SEQ ID NO: 570063 - DNA, 120 bp, Artificial Sequence
  ENSG00000170634_3 (sequence is synthesized)
gaagacaaagtcaattccatgaagtcctggctgagcaaggttggaagccctagttctcgcattgaccgcacaaacttttctaatgaaaaaaccatctctaagcttgaatactctaatttt

SEQ ID NO: 570064 - DNA, 120 bp, Artificial Sequence
  ENSG00000170634_4 (sequence is synthesized)
acacactgaacaatagatactgtatgttcttaagactatgtatactagaataatagtagcagagtagggtgaaaaggaactttctgttctgaaagctaagcgactgtacgtgctactaaa

SEQ ID NO: 570065 - DNA, 120 bp, Artificial Sequence
  ENSG00000170634_5 (sequence is synthesized)
aatgtctgacactgaaataattttactcaactatgttttcaacaagcaaaaatatagtattctaagattaaaatgtcattacaaaatatttagtgtgaacatttaatttaaacttgtctc

SEQ ID NO: 570066 - DNA, 120 bp, Artificial Sequence
  ENSG00000170634_6 (sequence is synthesized)
atggaatctttaatttcaatgaacattacagcatatatatgttatttggcgagacatcaaataaagttaaccatttaaaaattattttcatatactgttgtctatgttgaattataaaat

SEQ ID NO: 570067 - DNA, 120 bp, Artificial Sequence
  ENSG00000170634_7 (sequence is synthesized)
cctctgaataatttgttactacggttatttgttattaaactcttcaaaaagaaccagtgattagaaataaatgtgatgatcaatataaccataaaatattatcaacaaagagttttaaaa

SEQ ID NO: 570068 - DNA, 120 bp, Artificial Sequence
  ENSG00000170634_8 (sequence is synthesized)
ggtggcggcagctggagcccaacgggctgcgccttcttcgccgtgggcccggctcggagcccccaccccaggcctcaccggcccagcgcgaggctgcctcaccggaaacacgaggccgaa

SEQ ID NO: 570069 - DNA, 120 bp, Artificial Sequence
  ENSG00000170634_9 (sequence is synthesized)
aggccgaattccaagctattgtcctgcttcgccgggggtcgcgcactccaagcggcagcccactggagtcccagtcgccacgacaggcggcagccagactcagcctgcctgcacccaggt

SEQ ID NO: 570070 - DNA, 120 bp, Artificial Sequence
  ENSG00000170634_10 (sequence is synthesized)
tcacacaaagcctgtttggtggtctcttcccacggacgcgcgagacaatgaggagatacaaggtctcgctgttctacctaggctgttctagaactcctaatgtcaagctatcctcctgcc

SEQ ID NO: 570071 - DNA, 120 bp, Artificial Sequence
  ENSG00000170634_11 (sequence is synthesized)
tatcctcctgcctcggcctcccatgctgttgggattacagctataaattcatacaattatcagagtttggttttggtcaagtcataattgtgagtgaagaaccatggaaggagaacattt

SEQ ID NO: 570072 - DNA, 84 bp, Artificial Sequence
  ENSG00000170634_12 (sequence is synthesized)
acaggccaagtgcaggggccagaagacaaagtcaattccatgctggagtgcagtggtctgatctagattcccacgtcaacctcc

SEQ ID NO: 570073 - DNA, 120 bp, Artificial Sequence
  ENSG00000170634_13 (sequence is synthesized)
tgttgttgttgttgttgttgttgttgttgctttgtagagatagtgtctcactatgttgctcaggctggtataggactcttggcttcaaatgactttcctgcctcagcctcccaaagtgct

SEQ ID NO: 570074 - DNA, 120 bp, Artificial Sequence
  ENSG00000170634_14 (sequence is synthesized)
agcctcccaaagtgctgggattacaaaaataaactttatttttgagaacagttttatatttacagaaaaattgtgaagatagtacagagactttccatatactccccacacagttttcct

SEQ ID NO: 570075 - DNA, 120 bp, Artificial Sequence
  ENSG00000170634_15 (sequence is synthesized)
tcaatttttacctaatgtccattttatgtcttaggatcccattattgtatttgctttttaattgggcattctcttgaaattaagagaagtgacattttggctgggtgcagtggctcatgc

SEQ ID NO: 570076 - DNA, 85 bp, Artificial Sequence
  ENSG00000170634_16 (sequence is synthesized)
tcaggagttcaagaccagcctgtccaacacagcgagatcgtgtctctacaaaaaatacaaaaactagctggggttggtggcacaa

SEQ ID NO: 570077 - DNA, 120 bp, Artificial Sequence
  ENSG00000170634_17 (sequence is synthesized)
aggctgaggcaagagaatcgcttgagtctgggaggcagaggttgcaatgagatgagattgcaccaccgcactccagtctgggcaatgggagtagcctgtcccaaaaaaaataaaataaaa

SEQ ID NO: 570078 - DNA, 120 bp, Artificial Sequence
  ENSG00000170634_18 (sequence is synthesized)
aaaaaataaaataaaataaaaataaagacagaagtgacatttttatgatattaaatcttcccatttaagaacacacagatgttgttccatttgcttagattttaaaatttatccttcagt

SEQ ID NO: 570079 - DNA, 120 bp, Artificial Sequence
  ENSG00000170634_19 (sequence is synthesized)
ccttcagtatgattttatggttttctttatataggtttttgtacttttcttgctaagttatttctaagtatcttaatgactttttcactattgcatatggatttctttcccatttatgct

SEQ ID NO: 570080 - DNA, 120 bp, Artificial Sequence
  ENSG00000170634_20 (sequence is synthesized)
cccatttatgcttctagttgttcatgcttaaatatggaatatctaatgacttttgtgtattaattagatatcatagtattaccttatcagatattcttattaattctatcagttttttaa

SEQ ID NO: 570081 - DNA, 120 bp, Artificial Sequence
  ENSG00000170634_21 (sequence is synthesized)
tattgggtttttaaaaaatacagttatgcaattagtaaaaatggtgtatctttgtttcagtgacttcatttgtcagacctgccatgacaatgttgaataataatagccatagcaggcatg

SEQ ID NO: 570082 - DNA, 120 bp, Artificial Sequence
  ENSG00000170634_22 (sequence is synthesized)
cctgtttggtttctgactttatttaaaatagttttattgtttcacctagtaaaaagatgtttgctgttggttttaggtaaatatactttatcacaataaattttacttttgcattccttg

SEQ ID NO: 570083 - DNA, 120 bp, Artificial Sequence
  ENSG00000170634_23 (sequence is synthesized)
gctccgcctcctccgcgtcttcgtcgccctgcggccgctggcggcccgtcgccctcggaccgatcgctaggcccccttccctggccggcgtgctgctgggccccacgcggctctcagttc

SEQ ID NO: 570084 - DNA, 120 bp, Artificial Sequence
  ENSG00000170634_24 (sequence is synthesized)
ggctctcagttcgttggcggcggcagcggccgctctgcccgccccgcaccggctctgctggtgacgctgcagccgccgggcccagaggttccggaccggcctcaagtcacttccggggcg

SEQ ID NO: 570085 - DNA, 120 bp, Artificial Sequence
  ENSG00000170634_25 (sequence is synthesized)
ggaggtaatgaggcagcacctgcaggtctaaatcgagatgggaatgttcagccttcgtgggcttcacaagattgattcctgactaccttgctgtgaatggcacaactcacaccataatgc

SEQ ID NO: 570086 - DNA, 120 bp, Artificial Sequence
  ENSG00000170634_26 (sequence is synthesized)
agcttcatatacagcttgggaagcacataggcatcaaagatattctttagaaatgtccctaacaactgcagcctttgctgtgttttgaatgatgaacctaatagccttatccgtaggctg

SEQ ID NO: 570087 - DNA, 120 bp, Artificial Sequence
  ENSG00000170634_27 (sequence is synthesized)
cacatggctgtgatcctttgtggcaacaccattgtttcttcttttctttgtcatcttggaagcaaggaccctaaaaacaatatttttattgttttattatctgcctgacacatctctatg

SEQ ID NO: 570088 - DNA, 120 bp, Artificial Sequence
  ENSG00000170634_28 (sequence is synthesized)
gtattttttctcctgctttttgggatgcagtttctttgatgtcctcttcatgagacaatgcttttgtattagcattacagagataccgtaatcttattatagaaagaatccaatgttgca

SEQ ID NO: 570089 - DNA, 120 bp, Artificial Sequence
  ENSG00000170634_29 (sequence is synthesized)
acacactaatgatacgcctcctcacagaaggaatttccgctagagagaaagatgctttctcctgcagaaataagttataaaatctagagagagctcagtcatttagttctacttgccgta

SEQ ID NO: 570090 - DNA, 120 bp, Artificial Sequence
  ENSG00000170634_30 (sequence is synthesized)
cttcaagaggatcttcactgcagttgttttggtatggagtgataggaaaaagtcagggaggttgtacggtaagcaaaattggagaatgactgcccttgttctacaaatagagtatacaga

SEQ ID NO: 570091 - DNA, 120 bp, Artificial Sequence
  ENSG00000170634_31 (sequence is synthesized)
cagatgacaatgagctccctagaaacaaacatctgaactggaaaagttgaagaatttacgggagcaagcaaaataaggtctcttcctcttattctaaataaagtttcatggagaacacta

SEQ ID NO: 570092 - DNA, 120 bp, Artificial Sequence
  ENSG00000170634_32 (sequence is synthesized)
caatttgcttaaatccagactctgaattcagaccatgtttcaatgcttggctatccctgatcagggaaaatgcagttggtctctgagtcacactgtgaaatagtattcagagctgaggct

SEQ ID NO: 570093 - DNA, 120 bp, Artificial Sequence
  ENSG00000170634_33 (sequence is synthesized)
tcatctgcagtgcttgattcaacagatccctgggctggtgtgagtaagtggaaagccattttagagaagccagaattgggttgccatctgtcacgcatgggctttgctccttacacatat

SEQ ID NO: 570094 - DNA, 120 bp, Artificial Sequence
  ENSG00000170634_34 (sequence is synthesized)
tggtgaataaaatgtttaacaggctgtagccggaaagtgatatgaagcatctcattcatgaggaaactctacattttgctttctatttaagagcattgtttaaatgtcctctgggctgtg

SEQ ID NO: 570095 - DNA, 120 bp, Artificial Sequence
  ENSG00000170634_35 (sequence is synthesized)
tttatgcatgctcagctgaatagattcttgcctaaagtccactatcatcagcacttacaagatggaacaagaggaaattgtaaaactaatacgtgctgcttaccggtgttcagagcctct

SEQ ID NO: 570096 - DNA, 120 bp, Artificial Sequence
  ENSG00000170634_36 (sequence is synthesized)
tctttcaaacatgacttatttacaaatttctccaactgaagtcatgcaatttttatttgttgtgcacttattttgtaccaatcactcttccaaccactaataaatatgtatttatacaca

SEQ ID NO: 570097 - DNA, 120 bp, Artificial Sequence
  ENSG00000170638_0 (sequence is synthesized)
cgcatggaggccggctgaggagcgccgctgcctcgcctcggtacgccgcgcggcgcggacggcgcgctccccacaggtgcaggaagccgccgcccagccatggacggggaggagcagcag

SEQ ID NO: 570098 - DNA, 120 bp, Artificial Sequence
  ENSG00000170638_1 (sequence is synthesized)
tggacggggaggagcagcagccaccgcacgaggccaacgtggaacctgttgtgccgtcagaggcttcagagccggtgcccagggtgctttctggagacccccagaacctgtccgacgtgg

SEQ ID NO: 570099 - DNA, 120 bp, Artificial Sequence
  ENSG00000170638_2 (sequence is synthesized)
acgccttcaacctgctcctggagatgaagctgaagcggcggcgtcagcggcccaacctgccgcgcactgtgacccagttggtggctgaggacgggagcagggtgtacgtggtggggacag

SEQ ID NO: 570100 - DNA, 120 bp, Artificial Sequence
  ENSG00000170638_3 (sequence is synthesized)
cccacttcagcgacgacagcaagagggacgttgtgaagaccatccgggaggtgcagcctgacgtggtggtcgtggagctctgccaatatcgtgtgtccatgctgaagatggacgagagca

SEQ ID NO: 570101 - DNA, 120 bp, Artificial Sequence
  ENSG00000170638_4 (sequence is synthesized)
cgctgctgcgggaggcccaggagctcagcctggagaagctgcagcaggccgtgaggcagaacgggctcatgtcggggctgatgcagatgctgctgctgaaggtgtctgcacacatcaccg

SEQ ID NO: 570102 - DNA, 120 bp, Artificial Sequence
  ENSG00000170638_5 (sequence is synthesized)
agcagctgggcatggccccaggtggcgagttcagggaggccttcaaggaggccagcaaggtgcctttctgcaagttccacctgggtgaccgacccatccccgtcaccttcaagagggcca

SEQ ID NO: 570103 - DNA, 120 bp, Artificial Sequence
  ENSG00000170638_6 (sequence is synthesized)
tcgcagcgctctccttctggcagaaggtcaggctggcttggggcctgtgcttcctgtcagaccccatcagcaaggatgacgtggaacgctgcaagcagaaggacctactggagcagatga

SEQ ID NO: 570104 - DNA, 120 bp, Artificial Sequence
  ENSG00000170638_7 (sequence is synthesized)
tggccgagatgattggcgagttcccagacctgcaccgcaccatcgtctcggagcgcgacgtctacctaacctacatgctgcgccaggccgcgcggcgcctcgagctgcctcgggcctctg

SEQ ID NO: 570105 - DNA, 120 bp, Artificial Sequence
  ENSG00000170638_8 (sequence is synthesized)
acgccgagcccaggaagtgcgtcccctccgtggtcgtgggcgtcgtgggcatgggccacgtgcctggcatcgagaagaactggagcaccgacctcaacatccaggagatcatgaccgtgc

SEQ ID NO: 570106 - DNA, 120 bp, Artificial Sequence
  ENSG00000170638_9 (sequence is synthesized)
cttcttcggcctgctgggctacagcctgtactggatgggccgccgcaccgcgagcctggtcctgtcgctgcccgccgcgcagtactgcctgcagagggtgaccgaggcccggcacaagta

SEQ ID NO: 570107 - DNA, 120 bp, Artificial Sequence
  ENSG00000170638_10 (sequence is synthesized)
ggagactgctccccgcccgctcgggcccctgaggagccagtgcccccgcggcacttctgggtgccaggtgcatcctagcccgcccgaggcccctgccaccccccatgggggtctgggccc

SEQ ID NO: 570108 - DNA, 120 bp, Artificial Sequence
  ENSG00000170638_11 (sequence is synthesized)
ggcctcgcctgccctcctgggccagtcacccctcccccagcccacccaaataaaggattatttaactgtctgagctcaggcctcccggcagcccctcccctcccacactgcaggggccgt

SEQ ID NO: 570109 - DNA, 120 bp, Artificial Sequence
  ENSG00000170638_12 (sequence is synthesized)
tccccagcttctggacaagacacccagctccgagggggcaggggcttataggaggggccgaggcgtgcgctgccctctcagccctggtggcaggcgggggacaatggccactgtccctac

SEQ ID NO: 570110 - DNA, 120 bp, Artificial Sequence
  ENSG00000170638_13 (sequence is synthesized)
ctcactgtgccttcctgtgctccggccacaggagcgtcggcccaggggcggctcctgggggctccagggcaggcgagactgggaaaggcccagccctggagctccagccgaccccaccgt

SEQ ID NO: 570111 - DNA, 120 bp, Artificial Sequence
  ENSG00000170638_14 (sequence is synthesized)
gcccctggcatcctggccctggccgccacctccctggcaccgtctgcctgcagggattctgtgtttttggcttttttaatgtcttaaaatcttttactcaggtaattttaatttcagaga

SEQ ID NO: 570112 - DNA, 120 bp, Artificial Sequence
  ENSG00000170638_15 (sequence is synthesized)
gaaaaactgaagtaaatgtcaaaaaacaccagccttaaatccaaagggagagaattcgtgttcttgggtctgtcccgagtgggctcgcgtgcagccaaacatcagctctgggtccaggcg

SEQ ID NO: 570113 - DNA, 120 bp, Artificial Sequence
  ENSG00000170638_16 (sequence is synthesized)
tggcctcagctgggagcctgtgtcctgagcccccggagcgaaggggtgcctggggcatcttggccctctctgggcagacaatgtgtgcacctatgtggaaggccaaggacatgggctgtg

SEQ ID NO: 570114 - DNA, 120 bp, Artificial Sequence
  ENSG00000170638_17 (sequence is synthesized)
gccaggcctgtcccgctcaggccccctgcccggcggccgtctgtgtgcggggcctccctcctggctgtccaggacacagcccgtgcagccccagcctggacccaggccatctctggttgt

SEQ ID NO: 570115 - DNA, 120 bp, Artificial Sequence
  ENSG00000170638_18 (sequence is synthesized)
gtctgtgccgactcggtgttgaatcaaatcaggtgtgcgtcaggagccggctgtgtccttcctgccacactcggggattcattccttagaaactgaaataaattctaattttggaaactc

SEQ ID NO: 570116 - DNA, 71 bp, Artificial Sequence
  ENSG00000170638_19 (sequence is synthesized)
gccactgcacccggcccgtgaaggtcttttctgaagggagctacctttgagaagtgcctgttgggacagaa

SEQ ID NO: 570117 - DNA, 120 bp, Artificial Sequence
  ENSG00000170638_20 (sequence is synthesized)
tgaagggagctacctttgagaagtgcctgttgggacagaactccctgctctggtctgaccctctgcacgctagggtggtcctgcacctgtcggggagggggccaaggacacagcactggg

SEQ ID NO: 570118 - DNA, 120 bp, Artificial Sequence
  ENSG00000170638_21 (sequence is synthesized)
ctggggcagggctctgcgctggtgctgcctgccatcccagttctgccattcccccagcgcacccccgcacccgcccctccagctgatgcctgctccctctctctgcagaacgggctcatg

SEQ ID NO: 570119 - DNA, 120 bp, Artificial Sequence
  ENSG00000170638_22 (sequence is synthesized)
tcggggctgatgcagatgctgctgctgaaggtgtctgcacacatcaccgagcagctgggcatggccccaggtggcgagttcagggaggccttcaaggaggtgggcacagggtgaggtagg

SEQ ID NO: 570120 - DNA, 120 bp, Artificial Sequence
  ENSG00000170638_23 (sequence is synthesized)
gggtggccacagggatgtggctcacaggggtggtccggggttcccactgctccccaacacccagcctctgctccaggccagcaaggtgcctttctgcaagttccacctgggtgaccgacc

SEQ ID NO: 570121 - DNA, 120 bp, Artificial Sequence
  ENSG00000170638_24 (sequence is synthesized)
caaatcccaaacaaacgtgctgtggtccctgcccggtgtccacagtgccagccccacccccccagcccgttgcccatccctgcggggctgcagccatccctctccacagcaaggatgacg

SEQ ID NO: 570122 - DNA, 120 bp, Artificial Sequence
  ENSG00000170653_0 (sequence is synthesized)
ggacgggaggaaagtatccgttccgccaaggggggaaaggaggagctggagacagattgtaggaccgagcgcgggcaggcgggaggcaacggagctaccagccgctcctctctgctatat

SEQ ID NO: 570123 - DNA, 120 bp, Artificial Sequence
  ENSG00000170653_1 (sequence is synthesized)
gaaatatgggagacgacagaccgtttgtgtgcaatgccccgggctgtggacagagatttacaaacgaggaccacctggcagttcataaacacaagcatgagatgacattgaaatttggcc

SEQ ID NO: 570124 - DNA, 120 bp, Artificial Sequence
  ENSG00000170653_2 (sequence is synthesized)
cagcccgaactgactcagtcatcattgcagatcaaacgcctactccaactagattcctgaagaactgtgaggaggtgggactcttcaatgaactagctagctcctttgaacatgaattca

SEQ ID NO: 570125 - DNA, 120 bp, Artificial Sequence
  ENSG00000170653_3 (sequence is synthesized)
agaaagctgcagatgaggatgagaaaaaggctgctgctgggccccttgacatgtctctgccttccacaccagacatcaaaatcaaagaagaagagccagtggaggtagactcatccccac

SEQ ID NO: 570126 - DNA, 120 bp, Artificial Sequence
  ENSG00000170653_4 (sequence is synthesized)
ctgatagccctgcctctagtccctgttccccaccactgaaggagaaggaggttaccccaaagcctgttctgatctctacccccacacccaccattgtacgtcctggctccctgcctctcc

SEQ ID NO: 570127 - DNA, 120 bp, Artificial Sequence
  ENSG00000170653_5 (sequence is synthesized)
acttgggctatgatccacttcatccaacccttccctccccaacctctgtcatcacacaggctccaccatccaacaggcaaatggggtctcccactggctccctccctcttgtcatgcatc

SEQ ID NO: 570128 - DNA, 120 bp, Artificial Sequence
  ENSG00000170653_6 (sequence is synthesized)
ttgctaatggacagaccatgcctgtgttgccagggcctccagtacagatgccgtctgttatatcgctggccagacctgtgtccatggtgcccaacattcctggtatccctggcccaccag

SEQ ID NO: 570129 - DNA, 120 bp, Artificial Sequence
  ENSG00000170653_7 (sequence is synthesized)
ttaacagtagtggctccatttctccctctggccaccctataccatcagaagccaagatgagactgaaagccaccctaactcaccaagtctcctcaatcaatggtggttgtggaatggtgg

SEQ ID NO: 570130 - DNA, 120 bp, Artificial Sequence
  ENSG00000170653_8 (sequence is synthesized)
tgggtactgccagcaccatggtgacagcccgcccagagcagagccagattctcatccagcaccctgatgccccatcccctgcccagccacaggtctcaccagctcagcccacccctagta

SEQ ID NO: 570131 - DNA, 120 bp, Artificial Sequence
  ENSG00000170653_9 (sequence is synthesized)
ctggggggcgacggcggcgcacagtagatgaagatccagatgagcgacggcagcgctttctggagcgcaaccgggctgcagcctcccgctgccgccaaaagcgaaagctgtgggtgtcct

SEQ ID NO: 570132 - DNA, 120 bp, Artificial Sequence
  ENSG00000170653_10 (sequence is synthesized)
ccctagagaagaaggccgaagaactcacttctcagaacattcagctgagtaatgaagtcacattactacgcaatgaggtggcccagttgaaacagctactgttagctcataaagactgcc

SEQ ID NO: 570133 - DNA, 120 bp, Artificial Sequence
  ENSG00000170653_11 (sequence is synthesized)
cagtcactgcactacagaaaaagactcaaggctatttagaaagccccaaggaaagctcagagccaacgggttctccagcccctgtgattcagcacagctcagcaacagcccctagcaatg

SEQ ID NO: 570134 - DNA, 120 bp, Artificial Sequence
  ENSG00000170653_12 (sequence is synthesized)
gcctcagtgttcgctctgcagctgaagctgtggccacctcggtcctcactcagatggccagccaaaggacagaactgagcatgccgatacaatcgcatgtaatcatgaccccacagtccc

SEQ ID NO: 570135 - DNA, 120 bp, Artificial Sequence
  ENSG00000170653_13 (sequence is synthesized)
agtctgcgggcagatgatgcctcctctggtggagaggtcctcagccagagctcgcccgcccaagagccaagagagatgtcatcttatcccctcccatctgccttggacatggcaatatgg

SEQ ID NO: 570136 - DNA, 120 bp, Artificial Sequence
  ENSG00000170653_14 (sequence is synthesized)
gtggggggaattgtgtgttgtgagtaatggacagatatggggctttttagccatgtggtcatgtacgtttgacacctgtgctgggggcctcccagccccggagcctcatagatcatcccc

SEQ ID NO: 570137 - DNA, 120 bp, Artificial Sequence
  ENSG00000170653_15 (sequence is synthesized)
cagggtggggtttctgatgcatccacagccaaaggcctttccagatggtccgaacaatcacccctgccccatgcacgtgtatctgtctcttttaacactaacccttggcacttctaggtt

SEQ ID NO: 570138 - DNA, 120 bp, Artificial Sequence
  ENSG00000170653_16 (sequence is synthesized)
tggggtttctcagttccctctcttcccactaagccgtggctgttacctttttgttccttaccagcatgccacttcctgccagatagagggaggctagatttgatgacatattacccgctg

SEQ ID NO: 570139 - DNA, 120 bp, Artificial Sequence
  ENSG00000170653_17 (sequence is synthesized)
acccagccccagccaccccatggactcaggactcaggtctcccatagctgcttatttacccgtttcctttttcctcttccttaattctagttaaaacattcacttacggagaatgtaagg

SEQ ID NO: 570140 - DNA, 120 bp, Artificial Sequence
  ENSG00000170653_18 (sequence is synthesized)
ttacctttgatgtatgaagtagcagtattttccagtttttccataagctttattccttctctctacctgccaccaaaaagaaagaaaccctcaagagttctaattctttttcatctattt

SEQ ID NO: 570141 - DNA, 120 bp, Artificial Sequence
  ENSG00000170653_19 (sequence is synthesized)
gcagagctatttgggtacctcattttgtcccttgactttagtgtagtggtggggtctttcccaccaccccactaagccttggcaacctcattttgtggccttattattaaagattgcttg

SEQ ID NO: 570142 - DNA, 120 bp, Artificial Sequence
  ENSG00000170653_20 (sequence is synthesized)
gtagtgaaaagggaagggcccagaatctgactggctgattctgtctcctcccctccctccttctttagtttaaccatcagggcagacaggaacaaagtatttcaaagcttgttccatcaa

SEQ ID NO: 570143 - DNA, 120 bp, Artificial Sequence
  ENSG00000170653_21 (sequence is synthesized)
gttagggattaatcgattcctttatgttttataagagtttaccggccaaagcatattgtcatctttggtcatttttctgctcctgcttctctctcttcattcccctatcaacattaccgc

SEQ ID NO: 570144 - DNA, 120 bp, Artificial Sequence
  ENSG00000170653_22 (sequence is synthesized)
ccctgtctctcttctgtaactacttcagactcagccctcctggaggctgtcatgtaggggactctcgagttcctttgttctaccccatctctccccctcacacatctgtctgcttttctg

SEQ ID NO: 570145 - DNA, 120 bp, Artificial Sequence
  ENSG00000170653_23 (sequence is synthesized)
agctagagtcttctgttcacaagtgcccatcaccgtctggactatcttctttctctttcaccaggttcctagcttagccactaggtcttccaggtcctccagagtttcttcaacccattt

SEQ ID NO: 570146 - DNA, 120 bp, Artificial Sequence
  ENSG00000170653_24 (sequence is synthesized)
cttctctcttctctttacatgcagtgctccaggatcttgaagcgtcatagccaagatgctgagtgggtttacttgagtataagattgaaaggagggaggaagaggagagggaaagtgcag

SEQ ID NO: 570147 - DNA, 120 bp, Artificial Sequence
  ENSG00000170653_25 (sequence is synthesized)
aactggtcccagcaaaggaccccaggttctggcctgggaaattggtgactattgctctcaaccattcttactttgaagagttgggttgcagagggagcaattcatctctcttgtccctct

SEQ ID NO: 570148 - DNA, 120 bp, Artificial Sequence
  ENSG00000170653_26 (sequence is synthesized)
tccacgttaaggcttctcatctccccttggctctgaactatgcagtttctaccaggaccataggaagcaattcagagccagaggcctgtggatagataggtcagctttaattgcctttcc

SEQ ID NO: 570149 - DNA, 120 bp, Artificial Sequence
  ENSG00000170653_27 (sequence is synthesized)
tccttctctccatctttcctacctccatcttaaacatacatacaaaataactgccagcttcctttcttattttgtctccaaaattgactgtcacaggggaatgagaaaatgttctaagct

SEQ ID NO: 570150 - DNA, 120 bp, Artificial Sequence
  ENSG00000170653_28 (sequence is synthesized)
acaagattcccgtttccttaaagtgatatcctgtcctagtgaaccagtcaggtaacaggttctgctgcatttgttttaaatttcccctcctgcttttcagagctggtgctgaacaggcca

SEQ ID NO: 570151 - DNA, 120 bp, Artificial Sequence
  ENSG00000170653_29 (sequence is synthesized)
cacccctaaagacaaaggagagaaaacacggttttctcatcctctaccatcaggtacccaacaggaataggccctgaagtgattcagactagcaaatgttatggcagatggtcaggacgc

SEQ ID NO: 570152 - DNA, 120 bp, Artificial Sequence
  ENSG00000170653_30 (sequence is synthesized)
aggttaccacatccagggacttcacttttgcctttaaaaattcacagccgtaacttgtgctcaggacttcccctttagctggctgctccctgggattttctcctgctttagagttttgtt

SEQ ID NO: 570153 - DNA, 120 bp, Artificial Sequence
  ENSG00000170653_31 (sequence is synthesized)
tcatttttttattgtcttgatttcccagtagcagccttgccctaaagcttgactgagtttatggctcctaaggagctttcctaagactcttgactatttttcttcccccttcagtcaagt

SEQ ID NO: 570154 - DNA, 120 bp, Artificial Sequence
  ENSG00000170653_32 (sequence is synthesized)
gtttttacagttaagaattaatttgtaactgcatacatgccctgccagtctgtccctgtgttgggtggctaatttatgtagcgggtcttttttatttcttagcccccatgactaattatc

SEQ ID NO: 570155 - DNA, 120 bp, Artificial Sequence
  ENSG00000170653_33 (sequence is synthesized)
tagtcctaacttcatttttatcagtgggaagatgtgtacgggacctcagtgaggagcactgccagaaccacagtaacaaaatggcactgaaataaggaagcagcaggtcagaacccccta

SEQ ID NO: 570156 - DNA, 120 bp, Artificial Sequence
  ENSG00000170653_34 (sequence is synthesized)
gatagttcttgagttggttctcagtctcactaaggaggcagaataattgctgccctgaaacttctctgatagtcaaaggtaacttcacttaccttgttattgctaccagccatgtggtca

SEQ ID NO: 570157 - DNA, 120 bp, Artificial Sequence
  ENSG00000170653_35 (sequence is synthesized)
ctctccccaaatctttgtcttccagatccatctggaccagaaccaaacatcatggaaggtgtcacttggcccttcctaaagtccatggcgtttctagaggcctaagggaggacactttca

SEQ ID NO: 570158 - DNA, 120 bp, Artificial Sequence
  ENSG00000170653_36 (sequence is synthesized)
gaaaggagctgagtgtatggtgggtgtcctgaattcgttcatgtgaatacaggactcaggcttcccaccccactccaatgtgagtgctcgatacacaagcactctagctagctgccacgt

SEQ ID NO: 570159 - DNA, 120 bp, Artificial Sequence
  ENSG00000170653_37 (sequence is synthesized)
acccaaggccacagagggaggggacagaaccaggtcttctggtctgctcactttctgccccattcccctaacagaaagtttgcttagagttgaaaagtctaagaaagcctcccacaatac

SEQ ID NO: 570160 - DNA, 120 bp, Artificial Sequence
  ENSG00000170653_38 (sequence is synthesized)
tagagaggccaacaaaaaaaaagtcatgccccctttacttactcttttgctgctggttatgcatctcaaatctgacttccttagccttcacctccctccttggccctaagcattagacca

SEQ ID NO: 570161 - DNA, 120 bp, Artificial Sequence
  ENSG00000170653_39 (sequence is synthesized)
tgtactctaagtagtggttaaagagggactgagcaaactgaacctcctctcgctcacttctctatccctgttctgttggttttggctcctttcttgattcactgccctctagcaccaccc

SEQ ID NO: 570162 - DNA, 120 bp, Artificial Sequence
  ENSG00000170653_40 (sequence is synthesized)
atcctggtagatggagtgcttaaccccaaccgtgccctatgtacagcctgaaccaccaaacagacaccaaaaaaattcttcctgtggtttctggggctcccctgctccacactgagaggc

SEQ ID NO: 570163 - DNA, 120 bp, Artificial Sequence
  ENSG00000170653_41 (sequence is synthesized)
tccttaaaggtgctagcccctgatacagctatccccgccagttttctccttttttcataacttccttcccatccccaaatcattaatttttcattaatattgtacattatatacacagga

SEQ ID NO: 570164 - DNA, 120 bp, Artificial Sequence
  ENSG00000170653_42 (sequence is synthesized)
aggaaatacattattttttttaaatttcataaccagcctgtttagattccagtcttcctagctatatcacatatgccttgttgatatgctctttctgctttctttagacttaatgtttga

SEQ ID NO: 570165 - DNA, 120 bp, Artificial Sequence
  ENSG00000170653_43 (sequence is synthesized)
cgggggtgggggtgtctggaagaacaggaaaggtggggatcctaaggcagattaaaggactccctccaccccactacagcctcccataactctagtcatccctctcatagtacaggactg

SEQ ID NO: 570166 - DNA, 120 bp, Artificial Sequence
  ENSG00000170653_44 (sequence is synthesized)
atttctctgtgtctgtttgtacacacaaatgtgcatacagacataaattcccccaccccataccaaggtggttacctagcaggaatgagcgtaggtggctgctggccaccattaccaccg

SEQ ID NO: 570167 - DNA, 120 bp, Artificial Sequence
  ENSG00000170653_45 (sequence is synthesized)
tctgcatcagctgtgttgtctctctttggggtaaagtcctaccccagaatgagaaaaggctggggagagtagggcaggttaaaggagcttatgtcctctgtagatgtaggtttgtatcat

SEQ ID NO: 570168 - DNA, 120 bp, Artificial Sequence
  ENSG00000170653_46 (sequence is synthesized)
agctactagggtttatttttttaatggggggctaatagcacagagttatctcaccagcagtagctactggtgagtgatgttttagctgtaagaagtggctatgagcaatagtttcactga

SEQ ID NO: 570169 - DNA, 120 bp, Artificial Sequence
  ENSG00000170653_47 (sequence is synthesized)
ctttaccttagggcagtgccacagtaatctgggaacttgttagaaatacacattctcaggccccatcccagacttattgaatcacagactctgggggcagggtttaaaagcactccaagt

SEQ ID NO: 570170 - DNA, 120 bp, Artificial Sequence
  ENSG00000170653_48 (sequence is synthesized)
gattctaatgcacactaaaggttgagaaccatttcttagggataagctgggaaatttttacaggtgtggaggatatttcaaatacatcttttgcctttgcactaacatgctttcatttct

SEQ ID NO: 570171 - DNA, 120 bp, Artificial Sequence
  ENSG00000170653_49 (sequence is synthesized)
ttcagtctcttcctccattccctttaaagtcttccccatcatatcactgatctcaaaagctagatttgtcttcattttagtcgtatccctaaaaccatgcattggtctggacaggagttg

SEQ ID NO: 570172 - DNA, 120 bp, Artificial Sequence
  ENSG00000170653_50 (sequence is synthesized)
tcccatattcccttgcagactggtcactccatgttctctgttacagtaaggaccagccaagcttcagctgtcccattcctccccctacaacacacacacctttcaggcagggaggagatg

SEQ ID NO: 570173 - DNA, 120 bp, Artificial Sequence
  ENSG00000170653_51 (sequence is synthesized)
agcttccagccccaagagtggaggctgccacatcctaacatagtatctattgaaaaggaagcagtgtgtatctatgattatatctctgttcatctatatatttttgacatgtagcaacac

SEQ ID NO: 570174 - DNA, 120 bp, Artificial Sequence
  ENSG00000170653_52 (sequence is synthesized)
ctctccatcttatcaaggaactcaactcggtctgggtctccccagtgcccagtggtggcctttgacaggtaggaggatgcagtgctgcaggctattttgttttttgttacaaaactgtct

SEQ ID NO: 570175 - DNA, 120 bp, Artificial Sequence
  ENSG00000170653_53 (sequence is synthesized)
tttcccttttcccctccacctgattcagcatgatccctgtgagctggttctcacaatctcctgggactgggctgaggcaggggcttcgctctattctccctaaccatactgtcttccttt

SEQ ID NO: 570176 - DNA, 120 bp, Artificial Sequence
  ENSG00000170653_54 (sequence is synthesized)
cccccttgccacttagcagttatccccccagctatgccttctccctccctcccttgccctggcatatattgtgccttatttatgctgcaaatataacattaaactatcaagtgaaccact

SEQ ID NO: 570177 - DNA, 120 bp, Artificial Sequence
  ENSG00000170653_55 (sequence is synthesized)
tggttaaaacacaaaatcatgggcttagtagagtaaaaccagtaaaaccagatagtagtcactaatcccagtcagccattcaggtctttaggagttccagatgatggatcagcacaagtc

SEQ ID NO: 570178 - DNA, 120 bp, Artificial Sequence
  ENSG00000170653_56 (sequence is synthesized)
tgtcgtcaccgaaaattagtcctcttgttcttccaggggagtattagtttaataatcggttttttaaaaaatatttatattataaatatgttgaagatgttaaaaggtgataaattactc

SEQ ID NO: 570179 - DNA, 120 bp, Artificial Sequence
  ENSG00000170653_57 (sequence is synthesized)
agattttgttggataacatatttgttgccaaattccactcttttctgagctgatcagacttctcagctacactgtttttttgaatcagcaagtcaataaacatttatcaaatttccactc

SEQ ID NO: 570180 - DNA, 120 bp, Artificial Sequence
  ENSG00000170653_58 (sequence is synthesized)
agaggcttgaagtgtggggagaacttggtctcctctctgctatatgaaatatgggagacgacagaccgtttgtgtgcaatgccccgggctgtggacagatcaaacgcctactccaactag

SEQ ID NO: 570181 - DNA, 120 bp, Artificial Sequence
  ENSG00000170653_59 (sequence is synthesized)
gacagaccgtttgtgtgcaatgccccgggctgtggacaggtacgtttacaatatactttattgtgaatgtctcgttgtgaatcaaagtggctgttttatcactaaggcaaagagtttaaa

SEQ ID NO: 570182 - DNA, 120 bp, Artificial Sequence
  ENSG00000170653_60 (sequence is synthesized)
gccagtattttacgtgatcactggaggtaatcagatcagaggatttgcagtgtgtaaatccaagttatgaggaagtgtaggcactctaccgtaatgaaatctgccttgctgtcttccata

SEQ ID NO: 570183 - DNA, 120 bp, Artificial Sequence
  ENSG00000170653_61 (sequence is synthesized)
ccctgactgccagccccaggcacagaggaccaggcctggtcatcctcacagactctgaccctggctcttcccactcctcttccactccaggacatcctacttaacccctcctgacatgag

SEQ ID NO: 570184 - DNA, 120 bp, Artificial Sequence
  ENSG00000170653_62 (sequence is synthesized)
ctaagtatgagactgagaagactggaaggaaataggaggcaaaattgaggactcctacaaaagggaagcttggggacatagtaatgagacttgctgtggttaccagaggctggtctcacc

SEQ ID NO: 570185 - DNA, 120 bp, Artificial Sequence
  ENSG00000170653_63 (sequence is synthesized)
ggcacacaacctaagctaagtcagtcagtcagtaaactgcatgtactgagtgtctcaactgcttataattttataactccattctgaatgttctggggaccccacgctgatgataaagac

SEQ ID NO: 570186 - DNA, 71 bp, Artificial Sequence
  ENSG00000170653_64 (sequence is synthesized)
agccccaaggaaagctcagagccaacgggttctccagcccctgtgattcagcacagctcagcaacagcccc

SEQ ID NO: 570187 - DNA, 120 bp, Artificial Sequence
  ENSG00000170653_65 (sequence is synthesized)
atttcttactcggtagctttagtcagcaaactcaaccatctgatcctcagtttcttctcatcagattttaacatccatctgctttttctgctcacttcagacctagcagggaatcaaacg

SEQ ID NO: 570188 - DNA, 120 bp, Artificial Sequence
  ENSG00000170667_0 (sequence is synthesized)
gcccagtccagcgcccgccgcccgccaccccggaccccggtgtctggcttcccccgagccggcaccccgcgatggccaagcgcagctcgctgtacatccgcatcgtggaggggaagaacc

SEQ ID NO: 570189 - DNA, 120 bp, Artificial Sequence
  ENSG00000170667_1 (sequence is synthesized)
ttcccgccaaggacatcactggcagcagcgacccctactgcatcgtgaaggtggacaatgagcccatcatcaggacagccacagtgtggaagaccctgtgccccttctggggtgaggagt

SEQ ID NO: 570190 - DNA, 120 bp, Artificial Sequence
  ENSG00000170667_2 (sequence is synthesized)
accaagtgcacctgccgcccaccttccacgctgtggctttctatgtcatggatgaggatgccctcagccgggacgacgttatcggaaaggtctgccttacaagggacaccatagcctctc

SEQ ID NO: 570191 - DNA, 120 bp, Artificial Sequence
  ENSG00000170667_3 (sequence is synthesized)
accctaagggtttcagcgggtgggcccacctgacagaggtcgaccccgacgaggaggtgcagggcgagatccacctgcggctggaagtgtggccaggggcccgggcctgccggctacgct

SEQ ID NO: 570192 - DNA, 120 bp, Artificial Sequence
  ENSG00000170667_4 (sequence is synthesized)
gctctgtgctggaggccagggatctggccccaaaggaccgcaatggcacatctgaccccttcgtccgagtgcgctacaagggccggacacgggagacctcgatcgtgaagaagtcatgct

SEQ ID NO: 570193 - DNA, 120 bp, Artificial Sequence
  ENSG00000170667_5 (sequence is synthesized)
acccacgctggaatgagacgtttgaatttgagctgcaggagggggccatggaggcgctgtgcgtggaggcctgggactgggaccttgtcagccgaaacgacttcctgggcaaagtggtga

SEQ ID NO: 570194 - DNA, 120 bp, Artificial Sequence
  ENSG00000170667_6 (sequence is synthesized)
ttgatgtccagagactgcgggtggtgcagcaggaggagggctggttccggctgcagcccgaccagtccaagagccggcggcatgacgagggcaacctgggctccttgcagctggaggtgc

SEQ ID NO: 570195 - DNA, 120 bp, Artificial Sequence
  ENSG00000170667_7 (sequence is synthesized)
ggctgcgggacgagacggtgctgccctccagctactaccagccactggtgcacctgctgtgccacgaggtcaagctgggcatgcagggcccagggcagctgatcccactcatcgaggaga

SEQ ID NO: 570196 - DNA, 120 bp, Artificial Sequence
  ENSG00000170667_8 (sequence is synthesized)
caaccagcaccgagtgtcgccaggacgtggccacgaacctgctcaagctcttcctggggcaggggctggccaaggacttcctggacctgctcttccagctggagctgagtcgcaccagtg

SEQ ID NO: 570197 - DNA, 120 bp, Artificial Sequence
  ENSG00000170667_9 (sequence is synthesized)
agaccaacaccctgttccggagcaactctctggcctcaaagtccgtggagtcttttctgaaggtggccgggatgcagtacctgcacggcgtcctgggccccatcatcaacaaggtgtttg

SEQ ID NO: 570198 - DNA, 120 bp, Artificial Sequence
  ENSG00000170667_10 (sequence is synthesized)
aggagaagaagtacgtggagctggaccccagcaaagtggaagttaaggatgtagggtgctccgggctgcaccgcccgcagaccgaggccgaggtgctggagcagagcgcgcagacgctgc

SEQ ID NO: 570199 - DNA, 120 bp, Artificial Sequence
  ENSG00000170667_11 (sequence is synthesized)
gggccctgctgagcgcgctcagccgctcggttcgcgcgtgccccgccgtggtgcgcgccaccttccgccagctcttccggcgcgtgcgcgagcgcttccccggcgcccagcacgagaatg

SEQ ID NO: 570200 - DNA, 120 bp, Artificial Sequence
  ENSG00000170667_12 (sequence is synthesized)
tcttctctcccgccatcatgtcgcccaagctcttccacctgcgggagcgccacgcggacgcccgcaccagccgcaccctgctcctgttggccaaggcagtccagaacgtgggcaacatgg

SEQ ID NO: 570201 - DNA, 120 bp, Artificial Sequence
  ENSG00000170667_13 (sequence is synthesized)
acacgccggcttccagggccaaggaggcttggatggagccgctgcagcccaccgtgcaccagggcgtggcgcagctgaaggacttcatcaccaagctcgtggacatcgaggagaaggacg

SEQ ID NO: 570202 - DNA, 120 bp, Artificial Sequence
  ENSG00000170667_14 (sequence is synthesized)
agctggacctgcagcggacgctgagtttgcaggcgccacctgtgaaggaggggccactcttcatccacaggaccaagggcaagggccccctcatgtcctcctccttcaagaagctctact

SEQ ID NO: 570203 - DNA, 120 bp, Artificial Sequence
  ENSG00000170667_15 (sequence is synthesized)
tctccctcactaccgaggccctcagcttcgcgaagacgcccagctccaagaaaagcgccctcatcaagttagccaacatccgggcagcggaaaaggttgaggaaaagagctttggcggct

SEQ ID NO: 570204 - DNA, 120 bp, Artificial Sequence
  ENSG00000170667_16 (sequence is synthesized)
cgcacgtcatgcaggtcatctacacggacgacgccggcaggccccagactgcctacctgcagtgcaagtgtgtgaatgagcttaaccagtggctgtctgcgctgcggaaggtgagcatca

SEQ ID NO: 570205 - DNA, 120 bp, Artificial Sequence
  ENSG00000170667_17 (sequence is synthesized)
acaacaccggactgctgggctcctaccaccctggcgtcttccgtggggacaagtggagctgctgccaccaaaaagagaagacaggtcagggctgcgataagacccggtcacgggtgaccc

SEQ ID NO: 570206 - DNA, 120 bp, Artificial Sequence
  ENSG00000170667_18 (sequence is synthesized)
tgcaggagtggaatgaccctcttgaccatgaccttgaggcccagctcatctaccggcacctgctgggcgtggaggccatgctgtgggagaggcaccgggagctgagcgggggcgcagagg

SEQ ID NO: 570207 - DNA, 120 bp, Artificial Sequence
  ENSG00000170667_19 (sequence is synthesized)
caggcacggtgcccacgagccctggcaaagtccccgaggactcattggcccggctgctccgggtgctgcaggacctccgcgaggcccatagctccagcccggccggctccccaccctcag

SEQ ID NO: 570208 - DNA, 120 bp, Artificial Sequence
  ENSG00000170667_20 (sequence is synthesized)
agcccaactgcctcctggagctgcagacgtgaggcccgccctacgctccccttgctgagtcccctgccaagcgctcggagcccccccaggacactctgcaccccctcaccccggtcctcc

SEQ ID NO: 570209 - DNA, 120 bp, Artificial Sequence
  ENSG00000170667_21 (sequence is synthesized)
tcattagggtgcagggcctaggtctcttccaggtgggggaggggggagagtcaggaataaggggatccccagaagtgcagagctgagcaggcttgggcctgtcatggctggccggaagtg

SEQ ID NO: 570210 - DNA, 120 bp, Artificial Sequence
  ENSG00000170667_22 (sequence is synthesized)
tccccagctccctacagacgctgtagccatcactgcctctccagggaccctcctctcctgcccaggacagacccagccagaaccactgctaggatgggccgcacccaggggtctggcctc

SEQ ID NO: 570211 - DNA, 120 bp, Artificial Sequence
  ENSG00000170667_23 (sequence is synthesized)
cagggacctagagaatgggagggagaacggggccccaggagacccggccgccaccccacccgctacccttgggtgccacagggctgtgctgttgccaacagtaaacctgctcttactgtc

SEQ ID NO: 570212 - DNA, 120 bp, Artificial Sequence
  ENSG00000170667_24 (sequence is synthesized)
cccgctgggctaggctgggccgggttggactgggctggggcgaggggtgaagagcggtggggaaccagggagcgctggggaggaccagggaggctgtgtcccagcgagggtcagggacgg

SEQ ID NO: 570213 - DNA, 120 bp, Artificial Sequence
  ENSG00000170667_25 (sequence is synthesized)
cctcactaccgaggccctcagcttcgcgaagacgcccagctccaaggagttcccttttgtgtcagggtccagagccactgggaaaagtagtgatatcagggccaccaaatatatttggcg

SEQ ID NO: 570214 - DNA, 120 bp, Artificial Sequence
  ENSG00000170667_26 (sequence is synthesized)
ggttctggaatacctacgagcgtggccaaggggccagcggcggctgaaatccagcccacaccagcctcctgggctcctaccatcccggtgccttccgtggggacaagtggagctgctgcc

SEQ ID NO: 570215 - DNA, 120 bp, Artificial Sequence
  ENSG00000170667_27 (sequence is synthesized)
ctgtgcacctgcagggacctaacccaaggaatgctggcccctccaggagctctgggcagaaagggtcccgtggaccaggtggtttgggaaatgccacgtgatgtgtgtgatgcatatgag

SEQ ID NO: 570216 - DNA, 83 bp, Artificial Sequence
  ENSG00000170667_28 (sequence is synthesized)
tgatgcatatgagtgaattcgctgaaggctctaaggaggcccgaaaacacgttagaatcccatttcagacacagactttcact

SEQ ID NO: 570217 - DNA, 120 bp, Artificial Sequence
  ENSG00000170667_29 (sequence is synthesized)
ctgcctcaacctccccagtagctgggatgaccggcactcgccaccaagcctagctaatttttttgtattttgactagagatggggtttcaccatgttagtcaagctgctcttgttttgtt

SEQ ID NO: 570218 - DNA, 77 bp, Artificial Sequence
  ENSG00000170667_30 (sequence is synthesized)
caagcctagctaatttttttgtattttgactagagatggggtttcaccatgttagtcaagctgctctactgagtctc

SEQ ID NO: 570219 - DNA, 120 bp, Artificial Sequence
  ENSG00000170667_31 (sequence is synthesized)
gattctcctgcctcagcctcccaagtactacaggcgcaagccactgcacccagtcagggctgcgataagacccggtcacgggtgaccctgcaggagtggaatgaccctcttgaccatgac

SEQ ID NO: 570220 - DNA, 120 bp, Artificial Sequence
  ENSG00000170667_32 (sequence is synthesized)
accccggaccccggtgtctggcttcccccgagccggcaccccgcgatggccaagcgcagctcgctgtacatccgcatcgtggaggggaagaaccttcccgccaaggacatgtgagcgcgg

SEQ ID NO: 570221 - DNA, 120 bp, Artificial Sequence
  ENSG00000170667_33 (sequence is synthesized)
gggctctgggcatccctgttcccccctctttcttccccccactcttctggggtcgggggttcctttcccttcccagttgctgtccctgggtcccctctttcatgtcccacaggccacaga

SEQ ID NO: 570222 - DNA, 120 bp, Artificial Sequence
  ENSG00000170667_34 (sequence is synthesized)
gcccagtgtgtccaaccagctgttctctcctcaaagcagcccccaagcaagtcccttctctagggtgtccctgaggacagcacagaggcgggactcagagaccccattcctcttcacgca

SEQ ID NO: 570223 - DNA, 120 bp, Artificial Sequence
  ENSG00000170667_35 (sequence is synthesized)
gcccttaccccaagccctctagctgtgtggctggcagtgttggccacgtaggggctcccatccccccaccattgtgtcacatgggctgccaggctcagctcccagctgcgtccacagtga

SEQ ID NO: 570224 - DNA, 120 bp, Artificial Sequence
  ENSG00000170667_36 (sequence is synthesized)
cctggatcagggtggggacaaggactggaccctccttctccagaaggccttcagctcttgccttgccatgcagtcacctccttccccctctgaccccagatcccaaaggtgcaccgttgc

SEQ ID NO: 570225 - DNA, 120 bp, Artificial Sequence
  ENSG00000170667_37 (sequence is synthesized)
cccagcccctttctggccccatggggtttctctgatgccttcatcatagaggcccggggctggtccgatggttggcaaaacttgactccggcccagtccccactcttggggacttagaac

SEQ ID NO: 570226 - DNA, 120 bp, Artificial Sequence
  ENSG00000170677_0 (sequence is synthesized)
agtcgcgccggcgctgggcgaggaagcggagccgggccgcctccggaaaatggctccaaaggttaaatgaagcaggaaaaatacatagatgcagccttgcagcctctccagatgtttggg

SEQ ID NO: 570227 - DNA, 120 bp, Artificial Sequence
  ENSG00000170677_1 (sequence is synthesized)
gataatattccagatagaaatattgatcccttggattaggtaactagtcataatgaagaaaattagtcttaaaaccttacggaaatcttttaacttgaataaaagtaaagaagaaactga

SEQ ID NO: 570228 - DNA, 120 bp, Artificial Sequence
  ENSG00000170677_2 (sequence is synthesized)
tttcatggtagtacaacaaccatcgctagccagtgactttggaaaagatgattccttatttggtagctgctatggtaaagatatggccagctgcgatatcaacggtgaagatgaaaaagg

SEQ ID NO: 570229 - DNA, 120 bp, Artificial Sequence
  ENSG00000170677_3 (sequence is synthesized)
cggaaaaaacagatcaaaaagcgagagcctgatgggtacgctaaaaaggcggctttctgcaaaacagaagtcaaaaggcaaggcgggcacaccctctgggagctctgccgacgaggacac

SEQ ID NO: 570230 - DNA, 120 bp, Artificial Sequence
  ENSG00000170677_4 (sequence is synthesized)
cttctcctcctcctcagcacccatagtctttaaagacgtgagagctcagaggccgataaggtccacgtcgctccgcagccatcactacagtcccgcgccgtggcctctgcggcccacaaa

SEQ ID NO: 570231 - DNA, 120 bp, Artificial Sequence
  ENSG00000170677_5 (sequence is synthesized)
ctccgaggagacctgcatcaagatggaggtgagagtcaaggccttggttcactcttccagcccgagtccagccctgaatggcgtccggaaggatttccacgacctccagtctgagaccac

SEQ ID NO: 570232 - DNA, 120 bp, Artificial Sequence
  ENSG00000170677_6 (sequence is synthesized)
gtgccaggagcaagccaattcactgaagagctcggcttctcataatggagacctgcatcttcacctggatgaacatgtgcctgtcgttattggacttatgcctcaggactacattcagta

SEQ ID NO: 570233 - DNA, 120 bp, Artificial Sequence
  ENSG00000170677_7 (sequence is synthesized)
tactgtgcctttagatgaggggatgtatcctttggaaggatcacggagctattgtctggacagctcttctcccatggaagtctctgcggttcctcctcaagtgggagggcgcgctttccc

SEQ ID NO: 570234 - DNA, 120 bp, Artificial Sequence
  ENSG00000170677_8 (sequence is synthesized)
cgaggatgagagtcaggtagaccaggacctagttgtcgccccagagatcttcgtggatcagtccgtgaatggcttgttgattggcaccacgggagtcatgttgcagagcccgagagcggg

SEQ ID NO: 570235 - DNA, 120 bp, Artificial Sequence
  ENSG00000170677_9 (sequence is synthesized)
tcacgatgatgtccctccactctcaccattgctacctccaatgcagaataatcaaatccaaaggaacttcagtggactcactggcacagaagcccacgtggctgaaagtatgcgctgtca

SEQ ID NO: 570236 - DNA, 120 bp, Artificial Sequence
  ENSG00000170677_10 (sequence is synthesized)
tttgaattttgatccgaactctgctcctggggttgcaagagtttatgactcagtgcaaagtagtggtcccatggttgtgacaagccttacagaggagctgaaaaaacttgcaaagcaagg

SEQ ID NO: 570237 - DNA, 120 bp, Artificial Sequence
  ENSG00000170677_11 (sequence is synthesized)
atggtactggggaccaatcacacgttgggaggcagaagggaagctagcaaacgtgccagatggttcttttcttgttcgggacagttctgacgaccgttaccttttaagcttgagctttcg

SEQ ID NO: 570238 - DNA, 120 bp, Artificial Sequence
  ENSG00000170677_12 (sequence is synthesized)
ctcccatggtaaaacacttcacactagaattgagcactcaaatggtaggtttagcttttatgaacagccagatgtggaaggacatacgtccatagttgatctaattgagcattcaatcag

SEQ ID NO: 570239 - DNA, 120 bp, Artificial Sequence
  ENSG00000170677_13 (sequence is synthesized)
ggactctgaaaatggagctttttgttattcaaggtctcggctgcctggatctgcaacttaccccgtcagactgaccaacccagtgtcccggttcatgcaggtgcgctcgttgcagtacct

SEQ ID NO: 570240 - DNA, 120 bp, Artificial Sequence
  ENSG00000170677_14 (sequence is synthesized)
gtgtcgttttgttatacgtcagtataccagaatagacttaattcagaaactgcctttgccaaacaaaatgaaggattatttacaggagaagcactactgaaagattgagaaccctgcatc

SEQ ID NO: 570241 - DNA, 120 bp, Artificial Sequence
  ENSG00000170677_15 (sequence is synthesized)
ttgcactttgggaataagaacaagagattgaaatacagtttacaaactttcattgccatcaaaatcttttgctgccataactatttcagttttatgtgtaaaagagtcatcagtttgttt

SEQ ID NO: 570242 - DNA, 120 bp, Artificial Sequence
  ENSG00000170677_16 (sequence is synthesized)
aggggtggggaagtgtcagcaaggtgtcttgggtttattttggttctttaaaaaagggaagtcttgaggttttagaggtgtgaattatgtttcatcaatgtgcagaataatcacaatgtg

SEQ ID NO: 570243 - DNA, 120 bp, Artificial Sequence
  ENSG00000170677_17 (sequence is synthesized)
aattatcaaattctcctcaatgccccccccgcccagtcctttgctgctatccactgtgatttttatgcattaaaagcacatttcatgtgtattcaaccctaagtaaagttgaatgaaact

SEQ ID NO: 570244 - DNA, 120 bp, Artificial Sequence
  ENSG00000170677_18 (sequence is synthesized)
taacagaatggaaattgctatgtctttttaaatggtccattttcaaaagacagtgttgaataaacatacctgtgtgataaaacacagaatttacatatacactgaagatgagtttttaat

SEQ ID NO: 570245 - DNA, 120 bp, Artificial Sequence
  ENSG00000170677_19 (sequence is synthesized)
ctcttactttaaaaagatttatttagaatcgtgaattgacataatcttgggtaatggaacggagatctgcaacatatcttttaacaacacttttttctaaattatttctaaggttgtgct

SEQ ID NO: 570246 - DNA, 120 bp, Artificial Sequence
  ENSG00000170677_20 (sequence is synthesized)
aattcttttggttgtgaaaagttgaatttttctgttgccttcgttttcatcttctagtttgtctattttaataaatggccttacattaaaaaattgtaaagaaatgtataccaccaattt

SEQ ID NO: 570247 - DNA, 120 bp, Artificial Sequence
  ENSG00000170677_21 (sequence is synthesized)
agaaattgttgccttttctgtaattaaactcgggtacaaattggcataacatgaaaacctatggaactagaattattattaaagaaatattagatgatcatagcttcctgtgatagcatt

SEQ ID NO: 570248 - DNA, 120 bp, Artificial Sequence
  ENSG00000170677_22 (sequence is synthesized)
tttttgtgtgttacctatccttttggtaaaatgttttatctgtgatttctttagcttagtcaacattttcttgggtgaacttgattgtcaactaattttcataaatggactggattctct

SEQ ID NO: 570249 - DNA, 120 bp, Artificial Sequence
  ENSG00000170677_23 (sequence is synthesized)
agttggatttatatttttcttctatgtagttactataaaagtgtgctggatttgaccaatccttacccccactataaagagaacccgtgatgactttagtttaaaaattgtggaaattgt

SEQ ID NO: 570250 - DNA, 120 bp, Artificial Sequence
  ENSG00000170677_24 (sequence is synthesized)
ggagcaatttttctcacaatgtgagaaaaattctaaaccatattagataatgtggaagtcatattgtctatcatatatactgccatttaaaaataggtttttaaaatttagctaagtctt

SEQ ID NO: 570251 - DNA, 120 bp, Artificial Sequence
  ENSG00000170677_25 (sequence is synthesized)
aagtaatttgccgttgctaataattttatctccttgagtcggttgttggggagagatgttatattcaataatttttagttattttgtaatgcagagtgtttattcatttcacagttctgc

SEQ ID NO: 570252 - DNA, 120 bp, Artificial Sequence
  ENSG00000170677_26 (sequence is synthesized)
aatggatgtagtattttgggattgccctgtccagaaaattttcagctacacacctttaaaggaaaatgtttctatctcagatgaaacatgtaatttgggatggttcttcctttgtcactt

SEQ ID NO: 570253 - DNA, 120 bp, Artificial Sequence
  ENSG00000170677_27 (sequence is synthesized)
aaaggaagagataggaaaagtctcttacccactttaaacatgagggtaaaggtttaggtcaaacttactggctttgtcattcaagcatatctgaatcctcacttttttctctttgctttt

SEQ ID NO: 570254 - DNA, 120 bp, Artificial Sequence
  ENSG00000170677_28 (sequence is synthesized)
tagggtcagaactgagatattaccaagaaaaggcacaatgccataatattatggtgttatggtattttgacttaaaggggaaaaggtacttaattttggtgggatgttgattgtaccttg

SEQ ID NO: 570255 - DNA, 120 bp, Artificial Sequence
  ENSG00000170677_29 (sequence is synthesized)
ttaaaaagactctcattttctcatatgttttctcctaataagatggaatatggagtatactgtaataatataagtgttcattataagctatttggattaagaactattgcagagttgtaa

SEQ ID NO: 570256 - DNA, 120 bp, Artificial Sequence
  ENSG00000170677_30 (sequence is synthesized)
gcttgttatcaaattaatgcaagacatttaaactatttttttgcaaaactatttatttttaaaacaacttaaagtatatctagggtgagttaaaagtccctgtgcatctatattagatgg

SEQ ID NO: 570257 - DNA, 120 bp, Artificial Sequence
  ENSG00000170677_31 (sequence is synthesized)
caggttttgtcacagagtcactgtgtattaataataaatgttgaaatggcttctccgtgtctccagaagcatttacatgtcctccttgtgagatcatggtgcacagaggtctttggactg

SEQ ID NO: 570258 - DNA, 120 bp, Artificial Sequence
  ENSG00000170677_32 (sequence is synthesized)
ccctgaacccgtcttatgtggacataacctattcccttcgttttctcatcatgccatgtgtttaagatctacccgcttagtgtcaagattattgagattttcatctaaatgtttttaaaa

SEQ ID NO: 570259 - DNA, 120 bp, Artificial Sequence
  ENSG00000170677_33 (sequence is synthesized)
ttgtattttgtgttttagtggaggacagtcttgatactgttctaattcagaaagccaaattttgatgcgcttttgtatattcataatatatactttaatatgccctattctaatctagtt

SEQ ID NO: 570260 - DNA, 120 bp, Artificial Sequence
  ENSG00000170677_34 (sequence is synthesized)
tgaaattgttagattctgatagtataatgataaaatcaaactatttgccaaaaagttaaatttacaagcagaaagatgttttgcgatattttctacttttgtgtagaaagataaccattt

SEQ ID NO: 570261 - DNA, 120 bp, Artificial Sequence
  ENSG00000170677_35 (sequence is synthesized)
ggggtaggcagcacaacagaatgtgaaagattggctttatatgatactaacacagtccagttaaaagtggaaacagggaaaagagagagagaaaactcatcatttagtttggtctagaca

SEQ ID NO: 570262 - DNA, 120 bp, Artificial Sequence
  ENSG00000170677_36 (sequence is synthesized)
caatttggttaaattttaggattctattggcagttaacatagatgacatggacacagcctatgagtgctttttaaatacgtgcttctaaaaatctgagctcaaagcaagaaaaagaaaac

SEQ ID NO: 570263 - DNA, 120 bp, Artificial Sequence
  ENSG00000170677_37 (sequence is synthesized)
aggaaagctgtatccatttgccataatagatgaatcagaattgttttctattaaatatttcatcacgaaatatgatggaggccagaagctatttttaggcttactataacactattatgc

SEQ ID NO: 570264 - DNA, 120 bp, Artificial Sequence
  ENSG00000170677_38 (sequence is synthesized)
atttttataaataagaagaaggctgtagaaagtacttgaaaaatatctaattctctttctgtctaaggaaaactctttctacttggtgcaataatctgaaaatttagaaggtcaaaatat

SEQ ID NO: 570265 - DNA, 120 bp, Artificial Sequence
  ENSG00000170677_39 (sequence is synthesized)
gtcacaggaaatgatcatagacctaaaaatagtttttaaggaaaccagctacacggggcaaccaaccatcttgctgttgaagaaaacagttccaaaaggctaaatcattggcataaagga

SEQ ID NO: 570266 - DNA, 120 bp, Artificial Sequence
  ENSG00000170677_40 (sequence is synthesized)
aacaaaacccaaagtatgcgttgtaattcttgagccagtattactgaaacaggataaaagttataaaatctaacataggttaatgcaatgtctctgctagtgctacaagtctaaaatatc

SEQ ID NO: 570267 - DNA, 120 bp, Artificial Sequence
  ENSG00000170677_41 (sequence is synthesized)
tttgtaacaatgctttcagaaatgccagttttaattacatttcacattgtatatgagagatactgctttatgaatgaatcggaataatacattttcatttaaatcttaattgcttttcat

SEQ ID NO: 570268 - DNA, 120 bp, Artificial Sequence
  ENSG00000170677_42 (sequence is synthesized)
taaatgcgaagtcttaatttcaaaatgaaatcacactaccagcaatagacagttttcttgaaaactctaataaggaacaatagccagttccgtaaataactttaaaattctaaaagtgtt

SEQ ID NO: 570269 - DNA, 120 bp, Artificial Sequence
  ENSG00000170677_43 (sequence is synthesized)
ggtacactagcaatcacaaatatggtttcttttaatacttttttaatcctgtaaagaagggtttttataaacattctttttattaatcagtcataacatggcgaagtgtgtagttgctgt

SEQ ID NO: 570270 - DNA, 120 bp, Artificial Sequence
  ENSG00000170677_44 (sequence is synthesized)
ttctgaaaagtgatccaaactctacatccagagattatgaaaaattcttatagaattttgtaacaagtatttacatgttgggtgaaagaaatttcatagtcgttggagtgccatgaaatt

SEQ ID NO: 570271 - DNA, 120 bp, Artificial Sequence
  ENSG00000170677_45 (sequence is synthesized)
aatacttgcaattcagattgcggtagtttacactttttctgtatgtttcaaatcaggtgtgtaccatttgtactgagaacaccacagaatgaattatccaaagtccattgattttaatac

SEQ ID NO: 570272 - DNA, 120 bp, Artificial Sequence
  ENSG00000170677_46 (sequence is synthesized)
gtgttttggtttgtaaacaaattatagtaatttcttgcacatttttggaaattaattgtataagaatttatgtatctgcttctagatacagtgtgtaaataaaaaatttcgttcacaaga

SEQ ID NO: 570273 - DNA, 120 bp, Artificial Sequence
  ENSG00000170677_47 (sequence is synthesized)
cttggaatattgcaggcattgctccgttgtcgtccggttttcagtgttactgttaagtcacatgccgccagtttcccaggcagttaaaatggctccaaaggttaaatgaagcaggaaaaa

SEQ ID NO: 570274 - DNA, 120 bp, Artificial Sequence
  ENSG00000170681_0 (sequence is synthesized)
gactttttgctccaagtgccagaattgattgtggttaggacatcttacgctgagaaataaataaaatggaacataatgggtctgcttcaaatgctgataaaatccaccagaatcgcctgt

SEQ ID NO: 570275 - DNA, 120 bp, Artificial Sequence
  ENSG00000170681_1 (sequence is synthesized)
cgagtgttacagaagatgaagaccaagacgctgctcttaccattgtgactgtgctggacaaagtagcctccatcgtggacagtgtgcaggcaagccagaagagaatagaagagagacaca

SEQ ID NO: 570276 - DNA, 120 bp, Artificial Sequence
  ENSG00000170681_2 (sequence is synthesized)
gggaaatggaaaatgccataaaatccgtccagattgacctgttgaagctttcacagtcgcatagcaatacagggcatatcattaacaaattgtttgagaaaacccgaaaagttagtgctc

SEQ ID NO: 570277 - DNA, 120 bp, Artificial Sequence
  ENSG00000170681_3 (sequence is synthesized)
acattaaagatgtgaaagcccgggtggagaagcaacaaattcatgttaaaaaagttgaagtcaagcaagaggaaataatgaagaaaaacaaattccgcgtggtaatattccaggagaagt

SEQ ID NO: 570278 - DNA, 120 bp, Artificial Sequence
  ENSG00000170681_4 (sequence is synthesized)
ttcggtgtccgacatccctgtctgttgttaaagacagaaacctaactgagaaccaagaagaggatgatgatgatatctttgatcccccagtagatctgtcttcggatgaagaatattatg

SEQ ID NO: 570279 - DNA, 120 bp, Artificial Sequence
  ENSG00000170681_5 (sequence is synthesized)
ttgaagaaagcagatctgccaggcttaggaagtcaggcaaggagcacattgataatatcaagaaggcattttccaaagaaaacatgcagaagacacggcagaatcttgacaagaaagtga

SEQ ID NO: 570280 - DNA, 120 bp, Artificial Sequence
  ENSG00000170681_6 (sequence is synthesized)
acagaattagaactagaatagtgaccccggagaggagagagaggctaaggcagtcaggagagaggctgagacagtcaggggagaggctgagacagtcaggggagaggtttaagaaatcta

SEQ ID NO: 570281 - DNA, 120 bp, Artificial Sequence
  ENSG00000170681_7 (sequence is synthesized)
tttctaatgcagctccctcaaaggaagcttttaagatgcgcagcctcaggaaaggtaaggaccgaacagtggctgaaggtgaggaatgtgccagggagatgggtgtggacatcattgcca

SEQ ID NO: 570282 - DNA, 120 bp, Artificial Sequence
  ENSG00000170681_8 (sequence is synthesized)
ggagcgagtctctgggccccatcagtgagctctactctgatgagctcagtgaaccagaacacgaggcagccaggccggtgtatcctccccatgaaggaagggaaatccccacccccgagc

SEQ ID NO: 570283 - DNA, 120 bp, Artificial Sequence
  ENSG00000170681_9 (sequence is synthesized)
ctttaaaagttacttttaaatctcaggtgaaagtagaggatgatgaatctcttttgttagatttaaagcactcatcgtaaagaggaattaagtatatcctaaatatgaatctcctaatca

SEQ ID NO: 570284 - DNA, 120 bp, Artificial Sequence
  ENSG00000170681_10 (sequence is synthesized)
tgcagttttagtttgaatagtgtagtcgtctacatttctgtgccatgtaggaaaacataaatgtattttttttcttatatttaaaatcttgaagataatataaatattattatcactctt

SEQ ID NO: 570285 - DNA, 120 bp, Artificial Sequence
  ENSG00000170681_11 (sequence is synthesized)
tctcatggcagctgtggattttttagttcctttctcttgtccaccagaaaaatagtttcctaggttgggccagttacgtgtttggtaagggcaactttgcggccgtcatttgcaggagaa

SEQ ID NO: 570286 - DNA, 120 bp, Artificial Sequence
  ENSG00000170681_12 (sequence is synthesized)
tagtaaattagcagtcacaccccttttttgatgctttcacattaaaaaattgaagttttggacttgagcatttggctctagtatcatagctttacttataagaaaaccctgggcaagtca

SEQ ID NO: 570287 - DNA, 120 bp, Artificial Sequence
  ENSG00000170681_13 (sequence is synthesized)
tctgcttattctcatcagtaaaaatggagagggttggcctctgctgcctgcctcagaggactgttgtgatgatcaaaggaaatggtacacattctgggggaacaagaagcacacccagag

SEQ ID NO: 570288 - DNA, 120 bp, Artificial Sequence
  ENSG00000170681_14 (sequence is synthesized)
aaaacaagcctcatcagttcctccaaaacagaatggaaagagttacaccttctgaaaaagccctcagcaccaatcaataaggtcctaggttggagagaaactaaagctggtcttcagaag

SEQ ID NO: 570289 - DNA, 120 bp, Artificial Sequence
  ENSG00000170681_15 (sequence is synthesized)
ccttttcacagaatcaagagtgaaaaataagtaaatgtttgggtgaccactttttcatcagactaactatatcttgggttttagttgggtctcaaaatgttccccagccagaccctttct

SEQ ID NO: 570290 - DNA, 120 bp, Artificial Sequence
  ENSG00000170681_16 (sequence is synthesized)
aatttccttttgattaagatctttggtggactatagcactaaatttgtttaagcagtatgaggcataaaattgtgactatgtttctaaagtcggccctgatgcattgggtttggaaatga

SEQ ID NO: 570291 - DNA, 120 bp, Artificial Sequence
  ENSG00000170681_17 (sequence is synthesized)
ccacaaatattcctgttttcctgagtgtacccttcagggtccagctgtccaaaacagtgttgataggagttcatcatagctgctttgggaggaagccagattctccttatcttttagctt

SEQ ID NO: 570292 - DNA, 120 bp, Artificial Sequence
  ENSG00000170681_18 (sequence is synthesized)
tttagctttagatcgtggaatccaggaagtagaacaatgtctattgttgctaaagaaagaaagaaatgggccgggtgtggtggctcacggggagtaatcccagcactttgcgaggccgag

SEQ ID NO: 570293 - DNA, 120 bp, Artificial Sequence
  ENSG00000170681_19 (sequence is synthesized)
aagaaagaaatggtagtactgattctgtacttgaaggatgtttaatgtagcatggtgttgtaatagagaagaaatgatgaaattgttgaatttgaagagttgggacaacgatcagctatc

SEQ ID NO: 570294 - DNA, 120 bp, Artificial Sequence
  ENSG00000170681_20 (sequence is synthesized)
ccactttttttctcactttcagatcagtttttggataatcatatggtagttaaaataataagtgtacacatatacacacaggcatacataaatcggctttaaaatatttgactcagttac

SEQ ID NO: 570295 - DNA, 120 bp, Artificial Sequence
  ENSG00000170681_21 (sequence is synthesized)
tcagatgtttgggtttgggagtctgattcagcatcatttcctcttcaccttgcatgaatacatgaaatcataatatcgttcatgttgttacctttttatattgaaaactaaagtgtatac

SEQ ID NO: 570296 - DNA, 120 bp, Artificial Sequence
  ENSG00000170681_22 (sequence is synthesized)
aacattggataacactttcaaatgaataattttaaaatgtttttatgacattttggaaagatcttgggtgcctaatcacatattttcttaagaaccataataaatttgaatttaagaaaa

SEQ ID NO: 570297 - DNA, 120 bp, Artificial Sequence
  ENSG00000170683_0 (sequence is synthesized)
tcacagctatgggattacgacttcatactcgatataccaggtccataaaaacaatataagtttcaactactgaaatgaaaagacaaaatcaaagctgtgtggttgaattcatcctcctgg

SEQ ID NO: 570298 - DNA, 120 bp, Artificial Sequence
  ENSG00000170683_1 (sequence is synthesized)
gcttttctaactttcctgagctccaggtgcagctctttggggttttcctagttatttatgtggtgaccctgatgggaaatgccatcattacagtcatcatctccttaaaccagagcctcc

SEQ ID NO: 570299 - DNA, 120 bp, Artificial Sequence
  ENSG00000170683_2 (sequence is synthesized)
acgttcccatgtacctgttcctcctgaacctatctgtggtggaggtgagtttcagtgcagtcattacgcctgaaatgctggtggtgctctctactgagaaaactatgatttcttttgtgg

SEQ ID NO: 570300 - DNA, 120 bp, Artificial Sequence
  ENSG00000170683_3 (sequence is synthesized)
gctgttttgcacagatgtatttcatccttctttttggtgggactgaatgttttctcctgggagcgatggcttatgaccgatttgctgcaatttgccatcctctgaactacccagtgatta

SEQ ID NO: 570301 - DNA, 120 bp, Artificial Sequence
  ENSG00000170683_4 (sequence is synthesized)
ggccccaatgaaattaatcatctcttctgtgagactcccccggtactagagcttgtgtgtgcagacaccttcttatttgaaatctatgccttcacaggcaccattttgattgttatggtt

SEQ ID NO: 570302 - DNA, 120 bp, Artificial Sequence
  ENSG00000170683_5 (sequence is synthesized)
cctttcttgttgatcctcttgtcttacattcgagttctgtttgccatcctgaagatgccatcaactactgggagacaaaaggccttttccacctgtgcctctcacctcacatctgtgacc

SEQ ID NO: 570303 - DNA, 120 bp, Artificial Sequence
  ENSG00000170683_6 (sequence is synthesized)
ctgttctatggcacagccaatatgacttatttacaacccaaatctggctactcacccgaaaccaagaaactgatctcattggcttacacgttgcttacccctctgctcaatccgctcatc

SEQ ID NO: 570304 - DNA, 120 bp, Artificial Sequence
  ENSG00000170683_7 (sequence is synthesized)
tatagcttacgaaacagtgagatgaagaggactttgataaaactatggcgaagaaaagtgattttacacacattctgattgtgttgagaagctgagtaagatttggccactgcctgagtg

SEQ ID NO: 570305 - DNA, 120 bp, Artificial Sequence
  ENSG00000170683_8 (sequence is synthesized)
cagggacagtgaatagataaggatctgaagattctgctttggtacttgttggtgggtttgccttctgtagttatcctcactgataattggagatacttatcaagtgataactcaatgctc

SEQ ID NO: 570306 - DNA, 120 bp, Artificial Sequence
  ENSG00000170683_9 (sequence is synthesized)
tttgtatgactatgtaagtttgttgagtttttttattggaaaacgtatctcaataaagaactgctgtcacttgtttttagtagatacatatgttctcataacatgacacaacagtttatt

SEQ ID NO: 570307 - DNA, 87 bp, Artificial Sequence
  ENSG00000170683_10 (sequence is synthesized)
tagatacatatgttctcataacatgacacaacagtttattcatccatttctctattatgaacatccaagtagctactggattactgt

SEQ ID NO: 570308 - DNA, 120 bp, Artificial Sequence
  ENSG00000170683_11 (sequence is synthesized)
cattaagacagtgcttcaataaatgccttgttccatatgctcatatgtactgatgtcattatacctgtgtgatagatttgctacagtgcggctgataggatgaggagtatctgtgtttac

SEQ ID NO: 570309 - DNA, 120 bp, Artificial Sequence
  ENSG00000170683_12 (sequence is synthesized)
aaattttattagctattgcagaattacttttcaaaatgattatagttcttcagactggcctgaaggctcactgtgctttggtaacagggtagagcttcaagagaccaacaaataaggtga

SEQ ID NO: 570310 - DNA, 120 bp, Artificial Sequence
  ENSG00000170683_13 (sequence is synthesized)
tgatgtttctatttttggattgaaaatttgttccacggatgagtaaaaaaaaagtgcatctattttggggggccaaaaatggttctacttcatgaccttacacaaattataatcccaaac

SEQ ID NO: 570311 - DNA, 120 bp, Artificial Sequence
  ENSG00000170683_14 (sequence is synthesized)
tggatttctcttggtatctttccaaatatttatccaatgttggtgaccagagagctacatgggaagtttctcaaattctcatttgataatatcagtatctttttcatttacagaccactg

SEQ ID NO: 570312 - DNA, 120 bp, Artificial Sequence
  ENSG00000170683_15 (sequence is synthesized)
atttagaaacttttatgaagtttccttttgtagtctgtgacaggaaagtaaaatcttggaaccccaaactcactatgccaaaagaaaagttaagcttggaaactggctcaggcaaaaaaa

SEQ ID NO: 570313 - DNA, 120 bp, Artificial Sequence
  ENSG00000170683_16 (sequence is synthesized)
ttgcctttccttttgttcctaaatagatagctacaagatatccggtcacctatcttcccaggttacctccctcaattgttcttaaaaataattggaataaaactgatactgtgatgttaa

SEQ ID NO: 570314 - DNA, 120 bp, Artificial Sequence
  ENSG00000170683_17 (sequence is synthesized)
gattagatatacatattctgctaaatgaaggggtgtcattataatttgtgtatattatttgggaataggcaatacatatatatatctgtgtgtctatttaaactggttttaggtttataa

SEQ ID NO: 570315 - DNA, 120 bp, Artificial Sequence
  ENSG00000170684_0 (sequence is synthesized)
agtcactcacctgagcgcgcacggtccgcgcgtcctccgctcgtgcgtcctccgcccgcccgcctgcctgcctgcccgcccgctcgctcgcccggcccgcgactcatgtcccgccgcaag

SEQ ID NO: 570316 - DNA, 120 bp, Artificial Sequence
  ENSG00000170684_1 (sequence is synthesized)
gccggcagcgcgccccgccgagtagagcccgcgcccgccgccaacccagacgacgagatggaaatgcaggacctcgtcatcgaactcaagcccgagccagacgcgcagccccaacaggcc

SEQ ID NO: 570317 - DNA, 120 bp, Artificial Sequence
  ENSG00000170684_2 (sequence is synthesized)
ccagacgcgcagccccaacaggccccaaggctggggcccttctccccgaaggaggtgtcctcggcggggcggttcggcggcgaaccccaccactcccctggccccatgcccgccggggcc

SEQ ID NO: 570318 - DNA, 120 bp, Artificial Sequence
  ENSG00000170684_3 (sequence is synthesized)
aacccgtggaccctgtggacgccgttgaccccgaactatcccgaccgccagccctggaccgacaaacacccagatctgttgacctgcggccgctgcctgcagaccttcccgttggaggcc

SEQ ID NO: 570319 - DNA, 120 bp, Artificial Sequence
  ENSG00000170684_4 (sequence is synthesized)
atcactgccttcatggaccacaagaagctgggctgtcagctcttcagaggccccagccgcggccagggctcagaacgagaggagctgaaggccttgagctgcctgcgctgtggcaaacag

SEQ ID NO: 570320 - DNA, 120 bp, Artificial Sequence
  ENSG00000170684_5 (sequence is synthesized)
ttcacagtggcctggaagctgctgcgtcacgcccagtgggaccacggactgtccatctaccagacagaatcagaggccccggaggccccgctcctgggcctggccgaggtggctgcagcc

SEQ ID NO: 570321 - DNA, 120 bp, Artificial Sequence
  ENSG00000170684_6 (sequence is synthesized)
ccccacctgtcctgtgtgcaagaagaccctcagctccttcagcaacctcaaagtgcacatgcgctcacacacaggcgagcggccctatgcttgcgaccagtgtccctacgcctgcgccca

SEQ ID NO: 570322 - DNA, 120 bp, Artificial Sequence
  ENSG00000170684_7 (sequence is synthesized)
gagcagcaagctcaaccgccacaagaagacccaccggcaggtgccgccccagagccccctcatggccgacaccagccaggagcaggcctctgcagcccctccggagccggctgtccatgc

SEQ ID NO: 570323 - DNA, 120 bp, Artificial Sequence
  ENSG00000170684_8 (sequence is synthesized)
tgctgcccccaccagcacccttccatgcagcggtggtgagggggctggagccgccgccacagcaggtgtccaggaacccggggctcctggcagtggggctcaagccggccctggtggaga

SEQ ID NO: 570324 - DNA, 120 bp, Artificial Sequence
  ENSG00000170684_9 (sequence is synthesized)
cacttggggagccatcaccacggaacaaagaactgaccctgcaaacagccagaaggcatcacccaaaaagatgcccaagtcagggggcaagagccgcgggcccgggggcagctgtgagtt

SEQ ID NO: 570325 - DNA, 120 bp, Artificial Sequence
  ENSG00000170684_10 (sequence is synthesized)
ctgcgggaagcattttaccaacagcagcaacctgacggtgcaccggcgctcacacaccggggagcgcccctacacctgtgagttctgcaactacgcctgcgcccagagcagtaagctcaa

SEQ ID NO: 570326 - DNA, 120 bp, Artificial Sequence
  ENSG00000170684_11 (sequence is synthesized)
ccgccaccgccgcatgcacggcatgacgcctggcagcacccgcttcgagtgcccccactgccatgtgcccttcggcctgcgagccaccctggacaaacacctgcggcagaagcaccctga

SEQ ID NO: 570327 - DNA, 120 bp, Artificial Sequence
  ENSG00000170684_12 (sequence is synthesized)
ggcggccggcgaggcctgagcccaggaaagcccccctcactgtccctggtaccgctgccaacacccattgacctcctcgtttttgcccgccttctccaagtaaattttcccttttattta

SEQ ID NO: 570328 - DNA, 120 bp, Artificial Sequence
  ENSG00000170684_13 (sequence is synthesized)
gccgtcagggccccagcagggcggctcggtcccctcccatgagccccgccctggtaggcggagccacgggcccggccagcacgtgtaagagttcgcggcgggtcgccgcagtcactcacc

SEQ ID NO: 570329 - DNA, 120 bp, Artificial Sequence
  ENSG00000170689_0 (sequence is synthesized)
acaccggtccgggtgccacctctccctgcttgggcgccgccgcgcgagcgcttcccttccccctgcaagcgcccggataatgtctgagaatgtccatttctgggacgcttagcagctatt

SEQ ID NO: 570330 - DNA, 120 bp, Artificial Sequence
  ENSG00000170689_1 (sequence is synthesized)
atgtcgactcgatcataagtcacgagagtgaggacgcgcctccagccaagtttccttctggccagtacgcgagctcgcggcagccgggccacgcggagcacctggagttcccctcgtgca

SEQ ID NO: 570331 - DNA, 120 bp, Artificial Sequence
  ENSG00000170689_2 (sequence is synthesized)
gcttccagcccaaagcgccggtgttcggcgcctcctgggcgccgctgagcccgcacgcgtccgggagcctgccgtccgtctaccacccttacatccagccccagggcgtcccgccggccg

SEQ ID NO: 570332 - DNA, 120 bp, Artificial Sequence
  ENSG00000170689_3 (sequence is synthesized)
gccggcgccgcgcggcgaagcggccccggggcagggccaggcggcggtgaaggcggagccgctgctgggcgcgcctggggagctgctcaaacagggcacgcccgagtacagtttggaaac

SEQ ID NO: 570333 - DNA, 120 bp, Artificial Sequence
  ENSG00000170689_4 (sequence is synthesized)
agggcacgcccgagtacagtttggaaacttcggcgggcagggaggccgtgctgtctaatcaaagacccggctacggggacaataaaatttgcgaaggaagcgaggacaaagagaggccgg

SEQ ID NO: 570334 - DNA, 120 bp, Artificial Sequence
  ENSG00000170689_5 (sequence is synthesized)
atcaaaccaacccctccgccaactggctgcacgctcgctcttcccggaaaaagcgctgtccctacaccaaataccagacgctggagctagagaaggagtttctgttcaatatgtacctca

SEQ ID NO: 570335 - DNA, 120 bp, Artificial Sequence
  ENSG00000170689_6 (sequence is synthesized)
ccagggaccgtaggcacgaagtggccagactcctcaatctgagtgagagacaagtcaaaatctggtttcagaaccggcggatgaaaatgaagaaaatgaataaggagcagggcaaagagt

SEQ ID NO: 570336 - DNA, 120 bp, Artificial Sequence
  ENSG00000170689_7 (sequence is synthesized)
aaagattaaagattacccccagtcctccctagctcttccccatctcactcttagttatgtgacgactgcaaagccagtgctgtctgggatgtattcaagtgaatggggaagggagtctct

SEQ ID NO: 570337 - DNA, 120 bp, Artificial Sequence
  ENSG00000170689_8 (sequence is synthesized)
cttccaagtcctttatctgcacctagaacctccctcctttcctttgcccttacctgtctctctcttctctctaggtgtcaggagaaagttttgttgatttagaagatagaaatagttggt

SEQ ID NO: 570338 - DNA, 120 bp, Artificial Sequence
  ENSG00000170689_9 (sequence is synthesized)
tcctaagaatgtgatgggccacaaggaaagagagaccccagtcaagctcctagtatgccctgtaatttttctgggaagtcctagcccctcacttccagcttgcctgtttcttctctacac

SEQ ID NO: 570339 - DNA, 120 bp, Artificial Sequence
  ENSG00000170689_10 (sequence is synthesized)
ggggtgagctcacaaccaccattcagtcaagtgaggtgacactccagttgcagaccatcgcacaccaaatttggcaaaacagccctcagactgtcaggcaagcccgggttctacccctaa

SEQ ID NO: 570340 - DNA, 120 bp, Artificial Sequence
  ENSG00000170689_11 (sequence is synthesized)
tgcaaatacccaccagggagatgtctagaggcagactcctgagtgaggtgttgcagcccaaaggctgcagcattgccataccattcccatggagttgccaactattctcaggccaagggc

SEQ ID NO: 570341 - DNA, 120 bp, Artificial Sequence
  ENSG00000170689_12 (sequence is synthesized)
catggggaagatggagcaaacctagcccccaagccggtgggctagaaagtacaagaaaaggcagcacgtggttttatgaagctatcttaggtggagctactccccacctcccaccaacat

SEQ ID NO: 570342 - DNA, 120 bp, Artificial Sequence
  ENSG00000170689_13 (sequence is synthesized)
atacattttgttgcaggaaatgtttaattccgcatgatgtttccctctccttccaacaaaagaaggtcaaactgtgggtcgtagagccttgacaatgttgtcctcctgttcatctgtgca

SEQ ID NO: 570343 - DNA, 120 bp, Artificial Sequence
  ENSG00000170689_14 (sequence is synthesized)
ccacttgacagactgtagcttctcttgctctcgaccggccctgcattcttccgcaccctccctagctctgaaatcaactctcttcggtcgtatccaccttgcacccgcaagtcaagccgc

SEQ ID NO: 570344 - DNA, 120 bp, Artificial Sequence
  ENSG00000170689_15 (sequence is synthesized)
cccttgtagaaaaatccctccaccttccgttccccgctaggtcaaccccactgtagacaggaaagccaggccaggagagtccgaatgagaatttattgtgaatcgattcccaagctccct

SEQ ID NO: 570345 - DNA, 120 bp, Artificial Sequence
  ENSG00000170689_16 (sequence is synthesized)
tccgggacaagtggtctgggacagggaggagcaacggccccagcgcgcaacgctctgcgcgttcctccgaatcccgtcggcttctcgacccacgcagagaagccccgggcttggcggctc

SEQ ID NO: 570346 - DNA, 120 bp, Artificial Sequence
  ENSG00000170689_17 (sequence is synthesized)
tagccccagcgccaaaggagacccgccccagggccgggcttggcctcctgcttcatgggcctggatgcagatctgcgtggctggtgcgtgcgcgcgcttctgggaaacagtcccgcgtgc

SEQ ID NO: 570347 - DNA, 120 bp, Artificial Sequence
  ENSG00000170689_18 (sequence is synthesized)
aaaggaaaggggcaaaatggcacctaagcatcagatggaagcttactctctgcttccgttcctccccctgctcccctacttctcagtccccttcaatttgtagactcttgctcctgcttc

SEQ ID NO: 570348 - DNA, 120 bp, Artificial Sequence
  ENSG00000170689_19 (sequence is synthesized)
tcctgatcctgcaaggggacattccagtagaagttttttgctttgtcggtggctgtcgtgaaattgtgcttgtgtttcgtgatttctttgggggtgattgtctcgcttgttttcagttgt

SEQ ID NO: 570349 - DNA, 120 bp, Artificial Sequence
  ENSG00000170689_20 (sequence is synthesized)
cgattatatgggagggttctgggtgggagtggggagggcgaggggcctagagctctaattgtttgttttggaagaaaaaaagaaaaagaacaaaaaatatatatcactctagaaaataaa

SEQ ID NO: 570350 - DNA, 120 bp, Artificial Sequence
  ENSG00000170703_0 (sequence is synthesized)
aattggattcgggagggagggggcatggcagctactgcaggggccaatcgaaggcctagaaggccccgtatgcaaatatgagggccgggcggacccaaagttagggcgagcgcgggttgg

SEQ ID NO: 570351 - DNA, 120 bp, Artificial Sequence
  ENSG00000170703_1 (sequence is synthesized)
ggttggggctgtctggcagccaatgggagcgttactccttcatccttcgaggagggggccggcaggtgtggttgcaagctggactagcagcccagcggggcgagacgggggagtaggaat

SEQ ID NO: 570352 - DNA, 120 bp, Artificial Sequence
  ENSG00000170703_2 (sequence is synthesized)
tgcgggggcctggtatttccccagagcctcctcccaggccagggagatgccacagtgcccgactttggaaagccaggaaggggaaaactccgaagagaagggggacagttccaaagaaga

SEQ ID NO: 570353 - DNA, 120 bp, Artificial Sequence
  ENSG00000170703_3 (sequence is synthesized)
tccaaaagaaaccgtcgcgctggcttttgtgagagagaacccaggggcacaaaacggacttcagaatgcccagcagcaaggcaagaagaagaggaagaaaaagagattggtgatcaatct

SEQ ID NO: 570354 - DNA, 120 bp, Artificial Sequence
  ENSG00000170703_4 (sequence is synthesized)
atccagctgccggtatgagagtgtgcgcagggctgcccaacagtacggctttagagagggaggggaagacgatgactggactctctattggacagattactcagtgtcactggagcgggt

SEQ ID NO: 570355 - DNA, 120 bp, Artificial Sequence
  ENSG00000170703_5 (sequence is synthesized)
gatggaaatgaaaagttaccagaagatcaatcacttccccgggatgagtgaaatctgccggaaggacttgctggccaggaacatgagccgcatgttaaagatgttccctaaagatttccg

SEQ ID NO: 570356 - DNA, 120 bp, Artificial Sequence
  ENSG00000170703_6 (sequence is synthesized)
ctttttccctaggacctggtgtcttcctgctgactggggagatttgcagacctacagcaggtcaagaaaaaataagacatacatttgtaagccggattcgggctgccaagggaaaggtat

SEQ ID NO: 570357 - DNA, 120 bp, Artificial Sequence
  ENSG00000170703_7 (sequence is synthesized)
attcatcacccggacagtgaaagaaatcaaaccaggggaggatatgatctgtcagctgtatatttcaaagccctttatcattgatgggtttaagtttgacctacggatttatgtactggt

SEQ ID NO: 570358 - DNA, 120 bp, Artificial Sequence
  ENSG00000170703_8 (sequence is synthesized)
gacatcctgtgaccctctcaggatttttgtgtacaatgaaggactggcccgctttgcgacgacctcttactcccgcccttgcacagacaacctggatgatatctgcatgcacctgactaa

SEQ ID NO: 570359 - DNA, 120 bp, Artificial Sequence
  ENSG00000170703_9 (sequence is synthesized)
ttattccattaataagcacagttcaaatttcagtcgagatgcacactctggcagtaagaggaagctctccaccttcagtgcatacttggaggaccacagctacaacgtggagcagatatg

SEQ ID NO: 570360 - DNA, 120 bp, Artificial Sequence
  ENSG00000170703_10 (sequence is synthesized)
gagggatattgaggacgtcatcatcaagaccctcatctcggcccaccccatcatcaggcataactaccacacctgcttccccaaccacacactcaacagcgcctgctttgagatcctggg

SEQ ID NO: 570361 - DNA, 120 bp, Artificial Sequence
  ENSG00000170703_11 (sequence is synthesized)
ctttgacattttgttggaccacaaactcaaaccctggctgctggaggtcaaccactctccaagcttctccaccgactctcggttggataaagaggtgaaagatggtctgctgtatgacac

SEQ ID NO: 570362 - DNA, 120 bp, Artificial Sequence
  ENSG00000170703_12 (sequence is synthesized)
cttagtcctgatcaacctggaaagctgtgacaagaagaaagtcttggaggaggagagacaacgggggcagttcctgcagcagtgttgttctcgggagatgaggattgaggaagccaaggg

SEQ ID NO: 570363 - DNA, 120 bp, Artificial Sequence
  ENSG00000170703_13 (sequence is synthesized)
tttccgggccgtgcagttaaagaaaactgaaacgtatgagaaggaaaactgtggagggttccgactgatttatcccagtctgaattcggagaagtatgagaagtttttccaggacaacaa

SEQ ID NO: 570364 - DNA, 120 bp, Artificial Sequence
  ENSG00000170703_14 (sequence is synthesized)
gactaaaacgggagaaaaagcccttccaaatgaagaagaaggtagagatgcagggggaatcggcaggcgagcaagtgagaaagaagggcatgaggggctggcaacagaaacaacagcaga

SEQ ID NO: 570365 - DNA, 120 bp, Artificial Sequence
  ENSG00000170703_15 (sequence is synthesized)
aagacaaggccgccacccaagcctccaaacagtacatccagccattgacattagtatcctacacacctgacttgctcttgagtgtcagaggtgaaaggaaaaatgaaacagacagcagcc

SEQ ID NO: 570366 - DNA, 120 bp, Artificial Sequence
  ENSG00000170703_16 (sequence is synthesized)
tcaaccaggaggctcccacggaggaggccagctctgttttccccaagctgacgtctgcgaagcccttcagttctctacccgatctgaggaatatcaatctcagcagctcgaagttggagc

SEQ ID NO: 570367 - DNA, 120 bp, Artificial Sequence
  ENSG00000170703_17 (sequence is synthesized)
ccagtaaacccaacttcagcatcaaggaggccaagtctgcctctgcagtgaacgtattcactggcactgtgcacttaacctccgtagaaaccaccccagaatccaccacccaactctcaa

SEQ ID NO: 570368 - DNA, 120 bp, Artificial Sequence
  ENSG00000170703_18 (sequence is synthesized)
tctccccaaagtctccgccaaccctggctgtgaccgccagctctgagtacagtggcccagagacggacagggtggtatcctttaaatgcaagaagcagcagacccctccacacttaaccc

SEQ ID NO: 570369 - DNA, 120 bp, Artificial Sequence
  ENSG00000170703_19 (sequence is synthesized)
agaagaaaatgttaaaatcttttctgcccacaaaatccaagagcttctgggagagtccgaacacaaactggactttgctaaagagtgacatgaacaagccacatttgatatccgagctac

SEQ ID NO: 570370 - DNA, 120 bp, Artificial Sequence
  ENSG00000170703_20 (sequence is synthesized)
tcaccaagcttcaactgagtgggaagctctccttcttcccagctcactacaaccccaagctggggatgaataacctgtcacaaaacccctccctgcctggggagtgccactcccgcagtg

SEQ ID NO: 570371 - DNA, 120 bp, Artificial Sequence
  ENSG00000170703_21 (sequence is synthesized)
acagctctggcgagaagaggcagctggatgtgtcctccctcctcttgcagagtcctcagagctataatgttactctgagggacctgctggtgattgccactccagcccaactggatccaa

SEQ ID NO: 570372 - DNA, 120 bp, Artificial Sequence
  ENSG00000170703_22 (sequence is synthesized)
ggccttgtagaagccacgcaagtgctatgagggacccatgtatgcaggatcaagaagcatacagccattgcctgatctctggccaaaaaggatgtgagaggagctagaatcagactggat

SEQ ID NO: 570373 - DNA, 120 bp, Artificial Sequence
  ENSG00000170703_23 (sequence is synthesized)
ctctgccacttttcccttcctacctcttaacttgcaggaaacaatgtgtctcttccgacagtgtctccagtgttcacagaatcaactgaagttttgtttgctcatctagatatactggtc

SEQ ID NO: 570374 - DNA, 120 bp, Artificial Sequence
  ENSG00000170703_24 (sequence is synthesized)
ttccattagttcctagtagcagcaatggggccaacagccctgcctctgttccctcccagttagcttacagtgctacaggaccatgatttctggggttggattggtgctgccccaggacac

SEQ ID NO: 570375 - DNA, 120 bp, Artificial Sequence
  ENSG00000170703_25 (sequence is synthesized)
actccagttgccgtaccagtggcacttctctgggttcttcacatggcaccatcatccagaatactcccccagataaagcaacttcgggagtagtgtttcagagaaggactcatgatttcc

SEQ ID NO: 570376 - DNA, 120 bp, Artificial Sequence
  ENSG00000170703_26 (sequence is synthesized)
aggagtcaaaagccctcagtccaccaacagaactatgccagttggtcttcgtctccaagataaaagatgaggtcagggatgggcatggtgcataactctgagccctgagtgagagaactg

SEQ ID NO: 570377 - DNA, 120 bp, Artificial Sequence
  ENSG00000170703_27 (sequence is synthesized)
aggcagctgcaacttcacaaggtcaaggcccgacctccgcccatccccaccagcccaaagacttgccacctcagtgcccgagcatcctctggtgacctccctcaccagcccaacttaatc

SEQ ID NO: 570378 - DNA, 120 bp, Artificial Sequence
  ENSG00000170703_28 (sequence is synthesized)
tcaccagtgaaaacagaggtgaggcgagagtacccagcctgaagatgcttcttctatcagcctgcagaaatgttacactttcccttcaggcatccattaataaaagaaattgccatgctt

SEQ ID NO: 570379 - DNA, 120 bp, Artificial Sequence
  ENSG00000170703_29 (sequence is synthesized)
ttccttgttttaagaaggcgctgatttgtcctggaaatttagtacgccttcagtatgatagcaccatactgacttatcaggatccaactgcagcttgtgcattccagttcttgtttaata

SEQ ID NO: 570380 - DNA, 120 bp, Artificial Sequence
  ENSG00000170703_30 (sequence is synthesized)
tttcaccatgccttgctccattcagactgattgatgaaggaaagcttgtccactttcttattcatagcttcccttaatggggggaagaggaaggagacaagtattttggccaaaaatatt

SEQ ID NO: 570381 - DNA, 120 bp, Artificial Sequence
  ENSG00000170703_31 (sequence is synthesized)
ttcaattcctgtccctgatgagccagtggagtaaaaggcttgaggcaatgatgttagtgagaagctgcaagcaagatcagctgtaattgcaatacagaatttctaccttctgggtagagt

SEQ ID NO: 570382 - DNA, 120 bp, Artificial Sequence
  ENSG00000170703_32 (sequence is synthesized)
aatagtaccctgatgccatgttttccaccatgctgtacccccttggactcgtgtcctcagcaacagggacggtcaaaccaggcttagcatggcaggctagatttcagacagctccacctg

SEQ ID NO: 570383 - DNA, 120 bp, Artificial Sequence
  ENSG00000170703_33 (sequence is synthesized)
ggagggaagggggtcttggctgatgatgagagagtaaaggagaaactgtgtgctgagactgtcaacatctcaccacttttggttcatataaaaagaatctactttcgatgatctgtttta

SEQ ID NO: 570384 - DNA, 120 bp, Artificial Sequence
  ENSG00000170703_34 (sequence is synthesized)
acagacgaaacactgaagcccagcatggggtgagagactgacggatccaaaatcacatcacttgtcagggcttgagccaggtccagaactccaaagctcctacctgcaaacccagaaaac

SEQ ID NO: 570385 - DNA, 120 bp, Artificial Sequence
  ENSG00000170703_35 (sequence is synthesized)
attttcctcctccaatgagaattggcaccccaacagcaggccctgggccctcggctgtgatggaggggtgtctcggggtagcagaactaaggtcaaccactctccaagcttctccaccga

SEQ ID NO: 570386 - DNA, 120 bp, Artificial Sequence
  ENSG00000170703_36 (sequence is synthesized)
atttttccttagtctaagggcacagaatggaaaggttctcattttcctcctccaatgagaattggcaccccaacagcaggccctgggccctcggctgtgatggaggggtgtctcggggta

SEQ ID NO: 570387 - DNA, 120 bp, Artificial Sequence
  ENSG00000170703_37 (sequence is synthesized)
ttccagtagggaaatgaggaccaaaagatgaaaaggaggccatgtcttttgcctttcctccttttattcctcaaggctacaagactgcttttggtgttggcaccaacaaaattgttacgc

SEQ ID NO: 570388 - DNA, 79 bp, Artificial Sequence
  ENSG00000170703_38 (sequence is synthesized)
aagactgcttttggtgttggcaccaacaaaattgttacgcaagacaataggtgggaactaccagatggagtctcgctct

SEQ ID NO: 570389 - DNA, 120 bp, Artificial Sequence
  ENSG00000170734_0 (sequence is synthesized)
aacggcccttcgcagcgggcgcgctgtcagacctcagtctggcggctgcattgctgggcgcgccgctctcgtctgatccctgctggggacggttgcccgggcaggatcctttacgatccc

SEQ ID NO: 570390 - DNA, 120 bp, Artificial Sequence
  ENSG00000170734_1 (sequence is synthesized)
ttctcggtttctccgtcgtcacagggaataaatctcgctcgaaactcactggaccgctcctagaaaggcgaaaagatattcaggagcccttccattttccttccagtaggcaccgaaccc

SEQ ID NO: 570391 - DNA, 120 bp, Artificial Sequence
  ENSG00000170734_2 (sequence is synthesized)
agcattttcggcaaccgctgctggcagttttgccaggtgtttgttaccttgaaaaatggctactggacaggatcgagtggttgctctcgtggacatggactgtttttttgttcaagtgga

SEQ ID NO: 570392 - DNA, 120 bp, Artificial Sequence
  ENSG00000170734_3 (sequence is synthesized)
gcagcggcaaaatcctcatttgaggaataaaccttgtgcagttgtacagtacaaatcatggaagggtggtggaataattgcagtgagttatgaagctcgtgcatttggagtcactagaag

SEQ ID NO: 570393 - DNA, 120 bp, Artificial Sequence
  ENSG00000170734_4 (sequence is synthesized)
tatgtgggcagatgatgctaagaagttatgtccagatcttctactggcacaagttcgtgagtcccgtgggaaagctaacctcaccaagtaccgggaagccagtgttgaagtgatggagat

SEQ ID NO: 570394 - DNA, 120 bp, Artificial Sequence
  ENSG00000170734_5 (sequence is synthesized)
aatgtctcgttttgctgtgattgaacgtgccagcattgatgaggcttacgtagatctgaccagtgctgtacaagagagactacaaaagctacaaggtcagcctatctcggcagacttgtt

SEQ ID NO: 570395 - DNA, 120 bp, Artificial Sequence
  ENSG00000170734_6 (sequence is synthesized)
gccaagcacttacattgaagggttgccccaaggccctacaacggcagaagagactgttcagaaagaggggatgcgaaaacaaggcttatttcaatggctcgattctcttcagattgataa

SEQ ID NO: 570396 - DNA, 120 bp, Artificial Sequence
  ENSG00000170734_7 (sequence is synthesized)
cctcacctctccagacctgcagctcaccgtgggagcagtgattgtggaggaaatgagagcagccatagagagggagactggttttcagtgttcagctggaatttcacacaataaggtcct

SEQ ID NO: 570397 - DNA, 120 bp, Artificial Sequence
  ENSG00000170734_8 (sequence is synthesized)
ggcaaaactggcctgtggactaaacaagcccaaccgccaaaccctggtttcacatgggtcagtcccacagctcttcagccaaatgcccattcgcaaaatccgtagtcttggaggaaagct

SEQ ID NO: 570398 - DNA, 120 bp, Artificial Sequence
  ENSG00000170734_9 (sequence is synthesized)
aggggcctctgtcattgagatcctagggatagaatacatgggtgaactgacccagttcactgaatcccagctccagagtcattttggggagaagaatgggtcttggctatatgccatgtg

SEQ ID NO: 570399 - DNA, 120 bp, Artificial Sequence
  ENSG00000170734_10 (sequence is synthesized)
ccgagggattgaacatgatccagttaaacccaggcaactacccaaaaccattggctgtagtaagaacttcccaggaaaaacagctcttgctactcgggaacaggtacaatggtggctgtt

SEQ ID NO: 570400 - DNA, 120 bp, Artificial Sequence
  ENSG00000170734_11 (sequence is synthesized)
gcaattagcccaggaactagaggagagactgactaaagaccgaaatgataatgacagggtagccacccagctggttgtgagcattcgtgtacaaggagacaaacgcctcagcagcctgcg

SEQ ID NO: 570401 - DNA, 120 bp, Artificial Sequence
  ENSG00000170734_12 (sequence is synthesized)
ccgctgctgtgcccttacccgctatgatgctcacaagatgagccatgatgcatttactgtcatcaagaactgtaatacttctggaatccagacagaatggtctcctcctctcacaatgct

SEQ ID NO: 570402 - DNA, 120 bp, Artificial Sequence
  ENSG00000170734_13 (sequence is synthesized)
tttcctctgtgctacaaaattttctgcctctgccccttcatcttctacagacatcaccagcttcttgagcagtgacccaagttctctgccaaaggtgccagttaccagctcagaagctaa

SEQ ID NO: 570403 - DNA, 120 bp, Artificial Sequence
  ENSG00000170734_14 (sequence is synthesized)
attcttccaaaaagctgcagaaaggcagaaagttaaagaagcttcgctttcatctcttactgctcccactcaggctcccatgagcaattcaccatccaagccctcattaccttttcaaac

SEQ ID NO: 570404 - DNA, 120 bp, Artificial Sequence
  ENSG00000170734_15 (sequence is synthesized)
cagtcaaagtacaggaactgagcccttctttaagcagaaaagtctgcttctaaagcagaaacagcttaataattcttcagtttcttccccccaacaaaacccatggtccaactgtaaagc

SEQ ID NO: 570405 - DNA, 120 bp, Artificial Sequence
  ENSG00000170734_16 (sequence is synthesized)
attaccaaactctttaccaacagagtatccagggtgtgtccctgtttgtgaaggggtgtcgaagctagaagaatcctctaaagcaactcctgcagagatggatttggcccacaacagcca

SEQ ID NO: 570406 - DNA, 120 bp, Artificial Sequence
  ENSG00000170734_17 (sequence is synthesized)
aagcatgcacgcctcttcagcttccaaatctgtgctggaggtgactcagaaagcaaccccaaatccaagtcttctagctgctgaggaccaagtgccctgtgagaagtgtggctccctggt

SEQ ID NO: 570407 - DNA, 120 bp, Artificial Sequence
  ENSG00000170734_18 (sequence is synthesized)
accggtatgggatatgccagaacacatggactatcattttgcattggagttgcagaaatcctttttgcagccccactcttcaaacccccaggttgtttctgccgtatctcatcaaggcaa

SEQ ID NO: 570408 - DNA, 120 bp, Artificial Sequence
  ENSG00000170734_19 (sequence is synthesized)
aagaaatcccaagagccctttggcctgcactaataaacgccccaggcctgagggcatgcaaacattggaatcattttttaagccattaacacattagtgctgccctcaggcttgcctgta

SEQ ID NO: 570409 - DNA, 120 bp, Artificial Sequence
  ENSG00000170734_20 (sequence is synthesized)
ggatttaatattttttatctttacagatctttatctttaatattttatctttacagatttccctgagaaagggaattatgaaatttttaatacaaaaaataatccatttaggtgctgagt

SEQ ID NO: 570410 - DNA, 120 bp, Artificial Sequence
  ENSG00000170734_21 (sequence is synthesized)
tacggtcccatctcttcacaggcatggattctaatcccactgctgacagagatgtaaaaattcatcctaccagagtttttaatctttagcatttagggaggcagtgtcataaagtaaaaa

SEQ ID NO: 570411 - DNA, 120 bp, Artificial Sequence
  ENSG00000170734_22 (sequence is synthesized)
gtgtgtgggccttggagtctaagagacgtggttgcaaacttagctctggttattgcaatgagggccttgaacaagtcattttcttcacattctcatctgtaaaatggagataatacctta

SEQ ID NO: 570412 - DNA, 120 bp, Artificial Sequence
  ENSG00000170734_23 (sequence is synthesized)
tcacattctcatctgtaaaatggagataataccttacagattattgcagattaataacaatgtattcaaattatgtaactcggccgggtacaatggctcacgcctgtaatcctaacactt

SEQ ID NO: 570413 - DNA, 120 bp, Artificial Sequence
  ENSG00000170734_24 (sequence is synthesized)
actaaaaatagaaaaattagccaggcacgttccaggcacctgtgatcccagctacttagaggctgaggcagaagaattgctttaaccttggaggcggaggttgcattgagctgagatcat

SEQ ID NO: 570414 - DNA, 85 bp, Artificial Sequence
  ENSG00000170734_25 (sequence is synthesized)
tgtgatcccagctacttagaggctgaggcagaagaattgctttaaccttggaggcggaggttgcattgagctgagatcatgctag

SEQ ID NO: 570415 - DNA, 120 bp, Artificial Sequence
  ENSG00000170734_26 (sequence is synthesized)
cgagactccatctcaaacaaaaacaagaacaaaaacaaacataaagttggcacagaaaagggaccaagtttaaaaaagggttttaaatgtaatgagacttgcatagttaaaaaaaaaaaa

SEQ ID NO: 570416 - DNA, 120 bp, Artificial Sequence
  ENSG00000170743_0 (sequence is synthesized)
gctctgggctgtgcggcaccgcctctcctcggtgtctggggagggacggagggaccgggcgggagagagagaaagcctgaccgaccggctggcgaagagctgcatgcaaccggtgggagg

SEQ ID NO: 570417 - DNA, 120 bp, Artificial Sequence
  ENSG00000170743_1 (sequence is synthesized)
ccgggccggctgggtctggggctcgggctcaggctcgcaccgtttctcggcaggtccctggcggtgagcgcggacggcccggaggcggcggctctgagctggcaggcggagggctgtctc

SEQ ID NO: 570418 - DNA, 120 bp, Artificial Sequence
  ENSG00000170743_2 (sequence is synthesized)
gctgtctcctgcgcccgcctgcccggcgcggtccgaggatgcgggggggcgatgcccggggccagggacgcgctctgtcaccaggcgctgcagctgctggccgagctctgtgcccgtggg

SEQ ID NO: 570419 - DNA, 120 bp, Artificial Sequence
  ENSG00000170743_3 (sequence is synthesized)
gcacgacagctgccaggatttcatttaccacctgcgggaccgtgccagaccccggctccgcgacccagatatctcagtgagcctgctgacccttgtggtcactgcctgtggtctcgctct

SEQ ID NO: 570420 - DNA, 120 bp, Artificial Sequence
  ENSG00000170743_4 (sequence is synthesized)
ctttggcgtgtctctcttcgtatcttggaaactctgctgggttccgtggcgagaacgaggcctgccctctggtagcaaagacaacaaccaggagccccttaactacatggacacagagac

SEQ ID NO: 570421 - DNA, 120 bp, Artificial Sequence
  ENSG00000170743_5 (sequence is synthesized)
caatgagcaggagaacagtgaggacttcctagatcctcccacgccctgccctgactcctccatgaagatcagccacacctcccctgacattcccctctccacccagacggggatccagga

SEQ ID NO: 570422 - DNA, 120 bp, Artificial Sequence
  ENSG00000170743_6 (sequence is synthesized)
gaactgtgcccatggcgtccgcgtgcagcgccaagtcacagagccaacctcgtcggcccggcataattcaatccgaagacaactcaacttgtcaaacccggacttcaatatccagcagct

SEQ ID NO: 570423 - DNA, 120 bp, Artificial Sequence
  ENSG00000170743_7 (sequence is synthesized)
tcaaaaacaggaacagttgactggaattggtagaattaaaccagagttatataagcagaggtcattggataatgatgacgggagacggagtaacagcaaggcttgtgggaaactgaactt

SEQ ID NO: 570424 - DNA, 120 bp, Artificial Sequence
  ENSG00000170743_8 (sequence is synthesized)
cattttaaaatatgactgtgacttagagcagctcatagtgaagattcacaaagctgtcaatttgcccgccaaggacttttctgggacttcagatccttatgtcaagatctatttgcttcc

SEQ ID NO: 570425 - DNA, 120 bp, Artificial Sequence
  ENSG00000170743_9 (sequence is synthesized)
tgatcggaaaacaaaacaccagactaaagttcacagaaagaccctgaaccctgtgtttgatgaagtgtttttatttccggttccctacaatgaccttgaagcacggaagcttcacttctc

SEQ ID NO: 570426 - DNA, 120 bp, Artificial Sequence
  ENSG00000170743_10 (sequence is synthesized)
tgtgtacgactttgacaggttctctcgtcatgacttaatcggccaagtggtggtggatcacttcctagacttggctgatttccccagggagtgcatcctttggaaggatatcgaatatgt

SEQ ID NO: 570427 - DNA, 120 bp, Artificial Sequence
  ENSG00000170743_11 (sequence is synthesized)
caccaatgacaacgtggatctgggagagctgatgttttccctgtgctatcttccaacggctggcaggctgaccattaccattataaaagcaaggaatttaaaggcaatggacataacagg

SEQ ID NO: 570428 - DNA, 120 bp, Artificial Sequence
  ENSG00000170743_12 (sequence is synthesized)
agcatcagatccctatgtgaaagtctcgctgatgtgtgatggcagacgactgaagaagaggaaaacatccaccaagaggaacaccttgaatcctgtttacaacgaagccatagtctttga

SEQ ID NO: 570429 - DNA, 120 bp, Artificial Sequence
  ENSG00000170743_13 (sequence is synthesized)
tgtccctcccgagaacattgaccaaatccacttgtccatagcagtcatggactatgaccgtgtaggtcacaatgagatcatcggcgtgtgtcaagtaggcaacgaggctgagaggctggg

SEQ ID NO: 570430 - DNA, 120 bp, Artificial Sequence
  ENSG00000170743_14 (sequence is synthesized)
cagagaccactggagtgaaatgttgtcatatcctcggaagcccattgcacactggcattccctggtggagaaacgatgaccatgggtaagaggactgcttgtgccaaggacaaaatagga

SEQ ID NO: 570431 - DNA, 120 bp, Artificial Sequence
  ENSG00000170743_15 (sequence is synthesized)
caaccatctcacaaagatcttaagtaactttttccatccagcaacatccagacgatttcagtgaccaaatgctcagctgtaaccacagcactaactggccttctttccagattgggtttg

SEQ ID NO: 570432 - DNA, 120 bp, Artificial Sequence
  ENSG00000170743_16 (sequence is synthesized)
gtgatgtgctgcagggaagcatgtctctcatgccaagaaccaagatcggactatgaacaaaaacaaatgatagatatagtgacagtaccaagagtaccaggactcaatgtttcatatgaa

SEQ ID NO: 570433 - DNA, 120 bp, Artificial Sequence
  ENSG00000170743_17 (sequence is synthesized)
gcccttggtgatgaggacatagcatctgccctggaaatcgttattccaacataatattattttctagaatgccctggaaggacagaatatttaaaaatatatccaggtgctaaataggca

SEQ ID NO: 570434 - DNA, 120 bp, Artificial Sequence
  ENSG00000170743_18 (sequence is synthesized)
gcagatctcaattcacacatgactacctttgagctaatgactgtctccagaaaataactgtgccccaagaagtgctccagatttgcaaggaatagccccaagagaataccaagacaagca

SEQ ID NO: 570435 - DNA, 120 bp, Artificial Sequence
  ENSG00000170743_19 (sequence is synthesized)
ggctgttccctggaaaaaatctaatgcaaggagggctagttcacagcaaattcactgcctcctcccatgcacgtggtagagagtaccagtatcaacatggccctgttttctgctaaaacc

SEQ ID NO: 570436 - DNA, 120 bp, Artificial Sequence
  ENSG00000170743_20 (sequence is synthesized)
agattttgaggaatcagagacccccaacactactcactcagtagctagcagccccttcctttcaactgggagtgttattagaatgaaaagtaattagttagaagggcatacatctcagtg

SEQ ID NO: 570437 - DNA, 120 bp, Artificial Sequence
  ENSG00000170743_21 (sequence is synthesized)
gcatgagcattgtggaatatcctttcctaggcacattcgtccactaagggaacagcctcagaaactggtacagcaatgggtgagatgagatcatggagagagaacacagccatcccctat

SEQ ID NO: 570438 - DNA, 120 bp, Artificial Sequence
  ENSG00000170743_22 (sequence is synthesized)
agaaaggcacagcttttgggcttctctggcctgaatgccttctggggtatttccatatgcaacagcccagagtcatagccttgggcaaccacacatagaggtttccttctcacttcagac

SEQ ID NO: 570439 - DNA, 120 bp, Artificial Sequence
  ENSG00000170743_23 (sequence is synthesized)
acatacatcactttcacaccacttggggatggaaatacctacaagagtgaaggtcaagggccctccccaggcatctcattcattactcagcttccttcctgaccaagtctgccaaccaat

SEQ ID NO: 570440 - DNA, 120 bp, Artificial Sequence
  ENSG00000170743_24 (sequence is synthesized)
ggccagctatgcgcctcatcctcattgcttctgcctccacgtaaatgaaaccaaaggcctcagcatatcctgggaggactgggggctgttacctaatggtcctctctgtcccattatagg

SEQ ID NO: 570441 - DNA, 120 bp, Artificial Sequence
  ENSG00000170743_25 (sequence is synthesized)
tgcaaggcaccccatccacacatttgcaccactactccaagatagtatttttcttttcacacaatctctttacagcagaatccagagttggattgtagtttaccttcctggaaagctcat

SEQ ID NO: 570442 - DNA, 120 bp, Artificial Sequence
  ENSG00000170743_26 (sequence is synthesized)
tatctctgtttgaattaacatttcagcatggaactaactgggcggaggaaggatcgttatacgtcttcagaaagttctcattgccccagctgcctagtactatacaagaagctctacttt

SEQ ID NO: 570443 - DNA, 120 bp, Artificial Sequence
  ENSG00000170743_27 (sequence is synthesized)
gatggcagatctaagaaggctataggcctttgtttgtaggaagcagtgtcattacattcaagcttcacttctctgattggcttccaaccactgggattcaaagagaatccaaggttctgc

SEQ ID NO: 570444 - DNA, 120 bp, Artificial Sequence
  ENSG00000170743_28 (sequence is synthesized)
ctatgtctgatgacataaggaaaacttggcttcctctgctcaaggttcccctctgctcatccctcctcattcagacatcctccaccataccagtgtttagaagcaaaacatgaagggcta

SEQ ID NO: 570445 - DNA, 120 bp, Artificial Sequence
  ENSG00000170743_29 (sequence is synthesized)
gcgccaccaggatagttagcagaaatattgtctgtaaagctaggcagatgagcccagaagaatggtcccagagaaagcagactggctccaatagatatcaggcagcaatcccaataaatt

SEQ ID NO: 570446 - DNA, 120 bp, Artificial Sequence
  ENSG00000170743_30 (sequence is synthesized)
ctgacatgtccttggcaatggaagcctgggttggagatcctgaggcagctgtgcctactgttccccacctcagaagcttcctgcccagagagccagcagccttgggatactaatgaggat

SEQ ID NO: 570447 - DNA, 120 bp, Artificial Sequence
  ENSG00000170743_31 (sequence is synthesized)
gcaactggcttattggtatgaaatagaaggtggctttgtaggggcaagcaggcaaagagtactatccacatggcaggcaggtggctttgtgtctggaaagctttgcctagccagtacagc

SEQ ID NO: 570448 - DNA, 120 bp, Artificial Sequence
  ENSG00000170743_32 (sequence is synthesized)
tgtgagcagaggctggttataaatttgaactccctcagcccatttgcaactctgcctctgttctcttgcattctgtttggttgccctttagtttcctagtaaatgctccttttgaaaaac

SEQ ID NO: 570449 - DNA, 120 bp, Artificial Sequence
  ENSG00000170743_33 (sequence is synthesized)
gcagtcctgagctttgtcaacatgatcctcctgcctgagacttcaatttgggaaagaatgatatgaagaagccagtaatgcagagaacaaatgctggcgaaggtggtggagggagattta

SEQ ID NO: 570450 - DNA, 120 bp, Artificial Sequence
  ENSG00000170743_34 (sequence is synthesized)
gtctcttggtgcccaggttttctctgcatacttgctgcactctctggtgtcctggaagcagctctgccctcttccaacctggctcagccttgaaagggccccttttttcacattggtgca

SEQ ID NO: 570451 - DNA, 120 bp, Artificial Sequence
  ENSG00000170743_35 (sequence is synthesized)
ggggaggaagaagggtttccagctgcaaggagagagcagcgtgcagtgacagtgaggcaccaggatgtagaacaatgctgccagaacatattccctgaggtttgggaatgaacttcttca

SEQ ID NO: 570452 - DNA, 120 bp, Artificial Sequence
  ENSG00000170743_36 (sequence is synthesized)
agggctgtgctccctttttgatgggtcctagtgggcctctgtgctggtcgtgaccgacttttcttcaatgatccagtggaggctgcaatgtattttgcttaaaactacagctggtttata

SEQ ID NO: 570453 - DNA, 120 bp, Artificial Sequence
  ENSG00000170743_37 (sequence is synthesized)
attttggcctcagacagtaattacagctgctggggctccttggagagataattacggaaagaattcagcatattcattttatctacacacttaaccatcaattaaatcattaccatctaa

SEQ ID NO: 570454 - DNA, 120 bp, Artificial Sequence
  ENSG00000170745_0 (sequence is synthesized)
gctctcctcgccgccgcggcggcaggcgcggggccgcgccgcgaggcctgatccctgcagcgcgggcaggcggcgtcgcagagcggagctagctggatgcgtccggactcctgcaggtga

SEQ ID NO: 570455 - DNA, 120 bp, Artificial Sequence
  ENSG00000170745_1 (sequence is synthesized)
atgcgtccggactcctgcaggtgagagtgattttccagtgattgctttggcctgtacaaccagagaacaggattcttcccttctttttggccaccaaatgcctatgtgcaccacacattc

SEQ ID NO: 570456 - DNA, 120 bp, Artificial Sequence
  ENSG00000170745_2 (sequence is synthesized)
cagtgtgctgagaagggcagagcttcttggatgatgatggacgtcccaccgggcaggatgaaggcagagcgtgtggcatctccacctcaagggtgcagcctgatcttcctcttctccctt

SEQ ID NO: 570457 - DNA, 120 bp, Artificial Sequence
  ENSG00000170745_3 (sequence is synthesized)
gccagccagcactctgccttctgtatccaccatggtgtttggtgagtttttccatcgccctggacaagacgaggaacttgtcaacctgaatgtggggggctttaagcagtctgttgacca

SEQ ID NO: 570458 - DNA, 120 bp, Artificial Sequence
  ENSG00000170745_4 (sequence is synthesized)
aagcaccctcctgcggtttcctcacaccagactggggaagctgcttacttgccattctgaagaggccattctggagctgtgtgatgattacagtgtggccgataaggagtactactttga

SEQ ID NO: 570459 - DNA, 120 bp, Artificial Sequence
  ENSG00000170745_5 (sequence is synthesized)
tcggaatccctccttgttcagatatgttttgaatttttattacacggggaagctgcatgtcatggaggagctgtgcgtattctcattctgccaggagatcgagtactggggcatcaacga

SEQ ID NO: 570460 - DNA, 120 bp, Artificial Sequence
  ENSG00000170745_6 (sequence is synthesized)
gctcttcattgattcttgctgcagcaatcgctaccaggaacgcaaggaggaaaaccacgagaaggactgggaccagaaaagccatgatgtgagtaccgactcctcgtttgaagagtcgtc

SEQ ID NO: 570461 - DNA, 120 bp, Artificial Sequence
  ENSG00000170745_7 (sequence is synthesized)
tctgtttgagaaagagctggagaagtttgacacactgcgatttggtcagctccggaagaaaatctggattagaatggagaatccagcgtactgcctgtccgctaagcttatcgctatctc

SEQ ID NO: 570462 - DNA, 120 bp, Artificial Sequence
  ENSG00000170745_8 (sequence is synthesized)
ctccttgagcgtggtgctggcctccatcgtggccatgtgcgttcacagcatgtcggagttccagaatgaggatggagaagtggatgatccggtgctggaaggagtggagatcgcgtgcat

SEQ ID NO: 570463 - DNA, 120 bp, Artificial Sequence
  ENSG00000170745_9 (sequence is synthesized)
tggaaaaaccctctgaacatcattgactttgtctctattattcccttctatgccacgttggctgtagacaccaaggaggaagagagtgaggatattgagaacatgggcaaggtggtccag

SEQ ID NO: 570464 - DNA, 120 bp, Artificial Sequence
  ENSG00000170745_10 (sequence is synthesized)
atcctacggcttatgaggattttccgaattctaaagcttgcccggcactcggtaggacttcggtctctaggtgccacactgagacacagctaccatgaagttgggcttctgcttctcttc

SEQ ID NO: 570465 - DNA, 120 bp, Artificial Sequence
  ENSG00000170745_11 (sequence is synthesized)
ctctctgtgggcatttccattttctctgtgcttatctactccgtggagaaagatgaccacacatccagcctcaccagcatccccatctgctggtggtgggccaccatcagcatgacaact

SEQ ID NO: 570466 - DNA, 120 bp, Artificial Sequence
  ENSG00000170745_12 (sequence is synthesized)
gtgggctatggagacacccacccggtcaccttggcgggaaagctcatcgccagcacatgcatcatctgtggcatcttggtggtggcccttcccatcaccatcatcttcaacaagttttcc

SEQ ID NO: 570467 - DNA, 120 bp, Artificial Sequence
  ENSG00000170745_13 (sequence is synthesized)
aagtactaccagaagcaaaaggacattgatgtggaccagtgcagtgaggatgcaccagagaagtgtcatgagctaccttactttaacattagggatatatatgcacagcggatgcacacc

SEQ ID NO: 570468 - DNA, 120 bp, Artificial Sequence
  ENSG00000170745_14 (sequence is synthesized)
ttcattaccagtctctcttctgtaggcattgtggtgagcgatcctgactccacagatgcttcaagcattgaagacaatgaggacatttgtaacaccacctccttggagaattgcacagca

SEQ ID NO: 570469 - DNA, 120 bp, Artificial Sequence
  ENSG00000170745_15 (sequence is synthesized)
aaatgagcgggggtgtttgtgcctgtttctcttatcctttcccgacattaggttaacacagctttataaacctcagtgggttcgttaaaatcatttaattctcagggtgtacctttcagc

SEQ ID NO: 570470 - DNA, 120 bp, Artificial Sequence
  ENSG00000170745_16 (sequence is synthesized)
catagttggacattcattgctgaattctgaaatgatagaattgtctttatttttctctgtgaggtcaattaaatgccttgttctgaaatttattttttacaagagagagttgtgatatag

SEQ ID NO: 570471 - DNA, 120 bp, Artificial Sequence
  ENSG00000170745_17 (sequence is synthesized)
tttggaatataagataaatggtattgggtggggtttgtggctacagcttatgcatcattctgtgtttgtcatttactcacattgagctaactttaaattactgacaagtagaatcaaagg

SEQ ID NO: 570472 - DNA, 120 bp, Artificial Sequence
  ENSG00000170745_18 (sequence is synthesized)
tgcagctgactgagacgacatgcatgtaagatccacaaaatgagacaatgcatgtaaatccatgctcatgttctaaacatggaaactaggagcctaataaacttcctaattcagtatgga

SEQ ID NO: 570473 - DNA, 120 bp, Artificial Sequence
  ENSG00000170745_19 (sequence is synthesized)
agtgcagcgaggccagcgatgccttctggaccacacgctgtcctcgccgaggtcctggtttgttcctcaacgtcggctgaaggcatcgtcccctgacttcctcttccattcgtccttccg

SEQ ID NO: 570474 - DNA, 120 bp, Artificial Sequence
  ENSG00000170745_20 (sequence is synthesized)
catgacgaaatttgcatttcagaaaggccacctgatactgtatggaggatggcctagagggctgaactgatgcttgaaggccctggagcaagctttttgtgatgcttctatggcaccatc

SEQ ID NO: 570475 - DNA, 120 bp, Artificial Sequence
  ENSG00000170745_21 (sequence is synthesized)
tgccaactggaaaaatgaccctgctctgcacacagacctgtgttcctgtgggcggagacccctctgtcagttctcagatggggaacctggagcatagagggggaagccacagtttcttca

SEQ ID NO: 570476 - DNA, 120 bp, Artificial Sequence
  ENSG00000170745_22 (sequence is synthesized)
tccacctcaagggtgggtttataaactccttctatagatgaagacttcacctgcccaaggtcatgcagataagaagaggcagctcagacacaagttttcagaatcctagtctttccctct

SEQ ID NO: 570477 - DNA, 120 bp, Artificial Sequence
  ENSG00000170745_23 (sequence is synthesized)
tttttgctagttgatgctgataattcagcatgaataagaggacatgctgtttttgttttgttaagttcaacattgaaacgttgcattcagtttatgaatgctctggaatagagcaccctg

SEQ ID NO: 570478 - DNA, 120 bp, Artificial Sequence
  ENSG00000170748_0 (sequence is synthesized)
ggactcggcgactaggcgccgcctgaccagtaggagccgccctcgacgagcgagctcgaaggctgcgactggcgccgcctcaccgcctcccaccgccactgaccgaccgttcgaccggca

SEQ ID NO: 570479 - DNA, 120 bp, Artificial Sequence
  ENSG00000170748_1 (sequence is synthesized)
aacatggttgaagcggatcgcccggggaagctgttcattgggggcctcaacctcgaaaccgacgagaaagccctcgaagccgagtttggcaagtatggccgcatcgtcgaggtgctcctg

SEQ ID NO: 570480 - DNA, 120 bp, Artificial Sequence
  ENSG00000170748_2 (sequence is synthesized)
atgaaagaccgagaaaccaacaagtcgaggggcttcgcgttcgtcacctttgaaagccccgcagacgccaaggccgccgccagagacatgaacggcaagtccctggatggtaaggccatc

SEQ ID NO: 570481 - DNA, 120 bp, Artificial Sequence
  ENSG00000170748_3 (sequence is synthesized)
ggtaaggccatcaaggtggcccaggccaccaaaccggcgttcgagagcagccggcggggcccgccgcctccccgcagccgcggtcgcccgaggttcctgcgcggaacccgcgggggtggc

SEQ ID NO: 570482 - DNA, 120 bp, Artificial Sequence
  ENSG00000170748_4 (sequence is synthesized)
cgttccccatcccggggcgggcccgatgatgacggcggctacacggcggatttcgacctgcggccctccagggccccgatgcccatgaagcgtgggccgccgccgcgcagggtcggccca

SEQ ID NO: 570483 - DNA, 80 bp, Artificial Sequence
  ENSG00000170748_5 (sequence is synthesized)
gcggcggtggaatgcgcgggagggccctggccgtgcgggggcgagacggctactcaggcccaccgcgccgggagccgctg

SEQ ID NO: 570484 - DNA, 120 bp, Artificial Sequence
  ENSG00000170748_6 (sequence is synthesized)
cccccgcgccgcgacccctacctgggcccgcgggatgagggctactcgtccagagacggctactcgagccgagactaccgcgaaccccggggttttgccccctcgcccggagagtacacc

SEQ ID NO: 570485 - DNA, 120 bp, Artificial Sequence
  ENSG00000170748_7 (sequence is synthesized)
caccgcgattacggccactccagtgtccgggacgactgtcccttgagaggctacagcgaccgagacggctacggaggtcgcgaccgtgactacggggatcatctgagcagaggctcccat

SEQ ID NO: 570486 - DNA, 120 bp, Artificial Sequence
  ENSG00000170748_8 (sequence is synthesized)
gatgcctacagcggcggccgcgacagttacagcagcagttatggccggagcgaccgctactcgaggggccgacaccgggtgggcagaccagatcgtgggctctctctgtccatggaaagg

SEQ ID NO: 570487 - DNA, 120 bp, Artificial Sequence
  ENSG00000170748_9 (sequence is synthesized)
ggctgccctccccagcgtgattcttacagccggtcaggctgcagggtgcccaggggcggaggccgtctaggaggccgcttggagagaggaggaggccggagcagatactaagcaggaaca

SEQ ID NO: 570488 - DNA, 120 bp, Artificial Sequence
  ENSG00000170748_10 (sequence is synthesized)
gacttgggaccaaaaatcccttttcaacgaaactaacaaaaagaagaacctgttgtatggtaactacccaaggactagtacaaggaagagttgtttttaccttttaagaatttcctgtta

SEQ ID NO: 570489 - DNA, 120 bp, Artificial Sequence
  ENSG00000170748_11 (sequence is synthesized)
agatcgtctccatttttatgcttttgggagaaaaaacttaaaattcgtttagtttagttttggaattgttaacgtttctttcaacaagctcctgttaaaagtatatgaacctgagtacta

SEQ ID NO: 570490 - DNA, 120 bp, Artificial Sequence
  ENSG00000170748_12 (sequence is synthesized)
gtcttcttacatttacaagtagaaattcgattaatggcttcttcccttgtaaattttcttgataaatgaggcaaacagttctaagatctttgataaacatctgctcacctaaaatggaaa

SEQ ID NO: 570491 - DNA, 120 bp, Artificial Sequence
  ENSG00000170748_13 (sequence is synthesized)
aacggatcattctgctcatttaaaccaactagattttgggtggagagtgggagggattggtgtatgctactcttaagatttcagggtatctttcaaactgaatctttgtttccagtatta

SEQ ID NO: 570492 - DNA, 120 bp, Artificial Sequence
  ENSG00000170748_14 (sequence is synthesized)
aaaagcaaacaaccagcaacaacaacaacaaaagtgatttagatcaaatgtttatgtaaagaaaattattttcactcagtaaatctgaaaagtaaatggataatgttggccatgttttgc

SEQ ID NO: 570493 - DNA, 120 bp, Artificial Sequence
  ENSG00000170748_15 (sequence is synthesized)
ctttttgctttttctttgggaatctacaggatcacctgtcccctcactcccaaaagtactatctatgttttgaacaacagtggaatactatatcaaaggtttggccaaccaaccacaaag

SEQ ID NO: 570494 - DNA, 120 bp, Artificial Sequence
  ENSG00000170748_16 (sequence is synthesized)
ctacaaaacaagcaaatcccaaatccttcaattgatagcattcattttcactaccaacaaatttattaagaaacaagtagaaaataaatcagtggtcgacttggggaccgtaatggcttc

SEQ ID NO: 570495 - DNA, 120 bp, Artificial Sequence
  ENSG00000170759_0 (sequence is synthesized)
gtcgcccaacggcggcctcaggagtgatcgggcagcagtcggccggccagcggacggcagagcgggcggacgggtaggcccggcctgctcttcgcgaggaggaagaaggtggccactctc

SEQ ID NO: 570496 - DNA, 120 bp, Artificial Sequence
  ENSG00000170759_1 (sequence is synthesized)
ccggtccccagaacctccccagcccccgcagtccgcccagaccgtaaagggggacgctgaggagccgcggacgctctccccggtgccgccgccgctgccgccgccatggctgccatgatg

SEQ ID NO: 570497 - DNA, 120 bp, Artificial Sequence
  ENSG00000170759_2 (sequence is synthesized)
gatcggaagtgagcattagggttaacggctgccggcgccggctcttcaagtcccggctccccggccgcctccacccggggaagcgcagcgcggcgcagctgactgctgcctctcacggcc

SEQ ID NO: 570498 - DNA, 120 bp, Artificial Sequence
  ENSG00000170759_3 (sequence is synthesized)
ctcgcgaccacaagccctcaggtccggcgcgttccctgcaagactgagcggcggggagtggctcccggccgccggccccggctgcgagaaagatggcggacctggccgagtgcaacatca

SEQ ID NO: 570499 - DNA, 120 bp, Artificial Sequence
  ENSG00000170759_4 (sequence is synthesized)
aagtgatgtgtcgcttcagacctctcaacgagtctgaagtgaaccgcggcgacaagtacatcgccaagtttcagggagaagacacggtcgtgatcgcgtccaagccttatgcatttgatc

SEQ ID NO: 570500 - DNA, 120 bp, Artificial Sequence
  ENSG00000170759_5 (sequence is synthesized)
gggtgttccagtcaagcacatctcaagagcaagtgtataatgactgtgcaaagaagattgttaaagatgtacttgaaggatataatggaacaatatttgcatatggacaaacatcctctg

SEQ ID NO: 570501 - DNA, 120 bp, Artificial Sequence
  ENSG00000170759_6 (sequence is synthesized)
ggaagacacacacaatggagggtaaacttcatgatccagaaggcatgggaattattccaagaatagtgcaagatatttttaattatatttactccatggatgaaaatttggaatttcata

SEQ ID NO: 570502 - DNA, 120 bp, Artificial Sequence
  ENSG00000170759_7 (sequence is synthesized)
ttaaggtttcatattttgaaatatatttggataagataagggacctgttagatgtttcaaagaccaacctttcagttcatgaagacaaaaaccgagttccctatgtaaaggggtgcacag

SEQ ID NO: 570503 - DNA, 120 bp, Artificial Sequence
  ENSG00000170759_8 (sequence is synthesized)
agcgttttgtatgtagtccagatgaagttatggataccatagatgaaggaaaatccaacagacatgtagcagttacaaatatgaatgaacatagctctaggagtcacagtatatttctta

SEQ ID NO: 570504 - DNA, 120 bp, Artificial Sequence
  ENSG00000170759_9 (sequence is synthesized)
ttaatgtcaaacaagagaacacacaaacggaacaaaagctgagtggaaaactttatctggttgatttagctggtagtgaaaaggttagtaaaactggagctgaaggtgctgtgctggatg

SEQ ID NO: 570505 - DNA, 120 bp, Artificial Sequence
  ENSG00000170759_10 (sequence is synthesized)
aagctaaaaacatcaacaagtcactttctgctcttggaaatgttatttctgctttggctgagggtagtacatatgttccatatcgagatagtaaaatgacaagaatccttcaagattcat

SEQ ID NO: 570506 - DNA, 120 bp, Artificial Sequence
  ENSG00000170759_11 (sequence is synthesized)
taggtggcaactgtagaaccactattgtaatttgctgctctccatcatcatacaatgagtctgaaacaaaatctacactcttatttggccaaagggccaaaacaattaagaacacagttt

SEQ ID NO: 570507 - DNA, 120 bp, Artificial Sequence
  ENSG00000170759_12 (sequence is synthesized)
gtgtcaatgtggagttaactgcagaacagtggaaaaagaagtatgaaaaagaaaaagaaaaaaataagatcctgcggaacactattcagtggcttgaaaatgagctcaacagatggcgta

SEQ ID NO: 570508 - DNA, 120 bp, Artificial Sequence
  ENSG00000170759_13 (sequence is synthesized)
atggggagacggtgcctattgatgaacagtttgacaaagagaaagccaacttggaagctttcacagtggataaagatattactcttaccaatgataaaccagcaaccgcaattggagtta

SEQ ID NO: 570509 - DNA, 120 bp, Artificial Sequence
  ENSG00000170759_14 (sequence is synthesized)
taggaaattttactgatgctgaaagaagaaagtgtgaagaagaaattgctaaattatacaaacagcttgatgacaaggatgaagaaattaaccagcaaagtcaactggtagagaaactga

SEQ ID NO: 570510 - DNA, 120 bp, Artificial Sequence
  ENSG00000170759_15 (sequence is synthesized)
agacgcaaatgttggatcaggaggagcttttggcatctaccagaagggatcaagacaatatgcaagctgagctgaatcgccttcaagcagaaaatgatgcctctaaagaagaagtgaaag

SEQ ID NO: 570511 - DNA, 120 bp, Artificial Sequence
  ENSG00000170759_16 (sequence is synthesized)
aagttttacaggccctagaagaacttgctgtcaattatgatcagaagtctcaggaagttgaagacaaaactaaggaatatgaattgcttagtgatgaattgaatcagaaatcggcaactt

SEQ ID NO: 570512 - DNA, 120 bp, Artificial Sequence
  ENSG00000170759_17 (sequence is synthesized)
tagcgagtatagatgctgagcttcagaaacttaaggaaatgaccaaccaccagaaaaaacgagcagctgagatgatggcatctttactaaaagaccttgcagaaataggaattgctgtgg

SEQ ID NO: 570513 - DNA, 120 bp, Artificial Sequence
  ENSG00000170759_18 (sequence is synthesized)
gaaataatgatgtaaagcagcctgagggaactggcatgatagatgaagagttcactgttgcaagactctacattagcaaaatgaagtcagaagtaaaaaccatggtgaaacgttgcaagc

SEQ ID NO: 570514 - DNA, 120 bp, Artificial Sequence
  ENSG00000170759_19 (sequence is synthesized)
agttagaaagcacacaaactgagagcaacaaaaaaatggaagaaaatgaaaaggagttagcagcatgtcagcttcgtatctctcaacatgaagccaaaatcaagtcattgactgaatacc

SEQ ID NO: 570515 - DNA, 120 bp, Artificial Sequence
  ENSG00000170759_20 (sequence is synthesized)
ttcaaaatgtggaacaaaagaaaagacagttggaggaatctgtcgatgccctcagtgaagaactagtccagcttcgagcacaagagaaagtccatgaaatggaaaaggagcacttaaata

SEQ ID NO: 570516 - DNA, 120 bp, Artificial Sequence
  ENSG00000170759_21 (sequence is synthesized)
aggttcagactgcaaatgaagttaagcaagctgttgaacagcagatccagagccatagagaaactcatcaaaaacagatcagtagtttgagagatgaagtagaagcaaaagcaaaactta

SEQ ID NO: 570517 - DNA, 120 bp, Artificial Sequence
  ENSG00000170759_22 (sequence is synthesized)
ttactgatcttcaagaccaaaaccagaaaatgatgttagagcaggaacgtctaagagtagaacatgagaagttgaaagccacagatcaggaaaagagcagaaaactacatgaacttacgg

SEQ ID NO: 570518 - DNA, 120 bp, Artificial Sequence
  ENSG00000170759_23 (sequence is synthesized)
ttatgcaagatagacgagaacaagcaagacaagacttgaagggtttggaagagacagtggcaaaagaacttcagactttacacaacctgcgcaaactctttgttcaggacctggctacaa

SEQ ID NO: 570519 - DNA, 120 bp, Artificial Sequence
  ENSG00000170759_24 (sequence is synthesized)
gcacaaacagttggtacgtgataatgcagatctccgctgtgaacttcctaagttggaaaagcgacttcgagctacagctgagagagtgaaagctttggaatcagcactgaaagaagctaa

SEQ ID NO: 570520 - DNA, 120 bp, Artificial Sequence
  ENSG00000170759_25 (sequence is synthesized)
agaaaatgcatctcgtgatcgcaaacgctatcagcaagaagtagatcgcataaaggaagcagtcaggtcaaagaatatggccagaagagggcattctgcacagattgctaaacctattcg

SEQ ID NO: 570521 - DNA, 120 bp, Artificial Sequence
  ENSG00000170759_26 (sequence is synthesized)
tcccgggcaacatccagcagcttctccaactcacccaagtgcaattcgtggaggaggtgcatttgttcagaacagccagccagtggcagtgcgaggtggaggaggcaaacaagtgtaatc

SEQ ID NO: 570522 - DNA, 120 bp, Artificial Sequence
  ENSG00000170759_27 (sequence is synthesized)
gtttatacatacccacaggtgttaaaaagtaatcgaagtacgaagaggacatggtatcaagcagtcattcaatgactataacctctactcccttgggattgtagaattataacttttaaa

SEQ ID NO: 570523 - DNA, 120 bp, Artificial Sequence
  ENSG00000170759_28 (sequence is synthesized)
aaaaatgtataaattatacctggcctgtacagctgtttcctacctactcttcttgtaaactctgctgcttcccaacacaactagagtgcaattttggcatcttaggagggaaaaaggaca

SEQ ID NO: 570524 - DNA, 120 bp, Artificial Sequence
  ENSG00000170759_29 (sequence is synthesized)
gtttacaactgtggccctatttattacacagtttgtctatcgtgtcttaaatttagtctttactgtgccaagctaactgtaccttataggactgtactttttgtattttttgtgtatgtt

SEQ ID NO: 570525 - DNA, 120 bp, Artificial Sequence
  ENSG00000170759_30 (sequence is synthesized)
tattttttaatctcagtttaaattacctagctgctactgcttcttgtttttcttttcctattaaaacgtcttcctttttttttcttaagagaaaatggaacatttaggttaaatgtcttt

SEQ ID NO: 570526 - DNA, 120 bp, Artificial Sequence
  ENSG00000170759_31 (sequence is synthesized)
aaattttaccacttaacaacactacatgcccataaaatatatccagtcagtactgtattttaaaatcccttgaaatgatgatatcagggttaaaattacttgtattgtttctgaagtttg

SEQ ID NO: 570527 - DNA, 120 bp, Artificial Sequence
  ENSG00000170759_32 (sequence is synthesized)
ctcctgaaaactactgtttgagcactgaaacgttacaaatgcctaataggcatttgagactgagcaaggctacttgttatctcatgaaatgcctgttgccgagttattttgaatagaaat

SEQ ID NO: 570528 - DNA, 120 bp, Artificial Sequence
  ENSG00000170759_33 (sequence is synthesized)
attttaaagtatcaaaagcagatcttagtttaagggagtttggaaaaggaattatatttctctttttcctgattctgtactcaacaagtcttgatggaattaaaatactctgctttattc

SEQ ID NO: 570529 - DNA, 120 bp, Artificial Sequence
  ENSG00000170759_34 (sequence is synthesized)
tggtgagcctgctagctaatataagtattggacaggtaataatttgtcatctttaatattagtaaaatgaattaagatattataggattaaacataattttatacggttagtactttatt

SEQ ID NO: 570530 - DNA, 120 bp, Artificial Sequence
  ENSG00000170759_35 (sequence is synthesized)
ggccgacctaaatttatagcgtgtggaaattgagaaaaatgaagaaacaggacagatatatgatgaattaaaaatatatataggtcaattttggtctgaaatccctgaggtgtttttaac

SEQ ID NO: 570531 - DNA, 120 bp, Artificial Sequence
  ENSG00000170759_36 (sequence is synthesized)
ctgctacactaatttgtacactaatttatttctttagtctagaaatagtaaattgtttgcaagtcactaataatcattagataaattattttcttggccatagccgataattttgtaatc

SEQ ID NO: 570532 - DNA, 120 bp, Artificial Sequence
  ENSG00000170759_37 (sequence is synthesized)
agtactaagtgtatacgtatttttgccactttttcctcagatgattaaagtaagtcaacagcttattttaggaaactgtaaaagtaatagggaaagagatttcactatttgcttcatcag

SEQ ID NO: 570533 - DNA, 120 bp, Artificial Sequence
  ENSG00000170759_38 (sequence is synthesized)
tggtaggggggcggtgactgcaactgtgttagcagaaattcacagagaatggggatttaaggttagcagagaaacttggaaagttctgtgttaggatcttgctggcagaattaacttttt

SEQ ID NO: 570534 - DNA, 120 bp, Artificial Sequence
  ENSG00000170759_39 (sequence is synthesized)
gcaaaagttttatacacagatatttgtattaaatttggagccatagtcagaagactcagatcataattggcttatttttctatttccgtaactattgtaatttccacttttgtaataatt

SEQ ID NO: 570535 - DNA, 120 bp, Artificial Sequence
  ENSG00000170759_40 (sequence is synthesized)
ttgatttaaaatataaatttatttatttatttttttaatagtcaaaaatctttgctgttgtagtctgcaacctctaaaatgattgtgttgcttttaggattgatcagaagaaacactcca

SEQ ID NO: 570536 - DNA, 120 bp, Artificial Sequence
  ENSG00000170759_41 (sequence is synthesized)
aaaattgagatgaaatgttggtgcagccagttataagtaatatagttaacaagcaaaaaaagtgctgccaccttttatgatgattttctaaatggagaaacatttggctgcatccacata

SEQ ID NO: 570537 - DNA, 120 bp, Artificial Sequence
  ENSG00000170759_42 (sequence is synthesized)
gacctttatgttttgttttcagttgaaaacttgcctcctttggcaacattcgtaaatgaagcagaatttttttttctcttttttccaaatatgttagttttgttcttgtaagatgtatca

SEQ ID NO: 570538 - DNA, 120 bp, Artificial Sequence
  ENSG00000170759_43 (sequence is synthesized)
tgggtattggtgctgtgtaatgaacaacgaattttaattagcatgtggttcagaatatacaatgttaggtttttaaaaagtatcttgatggttcttttctatttataatttcagactttc

SEQ ID NO: 570539 - DNA, 120 bp, Artificial Sequence
  ENSG00000170759_44 (sequence is synthesized)
ataaagtgtaccaagaatttcataaatttgttttcagtgaactgctttttgctatggtaggtcattaaacacagcacttactcttaaaaatgaaaatttctgatcatctaggatattgac

SEQ ID NO: 570540 - DNA, 120 bp, Artificial Sequence
  ENSG00000170759_45 (sequence is synthesized)
acatttcaatttgcagtgtctttttgactggatatattaacgttcctctgaatggcattgatagatggttcagaagagaaactcaatgaaataaagagaatatttattcatggcgattaa

SEQ ID NO: 570541 - DNA, 120 bp, Artificial Sequence
  ENSG00000170759_46 (sequence is synthesized)
ttaaattatttgcctaacttaagaaaactactgtgcgtaactctcagtttgtgcttaactccatttgacatgaggtgacagaagagagtctgagtctacctgtggaatatgttggtttat

SEQ ID NO: 570542 - DNA, 120 bp, Artificial Sequence
  ENSG00000170759_47 (sequence is synthesized)
tttcagtgcttgaagatacattcacaaatacttggtttgggaagacaccgtttaattttaagttaacttgcatgttgtaaatgcgttttatgtttaaataaagaggaaaattttttgaaa

SEQ ID NO: 570543 - DNA, 120 bp, Artificial Sequence
  ENSG00000170775_0 (sequence is synthesized)
agtgactagctcccgcggctagcggcactgtccaccgacgagcggcgccctcttctcccccttctccccacgatttccttctctgcggcggcacgccgtccagcagcctgcttcgccccg

SEQ ID NO: 570544 - DNA, 120 bp, Artificial Sequence
  ENSG00000170775_1 (sequence is synthesized)
tcgtcaactttgagctggaggagaagcaactttggcagtggccgcggggttggaatcccgcttctcctcggcagcagtaggctcgcaagtcgctggggttaggtggggcaagagtttcgc

SEQ ID NO: 570545 - DNA, 120 bp, Artificial Sequence
  ENSG00000170775_2 (sequence is synthesized)
cggcgcatcagcgctgcttcggactgtttgcaacgtgtttccagcgagctgggagcggggttgtgactgcgagtcgtctgggggagggggacttgtttttcttttcctctagagacctcg

SEQ ID NO: 570546 - DNA, 120 bp, Artificial Sequence
  ENSG00000170775_3 (sequence is synthesized)
gcttgcaactggatcaaacgctgtcgaaaggatgtaaataggcagagcaactgttaccaagaaggccaccacccccacccaaaggcagtgaggagtgtggggcttcgtctgggctccccc

SEQ ID NO: 570547 - DNA, 120 bp, Artificial Sequence
  ENSG00000170775_4 (sequence is synthesized)
gagtctcaacagtaatcaacagtcaggtgttgattgcaacttttcaaggtcagccaccgggagtagcctattccctctaggaaccttggagggcataccttgctgggactcaacttggct

SEQ ID NO: 570548 - DNA, 120 bp, Artificial Sequence
  ENSG00000170775_5 (sequence is synthesized)
gagaaatgcacaagatgccaaaggaggaaggattatagggggcgtgtgtgtgacccccaagaccgatcttccgctatcaccctaatctccggttccccgctacccgggcgggggtgagta

SEQ ID NO: 570549 - DNA, 120 bp, Artificial Sequence
  ENSG00000170775_6 (sequence is synthesized)
tgtgacatgtgcctaactctcagcagcaacttcggcagcaggtgtcgatcctaactaagcaggagctgcggctgccgggtgtgccctcaccaagccatgcgagccccgggcgcgcttctc

SEQ ID NO: 570550 - DNA, 120 bp, Artificial Sequence
  ENSG00000170775_7 (sequence is synthesized)
gcccgcatgtcgcggctactgcttctgctactgctcaaggtgtctgcctcttctgccctcggggtcgcccctgcgtccagaaacgaaacttgtctgggggagagctgtgcacctacagtg

SEQ ID NO: 570551 - DNA, 120 bp, Artificial Sequence
  ENSG00000170775_8 (sequence is synthesized)
atccagcgccgcggcagggacgcctggggaccgggaaattctgcaagagacgttctgcgagcccgagcacccagggaggagcagggggcagcgtttcttgcgggaccctcctgggacctg

SEQ ID NO: 570552 - DNA, 120 bp, Artificial Sequence
  ENSG00000170775_9 (sequence is synthesized)
ccggcggccccgggccgtgacccggctgcaggcagaggggcggaggcgtcggcagccggacccccgggacctccaaccaggccacctggcccctggaggtggaaaggtgctcggggtcag

SEQ ID NO: 570553 - DNA, 120 bp, Artificial Sequence
  ENSG00000170775_10 (sequence is synthesized)
gagccttctgaaactttggggagagggaaccccacggccctccagctcttccttcagatctcagaggaggaagagaagggtcccagaggcgctggcatttccgggcgtagccaggagcag

SEQ ID NO: 570554 - DNA, 120 bp, Artificial Sequence
  ENSG00000170775_11 (sequence is synthesized)
agtgtgaagacagtccccggagccagcgatcttttttactggccaaggagagccgggaaactccagggttcccaccacaagcccctgtccaagacggccaatggactggcggggcacgaa

SEQ ID NO: 570555 - DNA, 120 bp, Artificial Sequence
  ENSG00000170775_12 (sequence is synthesized)
gggtggacaattgcactcccgggccgggcgctggcccagaatggatccttgggtgaaggaatccatgagcctgggggtccccgccggggaaacagcacgaaccggcgtgtgagactgaag

SEQ ID NO: 570556 - DNA, 120 bp, Artificial Sequence
  ENSG00000170775_13 (sequence is synthesized)
aaccccttctacccgctgacccaggagtcctatggagcctacgcggtcatgtgtctgtccgtggtgatcttcgggaccggcatcattggcaacctggcggtgatgtgcatcgtgtgccac

SEQ ID NO: 570557 - DNA, 120 bp, Artificial Sequence
  ENSG00000170775_14 (sequence is synthesized)
aactactacatgcggagcatctccaactccctcttggccaacctggccttctgggactttctcatcatcttcttctgccttccgctggtcatcttccacgagctgaccaagaagtggctg

SEQ ID NO: 570558 - DNA, 120 bp, Artificial Sequence
  ENSG00000170775_15 (sequence is synthesized)
ctggaggacttctcctgcaagatcgtgccctatatagaggtcgcttctctgggagtcaccactttcaccttatgtgctctgtgcatagaccgcttccgtgctgccaccaacgtacagatg

SEQ ID NO: 570559 - DNA, 120 bp, Artificial Sequence
  ENSG00000170775_16 (sequence is synthesized)
tactacgaaatgatcgaaaactgttcctcaacaactgccaaacttgctgttatatgggtgggagctctattgttagcacttccagaagttgttctccgccagctgagcaaggaggatttg

SEQ ID NO: 570560 - DNA, 120 bp, Artificial Sequence
  ENSG00000170775_17 (sequence is synthesized)
gggtttagtggccgagctccggcagaaaggtgcattattaagatctctcctgatttaccagacaccatctatgttctagccctcacctacgacagtgcgagactgtggtggtattttggc

SEQ ID NO: 570561 - DNA, 120 bp, Artificial Sequence
  ENSG00000170775_18 (sequence is synthesized)
tgttacttttgtttgcccacgcttttcaccatcacctgctctctagtgactgcgaggaaaatccgcaaagcagagaaagcctgtacccgagggaataaacggcagattcaactagagagt

SEQ ID NO: 570562 - DNA, 120 bp, Artificial Sequence
  ENSG00000170775_19 (sequence is synthesized)
cagatgaactgtacagtagtggcactgaccattttatatggattttgcattattcctgaaaatatctgcaacattgttactgcctacatggctacaggggtttcacagcagacaatggac

SEQ ID NO: 570563 - DNA, 120 bp, Artificial Sequence
  ENSG00000170775_20 (sequence is synthesized)
ctccttaatatcatcagccagttccttttgttctttaagtcctgtgtcaccccagtcctccttttctgtctctgcaaacccttcagtcgggccttcatggagtgctgctgctgttgctgt

SEQ ID NO: 570564 - DNA, 120 bp, Artificial Sequence
  ENSG00000170775_21 (sequence is synthesized)
gaggaatgcattcagaagtcttcaacggtgaccagtgatgacaatgacaacgagtacaccacggaactcgaactctcgcctttcagtaccatacgccgtgaaatgtccacttttgcttct

SEQ ID NO: 570565 - DNA, 120 bp, Artificial Sequence
  ENSG00000170775_22 (sequence is synthesized)
aggacagtacttggttgggtcagatttatttgtttgattttcatatcccgtgaaagtttttaattcatatttttccttatagggaaaaatgcaaaaaagaaacaataaagaaagaaatat

SEQ ID NO: 570566 - DNA, 120 bp, Artificial Sequence
  ENSG00000170775_23 (sequence is synthesized)
taactactgtagaactgattttacaaattaatatttgtgctttgaaaaaaagtttctatttagttatttaagaagaatgagaaggccaatagttttagattattttatctggtatggtgc

SEQ ID NO: 570567 - DNA, 120 bp, Artificial Sequence
  ENSG00000170775_24 (sequence is synthesized)
gtgctaatattttatttgaaaaaagttactgcaacttaacttaaaattgctaacgttttttcttcttttaaaaatacaattattgtatattgattatagcaatgtgattttgtaggttat

SEQ ID NO: 570568 - DNA, 120 bp, Artificial Sequence
  ENSG00000170775_25 (sequence is synthesized)
tatttgagttgtgattgaaagtatgttgtatatggtattgtgagatgatttgtacttggaagcattcacaaagtagcaccaaataaattacactttattctttaatgtcattgtcaatct

SEQ ID NO: 570569 - DNA, 120 bp, Artificial Sequence
  ENSG00000170775_26 (sequence is synthesized)
acttttaaccaatattcaataaatcttctaattgccttaaagatacaattactggttctatgcacaatttaaaaccggccttactgttttataacgtattttcttttaaggcaggtaatc

SEQ ID NO: 570570 - DNA, 120 bp, Artificial Sequence
  ENSG00000170775_27 (sequence is synthesized)
attatgttataaagaagtttttctaatagcagtattttatatgcatgattcataaaactatgttgtatgttaaaacaaagctgtatttttaatattcaggtatagatgtcaaattacttc

SEQ ID NO: 570571 - DNA, 120 bp, Artificial Sequence
  ENSG00000170775_28 (sequence is synthesized)
tgaatacttataaaatatgaataaatagcagagtaggaagaaagtttcttttttaaaaaattcacctctgaactagcacatagagctacagattttcccttggggaattatgggcagaat

SEQ ID NO: 570572 - DNA, 120 bp, Artificial Sequence
  ENSG00000170775_29 (sequence is synthesized)
caagaattttaaaatgcagttgtcatctgatttcctctgaacactgacctttgaagctttgtgaatcctacgtaaagcactctgagttctaatttttctccttttgaaaaataaacttga

SEQ ID NO: 570573 - DNA, 120 bp, Artificial Sequence
  ENSG00000170775_30 (sequence is synthesized)
tgaaatctatacaacttaatttctttaagtgcaatgaaagtataggagtggaataataaaatatttatatatttttattagaacattctacctttaacttgatacttcataaactctgaa

SEQ ID NO: 570574 - DNA, 120 bp, Artificial Sequence
  ENSG00000170775_31 (sequence is synthesized)
taaaaaaacctaacctcctccattgggaatatttgaatcccctcttttgcctcttctggagtttaaaatgcagcagttgtgtaggatgcttgctgtgtgggacacatgtctaactcaggt

SEQ ID NO: 570575 - DNA, 120 bp, Artificial Sequence
  ENSG00000170775_32 (sequence is synthesized)
ggcagagaccatgacctagtgacacagtgatatttaaaagctaccaaagaagatgtgtagttggatgtctttgtcttcagaaaaatcttgttatagagaacccagttttcttgctgggaa

SEQ ID NO: 570576 - DNA, 120 bp, Artificial Sequence
  ENSG00000170775_33 (sequence is synthesized)
aacgtagtttctgcttgttgatttctgttctactcggcataagtaagtcagtattcctttttccaaattataacatgatgttatttaaaaatcattaaagagattggtgcaggtgaaact

SEQ ID NO: 570577 - DNA, 120 bp, Artificial Sequence
  ENSG00000170775_34 (sequence is synthesized)
taaatggcagtgcccaggctatctcctttttcccagtccaatacttttcaaaggggtttttccctccattgtgtgtattctgtgggatctgcaggagaattcaaacaaggtgcccttgtc

SEQ ID NO: 570578 - DNA, 120 bp, Artificial Sequence
  ENSG00000170775_35 (sequence is synthesized)
ttcttgtagatccctgtaataggtctttggaaaatttctcaagaggacacctgagctaggttttggctgctgagcagaacagcaactgtgattccatagtgtctctcctgatatttagtc

SEQ ID NO: 570579 - DNA, 120 bp, Artificial Sequence
  ENSG00000170775_36 (sequence is synthesized)
actttataaatcaaggaacaattgagcatgtcatgtggaaaagattctatcctattacctgagtaactaaaggtaaataggtcacagcctcagaccttacagaatcaggcagggatgaca

SEQ ID NO: 570580 - DNA, 120 bp, Artificial Sequence
  ENSG00000170775_37 (sequence is synthesized)
tggatgggaaggaataaaataaatacatagacaactatgatataagctggggcttgttaggtgcctcaggaagatgtgaagttctgcgatactttggaatagagggaatgcttatagggt

SEQ ID NO: 570581 - DNA, 120 bp, Artificial Sequence
  ENSG00000170775_38 (sequence is synthesized)
tagaagagagcatgaaaggctttatgagataactggatgagtgggcttttagaaggagctgatgaaagatggtgtgaggagtggacacttcaggaggagagagctaatttataaaggaat

SEQ ID NO: 570582 - DNA, 120 bp, Artificial Sequence
  ENSG00000170775_39 (sequence is synthesized)
agaagaagaaatcagtgggtgtgattgaagaataaacagcccagtttgacttctgtgctacgtgtgcatagcagccttgtgggaaatattaaagaaaatatgcaccaaggccatctaata

SEQ ID NO: 570583 - DNA, 120 bp, Artificial Sequence
  ENSG00000170775_40 (sequence is synthesized)
ataggaccatgttttgaaagatgtttacatggtggtgcttcaggaaatggggctttgcttttaaggtttttgagtatggagaaatagtatcccagctctgcaataggaagatcaacttgc

SEQ ID NO: 570584 - DNA, 120 bp, Artificial Sequence
  ENSG00000170775_41 (sequence is synthesized)
aaacagtttaaataggctggtaggggacagtctgatcatgaaaaagcaactaggaagctattataagagattgaaccacaatggaggcagcaggaacttaaatttcttttttcatttata

SEQ ID NO: 570585 - DNA, 120 bp, Artificial Sequence
  ENSG00000170775_42 (sequence is synthesized)
cttgcctttcaactttttgtagttgcaacatgtactttcttattgaatcctacctctgtcaaagtggaaactttgataactcaaattgtcccaagtataaagtgatttcaaagttttctc

SEQ ID NO: 570586 - DNA, 120 bp, Artificial Sequence
  ENSG00000170775_43 (sequence is synthesized)
atagtcgtcttgtgtttttcacaaaaaccaatttctataatatacttttaaaaaattgttaatcatttctgttcaacatttcttcagtctggatcttatccaatgtcttacgctcctcgt

SEQ ID NO: 570587 - DNA, 120 bp, Artificial Sequence
  ENSG00000170776_0 (sequence is synthesized)
tgtctttctccgcggcgaaggtgaagagttgtcccagctcggcccgcgggggagccccgggagccgcacgtgtcctgggtcatgaaacttaatccacagcaagctcccttatatggtgat

SEQ ID NO: 570588 - DNA, 120 bp, Artificial Sequence
  ENSG00000170776_1 (sequence is synthesized)
tgtgttgttacagtgctgcttgctgaagaggacaaagctgaagatgatgtagtgttttacttggtatttttgggttccaccctccgtcactgtacaagtactcggaaggtcagttctgat

SEQ ID NO: 570589 - DNA, 120 bp, Artificial Sequence
  ENSG00000170776_2 (sequence is synthesized)
acattggagaccattgctcctggtcatgattgttgtgaaacagtgaaggtgcagctctgtgcttccaaagagggccttcccgtgtttgtggtggctgaagaagactttcatttcgtccag

SEQ ID NO: 570590 - DNA, 120 bp, Artificial Sequence
  ENSG00000170776_3 (sequence is synthesized)
gatgaagcgtatgatgcagctcaattcctagcaaccagtgctggaaatcagcaggctttgaactttacccgttttcttgaccagtcaggacccccatctggggatgtgaattcccttgat

SEQ ID NO: 570591 - DNA, 120 bp, Artificial Sequence
  ENSG00000170776_4 (sequence is synthesized)
aagaagttggtgctggcattcaggcacctgaagctgcccacggagtggaatgtattggggacagatcagagtttgcatgatgctggcccgcgagagacattgatgcattttgctgtgcgg

SEQ ID NO: 570592 - DNA, 120 bp, Artificial Sequence
  ENSG00000170776_5 (sequence is synthesized)
ctgggactgctgaggttgacgtggttcctgttgcagaagccaggtggccgcggagctctcagtatccacaaccaggaaggggcgacgcctgtgagcttggccttggagcgaggctatcac

SEQ ID NO: 570593 - DNA, 120 bp, Artificial Sequence
  ENSG00000170776_6 (sequence is synthesized)
aagctgcaccagcttctaaccgaggagaatgctggagaaccagactcctggagcagtttatcctatgaaataccgtatggagactgttctgtgaggcatcatcgagagttggacatctat

SEQ ID NO: 570594 - DNA, 120 bp, Artificial Sequence
  ENSG00000170776_7 (sequence is synthesized)
acattaacctctgagtctgattcacatcatgaacacccatttcctggagacggttgcactggaccaatttttaaacttatgaacatccaacagcaactaatgaaaacaaacctcaagcag

SEQ ID NO: 570595 - DNA, 120 bp, Artificial Sequence
  ENSG00000170776_8 (sequence is synthesized)
atggacagtcttatgcccttaatgatgacagcacaggatccttccagtgccccagagacagatggccagtttcttccctgtgcaccggagcccacggaccctcagcgactttcttcttct

SEQ ID NO: 570596 - DNA, 120 bp, Artificial Sequence
  ENSG00000170776_9 (sequence is synthesized)
gaagagactgagagcactcagtgctgcccagggagccctgttgcacagactgaaagtccctgtgatttgtcaagcatagttgaggaggagaatacagaccgttcctgtaggaagaaaaat

SEQ ID NO: 570597 - DNA, 120 bp, Artificial Sequence
  ENSG00000170776_10 (sequence is synthesized)
aaaggcgtggaaagaaaaggggaagaggtggagccagcacctattgtggactctggaactgtatctgatcaagacagctgccttcagagcttgcctgattgtggagtaaagggcacggaa

SEQ ID NO: 570598 - DNA, 120 bp, Artificial Sequence
  ENSG00000170776_11 (sequence is synthesized)
ggcctttcgtcctgtggaaacagaaatgaagaaactggaacaaaatcttctggaatgcccacagaccaggagtccctgagcagtggagatgctgtgcttcagagagacttggtcatggag

SEQ ID NO: 570599 - DNA, 120 bp, Artificial Sequence
  ENSG00000170776_12 (sequence is synthesized)
ccaggcacagcccagtattcctctggaggtgaactgggaggcatttcaacaacaaatgtcagtaccccagacactgcaggggaaatggaacatgggctcatgaacccagatgccactgtt

SEQ ID NO: 570600 - DNA, 120 bp, Artificial Sequence
  ENSG00000170776_13 (sequence is synthesized)
tggaagaatgtgcttcagggaggggaaagtacaaaggaaagatttgagaactctaatattggcacagctggagcctctgacgtgcacgtcacaagtaagcctgtggataaaatcagtgtt

SEQ ID NO: 570601 - DNA, 120 bp, Artificial Sequence
  ENSG00000170776_14 (sequence is synthesized)
ccaaactgtgcccctgctgccagttccctggatggtaacaaacctgctgagtcttcacttgcatttagtaatgaagaaacctccactgaaaaaacagcagaaacggaaacttcacgaagt

SEQ ID NO: 570602 - DNA, 120 bp, Artificial Sequence
  ENSG00000170776_15 (sequence is synthesized)
cgtgaggagagtgctgatgctccagtagatcagaattctgtggtgattccagctgctgcaaaagacaagatttcagatggattagaaccttatactctcttagcagcaggcataggtgag

SEQ ID NO: 570603 - DNA, 120 bp, Artificial Sequence
  ENSG00000170776_16 (sequence is synthesized)
gcaatgtcaccctcagatttagcccttcttgggctggaagaagatgtaatgccacaccagaactcagaaacaaattcatctcatgctcaaagccaaaagggcaaatcctcacccatttgt

SEQ ID NO: 570604 - DNA, 120 bp, Artificial Sequence
  ENSG00000170776_17 (sequence is synthesized)
tctacaactggagacgataaactttgtgcagactctgcatgtcaacagaacacagtgacttctagtggcgatttggttgcaaaactgtgtgataacatagttagcgagtccgaaagcacc

SEQ ID NO: 570605 - DNA, 120 bp, Artificial Sequence
  ENSG00000170776_18 (sequence is synthesized)
acagcaaggcaacccagctcacaagatccacccgatgcctcccactgtgaagacccacaggctcatacagtcacctctgaccctgtaagggatacccaggaacgtgcggatttttgtcct

SEQ ID NO: 570606 - DNA, 120 bp, Artificial Sequence
  ENSG00000170776_19 (sequence is synthesized)
ttcaaagtggtggataacaaaggccaacgaaaagatgtgaaactagataaacctttaacaaatatgcttgaggtggtttcacatccacatccagttgtccctaaaatggagaaagaactg

SEQ ID NO: 570607 - DNA, 120 bp, Artificial Sequence
  ENSG00000170776_20 (sequence is synthesized)
gtgccagaccaggcagtaatatcagacagtactttctctctggcaaacagtccaggcagtgaatcagtaaccaaggatgacgcactttcttttgtcccctcccagaaagaaaagggaaca

SEQ ID NO: 570608 - DNA, 120 bp, Artificial Sequence
  ENSG00000170776_21 (sequence is synthesized)
gcaactcctgaactacatacagctacagattatagagatggcccagatggaaattcgaatgagcctgatacgcggccactagaagacagggcagtaggcctgtccacatcctccactgct

SEQ ID NO: 570609 - DNA, 120 bp, Artificial Sequence
  ENSG00000170776_22 (sequence is synthesized)
gcagagcttcagcacgggatggggaataccagtctcacaggacttggtggagagcatgagggtcccgcccctccagcaatcccagaagctctgaatatcaaggggaacactgactcttcc

SEQ ID NO: 570610 - DNA, 120 bp, Artificial Sequence
  ENSG00000170776_23 (sequence is synthesized)
ctgcaaagtgtgggtaaggccactttggctttagattcagttttgactgaagaaggaaaacttctggtggtttcagaaagctctgcagctcaggaacaagataaggataaagcggtgacc

SEQ ID NO: 570611 - DNA, 120 bp, Artificial Sequence
  ENSG00000170776_24 (sequence is synthesized)
tgttcctctattaaggaaaatgctctctcttcaggaactttgcaggaagagcagagaacaccacctcctggacaagatactcaacaatttcatgaaaaatcaatctcagctgactgtgcc

SEQ ID NO: 570612 - DNA, 120 bp, Artificial Sequence
  ENSG00000170776_25 (sequence is synthesized)
aaggacaaagcacttcagctaagtaattcaccgggtgcatcctctgcctttcttaaggcagaaactgaacataacaaggaagtggccccacaagtctcactgctgactcaaggtggggct

SEQ ID NO: 570613 - DNA, 120 bp, Artificial Sequence
  ENSG00000170776_26 (sequence is synthesized)
gcccagagcctggtgccaccaggagcaagtctggccacagagtcaaggcaggaagccttgggggcagagcacaacagctccgctctgttgccatgtctgttgccagatgggtctgatggg

SEQ ID NO: 570614 - DNA, 120 bp, Artificial Sequence
  ENSG00000170776_27 (sequence is synthesized)
tccgatgctcttaactgcagtcagccttctcctctggatgttggagtgaagaacactcaatcccagggaaaaactagtgcctgtgaggtgagtggagatgtgacggtggatgttacaggg

SEQ ID NO: 570615 - DNA, 120 bp, Artificial Sequence
  ENSG00000170776_28 (sequence is synthesized)
gttaatgctctacaaggtatggctgagcccagaagagagaatatatcacacaacacccaagacatcctgattccaaacgtcttgttgagccaagagaagaatgccgttctaggtttgcca

SEQ ID NO: 570616 - DNA, 120 bp, Artificial Sequence
  ENSG00000170776_29 (sequence is synthesized)
gtggctctacaggacaaagctgtgactgacccacagggagttggaaccccagagatgatacctcttgattgggagaaagggaagctggagggagcagaccacagctgtaccatgggtgac

SEQ ID NO: 570617 - DNA, 120 bp, Artificial Sequence
  ENSG00000170776_30 (sequence is synthesized)
gctgaggaagcccaaatagacgatgaagcacatcctgtcctactgcagcctgttgccaaggagctccccacagacatggagctctcagcccatgatgatggggccccagctggtgtgagg

SEQ ID NO: 570618 - DNA, 120 bp, Artificial Sequence
  ENSG00000170776_31 (sequence is synthesized)
gaagtcatgcgagccccgccttcaggcagggaaaggagcactccctctctaccttgcatggtctctgcccaggacgcacctctgcctaagggggcagacttgatagaggaggctgccagc

SEQ ID NO: 570619 - DNA, 120 bp, Artificial Sequence
  ENSG00000170776_32 (sequence is synthesized)
cgtatagtggatgctgtcatcgaacaagtcaaggccgctggagcactgcttactgagggggaggcctgtcacatgtcactgtccagccctgagttgggtcctctcactaaaggactagag

SEQ ID NO: 570620 - DNA, 120 bp, Artificial Sequence
  ENSG00000170776_33 (sequence is synthesized)
agtgcttttacagaaaaagtgagtactttcccacctggggagagcctaccaatgggcagtactcctgaggaagccacggggagccttgcaggatgttttgctggaagggaggagccagag

SEQ ID NO: 570621 - DNA, 120 bp, Artificial Sequence
  ENSG00000170776_34 (sequence is synthesized)
aagatcattttacctgtccaggggcctgagccagcagcagaaatgccagacgtgaaagctgaagatgaagtggattttagagcaagttcaatttctgaagaagtggctgtagggagcata

SEQ ID NO: 570622 - DNA, 120 bp, Artificial Sequence
  ENSG00000170776_35 (sequence is synthesized)
gctgctacactgaagatgaagcaaggcccaatgacccaggcgataaaccgagaaaactggtgtacaatagagccatgccctgatgcagcatctcttctggcttccaagcagagcccagaa

SEQ ID NO: 570623 - DNA, 120 bp, Artificial Sequence
  ENSG00000170776_36 (sequence is synthesized)
tgtgagaacttcctggatgttggactgggcagagagtgtacctcaaaacaaggtgtacttaaaagagaatctgggagtgattctgacctctttcactcacccagtgatgacatggacagc

SEQ ID NO: 570624 - DNA, 120 bp, Artificial Sequence
  ENSG00000170776_37 (sequence is synthesized)
atcatcttcccaaagccagaggaagagcatttggcctgtgatatcaccggatccagttcatccaccgatgacacggcttcactggaccgacattcttctcatggcagtgatgtgtctctc

SEQ ID NO: 570625 - DNA, 120 bp, Artificial Sequence
  ENSG00000170776_38 (sequence is synthesized)
tcccagattttaaagccaaacaggtcaagagatcggcaaagccttgatggattctacagccatgggatgggagctgagggtcgagaaagtgagagtgagcctgctgacccaggcgacgtg

SEQ ID NO: 570626 - DNA, 120 bp, Artificial Sequence
  ENSG00000170776_39 (sequence is synthesized)
aaaaatgcagccagcgatgcagaaatgaaccaccggagtatgagctggtgcccctctggtgtgcagtactctgctggcctgagtgctgactttaattacagaagtttcagtctagaaggc

SEQ ID NO: 570627 - DNA, 120 bp, Artificial Sequence
  ENSG00000170776_40 (sequence is synthesized)
ttgacaggaggagctggtgtcggaaacaagccatcctcatctctagaagtaagctctgcaaatgccgaagagctcagacacccattcagtggtgaggaacgggttgactctttggtgtca

SEQ ID NO: 570628 - DNA, 120 bp, Artificial Sequence
  ENSG00000170776_41 (sequence is synthesized)
ctttcagaagaggatctggagtcagaccagagagaacataggatgtttgatcagcagatatgtcacagatctaagcagcagggatttaattactgtacatcagccatttcctctccattg

SEQ ID NO: 570629 - DNA, 120 bp, Artificial Sequence
  ENSG00000170776_42 (sequence is synthesized)
acaaaatccatctcattaatgacaatcagccatcctggattggacaattcacggcccttccacagtaccttccacaataccagtgctaatctgactgagagtataacagaagagaactat

SEQ ID NO: 570630 - DNA, 120 bp, Artificial Sequence
  ENSG00000170776_43 (sequence is synthesized)
aatttcctgccacatagcccctccaagaaagattctgaatggaagagtggaacaaaagtcagtcgtacattcagctacatcaagaataaaatgtctagcagcaagaagagcaaagaaaag

SEQ ID NO: 570631 - DNA, 120 bp, Artificial Sequence
  ENSG00000170776_44 (sequence is synthesized)
gaaaaagaaaaagataagattaaggagaaggagaaagattctaaagacaaggagaaagataagaagactgtcaacgggcacactttcagttccattcctgttgtgggtcccatcagctgt

SEQ ID NO: 570632 - DNA, 120 bp, Artificial Sequence
  ENSG00000170776_45 (sequence is synthesized)
agccagtgtatgaagcccttcaccaacaaagatgcctatacttgtgcaaattgcagtgcttttgtccacaaaggctgccgagaaagtctagcctcctgtgcaaaggtcaaaatgaagcag

SEQ ID NO: 570633 - DNA, 120 bp, Artificial Sequence
  ENSG00000170776_46 (sequence is synthesized)
cccaaagggagccttcaggcacatgacacatcatcactgcccacggtcattatgagaaacaagccctcacagcccaaggagcgtcctcggtccgcagtcctcctggtggatgaaaccgct

SEQ ID NO: 570634 - DNA, 120 bp, Artificial Sequence
  ENSG00000170776_47 (sequence is synthesized)
accaccccaatatttgccaatagacgatcccagcagagtgtctcgctctccaaaagtgtctccatacagaacattactggagttggcaatgatgagaacatgtcaaacacctggaaattc

SEQ ID NO: 570635 - DNA, 120 bp, Artificial Sequence
  ENSG00000170776_48 (sequence is synthesized)
ctgtctcattcaacagactcactaaataaaatcagcaaggtcaatgagtcaacagaatcacttactgatgagggagtaggtacagacatgaatgaaggacaactactgggagactttgag

SEQ ID NO: 570636 - DNA, 120 bp, Artificial Sequence
  ENSG00000170776_49 (sequence is synthesized)
attgagtccaaacagctggaagcagagtcttggagtcggataatagacagcaagtttctaaaacagcaaaagaaagatgtggtcaaacggcaagaagtaatatatgagttgatgcagaca

SEQ ID NO: 570637 - DNA, 120 bp, Artificial Sequence
  ENSG00000170776_50 (sequence is synthesized)
gagtttcatcatgtccgcactctcaagatcatgagtggtgtgtacagccaggggatgatggcggatctgctttttgagcagcagatggtagaaaagctgttcccctgtttggatgagctg

SEQ ID NO: 570638 - DNA, 120 bp, Artificial Sequence
  ENSG00000170776_51 (sequence is synthesized)
atcagtatccatagccaattcttccagaggattctggagcggaagaaggagtctctggtggataaaagtgaaaagaactttctcatcaagaggataggggatgtgcttgtaaatcagttt

SEQ ID NO: 570639 - DNA, 120 bp, Artificial Sequence
  ENSG00000170776_52 (sequence is synthesized)
tcaggtgagaatgcagaacgtttaaagaagacatatggcaagttttgtgggcaacataaccagtctgtaaactacttcaaagacctttatgccaaggataagcgttttcaagcctttgta

SEQ ID NO: 570640 - DNA, 120 bp, Artificial Sequence
  ENSG00000170776_53 (sequence is synthesized)
aagaagaagatgagcagttcagttgttagaaggcttggaattccagagtgcatattgcttgtaactcagcggattaccaagtacccagttttattccaaagaatattgcagtgtaccaaa

SEQ ID NO: 570641 - DNA, 120 bp, Artificial Sequence
  ENSG00000170776_54 (sequence is synthesized)
gacaatgaagtggagcaggaagatctagcacagtccttgagcctggtgaaggatgtgattggagctgtagacagcaaagtggcaagttatgaaaagaaagtgcgtctcaatgagatttat

SEQ ID NO: 570642 - DNA, 120 bp, Artificial Sequence
  ENSG00000170776_55 (sequence is synthesized)
acaaagacagatagcaagtcaatcatgaggatgaagagtggtcagatgtttgccaaggaagatttgaaacggaagaagcttgtacgtgatgggagtgtgtttctgaagaatgcagcagga

SEQ ID NO: 570643 - DNA, 120 bp, Artificial Sequence
  ENSG00000170776_56 (sequence is synthesized)
aggttgaaagaggttcaagcagttcttctcactgacattttagttttccttcaagaaaaagaccagaagtacatctttgcatcattggaccagaagtcaacagtgatctctttaaagaag

SEQ ID NO: 570644 - DNA, 120 bp, Artificial Sequence
  ENSG00000170776_57 (sequence is synthesized)
ctgattgtgagagaagtggcacatgaggagaaaggtttattcctgatcagcatggggatgacagatccagagatggtagaagtccatgccagctccaaagaggaacgaaacagctggatt

SEQ ID NO: 570645 - DNA, 120 bp, Artificial Sequence
  ENSG00000170776_58 (sequence is synthesized)
cagatcattcaggacacaatcaacaccctgaacagagatgaagatgaaggaattcctagtgagaatgaggaagaaaagaaaatgttggacaccagagcccgagaattaaaagaacaactt

SEQ ID NO: 570646 - DNA, 120 bp, Artificial Sequence
  ENSG00000170776_59 (sequence is synthesized)
caccagaaggaccaaaaaatcctactcttgttggaagagaaggagatgattttccgggacatggctgagtgcagcacccctctcccagaggattgctccccaacacatagccctagagtt

SEQ ID NO: 570647 - DNA, 120 bp, Artificial Sequence
  ENSG00000170776_60 (sequence is synthesized)
ctcttccgctccaacacagaagaggctctcaaaggaggacctttaatgaaaagtgcaataaatgaggtggagatccttcagggtttggtgagtggaaatctgggaggcacacttgggccg

SEQ ID NO: 570648 - DNA, 120 bp, Artificial Sequence
  ENSG00000170776_61 (sequence is synthesized)
actgtcagcagccccattgagcaagatgtggtcggtcccgtttccctgccccggagagcagagacctttggaggatttgacagccatcagatgaatgcttcaaaaggaggcgagaaggaa

SEQ ID NO: 570649 - DNA, 120 bp, Artificial Sequence
  ENSG00000170776_62 (sequence is synthesized)
gagggagatgatggccaagatcttaggagaacggaatcagatagtggcctaaaaaagggtggaaatgctaacctggtatttatgcttaaaagaaacagtgagcaggttgtccagagcgtt

SEQ ID NO: 570650 - DNA, 120 bp, Artificial Sequence
  ENSG00000170776_63 (sequence is synthesized)
gttcatctctacgagctcctcagcgctctgcagggtgtggtgctgcagcaggacagctacattgaggaccagaaactggtgctgagcgagagggcgctcactcgcagcttgtcccgcccg

SEQ ID NO: 570651 - DNA, 120 bp, Artificial Sequence
  ENSG00000170776_64 (sequence is synthesized)
agctccctcattgagcaggagaagcagcgcagcctggagaagcagcgccaggacctggccaacctgcagaagcagcaggcccagtacctcgaggagaagcgcaggcgcgagcgtgagtgg

SEQ ID NO: 570652 - DNA, 120 bp, Artificial Sequence
  ENSG00000170776_65 (sequence is synthesized)
gaagctcgtgagagggagctgcgggagcgggaggccctcctggcccagcgcgaggaggaggtgcagcaggggcagcaggacctggaaaaggagcgggaggagctccagcagaagaagggc

SEQ ID NO: 570653 - DNA, 120 bp, Artificial Sequence
  ENSG00000170776_66 (sequence is synthesized)
acataccagtatgacctggagcgactgcgtgctgcccagaaacagcttgagagggaacaggagcagctgcgccgggaggcagagcggctcagccagcggcagacagaacgggacctgtgt

SEQ ID NO: 570654 - DNA, 120 bp, Artificial Sequence
  ENSG00000170776_67 (sequence is synthesized)
caggtttcccatccacataccaagctgatgaggatcccatcgttcttccccagtcctgaggagcccccctcgccatctgcaccttccatagccaaatcagggtcattggactcagaactt

SEQ ID NO: 570655 - DNA, 120 bp, Artificial Sequence
  ENSG00000170776_68 (sequence is synthesized)
tcagtgtccccaaaaaggaacagcatctctcggacacacaaagataaggggccttttcacatactgagttcaaccagccagacaaacaaaggaccagaagggcagagccaggcccctgcg

SEQ ID NO: 570656 - DNA, 120 bp, Artificial Sequence
  ENSG00000170776_69 (sequence is synthesized)
tccacctctgcctctacccgcctgtttgggttaacaaagccaaaggaaaagaaggagaaaaaaaagaagaacaaaaccagccgctctcagcccggtgatggtcccgcgtcagaagtatca

SEQ ID NO: 570657 - DNA, 120 bp, Artificial Sequence
  ENSG00000170776_70 (sequence is synthesized)
gcagagggtgaagagatcttctgctgaccctcttcctctctgctgaggcagctgcctcctgatcctggccagcccacctctcctgctgtccccgcgtgcacaagtctcttacactggacg

SEQ ID NO: 570658 - DNA, 120 bp, Artificial Sequence
  ENSG00000170776_71 (sequence is synthesized)
cccactgctcctcagcgtccagtcctcctgggcggccccaggtcctggacaataagcaacagatgatattgagtgtcgggtggggaaggaggcccagactctgcttcggccatgatttgt

SEQ ID NO: 570659 - DNA, 120 bp, Artificial Sequence
  ENSG00000170776_72 (sequence is synthesized)
gactgcccaggactctcaggttgggctggccctactcaggattacactgaaagtaatggcctcgtaagtacaggtgatggttttggacacgtcaggaattcctaaaggctgaaagagtgt

SEQ ID NO: 570660 - DNA, 120 bp, Artificial Sequence
  ENSG00000170776_73 (sequence is synthesized)
atccaagtaaggtctgaacctccgaatgccttttatttgggggaacacaaaaccaaacagcagatgttttggacttgatctgtgtacgtacatggggacctgtctgcatatacacacggg

SEQ ID NO: 570661 - DNA, 120 bp, Artificial Sequence
  ENSG00000170776_74 (sequence is synthesized)
gaatgccagaagaaggcccagtctgcaccaggcgtctggtcaacttagcacaagggcagtgcctggacggacccggagcccccgcatatcagcagttcacccagtactcctcagagactg

SEQ ID NO: 570662 - DNA, 120 bp, Artificial Sequence
  ENSG00000170776_75 (sequence is synthesized)
gtttccctctaaacccatcccgggcacataccacccgtgttttgcatgtatttctcatttcattttagggatgacaaacatttgtgaaaccagtgagagaaggcttgatgtgtataaaag

SEQ ID NO: 570663 - DNA, 120 bp, Artificial Sequence
  ENSG00000170776_76 (sequence is synthesized)
acgtgatgtgcaccacctcgatctcggtgtttcaggcactaaagcaacaaaacaacccatagtatctcattctgtcatcagatccagaagaaatatcctggttttccagcatgtttaccc

SEQ ID NO: 570664 - DNA, 120 bp, Artificial Sequence
  ENSG00000170776_77 (sequence is synthesized)
acatgttttggccatggataaagtgaagaggcctactcaccattatccctgcagcgtgacaccttttgattgtcactgaccactcagaaggggccacggcctcctggctgtgttcctgag

SEQ ID NO: 570665 - DNA, 120 bp, Artificial Sequence
  ENSG00000170776_78 (sequence is synthesized)
ttttaatagagaggagtctggaaggcagagatctccaccacctaaccgtgagaaatttggaactaaggacttgcactggtccccaagttaacagtggatatacttcctgcattttctctg

SEQ ID NO: 570666 - DNA, 120 bp, Artificial Sequence
  ENSG00000170776_79 (sequence is synthesized)
ttctttcttgcatttgggcaaaatgtatgaacggcacaagaggcgctacagcctctgtgacatctccaaggtggacaggactgtggacgtggtattgctgaagataaaccgagaaaactg

SEQ ID NO: 570667 - DNA, 120 bp, Artificial Sequence
  ENSG00000170776_80 (sequence is synthesized)
ctgtctggcccttgctgggtgagggcacaccactgccaggggtcagcctcgcacccaggccaggcagaagctgtgctctgaagctaggacagctggctgagaagtgggttcaggcgaagg

SEQ ID NO: 570668 - DNA, 120 bp, Artificial Sequence
  ENSG00000170776_81 (sequence is synthesized)
gtgaagccatgtgtagcagttcctgccagtgcagatctggagaggagctggcccggaaggcgtggttgtgaaagcgcccttcttatgttaggaggccttggcaaaattggatttcttcaa

SEQ ID NO: 570669 - DNA, 120 bp, Artificial Sequence
  ENSG00000170776_82 (sequence is synthesized)
aaatacatgtaaaggtctgttgttgaattgtactctgcccctggaagcagatacagatggctgcctgctgctcggctttgcttttgcttttcccaccgtgttttcatctttgttcacttg

SEQ ID NO: 570670 - DNA, 120 bp, Artificial Sequence
  ENSG00000170776_83 (sequence is synthesized)
aggctttccccagctggtgtgtgcaggacagttcatggtaatgttgccctctgaggccccgtacaccagaagggaggccctggaaaattttgtgcttccaacgtggccttcaattcttgc

SEQ ID NO: 570671 - DNA, 120 bp, Artificial Sequence
  ENSG00000170776_84 (sequence is synthesized)
ttttttgcccctcggaagcatggggcttttgagcacacttaaaaaaagaaaaatctgtaacttggtgcttattgatgaattgcaagctggccttgcagatggagatatttatctttcagt

SEQ ID NO: 570672 - DNA, 120 bp, Artificial Sequence
  ENSG00000170776_85 (sequence is synthesized)
ttatttgaaagaggtctggtttaaaatttgtagcctacatttgttttatttattgtatttgtgtgtttgtgtttgtttttttttaagggtgagccaggtctagcccaacagtctaaacta

SEQ ID NO: 570673 - DNA, 120 bp, Artificial Sequence
  ENSG00000170776_86 (sequence is synthesized)
tccagtcaataccgagtgaagtggcagccagcactgttcactctgtgtcttttgaagtgccttgaaggcccagatgaaattttaaagggagggggtccatgtccttccctcccccacccc

SEQ ID NO: 570674 - DNA, 120 bp, Artificial Sequence
  ENSG00000170776_87 (sequence is synthesized)
gcctcattctttaatcaaaggatgtcttctcccttgtttgagaatgaagaaactcgccacctctgacctacctttgcctttttctgtcatggagaatactcacccttcagaaacagacca

SEQ ID NO: 570675 - DNA, 120 bp, Artificial Sequence
  ENSG00000170776_88 (sequence is synthesized)
aaggccaaaacctgctgatttttctattgaaaatatgtccccttgcaaagaccctaaacaaaaagttaagtttctttctttcacctatttgtacaactccaagttacagctgaatctgtc

SEQ ID NO: 570676 - DNA, 120 bp, Artificial Sequence
  ENSG00000170776_89 (sequence is synthesized)
gtgactttcctgagatctacccggggcttggctgtctgttctgggcactggctccgagttcccctcctgggatttgcaggagggcagtactgaacctgcattcttctccttgtaaatgta

SEQ ID NO: 570677 - DNA, 120 bp, Artificial Sequence
  ENSG00000170776_90 (sequence is synthesized)
ggccgggtgcccctgttctccgggtttggaacaatacgaggttggtgctgatgggatttacttgcgtacgtgctcttcacaaaaacaccgtggatgctgaagttagagcacgtcgccaca

SEQ ID NO: 570678 - DNA, 120 bp, Artificial Sequence
  ENSG00000170776_91 (sequence is synthesized)
gagcttgacatcaatgttagagggtctcttactccccgcccagctgtgatgtttcatctgctttggttgttttggtggtcttttttaaaaatagagatttcacatctgcccagaccccac

SEQ ID NO: 570679 - DNA, 120 bp, Artificial Sequence
  ENSG00000170776_92 (sequence is synthesized)
tcaaaacgatttggtcaggttctggttggacaagtttaaaatcaaagtagtgcccggaattccctcaaaccacccaacttcatccaggaatacagtctgcagtgcagcaacagaaccgct

SEQ ID NO: 570680 - DNA, 120 bp, Artificial Sequence
  ENSG00000170776_93 (sequence is synthesized)
taccaagaactgtgcttacatacctttgtcatctctcttccccccttggaagttgtcctcagggggatttgttcctgtcctggggatttacctgggatggtggctgcctgtgcttttgct

SEQ ID NO: 570681 - DNA, 120 bp, Artificial Sequence
  ENSG00000170776_94 (sequence is synthesized)
catggccttgacagtgctctagttgctggatctaatggcctgtcttggtttctatcacatgagaaggggttgtttttttggggtgactcggactgaattccccatactgtttccacgccg

SEQ ID NO: 570682 - DNA, 120 bp, Artificial Sequence
  ENSG00000170776_95 (sequence is synthesized)
ggacaccatgttctccatcaagctaaagaaatcacgtgcctgaaactgtgcttaagttttgggggaaagatggagttcctatccagagcccccagatttccagaatcgagtgagcttcct

SEQ ID NO: 570683 - DNA, 120 bp, Artificial Sequence
  ENSG00000170776_96 (sequence is synthesized)
ggaaggagactgcgtcttctctcaattccagtcatctcagtcgttgtcgttaggtgacatgtgcactttaaatgctctcatcggttggcttcattttcaagacaatcaaatgtattgact

SEQ ID NO: 570684 - DNA, 120 bp, Artificial Sequence
  ENSG00000170776_97 (sequence is synthesized)
gtgttttcttcttagaaaatggagagggttaaaaacatgcaaactgccactttcaacctttgccagtattccctctacccccgtgagagctatctggggggaagaatccttaccaaggtt

SEQ ID NO: 570685 - DNA, 120 bp, Artificial Sequence
  ENSG00000170776_98 (sequence is synthesized)
tttttggaaaggtacgaatcttaacttttttccccttctgtgtctcagggtaatactattcagagtcgcccctttgctcattttctcccgtatttgttaccttcctgaggcctcagtatt

SEQ ID NO: 570686 - DNA, 120 bp, Artificial Sequence
  ENSG00000170776_99 (sequence is synthesized)
agtcgtgagcacaaagttttgagacctttggcgttgtttcttgatgtgggaggggaggtgttagtgcatgcaagggttgaactagatagaccctgccttagtagagggtgggactataac

SEQ ID NO: 570687 - DNA, 120 bp, Artificial Sequence
  ENSG00000170776_100 (sequence is synthesized)
cttagaggccagaacttgatccagaagttgctgtccacagaagtgctttctatttcatcatttttgtttctagggctctttttctgtagccaggtcttcccaaggattttagtatttgca

SEQ ID NO: 570688 - DNA, 120 bp, Artificial Sequence
  ENSG00000170776_101 (sequence is synthesized)
ttggagttgaggtttactctaatgatggtggcccagctgtgcccagaggacagccaggcaggccctgggagggagtttagaaagacagtcctggtgaatgggcttcaagtggtcacaaag

SEQ ID NO: 570689 - DNA, 120 bp, Artificial Sequence
  ENSG00000170776_102 (sequence is synthesized)
agggtggctgtgaggtgaccccagacactgcagaacgatgtgcaccctctgcgttttggatgtccttggaatgtgggagcctagaaataaccctgtggatggaattggggcagcggctgc

SEQ ID NO: 570690 - DNA, 120 bp, Artificial Sequence
  ENSG00000170776_103 (sequence is synthesized)
tggagatctgtgtgccttgccttccttcagcaggaccgtctaggtgcgcagccacctatggatgcgtcccagccagccccgtcgctctcgtccatcctcagagacaaagaagagggcagg

SEQ ID NO: 570691 - DNA, 120 bp, Artificial Sequence
  ENSG00000170776_104 (sequence is synthesized)
gagtttgggcttggttttgaactttcctttcaatgtagcaaagcattcctagttaaccagagccttggaatctactgcctgctggccaggctttaaaatgaaaagtgttttaatgctgcc

SEQ ID NO: 570692 - DNA, 120 bp, Artificial Sequence
  ENSG00000170776_105 (sequence is synthesized)
ataaaagggaggcgggggggaggaagggaaaataaaggcatctttccaagtactcatctaatttaattgtcaaaagattgataggccatgaattacttctccatctcactaagggttaaa

SEQ ID NO: 570693 - DNA, 120 bp, Artificial Sequence
  ENSG00000170776_106 (sequence is synthesized)
ggcgtgcaaccccccactggctgtgtcccctgccaccgaagtgagtgacctgccctacaaccaggtgggaccacctgtgctgcagtccggaggggcttctgcaggaagcactcacccccc

SEQ ID NO: 570694 - DNA, 120 bp, Artificial Sequence
  ENSG00000170776_107 (sequence is synthesized)
acaccttccccggcctgagcttcccctacctttcgtcaccacctgagggcatgagcacaggccatggggcgtgcctggtgagtctgcctgtggttcaggcttagcctgtggtctcctgtg

SEQ ID NO: 570695 - DNA, 120 bp, Artificial Sequence
  ENSG00000170776_108 (sequence is synthesized)
tgctgctgcccgcatgggatgcgcaggggaggcgtggggatccgcaggagggtggttgggatacaccggatacctctgctctcattgcttgtttgcaaatgctctatggacatttgtgtg

SEQ ID NO: 570696 - DNA, 120 bp, Artificial Sequence
  ENSG00000170776_109 (sequence is synthesized)
ctaaatcctattaaataaaaaagacgggttaaaacccagatgctgtatattcatttgtaattatgtataaagtgaagcagttttaaactgtaaagatttttttcagtgtgttttctcgaa

SEQ ID NO: 570697 - DNA, 120 bp, Artificial Sequence
  ENSG00000170776_110 (sequence is synthesized)
ttttgccacaacatactggcttcgtattttatttatctttctttctagttaccagcttcagacccttgtaaagtctccctcagccctttcaaaaaataataaatttcctgtgaagttctg

SEQ ID NO: 570698 - DNA, 120 bp, Artificial Sequence
  ENSG00000170776_111 (sequence is synthesized)
tttctatggtcatcatattcaggtcttccacagaggctgcgtaaatcttagaattactgtaggaaagtggcctcaatggcatctcttctaggttcttcaattgagctgttaagcatgttg

SEQ ID NO: 570699 - DNA, 120 bp, Artificial Sequence
  ENSG00000170776_112 (sequence is synthesized)
ttgcagcgaaatgaccctagggattacccaaggagagtggcacgtcaccttcctgtgggtctggatttcagatttgatctctcaagtgtagaaagtgacatgctcttcatgaggagagta

SEQ ID NO: 570700 - DNA, 120 bp, Artificial Sequence
  ENSG00000170776_113 (sequence is synthesized)
gcagagttactttttggtgtttaatgatcaaagacatggttttcattattgtattctgaagttctctaaagatagcctggaagtgaaggagaggaaagattgggcagtgagtgggaggag

SEQ ID NO: 570701 - DNA, 120 bp, Artificial Sequence
  ENSG00000170776_114 (sequence is synthesized)
catgagaacagggtgtgctctgagaaaccacacacttccttaaccaggttagtgtcactcttactgactttatctgttggccctccctatgagagttcactgaagaaaggactttttgtt

SEQ ID NO: 570702 - DNA, 80 bp, Artificial Sequence
  ENSG00000170776_115 (sequence is synthesized)
ccctccctatgagagttcactgaagaaaggactttttgtttgttttttgtttttttttgagaacgggctttcactcttgt

SEQ ID NO: 570703 - DNA, 63 bp, Artificial Sequence
  ENSG00000170776_116 (sequence is synthesized)
ggttcaggtgagcaaatttttttttttttttaattagagacagggtttcaccgtgttagtcag

SEQ ID NO: 570704 - DNA, 120 bp, Artificial Sequence
  ENSG00000170776_117 (sequence is synthesized)
taggcatgagccactgcgcccggccagaactccactttttcaaaaatatttacatagtaagtcctcttactcaaacaagggttttcccacataattctagtagccaatgacatctacttg

SEQ ID NO: 570705 - DNA, 120 bp, Artificial Sequence
  ENSG00000170776_118 (sequence is synthesized)
gttttcccacataattctagtagccaatgacatctacttgatgtcataattgtatagatattttttaatgaaacataatgtgtacctggagttcaataagtaacatccagtttcccttct

SEQ ID NO: 570706 - DNA, 120 bp, Artificial Sequence
  ENSG00000170776_119 (sequence is synthesized)
gagttcaagtccaattgaacgatttgggagtcctgagatagaaaccaaaatgtttattactgatgaaatctagattggaagcctgatgttagagctcctgccagaagggtctgcttgtac

SEQ ID NO: 570707 - DNA, 120 bp, Artificial Sequence
  ENSG00000170776_120 (sequence is synthesized)
tgtagagtccacccagccttgagtattgaattattttgggtaagcagaccacaagtcactctccccacaggtgagcagttcctgaggagaaatacccagaggggcctgagccatagcata

SEQ ID NO: 570708 - DNA, 120 bp, Artificial Sequence
  ENSG00000170776_121 (sequence is synthesized)
gttagtttctacactcagatgaattttgtcttcttccatggaagaatggtaaagaggtctttgccagctttgattctcttaaatctacactaaatttaacagttaaacctgtggtcagcc

SEQ ID NO: 570709 - DNA, 120 bp, Artificial Sequence
  ENSG00000170776_122 (sequence is synthesized)
gtcagaacggtgtcccatactgtcaggtgcatactgtcagattctacctggatagtcctgcccaggtaaaacctgaaaggaagtatcaaatcaaggaagaaaggatttatccttttcttc

SEQ ID NO: 570710 - DNA, 120 bp, Artificial Sequence
  ENSG00000170776_123 (sequence is synthesized)
ttctttttttaagtatagtgtccaagaaacttctgtcttgctaatatttagagatcagaatatttgacattctgaaaaggcactcatgccttatataaacctggtgatgggccttaatac

SEQ ID NO: 570711 - DNA, 120 bp, Artificial Sequence
  ENSG00000170776_124 (sequence is synthesized)
ctctagctcctcctatttctgtattgatacaggaatgtttattctggctgcctttcacaaatcagtgtcaagatagtactgcattagttatttgtggggcttatggtgttttatggtttt

SEQ ID NO: 570712 - DNA, 120 bp, Artificial Sequence
  ENSG00000170776_125 (sequence is synthesized)
gttttgtcttgtttaaagaggggcccaggagttggatagttttatgttgccatgattaaaaacaactattagaaaaagcaaacatctgaaactttggacatatcacttcctctttctctc

SEQ ID NO: 570713 - DNA, 63 bp, Artificial Sequence
  ENSG00000170776_126 (sequence is synthesized)
ctccatctcctgggttgcaccctgctgcttttttgtgtgttttagtagagacggggtttcacc

SEQ ID NO: 570714 - DNA, 120 bp, Artificial Sequence
  ENSG00000170776_127 (sequence is synthesized)
aggcgtgagccactgtgcccggccacttcctctctttgggccttaacttccttgtctttaataggagggaattggccagctttaatttttttttgtactgtcagtgtactggtaaatttt

SEQ ID NO: 570715 - DNA, 120 bp, Artificial Sequence
  ENSG00000170776_128 (sequence is synthesized)
tttaatttttttttgtactgtcagtgtactggtaaattttctgttgcacaaaattgctcaagcagtgctaacaaaggccaaaccaaatttgaacacttgaggaaggaaatacatattaaa

SEQ ID NO: 570716 - DNA, 120 bp, Artificial Sequence
  ENSG00000170776_129 (sequence is synthesized)
accacaatgagatatcattacacatttatcataatggctaagatgaagaataccaagtgctggcaaagatgaagaacatatcatatgttgcttgtaggaatgcaaaatgtataaccactc

SEQ ID NO: 570717 - DNA, 120 bp, Artificial Sequence
  ENSG00000170776_130 (sequence is synthesized)
tagaaatatttggcagtttcttgtaaagttaaacatacacttagcgtatgacccagtaatcccacttttgggtgtttatcctagagaaatgaaaatctgtagtcaccaaaaagtctgtgc

SEQ ID NO: 570718 - DNA, 120 bp, Artificial Sequence
  ENSG00000170776_131 (sequence is synthesized)
acggacgtgctcatagtaatgttattcataatcttcaaaaactggaaataacccagatttccctcactgagtgaatacagaagcaaactataatatatccatacagtggaatactactca

SEQ ID NO: 570719 - DNA, 120 bp, Artificial Sequence
  ENSG00000170776_132 (sequence is synthesized)
gcaataaaaagaagcaaactgttgacatgtgcaacaacttggatgtgttttaaatgcattatgcgggaaaatgaagtcagtttccaaaggttccatactatgtgattctatttatatgat

SEQ ID NO: 570720 - DNA, 120 bp, Artificial Sequence
  ENSG00000170776_133 (sequence is synthesized)
attctggaagatgcaaaattatagaaaaagagaacagatgagtagttgctaggggctgggagtgggggaagtctgactggaaagaggtatcatgagggaattctttgggttgttggagtt

SEQ ID NO: 570721 - DNA, 120 bp, Artificial Sequence
  ENSG00000170776_134 (sequence is synthesized)
gttttgtcttgttcgtggtggtggctgtaagaatctatgcatgtgttaaaactcataggagtgtacatcccctaaaggtgaattttattgtacatatatttaaaataataaaataacaaa

SEQ ID NO: 570722 - DNA, 120 bp, Artificial Sequence
  ENSG00000170776_135 (sequence is synthesized)
gacataagcaatttgtcttcagtcactgtagtacttccagccagttgtcattctagagtcttcaggtactcatttaagaatgcaagccataggttatcagaatgtatttgacagtatgta

SEQ ID NO: 570723 - DNA, 120 bp, Artificial Sequence
  ENSG00000170776_136 (sequence is synthesized)
tttttcttttgtccccagagttggcaatgatgagaacatgtcaaacacctggaaattcctgtctcattcaacagactcactaaataaaatcagcaaggtcaatgagtcaacagaatcact

SEQ ID NO: 570724 - DNA, 120 bp, Artificial Sequence
  ENSG00000170776_137 (sequence is synthesized)
agcgtctttcggcgcatgcgcggactggagctgtgtgcagggccagcgcggagcccgagcagccgcggtgaagcgcctgtgctctgccgagactgccgtgcccattgctcgcctcggtcg

SEQ ID NO: 570725 - DNA, 120 bp, Artificial Sequence
  ENSG00000170776_138 (sequence is synthesized)
tttttttttgttagtagtcccccccacaacaagtgttttatttttagaagaagcattttcttcagtttttctgaactgttggattgcgcagatgaggacaaacggtgcagttcttgaaag

SEQ ID NO: 570726 - DNA, 120 bp, Artificial Sequence
  ENSG00000170776_139 (sequence is synthesized)
gtcattattggcaagtttgtgaagaagctaagatcagttgagataaatcattgttactattcttgtattctgtcgtggactcttggggatttgcaggctgcattaagtacaagttttgtc

SEQ ID NO: 570727 - DNA, 120 bp, Artificial Sequence
  ENSG00000170776_140 (sequence is synthesized)
aagtttgggtgcacatattacacttaatttggtttgtgtggcttattatatgaacatgattctgtttcagttccccagatggaactagcttaaatgtctgtcattcatagtggagcaaaa

SEQ ID NO: 570728 - DNA, 120 bp, Artificial Sequence
  ENSG00000170776_141 (sequence is synthesized)
tcaagcgattttcctgcctcagcttcccgggtagctgggactacaggcgtggtggcatgtgcctttagtcccagcttactctagaggctgaggcaggaagattgcgtgagctcaggagtt

SEQ ID NO: 570729 - DNA, 120 bp, Artificial Sequence
  ENSG00000170776_142 (sequence is synthesized)
agctcaggagttcaaggctgcagtgagctatcatcacaccactcagagcaagactgtctccaaaacagacaagtgaacaagaaaacattagtgacggatctaaggaaacttagccaagtt

SEQ ID NO: 570730 - DNA, 120 bp, Artificial Sequence
  ENSG00000170776_143 (sequence is synthesized)
gccaagttttgataacagaacctgggcgttgtggcatactctataaaaagccattcagcagccttcatctaccttttattctgcttcacttttatttaacttctgtagccctttaaaaaa

SEQ ID NO: 570731 - DNA, 120 bp, Artificial Sequence
  ENSG00000170776_144 (sequence is synthesized)
attgtgtgtttgccgcaaattaaaacctcagctctgtatcttgccttctgctggaggtttgtaagcttgctcctgctaaccacttcattgtctgagagagaaacggagaatgctggagaa

SEQ ID NO: 570732 - DNA, 120 bp, Artificial Sequence
  ENSG00000170776_145 (sequence is synthesized)
aggaaacaagcagcctcagccctccctccttccctttctcagccagtctctggcttcctcttacgatttcactaatggcagctcaaagctgctgagctctgccctgacggcatgcgcccc

SEQ ID NO: 570733 - DNA, 120 bp, Artificial Sequence
  ENSG00000170776_146 (sequence is synthesized)
cgcttctgtgagagcacgcttcctggcatgggggtcgaatcatgtcgataaaatgggctcggtttcatgaagtaccccacataacagtgagattcataggaccaaagcatggggaggaaa

SEQ ID NO: 570734 - DNA, 120 bp, Artificial Sequence
  ENSG00000170776_147 (sequence is synthesized)
gttgtcccagctcggcccgcgggggagccccgggagccgcacgggacatgtatagtttcaccatgttggccaggatggtctgaaactccttatctgaagtgatcagcctgccttgacctc

SEQ ID NO: 570735 - DNA, 120 bp, Artificial Sequence
  ENSG00000170776_148 (sequence is synthesized)
gcttggggctgttgttgacttggatctttgaggtttgcaggatgtttaatggataaatggggccctcagtctagggaagactggctctcgtggtgagaaagttacagaatgcatcgacct

SEQ ID NO: 570736 - DNA, 120 bp, Artificial Sequence
  ENSG00000170776_149 (sequence is synthesized)
tccaggactagaattagtgaagagctggtgtgccgtaggcatggcttgataaccatgctacaaatcacatagcatgctaacatgcatctgggagattacttcactttagaaagccttaag

SEQ ID NO: 570737 - DNA, 120 bp, Artificial Sequence
  ENSG00000170776_150 (sequence is synthesized)
agagcctttttcatgtgattcctcacagtctgtttactcccttgcagaagaagatgagcagttcagttgttagaaggcttggaattccagagtgcatattgcttgtaactcagcggatta

SEQ ID NO: 570738 - DNA, 120 bp, Artificial Sequence
  ENSG00000170776_151 (sequence is synthesized)
atcggccgttatgcttagccagtttattctttatttttttactggagtcattgccagtgatggaaacggtgtttgcttctctttcagtcaagatctgcacaaagtatagcattaggtggt

SEQ ID NO: 570739 - DNA, 120 bp, Artificial Sequence
  ENSG00000170776_152 (sequence is synthesized)
atttattgtttatattatgagttctacattcatctttccagcactctgaagttatcagcaagttctcagtcagttcaaggcattggattctgcttgatttctttttaattcattgttttt

SEQ ID NO: 570740 - DNA, 120 bp, Artificial Sequence
  ENSG00000170776_153 (sequence is synthesized)
gctgggacacagggtgcttagggcagtgcaaaaagcagagtgggaaaggaagctgaactgcttgctcccttcctactcggcttctcagggcttgtcagaggtgaattgtcaatggactta

SEQ ID NO: 570741 - DNA, 120 bp, Artificial Sequence
  ENSG00000170776_154 (sequence is synthesized)
cacaccaaaactggttaaatcatggggacataaatggaaataaattcaggattactctccgaaatcgcctaatatttaaaggaaaataataagaagaaaaatagcaagaagtggaactac

SEQ ID NO: 570742 - DNA, 120 bp, Artificial Sequence
  ENSG00000170776_155 (sequence is synthesized)
ctttccatatattatttaaccctttcaacaaccctgtcaggtaggtgttatctctcttttctaaaagtgatgtaccttaccgaggatactcctctaatgtgaagaagtagttcaaaccag

SEQ ID NO: 570743 - DNA, 120 bp, Artificial Sequence
  ENSG00000170776_156 (sequence is synthesized)
atctctttggtttcaaatcccatactcttaaaccacagtgcttaaatctgtaatatcagtttaaatgcaacagaaggattttatgcaaagatcaaaggattgaaaatatttatatttggc

SEQ ID NO: 570744 - DNA, 120 bp, Artificial Sequence
  ENSG00000170776_157 (sequence is synthesized)
tttagagggaaggattatcccacagaagattacaagaacttttaagactaatatgatttcttagatctatttctaattaggagcatttggaatatattctcttagtgattaagagattaa

SEQ ID NO: 570745 - DNA, 120 bp, Artificial Sequence
  ENSG00000170776_158 (sequence is synthesized)
gcgtgccaacgccttaatttaaaaaaacaaaacaaaacactttgcccagaactttgtttctcactcctttccaaaatagtcaccagctgttgttaaccacatgccatctgggtgcccagg

SEQ ID NO: 570746 - DNA, 120 bp, Artificial Sequence
  ENSG00000170776_159 (sequence is synthesized)
tcacacagcagcctgttccatctgtgggtaaccatgttccgaggcagcaaagagaaaccgctattgctccgtggaaataaactatctgaataaaacttcttaacgggggttgaggctgaa

SEQ ID NO: 570747 - DNA, 120 bp, Artificial Sequence
  ENSG00000170776_160 (sequence is synthesized)
gctgaaacgggagtcggacacgatcttggctcctgaagtctttaaaggtcagtttgatgcacacttctataccaccacctgttaccagctgtagacagaagacctatctccatgcttgcc

SEQ ID NO: 570748 - DNA, 120 bp, Artificial Sequence
  ENSG00000170777_0 (sequence is synthesized)
acaggccaggtcgtcaactcaactgtcaaggtgtccattgtaccagctgggccatggatccctcccgcctgaaatctgactccacctgccaagagtctgagcctgcaggcctagatttcg

SEQ ID NO: 570749 - DNA, 120 bp, Artificial Sequence
  ENSG00000170777_1 (sequence is synthesized)
actctgctggccaagattatttctctgcagcccaataattcgactctttctaccaagaattggacctggactctcttaacgaagatcttctttcccagtccatgccacatgccaggacag

SEQ ID NO: 570750 - DNA, 120 bp, Artificial Sequence
  ENSG00000170777_2 (sequence is synthesized)
agacctctgtgggcacatatgaatcccactcgacttctgaactggaggatctgacagagcccgagcaaagagagctcaaaaccaaactcactaaattggaggctgaaattgtaaccctac

SEQ ID NO: 570751 - DNA, 120 bp, Artificial Sequence
  ENSG00000170777_3 (sequence is synthesized)
gccacgtactagcagccaaagagagacgctgtggggaactcaagaggaagttaggcctcaccgccttggtagggctgagacagaatctgtccaagagctggcttgatgttcaggtctcca

SEQ ID NO: 570752 - DNA, 120 bp, Artificial Sequence
  ENSG00000170777_4 (sequence is synthesized)
acacctatgtgaaacagaagacatcagctgctctgtccaccatgggcactctcatctgcaggaagcttggaggcgtgaagaagtcggccacattcagatcttttgaaggtctgatgggga

SEQ ID NO: 570753 - DNA, 120 bp, Artificial Sequence
  ENSG00000170777_5 (sequence is synthesized)
caatcaagtccaaagtctcagggggcaaaagagcttggccctgactgtctttcttctgcggagggtggggttgatctgctctcagttttggggtgtggggaagacccactccagattccg

SEQ ID NO: 570754 - DNA, 120 bp, Artificial Sequence
  ENSG00000170777_6 (sequence is synthesized)
gggagtgggaatgagccactcccagttctggagagtgaggatgaccatctccactttctggaaccagaatgagcccccttggtaaccttgcctggtactaaaccagtgcaaggaccccct

SEQ ID NO: 570755 - DNA, 120 bp, Artificial Sequence
  ENSG00000170777_7 (sequence is synthesized)
tcccttattacatttgcaactctgcccaacaaaaacaagcaagcaaaccacaatggtaaagtggttaattcaggaaattgacagaatccagttttgagaaaagaacacagatatttgctg

SEQ ID NO: 570756 - DNA, 120 bp, Artificial Sequence
  ENSG00000170777_8 (sequence is synthesized)
cttttaagatagagaacccaaagttttgtacctggttatttttcacttaagtttgtagacgaaatgtgccattatattagctttcctgagactgtatctaatgggcaagtcagtggctcc

SEQ ID NO: 570757 - DNA, 120 bp, Artificial Sequence
  ENSG00000170777_9 (sequence is synthesized)
aaagcccaaactctcttttggaaaactagcttattagaaagccaaagtagagttctgtttaagcttgaaagaggtatgaagtaatctgtagtgtttttttggtttgtttgtttgttttcc

SEQ ID NO: 570758 - DNA, 120 bp, Artificial Sequence
  ENSG00000170777_10 (sequence is synthesized)
cttccccatttccttccttccctcagtctcaaagtcaccttgaaagcttcacctggcctacaacttttattttaaaaagatgatcaagaaaacttcatcttctctgagactcagaaaaag

SEQ ID NO: 570759 - DNA, 120 bp, Artificial Sequence
  ENSG00000170777_11 (sequence is synthesized)
aggggaaaatagtggtagtgcactaattgttacattactaatatagcttttgtaaaactcgtttgttttcaaaggtctggactaagcaaaacaacagtgtcagtttaggaaattattact

SEQ ID NO: 570760 - DNA, 120 bp, Artificial Sequence
  ENSG00000170777_12 (sequence is synthesized)
actttgaacacaaactgaaattgcaactttgccttgtgctttgtttataatttctttatatatcaaaatgagtgttttaaagtttaacccttgaagcagcatgtctttgccatagcagca

SEQ ID NO: 570761 - DNA, 120 bp, Artificial Sequence
  ENSG00000170777_13 (sequence is synthesized)
cttcacttaaaaggaagaaattgcctctctggcagcaattcctagttagttaccacctccagctgaggggctggaggaaaacaggtatagccaaattcaagaaagataaacccctgtctc

SEQ ID NO: 570762 - DNA, 120 bp, Artificial Sequence
  ENSG00000170777_14 (sequence is synthesized)
aaggaacattttaaaaagaacgtctgtcccctgtgatgctggctgttatgcctttgaatggacctaactatacatctttgctcttaactccaagtctgcccttctttttaggaaacccta

SEQ ID NO: 570763 - DNA, 120 bp, Artificial Sequence
  ENSG00000170777_15 (sequence is synthesized)
aaggagaaggaagcagaatataaccctctggagagctcaagacagtaggaacctggacggtgcttgtttgaattttctgatatctgattttcacacgaatatactttttgtttgttttcc

SEQ ID NO: 570764 - DNA, 120 bp, Artificial Sequence
  ENSG00000170777_16 (sequence is synthesized)
ttttccattttcaaaatgccaagatctgggagcctctttcactcctctagacacactgcctgagatagaagtttgcatcttattggctgtgggcagagactaggacccttatgggtacat

SEQ ID NO: 570765 - DNA, 120 bp, Artificial Sequence
  ENSG00000170777_17 (sequence is synthesized)
ttcagtaatctctcactgcctaaaatggtaatccctccagcctaagaggatgattctgttttgttgactcttgaatgctcccccaacattcctttggttttcctataagcaaaaccaaat

SEQ ID NO: 570766 - DNA, 120 bp, Artificial Sequence
  ENSG00000170777_18 (sequence is synthesized)
accactataaatacaaaagcatctggtaaactgtaaagttactcatgtatcccaaccctccacagatttctgaagacaaagttttgcttggattaaaacaagatgttttactattttgca

SEQ ID NO: 570767 - DNA, 120 bp, Artificial Sequence
  ENSG00000170777_19 (sequence is synthesized)
taacatcatatacttcagacatcaaatatggaatccaagagactatcaacaacatgaacttgttcacaagttccttctgcttttaaacaaaaatatcgtgtttattcaaagccaatctga

SEQ ID NO: 570768 - DNA, 120 bp, Artificial Sequence
  ENSG00000170777_20 (sequence is synthesized)
gaattagacatcgtatgtgccctctagaaacacttagactttcaaatcattataattcaatgagtcctaaaatagagctgtgtgccagagataaaagaagtcctgaggaaggggtgttca

SEQ ID NO: 570769 - DNA, 120 bp, Artificial Sequence
  ENSG00000170777_21 (sequence is synthesized)
actctgtcttggtaggtcagtaaagactttagagagacagaaagtcttagaggactaggagaagtttgccagacagacaagaatagaacattccagacaacatgcagaggaactgagtca

SEQ ID NO: 570770 - DNA, 120 bp, Artificial Sequence
  ENSG00000170777_22 (sequence is synthesized)
caaaggaatgtataagaatggcatattctaggaactaacactgtggctagagaggaaggggaaatggtgttacatgagtgagggaggggaaatggtgttacgtgagtaagaaaaaataag

SEQ ID NO: 570771 - DNA, 120 bp, Artificial Sequence
  ENSG00000170777_23 (sequence is synthesized)
cagggggcaaaatcataagtagtcttacatactacattagatatcaatatttaagcctgtaggaaatgggaggcattgaagcacttaagtaaaaaagtaactatcaaatttttgttttag

SEQ ID NO: 570772 - DNA, 120 bp, Artificial Sequence
  ENSG00000170777_24 (sequence is synthesized)
attactctggtcatcagagaaatagattaagtatttaagaggtagaatctctcagacttaggaaccaactgcatgaggcggggcttggggggataaatttgcaagataataaggatgtag

SEQ ID NO: 570773 - DNA, 120 bp, Artificial Sequence
  ENSG00000170777_25 (sequence is synthesized)
aattgaaaaggcctgatattattgaagctggagttgcacattcattttgctttggcttttttgtatcagtggtcatgggcaccaaataaaatgcttccatgaacatttggattctggctc

SEQ ID NO: 570774 - DNA, 120 bp, Artificial Sequence
  ENSG00000170777_26 (sequence is synthesized)
cgatttttaatttgttgtgtttatcaaccaaaatggctttgtatgctggagaacaagaggtgagcctgcagcatacaagaaatgaaagtagtccaacaggcaaaggctttgacatatttc

SEQ ID NO: 570775 - DNA, 120 bp, Artificial Sequence
  ENSG00000170777_27 (sequence is synthesized)
aggaaggcttgtgttagggacaatctcagactattatcatgggccaaacctgagagatgttatattttatttaataatttctacaacagtagtaagtttccccaataaattctcaactcc

SEQ ID NO: 570776 - DNA, 120 bp, Artificial Sequence
  ENSG00000170779_0 (sequence is synthesized)
gctccttcctcagcggcgggaagctggcggcagcggcggtggcggtggctgagcagaggacccggcgggcggcctcgcgggtcaggacacaatgtttgcacgaggactgaagaggaaatg

SEQ ID NO: 570777 - DNA, 120 bp, Artificial Sequence
  ENSG00000170779_1 (sequence is synthesized)
tgttggccacgaggaagacgtggagggagccctggccggcttgaagacagtgtcctcatacagcctgcagcggcagtcgctcctggacatgtctctggtgaagttgcagctttgccacat

SEQ ID NO: 570778 - DNA, 120 bp, Artificial Sequence
  ENSG00000170779_2 (sequence is synthesized)
gcttgtggagcccaacctgtgccgctcagtcctcattgccaacacggtccggcagatccaagaggagatgacgcaggatgggacgtggcgcacagtggcaccccaggctgcagagcgggc

SEQ ID NO: 570779 - DNA, 120 bp, Artificial Sequence
  ENSG00000170779_3 (sequence is synthesized)
gccgctcgaccgcttggtctccacggagatcctgtgccgtgcagcgtgggggcaagagggggcacatcctgctcctggcttgggggacggccacacacagggtccagtttctgacctttg

SEQ ID NO: 570780 - DNA, 120 bp, Artificial Sequence
  ENSG00000170779_4 (sequence is synthesized)
cccagtcacctcagcacaggcaccaaggcacctgcagagcagcgcctgggagatggatggccctcgagaaaacagaggaagctttcacaagtcacttgatcagatatttgaaacgctgga

SEQ ID NO: 570781 - DNA, 120 bp, Artificial Sequence
  ENSG00000170779_5 (sequence is synthesized)
gactaaaaaccccagctgcatggaagagctgttctcagacgtggacagcccctactacgacctggacacagtactgacaggcatgatggggggtgccaggccgggcccctgcgaagggct

SEQ ID NO: 570782 - DNA, 120 bp, Artificial Sequence
  ENSG00000170779_6 (sequence is synthesized)
cgagggcttggctccggccaccccaggccctagctccagctgcaagtccgacctgggcgagctggaccacgtggtggagatcctggtggagacctgagcaggagccctgagtgctcacag

SEQ ID NO: 570783 - DNA, 120 bp, Artificial Sequence
  ENSG00000170779_7 (sequence is synthesized)
ccgcctctgacgcattgacacgtgagcactggctcccacggagggtgcgcctgccgccagcggcccagccttgctgccctgtctgctgattctgagaaatcccagaacagcccattacca

SEQ ID NO: 570784 - DNA, 120 bp, Artificial Sequence
  ENSG00000170779_8 (sequence is synthesized)
gtggggctgcagccctaggcccgtcccactcacctcccccctgtggagcgccaggcagaggctgttctggaaggcttcttgtcttctgacgtccccacagccctgggcccctcgtgtctc

SEQ ID NO: 570785 - DNA, 120 bp, Artificial Sequence
  ENSG00000170779_9 (sequence is synthesized)
tttgtgtcccccactgtagaggacggtgagccgcagctgcatcaacctccttttacctttagataggtgaatttttacaattcagttttacatgttttgggcagtattttgtcttaagat

SEQ ID NO: 570786 - DNA, 120 bp, Artificial Sequence
  ENSG00000170779_10 (sequence is synthesized)
ttttcttaaaagtatattttttctataaacatcctttgctgctacattagaacttttatagcctaaacaattgcagttggtgtgtttcatttttttaaggtttaaataagggttttttgt

SEQ ID NO: 570787 - DNA, 120 bp, Artificial Sequence
  ENSG00000170779_11 (sequence is synthesized)
tttgttttgttttttgcagtgagcatcactacagtctcagtcaacagtgtgaatgtatcatgttttactttaaatgtgtgtgtgatacttcttcattatgtcctgcgctgcagtgagacc

SEQ ID NO: 570788 - DNA, 120 bp, Artificial Sequence
  ENSG00000170779_12 (sequence is synthesized)
tgggtgaaaatcaggagccgcacacagccacatcttcctagacctaagagtaaattatggaggattttatttatgtctatttatatgtaaatgtcattgaagacaaaggtcaaatatttg

SEQ ID NO: 570789 - DNA, 120 bp, Artificial Sequence
  ENSG00000170779_13 (sequence is synthesized)
tctgtttgtagatcacaggcaccagttggtcttcagggacctcatagcccctcggtggtgccttctcaaggcagtgttcctggaggctcccatcagggtcagcccatgcacctgccctgg

SEQ ID NO: 570790 - DNA, 120 bp, Artificial Sequence
  ENSG00000170779_14 (sequence is synthesized)
gtgaggaagtagcattgctgctggatgagaaacgcctgcgctgctctgttagactggtgctgaaacaaaaggttaaggctaggttgaagtctagaatgaaagaaatctgaatccatgtca

SEQ ID NO: 570791 - DNA, 120 bp, Artificial Sequence
  ENSG00000170779_15 (sequence is synthesized)
ttcataaccccttgatctgtagtgtcatgggtgctgccgcaggcagggagtgagctgggggtgcctgcagccttccactcctgccccgcctcaccccacatgctccctgtttctcatgct

SEQ ID NO: 570792 - DNA, 120 bp, Artificial Sequence
  ENSG00000170779_16 (sequence is synthesized)
ttctctaacttcctcaccccttaaccaaaaaggtgtgttttcttttgtgcatatagccattcttaaatatcagtgatgtaaacctcactttattaaaaaattatccagcaaacaaaatgg

SEQ ID NO: 570793 - DNA, 120 bp, Artificial Sequence
  ENSG00000170779_17 (sequence is synthesized)
gaatgtggtgttagttacgaccacggcctgaccctccagcaacctttctgcaggatcagttctgctgtattatctggtggtgctttctaaggtggggaaaggaattgcacttggctgcat

SEQ ID NO: 570794 - DNA, 120 bp, Artificial Sequence
  ENSG00000170779_18 (sequence is synthesized)
taaatggacgctgggttacttttatttcccccccccacagggttgcagagcaaattctttttacattgttcagcgcccggctggagttgggggtgtccacgacctctgacagcccccgat

SEQ ID NO: 570795 - DNA, 120 bp, Artificial Sequence
  ENSG00000170779_19 (sequence is synthesized)
gtcgaaagttaatcctcatggaccctagtttaaagggtatgtgttttataggaataaatctaaagcactattttgtttctgtatagcatttttatcttttagaaacatcatttgttcagc

SEQ ID NO: 570796 - DNA, 120 bp, Artificial Sequence
  ENSG00000170782_0 (sequence is synthesized)
ccagtgaagtcctgggcagaagaatgatgtgggaaaactggacaattgtcagtgaatttgttctcgtgagcttctcagccctgtccactgagcttcaggctctactgtttctccttttct

SEQ ID NO: 570797 - DNA, 120 bp, Artificial Sequence
  ENSG00000170782_1 (sequence is synthesized)
tgaccatttacttggttactttaatgggcaatgtcctcatcatcctggtcactatagctgactctgcactacaaagtcctatgtacttcttcctcagaaacttgtccttcctggagatag

SEQ ID NO: 570798 - DNA, 120 bp, Artificial Sequence
  ENSG00000170782_2 (sequence is synthesized)
gtttcaacttggtcattgtgcccaagatgctggggaccctgatcattcaagacacaaccatctccttccttggatgtgccactcagatgtatttcttcttcttttttggggctgctgagt

SEQ ID NO: 570799 - DNA, 120 bp, Artificial Sequence
  ENSG00000170782_3 (sequence is synthesized)
gctgcctcctggccaccatggcatatgaccgctacgtggccatctgtgaccccttgcactacccagtcatcatgggccacatatcctgtgcccagctggcagctgcctcttggttctcag

SEQ ID NO: 570800 - DNA, 120 bp, Artificial Sequence
  ENSG00000170782_4 (sequence is synthesized)
ttcagtttccctttttgtggccccaacagggtgaaccacttcttctgtgacagccctcctgttattgcactggtctgtgctgacacctctgtgtttgaactggaggctctgacagccact

SEQ ID NO: 570801 - DNA, 120 bp, Artificial Sequence
  ENSG00000170782_5 (sequence is synthesized)
gtcctattcattctctttcctttcttgctgatcctgggatcctatgtccgcatcctctccactatcttcaggatgccgtcagctgaggggaaacatcaggcattctccacctgttccgcc

SEQ ID NO: 570802 - DNA, 120 bp, Artificial Sequence
  ENSG00000170782_6 (sequence is synthesized)
cacctcttggttgtctctctcttctatagcactgccatcctcacgtatttccgaccccaatccagtgcctcttctgagagcaagaagctgctgtcactctcttccacagtggtgactccc

SEQ ID NO: 570803 - DNA, 120 bp, Artificial Sequence
  ENSG00000170782_7 (sequence is synthesized)
atgttgaaccccatcatctacagctcaaggaataaagaagtgaaggctgcactgaagcggcttatccacaggaccctgggctctcagaaactatgattggcttagatggaaactgaaggg

SEQ ID NO: 570804 - DNA, 120 bp, Artificial Sequence
  ENSG00000170786_0 (sequence is synthesized)
gccgcacccactcctgcccctgcctgcaccccacccacttcccggggacttccgagcccacgcccacatcctttacctccaaggggcaaggaagctgttgacttaagatcccatgtggag

SEQ ID NO: 570805 - DNA, 120 bp, Artificial Sequence
  ENSG00000170786_1 (sequence is synthesized)
cagtcagatgctgctggagaactccccgcactgcaggctccagacacacgacctggcccctcccccgtggacgcctatactgctctgttctctaattccagggttcccaacctcggggtt

SEQ ID NO: 570806 - DNA, 120 bp, Artificial Sequence
  ENSG00000170786_2 (sequence is synthesized)
gtgccttgcaaatacctgggaaacttttctagctaatgcctaggcccctaccaacccagaaattcccatctaataatctagggtacagcctaggcattgaaacgttaagcctaagagaaa

SEQ ID NO: 570807 - DNA, 120 bp, Artificial Sequence
  ENSG00000170786_3 (sequence is synthesized)
tccggcgcacgcatccagtttccaccaccgaatttccagcttcttaaatctgcaggtccagaaaaagaagatgggagtgctgcccacgtcgcgcactggggctacggccggccccacccc

SEQ ID NO: 570808 - DNA, 120 bp, Artificial Sequence
  ENSG00000170786_4 (sequence is synthesized)
tggcgctgccgcggcagtcccgcccttggacttgggcggcgcctggataaacacctgaacctgactgagctccgagccagggactcgggtgcctggggcagacgaggccggcttctccgc

SEQ ID NO: 570809 - DNA, 120 bp, Artificial Sequence
  ENSG00000170786_5 (sequence is synthesized)
ggacagctagggagagtgtcctgggtgtcagccagaacatgtctttcaacctgcaatcatcaaagaaactgttcattttcttaggaaaatcactgtttagtcttctggaggctatgattt

SEQ ID NO: 570810 - DNA, 120 bp, Artificial Sequence
  ENSG00000170786_6 (sequence is synthesized)
ttgccttactcccaaagccacggaagaacgttgctggtgaaatagtcctcatcacaggtgctggaagtggactcggaaggctcttagccttgcagtttgcccggctgggatctgttcttg

SEQ ID NO: 570811 - DNA, 120 bp, Artificial Sequence
  ENSG00000170786_7 (sequence is synthesized)
taagatggctcgggaagctggagccacaagagtgcacgcctatacctgcgattgcagccaaaaggaaggagtgtatagagtagccgaccaggttaaaaaagaagtcggcgatgtttccat

SEQ ID NO: 570812 - DNA, 120 bp, Artificial Sequence
  ENSG00000170786_8 (sequence is synthesized)
cctaatcaacaatgccggaatcgtaacaggcaaaaagttccttgactgtccagatgagcttatggaaaagtcatttgatgtgaatttcaaagcacatttatggacttataaagcctttct

SEQ ID NO: 570813 - DNA, 120 bp, Artificial Sequence
  ENSG00000170786_9 (sequence is synthesized)
acctgctatgattgctaatgaccatggacatttggtttgcatttcaagttcagctggattaagtggagtaaatgggctggcagattactgtgcaagtaaatttgcagcctttgggtttgc

SEQ ID NO: 570814 - DNA, 120 bp, Artificial Sequence
  ENSG00000170786_10 (sequence is synthesized)
tgaatctgtatttgtagaaacatttgtccaaaaacaaaaggggatcaaaaccacgattgtgtgccccttttttataaaaactggaatgtttgaaggttgtactacaggctgtccttctct

SEQ ID NO: 570815 - DNA, 120 bp, Artificial Sequence
  ENSG00000170786_11 (sequence is synthesized)
gttgccaattctggaaccaaaatatgcagttgaaaaaatagtagaagctattctacaagaaaaaatgtacttgtatatgccaaagttgttatacttcatgatgtttcttaaaagcttttt

SEQ ID NO: 570816 - DNA, 120 bp, Artificial Sequence
  ENSG00000170786_12 (sequence is synthesized)
gcccctcaagacaggactgcttatagctgactatttgggcatccttcatgcaatggatggctttgttgaccaaaagaagaagctctaaagaccaactctatggctaaggtcatctgatac

SEQ ID NO: 570817 - DNA, 120 bp, Artificial Sequence
  ENSG00000170786_13 (sequence is synthesized)
acagtgttacataatgcgtacttcaatgaagaaaagtatttttgtctgacagtggaatatatctggagaccacaagtaccactcctattctgttatctggactagaattttcaatcaatg

SEQ ID NO: 570818 - DNA, 120 bp, Artificial Sequence
  ENSG00000170786_14 (sequence is synthesized)
tgtttgaaaataatgttgctatcacctatttggttgagttttggttttttctttttctttttttttccaaaaataaagacagcccatttttgtcatttccattaccacagatgtaagaaa

SEQ ID NO: 570819 - DNA, 120 bp, Artificial Sequence
  ENSG00000170786_15 (sequence is synthesized)
tgtggatatccagccagaatgccctctctccagaggacacacagctctggatttctacccccttgctatcctctctggccattttgaacctgtaccacctaatgtagaaaaggcccgcct

SEQ ID NO: 570820 - DNA, 120 bp, Artificial Sequence
  ENSG00000170786_16 (sequence is synthesized)
ccagtgcccttctttccaaaacagctacacaaatgcttctgaatgccctggatacgcagaccgagtggcagtctggctaaaggcccatccagcactattgtgcccaagagccttaccggg

SEQ ID NO: 570821 - DNA, 120 bp, Artificial Sequence
  ENSG00000170786_17 (sequence is synthesized)
cattccctgaagccccctcataggcagtgatcctagaccaaactcttaaatagaatcacttttgtttcctagaagagatcaaagagtggttgcttcttactttgaagatgaaattatacc

SEQ ID NO: 570822 - DNA, 120 bp, Artificial Sequence
  ENSG00000170786_18 (sequence is synthesized)
aagttaggttttttgctatctattgatccaaaaaatatattcgtgcaattaaagttaagtgttcaacttagtatttcaagttgggattcaggttgaggcattttcctgcagaatgggcaa

SEQ ID NO: 570823 - DNA, 120 bp, Artificial Sequence
  ENSG00000170786_19 (sequence is synthesized)
ttttatgcatttatattcatcagtgctgccctcactttggatctattgtattcttacagtttaatcaactggcaaagtgctttcatgctttggagattaactataaaagcaagattaaga

SEQ ID NO: 570824 - DNA, 120 bp, Artificial Sequence
  ENSG00000170786_20 (sequence is synthesized)
aaaatatgttaattaccatatccctggaactccttctcaggctggtgggggcagccttgcaagagaaacagcagcctttgtctcttccctcttgtggggagcaaggaggggatgagcggt

SEQ ID NO: 570825 - DNA, 120 bp, Artificial Sequence
  ENSG00000170786_21 (sequence is synthesized)
accttgggagacccggtaaaagtctaaagaattgagaatttgactatcttgggggtaaaatgctgtcataggggcagcagtctcagggggtgtaaactctggaatccactatggtttacc

SEQ ID NO: 570826 - DNA, 120 bp, Artificial Sequence
  ENSG00000170786_22 (sequence is synthesized)
ttgagtggcctgcacgaacatgacagccctgatctgtatttcctttccattcagaaaaccttaaaaaaaaaaaacttgttttatgataatattataacaatcataactaacatttactgt

SEQ ID NO: 570827 - DNA, 120 bp, Artificial Sequence
  ENSG00000170786_23 (sequence is synthesized)
gcccggcagcaaattaagtatttgacaaacattatttcattaaacgagactgtcaatcattactcaaagaatgatgaaggtatttggtgtatgccaaagaataaaggcgttttatttcac

SEQ ID NO: 570828 - DNA, 120 bp, Artificial Sequence
  ENSG00000170788_0 (sequence is synthesized)
aacgggacgccgctcctgggtggcgagcaggcgcgtgtgtaggggagttagaaatggagtcaatatatcttcaaaagcaccttggggcctgtttaactcaaggtcttgcagaagtggcaa

SEQ ID NO: 570829 - DNA, 120 bp, Artificial Sequence
  ENSG00000170788_1 (sequence is synthesized)
gagttcgcccagtggatccgatagaatatttagcattgtggatttacaagtataaggaaaatgtgaccatggaacaactgagacaaaaggaaatggccaagctggagcgtgaaagagaat

SEQ ID NO: 570830 - DNA, 120 bp, Artificial Sequence
  ENSG00000170788_2 (sequence is synthesized)
gcagaggagctcttacttcagcagcaacagctggcattgcagctagagttggaaatgcaagaaaaggagaggcagagaatacaagaactacagagagctcaagaacaattaggcaaggag

SEQ ID NO: 570831 - DNA, 120 bp, Artificial Sequence
  ENSG00000170788_3 (sequence is synthesized)
atgagaatgaatatggaaaatctagttaggaatgaagatattctacattcagaggaagcaacactagactcaggcaaaacactagctgaaatcagcgatcgttatggagcacctaacttg

SEQ ID NO: 570832 - DNA, 120 bp, Artificial Sequence
  ENSG00000170788_4 (sequence is synthesized)
agcagagtggaagaacttgatgaaccaatgttttctgatattgcattaaacattgatcaagatttgtaggaccaaccaacctaagagcaataaatgtttttgtttgtttcaaatttcaaa

SEQ ID NO: 570833 - DNA, 120 bp, Artificial Sequence
  ENSG00000170788_5 (sequence is synthesized)
ggtgtccatgactgagggcagggtgtatgtaaggctttgttcacctcactggactttagttttatagtgactttattgaaaatatcctgcagtaatgcaaaaacacttactttttaggag

SEQ ID NO: 570834 - DNA, 120 bp, Artificial Sequence
  ENSG00000170788_6 (sequence is synthesized)
aacgggacgccgctcctgggtggcgagcaggcgcgtgtgtaggggtgagcgcaccggaaaggcccgaactgtttttgggatttgttcccctagcttcgctgggtccggcgggcagaggcg

SEQ ID NO: 570835 - DNA, 120 bp, Artificial Sequence
  ENSG00000170788_7 (sequence is synthesized)
gttctgaccgttgggccttgggcgtcgagcaggactcacctgaggcggagagaggccgcttcgcgcctggggctcccgaaagcggccagctgtcctcctgctccccctgagcggggagcg

SEQ ID NO: 570836 - DNA, 120 bp, Artificial Sequence
  ENSG00000170788_8 (sequence is synthesized)
ctgcgtctcctgcgggctgcgggagacccttccagactcccgggtgggaaaaccacactgagcgccccgggaggttgccagatacaatactgtatctggcacccctgcccgggtgccccc

SEQ ID NO: 570837 - DNA, 120 bp, Artificial Sequence
  ENSG00000170790_0 (sequence is synthesized)
ggggacttctgcccacacttatagctacaggaaactggacaagaataagtgagtttatcctcatgagcttctcttccctgcctactgaaatacagtcattactctttctgacatttctaa

SEQ ID NO: 570838 - DNA, 120 bp, Artificial Sequence
  ENSG00000170790_1 (sequence is synthesized)
ccatctacctggtcaccctgatgggaaactgcctcatcattctggttaccctagctgaccccatgctacacagccccatgtacttcttcctcagaaacttatctttcctggagattggct

SEQ ID NO: 570839 - DNA, 120 bp, Artificial Sequence
  ENSG00000170790_2 (sequence is synthesized)
tcaacctagtcattgtgcccaaaatgctggggaccctgcttgcccaggacacaaccatctccttccttggctgtgccactcagatgtatttcttcttcttctttggagtggctgaatgct

SEQ ID NO: 570840 - DNA, 120 bp, Artificial Sequence
  ENSG00000170790_3 (sequence is synthesized)
tcctcctggctaccatggcatatgaccgctatgtggccatctgcagtcccttgcactacccagtcatcatgaaccaaaggactcgtgccaaactggctgctgcctcctggttcccaggct

SEQ ID NO: 570841 - DNA, 120 bp, Artificial Sequence
  ENSG00000170790_4 (sequence is synthesized)
tgctgaggctggtctgtgcagacacagcactctttgagatctacgccatcgtcggaaccattctggtggtcatgatcccctgcttgctgatcttgtgttcctatactcacattgctgctg

SEQ ID NO: 570842 - DNA, 120 bp, Artificial Sequence
  ENSG00000170790_5 (sequence is synthesized)
ccatcctcaagatcccatcagctaaagggaagaataaagccttttctacatgttcctcacacctccttgttgtctctcttttctatatatcattaagcctcacctacttccggcctaaat

SEQ ID NO: 570843 - DNA, 120 bp, Artificial Sequence
  ENSG00000170790_6 (sequence is synthesized)
caaataattcacctgagggcaagaagctgctatcattgtcctacactgttatgactcccatgttgaaccccattatctacagcctgagaaataacgaggtgaagaatgccctcagcagga

SEQ ID NO: 570844 - DNA, 120 bp, Artificial Sequence
  ENSG00000170790_7 (sequence is synthesized)
cggtctctaaggccctagccctcagaaactgtatcccatagaccttaggaagtaaggctacattttactggatgagaaacaatcagtcccagatttgagattcctctctgcatctttcca

SEQ ID NO: 570845 - DNA, 120 bp, Artificial Sequence
  ENSG00000170790_8 (sequence is synthesized)
actagccccaagaacaaaagaggcacaggtgggaacaactctcccaaaaccaggactgggagcatggccaaacttcatagtgagcttacttgcctctgacacacaaggcagcagtgagct

SEQ ID NO: 570846 - DNA, 120 bp, Artificial Sequence
  ENSG00000170790_9 (sequence is synthesized)
ggctacagctccagccattaatagctcagccaggacagggaataagacttccctggttcttcttttggctttgctgaaacagaaatagagctgttatattacatgcatgaaggacatgca

SEQ ID NO: 570847 - DNA, 120 bp, Artificial Sequence
  ENSG00000170790_10 (sequence is synthesized)
tgaagcatggatgtcagccagagttgaacaaggcagatgttcctgttggacacagtaagaacgagtctgaaaaacaaattgagaatctgacttccaatcaataatctttctccatgacca

SEQ ID NO: 570848 - DNA, 120 bp, Artificial Sequence
  ENSG00000170790_11 (sequence is synthesized)
tgttgctgaaatggcttttggaaagctgagtggagagaaaggagcagagaagtagtttcgacctagcaccaccaactatgaaaactcctctgcctgcccattgtagacttacattgtttt

SEQ ID NO: 570849 - DNA, 120 bp, Artificial Sequence
  ENSG00000170790_12 (sequence is synthesized)
aaaactcctctgcctgcccattgtagacttacattgttttccttgtttcaactggtatgacagcacttctgtggccaactatttccaggtgttatatttctttttttttttttttttgag

SEQ ID NO: 570850 - DNA, 120 bp, Artificial Sequence
  ENSG00000170790_13 (sequence is synthesized)
gtgtttatatttctgtgtgacgtgcattgtgcacaatatgaaactgctagtcattataacatgggggcacacatagtaacagagggtaaaacccaataaaaatcatcttgtcacttttcc

SEQ ID NO: 570851 - DNA, 120 bp, Artificial Sequence
  ENSG00000170790_14 (sequence is synthesized)
tcttctgggcagatctgactctacattcatgacagaaaatctcatgatctttcccaacacataactctcctcaccatcttacttcattctcatgcccttaagcagtgttagttcttttaa

SEQ ID NO: 570852 - DNA, 120 bp, Artificial Sequence
  ENSG00000170790_15 (sequence is synthesized)
gcttactggtatgcagtatgcatgtatgagagtagatcaaaagttcacatgcatatgcctttataaccccaataattatttccttcacactagattcttcccaagaaaaacaacctgagc

SEQ ID NO: 570853 - DNA, 120 bp, Artificial Sequence
  ENSG00000170790_16 (sequence is synthesized)
ttccctaagatctctattccatattcaggttcttatgttttgttgaagtaatatcgtaaatttcagtcatagctttgctttgatgagaacaaagctccagaataagtcttctttaaccac

SEQ ID NO: 570854 - DNA, 120 bp, Artificial Sequence
  ENSG00000170790_17 (sequence is synthesized)
aagatttctccttcttataatctggtagtactctatttgtagatgtgccctaatttatttagccagtcttttactactacaaatcatgctgtaaataatggacttatccatatatctgtt

SEQ ID NO: 570855 - DNA, 120 bp, Artificial Sequence
  ENSG00000170790_18 (sequence is synthesized)
tttatatttttgctagtgtacctgacaaatagaaatctagaaattgagtttcttgggcaaaagttaaatacatacataatgttgctatatatattgattgtctatctagctcccctctga

SEQ ID NO: 570856 - DNA, 120 bp, Artificial Sequence
  ENSG00000170790_19 (sequence is synthesized)
tttataaaaactcaatgaaattttaatttgaatgaaataaattttgaagaataagaaagaaacagatgatcaaatcagaggaaaggtgtgcatttcattgaaacttgagttatagattag

SEQ ID NO: 570857 - DNA, 120 bp, Artificial Sequence
  ENSG00000170790_20 (sequence is synthesized)
acgattagcaattggtgatgtcttggtgttttattttctcttcttgaaaggttgtttttcacttttattttagccaaatctatcccatctctcaagaccccactgtgattcctcaagaag

SEQ ID NO: 570858 - DNA, 120 bp, Artificial Sequence
  ENSG00000170790_21 (sequence is synthesized)
cagaaatcactctttctgtatgcacccatttcaagtttattaataaatacattaaattttgtatatactacatgtagaaactgtacatgtacttatttttacatgtttgtcttcctccaa

SEQ ID NO: 570859 - DNA, 120 bp, Artificial Sequence
  ENSG00000170790_22 (sequence is synthesized)
cttttctgtaactcttcaaaaataagaattgttcaagtgtttctggtgttttgttttgtgtttgagacagggtctctctctctgtcacccaggctggactgcggtagcagaattatggct

SEQ ID NO: 570860 - DNA, 120 bp, Artificial Sequence
  ENSG00000170790_23 (sequence is synthesized)
cactgtagcctcaaacacctgggctcaggccatcttcctgcctcagtctccctagtggctgggactataggcgtacatcaccatgcctggccatttaaaaatttttttttagtagagacg

SEQ ID NO: 570861 - DNA, 120 bp, Artificial Sequence
  ENSG00000170790_24 (sequence is synthesized)
aggtcttgctatgctacccagtctggtatcgaacttctgagttcaagcaatccttctgcctgaacctctcaaagtgctgggattataagtgtgagccattgcatgcaacacaagtgtttc

SEQ ID NO: 570862 - DNA, 76 bp, Artificial Sequence
  ENSG00000170790_25 (sequence is synthesized)
gcatgcaacacaagtgtttaaggtctgctctattactcaggctgctggggtgcaatggcacaatcttggctcactg

SEQ ID NO: 570863 - DNA, 120 bp, Artificial Sequence
  ENSG00000170790_26 (sequence is synthesized)
cttgagtagctgggattacaggcgtgccaagccatgcccaactaattttttttttgtattttttagtagagatgcagttttaccatgttggagctcctggcctcaagtgatctgcctgcc

SEQ ID NO: 570864 - DNA, 120 bp, Artificial Sequence
  ENSG00000170790_27 (sequence is synthesized)
aagtgatctgcctgcctcagcctcccaagggctgggattacagacgtgggccaccatgccaggccaagtatttcccttttaatatgacgtaggcattcctgaaaagcttatgtaatgcaa

SEQ ID NO: 570865 - DNA, 120 bp, Artificial Sequence
  ENSG00000170790_28 (sequence is synthesized)
taatgcaaacctttacattaaaaatattatggggaagtagggctagggttagggctagactcaaaatacatgcaactttaaagacaaggcattagtagaaacaacatttggttcccagag

SEQ ID NO: 570866 - DNA, 120 bp, Artificial Sequence
  ENSG00000170790_29 (sequence is synthesized)
agacaatgtagactgcccaggcaggcagctcattgaggctggaggttgccacagtagatatttaaaatatacaacaacagtagaatgaaaataccaacaatgcttggattagaacaatga

SEQ ID NO: 570867 - DNA, 120 bp, Artificial Sequence
  ENSG00000170790_30 (sequence is synthesized)
tgcttgatgctgagacaatttgtactggggtagggggtagtccttagtatgggtaaagaatttgaagtaaagcaaacaagaataacccaaaacctaaagaaaaagttgtacatagtttca

SEQ ID NO: 570868 - DNA, 120 bp, Artificial Sequence
  ENSG00000170790_31 (sequence is synthesized)
gggaaaggattccaacagaagagtgccacatgcacaaacacaggagtgctgagagactatgatgtgtgtaaggaacacaaagcatttttgtgtcactgaaaaatcagctacactggggat

SEQ ID NO: 570869 - DNA, 120 bp, Artificial Sequence
  ENSG00000170790_32 (sequence is synthesized)
ttgaaactggaaaaataagcagagatcacaggaaaagaccttgttaaaggatttactttatcccaggggccatacggagtaattgaaagacattaagcaggtaagtgacttaaccagagt

SEQ ID NO: 570870 - DNA, 120 bp, Artificial Sequence
  ENSG00000170790_33 (sequence is synthesized)
tgctggttaagacagcaactggtaagacagttgctgataagacagatcacatacaaaccaaggatggtttgaagagaatgaaccagaagcaggttcctaccatactctaggccagagaaa

SEQ ID NO: 570871 - DNA, 120 bp, Artificial Sequence
  ENSG00000170790_34 (sequence is synthesized)
ataaatccagaacctaaaggcagtggtggtagagctggagaaggtgacactgaattagtgtttaggagtaaaaataatcaaatttggggcacaaattaaaggattatatcccagttcctg

SEQ ID NO: 570872 - DNA, 120 bp, Artificial Sequence
  ENSG00000170790_35 (sequence is synthesized)
gcttgtactttggggtggtgccatttactgaaatggggtatctacaaagaggaggtttgaggtggaggaagcagacaagcacatttatatctcttatcattgtttcagtccgtgtgaatt

SEQ ID NO: 570873 - DNA, 120 bp, Artificial Sequence
  ENSG00000170790_36 (sequence is synthesized)
gtatgatgctatattatattcttttgtgcctttgtctaaattccttatgaatggggctcactgtacctactttgtgtctgtgtagatgtttccctgattatttaccacattttcttcatt

SEQ ID NO: 570874 - DNA, 120 bp, Artificial Sequence
  ENSG00000170790_37 (sequence is synthesized)
atctattaaattattcaataacaatttactgggcatctacctttctaggcattggggtaaaaaaatgaataacacaatttctatttcaaggagcatgtcatctactgtatgagacaaata

SEQ ID NO: 570875 - DNA, 120 bp, Artificial Sequence
  ENSG00000170790_38 (sequence is synthesized)
catacaataatgattattctaaaataagaactatgaaagtggtattccagttctccaatgttactaatatattgaaattttctgcccatctttagaaattgtgttgctttgttcttacta

SEQ ID NO: 570876 - DNA, 120 bp, Artificial Sequence
  ENSG00000170790_39 (sequence is synthesized)
ccaccctgtactggatactggcttgtcctcacctgtgggctcagatttattcccattctgaaaaaatgagtgcaagtgtcacttgtcggccaaatccctgacttggactcagccacccag

SEQ ID NO: 570877 - DNA, 120 bp, Artificial Sequence
  ENSG00000170790_40 (sequence is synthesized)
gattccaacacttgctgaaaaaactactcaacttatctgtgtctcagattccttgactgtaaaatgggtataatactatctgtatcttcaggtgttgtgagaatcaaataagataataca

SEQ ID NO: 570878 - DNA, 120 bp, Artificial Sequence
  ENSG00000170791_0 (sequence is synthesized)
gtgtttggagctggagacggcctgggtgctggcgaagcggaggccggagtaagaagactgttagaatgccctcggtaacacagaggctgagagatcctgacataaatccttgtttgtcgg

SEQ ID NO: 570879 - DNA, 120 bp, Artificial Sequence
  ENSG00000170791_1 (sequence is synthesized)
aatctgatgcttccaccagatgtctggatgaaaataactatgacagggaaaggtgttccacttacttcttgaggtacaaaaactgccggagattctggaattctatcgtgatgcagagaa

SEQ ID NO: 570880 - DNA, 120 bp, Artificial Sequence
  ENSG00000170791_2 (sequence is synthesized)
gaaagaacggagtgaagccatttatgcctacggcagcagaaagagatgaaatcttgagagcagtgggaaatatgccctattgaatgtttgcattaaaagtgtttatataacttagaagca

SEQ ID NO: 570881 - DNA, 120 bp, Artificial Sequence
  ENSG00000170791_3 (sequence is synthesized)
gatgaatatttctaataaatgattgctgtaatatttaagactgtacacccctcacccagacagaccttaagttcttcaagtggagacagtgaagtcaccccgtgtcctttttgcttgctc

SEQ ID NO: 570882 - DNA, 120 bp, Artificial Sequence
  ENSG00000170791_4 (sequence is synthesized)
tcagtgccatgccgatggtatgttgctgttggctgtgttgtggcatgagtttgcatgactttctggaggcatggagttaggtaaggctacatgagaaattgagcttttccactgggtttt

SEQ ID NO: 570883 - DNA, 120 bp, Artificial Sequence
  ENSG00000170791_5 (sequence is synthesized)
gaaagaagagtatgatgtgaacaagtaaagactgaatggggctgagatgaaggcaatgtttccaaggaaaggaaatgttatgagcaagagtgtgaggcaagagaagctggaaccacattc

SEQ ID NO: 570884 - DNA, 120 bp, Artificial Sequence
  ENSG00000170791_6 (sequence is synthesized)
agagagtatcctgtagattgctccacctagaatctcaggtgggtggagcagtggtgggagaagactggaaaggtaagttgaaggtaaggaatgtgtggtgggcctcagatcccaggctca

SEQ ID NO: 570885 - DNA, 120 bp, Artificial Sequence
  ENSG00000170791_7 (sequence is synthesized)
tacttccctcacttatctttgtttaaataaggttagtacattcactaggggcaaatgggtttttctaaataaatgacataaaaaagaactggttgtctttctttaaagaaagtcttagtt

SEQ ID NO: 570886 - DNA, 120 bp, Artificial Sequence
  ENSG00000170791_8 (sequence is synthesized)
acaggattctgtgattaaaatccttaaatattgggttgccttctgcagctgtagtatcagtttttgaaccacagtaatgggaagaaagacaaatggattcccttagaagtaagatttcta

SEQ ID NO: 570887 - DNA, 120 bp, Artificial Sequence
  ENSG00000170791_9 (sequence is synthesized)
tttgcaggatgagttgggcagggaaaagggtcagggttcatcaggtgaactcaacactgggatgagactagaacttcactttatgatataaacacaatacgattattcaatgtggtgact

SEQ ID NO: 570888 - DNA, 120 bp, Artificial Sequence
  ENSG00000170791_10 (sequence is synthesized)
ggggtagactgtgaagcagccctccttatgcccactgccttttagaatcgtttgttttattcatggtagttttatgaagacatactattattgaatgaaatttaatgtgtacttgaaaac

SEQ ID NO: 570889 - DNA, 120 bp, Artificial Sequence
  ENSG00000170791_11 (sequence is synthesized)
attgcttttgtcccttctcttcatctggtcttgggtcaagaacattgttttaatggctgccgacaatgaactgtctgtctgagtctaaaaccaagctcaggtttctaagccacatgacct

SEQ ID NO: 570890 - DNA, 120 bp, Artificial Sequence
  ENSG00000170791_12 (sequence is synthesized)
tgattgttaaatgtagttatatttgaataaaaaatgaatcatttccaaaattcttttgatttgtattgactgctataaaaatgatggattaaaataggaccagaaaagaatgaatgccta

SEQ ID NO: 570891 - DNA, 120 bp, Artificial Sequence
  ENSG00000170791_13 (sequence is synthesized)
cctgtgtaagaagtatttttgtatttttaagcacacttgttaaagggcttggaattttaatgtcactcctttgaaggtacataccaatatcaacattcatcttgtaactagttgtcctga

SEQ ID NO: 570892 - DNA, 120 bp, Artificial Sequence
  ENSG00000170791_14 (sequence is synthesized)
gctacttaaggtcctgctgcgtgagccattgacgtgtttggagctggagacggcctgggtgctggcgaagcggaggccggagttaatacacgaggaactcatgcaaaggaggggactttc

SEQ ID NO: 570893 - DNA, 120 bp, Artificial Sequence
  ENSG00000170791_15 (sequence is synthesized)
ggaaatccaaacttagagtgccttgtatttagaatccggaaggaaaaggaaatgaaatgtgaagaaactcatgcaccaaactcgaactgggtatatgtgatgttacctagtaagaagact

SEQ ID NO: 570894 - DNA, 120 bp, Artificial Sequence
  ENSG00000170791_16 (sequence is synthesized)
attatttttgaagaatttctgactgacaataaaatatagagtaggatactttcatgtaaggcacgaaacttaaatttaatgcaaggttgtctgatccttgttgagattattaaatctaag

SEQ ID NO: 570895 - DNA, 120 bp, Artificial Sequence
  ENSG00000170791_17 (sequence is synthesized)
gtgtatgaagagttctgtgttctcacatcataggataggtgtaaaaaagaaagctgtgaatttatttactatcatcatctctcttaggaagaagggaagtgtggaaaaaaattgtcttca

SEQ ID NO: 570896 - DNA, 120 bp, Artificial Sequence
  ENSG00000170791_18 (sequence is synthesized)
aagaatgcagttttaatatagaattctatcgtgatgcagagaagaaagaacggagtgaagccatttatgcctacggcagcagaaagagatgaaatcttgagagcagtgggaaatatgccc

SEQ ID NO: 570897 - DNA, 120 bp, Artificial Sequence
  ENSG00000170791_19 (sequence is synthesized)
agtctggcggcggcgcgcgccgattgggcgggctgccgccggggagcgggggcagcaagttgggatgcgcgctacttaaggtcctgctgcgtgagccattgacgtgtttggagctggaga

SEQ ID NO: 570898 - DNA, 120 bp, Artificial Sequence
  ENSG00000170791_20 (sequence is synthesized)
cggcctgggtgctggcgaagcggaggccggagtaagaagactgttagaatgccctcggtaacacagaggctgagagatcctgacataaatccttgtttgtcgatcctgttctacctttta

SEQ ID NO: 570899 - DNA, 120 bp, Artificial Sequence
  ENSG00000170791_21 (sequence is synthesized)
ttttattcacaaagtacagagaatacatgaagttcctcactaagtgatcattatgccaaaatcaaaatttcaggtacttttagtgctattgagatgtattgatttattttctgtcaacta

SEQ ID NO: 570900 - DNA, 120 bp, Artificial Sequence
  ENSG00000170791_22 (sequence is synthesized)
actttatcctctgtgtgctactttagccgtgaaagatccttgagagctcttgttagctgcctcgtcgtcctctaagctataagaatgcagttttaatataggtgggtcttcttagacatt

SEQ ID NO: 570901 - DNA, 120 bp, Artificial Sequence
  ENSG00000170791_23 (sequence is synthesized)
taagtatctgcagccctaaaacaatgtctttgttataaatttagttttcctggagatgaacagaatgtttaacttcccttgtcataacacatcatgttaggcttcaatttctgccttttt

SEQ ID NO: 570902 - DNA, 120 bp, Artificial Sequence
  ENSG00000170791_24 (sequence is synthesized)
gtgtttggagctggagacggcctgggtgctggcgaagcggaggccggaggtgagtggttcccccgccctacctccgaagcggccgcagaaaagcggggagagaggggtgcccttgggccg

SEQ ID NO: 570903 - DNA, 120 bp, Artificial Sequence
  ENSG00000170791_25 (sequence is synthesized)
tagcggggcccgaatgcacttctgcggcgcggaggcgctcccgccaggcttcgccgcagcgcggacctcttcccgttgctcttcctcccgccacacgggtctgttcgctccgggggcgag

SEQ ID NO: 570904 - DNA, 120 bp, Artificial Sequence
  ENSG00000170791_26 (sequence is synthesized)
gaagatgacctctgcctagtccgggcaaccccagctcttcttccactctcctgtgtagcctctgaagcgcagttaccggccccacccccagttccctgcgttttcctcgccccttgtctc

SEQ ID NO: 570905 - DNA, 120 bp, Artificial Sequence
  ENSG00000170791_27 (sequence is synthesized)
tctcggcatggtctcggcacagcaaggtgtgttcacctgtgcgcgccgtccaggatcagatgctgacgggctacaccgcggaaggcggcgaggcctcgggttcgcccttcgtttctcctt

SEQ ID NO: 570906 - DNA, 120 bp, Artificial Sequence
  ENSG00000170791_28 (sequence is synthesized)
gccctgcgcgcccacctccggcaggccacccttgacttcttgcccccttccactttgcacctggcagtgggttaacggcacggcgtgtgcagcttccgggtttagcagagccgcggaccc

SEQ ID NO: 570907 - DNA, 120 bp, Artificial Sequence
  ENSG00000170791_29 (sequence is synthesized)
tgcctgggctccgaccacggggcgtgtgggcatgaacgtgttcagaaacgtttccttccccctgccctttcaaagctacttagagaggggggacgtgaaccactggatgggaaatcagga

SEQ ID NO: 570908 - DNA, 120 bp, Artificial Sequence
  ENSG00000170791_30 (sequence is synthesized)
actgctttattaagcagtttgccctttggagtggattttagagttatcccctgaatgtgctatggttttgtggcccctccttcatatctttgcttggtttttctttctggttatgctctg

SEQ ID NO: 570909 - DNA, 120 bp, Artificial Sequence
  ENSG00000170791_31 (sequence is synthesized)
caagtagtagagccttgtaacatttatttagtacattcaaaaagtaatagacaaggcccctttagcggagcactcgatgttgtaattcagccccgctcctcactgtaaattgacatttcc

SEQ ID NO: 570910 - DNA, 120 bp, Artificial Sequence
  ENSG00000170791_32 (sequence is synthesized)
attttcttgtattgttcaatgaaaatcataaaattattattcagtgattacttaatggacaccagaataaccaaacccttttccattcttttttttgcaaaggctggtctcctttggcct

SEQ ID NO: 570911 - DNA, 87 bp, Artificial Sequence
  ENSG00000170791_33 (sequence is synthesized)
cctggacgtcctgatctttcccatagtagaactgggctgggtgtctcttttttttttttttgagacggcgtcttccactgctgtcgc

SEQ ID NO: 570912 - DNA, 120 bp, Artificial Sequence
  ENSG00000170791_34 (sequence is synthesized)
gtgatccgcccgactcggcctcctaaacttttgcaaagctgtatctctaggaattgaattggaagattactgaagcacagtagcattccctgacttcctgcaacgcagggaaatagttaa

SEQ ID NO: 570913 - DNA, 120 bp, Artificial Sequence
  ENSG00000170791_35 (sequence is synthesized)
aaagaagatgccactggaagtaaaatttcaactcttttgtttttgaaacagtatagcttttcataatgtcaactaagcaataacttggctttttggtgtgttggctaccctactattggc

SEQ ID NO: 570914 - DNA, 120 bp, Artificial Sequence
  ENSG00000170791_36 (sequence is synthesized)
cataaaataggcactctggtacttcagttgatgaatgtttttgctaaagttggactgtaccgaatttcattcttattttgtacgctaattggtgtaaaataaggaagtaattgttggaat

SEQ ID NO: 570915 - DNA, 120 bp, Artificial Sequence
  ENSG00000170791_37 (sequence is synthesized)
gcatactgtattcttaggttttattagtacatttggttgcttaaacttaagaataagagtaaacaacaactgaattataattgaactatctttctttttcgtttttttgagacagggtct

SEQ ID NO: 570916 - DNA, 90 bp, Artificial Sequence
  ENSG00000170791_38 (sequence is synthesized)
cacccaggctggagtgcactggtgcaatcacagctctctgcagccttgacttcctgggctatcccaccttacttacggcacgacaccagg

SEQ ID NO: 570917 - DNA, 120 bp, Artificial Sequence
  ENSG00000170791_39 (sequence is synthesized)
acaccaggctaatttttgtatttttggtagaaatggggtttctctgtgtcgcctaggttgatctcgaactgctgagcttaagcagccctctcgctccagcctcccaaagtgctgggatta

SEQ ID NO: 570918 - DNA, 120 bp, Artificial Sequence
  ENSG00000170791_40 (sequence is synthesized)
taggatggtttgctttaattttcatgagtgttaagttggaaaaacaggctgctctagttttgtgggcctttgttttctgcagttgttgaataaagttatttctctagaaaaaatattgtt

SEQ ID NO: 570919 - DNA, 120 bp, Artificial Sequence
  ENSG00000170791_41 (sequence is synthesized)
ggccagcatatcctatttaactagagcatttttagatgtttataatttctctaacaaacattcatcttttctttagttttccttatttgtataatatgcaagcatttggttgtcactgta

SEQ ID NO: 570920 - DNA, 120 bp, Artificial Sequence
  ENSG00000170791_42 (sequence is synthesized)
aaactagacaggaaaatgtaacactgagaatatttagtccaaacatggaaaactggaaggtatgatatttttaaactgtcactgacatttattgtttcactagcaataatatcaccatgt

SEQ ID NO: 570921 - DNA, 120 bp, Artificial Sequence
  ENSG00000170791_43 (sequence is synthesized)
aaaggtatctgataaacaaaatgttttaagagtaagcttttattggcatttatttggtatgatttgcgatacttacttgtggctttgctacgtttgaataatgtagttatcatactggtc

SEQ ID NO: 570922 - DNA, 120 bp, Artificial Sequence
  ENSG00000170791_44 (sequence is synthesized)
ccatgaaaattatactctttagttatatgcattttccaaatatatacattcattaaatatttggcacagaaattcagctttgttctgtttacgtagaacatgtttcttagatatgtgttg

SEQ ID NO: 570923 - DNA, 120 bp, Artificial Sequence
  ENSG00000170791_45 (sequence is synthesized)
caaactgtctacccatatagctaaagctttcctttagatctgtgttccccaaccttttgggcaccaaggaccggttttgtggaagacaatttttccacggatggggaagggggcgggcgt

SEQ ID NO: 570924 - DNA, 120 bp, Artificial Sequence
  ENSG00000170791_46 (sequence is synthesized)
caaaaggcattagattctcctaaggagcttgcagcctagatccctcacatgcacgcagttcacaatagggttcgtgatattagatcccacaatagggatctaatagcattagatgagaat

SEQ ID NO: 570925 - DNA, 120 bp, Artificial Sequence
  ENSG00000170801_0 (sequence is synthesized)
gtcaggctggagggagctggtccctgcgctccctgcgccctggggatgcccctgccgccctgacgcccgccagcctgagccaccggcgcatgtgaccgcgcgtccgccccagtcccatcc

SEQ ID NO: 570926 - DNA, 80 bp, Artificial Sequence
  ENSG00000170801_1 (sequence is synthesized)
catgtgaccgcgcgtccgccccagtcccatccgtaggcgcccggcgcccggccccgcagcggcctcgttgtccccgccgg

SEQ ID NO: 570927 - DNA, 120 bp, Artificial Sequence
  ENSG00000170801_2 (sequence is synthesized)
ctgcggcgccgtgtcccgcgcgctgcgacgtgtcgcggtgtcccagcccccgctgccccggcggctacgtgcccgacctctgcaactgctgcctggtgtgcgccgccagcgagggcgagc

SEQ ID NO: 570928 - DNA, 120 bp, Artificial Sequence
  ENSG00000170801_3 (sequence is synthesized)
actgctgcctggtgtgcgccgccagcgagggcgagccctgtggcggccctctggactcgccttgcggcgagagcctggagtgcgtgcgcggcctatgccgctgccgctggtcgcacgccg

SEQ ID NO: 570929 - DNA, 120 bp, Artificial Sequence
  ENSG00000170801_4 (sequence is synthesized)
tgtgtggcaccgacgggcacacctatgccaacgtgtgcgcgctgcaggcggccagccgccgcgcgctgcagctctccgggacgcccgtgcgccagctgcagaagggcgcctgcccgttgg

SEQ ID NO: 570930 - DNA, 120 bp, Artificial Sequence
  ENSG00000170801_5 (sequence is synthesized)
gtctccaccagctgagcagcccgcgctacaagttcaacttcattgctgacgtggtggagaagatcgcaccagccgtggtccacatagagctcttcctgagacacccgctgtttggccgca

SEQ ID NO: 570931 - DNA, 120 bp, Artificial Sequence
  ENSG00000170801_6 (sequence is synthesized)
acgtgcccctgtccagcggttctggcttcatcatgtcagaggccggcctgatcatcaccaatgcccacgtggtgtccagcaacagtgctgccccgggcaggcagcagctcaaggtgcagc

SEQ ID NO: 570932 - DNA, 120 bp, Artificial Sequence
  ENSG00000170801_7 (sequence is synthesized)
tacagaatggggactcctatgaggccaccatcaaagacatcgacaagaagtcggacattgccaccatcaagatccatcccaagaaaaagctccctgtgttgttgctgggtcactcggccg

SEQ ID NO: 570933 - DNA, 120 bp, Artificial Sequence
  ENSG00000170801_8 (sequence is synthesized)
acctgcggcctggggagtttgtggtggccatcggcagtcccttcgccctacagaacacagtgacaacgggcatcgtcagcactgcccagcgggagggcagggagctgggcctccgggact

SEQ ID NO: 570934 - DNA, 120 bp, Artificial Sequence
  ENSG00000170801_9 (sequence is synthesized)
ccgacatggactacatccagacggatgccatcatcaactacgggaactccgggggaccactggtgaacctggatggcgaggtcattggcatcaacacgctcaaggtcacggctggcatct

SEQ ID NO: 570935 - DNA, 120 bp, Artificial Sequence
  ENSG00000170801_10 (sequence is synthesized)
ccgcatcacacggttcctcacagagttccaagacaagcagatcaaagactggaagaagcgcttcatcggcatacggatgcggacgatcacaccaagcctggtggatgagctgaaggccag

SEQ ID NO: 570936 - DNA, 120 bp, Artificial Sequence
  ENSG00000170801_11 (sequence is synthesized)
caacccggacttcccagaggtcagcagtggaatttatgtgcaagaggttgcgccgaattcaccttctcagagaggcggcatccaagatggtgacatcatcgtcaaggtcaacgggcgtcc

SEQ ID NO: 570937 - DNA, 120 bp, Artificial Sequence
  ENSG00000170801_12 (sequence is synthesized)
tctagtggactcgagtgagctgcaggaggccgtgctgaccgagtctcctctcctactggaggtgcggcgggggaacgacgacctcctcttcagcatcgcacctgaggtggtcatgtgagg

SEQ ID NO: 570938 - DNA, 120 bp, Artificial Sequence
  ENSG00000170801_13 (sequence is synthesized)
ggcgcattcctccagcgccaagcgtcagagcctgcagacaacggagggcagcgcccccccgagatcaggacgaaggaccaccgtcggtcctcagcagggcggcagcctcctcctggctgt

SEQ ID NO: 570939 - DNA, 120 bp, Artificial Sequence
  ENSG00000170801_14 (sequence is synthesized)
ccggggcagagcggaggctgggcttggccaggggcccgaatttccgcctggggagtgttggatccacatcccggtgccggggagggaagcccaacatccccttgtacagatgatcctgaa

SEQ ID NO: 570940 - DNA, 120 bp, Artificial Sequence
  ENSG00000170801_15 (sequence is synthesized)
agtcacttccaagttctccggatattcacaaaactgccttccatggaggtcccctcctctcctagcttcccgcctctgcccctgtgaacacccatctgcagtatcccctgctcctgcccc

SEQ ID NO: 570941 - DNA, 120 bp, Artificial Sequence
  ENSG00000170801_16 (sequence is synthesized)
tcctactgcaggtctgggctgccaagcttcttcccccctgacaaacgcccacctgacctgaggccccagcttccctctgccctaggacttaccaagctgtagggccagggctgctgcctg

SEQ ID NO: 570942 - DNA, 120 bp, Artificial Sequence
  ENSG00000170801_17 (sequence is synthesized)
ccagcctggggtccctggaggacaggtcacatctgatccctttggggtgcgggggtggggtccagcccagagcaggcactgagtgaatgccccctggctgcggagctgagccccgccctg

SEQ ID NO: 570943 - DNA, 120 bp, Artificial Sequence
  ENSG00000170801_18 (sequence is synthesized)
ccatgaggttttcctccccaggcaggcaggaggccgcggggagcacgtggaaagttggctgctgcctggggaagcttctcctccccaaggcggccatggggcagcctgcagaggacagtg

SEQ ID NO: 570944 - DNA, 120 bp, Artificial Sequence
  ENSG00000170801_19 (sequence is synthesized)
gacgtggagctgcggggtgtgaggactgagccggcttccccttcccacgcagctctgggatgcagcagccgctcgcatggaagtgccgcccagaggcatgcaggctgctgggcaccaccc

SEQ ID NO: 570945 - DNA, 120 bp, Artificial Sequence
  ENSG00000170801_20 (sequence is synthesized)
cctcatccagggaacgagtgtgtctcaaggggcatttgtgagctttgctgtaaatggattcccagtgttgcttgtactgtatgtttctctactgtatggaaaataaagtttacaagcaca

SEQ ID NO: 570946 - DNA, 120 bp, Artificial Sequence
  ENSG00000170801_21 (sequence is synthesized)
ccatcccctcagaccgcatcacacggttcctcacagagttccaagacaagcagatcaaagccccctcactggcagttcattgagagcagggggcttcctcacgtttccccctcctccatg

SEQ ID NO: 570947 - DNA, 120 bp, Artificial Sequence
  ENSG00000170801_22 (sequence is synthesized)
accccgtcagccaagcacatggaccccagtgcagccaaggctggtgccatgagggctggtcacatgaagagctgctgttgaggatgccgccattgttcttctgtgtccattatgggaaga

SEQ ID NO: 570948 - DNA, 120 bp, Artificial Sequence
  ENSG00000170801_23 (sequence is synthesized)
caatctggagccaggcagagcctgtctttcccaaagaagctgaagtcttcttctcttgaacagtggggaccatctaatctcttgagcccttttcctgttggcttctaggaagctcagagc

SEQ ID NO: 570949 - DNA, 120 bp, Artificial Sequence
  ENSG00000170801_24 (sequence is synthesized)
tagattcaggggtgcacccagacctgtcctagcatgctcctttccctaatgaccgagtctttcctgttgaattatcccattctccatgggtgcctttgactttggcctccttactggaaa

SEQ ID NO: 570950 - DNA, 120 bp, Artificial Sequence
  ENSG00000170801_25 (sequence is synthesized)
ttagcggagctgctgtttgcacacactgagctgtgaggtggctttccttggaagtggatgatagtgtcctcttcccttcttgcctctctctttctcctgagacaggatccccctggggcc

SEQ ID NO: 570951 - DNA, 120 bp, Artificial Sequence
  ENSG00000170801_26 (sequence is synthesized)
taggtttgctcctttgttgtacaggggctgtcccagttagtgctgacctcatcccagaaccccctgggaaatatcccctgtcctcagagctgtgtcccctccccaaggacagtgcagact

SEQ ID NO: 570952 - DNA, 120 bp, Artificial Sequence
  ENSG00000170801_27 (sequence is synthesized)
aactgaggagcctgataaaccttagctgcatggcacacttgcaattttaaaatccttctgaagttgactggtgtttgtacttgcttctcttttttatttaataaaatccaatgatccaaa

SEQ ID NO: 570953 - DNA, 120 bp, Artificial Sequence
  ENSG00000170802_0 (sequence is synthesized)
actgcagctgctgctgcctgctggttgccgcgtcttcccggaggcgactgctggaagctgcagggaacagctgcggtgctctgccatattgtgtcttccccggccggtccctcgcctccc

SEQ ID NO: 570954 - DNA, 120 bp, Artificial Sequence
  ENSG00000170802_1 (sequence is synthesized)
ggccgagctgacgttggttgaagccatggataacagaacccacagatgcagagggctgactgtacaagtctgtcaaaaaaccaaactgctggttggctaataattggtcactgtatgact

SEQ ID NO: 570955 - DNA, 120 bp, Artificial Sequence
  ENSG00000170802_2 (sequence is synthesized)
tatagtacaggtgatattacttctgattctagatgaactgtaagagtaaatgggtccagtaattggaatgactccagataagagagctgaaaccccaggagctgaaaagattgcaggatt

SEQ ID NO: 570956 - DNA, 120 bp, Artificial Sequence
  ENSG00000170802_3 (sequence is synthesized)
aagccagatttacaaaatgggaagcttgcctgaagctgttgatgctgccaggccgaaggccactctagtggacagtgagtcagcagatgatgaactcacaaacttgaactggcttcatga

SEQ ID NO: 570957 - DNA, 120 bp, Artificial Sequence
  ENSG00000170802_4 (sequence is synthesized)
aagcactaatcttctaacaaacttcagcctcggaagtgagggtcttccaattgttagtccattgtatgacatagagggagatgatgtgccatcctttggaccagcttgctaccagaaccc

SEQ ID NO: 570958 - DNA, 120 bp, Artificial Sequence
  ENSG00000170802_5 (sequence is synthesized)
agaaaaaaaatcagcgacttcaaagcccccatactcctttagtcttctcatttatatggccattgagcactctccaaataaatgtttgcctgtcaaagaaatttatagctggattctgga

SEQ ID NO: 570959 - DNA, 120 bp, Artificial Sequence
  ENSG00000170802_6 (sequence is synthesized)
ccattttccatattttgctactgcaccaacaggctggaagaattctgttcgacataatctgtccctgaataaatgttttcagaaagtggaaagaagccatggcaaggttaatggaaaagg

SEQ ID NO: 570960 - DNA, 120 bp, Artificial Sequence
  ENSG00000170802_7 (sequence is synthesized)
ttccttatggtgtgttgatccggaatataaacccaatcttatccaggcactgaagaagcaacctttttcttcagcatcttcacaaaatggttctttatcacctcactatttaagctctgt

SEQ ID NO: 570961 - DNA, 120 bp, Artificial Sequence
  ENSG00000170802_8 (sequence is synthesized)
aatcaagcagaaccaggtgcgaaacctcaaagaatctgatattgatgctgctgctgcaatgatgcttttaaatacttctatagaacaaggaattttagaatgtgagaagcctcttcctct

SEQ ID NO: 570962 - DNA, 120 bp, Artificial Sequence
  ENSG00000170802_9 (sequence is synthesized)
taaaacagcattgcaaaaaaagaggagttacggcaatgcatttcatcatcccagtgctgtacgattacaagagagtgattctttagccaccagcattgatccaaaagaagatcacaatta

SEQ ID NO: 570963 - DNA, 120 bp, Artificial Sequence
  ENSG00000170802_10 (sequence is synthesized)
cagtgcaagtagcatggcagcacagcgttgtgcatccaggtctagcgtgtcttccctgtcttctgtggatgaggtatatgaatttatcccaaagaatagtcacgtgggaagtgatggcag

SEQ ID NO: 570964 - DNA, 120 bp, Artificial Sequence
  ENSG00000170802_11 (sequence is synthesized)
tgaaggatttcacagtgaagaagatacagacgttgattatgaagatgatcctcttggagacagtggctatgcatcacagccttgtgcaaaaatctctgaaaaagggcagtcaggcaaaaa

SEQ ID NO: 570965 - DNA, 120 bp, Artificial Sequence
  ENSG00000170802_12 (sequence is synthesized)
gatgcgaaaacagacatgtcaagaaattgatgaggagctcaaagaggcagctggatctctgctccaccttgctggaattcgtacatgtttaggttccctaataagtactgcaaagacaca

SEQ ID NO: 570966 - DNA, 120 bp, Artificial Sequence
  ENSG00000170802_13 (sequence is synthesized)
aaatcaaaagcaacggaaaaaatagaaatacttaaagtgtggcaatactctttcacttaattctttacaagggatatcaaagccataatggacttcattagttttagggtagggaaggga

SEQ ID NO: 570967 - DNA, 120 bp, Artificial Sequence
  ENSG00000170802_14 (sequence is synthesized)
tactaattacttatttctttcaaaacatttttggtttttggtttttaaaatttttattaaacaattgctgttaggatcatgcctgatcagaaatacatgatgtgaagtcctaaaagcata

SEQ ID NO: 570968 - DNA, 120 bp, Artificial Sequence
  ENSG00000170802_15 (sequence is synthesized)
atttttgtgataaatgtgtccaagatttgaaaatttttatataagaaaatccccagcctctgtcttaaacttgtgggacaaaaatcctttcttctgttaatatgtcagaatgtaagattt

SEQ ID NO: 570969 - DNA, 120 bp, Artificial Sequence
  ENSG00000170802_16 (sequence is synthesized)
ggcaactcgataaatttttttcattttcttttccaatctgtaactatagttactgaaccagctaaaaattttgctgatgtatttttcatatacttctctcctgacacgcaatccggtaac

SEQ ID NO: 570970 - DNA, 120 bp, Artificial Sequence
  ENSG00000170802_17 (sequence is synthesized)
ataagattgaaatttttttactttgtcttaatttgtttctaattttttttttgttgtcgtgtgagcaaagacaaacataaattgaaaaacatcctgatgtttagaaagtttcttttggtt

SEQ ID NO: 570971 - DNA, 120 bp, Artificial Sequence
  ENSG00000170802_18 (sequence is synthesized)
acgtaggtagagaatacaacaaagagttctaagacttagaaaagacaattttgtggtgtcatttcatccaagaacactcccaattcctattagaatggtagctttgaagtgtttttactt

SEQ ID NO: 570972 - DNA, 120 bp, Artificial Sequence
  ENSG00000170802_19 (sequence is synthesized)
cagagatcctgcatagcatttattggggccttttattctttcccaaagtgctttgcaaacattaagttttagccactagctgcctttgttgagtataagttatccagtgagaggatatag

SEQ ID NO: 570973 - DNA, 120 bp, Artificial Sequence
  ENSG00000170802_20 (sequence is synthesized)
ccaattaagtgtgttatggagtacacccattttgacacacttgtaataagagaatctttcatttgcctgccatgtgtactgtattatgagaatcttataatcggaatggagtgaaatgaa

SEQ ID NO: 570974 - DNA, 120 bp, Artificial Sequence
  ENSG00000170802_21 (sequence is synthesized)
acattttgagtactgatggcatgttatcatacataaagtaggtcatttaggaaaaaacttctgtccaagctttgtatgaattaaattcataagtataccaaattaaatcttaatagattt

SEQ ID NO: 570975 - DNA, 120 bp, Artificial Sequence
  ENSG00000170802_22 (sequence is synthesized)
aaaattcatataaaatttgatcttatgcaatacacctttttgaggaggcagtgtaacaacctatagtgccattgatccatgagaaaaagattttctggtactactccaaaagtgctttga

SEQ ID NO: 570976 - DNA, 120 bp, Artificial Sequence
  ENSG00000170802_23 (sequence is synthesized)
ctaagtatcttaactatttgaacagtctgcttatatgagacagtttttcatagtatcatttgtataatttgattagattattcagaaacaataggatgctaaactaattcattgtatctt

SEQ ID NO: 570977 - DNA, 120 bp, Artificial Sequence
  ENSG00000170802_24 (sequence is synthesized)
ttttttacaatggtggaagcaactttctgaaagttcagtcttatgctacatcctaagtcatagacaatgaccttgttttcattattctgatagattgtatacatatgtacacatacatat

SEQ ID NO: 570978 - DNA, 120 bp, Artificial Sequence
  ENSG00000170802_25 (sequence is synthesized)
acacatatgcacagtcaaggtcatgatgttgatttgctttcagctgtttctgtgattataaagcattttttaagagacaaattttaacttttaatttttattttggcaaaactgtcaaat

SEQ ID NO: 570979 - DNA, 120 bp, Artificial Sequence
  ENSG00000170802_26 (sequence is synthesized)
gagaaaaatgattttaaaaacttttttttcaattgacaagactttaagtcagggataacagtattaatgttctctgttctgtttccatgttaaatttaatttaacctggatagccacatt

SEQ ID NO: 570980 - DNA, 120 bp, Artificial Sequence
  ENSG00000170802_27 (sequence is synthesized)
aatgaattggtgctgtcaaaatatagtaatttttaaatttgttaataatgaaaacccttaagcatgcaggatgaggtatttgggttttttttttagatcgatcacatctacagaaaatgg

SEQ ID NO: 570981 - DNA, 120 bp, Artificial Sequence
  ENSG00000170802_28 (sequence is synthesized)
ctaaaccaagttaacttttattatagacagtgaataaaacaccaaaaacccaaaaatgctttaaccacagtataaataatagattatacacatcatcttaataactatttttaagttatt

SEQ ID NO: 570982 - DNA, 120 bp, Artificial Sequence
  ENSG00000170802_29 (sequence is synthesized)
taccatagcctctgtatagaccttaggaacagtgtttcagtgatctggcaccagtttattttgttctgctgaaattctgtatcacaaatgtgctacctggtttttgtccattagataatt

SEQ ID NO: 570983 - DNA, 120 bp, Artificial Sequence
  ENSG00000170802_30 (sequence is synthesized)
actctttataaggaaaggaaagagaagcagagttagttccagctctaatagggatcttcaaagttattttgtcttgatgtatgtaacagtaattctttacatcttttgatttttctcttc

SEQ ID NO: 570984 - DNA, 120 bp, Artificial Sequence
  ENSG00000170802_31 (sequence is synthesized)
ctttttattcactcttcccacgaatttaaatgtttaagttatattcatcactagcaaggatgataaacacttgtgcactgaaagctaacagggagaggttacacaatattttacagtttc

SEQ ID NO: 570985 - DNA, 120 bp, Artificial Sequence
  ENSG00000170802_32 (sequence is synthesized)
ttaaacataatttaatgcatcaccttccacttgctaacataccaagtcagttattttcaagggaagaaccttttaaattatggtcctccatttactacttccactgagagtatgctctca

SEQ ID NO: 570986 - DNA, 120 bp, Artificial Sequence
  ENSG00000170802_33 (sequence is synthesized)
ttcctcaggtgttttgagaaacatgactaataaccacacaattaagtagagtcattccaagtcctatggcctggaaattgtattccctataatatacaaattttcctgtaataaagtcaa

SEQ ID NO: 570987 - DNA, 120 bp, Artificial Sequence
  ENSG00000170802_34 (sequence is synthesized)
cttagaaactccaaggaggttacatgttttccaacatatcctaaaaactgtgatataagctaacatataatttgccttacgtcaaaagaatatgttttgttgcagctgattccagtttat

SEQ ID NO: 570988 - DNA, 120 bp, Artificial Sequence
  ENSG00000170802_35 (sequence is synthesized)
aatagatccctagtaaaaagctttgattcaacacaattgttcatcttcacatcccaaacagaatcactgtttcttgaatatatatttttgaagtttttttgtgcaatatattactaaatc

SEQ ID NO: 570989 - DNA, 120 bp, Artificial Sequence
  ENSG00000170802_36 (sequence is synthesized)
agttattattttacttttccaaattcagagaaagaaaacagattacctgaattcatggaaaaggtggatcacctccctttttccaccttcaagcctttcctgtcctcatagccagcatga

SEQ ID NO: 570990 - DNA, 120 bp, Artificial Sequence
  ENSG00000170802_37 (sequence is synthesized)
cttcttttaacttggattcctttgtatatagtaaagtttagtatatatatatttttttctttttgctactttctgaggcattatgtaaagggctcatactagatgttcagttaaatatac

SEQ ID NO: 570991 - DNA, 120 bp, Artificial Sequence
  ENSG00000170802_38 (sequence is synthesized)
tttagcacaaagtcaaactagagaatgtgttaaggagggaatgtatatgtcttggtagaccaggaggcctttgccagcaatttaagcaacagatgtgaatacttcacaaagctgtaaaga

SEQ ID NO: 570992 - DNA, 120 bp, Artificial Sequence
  ENSG00000170802_39 (sequence is synthesized)
ccattgtcttaaatactacaacaacttaacacccttttgtgaagatcacagcatttatctaagaaactgtgaggctttctggtttacatatatcttacaggtgtttttttgtattttttt

SEQ ID NO: 570993 - DNA, 120 bp, Artificial Sequence
  ENSG00000170802_40 (sequence is synthesized)
ttttttttagtttgaaatgtgtaagctttgatttaaaccaagtttacttcagtatgttaatgatgtagtaaaaatatttattgaaaggtgaattcgagtattttaatgttatacctgcca

SEQ ID NO: 570994 - DNA, 120 bp, Artificial Sequence
  ENSG00000170802_41 (sequence is synthesized)
ttttttttcttaaagcatattctttgcatctaactgccagtgccattgtcaaaacttattttttaaatcgttgtacatttcttattaaactaagtgcttaattttaaagtattatgttgc

SEQ ID NO: 570995 - DNA, 120 bp, Artificial Sequence
  ENSG00000170802_42 (sequence is synthesized)
catcatatagtgtataaaaatgtataattgccaattgattgtaactattatttatttttaaatgaaagtgtaagaatgctttctgattcaacaaatttgttatcaaactgtttccttatc

SEQ ID NO: 570996 - DNA, 120 bp, Artificial Sequence
  ENSG00000170802_43 (sequence is synthesized)
ctcttttctgatgtagcataaaaattgtcccggtttgagttataactgccagtagatgaccagtcacaagtgaaccacttctcagttgccaatctttgctcatattaaaaacaacttaca

SEQ ID NO: 570997 - DNA, 120 bp, Artificial Sequence
  ENSG00000170802_44 (sequence is synthesized)
aaacaacttacaaatacttagtttttgtatctaatctctgattattaaaatgtttataaagtttatttttaccaaagagatgcaattcattatgagaaagtattgcataataaattttgt

SEQ ID NO: 570998 - DNA, 120 bp, Artificial Sequence
  ENSG00000170807_0 (sequence is synthesized)
agttgttgaccagcctgccacttgcctccctgcctgcttctggccgccttgaatgcctggtccttcaagctccttctgggtctgacaaagcagggaccatgtctacctttggctaccgaa

SEQ ID NO: 570999 - DNA, 120 bp, Artificial Sequence
  ENSG00000170807_1 (sequence is synthesized)
gaggactcagtaaatacgaatccatcgacgaggatgaactcctcgcctccctgtcagccgaggagctgaaggagctagagagagagttggaagacattgaacctgaccgcaaccttcccg

SEQ ID NO: 571000 - DNA, 120 bp, Artificial Sequence
  ENSG00000170807_2 (sequence is synthesized)
tggggctaaggcaaaagagcctgacagagaaaacccccacagggacattcagcagagaggcactgatggcctattgggaaaaggagtcccaaaaactcttggagaaggagaggctggggg

SEQ ID NO: 571001 - DNA, 120 bp, Artificial Sequence
  ENSG00000170807_3 (sequence is synthesized)
aatgtggaaaggttgcagaagacaaagaggaaagtgaagaagagcttatctttactgaaagtaacagtgaggtttctgaggaagtgtatacagaggaggaggaggaggagtcccaggagg

SEQ ID NO: 571002 - DNA, 120 bp, Artificial Sequence
  ENSG00000170807_4 (sequence is synthesized)
aagaggaggaagaagacagtgacgaagaggaaagaacaattgaaactgcaaaagggattaatggaactgtaaattatgatagtgtcaattctgacaactctaagccaaagatatttaaaa

SEQ ID NO: 571003 - DNA, 120 bp, Artificial Sequence
  ENSG00000170807_5 (sequence is synthesized)
gtcaaatagagaacataaatttgaccaatggcagcaatgggaggaacacagagtccccagctgccattcacccttgtggaaatcctacagtgattgaggacgctttggacaagattaaaa

SEQ ID NO: 571004 - DNA, 120 bp, Artificial Sequence
  ENSG00000170807_6 (sequence is synthesized)
gcaatgaccctgacaccacagaagtcaatttgaacaacattgagaacatcacaacacagacccttacccgctttgctgaagccctcaaggacaacactgtggtgaagacgttcagtctgg

SEQ ID NO: 571005 - DNA, 120 bp, Artificial Sequence
  ENSG00000170807_7 (sequence is synthesized)
ccaacacgcatgccgacgacagtgcagccatggccattgcagagatgctcaaagtcaatgagcacatcaccaacgtaaacgtcgagtccaacttcataacgggaaaggggatcctggcca

SEQ ID NO: 571006 - DNA, 120 bp, Artificial Sequence
  ENSG00000170807_8 (sequence is synthesized)
tcatgagagctctccagcacaacacggtgctcacggagctgcgtttccataaccagaggcacatcatgggcagccaggtggaaatggagattgtcaagctgctgaaggagaacacgacgc

SEQ ID NO: 571007 - DNA, 120 bp, Artificial Sequence
  ENSG00000170807_9 (sequence is synthesized)
gctgggataccattttgaactcccaggaccaagaatgagcatgacgagcattttgacaagaaatatggataaacagaggcaaaaacgtttgcaggagcaaaaacagcaggagggatacga

SEQ ID NO: 571008 - DNA, 120 bp, Artificial Sequence
  ENSG00000170807_10 (sequence is synthesized)
tggaggacccaatcttaggaccaaagtctggcaaagaggaacacctagctcttcaccttatgtatctcccaggcactcaccctggtcatccccaaaactccccaaaaaagtccagactgt

SEQ ID NO: 571009 - DNA, 120 bp, Artificial Sequence
  ENSG00000170807_11 (sequence is synthesized)
gaggagccgtcctctgtctcctgtggccacacctcctcctcctccccctcctcctcctcctccccctccttcttcccaaaggctgccaccacctcctcctcctccccctcctccactccc

SEQ ID NO: 571010 - DNA, 120 bp, Artificial Sequence
  ENSG00000170807_12 (sequence is synthesized)
agagaaaaagctcattaccagaaacattgcagaagtcatcaaacaacaggagagtgcccaacgggcattacaaaatggacaaaaaaagaaaaaagggaaaaaggtcaagaaacagccaaa

SEQ ID NO: 571011 - DNA, 120 bp, Artificial Sequence
  ENSG00000170807_13 (sequence is synthesized)
cagtattctaaaggaaataaaaaattctctgaggtcagtgcaagagaagaaaatggaagacagttcccgaccttctaccccacagagatcagctcatgagaatctcatggaagcaattcg

SEQ ID NO: 571012 - DNA, 120 bp, Artificial Sequence
  ENSG00000170807_14 (sequence is synthesized)
gggaagcagcataaaacagctaaagcgggtggaagttccagaagccctgcgataaaaacatgatctttagaagaggatgcagaactgttcagtggtattacatgaaatgcattgtgagat

SEQ ID NO: 571013 - DNA, 120 bp, Artificial Sequence
  ENSG00000170807_15 (sequence is synthesized)
gtttctaaaataccttcttcaattcaaaatgatccctgactttaaaaataatctcacccattaattccaaagagaatcttaagaaacaatcagcatgtttcttctgtaaatatgaaaata

SEQ ID NO: 571014 - DNA, 120 bp, Artificial Sequence
  ENSG00000170807_16 (sequence is synthesized)
aatttcttttttatgtcgtgagatttgtattggcaagaagcagttaatttaaagatgctcttcctatctgtggatgtgttggtaactccgagttgtaatgagttcatgaaatgtgctgtt

SEQ ID NO: 571015 - DNA, 120 bp, Artificial Sequence
  ENSG00000170807_17 (sequence is synthesized)
atttttgtaatctcaataaatgtggattgaagttttttccctttttttaaagccaaactaatatttttctgtgacttgatacatctgtcagatttttgtaatctcgataaatgtgtattg

SEQ ID NO: 571016 - DNA, 120 bp, Artificial Sequence
  ENSG00000170807_18 (sequence is synthesized)
aagttttttccctttttttaaaaagccaaactaatatttttctgtgagttaatacatctgtcaggtgtgtatgtaacattactggacattaaaaaaaaatattacattctcacccaaaaa

SEQ ID NO: 571017 - DNA, 120 bp, Artificial Sequence
  ENSG00000170807_19 (sequence is synthesized)
gggcacagataaagtaaatgagttgtcctccattgcatggtggtaccaaagtcacctctcacaatacttatcaatactttcaatattttagtatgcgagagcaaacacaccaagtttgaa

SEQ ID NO: 571018 - DNA, 120 bp, Artificial Sequence
  ENSG00000170807_20 (sequence is synthesized)
acattaggagcaggcacacaagtgagcacatttctatttgagaggaacgcctgggccgctttcccagcctctcaatcatataagggcaaggaccattttcatacacgtcccaattccctt

SEQ ID NO: 571019 - DNA, 120 bp, Artificial Sequence
  ENSG00000170807_21 (sequence is synthesized)
aagaagaaaaccagggaatataatctaaattccaaaaggattcaccacttgtcaaaaattttaccacagagttgtgactgattcgatacctaatttataacataaaatttataatgtggt

SEQ ID NO: 571020 - DNA, 120 bp, Artificial Sequence
  ENSG00000170819_0 (sequence is synthesized)
actgggcaccacagaggcagaaggggtgatgagtgagaggcgagtggtagtggacttgcccaccagtgccagctccagcatgcccctccagaggcgcagggcgtccttcagggggccacg

SEQ ID NO: 571021 - DNA, 120 bp, Artificial Sequence
  ENSG00000170819_1 (sequence is synthesized)
gtcatcatcctccctggagagccccccagcctccaggaccaatgccatgagtggccttgtccgagcacccggggtctatgtaggaacagcacccagtgggtgcataggtggcttgggtgc

SEQ ID NO: 571022 - DNA, 120 bp, Artificial Sequence
  ENSG00000170819_2 (sequence is synthesized)
ccgtgtgacccgccgggccctcggcatcagcagtgtcttccttcagggcctgcggagctcaggcctggccaccgtgccggctccaggtttggagagggaccatggtgctgttgaggacct

SEQ ID NO: 571023 - DNA, 120 bp, Artificial Sequence
  ENSG00000170819_3 (sequence is synthesized)
agggggctgcctggtggaatatatggccaaagtgcacgcccttgagcaagtcagtcaggagctggaaacacaactgcggatgcacctggagagcaaagccacacgctcgggaaactgggg

SEQ ID NO: 571024 - DNA, 120 bp, Artificial Sequence
  ENSG00000170819_4 (sequence is synthesized)
tgccctacgggcttcctgggccagcagctgccagcaggtgggtgaggcagtcttggaaaatgcccggctcatgctgcagacagaaactatccaggccggagcagatgactttaaagagag

SEQ ID NO: 571025 - DNA, 120 bp, Artificial Sequence
  ENSG00000170819_5 (sequence is synthesized)
atatgaaaatgagcagccatttcgaaaggcggcagaagaggaaattaactctctgtataaagtcattgatgaggctaatttgactaaaatggacctggagagtcaaatagaaagtctgaa

SEQ ID NO: 571026 - DNA, 120 bp, Artificial Sequence
  ENSG00000170819_6 (sequence is synthesized)
tgagctggaacaaatggatgctcccattggcactggtctggacgacatccttgagacgatcagaattcagtgggagagagatgttgaaaagaaccgggtggaggcaggagccctgctcca

SEQ ID NO: 571027 - DNA, 120 bp, Artificial Sequence
  ENSG00000170819_7 (sequence is synthesized)
agctaagcaacaggcggaggtggcccacatgtcccagacccaggaggagaagctggcagctgccctcagggtggagttacacaacacttcgtgccaagtccagagcctccaggctgagac

SEQ ID NO: 571028 - DNA, 120 bp, Artificial Sequence
  ENSG00000170819_8 (sequence is synthesized)
agaatccttacgtgccctgaaacgaggcctggagaacaccttgcacgatgccaagcactggcatgacatggagctccagaacctgggcgctgtggtcggccggctggaggcggagctcag

SEQ ID NO: 571029 - DNA, 120 bp, Artificial Sequence
  ENSG00000170819_9 (sequence is synthesized)
ggaaatccgagcggaggcggagcagcagcaacaggagcgcgcgcatctgctggcccgcaagtgccagctgcagaaggacgtggcgtcctaccacgccctgctggacagggaggagagcgg

SEQ ID NO: 571030 - DNA, 120 bp, Artificial Sequence
  ENSG00000170819_10 (sequence is synthesized)
ctgatggagaaacttcctctttttcatgaagaaaacacccttcctcaacagctgacccaagaagttgcttgaggagctttctcctgagctccagtccctgctggattccctggttaattc

SEQ ID NO: 571031 - DNA, 120 bp, Artificial Sequence
  ENSG00000170819_11 (sequence is synthesized)
agcttgagctgaaaagcttcctggaagtggagaggatccttctgctttaatctgagtagtctgtagcttgagcaatctcccttgtcctccttcaaataaatgctttgtgcgcagcgtcca

SEQ ID NO: 571032 - DNA, 120 bp, Artificial Sequence
  ENSG00000170819_12 (sequence is synthesized)
gacagaactgaagaggacctccaacagttatggggtctagttccctgcgagacttcagcaattctaaaccacctcacacatattactgtctgatccaagatttaggctgcttcaagttga

SEQ ID NO: 571033 - DNA, 120 bp, Artificial Sequence
  ENSG00000170819_13 (sequence is synthesized)
caagtcagtcaggagctggaaacacaactgcggatgcacctggagagcaaagccacacgctcgggaaactggggtgccctacgggcttcctgggccagcagctgccagcagctagaagac

SEQ ID NO: 571034 - DNA, 120 bp, Artificial Sequence
  ENSG00000170819_14 (sequence is synthesized)
tggtgcaggaatgtaaatgaaatgatgtgtgtaaatcgcctggcacataatcaatgctttaagtttgtggaattgaataaacttgaagacatacattaagtgagcagtaacacaaacagc

SEQ ID NO: 571035 - DNA, 120 bp, Artificial Sequence
  ENSG00000170819_15 (sequence is synthesized)
tgcttacatgagcgcgttgatcaaccgacatacgctgtgggagtttccagaaagagcagggtattgattagttctcagcaagggtgccccaggaagtggggactgaatgtgggtcccaag

SEQ ID NO: 571036 - DNA, 120 bp, Artificial Sequence
  ENSG00000170820_0 (sequence is synthesized)
tgaccctaccagttctcaagtcagatctcttctcataagggcactgtgtggagcttctgagatctgtggaggtttttctctgcaaatgcaggaagaaatcaggtggatggatgcataatt

SEQ ID NO: 571037 - DNA, 120 bp, Artificial Sequence
  ENSG00000170820_1 (sequence is synthesized)
atggccctgctcctggtctctttgctggcattcctgagcttgggctcaggatgtcatcatcggatctgtcactgctctaacagggtttttctctgccaagagagcaaggtgacagagatt

SEQ ID NO: 571038 - DNA, 120 bp, Artificial Sequence
  ENSG00000170820_2 (sequence is synthesized)
ccttctgacctcccgaggaatgccattgaactgaggtttgtcctcaccaagcttcgagtcatccaaaaaggtgcattttcaggatttggggacctggagaaaatagagatctctcagaat

SEQ ID NO: 571039 - DNA, 120 bp, Artificial Sequence
  ENSG00000170820_3 (sequence is synthesized)
gatgtcttggaggtgatagaggcagatgtgttctccaaccttcccaaattacatgaaattagaattgaaaaggccaacaacctgctctacatcaaccctgaggccttccagaaccttccc

SEQ ID NO: 571040 - DNA, 120 bp, Artificial Sequence
  ENSG00000170820_4 (sequence is synthesized)
aaccttcaatatctgttaatatccaacacaggtattaagcaccttccagatgttcacaagattcattctctccaaaaagttttacttgacattcaagataacataaacatccacacaatt

SEQ ID NO: 571041 - DNA, 120 bp, Artificial Sequence
  ENSG00000170820_5 (sequence is synthesized)
gaaagaaattctttcgtggggctgagctttgaaagtgtgattctatggctgaataagaatgggattcaagaaatacacaactgtgcattcaatggaacccaactagatgagctgaatcta

SEQ ID NO: 571042 - DNA, 120 bp, Artificial Sequence
  ENSG00000170820_6 (sequence is synthesized)
agcgataataataatttagaagaattgcctaatgatgttttccacggagcctctggaccagtcattctagatatttcaagaacaaggatccattccctgcctagctatggcttagaaaat

SEQ ID NO: 571043 - DNA, 120 bp, Artificial Sequence
  ENSG00000170820_7 (sequence is synthesized)
cttaagaagctgagggccaggtcgacttacaacttaaaaaagctgcctactctggaaaagcttgtcgccctcatggaagccagcctcacctatcccagccattgctgtgcctttgcaaac

SEQ ID NO: 571044 - DNA, 120 bp, Artificial Sequence
  ENSG00000170820_8 (sequence is synthesized)
tggagacggcaaatctctgagcttcatccaatttgcaacaaatctattttaaggcaagaagttgattatatgactcaggctaggggtcagagatcctctctggcagaagacaatgagtcc

SEQ ID NO: 571045 - DNA, 120 bp, Artificial Sequence
  ENSG00000170820_9 (sequence is synthesized)
agctacagcagaggatttgacatgacgtacactgagtttgactatgacttatgcaatgaagtggttgacgtgacctgctcccctaagccagatgcattcaacccatgtgaagatatcatg

SEQ ID NO: 571046 - DNA, 120 bp, Artificial Sequence
  ENSG00000170820_10 (sequence is synthesized)
gggtacaacatcctcagagtcctgatatggtttatcagcatcctggccatcactgggaacatcatagtgctagtgatcctaactaccagccaatataaactcacagtccccaggttcctt

SEQ ID NO: 571047 - DNA, 120 bp, Artificial Sequence
  ENSG00000170820_11 (sequence is synthesized)
ctctgcattggaatctacctgctgctcattgcatcagttgatatccataccaagagccaatatcacaactatgccattgactggcaaactggggcaggctgtgatgctgctggctttttc

SEQ ID NO: 571048 - DNA, 120 bp, Artificial Sequence
  ENSG00000170820_12 (sequence is synthesized)
actgtctttgccagtgagctgtcagtctacactctgacagctatcaccttggaaagatggcataccatcacgcatgccatgcagctggactgcaaggtgcagctccgccatgctgccagt

SEQ ID NO: 571049 - DNA, 120 bp, Artificial Sequence
  ENSG00000170820_13 (sequence is synthesized)
gtcatggtgatgggctggatttttgcttttgcagctgccctctttcccatctttggcatcagcagctacatgaaggtgagcatctgcctgcccatggatattgacagccctttgtcacag

SEQ ID NO: 571050 - DNA, 120 bp, Artificial Sequence
  ENSG00000170820_14 (sequence is synthesized)
ctgtatgtcatgtccctccttgtgctcaatgtcctggcctttgtggtcatctgtggctgctatatccacatctacctcacagtgcggaaccccaacatcgtgtcctcctctagtgacacc

SEQ ID NO: 571051 - DNA, 120 bp, Artificial Sequence
  ENSG00000170820_15 (sequence is synthesized)
aggatcgccaagcgcatggccatgctcatcttcactgacttcctctgcatggcacccatttctttctttgccatttctgcctccctcaaggtgcccctcatcactgtgtccaaagcaaag

SEQ ID NO: 571052 - DNA, 120 bp, Artificial Sequence
  ENSG00000170820_16 (sequence is synthesized)
attctgctggttctgtttcaccccatcaactcctgtgccaaccccttcctctatgccatctttaccaaaaactttcgcagagatttcttcattctgctgagcaagtgtggctgctatgaa

SEQ ID NO: 571053 - DNA, 120 bp, Artificial Sequence
  ENSG00000170820_17 (sequence is synthesized)
atgcaagcccaaatttataggacagaaacttcatccactgtccacaacacccatccaaggaatggccactgctcttcagctcccagagtcaccagtggttccacttacatacttgtccct

SEQ ID NO: 571054 - DNA, 120 bp, Artificial Sequence
  ENSG00000170820_18 (sequence is synthesized)
ctaagtcatttagcccaaaactaaaacacaatgtgaaaatgtatctgagtattgaatgataattcagtcttgcctttgaagggtatgtcacaaagagctgacagtgcttctacacatttc

SEQ ID NO: 571055 - DNA, 120 bp, Artificial Sequence
  ENSG00000170820_19 (sequence is synthesized)
atctaatttaatattcctggcatacctttaaggtaaattggtcaggaactattaattccatgtgatacattaggaagctgaattattagtaacaacaataataattaaagaatgcaatac

SEQ ID NO: 571056 - DNA, 120 bp, Artificial Sequence
  ENSG00000170820_20 (sequence is synthesized)
tgtattacatattttatccttatatatgttatttttgcacgttatgttcaaagtgcttttgttcagatatctcaagtgatccctgttaaataagcaggacagggattattcttggagttt

SEQ ID NO: 571057 - DNA, 120 bp, Artificial Sequence
  ENSG00000170820_21 (sequence is synthesized)
tacaaatgaggaaaccacgactcaaagagttaagtgacttgttcaaaattgtttagtttgtaagaggcagagccaggattaggtattccgactcccagagaatttcccagagaagcacca

SEQ ID NO: 571058 - DNA, 120 bp, Artificial Sequence
  ENSG00000170820_22 (sequence is synthesized)
tggtattcattcattcattcattcaacaaatattaattgaacacccatctgaagcctttgtaatgcgtcagtgtggataggctgaaatacatttcccagatttcccttcctcatgtgttt

SEQ ID NO: 571059 - DNA, 120 bp, Artificial Sequence
  ENSG00000170820_23 (sequence is synthesized)
agaggcatccccagagacactttcattcataaactatcacatatggctaatgcaaagcactcctgccaaggacaaacccaagaagaaaaccagctcttcacatagatatccctagcccat

SEQ ID NO: 571060 - DNA, 120 bp, Artificial Sequence
  ENSG00000170820_24 (sequence is synthesized)
agttaaatatgagagttaaatacttctagttttgaaaatgtgagatcgaaaaggcaagaaaccaggctttcctactgtctcacataatttcttacacaaaatcattttacagagagaaac

SEQ ID NO: 571061 - DNA, 120 bp, Artificial Sequence
  ENSG00000170832_0 (sequence is synthesized)
cgtgatccggcatggaggcggtggcggcgaccgggaggagccgccggggcagaagccgcacttgttagtgtggggggaggtgggggcgggggacgccgacaccgtcaccgtcacccaggg

SEQ ID NO: 571062 - DNA, 120 bp, Artificial Sequence
  ENSG00000170832_1 (sequence is synthesized)
acgccgaggagaaggcgggaggggggtgggggcgagatcaggctccgaccccccgccgaggggatgaggggagcatgggtgccaaggagtcacggatcggattcctcagctacgaggagg

SEQ ID NO: 571063 - DNA, 120 bp, Artificial Sequence
  ENSG00000170832_2 (sequence is synthesized)
cgctgaggagagttacagatgtagagctaaaacgactgaaggatgctttcaagaggacctgtggactctcatattacatgggccagcactgcttcatccgggaagtgcttggggatggag

SEQ ID NO: 571064 - DNA, 120 bp, Artificial Sequence
  ENSG00000170832_3 (sequence is synthesized)
tgcctccaaaggttgctgaggtgatttactgttcttttggtggaacatccaaagggctgcacttcaataatttaatagttggacttgtcctccttacaagaggcaaagatgaagagaaag

SEQ ID NO: 571065 - DNA, 120 bp, Artificial Sequence
  ENSG00000170832_4 (sequence is synthesized)
caaaatacatttttagtcttttttcaagtgaatctgggaactatgttatacgggaagaaatggaaagaatgctccacgtggtggatggtaaagtcccagatacactcaggaagtgtttct

SEQ ID NO: 571066 - DNA, 120 bp, Artificial Sequence
  ENSG00000170832_5 (sequence is synthesized)
cagagggtgaaaaggtaaactatgaaaagtttagaaattggctttttctaaacaaagatgcttttactttctctcgatggcttctatctggaggtgtgtatgttaccctcactgatgata

SEQ ID NO: 571067 - DNA, 120 bp, Artificial Sequence
  ENSG00000170832_6 (sequence is synthesized)
gtgatactcctactttctaccaaactctggctggagtcacacatttggaggaatcagacatcattgatcttgagaaacgctattggttattgaaggctcaatcccggactggacgatttg

SEQ ID NO: 571068 - DNA, 120 bp, Artificial Sequence
  ENSG00000170832_7 (sequence is synthesized)
atttagagacatttggcccattggtttcaccacctattcgtccatctctaagtgaaggtttgtttaatgcttttgatgaaaatcgtgacaatcacatagattttaaggagatatcctgtg

SEQ ID NO: 571069 - DNA, 120 bp, Artificial Sequence
  ENSG00000170832_8 (sequence is synthesized)
ggttatcagcctgttgcaggggacccctggctgaaagacaaaaattttgcttcaaggtatttgatgttgaccgtgatggagttctctccagggttgaactgagagacatggtggttgcac

SEQ ID NO: 571070 - DNA, 120 bp, Artificial Sequence
  ENSG00000170832_9 (sequence is synthesized)
ttttagaagtctggaaggacaaccgcactgatgatattcctgaattacatatggatctctctgatattgtagaaggcatactgaatgcacatgacaccacaaagatgggtcatcttactc

SEQ ID NO: 571071 - DNA, 120 bp, Artificial Sequence
  ENSG00000170832_10 (sequence is synthesized)
tggaagactatcagatctggagtgtgaaaaatgttcttgccaatgagtttttgaacctccttttccaggtgtgtcacatagttctggggttaagaccagctactccggaagaagaaggac

SEQ ID NO: 571072 - DNA, 120 bp, Artificial Sequence
  ENSG00000170832_11 (sequence is synthesized)
aaattattagaggatggttagaacgagagagcaggtatggtctgcaagcaggacacaactggtttatcatctccatgcagtggtggcaacagtggaaagaatatgtcaaatacgatgcca

SEQ ID NO: 571073 - DNA, 120 bp, Artificial Sequence
  ENSG00000170832_12 (sequence is synthesized)
accctgtggtaattgagccatcatctgttttgaatggaggaaaatactcatttggaactgcagcccatcctatggagcaggtcgaagatagaattggaagcagcctcagttacgtgaata

SEQ ID NO: 571074 - DNA, 120 bp, Artificial Sequence
  ENSG00000170832_13 (sequence is synthesized)
ctacagaagagaaattttcagacaacatttctactgcatctgaagcctcagaaactgctggcagcggctttctgtattctgccacaccaggggcagatgtttgctttgctcgacaacata

SEQ ID NO: 571075 - DNA, 120 bp, Artificial Sequence
  ENSG00000170832_14 (sequence is synthesized)
acacttctgacaataacaaccagtgtttgctgggagccaatgggaatattttgttgcaccttaaccctcagaaaccaggggctattgataatcagccattagtaactcaagaaccagtaa

SEQ ID NO: 571076 - DNA, 120 bp, Artificial Sequence
  ENSG00000170832_15 (sequence is synthesized)
aggctacatcattaacactagaaggaggacgattaaaacgaactccacagctgattcatggaagagactatgaaatggtcccagaacctgtgtggagagcactttatcactggtatggag

SEQ ID NO: 571077 - DNA, 120 bp, Artificial Sequence
  ENSG00000170832_16 (sequence is synthesized)
caaacctggccttacctagaccagttatcaagaacagcaagacagacatcccagagctggaattatttccccgctatcttctcttcctgagacagcagcctgccactcggacacagcagt

SEQ ID NO: 571078 - DNA, 120 bp, Artificial Sequence
  ENSG00000170832_17 (sequence is synthesized)
ctaacatctgggtgaatatgggaaatgtaccttctccgaatgcacctttaaagcgggtattagcctatacaggctgttttagtcgaatgcagaccatcaaggaaattcacgaatatctat

SEQ ID NO: 571079 - DNA, 120 bp, Artificial Sequence
  ENSG00000170832_18 (sequence is synthesized)
ctcaaaggctgcgcattaaagaggaagatatgcgcctgtggctatacaacagtgagaactaccttactcttctggatgatgaggatcataaattggaatatttgaaaatccaggatgaac

SEQ ID NO: 571080 - DNA, 120 bp, Artificial Sequence
  ENSG00000170832_19 (sequence is synthesized)
aacacctggtaattgaagttcgcaacaaagatatgagttggcctgaggagatgtcttttatagcaaatagtagtaaaatagatagacacaaggttcccacagaaaagggagccacaggtc

SEQ ID NO: 571081 - DNA, 120 bp, Artificial Sequence
  ENSG00000170832_20 (sequence is synthesized)
taagcaatctgggaaacacatgcttcatgaactcaagcatccagtgtgttagtaacacacagccactgacacagtattttatctcagggagacatctttatgaactcaacaggacaaatc

SEQ ID NO: 571082 - DNA, 120 bp, Artificial Sequence
  ENSG00000170832_21 (sequence is synthesized)
ccattggtatgaaggggcatatggctaaatgctatggtgatttagtgcaggaactttggagtggaactcagaagaatgttgccccattaaagcttcggtggaccatagcaaaatatgctc

SEQ ID NO: 571083 - DNA, 120 bp, Artificial Sequence
  ENSG00000170832_22 (sequence is synthesized)
ccaggtttaatgggtttcagcaacaggactcccaagaacttctggcttttctcttggatggtcttcatgaagatcttaatcgagtccatgaaaagccatatgtggaactgaaggacagtg

SEQ ID NO: 571084 - DNA, 120 bp, Artificial Sequence
  ENSG00000170832_23 (sequence is synthesized)
atgggcgaccagactgggaagtagctgcagaggcctgggacaaccatctaagaagaaatagatcaattgttgtggatttgttccatgggcagctaagatctcaagtaaaatgcaagacat

SEQ ID NO: 571085 - DNA, 120 bp, Artificial Sequence
  ENSG00000170832_24 (sequence is synthesized)
gtgggcatataagtgtccgatttgaccctttcaattttttgtctttgccactaccaatggacagttatatgcacttagaaataacagtgattaagttagatggtactacccctgtacggt

SEQ ID NO: 571086 - DNA, 120 bp, Artificial Sequence
  ENSG00000170832_25 (sequence is synthesized)
atggactaagactgaatatggatgaaaagtacacaggtttaaaaaaacagctgagtgatctctgtggacttaattcagaacaaatccttctagcagaagtacatggttccaacataaaga

SEQ ID NO: 571087 - DNA, 120 bp, Artificial Sequence
  ENSG00000170832_26 (sequence is synthesized)
actttcctcaggacaaccaaaaagtacgactctcagtgagtggatttttgtgtgcatttgaaattcctgtccctgtgtctccaatttcagcttctagtccaacacagacagatttctcct

SEQ ID NO: 571088 - DNA, 120 bp, Artificial Sequence
  ENSG00000170832_27 (sequence is synthesized)
cttcgccatctacaaatgaaatgttcaccctaactaccaatggggacctaccccgaccaatattcatccccaatggaatgccaaacactgttgtgccatgtggaactgagaagaacttca

SEQ ID NO: 571089 - DNA, 120 bp, Artificial Sequence
  ENSG00000170832_28 (sequence is synthesized)
gtatttcctgtcatctcagaagaatcgccccagcctctttggaatgccattgattgttccatgtactgtgcatacccggaagaaagacctatatgatgcggtttggattcaagtatcccg

SEQ ID NO: 571090 - DNA, 120 bp, Artificial Sequence
  ENSG00000170832_29 (sequence is synthesized)
gttagcgagcccactcccacctcaggaagctagtaatcatgcccaggattgtgacgacagtatgggctatcaatatccattcactctacgagttgtgcagaaagatgggaactcctgtgc

SEQ ID NO: 571091 - DNA, 120 bp, Artificial Sequence
  ENSG00000170832_30 (sequence is synthesized)
ttggtgcccatggtatagattttgcagaggctgtaaaattgattgtggggaagacagagctttcattggaaatgcctatatcgctgtggattgggatcccacagcccttcaccttcgcta

SEQ ID NO: 571092 - DNA, 120 bp, Artificial Sequence
  ENSG00000170832_31 (sequence is synthesized)
tcaaacatcccaggaaagggttgtagatgagcatgagagtgtggagcagagtcggcgagcgcaagccgagcccatcaacctggacagctgtctccgtgctttcaccagtgaggaagagct

SEQ ID NO: 571093 - DNA, 120 bp, Artificial Sequence
  ENSG00000170832_32 (sequence is synthesized)
aggggaaaatgagatgtactactgttccaagtgtaagacccactgcttagcaacaaagaagctggatctctggaggcttccacccatcctgattattcaccttaagcgatttcaatttgt

SEQ ID NO: 571094 - DNA, 120 bp, Artificial Sequence
  ENSG00000170832_33 (sequence is synthesized)
aaatggtcggtggataaaatcacagaaaattgtcaaatttcctcgggaaagttttgatccaagtgcttttttggtaccaagagacccggctctctgccagcataaaccactcacacccca

SEQ ID NO: 571095 - DNA, 120 bp, Artificial Sequence
  ENSG00000170832_34 (sequence is synthesized)
gggggatgagctctctgagcccaggattctggcaagggaggtgaagaaagtggatgcgcagagttcggctggggaagaggacgtgctcctgagcaaaagcccatcctcactcagcgctaa

SEQ ID NO: 571096 - DNA, 120 bp, Artificial Sequence
  ENSG00000170832_35 (sequence is synthesized)
catcatcagcagcccgaaaggttctccttcttcatcaagaaaaagtggaaccagctgtccctccagcaaaaacagcagccctaatagcagcccacggactttggggaggagcaaagggag

SEQ ID NO: 571097 - DNA, 120 bp, Artificial Sequence
  ENSG00000170832_36 (sequence is synthesized)
gctccggctgccccagattggcagcaaaaataaactgtcaagtagtaaagagaacttggatgccagcaaagaaaatggggctgggcagatatgtgagctggctgacgccttgagtcgagg

SEQ ID NO: 571098 - DNA, 120 bp, Artificial Sequence
  ENSG00000170832_37 (sequence is synthesized)
gcatgtgctggggggcagccaaccagagttggtcactcctcaggaccatgaggtagctttggccaatggattcctttatgagcatgaagcatgtggcaatggctacagcaatggtcagct

SEQ ID NO: 571099 - DNA, 120 bp, Artificial Sequence
  ENSG00000170832_38 (sequence is synthesized)
tggaaaccacagtgaagaagacagcactgatgaccaaagagaagatactcgtattaagcctatttataatctatatgcaatttcgtgccattcaggaattctgggtgggggccattacgt

SEQ ID NO: 571100 - DNA, 120 bp, Artificial Sequence
  ENSG00000170832_39 (sequence is synthesized)
cacttatgccaaaaacccaaactgcaagtggtactgttacaatgacagcagctgtaaggaacttcacccggatgaaattgacaccgactctgcctacattcttttctatgagcagcaggg

SEQ ID NO: 571101 - DNA, 120 bp, Artificial Sequence
  ENSG00000170832_40 (sequence is synthesized)
gatagactatgcacaatttctgccaaagactgatggcaaaaagatggcagacacaagcagtatggatgaagactttgagtctgattacaaaaagtactgtgtgttacagtaaagctacca

SEQ ID NO: 571102 - DNA, 120 bp, Artificial Sequence
  ENSG00000170832_41 (sequence is synthesized)
ctctggctgctagacagcttggcggtgagggagatgactccttgtagctgacatttggcaaaagcgtcactgaaaggcaagctaaatgtagttattttatcctgtggccctgaagcacaa

SEQ ID NO: 571103 - DNA, 120 bp, Artificial Sequence
  ENSG00000170832_42 (sequence is synthesized)
aataaaaattctaattaaaatagttaactttaagagtagtaatcattttattttgaagtctcatacaagctctccgatagagaactttcaggcagatcccaccattagcctgtaaacaaa

SEQ ID NO: 571104 - DNA, 120 bp, Artificial Sequence
  ENSG00000170832_43 (sequence is synthesized)
aggtttggcaccagccacctgggaccaaataagaattcaattgtgcttgtccagatatgaacaaatatgtagtgagtatagagtttaccataatcataacaaatattaaagatttccttg

SEQ ID NO: 571105 - DNA, 120 bp, Artificial Sequence
  ENSG00000170832_44 (sequence is synthesized)
gagtcagagtaaaaaacaaacaattataatgttgtctagggacgacatgatatgctacctcctttttcctgaagttttattccattatattgacaagatggagaaagcaagatcacgaag

SEQ ID NO: 571106 - DNA, 120 bp, Artificial Sequence
  ENSG00000170832_45 (sequence is synthesized)
gtgtgcaaatgattcttaaggcatggacgaggatttttcaatttattttttaaactgtttccataccctttctttgtctttcttgctttttgtttttgccgttgtatttatgtttgagac

SEQ ID NO: 571107 - DNA, 120 bp, Artificial Sequence
  ENSG00000170832_46 (sequence is synthesized)
acaaccagtcattggtggcaggggcatatagtggtcagtctgaaagggaggctctcttaagagctgtgtgccttccacccagagccttgtgggagacccagtagaaagaaacagcatcct

SEQ ID NO: 571108 - DNA, 120 bp, Artificial Sequence
  ENSG00000170832_47 (sequence is synthesized)
gggaaatccagctaccatggccctcccagtggaggcatcttacatttaggatacttcaagtatcctcagaaatgtattctgcacccccggccccacccatgctgagggaaggggagcagt

SEQ ID NO: 571109 - DNA, 120 bp, Artificial Sequence
  ENSG00000170832_48 (sequence is synthesized)
tgccaatatttgcaccatcttcacatgcacctgttgcaacaagagcttctgggaaggtaagtggcattggagctagatcacgtttcacaattagtggttgttcttttctgtgtttgtctt

SEQ ID NO: 571110 - DNA, 120 bp, Artificial Sequence
  ENSG00000170832_49 (sequence is synthesized)
gcactttaaaaaagagagaacacatgcaaatgaacttgcttgtgtgtatttgatggctctaagggctataaattacaaacaaaacacatcccagacattaggagttcataagtgtattta

SEQ ID NO: 571111 - DNA, 120 bp, Artificial Sequence
  ENSG00000170832_50 (sequence is synthesized)
atgaaattggtggttttaggaagtcaactttagttttgctttgtttgcatgtccactaatttttttattttgatatttgtcttttttttaaattttacagtagtcatcgaaagttatgtt

SEQ ID NO: 571112 - DNA, 120 bp, Artificial Sequence
  ENSG00000170832_51 (sequence is synthesized)
tctttgcttacttcatttttttctctaatcaagactggaacaaaagtataaatattatttatttcaggtagcatttttttcgtgtagttttttaatatatacttgaaggaaatgtttcac

SEQ ID NO: 571113 - DNA, 120 bp, Artificial Sequence
  ENSG00000170832_52 (sequence is synthesized)
cttatttttggtctttgtttattcatttagaccctgcaagttgattctcattaattgtcagattccactaccctttcttcctcatagatagtaattaccaatgtaactaagtatttgtgt

SEQ ID NO: 571114 - DNA, 120 bp, Artificial Sequence
  ENSG00000170832_53 (sequence is synthesized)
tctgatatctgaggccagtaactattaatatctagttctcagagcatttggaaaggttatcttaaatggctacctaaattgaaatccttttcagaaaaaatataattgcaagtaggtagg

SEQ ID NO: 571115 - DNA, 120 bp, Artificial Sequence
  ENSG00000170832_54 (sequence is synthesized)
actggcctaaattgtctaatgtaataaagtcagacaaaatgcatactttatagtttcaagattttcagtatataaaatctgtccattcccattaaaaagtggaagattttaaataatttc

SEQ ID NO: 571116 - DNA, 120 bp, Artificial Sequence
  ENSG00000170832_55 (sequence is synthesized)
tttacagatgttttatttaagcaggtagctcaatctactaatgttgtttgatctgtgtttgttatactggttgtaattaatttttttaattcatgaactagcagaaaatttattaaatta

SEQ ID NO: 571117 - DNA, 120 bp, Artificial Sequence
  ENSG00000170832_56 (sequence is synthesized)
actattaactacattcaccttgtaaattactgtataaaacttgttgacaatgcactgactttagaaagatgttaatgtacataaatagagtgtaaataaaatagtgttgatgtaccgaaa

SEQ ID NO: 571118 - DNA, 120 bp, Artificial Sequence
  ENSG00000170832_57 (sequence is synthesized)
ccacaatgcccagctaatttttagatttttcttttacagagacagggtctcactcttttgaccaggctggtttcgaactcctggactcaagcaattaccccacctcggcctcctaaagtg

SEQ ID NO: 571119 - DNA, 120 bp, Artificial Sequence
  ENSG00000170832_58 (sequence is synthesized)
acaggcatgagccaccatacccagccagttgtattttctttttccttatatagagtaaaataagggtgagtgaccaagaggttgatgcatacctagatcaccactttaaatgccttccca

SEQ ID NO: 571120 - DNA, 120 bp, Artificial Sequence
  ENSG00000170832_59 (sequence is synthesized)
aaagccacggcaaccgccaacacagaacccagccccccaccccgctcccatttcctcattcttaggggtggctgcagctggcccctccagctgggatctggactagggaacggagcaaga

SEQ ID NO: 571121 - DNA, 120 bp, Artificial Sequence
  ENSG00000170832_60 (sequence is synthesized)
tcgtctatgtacagaataatttatctcaaaattctgatgacaggtagaggatttgaattgacattttcccaaagaagatatacaagtggtaaataaacacctaaaaaatgtgcaacataa

SEQ ID NO: 571122 - DNA, 120 bp, Artificial Sequence
  ENSG00000170832_61 (sequence is synthesized)
taaccaggagcagctttcatttcctcccatccagcaagtctgcatgggctgtcagtctgattcatgatttgaaggagagcaggaataaatgcctgtccaaggataataaaataaatacat

SEQ ID NO: 571123 - DNA, 120 bp, Artificial Sequence
  ENSG00000170832_62 (sequence is synthesized)
accatcatggtggtaaacagtgagggaaaactgacatcaccagcttggggataaaatactggttaggggaagcagcagactaacaacagaccagtcaaatttttaacagggaacaggatc

SEQ ID NO: 571124 - DNA, 120 bp, Artificial Sequence
  ENSG00000170832_63 (sequence is synthesized)
accatagtgagccttagcaagctttctcatgtccccagtgatctgtagactgcttgtacaaggctatacacaaactcaggagaaaccaaagtgggctttagcactttattcttccctagt

SEQ ID NO: 571125 - DNA, 120 bp, Artificial Sequence
  ENSG00000170832_64 (sequence is synthesized)
tgaaggtgaagccttgcatgtgcagaaagtaaaagccagggtaggcttgtaacctgcccaaactttaaatgcattccccaaaccatgtacagatccatcaggaaaagggtgtgaatgtta

SEQ ID NO: 571126 - DNA, 120 bp, Artificial Sequence
  ENSG00000170832_65 (sequence is synthesized)
ctggctaaacacaaccagtaaactgctgagagcacaacctctcagcagtcattggctgaccagtaagttaggctcaccccaagaaggccaagcttaaaaataaaaacagataataaaaaa

SEQ ID NO: 571127 - DNA, 120 bp, Artificial Sequence
  ENSG00000170832_66 (sequence is synthesized)
agcagatgctggtgccatgcttatacaggctgcagaaccgtgagccaaaaaaacctcttttctttataaaaattacccagcctcaggttaaaattctgactctgctgcttcattgatgta

SEQ ID NO: 571128 - DNA, 120 bp, Artificial Sequence
  ENSG00000170832_67 (sequence is synthesized)
aaggcttaatactggtgatttactgttcttttggtggaacatccaaagggctgcacttcaataatttaatagttggacttgtcctccttacaagaggcaaagatgaagagaaagcaaaat

SEQ ID NO: 571129 - DNA, 120 bp, Artificial Sequence
  ENSG00000170832_68 (sequence is synthesized)
ctaacatctgggtgaatatgggtatgatgagcctgagaatgtttcctcagcatttaccgagaggtaacttaagaatgcagcaagaataccatgcatttccttaaaaaaaaaaaaaaaaaa

SEQ ID NO: 571130 - DNA, 120 bp, Artificial Sequence
  ENSG00000170832_69 (sequence is synthesized)
ccaagagagatactaaaacataacgaaaactgaacaacaacaacaaaaaatgccaagttttccaacccagaaacttaagagttttctaccagaataaagggataatactgatggtggtat

SEQ ID NO: 571131 - DNA, 120 bp, Artificial Sequence
  ENSG00000170832_70 (sequence is synthesized)
ttttgaagaagggaaatacgtaaggctgcctatatggagtgttctagctgtgtcactatagtataggtttccaccaaagactgctgctgttaccaaagactgctgctattacccttgaca

SEQ ID NO: 571132 - DNA, 120 bp, Artificial Sequence
  ENSG00000170832_71 (sequence is synthesized)
gcgaagactttggcagagcgcacagcaggccaggagaggctggcgccccttctcccaagaatactgtcagatgctgatcctgacaccacctggaattccttctcccggaccttccttcgt

SEQ ID NO: 571133 - DNA, 120 bp, Artificial Sequence
  ENSG00000170832_72 (sequence is synthesized)
gaccgccgtcggcccgggcctcccctgccacccagcggccacctcgggcacaggagaggggcatagcggcttcaagtaggggtagcccggaggcccggagctttggaggagcaccctttg

SEQ ID NO: 571134 - DNA, 120 bp, Artificial Sequence
  ENSG00000170832_73 (sequence is synthesized)
agtccagaaactttttaacttgtcctctatgccagcatgttcagcaaacgtcttgttgttattgttgtcgttgttgttgttgtaaggggaggaataaaccttccacttatccgcctccaa

SEQ ID NO: 571135 - DNA, 120 bp, Artificial Sequence
  ENSG00000170835_0 (sequence is synthesized)
ggccacccagaggctgatgctcaccatggggcgcctgcaactggttgtgttgggcctcacctgctgctgggcagtggcgagtgccgcgaagctgggcgccgtgtacacagaaggtgggtt

SEQ ID NO: 571136 - DNA, 120 bp, Artificial Sequence
  ENSG00000170835_1 (sequence is synthesized)
cgtggaaggcgtcaataagaagctcggcctcctgggtgactctgtggacatcttcaagggcatccccttcgcagctcccaccaaggccctggaaaatcctcagccacatcctggctggca

SEQ ID NO: 571137 - DNA, 120 bp, Artificial Sequence
  ENSG00000170835_2 (sequence is synthesized)
agggaccctgaaggccaagaacttcaagaagagatgcctgcaggccaccatcacccaggacagcacctacggggatgaagactgcctgtacctcaacatttgggtgccccagggcaggaa

SEQ ID NO: 571138 - DNA, 120 bp, Artificial Sequence
  ENSG00000170835_3 (sequence is synthesized)
gcaagtctcccgggacctgcccgttatgatctggatctatggaggcgccttcctcatggggtccggccatggggccaacttcctcaacaactacctgtatgacggcgaggagatcgccac

SEQ ID NO: 571139 - DNA, 120 bp, Artificial Sequence
  ENSG00000170835_4 (sequence is synthesized)
acgcggaaacgtcatcgtggtcaccttcaactaccgtgtcggcccccttgggttcctcagcactggggacgccaatctgccaggtaactatggccttcgggatcagcacatggccattgc

SEQ ID NO: 571140 - DNA, 120 bp, Artificial Sequence
  ENSG00000170835_5 (sequence is synthesized)
ttgggtgaagaggaatatcgcggccttcgggggggaccccaacaacatcacgctcttcggggagtctgctggaggtgccagcgtctctctgcagaccctctccccctacaacaagggcct

SEQ ID NO: 571141 - DNA, 120 bp, Artificial Sequence
  ENSG00000170835_6 (sequence is synthesized)
catccggcgagccatcagccagagcggcgtggccctgagtccctgggtcatccagaaaaacccactcttctgggccaaaaaggtggctgagaaggtgggttgccctgtgggtgatgccgc

SEQ ID NO: 571142 - DNA, 120 bp, Artificial Sequence
  ENSG00000170835_7 (sequence is synthesized)
caggatggcccagtgtctgaaggttactgatccccgagccctgacgctggcctataaggtgccgctggcaggcctggagtaccccatgctgcactatgtgggcttcgtccctgtcattga

SEQ ID NO: 571143 - DNA, 120 bp, Artificial Sequence
  ENSG00000170835_8 (sequence is synthesized)
tggagacttcatccccgctgacccgatcaacctgtacgccaacgccgccgacatcgactatatagcaggcaccaacaacatggacggccacatcttcgccagcatcgacatgcctgccat

SEQ ID NO: 571144 - DNA, 120 bp, Artificial Sequence
  ENSG00000170835_9 (sequence is synthesized)
acaccgagtcctgggcccaggacccatcccaggagaataagaagaagactgtggtggactttgagaccgatgtcctcttcctggtgcccaccgagattgccctagcccagcacagagcca

SEQ ID NO: 571145 - DNA, 120 bp, Artificial Sequence
  ENSG00000170835_10 (sequence is synthesized)
atgccaagagtgccaagacctacgcctacctgttttcccatccctctcggatgcccgtctaccccaaatgggtgggggccgaccatgcagatgacattcagtacgttttcgggaagccct

SEQ ID NO: 571146 - DNA, 120 bp, Artificial Sequence
  ENSG00000170835_11 (sequence is synthesized)
tcgccacccccacgggctaccggccccaagacaggacagtctctaaggccatgatcgcctactggaccaactttgccaaaacaggggaccccaacatgggcgactcggctgtgcccacac

SEQ ID NO: 571147 - DNA, 120 bp, Artificial Sequence
  ENSG00000170835_12 (sequence is synthesized)
actgggaaccctacactacggaaaacagcggctacctggagatcaccaagaagatgggcagcagctccatgaagcggagcctgagaaccaacttcctgcgctactggaccctcacctatc

SEQ ID NO: 571148 - DNA, 120 bp, Artificial Sequence
  ENSG00000170835_13 (sequence is synthesized)
tggcgctgcccacagtgaccgaccaggaggccacccctgtgccccccacaggggactccgaggccactcccgtgccccccacgggtgactccgagaccgcccccgtgccgcccacgggtg

SEQ ID NO: 571149 - DNA, 80 bp, Artificial Sequence
  ENSG00000170835_14 (sequence is synthesized)
gtgactccgagaccgcccccgtgccgcccacgggtgactccggggccccccccgtgccgcccacgggtgactccggggcc

SEQ ID NO: 571150 - DNA, 80 bp, Artificial Sequence
  ENSG00000170835_15 (sequence is synthesized)
ccacgggtgactccggcgccccccccgtgccgcccacgggtgactccggggccccccccgtgacccccacgggtgactcc

SEQ ID NO: 571151 - DNA, 120 bp, Artificial Sequence
  ENSG00000170835_16 (sequence is synthesized)
gtgactccgagaccgcccccgtgccgcccacgggtgactccggggccccccctgtgccccccacgggtgactctgaggctgcccctgtgccccccacagatgactccaaggaagctcaga

SEQ ID NO: 571152 - DNA, 120 bp, Artificial Sequence
  ENSG00000170835_17 (sequence is synthesized)
tgcctgcagtcattaggttttagcgtcccatgagccttggtatcaagaggccacaagagtgggaccccaggggctcccctcccatcttgagctcttcctgaataaagcctcatacccctg

SEQ ID NO: 571153 - DNA, 120 bp, Artificial Sequence
  ENSG00000170836_0 (sequence is synthesized)
ggggaagcgcagtgcgcaggcgcaactgcctggctctgctcgctccggcgctccggcccagctctcgcggacaagtccagacatcgcgcgcccccccttctccgggtccgccccctcccc

SEQ ID NO: 571154 - DNA, 120 bp, Artificial Sequence
  ENSG00000170836_1 (sequence is synthesized)
cttctcggcgtcgtcgaagataaacaatagttggccggcgagcgcctagtgtgtctcccgccgccggattcggcgggctgcgtgggaccggcgggatcccggccagccggccatggcggg

SEQ ID NO: 571155 - DNA, 120 bp, Artificial Sequence
  ENSG00000170836_2 (sequence is synthesized)
gctgtactcgctgggagtgagcgtcttctccgaccagggcgggaggaagtacatggaggacgttactcaaatcgttgtggagcccgaaccgacggctgaagaaaagccctcgccgcggcg

SEQ ID NO: 571156 - DNA, 120 bp, Artificial Sequence
  ENSG00000170836_3 (sequence is synthesized)
gtcgctgtctcagccgttgcctccgcggccgtcgccggccgcccttcccggcggcgaagtctcggggaaaggcccagcggtggcagcccgagaggctcgcgaccctctcccggacgccgg

SEQ ID NO: 571157 - DNA, 120 bp, Artificial Sequence
  ENSG00000170836_4 (sequence is synthesized)
ggcctcgccggcacctagccgctgctgccgccgccgttcctccgtggcctttttcgccgtgtgcgacgggcacggcgggcgggaggcggcacagtttgcccgggagcacttgtggggttt

SEQ ID NO: 571158 - DNA, 120 bp, Artificial Sequence
  ENSG00000170836_5 (sequence is synthesized)
catcaagaagcagaagggtttcacctcgtccgagccggctaaggtttgcgctgccatccgcaaaggctttctcgcttgtcaccttgccatgtggaagaaactggcggaatggccaaagac

SEQ ID NO: 571159 - DNA, 120 bp, Artificial Sequence
  ENSG00000170836_6 (sequence is synthesized)
tatgacgggtcttcctagcacatcagggacaactgccagtgtggtcatcattcggggcatgaagatgtatgtagctcacgtaggtgactcaggggtggttcttggaattcaggatgaccc

SEQ ID NO: 571160 - DNA, 120 bp, Artificial Sequence
  ENSG00000170836_7 (sequence is synthesized)
gaaggatgactttgtcagagctgtggaggtgacacaggaccataagccagaacttcccaaggaaagagaacgaatcgaaggacttggtgggagtgtaatgaacaagtctggggtgaatcg

SEQ ID NO: 571161 - DNA, 120 bp, Artificial Sequence
  ENSG00000170836_8 (sequence is synthesized)
tgtagtttggaaacgacctcgactcactcacaatggacctgttagaaggagcacagttattgaccagattccttttctggcagtagcaagagcacttggtgatttgtggagctatgattt

SEQ ID NO: 571162 - DNA, 120 bp, Artificial Sequence
  ENSG00000170836_9 (sequence is synthesized)
cttcagtggtgaatttgtggtgtcacctgaaccagacacaagtgtccacactcttgaccctcagaagcacaagtatattatattggggagtgatggactttggaatatgattccaccaca

SEQ ID NO: 571163 - DNA, 120 bp, Artificial Sequence
  ENSG00000170836_10 (sequence is synthesized)
agatgccatctcaatgtgccaggaccaagaggagaaaaaatacctgatgggtgagcatggacaatcttgtgccaaaatgcttgtgaatcgagcattgggccgctggaggcagcgtatgct

SEQ ID NO: 571164 - DNA, 120 bp, Artificial Sequence
  ENSG00000170836_11 (sequence is synthesized)
ccgagcagataacactagtgccatagtaatctgcatctctccagaagtggacaatcagggaaactttaccaatgaagatgagttatacctgaacctgactgacagcccttcctataatag

SEQ ID NO: 571165 - DNA, 120 bp, Artificial Sequence
  ENSG00000170836_12 (sequence is synthesized)
tcaagaaacctgtgtgatgactccttccccatgttctacaccaccagtcaagtcactggaggaggatccatggccaagggtgaattctaaggaccatatacctgccctggttcgtagcaa

SEQ ID NO: 571166 - DNA, 120 bp, Artificial Sequence
  ENSG00000170836_13 (sequence is synthesized)
tgccttctcagagaattttttagaggtttcagctgagatagctcgagagaatgtccaaggtgtagtcataccctcaaaagatccagaaccacttgaagaaaattgcgctaaagccctgac

SEQ ID NO: 571167 - DNA, 120 bp, Artificial Sequence
  ENSG00000170836_14 (sequence is synthesized)
tttaaggatacatgattctttgaataatagccttccaattggccttgtgcctactaattcaacaaacactgtcatggaccaaaaaaatttgaagatgtcaactcctggccaaatgaaagc

SEQ ID NO: 571168 - DNA, 120 bp, Artificial Sequence
  ENSG00000170836_15 (sequence is synthesized)
ccaagaaattgaaagaacccctccaacaaactttaaaaggacattagaagagtccaattctggccccctgatgaagaagcatagacgaaatggcttaagtcgaagtagtggtgctcagcc

SEQ ID NO: 571169 - DNA, 120 bp, Artificial Sequence
  ENSG00000170836_16 (sequence is synthesized)
tgcaagtctccccacaacctcacagcgaaagaactctgttaaactcaccatgcgacgcagacttaggggccagaagaaaattggaaatcctttacttcatcaacacaggaaaactgtttg

SEQ ID NO: 571170 - DNA, 120 bp, Artificial Sequence
  ENSG00000170836_17 (sequence is synthesized)
tgtttgctgaaatgcatctgggaaatgaggtttttccaaacttaggatataagagggctttttaaatttggtgccgatgttgaactttttttaaggggagaaaattaaaagaaatataca

SEQ ID NO: 571171 - DNA, 120 bp, Artificial Sequence
  ENSG00000170836_18 (sequence is synthesized)
gtttgactttttggaattcagcagttttatcctggccttgtacttgcttgtattgtaaatgtggattttgtagatgttagggtataagttgctgtaaaatttgtgtaaatttgtatccac

SEQ ID NO: 571172 - DNA, 120 bp, Artificial Sequence
  ENSG00000170836_19 (sequence is synthesized)
gattttagaaaaacatttaaactttttaaaatacttattaaaaaatttgtataagccacttgtcttgaaaactgtgcaactttttaaagtaaattattaagcagactggaaaagtgatgt

SEQ ID NO: 571173 - DNA, 120 bp, Artificial Sequence
  ENSG00000170836_20 (sequence is synthesized)
attttcatagtgacctgtgtttcacttaatgtttcttagagccaagtgtcttttaaacattattttttatttctgatttcataattcagaactaaatttttcatagaagtgttgagccat

SEQ ID NO: 571174 - DNA, 120 bp, Artificial Sequence
  ENSG00000170836_21 (sequence is synthesized)
gctacagttagtcttgtcccaattaaaatactatgcagtatctcttacatcagtagcatttttctaaaaccttagtcatcagatatgcttactaaatcttcagcatagaaggaagtgtgt

SEQ ID NO: 571175 - DNA, 120 bp, Artificial Sequence
  ENSG00000170836_22 (sequence is synthesized)
ttgcctaaaacaatctaaaacaattcccttctttttcatcccagaccaatggcattattaggtcttaaagtagttactcccttctcgtgtttgcttaaaatatgtgaagttttccttgct

SEQ ID NO: 571176 - DNA, 120 bp, Artificial Sequence
  ENSG00000170836_23 (sequence is synthesized)
atttcaataacagatggtgctgctaattcccaacatttcttaaattattttatatcatacagttttcattgattatatgggtatatattcatctaataaatcagtgaactgttcctcatg

SEQ ID NO: 571177 - DNA, 83 bp, Artificial Sequence
  ENSG00000170836_24 (sequence is synthesized)
gtatatattcatctaataaatcagtgaactgttcctcatgttgctgaatttgtagttgttggtttattttaatggtatgtaca

SEQ ID NO: 571178 - DNA, 120 bp, Artificial Sequence
  ENSG00000170836_25 (sequence is synthesized)
tactgagcttttgagtgttcccaatctgaaattcaaaatgctctaatgagcatttcctttgagcatcatgcctgctctgaaaaagtttctgattctggagcattttggattttggatttt

SEQ ID NO: 571179 - DNA, 120 bp, Artificial Sequence
  ENSG00000170836_26 (sequence is synthesized)
tggattttcagattagggatgcttaacctggattaacattctgttgtgccatgatcatgctttacagtgagtgtattttatttatttattattttgtttgtttgtttgagatggagtctc

SEQ ID NO: 571180 - DNA, 82 bp, Artificial Sequence
  ENSG00000170836_27 (sequence is synthesized)
ttacaggcgtgagccaccgcatccggcctgagttttatgctttcaatgtatttcttacatttcagttcaagtgattttcatg

SEQ ID NO: 571181 - DNA, 89 bp, Artificial Sequence
  ENSG00000170836_28 (sequence is synthesized)
atgccattatttaaccatgtccacacattctggttattttcaatattttgcagaagataattcttgatcggtgtgtcttatgccacaag

SEQ ID NO: 571182 - DNA, 120 bp, Artificial Sequence
  ENSG00000170836_29 (sequence is synthesized)
gcagaagataattcttgatcggtgtgtcttatgccacaaggattaaaatatgtattcattgctacaaaacaatatctcgaaatttagcagtttaaaacaacaaatattatctccagtttc

SEQ ID NO: 571183 - DNA, 120 bp, Artificial Sequence
  ENSG00000170836_30 (sequence is synthesized)
tgagcctcagaaatctgagagtggtttagctgggtgatagtctcgtggttttggtcaagctaccaaccagggctacaatctttcgaaggtgtcattggggctagaagatctgcttcccgc

SEQ ID NO: 571184 - DNA, 120 bp, Artificial Sequence
  ENSG00000170836_31 (sequence is synthesized)
aagactcacagctgttggcaggagacctcagtttgttgccacatgttcccctccagagggcctctcacaacatggcagttatttgtccccagagcaagcaacaccggagggcaaggaaga

SEQ ID NO: 571185 - DNA, 120 bp, Artificial Sequence
  ENSG00000170836_32 (sequence is synthesized)
agccatgatgttttttgtaacctagcctctgaaagtgtcataccaattctgtattttgttggtcacacagaccaagtcaactacaacgtgggagactcctacacaaggcatgaattctag

SEQ ID NO: 571186 - DNA, 120 bp, Artificial Sequence
  ENSG00000170836_33 (sequence is synthesized)
gaggtgggcatttttaagtgtcatctggaaggaggctgtcacaacctggaagttaaaagcattgatattctgaaatacagcgtgtataacattgttttagtagggtgtgcaatagttatg

SEQ ID NO: 571187 - DNA, 120 bp, Artificial Sequence
  ENSG00000170836_34 (sequence is synthesized)
ttttggtaatagcattaatgaacaatgttattttcatcttccagacatctggaagattgctctagtggagtaaaacatcttaatgtattttgtccctaaataaactatctcactaacaaa

SEQ ID NO: 571188 - DNA, 120 bp, Artificial Sequence
  ENSG00000170836_35 (sequence is synthesized)
atacaaaataaaaaattagcttggcatggtagcatgtgcgtgtagtctctgctactccagaggctgagatggagggattgcttgagcctgggaggtggggttacagtgaaccatgatgga

SEQ ID NO: 571189 - DNA, 80 bp, Artificial Sequence
  ENSG00000170837_0 (sequence is synthesized)
attcctgagatggcggcggcggcacagcggcggctcggggagcccaggaggggccggccgggagcgggctgagccccgca

SEQ ID NO: 571190 - DNA, 80 bp, Artificial Sequence
  ENSG00000170837_1 (sequence is synthesized)
ggcaggggacggccccggggcggagcgcacggcctggtgaggccgcgatggcgaacgcgagcgagccgggtggcagcggc

SEQ ID NO: 571191 - DNA, 120 bp, Artificial Sequence
  ENSG00000170837_2 (sequence is synthesized)
gccgccctgggcctcaagctggccacgctcagcctgctgctgtgcgtgagcctagcgggcaacgtgctgttcgcgctgctgatcgtgcgggagcgcagcctgcaccgcgccccgtactac

SEQ ID NO: 571192 - DNA, 120 bp, Artificial Sequence
  ENSG00000170837_3 (sequence is synthesized)
gtgcgggagcgcagcctgcaccgcgccccgtactacctgctgctcgacctgtgcctggccgacgggctgcgcgcgctcgcctgcctcccggccgtcatgctggcggcgcggcgtgcggcg

SEQ ID NO: 571193 - DNA, 120 bp, Artificial Sequence
  ENSG00000170837_4 (sequence is synthesized)
aagctgctcgccttcctggccgcgctcttctgcttccacgccgccttcctgctgctgggcgtgggcgtcacccgctacctggccatcgcgcaccaccgcttctatgcagagcgcctggcc

SEQ ID NO: 571194 - DNA, 120 bp, Artificial Sequence
  ENSG00000170837_5 (sequence is synthesized)
tctatgcagagcgcctggccggctggccgtgcgccgccatgctggtgtgcgccgcctgggcgctggcgctggccgcggccttcccgccagtgctggacggcggtggcgacgacgaggacg

SEQ ID NO: 571195 - DNA, 120 bp, Artificial Sequence
  ENSG00000170837_6 (sequence is synthesized)
cggcccgacggcgcccccggcgcgctgggcttcctgctgctgctggccgtggtggtgggcgccacgcacctcgtctacctccgcctgctcttcttcatccacgaccgccgcaagatgcgg

SEQ ID NO: 571196 - DNA, 120 bp, Artificial Sequence
  ENSG00000170837_7 (sequence is synthesized)
cttcatccacgaccgccgcaagatgcggcccgcgcgcctggtgcccgccgtcagccacgactggaccttccacggcccgggcgccaccggccaggcggccgccaactggacggcgggctt

SEQ ID NO: 571197 - DNA, 120 bp, Artificial Sequence
  ENSG00000170837_8 (sequence is synthesized)
gtgggcatccggcccgcagggccgggccgcggcgcgcgccgcctcctcgtgctggaagaattcaagacggagaagaggctgtgcaagatgttctacgccgtcacgctgctcttcctgctc

SEQ ID NO: 571198 - DNA, 120 bp, Artificial Sequence
  ENSG00000170837_9 (sequence is synthesized)
ctctgggggccctacgtcgtggccagctacctgcgggtcctggtgcggcccggcgccgtcccccaggcctacctgacggcctccgtgtggctgaccttcgcgcaggccggcatcaacccc

SEQ ID NO: 571199 - DNA, 120 bp, Artificial Sequence
  ENSG00000170837_10 (sequence is synthesized)
gtcgtgtgcttcctcttcaacagggagctgagggactgcttcagggcccagttcccctgctgccagagcccccggaccacccaggcgacccatccctgcgacctgaaaggcattggttta

SEQ ID NO: 571200 - DNA, 120 bp, Artificial Sequence
  ENSG00000170837_11 (sequence is synthesized)
agggaggccccgccacatagacccccaacccagcctttccctttggctcggacggtgacgttgtatcttttccttctggcccctgtttaattttctaagctgccttcaaaatgactcgaa

SEQ ID NO: 571201 - DNA, 120 bp, Artificial Sequence
  ENSG00000170837_12 (sequence is synthesized)
gtggacagacacttggattgtactgactcctttgggggtggggtgggtgaggagtaggatgctcagcccactccagctccgcacattcgtcctcctaactcgactttcttcctgacaata

SEQ ID NO: 571202 - DNA, 120 bp, Artificial Sequence
  ENSG00000170837_13 (sequence is synthesized)
ggccctgcagtctttttgtagcggtactgacgtcttttattccatgtgtggttcctttttttctttttctataaaggctgtactaattttcttcatgcaacgtttcctaaagaccatggc

SEQ ID NO: 571203 - DNA, 120 bp, Artificial Sequence
  ENSG00000170837_14 (sequence is synthesized)
cagttttctacagaagctatttttgacaacctcaagtggcattacattttgcagtgaagtagaggaacctagggggacttcttcacaagttagatttcttgaggatcttctgttggaagc

SEQ ID NO: 571204 - DNA, 120 bp, Artificial Sequence
  ENSG00000170837_15 (sequence is synthesized)
aggagaaagtggggggtggggggaagttgtccgaaatgccctctgaattgccggctgcagggtccttgtgctgcgctggttctttgaaagtctcagtgttgatattgaacttaaagagca

SEQ ID NO: 571205 - DNA, 120 bp, Artificial Sequence
  ENSG00000170837_16 (sequence is synthesized)
gagatggagatcagtagcaaggcagtcatttttttaaagcagtaagtaacaagtaagatttggttcccggtttactttctgctgctaaaaaccacgtcagtgacaactgctctctgtatt

SEQ ID NO: 571206 - DNA, 120 bp, Artificial Sequence
  ENSG00000170837_17 (sequence is synthesized)
atagcaatcttgaatggaaacatttctgtcaagttgtaagttttaaaagagtaaagtgttttggttagtaatgatgtggagaaaaatacagtattgcatgtgttcgtgtgtatagattgt

SEQ ID NO: 571207 - DNA, 120 bp, Artificial Sequence
  ENSG00000170837_18 (sequence is synthesized)
ggttcgaggattgggagggctctgagaagcagagtactacatcaaaattgttttaagtattttttgccaataaaaaattaattttatggaaatggcttgtgctttgagaagcccagtttt

SEQ ID NO: 571208 - DNA, 120 bp, Artificial Sequence
  ENSG00000170837_19 (sequence is synthesized)
attctgtcttatgaaactaatttccactttgaaaattgttcttctgttgtttatggtataaatgaatggaatataatgatatcctccttctaggaaacaaagcatttccttaaaatgttt

SEQ ID NO: 571209 - DNA, 120 bp, Artificial Sequence
  ENSG00000170837_20 (sequence is synthesized)
gctaggttaagctgtgctgttctactgatggttgttttaaattaataatgagaactataatttaaataatatttctttgttagacattataatgttaaactgaaagactaaattctgcaa

SEQ ID NO: 571210 - DNA, 120 bp, Artificial Sequence
  ENSG00000170837_21 (sequence is synthesized)
gtactatataatatttttggcttataatgctacatttttattaatgtaccttccgttttgaggatttatatctgtatttctctttgcattatacaaatataccagtattttcattctgga

SEQ ID NO: 571211 - DNA, 120 bp, Artificial Sequence
  ENSG00000170846_0 (sequence is synthesized)
gaggcgggagccccgaatgcggttctcgcttgctgcgtggcggtaaaggaccgcaggtgtcgtaaaagggccgcagtggcagcgtcctggccgacggctagtagcccattttggataccg

SEQ ID NO: 571212 - DNA, 120 bp, Artificial Sequence
  ENSG00000170846_1 (sequence is synthesized)
tcctcgctgcggaaagttggggcaacctgttgctagtctggtcgttggtgacagcgaggcttccgcgctcgctgctggtgagcagccccggcgtgccccgcgggctggaagaggcggcgg

SEQ ID NO: 571213 - DNA, 80 bp, Artificial Sequence
  ENSG00000170846_2 (sequence is synthesized)
aagaggcggcggcgtgatgcggcccgtggacgcggacgaggcgcgggagccccgcgaggagccgggcagcccgctgagcc

SEQ ID NO: 571214 - DNA, 120 bp, Artificial Sequence
  ENSG00000170846_3 (sequence is synthesized)
ccgggcgcactggcgggcccgcaggaagctgctggagatccagagcctgctcgacgccatcaagagtgaggtggaggcagaggagcggggcgcccgggccccagcaccccgcccgcgtgc

SEQ ID NO: 571215 - DNA, 120 bp, Artificial Sequence
  ENSG00000170846_4 (sequence is synthesized)
ggaggctgaggagcgggtggctcggctgtgcgccgaagcagagaggaaggctgcggaggcggcgcggatgggcaggcggatcgtggagctgcaccagcggatcgccggctgcgagtgctg

SEQ ID NO: 571216 - DNA, 120 bp, Artificial Sequence
  ENSG00000170846_5 (sequence is synthesized)
ctgagccggcgaggccgcgcgggtctggagcggagcgcggcggggagtgtcccgcgtggaaggcgctgggtaggcagggaggggagcgcagagccgtgccacgctctccgcggagttggt

SEQ ID NO: 571217 - DNA, 120 bp, Artificial Sequence
  ENSG00000170846_6 (sequence is synthesized)
ttcattcttttttcataggtaattagagaaaataatttgatatgttgttgtaaagagtcatgaccactggaagtattttcaggacgtagacctggtgggtcactacgtggggggagagag

SEQ ID NO: 571218 - DNA, 120 bp, Artificial Sequence
  ENSG00000170846_7 (sequence is synthesized)
gtgtgaagcggaggtacatgctggaaacgtgtgaatgttgttacgagattggagcgtttgcgatgaccttcctgcaggtggaagcattgtgcacaggtggttgggtttgtttgactcccg

SEQ ID NO: 571219 - DNA, 120 bp, Artificial Sequence
  ENSG00000170846_8 (sequence is synthesized)
gagaatatcaagctcaaaatttatgttgtgatgatgaatttctcccacttgtactttaggtggccaactgacgaactgtgttcacctgataaggagtcgtggctgcttggacaggctcaa

SEQ ID NO: 571220 - DNA, 120 bp, Artificial Sequence
  ENSG00000170846_9 (sequence is synthesized)
accaagagagcctttcgttttgtctcccctgtttttctgcctgcgttttctccacattagccactcaatttccagtaccatcctggcggatgacttcagcattagatggtcaggtgtatt

SEQ ID NO: 571221 - DNA, 120 bp, Artificial Sequence
  ENSG00000170846_10 (sequence is synthesized)
tttttattaataggcgcattcagtttggaaaagacagcttttcattaatgtcccacgtaaaggaatatggcctatacagtacgtacgctgctgcgtggtcatatttgttcctgtgatctt

SEQ ID NO: 571222 - DNA, 120 bp, Artificial Sequence
  ENSG00000170846_11 (sequence is synthesized)
attgtattttcaaagtttggaagtatactcgtgtgctttgctgtttttttatgcttcctggaatttggggactcatgagagacttgaggttagagttctgcaagtgagaagacactacat

SEQ ID NO: 571223 - DNA, 120 bp, Artificial Sequence
  ENSG00000170846_12 (sequence is synthesized)
ggttgcagctgccacatgaagaacccaagctcctgtcaaagttgtgaatgcgactttggatgagattaagaaggcccagtggacggttggtcttgaagagtggcagtgtgtggatttgag

SEQ ID NO: 571224 - DNA, 120 bp, Artificial Sequence
  ENSG00000170846_13 (sequence is synthesized)
gacctctgcagaccatcagatcaaaggagggagagctgttttgggtgttttgttttttttgtttttatagcattttgctttttcttggaatgtaattttcctatggcatgttaactggtg

SEQ ID NO: 571225 - DNA, 120 bp, Artificial Sequence
  ENSG00000170846_14 (sequence is synthesized)
cacatcgtgtaacctgtctggtgagcaacctacaattgggatgagttctaggtacatgtgtttgctgactttggggtaaacaactttgttataatacagtctctgccacagatgcatgtg

SEQ ID NO: 571226 - DNA, 120 bp, Artificial Sequence
  ENSG00000170846_15 (sequence is synthesized)
acctcttcaggggcccagagtggctgaggaaggaaagcttcaagctggccatgggggtcccaaacagtcattccaggcttagatgatgactagcctaggtcatcagagcccagactccac

SEQ ID NO: 571227 - DNA, 120 bp, Artificial Sequence
  ENSG00000170846_16 (sequence is synthesized)
agagactaaaatcagagctctgtcttgttatgataaatttcatttgcttggaaaaagaaatgctgaaagccagtgtttagaatctttgtgcagatgaccaaagcaattgacttggccaag

SEQ ID NO: 571228 - DNA, 61 bp, Artificial Sequence
  ENSG00000170846_17 (sequence is synthesized)
tccgtaacaggtctgcagtttcactcctgagccggcgagaccacgaacccaccagaaggaa

SEQ ID NO: 571229 - DNA, 120 bp, Artificial Sequence
  ENSG00000170846_18 (sequence is synthesized)
caagaacccaccaattccggacacattgggaacttagagcagtgcttgggacatggttatcagcgtcagatatttccttaaactagcgtgaagtcgactttaaccttccagcagtgtgag

SEQ ID NO: 571230 - DNA, 120 bp, Artificial Sequence
  ENSG00000170846_19 (sequence is synthesized)
tgaagtcgactttaaccttccagcagtgtgagtgagggccctgaccctagaatcaacgcccaaagagctgtggcgctacagcgggcggggacatggggtgcgcatgcgtgcgggggggta

SEQ ID NO: 571231 - DNA, 120 bp, Artificial Sequence
  ENSG00000170846_20 (sequence is synthesized)
aaactacagtagcccagccaacatcttgactgcaacctccagagaccttgagccagaggcacccagctaagccctgcgcagctccctgacccatggaaactgtaagagatcaatcaccaa

SEQ ID NO: 571232 - DNA, 120 bp, Artificial Sequence
  ENSG00000170846_21 (sequence is synthesized)
atgcagctgccccaggaaggatggggtgacaatctctgaagatggctgctggcttggggctgtctcagcagctggaataagaccttcattcctaaagggcagtctgagccatgtgtcctc

SEQ ID NO: 571233 - DNA, 120 bp, Artificial Sequence
  ENSG00000170846_22 (sequence is synthesized)
ttttcaaaatgagtttctccttgatagtggtcactgtcaaatggaggagaattgcttctgactcacgagttgttcaaagcctgtagcccagggtggggtttgagctgcagaagaagaaga

SEQ ID NO: 571234 - DNA, 120 bp, Artificial Sequence
  ENSG00000170846_23 (sequence is synthesized)
aggcagacctagagtaggaaaggggtgcctcatgaagccatatggtctggccccagcctttggagaggtgaagtccattcaggcagctagtgttcactgtgaccacagagctccacacta

SEQ ID NO: 571235 - DNA, 120 bp, Artificial Sequence
  ENSG00000170846_24 (sequence is synthesized)
tgccaggcactaggaatttcttggagagacgatctagtgggttgagacaggtctgaaaacacaattacagtacagtgtccgcaatgctggtctttgattcaacgcataaattgagcacct

SEQ ID NO: 571236 - DNA, 120 bp, Artificial Sequence
  ENSG00000170846_25 (sequence is synthesized)
gcaatgctggtctttgattcaacgcataaattgagcacctacagatgctgagactacctgagtgaacaaagtgcttgtaaaattggatctgagggccaggcatggtagctcatgcctgta

SEQ ID NO: 571237 - DNA, 120 bp, Artificial Sequence
  ENSG00000170846_26 (sequence is synthesized)
gggcaacatggtgagaccctgtctctaatagaaaaaaaaagttggatttgttattcataagatgcttagaattgtgtctggctatagtaagtgtttcctaagtatttgttagataacccc

SEQ ID NO: 571238 - DNA, 120 bp, Artificial Sequence
  ENSG00000170846_27 (sequence is synthesized)
cctaagtatttgttagataacccctaaatgagggaagcaggaaaaaaatgatatgtacccatattaaatagtgtaagttctgtgggggaaaaaaatggcattgggggatagggtgtggga

SEQ ID NO: 571239 - DNA, 120 bp, Artificial Sequence
  ENSG00000170848_0 (sequence is synthesized)
cctaggctcatctccacaggggagaacacacagacagcagagaccatgggacccctctcagcccctccctgcactcagcacatcacctggaaggggctcctgctcacagcatcactttta

SEQ ID NO: 571240 - DNA, 120 bp, Artificial Sequence
  ENSG00000170848_1 (sequence is synthesized)
aacttctggaacctgcccaccactgcccaagtaataattgaagccaagccacccaaagtttccgaggggaaggatgttcttctacttgtccacaatttgccccagaatcttactggctac

SEQ ID NO: 571241 - DNA, 120 bp, Artificial Sequence
  ENSG00000170848_2 (sequence is synthesized)
atctggtacaaagggcaaatgacggacctctaccattacattacatcatatgtagtacacggtcaaattatatatgggcctgcctacagtggacgagaaacagtatattccaatgcatcc

SEQ ID NO: 571242 - DNA, 120 bp, Artificial Sequence
  ENSG00000170848_3 (sequence is synthesized)
ctgctgatccagaatgtcacacaggaggatgcaggatcctacaccttacacatcataaagcgaggcgatgggactggaggagtaactggatatttcactgtcaccttatactcggagact

SEQ ID NO: 571243 - DNA, 120 bp, Artificial Sequence
  ENSG00000170848_4 (sequence is synthesized)
cccaagccctccatctccagcagcaacttaaaccccagggaggtcatggaggctgtgcgcttaatctgtgatcctgagactccggatgcaagctacctgtggttgctgaatggtcagaac

SEQ ID NO: 571244 - DNA, 120 bp, Artificial Sequence
  ENSG00000170848_5 (sequence is synthesized)
tattgcaggaccctatgaatgtgaaatacggaacccagtgagtgccagccgcagtgacccagtcaccctgaatctcctcccgaagctgcccatgccttacatcaccatcaacaacttaaa

SEQ ID NO: 571245 - DNA, 120 bp, Artificial Sequence
  ENSG00000170848_6 (sequence is synthesized)
ccccagggagaagaaggatgtgttagccttcacctgtgaacctaagagtcggaactacacctacatttggtggctaaatggtcagagcctcccggtcagtccgagggtaaagcgacccat

SEQ ID NO: 571246 - DNA, 120 bp, Artificial Sequence
  ENSG00000170848_7 (sequence is synthesized)
tgaaaacaggatactcattctacccagtgtcacgagaaatgaaacaggaccctatcaatgtgaaatacgggaccgatatggtggcatccgcagtaacccagtcaccctgaatgtcctcta

SEQ ID NO: 571247 - DNA, 120 bp, Artificial Sequence
  ENSG00000170848_8 (sequence is synthesized)
tggtccagacctccccagaatttacccttcattcacctattaccgttcaggagaaaacctcgacttgtcctgctttgcggactctaacccaccggcagagtattcttggacaattaatgg

SEQ ID NO: 571248 - DNA, 120 bp, Artificial Sequence
  ENSG00000170848_9 (sequence is synthesized)
gaagtttcagctatcaggacaaaagctctttatcccccaaattactacaaatcatagcgggctctatgcttgctctgttcgtaactcagccactggcaaggaaatctccaaatccatgat

SEQ ID NO: 571249 - DNA, 120 bp, Artificial Sequence
  ENSG00000170848_10 (sequence is synthesized)
agtcaaagtctctgagacagcatctccccaggttacctatgctggtccaaacacctggtttcaagaaatccttctgctgtgacctcccaaagtgctaggattaaaacatgacccaccatg

SEQ ID NO: 571250 - DNA, 120 bp, Artificial Sequence
  ENSG00000170848_11 (sequence is synthesized)
catggaaaccagacagagtctcattaatggctgccacaatagagacactgagaaaaagaacaggttgataccttcatgaaattcaagacaaagaagaaaaaaactcaatgttattggact

SEQ ID NO: 571251 - DNA, 120 bp, Artificial Sequence
  ENSG00000170848_12 (sequence is synthesized)
aaataatcaaaaggataatgttttcataattttttattggaaaatgtgctgattcttggaatgttttattctccagatttatgaactttttttcttcagcaattggtaaagtatactttt

SEQ ID NO: 571252 - DNA, 120 bp, Artificial Sequence
  ENSG00000170848_13 (sequence is synthesized)
gtaaacaaaaattgaaacatttgcttttgctctctatctgagtgccccagaattgggaaactattcatgagtattcataggtttatggtaataaagttatttgcacaagttcagtaagaa

SEQ ID NO: 571253 - DNA, 120 bp, Artificial Sequence
  ENSG00000170848_14 (sequence is synthesized)
tatctggctttcagagaagagtcaggaaaacatttgtattcccagactgtgtcccatgggcacaagcaaatcccaaattctcctcctgaaccctcccaacttatctctacagactctctt

SEQ ID NO: 571254 - DNA, 120 bp, Artificial Sequence
  ENSG00000170848_15 (sequence is synthesized)
ctgcttgtttttctgttttctcatggctgaccttgtgtctggcctgagaaaggtagggagggggctttatcagccctgagccctatgtggtagaagaggcttcacagagggacaagaagg

SEQ ID NO: 571255 - DNA, 120 bp, Artificial Sequence
  ENSG00000170848_16 (sequence is synthesized)
ggaacccacagcccagcagtgtccaccctcaccagggtcacttcggcctaagtcctcagcgccctccatgctccccacacggactctgtcagctcctccctgacctgggggccaccaacc

SEQ ID NO: 571256 - DNA, 83 bp, Artificial Sequence
  ENSG00000170848_17 (sequence is synthesized)
gggcagcgctggtgcacgcgatgccacactgggcgctttcccctcgtgacctccctccatcctcatcaactctttctgtcacc

SEQ ID NO: 571257 - DNA, 120 bp, Artificial Sequence
  ENSG00000170848_18 (sequence is synthesized)
tcgtgacctccctccatcctcatcaactctttctgtcaccgctccctaaatgcccgcccctgctccatctgtcctgttccctggggcatcccaggccaagcttagcgctgacacagaata

SEQ ID NO: 571258 - DNA, 120 bp, Artificial Sequence
  ENSG00000170848_19 (sequence is synthesized)
gcggctgcctgagggcccacagcctcaccgggaatcagccaggcaccctgtgacctgcctgcacgctgcaccccacggggctcagagcgcgtgtgatggtcacacacaggcaccatccga

SEQ ID NO: 571259 - DNA, 120 bp, Artificial Sequence
  ENSG00000170848_20 (sequence is synthesized)
ggtgtggccacctatccccagctgtcccttgggaagacagacctctcctgtgtgcttgcggggagaagggggatgttattgctctttgctcccagaacacaactcaccccccacccgccc

SEQ ID NO: 571260 - DNA, 120 bp, Artificial Sequence
  ENSG00000170848_21 (sequence is synthesized)
gctcaggtgtgagcaacgtccctccagacaggatctctggccactgcctgttcctcctctacacacagcagcttggccaggtcaaaaaccctcaggacagacccctgggtatgtcaacac

SEQ ID NO: 571261 - DNA, 120 bp, Artificial Sequence
  ENSG00000170848_22 (sequence is synthesized)
atgaaaggctctgcccaacattgccacggagttggtcgggatgaatctctccagctctgaaactctgctccgacccaggctccccctcctgcgtctcaacgagccatgtcccaccgggtt

SEQ ID NO: 571262 - DNA, 120 bp, Artificial Sequence
  ENSG00000170848_23 (sequence is synthesized)
cctgtttaactcctcacttccttctgcaccaccacggagaagctgtggtgaccacaggacaatcagctgggcagagaagagaggacatcaaagatggtcaggaagaacatgagaaaccat

SEQ ID NO: 571263 - DNA, 120 bp, Artificial Sequence
  ENSG00000170848_24 (sequence is synthesized)
gagctccagctcagccaccggaccccacggagtcatacagtgaccgagaactttccctttgactatgggactcacagccaccactgagcaacaggcacaggcctctcctcccaagaggca

SEQ ID NO: 571264 - DNA, 120 bp, Artificial Sequence
  ENSG00000170848_25 (sequence is synthesized)
ctctctgcattatgtcccatgctggggtttgggcatttagtgcaggacacacacagaggagacacatttcaacagatcagaattcctttcccgcatccagaccctgcagacactcgctgc

SEQ ID NO: 571265 - DNA, 120 bp, Artificial Sequence
  ENSG00000170848_26 (sequence is synthesized)
gactcagcaggaggagatcagtctcagccaagcacctcatgccctcttcataaatttgaccctgagaaagaccctggaaaactgagtagggcttggcctgaggggcccactgagataccc

SEQ ID NO: 571266 - DNA, 120 bp, Artificial Sequence
  ENSG00000170848_27 (sequence is synthesized)
gcccactgagataccctcagagaacctcagctctggaagcctcaatcccagacccctgtccctaaatccttgctccaggtaaagctgaggagcctgtgccaggactgggttgtggcttct

SEQ ID NO: 571267 - DNA, 120 bp, Artificial Sequence
  ENSG00000170848_28 (sequence is synthesized)
ttggcagggcttactgggaccaaggatttaccagctgtctgaggactgtgtctcctggagctgttcaccagccagggctcagtcctcagagcctcatctgggcaaggacagagctttctt

SEQ ID NO: 571268 - DNA, 120 bp, Artificial Sequence
  ENSG00000170848_29 (sequence is synthesized)
cacctgacactcagagtggagaggacagaaagacaagctttgtaggccatcagccaactgccttaggaggcctaggacactccatagaaagtctaatatccccagaagcagaaacagaag

SEQ ID NO: 571269 - DNA, 120 bp, Artificial Sequence
  ENSG00000170848_30 (sequence is synthesized)
agagaagatgcaccaggtagccgtttgtccacagggatctgacgcaaaggtgctttctcatggaagcaaattaataataaatgctgtttgtgtgaacacctccactgtgccaagcattaa

SEQ ID NO: 571270 - DNA, 120 bp, Artificial Sequence
  ENSG00000170848_31 (sequence is synthesized)
aaatacaagtggccagaggccaggcctctcagtccctctcaggtccaagtacagagacctttatccctgaacatcaaagctggccatgactttctgctccaggcaaaccagagtaggcct

SEQ ID NO: 571271 - DNA, 120 bp, Artificial Sequence
  ENSG00000170848_32 (sequence is synthesized)
aggcttgatcaacaataagagagaagaggcttctcctgtcatgggagactcaggttccacagcttgtgatggaagaaacaggtgaatgtctcaggctccagatcagtgaacacagcgggg

SEQ ID NO: 571272 - DNA, 120 bp, Artificial Sequence
  ENSG00000170848_33 (sequence is synthesized)
atttggctgggacttcagtgttgcaacttggctcacagggtcactgtgactgtgtcccttccacagaccaggattttcccttccctctgacaatatcgcctgtgacattattctctttgc

SEQ ID NO: 571273 - DNA, 120 bp, Artificial Sequence
  ENSG00000170848_34 (sequence is synthesized)
tccgcatggcctggatgctcccaccgtttcttcctcatacacctattaccatacaggggaagtccccaagctctcctgcctcacagactctcacccactggcagagcattcttggctgat

SEQ ID NO: 571274 - DNA, 120 bp, Artificial Sequence
  ENSG00000170848_35 (sequence is synthesized)
tgatgggaagttccagcaatcagcacaagtgttctttataccccaaatcactaaaacatatagaggggtctatgtctgtttcatccataactcagccactggtggaacaaatctcataat

SEQ ID NO: 571275 - DNA, 120 bp, Artificial Sequence
  ENSG00000170848_36 (sequence is synthesized)
caagaggatcatagtccctggtaagtggatccctggagcattggcaccatgttttccagtaaagtctatctagctgtcagggaagagccacctgctctctgcaaagggagagggaaaatc

SEQ ID NO: 571276 - DNA, 120 bp, Artificial Sequence
  ENSG00000170848_37 (sequence is synthesized)
aaaacccaggaaagggaatatgtttctgctccaaaaccaccagcttctgcctgtccccttcactctttctagatcattctttagacaatacactaacaatgaacaatctgaaaggaagtt

SEQ ID NO: 571277 - DNA, 120 bp, Artificial Sequence
  ENSG00000170848_38 (sequence is synthesized)
ggaaaaacagaaggagggacaaggaggcaggactgagagaggaggggacagagaggtgtcctgggcctgaccccgcccatgagcctgagaagtgcttctgccctgggaagaggctcagca

SEQ ID NO: 571278 - DNA, 120 bp, Artificial Sequence
  ENSG00000170852_0 (sequence is synthesized)
agaggacgctgctttccgcgctggacggaccaagcgagggagggtgcgaggggaaaccggaaggaagaggcggcggcgccagccttcctcggccggaggcggaggcgagaccccaggcga

SEQ ID NO: 571279 - DNA, 120 bp, Artificial Sequence
  ENSG00000170852_1 (sequence is synthesized)
ggccgcggcgggagggccacgcccccgccgccgcgccggaggggcccagtgtggacggggccaccggctggagcggatcccacacctccggaccgagggacgcggttactccacaggatc

SEQ ID NO: 571280 - DNA, 120 bp, Artificial Sequence
  ENSG00000170852_2 (sequence is synthesized)
cgctgaacataggatgttgccacaaaatctacctcgtgtatttttctctttcactcatgagctgcacaattgcagatttgagcacaatgtctgcagactgtgttgaaaaactctgaagaa

SEQ ID NO: 571281 - DNA, 120 bp, Artificial Sequence
  ENSG00000170852_3 (sequence is synthesized)
cctaattaacacaggatgacctaggagtgattctaagtctgtgtaacaagatattactcattagtgaatgtgtcagtcttggtactgaatgctgcagataacagcaagtaggttctcctt

SEQ ID NO: 571282 - DNA, 120 bp, Artificial Sequence
  ENSG00000170852_4 (sequence is synthesized)
tatttctgaagtattcacttgaccttccatcagtaagacggacttttctaatctgttcctggagatattaatggaatacagtcatgtccactcaagacgagaggcagatcaatactgaat

SEQ ID NO: 571283 - DNA, 120 bp, Artificial Sequence
  ENSG00000170852_5 (sequence is synthesized)
atgctgtgtcattgttggaacagttgaaactgttttatgaacagcagttgtttactgacatagtgttaattgttgagggcactgaattcccttgtcataagatggttcttgcaacatgta

SEQ ID NO: 571284 - DNA, 120 bp, Artificial Sequence
  ENSG00000170852_6 (sequence is synthesized)
gctcttatttcagggccatgtttatgagtggactaagtgaaagcaaacaaacccatgtacacctgaggaatgtcgatgctgccaccttacagataataataacttatgcatacacgggta

SEQ ID NO: 571285 - DNA, 120 bp, Artificial Sequence
  ENSG00000170852_7 (sequence is synthesized)
acttggcaatgaatgacagcactgtagaacagctttatgaaacagcttgcttcctacaggtagaagatgtgttacaacgttgtcgagaatatttaattaaaaaaataaatgcagagaatt

SEQ ID NO: 571286 - DNA, 120 bp, Artificial Sequence
  ENSG00000170852_8 (sequence is synthesized)
gtgtacgattgttgagttttgctgatctcttcagttgtgaggaattaaaacagagtgctaaaagaatggtggagcacaagttcactgctgtgtatcatcaggacgcgttcatgcagctgt

SEQ ID NO: 571287 - DNA, 120 bp, Artificial Sequence
  ENSG00000170852_9 (sequence is synthesized)
cacatgacctactgatagatattctcagtagtgacaatttaaatgtagaaaaggaagaaaccgttcgagaagctgctatgctgtggctagagtataacacagaatcacgatcccagtatt

SEQ ID NO: 571288 - DNA, 120 bp, Artificial Sequence
  ENSG00000170852_10 (sequence is synthesized)
tgtcttctgttcttagccaaatcagaattgatgcactttcagaagtaacacagagagcttggtttcaaggtctgccacccaatgataagtcagtggtggttcaaggtctgtataagtcca

SEQ ID NO: 571289 - DNA, 120 bp, Artificial Sequence
  ENSG00000170852_11 (sequence is synthesized)
tgcccaagtttttcaaaccaagacttgggatgactaaagaggaaatgatgattttcattgaagcatcttcagaaaatccttgtagtctttactcttctgtctgttacagcccccaagcag

SEQ ID NO: 571290 - DNA, 120 bp, Artificial Sequence
  ENSG00000170852_12 (sequence is synthesized)
aaaaagtttacaagttatgtagcccaccagctgatttgcataaggttgggaccgttgtaactcctgataatgatatctacatagcagggggtcaagttcctctgaaaaacacaaaaacaa

SEQ ID NO: 571291 - DNA, 120 bp, Artificial Sequence
  ENSG00000170852_13 (sequence is synthesized)
atcacagtaaaacaagcaaacttcagactgccttcagaactgtgaattgcttttattggtttgatgcacagcaaaatacctggtttccaaagaccccaatgctttttgtccgcataaagc

SEQ ID NO: 571292 - DNA, 120 bp, Artificial Sequence
  ENSG00000170852_14 (sequence is synthesized)
catctttggtttgctgtgaaggctatatctatgcaattggaggagatagcgtaggtggagaacttaatcggaggaccgtagaaagatacgacactgagaaagatgagtggacgatggtaa

SEQ ID NO: 571293 - DNA, 120 bp, Artificial Sequence
  ENSG00000170852_15 (sequence is synthesized)
ccttgtgcttggcaatggagtgcagcagttgtggttcatgactgcatttatgtgatgacactgaacctcatgtactgttattttccaaggtctgactcatgggtagaaatggccatgaga

SEQ ID NO: 571294 - DNA, 120 bp, Artificial Sequence
  ENSG00000170852_16 (sequence is synthesized)
cagactagtaggtcctttgcttcagctgcagcttttggtgataaaattttctatattggagggttgcatattgctaccaattccggcataagactcccctctggcactgtagatgggtct

SEQ ID NO: 571295 - DNA, 120 bp, Artificial Sequence
  ENSG00000170852_17 (sequence is synthesized)
tcagtaactgtggaaatttatgatgtgaataaaaatgagtggaaaatggcagccaacatccctgctaagaggtactctgacccctgtgttagagctgttgtgatctcaaattctctatgt

SEQ ID NO: 571296 - DNA, 120 bp, Artificial Sequence
  ENSG00000170852_18 (sequence is synthesized)
gtgtttatgcgagaaacccacttaaatgagcgagctaaatacgtcacctaccaatatgacctggaacttgaccggtggtctctgcggcagcatatatctgaacgtgtactgtgggacttg

SEQ ID NO: 571297 - DNA, 120 bp, Artificial Sequence
  ENSG00000170852_19 (sequence is synthesized)
gggagagattttcgatgcactgtggggaaactctatccatcctgccttgaagagtctccatggaaaccaccaacttatcttttttcaacggatgggacagaagagtttgaactggatgga

SEQ ID NO: 571298 - DNA, 120 bp, Artificial Sequence
  ENSG00000170852_20 (sequence is synthesized)
gaaatggttgcactaccacctgtatagtggggaagttcagggagtgcacgcctgagttatgtgctttgtcattttctttgctaaacaaaagaggctatgaaagaactaaatatgagtaca

SEQ ID NO: 571299 - DNA, 120 bp, Artificial Sequence
  ENSG00000170852_21 (sequence is synthesized)
tgagtacataaaattctatctttgataaattttatttttatgccctacttaatatttgcatcagtataatatatatcagtgagtcttacagaaagatatgcttccataatatgaaataga

SEQ ID NO: 571300 - DNA, 120 bp, Artificial Sequence
  ENSG00000170852_22 (sequence is synthesized)
taattgagaaactttatgtgtaatcatgagagtataagaatctggattatctaacattgttagccctgtgtatgtacagttcaaaaagttcatttataaaagtagtttcctgttcctagt

SEQ ID NO: 571301 - DNA, 120 bp, Artificial Sequence
  ENSG00000170852_23 (sequence is synthesized)
gtgatgtatcacaaattgtgctgaggttattttagtatgtgtgtttcattcccgtgcttctgttctgaagtcctggaatacagttttcagtgtaattaattcaactgcacttaacactaa

SEQ ID NO: 571302 - DNA, 120 bp, Artificial Sequence
  ENSG00000170852_24 (sequence is synthesized)
tgtccgtgttggtatagaaatgtctaaatcctatactctagttgaggaagatcttccataattttatggtattacacagggaaagctatgactgcaggatcagtctaactatactattag

SEQ ID NO: 571303 - DNA, 120 bp, Artificial Sequence
  ENSG00000170852_25 (sequence is synthesized)
gtgcatgtattctcttttcactaacttatacttgtctatctagaatacaggtcttccagtcagctggtcatttaccaggtgtggacttaagttgctaggcttgcagtaagaattgccagc

SEQ ID NO: 571304 - DNA, 120 bp, Artificial Sequence
  ENSG00000170852_26 (sequence is synthesized)
cactcattgtgcgggtctgcgtggagctttaatcagaaaaagcctccactttctgtattatgttaacattggctcatgcatataactatctgctgctgatgtagttctccatcttcaaga

SEQ ID NO: 571305 - DNA, 120 bp, Artificial Sequence
  ENSG00000170852_27 (sequence is synthesized)
tttagagtgggttaaccaggtcattacatcttaatttaataacaagcattactgtagagtgattgtgtatagatctgttagctgtcagggtgtgttttttttaacctgttgtgtgcgtgt

SEQ ID NO: 571306 - DNA, 120 bp, Artificial Sequence
  ENSG00000170852_28 (sequence is synthesized)
gggggttaggattagtaaggtgaactgttcaggaattctctgcactagctgtgcagaagagcagataactagcgctgctctggcattaatcccaggaaccactagcagtagtggggcgcc

SEQ ID NO: 571307 - DNA, 120 bp, Artificial Sequence
  ENSG00000170852_29 (sequence is synthesized)
gccaatctaacatgagcacaggtgcttcatgacaaacattactagcatgttcaactgcaccatgttctggcactgtattttgaatgacattaatttattaaataaattgtatatattcaa

SEQ ID NO: 571308 - DNA, 120 bp, Artificial Sequence
  ENSG00000170852_30 (sequence is synthesized)
ctgggattacacgcgtgagccactgtgtccagcctacaggtaagcatttttttactcagttacatacatgagttgtagcttattggtttattatgtggtttattttgtgaggaaacattg

SEQ ID NO: 571309 - DNA, 120 bp, Artificial Sequence
  ENSG00000170852_31 (sequence is synthesized)
ttgtgaggaaacattgttaaacattttttatttatgtttttgagatggggtctcgttcggtcacccaggctggagtgcattggtgcagtcatggttcactgaagccttgaactcatgggc

SEQ ID NO: 571310 - DNA, 120 bp, Artificial Sequence
  ENSG00000170852_32 (sequence is synthesized)
aaagactcgcgacgtgttcgcgacatggtgggccgaaggaggacacccccttccttctgtattccccccgcgtacatctgaactaaccaagagaggtctagacgaacagagctcctgtta

SEQ ID NO: 571311 - DNA, 120 bp, Artificial Sequence
  ENSG00000170852_33 (sequence is synthesized)
attcccagtgtttttctcttttgtaatctttataggtggccaaattacaattctagacaatgagatgtttgtggaagtctgctgagtttgggagatgtagtatcctgagaaagctttcac

SEQ ID NO: 571312 - DNA, 120 bp, Artificial Sequence
  ENSG00000170852_34 (sequence is synthesized)
tttcctgaagaaaaaaaagaccatggatggtggaagccaccccctttcccctcttcttgccttgaacaaaggtgcgaaggctaaaactgctgcagccatattgcaaccatgaagtcaatg

SEQ ID NO: 571313 - DNA, 120 bp, Artificial Sequence
  ENSG00000170852_35 (sequence is synthesized)
gcattgcagcacacaacggaaggcttcagacgctggagctgccgtccgcacccagatgtctctctctcccttttcccctaacctcccccaactgcgggcccttttgggtgctgctctgac

SEQ ID NO: 571314 - DNA, 120 bp, Artificial Sequence
  ENSG00000170852_36 (sequence is synthesized)
ttcttccttggccttgggaaaagccgaagcggctctggagagaggagggcatggtttggagaagaggtgctgcggcaacaaagcgacccgcccaacgcctcctcaactttctcctgcccc

SEQ ID NO: 571315 - DNA, 120 bp, Artificial Sequence
  ENSG00000170854_0 (sequence is synthesized)
acaccggtgacgagcgcacggaaagtttggaggcttagcaaggagggtggtgccggcctccgcccggtggtggcagaactgcctgtgcgagcacggcttccacgtgggctgcgccgccgg

SEQ ID NO: 571316 - DNA, 120 bp, Artificial Sequence
  ENSG00000170854_1 (sequence is synthesized)
gcgtcatgtcgggcctaagagacacgctctacagctgtgaaatctgaagttcaggtttgcatttccttactgctttgtcttgaagacagaacgatgccaaagaaagcaaagcctacaggg

SEQ ID NO: 571317 - DNA, 120 bp, Artificial Sequence
  ENSG00000170854_2 (sequence is synthesized)
agtgggaaggaagaggggccggctccctgtaagcagatgaagttagaagcagctggggggccttcagctttaaactttgacagtcccagtagtctctttgaaagtttaatctcgcccatc

SEQ ID NO: 571318 - DNA, 120 bp, Artificial Sequence
  ENSG00000170854_3 (sequence is synthesized)
aagacagagacttttttcaaggaattctgggagcagaagccccttctcattcagagagatgaccctgcactggccacatactatgggtccctgttcaagctaacagatctgaagagtctg

SEQ ID NO: 571319 - DNA, 120 bp, Artificial Sequence
  ENSG00000170854_4 (sequence is synthesized)
tgcagccgggggatgtactatggaagagatgtgaatgtctgccggtgtgtcaatgggaagaagaaggttttaaataaagatggcaaagcacactttcttcagctgagaaaagattttgat

SEQ ID NO: 571320 - DNA, 120 bp, Artificial Sequence
  ENSG00000170854_5 (sequence is synthesized)
cagaaaagggcaacgattcagtttcaccaacctcagagatttaaggatgagctttggaggatccaggagaagctggaatgttactttggctccttggttggctcgaatgtgtacataact

SEQ ID NO: 571321 - DNA, 120 bp, Artificial Sequence
  ENSG00000170854_6 (sequence is synthesized)
cccgcaggatctcagggcctgccgccccattatgatgatgtcgaggttttcatcctgcagctggagggagagaaacactggcgcctctaccaccccactgtgcccctggcacgagagtac

SEQ ID NO: 571322 - DNA, 120 bp, Artificial Sequence
  ENSG00000170854_7 (sequence is synthesized)
agcgtggaggccgaggaaaggatcggcaggccggtgcatgagtttatgctgaagccgggtgatttgttgtactttcccagaggaaccattcatcaagcggacactcctgcggggctggcc

SEQ ID NO: 571323 - DNA, 120 bp, Artificial Sequence
  ENSG00000170854_8 (sequence is synthesized)
cactctactcacgtgaccatcagcacctaccagaacaattcatggggagatttccttttggataccatctcggggcttgtatttgatactgcaaaggaagacgtggagttacggaccggc

SEQ ID NO: 571324 - DNA, 120 bp, Artificial Sequence
  ENSG00000170854_9 (sequence is synthesized)
cttgcagaccggctggagggcaccaaagaactgctttcctcagacatgaagaaggattttattatgcacagactccccccttactctgcgggagatggggcagagctgtcaacaccaggt

SEQ ID NO: 571325 - DNA, 120 bp, Artificial Sequence
  ENSG00000170854_10 (sequence is synthesized)
ggaaagttaccgaggctggacagtgtagtgagactgcagtttaaagaccacattgtcctcacagtactgccggatcaagatcaatctgatgaagctcaagaaaagatggtgtacatctat

SEQ ID NO: 571326 - DNA, 120 bp, Artificial Sequence
  ENSG00000170854_11 (sequence is synthesized)
cattccttaaagaatagtagagagacacacatgatgggaaatgaggaggaaacagagtttcatggacttcgcttccctttgtcacatttggatgcactgaagcaaatttggaatagtcca

SEQ ID NO: 571327 - DNA, 120 bp, Artificial Sequence
  ENSG00000170854_12 (sequence is synthesized)
gctatttctgtcaaggacctgaaacttactacagatgaggaaaaggaaagcctggtattatccctctggacagaatgtttaattcaagtagtctagtgcctttgcagaatcaaatgccta

SEQ ID NO: 571328 - DNA, 120 bp, Artificial Sequence
  ENSG00000170854_13 (sequence is synthesized)
ctattttatatgcatatattaaaagaaaagcaaagacctgagccgaggagaggatgaattcaagtttccttacctgcgtatctactaacaaacatgagacctccctgttacaggtggtca

SEQ ID NO: 571329 - DNA, 120 bp, Artificial Sequence
  ENSG00000170854_14 (sequence is synthesized)
gttggccaaatgtactaacgggcacatgaaagaaagaacagcaaattaccaagtgtctcagaaaatgacaaaaccatattttgacaagtttatttaatccagtgtggtagaaaaggcaca

SEQ ID NO: 571330 - DNA, 120 bp, Artificial Sequence
  ENSG00000170854_15 (sequence is synthesized)
attccaatgtatcatttagaattgaatgtcattaacctggctttgttctttggaagaaacaacttctttaaagagcttctttggctctagaaaaatttcaaacaattaaaataagaaaaa

SEQ ID NO: 571331 - DNA, 120 bp, Artificial Sequence
  ENSG00000170854_16 (sequence is synthesized)
attttaaactggttttttataatgaaaatatacatacctttgtgtatagacaagcccatgcccattaaaataaagttatcctgtaacataaattttattaaataatacttccccacagat

SEQ ID NO: 571332 - DNA, 120 bp, Artificial Sequence
  ENSG00000170854_17 (sequence is synthesized)
gagaggcacgcaacacctatggacaaaagggagttacagaggctgcttaaaagatggagaaaagcctgagattgaaggaggaaaaaaacccagtatttaaagtctataaaaaatactcaa

SEQ ID NO: 571333 - DNA, 120 bp, Artificial Sequence
  ENSG00000170854_18 (sequence is synthesized)
gcctccagccgctgcgccgcaacgcagtgggctcgcggccgcgagcaacaggccgtgccgggtgagtggggcgctctcgtgggcatcccagcgccggggcaggccgggtagtgcccgatc

SEQ ID NO: 571334 - DNA, 120 bp, Artificial Sequence
  ENSG00000170854_19 (sequence is synthesized)
cgggtagtgcccgatcccgcggggcgcgcgctgctgctttaggcacccgggctcgggtgcgggtctgggagacctgtcggtcggcgagaagcctcggtggccggcgctgtggttgcggga

SEQ ID NO: 571335 - DNA, 120 bp, Artificial Sequence
  ENSG00000170854_20 (sequence is synthesized)
cctgggacgcgctcccaggcgtcccacctccccggagactggggcagggtgggtggggcccggatctaggggtagggtcgcggaagccttggttacagagagtcgcacacgtggcctgct

SEQ ID NO: 571336 - DNA, 120 bp, Artificial Sequence
  ENSG00000170854_21 (sequence is synthesized)
ttataaaaatagagcatttttctgctttctggcaaaagttggggataaaaggaaaaaaagttgtcaaaatgtaattttcagtccaattcaccaggaaaacatgcttgtgaattgtgcagt

SEQ ID NO: 571337 - DNA, 120 bp, Artificial Sequence
  ENSG00000170854_22 (sequence is synthesized)
aaaaggtggtaatgactactggaagctaagtcaaaggtgatttcctacctgattttacttacttaaataaaagttacttacaatgggagtgaaaaactgaggtttctgttatttagtaga

SEQ ID NO: 571338 - DNA, 120 bp, Artificial Sequence
  ENSG00000170854_23 (sequence is synthesized)
gaaatcaactccacgtttacttaaagagatggtaaggtcaaggttcaaatgctactgtgttttaatttggatatttgaaatttctcttgaggcaaaaaaaaaaaaaaattgatgcctctc

SEQ ID NO: 571339 - DNA, 120 bp, Artificial Sequence
  ENSG00000170854_24 (sequence is synthesized)
cttaaatctaggatgaagtgtcaacatggagacaggtaaccactgttatagagtcttgtcacctaaagggatgtcttggttaacacgtaacagtgcaagtttggccataggttatttatt

SEQ ID NO: 571340 - DNA, 120 bp, Artificial Sequence
  ENSG00000170854_25 (sequence is synthesized)
tgtacttttttagtttgaaggactgaggaaacaatagctacagaaaatacttcttgtgccttattcctaacaaagctgaggtccctgcctggggttagttacaagtataaatacttaacg

SEQ ID NO: 571341 - DNA, 120 bp, Artificial Sequence
  ENSG00000170854_26 (sequence is synthesized)
aggtgcgttcattataaaagcctcagtatagaaaccttaaagtttatctaggaaagtttagtatattttcaggtgttgctaaaaaattactcatctgtttgcaaaagtatgacttgacct

SEQ ID NO: 571342 - DNA, 120 bp, Artificial Sequence
  ENSG00000170854_27 (sequence is synthesized)
atagaaatctgtttctttatgctttgtactcatacaagcatctaggtaggatattaataaataatacaggataatagcatcaccagtgtccaataacgggccatcaggaacaggattcac

SEQ ID NO: 571343 - DNA, 120 bp, Artificial Sequence
  ENSG00000170854_28 (sequence is synthesized)
gtttggtggatatgagagaaaataaacacttcaggaaacttgctcaccacagctggagatcaggaatagaacctttccaagatatcataatattttctttataggaacactgagtaatgg

SEQ ID NO: 571344 - DNA, 120 bp, Artificial Sequence
  ENSG00000170854_29 (sequence is synthesized)
caagaatattttgagcttttccatggttaagagcgatagtctcagaggctggagaaaatgttcattctgctcagtgatccaggagtgtgaggacagtagcttcctttccacgtccacaag

SEQ ID NO: 571345 - DNA, 120 bp, Artificial Sequence
  ENSG00000170854_30 (sequence is synthesized)
acaatgacagatgtgtttccttctttgctctttctagggatctttctagggatgttgattctctcacaatatttcaatgtcccatttctgtgtttcttctccctccaggggctgatttac

SEQ ID NO: 571346 - DNA, 120 bp, Artificial Sequence
  ENSG00000170854_31 (sequence is synthesized)
aattacatgagtcttgtcacaataatttcctcctaaaatagaaattccaaaagaaaagattatttgttcaggcaggtgcttagcaatttcacaattttcacaagcttctgttcagctcac

SEQ ID NO: 571347 - DNA, 120 bp, Artificial Sequence
  ENSG00000170854_32 (sequence is synthesized)
catttcggtggatgaatgtgtcatttacaaagaagtctgaaatgggaagctgagtttgaacaggcttagccattattcacctcaaattggaccttattatgactcaaattgaaatactaa

SEQ ID NO: 571348 - DNA, 120 bp, Artificial Sequence
  ENSG00000170854_33 (sequence is synthesized)
aaggtataatacatgattgtataagtggcgtgccttaatgtgattctttagaacaaagtgctcttgagagaactctggctgaatgtcaggtactgtgtttttgtttctacaccaacaaaa

SEQ ID NO: 571349 - DNA, 120 bp, Artificial Sequence
  ENSG00000170854_34 (sequence is synthesized)
ctgtgactaacccaattaaagcaacagccatgaataatattggccctgaccttgctgaattcaaaaacaaggttaattgatacctaccataaattctacctgagggtttttaaggaccat

SEQ ID NO: 571350 - DNA, 120 bp, Artificial Sequence
  ENSG00000170854_35 (sequence is synthesized)
ggcaattcctggcaaaaagctagagatgtttctaagaaacagatgacattcatttcatggtttatggtgcttgaaatttagaactgttctgagttcacgtagcaaatgaaagttttacaa

SEQ ID NO: 571351 - DNA, 120 bp, Artificial Sequence
  ENSG00000170854_36 (sequence is synthesized)
ctgtactaatgaacaaaaaccctaagctttgttgtttggctttttctgctaattgttttgtttgtaaaactgcctatcttaattttcttcaagcataattttaaatgacttaacatttct

SEQ ID NO: 571352 - DNA, 120 bp, Artificial Sequence
  ENSG00000170854_37 (sequence is synthesized)
cttatacataaggatgtcctttacccaaaatgaggagatttggaactgaaactaatatccagggacacaacattgggtatcatcaaaggcccacctttaacatcaaggacaagttgatca

SEQ ID NO: 571353 - DNA, 120 bp, Artificial Sequence
  ENSG00000170854_38 (sequence is synthesized)
ctgagataagagctgatagttccatttttattcagtctccacttctgcctgaattgcccatgttcagtccatagagctactttagctccaggtgtgtcccggccaccaatcacatcaaga

SEQ ID NO: 571354 - DNA, 120 bp, Artificial Sequence
  ENSG00000170854_39 (sequence is synthesized)
catgtatcactggcctaaaagggttaagaaatgattaattggcagtagtatgtttgctaaagtaagttgaattaggtcccttttatcttaggtaaacaagtcatagacatgaagtgtgtg

SEQ ID NO: 571355 - DNA, 120 bp, Artificial Sequence
  ENSG00000170854_40 (sequence is synthesized)
tgtgtcttatctaaaaaaatactatatagtataatttcagtaagccttttttaatgtcttctttacggctgtgggtaggagatggtacagaaataaaccaactgaaatagaggtacttgt

SEQ ID NO: 571356 - DNA, 120 bp, Artificial Sequence
  ENSG00000170854_41 (sequence is synthesized)
ttttaataggatgtctacatctgacaacagatgttcaataaagatttggtgaattggaattaaatgttaaatccctgtttgcttaaaacgtattatgttgagcttggttttcttatgaaa

SEQ ID NO: 571357 - DNA, 120 bp, Artificial Sequence
  ENSG00000170854_42 (sequence is synthesized)
acattgcatgatgggctaaagatatccagacaataattacttttaaaagtttttcatttttgaagcatgagaaaaagtagataatccattggtgatacaataaaacacagtttgaatgtt

SEQ ID NO: 571358 - DNA, 120 bp, Artificial Sequence
  ENSG00000170854_43 (sequence is synthesized)
aggaaacagaggtttgtttcaactgaaaacaaatgcctatcctgtgacttgggtggtggttgggaagaattgattatttttgatttacaggtaatatgctttttatggctgcactgtgga

SEQ ID NO: 571359 - DNA, 120 bp, Artificial Sequence
  ENSG00000170854_44 (sequence is synthesized)
tataggaatggtataatgtaaaacatttcaaattactaatatcacttactacataaattaggatgccttttatatagaagttggcatcttttatgttatctaattgtagtgtgtctaaaa

SEQ ID NO: 571360 - DNA, 120 bp, Artificial Sequence
  ENSG00000170854_45 (sequence is synthesized)
tactcatgaggggtatcaaaaataatgatgtatggagaataaatttacaggaaaatgctacttcaatgacataagtagtatacatatattttgacaaataaatttatcctttcagtttca

SEQ ID NO: 571361 - DNA, 120 bp, Artificial Sequence
  ENSG00000170854_46 (sequence is synthesized)
aaagtctatggttaattttctgagagcttttaagagaaatcagtattgaagcctagcttcccacttttaactttgcaagtgagtgtctggaacggggagggaggaaacagggtggttgat

SEQ ID NO: 571362 - DNA, 120 bp, Artificial Sequence
  ENSG00000170854_47 (sequence is synthesized)
gaaggtcttagatttccatgctgagtaatgtccaattaatggaactcaaaatgcctggacagggaagccataatccaatttgtagcttttggctttactagcaataagtattttatgtat

SEQ ID NO: 571363 - DNA, 120 bp, Artificial Sequence
  ENSG00000170854_48 (sequence is synthesized)
tgctaggacagctctgagtcctggcctgcagcagccacattcaggagggatatgagggagttggcccctacctcctatgcaaaccccagggtttatgtcctttactgacttccacattcc

SEQ ID NO: 571364 - DNA, 120 bp, Artificial Sequence
  ENSG00000170854_49 (sequence is synthesized)
tttgatgtcccatgtatgtgactggtccctctggacttgcttctggggacatcatgaacctgactctgtaggatgtggggcattgcccaaatagagagtcacatagtttggaaagaaaga

SEQ ID NO: 571365 - DNA, 120 bp, Artificial Sequence
  ENSG00000170854_50 (sequence is synthesized)
gactagctgtgggtacatcagtgtgttagtgatgccaggctgggctcatactctctctctttttttttaatatgataaaatatatagaacataaaatataccattttaaaccattttaaa

SEQ ID NO: 571366 - DNA, 120 bp, Artificial Sequence
  ENSG00000170854_51 (sequence is synthesized)
gcttccaattcatttaccagcaaataattccgcaacgattggccgacagctgggttgtccaacaggttactgagaccaggttattcactgttttcaggaaggatagactgggaggaagag

SEQ ID NO: 571367 - DNA, 120 bp, Artificial Sequence
  ENSG00000170854_52 (sequence is synthesized)
gatctgatttcgccactcattagctgtaaatctggtgcctcgggtttcatgtcactgggctcatctttgagcagaggaacctgatttactcagcttcttctgctggtactggtttttgcc

SEQ ID NO: 571368 - DNA, 120 bp, Artificial Sequence
  ENSG00000170855_0 (sequence is synthesized)
accactgtcgccatgaacagtgtgggggaggcatgcacggacatgaagcgcgagtacgaccagtgcttcaatcgctggttcgccgagaaatttctcaagggggacagctccggggacccg

SEQ ID NO: 571369 - DNA, 120 bp, Artificial Sequence
  ENSG00000170855_1 (sequence is synthesized)
tgcaccgacctcttcaagcgctaccagcagtgtgttcagaaagcaataaaggagaaagagattcctattgaaggactggagttcatgggccatggcaaagaaaagcctgaaaattcttct

SEQ ID NO: 571370 - DNA, 120 bp, Artificial Sequence
  ENSG00000170855_2 (sequence is synthesized)
tgaccttgacagtcaccttgaaggatttcgcaagtccagaaattgaggactctggatttttgtcaactaactctgtgaacatagccatcagatttgatgaggaacttaggagagaggagt

SEQ ID NO: 571371 - DNA, 120 bp, Artificial Sequence
  ENSG00000170855_3 (sequence is synthesized)
tttatttcctccttcgatgttttcctctcagttgtaaaagatgaactctttgagatgatttctcacctgctgtggtatcttgcaggaactgtgtgctaaaattgaacaatttttttgaga

SEQ ID NO: 571372 - DNA, 120 bp, Artificial Sequence
  ENSG00000170855_4 (sequence is synthesized)
gtcaggatgagcagagctgcctgacctcttgatttctgctgcaaaagacatatacactgtactggggtcactatttatgaaagcaattggttaggacctctttttttcctctcagggaac

SEQ ID NO: 571373 - DNA, 120 bp, Artificial Sequence
  ENSG00000170855_5 (sequence is synthesized)
taatgctctgaaaagggatctgggcacaacagtttcagtgagtgcttttgagcacacttttatttttatatagtaactaatggttaagattgatggtggcctggattagcaaagaggaag

SEQ ID NO: 571374 - DNA, 120 bp, Artificial Sequence
  ENSG00000170855_6 (sequence is synthesized)
acagcttttaacacagttccctgccttcacaagaggtgtcagattaagatgtgaaagctgcaagaatgttgcagtgaacaccatttcagagctctcagtgtgcagttcaggaattaagat

SEQ ID NO: 571375 - DNA, 120 bp, Artificial Sequence
  ENSG00000170855_7 (sequence is synthesized)
acttggaatagctgtggaggaagaacctaaattgcaaagatctgctattgccagctctcaacccaagtcagtgaattgtcaacctgcatatcctaaaaatgtcaaaatgctgcatctggt

SEQ ID NO: 571376 - DNA, 120 bp, Artificial Sequence
  ENSG00000170855_8 (sequence is synthesized)
taaatgtcggggtaggggggaagctgaaggtgctcgcttcatttgccttgtttactcatcctgccctgtaatgtctgtaatcctgaagatggaataaattgtaacatttagtttctatca

SEQ ID NO: 571377 - DNA, 120 bp, Artificial Sequence
  ENSG00000170855_9 (sequence is synthesized)
caagcgctaccagcagtgtgttcaggtgagccctcccgcctctgttcccaggccctgcattctcggcgctgtgtcccaccacactcatcgtattttacggggattgggactggactggaa

SEQ ID NO: 571378 - DNA, 120 bp, Artificial Sequence
  ENSG00000170855_10 (sequence is synthesized)
gggtggagaaaagtcgcagtgaggccagtggcaggagctcgctcccctaccatcaccaccgaggccacttgggtgtctctccgaatgacaaatattggggcagtgcttttcaagaagcac

SEQ ID NO: 571379 - DNA, 120 bp, Artificial Sequence
  ENSG00000170860_0 (sequence is synthesized)
cttgtgttctcgcgagaggcgggaaagggcgcagggtttgaaacatggcggacgacgtagaccagcaacaaactaccaacactgtagaggagcccctggatcttatcaggctcagcctag

SEQ ID NO: 571380 - DNA, 120 bp, Artificial Sequence
  ENSG00000170860_1 (sequence is synthesized)
atgagcgaatttatgtgaaaatgagaaatgaccgagagcttcgaggcagattacatgcttatgatcaacatttaaatatgatcttgggagatgtggaagaaactgtgactactatagaaa

SEQ ID NO: 571381 - DNA, 120 bp, Artificial Sequence
  ENSG00000170860_2 (sequence is synthesized)
ttgatgaagaaacatatgaagagatatataaatcaacgaaacggaatattccaatgctctttgtccggggagatggcgttgtcctggttgcccctccactgagagttggctgaaacaaag

SEQ ID NO: 571382 - DNA, 120 bp, Artificial Sequence
  ENSG00000170860_3 (sequence is synthesized)
aatttgtcctgtatggaaaacgggagactttgtacagtggcctctctaaaagtacaaaacattcataagagaaacctgcatacattttgatattaagaaataattccggggattcttcca

SEQ ID NO: 571383 - DNA, 120 bp, Artificial Sequence
  ENSG00000170860_4 (sequence is synthesized)
ctcctgaaatgagttgatttgcagataactcacaacttcttaagctaaatggtattttcatttttctcaagctctccaataaatatgaccaccaagatgcagaactctttcaggacttct

SEQ ID NO: 571384 - DNA, 120 bp, Artificial Sequence
  ENSG00000170860_5 (sequence is synthesized)
tttgctccattattctcacagatacttactgatttttcttttctttaaattggtgtttccttgtagatttttttaagtgcggtcttctgtcttgtgaattatttaaagtaagcatgtctt

SEQ ID NO: 571385 - DNA, 120 bp, Artificial Sequence
  ENSG00000170860_6 (sequence is synthesized)
accttcacttagcacacatttgcagtgcacctactgtgtttgaggcaccaggtttgagtgctgggaaccagagttttatcaaaatgctttctgggccagacatggtggctcatgcctgta

SEQ ID NO: 571386 - DNA, 62 bp, Artificial Sequence
  ENSG00000170860_7 (sequence is synthesized)
agctactcaggaggctgaggcagtagacctggtcaacagagcgagactccgtgtcaaaaaaa

SEQ ID NO: 571387 - DNA, 120 bp, Artificial Sequence
  ENSG00000170860_8 (sequence is synthesized)
ctccgtgtcaaaaaaaaaaaaaaaaaagttttctgccctcaagtcttctggggaggcagatgtttaaaccaacaattgcaggcagtaagattagtgctgatagaatcatgcacatgcagg

SEQ ID NO: 571388 - DNA, 120 bp, Artificial Sequence
  ENSG00000170860_9 (sequence is synthesized)
caggatgccataggagcatggggaagagcacccaaatatgggagaaaggggcagagggacattgtaaacatcaaccctgcagtagaagacagagcaaagcatgatttctcttttctctgg

SEQ ID NO: 571389 - DNA, 120 bp, Artificial Sequence
  ENSG00000170860_10 (sequence is synthesized)
cctgatttaattctaaggtcagacgttcagcttgatcataacctgtttataattatgactcagaccatttttccactcttggatcattggccattaatgatgaggggtctcaaacaacat

SEQ ID NO: 571390 - DNA, 120 bp, Artificial Sequence
  ENSG00000170860_11 (sequence is synthesized)
gtctcagtgacacagtaaagcagaaattggctgaaagcaaagctgtttttatttctagcttcagtcagcacataatgcttaaaacctaaagaggaaagtaaaagcgtgttacaatctctc

SEQ ID NO: 571391 - DNA, 120 bp, Artificial Sequence
  ENSG00000170860_12 (sequence is synthesized)
gttcattatcaagcacgatatgctcacaaatgcacagtactttaagccttgtgcaagaaagatgctttcagtaaacatatttaaaaggttttattttccttactaatggtacatgcccct

SEQ ID NO: 571392 - DNA, 120 bp, Artificial Sequence
  ENSG00000170860_13 (sequence is synthesized)
gcaagttcatggagaagagaaaaacaagtgtgggtgagctgatggaggcttcatcttaggtgaggaggcaggagagacaccctcccttcacttgtgccatccccacgctttgtccttaag

SEQ ID NO: 571393 - DNA, 120 bp, Artificial Sequence
  ENSG00000170860_14 (sequence is synthesized)
ctgtagtggtcccaggagataacctgtttacagcagcccattcagtattgaaaaatgaactccctcctgcagaatgttagaagaaacaacctcaaagacctcaggccgcctgtggtcatt

SEQ ID NO: 571394 - DNA, 120 bp, Artificial Sequence
  ENSG00000170860_15 (sequence is synthesized)
agtatgtggcagcaagattgaacctgcctgcctcctacctgtgtgagcctgtggtgtgggtgtggtaccaaggccctggctctgggcagtctgttggctcctggtgttcactaaggcgtg

SEQ ID NO: 571395 - DNA, 120 bp, Artificial Sequence
  ENSG00000170860_16 (sequence is synthesized)
gggtgacaggccatctggcctcgctctgccagtctgcagttctccccagcactgcattcatttttagtggtttctgatagtcacactgaattcctggacactttcttctcttcattctta

SEQ ID NO: 571396 - DNA, 120 bp, Artificial Sequence
  ENSG00000170860_17 (sequence is synthesized)
gttatctttctcctttttctcctggaactgatagtttacactaaaacttttggctgtgaggacttgattatacacatttctaaaacccatgaaccttaatatctgacactgttactctca

SEQ ID NO: 571397 - DNA, 120 bp, Artificial Sequence
  ENSG00000170860_18 (sequence is synthesized)
tatgcacacacaactaaaacataccaacctacttcatttcctagctgctaagatacaaggggagggacaataaaaggttaactgcagaatagccacctatgtgtcaggaaatggagggag

SEQ ID NO: 571398 - DNA, 120 bp, Artificial Sequence
  ENSG00000170860_19 (sequence is synthesized)
gggaggcaatgtgtgagtccttttggagctgggactcaatccacaacagagacagctcaagcagggccctgccatggtccacactgaggtttcctctgcagtggtgctgtccactgaggg

SEQ ID NO: 571399 - DNA, 120 bp, Artificial Sequence
  ENSG00000170860_20 (sequence is synthesized)
gttatggtgtgagggcccctgggagccacgccttggacttctgagtctgcagagcactcggctccagccagctggatggcaggtggtcagtggagctggtgactggtggtttctgcaatg

SEQ ID NO: 571400 - DNA, 120 bp, Artificial Sequence
  ENSG00000170860_21 (sequence is synthesized)
aggtgtcagattagcctaagggaagcctcttcagcaagtatcatgcctggatcccggtcttggttgttttatgagaggccgatatgaattgccattgcctcccacaaagaaaaatggaca

SEQ ID NO: 571401 - DNA, 120 bp, Artificial Sequence
  ENSG00000170860_22 (sequence is synthesized)
aaatatgggaccacatctttgagatgaaatgtgcccaaaatgaaaagtaacttgagtatcccaagttaaacttaatcattagctgcaaatggacgattttcaaatttcaaatagtgattt

SEQ ID NO: 571402 - DNA, 120 bp, Artificial Sequence
  ENSG00000170860_23 (sequence is synthesized)
ttgaagatttgcccaaactagagtactatccctcttcacactaagaggcagaaagtggtttcacacacccttttatttaatcagctaaagtgggtgcggtgacacacacctgtaaactca

SEQ ID NO: 571403 - DNA, 120 bp, Artificial Sequence
  ENSG00000170860_24 (sequence is synthesized)
accactaaggagactgaggcgggaggattacttgagcccaggagttcgagatcagcctgagcaacataacaagaccctgtctcaaataatacttagctattacccatattgcttttagcc

SEQ ID NO: 571404 - DNA, 120 bp, Artificial Sequence
  ENSG00000170860_25 (sequence is synthesized)
tgctgccaggaggggagaaatgttattgtttgaacagatgtcagatgtgagtaatgctcagctgtgttcaatgtagaaaattaataaaagttccaggagtcatcctggctagatcaagaa

SEQ ID NO: 571405 - DNA, 120 bp, Artificial Sequence
  ENSG00000170871_0 (sequence is synthesized)
cagggccgcccggcgctcggcagccgcccgcagcccctcggagccagaggagaggcgcccccgccggccgccgcgccgcccggcagcctcggcaggtagtgtacactgataaaggtaggg

SEQ ID NO: 571406 - DNA, 120 bp, Artificial Sequence
  ENSG00000170871_1 (sequence is synthesized)
gtacactgataaaggtagggcgcggtggactctgcccctgtaaccgttccggagaatgcgttgagaatgaagacaaccagttctgccggagacttccatttggcctcaatgtgaaattaa

SEQ ID NO: 571407 - DNA, 120 bp, Artificial Sequence
  ENSG00000170871_2 (sequence is synthesized)
agtagaaaatcacatctacatgcatgttgctatcaggatgttgattcattagtcatgcctgaagagggaaagtctgttttaggtggctgactaccagcaaaaataaatgcttatcctaca

SEQ ID NO: 571408 - DNA, 120 bp, Artificial Sequence
  ENSG00000170871_3 (sequence is synthesized)
tgtcaagcatctctactttttactggagtgaaaatcccctccagataccaacagaatatcaactgcagaaaatgcttcacattttaaggatgtcggcaacctaaattcatgtaccctatc

SEQ ID NO: 571409 - DNA, 120 bp, Artificial Sequence
  ENSG00000170871_4 (sequence is synthesized)
tgtacagttgttgtggatggtttgccatctgaaagctcctcaagttcttatccaggccctgtgtctgtttctgaaatgtctctgcttcatgctttgggtccagtgcagacctggctggga

SEQ ID NO: 571410 - DNA, 120 bp, Artificial Sequence
  ENSG00000170871_5 (sequence is synthesized)
caagagctcgagaaatgtggcattgatgccatgatttacactcggtatgtcctcagtcttctgctgcatgacagctatgactacgacctgcaggaacaggagaatgacatcttcctgggc

SEQ ID NO: 571411 - DNA, 120 bp, Artificial Sequence
  ENSG00000170871_6 (sequence is synthesized)
tgggaaaaaggagcttataagaaatggggaaagagtaagaaaaaatgttcagatctaactctagaagaaatgaaaaaacaggctgctgtccagtgtcttcgatctgcttctgatgaaagc

SEQ ID NO: 571412 - DNA, 120 bp, Artificial Sequence
  ENSG00000170871_7 (sequence is synthesized)
tctggtatcgagactttagtggaggagctctgctccagactgaaagaccttcagagtaagcaagaagagaagattcacaaaaagttagaggggtctccctctccagaggcagaattatcc

SEQ ID NO: 571413 - DNA, 120 bp, Artificial Sequence
  ENSG00000170871_8 (sequence is synthesized)
cctccagcaaaggatcaagtggaaatgtactatgaagcatttccaccactttctgagaaaccagtttgcctgcaagaaatcatgactgtgtggaacaagtctaaagtctgttcttactct

SEQ ID NO: 571414 - DNA, 120 bp, Artificial Sequence
  ENSG00000170871_9 (sequence is synthesized)
agctcttcttcatcatccacagccccaccagctagcacagatacttcctctcctaaggactgcaacagtgaaagtgaagtcaccaaggaaagaagcagtgaagtacccaccactgtgcat

SEQ ID NO: 571415 - DNA, 120 bp, Artificial Sequence
  ENSG00000170871_10 (sequence is synthesized)
gagaaaacccagagcaaaagcaaaaacgagaaggaaaacaaatttagtaatggcacaattgaagaaaagcctgctttgtacaaaaagcaaatccgacataaacctgaaggaaagattcgc

SEQ ID NO: 571416 - DNA, 120 bp, Artificial Sequence
  ENSG00000170871_11 (sequence is synthesized)
cctcgctcgtggtcttctggctccagtgaagcaggctcaagttccagtgggaatcagggagaattaaaagcatccatgaagtatgttaaagtaagacacaaggcacgagagattcgaaac

SEQ ID NO: 571417 - DNA, 120 bp, Artificial Sequence
  ENSG00000170871_12 (sequence is synthesized)
aaaaaagggcggaatgggcaaagcaggctttctttgaagcacggtgaaaaggctgaaaggaacattcatactggaagtagtagcagtagcagcagtggttctgtcaaacagctgtgcaag

SEQ ID NO: 571418 - DNA, 120 bp, Artificial Sequence
  ENSG00000170871_13 (sequence is synthesized)
cggggtaagagacctttaaaagaaatagggagaaaagatcctgggagcactgaaggaaaagacctgtacatggagaatagaaaggacacagagtataaagaggagcccttgtggtacacc

SEQ ID NO: 571419 - DNA, 120 bp, Artificial Sequence
  ENSG00000170871_14 (sequence is synthesized)
gagccaattgctgaatattttgttcctctgagcagaaaaagtaaactagagaccacataccgaaacagacaggatacaagtgatctgacatcagaggcagtggaagaattgtctgaatca

SEQ ID NO: 571420 - DNA, 120 bp, Artificial Sequence
  ENSG00000170871_15 (sequence is synthesized)
gtgcatggtctttgtatcagcaacaataatcttcataaaacatacctcgcagcaggtactttcattgatggtcattttgtagaaatgcctgcagttataaatgaggatattgacctcact

SEQ ID NO: 571421 - DNA, 120 bp, Artificial Sequence
  ENSG00000170871_16 (sequence is synthesized)
gggacctcattatgttctctaccagaggacaataaatacctggatgatattcatctatcagaattaacgcacttctatgaagtggatattgatcaatccatgttggatcctggtgcctca

SEQ ID NO: 571422 - DNA, 120 bp, Artificial Sequence
  ENSG00000170871_17 (sequence is synthesized)
gaaacaatgcaaggagaaagtcggattttgaatatgattcgacagaaaagcaaagagaacacagattttgaggcagaatgttgcatagtgttagatggtatggagttgcaaggggaacgt

SEQ ID NO: 571423 - DNA, 120 bp, Artificial Sequence
  ENSG00000170871_18 (sequence is synthesized)
gcaatatggacagattctaccagctccgtaggtgctgagggcttattcctgcaggaccttggcaatctggctcagttttgggagtgctgttcatccagctccggtgatgctgatggggag

SEQ ID NO: 571424 - DNA, 120 bp, Artificial Sequence
  ENSG00000170871_19 (sequence is synthesized)
agttttggaggagactctccagttagactctctcccatcttagacagcacagtgctcaattcacacctgcttgctggcaatcaagagctcttttcagatattaatgaaggatctggtata

SEQ ID NO: 571425 - DNA, 120 bp, Artificial Sequence
  ENSG00000170871_20 (sequence is synthesized)
aactcttgtttttcagtgtttgaagtgcaatgcagtaattctgttttaccattttcttttgaaacactcaacttgggaaatgaaaatacagattctagtgctaatatgcttgggaaaaca

SEQ ID NO: 571426 - DNA, 120 bp, Artificial Sequence
  ENSG00000170871_21 (sequence is synthesized)
cagtctagattgctaatatggaccaaaaatagtgcctttgaagaaaatgaacactgttctaatctttcaacaagaacttgtagtccatggtcccattcagaagaaacacgttcagacaat

SEQ ID NO: 571427 - DNA, 120 bp, Artificial Sequence
  ENSG00000170871_22 (sequence is synthesized)
gaaacattaaatattcagtttgaagaatccacacagtttaatgccgaagatattaattatgtagttcctagagtctcgtcaaattatgtagatgaagaacttctagattttttgcaagat

SEQ ID NO: 571428 - DNA, 120 bp, Artificial Sequence
  ENSG00000170871_23 (sequence is synthesized)
gaaacttgccagcaaaacagtagaactttaggtgagattcctacattagttttcaaaaaaacatctaaactagaatccgtctgtggtattcagctagaacaaaaaacagaaaacaaaaat

SEQ ID NO: 571429 - DNA, 120 bp, Artificial Sequence
  ENSG00000170871_24 (sequence is synthesized)
tttgaaactacacaagtatgtaatgaaagtccacatggagatggctacagctcaggggttattaaagacatttggacaaagatggcagacacaaattctgtggctacagtagaaatagaa

SEQ ID NO: 571430 - DNA, 120 bp, Artificial Sequence
  ENSG00000170871_25 (sequence is synthesized)
agaactgatgctgagttgttttcggcagatgtaaataactactgctgctgtctagatgctgaagctgaactggagacccttcaggagcctgataaggctgtgcggaggtcagagtaccat

SEQ ID NO: 571431 - DNA, 120 bp, Artificial Sequence
  ENSG00000170871_26 (sequence is synthesized)
ctgtgggagggacagaaagagagcctggagaaaagagcatttgcttctagtgagctatcaaacgtggatggtggtgattatacaacaccctctaaaccctgggatgtagcccaagataaa

SEQ ID NO: 571432 - DNA, 120 bp, Artificial Sequence
  ENSG00000170871_27 (sequence is synthesized)
gaaaacacattcattcttggaggagtttatggagaactcaaaaccttcaatagtgatggggagtgggcagtcgtaccacctagtcacacaaaaggaagtctgttacagtgtgcagcttct

SEQ ID NO: 571433 - DNA, 120 bp, Artificial Sequence
  ENSG00000170871_28 (sequence is synthesized)
gatgttgtgacgatagctggtacagatgtctttatgaccccaggaaacagttttgctcctgggcacaggcagttatggaaacccttcgtgtcatttgaacagaatgatcagccgaagagt

SEQ ID NO: 571434 - DNA, 120 bp, Artificial Sequence
  ENSG00000170871_29 (sequence is synthesized)
ggggaaaatgggttaaataagggattttcttttatcttccatgaagacttactaggagcttgtggcaactttcaagtcgaagatcctggacttgaatactcattttcttcctttgactta

SEQ ID NO: 571435 - DNA, 120 bp, Artificial Sequence
  ENSG00000170871_30 (sequence is synthesized)
agcaatccattttcacaagttcttcatgtagaatgctcatttgaacctgaagggattgcatctttcagccccagttttaaaccgaaatcaatcctctgttctgattcagacagtgaagtg

SEQ ID NO: 571436 - DNA, 120 bp, Artificial Sequence
  ENSG00000170871_31 (sequence is synthesized)
tttcaccccaggatatgtggtgttgacagaacacaatacagggctattcggatctctcctcggactcactttcgcccaatttctgcatccgaactgtccccaggaggaggaagcgagtca

SEQ ID NO: 571437 - DNA, 120 bp, Artificial Sequence
  ENSG00000170871_32 (sequence is synthesized)
atatttgaagatccgcaggcagatctcaaacctttggaagaagatgcagagaaagaaggccattactatggaaaatcagagcttgagtctggaaaattccttcccaggttaaaaaaatct

SEQ ID NO: 571438 - DNA, 120 bp, Artificial Sequence
  ENSG00000170871_33 (sequence is synthesized)
gggatggaaaagagtgctcagacatcactggattcccaggaggaatcaactgggattctttcagtaggaaagcaaaatcagtgtttggaatgtagcatgaatgaatccctggaaatagat

SEQ ID NO: 571439 - DNA, 120 bp, Artificial Sequence
  ENSG00000170871_34 (sequence is synthesized)
ttagaaagctcagaagcaaattgtaaaataatggcacaatgcgaggaagaaattaataatttttgtggttgcaaagcaggttgtcagtttcctgcttatgaagataatccagtttcttcg

SEQ ID NO: 571440 - DNA, 120 bp, Artificial Sequence
  ENSG00000170871_35 (sequence is synthesized)
ggacagctggaagagttccctgtattgaacactgatatacaaggaatgaatagaagtcaagaaaaacagacctggtgggaaaaagccttgtactctcctctttttcctgcatcagagtgt

SEQ ID NO: 571441 - DNA, 120 bp, Artificial Sequence
  ENSG00000170871_36 (sequence is synthesized)
gaagaatgttacacaaatgccaagggagagagtggtttagaagaatatccagatgctaaagagacacccagtaatgaagagcgcctgttagattttaatagggtgtcttctgtttatgaa

SEQ ID NO: 571442 - DNA, 120 bp, Artificial Sequence
  ENSG00000170871_37 (sequence is synthesized)
gcaagatgtacaggagagagagattctggagcaaagtcagatggcttccgcggaaagatgtgctccagcgccagctccacctcggaagagacaggctcagaaggcggaggcgagtgggtg

SEQ ID NO: 571443 - DNA, 120 bp, Artificial Sequence
  ENSG00000170871_38 (sequence is synthesized)
ggccctagtgaagaggagctcttttctcgaactcatctctaaacctgcaaaatagtacaaattattgtttaaaaatgatatgtgatggaaaattactcttcagtgagacctgttaatcta

SEQ ID NO: 571444 - DNA, 120 bp, Artificial Sequence
  ENSG00000170871_39 (sequence is synthesized)
aaacaacaacttaggtttcctcttcaattaactgattcagattggtaataattatctttctcttcttgcttattttagagttgaggacagctatcctgttaaagattttttttcccagct

SEQ ID NO: 571445 - DNA, 120 bp, Artificial Sequence
  ENSG00000170871_40 (sequence is synthesized)
gttaaattcttggctatttgaaatagactagattgtgttgtcaaatcaagaatgggtgtgcatgtgcttgtcttagaagtatcactgctttttgcatcttaactgcagttaattttcctt

SEQ ID NO: 571446 - DNA, 120 bp, Artificial Sequence
  ENSG00000170871_41 (sequence is synthesized)
ccgactgcggttatatcactatgaccttactagcattgcagtgtcaacaaccacttctgctcttcagagacttcagctttggagcatttaggctttgttctccaagaactgggatatcca

SEQ ID NO: 571447 - DNA, 120 bp, Artificial Sequence
  ENSG00000170871_42 (sequence is synthesized)
ttcttaccctacagtggcttgatgcctttctgaaggcgagagggaagcctgggtgactcagcggtggtctccattcagcaaaatctcatgtacatttccagtaggaaccgcagaggtgtg

SEQ ID NO: 571448 - DNA, 120 bp, Artificial Sequence
  ENSG00000170871_43 (sequence is synthesized)
cttttcaagactcaccaaatactgtgttttctctcttaggatttcttttcccctaaagtatcacggaagatactatggttcgtgactttcttgctaactgaagaagccaaggatttgggg

SEQ ID NO: 571449 - DNA, 120 bp, Artificial Sequence
  ENSG00000170871_44 (sequence is synthesized)
tgtggggtcgtatgcgagacacagtggggtaagggtgcataccccaccccttacctgctctcatactgcagttacatttacaccaaaaccccatgcagggttctttgtggtgagtgttcc

SEQ ID NO: 571450 - DNA, 120 bp, Artificial Sequence
  ENSG00000170871_45 (sequence is synthesized)
atacgtgctaaggaccttagttacagattgttactttctggtgacctatgttgaattgaaacccccaaaacttgaaattgtgaacatttgacatgcagtaaaggccacctcatcacccag

SEQ ID NO: 571451 - DNA, 120 bp, Artificial Sequence
  ENSG00000170871_46 (sequence is synthesized)
agaaatctttggctgctgcagctagccgcttcttggctgtgatgtagtatagcttcgatctcattttgtgtttgagagaatgttctgggcaagttctgtgtgtggtgggttggggcgggt

SEQ ID NO: 571452 - DNA, 120 bp, Artificial Sequence
  ENSG00000170871_47 (sequence is synthesized)
agagtcatgagttttccacatccctgtgtggtggttttgctgactgtcgctccgtgggactggctcccgtttctccttggtgagcccggggagccggcgcatcttgtgagtcgcgtctgt

SEQ ID NO: 571453 - DNA, 120 bp, Artificial Sequence
  ENSG00000170871_48 (sequence is synthesized)
gcatggcgatccgctcctccggctctcatggcattgtgccacaggcagaggccaggaggagcagtatgtgcacagccgaaacattttacattttttacattgtttttcttttttaaccaa

SEQ ID NO: 571454 - DNA, 120 bp, Artificial Sequence
  ENSG00000170871_49 (sequence is synthesized)
ctcattgtttaaaaaacaaaaacaaaaaaaacctaatctgtgaaatcagcgtagcatgcctggagcatcaggaatggcagaaaagtctgatgcgctctagacagcttcaccactcatttg

SEQ ID NO: 571455 - DNA, 120 bp, Artificial Sequence
  ENSG00000170871_50 (sequence is synthesized)
ggcaggcagtaaacacacatataatttattagctgggagctgaactggctgtgaaatctatgatttgctttgaacatttgggttttgttgcctttttcttaattgataacacagaaaaga

SEQ ID NO: 571456 - DNA, 120 bp, Artificial Sequence
  ENSG00000170871_51 (sequence is synthesized)
aagtaccatcaaagactgtggagtcattgagggtctgtgtgtcctcaccgagagggacctggtgtgcccgccgggtcgatcttcccacgtgttagggtttatttttatacaacacatttt

SEQ ID NO: 571457 - DNA, 120 bp, Artificial Sequence
  ENSG00000170871_52 (sequence is synthesized)
tgtgtgtgtgtgtgtgcgcgcgtgcgcgcgcgcatgtgtaaggttttatgttgctgttatttatttacgaacttcagatacgtttttatgtatttttcattcttctggagcttcctaaaa

SEQ ID NO: 571458 - DNA, 120 bp, Artificial Sequence
  ENSG00000170871_53 (sequence is synthesized)
tttttcattcttctggagcttcctaaaaattgataagcatctgcactgaaatataatttaacagcaaaagtaaaaaaggattgaaagttgtaaattcctcatatcactacagtgacgatt

SEQ ID NO: 571459 - DNA, 120 bp, Artificial Sequence
  ENSG00000170871_54 (sequence is synthesized)
attctagaaatcgttgcttgtgtagcaaagaccaaataaatagatttcagacacaaccttgagcacagttgattttggacagctgctgtttattaggaaagggctccaggtggcaaaggt

SEQ ID NO: 571460 - DNA, 120 bp, Artificial Sequence
  ENSG00000170871_55 (sequence is synthesized)
gcacacttcctcagacacaggtgagaagatgcagcaccttccacaggtgaatgggacggattcgaagtgagcaaagggattcacaaattatgtatttatttgttttcatagttaagtagc

SEQ ID NO: 571461 - DNA, 120 bp, Artificial Sequence
  ENSG00000170871_56 (sequence is synthesized)
tgaagctcagaggctttcagcaacagagatgaaagtgtggctttttagttttgtgaatggatgatcacaaagaaaaagcatttttaaaaagttggcaaacgctgaaacgcactgtggtat

SEQ ID NO: 571462 - DNA, 120 bp, Artificial Sequence
  ENSG00000170871_57 (sequence is synthesized)
gaagcgcattgcatttccatagcactgaagtaccagtttccattcctgggctgagattgtttttcccgtggttgtattgttctgatttcacgtacaccagagtaactgatttttttttgt

SEQ ID NO: 571463 - DNA, 120 bp, Artificial Sequence
  ENSG00000170871_58 (sequence is synthesized)
ttgttttcttgtggagttaacaccaaataaaaattgtaaaaaacagtttgttgtttttatttctcatagcaaagcttcttttgtaaagaactccagcttccttttactcatgagcatccg

SEQ ID NO: 571464 - DNA, 120 bp, Artificial Sequence
  ENSG00000170871_59 (sequence is synthesized)
tggaagagcaagtgcccaggttacatttgttctagatggaggtcatttagctctcattgcagacactgctgaaaacattgtgcagctttgctagggaagaaagtggtgtggcctgctgag

SEQ ID NO: 571465 - DNA, 120 bp, Artificial Sequence
  ENSG00000170871_60 (sequence is synthesized)
aaatcagcggctcctccccatctcacccccagcacacgcagggactactacctgagtctgcaaaacacatagcatttttgtccgtggatggtacacaaagctcaatctttttgttttctt

SEQ ID NO: 571466 - DNA, 120 bp, Artificial Sequence
  ENSG00000170871_61 (sequence is synthesized)
ctggggaaaaaattaaatctttatatgttaatatgattgatattcattgtgcaaaaaaaatcagtgtgtttttaaagaagtataagggaaaaggaaaactcatatgtccttctgtcactc

SEQ ID NO: 571467 - DNA, 120 bp, Artificial Sequence
  ENSG00000170871_62 (sequence is synthesized)
tgagacatacactggtaacatctgtgcaagcccctttccaggattctgaatgtacagtatatatgaatgcatacacagagaaatttacattcaagagtgtactatacttgttcttctata

SEQ ID NO: 571468 - DNA, 120 bp, Artificial Sequence
  ENSG00000170871_63 (sequence is synthesized)
acatcagaaataggtttttactcagatgtcttcatgtcggtaattatagaactacataattatttttatagctgtattatgtagatttaacaggttcctcattgataaaacaatgttttt

SEQ ID NO: 571469 - DNA, 120 bp, Artificial Sequence
  ENSG00000170871_64 (sequence is synthesized)
ttggttgtttattcagtatctgaataacgtttctatggacatctgtaaacatgtatgaggggacttttaaaagttcatggaaaatggaattaaaagaaaaataaaaaaatataaacttta

SEQ ID NO: 571470 - DNA, 120 bp, Artificial Sequence
  ENSG00000170871_65 (sequence is synthesized)
ccggcgctcggcagccgcccgcagcccctcggagccagaggagaggcgcccccgccggccgccgcgccgcccggcagcctcggcaggttctgccggagacttccatttggcctcaatgtg

SEQ ID NO: 571471 - DNA, 120 bp, Artificial Sequence
  ENSG00000170871_66 (sequence is synthesized)
agtagtgtaaaggaaacgaaaccccatatttcagagccaggagcctgggttcacattctgtctcctgcaagaggtggtttagcaaggtcagaaggccctgtccactcggtagcagccagg

SEQ ID NO: 571472 - DNA, 120 bp, Artificial Sequence
  ENSG00000170871_67 (sequence is synthesized)
cttgggtgaaatcactttctttcagcctcagcttcctcaccagttaaatgcggatgacaaagatttgtcccacgatttttgtaaagaacaaaaagatatgttcgcagaaaaaacactctg

SEQ ID NO: 571473 - DNA, 120 bp, Artificial Sequence
  ENSG00000170871_68 (sequence is synthesized)
tccagtgtttcagcatctgcttctcccacaagcccgtgagctggtgcaggaaattctccaacaggttctgaacagaaaagcatagtgcctggcacctagtgggtgctgcataaatgaaca

SEQ ID NO: 571474 - DNA, 120 bp, Artificial Sequence
  ENSG00000170871_69 (sequence is synthesized)
aatgaccccaggttctgccggagacttccatttggcctcaatgtgaaattaaagtagaaaatcacatctacatgcatgttgctatcaggatgttgattcattagtcatgcctgaagaggg

SEQ ID NO: 571475 - DNA, 120 bp, Artificial Sequence
  ENSG00000170873_0 (sequence is synthesized)
gcggccgcagctgcgagcaacagatccggacgccgcgagctgacccgctctgctgttgggcgatttttttttaattgcagaaaaatttattaaattggaaaatcttgcgtttttcaatgg

SEQ ID NO: 571476 - DNA, 120 bp, Artificial Sequence
  ENSG00000170873_1 (sequence is synthesized)
cgctggccccgggtcagcgggcgattttctctgcatcaagatgggctttgccgtttccgtagtgggcaccagtggtggcctgattgtcagtcttctcccggcatttttaaggccaggagc

SEQ ID NO: 571477 - DNA, 120 bp, Artificial Sequence
  ENSG00000170873_2 (sequence is synthesized)
cgagcgctgcttgtaggcgaataccctacagagcggtttggctttttaaattactgttattattttgggcagagaacagtcggtctggtgcaccccgtcctcgctgcagaagaggctgcg

SEQ ID NO: 571478 - DNA, 120 bp, Artificial Sequence
  ENSG00000170873_3 (sequence is synthesized)
agtccgaggtgggtctctcggaaggtgaaattccttctggggtgagcgagccccggccccgcgcgcagtccagcggccccgcgtgtgtgccctcgccctgccggagccgggaaaatggag

SEQ ID NO: 571479 - DNA, 120 bp, Artificial Sequence
  ENSG00000170873_4 (sequence is synthesized)
gctgtgattgagaaggaatgcagcgcgctcggaggcctcttccagaccatcatcagcgacatgaaggggagctatccagtttgggaagatttcataaacaaagcaggaaagctgcagtcc

SEQ ID NO: 571480 - DNA, 120 bp, Artificial Sequence
  ENSG00000170873_5 (sequence is synthesized)
cagcttcggacaacagtagtagcagcagctgccttcttggacgcctttcagaaagtggctgacatggccaccaacacacgtggtgggaccagggagattggatctgctctcaccaggatg

SEQ ID NO: 571481 - DNA, 120 bp, Artificial Sequence
  ENSG00000170873_6 (sequence is synthesized)
tgcatgaggcacagaagcattgaagccaagctgaggcagttttcgagcgctttaattgattgtctgataaacccacttcaagaacagatggaagaatggaagaaagtggccaaccagctg

SEQ ID NO: 571482 - DNA, 120 bp, Artificial Sequence
  ENSG00000170873_7 (sequence is synthesized)
gataaagaccacgcaaaagaatataagaaagcccgccaagagataaaaaagaagtcctcggatacgctgaaactgcagaagaaagcaaaaaaagggagaggtgatatccagcctcagttg

SEQ ID NO: 571483 - DNA, 120 bp, Artificial Sequence
  ENSG00000170873_8 (sequence is synthesized)
gacagtgctctccaagatgtcaatgataagtatctcttattggaagaaacagaaaagcaggctgtccggaaggctttgattgaagaacgtggccgattctgtaccttcatctctatgctg

SEQ ID NO: 571484 - DNA, 120 bp, Artificial Sequence
  ENSG00000170873_9 (sequence is synthesized)
cggccagtgattgaagaagaaatctcaatgctaggggaaataacccaccttcagaccatctcggaagatctaaaaagcctgaccatggaccctcacaaactgccctcctcaagtgaacag

SEQ ID NO: 571485 - DNA, 120 bp, Artificial Sequence
  ENSG00000170873_10 (sequence is synthesized)
gtgattctggacttgaaaggttctgattacagctggtcgtatcagacgccaccctcttcccccagcaccaccatgtccagaaagtccagtgtctgcagcagcctgaacagtgtcaacagc

SEQ ID NO: 571486 - DNA, 120 bp, Artificial Sequence
  ENSG00000170873_11 (sequence is synthesized)
agtgactcccggtccagcggctcccactcgcattcccccagctcacattaccgctaccgcagctccaacctggcccagcaggctcctgtgaggctgtccagcgtgtcctcccatgactca

SEQ ID NO: 571487 - DNA, 120 bp, Artificial Sequence
  ENSG00000170873_12 (sequence is synthesized)
ggattcatatcccaggatgccttccagtccaagtcaccatcccccatgccgccagaggcccccaaccagttgtctaacgggttttctcactatagtttatcaagtgagtcccacgtgggg

SEQ ID NO: 571488 - DNA, 120 bp, Artificial Sequence
  ENSG00000170873_13 (sequence is synthesized)
cccacgggtgcaggccttttccctcattgcctgcctgcctcccgcctgctccctcgggtcacctctgtccaccttccagactacgctcattattacaccattgggcccggcatgttcccg

SEQ ID NO: 571489 - DNA, 120 bp, Artificial Sequence
  ENSG00000170873_14 (sequence is synthesized)
tcatctcagatccctagctggaaggactgggctaagcctgggccctatgaccagcctctggtgaacaccctgcagcgccgcaaagagaagcgagaaccggaccccaacgggggaggaccc

SEQ ID NO: 571490 - DNA, 120 bp, Artificial Sequence
  ENSG00000170873_15 (sequence is synthesized)
actaccgccagcggcccacctgcagcagctgaggaggctcagagaccacggagcatgactgtatcggctgccaccaggcctggtgaggagatggaggcttgtgaggagctggccctggcc

SEQ ID NO: 571491 - DNA, 120 bp, Artificial Sequence
  ENSG00000170873_16 (sequence is synthesized)
ctgtctcggggcctgcagctggacacccagaggagcagccgggactcgcttcagtgctccagcggctacagcacccagacaaccaccccctgctgctctgaggacaccatcccttcccaa

SEQ ID NO: 571492 - DNA, 120 bp, Artificial Sequence
  ENSG00000170873_17 (sequence is synthesized)
gtttcagattatgattatttctctgtaagtggtgaccaggaggcagatcagcaggagttcgacaagtcctccaccattccaagaaacagcgacatcagccagtcctaccgacggatgttc

SEQ ID NO: 571493 - DNA, 120 bp, Artificial Sequence
  ENSG00000170873_18 (sequence is synthesized)
caagccaagcgtccagcctcaactgctggcctccccaccaccctgggacctgctatggtcactccaggggttgcaactatccgacggaccccttccaccaagccttctgtccgccgggga

SEQ ID NO: 571494 - DNA, 120 bp, Artificial Sequence
  ENSG00000170873_19 (sequence is synthesized)
accattggagctggtcccatccccatcaagacacccgtgatccctgtcaagaccccaaccgtcccagacctcccaggggtgttgccagcccctccagatgggccagaagagcggggggag

SEQ ID NO: 571495 - DNA, 120 bp, Artificial Sequence
  ENSG00000170873_20 (sequence is synthesized)
ggtgagggcccccaaggtgtcaccagcatgccctcctcaatgtggagcggccaagcttccgttaaccctccacttccaggcccgaagcccagtatccctgaggagcacagacaggcaatt

SEQ ID NO: 571496 - DNA, 120 bp, Artificial Sequence
  ENSG00000170873_21 (sequence is synthesized)
ccagaaagtgaagctgaagaccaggaacgggaacccccaagtgccactgtctccccaggccagattccagagagtgaccctgcagacctgagcccaagggatactccacaaggagaagac

SEQ ID NO: 571497 - DNA, 120 bp, Artificial Sequence
  ENSG00000170873_22 (sequence is synthesized)
atgctgaacgccatccgaaggggcgtgaaactgaagaagaccacgacaaacgatcgctcagcccctcgcttttcttaggttcacaagaaatgcgccggtggggaatgaactgtttcatta

SEQ ID NO: 571498 - DNA, 120 bp, Artificial Sequence
  ENSG00000170873_23 (sequence is synthesized)
ataaaacctaatttgtcttgatccattccactctataataaaacaaaagattttgtaggcaactcggaatatagctcttttgaaagtactcgacacctttagataagaattaaaaccaac

SEQ ID NO: 571499 - DNA, 120 bp, Artificial Sequence
  ENSG00000170873_24 (sequence is synthesized)
ctatgtaactgacataatcttgatcttttaatttgtaaatattgacaattttctttctgcacattttaatcttagtttcccttttgatttttctgaaggtgccaaattccatttaacttt

SEQ ID NO: 571500 - DNA, 120 bp, Artificial Sequence
  ENSG00000170873_25 (sequence is synthesized)
tttacaagtctttgtaaaattttaaatgcataaagggggttggggcaggggaaccacgaagtagttaattttagaaaaggatttactatacttcactcttctttttttttccccacaagc

SEQ ID NO: 571501 - DNA, 120 bp, Artificial Sequence
  ENSG00000170873_26 (sequence is synthesized)
ttttgtagatgcattgtagtagtctagcttagaagcaaatgcaagttattttaatgtacaaactaaatgggtaagaggtaaaatcttcatttaaatatactatgttctggatgaaaagag

SEQ ID NO: 571502 - DNA, 120 bp, Artificial Sequence
  ENSG00000170873_27 (sequence is synthesized)
caggagtaacaattgatgagcaatattcagagtgaagtaaatctggaaatggtagactgtgttgggattggggggagggccatgggaggggtacatcgtcaacatagccgatcctgttac

SEQ ID NO: 571503 - DNA, 120 bp, Artificial Sequence
  ENSG00000170873_28 (sequence is synthesized)
atttaagagtagcctcgtaggttgaatttcttctggtagcttcatggtaaatgcatccgaataagccatactggattgcagtgtttgtttctgtagggtgtttaaggacttgacttcctt

SEQ ID NO: 571504 - DNA, 120 bp, Artificial Sequence
  ENSG00000170873_29 (sequence is synthesized)
tctcccatgattcctctggactgcacacagcacccacaaccagccccatgcatgctgctgcctctgggcagtcgtagaatctcccacttcagtttctcgttgattgtactcacctttatg

SEQ ID NO: 571505 - DNA, 120 bp, Artificial Sequence
  ENSG00000170873_30 (sequence is synthesized)
gaatccaaatacatccaaaagggtaaggcagttttaaaaatgtgaaaacatttaaaaatgataatagcagggaattcttagattatagtaaatgccttttacttaactgtgcccagcagg

SEQ ID NO: 571506 - DNA, 120 bp, Artificial Sequence
  ENSG00000170873_31 (sequence is synthesized)
ctgggtgcgttaaaaagcccaagtattttgaaaaaactcgaacagatttgacaagggtagccagcttggagtctagcaacttgccaatgtgtttaccaatctgggggcttgtttttcttt

SEQ ID NO: 571507 - DNA, 120 bp, Artificial Sequence
  ENSG00000170873_32 (sequence is synthesized)
tcttctttcaaataaatggcagttaactggctttacagtaaacattgaagagaggaggatttgtttattgtcactgggaatctgaccactatactgtcctttttttgtattctgggtaaa

SEQ ID NO: 571508 - DNA, 120 bp, Artificial Sequence
  ENSG00000170873_33 (sequence is synthesized)
tgttttttggaaaagatttgtcttttctaagtggaagttaaatttgttatactgcccatcccctaaagccaacagagatttgtagatttaaagggatcacatttgaagacaatagtgttt

SEQ ID NO: 571509 - DNA, 120 bp, Artificial Sequence
  ENSG00000170873_34 (sequence is synthesized)
aagaaagcaagcaagtcccttagcagtcaggtcataacagggcacatttctgaccgaaccctctcaaggcagaggaggagtttggtgggtttcatacaccctgcagattcctgttggctc

SEQ ID NO: 571510 - DNA, 120 bp, Artificial Sequence
  ENSG00000170873_35 (sequence is synthesized)
taaccctcaattacctaatcttatgctttaacacataactgcattggatgtgagagtaacgtaccgtatggtcattgttctatatattaacattgaacactgctgcgattgctcaaggac

SEQ ID NO: 571511 - DNA, 120 bp, Artificial Sequence
  ENSG00000170873_36 (sequence is synthesized)
attttatgttacggctttaaagcaaaggcatgattattagaaactatttaagcttttttctttgaaaaacaagctccttttacagaatataaacaacagtagtgcctgtggtttagccca

SEQ ID NO: 571512 - DNA, 120 bp, Artificial Sequence
  ENSG00000170873_37 (sequence is synthesized)
ccaatcttgatgactaaaagtagctgatgcattgtgcatatgatgcttgagatggtttttgcaaaagcagaaatcgctgcaaggtaatcacaatagataaaagtggtattttaaaccttt

SEQ ID NO: 571513 - DNA, 120 bp, Artificial Sequence
  ENSG00000170873_38 (sequence is synthesized)
gaaataaatggatgtaactgtaccttggtacagcttttcacttgtttagtttttaaacgttagtataatctgaataaataaaatgttgccaaattcaatgtagaaagaatgtgacaacac

SEQ ID NO: 571514 - DNA, 120 bp, Artificial Sequence
  ENSG00000170873_39 (sequence is synthesized)
accttgggtagttctgcttgtgtttttgcatattgtaaaagcagtgtcacagctaaaaagaaagaaatcgtttctaacagtaaattattgtgctttagttgctagtttgtactgagagtt

SEQ ID NO: 571515 - DNA, 120 bp, Artificial Sequence
  ENSG00000170873_40 (sequence is synthesized)
gacctctccctgtgcagttttttgttctaaacttgtataaataacaattgtgtaatgtgtctccctcctacattgtaacaattgcttcagcctacgttataaataaagaaccactagatt

SEQ ID NO: 571516 - DNA, 120 bp, Artificial Sequence
  ENSG00000170873_41 (sequence is synthesized)
ccagaggcccccaaccagaactcgtccagctcggcctcctccgaagcctcggaaacctgccagtcagtgagcgagtgcagctcccccacctctgtcagctcgggctccaccatgggtgcc

SEQ ID NO: 571517 - DNA, 120 bp, Artificial Sequence
  ENSG00000170873_42 (sequence is synthesized)
agggttttggaatggtggctgtgggttcggttcccttggcaccacatctgggtcatgcatgtgcttgtgaccagcttttactccacgtgcaggcagtactcttaaagagtgatttttttt

SEQ ID NO: 571518 - DNA, 120 bp, Artificial Sequence
  ENSG00000170873_43 (sequence is synthesized)
agtcttggcagaggagacaaaaagtaaagagacaatggcaggacgggtgtgacggggcacaggggtctggtttaggcagagaggcgggtcccttggaggcagagcatgggaaatgctgct

SEQ ID NO: 571519 - DNA, 120 bp, Artificial Sequence
  ENSG00000170873_44 (sequence is synthesized)
aagatgcagcttaagttatcagagctgagctgactcgtattttcccattttttaaaactctgtgggattccacatattagaagttgcaactagttttctggataataaagcacatgtgaa

SEQ ID NO: 571520 - DNA, 120 bp, Artificial Sequence
  ENSG00000170873_45 (sequence is synthesized)
gaagaatgaaaaaggaagaaaatgaaccactgtttctgcacgagttggcttgatgggttctttgatcactttaatgacgtgctggttgttgaaccttgagctgtgcctttggttgcaatt

SEQ ID NO: 571521 - DNA, 120 bp, Artificial Sequence
  ENSG00000170873_46 (sequence is synthesized)
tgcgttttcctccttacgtgggttttccttgtttccttgtggaatgggaagcagtagggatgattggatagaccatttttctgagtttccataaaatgaagaacccttttaaaataagga

SEQ ID NO: 571522 - DNA, 120 bp, Artificial Sequence
  ENSG00000170873_47 (sequence is synthesized)
aatttctagtgctggtcaaatagggcagaaatgaccactgaatatcaagtggttaaaatgcgctaccaacaagtctgggaaccatgattaactttatggcattacaagaggaaaatcctg

SEQ ID NO: 571523 - DNA, 120 bp, Artificial Sequence
  ENSG00000170873_48 (sequence is synthesized)
taaattctagccttgggtataaatggctgttataaattattaattggtcactgtatttctccctctctcgactgatatttcatgattttccttttcccttcctttccttctccctattaa

SEQ ID NO: 571524 - DNA, 120 bp, Artificial Sequence
  ENSG00000170873_49 (sequence is synthesized)
tgccctttagagcctggagagggcatgcagagggcctgtggcttgtcccagccggaggttccccttaaggggaccagctgccttctctggggagctgtctatggggtccccgcagccctc

SEQ ID NO: 571525 - DNA, 120 bp, Artificial Sequence
  ENSG00000170873_50 (sequence is synthesized)
tagctggttggggccacctcagcctggctggggatcacattctggccagcaactggggggccaaggcagccttgcagctggagggacctgggctccattccctgacttcctgctctacag

SEQ ID NO: 571526 - DNA, 120 bp, Artificial Sequence
  ENSG00000170873_51 (sequence is synthesized)
caaagtccctgggaaaaaaaccttgtgtgggaatgagagaggcagaactttctagggtcagagtgggacccaagcaagtcaatagccccctggccccacagacatgtagtgctcacgggg

SEQ ID NO: 571527 - DNA, 120 bp, Artificial Sequence
  ENSG00000170873_52 (sequence is synthesized)
tttatttataaatattcaggtttcccctcccttgaatgtcaatgccattttgtatctccgcactcatcctgttatattaattttttttccttccccccccctttttttgtttgtttccag

SEQ ID NO: 571528 - DNA, 120 bp, Artificial Sequence
  ENSG00000170873_53 (sequence is synthesized)
gtgagaaggcaagtcatgaagagttgccccaggacattttccttgtcaggaataagccaggctaaatgtgccctttgggcattgaaaattggaaatggctggtcctagaaaaacagctgc

SEQ ID NO: 571529 - DNA, 120 bp, Artificial Sequence
  ENSG00000170873_54 (sequence is synthesized)
cttaaatccttttggggcatgaataaatactttttttacatcctggaaaattgtggttttgactccagcaaggaccccagggaggaggggcacttgttccagaagctggtatttcagcaa

SEQ ID NO: 571530 - DNA, 120 bp, Artificial Sequence
  ENSG00000170873_55 (sequence is synthesized)
gccaccaacacacgtggcactatcatgggaccacaaaaagcaatatgactctccttgtcctggagcggcttacaattgagtggggaaaatgagaagtataaataaagaatttcaacatag

SEQ ID NO: 571531 - DNA, 120 bp, Artificial Sequence
  ENSG00000170876_0 (sequence is synthesized)
tttgcagtgcgcaggcgcatcaatgaggtactgcaatgtcccggaccgtatagtttccaggacgtctcgccgcgcgcatgcgcagaaacactgggcacagggggaggtaactgcagtaag

SEQ ID NO: 571532 - DNA, 120 bp, Artificial Sequence
  ENSG00000170876_1 (sequence is synthesized)
tcccgcttggccctggagtccacgcggattttcgaagctggggctggcaagaggccgctggacaccacgctccagtcgtcagcccacttcctagctgaacagcgcgaggcggcggcagcg

SEQ ID NO: 571533 - DNA, 120 bp, Artificial Sequence
  ENSG00000170876_2 (sequence is synthesized)
agccgggtcccaccatggccgcgaattattccagtaccagtacccggagagaacatgtcaaagttaaaaccagctcccagccaggcttcctggaacggctgagcgagacctcgggtggga

SEQ ID NO: 571534 - DNA, 120 bp, Artificial Sequence
  ENSG00000170876_3 (sequence is synthesized)
tgtttgtggggctcatggccttcctgctctccttctacctaattttcaccaatgagggccgcgcattgaagacggcaacctcattggctgaggggctctcgcttgtggtgtctcccgaca

SEQ ID NO: 571535 - DNA, 120 bp, Artificial Sequence
  ENSG00000170876_4 (sequence is synthesized)
gcatccacagtgtggctccggagaatgaaggaaggctggtgcacatcattggcgccttacggacatccaagcttttgtctgatccaaactatggggtccatcttccggctgtgaaactgc

SEQ ID NO: 571536 - DNA, 120 bp, Artificial Sequence
  ENSG00000170876_5 (sequence is synthesized)
ggaggcacgtggagatgtaccaatgggtagaaactgaggagtccagggagtacaccgaggatgggcaggtgaagaaggagacgaggtattcctacaacactgaatggaggtcagaaatca

SEQ ID NO: 571537 - DNA, 120 bp, Artificial Sequence
  ENSG00000170876_6 (sequence is synthesized)
tcaacagcaaaaacttcgaccgagagattggccacaaaaaccccagtgccatggcagtggagtcattcatggcaacagccccctttgtccaaattggcaggtttttcctctcgtcaggcc

SEQ ID NO: 571538 - DNA, 120 bp, Artificial Sequence
  ENSG00000170876_7 (sequence is synthesized)
tcatcgacaaagtcgacaacttcaagtccctgagcctatccaagctggaggaccctcatgtggacatcattcgccgtggagactttttctaccacagcgaaaatcccaagtatccagagg

SEQ ID NO: 571539 - DNA, 120 bp, Artificial Sequence
  ENSG00000170876_8 (sequence is synthesized)
tgggagacttgcgtgtctccttttcctatgctggactgagcggcgatgaccctgacctgggcccagctcacgtggtcactgtgattgcccggcagcggggtgaccagctagtcccattct

SEQ ID NO: 571540 - DNA, 120 bp, Artificial Sequence
  ENSG00000170876_9 (sequence is synthesized)
ccaccaagtctggggataccttactgctcctgcaccacggggacttctcagcagaggaggtgtttcatagagaactaaggagcaactccatgaagacctggggcctgcgggcagctggct

SEQ ID NO: 571541 - DNA, 120 bp, Artificial Sequence
  ENSG00000170876_10 (sequence is synthesized)
ggatggccatgttcatgggcctcaaccttatgacacggatcctctacaccttggtggactggtttcctgttttccgagacctggtcaacattggcctgaaagcctttgccttctgtgtgg

SEQ ID NO: 571542 - DNA, 120 bp, Artificial Sequence
  ENSG00000170876_11 (sequence is synthesized)
ccacctcgctgaccctgctgaccgtggcggctggctggctcttctaccgacccctgtgggccctcctcattgccggcctggcccttgtgcccatccttgttgctcggacacgggtgccag

SEQ ID NO: 571543 - DNA, 120 bp, Artificial Sequence
  ENSG00000170876_12 (sequence is synthesized)
ccaaaaagttggagtgaaaagaccctggcacccgcccgacacctgcgtgagccctaggatccaggtcctctctcacctctgacccagctccatgccagagcaggagccccggtcaatttt

SEQ ID NO: 571544 - DNA, 120 bp, Artificial Sequence
  ENSG00000170876_13 (sequence is synthesized)
taagcagctttggtgggcagcagcagctcatgaatggcaagctgacagcttctcctgctgtttccttcctctcttggactgagtgggtacggccagccactcagcccattggcagctgac

SEQ ID NO: 571545 - DNA, 120 bp, Artificial Sequence
  ENSG00000170876_14 (sequence is synthesized)
aacgcagacacgctctacggaggcctgctgataaagggctcagccttgccgtgtgctgcttctcatcactgcacacaagtgccatgctttgccaccaccaccaagcacatctgtgatcct

SEQ ID NO: 571546 - DNA, 120 bp, Artificial Sequence
  ENSG00000170876_15 (sequence is synthesized)
gaagggcggccgttagtcattactgctgagtcctgggtcaccagcagacacactgggcatggacccctcaaagcaggcacacccaaaacacaagtctgtggctagaacctgatgtggtgt

SEQ ID NO: 571547 - DNA, 120 bp, Artificial Sequence
  ENSG00000170876_16 (sequence is synthesized)
ttaaaagagaagaaacactgaagatgtcctgaggagaaaagctggacatatactgggcttcacacttatcttatggcttggcagaatctttgtagtgtgtgggatctctgaaggccctat

SEQ ID NO: 571548 - DNA, 120 bp, Artificial Sequence
  ENSG00000170876_17 (sequence is synthesized)
ttaagtttttcttcgttactttgctgcttcatgtgtactttcctaccccaagaggaagttttctgaaataagatttaaaaacaaaacaaaaaaaacacttaatatttcagactgttacag

SEQ ID NO: 571549 - DNA, 120 bp, Artificial Sequence
  ENSG00000170876_18 (sequence is synthesized)
gaaacaccctttagtctgtcagttgaattcagagcactgaaaggtgttaaattggggtatgtggtttgattgataaaaagttacctctcagtattttgtgtcactgagaagctttacaat

SEQ ID NO: 571550 - DNA, 120 bp, Artificial Sequence
  ENSG00000170876_19 (sequence is synthesized)
ggatgcttttgaaacaagtatcagcaaaaggatttgttttcactctgggaggagagggtggagaaagcacttgctttcatcctctggcatcggaaactcccctatgcacttgaagatggt

SEQ ID NO: 571551 - DNA, 120 bp, Artificial Sequence
  ENSG00000170876_20 (sequence is synthesized)
ttaaaagattaaagaaacgattaagagaaaaggttggaagctttatactaaatgggctccttcatggtgacgccccgtcaaccacaatcaagaactgaggcctgaggctggttgtacaat

SEQ ID NO: 571552 - DNA, 120 bp, Artificial Sequence
  ENSG00000170876_21 (sequence is synthesized)
gcccacgcctgcctggctgctttcacctgggagtgctttcgatgtgggcacctgggcttcctagggctgcttctgagtggttctttcacgtgttgtgtccatagctttagtcttcctaaa

SEQ ID NO: 571553 - DNA, 120 bp, Artificial Sequence
  ENSG00000170876_22 (sequence is synthesized)
taagatccacccacacctaagtcacagaatttctaagttccccaactactctcacacccttttaaagataaagtatgttgtaaccaggatgtcttaaatgattctttgtgtaccttttct

SEQ ID NO: 571554 - DNA, 120 bp, Artificial Sequence
  ENSG00000170876_23 (sequence is synthesized)
gtcatattcagaaaccgttttgtgcctgctgggagtaattcctttagcaattaagtatttggtagctgaataaggggtcagaacttctgaaaccagagatctgtaatcatctctattggc

SEQ ID NO: 571555 - DNA, 120 bp, Artificial Sequence
  ENSG00000170876_24 (sequence is synthesized)
ctggggtgcctgtgctataaatgagtttcttcacatgaaaaacacagccagcccaagatgacttatctgggtttaggattcaatagtattcactaactgcttattacatgagcaatttca

SEQ ID NO: 571556 - DNA, 120 bp, Artificial Sequence
  ENSG00000170876_25 (sequence is synthesized)
tcaaatctccaaactcttaaaggatgctttcggaaaacacgctgtatacctagatgatgactaaatgcaaaatccttgggctttggtttttttctagtaaggattttaaataactgccga

SEQ ID NO: 571557 - DNA, 120 bp, Artificial Sequence
  ENSG00000170876_26 (sequence is synthesized)
ccgacttcaaaagtgttcttaaaacgaaagataatgttaagaaaaatttgaaagctttggaaaaccaaatttgtaatatcattgtattttttattaaaagttttgtaataaatttctaaa

SEQ ID NO: 571558 - DNA, 120 bp, Artificial Sequence
  ENSG00000170876_27 (sequence is synthesized)
cacactgtggtatagtcataaatggaatactactcagccatgaaaaggaacaaattcctgataaacaccacaacatgaatgaattgcaaaagcagtgctctgagtccaagaagctgggca

SEQ ID NO: 571559 - DNA, 120 bp, Artificial Sequence
  ENSG00000170881_0 (sequence is synthesized)
gactgacggcgcagcctccgggcctagccacagcagcaacggcagaggccagcgggcgaggtcaagatggtggctccgcgggcgggggaggcagtggagggaggaggagtcagaccttag

SEQ ID NO: 571560 - DNA, 120 bp, Artificial Sequence
  ENSG00000170881_1 (sequence is synthesized)
ccagccggaaacaccgaaacccagagacctcctggggagccgccgccgccgccctctcggccatcgctgcctccgccgcctgctccacctcgagggacgcgagcgggcggcggggctggc

SEQ ID NO: 571561 - DNA, 80 bp, Artificial Sequence
  ENSG00000170881_2 (sequence is synthesized)
cgtgagagagacaggagaggaaggagggcaggggcggagttgcccgccttagcccccgcccccggccgcggccccgggcc

SEQ ID NO: 571562 - DNA, 120 bp, Artificial Sequence
  ENSG00000170881_3 (sequence is synthesized)
tggcagcggctcatggcggccgtggggcccccgcagcagcaggtgcggatggcccatcagcaggtctgggcggcgctcgaagtggcgctccgggtgccctgcctttacatcatcgacgcc

SEQ ID NO: 571563 - DNA, 120 bp, Artificial Sequence
  ENSG00000170881_4 (sequence is synthesized)
atcttcaactcctacccggattccagccaaagccggttctgcatcgtgctccagatcttcctccggctctttggtgtatttgcatccagtattgttctgatcttgtcacaacgatcactt

SEQ ID NO: 571564 - DNA, 120 bp, Artificial Sequence
  ENSG00000170881_5 (sequence is synthesized)
ttcaagttttacacgtacagctcagcctttctgttagctgcaacttcagtgttggtgaattattatgcttctttgcacattgacttctatggtgcctacaacacgtcagcttttggaatt

SEQ ID NO: 571565 - DNA, 120 bp, Artificial Sequence
  ENSG00000170881_6 (sequence is synthesized)
gagctgcttcctcgaaaaggtccctcgctgtggatggcacttatcgttctacagctaacatttggaattggatacgttacactactccagattcattccatctattcacaattaattatt

SEQ ID NO: 571566 - DNA, 120 bp, Artificial Sequence
  ENSG00000170881_7 (sequence is synthesized)
ttggatctcttggttcctgtaataggcttaatcacagagctaccattacacatcagagagactttactgtttacttcttccttgattctcacattaaatacagtgtttgtcctggcagtg

SEQ ID NO: 571567 - DNA, 120 bp, Artificial Sequence
  ENSG00000170881_8 (sequence is synthesized)
aaactgaagtggttttattattccacacgatatgtttatcttttggtgaggcacatgtatcgaatttacggattacagttattgatggaggacacatggaagaggattcgtttcccagac

SEQ ID NO: 571568 - DNA, 120 bp, Artificial Sequence
  ENSG00000170881_9 (sequence is synthesized)
atactacgagtcttttggctaacaagagttacagctcaggctacagtgttaatgtacatcttaaggatggcaaatgaaactgattccttctttatttcttgggatgatttttgggacctc

SEQ ID NO: 571569 - DNA, 120 bp, Artificial Sequence
  ENSG00000170881_10 (sequence is synthesized)
actgaggaagatgacaggcgtcttggctttgttgcacctgttttattttttattttggctcttcagactgggttaagtgggctaagaccagaagagagacttattcgcttaagtagaaac

SEQ ID NO: 571570 - DNA, 120 bp, Artificial Sequence
  ENSG00000170881_11 (sequence is synthesized)
atgtgccttttattaactgcagtcctgcattttatccatggaatgacagaccctgtattaatgtctctcagtgcctctcatgtgtcatcttttcgtagacattttcctgtgctgtttgtc

SEQ ID NO: 571571 - DNA, 120 bp, Artificial Sequence
  ENSG00000170881_12 (sequence is synthesized)
tctgcttgcctgtttattcttcctgtcttactcagttatgttctttggcatcactatgcactaaatacatggttgtttgcagttacagcattttgtgtggaactgtgcttaaaagtaatt

SEQ ID NO: 571572 - DNA, 120 bp, Artificial Sequence
  ENSG00000170881_13 (sequence is synthesized)
gtttctctcactgtttatacgttattcatgattgatggctactataatgtcctctgggaaaagcttgacgattatgtctactacgttcgttcaacaggcagtattattgaatttatattt

SEQ ID NO: 571573 - DNA, 120 bp, Artificial Sequence
  ENSG00000170881_14 (sequence is synthesized)
ggagttgtaatgtttggaaatggggcttacactatgatgtttgagtcgggaagtaaaattcgggcttttatgatgtgcctacatgcatattttaacatctacttacaagccaaaaatggc

SEQ ID NO: 571574 - DNA, 120 bp, Artificial Sequence
  ENSG00000170881_15 (sequence is synthesized)
tggaagacatttatgaatcgtaggactgctgtgaagaaaattaattcacttcctgaaataaaagggagccgcttacaagaaataaatgatgtatgtgcaatctgctatcatgagtttaca

SEQ ID NO: 571575 - DNA, 120 bp, Artificial Sequence
  ENSG00000170881_16 (sequence is synthesized)
acatctgctcgtattacaccgtgtaatcattatttccatgcactttgccttcggaaatggctgtacattcaagatacttgtccaatgtgccatcagaaagtatacatcgaagatgatatc

SEQ ID NO: 571576 - DNA, 120 bp, Artificial Sequence
  ENSG00000170881_17 (sequence is synthesized)
aaggataattcaaatgtatctaacaacaatggatttattccacccaatgaaactccagaggaagctgtaagagaagctgctgctgaatctgacagggaattgaacgaagatgacagtaca

SEQ ID NO: 571577 - DNA, 120 bp, Artificial Sequence
  ENSG00000170881_18 (sequence is synthesized)
gattgtgatgatgatgttcaaagagaaagaaatggagtgattcagcacacaggcgcagcagctgaagaatttaatgatgatactgactgatgaaaatagcatttattaatgattgaggta

SEQ ID NO: 571578 - DNA, 120 bp, Artificial Sequence
  ENSG00000170881_19 (sequence is synthesized)
tttgtttaaaattcagttcatccaaaatggagtaatatccttcaccttcagtgtgtaaccaagcacaaaaacagtatcaatgttgaatctgtgaatggttttccgtttactgtgatgtgc

SEQ ID NO: 571579 - DNA, 120 bp, Artificial Sequence
  ENSG00000170881_20 (sequence is synthesized)
tactgtaaatatacctctttaattacttctggtctctttggtgacctgtttaaatttgtgtacattattgtacatagaataaaatgttttcacatttttatgacaaaatttgaacaaata

SEQ ID NO: 571580 - DNA, 120 bp, Artificial Sequence
  ENSG00000170889_0 (sequence is synthesized)
ctctttctcagtgaccgggtggtttgcttaggcgcagacggggaagcggagccaacatgccagtggcccggagctgggtttgtcgcaaaacttatgtgaccccgcggagacccttcgaga

SEQ ID NO: 571581 - DNA, 120 bp, Artificial Sequence
  ENSG00000170889_1 (sequence is synthesized)
aatctcgtctcgaccaagagctgaagctgatcggcgagtatgggctccggaacaaacgtgaggtctggagggtcaaatttaccctggccaagatccgcaaggccgcccgggaactgctga

SEQ ID NO: 571582 - DNA, 120 bp, Artificial Sequence
  ENSG00000170889_2 (sequence is synthesized)
ctgaagatagaggatttcttagagagacgcctgcagacccaggtcttcaagctgggcttggccaagtccatccaccacgctcgcgtgctgatccgccagcgccatatcagggtccgcaag

SEQ ID NO: 571583 - DNA, 120 bp, Artificial Sequence
  ENSG00000170889_3 (sequence is synthesized)
caggtggtgaacatcccgtccttcattgtccgcctggattcccagaagcacatcgacttctctctgcgctctccctacgggggtggccgcccgggccgcgtgaagaggaagaatgccaag

SEQ ID NO: 571584 - DNA, 120 bp, Artificial Sequence
  ENSG00000170889_4 (sequence is synthesized)
aagggccagggtggggctggggctggagacgacgaggaggaggattaagtccacctgtccctcctgggctgctggattgtctcgttttcctgccaaataaacaggatcagcgctttacaa

SEQ ID NO: 571585 - DNA, 120 bp, Artificial Sequence
  ENSG00000170889_5 (sequence is synthesized)
ccgggtggtttgcttaggtgaggtgcggtggtgtgctttttctctagggtttgggttggatggtggcccgggccttccgagtttccatgagcgcagacggggaagcggagccaacatgcc

SEQ ID NO: 571586 - DNA, 120 bp, Artificial Sequence
  ENSG00000170889_6 (sequence is synthesized)
gcttgtgaggttcattctcccttctgttgcctctgttccagtgatgagagttgtgtcattggataaatggaaccagccttctaacttttagtggcacttgtggagtaggaaaagtgtatc

SEQ ID NO: 571587 - DNA, 120 bp, Artificial Sequence
  ENSG00000170889_7 (sequence is synthesized)
tggatcagtctttgccctgtttcttaggtgtgtggcttttttgcccagttattggaccttcagtttagtaatgaccagagctaaagataggcctggcacacctgggcacccgtctatatc

SEQ ID NO: 571588 - DNA, 120 bp, Artificial Sequence
  ENSG00000170889_8 (sequence is synthesized)
tttatattctgtttatgtggcctgtttgctagtggatgagagtagactatgaagtggaatttctgggctaagtgatggtgataacagggtttgcacatttgcttggtttattgttttttt

SEQ ID NO: 571589 - DNA, 120 bp, Artificial Sequence
  ENSG00000170889_9 (sequence is synthesized)
agcctcttgccccaatagcccagcgcaagggtcactgcggctctagccgtacaccttgtgaaggcctctgccaggcatgtgggcagctggacaggtaacagctcttggtgtccccagtgg

SEQ ID NO: 571590 - DNA, 120 bp, Artificial Sequence
  ENSG00000170889_10 (sequence is synthesized)
cttgtgaagttgattccagaccccgatccatgactgcgttctgggtactcagtgtgccctttctgtaatgtggcaccattgagggggaggagctgtacagaaagagggcaagatgtttgc

SEQ ID NO: 571591 - DNA, 120 bp, Artificial Sequence
  ENSG00000170889_11 (sequence is synthesized)
gtttagaatcttcgccccagcccttcactaaccctgtgagccgtaggcagagccttgtgtgtcaatgctttcgtcggagacgtagcctcgggttgctgtgttattgtgggcattgctgct

SEQ ID NO: 571592 - DNA, 120 bp, Artificial Sequence
  ENSG00000170889_12 (sequence is synthesized)
gcacgtggtaatacagctcagtgtcaggtgtggggttcacgatatttcagactcggaacttgggggctctcacatggccatctcatttgctttgtggtcttaggtgggatactttcggat

SEQ ID NO: 571593 - DNA, 120 bp, Artificial Sequence
  ENSG00000170889_13 (sequence is synthesized)
ttctcctataaaatggggttgagaaagtcatctgaagcatttttggggattaaggtgataccctaaaaccccggagggcgcacgtaggatcaggtgcacccttcctgcagcgccttggtg

SEQ ID NO: 571594 - DNA, 120 bp, Artificial Sequence
  ENSG00000170889_14 (sequence is synthesized)
tctgcagccgtggcggcctcacggggtgggtggagaggaaagagtggtgcggtagctggggttagcgtccgtttctcctccagtccacctcaccttgtcgctgcttccagggtccgcaag

SEQ ID NO: 571595 - DNA, 120 bp, Artificial Sequence
  ENSG00000170889_15 (sequence is synthesized)
cgcttgatgagaaggacccacggcgtctgttcgaaggcgggagcctctgattcctggcggagagccacagtgagcccagcagaacccatctgagcgccagcatccagcccggtcaggagg

SEQ ID NO: 571596 - DNA, 120 bp, Artificial Sequence
  ENSG00000170889_16 (sequence is synthesized)
atttgctgccccctcctggtggaatgcgcgccatgtcgtcaagcggccaccagatgactcgctcgctggtccactcaaaggcatcacatccagagcgctctgctggtcacagatttttca

SEQ ID NO: 571597 - DNA, 120 bp, Artificial Sequence
  ENSG00000170889_17 (sequence is synthesized)
gctgggactttctggagctgtttttctaagctgactttcttgtgtgtttggttcccctttggttggtgccctgatcccaccctcggtgggcccacaggttcccccagtccctgctcaccc

SEQ ID NO: 571598 - DNA, 120 bp, Artificial Sequence
  ENSG00000170889_18 (sequence is synthesized)
aatgtcctgtgtttgctctgacgccgacattggaggaggaggacgagcggcaggacaaaggccactgagaccccggttacaacccccaggtatcttcccagaccttgcgcgtgatgacgt

SEQ ID NO: 571599 - DNA, 120 bp, Artificial Sequence
  ENSG00000170889_19 (sequence is synthesized)
cgggaatgaggatgacatcgctgatgtgagcacctactgtgtgcaggcgcgtgctgggtcttcatgagctctaaccctcacagcagtcgtgcaacgtgggattgccaaccccccaaccca

SEQ ID NO: 571600 - DNA, 120 bp, Artificial Sequence
  ENSG00000170889_20 (sequence is synthesized)
tttcacagatgcacaaactgaggctcagaggggggaatcgcctgccccaggccccccagcctggaagaagcaggtctgggaggggaacctgggaccttgtgttttccccagctgtcctcc

SEQ ID NO: 571601 - DNA, 120 bp, Artificial Sequence
  ENSG00000170889_21 (sequence is synthesized)
tgctgccccaccaggtggacacctgcttcctgctctgggtcttctcatctgacagcaggggcctgtcttagtgtctccatctggggctgtgtcctccttacaaccctcccttccccagca

SEQ ID NO: 571602 - DNA, 120 bp, Artificial Sequence
  ENSG00000170889_22 (sequence is synthesized)
cccatgcagagcctttgaccacagactgaagggctgcactgtcggcttctcggcttctgaggttttggtactcggactagcttccttgctcctcagcttacagacagtctattgtgggac

SEQ ID NO: 571603 - DNA, 120 bp, Artificial Sequence
  ENSG00000170889_23 (sequence is synthesized)
aaactcccctttatatatacatctatcctgttagttctgcccctctagagaaccctgactaatacatgtttctgaaatacgcagccatagaaggaaatgagaaatgaaacttcctgacac

SEQ ID NO: 571604 - DNA, 120 bp, Artificial Sequence
  ENSG00000170889_24 (sequence is synthesized)
ccatagaaggaaatgagaaatgaaacttcctgacacaggcaggaaacctcaggaagcagcgaggtcagagctgagttggcttctggtgacttgcaatgtcagggaatcactaaaagggag

SEQ ID NO: 571605 - DNA, 120 bp, Artificial Sequence
  ENSG00000170889_25 (sequence is synthesized)
gtttccgcctctatatgagacagaggagaaccccagggccctcacagtcagggaggggttggggttttgggtgaaagtgggaagttgtggctcctcgtcccctgtgtttgtggatggcac

SEQ ID NO: 571606 - DNA, 120 bp, Artificial Sequence
  ENSG00000170889_26 (sequence is synthesized)
tggggtatctctgctcattgactcaggtttatggtcagccctgagcctccccctctgtgtgtgtgaaatagattcattgtagagttgtcagacatgaggttcacactggaccctcccctg

SEQ ID NO: 571607 - DNA, 120 bp, Artificial Sequence
  ENSG00000170889_27 (sequence is synthesized)
ctggttacaggcctgagcagactcacaagacccgggcaggtggtgccgtcctcctcttttcaagcctaacgcccagtgcagccctggtagaaaccctctctggcagatgaggcactggga

SEQ ID NO: 571608 - DNA, 120 bp, Artificial Sequence
  ENSG00000170889_28 (sequence is synthesized)
gatgagtgtccaagaatgagaagaaagaggaatcatcctaatgataaaaagtgctatgactggctgcctgcgatggctcacgcctattttcccagcgctctgggaggccgaggtgggcag

SEQ ID NO: 571609 - DNA, 120 bp, Artificial Sequence
  ENSG00000170889_29 (sequence is synthesized)
gtagttccagctacttaggagcctgaggtcgaagatcgcttgagtctggcaggcggaggttgcagtgaactggggtggtgcgccactgcactttagcctgggtgacagagcaagaacctg

SEQ ID NO: 571610 - DNA, 120 bp, Artificial Sequence
  ENSG00000170889_30 (sequence is synthesized)
tcttcctccacctgcccctctgatggttgccctcactaagcctgctgtccctatctcctatgcagccctcggaggtgatgggtgtgaactcacccagagggtacagattcacccttgcac

SEQ ID NO: 571611 - DNA, 120 bp, Artificial Sequence
  ENSG00000170890_0 (sequence is synthesized)
agttcttttctcaccttgactgcaagatgaaactccttgtgctagctgtgctgctcacagtggccgccgccgacagcggcatcagccctcgggccgtgtggcagttccgcaaaatgatca

SEQ ID NO: 571612 - DNA, 120 bp, Artificial Sequence
  ENSG00000170890_1 (sequence is synthesized)
agtgcgtgatcccggggagtgaccccttcttggaatacaacaactacggctgctactgtggcttggggggctcaggcacccccgtggatgaactggacaagtgctgccagacacatgaca

SEQ ID NO: 571613 - DNA, 120 bp, Artificial Sequence
  ENSG00000170890_2 (sequence is synthesized)
tcatactcgtgctctggctcggcaatcacctgtagcagcaaaaacaaagagtgtgaggccttcatttgcaactgcgaccgcaacgctgccatctgcttttcaaaagctccatataacaag

SEQ ID NO: 571614 - DNA, 120 bp, Artificial Sequence
  ENSG00000170890_3 (sequence is synthesized)
gcacacaagaacctggacaccaagaagtattgtcagagttgaatatcacctctcaaaagcatcacctctatctgcctcatctcacactgtactctccaataaagcaccttgttgaaagac

SEQ ID NO: 571615 - DNA, 120 bp, Artificial Sequence
  ENSG00000170890_4 (sequence is synthesized)
gagggagcaggaaggcagtgtgtccccggggtgctggcagaccgatttgaactctggctatgtcttcttgcagtggccgccgccgacagcggcatcagccctcgggccgtgtggcagttc

SEQ ID NO: 571616 - DNA, 120 bp, Artificial Sequence
  ENSG00000170891_0 (sequence is synthesized)
agcgcctggcaccatgaggacgcctgggcctctgcccgtgctgctgctgctcctggcgggagcccccgccgcgcggcccactcccccgacctgctactcccgcatgcgggccctgagcca

SEQ ID NO: 571617 - DNA, 120 bp, Artificial Sequence
  ENSG00000170891_1 (sequence is synthesized)
ggagatcacccgcgacttcaacctcctgcaggtctcggagccctcggagccatgtgtgagatacctgcccaggctgtacctggacatacacaattactgtgtgctggacaagctgcggga

SEQ ID NO: 571618 - DNA, 120 bp, Artificial Sequence
  ENSG00000170891_2 (sequence is synthesized)
ctttgtggcctcgcccccgtgttggaaagtggcccaggtagattccttgaaggacaaagcacggaagctgtacaccatcatgaactcgttctgcaggagagatttggtattcctgttgga

SEQ ID NO: 571619 - DNA, 120 bp, Artificial Sequence
  ENSG00000170891_3 (sequence is synthesized)
tgactgcaatgccttggaatacccaatcccagtgactacggtcctgccagatcgtcagcgctaagggaactgagaccagagaaagaacccaagagaactacagttatgtcagctacccag

SEQ ID NO: 571620 - DNA, 120 bp, Artificial Sequence
  ENSG00000170891_4 (sequence is synthesized)
aggtcttgtgttagttgtatctgaaactgttatgtatctctctaccttctggaaaacagggctggtattcctacccaggaacctcctttgagcatagagttagcaaccatgcttctcatt

SEQ ID NO: 571621 - DNA, 120 bp, Artificial Sequence
  ENSG00000170891_5 (sequence is synthesized)
cccttgactcatgtcttgccaggatggttagatacacagcatgttgatttggtcactaaaaagaagaaaaggactaacaagcttcacttttatgaacaactattttgagaacttgcacaa

SEQ ID NO: 571622 - DNA, 120 bp, Artificial Sequence
  ENSG00000170891_6 (sequence is synthesized)
tagtatgtttttattactggtttaatggagtaatggtacttttattctttcttgatagaaacctgcttacatttaaccaagcttctattatgcctttttctaacacagactttcttcact

SEQ ID NO: 571623 - DNA, 120 bp, Artificial Sequence
  ENSG00000170891_7 (sequence is synthesized)
gtctttcatttaaaaagaaattaatgctcttaagatatatattttacgtagtgctgacaggacccactctttcattgaaaggtgatgaaaatcaaataaagaatctcttcacatgagaaa

SEQ ID NO: 571624 - DNA, 120 bp, Artificial Sequence
  ENSG00000170891_8 (sequence is synthesized)
acctgcccaggctgtacctggacatacacgatttggtattcctgttggatgactgcaatgccttggaatacccaatcccagtgactacggtcctgccagatcgtcagcgctaagggaact

SEQ ID NO: 571625 - DNA, 120 bp, Artificial Sequence
  ENSG00000170892_0 (sequence is synthesized)
tgacgaagttgacgagggtgtcggcatgagggggtggagcaaggagcgcgtggcgcggtgcgcagtgggtggctccacctcgactgcgaattactgtttatgaggtgactcgctggttct

SEQ ID NO: 571626 - DNA, 120 bp, Artificial Sequence
  ENSG00000170892_1 (sequence is synthesized)
atcggtggacagtgggacattctgaagggaggcaaggaggcggactgagcgctcccaattggggaggatgctggtggtggaggtggcgaacggccgctccctggtgtggggagccgaggc

SEQ ID NO: 571627 - DNA, 120 bp, Artificial Sequence
  ENSG00000170892_2 (sequence is synthesized)
gagcgcctgggtgtggggggccgcacggtaggcgccctgccccgcgggccccgccagaactcgcgcctgggcctcccgctgctgctgatgcccgaagaggcgcggctcttggccgagatc

SEQ ID NO: 571628 - DNA, 120 bp, Artificial Sequence
  ENSG00000170892_3 (sequence is synthesized)
gctcttggccgagatcggcgccgtgactctggtcagcgccccgcgtccagactctcggcaccacagcctggccctgacatccttcaagcgccagcaagaggagagcttccaggagcagag

SEQ ID NO: 571629 - DNA, 120 bp, Artificial Sequence
  ENSG00000170892_4 (sequence is synthesized)
cgccttggcagctgaggcccgggagacccgtcgtcaggagctcctggagaagattacggagggccaggctgctaagaagcagaaactagaacaggcttcaggggccagctcaagccagga

SEQ ID NO: 571630 - DNA, 120 bp, Artificial Sequence
  ENSG00000170892_5 (sequence is synthesized)
ggccggctcgagccaggctgccaaagaggatgagaccagtgatggccaggcttcgggagagcaggaggaagctggcccctcgtcttcccaagcaggaccctcaaatggggtagccccctt

SEQ ID NO: 571631 - DNA, 120 bp, Artificial Sequence
  ENSG00000170892_6 (sequence is synthesized)
gcccagatctgctctccttgtccagctggccactgccaggcctcgaccggtcaaggccaggcccctggactggcgtgtccagtctaaagactggccccacgccggccgccctgcccacga

SEQ ID NO: 571632 - DNA, 120 bp, Artificial Sequence
  ENSG00000170892_7 (sequence is synthesized)
gctgcgctacagtatctacagagacctgtgggagcgaggcttcttcctcagtgcggctggcaagttcggaggtgacttcctggtctatcctggtgaccccctccgcttccacgcccatta

SEQ ID NO: 571633 - DNA, 120 bp, Artificial Sequence
  ENSG00000170892_8 (sequence is synthesized)
tatcgctcagtgctgggcccctgaggacaccatcccactccaagacctggttgctgctgggcgccttggaaccagcgtcagaaagaccctgctcctctgttctccgcagcctgatggtaa

SEQ ID NO: 571634 - DNA, 120 bp, Artificial Sequence
  ENSG00000170892_9 (sequence is synthesized)
ccctgcaatgggccagcctgcagtgaactccagagacctaggggatgtggctgtgtcggcagcaagagcctttctggatgttccccagctcttctctgggagtctagaacatcctcctac

SEQ ID NO: 571635 - DNA, 120 bp, Artificial Sequence
  ENSG00000170892_10 (sequence is synthesized)
ctttctccgcggttagtttttgattccaggttttcgaacactacatcttttttatgttcttccttgtttcaaagcacttattggctgtgtttttgtagttacctattttcacactgtgag

SEQ ID NO: 571636 - DNA, 120 bp, Artificial Sequence
  ENSG00000170892_11 (sequence is synthesized)
cttcccgagaatggggcctgggtttgattcatctgttttctacagggtttaagtctcaggaggtctcaataaacttggtatataaatgttcatgatttgaatgtttgcgacagtcctgga

SEQ ID NO: 571637 - DNA, 120 bp, Artificial Sequence
  ENSG00000170892_12 (sequence is synthesized)
acccgtggatggtctcatctgcatgtacaggtgagaaaaaggcctggaggagggggactgacttgcccaaagtcacacacttagtaaatagcaggcctggcctttcaaaattggtttttc

SEQ ID NO: 571638 - DNA, 120 bp, Artificial Sequence
  ENSG00000170892_13 (sequence is synthesized)
tgactcctaaatctgcactctttctacctcactaaacttccttttgaaaagatttctatgaaatttcccagatgcatacaaacgttataaataaaaatataggctgggcacgatgaccca

SEQ ID NO: 571639 - DNA, 87 bp, Artificial Sequence
  ENSG00000170892_14 (sequence is synthesized)
ctggcaacattgtaatacccagtctctacaaaaaataatttaaaaaaaaattagccagggatcccttgagcctgggaagttgaggct

SEQ ID NO: 571640 - DNA, 120 bp, Artificial Sequence
  ENSG00000170892_15 (sequence is synthesized)
aaattagccagggatcccttgagcctgggaagttgaggctgctgtgagctgtgattgcaccactgccctccagcctgggagacagagcaagaacctgtctcaaaaaatatatatatgtgt

SEQ ID NO: 571641 - DNA, 120 bp, Artificial Sequence
  ENSG00000170892_16 (sequence is synthesized)
atatatgtgtgtgtatatatatatatattatgaaaggaaatgagtattgtaattttaggagttcagagcctggggagaaaggaaggactctggaaggcgttctgctttttcatggcctgg

SEQ ID NO: 571642 - DNA, 120 bp, Artificial Sequence
  ENSG00000170892_17 (sequence is synthesized)
ggactctggaaggcgttctgctttttcatggcctgggtagtggtgaatttttttgatactgtatatttatattttagactcttttttggatgtgttatattctgcaatttttataaaagc

SEQ ID NO: 571643 - DNA, 120 bp, Artificial Sequence
  ENSG00000170892_18 (sequence is synthesized)
taaaacacatgtatttgtaaaaaatttgcacttatgaaatcatttacccatgtttttgcttaagaaagtactagaacactaccactattccaataattacacctttatcttatcaatgtg

SEQ ID NO: 571644 - DNA, 120 bp, Artificial Sequence
  ENSG00000170892_19 (sequence is synthesized)
cgaggacgcccgaacgccgaacttcctgtgctcgggagggggcagggttttgtactgtgggagtctgagagcgaggaggtccgaaagccgaatcacagtcgttcggaaagaggaggagcg

SEQ ID NO: 571645 - DNA, 120 bp, Artificial Sequence
  ENSG00000170892_20 (sequence is synthesized)
aaggctcgagcgtccggaagagggtgtggcctcggcggtgccttagcctccagagcttctgaccgctgacgggaacacccgaagggggacgcccactttgcaagagggtggtgccaaaat

SEQ ID NO: 571646 - DNA, 120 bp, Artificial Sequence
  ENSG00000170892_21 (sequence is synthesized)
ggacctttgtaagggggcgtgtcgccgcgcttgcggaggtttgtttttcacgctccaaggcgcaatggaggatgctggtggtggaggtggcgaacggccgctccctggtgtggggagccg

SEQ ID NO: 571647 - DNA, 120 bp, Artificial Sequence
  ENSG00000170892_22 (sequence is synthesized)
cacctcgactgcgaattactgtttatgaggtgactcgctggttctatcggtggacagtgggacattctgaagggaggcaaggaggcggactgagcgctcccaattggggtgagcccgccc

SEQ ID NO: 571648 - DNA, 120 bp, Artificial Sequence
  ENSG00000170892_23 (sequence is synthesized)
gagcggagagtggacggcgggtgtccagggggcggggctttcggctgtggggttcggtcgtagggcgggaactccccaactggggtgcgctggcgctcggagggggcggggccacaggcc

SEQ ID NO: 571649 - DNA, 120 bp, Artificial Sequence
  ENSG00000170892_24 (sequence is synthesized)
gcgaggctgccgggagccgatgacgcccgaacgccgaacctattgcgtccgggaggaggcggggctacggattcggccgagccgagaacacccgaacgtcaaattgctggcgttcgagaa

SEQ ID NO: 571650 - DNA, 120 bp, Artificial Sequence
  ENSG00000170892_25 (sequence is synthesized)
gcgggtgccgaccgcagggtcacaagggtagagcgggaccctgggggcttggcgaggggagagggtcgggggcttgtctccggcgtctcgtctccggcggccgcgaggcctggtgggatc

SEQ ID NO: 571651 - DNA, 120 bp, Artificial Sequence
  ENSG00000170892_26 (sequence is synthesized)
ggcctggcgctcgggcccagcaggtggtgaacggcggctgagcgaggccccgccccctgaggcctaggggcggggcttcgccgagaccccggaggctttgggtgcgctgcagcggtccgc

SEQ ID NO: 571652 - DNA, 120 bp, Artificial Sequence
  ENSG00000170892_27 (sequence is synthesized)
tcggtgggagcgggacctgggagtcaagtttcctggcttctgaagggaccataagcttggaggttccagcgaagtgtgcttctcaggccctgacatccttcaagcgccagcaagaggaga

SEQ ID NO: 571653 - DNA, 120 bp, Artificial Sequence
  ENSG00000170892_28 (sequence is synthesized)
tgacgaagttgacgagggtgtcggcatgagggggtggagcaaggagcgcgtggcgcggtgcgcagtgggtggctccacctcgactgcgaattactgtttatgaggaggatgctggtggtg

SEQ ID NO: 571654 - DNA, 120 bp, Artificial Sequence
  ENSG00000170892_29 (sequence is synthesized)
cacaagcttcggtttacttcgtagatagttgggtacaagtgacgctaggatgataggcggagtcaacaggttcgccagacacccatgagtatttacaagggggcggggcgaaagcgactt

SEQ ID NO: 571655 - DNA, 120 bp, Artificial Sequence
  ENSG00000170892_30 (sequence is synthesized)
gccctcaaaggggcggaaccccgagggccggcgtgcgcctacgggaccgggccaggatgacgatcctcaagttcccaagtagaggagaggaagcggcagagggaggaggatgctggtggt

SEQ ID NO: 571656 - DNA, 120 bp, Artificial Sequence
  ENSG00000170893_0 (sequence is synthesized)
cggcaggcgcccggggtcctcagcgctgcagactcctgacctgccgactgcggatcccgagtccccggatcccggacccatcctgtggagcccactcctggcagacgccgcgatgcccgg

SEQ ID NO: 571657 - DNA, 120 bp, Artificial Sequence
  ENSG00000170893_1 (sequence is synthesized)
cccttggttgctgctcgctctggctttgaccctgaacctgaccggtgtccccggcggccgtgctcagccagaggcggcccagcaggaggcagtgacggccgcggagcatccgggcctgga

SEQ ID NO: 571658 - DNA, 120 bp, Artificial Sequence
  ENSG00000170893_2 (sequence is synthesized)
tgacttcctgcgccaggtggagcgcctcctcttcctccgggaaaacatccagcggctgcaaggggaccagggtgagcactccgcgtcccagatctttcaatctgactggctctccaaacg

SEQ ID NO: 571659 - DNA, 120 bp, Artificial Sequence
  ENSG00000170893_3 (sequence is synthesized)
tcagcatccaggcaaaagagaggaggaggaggaagagggagttgaagaagaggaagaggaagaagggggggctgtgggaccccacaaacggcagcaccctggccgacgagaagatgaggc

SEQ ID NO: 571660 - DNA, 120 bp, Artificial Sequence
  ENSG00000170893_4 (sequence is synthesized)
ttcatggtcagtcgatgtaacccagcacaagcggcagcatcctggccggcgctccccctggcttgcatatgctgtcccgaagcggcagcacccaggcagaaggctggcagatcccaaggc

SEQ ID NO: 571661 - DNA, 120 bp, Artificial Sequence
  ENSG00000170893_5 (sequence is synthesized)
tcaaaggagctgggaagaagaggaggaggaggaagagagagaggaagacctgatgcctgaaaaacgccagcatccgggcaagagggccctgggaggcccctgtgggccccagggagccta

SEQ ID NO: 571662 - DNA, 120 bp, Artificial Sequence
  ENSG00000170893_6 (sequence is synthesized)
tggtcaagcgggccttctgctggggctcctggatgacctgagtaggagccagggagctgaggaaaagcggcagcaccctggtcggcgggcagcctgggtcagagagcccctggaggagtg

SEQ ID NO: 571663 - DNA, 120 bp, Artificial Sequence
  ENSG00000170893_7 (sequence is synthesized)
aacccagttttccctgaagtcgagtttgtggtctaaggatgtcttgagccctgtgtgccccaccattcatgacctctgtattctctagttagatccctgaccataagcctgagcccctcc

SEQ ID NO: 571664 - DNA, 120 bp, Artificial Sequence
  ENSG00000170893_8 (sequence is synthesized)
ctcccagccccatattcacacacatcccagcccctggccttgccctcttcctttaggcatgtgagaaaatcagcctagcagtttaaaccccactttcctccacttagcaccataggcaag

SEQ ID NO: 571665 - DNA, 120 bp, Artificial Sequence
  ENSG00000170893_9 (sequence is synthesized)
ggggcagatcccagagcccctctcaccccccccaccacaggcctgctccttccttagccttggctaagatggtccttctgtgtcttgcaaagactccccaagtgggacagggagcccctg

SEQ ID NO: 571666 - DNA, 120 bp, Artificial Sequence
  ENSG00000170893_10 (sequence is synthesized)
ggagggcagccagtgagggtggggtgggactgaagcgttgtgtgcaaatccagcttccatcccctccccaacctggcaggattctccatgtgtaaacttcacccccaggacccaggatct

SEQ ID NO: 571667 - DNA, 120 bp, Artificial Sequence
  ENSG00000170893_11 (sequence is synthesized)
tctcctttctgggcatccctttgtgggtgggcagagccctgacccacagctgtgttactgcttggagaagcatatgtaggggcataccctgtggtgttgtgctgtgtctggctgtgggat

SEQ ID NO: 571668 - DNA, 120 bp, Artificial Sequence
  ENSG00000170893_12 (sequence is synthesized)
aaatgtgtgtgggaatattgaaacatcgcctaggaattgtggtttgtatataaccctctaagcccctatcccttgtcgatgacagtcatcctaatgataataaaacctgcatccagataa

SEQ ID NO: 571669 - DNA, 120 bp, Artificial Sequence
  ENSG00000170899_0 (sequence is synthesized)
ctcactctcgcattcttccctcactcccccagttcagtccttctcttgtcttttcttcctcttgtcctttgtcctcctgctccatccagtctgggcagagaaagcctgaaaagctatcat

SEQ ID NO: 571670 - DNA, 120 bp, Artificial Sequence
  ENSG00000170899_1 (sequence is synthesized)
ggcagcaaggcccaagctccactatcccaacggaagaggccggatggagtccgtgagatgggttttagctgccgccggagtcgagtttgatgaagaatttctggaaacaaaagaacagtt

SEQ ID NO: 571671 - DNA, 120 bp, Artificial Sequence
  ENSG00000170899_2 (sequence is synthesized)
gtacaagttgcaggatggtaaccacctgctgttccaacaagtgcccatggttgaaattgacgggatgaagttggtacagacccgaagcattctccactacatagcagacaagcacaatct

SEQ ID NO: 571672 - DNA, 120 bp, Artificial Sequence
  ENSG00000170899_3 (sequence is synthesized)
cttatcatgcatcctttcttaaaaccagatgatcagcaaaaggaagtggttaacatggcccagaaggctataattagatactttcctgtgtttgaaaagattttaaggggtcacggacaa

SEQ ID NO: 571673 - DNA, 120 bp, Artificial Sequence
  ENSG00000170899_4 (sequence is synthesized)
agctttcttgttggtaatcagctgagccttgcagatgtgattttactccaaaccattttagctctagaagagaaaattcctaatatcctgtctgcatttcctttcctccaggaatacaca

SEQ ID NO: 571674 - DNA, 120 bp, Artificial Sequence
  ENSG00000170899_5 (sequence is synthesized)
gtgaaactaagtaatatccctacaattaagagattccttgaacctggcagcaagaagaagcctccccctgatgaaatttatgtgagaaccgtctacaacatctttaggccataaaacaac

SEQ ID NO: 571675 - DNA, 120 bp, Artificial Sequence
  ENSG00000170899_6 (sequence is synthesized)
gagatggtattgtctacagtcatgtcttaatggatcccagctctgtcatggtgctatctatgtattaagttgggtcctaagttgggtcttttgtgtcaacgagatcatctcttctagaaa

SEQ ID NO: 571676 - DNA, 120 bp, Artificial Sequence
  ENSG00000170899_7 (sequence is synthesized)
tatcaaccttttttgtccagtaaataattgttaggggatctttattggaaaacttttttggagaggctggtatttaagttagatctgattgggctactcatgtcctgtagccagttcatc

SEQ ID NO: 571677 - DNA, 120 bp, Artificial Sequence
  ENSG00000170899_8 (sequence is synthesized)
ctcataataagaatgggcaggatctcttgttctctcctgagtgtctttctactctcctgagcgtctttctgctctccttatcctgttctcttatccttatcccctccagtctctgcctaa

SEQ ID NO: 571678 - DNA, 120 bp, Artificial Sequence
  ENSG00000170899_9 (sequence is synthesized)
tttttagtgtttaataacaaccgaatgtctagtaaatgactctcctctgagctgtaataaataaaatggtagtaatgaatgcaatcagtattagccaaaataaagaatttatgagtcatt

SEQ ID NO: 571679 - DNA, 120 bp, Artificial Sequence
  ENSG00000170899_10 (sequence is synthesized)
aaagcctgaaaagctatcatggcagcaaggcccaagctccactatcccaacggaagaggccggatggagtccgtgagatgggttttagctgccgccggagtcgaggattgacatgtacgt

SEQ ID NO: 571680 - DNA, 120 bp, Artificial Sequence
  ENSG00000170899_11 (sequence is synthesized)
agtgagggaaaatgcagcaacaaaaataaagaacagtttcccgtgccaaaatcctgaatattcatttcgcccctgagcactgggttgaagacgcgaaattgggactgttggtctgcgacg

SEQ ID NO: 571681 - DNA, 120 bp, Artificial Sequence
  ENSG00000170899_12 (sequence is synthesized)
taacttggcattttttgtcctgagcctgtatgatatttacctccttttggagggtgaggatatctttttaaaaaattgatgcataatgtacatatttggggaatacatttgatattttga

SEQ ID NO: 571682 - DNA, 120 bp, Artificial Sequence
  ENSG00000170899_13 (sequence is synthesized)
tacatgtgtatcatgtgtagtgatcaaatcagggtaattaggatatccatcacccacctcaaacatttatctttcctttatggcggaacattccaattctcttctagccattttgaactg

SEQ ID NO: 571683 - DNA, 120 bp, Artificial Sequence
  ENSG00000170899_14 (sequence is synthesized)
tgtaatacgttattgttaactatagcctactgtactatcgaacactagattttatttcttctgtctagctgtatttatgtaccattaaccaacctcttttcacatcccattcctctctac

SEQ ID NO: 571684 - DNA, 120 bp, Artificial Sequence
  ENSG00000170899_15 (sequence is synthesized)
ctacacttcccagcctctagtaagcaccaatcaactttctatttccatgagatccacttttttagctcccacatatgaatcagaacatgcagtctttgtctttctgtgcctggcttattt

SEQ ID NO: 571685 - DNA, 120 bp, Artificial Sequence
  ENSG00000170899_16 (sequence is synthesized)
taacgtaatgacctctgtttctgttggtgttgctgaaaatgacaggattttgttttcttaatggctgaataatattccactatgtatatatacgtttcttttttaaaaatttagtttgat

SEQ ID NO: 571686 - DNA, 120 bp, Artificial Sequence
  ENSG00000170903_0 (sequence is synthesized)
ctaccccccttggggcgaccgtggggaggtgccgccggggtcgcaggtgagcggttctatgctggaggaggcggccagggaagcggcggctccgtgaccagtgggtgccctcgcagtggg

SEQ ID NO: 571687 - DNA, 120 bp, Artificial Sequence
  ENSG00000170903_1 (sequence is synthesized)
tagggtcccggaggggtcagcggcaattggcgcaacgcttgctgccgggtttggtccaagggctgcgacgtagcgggactgcacgctcgggagaagtgccacgcgcgtctgtcgcctgac

SEQ ID NO: 571688 - DNA, 120 bp, Artificial Sequence
  ENSG00000170903_2 (sequence is synthesized)
cggggaggctggggagggcccaggccacggaaacaagactgcagaagtttctgggcactcagtcgggactctcatttaatacccagagagaggagatcttccaggttgccccgactccca

SEQ ID NO: 571689 - DNA, 120 bp, Artificial Sequence
  ENSG00000170903_3 (sequence is synthesized)
ccgggactcctaccagcagcaacctcatcattgtggccgaggcaggtgcgcgcccctgctcccctgggtggccttccgggagcccagtctaactcgattcttcccaggggctctttttgg

SEQ ID NO: 571690 - DNA, 120 bp, Artificial Sequence
  ENSG00000170903_4 (sequence is synthesized)
acggtcccaaaggaggcagcgggagggaggtgaaagatactttgataaccgtcgacccataagtatacttgttatgcacctaccacgagttttagagaagaacatactttttggcaggga

SEQ ID NO: 571691 - DNA, 120 bp, Artificial Sequence
  ENSG00000170903_5 (sequence is synthesized)
agtgaatcccctataagaatataggggaggggaaagccacactttaaagagaatttgggtagggtttgatattgtagatttgtgatgcttttcttcttgaactgcttaactaatttaccc

SEQ ID NO: 571692 - DNA, 120 bp, Artificial Sequence
  ENSG00000170903_6 (sequence is synthesized)
tcaaatttttttgatccggaacttgccgtctggtttttctcagacttcttaattctgacttatcatgaagtatctaggaacttcattctcaagttttagtgcttgtaaaaagttgcctgg

SEQ ID NO: 571693 - DNA, 120 bp, Artificial Sequence
  ENSG00000170903_7 (sequence is synthesized)
ttatattatgccattggcagtacatcatcttcacaaggattacgtaagtgaactacatctcattcctgtttccaactagtgaagaacgattgtgaaatgggattttagaaaatggctgtt

SEQ ID NO: 571694 - DNA, 120 bp, Artificial Sequence
  ENSG00000170903_8 (sequence is synthesized)
ctctgtgattgggcatagaaggtttgtaagttttagagactgcagctgttgaatcctttctgctaagagagcgatgacaggcaatagaaaagggatagtgtttgacatctaaaatgacat

SEQ ID NO: 571695 - DNA, 120 bp, Artificial Sequence
  ENSG00000170903_9 (sequence is synthesized)
attttcacattttatgaggtgttatatccccagcaccaaaaatagtgcctttcacacagtaggagctcagtaagtattttttgaggaaattattggggaatgaatggatggtagaaaacc

SEQ ID NO: 571696 - DNA, 120 bp, Artificial Sequence
  ENSG00000170903_10 (sequence is synthesized)
caagcttctgttacttggataccggcatataaaggagaggacaggaagacaaacatttctggaaatggcttttatccaggaattatccagactgccttgccactagatgaatggaagaca

SEQ ID NO: 571697 - DNA, 120 bp, Artificial Sequence
  ENSG00000170903_11 (sequence is synthesized)
atgatttgaactaagggccagcaaagaattatccctggtttttgtgctttgcagcattcctcaaattgttttcacatctcttaccataaaaactgcattgaaattgaaaatgaagcagtt

SEQ ID NO: 571698 - DNA, 120 bp, Artificial Sequence
  ENSG00000170903_12 (sequence is synthesized)
gaaaagaaaaaggaaaagcaattttagtgttcaagaaactcagacccttttgaaagaaattacgaaaaggaaagaagtcattttttccaagcagctcaatacaacaattaatgtgatgaa

SEQ ID NO: 571699 - DNA, 120 bp, Artificial Sequence
  ENSG00000170903_13 (sequence is synthesized)
gcgaatggcttgggaagagattgcacagtgtgtgaatgctgtaggagaaggagaacagaggacagggacagaggtgaaaagaaggtaccttgactggcgagcacttatgaagagaaagag

SEQ ID NO: 571700 - DNA, 120 bp, Artificial Sequence
  ENSG00000170903_14 (sequence is synthesized)
gatgaaggccaacattaagctggttggttcaggatttccccttccctcctctgatttggatgactctctcactgaagagatagatgaaaagattggattccgaaatgatgcaaattttga

SEQ ID NO: 571701 - DNA, 120 bp, Artificial Sequence
  ENSG00000170903_15 (sequence is synthesized)
ctggcaaaatgtggcagatttcagggatgcaggtggatccttaactgaggtcaaggtggaagaggaagaaagggatccgcagagtcctgaatttgaaattgaggaggaggaagaaatgtt

SEQ ID NO: 571702 - DNA, 120 bp, Artificial Sequence
  ENSG00000170903_16 (sequence is synthesized)
gtcatccgtcataccagattccaggagagaaaatgaacttcccgatttcccccacattgatgagttttttacccttaactcaacaccatctagatctgcatatgatgagcctcatttgct

SEQ ID NO: 571703 - DNA, 120 bp, Artificial Sequence
  ENSG00000170903_17 (sequence is synthesized)
tagagttggaaaaacgacgactggatatcgaggccgaaaggctgcaggtagaaaaggaacgcctacaaatcgagaaagagaggctgcggcatttagacatggaacatgagcggcttcagc

SEQ ID NO: 571704 - DNA, 120 bp, Artificial Sequence
  ENSG00000170903_18 (sequence is synthesized)
tagagaaggagcggctgcagattgaaagagaaaagttgaggttacagatagtcaattcagagaaaccgtccttggaaaatgaacttggtcaaggagaaaaatccatgcttcaaccacagg

SEQ ID NO: 571705 - DNA, 120 bp, Artificial Sequence
  ENSG00000170903_19 (sequence is synthesized)
acatagaaacagagaagttaaaacttgagcgagaacgcttgcaactggaaaaggataggctgcagtttttgaagtttgaatctgagaagctgcagattgaaaaggaacgcttacaggtag

SEQ ID NO: 571706 - DNA, 120 bp, Artificial Sequence
  ENSG00000170903_20 (sequence is synthesized)
agaaagacagacttcgaattcagaaagaaggacacttgcagtgatttttccaggcttccatttagcaaatgtttgaaaactctagatttttctcatatcaggtgatataatgatggttgc

SEQ ID NO: 571707 - DNA, 120 bp, Artificial Sequence
  ENSG00000170903_21 (sequence is synthesized)
tggattagctgtggtttcttgtctaatgtcagtgttcagtaggaaaaagttatatgtggataactgtatgcctaagtagtatataaaagctgtgccctagcgtaaacagtatagcagaaa

SEQ ID NO: 571708 - DNA, 120 bp, Artificial Sequence
  ENSG00000170903_22 (sequence is synthesized)
cttactgtgctggactctttaccttataatattacatagagtcttgtattgtctgtgtacccagagtttacaattatgtccatataaaattctagcccagaagttctcatctggggtaga

SEQ ID NO: 571709 - DNA, 120 bp, Artificial Sequence
  ENSG00000170903_23 (sequence is synthesized)
ttttggccttcagaagaccaatttggtgatgtctggagacatgttgggttgtcaaaactggggtggggaaaaggttgctactgtgcaatgcatacctcctcaacacccccccacactcag

SEQ ID NO: 571710 - DNA, 120 bp, Artificial Sequence
  ENSG00000170903_24 (sequence is synthesized)
taaagaattttccaacccaaaatatcattagtcctgaggttgagaaaccctgtcctagcctaactgtgtacctctatagctatgttttatagttttagaatattaaaacctcagatattt

SEQ ID NO: 571711 - DNA, 120 bp, Artificial Sequence
  ENSG00000170903_25 (sequence is synthesized)
atgtgggtaggtacttaaatggccaaaaactttaactatgaaatgttactgtgtagtatattgaatataggaagtgatgaagattataggtattttattcccatgtttccatctataaat

SEQ ID NO: 571712 - DNA, 120 bp, Artificial Sequence
  ENSG00000170903_26 (sequence is synthesized)
agccttctcagattcagaaaacaatacagagaacatcagaaattttctaaaatgggtcactttgaaaagaattctttttctcactattaatgctttagaagcaagacgcaattttaaagc

SEQ ID NO: 571713 - DNA, 120 bp, Artificial Sequence
  ENSG00000170903_27 (sequence is synthesized)
tttagttccttttctttcagtcattgtcttagtttgggtacaaaaatgtcatttcagtaatgtactgaaatcttataagtgaatagttgaagctagtaaaaatgataccagtataaaaat

SEQ ID NO: 571714 - DNA, 120 bp, Artificial Sequence
  ENSG00000170903_28 (sequence is synthesized)
ggtacttgtagtccatgagcttgaacccaatgactgattgtttgacttttaaaataagtaatagcagccatttgggagtagggggtaggtggggaagatgtactccgtatcaaataataa

SEQ ID NO: 571715 - DNA, 120 bp, Artificial Sequence
  ENSG00000170903_29 (sequence is synthesized)
tgatgttgaaataatgatagtaggtatgtattatggattggagaagcacttattacactatctaacctaatatgtagaacaattcttgagagttgtatctgtcgttatttctgaatgtga

SEQ ID NO: 571716 - DNA, 120 bp, Artificial Sequence
  ENSG00000170903_30 (sequence is synthesized)
agctcagagaagtgacacagagtaaatggctgatcttctatattgtagtatattttgtccttccctcttccctgaggaacaaagcacgtatctttagtctctttgatatttattctgaga

SEQ ID NO: 571717 - DNA, 120 bp, Artificial Sequence
  ENSG00000170903_31 (sequence is synthesized)
ccaagggcttgcttgacctgatgattttccttcagctctctgaaggtgctttttccacaatccaagtgattctgatacacactaaagttgagaatcactgcactagatcactttgtgttt

SEQ ID NO: 571718 - DNA, 120 bp, Artificial Sequence
  ENSG00000170903_32 (sequence is synthesized)
tctgattttcaaggttgatacgtagctttaatacagctcttctgttgacagttattactttaattttgcatttgttccttgtaagaatggctggaaactgtgtgttgacatttgaggatg

SEQ ID NO: 571719 - DNA, 120 bp, Artificial Sequence
  ENSG00000170903_33 (sequence is synthesized)
ggtatgcaaggaaaaaatatacttctgtttacttactctgactttgaaatagtgttatttttctatatctgaaataaatgcttctaccatagaaataaatttgcctatactatctgagaa

SEQ ID NO: 571720 - DNA, 120 bp, Artificial Sequence
  ENSG00000170903_34 (sequence is synthesized)
attgtgaggccaggcctagggcgggctctcagccagaatggctacaccattctaaccaatggatgagactcatcaaatgagcggcagccatatgagccattggggtggcgggagatgggc

SEQ ID NO: 571721 - DNA, 120 bp, Artificial Sequence
  ENSG00000170903_35 (sequence is synthesized)
gggcccagttagtgggcgggggatcaatgaagcatcttttttcctaccccccttggggcgaccgtggggaggtgccgccggggtcgcaggaattatccagactgccttgccactagatga

SEQ ID NO: 571722 - DNA, 120 bp, Artificial Sequence
  ENSG00000170903_36 (sequence is synthesized)
tctccagtggaccaccctgttttttctaaaggaaccccaatggaggcagaagtcttaccacacccaatcactcacagatctcagcagcctcctgcctgaagaaagtaacatgaaatcggg

SEQ ID NO: 571723 - DNA, 120 bp, Artificial Sequence
  ENSG00000170903_37 (sequence is synthesized)
agtgaaagctaagagaggtacagatgggttgcctgactatacaacatattcaccacattgttaccaacaataggccggaagtgggaattttgcaatttgcactttcatggcagtgcttcc

SEQ ID NO: 571724 - DNA, 120 bp, Artificial Sequence
  ENSG00000170903_38 (sequence is synthesized)
ggcaatgaaagtcttcaaactagaagatgccttgtcagggacatgacgtaaagtagctagctgcagagaatctcactgcccactgtggacaagaagcctgagaagctgctggaggagatg

SEQ ID NO: 571725 - DNA, 120 bp, Artificial Sequence
  ENSG00000170903_39 (sequence is synthesized)
cccaaggatcactgcacccagcccaaggtcttgccatggtatatgtgggtggcaaatgggaatgggagagggcagctctacaaagcatacctcagcagcagcaaagaatctctgtcctca

SEQ ID NO: 571726 - DNA, 120 bp, Artificial Sequence
  ENSG00000170903_40 (sequence is synthesized)
tgtatcagtcctctgaacctttgtggtgcatgtgctttttaatggcattcatgccagcttcagagtgactgctccaatgcagcatgtgtcttctccaaaatagagtatcattattttaaa

SEQ ID NO: 571727 - DNA, 120 bp, Artificial Sequence
  ENSG00000170903_41 (sequence is synthesized)
atacttggtatgaaaaaatttgatgggattcaaatccattcacattttgccaaggatttttaatagtacattcatcaacaaaaagtaagctgtactatatcctttaaatataatttcagc

SEQ ID NO: 571728 - DNA, 120 bp, Artificial Sequence
  ENSG00000170906_0 (sequence is synthesized)
gctgtcgccgccgcggagacaaagatggctgcgagagtcggcgccttcctcaagaatgcctgggacaaggagccagtgctggtcgtgtccttcgtcgtcgggggcctcgctgtaattctg

SEQ ID NO: 571729 - DNA, 120 bp, Artificial Sequence
  ENSG00000170906_1 (sequence is synthesized)
cccccattgagcccctacttcaagtactccgtcatgatcaacaaggccacgccctacaactacccagtgcccgtccgtgatgatgggaacatgcccgacgtgcccagccacccccaggac

SEQ ID NO: 571730 - DNA, 120 bp, Artificial Sequence
  ENSG00000170906_2 (sequence is synthesized)
cctcagggccccagcctggagtggctgaagaaactgtgagcacctccactgacagaggcggcccctcccacggctcccaataaaaatgtgaaaaccaacccccgaacgtgagcatgtgtg

SEQ ID NO: 571731 - DNA, 120 bp, Artificial Sequence
  ENSG00000170906_3 (sequence is synthesized)
cagtttgtctggaccccgagaaacccaactggaatccagggcctcatctgcttcaaagccaaagtcttcctcaaccttaatctgcaggagataaggaacaaggtgttaacaggcctggga

SEQ ID NO: 571732 - DNA, 120 bp, Artificial Sequence
  ENSG00000170906_4 (sequence is synthesized)
caggagataaggaacaaggtgttaacaggcctgggaatctagaaaatcccatcagcttcaccatttttgttttcattttgttttgctttttaaagagacagggtctcactctgttgccca

SEQ ID NO: 571733 - DNA, 88 bp, Artificial Sequence
  ENSG00000170906_5 (sequence is synthesized)
taccaagcctaacatgttttttctttttggtagagatggggtctcagtatgttgctcaggcaggtctcagactcctggcctcaagtga

SEQ ID NO: 571734 - DNA, 90 bp, Artificial Sequence
  ENSG00000170906_6 (sequence is synthesized)
ctaacatgttttttctttttggtagagatggggtctcagtatgttgctcaggcaggtctcaaggcctcccaaagtgccgggattacaggc

SEQ ID NO: 571735 - DNA, 120 bp, Artificial Sequence
  ENSG00000170906_7 (sequence is synthesized)
agatggctgcgagtaagtgcaggtgccggtggcgcacggggctcgggtagttctgggaacctctgggcggtcctgggactgaggtgcggcagggcaggggtggaagcgatggggtccgtg

SEQ ID NO: 571736 - DNA, 120 bp, Artificial Sequence
  ENSG00000170906_8 (sequence is synthesized)
ctggaggggaacgcagaagtcacgagggggctcctccagggcaggggtggcacgagagggttagaggtcaccgggggcagctacttgcaggggtgacgcttcttgccaccccttcaggag

SEQ ID NO: 571737 - DNA, 120 bp, Artificial Sequence
  ENSG00000170906_9 (sequence is synthesized)
attctgcagtggtgcccggaccccccgttccattttttaagaattgagatataattcgtatactattctgtgtttgtgcttcgtttttgttttttggggtttttttgagacagagtctcg

SEQ ID NO: 571738 - DNA, 88 bp, Artificial Sequence
  ENSG00000170906_10 (sequence is synthesized)
cagcacttagtaaacattcatatcccctgcctccagagttccttaaggttcaattgatggaatgcctcctctgcaccagcacctgggc

SEQ ID NO: 571739 - DNA, 78 bp, Artificial Sequence
  ENSG00000170906_11 (sequence is synthesized)
gagccactgcgcccggcctatttcaacttaagtgaaaatctcacctgtggccagcggctaccgtgctggacagcacag

SEQ ID NO: 571740 - DNA, 120 bp, Artificial Sequence
  ENSG00000170906_12 (sequence is synthesized)
cacaactcccagagtgctccgcgtccttgctttcgcctctacttgtgctccagggcgcacgcgcagccctgggagcgggttctcgcgcatagggaccacaactcccagggtgctccgcgt

SEQ ID NO: 571741 - DNA, 69 bp, Artificial Sequence
  ENSG00000170906_13 (sequence is synthesized)
cccgtccgtgatgatgggaacatgcccgacgtgcccagccacccccaggaccctcagggccccagcctg

SEQ ID NO: 571742 - DNA, 120 bp, Artificial Sequence
  ENSG00000170906_14 (sequence is synthesized)
agagctcagctcccactccactcaacgccaaagctgtcctggagccagacggtcctgagctctggcactggaggcctgggagccatgcccttgaccagccttgagacctcgagcaagaca

SEQ ID NO: 571743 - DNA, 120 bp, Artificial Sequence
  ENSG00000170906_15 (sequence is synthesized)
aggcaaccattctgaggctgagtttcctgctctgcaaacgacatgacaccctcggctggatgttgcagcggtgacactgaagtagtgacaccagacgatttctgtacttaatgtgatgtc

SEQ ID NO: 571744 - DNA, 120 bp, Artificial Sequence
  ENSG00000170906_16 (sequence is synthesized)
caaggccacgccctacaactacccagcggctggggaaaagggccacaggatagagctcagctcccactccactcaacgccaaagctgtcctggagccagacggtcctgagctctggcact

SEQ ID NO: 571745 - DNA, 120 bp, Artificial Sequence
  ENSG00000170906_17 (sequence is synthesized)
cttagtaaacattcatatcccctgcctccagagttccttaaggttcaattgatggaatgcctcctctgcaccagcacctgggcaggtttgttgttgttgttttgcgacggaatctcactc

SEQ ID NO: 571746 - DNA, 120 bp, Artificial Sequence
  ENSG00000170909_0 (sequence is synthesized)
gctctagcgggtatctgcccaccatggccctggtgctgatcctccagctgctgaccctctggcctctgtgtcacacagacatcactccgtctgtggccattatagtccccccagcttcat

SEQ ID NO: 571747 - DNA, 120 bp, Artificial Sequence
  ENSG00000170909_1 (sequence is synthesized)
accaccctaagccatggctgggagctcagccggctacagttgtgacccctggggtcaacgtgaccttgagatgccgggcaccccaacccgcttggagatttggacttttcaagcctggag

SEQ ID NO: 571748 - DNA, 120 bp, Artificial Sequence
  ENSG00000170909_2 (sequence is synthesized)
agatcgctccccttctcttccgggatgtgtcctccgagctggcagaattctttctggaggaggtgactccagcccaagggggaagttaccgctgctgctaccgaaggccagactgggggc

SEQ ID NO: 571749 - DNA, 120 bp, Artificial Sequence
  ENSG00000170909_3 (sequence is synthesized)
cgggtgtctggtcccagcccagcgatgtcctggagctgctggtgacagaggagctgccgcggccgtcgctggtggcgctgcccgggccggtggtgggtcctggcgccaacgtgagcctgc

SEQ ID NO: 571750 - DNA, 120 bp, Artificial Sequence
  ENSG00000170909_4 (sequence is synthesized)
gctgcgcgggccgcctgcggaacatgagcttcgtgctgtaccgcgagggcgtggcggccccgctgcagtaccgccactccgcgcagccctgggccgacttcacgctgctgggcgcccgcg

SEQ ID NO: 571751 - DNA, 120 bp, Artificial Sequence
  ENSG00000170909_5 (sequence is synthesized)
cccccggcacctacagctgctactatcacacgccctccgcgccctacgtgctgtcgcagcgcagcgaggtgctggtcatcagctgggaaggtgagggccctgaggcccggcccgcctcct

SEQ ID NO: 571752 - DNA, 120 bp, Artificial Sequence
  ENSG00000170909_6 (sequence is synthesized)
ccgccccaggaatgcaggccccaggacctccgccctcagacccaggagcccaggcccccagcctctcctccttcagacccaggggtctagtcctgcagcccctcctccctcagacccagg

SEQ ID NO: 571753 - DNA, 120 bp, Artificial Sequence
  ENSG00000170909_7 (sequence is synthesized)
ctcctccctcagacccaggactccaggcccccagcccctccttcctggacccaggactccaggcccccagcccctccttcctgatccagcagtccaggccccagccccttcttcctggac

SEQ ID NO: 571754 - DNA, 120 bp, Artificial Sequence
  ENSG00000170909_8 (sequence is synthesized)
ccaggagttgaagcctccatcgactccccctcaactttgagactgtagagtcaggtccctaagtccaccccaggggctggaaacctggagttcagggcccagactttggggtccgggagc

SEQ ID NO: 571755 - DNA, 120 bp, Artificial Sequence
  ENSG00000170909_9 (sequence is synthesized)
tgatggcccctctctcccggctccgcccgcagactctggctcctccgactacacccgggggaacctagtccgcctggggctggccgggctggtcctcatctccctgggcgcgctggtcac

SEQ ID NO: 571756 - DNA, 120 bp, Artificial Sequence
  ENSG00000170909_10 (sequence is synthesized)
ttttgactggcgcagtcagaaccgcgctcctgctggtatccgcccctgagccccaggagcactgcagcccgagacttccaacctgagtggcggagaagctgggaccctgggctggactgt

SEQ ID NO: 571757 - DNA, 120 bp, Artificial Sequence
  ENSG00000170909_11 (sequence is synthesized)
cctttcctgcagccccacagtcctgctggctgagctccgcggaacggtccttagaccccgctgtgccctgtgctgtagcttctttccaggcctttcccaaggagtagctgaaaggaagac

SEQ ID NO: 571758 - DNA, 120 bp, Artificial Sequence
  ENSG00000170909_12 (sequence is synthesized)
gcgattagtggttaagacttccaagccagaagacagagggttcgaatcccagcactgccgtctactcactgtagtagtagcagctacagaaaggtagtagtgagacgtgaagccagctgg

SEQ ID NO: 571759 - DNA, 82 bp, Artificial Sequence
  ENSG00000170909_13 (sequence is synthesized)
cagctacagaaaggtagtagtgagacgtgaagccagctggacttcctgggttgaatggggaccgaccaatcagcactctgta

SEQ ID NO: 571760 - DNA, 120 bp, Artificial Sequence
  ENSG00000170909_14 (sequence is synthesized)
aggacacgggcggggacaataagggaataaaagctggcgagcgcggcaccccaccagagtctgcttccacgttgtgggagctttgttctcttgctctacacaataaatcttgctgctgct

SEQ ID NO: 571761 - DNA, 120 bp, Artificial Sequence
  ENSG00000170909_15 (sequence is synthesized)
gcactcgcgcagaacaaagatggagccgtggagtgccatagggctatgacacagtcacccacaggcccccacctcgatactctcttccgtaaatgaggatctgggtctggttttctgatg

SEQ ID NO: 571762 - DNA, 120 bp, Artificial Sequence
  ENSG00000170909_16 (sequence is synthesized)
gagggtgcgaccaagccctggctccagctctagcgggtatctgcccaccatggccctggtgctgatcctccagctgctgaccctctggcctctgtgtcacacagacatcactccgtctgc

SEQ ID NO: 571763 - DNA, 120 bp, Artificial Sequence
  ENSG00000170915_0 (sequence is synthesized)
cccgatgttgagtctccgaatccaagcccggaaggggggacgacggggtctcttgcctgctgtgtactgcttttactgccagaaatgttctcctcacctgggagccagttggctgccaac

SEQ ID NO: 571764 - DNA, 120 bp, Artificial Sequence
  ENSG00000170915_1 (sequence is synthesized)
actgagttgcataccctgtcctgagggcgcggcacggagtgcatgcgggccgctgccatgacgaccgccatcttggagcgcctgagcaccctgtcggtcagcgggcagcagctgcgccgc

SEQ ID NO: 571765 - DNA, 120 bp, Artificial Sequence
  ENSG00000170915_2 (sequence is synthesized)
ctgcccaagatcctggaggatgggcttcccaagatgccttgcactgtcccagaaacggatgtgccccagctcttccgggagccttacatccgcaccggctaccgccccacggggcacgag

SEQ ID NO: 571766 - DNA, 120 bp, Artificial Sequence
  ENSG00000170915_3 (sequence is synthesized)
tggcgctactacttcttcagcctctttcagaaacacaacgaggtggtcaacgtctggacccatttactggcagccctggccgtcctcttgcgattctgggcctttgccgaggctgaggcc

SEQ ID NO: 571767 - DNA, 120 bp, Artificial Sequence
  ENSG00000170915_4 (sequence is synthesized)
ttgccatgggcgtctacccactccctgcctctgctcctcttcatcctgtcgtcaatcacttacctcacctgcagccttctggcccacctgctgcagtccaagtcagagctctcccactac

SEQ ID NO: 571768 - DNA, 120 bp, Artificial Sequence
  ENSG00000170915_5 (sequence is synthesized)
accttctactttgtggactatgttggcgtgagcgtttaccaatatggcagtgctttggctcatttcttctacagctctgaccaggcctggtatgaccggttctggcttttcttcttgcca

SEQ ID NO: 571769 - DNA, 120 bp, Artificial Sequence
  ENSG00000170915_6 (sequence is synthesized)
gcagctgccttctgtggctggttatcttgtgctggctgttgctatgccaaatatcgttaccggaggccttatccagtcatgaggaagatctgtcaagtggtgccagcaggtctggctttt

SEQ ID NO: 571770 - DNA, 120 bp, Artificial Sequence
  ENSG00000170915_7 (sequence is synthesized)
atcctagacatcagccctgtggcacaccgtgtggcgctctgtcacctggctggctgccaggagcaagcagcctggtaccacaccctccagatcctcttcttcctggttagcgcttatttc

SEQ ID NO: 571771 - DNA, 120 bp, Artificial Sequence
  ENSG00000170915_8 (sequence is synthesized)
ttctcctgccccgtgcctgagaagtacttcccgggttcctgtgacatcgtgggccatgggcatcagatcttccatgcatttctgtccatctgtacgctctcccagctggaggccatcctc

SEQ ID NO: 571772 - DNA, 120 bp, Artificial Sequence
  ENSG00000170915_9 (sequence is synthesized)
ctggactaccaggggcggcaggagatcttcctgcagcgccatggacccctatctgtccacatggcctgcctctccttcttcttcctggctgcctgcagtgctgccaccgcagcccttctg

SEQ ID NO: 571773 - DNA, 120 bp, Artificial Sequence
  ENSG00000170915_10 (sequence is synthesized)
aggcacaaagtcaaggccagactgaccaagaaagattcctgaggctggcaagtggggcaacgtgtggaggaagcccctcataatttggagaaaacttgatacaatagaagctgactttta

SEQ ID NO: 571774 - DNA, 120 bp, Artificial Sequence
  ENSG00000170915_11 (sequence is synthesized)
aggcattggcttttaaattaatacatatatccaaggatatgttatagctgcagtgtttgaaagccaaaggatttaagagttttgttgttgttaataaaaggaatactccttttccttttg

SEQ ID NO: 571775 - DNA, 120 bp, Artificial Sequence
  ENSG00000170915_12 (sequence is synthesized)
gatcatagcttaacaaggcacaggaagggaagggatcttgactaagattcatgagacattgaattaaggagaatcatcttcatgcctgaaaatttagcaaaattccgactatggcctcca

SEQ ID NO: 571776 - DNA, 120 bp, Artificial Sequence
  ENSG00000170915_13 (sequence is synthesized)
ggggcaattcctaaaagctgaatggataataaaattggactggaaagtaagtaggtggctggtcctcaccctgttggaatggctatcctactatgctgttctttggtaatggaataaatt

SEQ ID NO: 571777 - DNA, 120 bp, Artificial Sequence
  ENSG00000170915_14 (sequence is synthesized)
gacccaaggaccgaatttcatttggatttcaaattgtccagagtggaaaagccttcaagatgacatgatgaattactcagttcatctgatttctggtccctcctttctcgacaactataa

SEQ ID NO: 571778 - DNA, 120 bp, Artificial Sequence
  ENSG00000170915_15 (sequence is synthesized)
tactaacccttttctcaggataactgtctacacctggcagttttctctgacgtgctgttcactcacatccctaccttgcatggtaatataaaggactaggaagcagtcatacttccagga

SEQ ID NO: 571779 - DNA, 120 bp, Artificial Sequence
  ENSG00000170915_16 (sequence is synthesized)
aatgcttggattcatgtggacattcaggaagcttattctcatataatactaatctaaacagtactagaaattacagtgccaagagccaccaggaggcccagccaataagcatagatacta

SEQ ID NO: 571780 - DNA, 120 bp, Artificial Sequence
  ENSG00000170915_17 (sequence is synthesized)
tatggtatcatgggacccatctattttttaccagtggactacaggattacttgagagttatcagggctgcctaacagaccaggagatctgggggttgcaccagggaatcgccatatttga

SEQ ID NO: 571781 - DNA, 120 bp, Artificial Sequence
  ENSG00000170915_18 (sequence is synthesized)
ccagcatgttttaaaagctcttggtaggattagttggttctaaggatccctctagggacctcattatttcaagaggaacccaaagtccagcctcctacatagatgctgccccacgaagga

SEQ ID NO: 571782 - DNA, 120 bp, Artificial Sequence
  ENSG00000170915_19 (sequence is synthesized)
gcatgtgtgtttactgtggattggtccctgaaggctcctttgggtgagaacatgtgaaccaggcaccctggtttgtttggagcattgctgcccagaagcttctatgggataggtggtgct

SEQ ID NO: 571783 - DNA, 120 bp, Artificial Sequence
  ENSG00000170915_20 (sequence is synthesized)
tgggattgatgtgttgtggccatgcagccctccctgaggattgacttctgcactaatccagtgaaggaggctgtgtcaaaagaagggctcagaagccctcttttcagaggcaatgattcc

SEQ ID NO: 571784 - DNA, 120 bp, Artificial Sequence
  ENSG00000170915_21 (sequence is synthesized)
tgtcagtatgaggtcccttagttactaaaaagggacatgatttaactccagtttgatgaacctcctccgagtttactttattgtcttcaaatcttttgttttcttcctttttgtgagatt

SEQ ID NO: 571785 - DNA, 120 bp, Artificial Sequence
  ENSG00000170915_22 (sequence is synthesized)
tgtgggttttgtgccttataaatggaaatgtatgaacacaatatatgctcatgtagaattttctgttctgggttattgggataagaaaaaatatatattgctcttcaactagtgaatgaa

SEQ ID NO: 571786 - DNA, 120 bp, Artificial Sequence
  ENSG00000170915_23 (sequence is synthesized)
agaaacttcagaaagctagaattgcttatcaatcaaaagactttctcaatctattttggccacaaacaaacatattcaactgaagctttccaataatctttatatcaagaaagcatgcgt

SEQ ID NO: 571787 - DNA, 120 bp, Artificial Sequence
  ENSG00000170915_24 (sequence is synthesized)
cttgtcagctacattgttttcttagatggatttctcctgttaatcctcaaatatctgaacttctgtgttacccaagtgtcttatacaagcttctggtgtctaggacaaatttatggcaaa

SEQ ID NO: 571788 - DNA, 120 bp, Artificial Sequence
  ENSG00000170915_25 (sequence is synthesized)
taaaattagcaaaactgaactgggttgaactgaacaagaggatgggggaattgtgcaaatacgttgttagtagaaggtcaatttaaaatagggactagaaattatttgaagttttcttta

SEQ ID NO: 571789 - DNA, 120 bp, Artificial Sequence
  ENSG00000170915_26 (sequence is synthesized)
ttacggattcaaagacttattttgaaagttggaaggagaagggagggaagagagcagaagggaagaaggtgtaagtcaagctcttgaatataactggtggtattgtgggcagagatcttt

SEQ ID NO: 571790 - DNA, 120 bp, Artificial Sequence
  ENSG00000170915_27 (sequence is synthesized)
agttcaaatccacgtattttttaaaagagagaaccggaggtagagcaatgatcagatgggtgcacagaccagtgccaatctgaacattgttaatggcctgtgacatgatgagcacaggaa

SEQ ID NO: 571791 - DNA, 120 bp, Artificial Sequence
  ENSG00000170915_28 (sequence is synthesized)
ggaacaggcatgaagatattgccatacaattttaatttatacaagtattggcccctcaagtggttggaaattttttttttaatctctttttctgagacagggtcttactctgtcgcccag

SEQ ID NO: 571792 - DNA, 84 bp, Artificial Sequence
  ENSG00000170915_29 (sequence is synthesized)
ccaggctggagtgcagtgatgcaatcacggctcactgcagcctcgacctcccccctggtactacaggcgcgtgccaccacacct

SEQ ID NO: 571793 - DNA, 120 bp, Artificial Sequence
  ENSG00000170915_30 (sequence is synthesized)
cacgcctgccctagaaacagttttttaataggagatatttgagaggcattgaggtaggagactctatgacatgccctcagaatatcagaatcttcttagaaataaactaggaaatgcaga

SEQ ID NO: 571794 - DNA, 120 bp, Artificial Sequence
  ENSG00000170915_31 (sequence is synthesized)
tgtttttaactactcagacttttgaggaattaatccttttaaaacatttttgttaaagttagtgtatcagtaagaaacagacctagtttaaaaggaataatcaacaattttataaaggag

SEQ ID NO: 571795 - DNA, 120 bp, Artificial Sequence
  ENSG00000170915_32 (sequence is synthesized)
atggcttattcaaccatagcccctccaacatatctactggaaattctgctggttaactttatctctctctctcttaatttagactttcaacctatgaaaatgtaaatacctttgaaaaaa

SEQ ID NO: 571796 - DNA, 120 bp, Artificial Sequence
  ENSG00000170915_33 (sequence is synthesized)
ctaaactatcagtcatttacatcctctcatgaatgaaatgcagtgtagggagaggagatggcaggacacagcaaacaggacacatttgcctgcttctctcttgcctaattcttcctgacc

SEQ ID NO: 571797 - DNA, 120 bp, Artificial Sequence
  ENSG00000170915_34 (sequence is synthesized)
tgtatttactgatgcttaataatacttgtaagactctaggggttcatttcccatttcagcggaaagtacttcactcaacaacaatattctcaagagtcttctactggaagctagaaagaa

SEQ ID NO: 571798 - DNA, 120 bp, Artificial Sequence
  ENSG00000170915_35 (sequence is synthesized)
ataggaatttaagtccatagaatgaaggtagttattcctgcctgtgttgcccacctgttcacaaaaagtacctttatgcttgaaaacattaggttctttggttactgcactgtagtttca

SEQ ID NO: 571799 - DNA, 120 bp, Artificial Sequence
  ENSG00000170915_36 (sequence is synthesized)
aatggatcctccagatggcattcatgtcttactcagaaagggcactgccattgtccccaaggcttctgtctactaattctattggtcttgtgttttgcttgcttggcaaaaaaaaaaaaa

SEQ ID NO: 571800 - DNA, 120 bp, Artificial Sequence
  ENSG00000170915_37 (sequence is synthesized)
aattgatcatccaacttcttaactgtctttttctcatggtaaaataccgagaacattgtgggtgaggagcaagtcgggaggtggaacccacccccgcaccctgcctccaatagattgtat

SEQ ID NO: 571801 - DNA, 120 bp, Artificial Sequence
  ENSG00000170917_0 (sequence is synthesized)
aacggacgaattaagcggcgtggagatgcggcagccactgagctggggccgctggcgcgcgatgcttgcccgaacctacggccccgggccttcggcgggttaccgctgggcctcgggcgc

SEQ ID NO: 571802 - DNA, 120 bp, Artificial Sequence
  ENSG00000170917_1 (sequence is synthesized)
acagggttacgtgcggaatccgccagttggagcgtgcgatctgcagggcgagctggacagattcgggggcatctcggtgcgcctggcgcggctcgatgcgctggaccgcctggacgctgc

SEQ ID NO: 571803 - DNA, 120 bp, Artificial Sequence
  ENSG00000170917_2 (sequence is synthesized)
cgccttccagaagggcttgcaggctgcagtacagcaatggcgatcagaaggtagaacagctgtatggctgcacattcccatcctccaaagccgatttattgcccctgctgcttccctggg

SEQ ID NO: 571804 - DNA, 120 bp, Artificial Sequence
  ENSG00000170917_3 (sequence is synthesized)
cttctgctttcaccacgcagaatcggattcatcaacgttgactctgtggctgagagaagggcccagcagattaccaggatatgcttcacatcaagtaggagttgcaggagctgtatttga

SEQ ID NO: 571805 - DNA, 120 bp, Artificial Sequence
  ENSG00000170917_4 (sequence is synthesized)
tgaaagtactagaaaaatactggttgtacaagatcgaaataaattgaaaaatatgtggaagtttccaggaggcctgtcagagcctgaagaagatattggagacacagcggttcgagaagt

SEQ ID NO: 571806 - DNA, 120 bp, Artificial Sequence
  ENSG00000170917_5 (sequence is synthesized)
attcaggtccgtcctgagtattcggcaacagcacacaaatcctggagcttttgggaagtcagatatgtatatcatctgccgcctaaagccatattcattcaccataaatttttgccagga

SEQ ID NO: 571807 - DNA, 120 bp, Artificial Sequence
  ENSG00000170917_6 (sequence is synthesized)
agaatgcttaagatgtgagtggatggatctcaatgacctggcgaagactgaaaatacaactcccatcaccagcagagttgctaggctgctgctgtatgggtacagagaagggtttgacaa

SEQ ID NO: 571808 - DNA, 120 bp, Artificial Sequence
  ENSG00000170917_7 (sequence is synthesized)
aattgacctgactgtggaagaacttccagcagtttacacaggactgttttataaactctatcataaggaactgccagagaattataaaactatgaaaggaattgattaaattcacattta

SEQ ID NO: 571809 - DNA, 120 bp, Artificial Sequence
  ENSG00000170917_8 (sequence is synthesized)
tatgtttagaaacatgtagactaacgaatgacataagaaatagtggacattttggattgattaaacatctgactgtgattttctaatgtatatgatttccatgaagaaattttgtttcta

SEQ ID NO: 571810 - DNA, 120 bp, Artificial Sequence
  ENSG00000170917_9 (sequence is synthesized)
aacatgcacattttaaaagcctcttttcgaataaagcaaatgcgtgaaaaagatcattgctctaggtaagcttcactgggtaacagcagatgcaatataaaagggagaatatacatttta

SEQ ID NO: 571811 - DNA, 120 bp, Artificial Sequence
  ENSG00000170917_10 (sequence is synthesized)
cttgcagggcaagtgcgcctgggacgaagggctcccggggctccagagcttttctaatgaaataaccgcggcccccactccctagtcgctctgtgcaccactgtcgagcccagagggaaa

SEQ ID NO: 571812 - DNA, 120 bp, Artificial Sequence
  ENSG00000170917_11 (sequence is synthesized)
gggagaaggcacgcgtgacctggacctgttttctggagcattcgtgcttagaccttttgctgggaggtctctaaggcggttgggtgaaatggtgaagatcccggactttgggatctgcaa

SEQ ID NO: 571813 - DNA, 120 bp, Artificial Sequence
  ENSG00000170917_12 (sequence is synthesized)
ccctggttgctggtccactttctactgtgcgacattcggaaattgccgtaaaccaccatttcctcttccacagaccccggtgataagaactcctggaattactgagagttaatttggata

SEQ ID NO: 571814 - DNA, 120 bp, Artificial Sequence
  ENSG00000170917_13 (sequence is synthesized)
ttctgtcggacacttttcccaaggaaaaaaactcttacattctaatacgggtggtggactgagtggaccaaagaggcttttcttttttatttttaatttttgtgggtccatagtaggtgt

SEQ ID NO: 571815 - DNA, 120 bp, Artificial Sequence
  ENSG00000170917_14 (sequence is synthesized)
gtatgtttatggggtatatgagctattttgatagaggtataaatgtgtaataattacatcagggtaaatgagatactcatcaccacaagcattcaaccataatccagttactcttagtta

SEQ ID NO: 571816 - DNA, 120 bp, Artificial Sequence
  ENSG00000170917_15 (sequence is synthesized)
ttttttttttttttttttttttgagagagggtatcattctgtctcccaggctagagtgcagtggtaggatcagggttcactgcagcctccaacccctgagctcaagcaatcctcccacct

SEQ ID NO: 571817 - DNA, 120 bp, Artificial Sequence
  ENSG00000170917_16 (sequence is synthesized)
agcaatcctcccacctcagcctcctgggtagctaggactacaggcgcgcatctggcttttttctattttttctagaaacggtgtctcactgtgttgcccaggctggtctcagtctcccgg

SEQ ID NO: 571818 - DNA, 87 bp, Artificial Sequence
  ENSG00000170917_17 (sequence is synthesized)
ctgaatctttattgaatatagtcaccctgttgggctatcaaatactaaaccagagaggttcagagtgtcacatttgtatacaaattg

SEQ ID NO: 571819 - DNA, 120 bp, Artificial Sequence
  ENSG00000170917_18 (sequence is synthesized)
aaccagagaggttcagagtgtcacatttgtatacaaattgggtcaacagctgtctcagcgagaactggagttttttagaataacgcttcttttatgattaaccagggacggtggtgggtg

SEQ ID NO: 571820 - DNA, 120 bp, Artificial Sequence
  ENSG00000170917_19 (sequence is synthesized)
gtttcagtcttcaataagaaaactttttactggctttcaaccttgagcccaatgataagaaagcttggatggaggagccttcactttggaagaagtcgatttagtggtgcagcagttttt

SEQ ID NO: 571821 - DNA, 120 bp, Artificial Sequence
  ENSG00000170917_20 (sequence is synthesized)
caaacggcctctgagggttttataatctaattgaaggcatagcatgcaaattcaactatggaaaaatctctcacactggaaactcaaaataatctttatcctattgagcaatatggcaag

SEQ ID NO: 571822 - DNA, 120 bp, Artificial Sequence
  ENSG00000170917_21 (sequence is synthesized)
aagcatatctgtaaatataattgagctagttatttcaatgtttactcatcctcattcccagacttcttacctcttcacattattttctctcctacttgctagtaattgctgacaagcccg

SEQ ID NO: 571823 - DNA, 120 bp, Artificial Sequence
  ENSG00000170917_22 (sequence is synthesized)
cttatactgcaacagtgtcactaataggagaatcaatcgttttatcttccagtgtgtgggtagacacaggtgttgtacccactgatacttatcaatgaccaaacaggtgatcaaagcact

SEQ ID NO: 571824 - DNA, 120 bp, Artificial Sequence
  ENSG00000170917_23 (sequence is synthesized)
accccagtcagcatgacaaagcagaaagctgtgcgatttggaggtgcacattctgggtttaagtaccaggttctgccatgtgcttagccaggcattaggcaaattgccaccaaaaatatt

SEQ ID NO: 571825 - DNA, 120 bp, Artificial Sequence
  ENSG00000170917_24 (sequence is synthesized)
tgcttcttagcttgctttttgtgaataacgccagctctaattactggatagatgcgttgatcaaagatgaaactaatttgtaaacttaagtaccaaatacttgttatattttttcaataa

SEQ ID NO: 571826 - DNA, 120 bp, Artificial Sequence
  ENSG00000170917_25 (sequence is synthesized)
aacaaattttgttgcacttaatggtagatgttttaggatctttataaatagtaattaatcctcctaacaaccctttgaggtagatagcattattattcctattttaaagatgacagtagt

SEQ ID NO: 571827 - DNA, 120 bp, Artificial Sequence
  ENSG00000170917_26 (sequence is synthesized)
gaggcacagagagaaaaatttacttgccctggctctacacctttcttactgcactatgctaccttgaagaactcctgctggttctgttgttataattgaacaaaactaactgaatggtag

SEQ ID NO: 571828 - DNA, 120 bp, Artificial Sequence
  ENSG00000170917_27 (sequence is synthesized)
tgcctataaagagagactatttacacatgaagtccgctattcttagtctttatggactaagaagtccatattcttggtggaataagaagtcaactattcatattcttttagaacatgaac

SEQ ID NO: 571829 - DNA, 120 bp, Artificial Sequence
  ENSG00000170917_28 (sequence is synthesized)
tattgatgttttgttaccaacaactgaagttagagggataaacaggcaatatgttgttagcttcacacataacatatctgcatcagtaatgaaatagcactggttctggtccctgctatg

SEQ ID NO: 571830 - DNA, 120 bp, Artificial Sequence
  ENSG00000170917_29 (sequence is synthesized)
caagccagtcatttcattagtacaaattgagccccagtgcataatgtagggttaccctggaggattgcaaatgcatggaatattaaatagaattggaaaaaatagctaatggaagagata

SEQ ID NO: 571831 - DNA, 120 bp, Artificial Sequence
  ENSG00000170917_30 (sequence is synthesized)
tcattaggtcatatgtaataagttctaataaattgtacagacatagtagtctttaaattcataatggtgagctcatgagcagtggttaggaaagactggtcaaagatgtggaatatgagc

SEQ ID NO: 571832 - DNA, 120 bp, Artificial Sequence
  ENSG00000170917_31 (sequence is synthesized)
tggactttaaaggatagatattagcaatgggaatgggaggtgagggaagaaaaagcaataaagcttattagggaaaagaagaaagcaatttaaaaatgattctaaggtttcaagcattgg

SEQ ID NO: 571833 - DNA, 120 bp, Artificial Sequence
  ENSG00000170917_32 (sequence is synthesized)
aaaatgattctaaggtttcaagcattggtgccagaaataaataagcttataaatgaagctagtttggggtgtaagattcagttttggccaggcgcggtgggtcacgcctataatcccagc

SEQ ID NO: 571834 - DNA, 120 bp, Artificial Sequence
  ENSG00000170917_33 (sequence is synthesized)
tttgaacacactttgtgaagtctgaagtggtaaccttcaggacaggaaatgtctgggagcaactggagaacagaaagtttagtgttcagtgaggtcagggctgggcagccatcctcatgt

SEQ ID NO: 571835 - DNA, 120 bp, Artificial Sequence
  ENSG00000170917_34 (sequence is synthesized)
atgtatcagctgaagcagtgagagtggattctccaagacacagagtgtagatataaaacagcaagcaaatagcattgcttttagaaagtagccttttaatttgattggaaggattgcctg

SEQ ID NO: 571836 - DNA, 120 bp, Artificial Sequence
  ENSG00000170917_35 (sequence is synthesized)
ggaaggagcacatgtgaaatgtatggagtgatagaaatgttctataatgttaaagtgtgttacgggcatatgcatatgtcaaatcgcatgaaatgtacacttaagatttgtacatttcac

SEQ ID NO: 571837 - DNA, 120 bp, Artificial Sequence
  ENSG00000170917_36 (sequence is synthesized)
tttatgtactttacctcaatttttaaaagatgtcatcagacaaagagagcaaggtgagaaggacctgatcccataattccactgcatgctaactcaaatcaggaagtctttattaaaggc

SEQ ID NO: 571838 - DNA, 120 bp, Artificial Sequence
  ENSG00000170917_37 (sequence is synthesized)
cccatgtgcctgtcactgtgctaggcacagcaactttcaaagaggtagagaacattgtccttaaagagaggagcttcctgcagagctagggaaaagagaagggaaagttaattaactatt

SEQ ID NO: 571839 - DNA, 120 bp, Artificial Sequence
  ENSG00000170917_38 (sequence is synthesized)
tgatatataatcaacccccaaagacagacacacacacacgctttatagcgttattataaagattaagtgagatgatggatgaagaaagtgatctgaaaagcttttctaaaaactctaaat

SEQ ID NO: 571840 - DNA, 120 bp, Artificial Sequence
  ENSG00000170917_39 (sequence is synthesized)
ctgaagtatttatttcttcacccataaacttaaggtagtaatacctttcatggttgtgcacttaatgagataatatatataaagtgcttggaacttagtaagtttcaaatagatattagc

SEQ ID NO: 571841 - DNA, 120 bp, Artificial Sequence
  ENSG00000170917_40 (sequence is synthesized)
atctttttcccctggctcaatcttaagtagtaaagagaatttaaagaaggcaaagatagaaaacctataattatgttcaccatgatattatctataataaggaaaaattagaattttatt

SEQ ID NO: 571842 - DNA, 120 bp, Artificial Sequence
  ENSG00000170917_41 (sequence is synthesized)
cctatatgctagtaaaatgtgaagtttgatttcttcatattttttattttcaaaatttctacaaccagcatacattatttaaaaacaaagtttaactaccttgaaatttatacattaaaa

SEQ ID NO: 571843 - DNA, 120 bp, Artificial Sequence
  ENSG00000170917_42 (sequence is synthesized)
acattataacagaactcctaaaggaagaaaaaaatagaagtccataattgtctttaagattaaacctaaggatgttaaaaggaacagcattcaaatggtatttgattcggtttaaatcct

SEQ ID NO: 571844 - DNA, 120 bp, Artificial Sequence
  ENSG00000170917_43 (sequence is synthesized)
tttatttgtccactctaaaactacagaacatctgttacgtgccaagcattgtctttggtggtatggatataaaggtcagcagtgtaatgactttattctgaaggaattcagtctgatgga

SEQ ID NO: 571845 - DNA, 120 bp, Artificial Sequence
  ENSG00000170917_44 (sequence is synthesized)
aaaatcatataaacaaggtggttactataaaacatggtacttccagtgccagcgatgtgaacaagacatttggggacctcttttgcttaaagatggtttcctggaggaggcgaaaccctg

SEQ ID NO: 571846 - DNA, 120 bp, Artificial Sequence
  ENSG00000170917_45 (sequence is synthesized)
cattttaaaagcctcttttcgaataaagcaaatgcgtgaaaaagatcattgctctaggtttatgatcaagaatagaagcagaagggaaacaaagagtgaaaggaaaattcatagtaacca

SEQ ID NO: 571847 - DNA, 120 bp, Artificial Sequence
  ENSG00000170917_46 (sequence is synthesized)
aacaaaactgaacaagatccctgcctttatgccactcaaattctagctgggggagacacacaataagcaataagcttaagtgaataaattatattctatgttagaatataagaaaactta

SEQ ID NO: 571848 - DNA, 120 bp, Artificial Sequence
  ENSG00000170917_47 (sequence is synthesized)
gaaaaatgtaaacctgaacagggtaagagggactaggaatggtgagtggtagaagctaggtgcaatattaaatagcatggtcacagtaggctccattgagaaagtgacatttgagcaaat

SEQ ID NO: 571849 - DNA, 120 bp, Artificial Sequence
  ENSG00000170917_48 (sequence is synthesized)
gcgatctgcagggcgagctggacagattcgggggcatctcggtgcgcctggcgcggctcgatgcgctggaccgcctggacgctgccgccttccagaagggcttgcaggttgaaaaatatg

SEQ ID NO: 571850 - DNA, 120 bp, Artificial Sequence
  ENSG00000170917_49 (sequence is synthesized)
agcagtctttgaaacagctgtaacggcatctgtgaaagaagataggttccaggaacggaactgccacttagattgtaaattcctgaaaaacaggacgtttttgcatctcctcccggcttc

SEQ ID NO: 571851 - DNA, 120 bp, Artificial Sequence
  ENSG00000170920_0 (sequence is synthesized)
atgaaagcaggaaacttctcagacactccagaattctttctcttgggattgtcaggggatccggagctgcagcccatcctcttcatgctgttcctgtccatgtacctggccacaatgctg

SEQ ID NO: 571852 - DNA, 120 bp, Artificial Sequence
  ENSG00000170920_1 (sequence is synthesized)
tcccacctccacacccccatgtacttcctcctctctatcctgtccttggtcgacatctgtttcacctccaccacgatgcccaagatgctggtgaacatccaggcacaggctcaatccatc

SEQ ID NO: 571853 - DNA, 120 bp, Artificial Sequence
  ENSG00000170920_2 (sequence is synthesized)
atgctggtgaacatccaggcacaggctcaatccatcaattacacaggctgcctcacccaaatctgctttgtcctggtttttgttggattggaaaatggaattctggtcatgatggcctat

SEQ ID NO: 571854 - DNA, 120 bp, Artificial Sequence
  ENSG00000170920_3 (sequence is synthesized)
ctggatgctctgctgcacacgttgatggtgctacagctgaccttctgcatagacctggaaattccccactttttctgtgaactagctcatattctcaagctcgcctgttctgatgtcctc

SEQ ID NO: 571855 - DNA, 120 bp, Artificial Sequence
  ENSG00000170920_4 (sequence is synthesized)
atcaataacatcctggtgtatttggtgaccagcctgttaggtgttgttcctctctctgggatcattttctcttacacacgaattgtctcctctgtcatgaaaattccatcagctggtgga

SEQ ID NO: 571856 - DNA, 120 bp, Artificial Sequence
  ENSG00000170920_5 (sequence is synthesized)
aagtataaagctttttccatctgcgggtcacatttaatcgttgtttccttgttttatggaacagggtttggggtgtaccttagttctggggctacccactcctccaggaagggtgcaata

SEQ ID NO: 571857 - DNA, 120 bp, Artificial Sequence
  ENSG00000170920_6 (sequence is synthesized)
gcatcagtgatgtataccgtggtcacccccatgctgaacccactcatttacagcctgagaaacaaggacatgttgaaggctttgaggaaactaatatctaggataccatctttccattga

SEQ ID NO: 571858 - DNA, 120 bp, Artificial Sequence
  ENSG00000170921_0 (sequence is synthesized)
aaccatgtttcggaatagtctcaagatgctgcttactggtgggaaatcaagtcgtaaaaacaggtcaagtgatggagggagcgaggaaccaccggatcgaagacagtcaagtgtagactc

SEQ ID NO: 571859 - DNA, 120 bp, Artificial Sequence
  ENSG00000170921_1 (sequence is synthesized)
tcgccaaagccgctctgggcaaggtggcatctccacagaaagcgactgtgcttttgagccagactacgctgtcccgccacttccagtgagtgaaggtgatgctgaacaggagcttggccc

SEQ ID NO: 571860 - DNA, 120 bp, Artificial Sequence
  ENSG00000170921_2 (sequence is synthesized)
ccctccatctgtagatgaggcagcaaacacactcatgactcgtctgggtttcctccttggagagaaagtcacagaagttcagccaggtgaccaatacagcatggaagtacaggatgaaaa

SEQ ID NO: 571861 - DNA, 120 bp, Artificial Sequence
  ENSG00000170921_3 (sequence is synthesized)
tcagacctcagcaatcacccagcggataagtccttgttccactctgactagcagcactgcctctccaccagccagtagcccctgctctacactcccacccatcagtacaaatgcaactgc

SEQ ID NO: 571862 - DNA, 120 bp, Artificial Sequence
  ENSG00000170921_4 (sequence is synthesized)
caaggactgcagctatggggctgttactagtccaacctctacccttgaaagcagagatagtggcatcattgctacattaacaagctattctgaaaatgtggaacgcacaaaatatgctgg

SEQ ID NO: 571863 - DNA, 120 bp, Artificial Sequence
  ENSG00000170921_5 (sequence is synthesized)
ggaaagcagtaaagaattaggatctggaggaaacataaaaccttggcagtctcaaaaatccagcatggactcctgtttgtatcgagtagatgaaaacatgactgcttccacctatagtct

SEQ ID NO: 571864 - DNA, 120 bp, Artificial Sequence
  ENSG00000170921_6 (sequence is synthesized)
gaataagatcccagagagaaatttggaaacagtgttatctcaatcagtacagtctattcctttgtatctcatgccacggccaaattcagtagcagccaccagctctgcccacttggaaga

SEQ ID NO: 571865 - DNA, 120 bp, Artificial Sequence
  ENSG00000170921_7 (sequence is synthesized)
ccttgcttacctggatgagcagagacatacacctttgagaacttctctacgaatgccaagacagagcatgggtggtgctcgcacacagcaggatttaagagttcgctttgcaccttatag

SEQ ID NO: 571866 - DNA, 120 bp, Artificial Sequence
  ENSG00000170921_8 (sequence is synthesized)
gcctccagatatctccttgaagcctctgctctttgaagtgcccagcatcactacagagtcagtgtttgttggccgagattgggttttccacgaaatagatgctcaacttcaaagttcaaa

SEQ ID NO: 571867 - DNA, 120 bp, Artificial Sequence
  ENSG00000170921_9 (sequence is synthesized)
tgccagcgtgaaccaaggagtagtgattgtgggaaacattggattcggcaaaactgccatcatctccagactggtggccctcagctgccatggtacaaggatgagacagatcgcctcaga

SEQ ID NO: 571868 - DNA, 120 bp, Artificial Sequence
  ENSG00000170921_10 (sequence is synthesized)
cagcccacatgcctcccccaaacatgtggatgccaacagagagctgccactcacacagccaccttcagcccactcatctatcaccagtggaagctgcccaggaactccggaaatgcgcag

SEQ ID NO: 571869 - DNA, 120 bp, Artificial Sequence
  ENSG00000170921_11 (sequence is synthesized)
gcggcaggaggaggctatgcgaagactagcctcgcaggtggttgcctatcactattgtcaagcagataatgcctacacttgcttggtgccagaatttgtccacaatgttgctgccttgct

SEQ ID NO: 571870 - DNA, 120 bp, Artificial Sequence
  ENSG00000170921_12 (sequence is synthesized)
ctgccgctcacctcagctgacagcctatcgggagcagcttcttcgggaacctcacctgcagagcatgctgagccttcgttcctgtgttcaagaccccatggcctccttccggaggggagt

SEQ ID NO: 571871 - DNA, 120 bp, Artificial Sequence
  ENSG00000170921_13 (sequence is synthesized)
tctggagccactagaaaatctccataaagagagaaaaatcccagatgaagatttcatcattttaattgatggattaaatgaagcagaatttcacaaaccggattatggggatacaattgt

SEQ ID NO: 571872 - DNA, 120 bp, Artificial Sequence
  ENSG00000170921_14 (sequence is synthesized)
atcgtttctgagtaaaatgatcggaaagtttccttcttggctcaaactaattgtaacagttaggaccagtttacaggaaattaccaagctgctgcctttccataggatttttttggatcg

SEQ ID NO: 571873 - DNA, 120 bp, Artificial Sequence
  ENSG00000170921_15 (sequence is synthesized)
actagaagagaatgaagccatagaccaggacctgcaggcttacatcctgcaccggatacacagcagctcagagatccagaataacatttcacttaatggcaaaatggacaatactacatt

SEQ ID NO: 571874 - DNA, 120 bp, Artificial Sequence
  ENSG00000170921_16 (sequence is synthesized)
tggcaaactcagttctcatctcaagaccctcagtcaagggtcctatctatatctgaaacttacatttgacctcatagagaaaggctatctagtgttaaagagctctagctacaaagtagt

SEQ ID NO: 571875 - DNA, 120 bp, Artificial Sequence
  ENSG00000170921_17 (sequence is synthesized)
tcctgtttcgctctcagaggtttatttactccagtgcaatatgaagttcccaacccagtcttcctttgaccgggtgatgcctctcctgaatgtggcagtggcctctctccacccactgac

SEQ ID NO: 571876 - DNA, 120 bp, Artificial Sequence
  ENSG00000170921_18 (sequence is synthesized)
tgatgagcatatcttccaggccatcaatgctgggagcattgaaggcacactagaatgggaggattttcagcagagaatggagaacctctccatgttcctaatcaagcgcagagacatgac

SEQ ID NO: 571877 - DNA, 120 bp, Artificial Sequence
  ENSG00000170921_19 (sequence is synthesized)
tcgtatgtttgtacatccttcttttcgagaatggcttatctggagagaagaaggagagaaaaccaaatttctctgtgatccgaggagtggtcacacgttacttgccttctggttttcccg

SEQ ID NO: 571878 - DNA, 120 bp, Artificial Sequence
  ENSG00000170921_20 (sequence is synthesized)
ccaagagggaaaactaaaccgacagcagactattgaactgggacatcacatcctcaaagcacacatttttaagggtttgagtaaaaaagttggtgtatcatcctccatcctccaaggtct

SEQ ID NO: 571879 - DNA, 120 bp, Artificial Sequence
  ENSG00000170921_21 (sequence is synthesized)
ctggatctcttatagcacagaaggtctttccatggcactggcgtctttacgaaatctctacactccaaatataaaggtcagccgactgctgattttgggaggtgccaatattaattaccg

SEQ ID NO: 571880 - DNA, 120 bp, Artificial Sequence
  ENSG00000170921_22 (sequence is synthesized)
gacagaggttttaaataatgctccaattctatgtgttcagtcccatcttggttacacagaaatggtagccctgctgctggagttcggggccaacgtggatgcctcttctgaaagtggcct

SEQ ID NO: 571881 - DNA, 120 bp, Artificial Sequence
  ENSG00000170921_23 (sequence is synthesized)
gactcccctgggatatgctgcagcagcagggtacctgagcattgtggtgctgctgtgcaagaaacgggccaaggtggatcatttggataagaacgggcagtgtgctttggttcatgctgc

SEQ ID NO: 571882 - DNA, 120 bp, Artificial Sequence
  ENSG00000170921_24 (sequence is synthesized)
actccgaggtcatctggaggttgtcaagtttttgattcagtgtgactggacgatggccggccagcagcaaggagtatttaagaagagccatgccatccaacaggccctcattgctgcagc

SEQ ID NO: 571883 - DNA, 120 bp, Artificial Sequence
  ENSG00000170921_25 (sequence is synthesized)
cagcatgggttatactgagattgtctcctacctacttgatcttccagaaaaagatgaagaggaagtagagcgagcacagatcaacagctttgacagtctctggggagagacagccctaac

SEQ ID NO: 571884 - DNA, 120 bp, Artificial Sequence
  ENSG00000170921_26 (sequence is synthesized)
agctgcagccggaaggggcaaactggaggtgtgccgtttgctcttggaacaaggggcggcagtggcccagccaaaccgccgaggagcagtgccactattcagcacagtgcgccagggcca

SEQ ID NO: 571885 - DNA, 120 bp, Artificial Sequence
  ENSG00000170921_27 (sequence is synthesized)
ctggcagattgttgatcttttactcacccatggagctgatgtcaacatggcagacaagcagggccgcactcccctgatgatggctgcttccgaaggccatctaggaaccgtggactttct

SEQ ID NO: 571886 - DNA, 120 bp, Artificial Sequence
  ENSG00000170921_28 (sequence is synthesized)
gcttgcacaaggtgcctccattgctcttatggacaaagaaggattgacagccctcagctgggcttgtttgaagggccatctctcagtagtacgttctctggtggataacggagctgccac

SEQ ID NO: 571887 - DNA, 120 bp, Artificial Sequence
  ENSG00000170921_29 (sequence is synthesized)
agaccatgctgacaagaatggccgtaccccactggatctggcagctttctatggcgatgctgaggtggtccagttcctggtagatcatggggccatgatcgagcacgttgactacagtgg

SEQ ID NO: 571888 - DNA, 120 bp, Artificial Sequence
  ENSG00000170921_30 (sequence is synthesized)
aatgcgccctttggatagggcagtggggtgccggaacacttctgttgttgtcactcttctgaagaaaggagccaagataggtccagccacatgggcgatggccacctccaagccagacat

SEQ ID NO: 571889 - DNA, 120 bp, Artificial Sequence
  ENSG00000170921_31 (sequence is synthesized)
catgatcatcctgttgagcaagctgatggaagagggggacatgttttataagaaaggtaaagtaaaggaagctgcccagcgctaccagtacgccctgaagaagttccctagagaagggtt

SEQ ID NO: 571890 - DNA, 120 bp, Artificial Sequence
  ENSG00000170921_32 (sequence is synthesized)
tggtgaggacttgaaaactttccgggaactaaaggtgtctctcctcctcaacctctctcggtgtcgcaggaaaatgaacgattttggaatggcggaggaatttgctactaaggccctgga

SEQ ID NO: 571891 - DNA, 120 bp, Artificial Sequence
  ENSG00000170921_33 (sequence is synthesized)
gctgaaaccgaaatcttatgaagcttactatgcgagagcaagggcaaaacgcagcagcagacagttcgcagcagccttagaggacctgaacgaggccatcaagctgtgtcccaacaaccg

SEQ ID NO: 571892 - DNA, 120 bp, Artificial Sequence
  ENSG00000170921_34 (sequence is synthesized)
tgagatccagagacttctgctgagagtggaagaagagtgtagacagatgcagcagccacagcagccaccgccgccaccgcagcctcagcagcagttgccggaagaagcagaacctgagcc

SEQ ID NO: 571893 - DNA, 120 bp, Artificial Sequence
  ENSG00000170921_35 (sequence is synthesized)
acagcatgaagacatatactctgtacaggatatattcgaggaggagtacctggaacaggatgttgaaaatgtttccattggcctccagacagaggcccggcccagccaggggctcccggt

SEQ ID NO: 571894 - DNA, 120 bp, Artificial Sequence
  ENSG00000170921_36 (sequence is synthesized)
catccagagcccaccctcctctcccccgcatcgggactcagcctacatctccagctcacctcttggctctcatcaggtttttgacttccggtccagtagttctgtaggctctcccactag

SEQ ID NO: 571895 - DNA, 120 bp, Artificial Sequence
  ENSG00000170921_37 (sequence is synthesized)
acagacctatcagtccacctcacctgccctttctccaactcatcagaactcacattacaggcctagcccaccacacacttccccggctcatcagggaggatcttaccgtttcagcccccc

SEQ ID NO: 571896 - DNA, 120 bp, Artificial Sequence
  ENSG00000170921_38 (sequence is synthesized)
tcctgtgggaggacagggcaaagaatacccaagccctcccccttcccctctccggagaggccctcagtatcgggccagccctccagctgaaagtatgagtgtctatagatcccagtctgg

SEQ ID NO: 571897 - DNA, 120 bp, Artificial Sequence
  ENSG00000170921_39 (sequence is synthesized)
ttcacccgtgcgctatcagcaggaaacaagcgtcagtcagcttcctggcagacccaaatctccattatccaaaatggcccagcggccctaccagatgcctcagctccctgtggcagttcc

SEQ ID NO: 571898 - DNA, 120 bp, Artificial Sequence
  ENSG00000170921_40 (sequence is synthesized)
ccagcaagggctcaggctacagcctgccaaggcccagattgtgagaagtaaccagcccagcccagccgtccattcaagcaccgtcatccccacaggagcctatggccaagtagcccattc

SEQ ID NO: 571899 - DNA, 120 bp, Artificial Sequence
  ENSG00000170921_41 (sequence is synthesized)
aatggccagtaaataccagtcttcacaaggagacataggagtcagccagagccggttggtttatcaagggtcaattgggggaatcgtaggggatggaaggccggtgcagcatgtccaagc

SEQ ID NO: 571900 - DNA, 120 bp, Artificial Sequence
  ENSG00000170921_42 (sequence is synthesized)
cagcctgagtgcaggcgccatctgtcagcatggaggattgaccaaagaggatcttccacagcgaccttcctcagcataccgaggtggcgtgagatacagccagacaccacagatcggacg

SEQ ID NO: 571901 - DNA, 120 bp, Artificial Sequence
  ENSG00000170921_43 (sequence is synthesized)
cagccagtcagcatcctattacccagtctgtcactcaaaactagatctggagcgctcctccagccaactaggttcccctgatgtgtcgcatttaatcagaagacctatcagtgtcaaccc

SEQ ID NO: 571902 - DNA, 120 bp, Artificial Sequence
  ENSG00000170921_44 (sequence is synthesized)
taacgaaatcaaaccgcacccgccaactcccaggccgttgctgcattcccaaagtgtaggccttcgcttctctccatctagcaatagtatctcctccacctccaacctaactccgacctt

SEQ ID NO: 571903 - DNA, 120 bp, Artificial Sequence
  ENSG00000170921_45 (sequence is synthesized)
ccggccatcttcttccatccagcaaatggagatcccactgaaacctgcatatgagaggtcatgtgacgagctgtcgccagtgtctccaactcaaggaggttaccccagtgagcccacccg

SEQ ID NO: 571904 - DNA, 120 bp, Artificial Sequence
  ENSG00000170921_46 (sequence is synthesized)
atccaggaccacaccattcatggggatcatagataaaacagcacggactcagcagtacccccacctccaccagcagaatcggacctgggcagtgtcatctgtggacaccgtcctcagtcc

SEQ ID NO: 571905 - DNA, 120 bp, Artificial Sequence
  ENSG00000170921_47 (sequence is synthesized)
cacgtctccaggcaacctgcctcagcctgagtccttcagtccaccatcatccatcagcaacattgccttttataacaaaaccaacaatgcacagaatggccatttgctggaggacgatta

SEQ ID NO: 571906 - DNA, 120 bp, Artificial Sequence
  ENSG00000170921_48 (sequence is synthesized)
cgtgaaggtagctcggactctacctgtggctcaggcataccaggacaacctgtacaggcagctgtcccgagactctcggcaagggcagacatcccctatcaaaccaaagagaccgttcgt

SEQ ID NO: 571907 - DNA, 120 bp, Artificial Sequence
  ENSG00000170921_49 (sequence is synthesized)
ggagtctaatgtttaaaagacgttttgttggagtgagacccatatgttttcactgcacattttcaggcttggtttccacattcgaggtagttctctggcttaatttctcatgtagtttct

SEQ ID NO: 571908 - DNA, 120 bp, Artificial Sequence
  ENSG00000170921_50 (sequence is synthesized)
gtgtggtgttcagaggtggcagcccacatgctgaaatcctttgcatgcagccgactgggaagcggcctcccgggagccaggacttcagtttctcttgtctgtgcccagccacatgctctc

SEQ ID NO: 571909 - DNA, 120 bp, Artificial Sequence
  ENSG00000170921_51 (sequence is synthesized)
tccctctcttcagatgccaacgaggagattttcgtgctgtgtgctttaacccagggagatcagacacactggtcagctttttccaggagacaatcgctttcactgatgttcttgttgtgt

SEQ ID NO: 571910 - DNA, 120 bp, Artificial Sequence
  ENSG00000170921_52 (sequence is synthesized)
aattgtctttttccttttttaaaaaataaggtgttcttgttcgttttcttctagaaactttagaaagagtgcgatgcccctttgcctttgcatccttagccagtgtcacccacacagcca

SEQ ID NO: 571911 - DNA, 120 bp, Artificial Sequence
  ENSG00000170921_53 (sequence is synthesized)
gccgcagcgcattctcatgctgtggcccctccccagaccgccagcgccctgcagccaccaggtctgcagtgtgcattaggattattgctggtcttcctagggggtaaaaggatcagagag

SEQ ID NO: 571912 - DNA, 120 bp, Artificial Sequence
  ENSG00000170921_54 (sequence is synthesized)
agaagaattaagtgctaaattggaagaaaaccccaatataattatgtaaaatgtcactacattgattttccaagaggcattgtaggaacatgtcaaaaacagccagccctttaaatattg

SEQ ID NO: 571913 - DNA, 120 bp, Artificial Sequence
  ENSG00000170921_55 (sequence is synthesized)
cagtcagccaaggaaattagatgagaattgtggctattaagagaattcactgagagttattctctagatttttagccgacaattaaccactaaaagctgctgcttttccagggtggggga

SEQ ID NO: 571914 - DNA, 120 bp, Artificial Sequence
  ENSG00000170921_56 (sequence is synthesized)
gggaatgaatacatagaaaaacaaaaaagattgttctggattctcagtgaaaggctataggaagtctgttctggagacatctactttttagatcctgatacatcactgagtgtcatactc

SEQ ID NO: 571915 - DNA, 120 bp, Artificial Sequence
  ENSG00000170921_57 (sequence is synthesized)
cactaaaaggaaactctaaccgaaggctggctggtgtgacaatcccgttagttggatcttcacctacagccagattttgttctagtggccctcttcctgtaaacccagatggtgtcatac

SEQ ID NO: 571916 - DNA, 120 bp, Artificial Sequence
  ENSG00000170921_58 (sequence is synthesized)
agaaattgtttctttcagaagcagattggaatctcttgggaccatgagactgagtcccaatatttccacccagggtcatgcccgttgttgtctacttccattttgagatctatagtttga

SEQ ID NO: 571917 - DNA, 120 bp, Artificial Sequence
  ENSG00000170921_59 (sequence is synthesized)
ttatctattattacaggaactgtttcttttctttttctaggagtgtttatgagagtgtgatattttaaagtcagacgcagcaaaaactgtttcagggtgaagaaagacccctttcagccc

SEQ ID NO: 571918 - DNA, 120 bp, Artificial Sequence
  ENSG00000170921_60 (sequence is synthesized)
tgttttgcagccctgggtgggggcatgagatagacagcaagcttctgatcttgaagcttgtctagaagacacatcttctaggtctcgtggtcatttggtaggctgacctttgagtgagcg

SEQ ID NO: 571919 - DNA, 120 bp, Artificial Sequence
  ENSG00000170921_61 (sequence is synthesized)
aggccactattgagtggatagcaagaacattggaaccaaagcctcggcacaggcctggcactggctgtacatcagctcttacaactaaacaactcaactaagcaactgaaacgaaacaaa

SEQ ID NO: 571920 - DNA, 120 bp, Artificial Sequence
  ENSG00000170921_62 (sequence is synthesized)
ggagcattcgttctctgttgttaggaatcattctgctctgttagggaagggctgcaggaagggcagtttcctgaataaaaatctggctgcgaccagtcccatgtgtctggtaagtaagta

SEQ ID NO: 571921 - DNA, 120 bp, Artificial Sequence
  ENSG00000170921_63 (sequence is synthesized)
agtaagtaagtgccctttgaagggatcattaagacacagggagcatgaacctgagatcagaagcatttctttactaatttagattctgcgaaatagacggacctctccacccccaaacct

SEQ ID NO: 571922 - DNA, 120 bp, Artificial Sequence
  ENSG00000170921_64 (sequence is synthesized)
aaaacaggccaggacttgtctctgtgctgaaagcaaatagcaagactaactcaagccccagcctctttccacactccctgatacctaaggactgctttctcagctagaccagggtgggca

SEQ ID NO: 571923 - DNA, 120 bp, Artificial Sequence
  ENSG00000170921_65 (sequence is synthesized)
tcagcgacgccttctcagctagaccagggtaggcatcagcgtcctctctccatctctatacccctctctctcacatcaggaagatgaaatgtgtagctctagcggcaacctctagccagg

SEQ ID NO: 571924 - DNA, 120 bp, Artificial Sequence
  ENSG00000170921_66 (sequence is synthesized)
agcccagtggcctctcagattgctttttggccaggtctcagcactgctggcatctttacatcttactccttaaaaccgcctctcgctgaggagccactgcattttgaagaatttctcagt

SEQ ID NO: 571925 - DNA, 120 bp, Artificial Sequence
  ENSG00000170921_67 (sequence is synthesized)
gtctgtcaggaaagtgctcctgctcatttggaacgccacacaccacccgcactcacctgtccaggcgaatgagcaggtcctgtagctttacaaatatgccgctgatgccgcttctcccca

SEQ ID NO: 571926 - DNA, 120 bp, Artificial Sequence
  ENSG00000170921_68 (sequence is synthesized)
gggtctctcagttttccaggacaaaaagatttagggcctataccctatgggcaaaacacctaaaatgtcaacagtcaaaatgccattctttttggccatcataagagggagtaggtatca

SEQ ID NO: 571927 - DNA, 120 bp, Artificial Sequence
  ENSG00000170921_69 (sequence is synthesized)
ctgctgcatgccagttgtttttgactagaatatgccaaccagagcttgttggggcaggagacgtttttccttacaagcagactgcctgtgccctgtgccctgtttgctacttcactgcca

SEQ ID NO: 571928 - DNA, 120 bp, Artificial Sequence
  ENSG00000170921_70 (sequence is synthesized)
tggaatgatccgagtactgtatttcagagctgccccttccccagcagcaaacactcgctgagtccatgtctggcttcaggtgggaggaaatgtttcagatgaaacttactcaattcatac

SEQ ID NO: 571929 - DNA, 120 bp, Artificial Sequence
  ENSG00000170921_71 (sequence is synthesized)
caccctgaaatggaggacagaggtgacaaacttcagtttaataggtttctcaccaagttgtatgttccattggcccaggattcttgcactaatgggtttctatcacatcatgtctataaa

SEQ ID NO: 571930 - DNA, 120 bp, Artificial Sequence
  ENSG00000170921_72 (sequence is synthesized)
tgggtgcactttactgtttgaatttgtaactgaagtactggatatttaagtgtgagtaatgtcttcattagaaaatagcagaaccgctcttgtcttttagtgtatttttcaagaaaaaag

SEQ ID NO: 571931 - DNA, 120 bp, Artificial Sequence
  ENSG00000170921_73 (sequence is synthesized)
gaaaggaaagacatcaagcagtggatcacaacatttatagcacaagaaataacttgtatataagcatcaaaaagattaagaattttttaatatgaaaaatatttgcagtgattttaaagt

SEQ ID NO: 571932 - DNA, 120 bp, Artificial Sequence
  ENSG00000170921_74 (sequence is synthesized)
gcttttccagcaatgttcttagggactcctgagacacggttactttatctactggatcagtaaggcacacaattaacaattaacaattaatgtttatttacaaagtaaagggaaaacctg

SEQ ID NO: 571933 - DNA, 120 bp, Artificial Sequence
  ENSG00000170921_75 (sequence is synthesized)
tgtaacatgagaatttggcatgacaaaatggagaccattttgtatctgctgttgtatcttgtccgggttgcagacgtgcactattaaagtcccaagttaatagagcacaaacccttctcg

SEQ ID NO: 571934 - DNA, 120 bp, Artificial Sequence
  ENSG00000170921_76 (sequence is synthesized)
ctcctcccccatgtgcccctctttttagatgtgtataacttaaactcgatggctcaggaaaattccactaattagaatcatgtacagtaccccaggtcgttgtccagatatacaagtttg

SEQ ID NO: 571935 - DNA, 120 bp, Artificial Sequence
  ENSG00000170921_77 (sequence is synthesized)
ctaatgtagttaagcctggattattaaacacttttcctaaattattgtaaacagaacagcttagagaaaggtattctcagtccttaatattgtatagtagtttatgagcccctctctaaa

SEQ ID NO: 571936 - DNA, 120 bp, Artificial Sequence
  ENSG00000170921_78 (sequence is synthesized)
tattggtatttttatattccagagatgtacccaatagaaaaaattaaaaattaatcagtatctaatttaatatccataagtatttttccttagattttagtcacgtacagtgggctatgt

SEQ ID NO: 571937 - DNA, 120 bp, Artificial Sequence
  ENSG00000170921_79 (sequence is synthesized)
ggatgtcacttgtgcttcaccatagtttaccactaggtgtcactgtggctctgcactgcgcttgttttgtagcaaagaacagcggcatcccctcgggagagaggagctgcttccagggca

SEQ ID NO: 571938 - DNA, 120 bp, Artificial Sequence
  ENSG00000170921_80 (sequence is synthesized)
acaggcaagcgggctcagaggttcaggagaaggcaacagaggcctggaaggggtcttcgtgcatctgtgccagttgtgcaagacgaactctttgaacactacatgctttggacttcagcc

SEQ ID NO: 571939 - DNA, 120 bp, Artificial Sequence
  ENSG00000170921_81 (sequence is synthesized)
aggcagaggctggaagaaggttgaccagagctcccttgctctggtagagggatgggtacatggagaagccccttcttccccatgagcctccctcctgtcagttcctctcagcctccagct

SEQ ID NO: 571940 - DNA, 120 bp, Artificial Sequence
  ENSG00000170921_82 (sequence is synthesized)
tttataactccagaagcgtcacagttgggtggtttgattcagagagagttatttttctactgcagaaatgccttggacaaaaccagtgctcactgaatctttgccacaaaatggaatagg

SEQ ID NO: 571941 - DNA, 120 bp, Artificial Sequence
  ENSG00000170921_83 (sequence is synthesized)
ctatcccagggggcaagaggtgcccgcccctgtgcccagcctcctcttgatgctcccagtgcccagcagcctcgcacaccctgcctgtctgttcctgggctgcccatttctcaagaaacc

SEQ ID NO: 571942 - DNA, 120 bp, Artificial Sequence
  ENSG00000170921_84 (sequence is synthesized)
gacctgcaaaggcagccggctgctgcctccacaccgagggctgtgcggtcctgctgctcgctcactgggaggtgcagctctttctcctcttcctctaggaattccagaccgaccatctac

SEQ ID NO: 571943 - DNA, 120 bp, Artificial Sequence
  ENSG00000170921_85 (sequence is synthesized)
catgactaacaacaatgaacaaagggcttaggggcaagagctacctgcaaagacgtgtcatggaacccttcaccatgcaatgccttgaactcagctctggctgctcccaagaaaaggtgg

SEQ ID NO: 571944 - DNA, 120 bp, Artificial Sequence
  ENSG00000170921_86 (sequence is synthesized)
ctggctgggggcctggacacaagcacaatggggctggtggagccactgtgcagagctacttgaataatcactgggttttcatcaactccttttgtcatacagaccactcaagggctgaag

SEQ ID NO: 571945 - DNA, 120 bp, Artificial Sequence
  ENSG00000170921_87 (sequence is synthesized)
tgttggtaaccttcatttcggtgtccaaagcctcacagcaggtgagccaccctgagatgcttgtggccacatggtggccacagtcagagctttgaaagtcagtaccaaatgaacgcataa

SEQ ID NO: 571946 - DNA, 120 bp, Artificial Sequence
  ENSG00000170921_88 (sequence is synthesized)
ttggacaccaaaaatcaagtgttactttcatgtttcctcaccccatcatctcattgcctcctgctgactctgataccgacgctgagctgacttgccaggctgccgctggacgcgtagaga

SEQ ID NO: 571947 - DNA, 120 bp, Artificial Sequence
  ENSG00000170921_89 (sequence is synthesized)
tcaggccagcgccgcgctcatttttccaggtagacctactctgtggaacggaagtgccctagctgctttgtttttgtagcacttgctggctgaatttttcttttgctaatcgctaaccag

SEQ ID NO: 571948 - DNA, 120 bp, Artificial Sequence
  ENSG00000170921_90 (sequence is synthesized)
aaagtctggttagagggggctcaactcaatccctttggtccccagcgccagacaagagttaattctggaaaattcagtacttgaatgtacctgccttattgcataccaatttactggggg

SEQ ID NO: 571949 - DNA, 120 bp, Artificial Sequence
  ENSG00000170921_91 (sequence is synthesized)
gaaaaaaaaagttaagagatgccggctccagatctccacttcattcacaggtgattttggaaatcctgtaagttacacttcctgttctggttttgttttgttttttgtttcctttggctg

SEQ ID NO: 571950 - DNA, 120 bp, Artificial Sequence
  ENSG00000170921_92 (sequence is synthesized)
attcctgctgagtgaggccagttcctcatcaggctcagggcaggtgccttttcaggcgtggcctcctttccatctagcacagcatctttgtctctgttctgtctcctccaaatccaagat

SEQ ID NO: 571951 - DNA, 120 bp, Artificial Sequence
  ENSG00000170921_93 (sequence is synthesized)
gattttaattagtacagacatgtacagtctacaattaaagagtgatttgtactaatatgattttgattcttcctcctctttgctgtcctttcaagacacttgctggaaaaagctttaatg

SEQ ID NO: 571952 - DNA, 120 bp, Artificial Sequence
  ENSG00000170921_94 (sequence is synthesized)
cacttagttttcctttaggttttctatgactcagatgtaaaggactttctctgtacagtatattatccaatgcatgtttgttctctctcctgatatattgaacaccacacagttgtgaag

SEQ ID NO: 571953 - DNA, 120 bp, Artificial Sequence
  ENSG00000170921_95 (sequence is synthesized)
ccgtgcagtggggatgccccacaccccacagaggcatctacccctgtgtataaggaaagacattttcctttgctgtacttgcttgagcagttttattgtctgtacatgtgagctgtgtga

SEQ ID NO: 571954 - DNA, 120 bp, Artificial Sequence
  ENSG00000170921_96 (sequence is synthesized)
gatagatgtgaaaagttcaaatgaatgcattttcctgccccatgtatacagattgtcatctgtacaaggaactgtatgtatgaaagcaaatgtacttatttataaatggctaacacttgg

SEQ ID NO: 571955 - DNA, 120 bp, Artificial Sequence
  ENSG00000170921_97 (sequence is synthesized)
cggctccagcctgtgaagaagttaactggtgatgctgaacaggagcttggcccccctccatctgtagatgaggcagcaaacacactcatgactcgtctgggtttcctccttggagagaaa

SEQ ID NO: 571956 - DNA, 120 bp, Artificial Sequence
  ENSG00000170921_98 (sequence is synthesized)
gacgttgccctcaagaatgtgttgtgtttgtgtggactctcgaatctcacccccttattttttccctggcatacatttggcagtcttctgtctcaggcttttgtaatgcagactgattca

SEQ ID NO: 571957 - DNA, 120 bp, Artificial Sequence
  ENSG00000170921_99 (sequence is synthesized)
gccaaactaaacagtcaagcagttttcctctttcaatcctctttgcctgtggattctccatactctttgcaccagagtcttctttcaaacaaaactttttccctctcttgtttccaaata

SEQ ID NO: 571958 - DNA, 120 bp, Artificial Sequence
  ENSG00000170921_100 (sequence is synthesized)
tttttaaaagactgaaagttaccttacaatgtgccaaaccagagcagaaaattattgtggcctgtctcctttttatgtgatccttgtagtagttaggaataaatatttctcccatcaaaa

SEQ ID NO: 571959 - DNA, 120 bp, Artificial Sequence
  ENSG00000170921_101 (sequence is synthesized)
tatactgaggtaagaagtaggcaataggattgttttttcaagctctgtattgaaggacccaggaaaccaggagaaaagattgcacgaagacaaaattgccaaccaaattaatgtgaattc

SEQ ID NO: 571960 - DNA, 120 bp, Artificial Sequence
  ENSG00000170921_102 (sequence is synthesized)
gtgatcgctgctctgaataataaggagattaaactccatgaagcactttactcaaatgccaaagtccctcaaattataggtatagaaaggtgcgagttggaaaggaccgtggaaatgata

SEQ ID NO: 571961 - DNA, 120 bp, Artificial Sequence
  ENSG00000170921_103 (sequence is synthesized)
ggcacaggaacagcataacatttagaatctcagaaggaccagatttgagtcccagcctcgctattcattaactctagcccttgaacaatttacctatctcttagaagtttagtttcccat

SEQ ID NO: 571962 - DNA, 120 bp, Artificial Sequence
  ENSG00000170921_104 (sequence is synthesized)
cagcaaagtgaagctaataaactcctttatacaaggctgttgtaagggatgcttggtaaactgttaaacattatacagtttatttattaatgataataacaataatagtggcaaatgtag

SEQ ID NO: 571963 - DNA, 120 bp, Artificial Sequence
  ENSG00000170921_105 (sequence is synthesized)
ggaattggtagtgtgctaggaaatgtttaacaaccaactgtgaagaggggtgtggggtggaacaggggtgtgtgtttgtgtgtgcatacgtttattataaattttactgatagaatgtgt

SEQ ID NO: 571964 - DNA, 120 bp, Artificial Sequence
  ENSG00000170921_106 (sequence is synthesized)
tactgatagaatgtgttgccgtggaatactacacagccgtaagaagaacaaaatcatgtcctttgcagcaacatagatgcaactgaaggccagtatcctaagtgaattaacacaggaaca

SEQ ID NO: 571965 - DNA, 120 bp, Artificial Sequence
  ENSG00000170921_107 (sequence is synthesized)
atgttctcattgataagtgggagctaaacattgagtacctatggacataaagaggcaacagtagacactggggactactgggaggggaaaggaaggggaaagggttgaaaaaaactgttg

SEQ ID NO: 571966 - DNA, 120 bp, Artificial Sequence
  ENSG00000170921_108 (sequence is synthesized)
ttatcctcactaccaggtgatgggaacttttgtgtcccaaacctcggcatcatccagtacaccatgaaacaaacctgtacattcactgcccttgaatctacaataaaatttgaaataatt

SEQ ID NO: 571967 - DNA, 120 bp, Artificial Sequence
  ENSG00000170921_109 (sequence is synthesized)
ataaattaccctttttggacttttcaaatcctgtggtaatgtttaatataaatccttcctcccaattccttatttaaaataattccaaactgagccattgcttgcccacatgcagcacgc

SEQ ID NO: 571968 - DNA, 120 bp, Artificial Sequence
  ENSG00000170921_110 (sequence is synthesized)
aggctttgctgccctcgcgtggggcaggctcacatggttcaagtattcttattttaaggtgaatacaaatccaatgcagcttcttggcagtgggagttactaaaatactcccaggtctaa

SEQ ID NO: 571969 - DNA, 120 bp, Artificial Sequence
  ENSG00000170921_111 (sequence is synthesized)
aaattcccctagggtatttttttcacctagcttcctaccacccttacattgtatgagttttttacccatcatgcatcctgtacactacaggtccagccacatgggcgatggccacctcca

SEQ ID NO: 571970 - DNA, 120 bp, Artificial Sequence
  ENSG00000170921_112 (sequence is synthesized)
atagtatgtctgaaactactttcttactttgttttctgtagccgtagccctcactagtccatgtattaataaacttaataagtgagctatatcactgtatccaagcactgtgcttaaata

SEQ ID NO: 571971 - DNA, 120 bp, Artificial Sequence
  ENSG00000170921_113 (sequence is synthesized)
cttatacatgtttggaattagttaagcctcataacaatactgtgactttatgaggaaactgaggcttggtaaggctaaataacttgcctaatttcttactattaatatatgctagaatca

SEQ ID NO: 571972 - DNA, 120 bp, Artificial Sequence
  ENSG00000170921_114 (sequence is synthesized)
agacctagatttttcagatcactctacttaacctctaagccgatatgcattcatctgctcaacctctgccagattctgtaactcaagtcattgagggcataagaatcgatgttcccagtg

SEQ ID NO: 571973 - DNA, 120 bp, Artificial Sequence
  ENSG00000170921_115 (sequence is synthesized)
tcagttccaatcacttatttgtgcagtagtttctgttatctcttacatcacaataaaatgccaagtttgggctttagattgttcctacccatctcatctcaaccactttctttcttcttt

SEQ ID NO: 571974 - DNA, 120 bp, Artificial Sequence
  ENSG00000170921_116 (sequence is synthesized)
taactatcagagaaggccttttaatgtggaattctcttactcacatgaatcatcttatgtaccattttttacaatgaagcatattaaaattccaggcttccaggtaaaacattatgcccc

SEQ ID NO: 571975 - DNA, 120 bp, Artificial Sequence
  ENSG00000170921_117 (sequence is synthesized)
atcttccaacttgcccttctatgttctccaccaagcaatattatgactattgttcaacttatcatatctgtgattgtccctgctgtgtttgacttacaaatgacactagttttctgtgac

SEQ ID NO: 571976 - DNA, 120 bp, Artificial Sequence
  ENSG00000170921_118 (sequence is synthesized)
ttggatgagaacaccattatcatctaccttataaaacagtttaactttattattagacaagcacagtaccccatggatgagggaagaggtgaagagtagatagaagaaagaattaaatgt

SEQ ID NO: 571977 - DNA, 120 bp, Artificial Sequence
  ENSG00000170921_119 (sequence is synthesized)
ctcctgtgagctataaagataacctcagttggaatttcctgagaagggaaaataaagaagttggtatacatcgagcttcatagatctaaaataactctctttgctggagaattgtgtatt

SEQ ID NO: 571978 - DNA, 120 bp, Artificial Sequence
  ENSG00000170921_120 (sequence is synthesized)
ttagtaagaggttttattttttttcctctgccagatctgtttaacttctgattaacaccatatagtccatactctcttcacagtcttcagctatttccttttttctgtatgatctctaga

SEQ ID NO: 571979 - DNA, 120 bp, Artificial Sequence
  ENSG00000170921_121 (sequence is synthesized)
accctgatcttttcccttgacttcatctcataattcttgtacacgcctcatacctcccttaagttctcctgccatccttcactttttttcttacatttctaccttaagtttctggtctgt

SEQ ID NO: 571980 - DNA, 120 bp, Artificial Sequence
  ENSG00000170921_122 (sequence is synthesized)
ctactagccctaaatttcattatttaaaaaatgtttttaagattttaagatatatagagtcccttgagcagggacctgtgctgtctttgtcagaactcagcaggtaaaacagttactctg

SEQ ID NO: 571981 - DNA, 120 bp, Artificial Sequence
  ENSG00000170921_123 (sequence is synthesized)
atgccatgacaatgctttaataaaattctagtaaaggacttaagagccttaaggattaaattactatataatcatttttcctatactaagcagtattgaataaataaactgtttcattat

SEQ ID NO: 571982 - DNA, 120 bp, Artificial Sequence
  ENSG00000170921_124 (sequence is synthesized)
ttttaaatctgttggtgaaattataatgaaagagattctaatattggctattagtagcctgcatatatacatataaatcacttgagatctttatttgtaataatgatttttaaaaacagg

SEQ ID NO: 571983 - DNA, 120 bp, Artificial Sequence
  ENSG00000170921_125 (sequence is synthesized)
ctcaagtctcacactcatagcaaaggtgagagttctgctattccaaagcttgcttttgacagaaccatactgttaggactcttaatgttaggcctttgttgccatggagacagtaacagg

SEQ ID NO: 571984 - DNA, 120 bp, Artificial Sequence
  ENSG00000170921_126 (sequence is synthesized)
ctttattattttttaacatatactgaaaatatacataccctaaggtataaagcgtgacttagttgtctgttggttttgagtattgacacattttgaaaatagtttctatatacttttaat

SEQ ID NO: 571985 - DNA, 120 bp, Artificial Sequence
  ENSG00000170921_127 (sequence is synthesized)
acttgatttttatccttcaaagaaaatgaaggagatttctgaccattgtgataacagagttgtatattactttttacagggtcttttaggaataacgtagaatctcttgtgggtcagtaa

SEQ ID NO: 571986 - DNA, 120 bp, Artificial Sequence
  ENSG00000170921_128 (sequence is synthesized)
tggatgaggactttgaagaacatgcagaaacttttgagaaaagtaatgtgatcttagacacatgtcttggccacctatgattatgacactaatatataatacaaacaaatcaatttcaga

SEQ ID NO: 571987 - DNA, 120 bp, Artificial Sequence
  ENSG00000170921_129 (sequence is synthesized)
ttcaactaatactttgtgccagtactgtgctaagcactgtcaccctattatagtttatttaatagaactcagtttgaaagcacctaagcaatcctcatattttaacttttacaataactg

SEQ ID NO: 571988 - DNA, 120 bp, Artificial Sequence
  ENSG00000170921_130 (sequence is synthesized)
attattcgaatgtgtatcaatagcattcctgaatttttcctcctaaaaattagtaaataaaatgtgtacatactttcaataagtaaaactttcaattcatgagttatactttattcctta

SEQ ID NO: 571989 - DNA, 120 bp, Artificial Sequence
  ENSG00000170921_131 (sequence is synthesized)
caagaatgaatggattccatggcatgagatattaatattccataggcatcatgattaaattggtaactaaatcacatgtctttagcttctagtgtcaaactagcagggcctagttaatgc

SEQ ID NO: 571990 - DNA, 120 bp, Artificial Sequence
  ENSG00000170921_132 (sequence is synthesized)
tttagtccaccagcagttttgacttcttacattaatagctgagaagtaaggtaattgattttcttgttaagctacgtagattaggcctgatggcttatatttaatcctacttatggtgtt

SEQ ID NO: 571991 - DNA, 120 bp, Artificial Sequence
  ENSG00000170921_133 (sequence is synthesized)
tatcatgaccaagtattagagtagttatttctggataacaaaaaccttttgattacagttattataaacaaaaccttgaaacatagtcctgtgctttccttagttaacatctgtatttaa

SEQ ID NO: 571992 - DNA, 120 bp, Artificial Sequence
  ENSG00000170921_134 (sequence is synthesized)
tggcaaaagaagccaaagtaagaaagctctttgctttataaagagagagaaataaggtaacagacaatcacaatttatactaatagttttgaatattagattttagcttttccagttttc

SEQ ID NO: 571993 - DNA, 120 bp, Artificial Sequence
  ENSG00000170921_135 (sequence is synthesized)
agtgacttttaacaagacccatctcctctatgaagaatgcagttagttttttttttttttttctggctcaaaaaatagggtaacctgatctgagtctgacagagtgtgtcgttcatttaa

SEQ ID NO: 571994 - DNA, 120 bp, Artificial Sequence
  ENSG00000170921_136 (sequence is synthesized)
gtgcttccatctgttgcctgctgttccccttactcatgacccctctatgtttctctctttccctttttccttctctttccctgtttctctcccttcctttctctttctttctctcttgct

SEQ ID NO: 571995 - DNA, 120 bp, Artificial Sequence
  ENSG00000170921_137 (sequence is synthesized)
ctctctgtctcttgcttgctctctctctctttttgttcttagcccctctgaggaaggcaaagtttgttgagagcccacgaattccagaatccgagcttggctcaccaaccctcacttcag

SEQ ID NO: 571996 - DNA, 120 bp, Artificial Sequence
  ENSG00000170921_138 (sequence is synthesized)
ctcagaaactggacgtggatgcatactgccctggtaagcatgcatgcaaagtgtctgctttgaaagagggaggattggatcaggcccatccagcagagcagtgttttgcatgtatactac

SEQ ID NO: 571997 - DNA, 120 bp, Artificial Sequence
  ENSG00000170921_139 (sequence is synthesized)
tcataaaaacatgttacctcttttgcaactgattgcctattcttcttaatagaacatagtttttactgaatgccctgttttgactttgatacaataatgagagtaagtattgaaaataat

SEQ ID NO: 571998 - DNA, 120 bp, Artificial Sequence
  ENSG00000170921_140 (sequence is synthesized)
ttcaaaggtaattttcaaaagaattaaaataattttggtagataagtagttttaggtaagtagggttacttttgtgatttgagatacttaaagaaattttgctgtggccatgtgcaaaca

SEQ ID NO: 571999 - DNA, 120 bp, Artificial Sequence
  ENSG00000170921_141 (sequence is synthesized)
tagacacaaaagtgttctatgcaacacttttgcatacaacctttatgcctaattcctgttggatttctggtgattatagaaaatacttgtgatgctggaaacattaaacttgaattagaa

SEQ ID NO: 572000 - DNA, 120 bp, Artificial Sequence
  ENSG00000170921_142 (sequence is synthesized)
aagaaatataggtttccgagatggactccttttggatacagatacttacttttagaaatacctcttgtgaatggcctgtaaacacatgtgagagttcactaaaacccttcttgtgtggga

SEQ ID NO: 572001 - DNA, 120 bp, Artificial Sequence
  ENSG00000170921_143 (sequence is synthesized)
gccaaactgagaaagactcattatcaatgcttagattctttcaaacttagatgagttgcctggcaacatcctttacactctctctacagtcagtctatagagctgtgtcagaaatgttca

SEQ ID NO: 572002 - DNA, 120 bp, Artificial Sequence
  ENSG00000170921_144 (sequence is synthesized)
cagctctagctgagtatacagattagagcattagtaaaggaaggaccttggaagacttggttttaggtcttttgtttattcctgctcattaaaattgatgttaaaccacagtgaatacaa

SEQ ID NO: 572003 - DNA, 120 bp, Artificial Sequence
  ENSG00000170921_145 (sequence is synthesized)
ctactacatatttacagcatgaggggtcagcagagtaaaatgattcctagttctggggaagatatcagtatctgtgatctgaaatgtcagtataatataccttcgaagccagataggaca

SEQ ID NO: 572004 - DNA, 120 bp, Artificial Sequence
  ENSG00000170921_146 (sequence is synthesized)
tagtaaaacaaaaaacaaaacagtaggagaaaatttgggccaaacctcataaaatgagagacgtttcattttatgagtcaattttgaatactgaaagaccttggggattttgctttcctt

SEQ ID NO: 572005 - DNA, 120 bp, Artificial Sequence
  ENSG00000170921_147 (sequence is synthesized)
cggggtattgaaacggcttcatccactcttatagataaccattcttttctaaatcaatcacagttttgtattaggaaccagcttttctgttttcaaaaggaacaaagtagttctttaaat

SEQ ID NO: 572006 - DNA, 120 bp, Artificial Sequence
  ENSG00000170921_148 (sequence is synthesized)
ggtactatagcacacgattagaagaatctttcatgttttgaggtattgtcacgcttcttgggcagtcgaatattgtactttgcatttcttcatgcaaattttagtgttataaagtaaaat

SEQ ID NO: 572007 - DNA, 120 bp, Artificial Sequence
  ENSG00000170921_149 (sequence is synthesized)
aagtgtgctaattttctatccctttcttgagttttagaaggaaaaccctatcagaggccttttccagatttgcaagtcagaatgactgtcatgggggcctaatctttcacttcctgattg

SEQ ID NO: 572008 - DNA, 120 bp, Artificial Sequence
  ENSG00000170921_150 (sequence is synthesized)
cccatctgacatctttaatctaatctaaagctaaagtcttactcaggtgattatttatgtatattttccacaggcatgaattctttgttgaattagaattaaactaaagctcggttatga

SEQ ID NO: 572009 - DNA, 120 bp, Artificial Sequence
  ENSG00000170921_151 (sequence is synthesized)
tttttagaaagcaaggaagaaactaaaacacaatatcaaagtgctgctaaaaaagtctttccttttcttatctgaaacaattttaaagcatagaaactttatagtgatttgctcatctct

SEQ ID NO: 572010 - DNA, 120 bp, Artificial Sequence
  ENSG00000170921_152 (sequence is synthesized)
aatcaagttattagatgctctgaaaattagtttctaccaagataagaatggtaacctgagggttgaagctattatctctacatagtatcaaaaattaacaataaccaaatgaattgatga

SEQ ID NO: 572011 - DNA, 120 bp, Artificial Sequence
  ENSG00000170921_153 (sequence is synthesized)
gtatactcacaaaccaaaaagattttgcattttttcatgcaaattttagtattataaagtgaaataatacttaatttttgaatttctttcacataggatatactaacaccactgatgata

SEQ ID NO: 572012 - DNA, 120 bp, Artificial Sequence
  ENSG00000170921_154 (sequence is synthesized)
ttttattgtacattcatacagagtaatacagttaaggctactagtgttctgataccttcttgtctgcctgctttattcattatcacctgaaaatttaggaaaatactttgtctcccagag

SEQ ID NO: 572013 - DNA, 120 bp, Artificial Sequence
  ENSG00000170921_155 (sequence is synthesized)
gcaacaatcacaaactgaaggttagagcagtggttttcaaactttaacttacttcagaattacctggaagatttgtccaaatgcagattggtgggcccccagaatttcttactcagtagg

SEQ ID NO: 572014 - DNA, 120 bp, Artificial Sequence
  ENSG00000170921_156 (sequence is synthesized)
tctggagtgggtcaagaatttgcatttctaacaaaatctcagatcatactgaagctgctgtttgagattctatgctttgagaaccaattgggttacagggctgctgcaggctactcactg

SEQ ID NO: 572015 - DNA, 120 bp, Artificial Sequence
  ENSG00000170921_157 (sequence is synthesized)
tacagtcattgttcagtggttcagtgaacaatgctgaaagtctttggggttccttctaccactattgatatctggggagtaactgccagtgttgtttctgtgttatctaaacttaaacct

SEQ ID NO: 572016 - DNA, 120 bp, Artificial Sequence
  ENSG00000170921_158 (sequence is synthesized)
tttggtagcttttgtgtctgagaaatagacttatatatttttcttggtatgtctttttgtacctgacatctgtgtacccacgtctaacttttctgtgttgtcctgcatgtaaaaggaaat

SEQ ID NO: 572017 - DNA, 120 bp, Artificial Sequence
  ENSG00000170921_159 (sequence is synthesized)
tgtggatcaaaccaaaccaattcactgatggttaagtccaaaagtgtagggaaagctactctggagtatagctgttgagctggaatattaaattgagtgattcattatatagcattatct

SEQ ID NO: 572018 - DNA, 120 bp, Artificial Sequence
  ENSG00000170921_160 (sequence is synthesized)
tctataatatctaattaaaggtttactgttcctcaagttacatttgttgtatgcaaaaaatgtgggaaaaatacaagcaaacagtatgttttggttctgcagctacaactgtggagataa

SEQ ID NO: 572019 - DNA, 120 bp, Artificial Sequence
  ENSG00000170921_161 (sequence is synthesized)
tcgatggtgttaagtaaactaccagaataaaggggatgttccgggaattgtgtgtgttaattgtctcacagtggggaaactaagatctagagaattcaagtgatttgtctagggtcacaa

SEQ ID NO: 572020 - DNA, 120 bp, Artificial Sequence
  ENSG00000170921_162 (sequence is synthesized)
gcaggatttgttgttcagctcttgaagtggacacaatatagtccaaaaatatattgccctctaatcctgtcactgtgtaaattccatgagcattccttactgtccttagatttaaaagca

SEQ ID NO: 572021 - DNA, 120 bp, Artificial Sequence
  ENSG00000170921_163 (sequence is synthesized)
gaaaattcagttaagtatgagatagtcatattctatttttatgaaaaagggtaaccaactgttagtgatttcaataaagcaatttccaaaataagaaaatagattcatcctacactctat

SEQ ID NO: 572022 - DNA, 120 bp, Artificial Sequence
  ENSG00000170921_164 (sequence is synthesized)
cacttttctatctacagtattacttattaggtgtgtgatttggggcaagtcacttaacctttctacctgtttcttcatctgtaaaaatagagatgataattttaaatcagtttaatatat

SEQ ID NO: 572023 - DNA, 120 bp, Artificial Sequence
  ENSG00000170921_165 (sequence is synthesized)
ataaagcacttagaagaatgcttggctcatagtcagtgctcataattgttagttgattttattatttttgcagtgatgatcctaaggtataagacaaggtcttaatcagaaaaaatactt

SEQ ID NO: 572024 - DNA, 120 bp, Artificial Sequence
  ENSG00000170921_166 (sequence is synthesized)
aaaggtttagggtcattttttgttaagtgtgtcctgttgcatttcaattctgatttttctctgatgaatcttatggtctggaacatgtcacttaacttttccattccacagtctcctgtc

SEQ ID NO: 572025 - DNA, 120 bp, Artificial Sequence
  ENSG00000170921_167 (sequence is synthesized)
acagcaacattatttctataatttaacaaattatgcttttatatagatacatgaatatatattcataggaaaaaatttctggaagaatacaccaaaccgtaccactggttgcctaaggag

SEQ ID NO: 572026 - DNA, 120 bp, Artificial Sequence
  ENSG00000170921_168 (sequence is synthesized)
gggagactttgaattattggaaagttagagtaggattgttgtgagataatattagttagcagagattatatctggttggtggcattacaggtggttttaattttctttcttgggcagcat

SEQ ID NO: 572027 - DNA, 120 bp, Artificial Sequence
  ENSG00000170921_169 (sequence is synthesized)
gtattagtgaataagagcttatgttctggagttagatctaggtttaatttttttctcttccacctactagctgtgtgactgataaaaatagacctatctttaaaaaaaacaaaaacaaaa

SEQ ID NO: 572028 - DNA, 120 bp, Artificial Sequence
  ENSG00000170921_170 (sequence is synthesized)
atcagtgttcggctccagcctgtgaagaagttaactgcccctctgaggaaggcaaagtttgttgagagcccacgaattccagaatccgagcttggctcaccaaccctcacttcagctcag

SEQ ID NO: 572029 - DNA, 120 bp, Artificial Sequence
  ENSG00000170921_171 (sequence is synthesized)
aaactggacgtggatgcatactgccctggtgatgctgaacaggagcttggcccccctccatctgtagatgaggcagcaaacacactcatgactcgtctgggtttcctccttggagagaaa

SEQ ID NO: 572030 - DNA, 120 bp, Artificial Sequence
  ENSG00000170921_172 (sequence is synthesized)
ttttctttattttcgatgcatactctttcttatctccagtgttacttcatgagtctgggtagagtatatcaaaccatgatggagaggagatcagagagagtgctggttctgcatatgtgc

SEQ ID NO: 572031 - DNA, 120 bp, Artificial Sequence
  ENSG00000170921_173 (sequence is synthesized)
agggccactgccatccatcctgcaggagcacacagttctaaaccctttgagaggtgcttgggaaactgcatttatccgtaaccacaaaaagtttctacataacaacccagaaatgatcta

SEQ ID NO: 572032 - DNA, 120 bp, Artificial Sequence
  ENSG00000170921_174 (sequence is synthesized)
ttgagctcagaagaagcctctttttaacaaagagaggaaggagaagtgaggaagccaggagactgcagtggcaggtctggaccaaatgacacctgcaggctctaagcctttcatgtgtag

SEQ ID NO: 572033 - DNA, 120 bp, Artificial Sequence
  ENSG00000170921_175 (sequence is synthesized)
agaagaaaacttagccatggagatgagaacaggaccagacaccttcatcctgtccttgaagaccaccactctagagataaggggagaagatgattctccctatttatactcagactgacc

SEQ ID NO: 572034 - DNA, 120 bp, Artificial Sequence
  ENSG00000170921_176 (sequence is synthesized)
aagggcacctcgaagtgcttctgttagtactgatcagttctctgaaaatatttccaaaatatgtttgctttatgtataaaaactcgatttcacaatattggtgaaaagaaaaatgctggt

SEQ ID NO: 572035 - DNA, 120 bp, Artificial Sequence
  ENSG00000170921_177 (sequence is synthesized)
tgggaaaaaaaagtctggcctcatagtattttgtttcagtcctgaaaacaaactgaggactttagtggtttcatagtgaaatacaagtcatagtatgacttcattctgcggtattcagtg

SEQ ID NO: 572036 - DNA, 120 bp, Artificial Sequence
  ENSG00000170921_178 (sequence is synthesized)
ctgttacgaggggagaaagtgggactcctccactcctttgggaactgagacgtaggcctctcaatgacatctcagagccttagaagtttactgtagcacagtgattgtgcacctgtgaca

SEQ ID NO: 572037 - DNA, 120 bp, Artificial Sequence
  ENSG00000170921_179 (sequence is synthesized)
tcccattcatttgaatggacacctctaggaacaatgataactgggcctcgttactattttcgttttctttttagagacaaagtcttgttctgttgcctaggccagagtgcagtggcatga

SEQ ID NO: 572038 - DNA, 120 bp, Artificial Sequence
  ENSG00000170921_180 (sequence is synthesized)
ttgtagctcactgcagtcttcagcctccccagtagccaggagtataggtatgtgccaccacactcagctttatttttttcctattttgtagaggcagggtcttgctatattgctcggagg

SEQ ID NO: 572039 - DNA, 120 bp, Artificial Sequence
  ENSG00000170921_181 (sequence is synthesized)
tttgctaaaactcgttggatcaagagatcctcccactgtggcctcccaaagcgctaggattacaagcatgagccacggcagccagcccttcttactattgctgtcacttcatattctgat

SEQ ID NO: 572040 - DNA, 120 bp, Artificial Sequence
  ENSG00000170921_182 (sequence is synthesized)
cttagctgggtctttcctgctgttcagcccttacactgccaagccatccttttcttcatctttcattgttttccccagagcagaaatgtaactcatatgtacttctttcaagatcctatc

SEQ ID NO: 572041 - DNA, 120 bp, Artificial Sequence
  ENSG00000170921_183 (sequence is synthesized)
acgcctcttctgcccttcatcactgtgatcgagctcatctcaaggtgcctgtatctcaaaactcttatcagttcttacgtacgctcacctctactttgccttagagaaggaagtacttac

SEQ ID NO: 572042 - DNA, 120 bp, Artificial Sequence
  ENSG00000170921_184 (sequence is synthesized)
cttcctttccagagcaattgtctcctcctctacactcttaacccacggtgttgctcattctctcacgttatttcattctttttctaaattcacactaccttttttctcagtttctacaaa

SEQ ID NO: 572043 - DNA, 120 bp, Artificial Sequence
  ENSG00000170921_185 (sequence is synthesized)
cctatgaatgtagaaacctacctaacctaaaaaagaaatgttcctctcccttgctaaccagaagcaacatcccatctcttccctttcacctctgccaaacctgtcctaagagtcctctat

SEQ ID NO: 572044 - DNA, 120 bp, Artificial Sequence
  ENSG00000170921_186 (sequence is synthesized)
actggctacattcacctctttattactccttaaccacttgcattctggcttccatgaatgagagaggaggcaactcattaaaatgataagctttaggatcagacacaactgggttaaatc

SEQ ID NO: 572045 - DNA, 120 bp, Artificial Sequence
  ENSG00000170921_187 (sequence is synthesized)
ctgtgtccatacttaatttatacaagggcttgaacaagtcacttaacctctctcaatcgcacttttcatctataaaaagggtgttaaaagagtcagtgtaagcattgaaagagataaagc

SEQ ID NO: 572046 - DNA, 120 bp, Artificial Sequence
  ENSG00000170921_188 (sequence is synthesized)
ctttttttaaaagaggtgttaaagtctcttttaatcttatatagtgcctaataaatagtatctgtaaaaaagaaaataacccaacctccctacattctaccaagctgctcttttaaaagt

SEQ ID NO: 572047 - DNA, 120 bp, Artificial Sequence
  ENSG00000170921_189 (sequence is synthesized)
cactaatgactgccattcaccaaataaagcagctttgtcttattcctcacatctctgagcccctccatagtattagcaataataaacctttttttttttttttttttaaacagagcctgg

SEQ ID NO: 572048 - DNA, 120 bp, Artificial Sequence
  ENSG00000170923_0 (sequence is synthesized)
atgccgatgcagctgctgcttacagattttattatcttttccatcagattcatcatcaacagcatggaagcgagaaaccaaacagctatttcaaaattccttctcctgggactgatagag

SEQ ID NO: 572049 - DNA, 120 bp, Artificial Sequence
  ENSG00000170923_1 (sequence is synthesized)
gatccggaactgcagcccgtccttttcagcctgttcctgtccatgtacttggtcaccatcctggggaacctgctcatcctcttggctgtcatctctgactctcacctccacacccccatg

SEQ ID NO: 572050 - DNA, 120 bp, Artificial Sequence
  ENSG00000170923_2 (sequence is synthesized)
tacttcttcctctccaatctctcctttttggacatttgtttaagcacaaccacgatcccaaagatgctggtgaacatccaagctcagaatcggagcatcacgtactcaggctgcctcacc

SEQ ID NO: 572051 - DNA, 120 bp, Artificial Sequence
  ENSG00000170923_3 (sequence is synthesized)
cagatctgctttgtcttgttttttgctggcttggaaaattgtctccttgcagcaatggcctatgaccgctatgtggccatttgtcacccccttagatacacagtcatcatgaacccccgc

SEQ ID NO: 572052 - DNA, 120 bp, Artificial Sequence
  ENSG00000170923_4 (sequence is synthesized)
ctgtccttctgcacagacctggaaatcccgctcttcttctgtgaactggctcaggtcatccaactcacctgttcagacaccctcatcaataacatcctgatatattttgcagcttgcata

SEQ ID NO: 572053 - DNA, 120 bp, Artificial Sequence
  ENSG00000170923_5 (sequence is synthesized)
tttggtggtgttcctctgtctggaatcattttgtcttacactcagatcacctcctgtgttttgagaatgccatcagcaagtggaaagcacaaagcagtttccacctgtgggtctcacctc

SEQ ID NO: 572054 - DNA, 120 bp, Artificial Sequence
  ENSG00000170923_6 (sequence is synthesized)
tccattgttctcttgttctatggggcaggtttgggggtgtacattagttctgtggttactgactcacctaggaagactgcagtggcttcagtgatgtattctgtgttccctcaaatggtg

SEQ ID NO: 572055 - DNA, 120 bp, Artificial Sequence
  ENSG00000170923_7 (sequence is synthesized)
aacccctttatctatagtctgaggaataaggacatgaaaggaaccttgaggaagttcatagggaggataccttctcttctgtggtgtgccatttgctttggattcaggtttctagagtaa

SEQ ID NO: 572056 - DNA, 120 bp, Artificial Sequence
  ENSG00000170923_8 (sequence is synthesized)
gggatatagacagtgcaacaagtcaggctgtaagcacctcactgaacatctcttacccagctcggaagctgcatcagaacctccttccagacatgatatttttgaccaggactcgagtct

SEQ ID NO: 572057 - DNA, 74 bp, Artificial Sequence
  ENSG00000170923_9 (sequence is synthesized)
tgacaggattcctggtgagctagaatgcctgactctttgttttgttttgtttttttctctgagatggagtcttt

SEQ ID NO: 572058 - DNA, 120 bp, Artificial Sequence
  ENSG00000170923_10 (sequence is synthesized)
agtgctgggattacaggcgtgagacaatgcgcccagcctgcctgactctttcatcaccaagttcttctaaaatgtctagatgacataaaagccaactacatttccactccggcttgaaat

SEQ ID NO: 572059 - DNA, 120 bp, Artificial Sequence
  ENSG00000170923_11 (sequence is synthesized)
cttgaaatctgactttgctttttatgtctggatctgtgatgatggacatgtgattttaattctctagactcaatttctttgctcaggccatagactcagaggctgagcccaagttattta

SEQ ID NO: 572060 - DNA, 87 bp, Artificial Sequence
  ENSG00000170923_12 (sequence is synthesized)
gcctactgagtagctgggactacaggtgcacgacaccacacccggctaatttttgtacttttagtagaggtgaggtttcatcatgct

SEQ ID NO: 572061 - DNA, 120 bp, Artificial Sequence
  ENSG00000170923_13 (sequence is synthesized)
cctcggcctcccaaagttctgggattactgggattagaggcgtgagccaccgctcctggctaagtgatttttttttaatggattagtctcagaagaagaaaagttgtggaaggtagatag

SEQ ID NO: 572062 - DNA, 120 bp, Artificial Sequence
  ENSG00000170923_14 (sequence is synthesized)
ttcaggaggataggtcaggaaaatgtatttttggttttttgtttagtttaggttttttgttttttgttttgctgagacggagtcttgctctgtccaccaggctggagtgcaatggcgcaa

SEQ ID NO: 572063 - DNA, 120 bp, Artificial Sequence
  ENSG00000170923_15 (sequence is synthesized)
cgccttctgggttcaagcgattctcctacctcaggctcccaagtagctgggcagttttgttttttgtttctttttttccatagacagggtcttgctttgtcacctaggctggaatgcaat

SEQ ID NO: 572064 - DNA, 120 bp, Artificial Sequence
  ENSG00000170923_16 (sequence is synthesized)
cacctaggctggaatgcaatgacatgatcatagctccctgcagccccaaactccaggactccagggctcaaactccagggaccctcctacctcagcctcctaggaagctaggactccagg

SEQ ID NO: 572065 - DNA, 120 bp, Artificial Sequence
  ENSG00000170923_17 (sequence is synthesized)
catgcaccaccacgtccagtgtggggtgtggtgtagagatggactctggctatgttgcccaggttggtctcaaaacctaggttcaagtgatcctcctgccatggcctcccaaagatctga

SEQ ID NO: 572066 - DNA, 120 bp, Artificial Sequence
  ENSG00000170923_18 (sequence is synthesized)
gattagtggtgaagtcactgtgcgctgccaggaaaaggatttaagcgaggttgttgttatatctggagacaagcttccaccttattgcgtatttagggtcttgtcaattgcaccccagtg

SEQ ID NO: 572067 - DNA, 120 bp, Artificial Sequence
  ENSG00000170923_19 (sequence is synthesized)
tagacctacagtgggtcaagggagctaagttttcatacccaatttagtaactactgggaccagtcactggtaaactatattctccctagacaacattagcatctattatactcagtttta

SEQ ID NO: 572068 - DNA, 120 bp, Artificial Sequence
  ENSG00000170923_20 (sequence is synthesized)
tcatcaaaaaattagcatgattagattatcttagtgatttgagattattgtgagatatttgaacttcataagtgaggataccttaggttccagtttaaagaataggagccctgggctggg

SEQ ID NO: 572069 - DNA, 120 bp, Artificial Sequence
  ENSG00000170925_0 (sequence is synthesized)
tctcttcaggcgtgttaagcagcggggttggcctgtacttcctctggccctggctgaagagggctagtgaaaccgttaagcccctaggcgatcatggccttgagacctgaggaccccagt

SEQ ID NO: 572070 - DNA, 120 bp, Artificial Sequence
  ENSG00000170925_1 (sequence is synthesized)
agtgggttccggcacggaaacgtggtggccttcatcatcgagaaaatggccaggcacacgaaaggccccgagttctacttcgagaatatatccttatcctgggaggaggtggaagacaag

SEQ ID NO: 572071 - DNA, 120 bp, Artificial Sequence
  ENSG00000170925_2 (sequence is synthesized)
ctcagggccatcctggaggacagcgaggtgcccagcgaggtcaaagaggcctgcacctggggcagcctggccttgggtgtgcgctttgcccacaggcaggggcagttacaaaaccgcagg

SEQ ID NO: 572072 - DNA, 120 bp, Artificial Sequence
  ENSG00000170925_3 (sequence is synthesized)
gtgcagtggctgcaaggctttgccaaactgcacagatcagctgcgctggtcttggcctcaaacctgacggaactcaaggaacagcaggagatggaatgcaatgaggcgaccttccagttg

SEQ ID NO: 572073 - DNA, 120 bp, Artificial Sequence
  ENSG00000170925_4 (sequence is synthesized)
cagctaaccgagaccagccttgcggaggtgcagagagagcgggacatgctgagatggaagctcttccatgccgagctggcacctccccagggacagggccaggctacagtgtttccaggc

SEQ ID NO: 572074 - DNA, 120 bp, Artificial Sequence
  ENSG00000170925_5 (sequence is synthesized)
aaggaggcggtggctgctgctggtgctgctggaggaaaaggagaggagaggtatgcagaggcagggcctgcccccgcagaggtcttgcaggggctgggaggaggcttcaggcagcccctc

SEQ ID NO: 572075 - DNA, 120 bp, Artificial Sequence
  ENSG00000170925_6 (sequence is synthesized)
ggagctattgtagcaggcaaattacacctttgcggggcagagggagaaagatctcaggtcagtacaaacagccatgtctgtcttctctgggcttgggtccacagtctcactggagcctct

SEQ ID NO: 572076 - DNA, 120 bp, Artificial Sequence
  ENSG00000170925_7 (sequence is synthesized)
tcctgtccagctccctacctcattcacatactcatacccatgccctttgtccgccttctcagccatacccaatatacccccttcaccagcaaaggtcacagaacgggttccaactcagat

SEQ ID NO: 572077 - DNA, 120 bp, Artificial Sequence
  ENSG00000170925_8 (sequence is synthesized)
gcctttcaactggggggcctctgatgctagcctgtggtcagatgtggaggcccagggaatagaccctcaagagcccccaagagacaggagagactccgaactccatcagcagagaagacc

SEQ ID NO: 572078 - DNA, 120 bp, Artificial Sequence
  ENSG00000170925_9 (sequence is synthesized)
tccagtatatcgcaggccagggaactgggactgcccgtggtgtaaagctgtgaatttttcatggagggaaaattgcttcctctgtgggaggcgaatctggctgcaaaagcctcagtaaat

SEQ ID NO: 572079 - DNA, 120 bp, Artificial Sequence
  ENSG00000170927_0 (sequence is synthesized)
gacacaaacgagttaggtgagttatagtctaacgtgagtgagttacctgcgtggtggctgcaggctgagctctaaccagataacatgtccacggattcttgacagagagaaataagatca

SEQ ID NO: 572080 - DNA, 120 bp, Artificial Sequence
  ENSG00000170927_1 (sequence is synthesized)
cttagaaagaaaggatcatttctcccttgagtcacaaggagacagaaacagaaaaaaaagcacaaaagctatgctgctccaatcaaaactgaaaatgcttttaatgtctgagcaatctta

SEQ ID NO: 572081 - DNA, 120 bp, Artificial Sequence
  ENSG00000170927_2 (sequence is synthesized)
agagtattgatttaagtggacagaatgactgcctggctgatctctctgatgagtattgaagtactacttttggcagtacgtcacctgagtttacatattgaacctgaagaaggtagcctt

SEQ ID NO: 572082 - DNA, 120 bp, Artificial Sequence
  ENSG00000170927_3 (sequence is synthesized)
gcagggggaacgtggatcacagtcatttttgatggtttggagttgggtgttctttaccccaacaatggctctcaattggagatacacctggtgaacgtgaacatggtggtgcccgcactg

SEQ ID NO: 572083 - DNA, 120 bp, Artificial Sequence
  ENSG00000170927_4 (sequence is synthesized)
cggagtgttccctgtgacgtctttcctgttttcttggatttgcctgtggtgacatgccggaccagatctgtgctgtctgaagcacatgagggtctgtacttcctggaagcatacttcggg

SEQ ID NO: 572084 - DNA, 120 bp, Artificial Sequence
  ENSG00000170927_5 (sequence is synthesized)
ggacagctggtaagcagtccaaatccaggaccacgagatagctgtactttcaagttttccaaggcgcagacacccatcgttcaccaagtttatccaccaagtggtgttccaggaaaacta

SEQ ID NO: 572085 - DNA, 120 bp, Artificial Sequence
  ENSG00000170927_6 (sequence is synthesized)
atacatgtatatggctggattatcactggaagattggaaacttttgattttgatgctgagtacattgatagcccagtgatcttggaagctcaaggagacaaatgggttactccttgctct

SEQ ID NO: 572086 - DNA, 120 bp, Artificial Sequence
  ENSG00000170927_7 (sequence is synthesized)
cttataaataggcagatgggaagctgttatcctattcaggaggaccatggtcttgggactctgcagtgccatgtggaaggcgactacatcggctcccagaatgttagcttctcagtattt

SEQ ID NO: 572087 - DNA, 120 bp, Artificial Sequence
  ENSG00000170927_8 (sequence is synthesized)
aacaaaggaaagtcaatggtccacaagaaggcatggctgatcagtgctaaacaggatcttttcctataccagacacactcagaaatattatctgtgtttccagaaactgggagccttggg

SEQ ID NO: 572088 - DNA, 120 bp, Artificial Sequence
  ENSG00000170927_9 (sequence is synthesized)
ggaagaacaaacatcacaattacaggagacttttttgacaattctgcccaggttaccattgcaggcattccatgtgatattagacacgtgtctcccaggaagattgagtgcaccactcgg

SEQ ID NO: 572089 - DNA, 120 bp, Artificial Sequence
  ENSG00000170927_10 (sequence is synthesized)
gctccaggaaaagatgtgaggctcaccacccctcagccaggcaatcgagggcttctttttgaagttggagatgctgttgagggactggaactgactgaagccaccccagggtacaggtgg

SEQ ID NO: 572090 - DNA, 120 bp, Artificial Sequence
  ENSG00000170927_11 (sequence is synthesized)
cagattgtccctaatgccagttctccatttgggttttggtcacaggaaggacaacctttcagagcacggctcagtgggttctttgtggctccagagacaaataattacactttctggatt

SEQ ID NO: 572091 - DNA, 120 bp, Artificial Sequence
  ENSG00000170927_12 (sequence is synthesized)
caggcagatagccaagcttccttgcatttcagttggtcagaggaaccaaggactaaggtgaaagtggcctccatcagcgtcggcactgctgactggtttgactcctgggagcagaatagg

SEQ ID NO: 572092 - DNA, 120 bp, Artificial Sequence
  ENSG00000170927_13 (sequence is synthesized)
gatgaagggacctggcagcagaagactcccaagttggagctgttgggtggagccatgtactacctggaagcagagcatcatgggatagccccaagcagggggatgaggattggtgtccag

SEQ ID NO: 572093 - DNA, 120 bp, Artificial Sequence
  ENSG00000170927_14 (sequence is synthesized)
attcacaacacctggctgaatcctgatgtggtcaccacttacctacgggagaagcaccagatccgagtccgagcccagaggcttccagaagtacaggtgctgaatgtatcaggcagagga

SEQ ID NO: 572094 - DNA, 120 bp, Artificial Sequence
  ENSG00000170927_15 (sequence is synthesized)
aacttcttccttacttgggacaatgtctctagtcagccaatccctgcaaatgccacagcccatctgattcaaacaaccattgaggagttacttgcagtaaaatgcaaactggaacccctt

SEQ ID NO: 572095 - DNA, 120 bp, Artificial Sequence
  ENSG00000170927_16 (sequence is synthesized)
tggtctaacatccttctccggcttggatttgaacgaggcccagaagtttccaactctgatggggacctcaccagtgggacggagcccttctgtggcaggttcagcctccgtcagcctcga

SEQ ID NO: 572096 - DNA, 120 bp, Artificial Sequence
  ENSG00000170927_17 (sequence is synthesized)
caccttgtccttactcccccggctgcccagaagggctatcggctagatcagtatacacacctgtgtcttgcatacaaaggccacatgaacaagatcctgaagatgattgtgtccttcaca

SEQ ID NO: 572097 - DNA, 120 bp, Artificial Sequence
  ENSG00000170927_18 (sequence is synthesized)
atcggctttcaaaacatggtaaagaataccacctgtgactggagtctcacgaggaccagccccgagagctggcagttcgattgcactgacctctgggagacttgtgtgcgttgcttcggg

SEQ ID NO: 572098 - DNA, 120 bp, Artificial Sequence
  ENSG00000170927_19 (sequence is synthesized)
gatctccagccccctccggcaaactccccagtgctggttcatcagatcaaccttctccctctggcccaggagacgggcctgttctatgtggatgaaattattattgcagacacaaacgta

SEQ ID NO: 572099 - DNA, 120 bp, Artificial Sequence
  ENSG00000170927_20 (sequence is synthesized)
acagtttctcaagctgattctggaacggctcgcccagggggcaatctggtggaatcagtctctgtggtgggatcccctccggtctacagtgtcacctcctggctggcggggtgtggcacg

SEQ ID NO: 572100 - DNA, 120 bp, Artificial Sequence
  ENSG00000170927_21 (sequence is synthesized)
gagctcccgctcatcactgcacgctctgtgcccactgaaggaacagaagagggatctggactggtcctggtgacgacacagagacgacagcggacaagtccacctctaggaggacacttt

SEQ ID NO: 572101 - DNA, 120 bp, Artificial Sequence
  ENSG00000170927_22 (sequence is synthesized)
cgcatccagcttcctaatacagtgatttctgatgtccctgtacaaatttctgctcatcaccttcaccagctcttacagaataatgccgatgacttcacatccaggtacctcaatgccagt

SEQ ID NO: 572102 - DNA, 120 bp, Artificial Sequence
  ENSG00000170927_23 (sequence is synthesized)
gacttcactgtgaaggaggatctatacacttgctacgaacacgtgtggaccttgtcctggtccactcagattggggatttgcccaattttatcagggtctctgatgaaaaccttactgga

SEQ ID NO: 572103 - DNA, 120 bp, Artificial Sequence
  ENSG00000170927_24 (sequence is synthesized)
gtgaatcctgctgcagccacgcgtgtggtatatgatggtggagtttttcttggacccatatttggagacatgttggctactgccaaccagcatactcaggtggttgtgcgagtgaatgat

SEQ ID NO: 572104 - DNA, 120 bp, Artificial Sequence
  ENSG00000170927_25 (sequence is synthesized)
gtaccagctcattgcccaggttcctgctctttccagtacctccaagggtcaactccctgtgtccattctgtgtggtactccattgatggtgacatcaacctaatgatttacattaccgga

SEQ ID NO: 572105 - DNA, 120 bp, Artificial Sequence
  ENSG00000170927_26 (sequence is synthesized)
actggtttctctggtgactcccagttcttgcaggttacagtgaacaaaacgagttgcaaagttattttctcaaaccagaccaatgtagtctgtcagacagatttgctacctgttggaatg

SEQ ID NO: 572106 - DNA, 120 bp, Artificial Sequence
  ENSG00000170927_27 (sequence is synthesized)
catcggatcttgatgttggtgagaccctctggtcttgccatcagtgccactggagaagacctcttcctaaatgtgaaacctagactggatatggtggagccttccagagctgcggatatt

SEQ ID NO: 572107 - DNA, 120 bp, Artificial Sequence
  ENSG00000170927_28 (sequence is synthesized)
ggagggctctgggccaccatccgaggctctagtttggaaggtgttagcctgatattatttggatcttactcgtgtgccatcaatgtcgctacaagcaattcaagcagaattcagtgcaaa

SEQ ID NO: 572108 - DNA, 120 bp, Artificial Sequence
  ENSG00000170927_29 (sequence is synthesized)
gttccacccagggggaaagatggacgcattgtgaatgtgactgtgatcagaggggactattctgcagttcttcccagagcatttacatatgtctcttccttaaatccagttattgtgact

SEQ ID NO: 572109 - DNA, 120 bp, Artificial Sequence
  ENSG00000170927_30 (sequence is synthesized)
ctgagcagaaacataagcaatatagcaggcggtgagaccctggtcattggagtggcgaggctgatgaactatacggatttggatgtggaagtccacgtccaggatgccttggctccggtt

SEQ ID NO: 572110 - DNA, 120 bp, Artificial Sequence
  ENSG00000170927_31 (sequence is synthesized)
cacacacagtcggcttggggcctggaggtggcactgcccccactgccagctggtctccacagaatttccgtctctatcaatggggtcagcattcactcacaaggggttgatctccacatc

SEQ ID NO: 572111 - DNA, 120 bp, Artificial Sequence
  ENSG00000170927_32 (sequence is synthesized)
cagtacctcacagaagttttcagcatcgagccttgctgtgggtccctgctgggagggaccatcctcagcatctcaggaataggcttcagcagggacccagctttggtttgggtacttgtg

SEQ ID NO: 572112 - DNA, 120 bp, Artificial Sequence
  ENSG00000170927_33 (sequence is synthesized)
ggcaatcggtcctgtgacattgtgaacttaacggaggcgagcatctggtgtgaaaccctgccagccccccagatacccgatgcgggcgctcccactgttccagctgccgtggaggtctgg

SEQ ID NO: 572113 - DNA, 120 bp, Artificial Sequence
  ENSG00000170927_34 (sequence is synthesized)
gctggcaacaggttcttcgcccgtggtccttcaccaagcttggtggggaaaggcttcaccttcatgtatgaagcggcagcaacaccagtagtcactgccatgcaaggagaaatcacaaat

SEQ ID NO: 572114 - DNA, 120 bp, Artificial Sequence
  ENSG00000170927_35 (sequence is synthesized)
agcagcctgagcctgcatgtgggaggaagtaacctctccaactcagtcatccttctggggaacctgaactgtgatgttgagacacagtccttccagggcaacgtgagcctgtctggatgc

SEQ ID NO: 572115 - DNA, 120 bp, Artificial Sequence
  ENSG00000170927_36 (sequence is synthesized)
tccatccctcttcacagtctggaggctggcatctatcctctccaagtacgtcagaagcagatgggatttgctaatatgtctgtggtgctccagcaatttgcagtgatgcctcggataatg

SEQ ID NO: 572116 - DNA, 120 bp, Artificial Sequence
  ENSG00000170927_37 (sequence is synthesized)
gccatcttcccatcgcagggttcggcatgtggtgggaccatacttactgtgagggggttgcttcttaactctagaaggaggtcagttcgggttgacctctcgggtccttttacttgtgtg

SEQ ID NO: 572117 - DNA, 120 bp, Artificial Sequence
  ENSG00000170927_38 (sequence is synthesized)
attttgagtttgggagaccacaccattctctgccaggttagcctggagggtgaccccttgcctggagcttccttctccctgaacgtcacagtcctggtcaatgggctaaccagcgagtgt

SEQ ID NO: 572118 - DNA, 120 bp, Artificial Sequence
  ENSG00000170927_39 (sequence is synthesized)
caggggaattgcactcttttcataagggaagaggcaagtcctgtcatggatgccttgtccacaaacaccagtgggtctctgaccactgtgctgattaggggtcagaggttagccaccaca

SEQ ID NO: 572119 - DNA, 120 bp, Artificial Sequence
  ENSG00000170927_40 (sequence is synthesized)
gctgatgagccgatggtatttgtggatgatcaacttccttgcaatgtaactttttttaatgcaagccacgttgtgtgccagacaagagacttggccccaggaccccactacctgtcagtt

SEQ ID NO: 572120 - DNA, 120 bp, Artificial Sequence
  ENSG00000170927_41 (sequence is synthesized)
ttttatacaagaaatgggtatgcttgttctggtaatgtttccagacacttctacattatgccccaagtgtttcattattttcctaagaatttcagcttacatggtggaagcctcttgacc

SEQ ID NO: 572121 - DNA, 120 bp, Artificial Sequence
  ENSG00000170927_42 (sequence is synthesized)
atagagggcacaggcctgagaggacagaacaccacgtcagtctatattgaccagcagacctgcctgacggtgaacatcggtgctgagctcatccggtgcattgttcccacagggaatggc

SEQ ID NO: 572122 - DNA, 120 bp, Artificial Sequence
  ENSG00000170927_43 (sequence is synthesized)
tctgttgccctggaaatagaggtagatggactttggtatcacataggagtcattggttataacaaggcctttaccccagaattgatctctatttctcagagcgatgacatcttaaccttt

SEQ ID NO: 572123 - DNA, 120 bp, Artificial Sequence
  ENSG00000170927_44 (sequence is synthesized)
gcagtggcccagatctcaggagctgcaaacattgacatttttataggaatgtcaccctgtgtgggtgtctctggtaaccacaccgttcttcagtgcgtggtcccttcccttccggccggg

SEQ ID NO: 572124 - DNA, 120 bp, Artificial Sequence
  ENSG00000170927_45 (sequence is synthesized)
gagtaccacgtcagaggctatgactgcatcagagggtgggcctcatctgccctggtgttcacctcaagagttattattacagcagtgacggagaacttcggctgcctgggtggaaggctg

SEQ ID NO: 572125 - DNA, 120 bp, Artificial Sequence
  ENSG00000170927_46 (sequence is synthesized)
gtgcatgtgtttggagcgggattttctccagggaatgtctcagctgctgtgtgtggtgctccctgccgagtcctggctaatgctacagtgtctgccttcagctgcttggttctgcccctg

SEQ ID NO: 572126 - DNA, 120 bp, Artificial Sequence
  ENSG00000170927_47 (sequence is synthesized)
gatgtgtccttggccttcctgtgtggcctgaagcgtgaggaggacagctgtgaggctgccagacacacctatgtgcagtgtgatttgacagttgccatggcgacagagcaactgcttgaa

SEQ ID NO: 572127 - DNA, 120 bp, Artificial Sequence
  ENSG00000170927_48 (sequence is synthesized)
tcgtggccttacctctacatttgcgaggaaagttcccaatgcctctttgtgccagatcattgggcagagtcaatgtttccatcattctcgggcctctttatcagccctaaattggaaaga

SEQ ID NO: 572128 - DNA, 120 bp, Artificial Sequence
  ENSG00000170927_49 (sequence is synthesized)
gatgaagttctcatctataatagctcctgtaacattaccatggaaactgaggcagagatggagtgtgagacgcccaatcagccaattaccgtcaagattactgagatacggaaacgctgg

SEQ ID NO: 572129 - DNA, 120 bp, Artificial Sequence
  ENSG00000170927_50 (sequence is synthesized)
ggccagaacactcagggcaacttttctttacagttctgccggagatggtccaggactcacagctggtttcctgaaaggctgccacaagatggcgacaacgtcacagtggagaatggccaa

SEQ ID NO: 572130 - DNA, 120 bp, Artificial Sequence
  ENSG00000170927_51 (sequence is synthesized)
ttgcttctgctggacactaacacaagcatcctcaacttactgcacattaaagggggcaagctgattttcatggccccaggacccatcgagctcagggcacacgccatccttgtttctgat

SEQ ID NO: 572131 - DNA, 120 bp, Artificial Sequence
  ENSG00000170927_52 (sequence is synthesized)
ggtggagagctccggattggatccgaagacaagcccttccaaggcagagctcagatcacactctacgggagttcctactcaactcccttctttccctatggagtcaagttcctggctgtg

SEQ ID NO: 572132 - DNA, 120 bp, Artificial Sequence
  ENSG00000170927_53 (sequence is synthesized)
aggaatggaactctttctctgcacggttcactaccagaagtaattgtcacctgtcttagagcaactgcccatgccctagacacagtgctggctttagaagatgctgtggactggaaccct

SEQ ID NO: 572133 - DNA, 120 bp, Artificial Sequence
  ENSG00000170927_54 (sequence is synthesized)
ggggatgaagttgtcatcatcagtggaacaggtgttaaaggtgccaaaccgatggaagagattgtcactgtggaaactgtgcaggatacagacctctatcttaagtcacctttgagatat

SEQ ID NO: 572134 - DNA, 120 bp, Artificial Sequence
  ENSG00000170927_55 (sequence is synthesized)
tctcacaactttacagagaattgggtggctggagagcaccatattttaaaggccactgtggctctgctcagcaggagtattaccatacaaggaaatctcactaatgagagggagaagctg

SEQ ID NO: 572135 - DNA, 120 bp, Artificial Sequence
  ENSG00000170927_56 (sequence is synthesized)
cttgtttcatgccaggaggccaatgctccagaaggtaatctgcagcactgtttgtattccatgagtgagaagatgctaggatccagggatatgggagccagagtgatcgttcagtccttc

SEQ ID NO: 572136 - DNA, 120 bp, Artificial Sequence
  ENSG00000170927_57 (sequence is synthesized)
ccagaagagcccagccaggtccagttgaagggagtgcagtttcaagtcttggggcaagccttccataagcatctgagctcactcactctggtgggagctatgagagagtctttcatacag

SEQ ID NO: 572137 - DNA, 120 bp, Artificial Sequence
  ENSG00000170927_58 (sequence is synthesized)
ggctgcacagtgaggaactccttcagtagaggcctcagcatgtgcgggaccttgggcctgaaggtggacagtaatgtattctacaatattttaggtcatgcgctgctagttgggacatgc

SEQ ID NO: 572138 - DNA, 120 bp, Artificial Sequence
  ENSG00000170927_59 (sequence is synthesized)
acggagatgagatatatctcctgggaggcaattcatggaaggaaagatgactggtcaggacatggaaatataataagaaacaacgtgatcatccaggtttctggtgccgagggactctcc

SEQ ID NO: 572139 - DNA, 120 bp, Artificial Sequence
  ENSG00000170927_60 (sequence is synthesized)
aatcctgaaatgttgacaccatctggcatctatatctgcagtcccaccaatgttatagaggggaacagagtgtgtggtgctggctatggctactttttccatctcatgaccaaccaaaca

SEQ ID NO: 572140 - DNA, 120 bp, Artificial Sequence
  ENSG00000170927_61 (sequence is synthesized)
tcacaagctccgcttctttccttcactcagaacattgcacattcttgtaccaggtatggtctctttgtataccctaaatttcagccaccttgggataatgtcactggcaccactctgttc

SEQ ID NO: 572141 - DNA, 120 bp, Artificial Sequence
  ENSG00000170927_62 (sequence is synthesized)
cagagcttcacagtttgggaaagtgcaggtggtgcccagatttttagaagtagcaatcttcgcctgaaaaacttcaaagtttattcatgcagagattttggaattgacgtcttggaaagt

SEQ ID NO: 572142 - DNA, 120 bp, Artificial Sequence
  ENSG00000170927_63 (sequence is synthesized)
gatgcaaatacttcagttactgacagcttattacttggtcattttgcccacaagggaagtctgtgtatgtcatctgggattaaaactcctaaaagatgggaactgatggtgtctaacaca

SEQ ID NO: 572143 - DNA, 120 bp, Artificial Sequence
  ENSG00000170927_64 (sequence is synthesized)
acctttgttaattttgatctcatcaactgtgtggccattagaacctgttcagactgttcccaaggacaaggtggatttactgtgaagaccagccagttgaagtttacaaactcttcaaac

SEQ ID NO: 572144 - DNA, 120 bp, Artificial Sequence
  ENSG00000170927_65 (sequence is synthesized)
ttagtggcatttccatttcctcatgcagcaattttggaagacttggatgggtctctgtctgggaaaaacagaagtcacattcttgcttctatggaaaccctttcagcttcttgtttggtc

SEQ ID NO: 572145 - DNA, 120 bp, Artificial Sequence
  ENSG00000170927_66 (sequence is synthesized)
aattcaagctttggtcgggttgtccatggcagtgcctgtggaggaggtgttctttttcatcgtatgtctattggtttagcgaatactcctgaagtttcttatgatttaaccatgactgac

SEQ ID NO: 572146 - DNA, 120 bp, Artificial Sequence
  ENSG00000170927_67 (sequence is synthesized)
gctcttggaccaagagacctactcattgcaatctgagaacctttggatcaacagatctctgcagtactcagcaacctttgacaactttgctcctggtaattacctactgctggtgcacac

SEQ ID NO: 572147 - DNA, 120 bp, Artificial Sequence
  ENSG00000170927_68 (sequence is synthesized)
agatttgccgccttaccctgacatcctcctaagatgtgggagtcgagtgggtctgtcttttccatttcttccatcaccaggtcagaaccaaggctgtgactggttcttcaatagccagct

SEQ ID NO: 572148 - DNA, 120 bp, Artificial Sequence
  ENSG00000170927_69 (sequence is synthesized)
gaggcaactcacctatctggtttcaggtgaaggccaagttcaagtcattctccgggtgaaggaaggtatgcccccaactatttcagcttctacctctgcccctgaatcagctttaaaatg

SEQ ID NO: 572149 - DNA, 120 bp, Artificial Sequence
  ENSG00000170927_70 (sequence is synthesized)
gtccctccctgaaacatggcaaggtgttgaagaaggctggggaggatacaacaataccattccaggccctggggatgacgttctcattttacccaacagaactgtccttgtggatacaga

SEQ ID NO: 572150 - DNA, 120 bp, Artificial Sequence
  ENSG00000170927_71 (sequence is synthesized)
tcttccattcttcaaagggctgtatgtgatggggaccttagacttccctgtggacagaagcaatgttctgagtgtggcatgcatggtcattgcaggcggggagctgaaagttggtacttt

SEQ ID NO: 572151 - DNA, 120 bp, Artificial Sequence
  ENSG00000170927_72 (sequence is synthesized)
agaaaatcccttagaaaaggaacaaaagcttctgattctccttagagcctcagagggagtcttttgtgaccgtatgaatggaattcatattgacccaggaacaattggggtttatgggaa

SEQ ID NO: 572152 - DNA, 120 bp, Artificial Sequence
  ENSG00000170927_73 (sequence is synthesized)
agttcatctttacagtgcttatcctaagaactcctggacacatcttggagctgatattgcctcaggaaatgagagaattatagtagaagatgcagtggattggcgcccccatgacaaaat

SEQ ID NO: 572153 - DNA, 120 bp, Artificial Sequence
  ENSG00000170927_74 (sequence is synthesized)
agtccttagctcctcttcttatgagcctcatgaagcagaggtcctcactgtgaaagaagtcaagggccaccatgtgaggatctatgaacggctcaaacaccggcatattggaagtgtaca

SEQ ID NO: 572154 - DNA, 120 bp, Artificial Sequence
  ENSG00000170927_75 (sequence is synthesized)
tgtcacggaggatggccgacacattcgtttggctgctgaggttggactgttgacccgaaatatacaaattcagcctgacgtatcatgtagggggagactgtttgtggggtccttcaggaa

SEQ ID NO: 572155 - DNA, 120 bp, Artificial Sequence
  ENSG00000170927_76 (sequence is synthesized)
gtccagccgagaagaattttcaggtgtccttcaacttcttaatgtggaaattcagaacttcgggtcaccattgtactcatctgttgaattcagtaatgtgtcagcaggatcctggatcat

SEQ ID NO: 572156 - DNA, 120 bp, Artificial Sequence
  ENSG00000170927_77 (sequence is synthesized)
atcatctactctgcaccagagctgtggcgggggcattcatgcagctgccagtcatggagtacttttaaatgacaatattgtgtttggcacagctggccatggcatagatttagagggtca

SEQ ID NO: 572157 - DNA, 120 bp, Artificial Sequence
  ENSG00000170927_78 (sequence is synthesized)
ggcctatactgtcactaataaccttgtggttctgatgacacagccagcgtggtccaccatttgggtggcgggaatcaaagtgaaccaggtaaaggacatcaacctccatggcaacgttgt

SEQ ID NO: 572158 - DNA, 120 bp, Artificial Sequence
  ENSG00000170927_79 (sequence is synthesized)
ggcaggatcagagagacttggctttcacatccgaggccacaagtgctcctcttgtgaactgctttggtctgacaatgtggcgcattcaagtcttcatggccttcatctctataaggaaag

SEQ ID NO: 572159 - DNA, 120 bp, Artificial Sequence
  ENSG00000170927_80 (sequence is synthesized)
tggacttgacaactgtaccagaatctctggcttcttggctttcaagaactttgactatggtgccatgttacatgtagagaacagcgtggagatagagaacattactctggtagacaatac

SEQ ID NO: 572160 - DNA, 120 bp, Artificial Sequence
  ENSG00000170927_81 (sequence is synthesized)
tattggtcttttggcagtagtgtatgtattttctgctccacaaaattccgtcaaaaaagtgcagattgtgcttaggaattcagtcattgtggccaccagctcttcttttgactgcattca

SEQ ID NO: 572161 - DNA, 120 bp, Artificial Sequence
  ENSG00000170927_82 (sequence is synthesized)
ggacaaagtgaagccgcactcagccaacttgacatcaacagatagagctccctccaatccaagaggaggtcgaattggtattctgtggcctgtattcacctcagaaccaaatcagtggcc

SEQ ID NO: 572162 - DNA, 120 bp, Artificial Sequence
  ENSG00000170927_83 (sequence is synthesized)
tcaggagccatggcacaaagtgaggaatgatcattcaatttcaggaatcatgaaacttcaagatgttaccttttctagttttgtgaagagttgctatagcgatgacctggatgtctgcat

SEQ ID NO: 572163 - DNA, 120 bp, Artificial Sequence
  ENSG00000170927_84 (sequence is synthesized)
tctaccaaatgcagagaacagtggaattatgcacccaataacagcagagaggaccaggatgctaaagataaaagataaaaacaagttctactttccttcattacaacccaggaaagattt

SEQ ID NO: 572164 - DNA, 120 bp, Artificial Sequence
  ENSG00000170927_85 (sequence is synthesized)
aggaaaagtagtctgtcctgaattagactgtgcaagtccaagaaaatatctcttcaaggatctggatgggagagccctgggtctgcctccaccagtttctgtatttcctaaaacagaggc

SEQ ID NO: 572165 - DNA, 120 bp, Artificial Sequence
  ENSG00000170927_86 (sequence is synthesized)
agaatggactgcatccttcttcaacgcaggtacatttagagaagaacagaaatgtacataccaatttctgatgcaaggattcatctgcaaacagactgaccaagtggtcctaattcttga

SEQ ID NO: 572166 - DNA, 120 bp, Artificial Sequence
  ENSG00000170927_87 (sequence is synthesized)
tagcgctgatgccatttgggcaattcagaagttatatccagttgtatctgtgactagtggttttgttgatgtctttagcagtgtaaatgccaatattccctgctctacttctgggtcagt

SEQ ID NO: 572167 - DNA, 120 bp, Artificial Sequence
  ENSG00000170927_88 (sequence is synthesized)
gtctactttctattctatcttacccatcaggcaaatcaccaaagtctgcttcatggatcaaactcctcaagttttgcgcttttttctattggggaacaaaagtacctccaagcttctctt

SEQ ID NO: 572168 - DNA, 120 bp, Artificial Sequence
  ENSG00000170927_89 (sequence is synthesized)
ggctgtattctaccatgagctccagagcccccacgtcttcttaggggaaagttttattccacccactctggttcagtcagcttccttattgctgaatgaatctattggtgccaactattt

SEQ ID NO: 572169 - DNA, 120 bp, Artificial Sequence
  ENSG00000170927_90 (sequence is synthesized)
caacatcatggataacctcttgtatgttgtcctacaaggagaggagcccattgaaatacgctcaggtgtttccattcacttggccctcactgtgatggtttcagtcttagaaaaaggctg

SEQ ID NO: 572170 - DNA, 120 bp, Artificial Sequence
  ENSG00000170927_91 (sequence is synthesized)
ggaaatagtaatactcgaaagactaactaacttcttacagattggccaaaaccaaatcaggtttattcacgagatgcctggccatgaagagaccttaaaggccattgctgacagtagagc

SEQ ID NO: 572171 - DNA, 120 bp, Artificial Sequence
  ENSG00000170927_92 (sequence is synthesized)
aaaaagaaagcgcaattgccctactgtgacttgcactagtcattatagaagagttggtcaacgtaggcctctcatgatggaaatgaactcacatagggcttcacccccaatgactgtgga

SEQ ID NO: 572172 - DNA, 120 bp, Artificial Sequence
  ENSG00000170927_93 (sequence is synthesized)
aactatctcaaaagtgattgtcattgaaattggtgattcgccaacagtaaggagcactggaatgatttcatccttatcaagtaacaaattacagaatttggctcatcgagtcatcactgc

SEQ ID NO: 572173 - DNA, 120 bp, Artificial Sequence
  ENSG00000170927_94 (sequence is synthesized)
tcaacagactggggtactagagaatgttctgaatatgactatcggggccttactagttactcagtcaaagggagtcattggctatggaaatacaagcagttttaaaactgggaacttgat

SEQ ID NO: 572174 - DNA, 120 bp, Artificial Sequence
  ENSG00000170927_95 (sequence is synthesized)
atatattcggccctatgcactttccatcctagtccagccttcagatggagaagtgggaaatgagcttccagtgcagccacaattggtatttttggatgagcagaatcgaagagtagagtc

SEQ ID NO: 572175 - DNA, 120 bp, Artificial Sequence
  ENSG00000170927_96 (sequence is synthesized)
cctgggacctccttcagagccatggacaatttcagcttccctggaaggagcatcagactcagtgctaaaagggtgcacccaggcagaaactcaagatggttatgttagcttctacaactt

SEQ ID NO: 572176 - DNA, 120 bp, Artificial Sequence
  ENSG00000170927_97 (sequence is synthesized)
ggcagtcttgatctctgggtcaaactggcactttatttttactgtcacttctcctccaggagtcaattttacagctcgatccaagccatttgctgtcttgcctgtgactaggaaggagaa

SEQ ID NO: 572177 - DNA, 120 bp, Artificial Sequence
  ENSG00000170927_98 (sequence is synthesized)
gtcgaccatcatcctggctgcttccctgtcctctgtggcctcatggctggctctgagctgtctggtgtgctgttggcttaaaagaagcaaaagcagaaaaacaaaacctgaagagattcc

SEQ ID NO: 572178 - DNA, 120 bp, Artificial Sequence
  ENSG00000170927_99 (sequence is synthesized)
tgaatcccagactaataatcaaaatattcatatccacatctcatccaaacgccgagaatcacaagggcccaaaaaagaagacactgtggtgggagaagatatgagaatgaaggtcatgct

SEQ ID NO: 572179 - DNA, 120 bp, Artificial Sequence
  ENSG00000170927_100 (sequence is synthesized)
gggcaaggtgaaccagtgcccccaccagttgatgaatggagtgtccagaaggaaagttagccgccacattgtccgagaggaagaggctgctgtgcctgctcctggtactactggcatcac

SEQ ID NO: 572180 - DNA, 120 bp, Artificial Sequence
  ENSG00000170927_101 (sequence is synthesized)
atcccatgggcacatctgtgctccaggtgctcctgctcagcaggtgtacctgcaagagactgggaactggaaggagggccaagagcagttgctcagataccagctggcaggccaaaatca

SEQ ID NO: 572181 - DNA, 120 bp, Artificial Sequence
  ENSG00000170927_102 (sequence is synthesized)
gctgctgctgctatgcccagacttcagacaagagaggcagcagttgccagggcaaagtcggctgagtaagcaaagtggcagcttggggctttcccaagagaagaaagcctcctgcggggc

SEQ ID NO: 572182 - DNA, 120 bp, Artificial Sequence
  ENSG00000170927_103 (sequence is synthesized)
cactgaggcattctgccttcattcagtacacccggaaactattcaggagcaactgtgatcagggaagttgggggcatttggcctgaaaggcagaatgttcccagtatttctggataataa

SEQ ID NO: 572183 - DNA, 120 bp, Artificial Sequence
  ENSG00000170927_104 (sequence is synthesized)
gctggggaagtgaggactgtcctgctgggacaactaagaagagagaatgtggactctgaatccctttttcaactttaaaatggaaaacagtcatataaatgcttacagactgaaaaatgt

SEQ ID NO: 572184 - DNA, 120 bp, Artificial Sequence
  ENSG00000170927_105 (sequence is synthesized)
ctcatacatattttgcagctatcatgatcctagttcaatgctaggcaaataatggcacttgttaattatttaccagtttttaacttaagcctgattttaacaacttgataatggtgtaat

SEQ ID NO: 572185 - DNA, 120 bp, Artificial Sequence
  ENSG00000170927_106 (sequence is synthesized)
actgacttataccagcaggggttattattaagcattctctggattgaccacccacaatgctttgagcttcttttatagaagggatcatgaaaaggtctggtcagctacagtttaattcca

SEQ ID NO: 572186 - DNA, 120 bp, Artificial Sequence
  ENSG00000170927_107 (sequence is synthesized)
cactgttacagaaaagcatttctttatcctgtagtagcatttgaagggacagttcaacaccctgctccctgatctgtcagagcttaccttccaaccacaaggcaacttcctggcttttta

SEQ ID NO: 572187 - DNA, 120 bp, Artificial Sequence
  ENSG00000170927_108 (sequence is synthesized)
caagtggattttatttcatggtttaaattcaatcattattgagaacctacagtagtgtgagcgtatcaaatttgcacttcatgaggatttacacatgaaaattgatattctcatgggctt

SEQ ID NO: 572188 - DNA, 120 bp, Artificial Sequence
  ENSG00000170927_109 (sequence is synthesized)
tgctgagagtttagttaaggacaaagatgtaaaaatgccaaatttgggaaaggaaattttgtatgaccactgttctatttttcagtgattctctctgttagtagctgggtcacatttaca

SEQ ID NO: 572189 - DNA, 120 bp, Artificial Sequence
  ENSG00000170927_110 (sequence is synthesized)
actggaaaagaactacattgggagatcagagaaagccaagtggccaagtcctttatcaaaaagctgctttttggagaagatgatgcataaagctgtgatactaaggagaggagagattat

SEQ ID NO: 572190 - DNA, 120 bp, Artificial Sequence
  ENSG00000170927_111 (sequence is synthesized)
gtcatatgcaactgctctaggctgtgcagggggtttaaatggagatcagaacaaaggctcacctggtattgatacatttggtaaggttgttaaaggcaatttcaccaaattcacacattt

SEQ ID NO: 572191 - DNA, 120 bp, Artificial Sequence
  ENSG00000170927_112 (sequence is synthesized)
gtacggggcccatttcttttcaaactgaagaatactttaaacagcctgactgtgtccttggctctggatccagaaggccttatgctccaagcatgtaaagaaaagatcgcaggaatgtgg

SEQ ID NO: 572192 - DNA, 120 bp, Artificial Sequence
  ENSG00000170927_113 (sequence is synthesized)
agagcttccaaaaagagattgctctcagattttcctgaaaatcctgaaaaccaggattttccaatctctacaatgttaaggggttgttgtgtagttgcattggaagagagaaaggaaaca

SEQ ID NO: 572193 - DNA, 120 bp, Artificial Sequence
  ENSG00000170927_114 (sequence is synthesized)
cactctttcattgctgaattctaaataatgatgccctgaattagttctatgagaagtactggcagacagctgttatgtctgcagggcatcaaggggcaggtgtgtctcaccctactaaga

SEQ ID NO: 572194 - DNA, 120 bp, Artificial Sequence
  ENSG00000170927_115 (sequence is synthesized)
attggcagaaatgttttaacctcttctttaggcatctggtgagtattgcagatcttcaggctgtccctaaaaggaggtaggtagccttctctgtggtcactgtgttggatttggaagaaa

SEQ ID NO: 572195 - DNA, 120 bp, Artificial Sequence
  ENSG00000170927_116 (sequence is synthesized)
atataagtagatgttaaggtcagtgctctccaggagatttcaatccaggctatctgtgttcagggaatgatttgcaagaagttggtttatagacgtttactctggaggcacaagctggct

SEQ ID NO: 572196 - DNA, 120 bp, Artificial Sequence
  ENSG00000170927_117 (sequence is synthesized)
gccatgctgagtaagtcctctttgtagatgatgtattttgcttgggcaccaacagaattaaaaacgaaaaacaaaaaaaaactcgaatgacttaggcagaacatgccttccctagtttaa

SEQ ID NO: 572197 - DNA, 120 bp, Artificial Sequence
  ENSG00000170927_118 (sequence is synthesized)
ttagtccctgttataaccagttatttatctttttttgtagattctcggtcttgaagtcatttgcctttgcaatctctactttagtatactcattggatcctcaaagagccgtaagctttt

SEQ ID NO: 572198 - DNA, 120 bp, Artificial Sequence
  ENSG00000170927_119 (sequence is synthesized)
tggaaaaaaacatttcagaagtgaaggcttttgaggtttataaaatggtagcagtcttagtccttgccctgcctcagtttacctgcacatgctttctttcatttcctcggattctttcac

SEQ ID NO: 572199 - DNA, 120 bp, Artificial Sequence
  ENSG00000170927_120 (sequence is synthesized)
cactttttaagttttttttccacaggtatttttcctgagctctataccatgcatttagctgcctagtgagaatatccagtaggttatcctatagttactatgaagttaacacagcccaaa

SEQ ID NO: 572200 - DNA, 120 bp, Artificial Sequence
  ENSG00000170927_121 (sequence is synthesized)
aacctacttctccttgtgtttttttccaactcaatgaatgacatcactgcactcagaccagaaatctagaagtcagtcatgactcttcattctatttcgcccttcacaaagagttagctg

SEQ ID NO: 572201 - DNA, 120 bp, Artificial Sequence
  ENSG00000170927_122 (sequence is synthesized)
ccagctctgttatttctgccccttctttacccttcttccaatttttattatcttcttatttatcctctatgtgtcacaagaccagtctttctgggaggcatgttttatcctatccctctg

SEQ ID NO: 572202 - DNA, 120 bp, Artificial Sequence
  ENSG00000170927_123 (sequence is synthesized)
cgtaggaataaccataattatcttactaattccatcccagaaaagcctgtgatccctgaggccagaattgactctttgggcctaaatagcagctataaacatcttcagtaacttgccagg

SEQ ID NO: 572203 - DNA, 120 bp, Artificial Sequence
  ENSG00000170927_124 (sequence is synthesized)
ctctagcatgtggcatggaattttggcatctagctaaaattcctcaacccatagttaagctactcctctttctcctaaaaaaaaaaaaaaatgagagaattagggaaacaccaaaagcaa

SEQ ID NO: 572204 - DNA, 120 bp, Artificial Sequence
  ENSG00000170927_125 (sequence is synthesized)
agagagcagctctatgttcattcatgtctggagatgagccaatttgagcaccactgtaggccaactctaaatttattcagatcgttaacatgggtaacccagcaaatatttcccagcagt

SEQ ID NO: 572205 - DNA, 120 bp, Artificial Sequence
  ENSG00000170927_126 (sequence is synthesized)
gacaatctacaccctttatctaaataaatattgagatgtgcttttttcctgtgttagttcaaagaatctcttcttgcctcccattgctgattttctgtattgatggactcatttctctca

SEQ ID NO: 572206 - DNA, 120 bp, Artificial Sequence
  ENSG00000170927_127 (sequence is synthesized)
agagattggacaagctaaaattctagagagttcaaaagtgtttgaaagtacattttaagtgttctcaccacaaaaaatgctagtgtgtgaggtgatacatatgttaattagttcaactga

SEQ ID NO: 572207 - DNA, 120 bp, Artificial Sequence
  ENSG00000170927_128 (sequence is synthesized)
tagttcaactgatccattccacaatgtatacatatttcaaactatcgagttgtacatgataaatatatacaatttttatttgtcaaataaagaacatctataaatatttatagatttcaa

SEQ ID NO: 572208 - DNA, 120 bp, Artificial Sequence
  ENSG00000170927_129 (sequence is synthesized)
agtatatatggagccacggttgttttgaccatttctccatgctttttgtttggggagggggacattttttggggggcagggactgtgttcagggaaagtacctgaccaacagaacttcaa

SEQ ID NO: 572209 - DNA, 120 bp, Artificial Sequence
  ENSG00000170927_130 (sequence is synthesized)
gtctcttccagagtgcgagactcagcttatctgatcaaggtgaacttgcccttcaatagacttgcccttgttactgcccagtgaggccaccaaggaccaagaacagttgagctctctcag

SEQ ID NO: 572210 - DNA, 120 bp, Artificial Sequence
  ENSG00000170927_131 (sequence is synthesized)
ggccttcccctttcaacaatttagttgaatgactcccttccatctatcagtcttactccaaatatatgaaattactatacattgaaatgcctgcaaactatatgcaaaaatgagtatgag

SEQ ID NO: 572211 - DNA, 120 bp, Artificial Sequence
  ENSG00000170927_132 (sequence is synthesized)
gaaatcaaatgtaaatcatatgcaaatattattcaaccaagcttctataaaattgtacgtgtcaataacagtaaagaattttaattaattctgtcatttaaaattcatgcattccatatt

SEQ ID NO: 572212 - DNA, 120 bp, Artificial Sequence
  ENSG00000170927_133 (sequence is synthesized)
ttgctttcagaacttatagtctatgccaattttgaaaaaactataagcacaaggaattaaatactattgagtatagaactgttgatttcaacatacactatagcactttgactaattaca

SEQ ID NO: 572213 - DNA, 120 bp, Artificial Sequence
  ENSG00000170927_134 (sequence is synthesized)
gatatatttgatagaaaagtcacatttctacaaggtaattttcaaaaagaaataaaacatttctgtaaacttaaatgtggattaagtggcagaatacagagatttgaatgtttacaaata

SEQ ID NO: 572214 - DNA, 120 bp, Artificial Sequence
  ENSG00000170927_135 (sequence is synthesized)
gaatggactgcatccttcttcaacgcagtaaccactgagcaggctttgaagatttcagaatagaggaggagcctgcaggaagctgaactttgaaagattaatgaggcagcaggaagcagg

SEQ ID NO: 572215 - DNA, 120 bp, Artificial Sequence
  ENSG00000170927_136 (sequence is synthesized)
gtgaagaatgggttggagcatggaccaaatggaaagacttgttaagacactgtttcaattgttcaaattgagaagaaattgattgaggactgggaggagattgatggcagccagaatgga

SEQ ID NO: 572216 - DNA, 120 bp, Artificial Sequence
  ENSG00000170927_137 (sequence is synthesized)
gaggatggtacagatcaaagaaatacaaaagagaggaaatagagtttgcttactcctgactttggggactgtggagagggtgtcaacagtgacaccattgtccgtagtcaggatatcttt

SEQ ID NO: 572217 - DNA, 120 bp, Artificial Sequence
  ENSG00000170927_138 (sequence is synthesized)
gggaatggaagttccagtagcagatatgggggagtaggaaagaagaggatggttgcttaagctttgcctttagtgagtttggggtacccactatatgagagaggagcaattcagatatta

SEQ ID NO: 572218 - DNA, 120 bp, Artificial Sequence
  ENSG00000170927_139 (sequence is synthesized)
aattggtggtgttgaaatctttggaattagagctttggagataaattgcagctagatataaattatctggaataaagtgataggtgaaataatatggtagagaagccttattttatttct

SEQ ID NO: 572219 - DNA, 120 bp, Artificial Sequence
  ENSG00000170927_140 (sequence is synthesized)
caataatagtgggttattgttaataatattggtaaagaaagaacataaatgtaagtttattaccaagaatattggtgtggtaaagataacccatttatgctggaggttgcaattttttga

SEQ ID NO: 572220 - DNA, 120 bp, Artificial Sequence
  ENSG00000170927_141 (sequence is synthesized)
attgcaaaatcagaccttggccatgaccttaagcagtaggatataaataactcccatgtgcccagtgttccattattggaacagtgtgccattcttgtgcactgatggaggaaatagtta

SEQ ID NO: 572221 - DNA, 120 bp, Artificial Sequence
  ENSG00000170927_142 (sequence is synthesized)
cagatacagtgtgatttgaggaattggttcccccagagccttattgaccctcaaatacttcccttacccatgttatcatttcctttctatcctaaaattgctacctttgctgccagatct

SEQ ID NO: 572222 - DNA, 120 bp, Artificial Sequence
  ENSG00000170927_143 (sequence is synthesized)
tttccttcataaagtcaatgtgacatttactcatttattaactcatttcttcaacagatacttattgggcatttactgtatgccaagtattgtaataaatgctgtatgtacaaaatgaca

SEQ ID NO: 572223 - DNA, 120 bp, Artificial Sequence
  ENSG00000170929_0 (sequence is synthesized)
ttccaaaaccatctccctgtcattcctataacctcccctttccatacttccagaggaatcacacccatggaaccaagaaaccaaaccagtgcatctcaattcatcctcctgggactctca

SEQ ID NO: 572224 - DNA, 120 bp, Artificial Sequence
  ENSG00000170929_1 (sequence is synthesized)
gaaaagccagagcaggagacgcttctcttttccctgttcttctgcatgtacctggtcatggtcgtggggaacctgctcatcatcctggccatcagcatagactcccacctccacaccccc

SEQ ID NO: 572225 - DNA, 120 bp, Artificial Sequence
  ENSG00000170929_2 (sequence is synthesized)
atgtacttcttcctggccaacctgtccctggttgatttctgtctggccaccaacaccatccctaagatgctggtgagccttcaaaccgggagcaaggccatctcttatccctgctgcctg

SEQ ID NO: 572226 - DNA, 120 bp, Artificial Sequence
  ENSG00000170929_3 (sequence is synthesized)
atccagatgtacttcttccatttctttggcatcgtggacagcgtcataatcgccatgatggcttatgaccggttcgtggccatctgccacccattgcactacgccaagatcatgagccta

SEQ ID NO: 572227 - DNA, 120 bp, Artificial Sequence
  ENSG00000170929_4 (sequence is synthesized)
gcccgtctcgttttctgcggcagccatgaggtgcctcactacttctgcgacctcactcccatcctccgactttcgtgcacggacacctctgtgaataggatcttcatcctcattgtggca

SEQ ID NO: 572228 - DNA, 120 bp, Artificial Sequence
  ENSG00000170929_5 (sequence is synthesized)
gggatggtgatagccacgccctttgtctgcatcctggcctcctatgctcgcatccttgtggccatcatgaaggtcccctctgcaggcggcaggaagaaagccttctccacctgcagctcc

SEQ ID NO: 572229 - DNA, 120 bp, Artificial Sequence
  ENSG00000170929_6 (sequence is synthesized)
cacctgtctgtggttgctctcttctatgggaccaccattggcgtctatctgtgtccctcctcggtcctcaccactgtgaaggagaaagcttctgcggtgatgtacacagcagtcaccccc

SEQ ID NO: 572230 - DNA, 120 bp, Artificial Sequence
  ENSG00000170929_7 (sequence is synthesized)
atgctgaatcccttcatctacagcttgaggaacagagacctgaaaggggctctcaggaagctggtcaacagaaagatcacctcatcttcctgaccaccaggactcaggaacttctggggg

SEQ ID NO: 572231 - DNA, 120 bp, Artificial Sequence
  ENSG00000170929_8 (sequence is synthesized)
aaacatctaacttcatcatctagtacctgctgggaggacactgagccagtttaactcatgcctgggtgatggtgtcaagaagaggaaagatagcccaaggaatcacacccatggaaccaa

SEQ ID NO: 572232 - DNA, 120 bp, Artificial Sequence
  ENSG00000170929_9 (sequence is synthesized)
tagaatatatacatctgggagtcttgggctaacatctggaattgcatgagttgaagagtaggcactttgaattttattattattattattatttagagatggggtctcactatgttgccc

SEQ ID NO: 572233 - DNA, 120 bp, Artificial Sequence
  ENSG00000170929_10 (sequence is synthesized)
ctggagtgcagtggcgtgatcatagatcactgcagcttcaaacttctctctctgtgtgcattgttttactagagacagggtctcactaatttggccaggctggtctggaactcctgggct

SEQ ID NO: 572234 - DNA, 120 bp, Artificial Sequence
  ENSG00000170929_11 (sequence is synthesized)
caagcagtacttccccctcagcctcctaacatcctaggattacaggtgtgagctaccacgccgagcctcactttgaattttttgtttgtttttgttttttgagacagagtctcgttctgt

SEQ ID NO: 572235 - DNA, 120 bp, Artificial Sequence
  ENSG00000170929_12 (sequence is synthesized)
agtgcagtggcatgatcacggctcattgcagccttgacctccctggctgaagcaatcctcccacctcagccttccgagtagctaggaccataggcacataccaccatgctcagctaattt

SEQ ID NO: 572236 - DNA, 120 bp, Artificial Sequence
  ENSG00000170929_13 (sequence is synthesized)
ctcagctaatttttgtatcttttgtacagacagggttttgccatactacccagccgcagaagtttcacgggaagtctcaggatggtctggtaactgtttttctttttgttttcttttttg

SEQ ID NO: 572237 - DNA, 89 bp, Artificial Sequence
  ENSG00000170929_14 (sequence is synthesized)
tctcttgatcctcctgcctcaccctccagactagctggaactacaggcacccatcaccatacccggctaatttttgtatttttggtgga

SEQ ID NO: 572238 - DNA, 86 bp, Artificial Sequence
  ENSG00000170929_15 (sequence is synthesized)
cctcctgcctcaccctccagactagctggaactacaggcacccatcaccatacccgtaccatgtgggccaggctgttctcgacctc

SEQ ID NO: 572239 - DNA, 120 bp, Artificial Sequence
  ENSG00000170929_16 (sequence is synthesized)
acaggcgtgagccaccaagcctggctggaaaggccatttgaggacacagcgaaagggggtctatctgccacggaagaaagacttcaccaaaaaccaatcccaacggcacgtcgatcttgg

SEQ ID NO: 572240 - DNA, 120 bp, Artificial Sequence
  ENSG00000170929_17 (sequence is synthesized)
gatcttgggcttctgaccctcagaaccatgagacaatccacttcacttatttagccacgcagtctgcggtgttttgttataaccagccctggccgaataacacagtgactgtgaggggag

SEQ ID NO: 572241 - DNA, 120 bp, Artificial Sequence
  ENSG00000170929_18 (sequence is synthesized)
gagtcttaggaagatgtcaacacgtgaaggagtgaaatgccgccatgtggttctgtggctggaccgactctgtctccaaactccgttaggaaagataatcattctggggctctgttgccc

SEQ ID NO: 572242 - DNA, 65 bp, Artificial Sequence
  ENSG00000170929_19 (sequence is synthesized)
cagaggcatgcagcaccatgcccggctaatttatttttatttgtatatatttttttggtagagat

SEQ ID NO: 572243 - DNA, 87 bp, Artificial Sequence
  ENSG00000170929_20 (sequence is synthesized)
ccaagtagttgggaccagaggcatgcagcaccatgcccggctaatttatttttatttgtatatatccaggctgctctcaaactcctg

SEQ ID NO: 572244 - DNA, 120 bp, Artificial Sequence
  ENSG00000170935_0 (sequence is synthesized)
aggccctgtgggtcctatatgtgccctgcaacttggggaaaatggaggtggggttgtggtctctatgctgtagcagccggaaagccaaaaacaagccgtacttctcgctcttgacaggat

SEQ ID NO: 572245 - DNA, 120 bp, Artificial Sequence
  ENSG00000170935_1 (sequence is synthesized)
cccaaggttttcagtggtggtgtcactgctgccaagctggaccgaaaacggccatcggcatgctgcccaaccagcaccatgtccaaagacctgaaaattctatgtaaagaccctgctttg

SEQ ID NO: 572246 - DNA, 120 bp, Artificial Sequence
  ENSG00000170935_2 (sequence is synthesized)
gagctgagctgctaccgggaccatcagttcagtggccgtaaatttcagcaggaaaaattactgaaggaaagctccacattgaatatggggaatctttccttttatacaaccgaagagaaa

SEQ ID NO: 572247 - DNA, 120 bp, Artificial Sequence
  ENSG00000170935_3 (sequence is synthesized)
atacatgaactctttagtagatctgatatcaggaatatctttatgggcctggataaaataaagaaaacagcatgtggtttttgctttgtagaatgccataacagagctgatgctgaaaat

SEQ ID NO: 572248 - DNA, 120 bp, Artificial Sequence
  ENSG00000170935_4 (sequence is synthesized)
gccatgcggtttctaactgggacctgcctagatgaatggattatctgcactgattgggatgtcggttttagagagggtcaacagtatggtcgcggtaaatctgggggtcaggtaagggat

SEQ ID NO: 572249 - DNA, 120 bp, Artificial Sequence
  ENSG00000170935_5 (sequence is synthesized)
gagtttcgtgaagattttcattctggtagaggaggctttggaagacagactcagatctagaacaatccatagagaaaaagttttaactctaaccccttgaaaagtgtgttatagaccaac

SEQ ID NO: 572250 - DNA, 120 bp, Artificial Sequence
  ENSG00000170935_6 (sequence is synthesized)
ctcaagtctgcaaatagccaattccaagtttaaattaccttacttgttgatgtatttttttctctgaaaatttgttaaatagcagaaacaaaaaaaatccatttgtttttgtctgaattt

SEQ ID NO: 572251 - DNA, 120 bp, Artificial Sequence
  ENSG00000170935_7 (sequence is synthesized)
gcttttcagattaccagtttgactgttaggtggtccaaagtgaagtgttcttcgggaacaaattaggtatgtaagatcagagtcaaccaaagcacaacttcccttttaagaagatttctg

SEQ ID NO: 572252 - DNA, 120 bp, Artificial Sequence
  ENSG00000170935_8 (sequence is synthesized)
ttggattctatggccatgttcctgcagcccaaaattataattttttttagagcttgcataaaatacagtcaaataagtggaaattttaaaaagttatcaagagaaacacaagcactatta

SEQ ID NO: 572253 - DNA, 120 bp, Artificial Sequence
  ENSG00000170935_9 (sequence is synthesized)
tttgaaaccatagaaaagtctggaagaatttgtaataaaaacaaaaatcctcctgccccacctcttcctatcctacgcctattccctggacgataacgcttaattatttttattagtttt

SEQ ID NO: 572254 - DNA, 120 bp, Artificial Sequence
  ENSG00000170935_10 (sequence is synthesized)
tggtttgtttgtttcttggtagtttcctccatatctccaaataacatgactacttactttctttttaaacgctacgtactgacttcctactttcagagatgaggatttagctcacttaca

SEQ ID NO: 572255 - DNA, 120 bp, Artificial Sequence
  ENSG00000170935_11 (sequence is synthesized)
cccccatttgcacttctctactctccatcctctcaatatagttcacaacactttacagagggttcctgagttacaatggcttggcttacaatgtttggactttacaatggtataaaagtg

SEQ ID NO: 572256 - DNA, 120 bp, Artificial Sequence
  ENSG00000170935_12 (sequence is synthesized)
atgtgcattcagtagaaaccatgcttcaggtacccatacaactatttcgtttttgactttcagtatagtattcaacaaattgcatgagatacttaacactttattataaaataggctttg

SEQ ID NO: 572257 - DNA, 120 bp, Artificial Sequence
  ENSG00000170935_13 (sequence is synthesized)
ggttagatgattttgcccaagtgtaggctaatgtaaaatgtttaagataggttgtgctatgctatatttgagaggttagatgtattaaatgcattttcaacttaatatatacaataagct

SEQ ID NO: 572258 - DNA, 120 bp, Artificial Sequence
  ENSG00000170935_14 (sequence is synthesized)
tattaggatgtaaccccatcataagtcaatgagcatctgtacttactttctttactgttacatagcataacttaggttatactgcagtaataaaaaatcgaaaaattttagtgcttaaaa

SEQ ID NO: 572259 - DNA, 120 bp, Artificial Sequence
  ENSG00000170935_15 (sequence is synthesized)
agaatagggcttgcacctgccagtcctcccctcagctccgcggtactccaggcaacctcaaggtccagtcactgtagcctgagtcagacctccccagtacccctcctgaacttcctagtt

SEQ ID NO: 572260 - DNA, 120 bp, Artificial Sequence
  ENSG00000170935_16 (sequence is synthesized)
gccccttttgccagagatgagggtgcagcagaggctggtgggagcaaggaccgagttgccgccgtgtgccgagccacccacctgtggaagaagagcaggatggagagcatggtctggtcg

SEQ ID NO: 572261 - DNA, 120 bp, Artificial Sequence
  ENSG00000170946_0 (sequence is synthesized)
agttctggccgacagcaggcgaggagtgggtagcagcgcctatgtgaagttagctaatctgagaaggcccacttctggttccatggatgatggcggttgagcagatgccaaaaaaggatt

SEQ ID NO: 572262 - DNA, 120 bp, Artificial Sequence
  ENSG00000170946_1 (sequence is synthesized)
ggtacagcatcctgggagcagacccatctgcaaatatatcagacctaaaacaaaaatatcaaaaactcatattaatgtatcatccagataaacaaagtacagatgtaccagcaggaacag

SEQ ID NO: 572263 - DNA, 120 bp, Artificial Sequence
  ENSG00000170946_2 (sequence is synthesized)
tggaggaatgtgtacagaagttcatcgaaattgatcaagcatggaaaattctaggaaatgaagagacaaaaagagagtatgacctgcagcggtgtgaagatgatctaagaaatgtaggac

SEQ ID NO: 572264 - DNA, 120 bp, Artificial Sequence
  ENSG00000170946_3 (sequence is synthesized)
cagtagatgctcaagtatatcttgaagaaatgtcttggaatgaaggtgatcactctttttatctgagttgcagatgtggtggaaaatacagtgtttccaaggatgaagcggaagaagtta

SEQ ID NO: 572265 - DNA, 120 bp, Artificial Sequence
  ENSG00000170946_4 (sequence is synthesized)
gcctgatttcttgtgatacatgttcactaattatagaactccttcattataactaaaattgttcacaacttgaaatgctttaactgtggtattgagacatgatgagaagccgttgagctt

SEQ ID NO: 572266 - DNA, 120 bp, Artificial Sequence
  ENSG00000170946_5 (sequence is synthesized)
tgtccattcaaggaaatggattatttgtcagcccgattatttgcaaagaaaatatacaattatcaagcagagaccacctcagattaatagagaatgaatataattatttatttgtattta

SEQ ID NO: 572267 - DNA, 120 bp, Artificial Sequence
  ENSG00000170946_6 (sequence is synthesized)
taatttatatttacaagttgtcacaaaaatagatttgattatatttggtgaattcccatctgagaactttattatgtcatttttttccatgacacaaaataagaattttcttaatatgag

SEQ ID NO: 572268 - DNA, 120 bp, Artificial Sequence
  ENSG00000170946_7 (sequence is synthesized)
catgtctcctcttttcagtgggtaacagtatcatcatattcctttatagttactaagtttctggtctaaccgataacgtttctagttgctaaagttatggggctgttgtacacctagaat

SEQ ID NO: 572269 - DNA, 120 bp, Artificial Sequence
  ENSG00000170946_8 (sequence is synthesized)
ctttgtgaataatgtgaggccagttcttccataaggaaggctggttatggatattcataaggttatttcaaagttaataaagacaaagtggcaactgtagaaagtgttgcctccaatctt

SEQ ID NO: 572270 - DNA, 120 bp, Artificial Sequence
  ENSG00000170946_9 (sequence is synthesized)
ggtccgtatttccaaagcttgtaaacactgccatcttcaaatttaaatgtaatttaggaaatggaagcttttaattttaatttcttttttctaagacagagtctcactctgtcgcgccag

SEQ ID NO: 572271 - DNA, 73 bp, Artificial Sequence
  ENSG00000170946_10 (sequence is synthesized)
tttcttttttctaagacagagtctcactctgtcgcgccagctggagtgcagtgccatgatctcaggtcgctgt

SEQ ID NO: 572272 - DNA, 120 bp, Artificial Sequence
  ENSG00000170946_11 (sequence is synthesized)
tgcaggcgtgagccaccatgcctggccagaagcttttttaaaaataatgacttggaagttggtgcattatttccccttttattttggagtgttgatataatattggggccaggcatggtg

SEQ ID NO: 572273 - DNA, 66 bp, Artificial Sequence
  ENSG00000170946_12 (sequence is synthesized)
tggaagttggtgcattatttccccttttattttggagtgttgatataatattcaggcggatcacct

SEQ ID NO: 572274 - DNA, 63 bp, Artificial Sequence
  ENSG00000170946_13 (sequence is synthesized)
atggtgaaaccccatatctactaaaaataatttttttaaaaattagccagtcacgttggtgtc

SEQ ID NO: 572275 - DNA, 70 bp, Artificial Sequence
  ENSG00000170946_14 (sequence is synthesized)
tatagtattaatgcctgtatttatgaagacagggccattgcactgctgctatgctgaaatgaacttttat

SEQ ID NO: 572276 - DNA, 120 bp, Artificial Sequence
  ENSG00000170946_15 (sequence is synthesized)
agggccattgcactgctgctatgctgaaatgaacttttataaagtattattgactatagccaactacagatggcatatgccttaaagatgcatttttctatgtatttaatattttgtgta

SEQ ID NO: 572277 - DNA, 120 bp, Artificial Sequence
  ENSG00000170946_16 (sequence is synthesized)
cagtaaaagtcagaactcatttaaagaactttaagggatcctttagaaacatttttacttaatttcaaatgagtgggctgagcatgtagactagcagctttttatcaaacctggcattgt

SEQ ID NO: 572278 - DNA, 120 bp, Artificial Sequence
  ENSG00000170946_17 (sequence is synthesized)
caggttgaacttataaatacgaatagttactactctgacttgtaaatgtagctgctaaagtatgaggtatatttaagaagaatagattagtttcattatacctataagaacaagaattca

SEQ ID NO: 572279 - DNA, 120 bp, Artificial Sequence
  ENSG00000170946_18 (sequence is synthesized)
aaagtgaggtagtcatccaggttccccctcccacaatatttttgtatcataaaatttagatgacttttttgggttacatttttatccatatattttgaactaacagaacttggcagaatg

SEQ ID NO: 572280 - DNA, 120 bp, Artificial Sequence
  ENSG00000170946_19 (sequence is synthesized)
tgtgttgaatattctttacatttaacaattaaaaacaactaaaactgaatagcaaatagtttattggtaagtacacggtttcaacgggagtaataaattcacatgaaaaggagacaataa

SEQ ID NO: 572281 - DNA, 120 bp, Artificial Sequence
  ENSG00000170946_20 (sequence is synthesized)
tcaagtcaaaagaataaatgcttactaatcatcagaaaatctgtggccattagggctggcacgtaaaaatccaaaatcactcagaggccaaatctgtaaaatcaaaatgaggttgaagac

SEQ ID NO: 572282 - DNA, 120 bp, Artificial Sequence
  ENSG00000170946_21 (sequence is synthesized)
aattagtgaaagtaatgttatagtatcatcatattcccttttgctatctgtcccttttctctatgccagataaacactttctccttactcatcaatcaagaataaaattttctacatcaa

SEQ ID NO: 572283 - DNA, 120 bp, Artificial Sequence
  ENSG00000170946_22 (sequence is synthesized)
agtaagacttgagaaaataaacttatgtgtatatatgtttaaactccaaagtttgggacattcaaacaatgtacatgaaattatatgtgtgtggtgtgtgaataaatatgtatgaatata

SEQ ID NO: 572284 - DNA, 120 bp, Artificial Sequence
  ENSG00000170946_23 (sequence is synthesized)
ctacagaaaatacaaaaattagccaggttattggattttttccccctctttttggtgtacatacttggaaggacgcatctgtcacaggaaaatttttgtgaagcactcatcttctgactt

SEQ ID NO: 572285 - DNA, 120 bp, Artificial Sequence
  ENSG00000170946_24 (sequence is synthesized)
acttgcccatgaattccttgttttaagcagtcaaggcaaacagtgtgcttctcaaattttagcacgcgtaacagttgcttggagagcttggtgaaacagagattctggagtcctccctct

SEQ ID NO: 572286 - DNA, 120 bp, Artificial Sequence
  ENSG00000170946_25 (sequence is synthesized)
ccttgacccatgtgaactgatgacagaatagagccacacagcatgtgaagtgatttgacctgtagcaatctttgaaccagtgttttgtctacacctatcctcagaggctatccagctgtt

SEQ ID NO: 572287 - DNA, 120 bp, Artificial Sequence
  ENSG00000170946_26 (sequence is synthesized)
ttcatttttaataattcagccaagagtgtggaacatttttctcttgagattttcaatagctagtctgaagatatgtttttgagagcttcaaatagtgttccagaagagaatgttagaatc

SEQ ID NO: 572288 - DNA, 120 bp, Artificial Sequence
  ENSG00000170946_27 (sequence is synthesized)
gggaagaataagcatattagatacttaaaggaaagtatctgaaaaagaaaatagagaatataagcatataattttcagtttactaaagaatactgtttttaggaataatagtcatgaaaa

SEQ ID NO: 572289 - DNA, 120 bp, Artificial Sequence
  ENSG00000170946_28 (sequence is synthesized)
ttataagggaaaaaaagagtttttaaaaagcctctgttacccagtttaatgcatcttttagttcagacatgattacttcacaatcacagtgacttttgcacactatcttgtaatttttaa

SEQ ID NO: 572290 - DNA, 120 bp, Artificial Sequence
  ENSG00000170946_29 (sequence is synthesized)
gtcctgccagtgttttcttagatcccactgttgagacaatggagccacagaattctttcacctcttgttgtcagacaaatccaatagaacacaaggtcagaagggcctatacttctaaag

SEQ ID NO: 572291 - DNA, 120 bp, Artificial Sequence
  ENSG00000170946_30 (sequence is synthesized)
gttgaaagattctttttcaaaagatgatctaagaaatgtaggaccagtagatgctcaagtatatcttgaagaaatgtcttggaatgaaggttggattttttttttctcttgacaacattt

SEQ ID NO: 572292 - DNA, 120 bp, Artificial Sequence
  ENSG00000170946_31 (sequence is synthesized)
aaaaaaaaaaggaattttctataagaaaaaaaaactcattggatatttggaaatcttaaaaagaaataatagtgtggctttctatatatatgtggtaagtgtttctgtctggagtatttc

SEQ ID NO: 572293 - DNA, 120 bp, Artificial Sequence
  ENSG00000170946_32 (sequence is synthesized)
tgcttaattctaaactttatttattgactgatgtccccctatatgactcatttccagttatttttatattctaattagatgttaggaacataaagtttcataagagtttttttgttgtgt

SEQ ID NO: 572294 - DNA, 120 bp, Artificial Sequence
  ENSG00000170946_33 (sequence is synthesized)
ttttttactttagtttttgcattactgtctatgtagtattgtagtatggtaaataatgtcaaacaagatagttttttttttccgttccttttaatgttgacaagatgaattcctattaga

SEQ ID NO: 572295 - DNA, 120 bp, Artificial Sequence
  ENSG00000170946_34 (sequence is synthesized)
atttttattttccctttatataaaatcataaactgtcaggacagggcttttaagaggcttgatttttttttttttttttttaacgctcacatactgattgtcttataagaagaaaagaat

SEQ ID NO: 572296 - DNA, 120 bp, Artificial Sequence
  ENSG00000170946_35 (sequence is synthesized)
atgtcttttttgcttttctgttattaaaattttagaacttaaattcaatgtcgtttccctattcttctgatggttccttgaattgttctggttagacatcattacattgggaaacacact

SEQ ID NO: 572297 - DNA, 120 bp, Artificial Sequence
  ENSG00000170946_36 (sequence is synthesized)
ttactaaacagaagccatgagtaccatacttacttgtttctctgggcaaatgaagaaaatcttactatttcctagaatctttatatatgcttaaccttttaaccttattgttcagcatga

SEQ ID NO: 572298 - DNA, 120 bp, Artificial Sequence
  ENSG00000170946_37 (sequence is synthesized)
gtacaaattccctccaggtttataaaaatctactaatgagtgtggataggtagaagacaaaaacagagccatctgaaaccaaatttactttttaaatggcaaattcttaacttagtgccc

SEQ ID NO: 572299 - DNA, 120 bp, Artificial Sequence
  ENSG00000170946_38 (sequence is synthesized)
ctaagacgtgggtcacaagcctaacttagaaagggaatcatgtctttgcctctggggccattctgtccccaacccctcaagtgaaatcctagagtagaaattcagtgaataattggaaaa

SEQ ID NO: 572300 - DNA, 120 bp, Artificial Sequence
  ENSG00000170946_39 (sequence is synthesized)
gttgaggttttgtgtaactggggctcttggtggtgacagtctcatcagagtaaacacgaagaaatactgtgaaaacaatacactagtgatacagattttcactgctggtgtgtggaaggg

SEQ ID NO: 572301 - DNA, 120 bp, Artificial Sequence
  ENSG00000170946_40 (sequence is synthesized)
acactctagaatatgtcatttatcaggaagacttgcccagttaaaaaaaatatatgcacatatgtatatatacacacatatactttttattttttgccaaatacacaaacttcaaggaga

SEQ ID NO: 572302 - DNA, 120 bp, Artificial Sequence
  ENSG00000170946_41 (sequence is synthesized)
ctaaatatgttttgaaaatatagtttgtctccttatctattggtatgtatatgtatgtttgtatgtgtttaatgtcttaataaattagttcttgctatagtcgatatgggtaatatattt

SEQ ID NO: 572303 - DNA, 120 bp, Artificial Sequence
  ENSG00000170946_42 (sequence is synthesized)
tgtttatgactgtgaaaatagtgaaaactggtttttataaatttttttttaccttttaaatatataacaatataatgttaagatcttaattttaaatgagaatacgggctggaagcctgg

SEQ ID NO: 572304 - DNA, 78 bp, Artificial Sequence
  ENSG00000170946_43 (sequence is synthesized)
ctggaatcccagcactttgggaggctgagtttggagaatcgcatgtgagaacagattgtgagaataggaaaaaaaaaa

SEQ ID NO: 572305 - DNA, 120 bp, Artificial Sequence
  ENSG00000170946_44 (sequence is synthesized)
aagatgatctaagaaatgtaggaccagtagatgctcaagtatatcttgaagaaatgtcttggaatgaagttacttctcagagacagtaaaatggaatgaccaatggatcagagattcttt

SEQ ID NO: 572306 - DNA, 120 bp, Artificial Sequence
  ENSG00000170946_45 (sequence is synthesized)
ctttgggcatctcacttcagcatcttgttggttcatgtatcatttgtaaacatcaaacacacacacacatacccccataggatttaaaaaaacaacaacaacatggtgttgtgtttatag

SEQ ID NO: 572307 - DNA, 120 bp, Artificial Sequence
  ENSG00000170946_46 (sequence is synthesized)
acttaagtcaagattcttgaaatagtgtgacactagaagagaaagtatccagatgttgcatttgataaatagtctggctttctctaaaggatagacttcaggcaaaagcatcatcctccc

SEQ ID NO: 572308 - DNA, 120 bp, Artificial Sequence
  ENSG00000170946_47 (sequence is synthesized)
gtgcttgtgttgaggagccacagcacatcggcaactcttagaagcacactctgcagccattcctggggagcattttccagcatttgcaccaagtgttattgttgcctttattcctcccct

SEQ ID NO: 572309 - DNA, 120 bp, Artificial Sequence
  ENSG00000170946_48 (sequence is synthesized)
ccatcactgtttttaattatgccctattcttagcagtgactattgtgtatccattgagaagttaacaaaactactaggatgtggcttcttgtgaagccttgaaagctactttttataaca

SEQ ID NO: 572310 - DNA, 120 bp, Artificial Sequence
  ENSG00000170946_49 (sequence is synthesized)
gtggcttcttgtgaagccttgaaagctactttttataacatttgaaaaatgtttaattacacattactaactaatatgctttatatgtttaaaaactttttattaaaataaatatggatt

SEQ ID NO: 572311 - DNA, 120 bp, Artificial Sequence
  ENSG00000170946_50 (sequence is synthesized)
acaatccaaatgaagatactatatatcagatgacatcataaagcactctgctgtctttgagctcattttaggctgggtttcatgattatcttcatgataaactattccttgtgattggta

SEQ ID NO: 572312 - DNA, 120 bp, Artificial Sequence
  ENSG00000170946_51 (sequence is synthesized)
taaatgatattttaggaatgcacattacctaagcaattttaaaagtcatttcttttatgctttttagaaaatagctttttaaaacagtgacaagctgttatgagaaagaaagagggaaat

SEQ ID NO: 572313 - DNA, 120 bp, Artificial Sequence
  ENSG00000170946_52 (sequence is synthesized)
gtaggtcaggtttgtcacacatggactgcagttacacgaagtgataggctgtctttcagcactggcctagggacaggagtccctcagccttgtgtttgaaccttcaatatgcaccccaca

SEQ ID NO: 572314 - DNA, 120 bp, Artificial Sequence
  ENSG00000170946_53 (sequence is synthesized)
tgctaatgggaggagtcaataatcagttacagcctgtggggaaaacactcagtcgctctctccaatagcatatcaggctcagcattgactgggatgtgttgataaaagctgtctcgtagt

SEQ ID NO: 572315 - DNA, 120 bp, Artificial Sequence
  ENSG00000170946_54 (sequence is synthesized)
cgcttattgaatcccctcccatgccctacaatggcacaccatcagacctcacaaaatgattctgaggctttgttagtactaaggttatgaaaatttgatttgagaagcaagcctttattt

SEQ ID NO: 572316 - DNA, 120 bp, Artificial Sequence
  ENSG00000170946_55 (sequence is synthesized)
tgatacttctgtgtggaaagacttgaactgtttatgtactggagtatttgtttataagagtgacttatttatagtactaatcagctcaaaggctttactactttttaaaagactgatgag

SEQ ID NO: 572317 - DNA, 120 bp, Artificial Sequence
  ENSG00000170946_56 (sequence is synthesized)
cttatttttttcttaaatattaagaacctgatgggtgtacctttgcttttcaaagcaaaggttaattttcaaaaatggcttgaatattgggttctgcttttgctgggtgcataatgagca

SEQ ID NO: 572318 - DNA, 120 bp, Artificial Sequence
  ENSG00000170946_57 (sequence is synthesized)
tctgtctaatgtatttattttttaaacatgtttgtactttttgcaaaagaatgtagaagtggcttcgtttgatgataagttctacccgttggtgtatctttttaaccttggttcacatga

SEQ ID NO: 572319 - DNA, 120 bp, Artificial Sequence
  ENSG00000170946_58 (sequence is synthesized)
tttctatgaaagaattgaaactaatgcacatgaatgtgttgtgtgttagaagaaatctacattcctaaagccactacgctctactgaagatgatgattctttcaggtgtttttgcacatc

SEQ ID NO: 572320 - DNA, 120 bp, Artificial Sequence
  ENSG00000170946_59 (sequence is synthesized)
tttactagtctctactatataggatgccagtttgcttgagataaaaataattcacacgacattgtaccctaaagagtatagggtatatactttcaatgttgctctacatttttgccactc

SEQ ID NO: 572321 - DNA, 120 bp, Artificial Sequence
  ENSG00000170946_60 (sequence is synthesized)
cacagcctgtgtactattaagaacatattagtgaagttgactagaagcctgctctctaaagaggtagggagggatcaggaatcataaaaatattttctcaagaagctacagggtggggta

SEQ ID NO: 572322 - DNA, 120 bp, Artificial Sequence
  ENSG00000170946_61 (sequence is synthesized)
ggccagaaaccaaaagaaataggaaaccaggttaaaagttagcagagaattgcatgaagaaagatttgagagatgtcagaagacaaataatcatcatattcatgcctttttcattgtctt

SEQ ID NO: 572323 - DNA, 120 bp, Artificial Sequence
  ENSG00000170946_62 (sequence is synthesized)
cgaaaggtccttggaactgcggatttcttttgagctttgagtcctacttttaagatcttaatggaagcacctgtggcctactgtgtcacagggtactcctgtaggtcatagatgaagtca

SEQ ID NO: 572324 - DNA, 120 bp, Artificial Sequence
  ENSG00000170946_63 (sequence is synthesized)
caatgaagtttagacaaagtaaatactgtgagagttggacctgattcatgattcagataaatagtttggaatttatacaatatcagtttgctctgcaagtttttcaggcagcatattact

SEQ ID NO: 572325 - DNA, 120 bp, Artificial Sequence
  ENSG00000170946_64 (sequence is synthesized)
gaatttagctgttctagaaggacagcttttcatgacactttagtacctcagatttaagtactaagtattgcctcttttaccagaggctccaaatactgacactactttgtttcaatttta

SEQ ID NO: 572326 - DNA, 120 bp, Artificial Sequence
  ENSG00000170946_65 (sequence is synthesized)
aatggagattgacatactgtttaggtaagaagagtatccaaatataacttgctatttttaagcctttcataccagagctatttttcaaaactcttacaataaacctactttcatattgtt

SEQ ID NO: 572327 - DNA, 120 bp, Artificial Sequence
  ENSG00000170946_66 (sequence is synthesized)
taaaacaaaaatatcaaaaactcatattaatggatctattcctctatgtgatataaatgtcactgtgcttctgagttttatttgaccctcttcacttacaaggaaatcaaggattcttca

SEQ ID NO: 572328 - DNA, 120 bp, Artificial Sequence
  ENSG00000170946_67 (sequence is synthesized)
tctgaggctcaggggactttggagtatcatccagataaacaaagtacagatgtaccagcaggaacagtggaggaatgtgtacagaagttcatcgaaattgatcaagcatggaaaattcta

SEQ ID NO: 572329 - DNA, 120 bp, Artificial Sequence
  ENSG00000170948_0 (sequence is synthesized)
tccttgtcctgagaaggcaggcttcattgatcaatttgaccccatttcatgatttattttaatagtgtaagaggaaaagaagtgtgatggccaagagttcacagaggaagcaacgtgact

SEQ ID NO: 572330 - DNA, 120 bp, Artificial Sequence
  ENSG00000170948_1 (sequence is synthesized)
gtgtaaaccaatgcaaatcaaagcctggcttgagcacctcaatccctttgagaatgtccagttacacattcaagaggccagtaacgagaattacaccccatcctggcaatgaggtcagat

SEQ ID NO: 572331 - DNA, 120 bp, Artificial Sequence
  ENSG00000170948_2 (sequence is synthesized)
accatcaatgggaggagagcttggagaagcctcagcaggtctgctggcagaggagactgcagggactccaggcttacagcagtgcaggagaactttcaagcactttggatcttgccaata

SEQ ID NO: 572332 - DNA, 120 bp, Artificial Sequence
  ENSG00000170948_3 (sequence is synthesized)
aggtggatctctgctggaggatcttgccagtggtctggagcactcctgccccatgccccaccttgcctgctcttcagatgcggtggagataattcctgcagagggagtgggtatctcgca

SEQ ID NO: 572333 - DNA, 120 bp, Artificial Sequence
  ENSG00000170948_4 (sequence is synthesized)
gctcctctgcaaacaatttctggttactgaggaagatatcaggaaacaggaagggaaagtgaagacagtcagagagagactcgcaatagcactgattgcggatggactcgctaatgaggc

SEQ ID NO: 572334 - DNA, 120 bp, Artificial Sequence
  ENSG00000170948_5 (sequence is synthesized)
agagaaagtgagagaccaagaaggccgtcctgaaaaacgctaagaaaaaaagggaagatagtgcagatgaaataaagtgtaatcctttattaacatctctttgcagtgtccccaatgagg

SEQ ID NO: 572335 - DNA, 120 bp, Artificial Sequence
  ENSG00000170948_6 (sequence is synthesized)
gttcggcgcttaggcgacaggcgcggcgggcgggagcggcggccgcgaaccccagccttgggcagaggtgttctagtttgcttagtgggcacaaagttgggccctggcctggggcagtag

SEQ ID NO: 572336 - DNA, 120 bp, Artificial Sequence
  ENSG00000170948_7 (sequence is synthesized)
cggggtgatcatatgacggtggtagccatggcgtcacagagaacagggaccttccaagtttgaagttttacaaggcaggtgtgataagtgtgtaagaggaaaagaagtgtgatggccaag

SEQ ID NO: 572337 - DNA, 120 bp, Artificial Sequence
  ENSG00000170949_0 (sequence is synthesized)
gcagttgcccacagacccggaagtggatcgtgcggagcaagcatcacaccatggcgtatgagtgttcctctgtgtagactcaacctgcgcctcgccgtcccccattcgcacacccgatgc

SEQ ID NO: 572338 - DNA, 120 bp, Artificial Sequence
  ENSG00000170949_1 (sequence is synthesized)
ccgggggtcgctacggacttaaaatctccgcaccgcaccctccacctcagaaacgttcctggatccgaacactgccccctgacgacctagagagatcccggctcccagcccactgagtgg

SEQ ID NO: 572339 - DNA, 120 bp, Artificial Sequence
  ENSG00000170949_2 (sequence is synthesized)
cccactgagtggcttcagcctcgctggaagaagtctggaagaagaggaagaggaaagaaaaggagtcagggatggcccttactcaggtacggttgacatttagggatgtggccatagaat

SEQ ID NO: 572340 - DNA, 120 bp, Artificial Sequence
  ENSG00000170949_3 (sequence is synthesized)
gaaatgcctggaccctgctcagaggatcttatacagggacgtgatgttggagaactactggaaccttgtttctctgggactgtgtcattttgatatgaatattatctccatgttggagga

SEQ ID NO: 572341 - DNA, 120 bp, Artificial Sequence
  ENSG00000170949_4 (sequence is synthesized)
aggaagggaaagagccctggactgtgaagagctgtgtgaaaatagcaagaaaaccaagaacgccggaatgtgtcaaaggcgtggtcacagatatccctcctaaatgtacaatcaaggatt

SEQ ID NO: 572342 - DNA, 120 bp, Artificial Sequence
  ENSG00000170949_5 (sequence is synthesized)
tgctaccaaaagagaagagcagtacagaagcagtattccacacagtggtgttggaaagacacgaaagccctgacattgaagacttttccttcaaggaaccccagaaaaatgtgcatgatt

SEQ ID NO: 572343 - DNA, 120 bp, Artificial Sequence
  ENSG00000170949_6 (sequence is synthesized)
ttgagtgtcaatggagagatgacacaggaaattacaagggagtgcttatggcccagaaagaaggtaaaagagatcaacgcgacagaagagacatagaaaacaagcttatgaacaatcagc

SEQ ID NO: 572344 - DNA, 120 bp, Artificial Sequence
  ENSG00000170949_7 (sequence is synthesized)
ttggagtaagctttcattctcatctgcctgaactgcagctatttcaaggtgaggggaaaatgtatgaatgtaatcaagttgagaagtctaccaacaatggttcctcagtgtcaccacttc

SEQ ID NO: 572345 - DNA, 120 bp, Artificial Sequence
  ENSG00000170949_8 (sequence is synthesized)
aacaaattccttctagtgtccaaacccacaggtctaaaaaatatcatgaacttaaccatttttcattactcacacaaagacgaaaagcaaacagttgtggaaaaccttataaatgtaatg

SEQ ID NO: 572346 - DNA, 120 bp, Artificial Sequence
  ENSG00000170949_9 (sequence is synthesized)
aatgtggcaaggcgttcactcagaattcgaaccttacaagtcataggagaattcatagtggagagaagccttacaaatgcagtgagtgcggcaaaacctttactgttcgttcaaatctaa

SEQ ID NO: 572347 - DNA, 120 bp, Artificial Sequence
  ENSG00000170949_10 (sequence is synthesized)
ctattcatcaggtcatccatactggagaaaaaccttacaaatgtcatgagtgtggcaaggtcttcaggcacaattcataccttgcaactcatcggcgaattcatactggagagaaacctt

SEQ ID NO: 572348 - DNA, 120 bp, Artificial Sequence
  ENSG00000170949_11 (sequence is synthesized)
acaagtgtaatgagtgtggaaaagcctttagaggacattcaaacctaactacccatcagttaattcatactggagaaaaaccgttcaaatgtaatgaatgtggcaagctcttcactcaaa

SEQ ID NO: 572349 - DNA, 120 bp, Artificial Sequence
  ENSG00000170949_12 (sequence is synthesized)
tcacactggagagaaaccttacaagtgcaatgagtgcggcaaagcctttagtgttcgttcaagcctagcaatccatcagacaatccacactggagaaaaaccttacaaatgtaatgaatg

SEQ ID NO: 572350 - DNA, 120 bp, Artificial Sequence
  ENSG00000170949_13 (sequence is synthesized)
ccacactggagaaaaaccttacaaatgtaatgaatgtggcaaagtctttaggtacaattcatacctcggaaggcatcggagagttcatactggtgagaaaccttacaagtgtaatgaatg

SEQ ID NO: 572351 - DNA, 120 bp, Artificial Sequence
  ENSG00000170949_14 (sequence is synthesized)
ccttcagtatgcattcaaacctagctacccatcaggtcatccatactggaacaaaacctttcaaatgcaatgaatgcagcaaggttttcactcaaaattcacaacttgcaaatcatcgaa

SEQ ID NO: 572352 - DNA, 120 bp, Artificial Sequence
  ENSG00000170949_15 (sequence is synthesized)
aatgagtgtgggaaagccttcagtgttcgttcaagtctgactacccatcaggcaatccattctggagagaaaccttacaaatgtattgaatgtggcaagagcttcactcaaaaatcacac

SEQ ID NO: 572353 - DNA, 84 bp, Artificial Sequence
  ENSG00000170949_16 (sequence is synthesized)
caggcaatccattctggagagaaaccttacaaatgtattgaatgtggcaagagcttcactcaaaaatcacaccttagaagtcat

SEQ ID NO: 572354 - DNA, 120 bp, Artificial Sequence
  ENSG00000170949_17 (sequence is synthesized)
tactggagaaaaaccttacaagtgtaatgactgtggcagagcctttagtgatcgttcaagcctaacttttcatcaggcaatacatactggagagaaaccttacaaatgtcatgaatgcgg

SEQ ID NO: 572355 - DNA, 81 bp, Artificial Sequence
  ENSG00000170949_18 (sequence is synthesized)
tacatactggagagaaaccttacaaatgtcatgaatgcggcaaggtttttaggcacaattcataccttgcaactcatcggc

SEQ ID NO: 572356 - DNA, 120 bp, Artificial Sequence
  ENSG00000170949_19 (sequence is synthesized)
taaggtcatccatactggagagaagccttacaaatgtaatcaatgtggcaaggtcttcactcagaactcacaccttgcaaatcatcaaaggactcacaccggagagaaaccttaccgatg

SEQ ID NO: 572357 - DNA, 120 bp, Artificial Sequence
  ENSG00000170949_20 (sequence is synthesized)
caccggagagaaaccttaccgatgcaatgagtgtgggaaagccttcagtgttcgttcaagcctaaccacccatcaggcaatccatactgggaaaaaaccttacaaatgtaatgaatgtgg

SEQ ID NO: 572358 - DNA, 120 bp, Artificial Sequence
  ENSG00000170949_21 (sequence is synthesized)
cctggcaaatcaccgaagaattcatactggggagaaaccttacaggtgtacagagtgtgggaaagcctttagggtaagatcaagtctaactacccatatggcaatccacactggagaaaa

SEQ ID NO: 572359 - DNA, 120 bp, Artificial Sequence
  ENSG00000170949_22 (sequence is synthesized)
gcgttacaaatgtaatgagtgtggcaaggtcttcaggcagagttcaaatcttgcaagtcatcacagaatgcataccggagagaaaccttacaaatgagtgtggtgaggtcattaggtaca

SEQ ID NO: 572360 - DNA, 120 bp, Artificial Sequence
  ENSG00000170949_23 (sequence is synthesized)
attcactcctttcacatcagttaatttcattcttgacagaatccttacaaatgtagtgacagtggccaatccctcatgagttgaagcattaatagatatgagaggccataagcaagagac

SEQ ID NO: 572361 - DNA, 120 bp, Artificial Sequence
  ENSG00000170949_24 (sequence is synthesized)
atcatgtaaacatatgtggcagagggtctatccaggcctcgcaggttactaggcatcaagatttatatctttgatgaaacgaaacaaatgtaatatgcatcctgaggccattacccagtg

SEQ ID NO: 572362 - DNA, 120 bp, Artificial Sequence
  ENSG00000170949_25 (sequence is synthesized)
accgatggtaagtgaggattcctaggaggaataacagtctctggtttccctgtttgcctttgatattatacactgtagaatactcacaagtccaaatatgctaaaaattatatattttta

SEQ ID NO: 572363 - DNA, 120 bp, Artificial Sequence
  ENSG00000170949_26 (sequence is synthesized)
actcacatacgaaaaggttgcaggatatttgtaggcagtcagttaccttcaccttatgaaatgtttcactgagttatttgaggttttttggaaagcctactattgcgtttcaatgtgaac

SEQ ID NO: 572364 - DNA, 120 bp, Artificial Sequence
  ENSG00000170949_27 (sequence is synthesized)
tttgaaatcttattgtgcatccttacacaccttccatggtgctttcttggaaagatcattgggatggaaggatcattgattgggtgaagatcattgattaggtgaaggattatttctatc

SEQ ID NO: 572365 - DNA, 120 bp, Artificial Sequence
  ENSG00000170949_28 (sequence is synthesized)
caatttgtgaagaaggaggactttgcttttaaaattaagtatcatctgaattagcatttgggagtggcgaaaaacaatgtaaaactatgatgtcactcaccattctgataatgttcaggg

SEQ ID NO: 572366 - DNA, 120 bp, Artificial Sequence
  ENSG00000170949_29 (sequence is synthesized)
tgcctttctcctaccaggagagtactgtggcttagaggaaagaaatggtctatcaactgaacatgaaatggagcaggccaagaccttaggacattgggatttttgtgggaggagagtaat

SEQ ID NO: 572367 - DNA, 120 bp, Artificial Sequence
  ENSG00000170949_30 (sequence is synthesized)
aggtaattagacactgattgtgtggtagaaatactgcaggggaaaaggtcgccctcttatgcatcaaagagcaatacctgttgtttagcaaagagtgatgaaaaattgatcttgttttga

SEQ ID NO: 572368 - DNA, 120 bp, Artificial Sequence
  ENSG00000170949_31 (sequence is synthesized)
gggcaacaagaacaaaactccatctaaagaagaaaaagaaaaactgaagagagagtagttgtcagagtgaagagtttaatcaacagaagtagagtaacatattctttagtagaactcaca

SEQ ID NO: 572369 - DNA, 120 bp, Artificial Sequence
  ENSG00000170949_32 (sequence is synthesized)
agtaacatattctttagtagaactcacattatctgcttgaagcacattttgctaatgttttattcagaatgtatcatagatataatgttttaactaataaaatagaatggtttttctcta

SEQ ID NO: 572370 - DNA, 120 bp, Artificial Sequence
  ENSG00000170949_33 (sequence is synthesized)
cttcagcctcgctggcacctcccaactcctggcctctctgcacgaggcgcctgccccgggccccgcctacaggggacccagctcttcttgcagccactggaagctgatcacctggagtga

SEQ ID NO: 572371 - DNA, 120 bp, Artificial Sequence
  ENSG00000170949_34 (sequence is synthesized)
gaagaagtctggaagaagaggaagaggaaagaaaaggagtcagggatggcccttactcaggtaaagtgatactcctggtggattgttcttttatttcttcctgaaatgcctggcattggc

SEQ ID NO: 572372 - DNA, 120 bp, Artificial Sequence
  ENSG00000170949_35 (sequence is synthesized)
attgcgaatcttctctgagtctgaagcgtcctgcctgacatgtttgctagcactcacccgcgccttccctcagtccctctcatctcgtttagattccatctcccgtgatccagtgacatg

SEQ ID NO: 572373 - DNA, 120 bp, Artificial Sequence
  ENSG00000170949_36 (sequence is synthesized)
tgggaagggctcacacccagacatggatggagacggggtgagggtcctgtggtgtcagtgctgttgggcagcagggattgctcaggggccgcatctggatgcactgtcagcgctgtgtaa

SEQ ID NO: 572374 - DNA, 120 bp, Artificial Sequence
  ENSG00000170949_37 (sequence is synthesized)
ccgcatctggatgcactgtcagcgctgtgtaaaccatgataacagaagctgcccatgaagtcaggtgcacacgtacctgctcactggcatagaaaagaacactaaggggaaagctttcct

SEQ ID NO: 572375 - DNA, 120 bp, Artificial Sequence
  ENSG00000170949_38 (sequence is synthesized)
tccgactccaaactcgtaaagactgggaacagaatggaaagtttagacactgacattggagatagatgattctttcattccatcatccattttaatgtatgacgtcaacataaatgtgta

SEQ ID NO: 572376 - DNA, 120 bp, Artificial Sequence
  ENSG00000170949_39 (sequence is synthesized)
acaagattcattaaactagtctcagaagctctatcccatggagactgtgatgttcttacaagaacctttgtccgtcgggtattgtaggtgagaatggcatataagcagaacaaccttgcc

SEQ ID NO: 572377 - DNA, 120 bp, Artificial Sequence
  ENSG00000170949_40 (sequence is synthesized)
attagagagaatggaactgtatttttgttttaccagttatgagtcaacattttgtttcttttattttgaacatggcatcatgtatatatttcttttatagtgaaatgatacatttatgtg

SEQ ID NO: 572378 - DNA, 120 bp, Artificial Sequence
  ENSG00000170949_41 (sequence is synthesized)
ccaagaggtaaagcatcccttttcctgtccagccttccaccctccctcacatcttagtggggagccactgttctcaattctgtgggaagggtcagtgcaagtcctgtagaaatgtatttt

SEQ ID NO: 572379 - DNA, 120 bp, Artificial Sequence
  ENSG00000170949_42 (sequence is synthesized)
gacatcattatgagatttaaacaaattcctcagtgaatgtttggttgtgatatgttaacctgcaagttttgaacattgacatgttttcgtgttaggaaacaggagctcacttttctacat

SEQ ID NO: 572380 - DNA, 120 bp, Artificial Sequence
  ENSG00000170949_43 (sequence is synthesized)
acttttctacatccttgttggagcatgctgggaatgaagacaggtggatcttttaactttctcacttctataaagaatgccacacagggtgctgcatggtggctcacacctgtaatccca

SEQ ID NO: 572381 - DNA, 85 bp, Artificial Sequence
  ENSG00000170949_44 (sequence is synthesized)
ggctcacacctgtaatcccagcacttgtggaagccaaggtgggaggatcatttgagccccagagatttcagcctgagtgatagaa

SEQ ID NO: 572382 - DNA, 120 bp, Artificial Sequence
  ENSG00000170949_45 (sequence is synthesized)
atttgattccattctgacactgtctatctggatatagggtcagctcccataggctgagggctcaatcccacaacagcgcacacacattaatgccagtcacaaacacaagttgtggcctgt

SEQ ID NO: 572383 - DNA, 120 bp, Artificial Sequence
  ENSG00000170949_46 (sequence is synthesized)
gcttctcaatgaccagctgtgaattgtgaattctgatgaccccctccttgaaattgattagtttgcttgagtggctcacataacacagggaaacacttatatttacccatttattataga

SEQ ID NO: 572384 - DNA, 120 bp, Artificial Sequence
  ENSG00000170949_47 (sequence is synthesized)
agatgctacaaagcacacagatgaacatctagatggaagtgatctattagttgagatatgggaaaggagtgaggagctgggatgtattctctcatgtattctgtcttttttgagttttca

SEQ ID NO: 572385 - DNA, 120 bp, Artificial Sequence
  ENSG00000170949_48 (sequence is synthesized)
tggaggccccattatggaggccttgcttccattattggcattggtgatcaactgaactttcattccctctgtcctcccgagaggacagaggcttagtctaaccgagcctcagcctttcca

SEQ ID NO: 572386 - DNA, 120 bp, Artificial Sequence
  ENSG00000170949_49 (sequence is synthesized)
gtgaccacccaccgagccttagttccggtgaccgccctccatcctgaagctacctaggtgctccagacaccaattatcccattaatgtacaaaaagatacttatcactccactgatttca

SEQ ID NO: 572387 - DNA, 120 bp, Artificial Sequence
  ENSG00000170949_50 (sequence is synthesized)
agtgagctcttatgtcaggagagggggatgaagaccaaatctgtatgtcacattgtcacaatctggatctgtcagctcacccacttcaatttaacctattctcacatttttctcctcttc

SEQ ID NO: 572388 - DNA, 120 bp, Artificial Sequence
  ENSG00000170949_51 (sequence is synthesized)
ggctgctgctccttggcatctgctgccccaaacctcatggaagagtctccagccgtctccgcctgtcgaggtccctcggccatttcttccattctgcttttgccactttcatgggggtgt

SEQ ID NO: 572389 - DNA, 120 bp, Artificial Sequence
  ENSG00000170949_52 (sequence is synthesized)
gtgataagcgagtgggttctatcttctaagattgttctcagcataaccgtaaagacacctaacaaaatccttctgtcattgatcctcagtcttacatggggtgcgtattctgtttttcca

SEQ ID NO: 572390 - DNA, 120 bp, Artificial Sequence
  ENSG00000170949_53 (sequence is synthesized)
ggcttcagcacagaaatacaagtactgcatgttgtcacttacatttggaatctaaaccaataaaactaatagcagcaaagagtagaatgtgggttaccacaggttggggactggagggaa

SEQ ID NO: 572391 - DNA, 120 bp, Artificial Sequence
  ENSG00000170949_54 (sequence is synthesized)
tagggagatgttggtcactgggtgaaaacattaggagtaaatgataggtttttgagatgacttatatggtaataggcttgtttccatcagtccatattgtatacctataacagaatatca

SEQ ID NO: 572392 - DNA, 120 bp, Artificial Sequence
  ENSG00000170949_55 (sequence is synthesized)
gtttgtttcctgtaaatatatataactataatttgtcaatatagaatttttttaaaaatcatattccagttcttattgtgttggttctaaataaaaatgcttctttctcttaagacaaaa

SEQ ID NO: 572393 - DNA, 120 bp, Artificial Sequence
  ENSG00000170949_56 (sequence is synthesized)
ggggtcttactatgttgcccaggctggattcagtgccgagtctcaaaggccaagaaacgttcctggatccgaacactgccccctgacgacctagagagatcccggctcccagcccactga

SEQ ID NO: 572394 - DNA, 120 bp, Artificial Sequence
  ENSG00000170949_57 (sequence is synthesized)
tccgcaccgcaccctccacctcaggattccacgggagatgagtgaataaacgactgaacattgtgcataaacagacaatttatatattcataagattaagacattttgtattcctcatcc

SEQ ID NO: 572395 - DNA, 120 bp, Artificial Sequence
  ENSG00000170949_58 (sequence is synthesized)
cacaccagccaccaactgggagtattaaaaagagcaatccagtctccaaatcaaggggagggttcaaatcatagacaagctgcagagccaccgggtctcagagtttcccgcggaaacgct

SEQ ID NO: 572396 - DNA, 120 bp, Artificial Sequence
  ENSG00000170949_59 (sequence is synthesized)
gggactcgctaccaatcccatgagcgcacctggggattttaacgtctggtgggatggtggattccgagtgtggttggacagggctggagtgccctgaaaggcctgaatgctctcctgccg

SEQ ID NO: 572397 - DNA, 120 bp, Artificial Sequence
  ENSG00000170949_60 (sequence is synthesized)
ttttaactttctcacttctataaagaatgccacacagggtgtgagccaccgtgcctggcttcttttgatatctcgttatctcctgttgggaccacagcatttcactaatcagccacttgt

SEQ ID NO: 572398 - DNA, 120 bp, Artificial Sequence
  ENSG00000170949_61 (sequence is synthesized)
tctggagatccctcaagccttttctaaggatgcgtcctccgtggactttttgattgtagcttaactaaagagcttgtgccagtttgtatgcaggaatgcctctgttgtctgccggctgtt

SEQ ID NO: 572399 - DNA, 120 bp, Artificial Sequence
  ENSG00000170949_62 (sequence is synthesized)
ccgcagcctcgctggtgtcctagtaagctgggggctgcaccgccacctaatgtctgcgtacgttactacaagctctggtttatgacggatggctttgttctcagtagcttccttacctgg

SEQ ID NO: 572400 - DNA, 120 bp, Artificial Sequence
  ENSG00000170949_63 (sequence is synthesized)
ggtcctgttacttcagtgtttatattcaggcaagacagaaacttgtcccttagcagtgccctgaaaagtcagaacgttatgagccttgtgttgtgttacaggaaaaaagagaaaaaaaaa

SEQ ID NO: 572401 - DNA, 120 bp, Artificial Sequence
  ENSG00000170949_64 (sequence is synthesized)
ggttaaacttgggcttcccaggctcctgcacatccagactcgatttgcaggagtcctcagagacatatgtgtatatatgagtgattgtagttcactgcagcctggacctcctgggctcaa

SEQ ID NO: 572402 - DNA, 120 bp, Artificial Sequence
  ENSG00000170949_65 (sequence is synthesized)
cctcagcctcctgagtagctgggaccaccggtgtgtaccaccaccacgtttaaataattttttttatatatatttagtagagaggaagtctcactgtgttgcctgagctggtctcgaatt

SEQ ID NO: 572403 - DNA, 120 bp, Artificial Sequence
  ENSG00000170949_66 (sequence is synthesized)
tggtctcgaatttgtgggctcaagtgatcctcccgcttcggctgggattacagcccacgaagtgctgggattacaggcatgagccgtcactccggaccctatagaccttagtatcccctc

SEQ ID NO: 572404 - DNA, 120 bp, Artificial Sequence
  ENSG00000170950_0 (sequence is synthesized)
aaaggcgttagaagtcaccaccgacccagcccctcaacagcaagttggttcttcagcattaagatccaggtgtcagcctatgtctttatattgtcaagatgtctctttctaagaagttga

SEQ ID NO: 572405 - DNA, 120 bp, Artificial Sequence
  ENSG00000170950_1 (sequence is synthesized)
ctttagacaaactggatgttagagggaagcgagtcatcatgagagtagacttcaatgttcccatgaagaagaaccagattacaaacaaccagaggatcaaggcttccatcccaagcatca

SEQ ID NO: 572406 - DNA, 120 bp, Artificial Sequence
  ENSG00000170950_2 (sequence is synthesized)
agtactgcctggacaatggagccaaggcagtagttcttatgagtcatctaggtcggcctgatggtgttcccatgcctgacaaatattccttagcacctgttgctgttgagctcaaatcct

SEQ ID NO: 572407 - DNA, 120 bp, Artificial Sequence
  ENSG00000170950_3 (sequence is synthesized)
tgctgggcaaggatgttctgttcctgaaggactgtgtaggcgcagaagtggagaaagcctgtgccaacccagctcctggttcagtcatcctgctggagaacctgcgctttcatgtggagg

SEQ ID NO: 572408 - DNA, 120 bp, Artificial Sequence
  ENSG00000170950_4 (sequence is synthesized)
aagaagggaagggccaagatccctctggaaagaagattaaagctgagccagataaaatagaagccttccgagcatcactttccaagctaggggacgtctatgtcaatgatgcttttggca

SEQ ID NO: 572409 - DNA, 120 bp, Artificial Sequence
  ENSG00000170950_5 (sequence is synthesized)
ctgcacaccgcgctcatagttccatggtgggagtgaatctgccccataaagcatccggattcttgatgaagaaggaactagattactttgctaaagccttggaaaacccagtgagaccct

SEQ ID NO: 572410 - DNA, 120 bp, Artificial Sequence
  ENSG00000170950_6 (sequence is synthesized)
aagtcaatgagatgattattggtggtggaatggcttataccttccttaaggtactcaacaacatggagattggtgcttccctgtttgatgaagagggagccaagatcgttaaagatatca

SEQ ID NO: 572411 - DNA, 120 bp, Artificial Sequence
  ENSG00000170950_7 (sequence is synthesized)
tggccaaagcacaaaagaatggtgtaaggattacttttcctgttgattttgttactggggacaagtttgacgagaacgctcaggttggaaaagccactgtagcatctggcatatctcctg

SEQ ID NO: 572412 - DNA, 120 bp, Artificial Sequence
  ENSG00000170950_8 (sequence is synthesized)
gctggatgggtttggactgtggtcctgagagcaacaagaatcatgctcaagttgtggctcaagcaaggctaattgtttggaatgggccgttaggagtatttgaatgggatgcctttgcta

SEQ ID NO: 572413 - DNA, 120 bp, Artificial Sequence
  ENSG00000170950_9 (sequence is synthesized)
agggaaccaaagccctcatggatgaaattgtgaaagccacttccaagggctgcatcactgttatagggggtggagacactgctacttgctgtgccaaatggaacactgaagataaagtca

SEQ ID NO: 572414 - DNA, 120 bp, Artificial Sequence
  ENSG00000170950_10 (sequence is synthesized)
gccatgtcagcactggaggcggtgccagtctagagcttctggaaggtaaaatccttcctggagtagaggccctcagcaacatgtagttaatatagtgttacttccttctgttttctgtcc

SEQ ID NO: 572415 - DNA, 120 bp, Artificial Sequence
  ENSG00000170950_11 (sequence is synthesized)
atggcccttaagtcagcttaatgcttttacatctcgatgtgacttttgttaaaatctactcctagatcaagacctatgtaatggacaagcagcaggccatcaggaactcttaatatcagc

SEQ ID NO: 572416 - DNA, 120 bp, Artificial Sequence
  ENSG00000170950_12 (sequence is synthesized)
acagcaattcattttagtttggtcacgcatttgcctgttcaagttctcatttgaacttcaccattgtgctatctagggaggacatattcttaagttgcctattaaagaaagtgagctgaa

SEQ ID NO: 572417 - DNA, 120 bp, Artificial Sequence
  ENSG00000170953_0 (sequence is synthesized)
cgactctcctgcctgaccaaaaagaatggcagccaaaaactcttctgtgacagagtttatcctcgaaggcttaacccaccagccgggactgcggatccccctcttcttcctgtttctggg

SEQ ID NO: 572418 - DNA, 120 bp, Artificial Sequence
  ENSG00000170953_1 (sequence is synthesized)
tttctacacggtcaccgtggtggggaacctgggcttgataaccctgattgggctgaactctcacctgcacactcccatgtacttcttcctttttaacctctctttaatagatttctgttt

SEQ ID NO: 572419 - DNA, 120 bp, Artificial Sequence
  ENSG00000170953_2 (sequence is synthesized)
ctccactaccatcactcccaaaatgctgatgagttttgtctcaaggaagaacatcatttccttcacagggtgtatgactcagctcttcttcttctgcttctttgtcgtctctgagtcctt

SEQ ID NO: 572420 - DNA, 120 bp, Artificial Sequence
  ENSG00000170953_3 (sequence is synthesized)
catcctgtcagcgatggcgtatgaccgctacgtggccatctgtaacccactgttgtacacagtcaccatgtcttgccaggtgtgtttgctccttttgttgggtgcctatgggatggggtt

SEQ ID NO: 572421 - DNA, 120 bp, Artificial Sequence
  ENSG00000170953_4 (sequence is synthesized)
tgaccttctgtgctgacaaccttgtcaatcatttcatgtgtgacatccttcctctccttgagctctcctgcaacagctcttacatgaatgagctggtggtctttattgtggtggctgttg

SEQ ID NO: 572422 - DNA, 120 bp, Artificial Sequence
  ENSG00000170953_5 (sequence is synthesized)
acgttggaatgcccattgtcactgtctttatttcttatgccctcatcctctccagcattctacacaacagttctacagaaggcaggtccaaagcctttagtacttgcagttcccacataa

SEQ ID NO: 572423 - DNA, 120 bp, Artificial Sequence
  ENSG00000170953_6 (sequence is synthesized)
ttgtagtttctcttttctttggttctggtgctttcatgtatctcaaacccctttccatcctgcccctcgagcaagggaaagtgtcctccctgttctataccataatagtccccgtgttaa

SEQ ID NO: 572424 - DNA, 120 bp, Artificial Sequence
  ENSG00000170953_7 (sequence is synthesized)
acccattaatctatagcttgaggaacaaggatgtcaaagttgccctgaggagaactttgggcagaaaaatcttttcttaagaaaggattagtattggaggaaggagatacaatgctttgc

SEQ ID NO: 572425 - DNA, 120 bp, Artificial Sequence
  ENSG00000170953_8 (sequence is synthesized)
gggataagagaacaatgcaggggtaaaaagaagaggagccaatcacagaagaggtctgggaagggatgcagctgaggagggagagaaagaacagaggcacacttggccctggatgcatca

SEQ ID NO: 572426 - DNA, 120 bp, Artificial Sequence
  ENSG00000170953_9 (sequence is synthesized)
ctgtggaccccagccctggagccacagggtaacattttggttccctgatcttctgtcctcatctcgtggttgcaccactcccatcactatttggttgatattgtggtgaggtcagagcct

SEQ ID NO: 572427 - DNA, 120 bp, Artificial Sequence
  ENSG00000170953_10 (sequence is synthesized)
ctgatagttaagaatatcaggatggcaagtatttttaatccgtcacaaagttctatacgtgcttatctattttaactaatgaggcacatggtttttctttttctgattcttggagcaact

SEQ ID NO: 572428 - DNA, 120 bp, Artificial Sequence
  ENSG00000170953_11 (sequence is synthesized)
ttattggtcaaaattcgtcattcatctagtagtattatatatccattcccttgccatggtctcacagaagtagggtatatttttccttgcctatgactgttggcttggccaggtgaacta

SEQ ID NO: 572429 - DNA, 120 bp, Artificial Sequence
  ENSG00000170953_12 (sequence is synthesized)
ttttggctaataggatattagtagatgagatgttagcaggagcttggaatatctttgcatggtatttgccctcttcggcttctgccattgccttgagaagagtccctcctgggtaaatgc

SEQ ID NO: 572430 - DNA, 120 bp, Artificial Sequence
  ENSG00000170953_13 (sequence is synthesized)
tgccgctcccaactaattctcaatatgaacacacgaggagcagtgttcactgtgcagagcaagcagtgcggcccagctgagcccagacaagacgaactaccacaatcaatttgtagacat

SEQ ID NO: 572431 - DNA, 120 bp, Artificial Sequence
  ENSG00000170953_14 (sequence is synthesized)
atgagaaacaaatattccttgttgtatgccaatgagattgtgtttggttgtataataatagctaactggtctactccaccattcggagaacaggaaaggagaatattgtctggaatatga

SEQ ID NO: 572432 - DNA, 120 bp, Artificial Sequence
  ENSG00000170953_15 (sequence is synthesized)
aagtctcttccagtgggatcatcctgtatgtgctgtgttacaaaatgttgtttaacttatcattataatgtgatctttattccttatcaatatttttttgaattgtaattttccatggac

SEQ ID NO: 572433 - DNA, 120 bp, Artificial Sequence
  ENSG00000170954_0 (sequence is synthesized)
aaacggatcgcgttgggtgaaggtgacggcgtcgagccattgacttccaaagactcctggcacatgaggaagaaacccagaagaggagagcaaaggagtcaggaatggcttttactcagt

SEQ ID NO: 572434 - DNA, 120 bp, Artificial Sequence
  ENSG00000170954_1 (sequence is synthesized)
tgacattcagggacgtggccatcgaattctctcaagatgagtggaaatgcctgaactctacacagaggactttatacagggatgtgatgttggagaactacaggaacctggtctccctgg

SEQ ID NO: 572435 - DNA, 120 bp, Artificial Sequence
  ENSG00000170954_2 (sequence is synthesized)
atctgtctcgtaactgtgtaatcaaggaactagcaccacaacaggaaggtaacccaggagaagtattccacacagtgacattggaacaacatgaaaaacatgacattgaagagttttgct

SEQ ID NO: 572436 - DNA, 120 bp, Artificial Sequence
  ENSG00000170954_3 (sequence is synthesized)
tcagggaaatcaagaaaaaaatacacgactttgactgtcagtggagagatgatgaaagaaattgcaacaaagtgactacggccccaaaagaaaatcttacttgtaggagagaccaacgcg

SEQ ID NO: 572437 - DNA, 120 bp, Artificial Sequence
  ENSG00000170954_4 (sequence is synthesized)
atagaagaggtataggaaacaagtctattaaacatcagcttggattaagctttctaccacatccccatgaactgcagcagtttcaagctgaagggaaaatttatgaatgtaaccatgttg

SEQ ID NO: 572438 - DNA, 120 bp, Artificial Sequence
  ENSG00000170954_5 (sequence is synthesized)
agaagtctgtcaaccatggttcctcagtttcaccaccccaaataatttcttctaccatcaaaacccatgtttctaataaatatgggactgatttcatctgttcttcattactcacacaag

SEQ ID NO: 572439 - DNA, 120 bp, Artificial Sequence
  ENSG00000170954_6 (sequence is synthesized)
aacagaaatcatgcattagggaaaaaccttacagatatattgagtgcgacaaagccttgaatcatggctcacacatgactgtacgtcaggtaagtcattctggagagaaaggatataaat

SEQ ID NO: 572440 - DNA, 120 bp, Artificial Sequence
  ENSG00000170954_7 (sequence is synthesized)
gtcaggtaagtcattctggagagaaaggatataaatgtgatctgtgtggcaaggtctttagtcaaaaatcaaaccttgcgcgtcattggagagttcatactggagagaaaccatacaaat

SEQ ID NO: 572441 - DNA, 120 bp, Artificial Sequence
  ENSG00000170954_8 (sequence is synthesized)
gccttgcactacatcggagagttcacactggagagaaaccttacaaatgttatgagtgtgacaaggtcttcagtcgaaattcatgccttgcactacatcagaaaactcatattggagaga

SEQ ID NO: 572442 - DNA, 120 bp, Artificial Sequence
  ENSG00000170954_9 (sequence is synthesized)
aaggtgttcagtcagacttcaagccttgcaactcatcagagaattcacactggggagaaaccatacaagtgtaatgaatgtggtaaagtcttcagtcagacttcaagccttgcaaggcat

SEQ ID NO: 572443 - DNA, 86 bp, Artificial Sequence
  ENSG00000170954_10 (sequence is synthesized)
caaggcattcaatgaatgtggtaaggttttcagttacaattcacaccttgcgagtcatcggagagttcatactggagagaaacctt

SEQ ID NO: 572444 - DNA, 120 bp, Artificial Sequence
  ENSG00000170954_11 (sequence is synthesized)
aatgagtgtgggaaagcctttagtgtgcattcgaacttaactacccatcaggtcatccatactggagagaagccttacaaatgtaatcaatgtggcaaaggcttcagtgtgcattcaagc

SEQ ID NO: 572445 - DNA, 120 bp, Artificial Sequence
  ENSG00000170954_12 (sequence is synthesized)
ctaactacccatcaggtcatccatactggagaaaaaccttacaaatgtaatgagtgtggcaaatcctttagtgtgcgcccaaacctcactagacatcagataatccatactggaaagaaa

SEQ ID NO: 572446 - DNA, 120 bp, Artificial Sequence
  ENSG00000170954_13 (sequence is synthesized)
ccttacaaatgtagtgattgtgggaagtcctttagtgtgcgcccaaacctcttcagacatcaaattatccatactaaggagaaaccttataaaagaaattaatatggcaaggtcttcagt

SEQ ID NO: 572447 - DNA, 120 bp, Artificial Sequence
  ENSG00000170954_14 (sequence is synthesized)
caaagtttaaatcctgtgagtcatcaaagaatttatatcagagagaaaccatacaagtataataaatgtggcaaggttttcagtcacaattcactcctacacagcatcagagaatttcat

SEQ ID NO: 572448 - DNA, 120 bp, Artificial Sequence
  ENSG00000170954_15 (sequence is synthesized)
tcttgagagaatccttacgagtacagcaaacccttcatcacaagttcaagcattcattgacatcagagtccatgctaaagagaaatcatatacacctaactgtgtggcagaggcttcatt

SEQ ID NO: 572449 - DNA, 120 bp, Artificial Sequence
  ENSG00000170954_16 (sequence is synthesized)
taggtctcacaactcactagacatcaaaatgtgtaaacatctttgtatattttgtgcatgttgaagctattaaccaaggatcaaaactgtaacacatccaaggatttatgtgaggaataa

SEQ ID NO: 572450 - DNA, 120 bp, Artificial Sequence
  ENSG00000170954_17 (sequence is synthesized)
ttcagtctagttgtgctgataaacttttcatattacacattgtagaacaaatgcaagcccaaatatgttaaaactcacacaacatgatatatattaaaggttgcaggatgtttgaagtca

SEQ ID NO: 572451 - DNA, 120 bp, Artificial Sequence
  ENSG00000170954_18 (sequence is synthesized)
gcatgcgcagtttcctacaggcccggaaacggatcgcgttgggtgaaggtgacggcgtcgagcgtgagtgaccctctgtgtagattaaacctgcgctccctgtttcccatttccacagcc

SEQ ID NO: 572452 - DNA, 120 bp, Artificial Sequence
  ENSG00000170954_19 (sequence is synthesized)
ccccgtacactccaccccaggtgggagacaatgccttggagctgcaaatcttctctgagtctgaagcatcctgcctgacgcgtttgctcacattgacccgtgccttccctcagtccttct

SEQ ID NO: 572453 - DNA, 120 bp, Artificial Sequence
  ENSG00000170954_20 (sequence is synthesized)
aggcccggaaacggatcgcgttgggtgaaggtgacggcgtcgagcgtgtccaaaagtgacttcctgactccctagatgcattcccctgcagtcctgcacatctcagatgagcgggaccat

SEQ ID NO: 572454 - DNA, 83 bp, Artificial Sequence
  ENSG00000170954_21 (sequence is synthesized)
aggaaagagccctggaccatagaaagccaagtacgagtagcaagaaaaccaaaagggtgggaatggatcaaaggtgtgaaaac

SEQ ID NO: 572455 - DNA, 120 bp, Artificial Sequence
  ENSG00000170954_22 (sequence is synthesized)
tctgacctcatctcctgcctgtgtcctcctcgctccctctgctccagccaagcatgcgtccttcctgttcctgggccgagcttgctcctgcctcaaggccttcacgtgggctgtgcctct

SEQ ID NO: 572456 - DNA, 120 bp, Artificial Sequence
  ENSG00000170954_23 (sequence is synthesized)
gctggaactcgctggcccctcagctgcagcattgacttccaaagactcctggcacatgaggaagaaacccagaagaggagagcaaaggagtcaggaatggcttttactcagttgacattc

SEQ ID NO: 572457 - DNA, 120 bp, Artificial Sequence
  ENSG00000170954_24 (sequence is synthesized)
ttcttatccaagcaaagggctgagattcttgaaaagccacagcacatcatgttccattcattttataagcgggaaattctcttcctgaccagagtattatcctatgtgggagcacaggaa

SEQ ID NO: 572458 - DNA, 120 bp, Artificial Sequence
  ENSG00000170954_25 (sequence is synthesized)
ctgactgagtttgaggccttgttgactctgaaatgaaaagctccataatgtgaactctggagtttaaccatcccctttttccagattttctgaccccttcatgatacaacagtggtggtt

SEQ ID NO: 572459 - DNA, 120 bp, Artificial Sequence
  ENSG00000170954_26 (sequence is synthesized)
acatctcctccttctcactcaactcagacctctcaggataacttggtgaaatgactccctctctcagcctcagtgagcccacctgtaacagagataagggactagaccagaaaacctcaa

SEQ ID NO: 572460 - DNA, 120 bp, Artificial Sequence
  ENSG00000170954_27 (sequence is synthesized)
aaaatagttttaacataaaccgttttcaacttggtaagtggaaaacattttggtttccaccataagtggcccacacaactctgatttttttaccttaaagcggcgcagaccccgcccact

SEQ ID NO: 572461 - DNA, 67 bp, Artificial Sequence
  ENSG00000170954_28 (sequence is synthesized)
aaagccaagtacgagtagcaagaaaaccaaaagggtgggaatggatcaaaggtgtgaaaaattcaaa

SEQ ID NO: 572462 - DNA, 120 bp, Artificial Sequence
  ENSG00000170955_0 (sequence is synthesized)
agacggagcagagcggtcagggatcatgagggagagtgcgttggagcgggggcctgtgcccgaggcgccggcggggggtcccgtgcacgccgtgacggtggtgaccctgctggagaagct

SEQ ID NO: 572463 - DNA, 120 bp, Artificial Sequence
  ENSG00000170955_1 (sequence is synthesized)
ggcctccatgctggagactctgcgggagcggcagggaggcctggctcgaaggcagggaggcctggcagggtccgtgcgccgcatccagagcggcctgggcgctctgagtcgcagccacga

SEQ ID NO: 572464 - DNA, 120 bp, Artificial Sequence
  ENSG00000170955_2 (sequence is synthesized)
caccaccagcaacaccttggcgcagctgctggccaaggcggagcgcgtgagctcgcacgccaacgccgcccaagagcgcgcggtgcgccgcgcagcccaggtgcagcggctggaggccaa

SEQ ID NO: 572465 - DNA, 120 bp, Artificial Sequence
  ENSG00000170955_3 (sequence is synthesized)
ccacgggctgctggtggcgcgcgggaagctccacgttctgctcttcaaggaggagggtgaagtcccagccagcgctttccagaaggcaccagagcccttgggcccggcggaccagtccga

SEQ ID NO: 572466 - DNA, 120 bp, Artificial Sequence
  ENSG00000170955_4 (sequence is synthesized)
cccagcggctgcggcgcaccggattgcagaaggtacagagcctccgaagggccctttcgggccggaaaggccctgcagcgccaccgcccaccccggtcaagccgcctcgccttgggcctg

SEQ ID NO: 572467 - DNA, 120 bp, Artificial Sequence
  ENSG00000170955_5 (sequence is synthesized)
gccggagcgctgaagcccagccggaagcccagcctgcgctggagcccacgctggagccagagcctccgcaggacaccgaggaagatcccgggagacctggggctgccgaagaagctctgc

SEQ ID NO: 572468 - DNA, 120 bp, Artificial Sequence
  ENSG00000170955_6 (sequence is synthesized)
tccaaatggagagtgtagcctgagggctggtgttgcctgcctcccctgtgcttgtgccttgtcccaaaataaatcctttcagaatgtagcactcacgccctaataaggagcgaatcctac

SEQ ID NO: 572469 - DNA, 120 bp, Artificial Sequence
  ENSG00000170955_7 (sequence is synthesized)
atccaccaaggcgggcgctctggccctcccttccttaagcccagtcctgtgtcctctgaaagaggtgcagtcactcacacctgcttgcgctcaccatcaataaaagtaatttcacccgaa

SEQ ID NO: 572470 - DNA, 120 bp, Artificial Sequence
  ENSG00000170955_8 (sequence is synthesized)
cggctggaggccaaccacgggctgctggtggcgcgcgggaagctccacgttctgctcttcaagactctggctgcggaggtaaaaggtttcccttgtgtaattaaggagtgagtttcgggc

SEQ ID NO: 572471 - DNA, 120 bp, Artificial Sequence
  ENSG00000170955_9 (sequence is synthesized)
ggcctttgccggcctgtgggccaccagctgggggctccccgcttccatccacctaccacacccacattcctgacccctcccgccgtctgttgctgtggaacagactcacagagccgcacc

SEQ ID NO: 572472 - DNA, 120 bp, Artificial Sequence
  ENSG00000170955_10 (sequence is synthesized)
cacttcccaagacccagccccatccctccctctcacgcctgagccccgcctggccaatccaagcccgcccagctctagctcaggccacgtccgcagaatttggtctgagtcccagccaat

SEQ ID NO: 572473 - DNA, 120 bp, Artificial Sequence
  ENSG00000170955_11 (sequence is synthesized)
ccctaaaataacggtggttgaaagggcattccgtgactgcgggcactatcctcttctcgcccctcaccaggcctcacctactttacagcgttttgcagttcgcacgcagctttccctccc

SEQ ID NO: 572474 - DNA, 120 bp, Artificial Sequence
  ENSG00000170956_0 (sequence is synthesized)
agcagagcctaagtcacagtagccctgactacagcattcctggagcccaggctcttttccacagaggaggaaagagcaggcagcagagaccatggggcccccctcagcctctccccacag

SEQ ID NO: 572475 - DNA, 120 bp, Artificial Sequence
  ENSG00000170956_1 (sequence is synthesized)
agaatgcatcccctggcaggggcttctgctcacagcctcacttctaaacttctggaacccgcccaccactgccaagctcactattgaatccatgccgctcagtgtcgcagaggggaagga

SEQ ID NO: 572476 - DNA, 120 bp, Artificial Sequence
  ENSG00000170956_2 (sequence is synthesized)
ggtgcttctacttgtccacaatctgccccagcatctttttggctacagctggtacaaaggggaaagagtggatggcaacagtctaattgtaggatatgtaataggaactcaacaagctac

SEQ ID NO: 572477 - DNA, 120 bp, Artificial Sequence
  ENSG00000170956_3 (sequence is synthesized)
cccaggggccgcatacagcggtcgagagacaatatacaccaatgcatccctgctgatccagaatgtcacccagaatgacataggattctacaccctacaagtcataaagtcagatcttgt

SEQ ID NO: 572478 - DNA, 120 bp, Artificial Sequence
  ENSG00000170956_4 (sequence is synthesized)
ggtcctggtcggagtggcgctggtggccgcgctggtgtgtttcctgctccttgccaaaactggaagaaccagcatccagcgtgacctcaaggagcagcagccccaagcccttgcccctgg

SEQ ID NO: 572479 - DNA, 120 bp, Artificial Sequence
  ENSG00000170956_5 (sequence is synthesized)
ccgtggtccctcccacagctctgccttctcgatgtcccctctctccactgcccaggcccccctacccaaccccaggacagcagcttccatctatgaggaattgctaaaacatgacacaaa

SEQ ID NO: 572480 - DNA, 120 bp, Artificial Sequence
  ENSG00000170956_6 (sequence is synthesized)
catttactgccggatggaccacaaagcagaagtggcttcttagcttcctccaggagctgctcctgtgtgttgatggagagtccccaaggcccccagccctggggatggggaaggacatga

SEQ ID NO: 572481 - DNA, 120 bp, Artificial Sequence
  ENSG00000170956_7 (sequence is synthesized)
agcctgagccagagaaccagctataagtcctgagaagacactggtgtctgggggcagggagggatgggggtccctgatgaatatctggagacctcgacagcctgccctaggccctgggtg

SEQ ID NO: 572482 - DNA, 120 bp, Artificial Sequence
  ENSG00000170956_8 (sequence is synthesized)
ggtcaggacaaaggcctctcatcaccgcagaaagcgggggcttgcagggaaagtgaatgggcctgtggcccacctggggtcacttggaaaggatctgaataaaggggacccttcctctca

SEQ ID NO: 572483 - DNA, 120 bp, Artificial Sequence
  ENSG00000170956_9 (sequence is synthesized)
tgaagaagcaactggacagttccatgtataccgtgagtatttccacatgacctctgggtgttgggggtcagttctacttcccacatatgggattgtcaggcctgggctgtgcctgtggcc

SEQ ID NO: 572484 - DNA, 120 bp, Artificial Sequence
  ENSG00000170956_10 (sequence is synthesized)
tgaagaagcaactggacagttccatgtatacccggagctgcccaagccctccatctccagcaacaactccaaccccaaggaggacaaggatgctgtggccttcacctgtgaacctgagat

SEQ ID NO: 572485 - DNA, 120 bp, Artificial Sequence
  ENSG00000170956_11 (sequence is synthesized)
tcacagcacaacctgcctgtagtgggtaaatggtcagagcctcccgaagaaaatgccccaggccttcctgtgggggccgtcgccggcatcgtgaccggggtcctggtcggagtggcgctg

SEQ ID NO: 572486 - DNA, 120 bp, Artificial Sequence
  ENSG00000170956_12 (sequence is synthesized)
tgtttcctgctccttgccaaaactggaaggtaccacagctttttcccatccttctcccaccccctaggctgactccaggccaaaagaaaggagaccttgtcctgtattcagggccaggct

SEQ ID NO: 572487 - DNA, 120 bp, Artificial Sequence
  ENSG00000170956_13 (sequence is synthesized)
ctccacggcctcccaagtccccagggatccttccctcttattccacggctcctccctcgtcagctcctgaccctgggttgctgcctcaacagcttcctcctctgtgaatttggcccaatt

SEQ ID NO: 572488 - DNA, 120 bp, Artificial Sequence
  ENSG00000170956_14 (sequence is synthesized)
aaggccccacccctgagtgtggccctagttccctcacacagcaaagccacagctgcctggagggagggagagaaggagggagggaagtagggagggagggagggagggcgtgctctgtac

SEQ ID NO: 572489 - DNA, 120 bp, Artificial Sequence
  ENSG00000170956_15 (sequence is synthesized)
ttggtacctcccattgttcattgaatccatccacacagtgagggggatttgcaggctccggatcctgggcaccgtcacacaatggggagtggaccagcctggacaggctgggtggggtca

SEQ ID NO: 572490 - DNA, 120 bp, Artificial Sequence
  ENSG00000170956_16 (sequence is synthesized)
gtgccccccatggctgatgtggtaaccataggccctgaggtgtgagatgggagaacctgggcctcagaacagcatgtcctggagcgtcctttgtgtctcttgccaaggggttgagagaga

SEQ ID NO: 572491 - DNA, 120 bp, Artificial Sequence
  ENSG00000170956_17 (sequence is synthesized)
ggacaaggacactgtcccatttcagcatcaccagccctgagtgcagggtctggccacagcagggacactgagttccaggagaatccaagacacttgcggtcccctccgtgtcctgcacac

SEQ ID NO: 572492 - DNA, 120 bp, Artificial Sequence
  ENSG00000170956_18 (sequence is synthesized)
aagaaaatgccccaggccttcctgtgggggccgtcgccggcatcgtgaccggggtcctggtcggagtggcgctggtggccgcgctggtgtgtttcctgctccttgccaaaactggaagtg

SEQ ID NO: 572493 - DNA, 120 bp, Artificial Sequence
  ENSG00000170956_19 (sequence is synthesized)
tcgtggtctgtttccttccttgggtcctcagtccctttcctgggtccctgggtcaatgttctcctggcccggcatctgcctgagggtccttcccctctgctcaggacagatgtgggttcc

SEQ ID NO: 572494 - DNA, 120 bp, Artificial Sequence
  ENSG00000170956_20 (sequence is synthesized)
taaagcctttcctcaactcccctctgctgggctccccctaacacaaacctgagggagacaggaggtctccatgcccatccttgaaaatgggtttcccttcttgtcccctgttcgaactcc

SEQ ID NO: 572495 - DNA, 120 bp, Artificial Sequence
  ENSG00000170956_21 (sequence is synthesized)
aaagttgtggcttttaacctggcaccctcccaaatgaccctgacctttcctagaaccagcatccagcgtgacctcaaggagcagcagccccaagcccttgcccctggtgagtgtcctctc

SEQ ID NO: 572496 - DNA, 120 bp, Artificial Sequence
  ENSG00000170956_22 (sequence is synthesized)
agacaagtctctgtgttcaaagagcttacactcttgcagagatgaagatagacacccaaagagatctagaatgtgagttcaggtgttgacaagagccctggagggaacagagcagaaaaa

SEQ ID NO: 572497 - DNA, 120 bp, Artificial Sequence
  ENSG00000170956_23 (sequence is synthesized)
aaatggtcagagcctcccggtcagttccaggctgcagctgtccaatgacaagaggaccctcactctactcagtgtcacaaggaatgacacaggaccctatgagtgtgaaataccgaaccc

SEQ ID NO: 572498 - DNA, 120 bp, Artificial Sequence
  ENSG00000170956_24 (sequence is synthesized)
caaatccacacagccagaggccaggcctctcagtccctctcaagtccagggactcagactctcacccaggctggccatcacttcctgtcccaagcaaacctgggcagacccagccttgac

SEQ ID NO: 572499 - DNA, 120 bp, Artificial Sequence
  ENSG00000170956_25 (sequence is synthesized)
caagaataggaggggagaggctgctcctgtcctgggaggctcagggtccacagcctgtgatgggagaaacagaaaatgccccaggccttcctgtgggggccgtcgccggcatcgtgaccg

SEQ ID NO: 572500 - DNA, 120 bp, Artificial Sequence
  ENSG00000170959_0 (sequence is synthesized)
agaagcgacgctccgcccaccccgacgcggtctctatggtaaccggtcaccgcttctatggagtggcgtttactaccaattgcaaataagaaaattccagattccattccaagatggcca

SEQ ID NO: 572501 - DNA, 90 bp, Artificial Sequence
  ENSG00000170959_1 (sequence is synthesized)
tgtaagctgaaaatggcaaaaacaggagcagaagatcacagagaagcactatctcagtcttccttatccctcttgactgaagcaatggaa

SEQ ID NO: 572502 - DNA, 120 bp, Artificial Sequence
  ENSG00000170959_2 (sequence is synthesized)
atctcagtcttccttatccctcttgactgaagcaatggaagtattacagcaaagtagccctgaaggcactttggatgggaatactgtaaacccaatttacaaatatattttgaatgattt

SEQ ID NO: 572503 - DNA, 120 bp, Artificial Sequence
  ENSG00000170959_3 (sequence is synthesized)
accaagagagtttatgtcatcccaggcaaaagcagttattaaaactactgatgattatttgcagtctcagtttggccccaacagactcgtgcattcagcagcagtatcagaagggtcagg

SEQ ID NO: 572504 - DNA, 120 bp, Artificial Sequence
  ENSG00000170959_4 (sequence is synthesized)
acttcaagattgctccacacatcaaacagcatcagatcacagccatgatgaaatatcagacctagatagctacaaatcaaacagtaaaaacaattcttgttctatatcagcatccaagag

SEQ ID NO: 572505 - DNA, 120 bp, Artificial Sequence
  ENSG00000170959_5 (sequence is synthesized)
aaacagacctgtcagtgctccagtgggtcaactgagggttgcagagttctcttctttaaaatttcagtcagcccggaattggcagaaattgtctcaaagacacaaacttcaaccaagagt

SEQ ID NO: 572506 - DNA, 120 bp, Artificial Sequence
  ENSG00000170959_6 (sequence is synthesized)
gattaaagtaacagcttacaaaaatggatctagaacagtctttgccagagttactgtaccaaccatcaccttgctgctggaggagtgcacagaaaagctgaatctgaacatggccgcaag

SEQ ID NO: 572507 - DNA, 120 bp, Artificial Sequence
  ENSG00000170959_7 (sequence is synthesized)
aagccctcgaacctgaagatataccccatgaagccgatgtttatgtttcaacgggagagccctttttaaatccattcaaaaaaattaaagaccatctgttgttaattaagaaagtaactt

SEQ ID NO: 572508 - DNA, 120 bp, Artificial Sequence
  ENSG00000170959_8 (sequence is synthesized)
ggacaatgaatgggttgatgcttcctactgatatcaaaagacggaaaaccaagcctgttctttctattagaatgaagaaacttactgagaggacctcagtccgaattctgttctttaaga

SEQ ID NO: 572509 - DNA, 120 bp, Artificial Sequence
  ENSG00000170959_9 (sequence is synthesized)
atggcatggggcaggatgggcatgagattacagtgggaaaagaaacaatgaaaaaggttttagatacttgtacaataagaatgaatctaaatttaccagccagatatttttatgatttgt

SEQ ID NO: 572510 - DNA, 120 bp, Artificial Sequence
  ENSG00000170959_10 (sequence is synthesized)
atggcagaaaaattgaagatatttcaaaaggaaagcactgactctgagacgtgatacttcatggatgccagaggcattcggattcatgactcgtgcttcacgtatcccagaagtgtgcta

SEQ ID NO: 572511 - DNA, 120 bp, Artificial Sequence
  ENSG00000170959_11 (sequence is synthesized)
ttatcacattttaatgcatgccttgccctctgtttttgcatccttataaaagcttatgccagctgaaattagcctgtgcaaccactaacatgtggaagcattacaagttcactggactta

SEQ ID NO: 572512 - DNA, 120 bp, Artificial Sequence
  ENSG00000170959_12 (sequence is synthesized)
aaatatttaaagaagctaatcctgttggaggaacttccagtctgtagcaccctagtcacttaacattaggtttttgaacttcttttttctttgtttctatgatgttgtgcatcaaatgat

SEQ ID NO: 572513 - DNA, 120 bp, Artificial Sequence
  ENSG00000170959_13 (sequence is synthesized)
tgagatccctaaacttttgtgttggatggttttctgaacttcaacttgggaaaggtcaagttttatgtgaaagttatcttttaatttaaacaaataaatgctgatactcttttgattcga

SEQ ID NO: 572514 - DNA, 120 bp, Artificial Sequence
  ENSG00000170959_14 (sequence is synthesized)
agctttgtgtctctcagtaccatcatggcctctccatgtatctttacagtataccttctgagacctgctgaggatatgactcagcaaatcaccatggtgatgggagaaagccaggttgtg

SEQ ID NO: 572515 - DNA, 120 bp, Artificial Sequence
  ENSG00000170959_15 (sequence is synthesized)
ggggcaccagctataacggggtaatacttggaaggcaatttctttctgagaacttgctgcagcctagcttggagtcctggcctggaaagcttgaatatgaaaagtcaggtgggccataaa

SEQ ID NO: 572516 - DNA, 120 bp, Artificial Sequence
  ENSG00000170959_16 (sequence is synthesized)
acatgaaggaaccagtaagccaggccagtggaaacattctagagttgaaaatcctctatggaacaagcttacctacatgtggcctgtccttcccagtggccaacttaatgaggagtttga

SEQ ID NO: 572517 - DNA, 120 bp, Artificial Sequence
  ENSG00000170959_17 (sequence is synthesized)
ttggccaatacaaggactgcttgttccgagcagtcctcccatgaagaaacccatctgtaagacaacagagccatatgcccctgtgcgactcagagttttgcagaatggagagaagaataa

SEQ ID NO: 572518 - DNA, 120 bp, Artificial Sequence
  ENSG00000170959_18 (sequence is synthesized)
aaacagatccgttactatccttggtccagatatctcacctggacggaaaacgcagtgcactgagattttaaatttaccttctgcagctcggagattgtacaatgaaaaggggaaggaaat

SEQ ID NO: 572519 - DNA, 120 bp, Artificial Sequence
  ENSG00000170959_19 (sequence is synthesized)
atttgccttaaaagacctgcaaagagatgaactggtgtatgtttcatgtggagaactctggatcaatcctgacctgtccattgctcagcaaaagaaacaaatattcctgaggaacctaga

SEQ ID NO: 572520 - DNA, 120 bp, Artificial Sequence
  ENSG00000170959_20 (sequence is synthesized)
atcagacattgccaaaattcaaatcttctgcagcacacataaaatagaagctcttgttttagaagtccaaagtgacattgtatctggaagcaagcttgctgtgcataaacctgtagcaat

SEQ ID NO: 572521 - DNA, 120 bp, Artificial Sequence
  ENSG00000170959_21 (sequence is synthesized)
ttttggagaagagaagcaagttacagaaccggaagaaaagcaaatgcaagaagatcctctaacaacggaaaatgcttccagtgaaattctagattcacacgtaagagctcatcttcgaat

SEQ ID NO: 572522 - DNA, 120 bp, Artificial Sequence
  ENSG00000170959_22 (sequence is synthesized)
gaaggcttgtcacacacttcccaggtatgcctggcaggaaacttcacatgactttgatgaggatgacagtcttccaaagaaaacggaaaaagggctctttgaaaatgtggaaccacagaa

SEQ ID NO: 572523 - DNA, 120 bp, Artificial Sequence
  ENSG00000170959_23 (sequence is synthesized)
gaaacacagctgttcaccaaagcatagtaaattgcacaagcattgtcatcagcagttcgaatacagagatgggcagattataagccatgctgctcctcagctagtcttgggggttcaagg

SEQ ID NO: 572524 - DNA, 120 bp, Artificial Sequence
  ENSG00000170959_24 (sequence is synthesized)
tcccaatctccgatcaggcatggaggtggttttggtggagaagaaatctgatggtagtcatcagcgctggatacaccaggaagacagcaggacctttcaccttgtgagtaaccctgacct

SEQ ID NO: 572525 - DNA, 120 bp, Artificial Sequence
  ENSG00000170959_25 (sequence is synthesized)
tgtgctggcagtgtctatgaccaagactagaaatgaagtttgtggctatccagttattgttcagaaatataagccgtacaacaatggagctgccaatcaaaagtggcattacatgaaaaa

SEQ ID NO: 572526 - DNA, 120 bp, Artificial Sequence
  ENSG00000170959_26 (sequence is synthesized)
tataaaagcacttgtggcctttcatagcactgccttggataaggaaattacatcagcaaattatgctggtgtctgtacatcatctgtgattaaagaagaaaacattgatcaaccaggata

SEQ ID NO: 572527 - DNA, 120 bp, Artificial Sequence
  ENSG00000170959_27 (sequence is synthesized)
ctgttatctctcacctgatggaaagagaaaaactatgctctgcttggcttgtggacaatccatgagaacagagaaaggactgaaacaattgcttccaggggttccattcctctgtatttc

SEQ ID NO: 572528 - DNA, 120 bp, Artificial Sequence
  ENSG00000170959_28 (sequence is synthesized)
aggcaccaagactcagaagcccttcttacaagggcccttcaaggtcatcagtgtggctgaggttgatttgtcgtgtgacaaggctgaaaaaactctaagttactaccaagcacgtctatt

SEQ ID NO: 572529 - DNA, 120 bp, Artificial Sequence
  ENSG00000170959_29 (sequence is synthesized)
gtctttacggatgaagacctgcacgcaagctgcatctcacagtggcatggcagccacacaccagaaggcagtgaaaataattgcatacaaaaatggggatgggtatcgtaatgggaagtt

SEQ ID NO: 572530 - DNA, 120 bp, Artificial Sequence
  ENSG00000170959_30 (sequence is synthesized)
aattgtggctggaacattccccatgcttcttacagaatgcacggaacaacttgggcttgccagagcagcctccaaagtatataccaaagatggaaccccaatctttaccttgcgtgattt

SEQ ID NO: 572531 - DNA, 120 bp, Artificial Sequence
  ENSG00000170959_31 (sequence is synthesized)
ggttttatgggctctagatgaatcctttctccagagagactctgagaaacaaaagcaagatgcagctcctgttggaaaagaacagataattgttgaaaaaaatccaagaatgaaagtgaa

SEQ ID NO: 572532 - DNA, 120 bp, Artificial Sequence
  ENSG00000170959_32 (sequence is synthesized)
aaacagattatttgcaaaatctgtgacatccgatagtttggatggtatagacaagtctttgcttaccctcatcctcagaaatcctattgccatctgggtgtcttgtggtgaaccatttct

SEQ ID NO: 572533 - DNA, 120 bp, Artificial Sequence
  ENSG00000170959_33 (sequence is synthesized)
agataccatgagacacaaaatgagacagttaaaagggcggcgagtagcggcatgtcagccagccaccatggttcctaccaagagccctgtgcagcccgtggtggttgaaggaggctggac

SEQ ID NO: 572534 - DNA, 120 bp, Artificial Sequence
  ENSG00000170959_34 (sequence is synthesized)
cgaacagactcaacaggaaattaaactcatggaacttataagacatacagaggcacacctttctgaaatccaagaaatggaatccaaaataaattttccaattgcaaccaaacgtatagc

SEQ ID NO: 572535 - DNA, 120 bp, Artificial Sequence
  ENSG00000170959_35 (sequence is synthesized)
agtcaagccgagcaacctgtataagcagcccaacacaaaacgagtgtggatttatctaaatggaggcagacctgaagatggcacttatgcctggggcaaaactatttcagagctgctgca

SEQ ID NO: 572536 - DNA, 120 bp, Artificial Sequence
  ENSG00000170959_36 (sequence is synthesized)
agactgctcctctcgtctcaaaatgacccacccagctagagcactgtacacccccagtggagagccaattcagtcctgggacgacatagagcgagatatggtcatctgtgtgtctatggg

SEQ ID NO: 572537 - DNA, 120 bp, Artificial Sequence
  ENSG00000170959_37 (sequence is synthesized)
acatggtttcaaaaccccaaaagagttaaaacaactgatggagatcagagcaaattatgccagaatccgaaggcagcagggccctcaagccacagacattgtggtgtcaccatccacgaa

SEQ ID NO: 572538 - DNA, 120 bp, Artificial Sequence
  ENSG00000170959_38 (sequence is synthesized)
gctgctgtctctggcacatctccacaattaactcctatcagaaccatcggattttctgctgtatttttctggaaagaaaactttctttacccacttataaacagaagactgtgacaagaa

SEQ ID NO: 572539 - DNA, 120 bp, Artificial Sequence
  ENSG00000170959_39 (sequence is synthesized)
ggccaattatttccatcgctgaagactctaaatttggcaaatcttctaaataacaatcctgcatagtttattaaaaaaaattagtcgtaaaatttatccttcaaaaatctgcattttaaa

SEQ ID NO: 572540 - DNA, 120 bp, Artificial Sequence
  ENSG00000170959_40 (sequence is synthesized)
taaaccctgacagtgatttctcaagactgtaaagatattagtctgagaatgcaactctaacagactgctctgggcatcttttctctttgccttggccaggcctctcagaattgagtgagc

SEQ ID NO: 572541 - DNA, 120 bp, Artificial Sequence
  ENSG00000170959_41 (sequence is synthesized)
gtgtgactccatttgcacagtgggacagatgagtacaactgaaataaaaagtggaggcctctgcaaaaaataaaaaataaaaaataaatttatccttcaaaataactcagttttttcaat

SEQ ID NO: 572542 - DNA, 120 bp, Artificial Sequence
  ENSG00000170959_42 (sequence is synthesized)
gggcctattttgaagaatgaacattgaaaaatgagacaatatatccataaattcatagtatgacataccataatcgagagcattgttagccatagacattttgtatgccagtgaaatctg

SEQ ID NO: 572543 - DNA, 120 bp, Artificial Sequence
  ENSG00000170959_43 (sequence is synthesized)
tatacattctctaaatttttccagtttatcgtgtggcttattggaaaaaaaaaagcatatacactgactgcatgttttgtctccccaactaaatgataagtgcctagagggcaggaacac

SEQ ID NO: 572544 - DNA, 120 bp, Artificial Sequence
  ENSG00000170959_44 (sequence is synthesized)
ccttggttttatttacttgggacagagctctacccacaagggctcactgataaaactcatcagtcccaccccacagcaacatgatggggacatgaggttcagttcttctactcttggcct

SEQ ID NO: 572545 - DNA, 120 bp, Artificial Sequence
  ENSG00000170959_45 (sequence is synthesized)
gagccgcaaaccaaaattacaacagtacaatgggaatagaggatctgctttatagaatttcctttcagtcagctgctcagaaactacaatcctcagagtgaaattaaatggagttatact

SEQ ID NO: 572546 - DNA, 120 bp, Artificial Sequence
  ENSG00000170959_46 (sequence is synthesized)
gggatagtcctctctgcttttcagaggaaagaaacacttctcgaaattgtgcaaatgaaagaaatgtcatggtataaactagacatcttatatccttaaaatatatctttgatgattata

SEQ ID NO: 572547 - DNA, 120 bp, Artificial Sequence
  ENSG00000170959_47 (sequence is synthesized)
catattggtttcaaatcccaagtttgaagaaacatccaaaagttatgtgaaattacttatagatgaattgacaacatttgagacttcgacaggcaatcatgaagcagttctcaagttgat

SEQ ID NO: 572548 - DNA, 120 bp, Artificial Sequence
  ENSG00000170959_48 (sequence is synthesized)
acaggcaatcatgaagcagttctcaagttgatttggtttatatagctctttaagaatcttttggaaagccataatctcacaaaatacagatatgcaattttttttttttgagatggagtc

SEQ ID NO: 572549 - DNA, 120 bp, Artificial Sequence
  ENSG00000170959_49 (sequence is synthesized)
aaaaaatgtttgtgcacagaactgtggatgtttgtcacagaactttccaaataaagaagttctgataaaagagaagatatttctcatttccataatctttaaggtgtgggggatacgtaa

SEQ ID NO: 572550 - DNA, 120 bp, Artificial Sequence
  ENSG00000170959_50 (sequence is synthesized)
tctggacttctcaaatggatgatttctaaatacgcgtcagatgaagtgattctaactttctctgtagtaatatcttattttgttttattcaaaaacaataaaccatgtagatttattagc

SEQ ID NO: 572551 - DNA, 120 bp, Artificial Sequence
  ENSG00000170959_51 (sequence is synthesized)
aattccatcacacctttgcgaggactactttgggtctctaagggagaaggtttcagcccctcaggagctaagatgtacatccaaggagttcttttggccctgtaccaacgattaaagtct

SEQ ID NO: 572552 - DNA, 120 bp, Artificial Sequence
  ENSG00000170959_52 (sequence is synthesized)
gcaaaaaaatattataaacagttgaacctggtcatgaatgaacagaaggagaaaattacagaaaaagtcattctttcaatgacggcaaaggaacaccataaggaacaggaagaagtgagc

SEQ ID NO: 572553 - DNA, 120 bp, Artificial Sequence
  ENSG00000170959_53 (sequence is synthesized)
aggctgattgatgaattgcagacagctatcaaaagtaacataggtcatctctgtaaacttggcccccaattacaggctgagcaggagcaattctcctcttatgtctaccaacacattaaa

SEQ ID NO: 572554 - DNA, 120 bp, Artificial Sequence
  ENSG00000170959_54 (sequence is synthesized)
agccttccagcaaacacgcttgtcccaggaggcctgcagcttaaggtatttgaaaatggtaaaaacactggagagatctctgttggtatcagtaaaaaagatttgggatcggatagccca

SEQ ID NO: 572555 - DNA, 120 bp, Artificial Sequence
  ENSG00000170959_55 (sequence is synthesized)
attcaaactgaccatatgatggaaagattacttctcaagattcatcaaaggcttcaaggttcttccatcaacccaccaggcctcaattattcttcaatgcggctttttgatgagaatggc

SEQ ID NO: 572556 - DNA, 120 bp, Artificial Sequence
  ENSG00000170959_56 (sequence is synthesized)
caagaaattaagaatccactttcgctgaagaatgagcaaaaaatttgggtctcttatggtagagcatacagatctccactaaatcttgctttgggtttgacctttgaccgagtgagtgca

SEQ ID NO: 572557 - DNA, 120 bp, Artificial Sequence
  ENSG00000170959_57 (sequence is synthesized)
tttgccagaggtgatatcatggttgcatataagacctttttggatcctaatgctgttctgctacctggatgtggcaattgggaagtttgtgagggatttccaattaatttcaactgtacc

SEQ ID NO: 572558 - DNA, 120 bp, Artificial Sequence
  ENSG00000170959_58 (sequence is synthesized)
agtcaacagatacctgaccagtttgaaaaggtggacttggagaaccattttctacagaacaaggtagatcccaatattgtccttcatgcctctgtttccattggaaagtggagtttctca

SEQ ID NO: 572559 - DNA, 120 bp, Artificial Sequence
  ENSG00000170959_59 (sequence is synthesized)
ggcagtgaagcaagcagcaggagtcaaatagcgccatcgatcctgtggcctgtagccagtgtgtggctgatcaccaagactggaatgatcctgagccgagcgataactcagggctgcctg

SEQ ID NO: 572560 - DNA, 120 bp, Artificial Sequence
  ENSG00000170959_60 (sequence is synthesized)
gctattggtcatcctatcagagtcaaggctgctgagggaacatcactagaaggatataaattaatcttacagaaaagacatagtggagatgactctcagaagtgggtgtttggaactgat

SEQ ID NO: 572561 - DNA, 120 bp, Artificial Sequence
  ENSG00000170959_61 (sequence is synthesized)
ggttgcatttattcaaaggcttatcctcagtttgttctgacctacctagaggagctaaatgcacaagtagatgtgacccagacagagtatcacattcaccatggtgcctggaccacagct

SEQ ID NO: 572562 - DNA, 120 bp, Artificial Sequence
  ENSG00000170959_62 (sequence is synthesized)
catcaggaacatggcagaaacttagcagaagaggttctgcaagaaagtgccagcaaccttggtctgaagcaactgccagaaccctcagacacccatttaatgccagaaggttctcttgag

SEQ ID NO: 572563 - DNA, 120 bp, Artificial Sequence
  ENSG00000170959_63 (sequence is synthesized)
gattaagaagtataagctatgagtcaacaaggaagaaacaagaaaaggaaggagacagagttgatgaataaaggagaaggaagggagagagaagaaactcacagaaaaagtttggtgttc

SEQ ID NO: 572564 - DNA, 120 bp, Artificial Sequence
  ENSG00000170959_64 (sequence is synthesized)
cagaaatcaaggctatgcattgagccagtttatttagtcatatagtcactgtgaagaaagatcagctgggctgattgtccaaatgggcctgaaaattaagtaaaaatactaaatctagga

SEQ ID NO: 572565 - DNA, 120 bp, Artificial Sequence
  ENSG00000170959_65 (sequence is synthesized)
aaaccatctaacaaacaacaccctgagtgagactccaattctcctgttagttccttgacaagaaactttcaaaatagaatgatgactaaggaagtatgaacaatatagaaatatggaatt

SEQ ID NO: 572566 - DNA, 120 bp, Artificial Sequence
  ENSG00000170959_66 (sequence is synthesized)
atcttggtaatgtctcagactgcattaatactaaaaactatgtacctctcagtggtgacagctgctttgagaactgatttcatgctgtcctcacttttaaatattattcatactaaaagg

SEQ ID NO: 572567 - DNA, 120 bp, Artificial Sequence
  ENSG00000170959_67 (sequence is synthesized)
caattgataatatttttatgaacaaacagcatttaatatatctagggatatcagtattttttaaatatggtaaagccttattgaaaaccaacattaataaattcttttggtttcttttgt

SEQ ID NO: 572568 - DNA, 120 bp, Artificial Sequence
  ENSG00000170959_68 (sequence is synthesized)
gactaagttcactggaaaaaattagaggaactcaagttattttctcactctatgggggaaaagttgtgaattgaaaaattgtgcttctaaacacttaaaggtaaggagcaatggattttc

SEQ ID NO: 572569 - DNA, 120 bp, Artificial Sequence
  ENSG00000170959_69 (sequence is synthesized)
atattcaaggaaggaattgtggtaaaaagtaagattaaaaagatgtacgattttggaatgagctgttggatagttattttaaagtatctaaattaaaatatatccatttggacgggccat

SEQ ID NO: 572570 - DNA, 120 bp, Artificial Sequence
  ENSG00000170959_70 (sequence is synthesized)
gccagacagaacaaagctaaaagtttattactctattgagagatgataataagtagctaccagaataaagaggggggaaaaggagacgtgggaaggctcaggagagaacattgaagaata

SEQ ID NO: 572571 - DNA, 120 bp, Artificial Sequence
  ENSG00000170959_71 (sequence is synthesized)
tattatattgttaatagcaaatagataaaagaggactaatatagctatgaaacttagattgctggttaagagctggactcccaaaacgaacacatgctctctctcttatgagagagagat

SEQ ID NO: 572572 - DNA, 120 bp, Artificial Sequence
  ENSG00000170959_72 (sequence is synthesized)
atcagtgtggctgaggtatgtaatgatctgagctctgctaatgcatgtatggcaacaatttggaaactttgatgcattcattatctgccttgcactcaagttcatctccactcatccaat

SEQ ID NO: 572573 - DNA, 120 bp, Artificial Sequence
  ENSG00000170959_73 (sequence is synthesized)
tcatcttcctcagatgcacctttaccattctacctgcattgatttccttttccccattgtaatttaaaatgcattgtctattaatagttcaatagactctttgaagttaattgggcactt

SEQ ID NO: 572574 - DNA, 120 bp, Artificial Sequence
  ENSG00000170959_74 (sequence is synthesized)
caagtttgagaaggagctaagcatactggaaatgttttagattccagtcatcaagagttctaatcttattaactggtctgacctctgagtcttagtttttcttatctgcaaaatgacaat

SEQ ID NO: 572575 - DNA, 120 bp, Artificial Sequence
  ENSG00000170959_75 (sequence is synthesized)
gaaccatcggattttctgctgtatttttctgagttcttggttgcaagcaacagaaatctatcatttacaacaaaagcaacgaggagattacatgaagcgaaagagggggctcacagaatt

SEQ ID NO: 572576 - DNA, 120 bp, Artificial Sequence
  ENSG00000170959_76 (sequence is synthesized)
gaagggatgccggagaacaagaagctgaagaaaatctcaacattgaaggagccttggacaaccacctaatcctatattcattgaatagttgaactgtatccacccggcgtaatacccatg

SEQ ID NO: 572577 - DNA, 120 bp, Artificial Sequence
  ENSG00000170959_77 (sequence is synthesized)
gcaactggtcttccacatatgatgaaatagcctctgagaggttaagtcactcacccaaaatttccactgccaggaagtggtagtgatgggattcaaacctgggtggccctgagaccagag

SEQ ID NO: 572578 - DNA, 120 bp, Artificial Sequence
  ENSG00000170959_78 (sequence is synthesized)
cttccgctctacccacttcactatacttctcttactacaggtacacagcccttttatctctgctttcctgaagcagcctttgtaagtggaaggattgtactgaaggctcagcagcaatag

SEQ ID NO: 572579 - DNA, 120 bp, Artificial Sequence
  ENSG00000170959_79 (sequence is synthesized)
agctaatgaaatggaagctgggcagtgctgagtccctgggtcacagttaccgagaggaaaagtgggctggctgagatttcatcccaggctgcctgctacgaagctcctcatctgcctccc

SEQ ID NO: 572580 - DNA, 120 bp, Artificial Sequence
  ENSG00000170959_80 (sequence is synthesized)
tcgaatcaagtgctacatccaataatagggactaaacccacatctgtagcttctgagtcgagagatctgaatagagaaatcagcagttaaaataaaattaaaatagctctgaacatttaa

SEQ ID NO: 572581 - DNA, 120 bp, Artificial Sequence
  ENSG00000170959_81 (sequence is synthesized)
ttgtggctggaacattccccatggtaagtggctatcacttaaatgctgcttgcatcttcagaggtaatgacaatggcaattcttcttaaagaaaaagcagtgggattgagtgataaatgt

SEQ ID NO: 572582 - DNA, 120 bp, Artificial Sequence
  ENSG00000170959_82 (sequence is synthesized)
ccctggccagattcaccagttaaagctgatgagatgaagatctctgtttacttaaagacattttatttgattgtatgtcagtggatacagacttagaaaaactagaaaccagaattcagt

SEQ ID NO: 572583 - DNA, 120 bp, Artificial Sequence
  ENSG00000170959_83 (sequence is synthesized)
ttttagattggctctagagcagagatctataagaaagaggaaaacaaagctactggattttcttccttcttgtgatagactgaatgcctttttctgccttgtttctcatgccagcttcaa

SEQ ID NO: 572584 - DNA, 120 bp, Artificial Sequence
  ENSG00000170959_84 (sequence is synthesized)
aatcatccaagagatgccacctcattcaccatctggagtatctgggcatttatgtgttgataggatgttttattttattttcaaattggggaagcaggggctgtgttaggaggaactacc

SEQ ID NO: 572585 - DNA, 120 bp, Artificial Sequence
  ENSG00000170959_85 (sequence is synthesized)
tggtctgccttgggggctgctcctcacagtcataggaagagagaagaagctagaaggcccaaacccagctttgtccttgcactacttggtgattatcttgactattcactctggccaatg

SEQ ID NO: 572586 - DNA, 120 bp, Artificial Sequence
  ENSG00000170959_86 (sequence is synthesized)
cctttagcaatgtattttacaagtgatatttgatatgatatggagttaccctgcagacttccttgcaagcgcacatatctattccctcacctctttggctgaaaatattttttttaaatt

SEQ ID NO: 572587 - DNA, 120 bp, Artificial Sequence
  ENSG00000170959_87 (sequence is synthesized)
aaggtattgttactcaataaactaagcaaaatacagaagttagcaactccaagattcacccagggatccacagctggcttttatggtcttggacaaaaattttaatctttcatcctgttt

SEQ ID NO: 572588 - DNA, 120 bp, Artificial Sequence
  ENSG00000170959_88 (sequence is synthesized)
ttccatctgcaaaatggaggtaataatacctgtcagttcttggtttgaaggttaactacttacttattttaaagcggtttatcagtatgaagtattacaacagttgtataacataaagca

SEQ ID NO: 572589 - DNA, 120 bp, Artificial Sequence
  ENSG00000170959_89 (sequence is synthesized)
acaaatttgaaagtggatttttaagttgaacaattcttagaagatactctgatgctaaaatatattaatatatgtcagctgccatgttaaatttgtggagataggaaatttacagctgga

SEQ ID NO: 572590 - DNA, 120 bp, Artificial Sequence
  ENSG00000170959_90 (sequence is synthesized)
ttggactactgttgtgaaattaggtaggacaatctaatatccaaaatagtctgtaatcaaagatcagcatcattagtaattcagctttctattttctcaaattcaattattttttttttc

SEQ ID NO: 572591 - DNA, 120 bp, Artificial Sequence
  ENSG00000170959_91 (sequence is synthesized)
ctattttttgataactgcttaaggttaatgtattctagattcctctccagtaacaccaataatgtataggtttaatatctgatgtcttgacattataaatgtttgacttttctctctcat

SEQ ID NO: 572592 - DNA, 120 bp, Artificial Sequence
  ENSG00000170959_92 (sequence is synthesized)
acactttgtctcttttcctttttctgtatcctgtgagatcttctccacctagtctgccctaataatgatttgaatttctgtaatattgagtcttttttctttcttaccttctctcctctt

SEQ ID NO: 572593 - DNA, 120 bp, Artificial Sequence
  ENSG00000170959_93 (sequence is synthesized)
gtcattcagctctctcttcatcctcacttgaaaccctatttcttctctcactagcagctatacaactttggttattatatttaacctctttgttctccatttttctcatcaacaaaaggt

SEQ ID NO: 572594 - DNA, 120 bp, Artificial Sequence
  ENSG00000170959_94 (sequence is synthesized)
ggatactaattatttccacagaacaaaattagattgttcttgagaacttttagaaaaatacccagtccctagaaatgtgtcaatatgttttaatcagtattactgttatcagcagcctca

SEQ ID NO: 572595 - DNA, 120 bp, Artificial Sequence
  ENSG00000170959_95 (sequence is synthesized)
gcatctctcctgtatctgagcaatactcctttcctttaagctgtggttgtctcgtttctgtgtgtatctgtgagtatatttacacacagaagtcatattttttgaatttaggggtaacac

SEQ ID NO: 572596 - DNA, 120 bp, Artificial Sequence
  ENSG00000170959_96 (sequence is synthesized)
aacacagatacttttgaaaatgtactcctgctgtaaatctttttcaaaatcttcaccttgagtacaatgtaccctttttttatgttgtagaatattttcattagctttacattgttgcta

SEQ ID NO: 572597 - DNA, 120 bp, Artificial Sequence
  ENSG00000170959_97 (sequence is synthesized)
ttgttgatttttctatttatatttccttgtacaaggagagatcttttgataacagacagaataggttagttctctttggtgaccctagacatctacttgggagctgtcagaatcctccct

SEQ ID NO: 572598 - DNA, 120 bp, Artificial Sequence
  ENSG00000170959_98 (sequence is synthesized)
caatggtaggttgaaggattggtttgtatgcagagtatttaatcaaattgcttctgactggatggtatttggcaggagtagggctgcatttaaccaacatggcacatgtatacatatgta

SEQ ID NO: 572599 - DNA, 120 bp, Artificial Sequence
  ENSG00000170959_99 (sequence is synthesized)
ctagaacttaaagtatgataaaaaaatatataaaaatagataacattaaaaaaagactactctcctgttggtcctctctgactatcctattctatagaggggaatatatttttggataat

SEQ ID NO: 572600 - DNA, 120 bp, Artificial Sequence
  ENSG00000170959_100 (sequence is synthesized)
ccatcactcttcttgtcttggctcatattcctgatgcatttgccagatgcaaggtgtcatcacatgcccagccctgacccctgccattctgccttgttgtgagttgtagcatctaaacag

SEQ ID NO: 572601 - DNA, 120 bp, Artificial Sequence
  ENSG00000170961_0 (sequence is synthesized)
agacccccttaagttggaggaggcagaagggcaacaacggcggggaaggagaagtcaagacgtctggaaagaattacccagtcctggcttcgagcagcccattgaaccagagacttgaaa

SEQ ID NO: 572602 - DNA, 120 bp, Artificial Sequence
  ENSG00000170961_1 (sequence is synthesized)
ttcgagcagcccattgaaccagagacttgaaacagccccagccaaagacttttctcccaattctgcgcttcctgggttctgctgagtcttccacaggctttttttttttttttttttttt

SEQ ID NO: 572603 - DNA, 120 bp, Artificial Sequence
  ENSG00000170961_2 (sequence is synthesized)
aagaaaagaaaagaaaaaagaaaagttaatttatttttaaagcataatttttttaagaattagactgaagtgcaacggaaacataaagagaatattagtgaaattattttttaaagtggg

SEQ ID NO: 572604 - DNA, 120 bp, Artificial Sequence
  ENSG00000170961_3 (sequence is synthesized)
acataaagagaatattagtgaaattattttttaaagtggggaagaatcaaacatttaagactcccctatcctttttaaatgttgtttttaaatttcttattttttttggccggtcgtctc

SEQ ID NO: 572605 - DNA, 120 bp, Artificial Sequence
  ENSG00000170961_4 (sequence is synthesized)
aaattcatctgatctcttattacctcaattttggaaactgcccgccaccgaccctccgggaccacacagacaggctgaggacgactttatgaccaagagctgaacaagatgcattgtgag

SEQ ID NO: 572606 - DNA, 120 bp, Artificial Sequence
  ENSG00000170961_5 (sequence is synthesized)
aggtttctatgtatcctgagaataattggaaccacactctttggagtctctctcctccttggaatcacagctgcttatattgttggctaccagtttatccaaacggataattactatttc

SEQ ID NO: 572607 - DNA, 120 bp, Artificial Sequence
  ENSG00000170961_6 (sequence is synthesized)
tcttttggactgtatggtgcctttttggcatcacacctcatcatccaaagcctgtttgcctttttggagcaccgaaaaatgaaaaaatccctagaaacccccataaagttgaacaaaaca

SEQ ID NO: 572608 - DNA, 120 bp, Artificial Sequence
  ENSG00000170961_7 (sequence is synthesized)
gttgccctttgcatcgctgcctatcaagaagatccagactacttaaggaaatgtttgcaatctgtgaaaaggctaacctaccctgggattaaagttgtcatggtcatagatgggaactca

SEQ ID NO: 572609 - DNA, 120 bp, Artificial Sequence
  ENSG00000170961_8 (sequence is synthesized)
gaagatgacctttacatgatggacatcttcagtgaagtcatgggcagagacaaatcagccacttatatctggaagaacaacttccacgaaaagggtcccggtgagacagatgagtcacat

SEQ ID NO: 572610 - DNA, 120 bp, Artificial Sequence
  ENSG00000170961_9 (sequence is synthesized)
aaagaaagctcgcaacacgtaacgcaattggtcttgtccaacaaaagtatctgcatcatgcaaaaatggggtggaaaaagagaagtcatgtacacagccttcagagcactgggacgaagt

SEQ ID NO: 572611 - DNA, 120 bp, Artificial Sequence
  ENSG00000170961_10 (sequence is synthesized)
gtggattatgtacaggtttgtgattcagacactatgcttgacccagcctcatctgtggagatggtaaaagttttagaagaagatcccatggttggaggtgttgggggagatgtccagatt

SEQ ID NO: 572612 - DNA, 120 bp, Artificial Sequence
  ENSG00000170961_11 (sequence is synthesized)
ttaaacaagtacgattcctggatctcattcctcagcagtgtaagatattggatggcttttaatatagaaagggcctgtcagtcttattttgggtgtgttcagtgcattagtggacctctg

SEQ ID NO: 572613 - DNA, 120 bp, Artificial Sequence
  ENSG00000170961_12 (sequence is synthesized)
ggaatgtacagaaactccttgttgcatgagtttgtggaagattggtacaatcaagaatttatgggcaaccaatgtagctttggtgatgacaggcatctcacgaaccgggtgctgagcctg

SEQ ID NO: 572614 - DNA, 120 bp, Artificial Sequence
  ENSG00000170961_13 (sequence is synthesized)
ggctatgcaacaaaatacacagctcgatctaagtgccttactgaaacacctatagaatatctcagatggctaaaccagcagacccgttggagcaagtcctacttccgagaatggctgtac

SEQ ID NO: 572615 - DNA, 120 bp, Artificial Sequence
  ENSG00000170961_14 (sequence is synthesized)
aatgcaatgtggtttcacaaacatcacttgtggatgacctacgaagcgattatcactggattctttcctttctttctcattgccacagtaatccagctcttctaccggggtaaaatttgg

SEQ ID NO: 572616 - DNA, 120 bp, Artificial Sequence
  ENSG00000170961_15 (sequence is synthesized)
aacattctcctcttcttgttaactgtccagctagtaggtctcataaaatcatcttttgccagctgccttagaggaaatatcgtcatggtcttcatgtctctctactcagtgttatacatg

SEQ ID NO: 572617 - DNA, 120 bp, Artificial Sequence
  ENSG00000170961_16 (sequence is synthesized)
tcgagtttacttcccgccaagatgtttgcaattgcaacaataaacaaagctgggtggggcacatcaggaaggaaaaccattgttgttaatttcataggactcattccagtatcagtttgg

SEQ ID NO: 572618 - DNA, 120 bp, Artificial Sequence
  ENSG00000170961_17 (sequence is synthesized)
aggagtctaaaaggccattttcagaatccaaacagacagttctaattgttggaacgttgctctatgcatgctattgggtcatgcttttgacgctgtatgtagttctcatcaataagtgtg

SEQ ID NO: 572619 - DNA, 120 bp, Artificial Sequence
  ENSG00000170961_18 (sequence is synthesized)
gcaggcggaagaagggacaacaatatgacatggtgcttgatgtatgatcttccatgttttgacgtttgcagtcacacacaacaccttagttcctctaggggctgtacagtattgtggcat

SEQ ID NO: 572620 - DNA, 120 bp, Artificial Sequence
  ENSG00000170961_19 (sequence is synthesized)
cagataatgccaccaaaggagacatatcactgctgctgggacttgaacaaagacatttatatgggtttattttcattctgccaaagtaaaacaatacatcaacaagaagaaactcagatt

SEQ ID NO: 572621 - DNA, 120 bp, Artificial Sequence
  ENSG00000170961_20 (sequence is synthesized)
taacctgttatttctatgaaaatgggatgaattctttgtttatgcactttttccttactgtgcatccgcctgaaagtgttttgccctatatacctcactagccatgctttatgtgggtta

SEQ ID NO: 572622 - DNA, 120 bp, Artificial Sequence
  ENSG00000170961_21 (sequence is synthesized)
tcatggaagaaaaggattttggaaactcaaggaaaagttctttcaacctatacaacctaacttatggactgttttgatagatgataattttttttttttaggaaggattttctttttaac

SEQ ID NO: 572623 - DNA, 120 bp, Artificial Sequence
  ENSG00000170961_22 (sequence is synthesized)
tttaccaaatgaaatgccaaaggaagttttaaaggccgttggctgtgctgtattttgatataattgtactgtgtttttaaattttgtatgccaatcttaaagacaaattttgcatattct

SEQ ID NO: 572624 - DNA, 120 bp, Artificial Sequence
  ENSG00000170961_23 (sequence is synthesized)
ctattttacttttctgccaaaataaacctgttcttccttttttaaaataaaataagttcttaaaaaatttatacttaaaaaatcctgcccaaaatgtgaagcttggttgactgatgttca

SEQ ID NO: 572625 - DNA, 120 bp, Artificial Sequence
  ENSG00000170961_24 (sequence is synthesized)
agaaagaataaaatgtttctctctctctaccttttaaaattgaatagtttatttctgtgaaagaagtatttaaactttcaatattttaactttttgtttttatttcttttagaaaaggcc

SEQ ID NO: 572626 - DNA, 120 bp, Artificial Sequence
  ENSG00000170961_25 (sequence is synthesized)
ggccaatatacctatcacactttggaagtaaaaatacacactttcgtgtgtacctaaaaaaaaaatcgttgaaaatcaaggccaaaggtagtgcaattttttcattaagatttaaaaaaa

SEQ ID NO: 572627 - DNA, 120 bp, Artificial Sequence
  ENSG00000170961_26 (sequence is synthesized)
agggaatgatagtctttgaaagaaaacagtaggcatccagcactggacaaaacatgggtatcaaagatgaataatctttggagattctggcagtgttttcccagaacaagtcaagtggaa

SEQ ID NO: 572628 - DNA, 120 bp, Artificial Sequence
  ENSG00000170961_27 (sequence is synthesized)
agtggagaaattatctgtataattttggacacatacaatgcagtttatcaaaggttttgttctgtggcctgaatttactgggtcctacctacacattgaacatgttttgcctgtcttttt

SEQ ID NO: 572629 - DNA, 120 bp, Artificial Sequence
  ENSG00000170961_28 (sequence is synthesized)
tttttttttcaacttgccagttcactttacatgttagtataatgtttacacgggtgagttggataaattataaaacatataaattcaaaattggcagatagaatcaccaagtatctatcc

SEQ ID NO: 572630 - DNA, 120 bp, Artificial Sequence
  ENSG00000170961_29 (sequence is synthesized)
tcttttactttcaaatgaggaattttgtttttctgaattacacagatcatcacttcctatttcctgttctggacctgtataaaaatgtctacacagtagaagtgacatcaaggtttaata

SEQ ID NO: 572631 - DNA, 120 bp, Artificial Sequence
  ENSG00000170961_30 (sequence is synthesized)
agtatatcaatgattggcacatataaaaattgttgaaccacatactctgaacttggctaatttagttactgcaaggcctccattatccagttttattttttacacgattgaccttgcctt

SEQ ID NO: 572632 - DNA, 120 bp, Artificial Sequence
  ENSG00000170961_31 (sequence is synthesized)
gtagctggtgctgtgtagacctgtgttgaaaacacaatcggaatatatgaataattgaataaacagcattatggtgaggcagagacacatggagaagtgttaaaaaaaaaatgggcttcc

SEQ ID NO: 572633 - DNA, 120 bp, Artificial Sequence
  ENSG00000170961_32 (sequence is synthesized)
tgcctttctgcctcttttttatgcagtcatctatgttacatctatcctgcctaagaaaaagctgcacatcctaccttcagagtacaaaaaggtacatctgagactcaagactctcactga

SEQ ID NO: 572634 - DNA, 120 bp, Artificial Sequence
  ENSG00000170961_33 (sequence is synthesized)
ttggagagcttgtggaaaacaaaacacaccatgccaataaatgagatgaaaacttgagtttgcctttttaactatttatgttctaagttaagctttgataacattcaaatgtcaaattct

SEQ ID NO: 572635 - DNA, 120 bp, Artificial Sequence
  ENSG00000170961_34 (sequence is synthesized)
acattcaaatgtcaaattctctcattcttataaaaagttgaattaattgcctgtatttattttagcaattattcaatgtatttccagtataggatgtatagtataattaattttttgtaa

SEQ ID NO: 572636 - DNA, 120 bp, Artificial Sequence
  ENSG00000170962_0 (sequence is synthesized)
ggcagagcaggtttaggcccggcctgggaaactggggagctgaggtgctcgcgccgccgctctgagcccgagtgcgcgcctctcaggggccgcggccggggctggagaacgctgctgctc

SEQ ID NO: 572637 - DNA, 120 bp, Artificial Sequence
  ENSG00000170962_1 (sequence is synthesized)
cgctcgcctgccccgctagattcggcgctgcccgccccctgcagcctgtgctgcagctgccggccaccggagggggcgaacaaacaaacgtcaacctgttgtttgtcccgtcaccattta

SEQ ID NO: 572638 - DNA, 120 bp, Artificial Sequence
  ENSG00000170962_2 (sequence is synthesized)
tcagctcagcaccacaaggaagtgcggcacccacacgcgctcggaaagttcagcatgcaggaagtttggggagagctcggcgattagcacagcgacccgggccagcgcagggcgagcgca

SEQ ID NO: 572639 - DNA, 120 bp, Artificial Sequence
  ENSG00000170962_3 (sequence is synthesized)
ggcggcgagagcgcagggcggcgcggcgtcggtcccgggagcagaacccggctttttcttggagcgacgctgtctctagtcgctgatcccaaatgcaccggctcatctttgtctacactc

SEQ ID NO: 572640 - DNA, 120 bp, Artificial Sequence
  ENSG00000170962_4 (sequence is synthesized)
taatctgcgcaaacttttgcagctgtcgggacacttctgcaaccccgcagagcgcatccatcaaagctttgcgcaacgccaacctcaggcgagatgacttgtaccgaagagatgagacca

SEQ ID NO: 572641 - DNA, 120 bp, Artificial Sequence
  ENSG00000170962_5 (sequence is synthesized)
tccaggtgaaaggaaacggctacgtgcagagtcctagattcccgaacagctaccccaggaacctgctcctgacatggcggcttcactctcaggagaatacacggatacagctagtgtttg

SEQ ID NO: 572642 - DNA, 120 bp, Artificial Sequence
  ENSG00000170962_6 (sequence is synthesized)
acaatcagtttggattagaggaagcagaaaatgatatctgtaggtatgattttgtggaagttgaagatatatccgaaaccagtaccattattagaggacgatggtgtggacacaaggaag

SEQ ID NO: 572643 - DNA, 120 bp, Artificial Sequence
  ENSG00000170962_7 (sequence is synthesized)
ttcctccaaggataaaatcaagaacgaaccaaattaaaatcacattcaagtccgatgactactttgtggctaaacctggattcaagatttattattctttgctggaagatttccaacccg

SEQ ID NO: 572644 - DNA, 120 bp, Artificial Sequence
  ENSG00000170962_8 (sequence is synthesized)
cagcagcttcagagaccaactgggaatctgtcacaagctctatttcaggggtatcctataactctccatcagtaacggatcccactctgattgcggatgctctggacaaaaaaattgcag

SEQ ID NO: 572645 - DNA, 120 bp, Artificial Sequence
  ENSG00000170962_9 (sequence is synthesized)
aatttgatacagtggaagatctgctcaagtacttcaatccagagtcatggcaagaagatcttgagaatatgtatctggacacccctcggtatcgaggcaggtcataccatgaccggaagt

SEQ ID NO: 572646 - DNA, 120 bp, Artificial Sequence
  ENSG00000170962_10 (sequence is synthesized)
caaaagttgacctggataggctcaatgatgatgccaagcgttacagttgcactcccaggaattactcggtcaatataagagaagagctgaagttggccaatgtggtcttctttccacgtt

SEQ ID NO: 572647 - DNA, 120 bp, Artificial Sequence
  ENSG00000170962_11 (sequence is synthesized)
gcctcctcgtgcagcgctgtggaggaaattgtggctgtggaactgtcaactggaggtcctgcacatgcaattcagggaaaaccgtgaaaaagtatcatgaggtattacagtttgagcctg

SEQ ID NO: 572648 - DNA, 120 bp, Artificial Sequence
  ENSG00000170962_12 (sequence is synthesized)
gccacatcaagaggaggggtagagctaagaccatggctctagttgacatccagttggatcaccatgaacgatgtgattgtatctgcagctcaagaccacctcgataagagaatgtgcaca

SEQ ID NO: 572649 - DNA, 120 bp, Artificial Sequence
  ENSG00000170962_13 (sequence is synthesized)
tccttacattaagcctgaaagaacctttagtttaaggagggtgagataagagacccttttcctaccagcaaccaaacttactactagcctgcaatgcaatgaacacaagtggttgctgag

SEQ ID NO: 572650 - DNA, 120 bp, Artificial Sequence
  ENSG00000170962_14 (sequence is synthesized)
tctcagccttgctttgttaatgccatggcaagtagaaaggtatatcatcaacttctatacctaagaatataggattgcatttaataatagtgtttgaggttatatatgcacaaacacaca

SEQ ID NO: 572651 - DNA, 120 bp, Artificial Sequence
  ENSG00000170962_15 (sequence is synthesized)
cagaaatatattcatgtctatgtgtatatagatcaaatgttttttttggtatatataaccaggtacaccagagcttacatatgtttgagttagactcttaaaatcctttgccaaaataag

SEQ ID NO: 572652 - DNA, 120 bp, Artificial Sequence
  ENSG00000170962_16 (sequence is synthesized)
ctcttaaagaaagcatcttgtatattaaaaatcaaaagatgaggctttcttacatatacatcttagttgattattaaaaaaggaaaaatatggtttccagagaaaaggccaatacctaag

SEQ ID NO: 572653 - DNA, 120 bp, Artificial Sequence
  ENSG00000170962_17 (sequence is synthesized)
cattttttccatgagaagcactgcatacttacctatgtggactataataacctgtctccaaaaccatgccataataatataagtgctttagaaattaaatcattgtgttttttatgcatt

SEQ ID NO: 572654 - DNA, 120 bp, Artificial Sequence
  ENSG00000170962_18 (sequence is synthesized)
ttgctgaggcatgcttattcatttaacacctatctcaaaaacttacttagaaggttttttattatagtcctacaaaagacaatgtataagctgtaacagaattttgaattgtttttcttt

SEQ ID NO: 572655 - DNA, 120 bp, Artificial Sequence
  ENSG00000170962_19 (sequence is synthesized)
gcaaaacccctccacaaaagcaaatcctttcaagaatggcatgggcattctgtatgaacctttccagatggtgttcagtgaaagatgtgggtagttgagaacttaaaaagtgaacattga

SEQ ID NO: 572656 - DNA, 120 bp, Artificial Sequence
  ENSG00000170962_20 (sequence is synthesized)
aacatcgacgtaactggaaattaggtgggatatttgataggatccatatctaataatggattcgaactctccaaactacaccaattaatttaatgtatcttgcttttgtgttcccgtctt

SEQ ID NO: 572657 - DNA, 120 bp, Artificial Sequence
  ENSG00000170962_21 (sequence is synthesized)
tttgaaatatagacatggatttataatggcattttatatttggcaggccatcatagattatttacaacctaaaagcttttgtgtatcaaaaaaatcacattttattaatgtaaatttcta

SEQ ID NO: 572658 - DNA, 120 bp, Artificial Sequence
  ENSG00000170962_22 (sequence is synthesized)
atcgtatacttgctcactgttctgatttcctgtttctgaaccaagtaaaatcagtcctagaggctatggttcttaatctatggagcttgctttaagaagccagttgtcaattgtggtaac

SEQ ID NO: 572659 - DNA, 120 bp, Artificial Sequence
  ENSG00000170962_23 (sequence is synthesized)
acaagtttggccctgctgtcctactgtttaatagaaaactgttttacattggttaatggtatttagagtaattttttctctctgcctcctttgtgtctgttttaaaggagactaactcca

SEQ ID NO: 572660 - DNA, 120 bp, Artificial Sequence
  ENSG00000170962_24 (sequence is synthesized)
ggagtaggaaatgattcatcatcctccaaagcaagaggcttaagagagaaacaccgaaattcagatagctcagggactgctaacagagaactacatttttcttattgccttgaaagttaa

SEQ ID NO: 572661 - DNA, 120 bp, Artificial Sequence
  ENSG00000170962_25 (sequence is synthesized)
aaggaaagcagatttcttcagtgactttgtggtcctactaactacaaccagtttgggtgacagggctggtaaagtcccagtgttagatgagtgacctaaatatacttagatttctaagta

SEQ ID NO: 572662 - DNA, 120 bp, Artificial Sequence
  ENSG00000170962_26 (sequence is synthesized)
tggtgctctcaggtccaagttcaactattcttaagcagtgcaattcttcccagttatttgagatgaaagatctctgcttattgaagatgtaccttctaaaactttcctaaaagtgtctga

SEQ ID NO: 572663 - DNA, 120 bp, Artificial Sequence
  ENSG00000170962_27 (sequence is synthesized)
tgtttttactcaagaggggagtggtaaaattaaatactctattgttcaattctctaaaatcccagaacacaatcagaaatagctcaggcagacactaataattaagaacgctcttcctct

SEQ ID NO: 572664 - DNA, 120 bp, Artificial Sequence
  ENSG00000170962_28 (sequence is synthesized)
tcataactgctttgcaagtttcctgtgaaaacatcagtttcctgtaccaaagtcaaaatgaacgttacatcactctaacctgaacagctcacaatgtagctgtaaatataaaaaatgaga

SEQ ID NO: 572665 - DNA, 120 bp, Artificial Sequence
  ENSG00000170962_29 (sequence is synthesized)
gtgttctacccagttttcaataaaccttccaggctgcaataaccagcaaggttttcagttaaagccctatctgcactttttatttattagctgaaatgtaagcaggcatattcactcact

SEQ ID NO: 572666 - DNA, 120 bp, Artificial Sequence
  ENSG00000170962_30 (sequence is synthesized)
tttctttgcctttcctgagagttttattaaaacttctcccttggttacctgttatcttttgcacttctaacatgtagccaataaatctatttgatagccatcaaaggaataaaaagctgg

SEQ ID NO: 572667 - DNA, 120 bp, Artificial Sequence
  ENSG00000170962_31 (sequence is synthesized)
ccgtacaaattacatttcaaaacaaaccctaataaatccacatttccgcatggctcattcacctggaataatgccttttattgaatatgttcttatagggcaaaacactttcataagtag

SEQ ID NO: 572668 - DNA, 120 bp, Artificial Sequence
  ENSG00000170962_32 (sequence is synthesized)
agttttttatgttttttgtcatatcggtaacatgcagctttttcctctcatagcattttctatagcgaatgtaatatgcctcttatcttcatgaaaaataaatattgcttttgaacaaaa

SEQ ID NO: 572669 - DNA, 120 bp, Artificial Sequence
  ENSG00000170962_33 (sequence is synthesized)
atctttgaggccgtaggagcccagggaacagtggtcctcgatgaggagtcgctccatgtggatgatctggatctcttcgacggggactctggactccgcttcgcagaggaccttgaagtt

SEQ ID NO: 572670 - DNA, 120 bp, Artificial Sequence
  ENSG00000170965_0 (sequence is synthesized)
atcagaaggatttgtataaagagtgactctcctatgaaggtaaaggccacccctcttcagttccagtgactgagatacatttttccaatcctgggggcaaatacagacacagcaagttcc

SEQ ID NO: 572671 - DNA, 120 bp, Artificial Sequence
  ENSG00000170965_1 (sequence is synthesized)
ttcttccctttggaaatttggcagctgccttcaccagtgagcacaaagccacatttcaaaggaaactgacaaattatccccagctgccagaagaagaaatcctcactggacggcttcctg

SEQ ID NO: 572672 - DNA, 120 bp, Artificial Sequence
  ENSG00000170965_2 (sequence is synthesized)
tttcctgtggttcattatctgattggctgcagggatgaaagtttttaagttcataggactgatgatcctcctcacctctgcgttttcagccggttcaggacaaagtccaatgactgtgct

SEQ ID NO: 572673 - DNA, 120 bp, Artificial Sequence
  ENSG00000170965_3 (sequence is synthesized)
gtgctccatagactggttcatggtcacagtgcaccccttcatgctaaacaacgatgtgtgtgtacactttcatgaactacacttgggcctgggttgccccccaaaccatgttcagccaca

SEQ ID NO: 572674 - DNA, 120 bp, Artificial Sequence
  ENSG00000170965_4 (sequence is synthesized)
cagggccaaagctgtctctcaggacatggttatctacagcactgagatacactactcttctaagggcacgccatctaagtttgtgatcccagtgtcatgtgctgccccccaaaagtcccc

SEQ ID NO: 572675 - DNA, 120 bp, Artificial Sequence
  ENSG00000170965_5 (sequence is synthesized)
atggctcaccaagccctgctccatgagagtagccagcaagagcagggccacagcccagaaggatgagaaatgctacgaggtgttcagcttgtcacagtccagtcaaaggcccaactgcga

SEQ ID NO: 572676 - DNA, 120 bp, Artificial Sequence
  ENSG00000170965_6 (sequence is synthesized)
ttgtccaccttgtgtcttcagtgaagaagagcatacccaggtcccttgtcaccaagcaggggctcaggaggctcaacctctgcagccatctcactttcttgatatttctgaggattggtc

SEQ ID NO: 572677 - DNA, 120 bp, Artificial Sequence
  ENSG00000170965_7 (sequence is synthesized)
tcttcacacagatgatatgattgggtccatgtgatcctcaggtttggggtctcctgaagatgctatttctagaattagtatatagtgtacaaatgtctgacaaataagtgctcttgtgac

SEQ ID NO: 572678 - DNA, 120 bp, Artificial Sequence
  ENSG00000170965_8 (sequence is synthesized)
cctcatgtgagcacttttgagaaagagaaacctatagcaacttcatgaattaagcctttttctatatttttatattcatgtgtaaacaaaaaataaaataaaattctgatcgcataaaaa

SEQ ID NO: 572679 - DNA, 120 bp, Artificial Sequence
  ENSG00000170965_9 (sequence is synthesized)
acctctaggaggagggtgaagcttcttgtcttccagacattcccgaggaaaacttacacgaggagtctgtcaaggagtgccaccctttggacaaagaaaacgagactgacaacgaagtct

SEQ ID NO: 572680 - DNA, 120 bp, Artificial Sequence
  ENSG00000170965_10 (sequence is synthesized)
aagaaggttagttttctgtgtgttcagtgtcccccttctctgataaccaacaggttaactttctaaagggaactgacaaaagcagaaattgtccttttacccaaatgagttgtgattgtt

SEQ ID NO: 572681 - DNA, 120 bp, Artificial Sequence
  ENSG00000170965_11 (sequence is synthesized)
tttgtaatattcctctccattcctactctaatttataccaggaaatagagtgtaagtgatcacaatggaacctctattgtttgcaagattcatattaatgcattctggttttttaagtgc

SEQ ID NO: 572682 - DNA, 120 bp, Artificial Sequence
  ENSG00000170965_12 (sequence is synthesized)
ttacaagatctaaattaatttttaaattagctagcatagtgtctttactcaatgagtagccatttaaaggctgaatgatgtcagccctggccatagagatttatgtgttgttatatttca

SEQ ID NO: 572683 - DNA, 120 bp, Artificial Sequence
  ENSG00000170965_13 (sequence is synthesized)
tttgcatttttaaccatctttgtacatgtgttatgcctctagcacttatgctgtataacaggagagagtctaatgcctagcacagtacactacatatagtaggtgctcactaaatgccat

SEQ ID NO: 572684 - DNA, 120 bp, Artificial Sequence
  ENSG00000170965_14 (sequence is synthesized)
gaggaaacagccctagctattcctgaggcccccattactgcctggtcaagggctttggggcacatactgcctgtgcgtccatcctcatgaactccaaatctccccgctactccacaggac

SEQ ID NO: 572685 - DNA, 120 bp, Artificial Sequence
  ENSG00000170967_0 (sequence is synthesized)
actgaggctgggagacagcccccagacagatgagtgtccgcgcctctctgagaggtgaatgagcccggacggtccctacctaccaagtcctgaggagcagcggcaccaacgacgcaggcc

SEQ ID NO: 572686 - DNA, 120 bp, Artificial Sequence
  ENSG00000170967_1 (sequence is synthesized)
cgccccagcccgccagtgagccgcccatgccctctgctagcccggcccgcccgggcccccgccatgctgatcaccgtgtactgcgtgcggagggacctctccgaggtcaccttctctctc

SEQ ID NO: 572687 - DNA, 120 bp, Artificial Sequence
  ENSG00000170967_2 (sequence is synthesized)
caggtcagccccgactttgagctccgaaacttcaaggtcctctgcgaagcggagtccagagtccccgtcgaagagatccagatcatccacatggagcgactcctcatcgaggaccactgt

SEQ ID NO: 572688 - DNA, 120 bp, Artificial Sequence
  ENSG00000170967_3 (sequence is synthesized)
tccctgggctcctacggcctcaaagatggcgatatcgtggttttactgcagaaggacaatgtgggacctcgggctccagggcgtgccccgaaccagcctcgtgtagacttcagtggcatt

SEQ ID NO: 572689 - DNA, 120 bp, Artificial Sequence
  ENSG00000170967_4 (sequence is synthesized)
gcggtgcctgggacgtccagctcccgtccacagcaccctggacagcagcagcagcgcacacccgctgcccagcggtcacagggcttggcgtcaggagagaaggtggccggcctgcaaggt

SEQ ID NO: 572690 - DNA, 120 bp, Artificial Sequence
  ENSG00000170967_5 (sequence is synthesized)
ctgggcagccccgccctgatccgcagcatgctgctctccaacccccacgatctgtccctgctcaaggaacgcaaccctcccttggcggaagccctgctcagcggaagccttgagaccttt

SEQ ID NO: 572691 - DNA, 120 bp, Artificial Sequence
  ENSG00000170967_6 (sequence is synthesized)
tctcaggtgctgatggagcagcaaagggaaaaggccttgagagagcaagagaggcttcgtctctacacagccgacccactggatcgggaagctcaggccaaaatagaagaggaaatccgg

SEQ ID NO: 572692 - DNA, 120 bp, Artificial Sequence
  ENSG00000170967_7 (sequence is synthesized)
cagcaaaacattgaagaaaacatgaatatagcgatagaagaggcccccgagagttttggacaagtgacgatgctctacattaactgcaaagtgaatgggcatcctttgaaggcttttgtt

SEQ ID NO: 572693 - DNA, 120 bp, Artificial Sequence
  ENSG00000170967_8 (sequence is synthesized)
gactcgggcgcccagatgaccattatgagccaggcttgtgccgagcgatgtaacatcatgaggctggtggaccgacggtgggctggggttgctaaaggagtgggcacacagagaattatt

SEQ ID NO: 572694 - DNA, 120 bp, Artificial Sequence
  ENSG00000170967_9 (sequence is synthesized)
ggccgtgttcatctagctcagattcaaattgaaggtgatttcttacagtgctctttctccatacttgaggatcaacccatggatatgcttctaggcctagatatgctccggagacatcaa

SEQ ID NO: 572695 - DNA, 120 bp, Artificial Sequence
  ENSG00000170967_10 (sequence is synthesized)
gcaccactggcacgcagacttattttcttcctgagggagagttgcccttatgctctaggatggtaagtgggcaagatgagtcttcggacaaggaaattacacattcagtcatggattcag

SEQ ID NO: 572696 - DNA, 120 bp, Artificial Sequence
  ENSG00000170967_11 (sequence is synthesized)
gacgaaaagagcattaaagcacgttataaatatgttaccaccttgagggagcctcaggtccccggcaattataagttaagagcttactggcaatgtaatcattaaaaaacatcagtaaca

SEQ ID NO: 572697 - DNA, 120 bp, Artificial Sequence
  ENSG00000170967_12 (sequence is synthesized)
actaaacctggccttgggactacgttctcagatgggtaactaacgtcaatcctgattccttggtcttggtccctcttccatttcccttgtccagagatcactgaaaggcatcctgggaag

SEQ ID NO: 572698 - DNA, 120 bp, Artificial Sequence
  ENSG00000170967_13 (sequence is synthesized)
gctctggaggctccagctgatttccagataatccatgaaaaagaaaaccagcttcttcctttagagacactatcctatcagattacaggtggcttatccaaatcattgctattttgcaga

SEQ ID NO: 572699 - DNA, 120 bp, Artificial Sequence
  ENSG00000170967_14 (sequence is synthesized)
attccctggaaaaatgctatggctgcagaccttacaaggcatccacataaaactatttcacatcagcactaataattctttctactgagagaaatatgcccattttcacaggttttgttt

SEQ ID NO: 572700 - DNA, 120 bp, Artificial Sequence
  ENSG00000170967_15 (sequence is synthesized)
tctttgggaagggtattagaaatggtaggtcagttacactatgatgttaactaatacttatacatgtctgtttggggcagcataaagaccaatttcctcatatttacaccttcccttccc

SEQ ID NO: 572701 - DNA, 120 bp, Artificial Sequence
  ENSG00000170967_16 (sequence is synthesized)
ctggatcccctgcagtcaccctgcaatccacagctaaagactatttttgccatatttgagaaagtggatttatctccaaggatgctacattaattttctatttctcctgcattcaaagaa

SEQ ID NO: 572702 - DNA, 120 bp, Artificial Sequence
  ENSG00000170967_17 (sequence is synthesized)
actctggctataaaacaaaggcaataaattagattttttaaaaaagaaattatggtacttcttgggagtcaagttgtacagtggtgggaatgagaggtggggacaggcagtggtccaggt

SEQ ID NO: 572703 - DNA, 120 bp, Artificial Sequence
  ENSG00000170967_18 (sequence is synthesized)
tctctaatagtcattgcaactagatcatctctctctctttttcaaagtaaaaatctgctttatacattaagctgctgctacatcagtattgtttgaacaaaggttttcactgttaaaata

SEQ ID NO: 572704 - DNA, 120 bp, Artificial Sequence
  ENSG00000170967_19 (sequence is synthesized)
acatttgaaaacttttgaatgagaagatctctaaggcctcattcagaattatccattctgacaatgttagtgtttattacaactgacagtgggtaatggaagatcctagacttaattaca

SEQ ID NO: 572705 - DNA, 120 bp, Artificial Sequence
  ENSG00000170967_20 (sequence is synthesized)
acccatggctaaagcacctgagagaaaagtttcagcttcctgaggccatcagatgcaggggaaatgtttcaggacaataatttatcaaaactagtattaaaacagcggattcaaaatcaa

SEQ ID NO: 572706 - DNA, 120 bp, Artificial Sequence
  ENSG00000170989_0 (sequence is synthesized)
ggcgcggcgctgggtgacttcgcgtagcaggcagggaactggccgcggcgagcgggactggccattggagtgctccgctgcggagggaggggaccccgactcgagtaagtttgcgagagc

SEQ ID NO: 572707 - DNA, 120 bp, Artificial Sequence
  ENSG00000170989_1 (sequence is synthesized)
actacgcagtcagtcgggggcagcagcaagatgcgaagcgagccgtacagatcccgggctctccgaacgcaacttcgccctgcttgagcgaggctgcggtttccgaggccctctccagcc

SEQ ID NO: 572708 - DNA, 120 bp, Artificial Sequence
  ENSG00000170989_2 (sequence is synthesized)
aaggaaaagctacacaaaaagcctggatcactcatcgaaccacccctgaagccagtgaaggctctctcgcctcgccctctagcgttcgtctggagtagcgccaccccggcttcctgggga

SEQ ID NO: 572709 - DNA, 120 bp, Artificial Sequence
  ENSG00000170989_3 (sequence is synthesized)
cacagggttggcaccatggggcccaccagcgtcccgctggtcaaggcccaccgcagctcggtctctgactacgtcaactatgatatcatcgtccggcattacaactacacgggaaagctg

SEQ ID NO: 572710 - DNA, 120 bp, Artificial Sequence
  ENSG00000170989_4 (sequence is synthesized)
aatatcagcgcggacaaggagaacagcattaaactgacctcggtggtgttcattctcatctgctgctttatcatcctggagaacatctttgtcttgctgaccatttggaaaaccaagaaa

SEQ ID NO: 572711 - DNA, 120 bp, Artificial Sequence
  ENSG00000170989_5 (sequence is synthesized)
ttccaccgacccatgtactattttattggcaatctggccctctcagacctgttggcaggagtagcctacacagctaacctgctcttgtctggggccaccacctacaagctcactcccgcc

SEQ ID NO: 572712 - DNA, 120 bp, Artificial Sequence
  ENSG00000170989_6 (sequence is synthesized)
cagtggtttctgcgggaagggagtatgtttgtggccctgtcagcctccgtgttcagtctcctcgccatcgccattgagcgctatatcacaatgctgaaaatgaaactccacaacgggagc

SEQ ID NO: 572713 - DNA, 120 bp, Artificial Sequence
  ENSG00000170989_7 (sequence is synthesized)
aataacttccgcctcttcctgctaatcagcgcctgctgggtcatctccctcatcctgggtggcctgcctatcatgggctggaactgcatcagtgcgctgtccagctgctccaccgtgctg

SEQ ID NO: 572714 - DNA, 120 bp, Artificial Sequence
  ENSG00000170989_8 (sequence is synthesized)
ccgctctaccacaagcactatatcctcttctgcaccacggtcttcactctgcttctgctctccatcgtcattctgtactgcagaatctactccttggtcaggactcggagccgccgcctg

SEQ ID NO: 572715 - DNA, 120 bp, Artificial Sequence
  ENSG00000170989_9 (sequence is synthesized)
acgttccgcaagaacatttccaaggccagccgcagctctgagaagtcgctggcgctgctcaagaccgtaattatcgtcctgagcgtcttcatcgcctgctgggcaccgctcttcatcctg

SEQ ID NO: 572716 - DNA, 120 bp, Artificial Sequence
  ENSG00000170989_10 (sequence is synthesized)
ctcctgctggatgtgggctgcaaggtgaagacctgtgacatcctcttcagagcggagtacttcctggtgttagctgtgctcaactccggcaccaaccccatcatttacactctgaccaac

SEQ ID NO: 572717 - DNA, 120 bp, Artificial Sequence
  ENSG00000170989_11 (sequence is synthesized)
aaggagatgcgtcgggccttcatccggatcatgtcctgctgcaagtgcccgagcggagactctgctggcaaattcaagcgacccatcatcgccggcatggaattcagccgcagcaaatcg

SEQ ID NO: 572718 - DNA, 120 bp, Artificial Sequence
  ENSG00000170989_12 (sequence is synthesized)
aggggacaacccagagaccattatgtcttctggaaacgtcaactcttcttcctagaactggaagctgtccacccaccggaagcgctctttacttggtcgctggccaccccagtgtttgga

SEQ ID NO: 572719 - DNA, 120 bp, Artificial Sequence
  ENSG00000170989_13 (sequence is synthesized)
aaaaaatctctgggcttcgactgctgccagggaggagctgctgcaagccagagggaggaagggggagaatacgaacagcctggtggtgtcgggtgttggtgggtagagttagttcctgtg

SEQ ID NO: 572720 - DNA, 120 bp, Artificial Sequence
  ENSG00000170989_14 (sequence is synthesized)
aacaatgcactgggaagggtggagatcaggtcccggcctggaatatattttctacccccctggagctttgattttgcactgagccaaaggtctagcattgtcaagctcctaaagggttca

SEQ ID NO: 572721 - DNA, 120 bp, Artificial Sequence
  ENSG00000170989_15 (sequence is synthesized)
tttggcccctcctcaaagactaatgtccccatgtgaaagcgtctctttgtctggagctttgaggagatgttttccttcactttagtttcaaacccaagtgagtgtgtgcacttctgcttc

SEQ ID NO: 572722 - DNA, 120 bp, Artificial Sequence
  ENSG00000170989_16 (sequence is synthesized)
tttagggatgccctgtacatcccacaccccaccctcccttcccttcatacccctcctcaacgttcttttactttatactttaactacctgagagttatcagagctggggttgtggaatga

SEQ ID NO: 572723 - DNA, 120 bp, Artificial Sequence
  ENSG00000170989_17 (sequence is synthesized)
tcgatcatctatagcaaataggctatgttgagtacgtaggctgtgggaagatgaagatggtttggaggtgtaaaacaatgtccttcgctgaggccaaagtttccatgtaagcgggatccg

SEQ ID NO: 572724 - DNA, 120 bp, Artificial Sequence
  ENSG00000170989_18 (sequence is synthesized)
ttttttggaatttggttgaagtcactttgatttctttaaaaaacatcttttcaatgaaatgtgttaccatttcatatccattgaagccgaaatctgcataaggaagcccactttatctaa

SEQ ID NO: 572725 - DNA, 120 bp, Artificial Sequence
  ENSG00000170989_19 (sequence is synthesized)
atgatattagccaggatccttggtgtcctaggagaaacagacaagcaaaacaaagtgaaaaccgaatggattaacttttgcaaaccaagggagatttcttagcaaatgagtctaacaaat

SEQ ID NO: 572726 - DNA, 120 bp, Artificial Sequence
  ENSG00000170989_20 (sequence is synthesized)
atgacatctgtctttggcacttttgttgatgtttatttcagaatgttgtgtgattcatttcaagcaacaacatggttgtattttgttgtgttaaaagtacttttcttgatttttgaatgt

SEQ ID NO: 572727 - DNA, 120 bp, Artificial Sequence
  ENSG00000170989_21 (sequence is synthesized)
atttgtttcagcagaagtcattttattggatttttctaacccgtgttaacaccattgaatgtgtatttcttaagaaaataccaccctcttgtgcccttaaaagcattactttaactggta

SEQ ID NO: 572728 - DNA, 120 bp, Artificial Sequence
  ENSG00000170989_22 (sequence is synthesized)
gggaacgccagaaacttttcagtccagctattcattagatagtaattgaagatatgtataaatattacaaagaataaaaatatattactgtctctttagtatggttttcagtgcaattaa

SEQ ID NO: 572729 - DNA, 120 bp, Artificial Sequence
  ENSG00000170989_23 (sequence is synthesized)
accgagagatgtcttgtttttttaaaaagaatagtatttaataggtttctgacttttgtggatcattttgcacatagctttatcaacttttaaacattaataaactgatttttttaaaga

SEQ ID NO: 572730 - DNA, 120 bp, Artificial Sequence
  ENSG00000170989_24 (sequence is synthesized)
acagcaaggcggggcgggcctggctgcccacacctcactgcgccctcggaccctaagcacacctgctcctagagagttattaatagagcccccaaatggcttacgctttcaaatgatttt

SEQ ID NO: 572731 - DNA, 120 bp, Artificial Sequence
  ENSG00000170989_25 (sequence is synthesized)
gggaaaatgcggagcttcttggcttgagcagcctctgctgttcgcggagttgctgggattgttctcatctctattacctcattttattgcattgctgcattaccttgaaatatttaagca

SEQ ID NO: 572732 - DNA, 120 bp, Artificial Sequence
  ENSG00000170989_26 (sequence is synthesized)
acttagaagtagacttctgctgaccagtgccgtcttagaaagtttctttgtaactttctagtcctaggagaggagtcaacgtgttgggggactgcagtaaataaaactgcccacgcaaat

SEQ ID NO: 572733 - DNA, 120 bp, Artificial Sequence
  ENSG00000170989_27 (sequence is synthesized)
tcctgaagaaaccacccagccttggcgcggcgctgggtgacttcgcgtagcaggcagggaactggccgcggcgagcgggactggccattggagtgctccgctgcggagggaggggacccc

SEQ ID NO: 572734 - DNA, 120 bp, Artificial Sequence
  ENSG00000170989_28 (sequence is synthesized)
agaatgagataaaaaccaccaaccttctgaataccacattggctagacactgtcttggcttctcccagcctatcttctgaaccacatagaagtatacagtatcagtgaagcagctagctg

SEQ ID NO: 572735 - DNA, 120 bp, Artificial Sequence
  ENSG00000170989_29 (sequence is synthesized)
taaaatgtgggctgagtagcataacacttttatctgaaaaccttcaattcatagtatctgaaagcattaatattctcagtcattaatttttccaactacaaaatgaaggcactttgcaag

SEQ ID NO: 572736 - DNA, 120 bp, Artificial Sequence
  ENSG00000170989_30 (sequence is synthesized)
catcacagacttattgtaatagttaattcttgtttttgattattgtcatcttttgggggattaaagtgttttggcatgttgggctctctaatcttttcgctactttcagaatttgtgctt

SEQ ID NO: 572737 - DNA, 120 bp, Artificial Sequence
  ENSG00000170989_31 (sequence is synthesized)
tcaagtgtcattgtatatgcacaggacacagttgggacatgaagataaacctcacctaatagagtagatgtcatttctgggtaaggttaactgtgggaaacagaaatgtgttcactaagg

SEQ ID NO: 572738 - DNA, 120 bp, Artificial Sequence
  ENSG00000170989_32 (sequence is synthesized)
aaaccttaggtcacaacctccagtttcctgaaggaaatgccaaaaatgctccaaagacaaaaggctggaaacaaactggaatgtctctctccatctgtctgctaaggcggaaggaatgat

SEQ ID NO: 572739 - DNA, 120 bp, Artificial Sequence
  ENSG00000170989_33 (sequence is synthesized)
ttcatgttacattcacttcctagactttcattacagagtcaagcataatggaaaagtatgtccattttgtgtttctgtggaagataaaatgttcatattctccgacttatcttcataagc

SEQ ID NO: 572740 - DNA, 120 bp, Artificial Sequence
  ENSG00000170989_34 (sequence is synthesized)
ggagatggggagctctttggtgacacttttccccctgtgaccacattatccagtgattagatgtactttcttcctggaaactccagactgtgcatttcattccaagaaagctgggtagtc

SEQ ID NO: 572741 - DNA, 120 bp, Artificial Sequence
  ENSG00000170989_35 (sequence is synthesized)
atggactgtggttttcctgggcacatgtgtggtagagccccagatcagaccaagaagcaaagacataagaagaaggaatccttggttgtctcccaacatgaatatctggttttaattcag

SEQ ID NO: 572742 - DNA, 120 bp, Artificial Sequence
  ENSG00000170989_36 (sequence is synthesized)
tgtattctcagaagtaagaatgagaaaaaaatcttagtaattatatgtttgtactaaaaaatacacatataaggctttgattttaaaattgtagtgtttttcaagaggagtgaaacagat

SEQ ID NO: 572743 - DNA, 120 bp, Artificial Sequence
  ENSG00000170989_37 (sequence is synthesized)
cctggacaatacttgacatattcttgtaaaaagttcaattgactcaaaatagtcaggaaagttatgaagtaacatcatataatactttatccccaacaatattaaatgtgattacaattt

SEQ ID NO: 572744 - DNA, 120 bp, Artificial Sequence
  ENSG00000170989_38 (sequence is synthesized)
tacagaatattcaaatcaaaatgttatataagacaaattattattcttgcttttacatctccttagaaggagaaacattcaattgttttaaaaatgttctatttatttttcagaaatgag

SEQ ID NO: 572745 - DNA, 83 bp, Artificial Sequence
  ENSG00000170989_39 (sequence is synthesized)
aattgttttaaaaatgttctatttatttttcagaaatgaggtgttgccttcttgcccaggctagtttcttgggctcaagtgat

SEQ ID NO: 572746 - DNA, 120 bp, Artificial Sequence
  ENSG00000170989_40 (sequence is synthesized)
acgtgccaccatgcctggctgatttttttttttttttaatgttttgtagagacaggatctcagtatgttgcgcaggctggtctttaattcctgggctcaagtgatcctcccatagatttg

SEQ ID NO: 572747 - DNA, 120 bp, Artificial Sequence
  ENSG00000170989_41 (sequence is synthesized)
tctgtgttttctctaaataggttataaataccttgagggaggaatcacaaataactaaaagaaacttttgtagagactatcagagtattatttccttgtggacacagtaaatgtatgatg

SEQ ID NO: 572748 - DNA, 120 bp, Artificial Sequence
  ENSG00000171004_0 (sequence is synthesized)
aagccaggctgacctttatgctcccagaatcatcagccttttcattggaaaccatggaaggacggttctgggaaaataatgaaaatcataccacaccatagagacaaccagaagccctgc

SEQ ID NO: 572749 - DNA, 120 bp, Artificial Sequence
  ENSG00000171004_1 (sequence is synthesized)
tcagatgacagagttctcctcgccttccagaaaatgcccccgcttccgctggagaatggaaattggcaaagagagacggaaaagctccaatttgcgcctttgctattttaggagaggttg

SEQ ID NO: 572750 - DNA, 120 bp, Artificial Sequence
  ENSG00000171004_2 (sequence is synthesized)
aaattacgagccaaagtggagtgatgcgctaagcggagtgacctccgtactccaagaaaagagaaaacccaggttctctgcttgtgaagtggctcgagctcttaggcgtgaggcattatt

SEQ ID NO: 572751 - DNA, 120 bp, Artificial Sequence
  ENSG00000171004_3 (sequence is synthesized)
atataaattcaagctcgctcgtgatccttagtaccctgagttgcctgaaggggggaatggcactgcctgcgtgtgcagtccgggagttcgagccgccgcggcaaccggagcgaggagcgc

SEQ ID NO: 572752 - DNA, 120 bp, Artificial Sequence
  ENSG00000171004_4 (sequence is synthesized)
ccgtccgcaccacctgtccccgccggcattccagagtagaggccgaattggcagcgagccggcccgggtcggtcgccgcctcagttcgcgcgggccctcctaggggtgtgtctcacggat

SEQ ID NO: 572753 - DNA, 120 bp, Artificial Sequence
  ENSG00000171004_5 (sequence is synthesized)
tccacacccggccgctcctggacaagccccgaaaggcgtcttcttccctggcgggagccgcgtgcgccccgcttttcgcgctgctgtcccggggccgccgcaggcggatgcacgtcctca

SEQ ID NO: 572754 - DNA, 120 bp, Artificial Sequence
  ENSG00000171004_6 (sequence is synthesized)
ggcgacgctgggacctgggctccctctgccgggccctgctcactcggggcctggccgccctgggccactcgctgaagcacgtgctcggtgcgatcttctccaagattttcggccccatgg

SEQ ID NO: 572755 - DNA, 120 bp, Artificial Sequence
  ENSG00000171004_7 (sequence is synthesized)
ccagcgtcgggaacatggatgagaaatccaacaagctgctgctagctttggtgatgctcttcctatttgccgtgatcgtcctccaatacgtgtgccccggcacagaatgccagctcctcc

SEQ ID NO: 572756 - DNA, 120 bp, Artificial Sequence
  ENSG00000171004_8 (sequence is synthesized)
gcctgcaggcgttcagctccccggtgccggacccgtaccgctcggaggatgagagctccgccaggttcgtgccccgctacaatttcacccgcggcgacctcctgcgcaaggtagacttcg

SEQ ID NO: 572757 - DNA, 120 bp, Artificial Sequence
  ENSG00000171004_9 (sequence is synthesized)
acatcaagggcgatgacctgatcgtgttcctgcacatccagaagaccgggggcaccactttcggccgccacttggtgcgtaacatccagctggagcagccgtgcgagtgccgcgtgggtc

SEQ ID NO: 572758 - DNA, 120 bp, Artificial Sequence
  ENSG00000171004_10 (sequence is synthesized)
agaagaaatgcacttgccaccggccgggtaagcgggaaacctggctcttctccaggttctccacgggctggagctgcgggttgcacgccgactggaccgagctcaccagctgtgtgccct

SEQ ID NO: 572759 - DNA, 120 bp, Artificial Sequence
  ENSG00000171004_11 (sequence is synthesized)
ccgtggtggacggcaagcgcgacgccaggctgagaccgtccaggaacttccactacatcaccatcctccgagacccagtgtcccggtacttgagtgagtggaggcatgtccagagagggg

SEQ ID NO: 572760 - DNA, 120 bp, Artificial Sequence
  ENSG00000171004_12 (sequence is synthesized)
caacatggaaagcatccctgcatgtctgcgatggaaggcctccaacctccgaagagctgcccagctgctacactggcgatgactggtctggctgccccctcaaagagtttatggactgtc

SEQ ID NO: 572761 - DNA, 120 bp, Artificial Sequence
  ENSG00000171004_13 (sequence is synthesized)
cctacaatctagccaacaaccgccaggtgcgcatgctctccgacctgaccctggtaggctgctacaacctctctgtcatgcctgaaaagcaaagaaacaaggtccttctggaaagtgcca

SEQ ID NO: 572762 - DNA, 120 bp, Artificial Sequence
  ENSG00000171004_14 (sequence is synthesized)
agtcaaatctgaagcacatggcgttcttcggcctcactgagtttcagcggaagacccaatatctgtttgagaaaaccttcaacatgaactttatttcgccatttacccagtataatacca

SEQ ID NO: 572763 - DNA, 120 bp, Artificial Sequence
  ENSG00000171004_15 (sequence is synthesized)
ctagggcctctagtgtagagatcaatgaggaaattcaaaagcgtattgagggactgaattttctggatatggagttgtacagctatgccaaagacctttttttgcagaggtatcagttta

SEQ ID NO: 572764 - DNA, 120 bp, Artificial Sequence
  ENSG00000171004_16 (sequence is synthesized)
tgaggcagaaagagcatcaggaggccaggcgaaagcgtcaggaacaacgcaaatttctgaagggaaggctccttcagacccatttccagagccagggtcagggccagagccagaatccga

SEQ ID NO: 572765 - DNA, 120 bp, Artificial Sequence
  ENSG00000171004_17 (sequence is synthesized)
atcagaatcagagtcagaacccaaatccgaatgccaatcagaacctgactcagaatctgatgcagaatctgactcagagtttgagccagaaggagaaccgggaaagcccgaagcagaact

SEQ ID NO: 572766 - DNA, 120 bp, Artificial Sequence
  ENSG00000171004_18 (sequence is synthesized)
aggcaaggagcagaatgataacaccagcaatggcaccaacgactacataggcagtgtagagaaatggcgttaaatggctcaaaaaggcctgtacatacttctcccaaagcgccactgaaa

SEQ ID NO: 572767 - DNA, 120 bp, Artificial Sequence
  ENSG00000171004_19 (sequence is synthesized)
agatggcatagcttaaaagatgaaagtgtccaaacacatcctgcttccttcattggggaagttttaaaaaaaagtttagatgttgcctttacagttgcctttcaattcagtgttatactg

SEQ ID NO: 572768 - DNA, 120 bp, Artificial Sequence
  ENSG00000171004_20 (sequence is synthesized)
tgtgtaggtaaaacaaatctcaatatggaattaaattgtctttttggggttggactaaatatgaaatccgaaagccaaaccagactcaccagaaattgctgtttagatattttaagaagt

SEQ ID NO: 572769 - DNA, 120 bp, Artificial Sequence
  ENSG00000171004_21 (sequence is synthesized)
tcttaaattagttatggagacaaagtgaaaacataaaatgtgaccatttaacttatggctaagaaatggactttaaattattcatgatacactgttaaaacccaatcttggaatcaaata

SEQ ID NO: 572770 - DNA, 120 bp, Artificial Sequence
  ENSG00000171004_22 (sequence is synthesized)
ttttttccaggggtgagaataagtataaacataaagcaactaaaatgaaacataaaaccttttattttcttctgattttaacaaggaatctatttaaatagaataacaactgatggtgaa

SEQ ID NO: 572771 - DNA, 120 bp, Artificial Sequence
  ENSG00000171004_23 (sequence is synthesized)
tcttaccgagctgtagaaaataaaaaattcctctccaaacatgggtagttttatgtcaaaatattggcttttcaagaacaggactcatatcttgatatttaagagatgtttaaaatttta

SEQ ID NO: 572772 - DNA, 120 bp, Artificial Sequence
  ENSG00000171004_24 (sequence is synthesized)
aactttttctaccttctactgtttaaaggttttacacagggtgtatctcacattaaacaaaacacctttttttcaaaatgaaataccaatgtaaagatctaatttccaggcgctttcagg

SEQ ID NO: 572773 - DNA, 120 bp, Artificial Sequence
  ENSG00000171004_25 (sequence is synthesized)
gcactgtaatttcaacaatactggaatcattttggcgctgcttctcattcattttaaggcttctctgaattgtgctcattccaaattaacccatgtatagaatctttcttcatcatctaa

SEQ ID NO: 572774 - DNA, 120 bp, Artificial Sequence
  ENSG00000171004_26 (sequence is synthesized)
atggtgtgttgctgaagttattgtggtatataatcctggattaaagtcaggactttctttctatagaattattttatcaatatttgtgtagtgaggtcctaatcaagaaacttgaacagg

SEQ ID NO: 572775 - DNA, 120 bp, Artificial Sequence
  ENSG00000171004_27 (sequence is synthesized)
ataatgtgtctaaaaatattgctgaagttattcttgatcagatagaatttaacctaaaatgtgaactcttacttactttttgtacatctctattgtaatgtttccagttgggccaactat

SEQ ID NO: 572776 - DNA, 120 bp, Artificial Sequence
  ENSG00000171004_28 (sequence is synthesized)
ttctagccctttagttctttttcatgttgacagatttgtagacaattacaaaagccaaaaaaggataaaataagcattaggaaggctagccagttattcaatagcaccttgataatgtgg

SEQ ID NO: 572777 - DNA, 120 bp, Artificial Sequence
  ENSG00000171004_29 (sequence is synthesized)
gcaaacccttctacaaagtttttgttttgaaaagagcaaaagtaaaaagtgttctgtagtgaggttacatatcaggaacatatgagttgagcagagtaatttggtagtgtaagtcgatgc

SEQ ID NO: 572778 - DNA, 120 bp, Artificial Sequence
  ENSG00000171004_30 (sequence is synthesized)
aaaaatacttctatggtacctattacaagctgaccaagataaaaagaagtatgtaacccactgtgctgtcaagcatcatgattccgggcagttttcattttactgtggattttgctatac

SEQ ID NO: 572779 - DNA, 120 bp, Artificial Sequence
  ENSG00000171004_31 (sequence is synthesized)
ttatgcaaggacttacactaacctcctggctgtaaatcaaacaaggtgactgaaagtggcatttatgttttcacaagggacatgcttagaagtgtgaccataaagtcacatcttgtacaa

SEQ ID NO: 572780 - DNA, 120 bp, Artificial Sequence
  ENSG00000171004_32 (sequence is synthesized)
tctgctcatgtgtttcatctgtagtaatatagccacaaactggacaagaagctgggtatttgggtttaaaatagattttcttgactctgagcttgtatcagtatttctagcttttgtttt

SEQ ID NO: 572781 - DNA, 120 bp, Artificial Sequence
  ENSG00000171004_33 (sequence is synthesized)
gtctgacagtattgcagtcttgaaaatcctgagagctaaaaaactgaaaggaatttttccacaccttgaagtcacagtgttttagagtaaaactattttgtgtacaattgtgtttttaaa

SEQ ID NO: 572782 - DNA, 120 bp, Artificial Sequence
  ENSG00000171004_34 (sequence is synthesized)
atagttagtagatcactatggtatttcaattttctttagttttaattgaaaatgtttgcttttaaaactgataggtattgttggaaagcaggatgaagcctgagccagtggaaaagcttg

SEQ ID NO: 572783 - DNA, 120 bp, Artificial Sequence
  ENSG00000171004_35 (sequence is synthesized)
ttacagaaaaaacattttgtgttattgctgtggtgtgcatgatttgcaaagattaagtgcattttctctgtctatactgattattgtatatagaggatgttataaatatacatatacatt

SEQ ID NO: 572784 - DNA, 120 bp, Artificial Sequence
  ENSG00000171004_36 (sequence is synthesized)
tttgccattatgtaaatcccatgatttcaactgtaaacatctgtccattggtgtagctttacaaaccattcactgattttgtgtaatttaacaatagatatgaaataaagtttaaattac

SEQ ID NO: 572785 - DNA, 120 bp, Artificial Sequence
  ENSG00000171004_37 (sequence is synthesized)
tggaggatttttcagattctagatgcagcaagtaaggataaacggggttctccaaacactaacgcaggcgccaactctccgtcatccacaaagacccggaacacatctaagagtgggaag

SEQ ID NO: 572786 - DNA, 120 bp, Artificial Sequence
  ENSG00000171004_38 (sequence is synthesized)
cctgcagcagaatcacctggcgaggaggtgcctgttgaaaaagataagaagtttcattcagaaaagatgaccctgaaatcctggagcttttgcccaaaaggctctgaaacatgcatcttg

SEQ ID NO: 572787 - DNA, 120 bp, Artificial Sequence
  ENSG00000171004_39 (sequence is synthesized)
ttacttgggctgccttgataccatcccccatcagtgtgacaatgatgattctgggcacgtacaagcctctttcccaggaagctggagcaccaaatgacagctgtgtttgagggatggctc

SEQ ID NO: 572788 - DNA, 120 bp, Artificial Sequence
  ENSG00000171004_40 (sequence is synthesized)
cgttgacaactgattcagaatattgacaagacttcattatgtttttgctcttgtgtttacatctttcaagtgtgtttgaaaaatcaagaaaacaatacaatttggtttcccaaattgaaa

SEQ ID NO: 572789 - DNA, 120 bp, Artificial Sequence
  ENSG00000171014_0 (sequence is synthesized)
gagaactttgcagatcccctgaataatatgtccttttttcttagcaggttcattgacaaggtcataccaaccagatgaatccagcaaatcattcccaggtggcaggatttgttctactgg

SEQ ID NO: 572790 - DNA, 120 bp, Artificial Sequence
  ENSG00000171014_1 (sequence is synthesized)
ggctctctcaggtttgggagcttcggtttgttttcttcactgttttctctgctgtgtattttatgactgtagtgggaaaccttcttattgtggtcatagtgacctccgacccacacctgc

SEQ ID NO: 572791 - DNA, 120 bp, Artificial Sequence
  ENSG00000171014_2 (sequence is synthesized)
acacaaccatgtattttctcttgggcaatctttctttcctggacttttgctactcttccatcacagcacctaggatgctggttgacttgctctcaggcaaccctaccatttcctttggtg

SEQ ID NO: 572792 - DNA, 120 bp, Artificial Sequence
  ENSG00000171014_3 (sequence is synthesized)
gatgcctgactcaactcttcttcttccacttcattggaggcatcaagatcttcctgctgactgtcatggcgtatgaccgctacattgccatttcccagcccctgcactacacgctcatta

SEQ ID NO: 572793 - DNA, 120 bp, Artificial Sequence
  ENSG00000171014_4 (sequence is synthesized)
gtgcactccttatggcagcctcctgggtggggggcttcatccactccatagtacagattgcattgactatccagctgccattctgtgggcctgacaagctggacaacttttattgtgatg

SEQ ID NO: 572794 - DNA, 120 bp, Artificial Sequence
  ENSG00000171014_5 (sequence is synthesized)
tgcctcagctgatcaaattggcctgcacagatacctttgtcttagagcttttaatggtgtctaacaatggcctggtgaccctgatgtgttttctggtgcttctgggatcgtacacagcac

SEQ ID NO: 572795 - DNA, 120 bp, Artificial Sequence
  ENSG00000171014_6 (sequence is synthesized)
tgctagtcatgctccgaagccactcacgggagggccgcagcaaggccctgtctacctgtgcctctcacattgctgtggtgaccttaatctttgtgccttgcatctacgtctatacaaggc

SEQ ID NO: 572796 - DNA, 120 bp, Artificial Sequence
  ENSG00000171014_7 (sequence is synthesized)
cttttcggacattccccatggacaaggccgtctctgtgctatacacaattgtcacccccatgctgaatcctgccatctataccctgagaaacaaggaagtgatcatggccatgaagaagc

SEQ ID NO: 572797 - DNA, 120 bp, Artificial Sequence
  ENSG00000171014_8 (sequence is synthesized)
tgtggaggaggaaaaaggaccctattggtcccctggagcacagacccttacattagcagaggcagtgacctgagaatctgaaagatgctacagggtattagcctgctggataggaccctc

SEQ ID NO: 572798 - DNA, 120 bp, Artificial Sequence
  ENSG00000171016_0 (sequence is synthesized)
gcatcaaagagaccgaattcccgcggcctgggggggagtcatgctttgcggtctgtaatgtcagcagaacaggagaaggatcccatttcgctgaagagagttcgaggtggtgatagtgga

SEQ ID NO: 572799 - DNA, 120 bp, Artificial Sequence
  ENSG00000171016_1 (sequence is synthesized)
ctggatgggttaggaggaccaggtgtacaactaggaagcccagataagaaaaagcgcaaggcaaatacacagggaccttctttccctccattgtctgagtatgctccaccaccgaatcca

SEQ ID NO: 572800 - DNA, 120 bp, Artificial Sequence
  ENSG00000171016_2 (sequence is synthesized)
aactctgaccatctagtggctgctaatccatttgatgacaactataatactatttcctataaaccactaccttcgtcaaatccatatcttggccctggttatcctggctttggaggctat

SEQ ID NO: 572801 - DNA, 120 bp, Artificial Sequence
  ENSG00000171016_3 (sequence is synthesized)
agtacattcagaatgccacctcacgttcccccaagaatgtcttccccatactgtggtccttactcactcaggaaccagccacacccatttcctcagaatcctctgggcatgggttttaat

SEQ ID NO: 572802 - DNA, 120 bp, Artificial Sequence
  ENSG00000171016_4 (sequence is synthesized)
cgacctcatgcttttaactttgggccacatgataattcaagtttcggtaatccatcttataataatgcactaagtcagaatgtcaacatgcctaatcaacattttagacaaaatcctgct

SEQ ID NO: 572803 - DNA, 120 bp, Artificial Sequence
  ENSG00000171016_5 (sequence is synthesized)
gaaaatttcagtcaaattcctccacagaatgctagccaagtttctaaccccgatttggcatctaattttgttcctggaaataattcaaattttacttctccgttagaatctaatcattct

SEQ ID NO: 572804 - DNA, 120 bp, Artificial Sequence
  ENSG00000171016_6 (sequence is synthesized)
tttattcctcccccaaacacttttggtcaagcaaaagcaccacccccaaaacaagactttactcaaggagcaaccaaaaacactaatcaaaattcctctgctcatccacctcacttgaat

SEQ ID NO: 572805 - DNA, 120 bp, Artificial Sequence
  ENSG00000171016_7 (sequence is synthesized)
atggatgacacagtgaatcagagtaatattgaattaaaaaatgttaatcgaaacaatgcagtaaatcaggagaacagccgttcaagtagcactgaagccacaaacaataaccctgcaaat

SEQ ID NO: 572806 - DNA, 120 bp, Artificial Sequence
  ENSG00000171016_8 (sequence is synthesized)
gggacgcagaataagccacgacaaccaagaggtgcagcagatgcctgcaccacagaaaaaagcaataaatcctctcttcacccaaaccgtcatggccattcgtcttctgacccagtgtat

SEQ ID NO: 572807 - DNA, 120 bp, Artificial Sequence
  ENSG00000171016_9 (sequence is synthesized)
ccttgtggaatttgtacaaacgaggtgaacgatgatcaggatgccatcttatgtgaggcctcttgtcagaaatggtttcatcggatctgtactggaatgactgaaacagcttatggcctc

SEQ ID NO: 572808 - DNA, 120 bp, Artificial Sequence
  ENSG00000171016_10 (sequence is synthesized)
ttaactgcagaagcatctgcagtatggggctgtgatacctgtatggctgacaaagatgtccagttaatgcgtactagagaaacttttggtccatctgcagtgggcagtgatgcttaatca

SEQ ID NO: 572809 - DNA, 120 bp, Artificial Sequence
  ENSG00000171016_11 (sequence is synthesized)
aagtgggtttattttcctgtgcattgcagaagttcattgacacaggattttaatgttttacattatttttttaaatgcatacacaaaaacattatttacttagtttttattaatcacttc

SEQ ID NO: 572810 - DNA, 120 bp, Artificial Sequence
  ENSG00000171016_12 (sequence is synthesized)
atcactagagcaaattttttattgtctttgcttgctgtcttaaatgagaataatgtatatgggggtgctttagaaacataaataaatgttagttgttgttatttatcacaaacataaaag

SEQ ID NO: 572811 - DNA, 120 bp, Artificial Sequence
  ENSG00000171016_13 (sequence is synthesized)
cctcttgaaacttcaaaataatatataacaaatgtaggcaagttttaacttttaaaagttagaatcattgaaaaacgtgtatttcagtgctgaactttggttgtaccatattaaagattt

SEQ ID NO: 572812 - DNA, 120 bp, Artificial Sequence
  ENSG00000171016_14 (sequence is synthesized)
agttcaaaaagtttatcaaggatccacttaacacgtcttcacaacataatatatgtaactgtaacatgggggaaagcatacatttttatggattaaaaaaataatagtatgacaccagat

SEQ ID NO: 572813 - DNA, 120 bp, Artificial Sequence
  ENSG00000171016_15 (sequence is synthesized)
tcctcctccactagggtctttggaatcaatgaatttcatatttcaagtgagttttcaggatatctgtttgtacagatacgagacagatcttagcatatagtaaattctcagtaagtattg

SEQ ID NO: 572814 - DNA, 120 bp, Artificial Sequence
  ENSG00000171016_16 (sequence is synthesized)
ttgattaacttgtggatggtaccacatgaaattgctaatattagatcagttgaaaattgactgcaattagtaaagttggtataacgtacgttcccagttgtgctatttagaattatgata

SEQ ID NO: 572815 - DNA, 120 bp, Artificial Sequence
  ENSG00000171016_17 (sequence is synthesized)
gtattatgctcctacttttctttgatattgagttgtcttgttattgtttattgttttccagagaaatactatagtatccacagaagaattgtgaatacttttttataattttgaactggg

SEQ ID NO: 572816 - DNA, 120 bp, Artificial Sequence
  ENSG00000171016_18 (sequence is synthesized)
acatattgcagatgaggaaggtagaaacatccatttggccttagagggctctgctagtaaaagaactactcagtggtggtttgaaaaatcttgttctggggatctgaatttcaaaaatga

SEQ ID NO: 572817 - DNA, 120 bp, Artificial Sequence
  ENSG00000171016_19 (sequence is synthesized)
accctaggggagatcaaaatccattttaaacaaagatcaattaagagccaaagtgaaatctaacttgcaaacaacaatttgaagccttgcagcagacttaaggaattcccgctctgactg

SEQ ID NO: 572818 - DNA, 120 bp, Artificial Sequence
  ENSG00000171016_20 (sequence is synthesized)
gggaaaagtataaaaatggacctgagagtaccctcttgagggatgatcaagaatggagacagttggagttgtgctcattaagattcaaaacagcagaaatccatttttggagcagattat

SEQ ID NO: 572819 - DNA, 120 bp, Artificial Sequence
  ENSG00000171016_21 (sequence is synthesized)
aacctgtggccaaaaaaaaaaaatgtgtgctgtttgacagctaatggcaatttatacaatcattggaggctggtaaagctccctaatatgttgccaccattatcattgcaaccaaaaaaa

SEQ ID NO: 572820 - DNA, 120 bp, Artificial Sequence
  ENSG00000171016_22 (sequence is synthesized)
aattactgttatttaaacccaagtgaaacaatgacggcagcagcatattatcaagaaatttaaattatgcatgaaaatgtgatttaaaaacaatgtcctttgggtaacacacaagaacct

SEQ ID NO: 572821 - DNA, 120 bp, Artificial Sequence
  ENSG00000171016_23 (sequence is synthesized)
acactttcacagacaaggactcgacctcacatgtcacaagctactaaagcaaagttaagtgacttgggctatgaaattttgtcatgtccattttagtcactggacctttattccatggac

SEQ ID NO: 572822 - DNA, 120 bp, Artificial Sequence
  ENSG00000171016_24 (sequence is synthesized)
agtcaagtcgttaaaataccaagtggaggcattctacagacaggtgtccacaccacggccacgcggacacggagtcggggaatctggatccccacatgcccgccgagaactctccagctc

SEQ ID NO: 572823 - DNA, 120 bp, Artificial Sequence
  ENSG00000171016_25 (sequence is synthesized)
aacaatgcattccccaatcgagatgaagtaactggaagatgttaacaatttatacagcctaacaaatgatgaattttataaaagttagacctttaatattctgttggaagaaaactattc

SEQ ID NO: 572824 - DNA, 120 bp, Artificial Sequence
  ENSG00000171016_26 (sequence is synthesized)
atgctcctgatgcatattttgattgaataaaacttatttttttaaatacattgttttaattttgacctacaaaaacagcaatttcatatggtacaaggtaatacaaggttttctccattt

SEQ ID NO: 572825 - DNA, 120 bp, Artificial Sequence
  ENSG00000171016_27 (sequence is synthesized)
acccttgactagttagaggtgagtacaaaatattttcagtagttgtaaaatatttatctttacaattttaggaaacaaaatgatataaactatacttctaggtactcctttgtgtgaaaa

SEQ ID NO: 572826 - DNA, 120 bp, Artificial Sequence
  ENSG00000171016_28 (sequence is synthesized)
ctttaccagttgaagcaggttaaaatgcagtattttgggctgacaggcatttgatggtgttcagtagtgtacttgaagatctcattttacttggattttttattatacatatttctctaa

SEQ ID NO: 572827 - DNA, 120 bp, Artificial Sequence
  ENSG00000171016_29 (sequence is synthesized)
atgtttaaggacctagttatgttgctcctgaaagtttaatgagtgctgatttttaataaatgatgcactgtatgctgtatgcctagttgtagcatcagatcatgatttattattaccctg

SEQ ID NO: 572828 - DNA, 120 bp, Artificial Sequence
  ENSG00000171016_30 (sequence is synthesized)
aatagagctagatgatagatattttgagtagaactttccagtgttctcaggagttaacactttacatggtagtacttgagttgtgatcattactaaaatcaattatgcagtttcttaaac

SEQ ID NO: 572829 - DNA, 120 bp, Artificial Sequence
  ENSG00000171016_31 (sequence is synthesized)
cctttatctctttaagtttcagtagttagctgtttttgtgaaaatgaaataacttctcccaagctagtctaaaggtatgtgttatgcaatataattcattttctatttccacatagttgt

SEQ ID NO: 572830 - DNA, 120 bp, Artificial Sequence
  ENSG00000171016_32 (sequence is synthesized)
ttttaaaaacctacaaacaggtgaatttttattcaggtgtttaggtcttcaaagcaccttacttaaataagaatctgtaaatattcaaaagaaaaactcacggttcattctgatagtgaa

SEQ ID NO: 572831 - DNA, 120 bp, Artificial Sequence
  ENSG00000171016_33 (sequence is synthesized)
tcatagccaaactgtaatcatagctgatgaatagcgttcatgtgtttgaattaattttcctgctagttctacatttgtctctacataatgctaagtcaaaagttatatagatgcttttgg

SEQ ID NO: 572832 - DNA, 120 bp, Artificial Sequence
  ENSG00000171016_34 (sequence is synthesized)
atggaataagtgatgaactgtaagaatagccagatgataatttgtctgaagaaggctattatacaaactgaaatggcttcttaggataaatgataagctgccttcaactttaaaaatatg

SEQ ID NO: 572833 - DNA, 120 bp, Artificial Sequence
  ENSG00000171016_35 (sequence is synthesized)
cacacacacacaccccccacagtttctccaacatccttgagttttgcttaaattcaacctggctaactatgagcatctaggtttactcaccaaagctaggttattgacagaaaggtgggt

SEQ ID NO: 572834 - DNA, 78 bp, Artificial Sequence
  ENSG00000171016_36 (sequence is synthesized)
gacagaaaattttaaaaagcatcagttcctttctcagaacttgacttgctcatgcactagagaatttgtggtccacat

SEQ ID NO: 572835 - DNA, 120 bp, Artificial Sequence
  ENSG00000171016_37 (sequence is synthesized)
acttgacttgctcatgcactagagaatttgtggtccacatgcttctaggtgttactcgattcactaatactgaaacagctcagcttgtgaaagataaattgttcttcagacagagtgctt

SEQ ID NO: 572836 - DNA, 120 bp, Artificial Sequence
  ENSG00000171016_38 (sequence is synthesized)
agaattagatttgtgatcagtgttttccttttgtgtgaaatactttagagtactgctataattgttattcaaattagaaggttatatacataaaactaaagattttcttgtactagtgct

SEQ ID NO: 572837 - DNA, 120 bp, Artificial Sequence
  ENSG00000171016_39 (sequence is synthesized)
tattcttcataaacacagtgtaaagaaatctacttttttggtggtttgttttagactcccaactctgcctagtggcagaaaaacctcttaatagtgtgggtcatcataaaatctgccaac

SEQ ID NO: 572838 - DNA, 120 bp, Artificial Sequence
  ENSG00000171016_40 (sequence is synthesized)
tttaatccaaataagtatcaagagtcttcattcaatattctttcaaacttgtttgtctcgaacaaattagagttttagcacttattgttcaatgtactatagtaattgtatttaatagta

SEQ ID NO: 572839 - DNA, 120 bp, Artificial Sequence
  ENSG00000171016_41 (sequence is synthesized)
agaaaatatataagcaatgattttttaaaagggagttctcaagagttttggatttctttctgccgtgtatagaggtttcttatgcatggacatttgtgctgttttatatctttttcaatt

SEQ ID NO: 572840 - DNA, 120 bp, Artificial Sequence
  ENSG00000171016_42 (sequence is synthesized)
aaaaaaaaatttaaaggcatcaggctccctaagttcatttgtaaatagtggcttggaactctacacaatagggaagctcctaaaggctcatttagaccataatctagttaatagtatcat

SEQ ID NO: 572841 - DNA, 120 bp, Artificial Sequence
  ENSG00000171016_43 (sequence is synthesized)
gctgaactctcagttttctttaggaaaccaatcaatcagtgtaggagggagaaagaagcagaggtcttgtctttttcctgatgtgattaggaggttaagttctttggtgtgggtttcttt

SEQ ID NO: 572842 - DNA, 120 bp, Artificial Sequence
  ENSG00000171016_44 (sequence is synthesized)
gcatttgcccccttaccatgctaaactctggtgaaatgtataagcagccttggcttttcctctcctgggtgctctgtgcttcaacattttatatctttcctcccatcagaaatcctgtgt

SEQ ID NO: 572843 - DNA, 120 bp, Artificial Sequence
  ENSG00000171016_45 (sequence is synthesized)
ctttgtgtggcagtagtagttggctagactttaagagaaaagcattttctactaaggtatgaatgaagatagtgggaaaagtgtcattaaatttcttttttaaaaaagtatgtttattaa

SEQ ID NO: 572844 - DNA, 120 bp, Artificial Sequence
  ENSG00000171016_46 (sequence is synthesized)
gaatgaatctttaatatctaacatttcagacaatatgaccgcatttcagataccatgggaagcagtacatttagtgaattagctggtactgtctgagggtacttccagtttcctttaggc

SEQ ID NO: 572845 - DNA, 120 bp, Artificial Sequence
  ENSG00000171016_47 (sequence is synthesized)
tgttgtgacttttcacagcttcctctcctctaattctgaacttagagattttcttctcatttctaatttttagtagcttattgttccatccagtagagcattataaaagtcacatctgca

SEQ ID NO: 572846 - DNA, 120 bp, Artificial Sequence
  ENSG00000171016_48 (sequence is synthesized)
tcttccaacttatggtacagtgatgggaatttggaagcacccctggagcaaagaggctagggatagcattaacatctcccaagacaagtggtataggggaaatgaaggaaagactgtggc

SEQ ID NO: 572847 - DNA, 120 bp, Artificial Sequence
  ENSG00000171016_49 (sequence is synthesized)
catgtatatgccaggcgttaatacatcagagctgcctgtatttaatttaaaacttttgatgaaactcagtggataagcatctttgtcatattttgtcaataatacattacttgcaattat

SEQ ID NO: 572848 - DNA, 120 bp, Artificial Sequence
  ENSG00000171016_50 (sequence is synthesized)
attaaaacttattctaaatacctgtacctttcttgttctgtagatgtgtagatgatgttgcttgtttgtcaaaatattatcttttataaaagaaagtcctgcttcttatcatgatgtatg

SEQ ID NO: 572849 - DNA, 120 bp, Artificial Sequence
  ENSG00000171016_51 (sequence is synthesized)
tgacttaaatgattgtttcatattaaaactatttcttccttatgtactgtttacatatacctctttttgggatattagttcagtacttttatacaaatctgagtgtgttccacattggtg

SEQ ID NO: 572850 - DNA, 120 bp, Artificial Sequence
  ENSG00000171016_52 (sequence is synthesized)
acatgtatttttgcagtaactttttgttttgttcttagaacatgtctaaagtaacacatgcactagtgctgtggtctgtggcaaaattactgtaattcaaattggaaaaaaaaatgtttc

SEQ ID NO: 572851 - DNA, 120 bp, Artificial Sequence
  ENSG00000171016_53 (sequence is synthesized)
cagactttgtccaacatttattcctatggcaaaggaaattactatgtaatactaattatttcttatgctggtatgttttaagctactctatgaagtatgtgaaacatcaatatttatgga

SEQ ID NO: 572852 - DNA, 120 bp, Artificial Sequence
  ENSG00000171016_54 (sequence is synthesized)
ttaatagatggcctgatgtctttcaaatgggagaggagtaaattttagtgttaccaactcatgacacttgtaatacaataaatcttaaaatttttattttccacttacaggtatacttta

SEQ ID NO: 572853 - DNA, 120 bp, Artificial Sequence
  ENSG00000171016_55 (sequence is synthesized)
ctaaataattaccttaaatggcagtgcatattaggattttttagcacatactactaaaattatatagtaacttttaacttgtgctgatatttcccaaccaaaaaagacatcattcacttc

SEQ ID NO: 572854 - DNA, 120 bp, Artificial Sequence
  ENSG00000171016_56 (sequence is synthesized)
atcataaccaaaataagtagtactgtaatatttatcttcatttatttagacatgattaagataccgtaagactcctctaatttacctggaatttttagccattgattcaaggacttgaat

SEQ ID NO: 572855 - DNA, 120 bp, Artificial Sequence
  ENSG00000171016_57 (sequence is synthesized)
gctgtttacttggtactacctaatgaaaggatttggtaataaaggttataatcacgattttaaagaaaaatgtttcatcttgaaggcaaatttttaagctttttatttagaggtgtttac

SEQ ID NO: 572856 - DNA, 120 bp, Artificial Sequence
  ENSG00000171016_58 (sequence is synthesized)
ttaagaatagtaatttaaaagcattcttattttgtcattaagacaagtacccaaaagaattgtaataagtaatacttggccaatgcaaatttgtacatttgaaatcatacacttgaaaga

SEQ ID NO: 572857 - DNA, 120 bp, Artificial Sequence
  ENSG00000171016_59 (sequence is synthesized)
aaaaaatgaaggcttgtgagtgcttaaactgcatatctttttaaaaattcaaattttagacatatcagtttaaattatccttaataaggttttactatgtcagtgatgtatattacaaaa

SEQ ID NO: 572858 - DNA, 120 bp, Artificial Sequence
  ENSG00000171016_60 (sequence is synthesized)
tgtctacctatgttatgttaatgatatctctatactgcatcatattcggcatggttatggtatattttgtacttttgattgtggactattgataggattgatatagcaataaatctgatt

SEQ ID NO: 572859 - DNA, 120 bp, Artificial Sequence
  ENSG00000171016_61 (sequence is synthesized)
cagacttaatattttttaaaacgctagataccatactgtatcataatcctattatatttgacttgaatgcccaaaattttcatagttctatattttatgttaaaaatttagtattacatg

SEQ ID NO: 572860 - DNA, 120 bp, Artificial Sequence
  ENSG00000171016_62 (sequence is synthesized)
ttagggatttatttttgtctgctattttcacatacattcttttagaactgagtctgtttctatttagatcatagacgtctaaagaagtattattaattcatgaactgctttgtggaaaaa

SEQ ID NO: 572861 - DNA, 120 bp, Artificial Sequence
  ENSG00000171016_63 (sequence is synthesized)
tttaaataaagtatgaaatgactagattaccccaaattgtttatttttttttttggttaatgaccaggttacaattctcagacaaatgaaattggcttgataactgattgaatatagtag

SEQ ID NO: 572862 - DNA, 120 bp, Artificial Sequence
  ENSG00000171016_64 (sequence is synthesized)
ataatggaaagtttgactctttaagggcttccaagtgttaaatacattctcaattctgaattacttcatagtaactacttaaataatggtaagccaattctcctttttctttttgagata

SEQ ID NO: 572863 - DNA, 120 bp, Artificial Sequence
  ENSG00000171016_65 (sequence is synthesized)
tttaacacaatttgcgtcttctgatcccattcccttcttccccaaaaaccatgctagaatttaaaattggaagagtttaatttgtcatctacattttagtttttttattctatagataag

SEQ ID NO: 572864 - DNA, 120 bp, Artificial Sequence
  ENSG00000171016_66 (sequence is synthesized)
taagaagacaagtagacgttctgctgtcaagacagtccatgttattgttggccattcttttcagggataatgcttaatgttatttgtgcgttgtataaggaatgttgtttatcagtatat

SEQ ID NO: 572865 - DNA, 120 bp, Artificial Sequence
  ENSG00000171016_67 (sequence is synthesized)
agacctaccattagtagaaatgatgtatggcaggctttcttgaataatatgtattgtaagtttgtttcctatagtgttattatggttcagattcttttaaataaagctagtttttaaaga

SEQ ID NO: 572866 - DNA, 120 bp, Artificial Sequence
  ENSG00000171017_0 (sequence is synthesized)
accctcgcggcccgcccgggaactctgcgggagtcgcggcagctccgctcccagagacccaggagttgggcccagcgtccctcccggaacggcagcatgatcccagtggccgagttcaag

SEQ ID NO: 572867 - DNA, 120 bp, Artificial Sequence
  ENSG00000171017_1 (sequence is synthesized)
cagttcacggaacagcagcctgcgttcaaggtgctcaaaccctggtgggacgtgctggccgagtacctcaccgtggccatgctcatgattggggtctttggctgcaccctccaggtgaca

SEQ ID NO: 572868 - DNA, 120 bp, Artificial Sequence
  ENSG00000171017_2 (sequence is synthesized)
caggacaagatcatctgtctacccaatcatgagctccaggagaacttatcagaggccccgtgccagcaattgctgcctcgggggatccctgagcagattggggccctgcaggaggttaaa

SEQ ID NO: 572869 - DNA, 120 bp, Artificial Sequence
  ENSG00000171017_3 (sequence is synthesized)
ggccttaagaacaatttggacctgcagcaatacagctttattaaccagctgtgttatgagacggccctgcactggtatgccaagtacttcccttacctcgtggtcattcacacactcatc

SEQ ID NO: 572870 - DNA, 120 bp, Artificial Sequence
  ENSG00000171017_4 (sequence is synthesized)
ttcatggtctgcaccagtttctggttcaagttccctggcaccagctccaagattgaacacttcatctccatcctgggcaagtgtttcgactctccatggaccaccagggccctatccgag

SEQ ID NO: 572871 - DNA, 120 bp, Artificial Sequence
  ENSG00000171017_5 (sequence is synthesized)
gtctccggggagaaccagaagggcccagcagccaccgaacgggctgcggccaccatagtggccatggcagggaccgggccggggaaggcaggggagggtgagaaggagaaagtgctggcg

SEQ ID NO: 572872 - DNA, 120 bp, Artificial Sequence
  ENSG00000171017_6 (sequence is synthesized)
gaaccggagaaggtggtgaccgagcctccagttgtcaccctgttggacaagaaggagggtgagcaagccaaagccctgtttgagaaggtgaagaagttccgcatgcacgtggaagagggc

SEQ ID NO: 572873 - DNA, 120 bp, Artificial Sequence
  ENSG00000171017_7 (sequence is synthesized)
gacatcctgtacaccatgtacatccgacagacggtgctgaaagtgtgtaagttcctggccatcctggtctacaacctggtctatgtggagaagatcagtttcctggtggcctgtagggtg

SEQ ID NO: 572874 - DNA, 120 bp, Artificial Sequence
  ENSG00000171017_8 (sequence is synthesized)
gagacgtcagaggtcacgggctacgccagcttctgctgcaaccacaccaaggcccacctcttctccaagctggccttctgttacatctcctttgtgtgcatctacggacttacctgcatc

SEQ ID NO: 572875 - DNA, 120 bp, Artificial Sequence
  ENSG00000171017_9 (sequence is synthesized)
tacacgctctactggctcttccaccggcccctcaaggagtactccttccgttccgtgcgggaggagactggcatgggggacattcctgacgtcaagaatgacttcgccttcatgctgcac

SEQ ID NO: 572876 - DNA, 120 bp, Artificial Sequence
  ENSG00000171017_10 (sequence is synthesized)
ctcatcgatcagtacgactccctctactccaagcgcttcgccgtcttcctgtccgaggtcagcgaaagccgtctaaagcagctcaatctcaaccacgagtggacgcccgagaagcttcga

SEQ ID NO: 572877 - DNA, 120 bp, Artificial Sequence
  ENSG00000171017_11 (sequence is synthesized)
cagaagctgcagcgcaatgccgcgggccggctggagctggccctctgcatgctgccgggtctgcccgacaccgtctttgagctcagtgaggtggagtcactcaggctggaggccatctgc

SEQ ID NO: 572878 - DNA, 120 bp, Artificial Sequence
  ENSG00000171017_12 (sequence is synthesized)
gatatcaccttccccccggggctgtcacagctggtgcacttgcaggagctcagcttgctccactcgcccgccaggctacccttctccttgcaggtcttcctgcgggaccacctgaaggtg

SEQ ID NO: 572879 - DNA, 120 bp, Artificial Sequence
  ENSG00000171017_13 (sequence is synthesized)
atgcgcgtcaaatgcgaggagctccgcgaggtgccgctttgggtgtttgggctgcggggcttggaggagctgcacctggaggggcttttcccccaggagctagctcgggcagccaccctg

SEQ ID NO: 572880 - DNA, 120 bp, Artificial Sequence
  ENSG00000171017_14 (sequence is synthesized)
gcacaacgatggggcccgtctggttgccctgaacagcctcaagaagctggcggcattgcgggagctggagctggtggcctgcgggctggagcgcatcccccatgcagtgttcagcctggg

SEQ ID NO: 572881 - DNA, 120 bp, Artificial Sequence
  ENSG00000171017_15 (sequence is synthesized)
tgcgctgcaggaacttgacctcaaggacaaccacctgcgctccatcgaggaaatcctcagcttccagcactgccggaagctggtcacgctcaggctgtggcacaaccagatcgcctacgt

SEQ ID NO: 572882 - DNA, 120 bp, Artificial Sequence
  ENSG00000171017_16 (sequence is synthesized)
ccctgagcacgtgcggaagctcaggagcctggagcagctctacctcagctacaacaagctggagaccctgccctcccagctcggcctgtgctcaggcctccgtctgctggatgtgtccca

SEQ ID NO: 572883 - DNA, 120 bp, Artificial Sequence
  ENSG00000171017_17 (sequence is synthesized)
caatgggctacactccctgccacccgaggtgggcctcctgcagaacctacagcacctggccctctcctacaatgccctggaggccctgcccgaagagctcttcttctgccgcaagctgcg

SEQ ID NO: 572884 - DNA, 120 bp, Artificial Sequence
  ENSG00000171017_18 (sequence is synthesized)
gacgttgcttctgggcgacaaccagctgagccagctctcgccccacgtgggtgccctcagagccctcagccgcctggagctcaaaggcaaccgcttagaggcgctgccagaagaacttgg

SEQ ID NO: 572885 - DNA, 120 bp, Artificial Sequence
  ENSG00000171017_19 (sequence is synthesized)
caactgtggggggctcaagaaggcggggctcctggtggaagacacgctttaccagggtctgccggcagaagtgcgggacaagatggaggaggaatgaagctggggtggggccgttttagg

SEQ ID NO: 572886 - DNA, 120 bp, Artificial Sequence
  ENSG00000171017_20 (sequence is synthesized)
tagagccttaaaaatgcttctgccctggaatctcaaccattgtcttccaagataggaagccaagtgggtccaggccaggagatggggggggcgggggcagctgtgtcatctttctggggc

SEQ ID NO: 572887 - DNA, 120 bp, Artificial Sequence
  ENSG00000171017_21 (sequence is synthesized)
ccaggaggatctgggctggtttgtctggggagacagacaggatgttgtggagctggggtggaacctggtatggagggattaactcagtcatggcattctccgaccaaaaccacacctgtg

SEQ ID NO: 572888 - DNA, 120 bp, Artificial Sequence
  ENSG00000171017_22 (sequence is synthesized)
tctctggcaggctggctggccttgctcccatccctagaactgctgcctctccctggatattccagctcaattagtgccacatatgggggaaacgacacatcccagtgggatttccaacac

SEQ ID NO: 572889 - DNA, 120 bp, Artificial Sequence
  ENSG00000171017_23 (sequence is synthesized)
tccccctccccatgcaacaaagcaacttacttctggagttctctcccaaggagaggacacagacacagttgtttgctgtgttatatgttagctccgaacaatggttctcatttggctaag

SEQ ID NO: 572890 - DNA, 120 bp, Artificial Sequence
  ENSG00000171017_24 (sequence is synthesized)
catcaaaatcacctagggagtcggtgcaaaacaaaatatcccagtcccctcccctgaaacactgactcaggaggtttggttgggggccaggagtctgttcctaaatattccaggtagttc

SEQ ID NO: 572891 - DNA, 120 bp, Artificial Sequence
  ENSG00000171017_25 (sequence is synthesized)
tggtgcaggtaagtggccctgagacagtatgttgggaaatgctgacgtaaaggtatcagggccgggcgctgtggctcatgactataatcccagctgtttgagaggccaatgcaggaggat

SEQ ID NO: 572892 - DNA, 120 bp, Artificial Sequence
  ENSG00000171017_26 (sequence is synthesized)
gagctcaggagttcgagatcagcctgggtaacatagcgagaccccacctctgccaaaaaaaaaaaaaatagggtatccaaatatctagattctgatcccttttgaggtcctagacccttt

SEQ ID NO: 572893 - DNA, 120 bp, Artificial Sequence
  ENSG00000171017_27 (sequence is synthesized)
ctttgagaaactgatgaagccaggcacctccttcctcaggaaaatgctggtgtacaaatacacacaaagctcttcaggcagctgatagatttcccccagagagctattcaaggacttcct

SEQ ID NO: 572894 - DNA, 120 bp, Artificial Sequence
  ENSG00000171017_28 (sequence is synthesized)
aaggtgggtggactgcagggttaggacacctgctatagaggtgacatttttccaaggacaagcagggactttggtcttgactgttctctgggtgcttaataaataatactaattatgcaa

SEQ ID NO: 572895 - DNA, 120 bp, Artificial Sequence
  ENSG00000171017_29 (sequence is synthesized)
gactcaccctcgcggcccgcccgggaactctgcgggagtcgcggcagctccgctcccagagacccaggagttgggcccagcgtccctcccggaacgaagagacggggtttcaccatgctg

SEQ ID NO: 572896 - DNA, 68 bp, Artificial Sequence
  ENSG00000171017_30 (sequence is synthesized)
caacctatgacattttacacttgcatggcagcatgatcccagtggccgagttcaagcagttcacggaa

SEQ ID NO: 572897 - DNA, 120 bp, Artificial Sequence
  ENSG00000171017_31 (sequence is synthesized)
gagccttggaacgctttcaggcctggtggcggtgggagccggggctggcccagacgctgagtgtctgcagtcagggagcatcgaggcagatgttttcaggccttggtgtcaggggtggga

SEQ ID NO: 572898 - DNA, 120 bp, Artificial Sequence
  ENSG00000171017_32 (sequence is synthesized)
gagggatgcctcgttttggggagggggccacccgaggaggctggagggcggcggccctgtggactatccctcatgtgctcttcgaggtcagacaagtcagatcaggtgcaggggtgccca

SEQ ID NO: 572899 - DNA, 120 bp, Artificial Sequence
  ENSG00000171017_33 (sequence is synthesized)
gaggggaacagtggccgcttggttctgggcaggtggtgacgtctgcatggagggtgactaaggccaggctaagagggaagtgggggcacacactttggtggtttggacaagtttgggcag

SEQ ID NO: 572900 - DNA, 120 bp, Artificial Sequence
  ENSG00000171033_0 (sequence is synthesized)
ggtggggcgcgggccggcgcgagctgaccgagcactcggcgggcgcggcgggactgcggcccgtggcggcgtgcgcggggacctgcgctgactaggtccggggaagtccctgctatgtgg

SEQ ID NO: 572901 - DNA, 120 bp, Artificial Sequence
  ENSG00000171033_1 (sequence is synthesized)
ctatgtggatatttggtagcaatgactgatgtggaaactacatatgcagattttattgcttcaggaagaacaggtagaagaaatgcaatacatgatatcctggtttcctctgcaagtggc

SEQ ID NO: 572902 - DNA, 120 bp, Artificial Sequence
  ENSG00000171033_2 (sequence is synthesized)
aacagcaatgaattagccttgaaattagcaggtcttgatatcaacaagacagaaggtgaagaagatgcacaacgaagttctacagaacaaagtggggaagcccagggagaagcagcaaaa

SEQ ID NO: 572903 - DNA, 120 bp, Artificial Sequence
  ENSG00000171033_3 (sequence is synthesized)
tctgaaagctaacaccccactttgaccctcgaccacacctgaaaatgtctcaaatctccaggagtatctggaatgcatttgtttccatgagtgaaaagaggaaaaagaaaatggctgtgc

SEQ ID NO: 572904 - DNA, 120 bp, Artificial Sequence
  ENSG00000171033_4 (sequence is synthesized)
tgcattgcaggaacctgctcattatcatgttaaaaatgagggcagaggctgtggctgcaggcagacttttccctacctctgtcattagcaatggttgaaatcatgtggcttgtgtttggg

SEQ ID NO: 572905 - DNA, 120 bp, Artificial Sequence
  ENSG00000171033_5 (sequence is synthesized)
cgtcatttttgtatggatcctttcacttgatcatatgacgaaatgcttatagagagtagctccgacctagatgatgattcttcctgtagcatctggcccctcacaatgtcagaggattta

SEQ ID NO: 572906 - DNA, 120 bp, Artificial Sequence
  ENSG00000171033_6 (sequence is synthesized)
attgtgtctaattgcgaagggttgattgaaccccagagtttaaatatctctggctcaagtgttcacccagtaaaagaaagatccagaaagcactgtttttagcattacgtatctgtgtgt

SEQ ID NO: 572907 - DNA, 120 bp, Artificial Sequence
  ENSG00000171033_7 (sequence is synthesized)
ccccttctctgattgcttatgaaaaacaaaatgatgtacattactgtgaatttttataccactcatttttaaaagggctgtcttttcattttagttttccatactgtggtggtgtacaca

SEQ ID NO: 572908 - DNA, 120 bp, Artificial Sequence
  ENSG00000171033_8 (sequence is synthesized)
ggatagaacacccttttttaaaacacagtctttccccttgctcattgtatgttgatgagttgattaagtctaacagattcatcaagactccattgctttattatagagacatttgaaaat

SEQ ID NO: 572909 - DNA, 120 bp, Artificial Sequence
  ENSG00000171033_9 (sequence is synthesized)
atccattaatgtgaatatcacctgaattcagtctgtttggtgtctgcacagactggaattcaatctgtcaaatttgttttattctcaagtggagaacttctcccacataatatatatata

SEQ ID NO: 572910 - DNA, 120 bp, Artificial Sequence
  ENSG00000171033_10 (sequence is synthesized)
tatatatattttaatttatgagaattttggacaattggaaaggtagaaaagaaaagccaagatcatactaaggactggaaatattttgttctatggaatcaaatttctcacaatgctgta

SEQ ID NO: 572911 - DNA, 120 bp, Artificial Sequence
  ENSG00000171033_11 (sequence is synthesized)
tgatactatttaaatttggaggacaacttatcttcactaagctgaatcaggtggagaaagtaatctccttgcaatcatgtggacaccaatcacaaaagtaaagccctggtgttgtgtttt

SEQ ID NO: 572912 - DNA, 120 bp, Artificial Sequence
  ENSG00000171033_12 (sequence is synthesized)
catgtcttttttcagccctctcagatccaaatgttattatgcactttttaatgtttgtaaacttttactaataattagtgtgaattgcattctgatacaataatgattatcattagaagc

SEQ ID NO: 572913 - DNA, 120 bp, Artificial Sequence
  ENSG00000171033_13 (sequence is synthesized)
taacaaaattctcattaatactgtgtttgatggcctctgctgtgttttaacatcgtgcttcttatatggaaagtttttgtgagctgtgtaatccctctggtcagtattatgaaatcattt

SEQ ID NO: 572914 - DNA, 120 bp, Artificial Sequence
  ENSG00000171033_14 (sequence is synthesized)
gctggcaggtggggcgcgggccggcgcgagctgaccgagcactcggcgggcgcggcgggactgcggcccgtggcggcgtgcgcggggacctgcgctgactaggtccggggaagtttcctg

SEQ ID NO: 572915 - DNA, 120 bp, Artificial Sequence
  ENSG00000171033_15 (sequence is synthesized)
ccggggaagtttcctgactttctgagaagccctggtttccccaaagaagtgatttctgatagaaatctgaaggtcatctccaagaaaaaagagatctagtatagtcaatgaattaaagac

SEQ ID NO: 572916 - DNA, 120 bp, Artificial Sequence
  ENSG00000171033_16 (sequence is synthesized)
catgaattactggacaaatagcagacaatgggagtccctttacaataacgagcccacttagctgtccttgagggcttagataccttgccacgtgaagtaggtagagcagcatttcaatag

SEQ ID NO: 572917 - DNA, 120 bp, Artificial Sequence
  ENSG00000171033_17 (sequence is synthesized)
gtaatttgtgtggttgtgccagaaactcagcccttctatgtaattacatacaggataaaaggtaagtctgctcacttctccttctacagggcatttcaactgactggaataagggcatgg

SEQ ID NO: 572918 - DNA, 120 bp, Artificial Sequence
  ENSG00000171033_18 (sequence is synthesized)
ttgcatttagtactcaatcagatattactagaaaaaaaattaataatgtgagcctttccgagagcagaacgaggaaagattaaattttagaatgcttccttctgtctaatccatcagggg

SEQ ID NO: 572919 - DNA, 120 bp, Artificial Sequence
  ENSG00000171033_19 (sequence is synthesized)
ccaaaatgcccagtaaaattcaaacacatcacctattaatagacttacaagtgagaaaagaggttcctagggttattttaggcaatccctggtaaactgtttaaaccatcaaacccctac

SEQ ID NO: 572920 - DNA, 120 bp, Artificial Sequence
  ENSG00000171033_20 (sequence is synthesized)
agtcagttttcagtatcctcatttaatattttaataggtttcttgtgaatttaaacttctcttctttcttaaggttgtgaaattccaaactgattttatgtgattttgaaaagtttagaa

SEQ ID NO: 572921 - DNA, 120 bp, Artificial Sequence
  ENSG00000171033_21 (sequence is synthesized)
ccagtgctgagtctatgtggagggtttatattcctatgtgatatactgttattaatgcatgtggtgccatgcttgtctttaaatatataaatagtgctaaattgcaaagtcatatggagc

SEQ ID NO: 572922 - DNA, 120 bp, Artificial Sequence
  ENSG00000171033_22 (sequence is synthesized)
tttggatttagtttgacttcttactactgctttgtctgctatattcaaacccaaaggcattcccaagctagggagataaaaattaattttctaaaatgtccacatcctatacattttgct

SEQ ID NO: 572923 - DNA, 120 bp, Artificial Sequence
  ENSG00000171033_23 (sequence is synthesized)
tattcatggcatctttcaaattttattttagtttcctttatttgccaagaatacatatggatttgaatttttaaggagagaaggaaagggtaggaaaccagggccttgggtttagtaaca

SEQ ID NO: 572924 - DNA, 120 bp, Artificial Sequence
  ENSG00000171033_24 (sequence is synthesized)
ggcattggatgtctattaaccaactattcttacgctaatggctttgcagctcctattctcccatttgatcctcaaacaattctattagagtggtatttttatccaatttcacagattaaa

SEQ ID NO: 572925 - DNA, 120 bp, Artificial Sequence
  ENSG00000171033_25 (sequence is synthesized)
atataagcactcaataaaatataacctttagaagcttaaaaagctagtaagtgatgaactgaggatttgaacccatgtttgtcaccaaggagctttccagggcacatgtcataaaattag

SEQ ID NO: 572926 - DNA, 120 bp, Artificial Sequence
  ENSG00000171033_26 (sequence is synthesized)
agccaactgcagagctgtaagggaacttttagagatgaacttcttcagcctccatattttacagaaggaaactgaatcccagaaggagaaattgccgttctcaaggctccctggatgggt

SEQ ID NO: 572927 - DNA, 120 bp, Artificial Sequence
  ENSG00000171033_27 (sequence is synthesized)
aataacacagatatgagtaggtcacataaagtatatcttttttaaaaaaaagaaattcaattatgtcttatttggggggtatatttcccagaagatatttttctggcatgtggtctgtaa

SEQ ID NO: 572928 - DNA, 120 bp, Artificial Sequence
  ENSG00000171033_28 (sequence is synthesized)
acacagcatgattcatattttttatgtttcatgctactcattttgtttaattaccaacaaacatggggactttggctttttgacttatttgcaacaagcatgaaattgttaaatttacct

SEQ ID NO: 572929 - DNA, 120 bp, Artificial Sequence
  ENSG00000171033_29 (sequence is synthesized)
tttatcaattgtaatcatcctatgccaacatattatcataaattcatagaaatatttttaaaaataaataacagacattgaaatccaattcttagataatactcccagaacagccaatgg

SEQ ID NO: 572930 - DNA, 120 bp, Artificial Sequence
  ENSG00000171033_30 (sequence is synthesized)
taaatgccctatacttgagtcttacttagatgctgtggtaatgcaccattttagaagatgaatgatactgctatttctcttcagggaaacaataatggataaagaaatgtaactgccggg

SEQ ID NO: 572931 - DNA, 120 bp, Artificial Sequence
  ENSG00000171033_31 (sequence is synthesized)
cagcaaagcttctaagtgaaacctgtagtagcagtagtagtagggagaaaatgtgtagtcatcaagtgaaaataggaaaggatctatgatttatgatgtcttaatagaccctaaattgtt

SEQ ID NO: 572932 - DNA, 120 bp, Artificial Sequence
  ENSG00000171033_32 (sequence is synthesized)
ctttaattacaagagtggcagtctctgaagtcatttgtgagcttgtatgacttttgtatttagcaatgttgcatgctcacataattgaaaattaaaagtaacacatttttctgaaatgta

SEQ ID NO: 572933 - DNA, 120 bp, Artificial Sequence
  ENSG00000171044_0 (sequence is synthesized)
gttagggggcgtttctccaggaggaaagctgtgagctgcgacgctgaggaaggggaccccaaaacgtctggcactgccccctccagggatcactttggaccgcctcactcgggccagccg

SEQ ID NO: 572934 - DNA, 120 bp, Artificial Sequence
  ENSG00000171044_1 (sequence is synthesized)
gattctgaaacgccgaggggtcaacctgatgggtttcggggtcaacggaagaggggaaggggagccctggcggggagaaccccccggtcccccgcccagcagctgaggcacaggagggcg

SEQ ID NO: 572935 - DNA, 120 bp, Artificial Sequence
  ENSG00000171044_2 (sequence is synthesized)
gccatcttggccgggagggtagggctggggagctgcgggcgccgtgcgattggggggctcgcccggaagtgacgccaactacccggaagcggagggggttccctggcccactcccccctc

SEQ ID NO: 572936 - DNA, 120 bp, Artificial Sequence
  ENSG00000171044_3 (sequence is synthesized)
gttcgtttgctcccccgcttcctccccgccccccttcctctccattcgtttccccccctccccgttccctgccttcttccccccccccccgccgtccctcccccccaacctccggagctg

SEQ ID NO: 572937 - DNA, 120 bp, Artificial Sequence
  ENSG00000171044_4 (sequence is synthesized)
ggaagagagtcaagatggcggcgaaatccgatggcggtggcgtgggggtgggcttcgctcagctgcacaacctggacgaggcggtgggcagcggcggcgaggaggacggggagcccgggg

SEQ ID NO: 572938 - DNA, 120 bp, Artificial Sequence
  ENSG00000171044_5 (sequence is synthesized)
gaggcggctgcggcggcggcggcgacggcagcgagcccggcgagagcagctcgatgcacatctgccactgctgcaacacctcctcgtgctactggggctgccgctccgcctgcctgcgct

SEQ ID NO: 572939 - DNA, 80 bp, Artificial Sequence
  ENSG00000171044_6 (sequence is synthesized)
cctgcctgcgctccctcctgggcaggaagccgcgccgcagcgccgccgccgacgggggggaccagccgctgcagcctccc

SEQ ID NO: 572940 - DNA, 120 bp, Artificial Sequence
  ENSG00000171044_7 (sequence is synthesized)
agccgccgccgccgcaggtggagcggccgtggctcgactgcctgtggatcgtgctggcgctgctggtgttcttcggggacgtgggcaccgacctgtggctggccctcgactactaccgca

SEQ ID NO: 572941 - DNA, 120 bp, Artificial Sequence
  ENSG00000171044_8 (sequence is synthesized)
agggggactacgtctacttcgggctgaccctcttcttcgtgctggtgccgtcgctgctggtgcagagcctgagcttccgctggttcgtgcaggactacacgggcggcgggctgggcgccg

SEQ ID NO: 572942 - DNA, 120 bp, Artificial Sequence
  ENSG00000171044_9 (sequence is synthesized)
ggcccccccatgatgggggccggctacgtccacggcgcggcccgcggtggcccaggcgtgagggtctcccccacgccgggggcgcagcgcctgtgtcgcctctccgtgtggatctggcag

SEQ ID NO: 572943 - DNA, 120 bp, Artificial Sequence
  ENSG00000171044_10 (sequence is synthesized)
tctccgtgtggatctggcagtcggtcatccacctgctgcagatggggcaggtgtggaggtatatccgcaccatgtacctggggattcagagccagcggcggaaggaacaccagcgacgct

SEQ ID NO: 572944 - DNA, 120 bp, Artificial Sequence
  ENSG00000171044_11 (sequence is synthesized)
tctactgggctatgatgtatgaatatgcagacgtcaacatgctgcgcctcctggagaccttcctggagagcgcgccccaactggtgctacagctctacatcatgctccagaagaacagcg

SEQ ID NO: 572945 - DNA, 120 bp, Artificial Sequence
  ENSG00000171044_12 (sequence is synthesized)
ccgagaccctgccctgtgtctcctctgtgacttccctgatgtccctggcttgggtgctagcctcctatcacaagctgctgcgggactccagggacgacaagaagagcatgagctacagag

SEQ ID NO: 572946 - DNA, 120 bp, Artificial Sequence
  ENSG00000171044_13 (sequence is synthesized)
gggccatcatccaggtcttctggcgcctcttcaccatctcatcccgagtgatctcttttgccctctttgcttccatcttccagctctattttgggatcttcgtggtggttcactggtgcg

SEQ ID NO: 572947 - DNA, 120 bp, Artificial Sequence
  ENSG00000171044_14 (sequence is synthesized)
ccatggccttctggatcatccatggcggaacagacttctgcatgtccaagtgggaggagatcctcttcaacatggtggtagggatcgtgtacattttctgctggtttaacgtcaaggaag

SEQ ID NO: 572948 - DNA, 120 bp, Artificial Sequence
  ENSG00000171044_15 (sequence is synthesized)
ggcggactcgatatcgaatgtttgcatattatacgatagtcttgaccgagaatgctgccttgacgttcctttggtatttttacagagacccggagaccactgactcctatgcggtgccag

SEQ ID NO: 572949 - DNA, 120 bp, Artificial Sequence
  ENSG00000171044_16 (sequence is synthesized)
cactgtgttgtgtctttattagctttgtggctgggatcgcaatgatgctcttatactatggcgtgctgcatcccacaggaccacgagctaagatccttgccagctcctgttgtgccgagc

SEQ ID NO: 572950 - DNA, 120 bp, Artificial Sequence
  ENSG00000171044_17 (sequence is synthesized)
tgctctggggcatccctttgccccccgatgttgagcccatggcgcctgagatccctgggtaccgggggacccaggttacgcccaccagagccgtaacggaacaacaggaggatctcacgg

SEQ ID NO: 572951 - DNA, 120 bp, Artificial Sequence
  ENSG00000171044_18 (sequence is synthesized)
ttgcttgcctgttttccaagtgagacccatggggccccctaccccgttggggcgtccttacctcccagaagggcccctcattaagattgacatgccaagaaagcgatacccagcttggga

SEQ ID NO: 572952 - DNA, 120 bp, Artificial Sequence
  ENSG00000171044_19 (sequence is synthesized)
tgctcattttgtagacaggaggctgagaaggactattaacattctacaatatgtcacccccaccgcagtaggcattcgatatcgagacggaccactcctctatgagttgctacagtatga

SEQ ID NO: 572953 - DNA, 120 bp, Artificial Sequence
  ENSG00000171044_20 (sequence is synthesized)
gtcttcactctaagagcatcttgaccaagttgagaaggggaccttaagtttggtttgcggcaaacagcacttgcaagaaatataaccctcccttcccccaatacacagaaccaccgccac

SEQ ID NO: 572954 - DNA, 120 bp, Artificial Sequence
  ENSG00000171044_21 (sequence is synthesized)
caccaccaacaccgccacaccaacaccaccactacaaaaaaaaaagaattaataagtcacaaccccttcaaataagctttctttccagtcgctgtatgtatacaaagatattctctatgt

SEQ ID NO: 572955 - DNA, 120 bp, Artificial Sequence
  ENSG00000171044_22 (sequence is synthesized)
tttgtaagtaaaaacaaaaagaaaacctttcttttgttttttacacataagaaacagtattgaaaaatcccacgctatggttcatagggtggagaaggaggagttatctccactccaaaa

SEQ ID NO: 572956 - DNA, 120 bp, Artificial Sequence
  ENSG00000171044_23 (sequence is synthesized)
gaaaaaaaaaaagttttttaccttacaccaagtgtagatcatttatgggattggtgctgattgaaagaacaaaacaaaacaaaacaaacacaaacaaacaaaaaaccttcaactgcctta

SEQ ID NO: 572957 - DNA, 120 bp, Artificial Sequence
  ENSG00000171044_24 (sequence is synthesized)
tgcccttaggtgctgagtttcattaagtactgtcacgttttctcatgcaaaactctctggtgatttttgcaccagaagagggaaaattaaacaattaaatgaaacaaatctaaaagtgaa

SEQ ID NO: 572958 - DNA, 120 bp, Artificial Sequence
  ENSG00000171044_25 (sequence is synthesized)
acaaaaaccaaccaacaaatacaacacaaagcaattattcttcctatctgattatttgtattgaagaaaacaaatttaccaaaagcaaaagcataaacccctccctcttttcagtttctc

SEQ ID NO: 572959 - DNA, 120 bp, Artificial Sequence
  ENSG00000171044_26 (sequence is synthesized)
cccctcctctcctgaccttctccccactttgcagagccttctaggagctcaagggctgtttgaaactcaaatggctggagaagctacttgaaggctgattatgtgccattttagcatttg

SEQ ID NO: 572960 - DNA, 120 bp, Artificial Sequence
  ENSG00000171044_27 (sequence is synthesized)
cctagcaagaatcacattcgtttcccagtgaaaagcaaaccagaacaaaacaaaaagccaccgcaataattcggtaaggacaggatattctaaagcaaattaaaggagatttctgtacac

SEQ ID NO: 572961 - DNA, 120 bp, Artificial Sequence
  ENSG00000171044_28 (sequence is synthesized)
atagtcagtaataataaaactcagcatagtagcaaaaagaacgacatcagtttaaaggcacaatacttaatcagtgactggcaacaacgattagttccatcattttaaggctgtgaatgg

SEQ ID NO: 572962 - DNA, 120 bp, Artificial Sequence
  ENSG00000171044_29 (sequence is synthesized)
tagacatttatcacatgtgatattgtgtaaagcctcttctgtttccatttggtgggaagccttaaattgatctggaaagaattcttcatttttcatttgtgcttttttaaaaaaaaaaat

SEQ ID NO: 572963 - DNA, 120 bp, Artificial Sequence
  ENSG00000171044_30 (sequence is synthesized)
aacacaaagaggaaaactagaatatatatatatatatacatatatataaaaagtcaaaattgtaataactgacccatttcaaagactgtttggtgcttctgtctttcaccattgtggttg

SEQ ID NO: 572964 - DNA, 120 bp, Artificial Sequence
  ENSG00000171044_31 (sequence is synthesized)
gctgaaaatcattcagctcacctggtgcatctgggttgaatgggaaattttgtgtgtgtagtatgtgtgtgtttgtgtgtgtatgtgtgtgtgtgcccatagcacacgtatatatgtgtg

SEQ ID NO: 572965 - DNA, 120 bp, Artificial Sequence
  ENSG00000171044_32 (sequence is synthesized)
tgtccctgctgcaaagtcttgccagagatatacaaaactgatgtaagacgaacttggatcacggcttggttcagcagagcatgggggcgggggctctggagtggtggggaagtgatgctg

SEQ ID NO: 572966 - DNA, 120 bp, Artificial Sequence
  ENSG00000171044_33 (sequence is synthesized)
cctgcccacgagccctggtttgggtggcaagactcacaccagcagcggactgcaggccttagaggccatgccatttgggtgaggatttgattccactgtttattttctcattgtatcaag

SEQ ID NO: 572967 - DNA, 120 bp, Artificial Sequence
  ENSG00000171044_34 (sequence is synthesized)
ttgaatttctgcaggtgttgcaagtatgttcaacgatttaaatttttttttatttttcaaagtattgttcctttaaagaatatttctgttctagggcatcgtttcaatcgcatcgtatct

SEQ ID NO: 572968 - DNA, 120 bp, Artificial Sequence
  ENSG00000171044_35 (sequence is synthesized)
catcgtttcaatcgcatcgtatctctacttgggcacaaaaaaaaaggaaaagaaaaaaaatcacaaaaaagatatataataagtatatatatatatatatatataaacacacacaatatt

SEQ ID NO: 572969 - DNA, 120 bp, Artificial Sequence
  ENSG00000171044_36 (sequence is synthesized)
gtctttttctcctgccttctcctggagatgaagagaactgcaaacactgtgtactgctgcacgcgggcctcccccaggccaacagaactgctgggtatatccgcaccatgtacctgggga

SEQ ID NO: 572970 - DNA, 120 bp, Artificial Sequence
  ENSG00000171044_37 (sequence is synthesized)
agatggggcaggtgtggagctctaagcgaaagacatgaggcctcagcctgaaatgaggttgttttgaggtcatctgatttctgactagaaggtgagcgatcgcctcgtcctgaaaccact

SEQ ID NO: 572971 - DNA, 120 bp, Artificial Sequence
  ENSG00000171044_38 (sequence is synthesized)
catggtaaatggcaaagccagcgagagggaggccttcatgtgtttccgtgtctgtgctgccccagttccttcctcttcaagattaaaaacattttaaagttgtaaaccaaaggtttgcaa

SEQ ID NO: 572972 - DNA, 120 bp, Artificial Sequence
  ENSG00000171044_39 (sequence is synthesized)
ttttttttggtgatggcatgttcagaatcttggatccctaagttcaatatattggacatatttaggaactctggaaattatgttgttttcacatatctagtaacttactagatgaatcag

SEQ ID NO: 572973 - DNA, 120 bp, Artificial Sequence
  ENSG00000171044_40 (sequence is synthesized)
tagatttcattaaagtatatctaataacagataattatgatgtacttctgggttgacatgcatgtctctcattatcagctatcagtattagtgtcatgctttggagacagttatcttttg

SEQ ID NO: 572974 - DNA, 120 bp, Artificial Sequence
  ENSG00000171044_41 (sequence is synthesized)
cctggtttcttcccttctccctcctcccatctgaaaaatccagaaatacttgcttagctgtgagggtaagtgggttaaattgagacagagatacttcctccaggagaatgaataagaaga

SEQ ID NO: 572975 - DNA, 120 bp, Artificial Sequence
  ENSG00000171044_42 (sequence is synthesized)
gaacatctctaaagatttatttcttgtttttgagtgaacagtaaccctaaaaacttgacatttatggtaaattttcaagggaaggggatgaaaaaatggcatgctttggagcgaaattgc

SEQ ID NO: 572976 - DNA, 120 bp, Artificial Sequence
  ENSG00000171044_43 (sequence is synthesized)
aactggggatgcagcatagtatttccagaaggatccagaaacaaagtgtcaaaatctgtattgtaagaaggctggtgctcctgaaatctagcaggcaggtgcttactagaagtcacaagt

SEQ ID NO: 572977 - DNA, 120 bp, Artificial Sequence
  ENSG00000171044_44 (sequence is synthesized)
tgttcatttctgtcttcaacatcatttgatactatagacttattcataaggtcaattgcctagtcaggcttatgcagtgcagtggatagattctgtaatgttggaaagattctgtgggat

SEQ ID NO: 572978 - DNA, 120 bp, Artificial Sequence
  ENSG00000171044_45 (sequence is synthesized)
ggaaagattctgtgggatgcaaaaagaaactgtgtctctgatgttgccattttcaccccaggatgatttgctttacaacgtgctgtctgcaaataagtttgtggttaaaattttagttta

SEQ ID NO: 572979 - DNA, 120 bp, Artificial Sequence
  ENSG00000171044_46 (sequence is synthesized)
ctccccatgatgtgctattcatctagtttcttctcatcaggaattctggatttcttatttgcctcttaaaaagtaaaacttttaaaaaatttatgaaaatataacctcatttaacaagtt

SEQ ID NO: 572980 - DNA, 120 bp, Artificial Sequence
  ENSG00000171045_0 (sequence is synthesized)
acgtgatgtttgggtgcccgccccgcccgcctcgcccgccgtgagcgcccggagcggtccgcgagccaccgaggcccagctcagtgtggaggctgctggccctgccatctgtaagaagat

SEQ ID NO: 572981 - DNA, 120 bp, Artificial Sequence
  ENSG00000171045_1 (sequence is synthesized)
gtcatacggatccatcgcccgtggaggtggcctggggagccgtggccctttcgggggaccttcgagacaaggctgtcagcccctagagtgcgctagatgttggaccgagtatggaatccg

SEQ ID NO: 572982 - DNA, 120 bp, Artificial Sequence
  ENSG00000171045_2 (sequence is synthesized)
ccatttcccctgcccgtcgccagagagcaagctgcagaaccgctgtgtggggaaggacggggaaggtgatctggggccagcaggcacgcctattgtcccaagggccaggaagcgagggcc

SEQ ID NO: 572983 - DNA, 120 bp, Artificial Sequence
  ENSG00000171045_3 (sequence is synthesized)
tggggttgcccctgaaggcagccggatgccggagcccacctcatcacccaccattggcccgaggaaggactcggctgctgggccccatggccggatggcggggcccagcactacccgggc

SEQ ID NO: 572984 - DNA, 120 bp, Artificial Sequence
  ENSG00000171045_4 (sequence is synthesized)
caagaagaggaagcccaacttctgcccgcaggagaccgaggtgctggtgtccaaggtgagcaagcaccaccagctgctgtttggcacggggctgctgaaggccgagcccactcgcaggta

SEQ ID NO: 572985 - DNA, 120 bp, Artificial Sequence
  ENSG00000171045_5 (sequence is synthesized)
ccgcgtgtggagccgcatcctgcaggccgtgaatgcgctgggctactgtcgccgcgacgttgtggacctgaagcacaagtggcgggacctacgagccgtcgtgcggcgcaagctgggcga

SEQ ID NO: 572986 - DNA, 120 bp, Artificial Sequence
  ENSG00000171045_6 (sequence is synthesized)
cctccggaaggcggcccatggccccagccctggttccggcaagccccaggccctggctctcacgcccgtggagcaggtggtggccaagaccttctcttgccaggccctgccctccgaggg

SEQ ID NO: 572987 - DNA, 120 bp, Artificial Sequence
  ENSG00000171045_7 (sequence is synthesized)
ctccttggagcggagccttcagtccttagggacaccgagtgacacgcaggagcttcgggacagcctgcacacggcacagcaggagaccaacaagaccattgcagccagcgccagctccgt

SEQ ID NO: 572988 - DNA, 120 bp, Artificial Sequence
  ENSG00000171045_8 (sequence is synthesized)
gaagcagatggccgagctgctgcgcagctcctgcccgcaggagcgtctgcagcaggagcgtcctcagctggaccggctgaaaacccagctctcagatgccattcagtgctatggagtggt

SEQ ID NO: 572989 - DNA, 120 bp, Artificial Sequence
  ENSG00000171045_9 (sequence is synthesized)
gcagaagaaaattgcagaaaagtccagagcgctgcttcccatggcgcagaggggcagtaaacagagtccccaggccccgtttgccgagctggctgatgatgagaaggtctttaacgggag

SEQ ID NO: 572990 - DNA, 120 bp, Artificial Sequence
  ENSG00000171045_10 (sequence is synthesized)
tgacaacatgtggcagggccaggagcaggcgctgctcccggacatcactgaagaggacctggaggccatccggctgcgggaggaggccatcctgcagatggagagcaacttgctggatgt

SEQ ID NO: 572991 - DNA, 120 bp, Artificial Sequence
  ENSG00000171045_11 (sequence is synthesized)
gaatcagatcatcaaggacttggcctccatggtgtcagagcaaggagaagctgttgatagtattgaagccagccttgaggctgcgtcctcgcatgcggaggcagcccgccagctcctggc

SEQ ID NO: 572992 - DNA, 120 bp, Artificial Sequence
  ENSG00000171045_12 (sequence is synthesized)
tggagccagccggcaccaactccagagacacaagatcaagtgctgcttcctatcagctggagtcactgccctgcttgtcatcatcatcatcatcgccacctctgtccgaaagtgatgcta

SEQ ID NO: 572993 - DNA, 120 bp, Artificial Sequence
  ENSG00000171045_13 (sequence is synthesized)
cccgtgcatcggccgctgaaccgtcagctggctgtggtgtgggctctccagccccgagcacccctcctggcccggagctgggagctgatggagtccgctgcgttgtcagctgatgccgtc

SEQ ID NO: 572994 - DNA, 120 bp, Artificial Sequence
  ENSG00000171045_14 (sequence is synthesized)
acttggcctgcaatggacccgagagcttcacagctgcctgctgtcctcccctgcactgaccccactcgcccctgtgtcggccccagctgagcacccgaataaaccgctgtggcttatcca

SEQ ID NO: 572995 - DNA, 120 bp, Artificial Sequence
  ENSG00000171045_15 (sequence is synthesized)
gaggtgctgtgcgcaagaagctggcggagggcggccccgcccccggcctcctcctcacacctgtggagcgcatggtggcagagaccttttctgcccacggtccccaaggcgagggccaga

SEQ ID NO: 572996 - DNA, 120 bp, Artificial Sequence
  ENSG00000171045_16 (sequence is synthesized)
gaggaggacgagacccccagctgcttgtggctgcccctgaggtccctggaagggcccagcctgcctgaacctgaccccctggacttacgaggagtcttccacgcacccacctcctcaccc

SEQ ID NO: 572997 - DNA, 120 bp, Artificial Sequence
  ENSG00000171045_17 (sequence is synthesized)
acgtgatgtttgggtgcccgccccgcccgcctcgcccgccgtgagcgcccggagcggtccgcgagccaccgaggcccagtgtcctgggacaatttttggcacattggaaatgttcagcca

SEQ ID NO: 572998 - DNA, 120 bp, Artificial Sequence
  ENSG00000171045_18 (sequence is synthesized)
tccccagcctccaccccaccagcaaccacactcatgggggccttccagccttccccgccctcttcggcgccagcacctcccttgccctccaggaggaccccagcggcagcatctgaaacg

SEQ ID NO: 572999 - DNA, 120 bp, Artificial Sequence
  ENSG00000171045_19 (sequence is synthesized)
tccgcatttgagcagcagctgctggactcccaccggcagcagggcgccctgctgtcctcctgggcccagcagcagagcacactcatggcccagcaaaacctgctgctgcagcggctggcc

SEQ ID NO: 573000 - DNA, 120 bp, Artificial Sequence
  ENSG00000171045_20 (sequence is synthesized)
gagcagagccagcgtctggccgatggcgtggaggccctcaaccggaccctcgagaggctggtggaagcacgccctacccgggaagcctcaccctcactccaggacggtagtcctgccagt

SEQ ID NO: 573001 - DNA, 120 bp, Artificial Sequence
  ENSG00000171045_21 (sequence is synthesized)
ggagtggcccaggggcctgctggaggctcccaggacagccccaagggcacccactcggggctcgaggtcttctcagggatgatcttgaaggtggaggaggagatatagggctggtcgggg

SEQ ID NO: 573002 - DNA, 120 bp, Artificial Sequence
  ENSG00000171045_22 (sequence is synthesized)
gtgctggcagagccaaagggcaggagcagggcctccagtctttcccctgctgagtccaggcaggggagaggtggcagtgactgggtctccagggcaccgggacaactccagtccaggaga

SEQ ID NO: 573003 - DNA, 120 bp, Artificial Sequence
  ENSG00000171045_23 (sequence is synthesized)
ccggaaggatgagaggatgtgggctgtctacctgtgatgtcgcgtccttgccattgcctgtagagggtggtgacctgcagggaaaggctgcagagagccgacctgtgggactcagtggac

SEQ ID NO: 573004 - DNA, 120 bp, Artificial Sequence
  ENSG00000171045_24 (sequence is synthesized)
caggtctactcagggatgatgctgttggaggctccaaccccatgtggcagcagctgcgaagtctgcagcccagcgtccctggaagcaggggaggtggggaagatgcactgaggggccccc

SEQ ID NO: 573005 - DNA, 120 bp, Artificial Sequence
  ENSG00000171045_25 (sequence is synthesized)
tgctcactggaactctggaaagggtggctcagccaggctctaaaaaggtcccaagcgtgatctggtgtgactcctgaaagcccctgtccctttggtgggcatgcacacttggagggcagg

SEQ ID NO: 573006 - DNA, 120 bp, Artificial Sequence
  ENSG00000171045_26 (sequence is synthesized)
gctcctctgccctacgtggttctggcccaggggaaccacatcccatatgcctggaataatttctatccaattttctgttataaatacataaatatatatatatatatatatatgcctata

SEQ ID NO: 573007 - DNA, 120 bp, Artificial Sequence
  ENSG00000171045_27 (sequence is synthesized)
gaccctgagccgcagccccgcgagagcgccgcatttcggggaccggcccgcgggcacatgagcccctcggcgggtcctcgcgcgctgttcagaccccagctcagtgtggaggctgctggc

SEQ ID NO: 573008 - DNA, 120 bp, Artificial Sequence
  ENSG00000171045_28 (sequence is synthesized)
ctccagggccctccccttcgctggtgctggttcctcatccgtctcgtgctctccggggccctccccttagctggtgctggttcctcatctgtctcgtggtctccggggccctccccttcg

SEQ ID NO: 573009 - DNA, 120 bp, Artificial Sequence
  ENSG00000171045_29 (sequence is synthesized)
cgtgggcaagcgtgctcactctccacactccacatgaggctgggaaccagaggagcccaggtgccagcctgctgcaccattgcttgcccttgacctggaggggctggaactaggcctcca

SEQ ID NO: 573010 - DNA, 120 bp, Artificial Sequence
  ENSG00000171045_30 (sequence is synthesized)
tggccttgcccattctaaccacctctctctggccatctggtccaataagggagagacgggagtctgggagccccatccccatcccctccttcctgggtttccctaatagggcacagccct

SEQ ID NO: 573011 - DNA, 120 bp, Artificial Sequence
  ENSG00000171045_31 (sequence is synthesized)
ctggccaggagctggggtctatgctggggtagcctctcagtcaccatggccatttcatttgctgtgtggttagacttccaggaggctgtttagctctaatgaagatgatttggtgcttaa

SEQ ID NO: 573012 - DNA, 120 bp, Artificial Sequence
  ENSG00000171045_32 (sequence is synthesized)
cagatcatcaaggacttggcctccatggtgtcagagcaaggagaagctgttgggtccagcagcagcaaagccatctgccagcagagctgcagccccgagccggccgcggcagccctgctg

SEQ ID NO: 573013 - DNA, 120 bp, Artificial Sequence
  ENSG00000171045_33 (sequence is synthesized)
ctgggtgccgggccgggctccacacccctgcggccgggcccccactcccgcaccaagacacgcaagcccaacttcagcccccaggagacggaggtgctggtgcagagggtgcggcgccac

SEQ ID NO: 573014 - DNA, 120 bp, Artificial Sequence
  ENSG00000171045_34 (sequence is synthesized)
tacccgctgctgttcggggcgctgcggggcacacctgcccgaaagcaccgcgtgtggagccgcatcctgcaggcagtgaacgcgctgggctactgccgccgcgacctgggggacctcaag

SEQ ID NO: 573015 - DNA, 120 bp, Artificial Sequence
  ENSG00000171049_0 (sequence is synthesized)
gttgctccacaggaagccaagaagcacacaggaaaaggagcttagctgctggtgctgctggcaagatggaaaccaacttctccactcctctgaatgaatatgaagaagtgtcctatgagt

SEQ ID NO: 573016 - DNA, 120 bp, Artificial Sequence
  ENSG00000171049_1 (sequence is synthesized)
ctgctggctacactgttctgcggatcctcccattggtggtgcttggggtcacctttgtcctcggggtcctgggcaatgggcttgtgatctgggtggctggattccggatgacacgcacag

SEQ ID NO: 573017 - DNA, 120 bp, Artificial Sequence
  ENSG00000171049_2 (sequence is synthesized)
tcaccaccatctgttacctgaacctggccctggctgacttttctttcacggccacattaccattcctcattgtctccatggccatgggagaaaaatggccttttggctggttcctgtgta

SEQ ID NO: 573018 - DNA, 120 bp, Artificial Sequence
  ENSG00000171049_3 (sequence is synthesized)
agttaattcacatcgtggtggacatcaacctctttggaagtgtcttcttgattggtttcattgcactggaccgctgcatttgtgtcctgcatccagtctgggcccagaaccaccgcactg

SEQ ID NO: 573019 - DNA, 120 bp, Artificial Sequence
  ENSG00000171049_4 (sequence is synthesized)
tgagtctggccatgaaggtgatcgtcggaccttggattcttgctctagtccttaccttgccagttttcctctttttgactacagtaactattccaaatggggacacatactgtactttca

SEQ ID NO: 573020 - DNA, 120 bp, Artificial Sequence
  ENSG00000171049_5 (sequence is synthesized)
actttgcatcctggggtggcacccctgaggagaggctgaaggtggccattaccatgctgacagccagagggattatccggtttgtcattggctttagcttgccgatgtccattgttgcca

SEQ ID NO: 573021 - DNA, 120 bp, Artificial Sequence
  ENSG00000171049_6 (sequence is synthesized)
tctgctatgggctcattgcagccaagatccacaaaaagggcatgattaaatccagccgtcccttacgggtcctcactgctgtggtggcttctttcttcatctgttggtttccctttcaac

SEQ ID NO: 573022 - DNA, 120 bp, Artificial Sequence
  ENSG00000171049_7 (sequence is synthesized)
tggttgcccttctgggcaccgtctggctcaaagagatgttgttctatggcaagtacaaaatcattgacatcctggttaacccaacgagctccctggccttcttcaacagctgcctcaacc

SEQ ID NO: 573023 - DNA, 120 bp, Artificial Sequence
  ENSG00000171049_8 (sequence is synthesized)
tgggccaagacttccgagagagactgatccactccctgcccaccagtctggagagggccctgtctgaggactcagccccaactaatgacacggctgccaattctgcttcacctcctgcag

SEQ ID NO: 573024 - DNA, 120 bp, Artificial Sequence
  ENSG00000171049_9 (sequence is synthesized)
agactgagttacaggcaatgtgaggatggggtcagggatattttgagttctgttcatcctaccctaatgccagttccagcttcatctacccttgagtcatattgaggcattcaaggatgc

SEQ ID NO: 573025 - DNA, 120 bp, Artificial Sequence
  ENSG00000171049_10 (sequence is synthesized)
acagctcaagtatttattcaggaaaaatgcttttgtgtccctgatttggggctaagaaatagacagtcaggctactaaaatattagtgttattttttgttttttgacttctgcctatacc

SEQ ID NO: 573026 - DNA, 120 bp, Artificial Sequence
  ENSG00000171049_11 (sequence is synthesized)
ctggggtaagtggagttgggaaatacaagaagagaaagaccagtggggatttgtaagacttagatgagatagcgcataataaggggaagactttaaagtataaagtaaaatgtttgctgt

SEQ ID NO: 573027 - DNA, 120 bp, Artificial Sequence
  ENSG00000171049_12 (sequence is synthesized)
aggttttttatagctattaaaaaaaatcagattatggaagttttcttctatttttagtttgctaagagttttctgtttctttttcttacatcatgagtggactttgcattttatcaaatg

SEQ ID NO: 573028 - DNA, 120 bp, Artificial Sequence
  ENSG00000171049_13 (sequence is synthesized)
cattttctacatgtattaagatggtcatattattcttcttcttttatgtaaatcattataaataatgttcattaagttctgaatgttaaactactcttgaattcctggaataaaccacac

SEQ ID NO: 573029 - DNA, 120 bp, Artificial Sequence
  ENSG00000171049_14 (sequence is synthesized)
ttagtcctgatgtactttaaatatttatatctcacaggagttggttagaatttctgtgtttatgtttatatactgttatttcactttttctactatccttgctaagttttcatagaaaat

SEQ ID NO: 573030 - DNA, 120 bp, Artificial Sequence
  ENSG00000171049_15 (sequence is synthesized)
aaggaacaaagagaaacttgtaatggtctctgaaaaggaattgagaagtaattcctctgattctgttttctggtgttatatctttattaaatattcagaaaaattcaccagtgaagccaa

SEQ ID NO: 573031 - DNA, 120 bp, Artificial Sequence
  ENSG00000171049_16 (sequence is synthesized)
ggaccaggaacaacctatttgcaaagttggcgcaaacattcctgcctgacaggaccatggacacaggttgtagagatagagatggctctggctgtgcattcagcagattctgtagataga

SEQ ID NO: 573032 - DNA, 120 bp, Artificial Sequence
  ENSG00000171049_17 (sequence is synthesized)
attaataggacttggatgggattgtggtgagagaaagtgaaatgaaagataagttctagtttggaagttttaacaactgaatgtttaaactcaaatagacacaaaatattggaagagtgg

SEQ ID NO: 573033 - DNA, 120 bp, Artificial Sequence
  ENSG00000171049_18 (sequence is synthesized)
caggtttgggaggatgagacaatcaactgtttggttgagccacgttaggtttgaaatgtctacgggactcccgtggggagaggttatatcagactggagcaccagagagaggccaaggct

SEQ ID NO: 573034 - DNA, 120 bp, Artificial Sequence
  ENSG00000171049_19 (sequence is synthesized)
gatagtttagatgaaaagagagcatgatattttaagccctgagactggataatatcacctatagaaagactatatagagataagagaggtggggaacaagtaaaagctgcgggacactcc

SEQ ID NO: 573035 - DNA, 120 bp, Artificial Sequence
  ENSG00000171049_20 (sequence is synthesized)
taaatttagagtcaaatttagagcagaaaatactagcaaaggggactgaaaagcggtggccaattgagcttcaaatgcaagtgaaagtgtgttgtgtgtacatttatcatctcatggcac

SEQ ID NO: 573036 - DNA, 120 bp, Artificial Sequence
  ENSG00000171049_21 (sequence is synthesized)
aggaaaaacgtgatttaaggagaaggaagcgatccaatgggaagaagagatccaatggatcctctatcacgaagatattgagataagaaccaatatggatttgcacccactgcatttgca

SEQ ID NO: 573037 - DNA, 120 bp, Artificial Sequence
  ENSG00000171049_22 (sequence is synthesized)
tatgagccttgtaatcctcttggtgaagtgatcagcccgataagcgaaatgcatattgataatgatgggaatatggaggactatcccttcccaaaggagcatccaagagaatgccaattc

SEQ ID NO: 573038 - DNA, 120 bp, Artificial Sequence
  ENSG00000171049_23 (sequence is synthesized)
gctttaatggcattaggacagtgggctgggcctgtttagaaactcatgtacctgactgtatttctcagcctcagtctctgtgggatgcagaggttcagtgctctcaacaacaagggccaa

SEQ ID NO: 573039 - DNA, 120 bp, Artificial Sequence
  ENSG00000171049_24 (sequence is synthesized)
gaaatccaagtgtccgggcccctgctccctccaagggtcaaggtaaagaaagcagcaagcactgtggtgagaagaatcagagggaggcaatgaaaggaagagaagaagtcatgagggatg

SEQ ID NO: 573040 - DNA, 120 bp, Artificial Sequence
  ENSG00000171049_25 (sequence is synthesized)
gagaccagaaacacagagagaggtggtccgcagagcccatgtctgattgatctctatgtctccagcagccagcaaggaagcacctctttagagacctgcacctatacaatacctaccacc

SEQ ID NO: 573041 - DNA, 120 bp, Artificial Sequence
  ENSG00000171049_26 (sequence is synthesized)
ttttatttctcgatatgtgaactccattgagaacaaacgagtaaataaggaagggctggacattcagattccttgacccttgacatttggaagcatgaactccagtctctcacagaaggc

SEQ ID NO: 573042 - DNA, 120 bp, Artificial Sequence
  ENSG00000171049_27 (sequence is synthesized)
attggtttctaagaagagtccgctgacaacatacccaaggtgtcttctgaaaattataagaaatcctgagtttctgttaggggattggctccagctccattgtccctcccccatcattca

SEQ ID NO: 573043 - DNA, 120 bp, Artificial Sequence
  ENSG00000171051_0 (sequence is synthesized)
atgttttgctgcaatcattagagcctgagtcactctccccaggagacccagacctagaactacccagagcaagaccacagctggtgaacagtccaggagcagacaagatggagacaaatt

SEQ ID NO: 573044 - DNA, 120 bp, Artificial Sequence
  ENSG00000171051_1 (sequence is synthesized)
cctctctccccacgaacatctctggagggacacctgctgtatctgctggctatctcttcctggatatcatcacttatctggtatttgcagtcacctttgtcctcggggtcctgggcaacg

SEQ ID NO: 573045 - DNA, 120 bp, Artificial Sequence
  ENSG00000171051_2 (sequence is synthesized)
ggcttgtgatctgggtggctggattccggatgacacacacagtcaccaccatcagttacctgaacctggccgtggctgacttctgtttcacctccactttgccattcttcatggtcagga

SEQ ID NO: 573046 - DNA, 120 bp, Artificial Sequence
  ENSG00000171051_3 (sequence is synthesized)
aggccatgggaggacattggcctttcggctggttcctgtgcaaattcgtctttaccatagtggacatcaacttgttcggaagtgtcttcctgatcgccctcattgctctggaccgctgtg

SEQ ID NO: 573047 - DNA, 120 bp, Artificial Sequence
  ENSG00000171051_4 (sequence is synthesized)
tttgcgtcctgcatccagtctggacccagaaccaccgcaccgtgagcctggccaagaaggtgatcattgggccctgggtgatggctctgctcctcacattgccagttatcattcgtgtga

SEQ ID NO: 573048 - DNA, 120 bp, Artificial Sequence
  ENSG00000171051_5 (sequence is synthesized)
ctacagtacctggtaaaacggggacagtagcctgcacttttaacttttcgccctggaccaacgaccctaaagagaggataaatgtggccgttgccatgttgacggtgagaggcatcatcc

SEQ ID NO: 573049 - DNA, 120 bp, Artificial Sequence
  ENSG00000171051_6 (sequence is synthesized)
ggttcatcattggcttcagcgcacccatgtccatcgttgctgtcagttatgggcttattgccaccaagatccacaagcaaggcttgattaagtccagtcgtcccttacgggtcctctcct

SEQ ID NO: 573050 - DNA, 120 bp, Artificial Sequence
  ENSG00000171051_7 (sequence is synthesized)
ttgtcgcagcagccttttttctctgctggtccccatatcaggtggtggcccttatagccacagtcagaatccgtgagttattgcaaggcatgtacaaagaaattggtattgcagtggatg

SEQ ID NO: 573051 - DNA, 120 bp, Artificial Sequence
  ENSG00000171051_8 (sequence is synthesized)
cctggccttcttcaacagctgcctcaaccccatgctctatgtcttcatgggccaggacttccgggagaggctgatccacgcccttcccgccagtctggagagggccctgaccgaggactc

SEQ ID NO: 573052 - DNA, 120 bp, Artificial Sequence
  ENSG00000171051_9 (sequence is synthesized)
aacccaaaccagtgacacagctaccaattctactttaccttctgcagaggtggagttacaggcaaagtgaggagggagctgggggacactttcgagctcccagctccagcttcgtctcac

SEQ ID NO: 573053 - DNA, 120 bp, Artificial Sequence
  ENSG00000171051_10 (sequence is synthesized)
cttgagttaggctgagccacaggcatttcctgcttattttaggattacccactcatcagaaaaaaaaaaaaaagcctttgtgtcccctgatttggggagaataaacagatatgagtttat

SEQ ID NO: 573054 - DNA, 120 bp, Artificial Sequence
  ENSG00000171051_11 (sequence is synthesized)
tattgacttcttttttgattttggacctcagccttgggtggtcagggtgggaaatgataggaagaagctgtcatctgcatcctagtttgcctgaaatgaacccaaataatacccattatt

SEQ ID NO: 573055 - DNA, 120 bp, Artificial Sequence
  ENSG00000171051_12 (sequence is synthesized)
attagtcctgaattatgagtagtgaatgatacccatcattctggcatcatgatgagtagtgtccacttccattctgaaaagtgccctgctgtgaaaaataaattatatagtcatcctagg

SEQ ID NO: 573056 - DNA, 120 bp, Artificial Sequence
  ENSG00000171051_13 (sequence is synthesized)
atatagtcatcctaggtaaatgaaggaggagggagaagtgtgaaagagtatggcttaaatcagacaagatatacaagaagatactttatatagggcaggagcggtggctcatgcctgtaa

SEQ ID NO: 573057 - DNA, 73 bp, Artificial Sequence
  ENSG00000171051_14 (sequence is synthesized)
aaaaattagctgggcgtagtggcaggctcccgtaatcccagctactcaagtgagccaagaaaacgccactaca

SEQ ID NO: 573058 - DNA, 120 bp, Artificial Sequence
  ENSG00000171051_15 (sequence is synthesized)
attagagcctgagtcactctccccaggagacccagacctagaactacccagagcaagaccacagctggtgaacagtccagcctgtctccagttggactagccacaattcaagtgcttgaa

SEQ ID NO: 573059 - DNA, 120 bp, Artificial Sequence
  ENSG00000171051_16 (sequence is synthesized)
gattaatgttggttaggcagctgtcagtcttggccagaattatgccttcaggtactcaagatccctttacactcttcttccaaatagaagaagtagagccatccttcccaaggatgagat

SEQ ID NO: 573060 - DNA, 120 bp, Artificial Sequence
  ENSG00000171051_17 (sequence is synthesized)
ccccaacgttttatgttgaagtttctttgtgataagtgtcccataacttaaaagaatacttagcttcaaagccccaatataccacgatgcaatgagaattgggaatccacaatggaaact

SEQ ID NO: 573061 - DNA, 120 bp, Artificial Sequence
  ENSG00000171051_18 (sequence is synthesized)
agtgccacaatcatagctcactgccgccttcgcctcccgggctcaagctatcctcccacctcagccccagtccttcagctggatctacaggcacgcaccaccaagcccaggagcagacaa

SEQ ID NO: 573062 - DNA, 120 bp, Artificial Sequence
  ENSG00000171051_19 (sequence is synthesized)
tgagatcagaggcaagaaagttgaggatgtggtacaatgattatcaagcataaagtccttcatcgatggcagccaccaaggcctgtgttcattgcaaatcacaggatttttcccttgaac

SEQ ID NO: 573063 - DNA, 120 bp, Artificial Sequence
  ENSG00000171053_0 (sequence is synthesized)
gtagcctggccctccctctttccaaaatggacaagtccctcttgctggaactccccatcctgctctgctgctttagggcattatctggatcactttcaatgagaaatgatgcagtcaatg

SEQ ID NO: 573064 - DNA, 120 bp, Artificial Sequence
  ENSG00000171053_1 (sequence is synthesized)
aaatagttgctgtgaaaaacaattttcctgtgatagaaattgttcagtgtaggatgtgccacctccagttcccaggagaaaagtgctccagaggaagaggaatatgcacagcaacaacag

SEQ ID NO: 573065 - DNA, 120 bp, Artificial Sequence
  ENSG00000171053_2 (sequence is synthesized)
aagaggcctgcatggttggaaggatgttcaaaagggatggtaatccctggttaaccttcatgggctgcctaaagaactgtgctgatgtgaaaggcataaggtggagtgtctatttggtga

SEQ ID NO: 573066 - DNA, 120 bp, Artificial Sequence
  ENSG00000171053_3 (sequence is synthesized)
acttcaggtgctgcaggagccatgacctgtgcaatgaagacctttagaagttaatggttcttctgtgactccaatttctgggtgaggttgttgcctcagcctcttcacaatgactttcta

SEQ ID NO: 573067 - DNA, 120 bp, Artificial Sequence
  ENSG00000171053_4 (sequence is synthesized)
aaaaaaatcacacacacacacacacacactacagaagaggattgcaaacacatggctccatcttctgcacacgaaaggaaagtccctctccttttctacagtctctgtcacgccccttaa

SEQ ID NO: 573068 - DNA, 120 bp, Artificial Sequence
  ENSG00000171053_5 (sequence is synthesized)
aataagtaaataaataaccttgagagaaagaacaagatcaatatatcctgcaggttgctacaaacccttgtgctttcactgtatagccagttcattcagaaaaggaggaaagggtagttt

SEQ ID NO: 573069 - DNA, 120 bp, Artificial Sequence
  ENSG00000171053_6 (sequence is synthesized)
tccttcttatcccactccaaagaaagcacataactgtggcctgaagggatggggagtagcaacataaaaagaagtggctcaagtcttcttggagtttgttcatgaatgctgatcccaggg

SEQ ID NO: 573070 - DNA, 120 bp, Artificial Sequence
  ENSG00000171053_7 (sequence is synthesized)
tgaggagaagattgggacatagaaaggaaactgcatcagaaacatgaacagagaaagattgtctgccttctagaatcagatctgtttggggctgggggttggagaataaaagcaggagaa

SEQ ID NO: 573071 - DNA, 120 bp, Artificial Sequence
  ENSG00000171053_8 (sequence is synthesized)
gtctatgggattctagaaatagtacctgcatccagcttccctgccaaactcacaaggagacatcaacctctagacagggaacagcttcaggatacttccaggagacagagccaccagcag

SEQ ID NO: 573072 - DNA, 120 bp, Artificial Sequence
  ENSG00000171053_9 (sequence is synthesized)
caaaacaaatattcccatgcctggagcatggcatagaggaagctgagaaatgtggggtctgaggaagccatttgagtctggccactagacatctcatcagccacttgtgtgaagagatgc

SEQ ID NO: 573073 - DNA, 120 bp, Artificial Sequence
  ENSG00000171053_10 (sequence is synthesized)
cccatgaccccagatgcctctcccacccttacctccatctcacacacttgagcttgccactctgtataattctaacatcctggagaaaaatggcagtttgaccgaacctgttcacaaggg

SEQ ID NO: 573074 - DNA, 120 bp, Artificial Sequence
  ENSG00000171053_11 (sequence is synthesized)
tagaggctgatttctaacgaaacttgtagaatgaagcctggaaagagtgatgaattatattatattatataaaaataataataaaaatataaagaaagctacctttcttctatacccaaa

SEQ ID NO: 573075 - DNA, 120 bp, Artificial Sequence
  ENSG00000171053_12 (sequence is synthesized)
tttccaaaatggacaagtccctcttgctggaactccccatcctgctctgctgctttagggcattatctggatcactttcaatgagaaatgatgcagtgatagaaattgttcagtgtagga

SEQ ID NO: 573076 - DNA, 120 bp, Artificial Sequence
  ENSG00000171053_13 (sequence is synthesized)
ctctttccaaaatggacaagtccctcttgctggaactccccatcctgctctgctgctttaggggtgagtccctagggttgacagctggtaagagtcctgaatttaggaacaggtgagagc

SEQ ID NO: 573077 - DNA, 120 bp, Artificial Sequence
  ENSG00000171053_14 (sequence is synthesized)
acccatgacagaggccttctcatgggagtcctatggcaactgaagcatgatgagcttctgttctaatgttatgccttctaccaggggtatgtcatgtccccaggaccttaactaaagctc

SEQ ID NO: 573078 - DNA, 120 bp, Artificial Sequence
  ENSG00000171053_15 (sequence is synthesized)
ttctcccttcctttatggggggaaataggtagattagagaggaattgagtggatgttcatagaagctttgagatggggtttggaaaatgaggtctgcagacagtgtatctcttttttttt

SEQ ID NO: 573079 - DNA, 120 bp, Artificial Sequence
  ENSG00000171053_16 (sequence is synthesized)
ccaacagcattatctggatcactttcaatgagaaatgatgcagtacagtcaatgaaatagttgctgtgaaaaacaattttcctggtaagtatgaagaggacctgtctgatcacctcagtc

SEQ ID NO: 573080 - DNA, 120 bp, Artificial Sequence
  ENSG00000171053_17 (sequence is synthesized)
gaagaggttcacgcttgatgggctctggcaaagccctgtggctctaggcagacttctaacccaaaaggggagaggggttctttcctggtagtgccatcttttctcacttctctttcccct

SEQ ID NO: 573081 - DNA, 120 bp, Artificial Sequence
  ENSG00000171053_18 (sequence is synthesized)
ggaaggatgttcaaaagtaagttgtgggttggggaaaagaagaacgggcagaggacgtatacagggacgtatcagccacaggggaaaggagagatcttactttacttttactataggcag

SEQ ID NO: 573082 - DNA, 120 bp, Artificial Sequence
  ENSG00000171053_19 (sequence is synthesized)
tctcatacctgggatggctgattccttcatccccatcatatgccgtaatgaaaattagatggaggtggtcactaaggagggtgggggcctacagctaagggattagcattttgagaagcc

SEQ ID NO: 573083 - DNA, 120 bp, Artificial Sequence
  ENSG00000171054_0 (sequence is synthesized)
tccacctttctcacaccctccatctttattcccattctttcaggtaacactaagtagccaattggcatccatttaatgaatagtggcaagagggaaagatggccatggacaatgtcacag

SEQ ID NO: 573084 - DNA, 120 bp, Artificial Sequence
  ENSG00000171054_1 (sequence is synthesized)
cagtgtttcagtttctccttattggcatttctaactatcctcaatggagagacacgtttttcacattagtgctgataatttacctcagcacattgttggggaatggatttatgatctttc

SEQ ID NO: 573085 - DNA, 120 bp, Artificial Sequence
  ENSG00000171054_2 (sequence is synthesized)
ttattcactttgaccccaacctccacactccaatctacttcttccttagtaacctgtctttcttagacctttgttatggaacagcttccatgccccaggctttggtgcattgtttctcta

SEQ ID NO: 573086 - DNA, 120 bp, Artificial Sequence
  ENSG00000171054_3 (sequence is synthesized)
cccatccctacctctcttatccccgatgtttggctcaaacgagtgtctccttggctttggccacagcagagtgcctcctactggctgccatggcctatgaccgtgtggttgctatcagca

SEQ ID NO: 573087 - DNA, 120 bp, Artificial Sequence
  ENSG00000171054_4 (sequence is synthesized)
tcccctgcgttattcagtggttatgaatggcccagtatgtgtctgcttggttgctacctcatgggggacatcacttgtgctcactgccatgctcatcctatccctgaggcttcacttctg

SEQ ID NO: 573088 - DNA, 120 bp, Artificial Sequence
  ENSG00000171054_5 (sequence is synthesized)
tggggctaatgtcatcaaccattttgcctgtgagattctctccctcattaagctgacctgttctgataccagcctcaatgaatttatgatcctcatcaccagtatcttcaccctgctgct

SEQ ID NO: 573089 - DNA, 120 bp, Artificial Sequence
  ENSG00000171054_6 (sequence is synthesized)
accatttgggtttgttctcctctcctacatacgaattgctatggctatcataaggattcgctcactccagggcaggctcaaggcctttaccacatgtggctctcacctgaccgtggtgac

SEQ ID NO: 573090 - DNA, 120 bp, Artificial Sequence
  ENSG00000171054_7 (sequence is synthesized)
aatcttctatgggtcagccatctccatgtatatgaaaactcagtccaagtcctaccctgaccaggacaagtttatctcagtgttttatggagctttgacacccatgttgaaccccctgat

SEQ ID NO: 573091 - DNA, 120 bp, Artificial Sequence
  ENSG00000171054_8 (sequence is synthesized)
atatagcctgagaaaaaaagatgttaaacgggcaataaggaaagttatgttgaaaaggacatgagccttctttgcttctaaacgtctaaaataacacaacgtccctgatggagaaaatgg

SEQ ID NO: 573092 - DNA, 120 bp, Artificial Sequence
  ENSG00000171055_0 (sequence is synthesized)
gggcgggctgggccggcctgggcggggcgcgcgactgctccgggcggcgatggcggcggacggggactggcaggatttctatgagttccaggagccggcccggagcctcctggaccagga

SEQ ID NO: 573093 - DNA, 120 bp, Artificial Sequence
  ENSG00000171055_1 (sequence is synthesized)
gaactgtaacgcgagccccgagcctggggcggaggcgggggccgaggcgggtgggggcgccgacggtttcccggccccggcctgcagcttggaggagaagctgagcctgtgcttccgccc

SEQ ID NO: 573094 - DNA, 120 bp, Artificial Sequence
  ENSG00000171055_2 (sequence is synthesized)
ctcggatccgggcgccgagcccccgaggacggccgtgcggcccatcacggagcgcagcctcctgcagggggacgagatttggaatgccctgacagataattatgggaatgtgatgcctgt

SEQ ID NO: 573095 - DNA, 120 bp, Artificial Sequence
  ENSG00000171055_3 (sequence is synthesized)
agactggaagtcatcgcatactaggaccttgcacttgcttactctgaacctctcagaaaaaggggtaagtgacagtttgctctttgatacatcagatgatgaagagctgagagaacagct

SEQ ID NO: 573096 - DNA, 120 bp, Artificial Sequence
  ENSG00000171055_4 (sequence is synthesized)
ggatatgcactcaatcatcgtctcctgtgttaatgatgaacccctcttcacggcagaccaggttattgaagaaattgaagaaatgatgcaggaatcaccggacccagaagatgatgaaac

SEQ ID NO: 573097 - DNA, 120 bp, Artificial Sequence
  ENSG00000171055_5 (sequence is synthesized)
ccctacacagtcagatcggctttcaatgctttcccaggaaattcaaactctcaagaggtctagtaccggcagttatgaagagagagtgaaaaggctctcagtgtctgagttaaatgaaat

SEQ ID NO: 573098 - DNA, 120 bp, Artificial Sequence
  ENSG00000171055_6 (sequence is synthesized)
cctggaagaaattgagactgccattaaggagtactctgaggagctggtgcagcagttggctttacgagatgaactggagtttgaaaaggaagtgaaaaacagctttatttctgttcttat

SEQ ID NO: 573099 - DNA, 120 bp, Artificial Sequence
  ENSG00000171055_7 (sequence is synthesized)
tgaagtgcaaaacaaacagaaagagcacaaagaaacagcaaaaaagaaaaagaaactaaaaaatggcagctctcagaatgggaagaatgagagaagtcatatgcccggcacacgcttcag

SEQ ID NO: 573100 - DNA, 120 bp, Artificial Sequence
  ENSG00000171055_8 (sequence is synthesized)
aggtggagagaaacagtatttgactacagtcattccttatgagaaaaaaaacggaccaccgtctgttgaagatcttcaaatattaacaaaaattcttcgtgccatgaaggaggacagtga

SEQ ID NO: 573101 - DNA, 120 bp, Artificial Sequence
  ENSG00000171055_9 (sequence is synthesized)
aaaagttccgagcttgttaactgattatattctgaaagttctgtgtcctacatagagcagcaactttatctgcggtgggctccaagctagatttccgacagcattattctgagagctggc

SEQ ID NO: 573102 - DNA, 120 bp, Artificial Sequence
  ENSG00000171055_10 (sequence is synthesized)
taccattacccttcttgctattggaaactcagcacatttgaacttgggtttgattcagtattaacagatcttgactacactaattctttatattatagaaccaacggaaatatgggcact

SEQ ID NO: 573103 - DNA, 120 bp, Artificial Sequence
  ENSG00000171055_11 (sequence is synthesized)
attttgaattctagagatggtttttgttaaatctactaataaactgttctcttagtagattaagagagagtaatattaattgtgcatgtgcagttgtatttctcattaactgacagtatg

SEQ ID NO: 573104 - DNA, 120 bp, Artificial Sequence
  ENSG00000171055_12 (sequence is synthesized)
cccatttgtttttatggctttcttatctaaactgcactgatgaactagattaaagccttgggagatttatactataaattcagtgatggcaagaaccaacactgtttttttgtgagaatt

SEQ ID NO: 573105 - DNA, 120 bp, Artificial Sequence
  ENSG00000171055_13 (sequence is synthesized)
gtcagtgtaactattacctaccagtattgttcagagagattgaaacagaataaacgggctgttcttgaagaagcaaaaccagaatatgcattactttggtttaatacttagtgctaacat

SEQ ID NO: 573106 - DNA, 120 bp, Artificial Sequence
  ENSG00000171055_14 (sequence is synthesized)
tgaaactgttggtggtgatggattttgtagcttgctgcttgtttcaccactggtcaaattttaaccattaaattgccattcacttttagaatcttgtatttaagttttgattttcaaatg

SEQ ID NO: 573107 - DNA, 120 bp, Artificial Sequence
  ENSG00000171055_15 (sequence is synthesized)
ttctgcttcatgtgtctgtgaagaattgtactttaagtgtgtgtcctctgaggtgcttgagaaagtgtacactgcagaactgcccattctcattactgtgtcctattttattcatgcctg

SEQ ID NO: 573108 - DNA, 120 bp, Artificial Sequence
  ENSG00000171055_16 (sequence is synthesized)
tgtgtttttcttaagtatgaattctagatacagctacttatggattcatcaatatcatgagcacttttgctggttccagtcaaatcaatggcatttaataaattttttaagaagtaaaaa

SEQ ID NO: 573109 - DNA, 120 bp, Artificial Sequence
  ENSG00000171055_17 (sequence is synthesized)
gttaaaagacatggcgctgttacttgtgagcctttacaagtagtgaactaggaagtttatctcaatttcagacattaattttcattattcatttccccttaggccattctctactttaac

SEQ ID NO: 573110 - DNA, 120 bp, Artificial Sequence
  ENSG00000171055_18 (sequence is synthesized)
ttttctcctttaatgcctaaaaacgtttacaatgacttacccaataatttaaaataatagtaacgcatttctaaaacgatttaagtgtgtctttgttagcttctgaaagaagctagtgtg

SEQ ID NO: 573111 - DNA, 120 bp, Artificial Sequence
  ENSG00000171055_19 (sequence is synthesized)
tgtttttcaaagttgtcatgttatatatgtggaccatttgttcaaccagaataaaaatggtctgaaacagaattattttgctgttggaaattactttattgtgcagaactgttaaaacta

SEQ ID NO: 573112 - DNA, 120 bp, Artificial Sequence
  ENSG00000171055_20 (sequence is synthesized)
tgtttttagtttaaattgctatttttaaaatgtgttgaaaaatatgcaagtagaatgtgagataatacttcactttaaaaatgaacaaattgagtaaaccatcctcagacttagtcctat

SEQ ID NO: 573113 - DNA, 120 bp, Artificial Sequence
  ENSG00000171055_21 (sequence is synthesized)
gaaattttcaataactgaaatgcaaaaaggtggttgtttctgttgacattaggtttgtatgaagcaaatagaggtgggcaaaaaaaaatgagctccatctgagatagtaagataacttta

SEQ ID NO: 573114 - DNA, 120 bp, Artificial Sequence
  ENSG00000171055_22 (sequence is synthesized)
ttcccatacaatacctgtgttttcattaccaaagtagcttgtgttttatattatcagatagaccttctagtaacagtatcaaattttttgcagataaggtaattccgatttaagtgacac

SEQ ID NO: 573115 - DNA, 120 bp, Artificial Sequence
  ENSG00000171055_23 (sequence is synthesized)
tattacctgatttccttttgctgattggtaaacacctgactttagttggctgattttgttgttagtgttttgtcagtttaggatgtaaatgatgcatataattgtttatttttataagaa

SEQ ID NO: 573116 - DNA, 120 bp, Artificial Sequence
  ENSG00000171055_24 (sequence is synthesized)
tgaagccaaaaatggctgtgacattaaatacaacagtaactctagtgttgatttgtactttttctgtttttcttaccttgtgaaatatttatgagctaaaattttgggaaaaagcataac

SEQ ID NO: 573117 - DNA, 120 bp, Artificial Sequence
  ENSG00000171055_25 (sequence is synthesized)
ctaaatctccatcatctcttacatgtttaagaacatatccatttatcataaataaaattccttatggatcttatatatctatgattgtcagtaactgaataggaaagatttacggtaaac

SEQ ID NO: 573118 - DNA, 120 bp, Artificial Sequence
  ENSG00000171055_26 (sequence is synthesized)
actttttatttcttatgaatgtagaacccgaggtagtagttataggtagaacataaattgacagtgatgttttaagaacatgcattcattcagcaaatatttagtgaaggcctactctgt

SEQ ID NO: 573119 - DNA, 120 bp, Artificial Sequence
  ENSG00000171055_27 (sequence is synthesized)
accaggccatgatctgggcacttgggatactttagtgaacaaagcagacaaagataatgcaccttcaaggggcttgccttaaaaaaaaaattgttagatttaaatatacatgatattgag

SEQ ID NO: 573120 - DNA, 120 bp, Artificial Sequence
  ENSG00000171055_28 (sequence is synthesized)
tatctcttatgatggccgcaaatgagccttgaattctggttctatccctgttattttcagggatatccttggaagttacttactctcttttgcttacattgaaaaactaggataaaaaat

SEQ ID NO: 573121 - DNA, 120 bp, Artificial Sequence
  ENSG00000171055_29 (sequence is synthesized)
atttgttctatttacctcacagtaaatagattaatatatgtatgattttggctaagttactatcaattagccgttaaaatggagggattgaatttgctgatctgttaggtctttgttatg

SEQ ID NO: 573122 - DNA, 120 bp, Artificial Sequence
  ENSG00000171055_30 (sequence is synthesized)
gtaaatatttatgatacttgctaattaggggggaaccaaatgaaagagcatcacatggatgagtatggatgatgatacttattttggaaatttaagaggaatgggcaaggaaaacctaag

SEQ ID NO: 573123 - DNA, 120 bp, Artificial Sequence
  ENSG00000171055_31 (sequence is synthesized)
agtagaagcaagtgtcttatttcttagctccctgcctgctaacttggagcttttattctttcctttggtgaataattctttaaaaattttatatttaaatatggataaatcaagtgatgc

SEQ ID NO: 573124 - DNA, 120 bp, Artificial Sequence
  ENSG00000171055_32 (sequence is synthesized)
cagccagtctgaaataaaaaatcaagagattaactgggtagctagccctcttattttcaggaagaacttaagttatatgtgtccaagatcacacagggggatggttagttacagagctgg

SEQ ID NO: 573125 - DNA, 120 bp, Artificial Sequence
  ENSG00000171055_33 (sequence is synthesized)
atctcttaattcccaggcaattatacttttaatgatgctggtttttggtatgtgattttatttagaagttagaaaaaattttaaacatgattggaagcagaaatactgaacatggtagcc

SEQ ID NO: 573126 - DNA, 120 bp, Artificial Sequence
  ENSG00000171055_34 (sequence is synthesized)
cagcttctcagatcaagaacaaatacttcattggtcaaactaaagtcatcataattccagcatcgagatgtctttataggttgtcacagtttggaatctctggacatatttgggtccaaa

SEQ ID NO: 573127 - DNA, 120 bp, Artificial Sequence
  ENSG00000171055_35 (sequence is synthesized)
gctccttttctttccaaaagaagagccctgtggagacagtcacagtgtttatggatatatagtcttcctgataaaagctattaggggattttgggtgcaataataatagttaataaaaat

SEQ ID NO: 573128 - DNA, 120 bp, Artificial Sequence
  ENSG00000171055_36 (sequence is synthesized)
ttaaataatttgagtagtgttagttacagttaatacatagcatgtactatgtgccaggcactatgatatgacctttatatctgaattagtagcttagtcctcataacaaacctttgagat

SEQ ID NO: 573129 - DNA, 120 bp, Artificial Sequence
  ENSG00000171055_37 (sequence is synthesized)
taaatctaattattattctcatttcacagatgaagagcttggtgcaaaagtggttaagtagcttgctcagcgtcacacaattaggaagtggcagagccagggtttaaacccaggaaggct

SEQ ID NO: 573130 - DNA, 120 bp, Artificial Sequence
  ENSG00000171055_38 (sequence is synthesized)
gatttgacagttacactattttgccttgtcgtattggtggggaaaaacagtgaaatatttttaccaggatgctttggagaaaatttgagttggcaatctctgttaaagtataatatttgt

SEQ ID NO: 573131 - DNA, 120 bp, Artificial Sequence
  ENSG00000171055_39 (sequence is synthesized)
gagtttatctcaacctgaatggtctagcttaaaaaagaaaaacgttatactaggtggctgctttttctattttagtttttacttagaagataaatttgtcaaattagaatgaggctaatt

SEQ ID NO: 573132 - DNA, 120 bp, Artificial Sequence
  ENSG00000171055_40 (sequence is synthesized)
ctcccaggtttctccctagtgcagaggaggcaacagccaggcagatgcccgatgctgcttcatggaagtctgttcttcatttgggtcttttctttgaaagtttctaaggagtctgacagg

SEQ ID NO: 573133 - DNA, 120 bp, Artificial Sequence
  ENSG00000171055_41 (sequence is synthesized)
atacgcttgttggagggtatagctgtccatttctttaagagtttctctagtttgcttgatctgcagcactgaggttttcttgctgcacagagttcattgaggtgcacattatagtaaccc

SEQ ID NO: 573134 - DNA, 120 bp, Artificial Sequence
  ENSG00000171055_42 (sequence is synthesized)
actttccggtattattacagagcgaaggctccttgtaaataacccagttcctctttttttgtctccactgtttggaaattttaaatcagggaagcaactctcaggtaagtgggatattct

SEQ ID NO: 573135 - DNA, 120 bp, Artificial Sequence
  ENSG00000171055_43 (sequence is synthesized)
taccgaaaataaattcttgtggacttactccactaaaataaattattgggcctttattgttgtatccccttatcaggaaaatcacctataatttgtatgagtcagttatatcctataatt

SEQ ID NO: 573136 - DNA, 120 bp, Artificial Sequence
  ENSG00000171055_44 (sequence is synthesized)
aaggaagattaaggccacaatgattgaaattaaataatatttttgatctaaatttttaattgttgtcttttttcccctcttctattttgcagttcttcgtgccatgaaggaggacagtga

SEQ ID NO: 573137 - DNA, 120 bp, Artificial Sequence
  ENSG00000171055_45 (sequence is synthesized)
gagaagtgactcacctgcccacttacctctactcagatctgatctccagaagttgtagaattctgagaagatcacccacagtcaatttaattgcttggaatatgatttttgctctttggc

SEQ ID NO: 573138 - DNA, 120 bp, Artificial Sequence
  ENSG00000171055_46 (sequence is synthesized)
agatcttcaaatattaacaaaaaagcgaaggctccttgtaaataacccagttcctctttttttgtctccactgtttggaaattttaaatcagggaagcaactctcagttcttcgtgccat

SEQ ID NO: 573139 - DNA, 120 bp, Artificial Sequence
  ENSG00000171055_47 (sequence is synthesized)
agaagtaaaaatacatgtttgagagccttatatttgggagttttgtgttgtattttttttttccttacagtgctagattctttcccttaattccacacagaacccatcgctacaatatgt

SEQ ID NO: 573140 - DNA, 120 bp, Artificial Sequence
  ENSG00000171055_48 (sequence is synthesized)
tgagctgctgtggaatgacagaaaaacaaagtctctgcaagaatacaaagatttacttctgccatcaccgtcaactacgtcagggacctggagccctttgctggatgcagctggtccttc

SEQ ID NO: 573141 - DNA, 120 bp, Artificial Sequence
  ENSG00000171055_49 (sequence is synthesized)
catggggctgcttacctcatgggatgctcagacaaacatcttcttttcttttgggattcagatatgagcaatattatcttgcatcacatatgattacaataaaaatatacaatgtctttc

SEQ ID NO: 573142 - DNA, 120 bp, Artificial Sequence
  ENSG00000171055_50 (sequence is synthesized)
ggagtggaaaagtctttggagaagtttttgggggcctggctggcacatgggatccactctgctctccaggaagcgtatgccatcttctagttcgcatttctgcaccaaggcagtggcagg

SEQ ID NO: 573143 - DNA, 120 bp, Artificial Sequence
  ENSG00000171055_51 (sequence is synthesized)
aggggaagaggaggacgtttattagagtatgctgagctgctgtggaatgacagaactcaaaaagtctctttgcagttaggcttcccctgatcgtgctcggtaaagtctttcttcttcagc

SEQ ID NO: 573144 - DNA, 120 bp, Artificial Sequence
  ENSG00000171055_52 (sequence is synthesized)
atttggagcatccacacctgaacaccattggttaatggagaattcagtgcatttctgctctgggtgccttaggttattgaagaaattgaagaaatgatgcaggaatcaccggacccagaa

SEQ ID NO: 573145 - DNA, 120 bp, Artificial Sequence
  ENSG00000171055_53 (sequence is synthesized)
attctttctccagaaaggataacaaaccttttgtttgagagagatttttcactttttgaaatggtctgtttgtttgaagttacagaagaaaaataagtgtaatgcacagttgtatttatt

SEQ ID NO: 573146 - DNA, 120 bp, Artificial Sequence
  ENSG00000171055_54 (sequence is synthesized)
attcatgtgaccctggaaacatttcttccccgccctgtgtttcagtttcttcatctgtaaaatgaggttaataatggttcccccttctaatgttgtttttgaagattacatgagttaata

SEQ ID NO: 573147 - DNA, 120 bp, Artificial Sequence
  ENSG00000171055_55 (sequence is synthesized)
catgtaaattgcttagaacagtgcctagcacctaatataatggaagtgttgcctactgcctattggcagttttctgtacggcttcaccttcccttaggacttcttgtcagcccagttatg

SEQ ID NO: 573148 - DNA, 120 bp, Artificial Sequence
  ENSG00000171055_56 (sequence is synthesized)
tgatttttcacctcgtttttgtttaggagactctactttgttgatgtttttctgagaaacaatgtgctgtctgtttttctctgtttcctttgacatttgctgttcatctttcactgaata

SEQ ID NO: 573149 - DNA, 120 bp, Artificial Sequence
  ENSG00000171055_57 (sequence is synthesized)
tttgtttaagaaagacatacagaatgttaattttcattgattgtagctttcttctttttaaggatttggaatgccctgacagataattatgggaatgtgatgcctgtagactggaagtca

SEQ ID NO: 573150 - DNA, 120 bp, Artificial Sequence
  ENSG00000171055_58 (sequence is synthesized)
tcgcatactaggaccttgcacttgcttactctgaacctctcagaaaaaggggtaagttaggaattgaaccaatagtgtttgaataactgatgctgataatagaactaaaacagtagcatt

SEQ ID NO: 573151 - DNA, 120 bp, Artificial Sequence
  ENSG00000171055_59 (sequence is synthesized)
tctgcttaacacagattcactgacctgcctctcatttctgaaattatagcagtttgggtggctctgtcttgatgtcttggctgtagggccatcaccttgctggcacattcctccagttct

SEQ ID NO: 573152 - DNA, 74 bp, Artificial Sequence
  ENSG00000171055_60 (sequence is synthesized)
tgatgatgcactgaaacactcagtaaaatttggtgcactgaaaccctcagtaaaaatgctagcctttggtttaa

SEQ ID NO: 573153 - DNA, 120 bp, Artificial Sequence
  ENSG00000171055_61 (sequence is synthesized)
gcactgaaaccctcagtaaaaatgctagcctttggtttaatatactgagagtattggaatctcaacacggagttaactttttaatgagtgtagtgacctgctagacatgatatgttgtca

SEQ ID NO: 573154 - DNA, 120 bp, Artificial Sequence
  ENSG00000171055_62 (sequence is synthesized)
ggagactgtgtattcctgtgaatactggagaacctttaaaagatattttagttcttggcttttaaaatacggtcttggctaacttacctttcttggggtctcctgtgtacatcctggtat

SEQ ID NO: 573155 - DNA, 120 bp, Artificial Sequence
  ENSG00000171055_63 (sequence is synthesized)
tgtaaagtgaagatgtcttgactaagaagtgtgagcacgagtggtgggacaggtagggaggcagaaaagggttgagaattacttgaaatggaaaatcacagtgttaagcttttttaaatc

SEQ ID NO: 573156 - DNA, 120 bp, Artificial Sequence
  ENSG00000171055_64 (sequence is synthesized)
tgatgagaaacatatccaaattatctaagtttcagggcctggctgtttaagttccttatcaaataataatgtaaactcatgccagatcttcttgcgtgctctatatttcattaagtgtaa

SEQ ID NO: 573157 - DNA, 120 bp, Artificial Sequence
  ENSG00000171055_65 (sequence is synthesized)
ttatgtgattattgagaatatagtgcagtaggcctgtcactattttacatagtattgttaatgttttgttaaaaggattttcttacatatgtgatcagaaaagcctactgttattatttt

SEQ ID NO: 573158 - DNA, 120 bp, Artificial Sequence
  ENSG00000171055_66 (sequence is synthesized)
ctagtaaaatgtagaattctggctgtatttcccagtattcagtagctatggaaatcttcctgactgtgccagtcattaatcccattaagctttgcagactgacctggcatatatttaatg

SEQ ID NO: 573159 - DNA, 120 bp, Artificial Sequence
  ENSG00000171055_67 (sequence is synthesized)
gaggtttggattagtcagtaaatacatcgccttgctaatacattagacagtaacttcccaatgcacaactttcattaatcttattatgcagggtgaggattagctacatgactgacttct

SEQ ID NO: 573160 - DNA, 120 bp, Artificial Sequence
  ENSG00000171055_68 (sequence is synthesized)
accaacattatatatcatggttttatataatttaagttttattggaggttctgggttggaaataatctccacagttaaactataaacatcaagagaggtagtagaagaaaattagtgaga

SEQ ID NO: 573161 - DNA, 120 bp, Artificial Sequence
  ENSG00000171055_69 (sequence is synthesized)
tggcaccataatcatgtgggtatcagatgttggcagattggcactgggaaatttgagaagggtggtctctgtcatcttgaggacagtggaaaggaggacagatcattagtgaggacggat

SEQ ID NO: 573162 - DNA, 88 bp, Artificial Sequence
  ENSG00000171055_70 (sequence is synthesized)
attctcatgatagtgaataagtcttacaagatctgatgggcttatcaggggtttccgcttttgctccttcctcattttcccttgctgc

SEQ ID NO: 573163 - DNA, 120 bp, Artificial Sequence
  ENSG00000171056_0 (sequence is synthesized)
agttggacgccccgacccgtgcgagggccaggtccgcgcctgccccgccaggcgaagcgaggcgacccgcgtgcggccatggcttcgctgctgggagcctacccttggcccgagggtctc

SEQ ID NO: 573164 - DNA, 120 bp, Artificial Sequence
  ENSG00000171056_1 (sequence is synthesized)
gagtgcccggccctggacgccgagctgtcggatggacaatcgccgccggccgtcccccggcccccgggggacaagggctccgagagccgtatccggcggcccatgaacgccttcatggtt

SEQ ID NO: 573165 - DNA, 120 bp, Artificial Sequence
  ENSG00000171056_2 (sequence is synthesized)
tgggccaaggacgagaggaaacggctggcagtgcagaacccggacctgcacaacgccgagctcagcaagatgctgggaaagtcgtggaaggcgctgacgctgtcccagaagaggccgtac

SEQ ID NO: 573166 - DNA, 120 bp, Artificial Sequence
  ENSG00000171056_3 (sequence is synthesized)
gtggacgaggcggagcggctgcgcctgcagcacatgcaggactaccccaactacaagtaccggccgcgcaggaagaagcaggccaagcggctgtgcaagcgcgtggacccgggcttcctt

SEQ ID NO: 573167 - DNA, 120 bp, Artificial Sequence
  ENSG00000171056_4 (sequence is synthesized)
ctgagctccctctcccgggaccagaacgccctgccggagaagagaagcggcagccggggggcgctgggggagaaggaggacaggggtgagtactcccccggcactgccctgcccagcctc

SEQ ID NO: 573168 - DNA, 120 bp, Artificial Sequence
  ENSG00000171056_5 (sequence is synthesized)
cggggctgctaccacgaggggccggctggtggtggcggcggcggcaccccgagcagtgtggacacgtacccgtacgggctgcccacacctcctgaaatgtctcccctggacgtgctggag

SEQ ID NO: 573169 - DNA, 120 bp, Artificial Sequence
  ENSG00000171056_6 (sequence is synthesized)
ccggagcagaccttcttctcctccccctgccaggaggagcatggccatccccgccgcatcccccacctgccagggcacccgtactcaccggagtacgccccaagccctctccactgtagc

SEQ ID NO: 573170 - DNA, 120 bp, Artificial Sequence
  ENSG00000171056_7 (sequence is synthesized)
caccccctgggctccctggcccttggccagtcccccggcgtctccatgatgtcccctgtacccggctgtcccccatctcctgcctattactccccggccacctaccacccactccactcc

SEQ ID NO: 573171 - DNA, 120 bp, Artificial Sequence
  ENSG00000171056_8 (sequence is synthesized)
aacctccaagcccacctgggccagctttccccgcctcctgagcaccctggcttcgacgccctggatcaactgagccaggtggaactcctgggggacatggatcgcaatgaattcgaccag

SEQ ID NO: 573172 - DNA, 120 bp, Artificial Sequence
  ENSG00000171056_9 (sequence is synthesized)
tatttgaacactcctggccacccagactccgccacaggggccatggccctcagtgggcatgttccggtctcccaggtgacaccaacgggtcccacagagaccagcctcatctccgtcctg

SEQ ID NO: 573173 - DNA, 120 bp, Artificial Sequence
  ENSG00000171056_10 (sequence is synthesized)
gctgatgccacggccacgtactacaacagctacagtgtgtcatagagctggaggcgccccgtccggtcagccctcgcgccctctccttcttgtgccttgagtggcagaggagccgtccag

SEQ ID NO: 573174 - DNA, 120 bp, Artificial Sequence
  ENSG00000171056_11 (sequence is synthesized)
ccacaccagctttcctcccaccgctcagggcagggaggtctgaactgcggccccagagcctttggcctaagctggactctccttatccgagtgccgcctctatccccttccccacgttcc

SEQ ID NO: 573175 - DNA, 120 bp, Artificial Sequence
  ENSG00000171056_12 (sequence is synthesized)
agcccctgcagcccacattttaagtatattccttcaagtgagttttcctccagcccctgagagttgctgtctcccagtggaatgttcactgacgtcttttcttggtagccatcatcgaaa

SEQ ID NO: 573176 - DNA, 120 bp, Artificial Sequence
  ENSG00000171056_13 (sequence is synthesized)
tgactcattaatgagctcgctaacctacgatctggtgataattttgtgtgcacagcccaaggaccacgaggctttctgcactttctgcacccccttccaaagtgaccacaaaatttcaaa

SEQ ID NO: 573177 - DNA, 120 bp, Artificial Sequence
  ENSG00000171056_14 (sequence is synthesized)
gggactcatacaatttgagaaaaaacagtcaacctgatttgagaaattaaccagtatggctaactatatcacagaaaatgggattgagttaaaactattttattttaaatatacatttta

SEQ ID NO: 573178 - DNA, 120 bp, Artificial Sequence
  ENSG00000171056_15 (sequence is synthesized)
ttaaaactattttattttaaatatacattttaaagcagttctttttttttgttaatttgtttattatacacacacttcaagagaatatgcacagtctaggccgggcacggtggctcacgc

SEQ ID NO: 573179 - DNA, 65 bp, Artificial Sequence
  ENSG00000171056_16 (sequence is synthesized)
gaccagcctagacaacatggtgaaaccttgtctctatgaaaaatacaaaatttgctgggtcttga

SEQ ID NO: 573180 - DNA, 120 bp, Artificial Sequence
  ENSG00000171056_17 (sequence is synthesized)
aaaaaaagaatatgcacagtctgaatgtataccaggagtgtgagagacacatgcccacttcatgcaactcctaaactcaaagtctaaatcagatatttttattaacaatgacaacttgtt

SEQ ID NO: 573181 - DNA, 120 bp, Artificial Sequence
  ENSG00000171056_18 (sequence is synthesized)
gccaactccctgtttctaatgaccaaagacccagggtacctaaaaggactttgcaaccaagcaaagtcactgtcttcaaatctggatacacactttcccctctgtagattcaaaaggtgc

SEQ ID NO: 573182 - DNA, 120 bp, Artificial Sequence
  ENSG00000171056_19 (sequence is synthesized)
ttccttcccggctgtctccagcttccttactctcttttctgggatttctttttctcttctttctgctcttcctccactgctgaactggtccctaactgaaacagcccctgacttatccca

SEQ ID NO: 573183 - DNA, 120 bp, Artificial Sequence
  ENSG00000171056_20 (sequence is synthesized)
agcatgcttcctttagctgctgtgagaatttgtcttcctcaccagccaggtcctcaggcaaagtcctcagccagtgctttagagcaacttcccgcaaatcagaaactcactgtgattcca

SEQ ID NO: 573184 - DNA, 120 bp, Artificial Sequence
  ENSG00000171056_21 (sequence is synthesized)
aaaatgtttctgagccctggacccctgcccccaaaatattttcatctttcccccaaacctcctttaaaggagcatgcataacagtgtgctgaaagacagttgttggttttttgattttag

SEQ ID NO: 573185 - DNA, 120 bp, Artificial Sequence
  ENSG00000171056_22 (sequence is synthesized)
ttagcatattatttcctgtatgaaatatgttttatataatctcctattatttttatcttatgttttgtattgttgataaatcctttttgtccttctaagatgtcctattgtaaaatcact

SEQ ID NO: 573186 - DNA, 120 bp, Artificial Sequence
  ENSG00000171056_23 (sequence is synthesized)
aggtatgattactctttatgctattactttatatgccatttggtaataaatagtaaattgttgatgatatgattgactgatgcgcagtccagagcatgtatgaataatctcataaaacag

SEQ ID NO: 573187 - DNA, 120 bp, Artificial Sequence
  ENSG00000171056_24 (sequence is synthesized)
tatcacagacattaagctaaactgtttcgtttttttgaaagaacaactcatactttggaacagttgtcaatattaatttgttgcaaatatttaatttaaataaacatttttgtaccatga

SEQ ID NO: 573188 - DNA, 120 bp, Artificial Sequence
  ENSG00000171060_0 (sequence is synthesized)
agtctggctccgtctcctggcaaccagatgcaggggccatggcactcttaacaccccagggagtgaaagaagtcttccaacttcagagaccacaaggtcgggagcgcctgcggaggcttc

SEQ ID NO: 573189 - DNA, 120 bp, Artificial Sequence
  ENSG00000171060_1 (sequence is synthesized)
tgaactgggaggagtttgacgaacagagagactcccggaggagcatcctgctggacaccctctacgagagcatcatctttgcagtgggcaaaggcttcccatgggtggaggtggcccagg

SEQ ID NO: 573190 - DNA, 120 bp, Artificial Sequence
  ENSG00000171060_2 (sequence is synthesized)
tggtcaagttcacagaagagctgctaagggaaaccaaaggctgctccattactgaggctgtgacgatcctggggaacaagcttagagattaccggggccatttcaacaccacccacctgc

SEQ ID NO: 573191 - DNA, 120 bp, Artificial Sequence
  ENSG00000171060_3 (sequence is synthesized)
tggccctctgtgactacttccaccacaccttcatccgccactacaaactctaccagtatgtcctgggccaggaccagcaggtcgacctgaccgttgcccacctggaggtgtgcatgccac

SEQ ID NO: 573192 - DNA, 120 bp, Artificial Sequence
  ENSG00000171060_4 (sequence is synthesized)
ggcacagaagcgcgccgacgtgctgctcctgaaagaggcgctgcgcctggagcgggagaactcgctgcagaaggcgttcgctgccgccgcgcctgcgcagcccggccaggtcctggagag

SEQ ID NO: 573193 - DNA, 120 bp, Artificial Sequence
  ENSG00000171060_5 (sequence is synthesized)
acaggagttggagagcctcatctgccaggcagtccacacccagatggagctcctgcaggagctgctgcagcgccagatccagaacacattcgccatcttggacctgaagcttcagaagaa

SEQ ID NO: 573194 - DNA, 120 bp, Artificial Sequence
  ENSG00000171060_6 (sequence is synthesized)
gactctgaacctcaacgcccccacccctatcccgccccccatcaccagccacgcaggccaggaggaagccctgaagccccaaagagcgagcaaaggaaagaaagcgaaggcaaggaagta

SEQ ID NO: 573195 - DNA, 120 bp, Artificial Sequence
  ENSG00000171060_7 (sequence is synthesized)
gaaggtcccgactgccacacgagactgactggggaccagccacccataaccatgagccttgcggcacggtgagctcagcacccacagagagacttcttgtgattaaaagaaacaaaccca

SEQ ID NO: 573196 - DNA, 120 bp, Artificial Sequence
  ENSG00000171060_8 (sequence is synthesized)
tggtcaagttcacagaagagctgctaagggaaaccaaagaaactactactgacttctaacatcatagttgggccagttttaataaatggaataaaaaagacaaagaaagagaacactgat

SEQ ID NO: 573197 - DNA, 120 bp, Artificial Sequence
  ENSG00000171060_9 (sequence is synthesized)
gcccagagaggccaaataacttctgcaagtgatgaagttgtgcagcctgaggttagcctgcatctgcctgaatccccagtctgtgctcataccagacataccctactgcccctgacagag

SEQ ID NO: 573198 - DNA, 120 bp, Artificial Sequence
  ENSG00000171060_10 (sequence is synthesized)
agatgcaggggccatggcactcttaacaccccagggagtgaaagaagtcttccaacttcaggcagggggatagggatcgtatttcagaacctgaggcctgctggaggtacacaaaacctg

SEQ ID NO: 573199 - DNA, 120 bp, Artificial Sequence
  ENSG00000171060_11 (sequence is synthesized)
ggctgcagtggccagcatgagaactctcagaggaaagaaagtcctagaagaagagcaagtcccaggaggagggagtgctgcccagaaaccaaagcacagctcttcccagggagaccacaa

SEQ ID NO: 573200 - DNA, 120 bp, Artificial Sequence
  ENSG00000171060_12 (sequence is synthesized)
taagggaaaccaaagaccacaggcctccctggagtcctcagctggagagtgaggaaggcctggcctggagaggctggagctgccggagaggggtctgcgccctgtacatctttgtcccct

SEQ ID NO: 573201 - DNA, 120 bp, Artificial Sequence
  ENSG00000171060_13 (sequence is synthesized)
ggaagaagctgacagctgcctccttagtcaaatgatccaagtggacattgtcagtaaaaggccacacacagaatcccgtgtgcctggtcagacgcagtgagcagccagcattctcctgtg

SEQ ID NO: 573202 - DNA, 120 bp, Artificial Sequence
  ENSG00000171060_14 (sequence is synthesized)
atggttccaacaaagactcatggcccgaatctaatcaagagaaaacagcaaagtaggaccatggctcaaagtagccctcctgccagcttcaaatactcgaaggccataagagcccagcaa

SEQ ID NO: 573203 - DNA, 120 bp, Artificial Sequence
  ENSG00000171060_15 (sequence is synthesized)
tggcctccaggggcttggggaccatcttcaggaagttcccagcagccaatgcaaatgagggccactccctgttattgaagagcaacttgcaggcacagatctgtccgcccggcagccagc

SEQ ID NO: 573204 - DNA, 120 bp, Artificial Sequence
  ENSG00000171060_16 (sequence is synthesized)
ggcttctccctgagacttaatccctccactttctgagtcaccaggaacttctcaacccgaggcccagggagtgtggtccgaggccaagaaagtgtgtctcataagccggcttccaacaag

SEQ ID NO: 573205 - DNA, 120 bp, Artificial Sequence
  ENSG00000171060_17 (sequence is synthesized)
ctttgctgaaacccagaaccagccaagagtgtctgggggccgaaagttagaattcagcccagggactccttccctgttgacccaggacaaggtctacacttggtttgtatgacctcttag

SEQ ID NO: 573206 - DNA, 120 bp, Artificial Sequence
  ENSG00000171060_18 (sequence is synthesized)
gagcaggtcacagcccatggccacagtggggcatcggccaggatgataagccgccaggacacccaggcacggctgctgagcacattcacactactgagcctggcagacttctcttttcag

SEQ ID NO: 573207 - DNA, 120 bp, Artificial Sequence
  ENSG00000171060_19 (sequence is synthesized)
atctgggttttgtgtacggctgctggggctgaacagaagggctcagaggctggccttcgccaatgaggcagacacagccacccacagctgcaggatgcaggtgaccccaccccatgctcc

SEQ ID NO: 573208 - DNA, 120 bp, Artificial Sequence
  ENSG00000171060_20 (sequence is synthesized)
gtcaggccaggccaggctggaggaggagcagggcaccttctggcaagttcagagaaggtgtgatgagtcatctgatgaagctcacacactgtcgcacacacacaggcccagagtccagct

SEQ ID NO: 573209 - DNA, 120 bp, Artificial Sequence
  ENSG00000171060_21 (sequence is synthesized)
tgctgatcaaaaatgatggcctcatgcctgctcaccctctgggatccctcaatgggcagcctctgctgtcctccatgcggccaccgacttccctctgggatggccccaacctctcacgtc

SEQ ID NO: 573210 - DNA, 120 bp, Artificial Sequence
  ENSG00000171060_22 (sequence is synthesized)
cgctatccttggaggtcctggtgttccgtgatgaagtcaactctttcacatggcacatagggctgtcatgaaccaccctgtccaaactgaccacaagccctgggtcccccagctcagtcc

SEQ ID NO: 573211 - DNA, 120 bp, Artificial Sequence
  ENSG00000171060_23 (sequence is synthesized)
gcagaatccagttttgcctcctggacagctgggtgtggccctgtgcacgcagccatgctgtgcccctctcacttccggccttcactgctcctggcccctctgcttggggtggcctttccc

SEQ ID NO: 573212 - DNA, 120 bp, Artificial Sequence
  ENSG00000171060_24 (sequence is synthesized)
accatcctctggactccagcctggtgcccccgacacggggcatgtgcagacgccctggcctctcagagctccttcttatctcactgcatccctgcggggaagctcctgccaattgatggc

SEQ ID NO: 573213 - DNA, 120 bp, Artificial Sequence
  ENSG00000171060_25 (sequence is synthesized)
aggcctgcacgctctgatgcccagctctgagtgaaaggacaggaagggacacagggcgtgtggggccaggggttctctgctgttctgagggcagcagcagccaagagcttctggtcagtg

SEQ ID NO: 573214 - DNA, 120 bp, Artificial Sequence
  ENSG00000171060_26 (sequence is synthesized)
aagcaagacctggaccctgccctaggctgatccccgccgaggccttggcccttccttccgacacagctcgttcctcctgctgccagaattggctccctggaacctggctccgctcacccc

SEQ ID NO: 573215 - DNA, 120 bp, Artificial Sequence
  ENSG00000171060_27 (sequence is synthesized)
ctacctgctggaaacccttctgccatgtctgggtgggcctggcctttggggcctgctctgccagcccagcagcctccatggtgaaagccttggccacaggcaacatcccccagcacctgg

SEQ ID NO: 573216 - DNA, 120 bp, Artificial Sequence
  ENSG00000171060_28 (sequence is synthesized)
ctggcacatgggaatgttccctaaataaatccttttgtgtgtgtgtgagacaagctctcaccctgtcatccagactggactgcagtggcacgatctgtagccttgacctcctgggctcaa

SEQ ID NO: 573217 - DNA, 120 bp, Artificial Sequence
  ENSG00000171060_29 (sequence is synthesized)
gtgatccttctatctcaacctcctgagtagctgggactaaaggcatgcaccaccatgctggctatttttttttttttatagtgttcgggtctttctatgttgcccaggctggtcttgaac

SEQ ID NO: 573218 - DNA, 120 bp, Artificial Sequence
  ENSG00000171060_30 (sequence is synthesized)
aggctcaagggatacccctgccatggcctctgaaagtgctgtggccgcccattcccttgtgtccattcaagaagtctctccttctctgcagagcacctcctgggagctgggcactgctct

SEQ ID NO: 573219 - DNA, 120 bp, Artificial Sequence
  ENSG00000171060_31 (sequence is synthesized)
ggcacttggcacccagcagtgaacagaaaagaccgcctctcgctccctcgcagcttgagtgatagtggagggaaaatgaccaagaacaaatcacacaagtaaaatgcacaagatcaaaga

SEQ ID NO: 573220 - DNA, 120 bp, Artificial Sequence
  ENSG00000171060_32 (sequence is synthesized)
aagggaaaccaaaggttcagtccaggagcccacacagcccaccagctgtgtaggaatgccagcagaggcctgatgatggcaatgacggtgacaatggcattacttattgagtgtttactg

SEQ ID NO: 573221 - DNA, 120 bp, Artificial Sequence
  ENSG00000171060_33 (sequence is synthesized)
tgtaccaggcactgtggaaagcaccacatatgcatgctgtcgcctaatctcacgaggtagagatttttattgcctctattttacagaaactactactgacttctaacatcatagttgggc

SEQ ID NO: 573222 - DNA, 120 bp, Artificial Sequence
  ENSG00000171060_34 (sequence is synthesized)
gcgcaatggtggctgctgtgtgaccgtgaatggtggctgagaacagaacacacagctattgaatccttggtgcccaagtcacagggcaggaggatgatgcatctccagccagcgtggtcc

SEQ ID NO: 573223 - DNA, 120 bp, Artificial Sequence
  ENSG00000171060_35 (sequence is synthesized)
ggtggctttggaaaggggtcaccctgaagggaccacttgtgctgcagtaggaggtgggaagatcaacagaccacggaccccgggacaggcaggagccacagaagaggtctcaagcaaagg

SEQ ID NO: 573224 - DNA, 120 bp, Artificial Sequence
  ENSG00000171060_36 (sequence is synthesized)
tggcaagctctcagggctcttcctgacaatcctgcctgtccccaggccgtggacagcaggtcagccacaaagctaactcccaagaacagcacctggcccagtctccttccctggctcctc

SEQ ID NO: 573225 - DNA, 120 bp, Artificial Sequence
  ENSG00000171060_37 (sequence is synthesized)
cgttcccttccctgggcagacagtgccccagccaagctttcacagacatttctgacctatcaaaaagcaccagggctggggcaatgaaaagaaatagacaccaatcccttccctacacag

SEQ ID NO: 573226 - DNA, 120 bp, Artificial Sequence
  ENSG00000171060_38 (sequence is synthesized)
ggagtggtgatggggaaggcagctctaccaccaggttcccgacccctcacacctgggctgaagctcaggtcctgactttgccacaggttagctttaggcaagtctcatcctttttctggg

SEQ ID NO: 573227 - DNA, 120 bp, Artificial Sequence
  ENSG00000171060_39 (sequence is synthesized)
cctcagtttccccatttgtagagaaaaacgattgtacaagctcaacatttctccttggtccagagagatgtgctccttggtccagagagactacttgccccaaatagatttgagaagcat

SEQ ID NO: 573228 - DNA, 120 bp, Artificial Sequence
  ENSG00000171060_40 (sequence is synthesized)
tgcaaacgctccatgccttttggtgatctgctaagctcatttgcatattttgttgagctcattagcatattaaagctctatttaatctccctggatccaacatctcttaaagggtctctc

SEQ ID NO: 573229 - DNA, 120 bp, Artificial Sequence
  ENSG00000171060_41 (sequence is synthesized)
tggctgtgaaacattcattttgatatacaggtgactcttgaagaacacgagatttagggccgccaacctcctgtgcggttgaaaacccatgtgtaactttggactcttccagaatttact

SEQ ID NO: 573230 - DNA, 120 bp, Artificial Sequence
  ENSG00000171060_42 (sequence is synthesized)
tactcatagcctaccgttgaccagaagcttactgataatataaacagtcgattcccatacattttgtatgtaatatgtattatgtactgtgttcttacaataaagtaggctgaagaaaag

SEQ ID NO: 573231 - DNA, 120 bp, Artificial Sequence
  ENSG00000171067_0 (sequence is synthesized)
ctgcccggagctgcctgggttgcgctgccggccacgtccccgcgccgggcctcaggctccttcctactgtccgagggccaccaggccgccgggggcctgctgcgcccggatgcgtctgtt

SEQ ID NO: 573232 - DNA, 120 bp, Artificial Sequence
  ENSG00000171067_1 (sequence is synthesized)
cgtctgttactagagtggagagtctaccttcgtctcacatgtgccacaaaggatggcatggcccgggagtgccccaccacgtggctttcaccccctgcaaagccagacttcgcccagcga

SEQ ID NO: 573233 - DNA, 120 bp, Artificial Sequence
  ENSG00000171067_2 (sequence is synthesized)
cacagtgtcaagcccacagctctccaaggaggaagatggtccaggctgggagcatccccttagcagcagcctctgatcccttggccaagcaggagggaaccattagcagcctgaggagct

SEQ ID NO: 573234 - DNA, 120 bp, Artificial Sequence
  ENSG00000171067_3 (sequence is synthesized)
ggctggctgggagcctcggggaccgcccagccttgctcccagctcacccacaagatgtggacagctcttgtgctcatttggattttctccttgtccttatctgaaagccatgcggcatcc

SEQ ID NO: 573235 - DNA, 120 bp, Artificial Sequence
  ENSG00000171067_4 (sequence is synthesized)
aacgatccacgcaactttgtccctaacaaaatgtggaagggattagtcaagaggaatgcatctgtggaaacagttgataataaaacgtctgaggatgtaaccatggcagcagcttctcct

SEQ ID NO: 573236 - DNA, 120 bp, Artificial Sequence
  ENSG00000171067_5 (sequence is synthesized)
gtcacattgaccaaagggacttcggcagcccacctcaactctatggaagtcacaacagaggacacaagcaggacagatgtgagtgaaccagcaacttcaggaggtgcagctgatggtgtg

SEQ ID NO: 573237 - DNA, 120 bp, Artificial Sequence
  ENSG00000171067_6 (sequence is synthesized)
acctccattgctcccacggctgtggcctccagtacgactgcggcctccattacgactgcggcctccagtatgactgtggcctccagtgctcccacgactgcagcctccagtacaactgtg

SEQ ID NO: 573238 - DNA, 120 bp, Artificial Sequence
  ENSG00000171067_7 (sequence is synthesized)
gcctccattgctcccacgactgcagcctccagtatgactgcggcctccagcactcccatgacacttgcactccccgcgcccacgtccacttccacagggcggaccccgtccactaccgcc

SEQ ID NO: 573239 - DNA, 120 bp, Artificial Sequence
  ENSG00000171067_8 (sequence is synthesized)
cacaagtgccaaagagcagcgcgttgccaagaacagcaaccctggccacattggccacacgtgctcagactgtagcgaccacagcaaacacaagcagccccatgagcactcgtccaagtc

SEQ ID NO: 573240 - DNA, 120 bp, Artificial Sequence
  ENSG00000171067_9 (sequence is synthesized)
cttccaagcacatgcccagtgacaccgcggcaagccctgtaccccctatgcgtccccaagcacaaggtcccattagccaggtgtcagtggaccagcctgtggttaacacaacaaataaat

SEQ ID NO: 573241 - DNA, 120 bp, Artificial Sequence
  ENSG00000171067_10 (sequence is synthesized)
ccacacccatgccctcaaacacaaccccagagcccgcccccacccccacagtggtgaccaccaccaaggcacaagccagggagccaactgccagcccagtgccagtacctcacaccagcc

SEQ ID NO: 573242 - DNA, 120 bp, Artificial Sequence
  ENSG00000171067_11 (sequence is synthesized)
caatccctgagatggaggccatgtcccccacgacacagccaagccccatgccatatacccagagggccgctgggccaggcacatcccaggcaccggagcaggtagagactgaagccacac

SEQ ID NO: 573243 - DNA, 120 bp, Artificial Sequence
  ENSG00000171067_12 (sequence is synthesized)
caggtactgattccactgggccaacacccaggagctcagggggcactaagatgccagccacggactcgtgccagcccagcacccaaggccagtacatggtggtcaccactgagcccctca

SEQ ID NO: 573244 - DNA, 120 bp, Artificial Sequence
  ENSG00000171067_13 (sequence is synthesized)
cccaggccgtggtagacaaaactctccttctggtggtgctgttactcggggtgacccttttcatcacagtcttggttttgtttgccctgcaggcctatgagagctacaagaagaaggact

SEQ ID NO: 573245 - DNA, 120 bp, Artificial Sequence
  ENSG00000171067_14 (sequence is synthesized)
acacccaggtggactacttaatcaacgggatgtatgcggactcagaaatgtgaggggggcgggggcctggcgggaggcctggccccttcctcgtcctttccttttgcctttgagaccaaa

SEQ ID NO: 573246 - DNA, 120 bp, Artificial Sequence
  ENSG00000171067_15 (sequence is synthesized)
ccaagtgcttccaaattcttttggtgcaattgaggagatatgccagatgcttaaacacatttaattgctgtcagattaattccatgatcactaaagagttgctgcttttttcatatttat

SEQ ID NO: 573247 - DNA, 120 bp, Artificial Sequence
  ENSG00000171067_16 (sequence is synthesized)
ttttgtaaatgattctgtgcccaggagcagctgggggttccacctcagggtggggcgggcaggaccccgtctccccaggtgtcggagcctgacctgaattaaagtactgactgctcgcca

SEQ ID NO: 573248 - DNA, 120 bp, Artificial Sequence
  ENSG00000171067_17 (sequence is synthesized)
gttgcgctgccggccacgtccccgcgccgggcctcaggctccttcctactgtccgagggccaccaggccgccgggggcctgctgcgcccgggtaaggggctcgcactgccgtccgggtag

SEQ ID NO: 573249 - DNA, 120 bp, Artificial Sequence
  ENSG00000171067_18 (sequence is synthesized)
ctgctgtcagggctccctgactggcttgggactgagagacagaggttggggggcaggaggagggttggatgggggcacgaggggcagtgggagagtgagtggggctgagagaggcaggag

SEQ ID NO: 573250 - DNA, 120 bp, Artificial Sequence
  ENSG00000171067_19 (sequence is synthesized)
gatgcctatgagagctacaagaagaaggactacacccaggtggactacttaatcaacgggatgtatgcggactcagaaatgtgaggggggcgggggcctggcgggaggcctggccccttc

SEQ ID NO: 573251 - DNA, 120 bp, Artificial Sequence
  ENSG00000171067_20 (sequence is synthesized)
gaattcctgcagtgaatcctttcacaaagccaagcgttcttttatgatgtgaatacctgtgcagtttatctgctttgtaaacctgggtgtgcgttcagtgggcttttaatgacaaaactc

SEQ ID NO: 573252 - DNA, 120 bp, Artificial Sequence
  ENSG00000171067_21 (sequence is synthesized)
atccccttagcagcagcctctgggaggctgtgtcttactcatgcagggtggtggaggggcgcctcttagcagaagatgatgaaaggctgtcccctctcaggaaggagaaggtccttgtct

SEQ ID NO: 573253 - DNA, 120 bp, Artificial Sequence
  ENSG00000171067_22 (sequence is synthesized)
gttccaaggcaaagaactggacaagaaggaggaggttcattcagtacattgagtctgatcctccctgctgtagctggagcacggtccctgaagctggctgaagtgctaaagcaggggcta

SEQ ID NO: 573254 - DNA, 120 bp, Artificial Sequence
  ENSG00000171067_23 (sequence is synthesized)
gatcatcagagggtcaagggaaaaggaaagacagccaggccttatagtaaccaaggaaggcccaggcccagtctgtggcccttaactgtcagaggccctgcctccatttttttttgtttg

SEQ ID NO: 573255 - DNA, 87 bp, Artificial Sequence
  ENSG00000171067_24 (sequence is synthesized)
cttaactgtcagaggccctgcctccatttttttttgtttgtttgtttgagacaatgtctggttctgtggtccaggctggagtgcaga

SEQ ID NO: 573256 - DNA, 120 bp, Artificial Sequence
  ENSG00000171067_25 (sequence is synthesized)
tagcagcagcctctgagatggggttccgccatgttgcccaggctggtctctaactcatgagctcagtccatccgcctacctcagcctctcaaagtgcggggattacatgcatgagtcatt

SEQ ID NO: 573257 - DNA, 120 bp, Artificial Sequence
  ENSG00000171067_26 (sequence is synthesized)
gcatctgatcaggaggccttatcttctgagtggactggggtggtggcccatgaacaggatggggatcacgcaatcccctgcaaccctcttcggcttcgtgacacaaatgcaagttacctc

SEQ ID NO: 573258 - DNA, 120 bp, Artificial Sequence
  ENSG00000171094_0 (sequence is synthesized)
agatgcgatccagcggctctgggggcggcagcggtggtagcagctggtacctcccgccgcctctgttcggagggtcgcggggcaccgaggtgctttccggccgccctctggtcggccacc

SEQ ID NO: 573259 - DNA, 120 bp, Artificial Sequence
  ENSG00000171094_1 (sequence is synthesized)
caaagccgcgggcgctgatgatgggtgaggagggggcggcaagatttcgggcgcccctgccctgaacgccctcagctgctgccgccggggccgctccagtgcctgcgaactctgaggagc

SEQ ID NO: 573260 - DNA, 120 bp, Artificial Sequence
  ENSG00000171094_2 (sequence is synthesized)
cgaggcgccggtgagagcaaggacgctgcaaacttgcgcagcgcgggggctgggattcacgcccagaagttcagcaggcagacagtccgaagccttcccgcagcggagagatagcttgag

SEQ ID NO: 573261 - DNA, 120 bp, Artificial Sequence
  ENSG00000171094_3 (sequence is synthesized)
ggtgcgcaagacggcagcctccgccctcggttcccgcccagaccgggcagaagagcttggaggagccaaaaggaacgcaaaaggcggccaggacagcgtgcagcagctgggagccgccgt

SEQ ID NO: 573262 - DNA, 120 bp, Artificial Sequence
  ENSG00000171094_4 (sequence is synthesized)
tctcagccttaaaagttgcagagattggaggctgccccgagaggggacagaccccagctccgactgcggggggcaggagaggacggtacccaactgccacctcccttcaaccatagtagt

SEQ ID NO: 573263 - DNA, 120 bp, Artificial Sequence
  ENSG00000171094_5 (sequence is synthesized)
tcctctgtaccgagcgcagcgagctacagacgggggcgcggcactcggcgcggagagcgggaggctcaaggtcccagccagtgagcccagtgtgcttgagtgtctctggactcgcccctg

SEQ ID NO: 573264 - DNA, 120 bp, Artificial Sequence
  ENSG00000171094_6 (sequence is synthesized)
agcttccaggtctgtttcatttagactcctgctcgcctccgtgcagttgggggaaagcaagagacttgcgcgcacgcacagtcctctggagatcaggtggaaggagccgctgggtaccaa

SEQ ID NO: 573265 - DNA, 120 bp, Artificial Sequence
  ENSG00000171094_7 (sequence is synthesized)
ggactgttcagagcctcttcccatctcggggagagcgaagggtgaggctgggcccggagagcagtgtaaacggcctcctccggcgggatgggagccatcgggctcctgtggctcctgccg

SEQ ID NO: 573266 - DNA, 120 bp, Artificial Sequence
  ENSG00000171094_8 (sequence is synthesized)
ctgctgctttccacggcagctgtgggctccgggatggggaccggccagcgcgcgggctccccagctgcggggccgccgctgcagccccgggagccactcagctactcgcgcctgcagagg

SEQ ID NO: 573267 - DNA, 120 bp, Artificial Sequence
  ENSG00000171094_9 (sequence is synthesized)
aagagtctggcagttgacttcgtggtgccctcgctcttccgtgtctacgcccgggacctactgctgccaccatcctcctcggagctgaaggctggcaggcccgaggcccgcggctcgcta

SEQ ID NO: 573268 - DNA, 120 bp, Artificial Sequence
  ENSG00000171094_10 (sequence is synthesized)
gctctggactgcgccccgctgctcaggttgctggggccggcgccgggggtctcctggaccgccggttcaccagccccggcagaggcccggacgctgtccagggtgctgaagggcggctcc

SEQ ID NO: 573269 - DNA, 120 bp, Artificial Sequence
  ENSG00000171094_11 (sequence is synthesized)
gtgcgcaagctccggcgtgccaagcagttggtgctggagctgggcgaggaggcgatcttggagggttgcgtcgggccccccggggaggcggctgtggggctgctccagttcaatctcagc

SEQ ID NO: 573270 - DNA, 120 bp, Artificial Sequence
  ENSG00000171094_12 (sequence is synthesized)
gagctgttcagttggtggattcgccaaggcgaagggcgactgaggatccgcctgatgcccgagaagaaggcgtcggaagtgggcagagagggaaggctgtccgcggcaattcgcgcctcc

SEQ ID NO: 573271 - DNA, 120 bp, Artificial Sequence
  ENSG00000171094_13 (sequence is synthesized)
cagccccgccttctcttccagatcttcgggactggtcatagctccttggaatcaccaacaaacatgccttctccttctcctgattattttacatggaatctcacctggataatgaaagac

SEQ ID NO: 573272 - DNA, 120 bp, Artificial Sequence
  ENSG00000171094_14 (sequence is synthesized)
tccttccctttcctgtctcatcgcagccgatatggtctggagtgcagctttgacttcccctgtgagctggagtattcccctccactgcatgacctcaggaaccagagctggtcctggcgc

SEQ ID NO: 573273 - DNA, 120 bp, Artificial Sequence
  ENSG00000171094_15 (sequence is synthesized)
cgcatcccctccgaggaggcctcccagatggacttgctggatgggcctggggcagagcgttctaaggagatgcccagaggctcctttctccttctcaacacctcagctgactccaagcac

SEQ ID NO: 573274 - DNA, 120 bp, Artificial Sequence
  ENSG00000171094_16 (sequence is synthesized)
accatcctgagtccgtggatgaggagcagcagtgagcactgcacactggccgtctcggtgcacaggcacctgcagccctctggaaggtacattgcccagctgctgccccacaacgaggct

SEQ ID NO: 573275 - DNA, 120 bp, Artificial Sequence
  ENSG00000171094_17 (sequence is synthesized)
gcaagagagatcctcctgatgcccactccagggaagcatggttggacagtgctccagggaagaatcgggcgtccagacaacccatttcgagtggccctggaatacatctccagtggaaac

SEQ ID NO: 573276 - DNA, 120 bp, Artificial Sequence
  ENSG00000171094_18 (sequence is synthesized)
cgcagcttgtctgcagtggacttctttgccctgaagaactgcagtgaaggaacatccccaggctccaagatggccctgcagagctccttcacttgttggaatgggacagtcctccagctt

SEQ ID NO: 573277 - DNA, 120 bp, Artificial Sequence
  ENSG00000171094_19 (sequence is synthesized)
gggcaggcctgtgacttccaccaggactgtgcccagggagaagatgagagccagatgtgccggaaactgcctgtgggtttttactgcaactttgaagatggcttctgtggctggacccaa

SEQ ID NO: 573278 - DNA, 120 bp, Artificial Sequence
  ENSG00000171094_20 (sequence is synthesized)
ggcacactgtcaccccacactcctcaatggcaggtcaggaccctaaaggatgcccggttccaggaccaccaagaccatgctctattgctcagtaccactgatgtccccgcttctgaaagt

SEQ ID NO: 573279 - DNA, 120 bp, Artificial Sequence
  ENSG00000171094_21 (sequence is synthesized)
gctacagtgaccagtgctacgtttcctgcaccgatcaagagctctccatgtgagctccgaatgtcctggctcattcgtggagtcttgaggggaaacgtgtccttggtgctagtggagaac

SEQ ID NO: 573280 - DNA, 120 bp, Artificial Sequence
  ENSG00000171094_22 (sequence is synthesized)
aaaaccgggaaggagcaaggcaggatggtctggcatgtcgccgcctatgaaggcttgagcctgtggcagtggatggtgttgcctctcctcgatgtgtctgacaggttctggctgcagatg

SEQ ID NO: 573281 - DNA, 120 bp, Artificial Sequence
  ENSG00000171094_23 (sequence is synthesized)
gtcgcatggtggggacaaggatccagagccatcgtggcttttgacaatatctccatcagcctggactgctacctcaccattagcggagaggacaagatcctgcagaatacagcacccaaa

SEQ ID NO: 573282 - DNA, 120 bp, Artificial Sequence
  ENSG00000171094_24 (sequence is synthesized)
tcaagaaacctgtttgagagaaacccaaacaaggagctgaaacccggggaaaattcaccaagacagacccccatctttgaccctacagttcattggctgttcaccacatgtggggccagc

SEQ ID NO: 573283 - DNA, 120 bp, Artificial Sequence
  ENSG00000171094_25 (sequence is synthesized)
gggccccatggccccacccaggcacagtgcaacaacgcctaccagaactccaacctgagcgtggaggtggggagcgagggccccctgaaaggcatccagatctggaaggtgccagccacc

SEQ ID NO: 573284 - DNA, 120 bp, Artificial Sequence
  ENSG00000171094_26 (sequence is synthesized)
gacacctacagcatctcgggctacggagctgctggcgggaaaggcgggaagaacaccatgatgcggtcccacggcgtgtctgtgctgggcatcttcaacctggagaaggatgacatgctg

SEQ ID NO: 573285 - DNA, 120 bp, Artificial Sequence
  ENSG00000171094_27 (sequence is synthesized)
tacatcctggttgggcagcagggagaggacgcctgccccagtacaaaccagttaatccagaaagtctgcattggagagaacaatgtgatagaagaagaaatccgtgtgaacagaagcgtg

SEQ ID NO: 573286 - DNA, 120 bp, Artificial Sequence
  ENSG00000171094_28 (sequence is synthesized)
catgagtgggcaggaggcggaggaggagggggtggagccacctacgtatttaagatgaaggatggagtgccggtgcccctgatcattgcagccggaggtggtggcagggcctacggggcc

SEQ ID NO: 573287 - DNA, 120 bp, Artificial Sequence
  ENSG00000171094_29 (sequence is synthesized)
aagacagacacgttccacccagagagactggagaataactcctcggttctagggctaaacggcaattccggagccgcaggtggtggaggtggctggaatgataacacttccttgctctgg

SEQ ID NO: 573288 - DNA, 120 bp, Artificial Sequence
  ENSG00000171094_30 (sequence is synthesized)
gccggaaaatctttgcaggagggtgccaccggaggacattcctgcccccaggccatgaagaagtgggggtgggagacaagagggggtttcggagggggtggaggggggtgctcctcaggt

SEQ ID NO: 573289 - DNA, 120 bp, Artificial Sequence
  ENSG00000171094_31 (sequence is synthesized)
ggaggaggcggaggatatataggcggcaatgcagcctcaaacaatgaccccgaaatggatggggaagatggggtttccttcatcagtccactgggcatcctgtacaccccagctttaaaa

SEQ ID NO: 573290 - DNA, 120 bp, Artificial Sequence
  ENSG00000171094_32 (sequence is synthesized)
gtgatggaaggccacggggaagtgaatattaagcattatctaaactgcagtcactgtgaggtagacgaatgtcacatggaccctgaaagccacaaggtcatctgcttctgtgaccacggg

SEQ ID NO: 573291 - DNA, 120 bp, Artificial Sequence
  ENSG00000171094_33 (sequence is synthesized)
acggtgctggctgaggatggcgtctcctgcattgtgtcacccaccccggagccacacctgccactctcgctgatcctctctgtggtgacctctgccctcgtggccgccctggtcctggct

SEQ ID NO: 573292 - DNA, 120 bp, Artificial Sequence
  ENSG00000171094_34 (sequence is synthesized)
ttctccggcatcatgattgtgtaccgccggaagcaccaggagctgcaagccatgcagatggagctgcagagccctgagtacaagctgagcaagctccgcacctcgaccatcatgaccgac

SEQ ID NO: 573293 - DNA, 120 bp, Artificial Sequence
  ENSG00000171094_35 (sequence is synthesized)
tacaaccccaactactgctttgctggcaagacctcctccatcagtgacctgaaggaggtgccgcggaaaaacatcaccctcattcggggtctgggccatggcgcctttggggaggtgtat

SEQ ID NO: 573294 - DNA, 120 bp, Artificial Sequence
  ENSG00000171094_36 (sequence is synthesized)
gaaggccaggtgtccggaatgcccaacgacccaagccccctgcaagtggctgtgaagacgctgcctgaagtgtgctctgaacaggacgaactggatttcctcatggaagccctgatcatc

SEQ ID NO: 573295 - DNA, 120 bp, Artificial Sequence
  ENSG00000171094_37 (sequence is synthesized)
agcaaattcaaccaccagaacattgttcgctgcattggggtgagcctgcaatccctgccccggttcatcctgctggagctcatggcggggggagacctcaagtccttcctccgagagacc

SEQ ID NO: 573296 - DNA, 120 bp, Artificial Sequence
  ENSG00000171094_38 (sequence is synthesized)
cgccctcgcccgagccagccctcctccctggccatgctggaccttctgcacgtggctcgggacattgcctgtggctgtcagtatttggaggaaaaccacttcatccaccgagacattgct

SEQ ID NO: 573297 - DNA, 120 bp, Artificial Sequence
  ENSG00000171094_39 (sequence is synthesized)
gccagaaactgcctcttgacctgtccaggccctggaagagtggccaagattggagacttcgggatggcccgagacatctacagggcgagctactatagaaagggaggctgtgccatgctg

SEQ ID NO: 573298 - DNA, 120 bp, Artificial Sequence
  ENSG00000171094_40 (sequence is synthesized)
ccagttaagtggatgcccccagaggccttcatggaaggaatattcacttctaaaacagacacatggtcctttggagtgctgctatgggaaatcttttctcttggatatatgccatacccc

SEQ ID NO: 573299 - DNA, 120 bp, Artificial Sequence
  ENSG00000171094_41 (sequence is synthesized)
agcaaaagcaaccaggaagttctggagtttgtcaccagtggaggccggatggacccacccaagaactgccctgggcctgtataccggataatgactcagtgctggcaacatcagcctgaa

SEQ ID NO: 573300 - DNA, 120 bp, Artificial Sequence
  ENSG00000171094_42 (sequence is synthesized)
gacaggcccaactttgccatcattttggagaggattgaatactgcacccaggacccggatgtaatcaacaccgctttgccgatagaatatggtccacttgtggaagaggaagagaaagtg

SEQ ID NO: 573301 - DNA, 120 bp, Artificial Sequence
  ENSG00000171094_43 (sequence is synthesized)
cctgtgaggcccaaggaccctgagggggttcctcctctcctggtctctcaacaggcaaaacgggaggaggagcgcagcccagctgccccaccacctctgcctaccacctcctctggcaag

SEQ ID NO: 573302 - DNA, 120 bp, Artificial Sequence
  ENSG00000171094_44 (sequence is synthesized)
gctgcaaagaaacccacagctgcagagatctctgttcgagtccctagagggccggccgtggaagggggacacgtgaatatggcattctctcagtccaaccctccttcggagttgcacaag

SEQ ID NO: 573303 - DNA, 120 bp, Artificial Sequence
  ENSG00000171094_45 (sequence is synthesized)
gtccacggatccagaaacaagcccaccagcttgtggaacccaacgtacggctcctggtttacagagaaacccaccaaaaagaataatcctatagcaaagaaggagccacacgacaggggt

SEQ ID NO: 573304 - DNA, 120 bp, Artificial Sequence
  ENSG00000171094_46 (sequence is synthesized)
aacctggggctggagggaagctgtactgtcccacctaacgttgcaactgggagacttccgggggcctcactgctcctagagccctcttcgctgactgccaatatgaaggaggtacctctg

SEQ ID NO: 573305 - DNA, 120 bp, Artificial Sequence
  ENSG00000171094_47 (sequence is synthesized)
ttcaggctacgtcacttcccttgtgggaatgtcaattacggctaccagcaacagggcttgcccttagaagccgctactgcccctggagctggtcattacgaggataccattctgaaaagc

SEQ ID NO: 573306 - DNA, 120 bp, Artificial Sequence
  ENSG00000171094_48 (sequence is synthesized)
aagaatagcatgaaccagcctgggccctgagctcggtcgcacactcacttctcttccttgggatccctaagaccgtggaggagagagaggcaatggctccttcacaaaccagagaccaaa

SEQ ID NO: 573307 - DNA, 120 bp, Artificial Sequence
  ENSG00000171094_49 (sequence is synthesized)
tgtcacgttttgttttgtgccaacctattttgaagtaccaccaaaaaagctgtattttgaaaatgctttagaaaggttttgagcatgggttcatcctattctttcgaaagaagaaaatat

SEQ ID NO: 573308 - DNA, 120 bp, Artificial Sequence
  ENSG00000171094_50 (sequence is synthesized)
cataaaaatgagtgataaatacaaggcccagatgtggttgcataaggtttttatgcatgtttgttgtatacttccttatgcttctttcaaattgtgtgtgctctgcttcaatgtagtcag

SEQ ID NO: 573309 - DNA, 120 bp, Artificial Sequence
  ENSG00000171094_51 (sequence is synthesized)
aattagctgcttctatgtttcatagttggggtcatagatgtttccttgccttgttgatgtggacatgagccatttgaggggagagggaacggaaataaaggagttatttgtaatgactaa

SEQ ID NO: 573310 - DNA, 120 bp, Artificial Sequence
  ENSG00000171094_52 (sequence is synthesized)
accctgaaagtttgcagatgcttcttcccaccaccacgtgtggatgggagcccctgttctcccagattttcaggcagagccatgcttagaaaatataagaaaccatgctctattgctcag

SEQ ID NO: 573311 - DNA, 120 bp, Artificial Sequence
  ENSG00000171094_53 (sequence is synthesized)
gttctattctaagagccccagatctcatacacaaagattctgattcacagatgacatattgggaccaggaatctgtattttttaaagttccccagttgactttcatgcgtaaccacattt

SEQ ID NO: 573312 - DNA, 120 bp, Artificial Sequence
  ENSG00000171094_54 (sequence is synthesized)
cagccttccctggctccctccccatttcctctcatgggcatttcttctaataaaatctgcagaccatattgggtctaatcccatctccagtctgcttcttggaggaaccagactaacatg

SEQ ID NO: 573313 - DNA, 120 bp, Artificial Sequence
  ENSG00000171094_55 (sequence is synthesized)
actctgccctatataatacaaataattattttccatatatctgatttttagctttgcatttactttaaatcatgcttcaattaaagacacaccttctttaatcattttattagtatttct

SEQ ID NO: 573314 - DNA, 120 bp, Artificial Sequence
  ENSG00000171094_56 (sequence is synthesized)
aagtatgatggaaaggttcagagctcaggggaggatatggagatccagggaggcttcctgtaggaagtggcctgtgtagtgcttcaagggccaggctgccaggccatgttgcagctgacc

SEQ ID NO: 573315 - DNA, 120 bp, Artificial Sequence
  ENSG00000171094_57 (sequence is synthesized)
acttcctcacccaagtgcctgagcaacatcctcacagctccagccactctcctgcaaatggaactcctgtggagcctgctgtggttcttcccacctgctcaccagcaagattctgggttt

SEQ ID NO: 573316 - DNA, 120 bp, Artificial Sequence
  ENSG00000171094_58 (sequence is synthesized)
aggctcagcccgggacccctgctgcccatgtttacagaatgcctttatacattgtagctgctgaaaatgtaactttgtatcctgttcctcccagtttaagatttgcccagactcagctca

SEQ ID NO: 573317 - DNA, 120 bp, Artificial Sequence
  ENSG00000171097_0 (sequence is synthesized)
gctgcaacctacggggtgtacttgggaacgaggggtgaagcggcccaggtgaggctcgccatggccaaacagctgcaggcccgaaggctagacgggatcgactacaacccctgggtggag

SEQ ID NO: 573318 - DNA, 120 bp, Artificial Sequence
  ENSG00000171097_1 (sequence is synthesized)
tttgtgaaactggccagtgagcatgacgtcgtgaacttgggccagggcttcccggatttcccaccaccagactttgccgtggaagcctttcagcacgctgtcagtggagacttcatgctt

SEQ ID NO: 573319 - DNA, 120 bp, Artificial Sequence
  ENSG00000171097_2 (sequence is synthesized)
aaccagtacaccaagacatttggttacccaccactgacgaagatcctggcaagtttctttggggagctgctgggtcaggagatagacccgctcaggaatgtgctggtgactgttggtggc

SEQ ID NO: 573320 - DNA, 120 bp, Artificial Sequence
  ENSG00000171097_3 (sequence is synthesized)
tatggggccctgttcacagccttccaggccctggtggacgaaggagacgaggtcatcatcatcgaacccttttttgactgctacgagcccatgacaatgatggcagggggtcgtcctgtg

SEQ ID NO: 573321 - DNA, 120 bp, Artificial Sequence
  ENSG00000171097_4 (sequence is synthesized)
tttgtgtccctgaagccgggtcccatccagaatggagaactgggttccagcagcaactggcagctggaccccatggagctggccggcaaattcacatcacgcaccaaagccctggtcctc

SEQ ID NO: 573322 - DNA, 120 bp, Artificial Sequence
  ENSG00000171097_5 (sequence is synthesized)
aacacccccaacaaccccctgggcaaggtgttctccagggaagagctggagctggtggccagcctttgccagcagcatgacgtggtgtgtatcactgatgaagtctaccagtggatggtc

SEQ ID NO: 573323 - DNA, 120 bp, Artificial Sequence
  ENSG00000171097_6 (sequence is synthesized)
tacgacgggcaccagcacatcagcattgccagcctccctggcatgtgggaacggaccctgaccatcggcagcgccggcaagaccttcagcgccactggctggaaggtgggctgggtcctg

SEQ ID NO: 573324 - DNA, 120 bp, Artificial Sequence
  ENSG00000171097_7 (sequence is synthesized)
ggtccagatcacatcatgaagcacctgcggaccgtgcaccagaactccgtcttccactgccccacgcagagccaggctgcagtagccgagagctttgaacgggagcagctgctcttccgc

SEQ ID NO: 573325 - DNA, 120 bp, Artificial Sequence
  ENSG00000171097_8 (sequence is synthesized)
gaccacatgatacgtagcctacagtcagtgggcctgaagcccatcatccctcagggcagctacttcctcatcacagacatctcagacttcaagaggaagatgcctgacttgcctggagct

SEQ ID NO: 573326 - DNA, 120 bp, Artificial Sequence
  ENSG00000171097_9 (sequence is synthesized)
gtggatgagccctatgacagacgcttcgtcaagtggatgatcaagaacaagggcttggtggccatccctgtctccatcttctatagtgtgccacatcagaagcactttgaccactatatc

SEQ ID NO: 573327 - DNA, 120 bp, Artificial Sequence
  ENSG00000171097_10 (sequence is synthesized)
cgcttctgttttgtgaaggatgaagccacgctccaggccatggacgagaagctgcggaagtggaaggtggaactctagccctgaagtcacgccttggccctgacatccccacatgcccgc

SEQ ID NO: 573328 - DNA, 120 bp, Artificial Sequence
  ENSG00000171097_11 (sequence is synthesized)
agagatcctctttgagtgtctgtctttgtccaggtttcagacatttctaggttggggaagatgctattgggaaacctcttctccgtgacacagaatgttctgggtgggagccgcccttct

SEQ ID NO: 573329 - DNA, 120 bp, Artificial Sequence
  ENSG00000171097_12 (sequence is synthesized)
tcatcttagagaaccaagtgcctcctgtctgaaaggtgagggtggcctgacctgggcctctccctgcccctccataggtgggtttgtagggtcttgtgttgcttctggtctctccaggct

SEQ ID NO: 573330 - DNA, 120 bp, Artificial Sequence
  ENSG00000171097_13 (sequence is synthesized)
tggctgagacggacggtagacttccaccatgtaccgatcacatcccagctctgcatggcccctgctaaggctcaggtataacctcaccttccctggctcatcttggccttggggagttgc

SEQ ID NO: 573331 - DNA, 120 bp, Artificial Sequence
  ENSG00000171097_14 (sequence is synthesized)
ctttaggcttgagtcctcaagcctctccttttcgtccataataaaatgtttaagttattaagatccttattgacggcttctctctgcttcacactcatgctgatggctgatctaacttgt

SEQ ID NO: 573332 - DNA, 120 bp, Artificial Sequence
  ENSG00000171097_15 (sequence is synthesized)
gaagaatgcccagaagaacctcagacacccccacaactttgtacaaatggttactgtagtcacatagtggcacaaccaggcctagcacccaaggccctcaaatgaattcctcactattaa

SEQ ID NO: 573333 - DNA, 120 bp, Artificial Sequence
  ENSG00000171097_16 (sequence is synthesized)
agttcatcagaaaattaggtcacagggtaacctgctgcccccaaactggagaggcagaaaggtagatacagagaatcatgatttgccagagcagaaaccttccctggaatcagcacctgg

SEQ ID NO: 573334 - DNA, 120 bp, Artificial Sequence
  ENSG00000171097_17 (sequence is synthesized)
gtgggaaaacctgaactgcaactgacgaatgtctggcagcgtggatgtgtgctgctggttaatgttaggtggcagctggactggagtaaggaatacctagagaatggtgaaacatgactt

SEQ ID NO: 573335 - DNA, 120 bp, Artificial Sequence
  ENSG00000171097_18 (sequence is synthesized)
ctgggtgtgtctgtgagggtgtttccagaggagattggcgtgggagtcagtggactgagtggggaagatccgctctcaatgtgggtggcagtatgcaattggttcacggcttgaataaaa

SEQ ID NO: 573336 - DNA, 120 bp, Artificial Sequence
  ENSG00000171097_19 (sequence is synthesized)
acaaaagaggagaaaattttcctctttctgtctctgtctctcctggagctggaagattctccttctcctgccctttggatatcaaaactctaggctcttcagccttggactgagaattat

SEQ ID NO: 573337 - DNA, 120 bp, Artificial Sequence
  ENSG00000171097_20 (sequence is synthesized)
cccagtggcgtccctggttctgaggcttgcagacttggactgagccacgctactggcacctcttgcaaatagtctctcaggggacttctcagcctccattaattgccaggtggctgagaa

SEQ ID NO: 573338 - DNA, 120 bp, Artificial Sequence
  ENSG00000171097_21 (sequence is synthesized)
gaatgttggatccccagctccacggcccaccagccatctgggactggcaaacccacaggaacggaaggttcctcagggaccacaaagcccatgtgaggtccctgctgctgaagggattct

SEQ ID NO: 573339 - DNA, 120 bp, Artificial Sequence
  ENSG00000171097_22 (sequence is synthesized)
gaggacaggaggagccaaattacctatccagggtcacccagccaagacaggatggcgctgtggcctgaaagcagctgtccctcctgtgtgcaagctcggactgctgcacccagacagatt

SEQ ID NO: 573340 - DNA, 120 bp, Artificial Sequence
  ENSG00000171097_23 (sequence is synthesized)
tacttcctcatcacagacatctcagacttcaagaggaagatgcctgacttgcctggagctgtggatgagccctatgacagacgcttcgtcaagtggatgatcaagaacaaggtgggctgg

SEQ ID NO: 573341 - DNA, 120 bp, Artificial Sequence
  ENSG00000171097_24 (sequence is synthesized)
catgtatggtttcacaggttgtgtgctgctcaagggtgcccaggcaagaggctcctgggctagatcttagtccagcctctgccgtcaaccttggggcagggttgtatccacttcagagaa

SEQ ID NO: 573342 - DNA, 120 bp, Artificial Sequence
  ENSG00000171097_25 (sequence is synthesized)
cacaggggtgcctgggagggggctcgcgcgccgcggagccggcgagaaggtggtgccccggagactccgggcactggggagcccagagctcgccatggccaaacagctgcaggcccgaag

SEQ ID NO: 573343 - DNA, 120 bp, Artificial Sequence
  ENSG00000171097_26 (sequence is synthesized)
gtgcgatcatggtccactgcagccttgaccctgccagtctcaagtggtcctcccacctcagcctctggagtaactgggactacaggctggtctcagagctggttggaaagttccttcttt

SEQ ID NO: 573344 - DNA, 120 bp, Artificial Sequence
  ENSG00000171097_27 (sequence is synthesized)
acttgggaacgaggggtgaagcggcccaggtgaggagctgtgtgtgggggacccaagtcctgagctcggaggcattttctggccagggctgtttcctcccttctcccctgcctctggaaa

SEQ ID NO: 573345 - DNA, 120 bp, Artificial Sequence
  ENSG00000171097_28 (sequence is synthesized)
agtctgcagtgccccaaggctctgggaggcatgttcaggactgcagcagccatctctgtgcacctggtggggccccttcagggaaggaaggctggagccccactcacttggttcttgcac

SEQ ID NO: 573346 - DNA, 120 bp, Artificial Sequence
  ENSG00000171100_0 (sequence is synthesized)
gcagccgagcagcctggcaacggcggtggcgcccggagcccgagagtttccaggatggcttctgcatcaacttctaaatataattcacactccttggagaatgagtctattaagaggacg

SEQ ID NO: 573347 - DNA, 120 bp, Artificial Sequence
  ENSG00000171100_1 (sequence is synthesized)
tctcgagatggagtcaatcgagatctcactgaggctgttcctcgacttccaggagaaacactaatcactgacaaagaagttatttacatatgtcctttcaatggccccattaagggaaga

SEQ ID NO: 573348 - DNA, 120 bp, Artificial Sequence
  ENSG00000171100_2 (sequence is synthesized)
gtttacatcacaaattatcgtctttatttaagaagtttggaaacggattcttctctaatacttgatgttcctctgggtgtgatctcgagaattgaaaaaatgggaggcgcgacaagtaga

SEQ ID NO: 573349 - DNA, 120 bp, Artificial Sequence
  ENSG00000171100_3 (sequence is synthesized)
ggagaaaattcctatggtctagatattacttgtaaagacatgagaaacctgaggttcgctttgaaacaggaaggccacagcagaagagatatgtttgagatcctcacgagatacgcgttt

SEQ ID NO: 573350 - DNA, 120 bp, Artificial Sequence
  ENSG00000171100_4 (sequence is synthesized)
cccctggctcacagtctgccattatttgcatttttaaatgaagaaaagtttaacgtggatggatggacagtttacaatccagtggaagaatacaggaggcagggcttgcccaatcaccat

SEQ ID NO: 573351 - DNA, 120 bp, Artificial Sequence
  ENSG00000171100_5 (sequence is synthesized)
tggagaataacttttattaataagtgctatgagctctgtgacacttaccctgctcttttggtggttccgtatcgtgcctcagatgatgacctccggagagttgcaacttttaggtcccga

SEQ ID NO: 573352 - DNA, 120 bp, Artificial Sequence
  ENSG00000171100_6 (sequence is synthesized)
aatcgaattccagtgctgtcatggattcatccagaaaataagacggtcattgtgcgttgcagtcagcctcttgtcggtatgagtgggaaacgaaataaagatgatgagaaatatctcgat

SEQ ID NO: 573353 - DNA, 120 bp, Artificial Sequence
  ENSG00000171100_7 (sequence is synthesized)
gttatcagggagactaataaacaaatttctaaactcaccatttatgatgcaagacccagcgtaaatgcagtggccaacaaggcaacaggaggaggatatgaaagtgatgatgcatatcat

SEQ ID NO: 573354 - DNA, 120 bp, Artificial Sequence
  ENSG00000171100_8 (sequence is synthesized)
aacgccgaacttttcttcttagacattcataatattcatgttatgcgggaatctttaaaaaaagtgaaggacattgtttatcctaatgtagaagaatctcattggttgtccagtttggag

SEQ ID NO: 573355 - DNA, 120 bp, Artificial Sequence
  ENSG00000171100_9 (sequence is synthesized)
tctactcattggttagaacatatcaagctcgttttgacaggagccattcaagtagcagacaaagtttcttcagggaagagttcagtgcttgtgcattgcagtgacggatgggacaggact

SEQ ID NO: 573356 - DNA, 120 bp, Artificial Sequence
  ENSG00000171100_10 (sequence is synthesized)
gctcagctgacatccttggccatgctgatgttggatagcttctataggagcattgaagggttcgaaatactggtacaaaaagaatggataagttttggacataaatttgcatctcgaata

SEQ ID NO: 573357 - DNA, 120 bp, Artificial Sequence
  ENSG00000171100_11 (sequence is synthesized)
ggtcatggtgataaaaaccacaccgatgctgaccgttctcctatttttctccagtttattgattgtgtgtggcaaatgtcaaaacagttccctacagcttttgaattcaatgaacaattt

SEQ ID NO: 573358 - DNA, 120 bp, Artificial Sequence
  ENSG00000171100_12 (sequence is synthesized)
ttgattataattttggatcatctgtatagttgccgatttggtactttcttattcaactgtgaatctgctcgagaaagacagaaggttacagaaaggactgtttctttatggtcactgata

SEQ ID NO: 573359 - DNA, 120 bp, Artificial Sequence
  ENSG00000171100_13 (sequence is synthesized)
aacagtaataaagaaaaattcaaaaaccccttctatactaaagaaatcaatcgagttttatatccagttgccagtatgcgtcacttggaactctgggtgaattactacattagatggaac

SEQ ID NO: 573360 - DNA, 120 bp, Artificial Sequence
  ENSG00000171100_14 (sequence is synthesized)
caagctttctgatcccccaacttcaccttccagtccttcgcaaatgatgccccatgtgcaaactcacttctgaggggggaccctggcaccgcattagagctcgaaataaaggcgatagct

SEQ ID NO: 573361 - DNA, 120 bp, Artificial Sequence
  ENSG00000171100_15 (sequence is synthesized)
gactttcatttggggcatttgtaaaaagtagattaaaatatttgcctccatgtagaacttgaactaacataatcttaaactcttgaatatgtgccttctagaatacatattacaagaaaa

SEQ ID NO: 573362 - DNA, 120 bp, Artificial Sequence
  ENSG00000171100_16 (sequence is synthesized)
ctacagggtccacacggcaatcagaagaaaggagctgagatgaggttttggaaaaccctgacacctttaaaaagcagtttttgaaagacaaaatttagatttaatttacgtcttgagaaa

SEQ ID NO: 573363 - DNA, 120 bp, Artificial Sequence
  ENSG00000171100_17 (sequence is synthesized)
tactatatatacaatatatattttgtgggcttaattgaaacaacattattttaaaatcaaaggggatatatgtttgtggaatggattttcctgaagctgcttaacagttgctttggattc

SEQ ID NO: 573364 - DNA, 120 bp, Artificial Sequence
  ENSG00000171100_18 (sequence is synthesized)
tctaagatgaatccaaatgtgaaagatgcatgttactgccaaaaccaaattgagctcagcttcctaggcattacccaaaagcaaggtgtttaagtaattgccagcttttataccatcatg

SEQ ID NO: 573365 - DNA, 120 bp, Artificial Sequence
  ENSG00000171100_19 (sequence is synthesized)
agtggtgacttaaggagaaatagctgtatagatgagtttttcattatttggaaatttaggggtagaaaatgttttcccctaattttccagagaagcctatttttatatttttaaaaaact

SEQ ID NO: 573366 - DNA, 120 bp, Artificial Sequence
  ENSG00000171100_20 (sequence is synthesized)
gacagggcccagttaaatatgatttgcattttttaaatttgccagttttattttctaaattctttcatgagcttgcctaaaattcggaatggttttcgggttgtggcaaaccccaaagag

SEQ ID NO: 573367 - DNA, 120 bp, Artificial Sequence
  ENSG00000171100_21 (sequence is synthesized)
agcactgtccaaggatgtcgggagcatcctgctgcttaggggaatgttttcgcaaatgttgctctagtcagtccagctcatctgccaaaatgtagggctaccgtcttggatgcatgagct

SEQ ID NO: 573368 - DNA, 120 bp, Artificial Sequence
  ENSG00000171100_22 (sequence is synthesized)
attgctagagcatcatccttagaaatcagtgccccagatgtacatgtgttgagcgtattcttgaaagtattgtgtttatgcatttcaatttcaatggtgttggcttcccctccccacccc

SEQ ID NO: 573369 - DNA, 120 bp, Artificial Sequence
  ENSG00000171100_23 (sequence is synthesized)
acgcgtgcataaaaactggttctacaaatttttacttgaagtaccaggccgtttgctttttcaggttgttttgttttatagtattaagtgaaattttaaatgcacagttctatttgctat

SEQ ID NO: 573370 - DNA, 120 bp, Artificial Sequence
  ENSG00000171100_24 (sequence is synthesized)
ctgaactaattcatttattaagtatatttgtaaaagctaaggctcgagttaaaacaatgaagtgttttacaatgatttgtaaaggactatttataactaatatggttttgttttcaatga

SEQ ID NO: 573371 - DNA, 120 bp, Artificial Sequence
  ENSG00000171100_25 (sequence is synthesized)
tatggttttgttttcaatgaattaagaaagattaaatatatctttgtaaattattttatgtcatagtttaattggtctaccaagtaagacatctcaaatacagtagtataatgtatgaat

SEQ ID NO: 573372 - DNA, 120 bp, Artificial Sequence
  ENSG00000171100_26 (sequence is synthesized)
tattagacattctcttactttttgtaaatgctgtaaatatttcataaattaacaaagtgtcactccataaaaagaaagctaatactaatagcctaaaagattttgtgaaatttcatgaaa

SEQ ID NO: 573373 - DNA, 120 bp, Artificial Sequence
  ENSG00000171100_27 (sequence is synthesized)
actttttaatggcaataatgactaaagacctgctgtaataaatgtattaactgaaacctaacactgttttcagggctgtgagtgtgcatgtgttggaaatgtgcatggtggccatctgat

SEQ ID NO: 573374 - DNA, 120 bp, Artificial Sequence
  ENSG00000171100_28 (sequence is synthesized)
ttctttgcccgggtctgcttcatgtactttttatctcaccggcaaccttgcagggctctcccaaaatttcagcaagattgggcatttaagtgtattaaacagtgcagattttaagagtca

SEQ ID NO: 573375 - DNA, 120 bp, Artificial Sequence
  ENSG00000171100_29 (sequence is synthesized)
tcagtcccgcttactctttagcagtcaggcttagacaaataggctacctttgtttagaagcgttaacacagaactctctgcatccctttcttgattaaagagttcttttgagagcttcat

SEQ ID NO: 573376 - DNA, 120 bp, Artificial Sequence
  ENSG00000171100_30 (sequence is synthesized)
gctcacaagggtagtgatattcttgtgtctgtaccaaagactgagaatgatttaggggaaaaaaatgtggattatctcttgaaagtctctcattggagccataagctctcatggtttaag

SEQ ID NO: 573377 - DNA, 120 bp, Artificial Sequence
  ENSG00000171100_31 (sequence is synthesized)
gttttaagagcaaaatgatttccagtcaatgatgcatgctttaaaatgataaacttaaaggcttgaaggcttaatcattctcctctttgaaatataggagaacatattgctttaaaatat

SEQ ID NO: 573378 - DNA, 120 bp, Artificial Sequence
  ENSG00000171100_32 (sequence is synthesized)
acatcacaaattatcgtctttatttaagaagtttggaaacgccattatttgcatttttaaatgaagaaaagtttaacgtggatggatggacagtttacaatccagtggaagaatacagga

SEQ ID NO: 573379 - DNA, 120 bp, Artificial Sequence; identical to SEQ ID NO: 244761
  ENSG00000171102_0 (sequence is synthesized)

SEQ ID NO: 573380 - DNA, 120 bp, Artificial Sequence
  ENSG00000171102_1 (sequence is synthesized)
gggacctggtacgtgaaggccatggtggtcgataaggactttccggaggacaggaggcccaggaaggtgtccccagtgaaggtgacagccctgggcggtgggaagttggaagccacgttc

SEQ ID NO: 573381 - DNA, 120 bp, Artificial Sequence
  ENSG00000171102_2 (sequence is synthesized)
agctcatgtacctgcaggagctgcccaggagggaccactacatcttttactgcaaagaccagcaccatgggggcctgctccacatgggaaagcttgtgggtaggaattctgataccaacc

SEQ ID NO: 573382 - DNA, 120 bp, Artificial Sequence
  ENSG00000171102_3 (sequence is synthesized)
gggaggccctggaagaatttaagaaattggtgcagcgcaagggactctcggaggaggacattttcacgcccctgcagacgggaagctgcgttcccgaacactaggcagcccccgggtctg

SEQ ID NO: 573383 - DNA, 120 bp, Artificial Sequence
  ENSG00000171102_4 (sequence is synthesized)
cacctccagagcccaccctaccaccagacacagagcctggaccacctggacctaccctccagccatgacccttccctgctcccacccacctgactccaaataaagtccttctcccccagc

SEQ ID NO: 573384 - DNA, 120 bp, Artificial Sequence
  ENSG00000171102_5 (sequence is synthesized)
gcccatcgccccctgcacctgtccccacgcggtccactccccaccatccacccaccaaggatgctcagaggcctgcccagtcattggaggagctgaggtcgctctggagccccgaggttg

SEQ ID NO: 573385 - DNA, 120 bp, Artificial Sequence
  ENSG00000171102_6 (sequence is synthesized)
cccagcagtggccgatgtgggggctgcagagcctggggagggagctctggccctggcctctgccctaccctgcagcctccctgacctctgctcctcttcccagcacagcagcccccgggt

SEQ ID NO: 573386 - DNA, 120 bp, Artificial Sequence; identical to SEQ ID NO: 244769
  ENSG00000171102_7 (sequence is synthesized)

SEQ ID NO: 573387 - DNA, 120 bp, Artificial Sequence
  ENSG00000171102_8 (sequence is synthesized)
accttcatgagggaggataggtgcatccagaagaaaatcctgatgcggaagacggaggagcctggcaaatacagcgcctgcttgtccgcagtcgagatggaccagatcacgcctgccctc

SEQ ID NO: 573388 - DNA, 120 bp, Artificial Sequence
  ENSG00000171103_0 (sequence is synthesized)
actcgtctgcgacggcgccttcgcgaaacactatgctaatggcatggtgccgcggtcctgtcttgctgtgcctgcggcaggggctcggaaccaattcattcctgcacggcctggggcagg

SEQ ID NO: 573389 - DNA, 120 bp, Artificial Sequence
  ENSG00000171103_1 (sequence is synthesized)
agcccttcgagggagctcggtcactgtgttgcaggtcctcgcctagagacctgcgagatggagaaagagagcacgaggcggcacaaaggaaagccccaggagcagagtcttgcccatctc

SEQ ID NO: 573390 - DNA, 120 bp, Artificial Sequence
  ENSG00000171103_2 (sequence is synthesized)
tccctctgagcatctcggacattgggactggatgtctttcgtcactggaaaacctcagactgccgacgctgcgggaagagtcatcccctcgagagctcgaggactcgagcggagaccagg

SEQ ID NO: 573391 - DNA, 120 bp, Artificial Sequence
  ENSG00000171103_3 (sequence is synthesized)
gccggtgcggtcccacacaccagggatccgaggatccttcgatgctctcgcaggcccagtccgctaccgaggtcgaagagcgtcacgtctccccttcttgttcaacttccagagagagac

SEQ ID NO: 573392 - DNA, 120 bp, Artificial Sequence
  ENSG00000171103_4 (sequence is synthesized)
cctttcaggctggggaactgattttagctgagactggggagggagaaacaaaatttaagaaattatttaggttgaacaacttcggactcttaaatagtaactggggggcagtcccgttcg

SEQ ID NO: 573393 - DNA, 120 bp, Artificial Sequence
  ENSG00000171103_5 (sequence is synthesized)
gcaagatcgtggggaagttccccggccagatactgaggagttccttcggtaagcagtacatgctgaggaggccagccttggaagactatgtagtattgatgaaaagagggactgccataa

SEQ ID NO: 573394 - DNA, 120 bp, Artificial Sequence
  ENSG00000171103_6 (sequence is synthesized)
cattcccaaaggatattaatatgattctctcaatgatggatatcaacccaggtgatactgttttggaagctggctcaggctctggtggaatgagcttatttttatccaaagcagttggat

SEQ ID NO: 573395 - DNA, 120 bp, Artificial Sequence
  ENSG00000171103_7 (sequence is synthesized)
gatctggctaagaagaattacaaacactggcgtgattcatggaaattaagtcatgtagaagagtggccagacaatgtggattttattcataaggacatttcaggagcaaccgaagacata

SEQ ID NO: 573396 - DNA, 120 bp, Artificial Sequence
  ENSG00000171103_8 (sequence is synthesized)
aaatctttaacatttgacgcagtagctttggatatgttaaatcctcatgttactttgcctgttttttacccacatcttaagcatggtggtgtatgtgctgtatatgtagtaaacatcaca

SEQ ID NO: 573397 - DNA, 120 bp, Artificial Sequence
  ENSG00000171103_9 (sequence is synthesized)
caggttattgaacttttagatggaattcgcacctgtgaacttgctctttcatgtgaaaagataagcgaggtcattgtcagagattggttggtttgccttgcaaaacagaaaaatggaatt

SEQ ID NO: 573398 - DNA, 120 bp, Artificial Sequence
  ENSG00000171103_10 (sequence is synthesized)
ttagctcaaaaagtagaatctaaaatcaacacagatgtacaactagattctcaagagaaaattggagttaaaggtgagctgtttcaagaggatgaccatgaagaatcgcattctgatttt

SEQ ID NO: 573399 - DNA, 120 bp, Artificial Sequence
  ENSG00000171103_11 (sequence is synthesized)
ccatatggatcatttccctatgttgctagaccagtacactggcaacctggtcatacagcttttcttgtcaagttgaggaaggtcaaaccacaacttaactgagtactccagatgacagta

SEQ ID NO: 573400 - DNA, 120 bp, Artificial Sequence
  ENSG00000171103_12 (sequence is synthesized)
actgacttgaagatggaaaaatatcaaaatagaactttatattgaaaatcactgcttccatagattggcatttttagctattactatgacttatataacttatacatataattttgaaaa

SEQ ID NO: 573401 - DNA, 120 bp, Artificial Sequence
  ENSG00000171103_13 (sequence is synthesized)
taacaactaaaagatgtataacatagcaaaactgcttaaacatcccattttgacacttgtcttgcagttagtttgacattttgtagttaatgattccaaattggtttagttgggccatct

SEQ ID NO: 573402 - DNA, 120 bp, Artificial Sequence
  ENSG00000171103_14 (sequence is synthesized)
cattcttcacttcctgtaaaccactccatagatttgtctttcttcaagaaattagttttctttcctttatttgattgatggtcattgactactgaaataaaatatgcattttaagataaa

SEQ ID NO: 573403 - DNA, 120 bp, Artificial Sequence
  ENSG00000171103_15 (sequence is synthesized)
gtggttgcctctgaagagggagggagattaattggagatcagggataggagatcagacttgtaacattgaactatttgaattatttttttcacatacatgtagtacctttgcaaaataca

SEQ ID NO: 573404 - DNA, 120 bp, Artificial Sequence
  ENSG00000171105_0 (sequence is synthesized)
gcacggggcccagctgacgggccgcgttgtttacgggcccgagcagccctctctcccgccgcccgcccgccacccgccagcccaggtgcccgcccgccagtcagctagtccgtcggtccg

SEQ ID NO: 573405 - DNA, 120 bp, Artificial Sequence
  ENSG00000171105_1 (sequence is synthesized)
cccgccagtcagctagtccgtcggtccgcgcgtccctctgtcccggagcccgcagatcgcgacccagagcgcgcggggccgagagccgagagacagtcccgggcgcagcgcggagctccg

SEQ ID NO: 573406 - DNA, 120 bp, Artificial Sequence
  ENSG00000171105_2 (sequence is synthesized)
ggccccgagatcctgggacggggcccgggccgcagcggccggggggtcggggccaccaccgcaagggcctccgctcagtatttgtagctggcgaagccgcgcgcgcccttcccggggctg

SEQ ID NO: 573407 - DNA, 120 bp, Artificial Sequence
  ENSG00000171105_3 (sequence is synthesized)
ggctgcggcccgcgggtcgcgggcgtggaagagaaggacgcgcggcccccagcgcctcttgggtggccgcctcggagcatgacccccgcgggccagcgccgcgcgctctgatccgaggag

SEQ ID NO: 573408 - DNA, 80 bp, Artificial Sequence
  ENSG00000171105_4 (sequence is synthesized)
gcatgacccccgcgggccagcgccgcgcgctctgatccgaggagaccccgcgctcccgcagccatggccaccgggggccg

SEQ ID NO: 573409 - DNA, 120 bp, Artificial Sequence
  ENSG00000171105_5 (sequence is synthesized)
gggccacctgtaccccggagaggtgtgtcccggcatggatatccggaacaacctcactaggttgcatgagctggagaattgctctgtcatcgaaggacacttgcagatactcttgatgtt

SEQ ID NO: 573410 - DNA, 120 bp, Artificial Sequence
  ENSG00000171105_6 (sequence is synthesized)
caaaacgaggcccgaagatttccgagacctcagtttccccaaactcatcatgatcactgattacttgctgctcttccgggtctatgggctcgagagcctgaaggacctgttccccaacct

SEQ ID NO: 573411 - DNA, 120 bp, Artificial Sequence
  ENSG00000171105_7 (sequence is synthesized)
cacggtcatccggggatcacgactgttctttaactacgcgctggtcatcttcgagatggttcacctcaaggaactcggcctctacaacctgatgaacatcacccggggttctgtccgcat

SEQ ID NO: 573412 - DNA, 120 bp, Artificial Sequence
  ENSG00000171105_8 (sequence is synthesized)
cgagaagaacaatgagctctgttacttggccactatcgactggtcccgtatcctggattccgtggaggataattacatcgtgttgaacaaagatgacaacgaggagtgtggagacatctg

SEQ ID NO: 573413 - DNA, 120 bp, Artificial Sequence
  ENSG00000171105_9 (sequence is synthesized)
tccgggtaccgcgaagggcaagaccaactgccccgccaccgtcatcaacgggcagtttgtcgaacgatgttggactcatagtcactgccagaaagtttgcccgaccatctgtaagtcaca

SEQ ID NO: 573414 - DNA, 120 bp, Artificial Sequence
  ENSG00000171105_10 (sequence is synthesized)
cggctgcaccgccgaaggcctctgttgccacagcgagtgcctgggcaactgttctcagcccgacgaccccaccaagtgcgtggcctgccgcaacttctacctggacggcaggtgtgtgga

SEQ ID NO: 573415 - DNA, 120 bp, Artificial Sequence
  ENSG00000171105_11 (sequence is synthesized)
gacctgcccgcccccgtactaccacttccaggactggcgctgtgtgaacttcagcttctgccaggacctgcaccacaaatgcaagaactcgcggaggcagggctgccaccagtacgtcat

SEQ ID NO: 573416 - DNA, 120 bp, Artificial Sequence
  ENSG00000171105_12 (sequence is synthesized)
tcacaacaacaagtgcatccctgagtgtccctccgggtacacgatgaattccagcaacttgctgtgcaccccatgcctgggtccctgtcccaaggtgtgccacctcctagaaggcgagaa

SEQ ID NO: 573417 - DNA, 120 bp, Artificial Sequence
  ENSG00000171105_13 (sequence is synthesized)
gaccatcgactcggtgacgtctgcccaggagctccgaggatgcaccgtcatcaacgggagtctgatcatcaacattcgaggaggcaacaatctggcagctgagctagaagccaacctcgg

SEQ ID NO: 573418 - DNA, 120 bp, Artificial Sequence
  ENSG00000171105_14 (sequence is synthesized)
cctcattgaagaaatttcagggtatctaaaaatccgccgatcctacgctctggtgtcactttccttcttccggaagttacgtctgattcgaggagagaccttggaaattgggaactactc

SEQ ID NO: 573419 - DNA, 120 bp, Artificial Sequence
  ENSG00000171105_15 (sequence is synthesized)
cttctatgccttggacaaccagaacctaaggcagctctgggactggagcaaacacaacctcaccatcactcaggggaaactcttcttccactataaccccaaactctgcttgtcagaaat

SEQ ID NO: 573420 - DNA, 120 bp, Artificial Sequence
  ENSG00000171105_16 (sequence is synthesized)
ccacaagatggaagaagtttcaggaaccaaggggcgccaggagagaaacgacattgccctgaagaccaatggggaccaggcatcctgtgaaaatgagttacttaaattttcttacattcg

SEQ ID NO: 573421 - DNA, 120 bp, Artificial Sequence
  ENSG00000171105_17 (sequence is synthesized)
gacatcttttgacaagatcttgctgagatgggagccgtactggccccccgacttccgagacctcttggggttcatgctgttctacaaagaggccccttatcagaatgtgacggagttcga

SEQ ID NO: 573422 - DNA, 120 bp, Artificial Sequence
  ENSG00000171105_18 (sequence is synthesized)
cgggcaggatgcgtgtggttccaacagttggacggtggtagacattgacccacccctgaggtccaacgaccccaaatcacagaaccacccagggtggctgatgcggggtctcaagccctg

SEQ ID NO: 573423 - DNA, 120 bp, Artificial Sequence
  ENSG00000171105_19 (sequence is synthesized)
gacccagtatgccatctttgtgaagaccctggtcaccttttcggatgaacgccggacctatggggccaagagtgacatcatttatgtccagacagatgccaccaacccctctgtgcccct

SEQ ID NO: 573424 - DNA, 120 bp, Artificial Sequence
  ENSG00000171105_20 (sequence is synthesized)
ggatccaatctcagtgtctaactcatcatcccagattattctgaagtggaaaccaccctccgaccccaatggcaacatcacccactacctggttttctgggagaggcaggcggaagacag

SEQ ID NO: 573425 - DNA, 120 bp, Artificial Sequence
  ENSG00000171105_21 (sequence is synthesized)
tgagctgttcgagctggattattgcctcaaagggctgaagctgccctcgaggacctggtctccaccattcgagtctgaagattctcagaagcacaaccagagtgagtatgaggattcggc

SEQ ID NO: 573426 - DNA, 120 bp, Artificial Sequence
  ENSG00000171105_22 (sequence is synthesized)
cggcgaatgctgctcctgtccaaagacagactctcagatcctgaaggagctggaggagtcctcgtttaggaagacgtttgaggattacctgcacaacgtggttttcgtccccagaaaaac

SEQ ID NO: 573427 - DNA, 120 bp, Artificial Sequence
  ENSG00000171105_23 (sequence is synthesized)
ctcttcaggcactggtgccgaggaccctaggccatctcggaaacgcaggtcccttggcgatgttgggaatgtgacggtggccgtgcccacggtggcagctttccccaacacttcctcgac

SEQ ID NO: 573428 - DNA, 120 bp, Artificial Sequence
  ENSG00000171105_24 (sequence is synthesized)
cagcgtgcccacgagtccggaggagcacaggccttttgagaaggtggtgaacaaggagtcgctggtcatctccggcttgcgacacttcacgggctatcgcatcgagctgcaggcttgcaa

SEQ ID NO: 573429 - DNA, 120 bp, Artificial Sequence
  ENSG00000171105_25 (sequence is synthesized)
ccaggacacccctgaggaacggtgcagtgtggcagcctacgtcagtgcgaggaccatgcctgaagccaaggctgatgacattgttggccctgtgacgcatgaaatctttgagaacaacgt

SEQ ID NO: 573430 - DNA, 120 bp, Artificial Sequence
  ENSG00000171105_26 (sequence is synthesized)
cgtccacttgatgtggcaggagccgaaggagcccaatggtctgatcgtgctgtatgaagtgagttatcggcgatatggtgatgaggagctgcatctctgcgtctcccgcaagcacttcgc

SEQ ID NO: 573431 - DNA, 120 bp, Artificial Sequence
  ENSG00000171105_27 (sequence is synthesized)
tctggaacggggctgcaggctgcgtgggctgtcaccggggaactacagcgtgcgaatccgggccacctcccttgcgggcaacggctcttggacggaacccacctatttctacgtgacaga

SEQ ID NO: 573432 - DNA, 120 bp, Artificial Sequence
  ENSG00000171105_28 (sequence is synthesized)
ctatttagacgtcccgtcaaatattgcaaaaattatcatcggccccctcatctttgtctttctcttcagtgttgtgattggaagtatttatctattcctgagaaagaggcagccagatgg

SEQ ID NO: 573433 - DNA, 120 bp, Artificial Sequence
  ENSG00000171105_29 (sequence is synthesized)
gccgctgggaccgctttacgcttcttcaaaccctgagtatctcagtgccagtgatgtgtttccatgctctgtgtacgtgccggacgagtgggaggtgtctcgagagaagatcaccctcct

SEQ ID NO: 573434 - DNA, 120 bp, Artificial Sequence
  ENSG00000171105_30 (sequence is synthesized)
tcgagagctggggcagggctccttcggcatggtgtatgagggcaatgccagggacatcatcaagggtgaggcagagacccgcgtggcggtgaagacggtcaacgagtcagccagtctccg

SEQ ID NO: 573435 - DNA, 120 bp, Artificial Sequence
  ENSG00000171105_31 (sequence is synthesized)
agagcggattgagttcctcaatgaggcctcggtcatgaagggcttcacctgccatcacgtggtgcgcctcctgggagtggtgtccaagggccagcccacgctggtggtgatggagctgat

SEQ ID NO: 573436 - DNA, 120 bp, Artificial Sequence
  ENSG00000171105_32 (sequence is synthesized)
ggctcacggagacctgaagagctacctccgttctctgcggccagaggctgagaataatcctggccgccctccccctacccttcaagagatgattcagatggcggcagagattgctgacgg

SEQ ID NO: 573437 - DNA, 120 bp, Artificial Sequence
  ENSG00000171105_33 (sequence is synthesized)
gatggcctacctgaacgccaagaagtttgtgcatcgggacctggcagcgagaaactgcatggtcgcccatgattttactgtcaaaattggagactttggaatgaccagagacatctatga

SEQ ID NO: 573438 - DNA, 120 bp, Artificial Sequence
  ENSG00000171105_34 (sequence is synthesized)
aacggattactaccggaaagggggcaagggtctgctccctgtacggtggatggcaccggagtccctgaaggatggggtcttcaccacttcttctgacatgtggtcctttggcgtggtcct

SEQ ID NO: 573439 - DNA, 120 bp, Artificial Sequence
  ENSG00000171105_35 (sequence is synthesized)
ttgggaaatcaccagcttggcagaacagccttaccaaggcctgtctaatgaacaggtgttgaaatttgtcatggatggagggtatctggatcaacccgacaactgtccagagagagtcac

SEQ ID NO: 573440 - DNA, 120 bp, Artificial Sequence
  ENSG00000171105_36 (sequence is synthesized)
tgacctcatgcgcatgtgctggcaattcaaccccaagatgaggccaaccttcctggagattgtcaacctgctcaaggacgacctgcaccccagctttccagaggtgtcgttcttccacag

SEQ ID NO: 573441 - DNA, 120 bp, Artificial Sequence
  ENSG00000171105_37 (sequence is synthesized)
cgaggagaacaaggctcccgagagtgaggagctggagatggagtttgaggacatggagaatgtgcccctggaccgttcctcgcactgtcagagggaggaggcggggggccgggatggagg

SEQ ID NO: 573442 - DNA, 120 bp, Artificial Sequence
  ENSG00000171105_38 (sequence is synthesized)
gtcctcgctgggtttcaagcggagctacgaggaacacatcccttacacacacatgaacggaggcaagaaaaacgggcggattctgaccttgcctcggtccaatccttcctaacagtgcct

SEQ ID NO: 573443 - DNA, 120 bp, Artificial Sequence
  ENSG00000171105_39 (sequence is synthesized)
cagagatcgttcctatacatttctgttcatcttaaggtggactcgtttggttaccaatttaactagtcctgcagaggatttaactgtgaacctggagggcaaggggtttccacagttgct

SEQ ID NO: 573444 - DNA, 120 bp, Artificial Sequence
  ENSG00000171105_40 (sequence is synthesized)
gctcctttggggcaacgacggtttcaaaccaggattttgtgttttttcgttccccccacccgcccccagcagatggaaagaaagcacctgtttttacaaattcttttttttttttttttt

SEQ ID NO: 573445 - DNA, 120 bp, Artificial Sequence
  ENSG00000171105_41 (sequence is synthesized)
ttttgctggtgtctgagcttcagtataaaagacaaaacttcctgtttgtggaacaaaagttcgaaagaaaaaacaaaacaaaaacacccagccctgttccaggagaatttcaagttttac

SEQ ID NO: 573446 - DNA, 120 bp, Artificial Sequence
  ENSG00000171105_42 (sequence is synthesized)
aggttgagcttcaagatggtttttttggttttttttttttctctcatccaggctgaaggattttttttttctttacaaaatgagttcctcaaattgaccaatagctgctgctttcatatt

SEQ ID NO: 573447 - DNA, 120 bp, Artificial Sequence
  ENSG00000171105_43 (sequence is synthesized)
ttggataagggtctgtggtcccggcgtgtgctcacgtgtgtatgcacgtgtgtgtgtccattagacacggctgatgtgtgtgcaaagtatccatgcggagttgatgctttgggaattggc

SEQ ID NO: 573448 - DNA, 120 bp, Artificial Sequence
  ENSG00000171105_44 (sequence is synthesized)
tcatgaaggttcttctcaagggtgcgagctcatccccctctctccttccttcttattgactgggagactgtgctctcgacagattcttcttgtgtcagaagtctagcctcaggtttctac

SEQ ID NO: 573449 - DNA, 120 bp, Artificial Sequence
  ENSG00000171105_45 (sequence is synthesized)
gtttctaccctcccttcacattggtggccaagggaggagcatttcatttggagtgattatgaatcttttcaagaccaaaccaagctaggacattaaaaaaaaaaaaagaaaaagaaagaa

SEQ ID NO: 573450 - DNA, 120 bp, Artificial Sequence
  ENSG00000171105_46 (sequence is synthesized)
atggaaaaaggaaaaaaaaaaagaactgagatgacagagttttgagaatatatttgtaccatatttaatttttaaagtctctggtattagcctcataagttattgactattccccggggt

SEQ ID NO: 573451 - DNA, 120 bp, Artificial Sequence
  ENSG00000171105_47 (sequence is synthesized)
tggcggggagtggggacatgagttggtctgcctgttgtggggccgggaaggggagggagtcaggcacaagtggcctctttgtttggtcttaaaggcatccatttctgggaatgaagccat

SEQ ID NO: 573452 - DNA, 120 bp, Artificial Sequence
  ENSG00000171105_48 (sequence is synthesized)
gttcgctgctaacacttttggatgttgtgaggccacgtggagtgtgtgagagactaggttttatggatggtctggttcaggtaccaggtctgctggaaggttcctgttcggataagctgg

SEQ ID NO: 573453 - DNA, 120 bp, Artificial Sequence
  ENSG00000171105_49 (sequence is synthesized)
tagctacctagctctgagcctgccttcaagaacacctgtgttcatcctctgattctctgtgtgtacctcttgtggcgtttcctctcccgggtgtgaacatcctaaccgttattgtgcaaa

SEQ ID NO: 573454 - DNA, 120 bp, Artificial Sequence
  ENSG00000171105_50 (sequence is synthesized)
cccaagaacgtcagatcccaaagcacaacaacctggatggactttgggaacatctaagcaatgtaagagagaggtgcactgagagtacgtcttggtcccctccaccctgagagcatctga

SEQ ID NO: 573455 - DNA, 120 bp, Artificial Sequence
  ENSG00000171105_51 (sequence is synthesized)
cggtcctcagtactgaactcccggaagctgctctgagcccggtgacctcatctgggccaggtgtggtgcctgagctgaatgctcaggtgcttacagtgttgcaatccctaagagagtaga

SEQ ID NO: 573456 - DNA, 120 bp, Artificial Sequence
  ENSG00000171105_52 (sequence is synthesized)
gtctggaggagaaaccgtgaaaaagaccttacacaccaccaagaacttccgaatgggcgtgaatccaccgtttcttctctttgcaaaaagaaccaccacagctgctcaaagaacacagtg

SEQ ID NO: 573457 - DNA, 120 bp, Artificial Sequence
  ENSG00000171105_53 (sequence is synthesized)
aactcatcactttggttcatcaaaaaatcatcgcccatgcgttattcctgagtgcattttcttacaactttttgactgcttccttttcttcttctcttaagagttgtgggcttaagaatg

SEQ ID NO: 573458 - DNA, 120 bp, Artificial Sequence
  ENSG00000171105_54 (sequence is synthesized)
ggatagagtcataatggcaacctccaagccctctcaattcttgattaagaacacaggtagacatgaatcccaattgtctattgctatcttatttatatgattcgggaaaatacagcatgt

SEQ ID NO: 573459 - DNA, 120 bp, Artificial Sequence
  ENSG00000171105_55 (sequence is synthesized)
aaaaatattgctgaggagcctcagtgattgggtacaagaagcaagagtacagaaattatttttgccaaatttattttgtaaatatgagggtctgtacctaaatttaaaaaaaaaacacgt

SEQ ID NO: 573460 - DNA, 120 bp, Artificial Sequence
  ENSG00000171105_56 (sequence is synthesized)
agaactaggtattttgttctcttcttagtaaatttgtagtggttgtatactacactagctgcaattttcacatttttctaattcagaaaggtttttcttatattaggggaaaaagtattt

SEQ ID NO: 573461 - DNA, 120 bp, Artificial Sequence
  ENSG00000171105_57 (sequence is synthesized)
attttaatatataaaatcactctgaaaatcactctcataaaaaatggagcgcatgtaaatttttatcaaagaaaaataaacaggtgaatgggggatagtgattttcttttttcagcacag

SEQ ID NO: 573462 - DNA, 120 bp, Artificial Sequence
  ENSG00000171105_58 (sequence is synthesized)
tctacctcagtgtattgttaagatgtgattcaatcatggacatctttgagatttcagaattctacctggaaccggtctgaatcagggaacgtgtgtatcagctgattcgaatgccaggga

SEQ ID NO: 573463 - DNA, 120 bp, Artificial Sequence
  ENSG00000171105_59 (sequence is synthesized)
ccagtaagaattttgagggagggagttgggatggagaaggtatggcctttatgcgagcatagatccttttcttcctggctggtaatattcttctctgaatttaatcttcctttaaaaaaa

SEQ ID NO: 573464 - DNA, 120 bp, Artificial Sequence
  ENSG00000171105_60 (sequence is synthesized)
aatcctccatctattgtcactatgttccccaaacataaactaagttccaggctgtcatgatgtatctgatatatggggtaacccagcaaggtgtaccttcctttggtgagagatggctgc

SEQ ID NO: 573465 - DNA, 120 bp, Artificial Sequence
  ENSG00000171105_61 (sequence is synthesized)
cggggcaaagacgggctttgattcagagcaagcattcccacctgttccatggaatccccctgaagtgagcacaaaggtgccctgggctccctgatggtttatgcccactcctttcaggct

SEQ ID NO: 573466 - DNA, 120 bp, Artificial Sequence
  ENSG00000171105_62 (sequence is synthesized)
ggtgatgcaccttacacacaaacacctaatgcaatgtctttttaaattctccaagtgggatgggagcatgtgagggaaattccaatccaaaacccattaatgtgctgaacgctttttttt

SEQ ID NO: 573467 - DNA, 120 bp, Artificial Sequence
  ENSG00000171105_63 (sequence is synthesized)
tttttttttttttttttgcaacaacaccttggacctctgtgttggggtttgactgacctcaagctgatattattggaccttgtgcagctttgataacccatgtgagagtctaggcaggac

SEQ ID NO: 573468 - DNA, 120 bp, Artificial Sequence
  ENSG00000171105_64 (sequence is synthesized)
cagtggggcccaaatcttgctgctcttgtacttttaggcactgcccttgcagactcacctttctccacctgccctggagaaaggtagggtgtgctgggcctgccccttgcaaatgggatt

SEQ ID NO: 573469 - DNA, 120 bp, Artificial Sequence
  ENSG00000171105_65 (sequence is synthesized)
caccagtttcatttatttgactctactgccacagtgaaaagagcaaacagctattgggttgcaaacctcctttgacattaggaaatgttgactttgtaacaataaaactttggtcctaga

SEQ ID NO: 573470 - DNA, 120 bp, Artificial Sequence
  ENSG00000171105_66 (sequence is synthesized)
aagacacggttgtcctgggagtttgtagtgttaagttgcaacaacaacaacaaaaagcaacaaaaccagcttaggataacactttttgttgcttgttcttaaagatgtctcactatgatt

SEQ ID NO: 573471 - DNA, 120 bp, Artificial Sequence
  ENSG00000171105_67 (sequence is synthesized)
aaaacccttttcattaatgtagtgaaagccacacaggagttccttcttccaggaggagaataccaagcacatcactttctctctgcatcagtgatgtcaaatacgcatcagaaaatgttc

SEQ ID NO: 573472 - DNA, 120 bp, Artificial Sequence
  ENSG00000171105_68 (sequence is synthesized)
aggttttaggagctgtcctaggtgctgtttcatcattggaagcagtgagaaagagaagcactgctgcttgtctggatataggctgaggatgattgagagaagctgtgggaactgacacaa

SEQ ID NO: 573473 - DNA, 120 bp, Artificial Sequence
  ENSG00000171105_69 (sequence is synthesized)
gggtctgcataggtcatcctgtgaccctggggactatgttaccaactgacagacagatctttcactgtatcctagcagggcaggtagtccaccaagaaatgtgcttattggattgggagg

SEQ ID NO: 573474 - DNA, 120 bp, Artificial Sequence
  ENSG00000171105_70 (sequence is synthesized)
tgtttatttgtagtctgctgtaacacgtgtgaaagagcaggagcgtcatcagcatatgacttgcgctggtcatccggtaaatggatgtgctgtagtcccagtgctaatcatttctctcct

SEQ ID NO: 573475 - DNA, 120 bp, Artificial Sequence
  ENSG00000171105_71 (sequence is synthesized)
tcacagtgggtggaagtttagggttaaatgtcctttgaatgtcacctggtgagtccttgacaccttaggctcttcagaaacaatggttttgttgaggatggggaacagggaatgccgatt

SEQ ID NO: 573476 - DNA, 120 bp, Artificial Sequence
  ENSG00000171105_72 (sequence is synthesized)
ttatatacatggtacacagagaggggtgtcacttcagaaaatcttccagcatgttcttcagaatattaatttatatgcgaggtgaggttgggaatgaaaagaacaggtcagcactttttt

SEQ ID NO: 573477 - DNA, 120 bp, Artificial Sequence
  ENSG00000171105_73 (sequence is synthesized)
ttttcctagaacatacaaaagaacatggtggactttcagggagtgcaatggaaggtgaatatttccttaagggtccccgagaaatgggagtgaggggaggggacacaatggctttttgag

SEQ ID NO: 573478 - DNA, 120 bp, Artificial Sequence
  ENSG00000171105_74 (sequence is synthesized)
cttacttttaccttctgatactagtcaaggtccagaaccagccaccagccaaatttctatctgggtgcgggccactgaaaatccttgttaaaaaccagatcacaaatctggggctcttgg

SEQ ID NO: 573479 - DNA, 120 bp, Artificial Sequence
  ENSG00000171105_75 (sequence is synthesized)
tcccattggagaaggaaggaagagcctcaaaataagtgtgcacccatgcacatattcaggaacagcttgtttagtctttacactttgcctgaaagttgcttctcctcgtccctttgtgtg

SEQ ID NO: 573480 - DNA, 120 bp, Artificial Sequence
  ENSG00000171105_76 (sequence is synthesized)
cctgggtggcctcggccctgtgcgttggcaacgcaggatcaaatgtgctgcagcttttgcagaaaacaactcagaaacacaaaaccccccaacagctcaattattattttttcaatgttt

SEQ ID NO: 573481 - DNA, 120 bp, Artificial Sequence
  ENSG00000171105_77 (sequence is synthesized)
tcctacaagagccaagtagcaccatgtacagaagacgcctttttttttggaatattgaaatcgttctgcatgtaaaatatgggataatgacctgtttatattaaaattctgattaaatta

SEQ ID NO: 573482 - DNA, 120 bp, Artificial Sequence
  ENSG00000171105_78 (sequence is synthesized)
ggattattgcctcaaagggcgagtccagtcatcagctccgctgtaagctgttggccctgcattcaagtaaccagaaccacccgtgagagctgccaccagtaatgtcactcgaagcttcct

SEQ ID NO: 573483 - DNA, 120 bp, Artificial Sequence
  ENSG00000171105_79 (sequence is synthesized)
tttttttttttttaattccgaaagtctaaatctgtaattaccaagggaccatttaaacatggttttatttgtaattgtcacaaagttaatatcattaaaaggaaactcactaaggacaaa

SEQ ID NO: 573484 - DNA, 120 bp, Artificial Sequence
  ENSG00000171105_80 (sequence is synthesized)
ccttcagagttgcacttggtacctccttcctctgctgaaattttgattccagtgcttctctcatcaggtactgtgctattagtacttaaagccttgatacctgacttcgcaggaagatgg

SEQ ID NO: 573485 - DNA, 120 bp, Artificial Sequence
  ENSG00000171105_81 (sequence is synthesized)
tatctgtctgctgtccgggcaggtatgtctgctctcctagaccagggctgagcacgctgcatccaggccacagggtgctgtgtgtgacatagacaccagggagggaggagaaccctggtg

SEQ ID NO: 573486 - DNA, 120 bp, Artificial Sequence
  ENSG00000171105_82 (sequence is synthesized)
caattggcttggtgttggtggaaggtcattacttagggaccgagaggtagtgggacccagagacggcagaagggtgggtggagtctgaatggagccctttcctgggtggaggaagagatc

SEQ ID NO: 573487 - DNA, 120 bp, Artificial Sequence
  ENSG00000171105_83 (sequence is synthesized)
ttgcagtttcgaaatttcgaggggaattttatcaggaagagcaaataatcgcacaaaaggggaaaaatggacaaaactcagcatttgcctttcttacctctcctgagctggtctccacgt

SEQ ID NO: 573488 - DNA, 88 bp, Artificial Sequence
  ENSG00000171105_84 (sequence is synthesized)
gcatttgcctttcttacctctcctgagctggtctccacgtgagttccaaaacaaactccgttagacgattaacattttttttcagagt

SEQ ID NO: 573489 - DNA, 69 bp, Artificial Sequence
  ENSG00000171105_85 (sequence is synthesized)
ctcactctatcgtccaggctggagtgcggtggtgcgatttcagctcaccctttccgggttcgcaccacg

SEQ ID NO: 573490 - DNA, 120 bp, Artificial Sequence
  ENSG00000171105_86 (sequence is synthesized)
gctgagcgcagtggtgtaagcctgtggtcccagctagttgggaagccgaggtggtagggttgcttgaggccagcctgggcaacataatgagaccccatcgctaccaaaaaaaaaaaaaaa

SEQ ID NO: 573491 - DNA, 120 bp, Artificial Sequence
  ENSG00000171109_0 (sequence is synthesized)
ttgatgaatgtcactggtgtgtcatcagtttgcatgtctatcatccactttagttggtgcttttctaactttatctccctctagtagcataatggcagaacctgtttctccactgaagca

SEQ ID NO: 573492 - DNA, 120 bp, Artificial Sequence
  ENSG00000171109_1 (sequence is synthesized)
ctttgtgctggctaagaaggcgattactgcaatctttgaccagttactggagtttgttactgaaggatcacattttgttgaagcaacatataagaatccggaacttgatcgaatagccac

SEQ ID NO: 573493 - DNA, 120 bp, Artificial Sequence
  ENSG00000171109_2 (sequence is synthesized)
tgaagatgatctggtagaaatgcaaggatataaagacaagctttccatcattggtgaggtgctatctcggagacacatgaaggtggcattttttggcaggacaagcagtgggaagagctc

SEQ ID NO: 573494 - DNA, 120 bp, Artificial Sequence
  ENSG00000171109_3 (sequence is synthesized)
tgttatcaatgcaatgttgtgggataaagttctccctagtgggattggccatataaccaattgcttcctaagtgttgaaggaactgatggagataaagcctatcttatgacagaaggatc

SEQ ID NO: 573495 - DNA, 120 bp, Artificial Sequence
  ENSG00000171109_4 (sequence is synthesized)
agatgaaaaaaagagtgtgaagacagttaatcaactggcccatgcccttcacatggacaaagatttgaaagctggctgtcttgtacgtgtgttttggccaaaagcaaaatgtgccctctt

SEQ ID NO: 573496 - DNA, 120 bp, Artificial Sequence
  ENSG00000171109_5 (sequence is synthesized)
gagagatgacctggtgttagtagacagtccaggcacagatgtcactacagagctggatagctggattgataagttttgcctagatgctgatgtctttgttttggtcgcaaactctgaatc

SEQ ID NO: 573497 - DNA, 120 bp, Artificial Sequence
  ENSG00000171109_6 (sequence is synthesized)
aacactaatgaatacggaaaaacacttttttcacaaggtgaatgagcggctttccaagcctaatattttcattctcaataatcgttgggatgcctctgcatcagagccagaatatatgga

SEQ ID NO: 573498 - DNA, 120 bp, Artificial Sequence
  ENSG00000171109_7 (sequence is synthesized)
agacgtacgcagacagcacatggaaagatgcctgcatttcttggtggaggagctcaaagttgtaaatgctttagaagcacagaatcgtatcttctttgtttcagcaaaggaagttcttag

SEQ ID NO: 573499 - DNA, 120 bp, Artificial Sequence
  ENSG00000171109_8 (sequence is synthesized)
tgctagaaagcaaaaagcacaggggatgccagaaagtggtgtggcacttgctgaaggatttcatgcaagattacaggaatttcagaattttgaacaaatctttgaggagtgtatctcgca

SEQ ID NO: 573500 - DNA, 120 bp, Artificial Sequence
  ENSG00000171109_9 (sequence is synthesized)
gtcagcagtgaaaacaaagttcgaacagcacactatcagagctaaacagatactagctactgtgaaaaacataatggattcagtaaacctggcagctgaagataaaaggcattattcagt

SEQ ID NO: 573501 - DNA, 120 bp, Artificial Sequence
  ENSG00000171109_10 (sequence is synthesized)
ggaagagagggaagaccaaattgatagactggactttattcgaaaccagatgaaccttttaacactggatgttaagaaaaaaatcaaggaggttaccgaggaggtggcaaacaaagtttc

SEQ ID NO: 573502 - DNA, 120 bp, Artificial Sequence
  ENSG00000171109_11 (sequence is synthesized)
catagaggatggtatgggaagaaatttggctgatcgatgcaccgatgaagtaaacgccttagtgcttcagacccagcaagaaattattgaaaatttgaagccattacttccagctggtat

SEQ ID NO: 573503 - DNA, 120 bp, Artificial Sequence
  ENSG00000171109_12 (sequence is synthesized)
acaggataaactacatacactgatcccttgcaagaaatttgatctcagttataatctaaattaccacaagttatgttcagattttcaagaggatattgtatttcgtttttccctgggctg

SEQ ID NO: 573504 - DNA, 120 bp, Artificial Sequence
  ENSG00000171109_13 (sequence is synthesized)
gtcttcccttgtacatcgatttttgggccctagaaatgctcaaagggtgctcctaggattatcagagcctatctttcagctccctagatctttagcttctactcccactgctcctaccac

SEQ ID NO: 573505 - DNA, 120 bp, Artificial Sequence
  ENSG00000171109_14 (sequence is synthesized)
tccagcaacgccagataatgcatcacaggaagaactcatgattacattagtaacaggattggcgtccgttacatctagaacttctatgggcatcattattgttggaggagtgatttggaa

SEQ ID NO: 573506 - DNA, 120 bp, Artificial Sequence
  ENSG00000171109_15 (sequence is synthesized)
aactataggctggaaactcctatctgtttcattaactatgtatggagctttgtatctttatgaaagactgagctggaccacccatgccaaggagcgagcctttaaacagcagtttgtaaa

SEQ ID NO: 573507 - DNA, 120 bp, Artificial Sequence
  ENSG00000171109_16 (sequence is synthesized)
ctatgcaactgaaaaactgaggatgattgttagctccacgagtgcaaactgcagtcaccaagtaaaacaacaaatagctaccacttttgctcgcctgtgccaacaagttgatattactca

SEQ ID NO: 573508 - DNA, 120 bp, Artificial Sequence
  ENSG00000171109_17 (sequence is synthesized)
aaaacagctggaagaagaaattgctagattacccaaagaaatagatcagttggagaaaatacaaaacaattcaaagctcttaagaaataaagctgttcaacttgaaaatgagctggagaa

SEQ ID NO: 573509 - DNA, 120 bp, Artificial Sequence
  ENSG00000171109_18 (sequence is synthesized)
ttttactaagcagtttctaccttcaagcaatgaagaatcctaacaatagagattgctttggtgaccatgataggaggaaacgaaacttgtaagattggaacagttgttatttttatgaaa

SEQ ID NO: 573510 - DNA, 120 bp, Artificial Sequence
  ENSG00000171109_19 (sequence is synthesized)
ttactttaaatatgaattgtactaactgtacctaaatagcaaagccctgtgtagattctggtaatgatctgtctcagggtatgtgtatttttgaagagtgttatgtccttagttttaatt

SEQ ID NO: 573511 - DNA, 120 bp, Artificial Sequence
  ENSG00000171109_20 (sequence is synthesized)
ttgagtaaagaaaaggctaaaatcatgaattagttacaagcaacagtaccaacttatgtgacccctgaggggtggggctgtgagctcttaatttgtttttgattctgaaaaactctgctt

SEQ ID NO: 573512 - DNA, 120 bp, Artificial Sequence
  ENSG00000171109_21 (sequence is synthesized)
cctggcatccaggagttagagattgagcctttcatcttctttctcaaaactagtttttgatgctttctttcatgggaatagtcacttttttatttagtaaatcgcattgctggaaccacc

SEQ ID NO: 573513 - DNA, 120 bp, Artificial Sequence
  ENSG00000171109_22 (sequence is synthesized)
actccccctgcctcctctccgcctttaacttctcgggaagatgaggcagtttggcatctgtggccgagttgctgttgccgggtgatagttggagcggagacttagcataatggcagaacc

SEQ ID NO: 573514 - DNA, 120 bp, Artificial Sequence
  ENSG00000171109_23 (sequence is synthesized)
tcacagtcacgttgccatcatggcagctatgtgaaacactaataaatgtgtttttactttttattcccgttaaaactgatgtaaaacaggataaaggcttgttatagtcacttataagta

SEQ ID NO: 573515 - DNA, 120 bp, Artificial Sequence
  ENSG00000171109_24 (sequence is synthesized)
tctgggtctaagtaatttccttagatgtttctaaagaaacattttcagctttgctcccattatgattccaataaggaacgctttcctagtgcaattttaggagtaaagtttgaagagata

SEQ ID NO: 573516 - DNA, 120 bp, Artificial Sequence
  ENSG00000171109_25 (sequence is synthesized)
aaaatagccaaagataggagacgtctgaattttgaatgataaacagtgatgttttaaaaaagctgttgttcttcaggaggcatttgcctaggatattgctggattataccccattggagg

SEQ ID NO: 573517 - DNA, 120 bp, Artificial Sequence
  ENSG00000171109_26 (sequence is synthesized)
cttttaattttatttgtatgaattttccaggatttcattaaaaattattattgtattttttaccttaatgaaagattttgggttcaaatatctttctatattaaaagctgattgagtctg

SEQ ID NO: 573518 - DNA, 120 bp, Artificial Sequence
  ENSG00000171109_27 (sequence is synthesized)
tacatatgtaaattatgcctagtggaggttctgttgactttcttccccactgtggaagaggccagttttgcctccatttgcacattcatttcagttatttctgatccataaatataacat

SEQ ID NO: 573519 - DNA, 120 bp, Artificial Sequence
  ENSG00000171109_28 (sequence is synthesized)
ttacaaaattcttccttgagctggtggaaatgcctcaccagtttcctctttaatgaatcaaataaaatctttaactgatgttaaaaaaaattgattgaaactcagatggaatggaaatgt

SEQ ID NO: 573520 - DNA, 120 bp, Artificial Sequence
  ENSG00000171109_29 (sequence is synthesized)
acaaaaatgacaccattctaggaatttgctagacaaaatgtaggactaccagatcagtatctcctagacacttgttagaaatgcacaatcccggggaacgcagtacatttggccacatgt

SEQ ID NO: 573521 - DNA, 120 bp, Artificial Sequence
  ENSG00000171109_30 (sequence is synthesized)
agtttatgtttccttttcatgggagggataaaatttaaagctttttttttctttgaatacagtccttccttttctatgccttttaaggcttctagatgctattcagcctttttacagcag

SEQ ID NO: 573522 - DNA, 120 bp, Artificial Sequence
  ENSG00000171109_31 (sequence is synthesized)
gtgcaactctatttttcaaggtatcttagaagataacactaggccattgaagcctttcaaaaatatatttttatgcaaattgacacgagtgcagtatactaatgcaaattaattttggtg

SEQ ID NO: 573523 - DNA, 120 bp, Artificial Sequence
  ENSG00000171109_32 (sequence is synthesized)
tttagcttttattgctcatttataacccaagaaatggtacagaccacagtaagtgggattaggtaacaactacaacatggaaaaacagtgtctaagatcacgtactgctaatttaggtta

SEQ ID NO: 573524 - DNA, 120 bp, Artificial Sequence
  ENSG00000171109_33 (sequence is synthesized)
caaaactcaaggctgtaacctttatatgaaagtacttaagcttgaaagttcataatagtttggtatcacctcattagtatagtacagtggttctcaaagtttggtcctgggtcatcgaca

SEQ ID NO: 573525 - DNA, 86 bp, Artificial Sequence
  ENSG00000171109_34 (sequence is synthesized)
agtacagtggttctcaaagtttggtcctgggtcatcgacattacttctttttctttctgagacagggtctcagtctgtcacccagg

SEQ ID NO: 573526 - DNA, 120 bp, Artificial Sequence
  ENSG00000171109_35 (sequence is synthesized)
caggcacacgccaccatgcctggctagtttttgtaaagacgaggtttccccatgttgtgcaggctggtcttgaactcacagactcaagtgatccttttacctcagcctcccaaactgttg

SEQ ID NO: 573527 - DNA, 120 bp, Artificial Sequence
  ENSG00000171109_36 (sequence is synthesized)
ctcagcctcccaaactgttgggataacaggtgtaagccaccacacacagctataatcaaccttcaaacttataaaaagtgtggatccttgggtctgaacccagacctatggagtcagaca

SEQ ID NO: 573528 - DNA, 120 bp, Artificial Sequence
  ENSG00000171109_37 (sequence is synthesized)
gtaggtttgaggcccagcaatctatggtttaacaagccatccaggtgtttctgatgcacagtgaaattggggtaccactggtattaggtttggtatggcaactttttcatcacttgtttt

SEQ ID NO: 573529 - DNA, 120 bp, Artificial Sequence
  ENSG00000171109_38 (sequence is synthesized)
ggcaactttttcatcacttgttttatgtagttgtctgatcaattgtgaaaacataatgaatgttggaaatggaacagtaaaataacgaaagccaactttttttttttttttttttttttt

SEQ ID NO: 573530 - DNA, 120 bp, Artificial Sequence
  ENSG00000171109_39 (sequence is synthesized)
gagccaccgcgcccggccgaaagccaactcttatgcctagaaatatgtgcacctatgaccaagcccatgaattatacaggaattatgtaattatgagtgatgtacttcaaagttattgca

SEQ ID NO: 573531 - DNA, 120 bp, Artificial Sequence
  ENSG00000171109_40 (sequence is synthesized)
catacacttgtttactttgtatgtttgcaggattaaactttgtataatctttttacaaaaattttttttcagtatgcaagcttgcaagatgaaaataaaacctgtttgcctgatagttga

SEQ ID NO: 573532 - DNA, 120 bp, Artificial Sequence
  ENSG00000171109_41 (sequence is synthesized)
atgcgccaccacacccggccaaaaagcactgttaatatttctaactttgaaagccatcactaagtattttgagtactctaaatttttttttcacttcataactaaattagtgaaaaaata

SEQ ID NO: 573533 - DNA, 120 bp, Artificial Sequence
  ENSG00000171109_42 (sequence is synthesized)
attattggtaatatttatgtctacaaggtcatgtctggtttgttttttcattcatgactggtgaagagcttattttcctttaggcattccattgaaggtaaaacatttaccattcttatc

SEQ ID NO: 573534 - DNA, 120 bp, Artificial Sequence
  ENSG00000171109_43 (sequence is synthesized)
gggaagaccaaattgatagactggactttattcgaaaccagatgaaccttttaacactggatgttaagaaaaaaatcaaggaggttaccgaggaggtggcaaacaaagtgggtaacagta

SEQ ID NO: 573535 - DNA, 120 bp, Artificial Sequence
  ENSG00000171109_44 (sequence is synthesized)
gcttcatgattaaaataacctggatggaaattatttttgataatgctaaaaatgttattcctgttactttaaaagaatgttttcagatttttcaatttaatttttttgaataattgataa

SEQ ID NO: 573536 - DNA, 120 bp, Artificial Sequence
  ENSG00000171109_45 (sequence is synthesized)
aagttttttttttccttgagtcatgctaatagatggttcaatacatgaatgagtcccttgctgaaatgctttaggacttcagactaccctgaacgttgattactctttatactgaaatag

SEQ ID NO: 573537 - DNA, 120 bp, Artificial Sequence
  ENSG00000171115_0 (sequence is synthesized)
ggctttgctcagagcttgtagcggcgccacaatctctgtcctctcaggaacaggaactggcttgacgtccttttcctgccctatccaagcccctgttcttgcagcccttctgaagctcag

SEQ ID NO: 573538 - DNA, 120 bp, Artificial Sequence
  ENSG00000171115_1 (sequence is synthesized)
cctggcaccggccccggcgccccagcccctggccaagcctctgctgtcatttctcctccctcctctcagtctgcagctgcgggacgggccgggctcctcagtttctgctgtgttgtgacc

SEQ ID NO: 573539 - DNA, 120 bp, Artificial Sequence
  ENSG00000171115_2 (sequence is synthesized)
ccacgaggcgctcagcacccagggaaggcgcgtgtgtccccgatgctggctcctccctgagccccgacggctctcgaggttctgagcctgtggcctgcacagggaacttcctctccgact

SEQ ID NO: 573540 - DNA, 120 bp, Artificial Sequence
  ENSG00000171115_3 (sequence is synthesized)
gcatttatgcctctgtggatgtgaaggctatttctagaaatctcttcctttgcagaaacacccgaaaccctcctgccaggaagaccagggcctgggaagagggtcgctctccggccattc

SEQ ID NO: 573541 - DNA, 120 bp, Artificial Sequence
  ENSG00000171115_4 (sequence is synthesized)
tcccctcaccctcctcaccttcctcacatcctgtgccctgggggaccagcagctgcttccacccagaacaagcgggagcctgtgtcaggaaagcatgtcagagcagagctgccagatgtc

SEQ ID NO: 573542 - DNA, 120 bp, Artificial Sequence
  ENSG00000171115_5 (sequence is synthesized)
cgaactgcggctcctcctcctgggaaaatgccgctcgggaaaaagtgccacaggaaatgccattctgggcaaacatgtgttcaagtccaagttcagtgatcagacagtgatcaaaatgtg

SEQ ID NO: 573543 - DNA, 120 bp, Artificial Sequence
  ENSG00000171115_6 (sequence is synthesized)
ccagagagagagttgggtcctgagagaaaggaaggttgtggtaattgacacccctgaccttttctcctcaatagcttgtgctgaagacaagcaacgcaacatccaacactgcttggagct

SEQ ID NO: 573544 - DNA, 120 bp, Artificial Sequence
  ENSG00000171115_7 (sequence is synthesized)
ctctgctcccagcctccatgctctgctcttggtaattgccatcggccatttcacaagggaggatgaggaaacagccaagggcatccaacaagtgtttggagctgaagccaggaggcacat

SEQ ID NO: 573545 - DNA, 120 bp, Artificial Sequence
  ENSG00000171115_8 (sequence is synthesized)
cattattgtcttcactcggaaggatgatttgggggatgacttgctgcaagatttcattgaaaaaaacaaacctctcaagcagttggttcaagactatgagggccgatactgcattttcaa

SEQ ID NO: 573546 - DNA, 120 bp, Artificial Sequence
  ENSG00000171115_9 (sequence is synthesized)
caacaagaccaatagtaaggatgagcagatcacccaggtgttggagctccttcgcaaggttgagtctttggtgaatacgaacggaggaccctatcatgtgaacttcaaaactgaaggcag

SEQ ID NO: 573547 - DNA, 120 bp, Artificial Sequence
  ENSG00000171115_10 (sequence is synthesized)
caggtttcaagattgtgtgaatgaagctgcatctcaagagggagacaagccacagggcccaagggaaaggcagctgcagtccacaggacccgagcagaatccggggacatcagaactgac

SEQ ID NO: 573548 - DNA, 120 bp, Artificial Sequence
  ENSG00000171115_11 (sequence is synthesized)
agtcctccttgtggggaaacgcggtgctggaaaaagtgcagcaggaaacagcattctggggaggcaggcctttcagaccggatttagtgagcagtcagtaacccagagcttcttgtctga

SEQ ID NO: 573549 - DNA, 120 bp, Artificial Sequence
  ENSG00000171115_12 (sequence is synthesized)
gagcagaagctggagaaaaaagaaagtttcgatcattgatgctccggacatctcatctttaaagaacattgactcagaagttagaaaacacatctgtacaggcccccatgccttcctgct

SEQ ID NO: 573550 - DNA, 120 bp, Artificial Sequence
  ENSG00000171115_13 (sequence is synthesized)
ggtgacaccactgggcttttacactaagaatgatgaggcagtgctgagcaccatccaaaacaattttggagaaaaattctttgagtacatgatcatacttcttaccaggaaagaagattt

SEQ ID NO: 573551 - DNA, 120 bp, Artificial Sequence
  ENSG00000171115_14 (sequence is synthesized)
aggggatcaggatctagatacgttcttaagaaacagcaataaagctctctatggtctcatccagaagtgtaaaaacagatatagtgccttcaactaccgggcaacaggagaagaagagca

SEQ ID NO: 573552 - DNA, 120 bp, Artificial Sequence
  ENSG00000171115_15 (sequence is synthesized)
aaggcaggcggacgagctcctggaaaaaattgagagcatggtgcatcagaatgggaacaagcattgtgttttcagagaaaaagaaaccctgaacattgtccttgtggggagaagcgggac

SEQ ID NO: 573553 - DNA, 120 bp, Artificial Sequence
  ENSG00000171115_16 (sequence is synthesized)
tgggaagagtgcgaccgggaactctatcctggggagcctcgtcttcacctctcggctccgggcccagccagtcaccaagaccagccagagtggcaggaggacatgggacggacaggaggt

SEQ ID NO: 573554 - DNA, 120 bp, Artificial Sequence
  ENSG00000171115_17 (sequence is synthesized)
ggacacattttttgtcctggtgttccagctgggacgattcactgaagaggacaaaacagctgtggcgaaactggaggccatctttggagcagactttacgaaatacgcgattatgctgtt

SEQ ID NO: 573555 - DNA, 120 bp, Artificial Sequence
  ENSG00000171115_18 (sequence is synthesized)
cacccggaaggaagacctaggggcggggaatttggaagacttcatgaagaactcagataacaaagcccttcggcgcatttttaaaaagtgtgggcggcgagtttgtgcttttaacaacaa

SEQ ID NO: 573556 - DNA, 120 bp, Artificial Sequence
  ENSG00000171115_19 (sequence is synthesized)
agaaacaggccaggcccaggaaacccaggtgaaagctcttttaacaaaggtcaatgatctgagaaaagaaagtgggtggtccgggtatccccatacacaggagaacgtcagcaaactaat

SEQ ID NO: 573557 - DNA, 120 bp, Artificial Sequence
  ENSG00000171115_20 (sequence is synthesized)
taaaaatgtccaggaaatgtcccaagccgaaaaactccttaaaaatttaataggtattttacaataggtagccgaagtgcctggggtctcttcaattagagacaccctcaggttgggggg

SEQ ID NO: 573558 - DNA, 120 bp, Artificial Sequence
  ENSG00000171115_21 (sequence is synthesized)
aggggcggggcatggtacaacctgtgggaagggaagcgggttcatggctttgagggcctgagaggcaaatgcatcccgccttgtgatgtatcagctatttgtagataaataaattgcagg

SEQ ID NO: 573559 - DNA, 120 bp, Artificial Sequence
  ENSG00000171115_22 (sequence is synthesized)
tgggggcgaatagtagggtattataaaggagaaagaagatacaaggtggggaaatctggaaaaagatttcagacattaggctgataataagtggtagaatcaagtcacaagaatcacctc

SEQ ID NO: 573560 - DNA, 120 bp, Artificial Sequence
  ENSG00000171115_23 (sequence is synthesized)
acttgtgtaggtaggttggaatcaggatagacactgtgatcaaggctgaggccacctgggatgagaatatagatagtcgtacaacaacccaggggatccagatacatgagaccagggcag

SEQ ID NO: 573561 - DNA, 120 bp, Artificial Sequence
  ENSG00000171115_24 (sequence is synthesized)
cgttcagcacactcctgggcatggcggaagcaggaagcagactccagagggcctccctgttgtccagggccgttggctccctgagctctcctgtctcctttgggatgcgacttagggcta

SEQ ID NO: 573562 - DNA, 120 bp, Artificial Sequence
  ENSG00000171115_25 (sequence is synthesized)
gagtgttcttttcttcacacgttagccattccttacggctcttcacgttccacgcctagatgtgaagtgggacatagtcttccattgctggctgtccctgaggaaacagacatgagtctt

SEQ ID NO: 573563 - DNA, 120 bp, Artificial Sequence
  ENSG00000171115_26 (sequence is synthesized)
ggaggttctgaatgattttattgctaattatcacagtgacatagactagaacagaaattagaagcatagtaagattgccaaaatcagagaatcttgcaaagttctgtaattctaagtgtt

SEQ ID NO: 573564 - DNA, 120 bp, Artificial Sequence
  ENSG00000171115_27 (sequence is synthesized)
gttctagatttcctctagagaaggttattagaatctccattgcgtttctctttctccttctctttcccttgaggttaggaaacaggttaaaactcagagaactccaataataatggttta

SEQ ID NO: 573565 - DNA, 120 bp, Artificial Sequence
  ENSG00000171115_28 (sequence is synthesized)
aaaacatcaggggcttcctgtatctcctgtcaggaagccgaggaataagcaggctggggctggtgggcgtcaacatcccagttttgttctatctttctgtcccacctgcactgggatgtg

SEQ ID NO: 573566 - DNA, 120 bp, Artificial Sequence
  ENSG00000171115_29 (sequence is synthesized)
gcttctacactcgaatttgcttcttggtttcaagacagtggtgttctttccatagctgagcagattattttgagaggtgggtgatatgtgagagagaaatctggaaccttcttctgggta

SEQ ID NO: 573567 - DNA, 120 bp, Artificial Sequence
  ENSG00000171115_30 (sequence is synthesized)
gatacaggataagatagatacagggtaaaatgttgagcactttgtacatgctttgagagcataatctttgtcatctgtttttttcccctagacaatatcaggttaccgtcaacattaatc

SEQ ID NO: 573568 - DNA, 120 bp, Artificial Sequence
  ENSG00000171115_31 (sequence is synthesized)
catttaaaaggacatggactgttgccattaatacttttggattccatataacccttaacacaataacttctagaaaatgtgtgtgccgtagacacaaagaagggaacaatagacaccagg

SEQ ID NO: 573569 - DNA, 120 bp, Artificial Sequence
  ENSG00000171115_32 (sequence is synthesized)
gtatacttgagggtggagggtggcaggagggtgaagattgaaaagctgcctattgcgtgttatgctggtttcctgggtgacaaaattacctgtacaccacacccctgtgacacacaactt

SEQ ID NO: 573570 - DNA, 120 bp, Artificial Sequence
  ENSG00000171115_33 (sequence is synthesized)
actcatgtaacaaacctgtgcatgtaccccttgaacctgaaataaaaattggaaagtaaaaaaaagtgtgtaaatatatttagttgaatcaaataataaagatgaatcattatgaattca

SEQ ID NO: 573571 - DNA, 120 bp, Artificial Sequence
  ENSG00000171116_0 (sequence is synthesized)
ctgcctccgactccccactggactgcatggcgacggcgtgtggtggggcagtcagctaagccatttgcctaaggggctgtcgggcatctgcgtgctggggaccgacagtgtgggtgtgtt

SEQ ID NO: 573572 - DNA, 120 bp, Artificial Sequence
  ENSG00000171116_1 (sequence is synthesized)
aggaggatctgtatggagcacattgctgcctctggctaggacagggtggaaagggtggcgtggctacagcctgacccatgggcaccgtcctaccctttgttctgtgcttccgagtgtcag

SEQ ID NO: 573573 - DNA, 120 bp, Artificial Sequence
  ENSG00000171116_2 (sequence is synthesized)
tcatgtgctggggtctgtgggcccatgactcagacggtgagctctgaccttcctgagccagggctttgctgtagttgtgcctggctcaggagctctaggacaaggggaccgctccaggtc

SEQ ID NO: 573574 - DNA, 120 bp, Artificial Sequence
  ENSG00000171116_3 (sequence is synthesized)
tgcatctacggtgtggcagggcccctcggcactcttgtgcactagtgtcatctttcccattgaaatgactgtgaggaccagaatgtgcacatgcagatgggcagctacttgtctgccttg

SEQ ID NO: 573575 - DNA, 120 bp, Artificial Sequence
  ENSG00000171116_4 (sequence is synthesized)
gccctttattacacaacttgctgggggtggagatgccaccccccggcagtcagagcccctttatgatgtcatggggctggttacatgactgccaaggggtgctgctggccacactgcact

SEQ ID NO: 573576 - DNA, 120 bp, Artificial Sequence
  ENSG00000171116_5 (sequence is synthesized)
agcaagtttgccagatggaggacaagcgatcattgagtatggctcgctgtgaagaaagaaattcgagaggacaggatcatggcttggaaagggtgcctttccctccccagttgcagtcag

SEQ ID NO: 573577 - DNA, 120 bp, Artificial Sequence
  ENSG00000171116_6 (sequence is synthesized)
agacctaccttcacccagcagatccttcccctgcctgggacgacccggggtccactgggagccctaacttgaggctgctgacagaagaaatcgctttccaacctctggccgaggaagctt

SEQ ID NO: 573578 - DNA, 120 bp, Artificial Sequence
  ENSG00000171116_7 (sequence is synthesized)
cgttcagaaggccgcaccctgacggtgacgtcccgccccagggagaagataatctcctctccctcccctttccacagaaactgtggagactggtcagcagcaaccagttttcgtccatct

SEQ ID NO: 573579 - DNA, 120 bp, Artificial Sequence
  ENSG00000171116_8 (sequence is synthesized)
ctttgaaaaggagattctcaaaagggacgtcgcacacaaagtgtttgccacaacttcgataaagagcttcttccgccagctaaacttgtatggcttccgaaaacggcgtcaatgcacttt

SEQ ID NO: 573580 - DNA, 120 bp, Artificial Sequence
  ENSG00000171116_9 (sequence is synthesized)
caggaccttcacccgcattttctccgcaaaaaggctggtctccatcttgaataagttagagttctactgccatccttactttcaaagagactcccctcacctcctcgtgaggatgaagag

SEQ ID NO: 573581 - DNA, 120 bp, Artificial Sequence
  ENSG00000171116_10 (sequence is synthesized)
aagagtgggtgtcaagtctgcaccaagacatcaggaggaggacaagccagaagctgctggatcctgtctggcaccagcagacactgagcaacaagatcacacgtctccgaatgagaatga

SEQ ID NO: 573582 - DNA, 120 bp, Artificial Sequence
  ENSG00000171116_11 (sequence is synthesized)
ccaggtcacaccgcaacaccgggaaccggccggtcccaacacccaaatcaggagtggctctgctccaccagcaactcctgtgatggtgcctgattccgccgtggcgagtgacaacagtcc

SEQ ID NO: 573583 - DNA, 120 bp, Artificial Sequence
  ENSG00000171116_12 (sequence is synthesized)
agtgacccagccggccggcgagtggtcagagggcagccaggctcacgtcactccggtggccgctgtccctgggcctgcagcgctgcccttcctctatgtccctggatctcccactcagat

SEQ ID NO: 573584 - DNA, 120 bp, Artificial Sequence
  ENSG00000171116_13 (sequence is synthesized)
gaattcttacgggcctgtggtggcccttcccacagcgtcccgtagtacccttgccatggacaccacaggacttcctgcacctggcatgctgcccttttgccatctctgggtaccggtgac

SEQ ID NO: 573585 - DNA, 120 bp, Artificial Sequence
  ENSG00000171116_14 (sequence is synthesized)
cctagtggctgctggggctgcacagcctgctgcctccatggtcatgttcccccatctcccagctctgcaccaccattgcccccacagccaccgcacgtcacagtacatgccagctagcga

SEQ ID NO: 573586 - DNA, 120 bp, Artificial Sequence
  ENSG00000171116_15 (sequence is synthesized)
tgggccccaggcgtacccagactacgcagaccagagcacatagagggcagcatttgggcagaatatgtgctggtcaataaatgtgtcagaaaatgagtaattttctgactgcacaaaaaa

SEQ ID NO: 573587 - DNA, 120 bp, Artificial Sequence
  ENSG00000171119_0 (sequence is synthesized)
atacgccacactcagtctggcctcggggcctttgcactggctgtgtcccctgcctgtgatgccattctcctctgcctggccaactcctacgtttattcaagtctggaccttgtcatcggc

SEQ ID NO: 573588 - DNA, 120 bp, Artificial Sequence
  ENSG00000171119_1 (sequence is synthesized)
tcctcaggaaggcactccgggacccccagatgggggcggttccctgtgactcctggcacggaggccaaccccttccttgttcaatggttccttgagggaccattcccatgtgattatcga

SEQ ID NO: 573589 - DNA, 120 bp, Artificial Sequence
  ENSG00000171119_2 (sequence is synthesized)
ccattcggcaggcgttcaaagtcaaaggccccacactgagtcctggcccagcgccctgtgcccgttggctgctggagggacagacggggcgtgcggctgaccatcccgtgcccgcaggct

SEQ ID NO: 573590 - DNA, 120 bp, Artificial Sequence
  ENSG00000171119_3 (sequence is synthesized)
gaggatgcagcgctggaaggcggcggccttggcctcagtgctctgcagctccgtgctgtccatctggatgtgtcgagagggcctgcttctcagccaccgcctcggacctgcgctggtccc

SEQ ID NO: 573591 - DNA, 120 bp, Artificial Sequence
  ENSG00000171119_4 (sequence is synthesized)
gacgcccggattgcccgcctggcccagtaccgtgcactcctgcagggggccccggatgcgatggagctgcgcgagctgacgccctgggctgggcggcccccaggtccgcgccgtcgggcg

SEQ ID NO: 573592 - DNA, 120 bp, Artificial Sequence
  ENSG00000171119_5 (sequence is synthesized)
gcggcggcgcgcgcgtgcgcggttgggggcgcggccttgcgggctgcgcgagctggaggtgcgcgtgagcgagctgggcctgggctacgcgtccgacgagacggtgctgttccgctactg

SEQ ID NO: 573593 - DNA, 120 bp, Artificial Sequence
  ENSG00000171119_6 (sequence is synthesized)
cgagacggtgctgttccgctactgcgcaggcgcctgcgaggctgccgcgcgcgtctacgacctcgggctgcgacgactgcgccagcggcggcgcctgcggcgggagcgggtgcgcgcgca

SEQ ID NO: 573594 - DNA, 120 bp, Artificial Sequence
  ENSG00000171119_7 (sequence is synthesized)
cctacgaggacgaggtgtccttcctggacgcgcacagccgctaccacacggtgcacgagctgtcggcgcgcgagtgcgcctgcgtgtgaccctacctcactcggccggcgcggcggccac

SEQ ID NO: 573595 - DNA, 120 bp, Artificial Sequence
  ENSG00000171119_8 (sequence is synthesized)
tccccccgcctcgacggcaccactggccggccccgcgaaagactgcgcgtgcgtagagcacgccggcgcggccccgggactctcgcgataactgtactgagataaagtgtggcaactcga

SEQ ID NO: 573596 - DNA, 120 bp, Artificial Sequence
  ENSG00000171121_0 (sequence is synthesized)
tgccctgcgagaatgtatctcatcctttgctggagcaggtttgcaggcacagtggagagaggagagaagaaatgaagggacacttatgcagaaccatgagtggccagagaggaggagaag

SEQ ID NO: 573597 - DNA, 120 bp, Artificial Sequence
  ENSG00000171121_1 (sequence is synthesized)
gagggtgagaggagcaaagaagccatgacaacttcataattctgagtggactgggcagtggccagaaattctggtggtggatatgctgcctttccaacaggtgaatatgaaagaataagt

SEQ ID NO: 573598 - DNA, 120 bp, Artificial Sequence
  ENSG00000171121_2 (sequence is synthesized)
caaaccctgttcaggacgctgttaattccaaatgtgaactttttgagtcattctttccatgtggaattcaaaggagaatgtaaacaaattttcaggagggacgtgcaatatccctgaaag

SEQ ID NO: 573599 - DNA, 120 bp, Artificial Sequence
  ENSG00000171121_3 (sequence is synthesized)
ataacaaagttcgtaacacttatttacatacaacattctctagttattgattaaacagatctctacagacttgcatgaggcaacatttcttaggcttgtttgctacaatatctttaaaaa

SEQ ID NO: 573600 - DNA, 120 bp, Artificial Sequence
  ENSG00000171121_4 (sequence is synthesized)
tacttgattacacatcactttagcttatttagatggacttttcaccaagctctgaactgggatttcattttgttgcattcatcctgctcacgagacacaggacagcctttcctgcctcag

SEQ ID NO: 573601 - DNA, 120 bp, Artificial Sequence
  ENSG00000171121_5 (sequence is synthesized)
ggaagaagagagagacagactacagtgatggagacccactagatgtgcacaagaggctgccatccagtgctggagaggaccgagccgtgatgctggggtttgccatgatgggcttctcag

SEQ ID NO: 573602 - DNA, 120 bp, Artificial Sequence
  ENSG00000171121_6 (sequence is synthesized)
tgctcagcattcagagagaagaatcgacctgcactgccatccacacagatatcatggacgactggctggactgtgccttcacctgtggtgtgcactgccacggtcaggggaagtacccgt

SEQ ID NO: 573603 - DNA, 120 bp, Artificial Sequence
  ENSG00000171121_7 (sequence is synthesized)
gtcttcaggtgtttgtgaacctcagccatccaggtcagaaagctctcctacattataatgaagaggctgtccagataaatcccaagtgcttttacacacctaagtgccaccaagatagaa

SEQ ID NO: 573604 - DNA, 120 bp, Artificial Sequence
  ENSG00000171121_8 (sequence is synthesized)
atgatttgctcaacagtgctctggacataaaagaattcttcgatcacaaaaatggaacccccttttcatgcttctacagtccagccagccaatctgaagatgtcattcttataaaaaagt

SEQ ID NO: 573605 - DNA, 120 bp, Artificial Sequence
  ENSG00000171121_9 (sequence is synthesized)
atgaccaaatggctatcttccactgtttattttggccttcactgactctgctaggtggtgccctgattgttggcatggtgagattaacacaacacctgtccttactgtgtgaaaaatata

SEQ ID NO: 573606 - DNA, 120 bp, Artificial Sequence
  ENSG00000171121_10 (sequence is synthesized)
gcactgtagtcagagatgaggtaggtggaaaagtaccttatatagaacagcatcagttcaaactgtgcattatgaggaggagcaaaggaagagcagagaaatcttaagacggtggccaaa

SEQ ID NO: 573607 - DNA, 120 bp, Artificial Sequence
  ENSG00000171121_11 (sequence is synthesized)
ttaaagtgctggccttcagatgtctgtgatttctgcaactgaggacctaattatgcctgtctgcaaactaataatgtaaaaggtaataattaaagtatcatattttcatgtgggaaaaaa

SEQ ID NO: 573608 - DNA, 120 bp, Artificial Sequence
  ENSG00000171121_12 (sequence is synthesized)
gcagcaaaccacgcaggtccttcttgatcatctagaactgaccgctccgccttgccaggagtctgcagaaccacgtggctagcctgcctgaagttctcacctctccaggaaggcgggggg

SEQ ID NO: 573609 - DNA, 120 bp, Artificial Sequence
  ENSG00000171121_13 (sequence is synthesized)
cttctaatggctgcagctgcgctgggggctgggggctcccgctgggactccacttccgtggatgtctaagcttcacctttcttgcgcccgcaggggcatgactcaggtgaaagggagcca

SEQ ID NO: 573610 - DNA, 120 bp, Artificial Sequence
  ENSG00000171121_14 (sequence is synthesized)
tacagagaggtgtgggatgtcagaacatccaagtcagaccatcaggaaagctttagacagcaatagcctaaaaaaccatgacttgttggcaccaggaggagagccgggggacttcaatcc

SEQ ID NO: 573611 - DNA, 120 bp, Artificial Sequence
  ENSG00000171121_15 (sequence is synthesized)
agaaagcagagaagataccagaggagggaacgagaagggcaaaagcaaagaagaccgtaccatgtcctaagctgaggcaggcggcaggcgtggtgcacaggaagtctgagtgtgaggggc

SEQ ID NO: 573612 - DNA, 120 bp, Artificial Sequence
  ENSG00000171121_16 (sequence is synthesized)
ataaatacatacaaattcaccatcttttctaatcccaatctctttccaaatgagctaaggaagcactgttttttttcctgtatagcaaaatgagttcaagatattctttgcctaatttca

SEQ ID NO: 573613 - DNA, 120 bp, Artificial Sequence
  ENSG00000171121_17 (sequence is synthesized)
gctctagctagaaccagtcaatatggaaataaacaatgagggtatctaatctactgaacactgaaccatcagcctaactctatgcaatatagtcatactaaaatatttctcataaaaaag

SEQ ID NO: 573614 - DNA, 120 bp, Artificial Sequence
  ENSG00000171121_18 (sequence is synthesized)
ttcttaacagtttgttcactatacaaagacaaaaatctggtagaaaacttaagaaaacatggagctaacatatttattatagttttttttttttttcctttttgagatggagttttgctc

SEQ ID NO: 573615 - DNA, 84 bp, Artificial Sequence
  ENSG00000171121_19 (sequence is synthesized)
agttttttttttttttcctttttgagatggagttttgctcgtcgcccaggctggagcacagtggcacagtcttggctcactgtg

SEQ ID NO: 573616 - DNA, 120 bp, Artificial Sequence
  ENSG00000171121_20 (sequence is synthesized)
aggcatgagccactgcgcttggctttagtttgttctttaccagtctagacagcagaggaaagctgctgcctagaaaattcactaagtttagagttactagtatttagccttgtcatgtac

SEQ ID NO: 573617 - DNA, 120 bp, Artificial Sequence
  ENSG00000171121_21 (sequence is synthesized)
catgtaatttttctttcagtaacatttttctagttaattaagcttttcataagctcatttcactttgtgcactttctggtgggaaaaatgggccagaaatatgaagaagctatactggat

SEQ ID NO: 573618 - DNA, 120 bp, Artificial Sequence
  ENSG00000171121_22 (sequence is synthesized)
tttaacattcatctcagatgatccacatcgtattaggctggtgcaaaagtaattccagtttttgctgttaacttttaatggcgaaaaaccgcaattatttttgcatcaacctaatagaaa

SEQ ID NO: 573619 - DNA, 120 bp, Artificial Sequence
  ENSG00000171121_23 (sequence is synthesized)
agaagtcccacatggatagtcaacaattgtctgtactttaattaatgaatcaaccatggttattaaatgatgtcataaggctctcaacaaatgctttccaggttgattaagccgaatcta

SEQ ID NO: 573620 - DNA, 120 bp, Artificial Sequence
  ENSG00000171121_24 (sequence is synthesized)
tgagtggaaaagagattttggtctgattttccaaagtgcctcaaagtatctttaaaattttattatactcaaaaatcttaaattatggacagtggaatgagacatttgaagctacttttg

SEQ ID NO: 573621 - DNA, 120 bp, Artificial Sequence
  ENSG00000171121_25 (sequence is synthesized)
tatgtagatgtaatcaaacaaaaaactgattctaagtcagtttaatcccttttagcaattaatttcgacacatattactaaattagctgaatacagcaatattgacttgatgagtaatga

SEQ ID NO: 573622 - DNA, 120 bp, Artificial Sequence
  ENSG00000171121_26 (sequence is synthesized)
ataatcttggtgttttcctttctagtgtgcaatggtggaaagaacatgtgtctcagagtaggatttatttgactttgtaggccataattacaactttgggcaaataagctaacctgtgta

SEQ ID NO: 573623 - DNA, 120 bp, Artificial Sequence
  ENSG00000171121_27 (sequence is synthesized)
aacctttcttttctcatctataaaatggggataacccgttctttcacgcagttgttattttatggaataagcaaagtagggcaggtgaaactttagcttagcttctagcatctagtagca

SEQ ID NO: 573624 - DNA, 120 bp, Artificial Sequence
  ENSG00000171121_28 (sequence is synthesized)
gtgctcaaaaatgttagatcatttatttaaaaatctgctaggttataacattcagtgagccttggtacttttcactggacagctggtatagaggctagggatagggagctgcagttcatt

SEQ ID NO: 573625 - DNA, 120 bp, Artificial Sequence
  ENSG00000171121_29 (sequence is synthesized)
ttccatgcccctacctgagttctcttggctaaatgtgatacgcatttaaggcccagaacctgctgtttaaaaggttgtggtaaactattttgtataccaaagacttctctgtaataaagt

SEQ ID NO: 573626 - DNA, 120 bp, Artificial Sequence
  ENSG00000171121_30 (sequence is synthesized)
atgtaagtacacatgaacatttgatgtgcacgcacattttaaatcatctgcacattgagattctacacttttctcaagggcacatctctattccgtttttgtaaatttgacttctaccta

SEQ ID NO: 573627 - DNA, 120 bp, Artificial Sequence
  ENSG00000171121_31 (sequence is synthesized)
acaatatgcagttgctgggattttttttttccctaacaaattcaaaactgctaatttaaaatataaagcgtgtgtttcaattaccacagttttccatttagataggagctacctgattca

SEQ ID NO: 573628 - DNA, 120 bp, Artificial Sequence
  ENSG00000171121_32 (sequence is synthesized)
ttccagcaaagagagagattatccctggagaacaaagtcaattcaaaattatttaaaccatttggcaaataaataaaatttaagtaattatttgcttaattgctcagaaatactaagttg

SEQ ID NO: 573629 - DNA, 120 bp, Artificial Sequence
  ENSG00000171121_33 (sequence is synthesized)
ttaatgcctatgtgcattaatggtcaaagaaaagcccacacttaccttttgcaatgtttatgagaactgaaagcaaaaccagtttgcttctagcctaacttcatttctaggttctgatct

SEQ ID NO: 573630 - DNA, 120 bp, Artificial Sequence
  ENSG00000171121_34 (sequence is synthesized)
tcaaacgacttggaaaaaagtctacttacctattgcatatacatacatacattcatacatatatgtatatacatatatttcttaaaatacaagcatataattctttatgcttaaaggaag

SEQ ID NO: 573631 - DNA, 120 bp, Artificial Sequence
  ENSG00000171121_35 (sequence is synthesized)
gtagaaaaattggcttttaaggtataatagtttcagattttcaatcaagtattcttagtcattactgaaaagaactcaaattcagctaaattttgattattagcaacaccggcttgcttt

SEQ ID NO: 573632 - DNA, 120 bp, Artificial Sequence
  ENSG00000171121_36 (sequence is synthesized)
tcaaaaggaatggcaaaagagaattatcacagttttttgcttatgtagtacactaaggattgtttggacacaaaaagtaatttttctttttttttttaataaacagcgtgatgttacaga

SEQ ID NO: 573633 - DNA, 120 bp, Artificial Sequence
  ENSG00000171121_37 (sequence is synthesized)
ctgcagagttaaagaaaagcagacattgacagtttctgatgagcataaacagtaagtgcagtcacaggccaaacttcttgctaggaacagcaagactgggaagaggtcttaaatttagtg

SEQ ID NO: 573634 - DNA, 120 bp, Artificial Sequence
  ENSG00000171121_38 (sequence is synthesized)
atactgttattattctatattctcaatatagtaacacatgcatcttgctgtgtcaaatgctttctgggccatcattaaaaggacattaaaaacgtttttcttctaatgaatgcagtatac

SEQ ID NO: 573635 - DNA, 120 bp, Artificial Sequence
  ENSG00000171121_39 (sequence is synthesized)
cacaggacttcaattcactgaatgacaaaatatagagaaataaacttgctacaattaatggggccaaaagggtggttcgaatttcttgataaagcttccaggtgaacatctgacgtgtta

SEQ ID NO: 573636 - DNA, 120 bp, Artificial Sequence
  ENSG00000171121_40 (sequence is synthesized)
gtagtcttcttttggtagtgccacattccccaaggtattaaaatgttatgctccaaaagggtatattcttttagattttattcaacccaattaggtctgaggactgaatcacactgaaac

SEQ ID NO: 573637 - DNA, 120 bp, Artificial Sequence
  ENSG00000171121_41 (sequence is synthesized)
cattaacttcatttgaaactcaaaacatttttgaaatcagatgaaggccaagttctccaacctctcttaggaacataagttaaattgaacaagggacttttaaaaatgaaataaaaacaa

SEQ ID NO: 573638 - DNA, 120 bp, Artificial Sequence
  ENSG00000171121_42 (sequence is synthesized)
aattaaataaaaatgaaataaatagataatgattttggaaattcatactagaattaagtttagtctaattatattttaatatgaaacaatgaaggttttctgcctccttgccaacctaga

SEQ ID NO: 573639 - DNA, 120 bp, Artificial Sequence
  ENSG00000171121_43 (sequence is synthesized)
aaaattgacaaaaataagaatacctaaaagtatacatggttcttagcataaccacaaaattattatagtgacagattaaataaggttgcagatagattcatagactttaactggctaaaa

SEQ ID NO: 573640 - DNA, 120 bp, Artificial Sequence
  ENSG00000171121_44 (sequence is synthesized)
aaatacatttaaaaaccttttctgtacttacctacatgaggaatggagtatactgttggtagaaaaatcatttacctaactactgtatacgcacaagggactaatttttttcctccacta

SEQ ID NO: 573641 - DNA, 120 bp, Artificial Sequence
  ENSG00000171121_45 (sequence is synthesized)
aaactcttatatgtagttgtgtacaaattaagtcagaaaatttcctcatggctcacacctgtcactttatgctaactagcaaggctggaatattaacatacctaaaatcaagcagaagaa

SEQ ID NO: 573642 - DNA, 120 bp, Artificial Sequence
  ENSG00000171121_46 (sequence is synthesized)
atggcactgcactaataaaaaggaggtgcaaaaccttaagtggaataggtgcatgaagtttatttaaagactaacatcccaacttgggaaactcctaataaattctaaactcttccgaat

SEQ ID NO: 573643 - DNA, 120 bp, Artificial Sequence
  ENSG00000171121_47 (sequence is synthesized)
tttagaaccttgatatttctttacaccttttataaaagatgcctcttgactagggctaagcaagcagtgtgtacacaaacagaattgtgtgcaagtatacacacaccaaatgcactaata

SEQ ID NO: 573644 - DNA, 120 bp, Artificial Sequence
  ENSG00000171121_48 (sequence is synthesized)
atgaagaagagagaacaaaatgaatttcaaatgccgaattcgggaacctcctcaaactattgcctttttcaaatggctggaccaacgattaaacttcagccaagtttttttcttaaggtc

SEQ ID NO: 573645 - DNA, 120 bp, Artificial Sequence
  ENSG00000171121_49 (sequence is synthesized)
ttccatatcattaaaaacaaggcatgccaactctgactttataaatctaaaattcagtgatctgcacagtttctgagcttgaagtattgaattgtgactcatctatttttttttcccatt

SEQ ID NO: 573646 - DNA, 120 bp, Artificial Sequence
  ENSG00000171121_50 (sequence is synthesized)
ttccttctgaggtagagttaccaatccaattttatcaggaccacagatattttgagctaaaccccatgatcttttcatacagtaaaaataatttttatgaaaaaagaaagcaggcttccc

SEQ ID NO: 573647 - DNA, 120 bp, Artificial Sequence
  ENSG00000171121_51 (sequence is synthesized)
aggccatggcacatagatatatttacaatttttaatgtaataattaaaaatggtattgtttatattttaaaaaacagcccagctgtattattctgtcaccaagaattattaattgaggat

SEQ ID NO: 573648 - DNA, 120 bp, Artificial Sequence
  ENSG00000171121_52 (sequence is synthesized)
gctgtcaatgctgaattttatagttcagccttcacaatcccatccatgatgaagagttgattctcttacggtatacaatatactctcacaactttcagccttctcttaaagacatgcccc

SEQ ID NO: 573649 - DNA, 120 bp, Artificial Sequence
  ENSG00000171121_53 (sequence is synthesized)
aaatgagcaggatggatataaagaatgtaattcattcaaacaactcctccctgttctgccccctcccctcacattcccctcttctcaaaaacatctgaagtatgaaagttgtctttaaat

SEQ ID NO: 573650 - DNA, 120 bp, Artificial Sequence
  ENSG00000171121_54 (sequence is synthesized)
agtaaaagcaccacaatctattaacaccacatattatctttaaacttaaatattttagtgatgtcttggacatcaaaataatttcttaaggtggactcttgagtatgtgggtccagccca

SEQ ID NO: 573651 - DNA, 120 bp, Artificial Sequence
  ENSG00000171121_55 (sequence is synthesized)
ggtctgcagtttgtgcagacatagaaaaaagaggaactttaaatattcagaaaaagttaacaggctagctttaaaatactgctggaaattaaatttcttcagagttggcaagcatgggct

SEQ ID NO: 573652 - DNA, 120 bp, Artificial Sequence
  ENSG00000171121_56 (sequence is synthesized)
attgatcaaagtatgaattaaacggatttacatcattaagaaaaaacaaatccgtgttattgtgctgtgaaatttccatgatgcctttcaaataggctgctcacaatttttttataattc

SEQ ID NO: 573653 - DNA, 120 bp, Artificial Sequence
  ENSG00000171121_57 (sequence is synthesized)
caaatcactcgatttttgatggaaaaaagaatacagatggactgtgttttacctatgtgaaagtcaccaatccatttaaaataaaatccaagagggcatatacagtctaatcaagtcatc

SEQ ID NO: 573654 - DNA, 120 bp, Artificial Sequence
  ENSG00000171121_58 (sequence is synthesized)
attttcctgattaataagaactacactttacacaaaatactttatcagcagctgttttcatcaaaaaatcaagtcagtttcacagttgaaaaagttacacattaaaatattttacaattc

SEQ ID NO: 573655 - DNA, 120 bp, Artificial Sequence
  ENSG00000171121_59 (sequence is synthesized)
attatatattcaccaggttcccattttctaatgggcttttaatataaagcagaatagaagggaaaatctcaaagttgattactttgacactaagttttacataggacactaagaaccaca

SEQ ID NO: 573656 - DNA, 120 bp, Artificial Sequence
  ENSG00000171121_60 (sequence is synthesized)
aaaagcttaggttctattgtaaaatagcaaccaaattccattcttcttttaaaaatccaattagaaacatcttttttaaaaaaacaaattccacaataagagtaacagatttcaaattaa

SEQ ID NO: 573657 - DNA, 120 bp, Artificial Sequence
  ENSG00000171121_61 (sequence is synthesized)
cagtagtctaaaaatcttcaaaataaatggttttgtatagctgagaatatggtagaaagtgaaagcataattttccaacagtcatttcttactacagtgtgtttaaaattatttttatta

SEQ ID NO: 573658 - DNA, 120 bp, Artificial Sequence
  ENSG00000171121_62 (sequence is synthesized)
cttttagactttttctcaaaataattattcaaggaaatatttcttaagtggcccaataaaactgtagagccaatagtcagttacaccatattcaaggacaaggatagtcagctatagata

SEQ ID NO: 573659 - DNA, 120 bp, Artificial Sequence
  ENSG00000171121_63 (sequence is synthesized)
ggaactgtctaaaccacgagaactgatctctgatactgaagtacccagaagtggctatattatcactgacttgaaacagatcttagtcacccatgtagcatttaattcaatgtttggttc

SEQ ID NO: 573660 - DNA, 120 bp, Artificial Sequence
  ENSG00000171121_64 (sequence is synthesized)
tttgcctcatttctttcttaggtcacaatctatagtctttatagaatttgtctacatttcttctaatagaattaatttggttgtagtaacttttgaaaataaatgtaaatggtgaaatcg

SEQ ID NO: 573661 - DNA, 120 bp, Artificial Sequence
  ENSG00000171121_65 (sequence is synthesized)
gttcctggttctccagcaggaactgagagcaagggtcaggaggcgacaggtccaagtacagtagacactcaaagtgaaccctcagatatgaaagagccagatgaagaaaagaatgaccaa

SEQ ID NO: 573662 - DNA, 120 bp, Artificial Sequence
  ENSG00000171121_66 (sequence is synthesized)
cagggagaggcattggactcattgcagaagagaaagaacaagaaaaagaaaaagaagaggaaaaaatccccagtacccatagaaacccttaaagatgtttaaaaagagttaacttatcag

SEQ ID NO: 573663 - DNA, 120 bp, Artificial Sequence
  ENSG00000171121_67 (sequence is synthesized)
aacacagatttaagtgaaattaaggaagaagagcaggtaaagtctactgacagaaagtcagcagtggaagcccaaaacgaggtgactgaaaatccaaaacagaaaattgcagcagaaagc

SEQ ID NO: 573664 - DNA, 120 bp, Artificial Sequence
  ENSG00000171121_68 (sequence is synthesized)
agtgaaaatgttgattgtccagagaatcctaaaatgaagttggatggaaaacttgaccaagaaggcaatgatgtaaaaacagcagctgaggaggtactagctggtagagacacattagat

SEQ ID NO: 573665 - DNA, 120 bp, Artificial Sequence
  ENSG00000171121_69 (sequence is synthesized)
tttgaggatgtcacagttcaatcatcaggcccgagggctggtggtgaagaattagatgaaggtgttgcaaaagataatgctaaaatagctggtgccacttaaagcaatcctgaagaacca

SEQ ID NO: 573666 - DNA, 120 bp, Artificial Sequence
  ENSG00000171124_0 (sequence is synthesized)
gttcccacttcctccccgccccaggaaacctgccatggcctcctggtgagctgtcctcatccactgctcgctgcctctccagatcttcagttgcttcaggccatttgaacgtatatgagc

SEQ ID NO: 573667 - DNA, 120 bp, Artificial Sequence
  ENSG00000171124_1 (sequence is synthesized)
gatggcttagcttgggctcagaggcctgaaaatcgcccccaccaatcacctgtttcccccaatctaccctcctgaaggtcactgacaaagacttcattgtctcctaggagaggctgccat

SEQ ID NO: 573668 - DNA, 120 bp, Artificial Sequence
  ENSG00000171124_2 (sequence is synthesized)
taggagaggctgccatatatccagggctgacgtaattccatcttaatatcagttacattataaaaatttacctcgtgcctgaggccccagagcccaagggtgcaaagcagtaattggtca

SEQ ID NO: 573669 - DNA, 120 bp, Artificial Sequence
  ENSG00000171124_3 (sequence is synthesized)
aagttcaacttccctcccactctgggctcaggctgtcccctgagggcctgtgttttgagtctctttccagaaccttggtgtgaacttaggtcttggcgtcgggatcccttttcgtcacac

SEQ ID NO: 573670 - DNA, 120 bp, Artificial Sequence
  ENSG00000171124_4 (sequence is synthesized)
tcaggtgacctacagggagctccgctcgacactgcaaggcttagaccagttcggtccaacagagaaagcaggcaaccaccatgtcatttgaaaacagtttcatcgggatataattcgcaa

SEQ ID NO: 573671 - DNA, 120 bp, Artificial Sequence
  ENSG00000171124_5 (sequence is synthesized)
cccatacagtgaatccatttaagatactctgacccatggatcccctgggtgcagccaagccacaatggccatggcgccgctgtctggccgcactgctatttcagctgctggtggctgtgt

SEQ ID NO: 573672 - DNA, 120 bp, Artificial Sequence
  ENSG00000171124_6 (sequence is synthesized)
gtttcttctcctacctgcgtgtgtcccgagacgatgccactggatcccctagggctcccagtgggtcctcccgacaggacaccactcccacccgccccaccctcctgatcctgctacgga

SEQ ID NO: 573673 - DNA, 120 bp, Artificial Sequence
  ENSG00000171124_7 (sequence is synthesized)
catggcctttccacatccctgtggctctgtcccgctgttcagagatggtgcccggcacagccgactgccacatcactgccgaccgcaaggtgtacccacaggcagacatggtcatcgtgc

SEQ ID NO: 573674 - DNA, 120 bp, Artificial Sequence
  ENSG00000171124_8 (sequence is synthesized)
accactgggatatcatgtccaaccctaagtcacgcctcccaccttccccgaggccgcaggggcagcgctggatctggttcaacttggagccaccccctaactgccagcacctggaagccc

SEQ ID NO: 573675 - DNA, 120 bp, Artificial Sequence
  ENSG00000171124_9 (sequence is synthesized)
tggacagatacttcaatctcaccatgtcctaccgcagcgactccgacatcttcacgccctacggctggctggagccgtggtccggccagcctgcccacccaccgctcaacctctcggcca

SEQ ID NO: 573676 - DNA, 120 bp, Artificial Sequence
  ENSG00000171124_10 (sequence is synthesized)
gagcctgcaggctcatctcaaggtggacgtgtacggacgctcccacaagcccctgcccaaggggaccatgatggagacgctgtcccggtacaagttctacctggccttcgagaactcctt

SEQ ID NO: 573677 - DNA, 120 bp, Artificial Sequence
  ENSG00000171124_11 (sequence is synthesized)
gcaccccgactacatcaccgagaagctgtggaggaacgccctggaggcctgggccgtgcccgtggtgctgggccccagcagaagcaactacgagaggttcctgccacccgacgccttcat

SEQ ID NO: 573678 - DNA, 120 bp, Artificial Sequence
  ENSG00000171124_12 (sequence is synthesized)
ccacgtggacgacttccagagccccaaggacctggcccggtacctgcaggagctggacaaggaccacgcccgctacctgagctactttcgctggcgggagacgctgcggcctcgctcctt

SEQ ID NO: 573679 - DNA, 120 bp, Artificial Sequence
  ENSG00000171124_13 (sequence is synthesized)
cagctgggcactggatttctgcaaggcctgctggaaactgcagcaggaatccaggtaccagacggtgcgcagcatagcggcttggttcacctgagaggccggcatggtgcctgggctgcc

SEQ ID NO: 573680 - DNA, 120 bp, Artificial Sequence
  ENSG00000171124_14 (sequence is synthesized)
gggaacctcatctgcctggggcctcacctgctggagtcctttgtggccaaccctctctcttacctgggacctcacacgctgggcttcacggctgccaggagcctctcccctccagaagac

SEQ ID NO: 573681 - DNA, 120 bp, Artificial Sequence
  ENSG00000171124_15 (sequence is synthesized)
ttgcctgctagggacctcgcctgctggggacctcgcctgttggggacctcacctgctggggacctcacctgctggggaccttggctgctggaggctgcacctactgaggatgtcggcggt

SEQ ID NO: 573682 - DNA, 120 bp, Artificial Sequence
  ENSG00000171124_16 (sequence is synthesized)
cggggactttacctgctgggacctgctcccagagaccttgccacactgaatctcacctgctggggacctcaccctggagggccctgggccctggggaactggcttacttggggccccacc

SEQ ID NO: 573683 - DNA, 120 bp, Artificial Sequence
  ENSG00000171124_17 (sequence is synthesized)
cgggagtgatggttctggctgatttgtttgtgatgttgttagccgcctgtgaggggtgcagagagatcatcacggcacggtttccagatgtaatactgcaaggaaaaatgatgacgtgtc

SEQ ID NO: 573684 - DNA, 120 bp, Artificial Sequence
  ENSG00000171124_18 (sequence is synthesized)
tcctcactctagaggggttggtcccatgggttaagagctcaccccaggttctcacctcaggggttaagagctcagagttcagacaggtccaagttcaagcccaggaccaccacttatagg

SEQ ID NO: 573685 - DNA, 120 bp, Artificial Sequence
  ENSG00000171124_19 (sequence is synthesized)
gtacaggtgggatcgactgtaaatgaggacttctggaacattccaaatattctggggttgagggaaattgctgctgtctacaaaatgccaagggtggacaggcgctgtggctcacgcctg

SEQ ID NO: 573686 - DNA, 82 bp, Artificial Sequence
  ENSG00000171124_20 (sequence is synthesized)
attgaggccaagagttaaagaccagcctggtcaatatagcaagaccacgtctctaaataaaaaataataggccggccaggca

SEQ ID NO: 573687 - DNA, 120 bp, Artificial Sequence
  ENSG00000171124_21 (sequence is synthesized)
tctgttcccacttcctccccgccccaggaaacctgccatggcctcctggtgagctgtcctcatccactgctcgctgcctctccagaaccttggtgtgaacttaggtcttggcgtcgggat

SEQ ID NO: 573688 - DNA, 120 bp, Artificial Sequence
  ENSG00000171124_22 (sequence is synthesized)
ctttagctccagccacctctttaagaggaaactgttgggcagatggaggagggctagtcacggaaagaaactaaccttggtgtgaacttaggtcttggcgtcgggatcccttttcgtcac

SEQ ID NO: 573689 - DNA, 120 bp, Artificial Sequence
  ENSG00000171124_23 (sequence is synthesized)
agctccagccacctctttaagaggaaactgttgggcagatggaggagggctagtcacggaaagaaactggagtgaaggtgaggacaggggactgctgtcccgaaggagtcccgctgaccc

SEQ ID NO: 573690 - DNA, 120 bp, Artificial Sequence
  ENSG00000171124_24 (sequence is synthesized)
gctttttgcttcctgatctttgtgatgtctcagcagagtagcattttttaatctttttctaggaaaaaatatcttgggttcaactggggtgggatctcagtcctcatcgcgatctcacat

SEQ ID NO: 573691 - DNA, 120 bp, Artificial Sequence
  ENSG00000171124_25 (sequence is synthesized)
gaagagaccaccaaacaggctttgtaattattggtgatggcctggatgcggttttgtatgaactgagaaactaaacaaaagagtggctgccaggtggatctcttcagggagtgaaggtga

SEQ ID NO: 573692 - DNA, 120 bp, Artificial Sequence
  ENSG00000171126_0 (sequence is synthesized)
actttgcctctcgcctctggacggcggcggggcggccgccggattcgcggccgcagggagcgccggagacggggagctattccgccccggcggctccattcggcgcccgcagccctcagg

SEQ ID NO: 573693 - DNA, 80 bp, Artificial Sequence
  ENSG00000171126_1 (sequence is synthesized)
gtgtgcgcagccctcgggcgcgagggtcggcggcgcggacacagccgcgttcccagccggtggggctcagcgctggcgcc

SEQ ID NO: 573694 - DNA, 120 bp, Artificial Sequence
  ENSG00000171126_2 (sequence is synthesized)
ggcgaggactccccggccacccgcaggtaccgccgggcggagggcgcgctactagcagcgccggagatactcgagcccagggacccccgggccagcggagggcaggagcggagccccgag

SEQ ID NO: 573695 - DNA, 80 bp, Artificial Sequence
  ENSG00000171126_3 (sequence is synthesized)
ccgtcagccacgggcaggcaggccccgcgtggcggcttggggtggggggctgcagcggggccctcgggccgaaagtcccc

SEQ ID NO: 573696 - DNA, 120 bp, Artificial Sequence
  ENSG00000171126_4 (sequence is synthesized)
catgaccttcgggcgcagcggggcggcctcggtggtgctgaacgtgggcggcgcccggtattcgctgtcccgggagctgctgaaggacttcccgctgcgccgcgtgagccggctgcacgg

SEQ ID NO: 573697 - DNA, 120 bp, Artificial Sequence
  ENSG00000171126_5 (sequence is synthesized)
ctgccgctccgagcgcgacgtgctcgaggtgtgcgacgactacgaccgcgagcgcaacgagtacttcttcgaccggcactcggaggccttcggcttcatcctgctctacgtgcgcggcca

SEQ ID NO: 573698 - DNA, 120 bp, Artificial Sequence
  ENSG00000171126_6 (sequence is synthesized)
cggcaagctgcgcttcgcgccgcggatgtgcgagctctccttctacaacgagatgatctactggggcctggagggcgcgcacctcgagtactgctgccagcgccgcctcgacgaccgcat

SEQ ID NO: 573699 - DNA, 120 bp, Artificial Sequence
  ENSG00000171126_7 (sequence is synthesized)
gtccgacacctacaccttctactcggccgacgagccgggcgtgctgggccgcgacgaggcgcgccccggcggggccgaggcggctccctccaggcgctggctggagcgcatgcggcggac

SEQ ID NO: 573700 - DNA, 120 bp, Artificial Sequence
  ENSG00000171126_8 (sequence is synthesized)
cttcgaggagcccacgtcgtcgctggccgcgcagatcctggctagcgtgtcggtggtgttcgtgatcgtgtccatggtggtgctgtgcgccagcacgttgcccgactggcgcaacgcagc

SEQ ID NO: 573701 - DNA, 120 bp, Artificial Sequence
  ENSG00000171126_9 (sequence is synthesized)
cgccgacaaccgcagcctggatgaccggagcaggtactccgccggccctgggagggagccctccgggataattgaagctatctgcataggttggttcactgccgagtgcatcgtgaggtt

SEQ ID NO: 573702 - DNA, 120 bp, Artificial Sequence
  ENSG00000171126_10 (sequence is synthesized)
cattgtctccaaaaacaagtgtgagtttgtcaagagacccctgaacatcattgatttactggcaatcacgccgtattacatctctgtgttgatgacagtgtttacaggcgagaactctca

SEQ ID NO: 573703 - DNA, 120 bp, Artificial Sequence
  ENSG00000171126_11 (sequence is synthesized)
actccagagggctggagtcaccttgagggtacttagaatgatgaggattttttgggtgattaagcttgcccgtcacttcattggtcttcagacactcggtttgactctcaaacgttgcta

SEQ ID NO: 573704 - DNA, 120 bp, Artificial Sequence
  ENSG00000171126_12 (sequence is synthesized)
ccgagagatggttatgttacttgtcttcatttgtgttgccatggcaatctttagtgcactttctcagcttcttgaacatgggctggacctggaaacatccaacaaggactttaccagcat

SEQ ID NO: 573705 - DNA, 120 bp, Artificial Sequence
  ENSG00000171126_13 (sequence is synthesized)
tcctgctgcctgctggtgggtgattatctctatgactacagttggctatggagatatgtatcctatcacagtgcctggaagaattcttggaggagtttgtgttgtcagtggaattgttct

SEQ ID NO: 573706 - DNA, 120 bp, Artificial Sequence
  ENSG00000171126_14 (sequence is synthesized)
attggcattacctatcacttttatctaccatagctttgtgcagtgttatcatgagctcaagtttagatctgctaggtatagtaggagcctctccactgaattcctgaattaatgcattgc

SEQ ID NO: 573707 - DNA, 120 bp, Artificial Sequence
  ENSG00000171126_15 (sequence is synthesized)
aaaattatccttcccagccgaagggataaaacagtttacttgttatggagtaaatagaattgagactgcaaaggaagaataatgactcctagagtaaactttaggacccggttttattta

SEQ ID NO: 573708 - DNA, 120 bp, Artificial Sequence
  ENSG00000171126_16 (sequence is synthesized)
gacttgttttcccgtttccttgaatgattacacatttttaaaaaatacattatttgaacattttaaaacagaaaggtactattttccaaatgtttttccatcttatgaattcagaagaag

SEQ ID NO: 573709 - DNA, 120 bp, Artificial Sequence
  ENSG00000171126_17 (sequence is synthesized)
cttggaacttatagtgttttttgtttgagagtaacattttcatttctaaatgttttataatttctcatatcaatgtcagaagtatcctggaaacatatgtcacatgcgggaactgtttaa

SEQ ID NO: 573710 - DNA, 120 bp, Artificial Sequence
  ENSG00000171126_18 (sequence is synthesized)
caaatactttaaaaatttggccaaaatttaaactgtataatggagctagatacaagcaagaatagtatttgaaagacttttccagcatacttctcaattctttgctttatttttgtgcca

SEQ ID NO: 573711 - DNA, 120 bp, Artificial Sequence
  ENSG00000171126_19 (sequence is synthesized)
attattcaccttatcgtgccgcttcatggaagcttgagtatgttctcccttttccattttggatttatctctttactgtaatgactcaaaaggtatttaagaattgacgagagcttgtgt

SEQ ID NO: 573712 - DNA, 120 bp, Artificial Sequence
  ENSG00000171126_20 (sequence is synthesized)
tgtttagcatcttactggataatatttgaattcattgctgttcctaggtgataactgtcctaatatttagatgtccaaacaagaatacttccaacataaaaattataataggaataattt

SEQ ID NO: 573713 - DNA, 120 bp, Artificial Sequence
  ENSG00000171126_21 (sequence is synthesized)
gagatgactcaatattacaacctcttcttctcttaacctcctcccccaaacactagaggtttaataagacttatcagatgaaaggatatttatatagccttttagtagcaaagtcatact

SEQ ID NO: 573714 - DNA, 120 bp, Artificial Sequence
  ENSG00000171126_22 (sequence is synthesized)
tacgtgttgtcactggattatcataaaagggagaaattaaatattactgtactcttagttgctgtgtagctaagtcaattttaagccagtaaaagcgatggatacataatgatttgatct

SEQ ID NO: 573715 - DNA, 120 bp, Artificial Sequence
  ENSG00000171126_23 (sequence is synthesized)
gatctttaactattgtgaatcacagctacaccaaaactcttcttgtaagaatactgactaatatgccatgttaatctggctagattattaggactagataatgtaaaagtgatgattgtt

SEQ ID NO: 573716 - DNA, 120 bp, Artificial Sequence
  ENSG00000171126_24 (sequence is synthesized)
tagtaactaaattttagcaacagaaattagaattttgctttttcaaccagttaccataaagaagttagtgtatatataaacacaaataattagtgacagattcataaaaaattgaatgtt

SEQ ID NO: 573717 - DNA, 120 bp, Artificial Sequence
  ENSG00000171126_25 (sequence is synthesized)
gtacacagtaattttgtcagaggtagagaagacagggattgggaagtggtgggtgatggaggacctggatatatttatcaaataaagggttaccagaagtgttcattaaaggaattttag

SEQ ID NO: 573718 - DNA, 120 bp, Artificial Sequence
  ENSG00000171126_26 (sequence is synthesized)
ccatcatctagttcaaacctcaactattacaggtagaaaatcagggcaggagagaatataattgtgaaggagtcagggctaacacctggatctccagaaacctagcccagcaggttaatc

SEQ ID NO: 573719 - DNA, 120 bp, Artificial Sequence
  ENSG00000171126_27 (sequence is synthesized)
ttcacacatctctgggttctgagaaaagcctggaaaaatcacacttctttgtcattgtcatgctgaggtaataatagcaaaactgttttctttcccttaatttcctttcctaagcttatg

SEQ ID NO: 573720 - DNA, 120 bp, Artificial Sequence
  ENSG00000171126_28 (sequence is synthesized)
taatagtttggccattaaatatcttgccctattttccctattactgctagtatgctacttcttacatacccaaaagaaattcagttatttattgtatatttattgtattctaatataatt

SEQ ID NO: 573721 - DNA, 120 bp, Artificial Sequence
  ENSG00000171126_29 (sequence is synthesized)
gaaataaatggcatggatttattttttcttaactatttggattaaagctttgtggttcatgcaaacaatgtgcagatgatagcacctccatattactaataaaaatatgataaccatcaa

SEQ ID NO: 573722 - DNA, 120 bp, Artificial Sequence
  ENSG00000171130_0 (sequence is synthesized)
gcctgggcatcctgcgcccggccatgacggcgcactcattcgccctcccggtcatcatcttcaccacgttctggggcctcgtcggcatcgccgggccctggttcgtgccgaagggaccca

SEQ ID NO: 573723 - DNA, 120 bp, Artificial Sequence
  ENSG00000171130_1 (sequence is synthesized)
accgcggagtgatcatcaccatgctggtcgccaccgccgtctgctgttacctcttctggctcatcgccatcctggcgcagctgaaccccctgttcgggccccagctgaagaatgagacca

SEQ ID NO: 573724 - DNA, 120 bp, Artificial Sequence
  ENSG00000171130_2 (sequence is synthesized)
tctggtacgtgcgcttcctgtgggagtgacccgccgcccccgacccaggtgcccagctctcggaatgactgtggctccactgtccctgacaaccccttcgtccggaccctcccccacaca

SEQ ID NO: 573725 - DNA, 120 bp, Artificial Sequence
  ENSG00000171130_3 (sequence is synthesized)
actatgtctggtcaccagctccctcctgctggcacccagagacccggacccgcagggcctgcctggttcctggaagtcttcccagtcttcccagccagcccgggccctggggagccctgg

SEQ ID NO: 573726 - DNA, 120 bp, Artificial Sequence
  ENSG00000171130_4 (sequence is synthesized)
gcacagcagcggccgaggggatgtcctgctccaatacccgcactgctctggagtttgccctctttcccaaggagatgctgctggggagctggtatgggtggggtctttccctttacagac

SEQ ID NO: 573727 - DNA, 120 bp, Artificial Sequence
  ENSG00000171130_5 (sequence is synthesized)
ggggcagatgccaggactcagcccatcctgaggaggacacgtgtcctcatggagagggtgctccggcccaggcgggggagtcagtgcccagtcagcagctctgccaccatcctgctggga

SEQ ID NO: 573728 - DNA, 120 bp, Artificial Sequence
  ENSG00000171130_6 (sequence is synthesized)
gaaaatgttgaagcagagaaacattcacacacaaaaagcaacatagtcatgtgggtccagatggcctcagtcctagatgttggcaccctttgctgtgtctcctcagagtatcctgttccg

SEQ ID NO: 573729 - DNA, 120 bp, Artificial Sequence
  ENSG00000171130_7 (sequence is synthesized)
cctcctgccacctggacctccctcagtggatgtcttccctcccccgaccccagcctgtcagtccgagcacagtgcaggtttggctctgacttgggcttttggctgcagtgggggtggatt

SEQ ID NO: 573730 - DNA, 120 bp, Artificial Sequence
  ENSG00000171130_8 (sequence is synthesized)
tcagagcctctcatggcagcatctaagtgaccagagctgggatgagagaggggaaggggcaatgtgagtggcgctatgggacgggccagccctgctcctgagccagccccgccctctgcc

SEQ ID NO: 573731 - DNA, 120 bp, Artificial Sequence
  ENSG00000171130_9 (sequence is synthesized)
ccctggccctgggctctgtgctagggatggtgaagaatgggggcgtgccagcctggcaggagtgggaagcaacacgcaggggtcccggacctctccagccttgccctcacgcttacccga

SEQ ID NO: 573732 - DNA, 120 bp, Artificial Sequence
  ENSG00000171130_10 (sequence is synthesized)
gctcccagtgtggttagcacagagctcacccaccttgcctggctcccagctggggcctgtcctcactggtgctccaggggaagaaacgacagcctcacttctgtatggactgctgatgtg

SEQ ID NO: 573733 - DNA, 120 bp, Artificial Sequence
  ENSG00000171130_11 (sequence is synthesized)
gcctgccatcctgttcagcgggcattgtctttggagcagcaggagaataggatgcctctcactcacatgccagttcctggctggccagctgctcagggctcaggctggggcctcccattg

SEQ ID NO: 573734 - DNA, 120 bp, Artificial Sequence
  ENSG00000171130_12 (sequence is synthesized)
acatcctccccctacactccctctctgagcctccgtcgcccctcctgttgggtaagggtgttgagtgtgacttgtgctgaaaacctggttcatatataataaataatggtgatgaaaaga

SEQ ID NO: 573735 - DNA, 120 bp, Artificial Sequence
  ENSG00000171130_13 (sequence is synthesized)
acacccagggcaggcctcggtcatattattttggatgcggccaacccagcagatggcagggcctgtgttcccagggtgacgaagggcccagggagccatccacactccggcaggcacatg

SEQ ID NO: 573736 - DNA, 120 bp, Artificial Sequence
  ENSG00000171130_14 (sequence is synthesized)
gtcaggttcggggcggcccaggctgcgggtccgcagggcgcttcgggccgagccggcgcggcgcgtgaagggcaggggacgccccgaaagaccgctggggtgggaccccaagctccaggg

SEQ ID NO: 573737 - DNA, 120 bp, Artificial Sequence
  ENSG00000171130_15 (sequence is synthesized)
gtctttggaaataagaatgcggcgtgacgttggctgtgcgggcgcggggctgacgcggaccctataacccatcgccgaaaccgggcggccgcgcccctattcctcggcatttctctctgt

SEQ ID NO: 573738 - DNA, 120 bp, Artificial Sequence
  ENSG00000171130_16 (sequence is synthesized)
ccgcggccctgctcagccaatcagcgagtgggctcctaggcaggtcctgagtgacagcgcggcgggctggatcaggagatgcgcgtgcgcggcccggcccggctgatcgcttcgggtgct

SEQ ID NO: 573739 - DNA, 120 bp, Artificial Sequence
  ENSG00000171130_17 (sequence is synthesized)
cccgacccagccattccgggagagaggagagggtcccagagctcatgtccactccactccctggcacgatctggtctcccaccctttggtgaggaccgtgttcctcccagaggctttccc

SEQ ID NO: 573740 - DNA, 120 bp, Artificial Sequence
  ENSG00000171130_18 (sequence is synthesized)
ccttttgcctcctgccatgattctgagacctcctcaaccttgtggaactgtaagaccaattaaatctttttttttccccccagtttcaggtgtgtctttatcaccagtgtgaaaacagac

SEQ ID NO: 573741 - DNA, 120 bp, Artificial Sequence
  ENSG00000171130_19 (sequence is synthesized)
ggtgtgtctttatcaccagtgtgaaaacagactaatacaggccagctgatgcagacatactagccaaaattaaatgcctgttgttataagtcagttttagggtgttttgtcatgcagcat

SEQ ID NO: 573742 - DNA, 120 bp, Artificial Sequence
  ENSG00000171130_20 (sequence is synthesized)
tattgcggcacacctgactgatacaatactgttacatacagatctagttcattagtgacatacactttctttgtccacccccctattaatgacccctgtgttacttccagattaacaaat

SEQ ID NO: 573743 - DNA, 120 bp, Artificial Sequence
  ENSG00000171130_21 (sequence is synthesized)
agtaagcatcttttatatgtctttgtgcacatttgctggaacttctctaggatatatatctaggagtcaaagagcttttaatattacaagagattgccaaatttctctccaaaatgattg

SEQ ID NO: 573744 - DNA, 120 bp, Artificial Sequence
  ENSG00000171130_22 (sequence is synthesized)
tttcaatttacactcaaccaaccttgtggcatgagccacagcacctggatggtagttggttttaacttgcatttccctaatagctgctaagcttgactcttcacctgtttattggacatt

SEQ ID NO: 573745 - DNA, 120 bp, Artificial Sequence
  ENSG00000171130_23 (sequence is synthesized)
tcggtttccacttctctaatttgcctactcaaatcattggcttgcttttctatgactttttttggtcttttccctattgatttatagaagttctttatatattcttggctacaagttccc

SEQ ID NO: 573746 - DNA, 120 bp, Artificial Sequence
  ENSG00000171130_24 (sequence is synthesized)
ctaatcctagtgaatctagtgccaggaacagggaaggaaggaggaagtggggagagagggcaagatcagacagcctcatttctccttctgctcttcaaaaccattgttgctgggcgtggt

SEQ ID NO: 573747 - DNA, 90 bp, Artificial Sequence
  ENSG00000171130_25 (sequence is synthesized)
ccattgttaaaaaaatgaaaagcaaaccacaaactggaagaaactatttgtaaagcatatatctgtcaagacttgtatcttgaatatata

SEQ ID NO: 573748 - DNA, 120 bp, Artificial Sequence
  ENSG00000171130_26 (sequence is synthesized)
aaacctaagttttaaaagtgggcaaatttgaactcttacttcacaaaagaagaactgcagccctaccttagatcatgcacagaaacaaatttcaggaaggtcaaagacctaaccccaaag

SEQ ID NO: 573749 - DNA, 120 bp, Artificial Sequence
  ENSG00000171130_27 (sequence is synthesized)
agcaaaatgtcaaagtgtttaaagtaaatcataagaaaatgacttcctgacatcagaaaagggaaaaattttctaaatcaggctgggaaaagatcgctgtggtacatatttatgaaagat

SEQ ID NO: 573750 - DNA, 120 bp, Artificial Sequence
  ENSG00000171130_28 (sequence is synthesized)
tggcatccagattatataaacaacactgacaaattaatctaaaaaatacagttgaaaaattggcatgtatattcccagcaactcacaaggagggaaacttgagaggccagtcagtaggtg

SEQ ID NO: 573751 - DNA, 120 bp, Artificial Sequence
  ENSG00000171130_29 (sequence is synthesized)
aaaaatatacttagccccattagtaatcagggaaatgtacattaaagtcacaatgagacatttcatactcatcagatgggcaagttatgtctgccagcacaaaaggctggagaggatggg

SEQ ID NO: 573752 - DNA, 120 bp, Artificial Sequence
  ENSG00000171130_30 (sequence is synthesized)
ggaaatgtaagtaggggtgcaaatggaggcaaccccaccccatctccacaaaaaatttttaaaaattagccaggctagtggcttctacctgtggtccgagctactcaggaggttgaagcg

SEQ ID NO: 573753 - DNA, 120 bp, Artificial Sequence
  ENSG00000171130_31 (sequence is synthesized)
ggaggatcaactgagtccagagtccgaggctgcagtgagctaggattgtgccacagaactctaacctggacaacagagcaagatcccatttctagaaaaataaaatacagagcaaaacag

SEQ ID NO: 573754 - DNA, 120 bp, Artificial Sequence
  ENSG00000171130_32 (sequence is synthesized)
taaaataaaataaaccactgtggatgtacagagaaaacagagtggcctgtgaaacgcagtggccatacttggcaatttcagctgtgaagacacagccagggaaaaaaaatcaaagactgg

SEQ ID NO: 573755 - DNA, 120 bp, Artificial Sequence
  ENSG00000171130_33 (sequence is synthesized)
cagggaaaaaaaatcaaagactggctttaatatacattaaatacatatattcgttatagagttattccatatttaatagttattccaataactattagccttatagttcaaatatttctt

SEQ ID NO: 573756 - DNA, 120 bp, Artificial Sequence
  ENSG00000171130_34 (sequence is synthesized)
ttcatatcctaacatcagaaagaattttataattggatctgggaccatttgacaatgtacttgcatgaaaaaaaatccaaacctaaattatgcaggtttaatacgcagcttacgtcacat

SEQ ID NO: 573757 - DNA, 120 bp, Artificial Sequence
  ENSG00000171130_35 (sequence is synthesized)
gaaactgccctctataaagcaagcattctgtacatataattaattttaacttgatgaaaagagcatctcacggaagaaaacatgtaatgttgagtagaaccactagagaacgaggagata

SEQ ID NO: 573758 - DNA, 120 bp, Artificial Sequence
  ENSG00000171130_36 (sequence is synthesized)
tttcttctcatttatctgtgatgtttcatttcatttgaatgaaatcagttaagtatataattagggcccataactcagttcagttttattttacagtaacatttaaaccctagaaaaaaa

SEQ ID NO: 573759 - DNA, 120 bp, Artificial Sequence
  ENSG00000171130_37 (sequence is synthesized)
caacatcttgacctggtttcctctgctataagtggcaataattacaatcatcttgctatgtctcaagaaaactaaagtaggcagttggtttatccaaatccattcctccttctattgtcc

SEQ ID NO: 573760 - DNA, 120 bp, Artificial Sequence
  ENSG00000171130_38 (sequence is synthesized)
ttgcttttggaggcctgtttagctacttaccctcctccagggtccagaacatcagacaagttctcctggtccccacaccaaggagaaagtcttcaagaatctaaaccagtcacagtaaat

SEQ ID NO: 573761 - DNA, 120 bp, Artificial Sequence
  ENSG00000171130_39 (sequence is synthesized)
ccattcctattgctctaaccaggttaggcataggcagatggggcaaatgtgctgggaaggtttctgggaaagggtctctaaattcttaaaaagtgcaagggaaatcttctatctctgtat

SEQ ID NO: 573762 - DNA, 120 bp, Artificial Sequence
  ENSG00000171130_40 (sequence is synthesized)
agaaatgtccaaagaggtgatctaggaatttggcagccaccctggacccagggggaacaaacagaagagctccagctagtgccctaggctgcatgtgcaattccatcactgagctgctaa

SEQ ID NO: 573763 - DNA, 120 bp, Artificial Sequence
  ENSG00000171130_41 (sequence is synthesized)
aacaacagccctagagctgcctcacttgggcttcctgtttggtgagctaacaagcccctttttgttctgaacgtttttattgagctttattttcaaaaaagcagcctgattcatgcacat

SEQ ID NO: 573764 - DNA, 120 bp, Artificial Sequence
  ENSG00000171130_42 (sequence is synthesized)
atctttagaagaaatttaaaacgccctagaaaagaatatcttcagtttaaaatctaagcaatttggaatttacaggaatatattcctcttagttccagttactcaccattaaaaaataat

SEQ ID NO: 573765 - DNA, 120 bp, Artificial Sequence
  ENSG00000171130_43 (sequence is synthesized)
gttgctagagataccgcctggaggccactgatctgtaaaagggatctctacagaagatagggatttttgatcgccagagaagaagggatatgtgagatccaaacgccgaaggaggaaagc

SEQ ID NO: 573766 - DNA, 120 bp, Artificial Sequence
  ENSG00000171130_44 (sequence is synthesized)
aggctccgtggtctcttccagccctgatggaagaaactaccgagccttattatactaggtgctttccacatgcctattcatttaatcctccagcaaccttgtaagaagggccatcccatt

SEQ ID NO: 573767 - DNA, 120 bp, Artificial Sequence
  ENSG00000171130_45 (sequence is synthesized)
ttatatttaaacaaaccttaactactgacgcaaggagtcaaggatctaatcccaaagcctctgcctggttcgctgcagatggatgtccgcgaggacgccagccctccgcctcccgccggg

SEQ ID NO: 573768 - DNA, 120 bp, Artificial Sequence
  ENSG00000171130_46 (sequence is synthesized)
tccctgaacgccggcccggccggtccaacctcattccgcttcccgccatcgaaacgcgaagcccccgccttcccccaaacgtctcagcgccgctggggcctttctggctgcgccgcctcc

SEQ ID NO: 573769 - DNA, 120 bp, Artificial Sequence
  ENSG00000171130_47 (sequence is synthesized)
gaccccaggccccggtccgcgcccgccgctcgctagtcctgggagtgaggagaacgcgtgctgaggacccggccagagggacagcggggaccgccctcccgctgcgtctctgaaagcgag

SEQ ID NO: 573770 - DNA, 120 bp, Artificial Sequence
  ENSG00000171130_48 (sequence is synthesized)
acaacctgcttagtaatgttgaaaaagggatcgcgtgctcctgtgtccagcaccagcttgcagtgctttagatcaaagatcaagggcctcgtttggattagagttagctttgcccaaagg

SEQ ID NO: 573771 - DNA, 120 bp, Artificial Sequence
  ENSG00000171130_49 (sequence is synthesized)
ccctacacccatgaaattacaactctcgagatctgcacttgggaattcctgttgttcatgaatgcccccaggtgactggaatgcagccatcttagaaccactagctggctcatcgccatc

SEQ ID NO: 573772 - DNA, 120 bp, Artificial Sequence
  ENSG00000171132_0 (sequence is synthesized)
gaaatttcccgggattatgtttcggaaaggtaggtaagcgccgggcgcggcgcccgctttcccgcagtccggagccggagagccagcgaggcggcgaggcagcccccgcggcttgcagcg

SEQ ID NO: 573773 - DNA, 120 bp, Artificial Sequence
  ENSG00000171132_1 (sequence is synthesized)
gagccgacagctcgtcttctcttctggaggtgcagctggtggtcggggggagagacttgctccaaacacggacatcccccagctctcccccctccctgttttccgttaggaacccggcga

SEQ ID NO: 573774 - DNA, 120 bp, Artificial Sequence
  ENSG00000171132_2 (sequence is synthesized)
ggaaatacatgcactggctgagaatcgcccgcgccagggcgcaacgccacaaggtgtagggagtgtgcggggtggggcgaaaggggacccaagagtccctgtggctcggagtgccgggcc

SEQ ID NO: 573775 - DNA, 120 bp, Artificial Sequence
  ENSG00000171132_3 (sequence is synthesized)
gtcggttcttcattcctgccctcggggcagacggagtgaccccggcccccactccccgccccgaccatggtagtgttcaatggccttcttaagatcaaaatctgcgaggccgtgagcttg

SEQ ID NO: 573776 - DNA, 120 bp, Artificial Sequence
  ENSG00000171132_4 (sequence is synthesized)
aagcccacagcctggtcgctgcgccatgcggtgggaccccggccgcagactttccttctcgacccctacattgccctcaatgtggacgactcgcgcatcggccaaacggccaccaagcag

SEQ ID NO: 573777 - DNA, 120 bp, Artificial Sequence
  ENSG00000171132_5 (sequence is synthesized)
aagaccaacagcccggcctggcacgacgagttcgtcaccgatgtgtgcaacggacgcaagatcgagctggctgtctttcacgatgcccccataggctacgacgacttcgtggccaactgc

SEQ ID NO: 573778 - DNA, 120 bp, Artificial Sequence
  ENSG00000171132_6 (sequence is synthesized)
accatccagtttgaggagctgctgcagaacgggagccgccacttcgaggactggattgatctggagccagaaggaagagtgtatgtgatcatcgatctctcagggtcgtcgggtgaagcc

SEQ ID NO: 573779 - DNA, 120 bp, Artificial Sequence
  ENSG00000171132_7 (sequence is synthesized)
cctaaagacaatgaagagcgtgtgttcagggaacgcatgcggccgaggaagcggcagggggccgtcaggcgcagggtccatcaggtcaacggccacaagttcatggccacctatcttcgg

SEQ ID NO: 573780 - DNA, 120 bp, Artificial Sequence
  ENSG00000171132_8 (sequence is synthesized)
cagcccacctactgctcccattgcagagacttcatctggggtgtcataggaaagcagggataccagtgtcaagtctgcacctgcgtggtccacaagcggtgccacgagctcataatcaca

SEQ ID NO: 573781 - DNA, 120 bp, Artificial Sequence
  ENSG00000171132_9 (sequence is synthesized)
aagtgtgctgggttaaagaagcaggagacccccgaccaggtgggctcccagcggttcagcgtcaacatgccccacaagttcggtatccacaactacaaggtccctaccttctgcgatcac

SEQ ID NO: 573782 - DNA, 120 bp, Artificial Sequence
  ENSG00000171132_10 (sequence is synthesized)
tgtgggtccctgctctggggactcttgcggcagggtttgcagtgtaaagtctgcaaaatgaatgttcaccgtcgatgtgagaccaacgtggctcccaactgtggagtggatgccagagga

SEQ ID NO: 573783 - DNA, 120 bp, Artificial Sequence
  ENSG00000171132_11 (sequence is synthesized)
atcgccaaagtactggccgacctgggcgttaccccagacaaaatcaccaacagcggccagagaaggaaaaagctcattgctggtgccgagtccccgcagcctgcttctggaagctcacca

SEQ ID NO: 573784 - DNA, 120 bp, Artificial Sequence
  ENSG00000171132_12 (sequence is synthesized)
tctgaggaagatcgatccaagtcagcacccacctccccttgtgaccaggaaataaaagaacttgagaacaacattcggaaagccttgtcatttgacaaccgaggagaggagcaccgggca

SEQ ID NO: 573785 - DNA, 120 bp, Artificial Sequence
  ENSG00000171132_13 (sequence is synthesized)
gcatcgtctcctgatggccagctgatgagccccggtgagaatggcgaagtccggcaaggccaggccaagcgcctgggcctggatgagttcaacttcatcaaggtgttgggcaaaggcagc

SEQ ID NO: 573786 - DNA, 120 bp, Artificial Sequence
  ENSG00000171132_14 (sequence is synthesized)
tttggcaaggtcatgttggcagaactcaagggcaaagatgaagtatatgctgtgaaggtcttaaagaaggacgtcatccttcaggatgatgacgtggactgcacaatgacagagaagagg

SEQ ID NO: 573787 - DNA, 120 bp, Artificial Sequence
  ENSG00000171132_15 (sequence is synthesized)
attttggctctggcacggaaacacccgtaccttacccaactctactgctgcttccagaccaaggaccgcctctttttcgtcatggaatatgtaaatggtggagacctcatgtttcagatt

SEQ ID NO: 573788 - DNA, 120 bp, Artificial Sequence
  ENSG00000171132_16 (sequence is synthesized)
cagcgctcccgaaaattcgacgagcctcgttcacggttctatgctgcagaggtcacatcggccctcatgttcctccaccagcatggagtcatctacagggatttgaaactggacaacatc

SEQ ID NO: 573789 - DNA, 120 bp, Artificial Sequence
  ENSG00000171132_17 (sequence is synthesized)
cttctggatgcagaaggtcactgcaagctggctgacttcgggatgtgcaaggaagggattctgaatggtgtgacgaccaccacgttctgtgggactcctgactacatagctcctgagatc

SEQ ID NO: 573790 - DNA, 120 bp, Artificial Sequence
  ENSG00000171132_18 (sequence is synthesized)
ctgcaggagttggagtatggcccctccgtggactggtgggccctgggggtgctgatgtacgagatgatggctggacagcctccctttgaggccgacaatgaggacgacctatttgagtcc

SEQ ID NO: 573791 - DNA, 120 bp, Artificial Sequence
  ENSG00000171132_19 (sequence is synthesized)
atcctccatgacgacgtgctgtacccagtctggctcagcaaggaggctgtcagcatcttgaaagctttcatgacgaagaatccccacaagcgcctgggctgtgtggcatcgcagaatggc

SEQ ID NO: 573792 - DNA, 120 bp, Artificial Sequence
  ENSG00000171132_20 (sequence is synthesized)
gaggacgccatcaagcagcacccattcttcaaagagattgactgggtgctcctggagcagaagaagatcaagccacccttcaaaccacgcattaaaaccaaaagagacgtcaataatttt

SEQ ID NO: 573793 - DNA, 120 bp, Artificial Sequence
  ENSG00000171132_21 (sequence is synthesized)
gaccaagactttacccgggaagagccggtactcacccttgtggacgaagcaattgtaaagcagatcaaccaggaggaattcaaaggtttctcctactttggtgaagacctgatgccctga

SEQ ID NO: 573794 - DNA, 120 bp, Artificial Sequence
  ENSG00000171132_22 (sequence is synthesized)
gagcccactgcagttggactttgccgatgctgcaagaaggggtgcagagaagactcctgtgttggagacactcagcaggtcttgaactacttctcctcctcggagccccagtcccatgtc

SEQ ID NO: 573795 - DNA, 120 bp, Artificial Sequence
  ENSG00000171132_23 (sequence is synthesized)
gtcagcaattagctgtatacactgccgtgtttggaccattggcaagcctggttccactcctcaggggctcctggcagtgaagcaacttcagttcttttactgcaaagaacagaaaaaaga

SEQ ID NO: 573796 - DNA, 120 bp, Artificial Sequence
  ENSG00000171132_24 (sequence is synthesized)
aagaaagcaaacaagaagactccggctctgctatcggacacagatcctgatccctcttgcttcttttccctcctgcaccgcagcttgccatccctgcccttctgtcctggagaagagact

SEQ ID NO: 573797 - DNA, 120 bp, Artificial Sequence
  ENSG00000171132_25 (sequence is synthesized)
ggtgcttctccgcacacacgagggagggcgcccttgaggcatgccctctgagggagggagaccagagatgcagggattggccagctgggttggtttgctctggaatggctaactcttgcc

SEQ ID NO: 573798 - DNA, 120 bp, Artificial Sequence
  ENSG00000171132_26 (sequence is synthesized)
tgctttggttttagcttttcagcatgccaaagtcatgtaagtttgtgtcttgtggaagaaatcctctttgtggaaaaagaaacagggttttgaactctgttaacatttgaaaaatatatt

SEQ ID NO: 573799 - DNA, 120 bp, Artificial Sequence
  ENSG00000171132_27 (sequence is synthesized)
ttcaaattcactttctaattggccaaaagagatgagttccagtctgaatacaggtagatattaaagggctaataaaaaatgagaaaccggtcgtccaaggtggatgctgtcaatgcccga

SEQ ID NO: 573800 - DNA, 120 bp, Artificial Sequence
  ENSG00000171132_28 (sequence is synthesized)
gtgacacatgagagctgtatgaattgagagaaaaggcaacaagtagcattcttcatcattcaagttctacctggacacaaaggcgaggaccctggggttccaacaaagctcagctcccag

SEQ ID NO: 573801 - DNA, 120 bp, Artificial Sequence
  ENSG00000171132_29 (sequence is synthesized)
attctctttccagtttcatcctaagttcctagcataaacactatttattttctgcagcagtgtgttatttttgcgcacttatacaaaatggtagtactactgtgttgtggtttttaaaca

SEQ ID NO: 573802 - DNA, 120 bp, Artificial Sequence
  ENSG00000171132_30 (sequence is synthesized)
ttaaacatgtaaagttatatacgaaatatctgcttttggaataagcagaatgaggctaaacatgggttatacaaagggtatctggaaactgaagagcaacttgttagaaaactgacaatg

SEQ ID NO: 573803 - DNA, 120 bp, Artificial Sequence
  ENSG00000171132_31 (sequence is synthesized)
tcgcaagatgtactcagttttgtttctgtgtgacatgcaatggcaactcatgtggacactattgaagggatgtgacattacctcctgtagatatgctaacagtgttattctttcatttcc

SEQ ID NO: 573804 - DNA, 120 bp, Artificial Sequence
  ENSG00000171132_32 (sequence is synthesized)
aagggttctctgtggctttgtgtatatgtttcccagaggtcatttgattacctaatttactgaactgatttagcagggaatggaatccattccaactattgcacgtggatttcccagctg

SEQ ID NO: 573805 - DNA, 120 bp, Artificial Sequence
  ENSG00000171132_33 (sequence is synthesized)
cccctaaatatatatacttgtgagtggcaaagtggcactaatgaagcttttgccttttgtacatttgagatttttgtatatagtgtttgctgcaaggcctgtggaattaattcgttgcat

SEQ ID NO: 573806 - DNA, 120 bp, Artificial Sequence
  ENSG00000171132_34 (sequence is synthesized)
atagaggtatcaactgctgcatgttcaggcatattataaaactttagtctatgaaagaataattataataatgtccaggtgcaatactctgtaagtctattggttcaagttaccgagaga

SEQ ID NO: 573807 - DNA, 120 bp, Artificial Sequence
  ENSG00000171132_35 (sequence is synthesized)
taggtgtgttcctttatgggggatgggggggtgtgttggggattctttgtattgtttatttcattttggtttattttaaaagatgtaaacatatattaagctatattaaatctcacatac

SEQ ID NO: 573808 - DNA, 120 bp, Artificial Sequence
  ENSG00000171132_36 (sequence is synthesized)
agttcttctgtgctctattataccctgatagagatgggggagagaaaggaatgtttttgatggtggtttcaaagctcggacagtaactatcttgagcccattagagagtctgtgtccata

SEQ ID NO: 573809 - DNA, 120 bp, Artificial Sequence
  ENSG00000171132_37 (sequence is synthesized)
tttgcatctggctggtcatagcctttgttactaatgatgacattcagttctcttttgtttttattttttaaaaactcaggtgtaattattatctgttcttaagataattgcaaatattaa

SEQ ID NO: 573810 - DNA, 120 bp, Artificial Sequence
  ENSG00000171132_38 (sequence is synthesized)
atattatgatatatcaattcatgtgtttggcataccagtgaatgatgaagaacatgagattaatttaatttatcttcggtaacttgacattctggagagagactatcttctggagttgag

SEQ ID NO: 573811 - DNA, 120 bp, Artificial Sequence
  ENSG00000171132_39 (sequence is synthesized)
tacaagcacagaaacatctttacggtggcatcatctcattttttaggaagacatgataatactgcccatcatattcatgtgtaactactgttctttcttctgctttcttcaccataataa

SEQ ID NO: 573812 - DNA, 120 bp, Artificial Sequence
  ENSG00000171132_40 (sequence is synthesized)
actttggacaaccaagcaagctctaaccgcaatgccagatggccttgtccgagggcctagtgtttgcacggcagtgggaactgggcctttcctacaggacaactggcaagtttgctggga

SEQ ID NO: 573813 - DNA, 120 bp, Artificial Sequence
  ENSG00000171132_41 (sequence is synthesized)
agtcaaataatacattccacctggcagctgaaggcagccagtcagtctgtcccagaaagggcccttttcagcacccaaagctgggctggctgggatgcctctggctggtgaagttctcac

SEQ ID NO: 573814 - DNA, 120 bp, Artificial Sequence
  ENSG00000171132_42 (sequence is synthesized)
ataggctgatttaaatccagcaaaggtctatagaaaaaggcttgcgtgttcgttgagtaatcattgtttcattttcatttttacgagagtttgaaaatagacacactgttaacacttctg

SEQ ID NO: 573815 - DNA, 120 bp, Artificial Sequence
  ENSG00000171132_43 (sequence is synthesized)
ccagttttttctgatctttccagccccaccccctttctctttctctctctctctcaaagaaaaaaaaaatgggagtgcaaaaaaaacaaagccaaaaaatatatgaaggatagctgttct

SEQ ID NO: 573816 - DNA, 120 bp, Artificial Sequence
  ENSG00000171132_44 (sequence is synthesized)
tctgtgttctctcattatggactttgtgaagtagaaacataattttttttcctccaaaggtgaaaaaacaatgcattcttgctttaaaaaaaaaaaagaaggctaaaaaattacctcttt

SEQ ID NO: 573817 - DNA, 120 bp, Artificial Sequence
  ENSG00000171132_45 (sequence is synthesized)
ttaaattatgtgcaaaataattctggctaactgtaaaatgtattcaattttaggattttttttttttgtattgtgatgctttatttgtacatttttttcctttctggatgtaattttaat

SEQ ID NO: 573818 - DNA, 120 bp, Artificial Sequence
  ENSG00000171132_46 (sequence is synthesized)
ctcttgccattcattagtgttatttcattgtaaacgttattgtgccaaatgtactgtattcaaaaggatgtgaatgtgtattgtttcagaacctaataaatacaatgacgttaagtctta

SEQ ID NO: 573819 - DNA, 120 bp, Artificial Sequence
  ENSG00000171132_47 (sequence is synthesized)
caactgaggcagaaataatgccccattccagccacagatacttccaattaccagggcagacccagctgtctgaccttcacttgctacatttggtcatgaactgagtggtcggtcttacag

SEQ ID NO: 573820 - DNA, 120 bp, Artificial Sequence
  ENSG00000171132_48 (sequence is synthesized)
atccaggtctcctctaagtccatgggcaaaggccactgagctctaggttccctggggtggagcctgaatagcttctggttcccactgggctgggaacttcagggagctccctgaccatct

SEQ ID NO: 573821 - DNA, 120 bp, Artificial Sequence
  ENSG00000171132_49 (sequence is synthesized)
gtagttagtacactaaggacaggggtaaggccgggtttgtgtgatagttctgtgtccatgctgactttctgtcttgccctgggaacaccactctggccatggaaggaacctctaatgttg

SEQ ID NO: 573822 - DNA, 120 bp, Artificial Sequence
  ENSG00000171132_50 (sequence is synthesized)
ccagggaaatatacctgccagctgcagccctcttccacagttagagggcccacagagcgtgtcctggtgctgggagaagaggaatgtccattctatccacaaggaaaggggtgtcatagg

SEQ ID NO: 573823 - DNA, 120 bp, Artificial Sequence
  ENSG00000171132_51 (sequence is synthesized)
aaatgaatacatctggggatggaagagagacaccgtccttccagtattccaagtggagaaatactgtttcactggatacctgagtaactgctgcacagaccacgctatgcacgtatcatc

SEQ ID NO: 573824 - DNA, 120 bp, Artificial Sequence
  ENSG00000171132_52 (sequence is synthesized)
aggtctgcaagctgaacagatgctctcacgtgtcatctcttagaggtaggatcagtcctggctgctatactcaagcaggaaaggaccgcctctttttcgtcatggaatatgtaaatggtg

SEQ ID NO: 573825 - DNA, 120 bp, Artificial Sequence
  ENSG00000171132_53 (sequence is synthesized)
attcagttcagactgccagtctcctctaacactggatttactggggctggctgttgcacttccctcagctgcttctcggaggtcctggcttctcctcgccctcctgtttgccctcagtca

SEQ ID NO: 573826 - DNA, 120 bp, Artificial Sequence
  ENSG00000171132_54 (sequence is synthesized)
gcgttcagtgtagtgcacagtgtctgacaccacactgaccgtgtggtctgaccagcagaacccaacaggagcagcaggagcggttgcttcctgcattccaggctctgtcctgcttcaact

SEQ ID NO: 573827 - DNA, 120 bp, Artificial Sequence
  ENSG00000171132_55 (sequence is synthesized)
cccccataggctacgacgacttcgtggccaactgcaccatccagtttgaggagctgctgcagaacgggagccgccacttcgaggactggatattcaagtctgtgcttctgcttgactgag

SEQ ID NO: 573828 - DNA, 120 bp, Artificial Sequence
  ENSG00000171132_56 (sequence is synthesized)
ccctctcacagtcaccctagagaatcctttacttacctgtgctgaaaaaaatgctcccatcagttaccctatgatgaggtctccagccctttcatcagaagacagagctttaaaatgcag

SEQ ID NO: 573829 - DNA, 120 bp, Artificial Sequence
  ENSG00000171132_57 (sequence is synthesized)
gtggtcagtcactgctggttggggaaggaaggagagacacaaccgcttcagatgggcagtgaaaaagacgatggaaaggccaggacaccacggaagttctgaaggggtagtgggaaccgg

SEQ ID NO: 573830 - DNA, 120 bp, Artificial Sequence
  ENSG00000171132_58 (sequence is synthesized)
gtgaatggaaagcagccctttgacagaagaaagacagagaccagtttccagtgagctcctgaggatattcaagtctgtgcttctgcttgactgaggatcatctaggaaatgaaactaaac

SEQ ID NO: 573831 - DNA, 120 bp, Artificial Sequence
  ENSG00000171132_59 (sequence is synthesized)
aatacctaactctgcattctgtgaaagggagagagttgaaatgaggcacagctgaagtttcaccactccattattctgccatcaagcatcccttcagctcccatctctcaaatgctgcag

SEQ ID NO: 573832 - DNA, 120 bp, Artificial Sequence
  ENSG00000171132_60 (sequence is synthesized)
ccccatcaatggaaaaaaatacattcatgggaattgcacaaagtttacaacacatgcaaattccaaggagctcagagagaggtgtgggggtgagatggtgtgactacacccccttcttct

SEQ ID NO: 573833 - DNA, 120 bp, Artificial Sequence
  ENSG00000171132_61 (sequence is synthesized)
aggatgcgccgaaggattctttttcttgctcatatgctgttagaaagcctgggcgtttacgtctgctggagctggagctaatgtgatttctaactgtctaataaaattccactgcttgca

SEQ ID NO: 573834 - DNA, 120 bp, Artificial Sequence
  ENSG00000171132_62 (sequence is synthesized)
actccgagcccgcgcggatgtgagattccgggctcctggcgcctcccgatcgccggctccggcgcggcgctgcttcgcccaggaggcggcggccccggctggccgtggggcttgtggatt

SEQ ID NO: 573835 - DNA, 120 bp, Artificial Sequence
  ENSG00000171132_63 (sequence is synthesized)
ggcttgtggatttttaaaaatttggctccgaggaggaccatttcctctcgacatgcatccctccggatagactgaacatccctccgttcacccccccgccccgcgcggtcagaggcaggc

SEQ ID NO: 573836 - DNA, 120 bp, Artificial Sequence
  ENSG00000171132_64 (sequence is synthesized)
gctgagtgtgcgaagaggatccgggttgaaatctgcgcccccggttctcgtccccgccccgtcccaccgccccatccccctcccggagtcgaaatttcccgggattatgtttcggaaagg

SEQ ID NO: 573837 - DNA, 120 bp, Artificial Sequence
  ENSG00000171132_65 (sequence is synthesized)
atttccctccagccctgctccttttcaacatgccaggctgcttggctgggttatctttaatcactttgtttaccattggcgtgacgggattttcttggccttgtgaagtacagggagcct

SEQ ID NO: 573838 - DNA, 120 bp, Artificial Sequence
  ENSG00000171132_66 (sequence is synthesized)
caggatagcttcactgggggtgtcattacatggtcattatcagtgagacacaaccgcttcagatgggcagtgaaaaagacgatggaaaggccaggacaccacggaagttctgaaggggta

SEQ ID NO: 573839 - DNA, 120 bp, Artificial Sequence
  ENSG00000171132_67 (sequence is synthesized)
ggcacaacaaggctgtactctgcccaggctggctcgctagaggctggggacccctgggtcaccaccacagaggccgaggatgcaacagcacaacagctttcaggcctgacttccattcct

SEQ ID NO: 573840 - DNA, 120 bp, Artificial Sequence
  ENSG00000171132_68 (sequence is synthesized)
tcggaagagctgttgattttgtagtttgttcagcgttttgcttgttagaatggagtgctgctgacttctaagccccttaggtgccagacttcaatgagcagtctgcaaaatgaatgttca

SEQ ID NO: 573841 - DNA, 120 bp, Artificial Sequence
  ENSG00000171132_69 (sequence is synthesized)
gagagagctgtagaattctttgcagccagagttggacaaagccaaatggctaaactcactgtttgctcattggaaaaaccaacaagtgtggttagtccttgctctgctcctaactttcta

SEQ ID NO: 573842 - DNA, 120 bp, Artificial Sequence
  ENSG00000171132_70 (sequence is synthesized)
tcactaatcaaatcacttaacttctaagttattttcatgtcatatgaaaaagagtaaaggccaccttaatctcttctaatctgtgtaatgtcatctgaaataaaggatgtgaacaaatgc

SEQ ID NO: 573843 - DNA, 120 bp, Artificial Sequence
  ENSG00000171132_71 (sequence is synthesized)
agttggggaaggcttttgggagaaggcgacatttcagcagagacctgaaaggagaaactggagacagtttaatgtgactactgcgaaagacacaaccgcttcagatgggcagtgaaaaag

SEQ ID NO: 573844 - DNA, 120 bp, Artificial Sequence
  ENSG00000171132_72 (sequence is synthesized)
ctgaaagcagaagagattcaattgctgttattcacatgattactatcgtgccaggagggagtgtcagggaagttaacaaaacaggccaggtgtggtggctcacaactgtaatcccggcac

SEQ ID NO: 573845 - DNA, 120 bp, Artificial Sequence
  ENSG00000171132_73 (sequence is synthesized)
tttgggaggccgaggtgggctgattgcttgaggtcagcagtttgagacaagcctgagcaacatgggtttgcagaatacagagctaacaagattacatggggcttagggggtcatgctgcc

SEQ ID NO: 573846 - DNA, 120 bp, Artificial Sequence
  ENSG00000171132_74 (sequence is synthesized)
tactggccccatctgcagcggattatttcttccttcctaaaaatccaggctgcttcttgccatgtggagacaatgagctccttaaccaagggtgaaaaagaccaaccaaatcaaaacaaa

SEQ ID NO: 573847 - DNA, 120 bp, Artificial Sequence
  ENSG00000171132_75 (sequence is synthesized)
cacccaggaagagttggtcaggggatgcgtattacagtaaaaatgacaaagaccagaggtggctgaggctctccctaagacaatgtctttaggccccaagtgtttactattgaaaacatg

SEQ ID NO: 573848 - DNA, 120 bp, Artificial Sequence
  ENSG00000171132_76 (sequence is synthesized)
taacctactacagcagcacccaagatgatgatttacgtgggccacagaacaccttttgtctttacagagattcaatttatttattttgattgaaaatgacaaatgatactagttttccat

SEQ ID NO: 573849 - DNA, 120 bp, Artificial Sequence
  ENSG00000171132_77 (sequence is synthesized)
cagtttgaggagctgctgcagaacgggagccgccacttcgaggactgggggctggtgagggtcagcactagtggtgagaattctggagaacattttctttacccagaaacttaaaatcat

SEQ ID NO: 573850 - DNA, 120 bp, Artificial Sequence
  ENSG00000171132_78 (sequence is synthesized)
ggactcttggggagaaaggaatgagaaaaggcagcatgcggaattaccagtttgttatttggttcccatctggatttaaaaccgaagatcccaaactcagattgatctggagccagaagg

SEQ ID NO: 573851 - DNA, 120 bp, Artificial Sequence
  ENSG00000171132_79 (sequence is synthesized)
aagaaagacagagaccagtttccagtgagctcctgaggtcaccctagagaatcctttacttacctgtgctgaaaaaaatgctcccatcagttaccctatgatgaggtctccagccctttc

SEQ ID NO: 573852 - DNA, 120 bp, Artificial Sequence
  ENSG00000171132_80 (sequence is synthesized)
tctcagggtcgtcgggtgaagagtgacttgcccatggccagaggctacaagaggctccagcaaaccctgccagagaggagtgactcactgaatccacagaccacgtctaatggcagggaa

SEQ ID NO: 573853 - DNA, 120 bp, Artificial Sequence
  ENSG00000171132_81 (sequence is synthesized)
ctccacaaagaatgctctccgttcatttattgcttgatagacacctctaatgtataaagggctatgttgaaatttaggattccctcgggctatgcctgtcaccgaggactgagtgctcct

SEQ ID NO: 573854 - DNA, 120 bp, Artificial Sequence
  ENSG00000171132_82 (sequence is synthesized)
gccatggagaggcaggtgggccaggtggcctgggctcccgcaaaatgggtgaggcaagaccccctcagagcagtaactccaggaaccacttgcctccacctgccagccctgcctgcacct

SEQ ID NO: 573855 - DNA, 120 bp, Artificial Sequence
  ENSG00000171133_0 (sequence is synthesized)
agttgctgatacggaattcagatgggaggaccaattcttcttggctactattaaatacttttgaatatcaaatctcagattaaatgaagggaatagtactggaagaaatatagatgaaag

SEQ ID NO: 573856 - DNA, 120 bp, Artificial Sequence
  ENSG00000171133_1 (sequence is synthesized)
aaagaaaatgcaaggagaaaacttcaccatttggagcatttttttcttggagggattttcccagtacccagggttagaagtggttctcttcgtcttcagccttgtaatgtatctgacaac

SEQ ID NO: 573857 - DNA, 120 bp, Artificial Sequence
  ENSG00000171133_2 (sequence is synthesized)
gctcttgggcaacagcactcttattttgatcactatcctagattcacgccttaaaacccccatgtacttattccttggaaatctctctttcatggatatttgttacacatctgcctctgt

SEQ ID NO: 573858 - DNA, 120 bp, Artificial Sequence
  ENSG00000171133_3 (sequence is synthesized)
tcctactttgctggtgaacttgctgtcatcccagaaaaccattatcttttctgggtgtgctgtacagatgtatctgtcccttgccatgggctccacagagtgtgtgctcctggccgtgat

SEQ ID NO: 573859 - DNA, 120 bp, Artificial Sequence
  ENSG00000171133_4 (sequence is synthesized)
ctggaaaccagttttgccctgcagatacccctctgtgggaatctcatcgatcacttcacgtgtgaaattctggcggtgctaaagttagcttgcacaagttcactgctcatgaacaccatc

SEQ ID NO: 573860 - DNA, 120 bp, Artificial Sequence
  ENSG00000171133_5 (sequence is synthesized)
atgctggtggtcagcattctcctcttgccaattccaatgctcttagtttgcatctcttacatcttcatcctttccactattctgagaatcacctcagcagagggaagaaacaaggctttt

SEQ ID NO: 573861 - DNA, 120 bp, Artificial Sequence
  ENSG00000171133_6 (sequence is synthesized)
tctacctgtggtgcccatttgactgtggtgattttgtattatggggctgccctctctatgtacctaaagccttcttcatcaaatgcacaaaaaatagacaaaatcatctcgttgctttac

SEQ ID NO: 573862 - DNA, 120 bp, Artificial Sequence
  ENSG00000171133_7 (sequence is synthesized)
ggagtgcttacccctatgttgaaccccataatttacagtttaagaaacaaggaagtcaaagatgctatgaagaaattgctgggcaaaataacattgcatcaaacacacgaacatctctga

SEQ ID NO: 573863 - DNA, 120 bp, Artificial Sequence
  ENSG00000171135_0 (sequence is synthesized)
ctcttcacggagccgcgcggctgcgggggcgcaaatagggtcagtgggccgcttggcggtgtcgttgcggtaccaggtccgcgtgaggggttcgggggttctgggcaggcacaatggcgt

SEQ ID NO: 573864 - DNA, 120 bp, Artificial Sequence
  ENSG00000171135_1 (sequence is synthesized)
ctcgagcaggcccgcgagcggccggcaccgacggcagcgactttcagcaccgggagcgcgtcgccatgcactaccagatgagtgtgactctcaagtatgaaatcaagaagctgatctacg

SEQ ID NO: 573865 - DNA, 120 bp, Artificial Sequence
  ENSG00000171135_2 (sequence is synthesized)
tacatctggtcatatggctgctgctggttgctaagatgagcgtgggacacctgaggctcttgtcacatgatcaggtggccatgccctatcagtgggaatacccgtatttgctgagcattt

SEQ ID NO: 573866 - DNA, 120 bp, Artificial Sequence
  ENSG00000171135_3 (sequence is synthesized)
tgccctctctcttgggccttctctcctttccccgcaacaacattagctacctggtgctctccatgatcagcatgggactcttttccatcgctccactcatttatggcagcatggagatgt

SEQ ID NO: 573867 - DNA, 120 bp, Artificial Sequence
  ENSG00000171135_4 (sequence is synthesized)
tccctgctgcacagcagctctaccgccatggcaaggcctaccgtttcctctttggtttttctgccgtttccatcatgtacctggtgttggtgttggcagtgcaagtgcatgcctggcagt

SEQ ID NO: 573868 - DNA, 120 bp, Artificial Sequence
  ENSG00000171135_5 (sequence is synthesized)
tgtactacagcaagaagctcctagactcttggttcaccagcacacaggagaagaagcataaatgaagcctctttggggtgaagcctggacatcccatcgaatgaaaggacactagtacag

SEQ ID NO: 573869 - DNA, 120 bp, Artificial Sequence
  ENSG00000171135_6 (sequence is synthesized)
agctccttttgccatctgctgaggtggcaaaactataatttattcctggttggctagaactgggtgaccaacagctatgaaacaaatttcagctgtttgaagttgaactttgaggttttt

SEQ ID NO: 573870 - DNA, 120 bp, Artificial Sequence
  ENSG00000171135_7 (sequence is synthesized)
ctttaagaatgagcttcgtccttgcctctactcggtcattctccccatttccatccattaccccttagccattgagactaaaggaaatagggaataaatcaaattacttcatctctaggt

SEQ ID NO: 573871 - DNA, 120 bp, Artificial Sequence
  ENSG00000171135_8 (sequence is synthesized)
cacgggtcaggaaacatttgggcagctgctcccttggcaggctgtggtctcctctgcaaagcattttaattaaaaacctcaataaagatggccctgcccacactgtgccttgtgtttggg

SEQ ID NO: 573872 - DNA, 120 bp, Artificial Sequence
  ENSG00000171135_9 (sequence is synthesized)
gcttgatagagtgtgaaaggtgtgttgcttgaaaggtgtggccttagacactaggagatgatgggtagaagctccttgagaaacctagcagtggccatagagaagtagactgggtatggg

SEQ ID NO: 573873 - DNA, 120 bp, Artificial Sequence
  ENSG00000171135_10 (sequence is synthesized)
gaacctaagtcatagttgtaacctacagctgattggtaagaactatgggccagacatttaatctctccatctatgaaatagtccattctcatttatctaccttaggttatgggctcttct

SEQ ID NO: 573874 - DNA, 120 bp, Artificial Sequence
  ENSG00000171135_11 (sequence is synthesized)
tttagttggatattcacatttatctttcagtgttaactgggtatcagttatgagtctactactgtataatggcatccaaaagaattttaaagtacctcggtttatagggatttacaattc

SEQ ID NO: 573875 - DNA, 120 bp, Artificial Sequence
  ENSG00000171135_12 (sequence is synthesized)
agtagaaacttgttattcatgtgaaacagtgaacataatatctaatgatgtggagcaagtacattaaaaacaggaaggaagagatctgtgattaaactaaaggccctttcacacctaaaa

SEQ ID NO: 573876 - DNA, 120 bp, Artificial Sequence
  ENSG00000171135_13 (sequence is synthesized)
tgttttattcaaatttgtatcccagtgtccagtacagttgtctggcatatagttggtggtaagaaaaatttgaaagatacttctccctctgctctgccccacagtgtgactctcaagtat

SEQ ID NO: 573877 - DNA, 120 bp, Artificial Sequence
  ENSG00000171136_0 (sequence is synthesized)
gccaagaggcagcagagacactggcccactctcacgttcaaagcatctccgtccagcatggccaggtacatgctgctgctgctcctggcggtatgggtgctgaccggggagctgtggccg

SEQ ID NO: 573878 - DNA, 120 bp, Artificial Sequence
  ENSG00000171136_1 (sequence is synthesized)
ggagctgaggcccgggcagcgccttacggggtcaggctttgcggccgagaattcatccgagcagtcatcttcacctgcgggggctcccggtggagacgatcagacatcctggcccacgag

SEQ ID NO: 573879 - DNA, 120 bp, Artificial Sequence
  ENSG00000171136_2 (sequence is synthesized)
gctatgggagataccttcccggatgcagatgctgatgaagacagtctggcaggcgagctggatgaggccatggggtccagcgagtggctggccctgaccaagtcaccccaggccttttac

SEQ ID NO: 573880 - DNA, 120 bp, Artificial Sequence
  ENSG00000171136_3 (sequence is synthesized)
agggggcgacccagctggcaaggaacccctggggttcttcggggcagccgagatgtcctggctggcctttccagcagctgctgcaagtgggggtgtagcaaaagtgaaatcagtagcctt

SEQ ID NO: 573881 - DNA, 120 bp, Artificial Sequence
  ENSG00000171136_4 (sequence is synthesized)
gagggctgggcagccgtgggcaccaggaccaatgccccagtcctgccatccactcaactagtgtctggctgggcacctgtctttcgagcctcacacattcattcattcatctacaagtca

SEQ ID NO: 573882 - DNA, 120 bp, Artificial Sequence
  ENSG00000171136_5 (sequence is synthesized)
cagaggcactgtgggctcaggcacagtctcccgacaccacctatccaaccctgccctttgaccagcctatcatgaccctggcccctaaggaagctgtgcccctgcctggtcaagtgggga

SEQ ID NO: 573883 - DNA, 120 bp, Artificial Sequence
  ENSG00000171136_6 (sequence is synthesized)
cccccccatcctgacccctgacctctccccagccctaaccatgcgtttgcctggcctacacactccactgccacaactgggtccctactctacctaggctggccacacagagacccctgc

SEQ ID NO: 573884 - DNA, 120 bp, Artificial Sequence
  ENSG00000171136_7 (sequence is synthesized)
ccccttcccagtccaaactgtggccattgtcccctgaccagctaaaatcaagcctctgtctcagtccagcctttgcacgcacgcttcctttgccctgctttccatcccctctccctccaa

SEQ ID NO: 573885 - DNA, 120 bp, Artificial Sequence
  ENSG00000171136_8 (sequence is synthesized)
ctcccctgccagagttccaaggctgtggaccccagagaaggtggcaggtggcccccctaggagagctctgggcacattcgaatcttcccaaactccaataataaaaattcgaagactttg

SEQ ID NO: 573886 - DNA, 120 bp, Artificial Sequence
  ENSG00000171148_0 (sequence is synthesized)
cttccggttctgtacccccatcctttctctcgcccctcctacccgcagctcctggcgctcggcggggctaactgcagcgcggagatctcggccgccaagctccgcctcccgccccgggct

SEQ ID NO: 573887 - DNA, 120 bp, Artificial Sequence
  ENSG00000171148_1 (sequence is synthesized)
gtgccccggggctcgcctgaggccgaccacccgcaccccacctctagcggctttgctcgaggcccaccttcttcccacccccggcaaactccagtaggctcgccctcgctgactccccgc

SEQ ID NO: 573888 - DNA, 120 bp, Artificial Sequence
  ENSG00000171148_2 (sequence is synthesized)
ccccgcgtcaactgcaaggggcccgcccatagccagttccggggcggttgctcacatcgaccggaactccccgccccctcccgcggcccctggggccgtaggaggccgcagcgaggaggt

SEQ ID NO: 573889 - DNA, 120 bp, Artificial Sequence
  ENSG00000171148_3 (sequence is synthesized)
agagggggcgggggtcgcactagggtgtccctagagaacgaggactctgaaggcgggacatttgggcgacccccgggcggggccagccattaaacagtcccacttctgtgccagacactg

SEQ ID NO: 573890 - DNA, 120 bp, Artificial Sequence
  ENSG00000171148_4 (sequence is synthesized)
aactgggctcttgacgggcatcatctcttaatcctcagaacatcccagggagctccacaggatccccatatcctgggccatgagtgagttgaaagactgccccttgcagttccacgactt

SEQ ID NO: 573891 - DNA, 120 bp, Artificial Sequence
  ENSG00000171148_5 (sequence is synthesized)
caagtctgtggatcacctgaaggtctgtccccgctacacggcagtgctggcacgctctgaggatgatggcatcggcatcgaggagctggacaccctgcagctggagctggagaccctgct

SEQ ID NO: 573892 - DNA, 120 bp, Artificial Sequence
  ENSG00000171148_6 (sequence is synthesized)
gtcttctgccagccggcgcctgcgtgtgcttgaggccgaaacccagatcctcaccgactggcaggataagaaaggtgacagacgattcctgaagctgggtcgagaccatgaacttggagc

SEQ ID NO: 573893 - DNA, 120 bp, Artificial Sequence
  ENSG00000171148_7 (sequence is synthesized)
tccccccaaacatgggaagcccaagaagcagaaactggaagggaaggcaggacatgggccgggccctggcccaggacggcccaaatccaaaaaccttcagcccaagatccaggaatatga

SEQ ID NO: 573894 - DNA, 120 bp, Artificial Sequence
  ENSG00000171148_8 (sequence is synthesized)
attcactgatgaccctatcgacgtgccacggatccccaaaaatgatgcccccaacaggttctgggcttcagtggagccctactgtgctgacatcaccagcgaggaggtccgcacacttga

SEQ ID NO: 573895 - DNA, 120 bp, Artificial Sequence
  ENSG00000171148_9 (sequence is synthesized)
ctgggcccaggaggacctgctggaggagcagaaggatggggcccgggcagcggctgtggctgacaagaagaaaggcctcatggggccactgaccgaactggacactaaagatgtggatgc

SEQ ID NO: 573896 - DNA, 120 bp, Artificial Sequence
  ENSG00000171148_10 (sequence is synthesized)
cctgctgaagaagtctgaggcccagcatgaacagccggaagatggatgcccctttggtgccctgacgcagcgcctcctgcaggccctggtggaggaaaatattatttcccctatggagga

SEQ ID NO: 573897 - DNA, 120 bp, Artificial Sequence
  ENSG00000171148_11 (sequence is synthesized)
ttctcctattcctgacatgtctgggaaagaatcaggggctgacggggcaagcacctcccctcgcaatcagaacaagcccttcagtgtgccgcatactaagtccctggagagccgcatcaa

SEQ ID NO: 573898 - DNA, 120 bp, Artificial Sequence
  ENSG00000171148_12 (sequence is synthesized)
ggaggagctaattgcccagggccttttggagtctgaggaccgccccgcagaggactccgaggatgaggtccttgctgagcttcgcaaacggcaggctgagctgaaggcacttagtgccca

SEQ ID NO: 573899 - DNA, 120 bp, Artificial Sequence
  ENSG00000171148_13 (sequence is synthesized)
caaccgcaccaagaagcacgacctgctgaggctggcaaaggaggaggtgagccggcaggagctgaggcagcgggtgcgcatggctgacaacgaggtcatggacgcctttcgcaagatcat

SEQ ID NO: 573900 - DNA, 120 bp, Artificial Sequence
  ENSG00000171148_14 (sequence is synthesized)
ggctgcccggcagaagaagcggactcccaccaagaaagaaaaggaccaggcctggaagactctgaaggagcgtgagagcatcctgaagctgctggatgggtagccctcacccctgcctca

SEQ ID NO: 573901 - DNA, 120 bp, Artificial Sequence
  ENSG00000171148_15 (sequence is synthesized)
ggctgattatctggcctaggggaggggaagggaggcccacttccttctttgggcacaggaaacattggcctgtggctgtccctcaaatggcggcagtctctagagggccgtggcccttcc

SEQ ID NO: 573902 - DNA, 120 bp, Artificial Sequence
  ENSG00000171148_16 (sequence is synthesized)
cctgaggtcttttggcctagctctgtacaaccaggacacaggaagccctgctgggctagcctgaggcctagtctctgcttggtccccgagatggggttggaggggacttcgtttctgggt

SEQ ID NO: 573903 - DNA, 120 bp, Artificial Sequence
  ENSG00000171148_17 (sequence is synthesized)
cttcctcttcccctctttaccatcccccactccctaatcccctacccctgtctccccttcaaggacttctcccttgtggttttgtaaagtgcaaacttaagaataaagtgactgctgtgg

SEQ ID NO: 573904 - DNA, 120 bp, Artificial Sequence
  ENSG00000171148_18 (sequence is synthesized)
tttttcaaaaaaagcatccagtctttgaatgtctgttacagtggggaggaaggaaccagtgtgggtggtaaggtttgtggggggtatgcttggtggctctcagcccatggccactaaccc

SEQ ID NO: 573905 - DNA, 120 bp, Artificial Sequence
  ENSG00000171148_19 (sequence is synthesized)
accatctatgctccgagcggggtagagagcccttacgaacgcttgggccttccggaagttttccacctagggctgtctcggtatttttaaattcttgcactcgagtcactatttaagctc

SEQ ID NO: 573906 - DNA, 120 bp, Artificial Sequence
  ENSG00000171148_20 (sequence is synthesized)
ctacaggatcaagtccacgcatcccagtccttgctggcacagctccagtgcccctctccattttcctcggccatatccctcttcattgccgtgttgaccagtcccaccaagtatctcgcc

SEQ ID NO: 573907 - DNA, 120 bp, Artificial Sequence
  ENSG00000171148_21 (sequence is synthesized)
ctcattccaggacaccacagcctcctcgctggtctctgggcctctggcaagctcttctctccctcttgtctccttgacagacttgactcacccttcaaggccctgatctcatgttacctc

SEQ ID NO: 573908 - DNA, 120 bp, Artificial Sequence
  ENSG00000171148_22 (sequence is synthesized)
caccaaagcactctttcagattccccagcagaaagttagtcagtctctcctttgtgctgccacaacactttgatctctctctttcacttcacttatctgatttcttaaaaatttatctga

SEQ ID NO: 573909 - DNA, 120 bp, Artificial Sequence
  ENSG00000171148_23 (sequence is synthesized)
aaaagagttcatacagacagcagtaaattcaagcaatacaaaaggtaattccctgtcacccgtgacctgaaggctcctaattctctcgagaggcaattgctgtgacctgagacaatctgt

SEQ ID NO: 573910 - DNA, 120 bp, Artificial Sequence
  ENSG00000171148_24 (sequence is synthesized)
gtacgtattctgcaccttctatcttgggaattatttcagattggcttctgtgtgtgtgtcttagttctttttggacctgtctcccttactagagtgtgaagtacaggttttatcttcgtt

SEQ ID NO: 573911 - DNA, 120 bp, Artificial Sequence
  ENSG00000171148_25 (sequence is synthesized)
gtactttcttacctacacctgacactgggcttggccttggactagggacttgagagagatataagataggtaagtgaatgaatgaatgaagcatggctggccagtgcttacccactcagg

SEQ ID NO: 573912 - DNA, 120 bp, Artificial Sequence
  ENSG00000171148_26 (sequence is synthesized)
tcacctttcaggggttttacaacaggctttccaatcctggctggcctctaaatcacctggagagcctcgaaaaaaacagcagtggccagtccaccgggtatgtcccaaacaaattctgat

SEQ ID NO: 573913 - DNA, 120 bp, Artificial Sequence
  ENSG00000171148_27 (sequence is synthesized)
tgtcccaaacaaattctgattccacagagtggggctcaggcatctgtgactgaccgattgatttgatttgtttttgttttgtttttttttgagagggagtctcgcactgtcacccaggct

SEQ ID NO: 573914 - DNA, 73 bp, Artificial Sequence
  ENSG00000171148_28 (sequence is synthesized)
aggcgtgagccactgcgcctggcctagtttggttttttaattatggtaaaggcataatataaaatgtatctcc

SEQ ID NO: 573915 - DNA, 120 bp, Artificial Sequence
  ENSG00000171148_29 (sequence is synthesized)
gtgaaactgcatctcaaaaaaaaaaagaaaaaaaatttacgcttcttaaccatttttaagtgtacagtttagtagtgttacccatattcacattgttgtgtgatttattttttgtctttt

SEQ ID NO: 573916 - DNA, 120 bp, Artificial Sequence
  ENSG00000171148_30 (sequence is synthesized)
ttattttttgtcttttcatgcttcttttctttttatccccaaagttttgttattaaaaatttgatacacacagaaaatctgaaagaatcatacaataaacatcagtatattctccaccta

SEQ ID NO: 573917 - DNA, 120 bp, Artificial Sequence
  ENSG00000171150_0 (sequence is synthesized)
ggcagccgcgcagagcgcgcacccaagcggccggacctccccgactcccgggccgcccccgtctcgcgccctgcctccctccttcggccttcacctacccgcctccggattggccgctag

SEQ ID NO: 573918 - DNA, 120 bp, Artificial Sequence
  ENSG00000171150_1 (sequence is synthesized)
gaatcccgcccctctaaagccctgcctgctattggtcacgattttataatcaatggataaagtgggaaaaatgtggaataacttcaaatacaggtgtcagaatctcttcggtcatgaggg

SEQ ID NO: 573919 - DNA, 120 bp, Artificial Sequence
  ENSG00000171150_2 (sequence is synthesized)
aggaagccgtagtgaaaatgtggacatgaactccaacagatgtttgtctgtcaaagagaaaaacatcagcataggagactcaactcctcagcaacaaagcagtcccttaagagaaaatat

SEQ ID NO: 573920 - DNA, 120 bp, Artificial Sequence
  ENSG00000171150_3 (sequence is synthesized)
tgccttacaactgggattaagcccttcgaagaattcttcaaggagaaatcaaaattgtgccacagaaatccctcaaattgttgaaataagcatcgaaaaggataatgattcttgtgttac

SEQ ID NO: 573921 - DNA, 120 bp, Artificial Sequence
  ENSG00000171150_4 (sequence is synthesized)
cccaggaacaagacttgcacgaagagattcctactctcgacatgctccatggggtgggaagaaaaaacattcctgttctacaaagacccagagttcattggatgctgataaaaagtttgg

SEQ ID NO: 573922 - DNA, 120 bp, Artificial Sequence
  ENSG00000171150_5 (sequence is synthesized)
tagaactcgaagtggacttcaaaggagagagaggcgctacggcgtaagttctgtacacgacatggacagtgtttccagcagaactgtaggaagtcgctctctaagacagaggttgcagga

SEQ ID NO: 573923 - DNA, 120 bp, Artificial Sequence
  ENSG00000171150_6 (sequence is synthesized)
tactgtgggcttgtgttttcccatgagaacttacagcaagcagtcaaagcctctcttttccaataaaagaaaaatccatctctctgaattaatgcttgagaaatgcccttttcctgctgg

SEQ ID NO: 573924 - DNA, 120 bp, Artificial Sequence
  ENSG00000171150_7 (sequence is synthesized)
ctcagatttagcccaaaaatggcatttgattaaacagcatacagctcctgtgagcccacattcaacattttttgatacatttgatccatctttggtttctacagaagatgaagaagatag

SEQ ID NO: 573925 - DNA, 120 bp, Artificial Sequence
  ENSG00000171150_8 (sequence is synthesized)
gcttagagagagaaggcggcttagtattgaagaaggggttgatccccctcccaatgcacaaatacatacatttgaagctactgcacaggttaatccattatataaactgggaccaaaatt

SEQ ID NO: 573926 - DNA, 120 bp, Artificial Sequence
  ENSG00000171150_9 (sequence is synthesized)
agctcctggaatgactgaaataagtggggacagttctgcaattccacaagctaattgtgactcggaagaggatacaaccaccctgtgtttgcagtcacggaggcagaagcagcgtcagat

SEQ ID NO: 573927 - DNA, 120 bp, Artificial Sequence
  ENSG00000171150_10 (sequence is synthesized)
atctggagacagccatacccatgttagcagacagggagcttggaaagtccacacacagattgattacatacactgcctcgtgcctgatttgcttcaaattacagggaatccctgttactg

SEQ ID NO: 573928 - DNA, 120 bp, Artificial Sequence
  ENSG00000171150_11 (sequence is synthesized)
gggagtgatggaccgttatgaagcagaagcccttctcgaagggaaacctgaaggcacgtttttgctcagggactctgcgcaagaggactacctcttctctgtgagcttccgccgctacaa

SEQ ID NO: 573929 - DNA, 120 bp, Artificial Sequence
  ENSG00000171150_12 (sequence is synthesized)
cagatccctgcatgcccgaattgagcagtggaatcacaactttagtttcgacgcccatgacccgtgtgtatttcactcctccactgtaacgggacttttagaacattataaagatcccag

SEQ ID NO: 573930 - DNA, 120 bp, Artificial Sequence
  ENSG00000171150_13 (sequence is synthesized)
ttcgtgcatgttttttgaaccattgcttactatatcactaaataggactttcccttttagcctgcagtatatctgtcgcgcggtaatctgcaggtgcactacgtatgatggaattgatgg

SEQ ID NO: 573931 - DNA, 120 bp, Artificial Sequence
  ENSG00000171150_14 (sequence is synthesized)
gctccctctaccctcaatgttacaggattttttaaaagagtatcattataaacaaaaagttagagttcgctggttggaacgagaaccagtcaaggcaaagtaaactctccggtccccaaa

SEQ ID NO: 573932 - DNA, 120 bp, Artificial Sequence
  ENSG00000171150_15 (sequence is synthesized)
ggttgttaactaggtccgctttcatgtgcatcagacagtacacctatagcaagcacacgtagcagtgttaggctttttcatacagtatgtaagcttagtgttagtatctgtcagatgcta

SEQ ID NO: 573933 - DNA, 120 bp, Artificial Sequence
  ENSG00000171150_16 (sequence is synthesized)
cctgctgttacttattcagataaacatggtgcctattggaacaatagcggatagagctacaggtgttcagtaagactacaaaaacattttgcctatttcgctaacagtttggtttttaat

SEQ ID NO: 573934 - DNA, 120 bp, Artificial Sequence
  ENSG00000171150_17 (sequence is synthesized)
ggctgtggtatttgagtgaggcaactctggggcatttgttatgaagaattctatttcttactgaagaacaaattattaatattggatgagtatttcaacagtgtgactaatgtttgaaat

SEQ ID NO: 573935 - DNA, 120 bp, Artificial Sequence
  ENSG00000171150_18 (sequence is synthesized)
tattttttctaagagtttttctataaccttccaaaagtcgtgatgtttgtagttactataaatcaagctttggaagtccaaaaagaataaaagactgccttccttttagaaaaaaatgca

SEQ ID NO: 573936 - DNA, 120 bp, Artificial Sequence
  ENSG00000171150_19 (sequence is synthesized)
aagtaaaccagattttctaaataggcattcttaaaatttcagacttacaaagctagtagtagaattttattgaaaggcctaggtattaattttttaaatgagtgctttaacttaaaacag

SEQ ID NO: 573937 - DNA, 120 bp, Artificial Sequence
  ENSG00000171150_20 (sequence is synthesized)
gcgtttggaatagctgctgcaatgtagtcttgtgtgtgatttttttttaagttgatgtgcagtctaattgttgtttcataaaagttggatctgttcctatgcccaggatgattttgtgaa

SEQ ID NO: 573938 - DNA, 120 bp, Artificial Sequence
  ENSG00000171150_21 (sequence is synthesized)
ccgtgaagtacgtgagactagaagacgcccaaacaagtcagataatagtaactacaatggttgctgatgttgagattattgttgaactataattaataatttggatggcagaatttatct

SEQ ID NO: 573939 - DNA, 120 bp, Artificial Sequence
  ENSG00000171150_22 (sequence is synthesized)
cttttttgtaaactctcataactgaattgcttaagtataatttatagaatttcagtgcagttcattcttaatggaaaatctgaaacctaaattgcagatttaaaaggtactgtacaacca

SEQ ID NO: 573940 - DNA, 120 bp, Artificial Sequence
  ENSG00000171150_23 (sequence is synthesized)
ttatatctgtaaataacttagcacctttttgtcacttagaataatatgtactactacttgagtgagcgcttttggaagttatatcaagttctagtgtttgcttcttagtaactgaactga

SEQ ID NO: 573941 - DNA, 120 bp, Artificial Sequence
  ENSG00000171150_24 (sequence is synthesized)
atttacagttctgtcctagacattttgcactaaagtagccgaatccactctcatgtcttttcgttaatgtgctctgtaccactggtgagtgctccatagtttccttacctgctgctacag

SEQ ID NO: 573942 - DNA, 120 bp, Artificial Sequence
  ENSG00000171150_25 (sequence is synthesized)
aatgttattttacatccctatggctattgccaaggctacaaaaaaggaaagctatatttgtatgcaacactaaccttttgactgctaatgtatgtttctgcttgctgtgccttgttatgg

SEQ ID NO: 573943 - DNA, 120 bp, Artificial Sequence
  ENSG00000171150_26 (sequence is synthesized)
ctgctttttttgtgctaataaagtatgtttggtgttctccttgtatatctgctgttttatacatttgcaacaatttctcttgtaaatggaatggtttggggtttttaaataagcattaac

SEQ ID NO: 573944 - DNA, 120 bp, Artificial Sequence
  ENSG00000171150_27 (sequence is synthesized)
taacaacctttctatagttaatgcagagttaatgaacagtctaatattgacttatcagaataagctaactctaaatttaatgctctacatcttatcagtcataattatatatactgtgga

SEQ ID NO: 573945 - DNA, 120 bp, Artificial Sequence
  ENSG00000171150_28 (sequence is synthesized)
acagtatctgtagttactgcaaattactgtacagtttaggttataacagaaaactgacagagaagtaataaacctattgatttctctgcttataaatgaaagattgaaactatccaatga

SEQ ID NO: 573946 - DNA, 120 bp, Artificial Sequence
  ENSG00000171150_29 (sequence is synthesized)
catattatagtaaatgagtatctgtaacctcccactgcatcagaagcaggttaaatgaagtcttgtgaatttgtaatagatcagtaccatttattggtttggggaccatcttaattaaaa

SEQ ID NO: 573947 - DNA, 120 bp, Artificial Sequence
  ENSG00000171150_30 (sequence is synthesized)
ataaatgcccaaaatgtagaactttaaccaaagacttgtcccttttaaagcaaaatggggattgaagggacttataatttctgttgtttctaattaaagtccctgaagatcatataccaa

SEQ ID NO: 573948 - DNA, 120 bp, Artificial Sequence
  ENSG00000171150_31 (sequence is synthesized)
agtgtttgagaacttcatccaaacctactttaaagcattatgtgcaattaagttgttatgacataattatattgcctaattgttgggtcttttttcttgagcttataatgtacctggaaa

SEQ ID NO: 573949 - DNA, 120 bp, Artificial Sequence
  ENSG00000171150_32 (sequence is synthesized)
ataaacctcttgagaaaaagaaaagttcatactgattattggaaaaggactatatatgtgagcaagattgtgttttagagaggaaacttgaaactccaagaaagcacttgatgtttttat

SEQ ID NO: 573950 - DNA, 120 bp, Artificial Sequence
  ENSG00000171150_33 (sequence is synthesized)
atgcttgtagcaaattgatgttctaactgtagttttatagaaagtattaatgcttttatgtatttcaaaactttcatatgttaaatggaaattgttttaaatgtgtttgagtttatgtaa

SEQ ID NO: 573951 - DNA, 120 bp, Artificial Sequence
  ENSG00000171150_34 (sequence is synthesized)
gcatgtatacactgtgctaaaagtcacatgtttcagtttgtgtataatattaatatgcaatttttggtttaaatttttgtcttaaaatattagtggcttacattttaaaaaagaaaaatc

SEQ ID NO: 573952 - DNA, 120 bp, Artificial Sequence
  ENSG00000171150_35 (sequence is synthesized)
accagcatgaacttgcacctaagtctatattcactgtgtccttttctgaatcccattgtagcctgtcaactaaatttgagtgttaacggtctttttaaagtgcatttaaatacaaaccag

SEQ ID NO: 573953 - DNA, 120 bp, Artificial Sequence
  ENSG00000171150_36 (sequence is synthesized)
gaatttctttagaagttgagatacatctttatagttgaaataattaacccaagaaaaggttgctttgatttgtacccattctcattcattttcttcattcccttacacacacacacacac

SEQ ID NO: 573954 - DNA, 120 bp, Artificial Sequence
  ENSG00000171150_37 (sequence is synthesized)
ctctcccttccgcatacatataagtgtgtattatatatttatgtatgcacatatatacatttatgttgttaatattactttagatggcatttccacctgatacaaaaacatttagagatc

SEQ ID NO: 573955 - DNA, 120 bp, Artificial Sequence
  ENSG00000171150_38 (sequence is synthesized)
ttattctatagatattacctaaagagtattcttgtactattcgaattttattatctgcactaaaagtttagccttgctactttagccttgtttataatacagtcaccttacaaagagaaa

SEQ ID NO: 573956 - DNA, 120 bp, Artificial Sequence
  ENSG00000171150_39 (sequence is synthesized)
gtccggaggaagcgacgctgcgctcgctgggcagtcggaggggacgggacgcaccggagggcaggcggactcgccctgtcggtgactgcgccgtccgggcccgtcctgcctggccgcagg

SEQ ID NO: 573957 - DNA, 120 bp, Artificial Sequence
  ENSG00000171150_40 (sequence is synthesized)
gggactctgcgcaagaggactacctcttctctgtgagcttccgccgctacaacagatccctgcatgcccgaattgagcagtggaatcacaactttagtttcgacgcccatgacccgcgtg

SEQ ID NO: 573958 - DNA, 120 bp, Artificial Sequence
  ENSG00000171150_41 (sequence is synthesized)
gattcttcatcacctacctcatcgtggtgtggaaatgtaaactgaataatctttgagagatacgtaacccagggcccggcatagcatatgtgcttgggctcacagcaatcctgtggagaa

SEQ ID NO: 573959 - DNA, 120 bp, Artificial Sequence
  ENSG00000171150_42 (sequence is synthesized)
agtatgagtttcccatttcaacaaagaaggtgaggcttagagggaaaggaagttgctcaagatttgctctggaacagagccaggattcccactcagatcttcgactctgaatcctgcagg

SEQ ID NO: 573960 - DNA, 120 bp, Artificial Sequence
  ENSG00000171150_43 (sequence is synthesized)
cctgtacaggcagatgacttccttcaccaaggacctgtgactctctccctgagggctttctctgacatcatctgcacatggacagcttagactgaaagtttcaggggttcgatgccttcc

SEQ ID NO: 573961 - DNA, 120 bp, Artificial Sequence
  ENSG00000171150_44 (sequence is synthesized)
agaggcacctctctaacaataagagcccagattgagtggaaataccccagcttccttaccactccagcctccatgcccttagtggcatgattccgaggtgcatcctacactgactcttgg

SEQ ID NO: 573962 - DNA, 120 bp, Artificial Sequence
  ENSG00000171150_45 (sequence is synthesized)
tggctccctggccagagctcattcgcgtggccctcagcagctctcctccttccctggctgtcttcctcaccacctctccgtgattccaggaatcagctcccgaataaacgacttgcaccc

SEQ ID NO: 573963 - DNA, 120 bp, Artificial Sequence
  ENSG00000171150_46 (sequence is synthesized)
gagctgagattgcaccactacactccagactgggatttaagaaaatgtgtagttaaatattgcctaaaatgctcgaatgtaggttataaacaatgagaatagggcccatgaagagatttt

SEQ ID NO: 573964 - DNA, 120 bp, Artificial Sequence
  ENSG00000171150_47 (sequence is synthesized)
ttttcgtttttcacagaggtgagacttaaaaaggccttgaaggataaatagaaatagaagcagagtagaagggttattccaggagaatattagtttggatgagggcacagaggcaggaag

SEQ ID NO: 573965 - DNA, 120 bp, Artificial Sequence
  ENSG00000171150_48 (sequence is synthesized)
atggagcttagcttgagggaatggaggtcactggtgctgtgaatatttgcagacagccatatccagagctgagaggtgaaagaacagactggaatagttcttttctttttcactctccta

SEQ ID NO: 573966 - DNA, 120 bp, Artificial Sequence
  ENSG00000171150_49 (sequence is synthesized)
ccttatttgcttttggtttagcaaggaggatcgaaagtaaaccaagagaaatggtggggggcagcagagggaggtgggagggaaactccaggatgagttatggtcagccaaaagaagctg

SEQ ID NO: 573967 - DNA, 120 bp, Artificial Sequence
  ENSG00000171150_50 (sequence is synthesized)
ttgaaataaaatgaccaagagttaatgcctttatagacgcagggatgcacagcctagatccccttcctctaaaggacttgctgcccatccactgaaagcttggtcagcagccagccccca

SEQ ID NO: 573968 - DNA, 120 bp, Artificial Sequence
  ENSG00000171150_51 (sequence is synthesized)
gctatcggctctttcagggcctgccttgttgcaaagggccgcctccctgcaaagagctgccttgctcaaagagctgccttgcactaggtcatgctcttctggtggcagcttgcatcctgt

SEQ ID NO: 573969 - DNA, 120 bp, Artificial Sequence
  ENSG00000171150_52 (sequence is synthesized)
cacagagaggcaggggtgtgaaagcacagccatctcatttgctctgcaggacaatatccactccagagttcctgctagactggccaagaccttgttgccattcaacttctttcccattct

SEQ ID NO: 573970 - DNA, 120 bp, Artificial Sequence
  ENSG00000171150_53 (sequence is synthesized)
actcgctccctccttccttcacaggtgttgagccctaataaaattttgcacccgaaattctgcttcattatctgtttctggagaacccaacctgtaacattttcccagccagggctgaat

SEQ ID NO: 573971 - DNA, 120 bp, Artificial Sequence
  ENSG00000171150_54 (sequence is synthesized)
atgtatatatgtatgtatatttttaattacttttctccattcaatagtatactgcctatcaattattagcaaattgtattttcaacctgttggcttatttattctaaatatagccatttt

SEQ ID NO: 573972 - DNA, 120 bp, Artificial Sequence
  ENSG00000171150_55 (sequence is synthesized)
cctctaaagagaaatctttgttgccaaaagaattttataatggcaaaatcagtcattttccccactaatcgcaatgtaattttgcccattttgagatgggcaaaaatcatatgttcagaa

SEQ ID NO: 573973 - DNA, 120 bp, Artificial Sequence
  ENSG00000171150_56 (sequence is synthesized)
cagtaaggtgagacagaatcagctaatttactgataactgtgggcactacctgaactgacgtatcatgctgctacgcactttagtaccaggctctctggtggccagttctttgcaggata

SEQ ID NO: 573974 - DNA, 120 bp, Artificial Sequence
  ENSG00000171150_57 (sequence is synthesized)
acgtggaataatgcttatgtaaaatatgacttccaagactaattctcaacttcagactccccactcccagcattattgctttggcattagtaatgttagtcagaaatatgagtaattctt

SEQ ID NO: 573975 - DNA, 120 bp, Artificial Sequence
  ENSG00000171150_58 (sequence is synthesized)
ggcaagaatgggaagcattcaacttgtaacttcaaaaagacattatctgaaaggttgaaagccagtttctaatagtacctggtatcttggcttcagggctcacagcaatcctgtggagaa

SEQ ID NO: 573976 - DNA, 120 bp, Artificial Sequence
  ENSG00000171155_0 (sequence is synthesized)
acctttagcgagaccaacgagagaacaccgcctgcagctagaacagcctggtcaggagcgtaacggagtggtgcgccaacgtgagaggaaacccgtgcgcggctgcgctttcctgtcccc

SEQ ID NO: 573977 - DNA, 120 bp, Artificial Sequence
  ENSG00000171155_1 (sequence is synthesized)
aagccgttctagacgcgggaaaaatgctttctgaaagcagctcctttttgaagggtgtgatgcttggaagcattttctgtgctttgatcactatgctaggacacattaggattggtcatg

SEQ ID NO: 573978 - DNA, 120 bp, Artificial Sequence
  ENSG00000171155_2 (sequence is synthesized)
gaaatagaatgcaccaccatgagcatcatcacctacaagctcctaacaaagaagatatcttgaaaatttcagaggatgagcgcatggagctcagtaagagctttcgagtatactgtatta

SEQ ID NO: 573979 - DNA, 120 bp, Artificial Sequence
  ENSG00000171155_3 (sequence is synthesized)
tccttgtaaaacccaaagatgtgagtctttgggctgcagtaaaggagacttggaccaaacactgtgacaaagcagagttcttcagttctgaaaatgttaaagtgtttgagtcaattaata

SEQ ID NO: 573980 - DNA, 120 bp, Artificial Sequence
  ENSG00000171155_4 (sequence is synthesized)
tggacacaaatgacatgtggttaatgatgagaaaagcttacaaatacgcctttgataagtatagagaccaatacaactggttcttccttgcacgccccactacgtttgctatcattgaaa

SEQ ID NO: 573981 - DNA, 120 bp, Artificial Sequence
  ENSG00000171155_5 (sequence is synthesized)
acctaaagtattttttgttaaaaaaggatccatcacagcctttctatctaggccacactataaaatctggagaccttgaatatgtgggtatggaaggaggaattgtcttaagtgtagaat

SEQ ID NO: 573982 - DNA, 120 bp, Artificial Sequence
  ENSG00000171155_6 (sequence is synthesized)
tgaagataaacagctagcagtttgcctgaaatatgctggagtatttgcagaaaatgcagaagatgctgatggaaaagatgtatttaataccaaatctgttgggctttctattaaagaggc

SEQ ID NO: 573983 - DNA, 120 bp, Artificial Sequence
  ENSG00000171155_7 (sequence is synthesized)
aatgacttatcaccccaaccaggtagtagaaggctgttgttcagatatggctgttacttttaatggactgactccaaatcagatgcatgtgatgatgtatggggtataccgccttagggc

SEQ ID NO: 573984 - DNA, 120 bp, Artificial Sequence
  ENSG00000171155_8 (sequence is synthesized)
atttgggcatattttcaatgatgcattggttttcttacctccaaatggttctgacaatgactgagaagtggtagaaaagcgtgaatatgatctttgtataggacgtgtgttgtcattatt

SEQ ID NO: 573985 - DNA, 120 bp, Artificial Sequence
  ENSG00000171155_9 (sequence is synthesized)
tgtagtagtaactacatatccaatacagctgtatgtttctttttcttttctaatttggtggcactggtataaccacacattaaagtcagtagtacatttttaaatgagggtggttttttt

SEQ ID NO: 573986 - DNA, 120 bp, Artificial Sequence
  ENSG00000171155_10 (sequence is synthesized)
cacatgaacattgtaaatgtgttggaaagaagtgttttaagaataataattttgcaaataaactattaataaatattatatgtgataaattctaaattatgaacattagaaatctgtggg

SEQ ID NO: 573987 - DNA, 120 bp, Artificial Sequence
  ENSG00000171155_11 (sequence is synthesized)
tctgtggggcacatatttttgctgattggttaaaaaattttaacaggtctttagcgttctaagatatgcaaatgatatctctagttgtgaatttgtgattaaagtaaaacttttagctgt

SEQ ID NO: 573988 - DNA, 120 bp, Artificial Sequence
  ENSG00000171155_12 (sequence is synthesized)
gtgttccctttacttctaatactgatttatgttctaagcctccccaagttccaatggatttgccttctcaaaatgtacaactaagcaactaaagaaaattaaagtgaaagttgaaaaata

SEQ ID NO: 573989 - DNA, 120 bp, Artificial Sequence
  ENSG00000171155_13 (sequence is synthesized)
gtaacggagtggtgcgccaacgtgagaggaaacccgtgcgcggctgcgctttcctgtccccaagccgttctagacgcggatgaagtgcaaaacaaacttctccatagaggagttgttgca

SEQ ID NO: 573990 - DNA, 120 bp, Artificial Sequence
  ENSG00000171155_14 (sequence is synthesized)
aagttccagtttataccaaacagtaatcagattccattggaagctaaagattttgagagccttttgtactatatgcaactaacttgatttcaagcttgggaaccttttaaaaaaaacatt

SEQ ID NO: 573991 - DNA, 120 bp, Artificial Sequence
  ENSG00000171159_0 (sequence is synthesized)
ctctgggcggagatctgctgccgcgttctacccttccggcccgtgttctatccgccgcctccaccttccatccggcgccggctttcggcgcgacggtcgccgcgttccatcgtcgcgcgg

SEQ ID NO: 573992 - DNA, 120 bp, Artificial Sequence
  ENSG00000171159_1 (sequence is synthesized)
cccttcgggcgcccgagcccgcaatgtcgggccccaacggagacctggggatgccggtggaggcgggagcggaaggcgaggaggacggcttcggggaagcagaatacgctgccatcaact

SEQ ID NO: 573993 - DNA, 120 bp, Artificial Sequence
  ENSG00000171159_2 (sequence is synthesized)
ctggagttccagcagcagctcggggaggcccccagtgatgccagcccctaggctccaagagcccccaaccgggacccaaccctgcctccctgggctaggctctggcctgggcactcaccc

SEQ ID NO: 573994 - DNA, 120 bp, Artificial Sequence
  ENSG00000171159_3 (sequence is synthesized)
cctggcttagacaccttctcaagggctggccttcagggacccctggtgggtctgcctgcctgggccacccttcctgcctgggcctccccttggcctacctgggccagcccccaccacctg

SEQ ID NO: 573995 - DNA, 120 bp, Artificial Sequence
  ENSG00000171159_4 (sequence is synthesized)
gcatgccctcctggggccaagagtgggcctgcaacccacccacttgcctgcccacccaactcctgggcgctccccactctgcccaggccttgagtgtccacattaaatgggtctcccaca

SEQ ID NO: 573996 - DNA, 120 bp, Artificial Sequence
  ENSG00000171159_5 (sequence is synthesized)
caatcctgagtttcggctgttaccaacctggaggaccctgggcaggttccttccttctgaggcctcggtttccctagctatataccatgagggggttggactttaagatgcagccgattt

SEQ ID NO: 573997 - DNA, 120 bp, Artificial Sequence
  ENSG00000171159_6 (sequence is synthesized)
cccaggacgctgtcgtctgtgagggtggctggctctaggcaacgggtgccctttcctagaacacaggcacatatgcacccataacccagatacgctcctccagctcctccaccggctgct

SEQ ID NO: 573998 - DNA, 120 bp, Artificial Sequence
  ENSG00000171159_7 (sequence is synthesized)
tcccccttggtctcaagctggcagctgagtgtatgtgagtcatgggctggctcagaactgggtcccgcagtgggcacaggcccagaccttgagtcctcagggacactgtgttgctgagca

SEQ ID NO: 573999 - DNA, 120 bp, Artificial Sequence
  ENSG00000171159_8 (sequence is synthesized)
gggcagctctggagtggccgtggaggggagggagtgatggtttctagtggagaccagggaaggcttcttggaggaggcattttgagctggtccttgaagggctgttgtggttgaggcatt

SEQ ID NO: 574000 - DNA, 120 bp, Artificial Sequence
  ENSG00000171159_9 (sequence is synthesized)
gggatagttgagcaatggcggagaggctggaaagtcagaggcttcattcattcactcactcagtcattcaacaaatgcttattgcaaaactgtgagggcaccagggagccagcagcgaac

SEQ ID NO: 574001 - DNA, 120 bp, Artificial Sequence
  ENSG00000171159_10 (sequence is synthesized)
acaggaccgttcatctttcatggggaaacataacagcactcagataagcacagcagtcaatcctggagagaaggtcgtggagggctgaggagggctaggggctcagcatagaggcctgat

SEQ ID NO: 574002 - DNA, 120 bp, Artificial Sequence
  ENSG00000171159_11 (sequence is synthesized)
ccagtctggggcattgggtgggctcccggtggtgacatccatactgagacttgaaggatgagtgggactcatccaggaggagagaagggaaggaagatgggaggacccagcaccttccag

SEQ ID NO: 574003 - DNA, 120 bp, Artificial Sequence
  ENSG00000171159_12 (sequence is synthesized)
gcagagacagcagcatgttcaaagggcctgagaatacgctgccatcaactccatgctggaccagatcaactcctgtctggaccacctggaggagaagaatgaccacctccacgcccgcct

SEQ ID NO: 574004 - DNA, 120 bp, Artificial Sequence
  ENSG00000171159_13 (sequence is synthesized)
tggcagctgagtgtataatacgctgccatcaactccatgctggaccagatcaactcctgtctggaccacctggaggagaagaatgaccacctccacgcccgcctccaggagctgctggag

SEQ ID NO: 574005 - DNA, 120 bp, Artificial Sequence
  ENSG00000171160_0 (sequence is synthesized)
agtgcggtcgcccaggatggcggcgtcaagtggggcaatcgctggtggaggtggcggagagcaaggtggcagccgggagcccatcagaggaaaagtccgaggcgctggaaccctgcgtcc

SEQ ID NO: 574006 - DNA, 120 bp, Artificial Sequence
  ENSG00000171160_1 (sequence is synthesized)
aggcgtgacggtcatcccgaaaggccggccccagtttcatccttttatcctgtaatctgtcaccatgaccctgacaaaaggttccttcacctactccagtggggaggaatatcgtggcga

SEQ ID NO: 574007 - DNA, 120 bp, Artificial Sequence
  ENSG00000171160_2 (sequence is synthesized)
gtggaaggagggccgcaggcatggttttggtcaactgatgtttgcagatggtggcacctacctgggtcattttgagaatgggctctttaatggctttggggtattgaccttctcagatgg

SEQ ID NO: 574008 - DNA, 120 bp, Artificial Sequence
  ENSG00000171160_3 (sequence is synthesized)
ttcaaggtatgagggggagtttgcccagggcaagtttaatggcgtcggagtcttcattcgatatgacaacatgacctttgagggggaatttaaaaatggcagagtagatggttttggcct

SEQ ID NO: 574009 - DNA, 120 bp, Artificial Sequence
  ENSG00000171160_4 (sequence is synthesized)
gctgactttccctgatggttctcatggaatcccccgcaatgaaggtctctttgagaacaacaagctgctgcgacgtgagaagtgttctgccattgttcagcgggcccagagcgcctccaa

SEQ ID NO: 574010 - DNA, 120 bp, Artificial Sequence
  ENSG00000171160_5 (sequence is synthesized)
gtcagccagaaatctcactgcctgacagcgcagtgggcaccagctgataagtattgggtaaagccagtgcccctgttgttgattcgaggtgaacaaatgaatcagagctgagatgagttg

SEQ ID NO: 574011 - DNA, 120 bp, Artificial Sequence
  ENSG00000171160_6 (sequence is synthesized)
acaatgacagtggagcagaggccttgtatgtgccctgtcacctgccattccagaactggaccacagaaaagtgctgaggatgctggccagcagaccctgcagcagtcattggtggttctg

SEQ ID NO: 574012 - DNA, 120 bp, Artificial Sequence
  ENSG00000171160_7 (sequence is synthesized)
tctttccctaacccttatgtgctggaggacagaggagccacctcttctcactggttgatactctgttcctaagacctcaggttacccagtgtagcctgctgtgacccttctgcttcattt

SEQ ID NO: 574013 - DNA, 120 bp, Artificial Sequence
  ENSG00000171160_8 (sequence is synthesized)
tctgccaagtgatacagaaccttcgttctgctgctttggggacaggtgatcctagccccagcttagggccagtgctctgtgccactctggagaaatagggaaaagataggggtggctcag

SEQ ID NO: 574014 - DNA, 85 bp, Artificial Sequence
  ENSG00000171160_9 (sequence is synthesized)
ttaattttattattataaaaaattgagccagggtcttgctatgtggctcaggctcatctcaaaatcctgggctcaagtgatcctc

SEQ ID NO: 574015 - DNA, 120 bp, Artificial Sequence
  ENSG00000171160_10 (sequence is synthesized)
tttattattataaaaaattgagccagggtcttgctatgtggctcaggctcatctcaaaatcctgggctcaagtgatcctcctgcctgggcctgccaaagtgctaggattgcaggtgtgag

SEQ ID NO: 574016 - DNA, 120 bp, Artificial Sequence
  ENSG00000171160_11 (sequence is synthesized)
ctcatgctggttggaatcatggctgcaggcttccacttggtctgatcagactggtattcattcctgcctatgtccccgtgaaggattcggtaagagtgctatttcctcctccctttagaa

SEQ ID NO: 574017 - DNA, 120 bp, Artificial Sequence
  ENSG00000171160_12 (sequence is synthesized)
gacaggctgtcttctttcatcaacttagagcagataatccccatgtgtgcctctctccttccttagatggggaacaggatccctttttgggacaatcaagaaaaaaactcatgtaaacag

SEQ ID NO: 574018 - DNA, 120 bp, Artificial Sequence
  ENSG00000171160_13 (sequence is synthesized)
taatcttattacttgtatttgtgactaactccagggaaaagggtagaatatttaggccacttcaggcactaccatggagtgaactgaattcatacggatggcttgggctgacacagtttc

SEQ ID NO: 574019 - DNA, 120 bp, Artificial Sequence
  ENSG00000171160_14 (sequence is synthesized)
ttcccagtggaccaataaatcagactcacccgaacccctggggttttggtagaattggacctactctaggactgtggggaactaaaggagcatttggctcactgtagctcttctatcatg

SEQ ID NO: 574020 - DNA, 120 bp, Artificial Sequence
  ENSG00000171160_15 (sequence is synthesized)
agccttgaccgtcaggccgcaatcagaccttactgatgggatctctgcagtttattacgtaggcctcccgttaccctggtacccaaatacgtcccccacctctagctccctagcctcaca

SEQ ID NO: 574021 - DNA, 120 bp, Artificial Sequence
  ENSG00000171160_16 (sequence is synthesized)
ttgaatgtctcttcaacagcagattgtggtggaagttatagccgtgtgcctctatttattctctgaattgtactgtagaaaaaggtgtttataaagaataaagaaatcaccagaactgcc

SEQ ID NO: 574022 - DNA, 120 bp, Artificial Sequence
  ENSG00000171160_17 (sequence is synthesized)
tacatcaggatatatagccaactttatggatcttcattttcaactccaggatttaattccatatagtgcctgccattcctttattccattttaggattaaataaaggaatttgaaaatgc

SEQ ID NO: 574023 - DNA, 120 bp, Artificial Sequence
  ENSG00000171161_0 (sequence is synthesized)
agccccgcctgcttcccggctccagctggggccggagaggctgagtggttggtacgctgctcgctggcctcccagtcttcccagcaaccggtgacactgcccgcgccagactgaccacta

SEQ ID NO: 574024 - DNA, 120 bp, Artificial Sequence
  ENSG00000171161_1 (sequence is synthesized)
gccgacgcgggcgagagggacaggagcgtgacctccccatcccgaggggccggacgctcgggcgcctccccgctccccccactcggaggccgcgcgcgccgttagccccttcctcgctcc

SEQ ID NO: 574025 - DNA, 120 bp, Artificial Sequence
  ENSG00000171161_2 (sequence is synthesized)
cccgccccagtcccgcagtccgggaggcgggggtcggcagccggctgagtgggaaccgcgcggtgtctgaggaggcagtcggcgaccggtttccacttcaagcgtgacccttttgcctgt

SEQ ID NO: 574026 - DNA, 120 bp, Artificial Sequence
  ENSG00000171161_3 (sequence is synthesized)
gggatgagctccagcatggggtgaggtacagaagagagacttgaagagcgtgccttgggactcaagcgccaaacctgtaccctagcgagtgtcctactccgcatccgtaatggaaggaaa

SEQ ID NO: 574027 - DNA, 120 bp, Artificial Sequence
  ENSG00000171161_4 (sequence is synthesized)
tgcacatcttactccagaggcacaagaggaggacatcccatgcggctactcctgcccagcgtggtggggcagcagaagctccagagcccagacttgcaggctcacggtgcagggtgaacc

SEQ ID NO: 574028 - DNA, 120 bp, Artificial Sequence
  ENSG00000171161_5 (sequence is synthesized)
tggccacagctcaccctggaacagccacaatgtctgccccttagagaagaaccctgaaatcagaccagtttttgcggcctccccctttcctctctgttacagtgccctttccaggcctta

SEQ ID NO: 574029 - DNA, 120 bp, Artificial Sequence
  ENSG00000171161_6 (sequence is synthesized)
agagaagtaaaacttagctgcagcgtcaggaggtggaccccagagtgtgagtggcacgcttccctgtgaacccgtcctcaccatgtttgccacatctggggcagtggcagcggggaagcc

SEQ ID NO: 574030 - DNA, 120 bp, Artificial Sequence
  ENSG00000171161_7 (sequence is synthesized)
ttactcgtgcagcgaatgtggcaagagcttctgctacagctcagtgctgctgcgacatgaacgagctcacggcggtgacggccgcttccgttgcctagaatgcggtgagcgctgtgcacg

SEQ ID NO: 574031 - DNA, 120 bp, Artificial Sequence
  ENSG00000171161_8 (sequence is synthesized)
ggctgctgacctccgagcgcacaggcgcacgcatgctggccagaccctctacatctgcagtgagtgcggacaaagcttccgccacagcggccgtcttgacctacacttgggcgcacaccg

SEQ ID NO: 574032 - DNA, 120 bp, Artificial Sequence
  ENSG00000171161_9 (sequence is synthesized)
gcagcgatgccgcacttgcccctgccgcacatgcggccggcgcttcccgcacctcccggcgctgctgctacaccggcgccgccagcatctgccagagcggccccgccgctgcccgctgtg

SEQ ID NO: 574033 - DNA, 120 bp, Artificial Sequence
  ENSG00000171161_10 (sequence is synthesized)
cgcccgcaccttccggcagagcgcgctgctcttccaccaggcgcgggcgcaccccttggggacaacctctgaccctgctgccccaccccaccgctgcgcgcagtgcccgcgagccttccg

SEQ ID NO: 574034 - DNA, 120 bp, Artificial Sequence
  ENSG00000171161_11 (sequence is synthesized)
aagcggcgccgggctgcggagtcacgcgcgcatccacgtgtcccggagccccacgcgaccccgtgtctcagacgcccaccagtgtggcgtgtgcggcaagtgctttggcaagagctctac

SEQ ID NO: 574035 - DNA, 120 bp, Artificial Sequence
  ENSG00000171161_12 (sequence is synthesized)
gtgcccggagtgcggcaagggcttcctggagagcgccacgctggtgcgccaccagcgcacacacacgggcgagaagccgtacgcatgtggcgactgtggacgctgcttcagcgagagttc

SEQ ID NO: 574036 - DNA, 120 bp, Artificial Sequence
  ENSG00000171161_13 (sequence is synthesized)
cacgctgctgcgccatcggcgcagccatcagggcgagcggccacatgcgtgcgccacttgcggcaagggtttcgggcagcgctccgacctggtggtgcaccagcgcatccacacgggcga

SEQ ID NO: 574037 - DNA, 120 bp, Artificial Sequence
  ENSG00000171161_14 (sequence is synthesized)
gaagcccttcgcgtgccccgagtgcggccgccgcttcagcgaccgctcggacctcaccaagcaccggcgcacgcacacgggcgagaagccctaccgctgcgaactgtgcggcaagcggtt

SEQ ID NO: 574038 - DNA, 120 bp, Artificial Sequence
  ENSG00000171161_15 (sequence is synthesized)
cacgtgcgtgtccaatctcaacgtgcatcggcgcaaccatgccggccacaagccacacaaatgccccgagtgcagcaaggccttcagcgtcgcctccaagcttgcactgcaccgcaagac

SEQ ID NO: 574039 - DNA, 120 bp, Artificial Sequence
  ENSG00000171161_16 (sequence is synthesized)
gcacctgggcgaacggccagcggagtgcgcagagtgcggcaagtgcttcagccacagccgctcgctgtcacagcatcagcgggcccacacgcgcgcccgcaccgctgccgccgttgccat

SEQ ID NO: 574040 - DNA, 120 bp, Artificial Sequence
  ENSG00000171161_17 (sequence is synthesized)
ccagtccgcagtgggcactgccctcgtctttgaggggccggctgaacaggaaaagccagggttctctgtgtcctagttgagggaggcttgctgaggcttctctaaaggtggttgggcaag

SEQ ID NO: 574041 - DNA, 120 bp, Artificial Sequence
  ENSG00000171161_18 (sequence is synthesized)
cacctatatagtatcacggggacagttgaggcaactcgtagatggagatttgggaaaagacgatgtggcctcctacctttccagtttctgttggcagcccttcacgtagcctcctgcctc

SEQ ID NO: 574042 - DNA, 120 bp, Artificial Sequence
  ENSG00000171161_19 (sequence is synthesized)
gcctctacacctactaccctgtcggcccttttgccatgctgtcctcgtataactcggattctctcctcaggtgtaggtgcagggagtcagggaacccttagactcccctgtgtgcaagag

SEQ ID NO: 574043 - DNA, 120 bp, Artificial Sequence
  ENSG00000171161_20 (sequence is synthesized)
cccaggtgttggtgtgtccctttaatgctactgtgctctctggtgtttctgattttcctgcctttattctgtcttctcttgtcctatctcattccagcccacatcttctcctttcctgat

SEQ ID NO: 574044 - DNA, 120 bp, Artificial Sequence
  ENSG00000171161_21 (sequence is synthesized)
tacttttgttgtcctgcctcttcaggtaatggtcacagatttggctgtaggcacgttaccagccctgtggcttcttgactcttggttccctgttaactctgtttctgagaaatgtgggta

SEQ ID NO: 574045 - DNA, 120 bp, Artificial Sequence
  ENSG00000171161_22 (sequence is synthesized)
tggaggtgggtgggaaagctcacttccatgaaggatgtctccatgctaggagctgcctgcaccctggcagaggtggccagtcacgtgaaggtgggcagggcccttagcatggccacacat

SEQ ID NO: 574046 - DNA, 120 bp, Artificial Sequence
  ENSG00000171161_23 (sequence is synthesized)
gtccccagggcagatcaaggggcctctcagaaccatgttccccagccaggtgaggaccattttcactgggacccaggccaaaaccatgtgggtgcacaaagccaggcactgccaagtgga

SEQ ID NO: 574047 - DNA, 120 bp, Artificial Sequence
  ENSG00000171161_24 (sequence is synthesized)
acatgaggttatttccaaatcatgggagccaccagcagggagagggcaggatggaaaatcccctggagccggtcaactttttgctcatggctagtgaaataaagttgtttgagtactaga

SEQ ID NO: 574048 - DNA, 120 bp, Artificial Sequence
  ENSG00000171161_25 (sequence is synthesized)
ttcggcgaatagttgtgcttcgctcttaagtaccaggcaccaagtccccagatgagtagccagcttcccttctttcatcttggagcccacagttcgcgcaagtggagctatggaaggccc

SEQ ID NO: 574049 - DNA, 120 bp, Artificial Sequence
  ENSG00000171161_26 (sequence is synthesized)
gacgcgcgccgactgaggcgccccaggattggctgcgctgctgtgggccacggaaagcgacctgttcaggtgccgtgttccgcattcggcgaatagttgtgcttcgctcttaagtaccag

SEQ ID NO: 574050 - DNA, 120 bp, Artificial Sequence
  ENSG00000171161_27 (sequence is synthesized)
gacttgcagtgccctttccaggccttaagagaagtaaaacttagctgcagcgtcaggaggtggaccccagagtgtgagtggcacgcttccctgtgaacccgtcctcaccatgtttgccac

SEQ ID NO: 574051 - DNA, 120 bp, Artificial Sequence
  ENSG00000171161_28 (sequence is synthesized)
ttcccttctttcatcttggagcccacagttcgcgcaagtggagctatggaaggcccatgctgtgctgttctaatcatgtgagggattcttaggggttgagggggaaggactgaaaacggc

SEQ ID NO: 574052 - DNA, 120 bp, Artificial Sequence
  ENSG00000171161_29 (sequence is synthesized)
tgcagaccgtttaggatgcctggagtggagacaggagttaagccccttactcagagtcgctcttaagaactgcccagggccgggcacagtggctcatgcctgttatcctagcactttggg

SEQ ID NO: 574053 - DNA, 120 bp, Artificial Sequence
  ENSG00000171161_30 (sequence is synthesized)
ctgagccgacttaagggggcaacggccgccaccgggttctggcagcgttaaacgttccccactacgtttttggtgcccggtctcgccctccaagtcggctggcgccacgggcaaggggct

SEQ ID NO: 574054 - DNA, 120 bp, Artificial Sequence
  ENSG00000171161_31 (sequence is synthesized)
agggtaggctcggggttgggaaggggctcgctcaaagaaagtttgcccagcaacttgtgacgcgcgccgactgaggcgccccaggattggctgcgctgctgtgggccacggaaagcgacc

SEQ ID NO: 574055 - DNA, 120 bp, Artificial Sequence
  ENSG00000171163_0 (sequence is synthesized)
agcagccgacgccgagaggcaccgtttcttcttaaaagagaaacgctgcgcgcgcgaggtgggcccctgtcttccagcagctccgggcctgctcgctaggcccgggaggcgcaggcgcag

SEQ ID NO: 574056 - DNA, 120 bp, Artificial Sequence
  ENSG00000171163_1 (sequence is synthesized)
gcgcagtgggggtgagggcgcgtgggggcgcacagcctctggtgcacatggcttcctccccggcggtggacgtgtcctgcaggcggcgggagaagcggcggcagctggacgcgcgccgca

SEQ ID NO: 574057 - DNA, 120 bp, Artificial Sequence
  ENSG00000171163_2 (sequence is synthesized)
gcaagtgccgcatccgcctgggcggccacatggagcagtggtgcctcctcaaggagcggctgggcttctccctgcactcgcagctcgccaagttcctgttggaccggtacacttcttcag

SEQ ID NO: 574058 - DNA, 120 bp, Artificial Sequence
  ENSG00000171163_3 (sequence is synthesized)
gctgtgtcctctgtgcaggtcctgagcctttgcctccaaaaggtctgcagtatctggtgctcttgtctcatgcccacagccgagagtgcagcctggtgcccgggcttcgggggcctggcg

SEQ ID NO: 574059 - DNA, 120 bp, Artificial Sequence
  ENSG00000171163_4 (sequence is synthesized)
gccaagatggggggcttgtgtgggagtgctcagcaggccataccttctcctggggaccctctttgagccctacaccttcagaggcacccaagccagcctcccttccacatactactcgga

SEQ ID NO: 574060 - DNA, 120 bp, Artificial Sequence
  ENSG00000171163_5 (sequence is synthesized)
gaagttggtgttccgaggccacgagtgggcaggagcttgcagatttggaatctgagcatgatgagaggactcaagaggccaggttgcccaggagggtgggacccccaccagagaccttcc

SEQ ID NO: 574061 - DNA, 120 bp, Artificial Sequence
  ENSG00000171163_6 (sequence is synthesized)
cacctccaggagaggaagagggtgaggaagaagaggacaatgatgaggatgaagaggagatgctcagtgatgccagcttatggacctacagctcctccccagatgatagtgagcctgatg

SEQ ID NO: 574062 - DNA, 120 bp, Artificial Sequence
  ENSG00000171163_7 (sequence is synthesized)
cccccagactactgccttcccctgtcacctgcacacctaaagagggggagacaccaccagcccctgcagcactctccagtcctcttgctgtgccggccttgtcagcatcctcattgagtt

SEQ ID NO: 574063 - DNA, 120 bp, Artificial Sequence
  ENSG00000171163_8 (sequence is synthesized)
ccacctgcagaagtcagggtgcagccacagctcagcaggacccctcaagcggcccagcagactgaggccctggccagcactgggagtcaggcccagtctgctccaaccccggcctgggat

SEQ ID NO: 574064 - DNA, 120 bp, Artificial Sequence
  ENSG00000171163_9 (sequence is synthesized)
gaggacactgcacaaattggccccaagagaattaggaaagctgccaaaagagagctgatgccttgtgacttccctggctgtggaaggatcttctccaaccggcagtatttgaatcaccac

SEQ ID NO: 574065 - DNA, 120 bp, Artificial Sequence
  ENSG00000171163_10 (sequence is synthesized)
aaaaagtaccagcacatccaccagaagtctttctcctgcccagagccagcctgtgggaagtctttcaactttaagaaacacctgaaggagcacatgaagctgcacagtgacacccgggac

SEQ ID NO: 574066 - DNA, 120 bp, Artificial Sequence
  ENSG00000171163_11 (sequence is synthesized)
tacatctgtgagttctgcgcccggtctttccgcactagcagcaaccttgtcatccacagacgtatccacactggagaaaaacccctgcagtgtgagatatgcgggtttacctgccgccag

SEQ ID NO: 574067 - DNA, 120 bp, Artificial Sequence
  ENSG00000171163_12 (sequence is synthesized)
aaggcttccctgaactggcaccagcgcaagcatgcagagacggtggctgccttgcgcttcccctgtgaattctgcggcaagcgctttgagaagccagacagtgttgcagcccaccgtagc

SEQ ID NO: 574068 - DNA, 120 bp, Artificial Sequence
  ENSG00000171163_13 (sequence is synthesized)
aaaagtcacccagccctgcttctagcccctcaagagtcacccagtggtcccctagagccctgtcccagcatctctgcccctgggcctctgggatccagcgaggggtccaggccctctgca

SEQ ID NO: 574069 - DNA, 120 bp, Artificial Sequence
  ENSG00000171163_14 (sequence is synthesized)
tctcctcaggctccaaccctgcttcctcagcaatgagctctcctccagctttggctttgggaagccagactccagggactgaaaaggagcaacaaggagagggtctgcttgagaaatgcc

SEQ ID NO: 574070 - DNA, 120 bp, Artificial Sequence
  ENSG00000171163_15 (sequence is synthesized)
agatgcttggtccccaggaactaaggcgacagagtgcagggtgggggcaagactgggctgtaggggagctggactactttagtcttcctaaaggacaaaataaacagtattttatgcagg

SEQ ID NO: 574071 - DNA, 120 bp, Artificial Sequence
  ENSG00000171163_16 (sequence is synthesized)
attgggattagtccgctccactcactgtcagcattaagtgggggtgcccaagacggggtggatggggggcgccctccagacctctgaccacggcctcaccgccactcgacccaactatga

SEQ ID NO: 574072 - DNA, 120 bp, Artificial Sequence
  ENSG00000171163_17 (sequence is synthesized)
agagcgcccccagctgcacgccaggacacgacctttccttcccctagaaaccagtaaaggccgctgccctattcaagatgaaatgtgtggaccgcccccagcccagttgaaatttcccgt

SEQ ID NO: 574073 - DNA, 120 bp, Artificial Sequence
  ENSG00000171163_18 (sequence is synthesized)
gaaagtctctcgccccttccccacagctccacttcagtggactggagggcgcaggcctttgttctgactgcttctgtctgcctgcctcccacccgacgacactcacatgcctctggtgca

SEQ ID NO: 574074 - DNA, 120 bp, Artificial Sequence
  ENSG00000171163_19 (sequence is synthesized)
accggtttctcactttaccaggacggcctgtgtgacttgtggcctccgagggtcctgctcccctcctcatggtctcagcgaatagcggcccttagggctggccccttacatgtgtgagtg

SEQ ID NO: 574075 - DNA, 120 bp, Artificial Sequence
  ENSG00000171163_20 (sequence is synthesized)
atacccatggtgaactattaaaaagcaagcagttggggagatactgttgtacgtgaatactgacatcaagtaggatgatcatacttacccaaactgctttcccctctgcagcagatagtg

SEQ ID NO: 574076 - DNA, 120 bp, Artificial Sequence
  ENSG00000171163_21 (sequence is synthesized)
cattcatgattaggtgaaccaggggtgtcacccagagtgatactttgtacagggaacattgcaggacattgcagggtgagagtgtgacaaggaggtgagataatggaagtaaagcacaga

SEQ ID NO: 574077 - DNA, 120 bp, Artificial Sequence
  ENSG00000171163_22 (sequence is synthesized)
attgggtgacaggagagttgagtggtcaggatgggatgggtgtggtactcatggtgtaggtgaggactgagcctcaaggaaacgagcaggccatgacagggagaactgctggggcacagg

SEQ ID NO: 574078 - DNA, 120 bp, Artificial Sequence
  ENSG00000171163_23 (sequence is synthesized)
gcagatatgaatggggagcctagggtgggggtagggttgtttcaagtttgagatcttttcagtttaggggctagggtcgggcaggggatggctgactgcccagaaagttaatgccatctt

SEQ ID NO: 574079 - DNA, 120 bp, Artificial Sequence
  ENSG00000171163_24 (sequence is synthesized)
agggtggctggccacctgagtcctgacctgcctcttctcctgctggcaggtacacttcttcaggctgtgtcctctgtgcaggtaggtaggggatggcagggggtgagagccagagggaag

SEQ ID NO: 574080 - DNA, 120 bp, Artificial Sequence
  ENSG00000171163_25 (sequence is synthesized)
agggaccacagggtgacccagaaacaccctcctttcaaagggagccctgagtaagtttgggaagggtggggtgagttggggagcacagggtagtttgatggaggcaacctctgggtgggg

SEQ ID NO: 574081 - DNA, 120 bp, Artificial Sequence
  ENSG00000171163_26 (sequence is synthesized)
gtgtgtctaggttctgaagaatgataaattggactggggctgaggttgccctggggtttgagggaacagggctccctgggtatggctctccagggtaagaggaggagacttcccagttca

SEQ ID NO: 574082 - DNA, 120 bp, Artificial Sequence
  ENSG00000171163_27 (sequence is synthesized)
tggctgagacagaaagggcaggggcgtcctgggatgtggccctccctcgaggccctctgctccctctttgctgcccgtagcactgggagtcaggcccagtctgctccaaccccggcctgg

SEQ ID NO: 574083 - DNA, 120 bp, Artificial Sequence
  ENSG00000171163_28 (sequence is synthesized)
agtgcgcaggcgcacggcgtcggcctccgactcgcccctccctctggggcgcgggcctcagttccgggctacagcagccgacgccgagaggcaccgtttcttcttaaaagagaaacgctg

SEQ ID NO: 574084 - DNA, 120 bp, Artificial Sequence
  ENSG00000171163_29 (sequence is synthesized)
gtgggggtgagggcgcgtgggggcgcacagttcactgatgaggaaactgaggccctaacggcaggtggagccgggtccccgacccccgagatcggcagggcgctgaagacgtcccttcca

SEQ ID NO: 574085 - DNA, 120 bp, Artificial Sequence
  ENSG00000171163_30 (sequence is synthesized)
gaaacgctgcgcgcgcgaggtgggcccctgtcttccagcagctccgggcctgctcgctaggcccgggaggcgcaggcgcaggcgcagtgggggtgagggcgcgtgggggcgcacaggtgg

SEQ ID NO: 574086 - DNA, 120 bp, Artificial Sequence
  ENSG00000171169_0 (sequence is synthesized)
attacgctgctggctggcagcggccgggccggtcggggctgggccctacgcactttgcgtagcgaggggggttaccaaaggcctagtgcttggcctcgagcaagcctggcctatcccctg

SEQ ID NO: 574087 - DNA, 120 bp, Artificial Sequence
  ENSG00000171169_1 (sequence is synthesized)
tagggggtgggtgaggggcgaggctgaggaagaagagaaggggaattggggcgcttgaggggattataatttctttaaaaagaggggaggggagaggccatggccgtcccagccaagaaa

SEQ ID NO: 574088 - DNA, 120 bp, Artificial Sequence
  ENSG00000171169_2 (sequence is synthesized)
aggaagatgaacttctcagagcgggaggtggagatcatcgtggaggagctggagctgaagaagcacctgctggtgaaccacttcaacgccggggtacccctggccgccaagagtgcggcc

SEQ ID NO: 574089 - DNA, 120 bp, Artificial Sequence
  ENSG00000171169_3 (sequence is synthesized)
tggcacggcatcctgagaagggtcaacgccgtggccacctgccgcagagagctgcctgaggtcaagaagaagtggtctgacctcaagaccgaggtccgtcgcaaggttgcccaggtccgg

SEQ ID NO: 574090 - DNA, 120 bp, Artificial Sequence
  ENSG00000171169_4 (sequence is synthesized)
gccgccgtggagggtggtgaggcgccggggcccactgaggaggacggagctggggggcctgggacaggcggtggcagtggtggcggtggcccagctgtagccccagtgctgctgaccccc

SEQ ID NO: 574091 - DNA, 120 bp, Artificial Sequence
  ENSG00000171169_5 (sequence is synthesized)
atgcaacaacgtatctgcaacctgctgggcgaggccaccatcatcagcctgcccagcaccacagagatccaccctgtggccctcggaccctcggccaccgcagccgcagccacggtcacc

SEQ ID NO: 574092 - DNA, 120 bp, Artificial Sequence
  ENSG00000171169_6 (sequence is synthesized)
ctgacacagatccccacagagaccacctatcacacgctggaggagggcgtggtggagtactgcacggctgaggcgcccccacctctgccaccagagacccctgtggacatgatggcccag

SEQ ID NO: 574093 - DNA, 120 bp, Artificial Sequence
  ENSG00000171169_7 (sequence is synthesized)
catgcagacacgtcggtcaagccgcaagcgctcaagagccgcattgctctcaactccgccaagctgatacaggagcagcgggtcaccaacctgcatgtgaaggagatcgcacagcacctg

SEQ ID NO: 574094 - DNA, 120 bp, Artificial Sequence
  ENSG00000171169_8 (sequence is synthesized)
gaacagcagaacgacctactgcagatgatccgccgctcccaggaagtgcaggcctgtgcccaggagcgccaggcccaggccatggagggcacacaggctgccctgagcgtcctcatccag

SEQ ID NO: 574095 - DNA, 120 bp, Artificial Sequence
  ENSG00000171169_9 (sequence is synthesized)
gtcctccggcctatgatcaaagatttccgccgctacctgcagagcaacacagctaacccggcccccgcctctgaccctgggcaggtggcccagaatgggcagccagacagcatcatccag

SEQ ID NO: 574096 - DNA, 120 bp, Artificial Sequence
  ENSG00000171169_10 (sequence is synthesized)
tgagggcaggggtcaggccagccttctgccatgatgggatgaaaactccatggacttgtaagtgggtcctgtgattggccttggccttagaccggccacgtgcacagctccctctttaat

SEQ ID NO: 574097 - DNA, 120 bp, Artificial Sequence
  ENSG00000171169_11 (sequence is synthesized)
aaacgcttaggggttgcactgtttttgagaagaggaatttgttgggctcctgggacccaaactcatactccccctacttgagctgccttgctaagatccagaagattggttagcaggggg

SEQ ID NO: 574098 - DNA, 120 bp, Artificial Sequence
  ENSG00000171169_12 (sequence is synthesized)
tcacgtgtgcatgtgatgggacatgtgttgtcatgaccccgggcttgtgacatgacccagccttggtcttggacaactgtaaggaacaacacaacgggctgtcactgggggccgtcaccc

SEQ ID NO: 574099 - DNA, 120 bp, Artificial Sequence
  ENSG00000171169_13 (sequence is synthesized)
agcctgggtctctactgagctgcccaaccccaggtgccatcctttcgagtagggtaatgtcactgatgctggcagttgagcaataatatcttcctcctttgggaggtagtgtgactgagg

SEQ ID NO: 574100 - DNA, 120 bp, Artificial Sequence
  ENSG00000171169_14 (sequence is synthesized)
ctcaggggactccaatgactgttgtgctctcccccgaccccaccccaggcacagcgcaggcccttgttaggtagtgtgctgggacgcctccgtaatacatgcagtgtgcagccagtctgg

SEQ ID NO: 574101 - DNA, 120 bp, Artificial Sequence
  ENSG00000171169_15 (sequence is synthesized)
ctcaggaatgctgtgtatggtggggacggtttggccactctctggttttcaacagcatctctgggcagccctttggtggtttgtccctagagcttttgactcaggtcaagctttggatgc

SEQ ID NO: 574102 - DNA, 120 bp, Artificial Sequence
  ENSG00000171169_16 (sequence is synthesized)
tgtaaatttttgagaaagccaactagtgtggaagcttgctgccccactgcagtgggtctgagtgacctgttggctttgtgcggaggcttgcatccagccagttgtatttattctgtgtgt

SEQ ID NO: 574103 - DNA, 120 bp, Artificial Sequence
  ENSG00000171169_17 (sequence is synthesized)
gaacccctcctaggaaggcctccaggaaggctgccctgtggccacacccatcctcctttcctctctgctgactccacatttccaaaattcagtgcaaaaaaagccctgctgagcatcaca

SEQ ID NO: 574104 - DNA, 120 bp, Artificial Sequence
  ENSG00000171169_18 (sequence is synthesized)
tgctggactcttcccctgccacaccgctcagtgccttctgttctcttgagactccctctgagtagctgagtgaatccaaagccataattgaccctgaacgtaggaggaggaaaaggcgaa

SEQ ID NO: 574105 - DNA, 83 bp, Artificial Sequence
  ENSG00000171169_19 (sequence is synthesized)
gccataattgaccctgaacgtaggaggaggaaaaggcgaagctgacctaagaagtgggaccctggccgggcgaggtggctcaa

SEQ ID NO: 574106 - DNA, 64 bp, Artificial Sequence
  ENSG00000171169_20 (sequence is synthesized)
tgggaccctttggattctatgctcagggaagagcaggcagagccttggagtgctgaaggaggtg

SEQ ID NO: 574107 - DNA, 120 bp, Artificial Sequence
  ENSG00000171169_21 (sequence is synthesized)
agggaagagcaggcagagccttggagtgctgaaggaggtgctgttccctgttccatctttacactttctcttctgagatgtctgtaaggattttacccagatgccatttgtctgtttcat

SEQ ID NO: 574108 - DNA, 120 bp, Artificial Sequence
  ENSG00000171169_22 (sequence is synthesized)
tttcagactcaccatcaattaccaaggcccttgcatctccccagatcgtttcccaagtttggcgatttgctgtcggtgcctcagccacatatgaccaatggttacaactcagggctccag

SEQ ID NO: 574109 - DNA, 120 bp, Artificial Sequence
  ENSG00000171169_23 (sequence is synthesized)
acctcagctaaaaagagaagacgctgccctcctgggcacgaacgtttagaatgctcaactcctctattgtgaccacaggaaggtggccctgaagatgcaccgaagacagctgggaggtga

SEQ ID NO: 574110 - DNA, 120 bp, Artificial Sequence
  ENSG00000171169_24 (sequence is synthesized)
ctgctgtactgtcagcctctctgtggaggcattcgtgcagtgccagctaaaagggaggtgaagggggatatcggacccagcgagggagttgctggtagaaggaaagctcttctcagtgtg

SEQ ID NO: 574111 - DNA, 120 bp, Artificial Sequence
  ENSG00000171169_25 (sequence is synthesized)
gctggattaagagcagcctagcagcttgggcacctccactctgtgcggtctgatggccccagcaaggtcgctgcagggacttcctgaggacttggtttggtttttttctggggttggaaa

SEQ ID NO: 574112 - DNA, 120 bp, Artificial Sequence
  ENSG00000171169_26 (sequence is synthesized)
tctgagccaatattgtgtctgttccatttgggtatgaagaggaagtctggatcacttaaactgactagttatttccgggtcataattttaaattaaagacatatcacttttttatacaca

SEQ ID NO: 574113 - DNA, 120 bp, Artificial Sequence
  ENSG00000171169_27 (sequence is synthesized)
ccccacaggacttttcacagggcccggcttgtagtagacagccaggccatatttgttgaaaaaattgatgggaataatactgcccaagtgagacaacgattctggattctgttttcagtg

SEQ ID NO: 574114 - DNA, 120 bp, Artificial Sequence
  ENSG00000171174_0 (sequence is synthesized)
gcagaggtcaccgtccaggttggacagcagcacctttgagcgatggcggcgtctggggaaccccagaggcagtggcaagaggaggtggcggcggtggtagtggtgggctcctgcatgacc

SEQ ID NO: 574115 - DNA, 120 bp, Artificial Sequence
  ENSG00000171174_1 (sequence is synthesized)
gacctggtcagtcttacttctcgtttgccaaaaactggagaaaccatccatggacataagttttttattggctttggagggaaaggtgccaaccagtgtgtccaagctgctcggcttgga

SEQ ID NO: 574116 - DNA, 120 bp, Artificial Sequence
  ENSG00000171174_2 (sequence is synthesized)
gcaatgacgtccatggtgtgtaaggttggcaaagattcttttggcaatgattatatagaaaacttaaaacagaatgatatttctacagaatttacatatcagactaaagatgctgctaca

SEQ ID NO: 574117 - DNA, 120 bp, Artificial Sequence
  ENSG00000171174_3 (sequence is synthesized)
ggaactgcttctataattgtcaataatgaaggccagaatatcattgtcatagtggctggagcaaatttacttttgaatacggaggatctgagggcagcagccaatgtcattagcagagcc

SEQ ID NO: 574118 - DNA, 120 bp, Artificial Sequence
  ENSG00000171174_4 (sequence is synthesized)
aaagtcatggtctgccagctcgaaataactccagcaacttctttggaagccctaacaatggcccgcaggagtggagtgaaaaccttgttcaatccagcccctgccattgctgacctggat

SEQ ID NO: 574119 - DNA, 120 bp, Artificial Sequence
  ENSG00000171174_5 (sequence is synthesized)
ggctgagattttaactggcctcacggtgggcagcgctgcagatgctggggaggctgcattagtgctcttgaaaaggggctgccaggtggtaatcattaccttaggggctgaaggatgtgt

SEQ ID NO: 574120 - DNA, 120 bp, Artificial Sequence
  ENSG00000171174_6 (sequence is synthesized)
ggtgctgtcacagacagaacctgagccaaagcacattcccacagagaaagtcaaggctgtggataccacgggtgctggtgacagctttgtgggagctctggccttctacctggcttacta

SEQ ID NO: 574121 - DNA, 120 bp, Artificial Sequence
  ENSG00000171174_7 (sequence is synthesized)
tccaaatctgtccttggaagacatgctcaacagatccaatttcattgcagcagtcagtgtccaggctgcaggaacacagtcatcttacccttacaaaaaagaccttccgcttactctgtt

SEQ ID NO: 574122 - DNA, 120 bp, Artificial Sequence
  ENSG00000171174_8 (sequence is synthesized)
ttgattgctattagtcccaaaataaatatacctgggaataaaatgtacttgggggtggctgctcctggctaatgcttattagaaaatgtcctcgtcccctttctttgcaaatattagttc

SEQ ID NO: 574123 - DNA, 120 bp, Artificial Sequence
  ENSG00000171174_9 (sequence is synthesized)
ttttacgaagtcatcctcaagcttcaatttatttataacgatgattcttttgctttccatgcatttgcacaaaacaaccagaattaaagattccacaaccaagatctgtacaaacataaa

SEQ ID NO: 574124 - DNA, 120 bp, Artificial Sequence
  ENSG00000171174_10 (sequence is synthesized)
ggacagcagcacctttgagcgatggcggcgtctggggaaccccagaggcagtggcaagaggaggtggcggcggtggtagtggtgggctcctgcatgaccgacctggtcaggaggatgtgc

SEQ ID NO: 574125 - DNA, 120 bp, Artificial Sequence
  ENSG00000171174_11 (sequence is synthesized)
atgaggatatgttatgtgcacttttgttgccagcccacaccacagctgcagaactgttcaagtctttgcgtgattacatgtcaggaaaactgaactggtcattttgtgtgagtatatgca

SEQ ID NO: 574126 - DNA, 120 bp, Artificial Sequence
  ENSG00000171174_12 (sequence is synthesized)
tggacagagtggctgccatggctggacagcttctggtttcactactcacatcaaagaggttgcttctgaatgtgagtctacacaccatgtcatccatagagaaatgctggctagccaaaa

SEQ ID NO: 574127 - DNA, 120 bp, Artificial Sequence
  ENSG00000171174_13 (sequence is synthesized)
aatgtcacctgaacttaacagcattttgcaggatgtgattaaaattatcaaccacgttaaagtacatgcccttaactcacgtctcttcgcacagctctgtgaggaggtgggtgcagtgca

SEQ ID NO: 574128 - DNA, 120 bp, Artificial Sequence
  ENSG00000171174_14 (sequence is synthesized)
cacatgtcttctctcacacacacaagtgagatggctttctaaaggtagatcactgatcagagtttttgagttacaagagccactccggagatttcttttagaaaaacagtcaccactggc

SEQ ID NO: 574129 - DNA, 120 bp, Artificial Sequence
  ENSG00000171174_15 (sequence is synthesized)
agcacatttcagtgacacagaatgggttgcaaacctggcttccttgtgtgacatattcaacctgctcaacgaactcgatctgtcacttcaggggagaatgacaactgtgttcaaattgtc

SEQ ID NO: 574130 - DNA, 120 bp, Artificial Sequence
  ENSG00000171174_16 (sequence is synthesized)
agataaaggggctgcattcaaagccaaactggaattatgggggtgacaagtgaacatggggatttctgacatgtttcaaacattagcagatattttgaaagagactgaaccagggccttc

SEQ ID NO: 574131 - DNA, 120 bp, Artificial Sequence
  ENSG00000171174_17 (sequence is synthesized)
tttcccccagctggtgcatgatcacctatctcagcttttaaaggagtttgagcattacttcccaaccacaaaagaccccccagactgggaaggaatggatctgcaacccatttgtggata

SEQ ID NO: 574132 - DNA, 120 bp, Artificial Sequence
  ENSG00000171174_18 (sequence is synthesized)
ggattgaagtcaaggcataatatccagagactgccccaaaagcactgaaaagcttgcttccatttccaacaccctatctttgtgaagcagagttttctgcagtaacagcaaccaaaacga

SEQ ID NO: 574133 - DNA, 120 bp, Artificial Sequence
  ENSG00000171174_19 (sequence is synthesized)
gtgtagacctggctcaagacccaagagtgaagcagcaagtgtgaagaagcagaaacattataaataacccagagaatccttttataacagcaactgcctactgattttgtggcctaacag

SEQ ID NO: 574134 - DNA, 120 bp, Artificial Sequence
  ENSG00000171174_20 (sequence is synthesized)
ctcgagcaaaaatgaatataaatacaacattgtgcaatgactaattactcaaaattttgtgcatcagcagaagtggaacctgtggttggtgctaatattatgaaatgcctttgctgttta

SEQ ID NO: 574135 - DNA, 120 bp, Artificial Sequence
  ENSG00000171174_21 (sequence is synthesized)
ataatctggtagctctgtattatttagcatgcatttttcttggagaacaatgattttatttcaagtacctctcactgaaataaaaaagcagctgttagaagatgaacatttagcagaaaa

SEQ ID NO: 574136 - DNA, 120 bp, Artificial Sequence
  ENSG00000171174_22 (sequence is synthesized)
gtgcgcgcccccgcgccgcgccgagccgggcgctcggaaaggcgtccccgcggtgcctgacagttccttcctcagcgcctgccccgtgagtgacgaggagcgcggagtctcgccatatca

SEQ ID NO: 574137 - DNA, 120 bp, Artificial Sequence
  ENSG00000171174_23 (sequence is synthesized)
ggagggccctgttacgtgaggctgtgcaccgagactattccaggaagaagaggggacacttggtgggcggggtgatttcgggcagtcaggtgggcgacccgcgtaggcgtctgaaaggcc

SEQ ID NO: 574138 - DNA, 120 bp, Artificial Sequence
  ENSG00000171174_24 (sequence is synthesized)
tgtggaagaggaatgctgctgatactgggagtgcagtgggcaagatctgtcttacttctcgtttgccaaaaactggagaaaccatccatggacataagttttttattggctttggaggga

SEQ ID NO: 574139 - DNA, 120 bp, Artificial Sequence
  ENSG00000171180_0 (sequence is synthesized)
atggtgtgggaaaaccagaccttcaactccatcttcatcctgctgggaatcttcaatcacagtcccacccacaccttccttttttctctggtcctgggcatcttctcactggcattgatg

SEQ ID NO: 574140 - DNA, 120 bp, Artificial Sequence
  ENSG00000171180_1 (sequence is synthesized)
gaaaatatttccatggttctcctcatctacatagagaaacagctccacacccccatgtacttcctcctcagtcaactgtcccttatggacctcatgctcatctgcaccactctacccaag

SEQ ID NO: 574141 - DNA, 120 bp, Artificial Sequence
  ENSG00000171180_2 (sequence is synthesized)
atgatcttcagctacttgtctgggaagaaatctatctctctggcaggttgtggaactcagatattcttctatgtgtccctgcttggagctgaatgtttcttgttggctgtcatggcttat

SEQ ID NO: 574142 - DNA, 120 bp, Artificial Sequence
  ENSG00000171180_3 (sequence is synthesized)
tctcttgatgggatcatagtgcttgcagctgtcctgtcattttcttactgcagctctctggaaattcatcactttttctgtgatgttgctgcccttttacctctatcctgcacagaaaca

SEQ ID NO: 574143 - DNA, 120 bp, Artificial Sequence
  ENSG00000171180_4 (sequence is synthesized)
tctgcatttgaaagactacttgtcatttgttgtgtggtaatgctaatctttccagtttcagttatcatactttcctattcccatgtccttcgagccgtcatccacatgggctctggggaa

SEQ ID NO: 574144 - DNA, 120 bp, Artificial Sequence
  ENSG00000171180_5 (sequence is synthesized)
agtcgtcgcaaggccttcactacctgctcctcccacctgtctgtggtcggactctactacggtgctgctatgttcatgtacatgagaccagcttctaaacatacgccagaccaggacaag

SEQ ID NO: 574145 - DNA, 120 bp, Artificial Sequence
  ENSG00000171180_6 (sequence is synthesized)
atggtgtcggccttctacactattctcacccctatgctgaaccctctcatttatagcctccgcaacaaagaagtgttcagggcactacagaaggtactgaagaaaagaaagttaatatga

SEQ ID NO: 574146 - DNA, 120 bp, Artificial Sequence
  ENSG00000171180_7 (sequence is synthesized)
cttcggacaagtgggtcatttggactactggagttgctgcttttgaatcttttctagaagagaaagaagaaaaggttgtaatacagctcaggcagtgattattatattccagagtataaa

SEQ ID NO: 574147 - DNA, 120 bp, Artificial Sequence
  ENSG00000171180_8 (sequence is synthesized)
atttctggtaatttgtattaatattttccacttcttttcaaaattatctattcagtatattattacatatacatcgtttgtatactaagctagatttggatgttagtataagtggtttaa

SEQ ID NO: 574148 - DNA, 120 bp, Artificial Sequence
  ENSG00000171180_9 (sequence is synthesized)
tccctgtgaatgacaattatattattaggtgtcacacatgggtggtacttgattttaggatgcttacttttgaagccaggtataagtccgaagggtcttagctgtatcaaaaagcaaagg

SEQ ID NO: 574149 - DNA, 120 bp, Artificial Sequence
  ENSG00000171180_10 (sequence is synthesized)
ttggagttgatcctctgtttttggagagatgcttctttgttcacaaattacttacctattagtacttgtttttaatttgcccatcctcaaacccaagaatgactattttaatactgattc

SEQ ID NO: 574150 - DNA, 120 bp, Artificial Sequence
  ENSG00000171180_11 (sequence is synthesized)
ttctttacttgactcccaagtatttaaaagtgcggagttagtatcaacactttcttcaatcaagttttatgtctgcataaaatatttcctagaaactcgtataaacatacacacacttaa

SEQ ID NO: 574151 - DNA, 120 bp, Artificial Sequence
  ENSG00000171180_12 (sequence is synthesized)
gtatatatgtgtgtgatctttatgctaataaaattaaatattttaaggagtccacataaaatatctatttgggctgcacagtcaacatctgtatcatgtctgcttttattccttataatc

SEQ ID NO: 574152 - DNA, 120 bp, Artificial Sequence
  ENSG00000171180_13 (sequence is synthesized)
cttatattaaccatcagaatctgaaggcagagcaagatgatggaatagaaggctccactgatcgttcacatgcaaggacagcaatttaacaataatccatacacgaacaacacattcatg

SEQ ID NO: 574153 - DNA, 120 bp, Artificial Sequence
  ENSG00000171180_14 (sequence is synthesized)
agagccaaaaatcaggtgagccttcgtagtacctggttttaactttatatcactgaagaggcagtgaagaggtagaaaaaacaacttgaacagacaatgccacccctctctcaccactga

SEQ ID NO: 574154 - DNA, 120 bp, Artificial Sequence
  ENSG00000171180_15 (sequence is synthesized)
cagaaggaacagtgtgctaagagtgtctctgggctctggtgagaaagaacacagcaattgtgaggctttgagctcagtgctgtcctgtaagagcagaaaggaaaaccagataaaattcag

SEQ ID NO: 574155 - DNA, 120 bp, Artificial Sequence
  ENSG00000171180_16 (sequence is synthesized)
ctgatgcctggccacagacagagcatttaaaccagcccttgtcagaggggaattactgatcccagtggtcaaaacttgtgttcccacaaaccttgacactgagggctaaaatgcgctgag

SEQ ID NO: 574156 - DNA, 120 bp, Artificial Sequence
  ENSG00000171180_17 (sequence is synthesized)
gctctaagtaaacttaaaaggcggtctatgccataagtactgcaactcttaggtgagtcctagtgctgaattgggccccgagatagtggactgtgcggcgggcacgtgaactacagagac

SEQ ID NO: 574157 - DNA, 120 bp, Artificial Sequence
  ENSG00000171180_18 (sequence is synthesized)
agcagctggggcaactgaggttgtgctggcatcacccttgcctaacctcaggctgcacagctcatggctccaaaagagttcttccacttgaggagaagaaagagtggagaggactttgtc

SEQ ID NO: 574158 - DNA, 120 bp, Artificial Sequence
  ENSG00000171180_19 (sequence is synthesized)
tcacatcttggataccagtttagccacagcaagaaaatgcactcgtcaaagctgtgaggcccttattccaggacctccatcccagatgacatttctatatacaccctgggcaagaaggga

SEQ ID NO: 574159 - DNA, 120 bp, Artificial Sequence
  ENSG00000171180_20 (sequence is synthesized)
ctaacactgttgcttaatattttgcttcgtaagcaccaatggattgattcaactgaaatttttgtactcaccacagtaatattcataattattatttagattgacatgcttatttttaag

SEQ ID NO: 574160 - DNA, 120 bp, Artificial Sequence
  ENSG00000171180_21 (sequence is synthesized)
tatagtataatcaaatgttttctaatttaaaaatgtgctagcaaattttaaaaattaaaacaaaggctaattttatccttaaaaaaaataatttctgggccggatgcagtggctcgctca

SEQ ID NO: 574161 - DNA, 79 bp, Artificial Sequence
  ENSG00000171180_22 (sequence is synthesized)
aggccagcctgaccaacatggagaaatttcatctcgactaaaaaaatacaaaatctggggctgaggcaggagaatcgct

SEQ ID NO: 574162 - DNA, 120 bp, Artificial Sequence
  ENSG00000171180_23 (sequence is synthesized)
aaatataaaaagtagtttttatcatagcaaatgtcgccctagctatgtcaagtcaaaaatttagatttattgggattttaaaagaagataatactatgtccctatgtgtttcattccact

SEQ ID NO: 574163 - DNA, 120 bp, Artificial Sequence
  ENSG00000171180_24 (sequence is synthesized)
ttatgatacacactggaaatgtttatgctcagtttttggaagcagaatatatgtgtcgtgggtacagttgctcaatttattcaatttatacttgtatatgctgattcttcaccaatgaat

SEQ ID NO: 574164 - DNA, 120 bp, Artificial Sequence
  ENSG00000171180_25 (sequence is synthesized)
tcaattttattaattcaattaattaaattttataatacaaaacagtgaatttaatgacatatctttgccagtcagtgttcactggttgagccagaaagagttttacaaagtttttttttg

SEQ ID NO: 574165 - DNA, 120 bp, Artificial Sequence
  ENSG00000171180_26 (sequence is synthesized)
agtgcctggattacatgcgtcagccacagcacccagccccgagttttacaaagatttactgtactttcactcccactccggatcttctttaatcaaaatatatagcaagcatttcaatag

SEQ ID NO: 574166 - DNA, 120 bp, Artificial Sequence
  ENSG00000171180_27 (sequence is synthesized)
tcatgataacaaatagaagtgtgatttacattttgtcagcaacatcacaccttatgtgaaacaggtaaatttagaacaaccagaaaagaaagacttatctgtgatctactaagagaagta

SEQ ID NO: 574167 - DNA, 120 bp, Artificial Sequence
  ENSG00000171180_28 (sequence is synthesized)
tgaaaattgagcttgaaatggaaacattttatgatatgaatcgataatgattttgtacatttgattttacacataatatgcagaaaaaagtaattttaatatgcaattatgtaaactgca

SEQ ID NO: 574168 - DNA, 120 bp, Artificial Sequence
  ENSG00000171180_29 (sequence is synthesized)
tgcaaaatctacaagaaacatttgaaaacaattttgatattgatgaatttaaagttactttttaatttatatgttaaatttttgaatttgatgttaataataccgacttgaaagaagtta

SEQ ID NO: 574169 - DNA, 120 bp, Artificial Sequence
  ENSG00000171180_30 (sequence is synthesized)
gcttactcaatttagtgatgaaaaatgttttgagtatgtttgggacattgcgtatatgtgaatctaatttttcaactgtaaattttattaaatttaaatgcagaccaagtatttttgaaa

SEQ ID NO: 574170 - DNA, 120 bp, Artificial Sequence
  ENSG00000171180_31 (sequence is synthesized)
aaaaattagtgtctgaattatgagctgaaaatgtaaaataaacgcttgattttaaaaagtttatacataaaatgtaaaatatatcgttattaatttttaaggttgcttgcctgttgaaac

SEQ ID NO: 574171 - DNA, 120 bp, Artificial Sequence
  ENSG00000171180_32 (sequence is synthesized)
aatattttggacgtattagttttaacttaatttttggtgttgaagtttgggctgtaatccagtagatggcgcctaagagtaatgcccgtagagaggctcttgatcggccacttggctctt

SEQ ID NO: 574172 - DNA, 120 bp, Artificial Sequence
  ENSG00000171180_33 (sequence is synthesized)
tcgtgtttcctggcattcgcaggcacgctgtccggtgggggttgagagagatgcctccttaccaggacgactcctgagccttggaggaggcccctccaattactagcacttcgcctgcat

SEQ ID NO: 574173 - DNA, 120 bp, Artificial Sequence
  ENSG00000171180_34 (sequence is synthesized)
ttcttttattagatgtttcgggctacagccctccctcaggcagaggccacagcagagagagctacctttcagcatgtacagaaattaactcgagatggattaaagacttaaacgtaagaa

SEQ ID NO: 574174 - DNA, 120 bp, Artificial Sequence
  ENSG00000171180_35 (sequence is synthesized)
aatcctagaagaaaacttaggaaatgccgttcttgataccaggcttggcaaataatttttggctaatttcccaaaaacatttgcaacaaaaattgacaagctagacctaattaaagagct

SEQ ID NO: 574175 - DNA, 120 bp, Artificial Sequence
  ENSG00000171180_36 (sequence is synthesized)
aacagacaatctacagaatgggagaagatattagcaaaatgtgcatccaacaaaggtctaacatccagattctatacggaacttaagtcaacaagcaaaaccccattaaataatcccatt

SEQ ID NO: 574176 - DNA, 120 bp, Artificial Sequence
  ENSG00000171180_37 (sequence is synthesized)
caacaagcaaaaccccattaaataatcccattaaaaagtgggcaaagcacatgaccatgcatttctcaaaagaaggcatatgagcagccaacaaacatgaaaaaatggtcatcatagtta

SEQ ID NO: 574177 - DNA, 120 bp, Artificial Sequence
  ENSG00000171180_38 (sequence is synthesized)
gttatgagagaaatgcaaatcaaaacctaaatgagagaccatctcacaccagtcccgtcaaaatgaccattaataaagtcaaataataacaaatactagtgaagctgtggagaaaaggaa

SEQ ID NO: 574178 - DNA, 90 bp, Artificial Sequence
  ENSG00000171180_39 (sequence is synthesized)
gaagaacttaaaacagggctgctacttgacccaggaatgctattactggggatacatccaaaagaaaataaattgttctaccccaaagac

SEQ ID NO: 574179 - DNA, 120 bp, Artificial Sequence
  ENSG00000171180_40 (sequence is synthesized)
gatacatccaaaagaaaataaattgttctaccccaaagacaaattattcattcattgcagtgttattcccaatagcaaggaatcaacctacatgcccatcaatggtggattggataaaga

SEQ ID NO: 574180 - DNA, 120 bp, Artificial Sequence
  ENSG00000171180_41 (sequence is synthesized)
catcaatggtggattggataaagaaaatgtagcacataaacaccacagagtgctacatagccataaaaaagaacaaaatcatgtcctttgtagcaacatggatgcaactggaggccatta

SEQ ID NO: 574181 - DNA, 120 bp, Artificial Sequence
  ENSG00000171180_42 (sequence is synthesized)
aaccaaatactgcatgttctcacttatacataggagctaaactttgggtactcaaggatgtaaagatggaaacaatagacactgtggactaccaaatggggaaggaagggaggggagtgt

SEQ ID NO: 574182 - DNA, 120 bp, Artificial Sequence
  ENSG00000171180_43 (sequence is synthesized)
gtgtgggttgcaaaactacctatgggatactatgctcacaacctgggtgatgggatctataccctaaacctcagcgtgatgaaatatacacatgtaacaaacacgcacatgtacccactg

SEQ ID NO: 574183 - DNA, 120 bp, Artificial Sequence
  ENSG00000171189_0 (sequence is synthesized)
agcgcgcagcgtgcttggaaccggagcatccagagaggatgaggcggggacccggcccaagttgggtgcatctctcgggcgtccggcagcggctgtatctcggcatgaattaagaagcta

SEQ ID NO: 574184 - DNA, 120 bp, Artificial Sequence
  ENSG00000171189_1 (sequence is synthesized)
ggaagatggagcacggcacactcctcgcccagcccgggctctggaccagggacaccagctgggcactcctctatttcctctgctatatcctccctcagaccgccccgcaagtactcagga

SEQ ID NO: 574185 - DNA, 120 bp, Artificial Sequence
  ENSG00000171189_2 (sequence is synthesized)
tcggagggatttttgaaacagtggaaaatgagcctgttaatgttgaagaattagctttcaagtttgcagtcaccagcattaacagaaaccgaaccctgatgcctaacaccacattaacct

SEQ ID NO: 574186 - DNA, 120 bp, Artificial Sequence
  ENSG00000171189_3 (sequence is synthesized)
atgacatccagagaattaacctttttgatagttttgaagcctcgcggagagcatgtgaccagctggctcttggtgtggctgctctctttggcccttcccatagctcctccgtcagtgctg

SEQ ID NO: 574187 - DNA, 120 bp, Artificial Sequence
  ENSG00000171189_4 (sequence is synthesized)
tgcagtctatttgcaatgctctcgaagttccacacatacagacccgctggaaacacccctcggtggacaacaaagatttgttttacatcaacctttacccagattatgcagctatcagca

SEQ ID NO: 574188 - DNA, 120 bp, Artificial Sequence
  ENSG00000171189_5 (sequence is synthesized)
gggcgatcctggatctggtcctctattacaactggaaaacagtgacagtggtgtatgaagacagcacaggtctaattcgtctacaagagctcatcaaagctccctccagatataatatta

SEQ ID NO: 574189 - DNA, 120 bp, Artificial Sequence
  ENSG00000171189_6 (sequence is synthesized)
aaatcaaaatccgccagctgccctctgggaataaagatgccaagcctttactcaaggagatgaagaaaggcaaggagttctatgtgatatttgattgttcacatgaaacagccgctgaaa

SEQ ID NO: 574190 - DNA, 120 bp, Artificial Sequence
  ENSG00000171189_7 (sequence is synthesized)
tccttaagcagattctgttcatgggcatgatgaccgagtactatcactactttttcacaaccctggacttatttgctttggatctggaactctataggtacagtggcgtaaacatgaccg

SEQ ID NO: 574191 - DNA, 120 bp, Artificial Sequence
  ENSG00000171189_8 (sequence is synthesized)
ggtttcggctgcttaacattgacaaccctcacgtgtcatccatcattgagaagtggtccatggagagactgcaggccccacccaggcccgagactggccttttggatggcatgatgacaa

SEQ ID NO: 574192 - DNA, 120 bp, Artificial Sequence
  ENSG00000171189_9 (sequence is synthesized)
ctgaagcggctctgatgtacgatgctgtgtacatggtggccattgcctcgcaccgggcatcccagctgaccgtcagctccctgcagtgccatagacataagccatggcgcctcggaccca

SEQ ID NO: 574193 - DNA, 120 bp, Artificial Sequence
  ENSG00000171189_10 (sequence is synthesized)
gatttatgaacctgatcaaagaggcccggtgggatggcttgactgggcatatcacctttaataaaaccaatggcttgaggaaggattttgatctggacattattagtctcaaagaggaag

SEQ ID NO: 574194 - DNA, 120 bp, Artificial Sequence
  ENSG00000171189_11 (sequence is synthesized)
gaactgaaaagattgggatttggaattccaacagtgggcttaacatgacggacagcaacaaagacaagtccagcaatatcactgattcattggccaacagaacactcattgtcaccacca

SEQ ID NO: 574195 - DNA, 120 bp, Artificial Sequence
  ENSG00000171189_12 (sequence is synthesized)
ttctggaagaaccctatgttatgtacaggaaatctgataagcctctatatggaaatgacagatttgaaggatattgcctagacctgttgaaagaattgtcaaacatcctgggtttcattt

SEQ ID NO: 574196 - DNA, 120 bp, Artificial Sequence
  ENSG00000171189_13 (sequence is synthesized)
gatggcaaatatggggcccagaatgacaaaggggagtggaacgggatggttaaagaactcatagatcacagggctgacctggcagtggctcctcttaccatcacctacgtgcgggagaaa

SEQ ID NO: 574197 - DNA, 120 bp, Artificial Sequence
  ENSG00000171189_14 (sequence is synthesized)
gtcattgacttctccaaacccttcatgaccctaggcatcagcattctctaccggaagcccaatggtaccaatccaggcgttttctccttcctcaaccccctgtctccagatatttggatg

SEQ ID NO: 574198 - DNA, 120 bp, Artificial Sequence
  ENSG00000171189_15 (sequence is synthesized)
tatgtgctcttagcctgcttgggagtcagctgtgtactctttgtgattgcaaggtttacaccctacgagtggtataacccccacccatgcaaccctgactcagacgtggtggaaaacaat

SEQ ID NO: 574199 - DNA, 120 bp, Artificial Sequence
  ENSG00000171189_16 (sequence is synthesized)
tttactttactaaatagtttctggtttggagttggagctctcatgcagcaaggatcagagctgatgcccaaagctctatcgaccagaatagttggagggatatggtggtttttcacccta

SEQ ID NO: 574200 - DNA, 120 bp, Artificial Sequence
  ENSG00000171189_17 (sequence is synthesized)
atcatcatttcatcctacacggccaatctggctgccttcttgacagtagagagaatggaatcccccatagattcggcagatgatctggcaaagcaaaccaagatagaatatggggcggtt

SEQ ID NO: 574201 - DNA, 120 bp, Artificial Sequence
  ENSG00000171189_18 (sequence is synthesized)
agagatggatcaacaatgaccttcttcaagaaatcaaaaatctccacctatgagaagatgtgggctttcatgagcagcaggcagcagaccgccctggtaagaaacagtgatgaggggatc

SEQ ID NO: 574202 - DNA, 120 bp, Artificial Sequence
  ENSG00000171189_19 (sequence is synthesized)
cagagagtgctcaccacagactacgcgctgctgatggagtccaccagcattgagtatgtgacgcagagaaactgcaacctcactcagatcgggggcctcattgactccaaaggttacgga

SEQ ID NO: 574203 - DNA, 120 bp, Artificial Sequence
  ENSG00000171189_20 (sequence is synthesized)
gtgggaacacctattggttctccttaccgggataaaattactattgctattcttcaactccaagaagaagggaagctgcatatgatgaaagagaagtggtggcgtgggaatggctgcccc

SEQ ID NO: 574204 - DNA, 120 bp, Artificial Sequence
  ENSG00000171189_21 (sequence is synthesized)
gaggaagacaacaaagaagccagtgccctgggagtggaaaatattggaggcatcttcattgttctggctgccggactggtcctttctgtatttgtagctattggagaattcatatacaaa

SEQ ID NO: 574205 - DNA, 120 bp, Artificial Sequence
  ENSG00000171189_22 (sequence is synthesized)
tcacggaagaataatgatattgaacagtgtctctctttcaacgctatcatggaagaactgggaatctcactgaagaatcagaaaaaaataaagaaaaagtcaagaactaaggggaaatct

SEQ ID NO: 574206 - DNA, 120 bp, Artificial Sequence
  ENSG00000171189_23 (sequence is synthesized)
tccttcacaagtatccttacttgtcatcagagacgaactcagagaaaagagactgtggcgtgatccaaggaaacgcctgtaggaagaaaaaggatgcattccctacagatttttggagaa

SEQ ID NO: 574207 - DNA, 120 bp, Artificial Sequence
  ENSG00000171189_24 (sequence is synthesized)
aggatttctgaggagtgtgtgatgtgtttccatatatctatatccataactctgattatgaatacagatataagaaatacaaaagtttaaaaagctcacatagatatgacttgggaagtg

SEQ ID NO: 574208 - DNA, 120 bp, Artificial Sequence
  ENSG00000171189_25 (sequence is synthesized)
acaccagttcttttaaaataaatttgtatgctcaattattttgcattttttctttttccccaataaattgttgtgtgtgctttctaaataataataaaacaacagggtttttttccagaa

SEQ ID NO: 574209 - DNA, 120 bp, Artificial Sequence
  ENSG00000171189_26 (sequence is synthesized)
ctttcccccttttccctcctctgtctgtgcctatcccccgacttttgcatctgaccaaaggacgaatgagggagacgttcctgcagatcggggcagcaactttcctcagctggtctctgg

SEQ ID NO: 574210 - DNA, 120 bp, Artificial Sequence
  ENSG00000171189_27 (sequence is synthesized)
gctccgggagccagagagcgctgatcctccgcggtctgcggcccatggaagaggaggaggaggagccgtgatgggctagcgacagcactgaggagccccgagagagctcagccttgccag

SEQ ID NO: 574211 - DNA, 120 bp, Artificial Sequence
  ENSG00000171189_28 (sequence is synthesized)
tcacggaagaataatgatattgaacaggctttttgtttcttttatggactgcaatgtaagcaaacccatccaaccaactccacttctggaactactttatctacggatttagaatgtggt

SEQ ID NO: 574212 - DNA, 120 bp, Artificial Sequence
  ENSG00000171189_29 (sequence is synthesized)
aaattaattcgagaggagagagggattcgaaaacagtcctcagttcatactgtgtaatcagtttaaaaaaaaaaaaaaagatgtgcccagtagaaaatgtttttgctaattggtgttgtt

SEQ ID NO: 574213 - DNA, 120 bp, Artificial Sequence
  ENSG00000171189_30 (sequence is synthesized)
gatatttgtatttgctaagcataaatagccacaattctctattcctttaggatagcaaaactcatgtattctagacattgaaatgaatacactggaaagatacttgcactgtatgttgaa

SEQ ID NO: 574214 - DNA, 120 bp, Artificial Sequence
  ENSG00000171189_31 (sequence is synthesized)
gcaggggcatattaggggtataaagacttctagaaatgtgtatttacaggaatcttctctgtcccactcatcatcttagttctatcttcatgcattaaaaataagtaactcttccttcat

SEQ ID NO: 574215 - DNA, 120 bp, Artificial Sequence
  ENSG00000171189_32 (sequence is synthesized)
caaagattcagagaagccggaacgtggctccgctcccagttaacctgctggagctcatcaggcttgctcagagcccctgcaccaactcaccctgtaccctctctccttcttcgttagtct

SEQ ID NO: 574216 - DNA, 120 bp, Artificial Sequence
  ENSG00000171195_0 (sequence is synthesized)
ctcttcttttgcttctagttaccatcctcaaaggattggctaaaagcaagcaactggattgaacaccctaagaagaaagattcacactgcaccaggagacatcagaaagaatgaaaactc

SEQ ID NO: 574217 - DNA, 120 bp, Artificial Sequence
  ENSG00000171195_1 (sequence is synthesized)
tgccgctgtttgtgtgcatctgtgcactgagtgcttgcttctcgttcagtgaaggtcgagaaagggatcatgaactacgtcacagaaggcatcatcaccaatcacccaaatctcactttg

SEQ ID NO: 574218 - DNA, 120 bp, Artificial Sequence
  ENSG00000171195_2 (sequence is synthesized)
aattaccacattatcctggactgctagctcaccagaagccgttcattagaaagtcctataaatgtctgcacaaacgctgtaggcctaagcttccaccttcacctaataacccccccaaat

SEQ ID NO: 574219 - DNA, 120 bp, Artificial Sequence
  ENSG00000171195_3 (sequence is synthesized)
tcccaaatcctcaccagccacctaaacatccagataaaaatagcagtgtggtcaaccctaccttagtggctacaacccaaattccatctgtgactttcccatcagcttccaccaaaatta

SEQ ID NO: 574220 - DNA, 120 bp, Artificial Sequence
  ENSG00000171195_4 (sequence is synthesized)
ctacccttccaaatgtgacttttcttccccagaatgccaccaccatatcttcaagagaaaatgttaacacaagctcttctgtagctacattagcaccagtgaattccccagctccacaag

SEQ ID NO: 574221 - DNA, 120 bp, Artificial Sequence
  ENSG00000171195_5 (sequence is synthesized)
acaccacagctgccccacccacaccttctgcaactacaccagctccaccatcttcctcagctccaccagagaccacagctgccccacccacaccttctgcaactacacaagctccaccat

SEQ ID NO: 574222 - DNA, 120 bp, Artificial Sequence
  ENSG00000171195_6 (sequence is synthesized)
cttcctcagctccaccagagaccacagctgccccacccacacctcctgcaactacaccagctccaccatcttcctcagctccaccagagaccacagctgccccacccacaccttctgcaa

SEQ ID NO: 574223 - DNA, 120 bp, Artificial Sequence
  ENSG00000171195_7 (sequence is synthesized)
ctacaccagctccactatcttcctcagctccaccagagaccacagctgtcccacccacaccttctgcaactaccctagacccatcatccgcctcagctccaccagagaccacagctgccc

SEQ ID NO: 574224 - DNA, 120 bp, Artificial Sequence
  ENSG00000171195_8 (sequence is synthesized)
cacccacaccttctgcaactacaccagctccaccgtcttccccagctccacaagagaccacagctgccccaattaccacacctaattcttccccaactactcttgcacctgacacttctg

SEQ ID NO: 574225 - DNA, 120 bp, Artificial Sequence
  ENSG00000171195_9 (sequence is synthesized)
ggccaaaataaaatttctcgatttcttttatatatgaagaatctactaaacagaattattgacgacatggtggagcaatagtatattgtatgttgtaaagtgttctgtcatttacaagat

SEQ ID NO: 574226 - DNA, 120 bp, Artificial Sequence
  ENSG00000171195_10 (sequence is synthesized)
gtgattcatgagtgcagaactaccacctttcttttagcaccaatcccaacatgaaattatattactcagatttaaagcactatcattaatctttcaatctaattattcaccaccacaaga

SEQ ID NO: 574227 - DNA, 120 bp, Artificial Sequence
  ENSG00000171195_11 (sequence is synthesized)
cctattaacaagacaaaatgcctctatcccacaagccagatgcaggtctggggttcaaaataactctttggatcctacagagatagcctactgagggcaaagaaagtccttagataaaga

SEQ ID NO: 574228 - DNA, 120 bp, Artificial Sequence
  ENSG00000171195_12 (sequence is synthesized)
gagaatattgtatgggccatcaaccatttacttttccctgaatgttagaaactacaaaaccactaccttgtacccccatcaaaatcccacctgaaccatctaatcctataaacataaagg

SEQ ID NO: 574229 - DNA, 120 bp, Artificial Sequence
  ENSG00000171195_13 (sequence is synthesized)
ggtaaaattggaactctccagatgaacaaagacatctaaatatctgtagatagaaacatttatctatctaaatatattgatagacctgtcattgtattgattaatgacaaaaccctttag

SEQ ID NO: 574230 - DNA, 120 bp, Artificial Sequence
  ENSG00000171195_14 (sequence is synthesized)
ataattatcttccattttaaataaaattttatttcacaaatatgagccaagaaagaggaaagttgatttgaagtgaggattagaagtgaatgacaataaagtctgtcagccaagcacgaa

SEQ ID NO: 574231 - DNA, 120 bp, Artificial Sequence
  ENSG00000171195_15 (sequence is synthesized)
ccaagactggcactatttttcttagtgtatataattgtttaaactgcaaggttgacatttattgtgttgtgtctaagttaatttcgatctaatgtacctgattctagcctctgtgaacaa

SEQ ID NO: 574232 - DNA, 120 bp, Artificial Sequence
  ENSG00000171195_16 (sequence is synthesized)
caagaatatgtttgtgtatgttcacatggtgcttataatatttcactatcaattcaattaattcacataaattccatgtgaaatgtattcaacaatggaatattttctaaaacatttagt

SEQ ID NO: 574233 - DNA, 120 bp, Artificial Sequence
  ENSG00000171195_17 (sequence is synthesized)
atacatttgaatgtattttaaaccatgccaaactactgctttaatgtcaagtttgcagaattgtctctgaaaataaaaaccctgactttagttgtaaaacaataaaagttagctacttgg

SEQ ID NO: 574234 - DNA, 120 bp, Artificial Sequence
  ENSG00000171195_18 (sequence is synthesized)
tatacggagatgttaatttgggatatggaggcatttttatcttctgtcactactacttaaaactctgatgattatgttagatttttttgctaactaataaagatttcaaatggcaattta

SEQ ID NO: 574235 - DNA, 120 bp, Artificial Sequence
  ENSG00000171195_19 (sequence is synthesized)
actcaattacagtatttcctattcctaaaagaatctagtaggaaggctataagaaatgttctcttactgatccttcttatttgccaccttagattttaagttgcttcttggctaccaaaa

SEQ ID NO: 574236 - DNA, 120 bp, Artificial Sequence
  ENSG00000171195_20 (sequence is synthesized)
actgttccactactcatcaagcacataagttactcattgagaacctctgatcgtcactgtgctcatcaggaagaaattgatgcacaaagaactactgtcaatctcagcaaaccacaacta

SEQ ID NO: 574237 - DNA, 120 bp, Artificial Sequence
  ENSG00000171195_21 (sequence is synthesized)
ctcttcttttgcttctagttaccatcctcaaaggattggctaaaagcaagcaactggattgaacaccctaagaagaaagattcacactgcaccagttcagtgaaggtcgagaaagggatc

SEQ ID NO: 574238 - DNA, 120 bp, Artificial Sequence
  ENSG00000171195_22 (sequence is synthesized)
actgtgctcatcaggaagaaattgatgcacaaagaactactgtcaatctcagcaaaccacaactattcttttctttaaaagtaaattccttgacacaaatgaccttatcttaaatctaat

SEQ ID NO: 574239 - DNA, 120 bp, Artificial Sequence
  ENSG00000171199_0 (sequence is synthesized)
ctttctcttcttggacttttaaattgtggctacctaaattgagtatctggcaagagtaagattaagcagtaatttgttccaaagaagaatcttctaccaaggagcaactttaaagaatga

SEQ ID NO: 574240 - DNA, 120 bp, Artificial Sequence
  ENSG00000171199_1 (sequence is synthesized)
aattaactttcttcttgggcctgttggctcttatttcatgtttcacacccagtgagagtcaaagattctccagaagaccatatctacctggccagctgccaccacctccactctacaggc

SEQ ID NO: 574241 - DNA, 120 bp, Artificial Sequence
  ENSG00000171199_2 (sequence is synthesized)
caagatgggttccaccaagtcccccacctccctatgactcaagacttaattcaccactttctcttccctttgtcccagggcgagttccaccatcttctttctctcgatttagccaagcag

SEQ ID NO: 574242 - DNA, 120 bp, Artificial Sequence
  ENSG00000171199_3 (sequence is synthesized)
tcattctatctcaactctttccattggaatctattagacaacctcgactctttccgggttatccaaacctacatttcccactaagaccttactatgtaggacctattaggatattaaaac

SEQ ID NO: 574243 - DNA, 120 bp, Artificial Sequence
  ENSG00000171199_4 (sequence is synthesized)
tttcttgctatttaccttcctatctctaaccctgagccccaaataaacatcaccaccgcagatacaacaatcaccacaaatccccccaccactgcaacagcaaccaccagcacttccaca

SEQ ID NO: 574244 - DNA, 120 bp, Artificial Sequence
  ENSG00000171199_5 (sequence is synthesized)
aaacccacaatgacgatcagctcctcaacagtacctatctcttcaacaccagagcctgccacctccatatcagcagcaacccccgcagcatctactgaaaatactactcaaattctcgcc

SEQ ID NO: 574245 - DNA, 120 bp, Artificial Sequence
  ENSG00000171199_6 (sequence is synthesized)
aaccgtcctcacacagtattgctcaatgccactgtccaagttacgacttccaaccaaactatattaagcagcccagcctttaaaagtttttggcaaaaactctttgccatttttggttga

SEQ ID NO: 574246 - DNA, 120 bp, Artificial Sequence
  ENSG00000171199_7 (sequence is synthesized)
acatgcaataaatgatattttccaaactgctctgatatcttagaagaaataaactgcaatgattttgatggaaccaaccctgatctaaccagcacactaaataaagtatttgagcaataa

SEQ ID NO: 574247 - DNA, 120 bp, Artificial Sequence
  ENSG00000171199_8 (sequence is synthesized)
gtggctacctaaattgagtatctggcaagagtaagattaagcagtaatttgttccaaagaagaatcttctaccaagcccagtgagagtcaaagattctccagaagaccatatctacctgg

SEQ ID NO: 574248 - DNA, 120 bp, Artificial Sequence
  ENSG00000171201_0 (sequence is synthesized)
acctttatttgccgtctttcaactggcaagagtcattttgaccagcagattaatcaactgtaagacagatcctcacacaaagaggcaactgaaaggatgaaatcactgacttggatcttg

SEQ ID NO: 574249 - DNA, 120 bp, Artificial Sequence
  ENSG00000171201_1 (sequence is synthesized)
ggcctttgggctcttgcagcgtgtttcacacctggtgagagtcaaagaggccccaggggaccatatccacctggaccgctggctcctcctcaaccttttggcccaggatttgttccacca

SEQ ID NO: 574250 - DNA, 120 bp, Artificial Sequence
  ENSG00000171201_2 (sequence is synthesized)
cctcctcctccaccctatggtccagggagaatcccacctcctcctcccgcaccctatggtccagggatatttccaccaccccctcctcaaccctaaggtccaccactccatcctgatgcc

SEQ ID NO: 574251 - DNA, 120 bp, Artificial Sequence
  ENSG00000171201_3 (sequence is synthesized)
cagcctccttcccgaccaagaccctatccacctggacctccatttttccctgtaaattctccaactgatcctaccctccctactcctgcaccccaaatatgaacaactgcagcaggtgcc

SEQ ID NO: 574252 - DNA, 120 bp, Artificial Sequence
  ENSG00000171201_4 (sequence is synthesized)
accaccaccacaaaagacaccactacccttgtaactactgcttctactacccaaaatatgaattccaacactgcttccaagagacatttacataaaattgcttccatttttggatgagaa

SEQ ID NO: 574253 - DNA, 120 bp, Artificial Sequence
  ENSG00000171201_5 (sequence is synthesized)
tgaaaaattccaaaagtgctgagctttggggagaaataatcttagaaagaaattgtagaaaaaacccatgcagacataacatttataccaatgaggcaaaaataaagaattgagcaccaa

SEQ ID NO: 574254 - DNA, 120 bp, Artificial Sequence
  ENSG00000171201_6 (sequence is synthesized)
aacagaaacaagttgctgtgaattactcaacaaggtcctgtgtacttagctgacatgtggtgatggggtgaaaagaatgagtatgtgtgattcttcttaatattgttatttcaccctgat

SEQ ID NO: 574255 - DNA, 120 bp, Artificial Sequence
  ENSG00000171201_7 (sequence is synthesized)
ggcctttgggctcttgcagcgtgtttcacagtaagtatcattaatcacgatcacacttctttatagtttctcattaaccattacttcagatttctttttacattaatgatgttacctttt

SEQ ID NO: 574256 - DNA, 120 bp, Artificial Sequence
  ENSG00000171201_8 (sequence is synthesized)
taaccacacatgtctgatggctgccatactggacagctcaagtctgtggtatcagactgcattaaacagatacgtataaatgttaagttcccatactctagtcagttacacagtaggtaa

SEQ ID NO: 574257 - DNA, 120 bp, Artificial Sequence
  ENSG00000171201_9 (sequence is synthesized)
aactctataaaaatagataatcaaaataaaaccgttttcccagcatgtagtttatggatcatttacaccagagtcacctaactcacttattaaaaatatagtaaagacctcatccaagct

SEQ ID NO: 574258 - DNA, 120 bp, Artificial Sequence
  ENSG00000171201_10 (sequence is synthesized)
tcaataagagtatcagataatgggacctggaaagatgcattttactaaggatctacaagtatctttgcatgctaaattttgggagaatgctaagcatttatatataaacagctactttgt

SEQ ID NO: 574259 - DNA, 120 bp, Artificial Sequence
  ENSG00000171202_0 (sequence is synthesized)
acgccgcgtcacgagtcagccaaagatggctgcgcccaggtaatttgagcaaaggccacagtgaactccggcgtggctgaggaaggaggaggcacccacaggctgctgggaggagagcat

SEQ ID NO: 574260 - DNA, 120 bp, Artificial Sequence
  ENSG00000171202_1 (sequence is synthesized)
aaggctcaaaatggaaaatcataaatccaataataaggaaaacataacaattgttgatatatccagaaaaattaaccagcttccagaagcagaaaggaatctacttgaaaatggatcggt

SEQ ID NO: 574261 - DNA, 120 bp, Artificial Sequence
  ENSG00000171202_2 (sequence is synthesized)
ttatgttggattaaatgctgctctttgtggcctcatagcaaacagtctttttcgacgcatcttgaatgtgacaaaggctcgcatagctgctggcttaccaatggcagggataccttttct

SEQ ID NO: 574262 - DNA, 120 bp, Artificial Sequence
  ENSG00000171202_3 (sequence is synthesized)
tttgaatacaggtgatttggattgtgaaacctgtaccataacacggagtggactgactggtcttgttattggtggtctataccctgttttcttggctatacctgtaaatggtggtctagc

SEQ ID NO: 574263 - DNA, 120 bp, Artificial Sequence
  ENSG00000171202_4 (sequence is synthesized)
agccaggtatcaatcagctctgttaccacacaaagggaacatcttaagttactggattagaacttctaagcctgtctttagaaagatgttatttcctattttgctccagactatgttttc

SEQ ID NO: 574264 - DNA, 120 bp, Artificial Sequence
  ENSG00000171202_5 (sequence is synthesized)
agcataccttgggtctgaacaatataaactacttataaaggcccttcagttatctgaacctggcaaagaaattcactgattttaaacaaatatgtaaacaaaaataaaatggtaaaaaca

SEQ ID NO: 574265 - DNA, 120 bp, Artificial Sequence
  ENSG00000171202_6 (sequence is synthesized)
gccacagtgaactccggcgtggctgaggaaggaggaggcacccacaggctgctgggaggagagcataagaaaaattaaccagcttccagaagcagaaaggaatctacttgaaaatggatc

SEQ ID NO: 574266 - DNA, 120 bp, Artificial Sequence
  ENSG00000171202_7 (sequence is synthesized)
caattattcctagctattttaagttactcatagatgtaattataccttttaacaggctttgtacaattacatttgatatattacctgaaaaatacctgtgatacacaaaagaggatctta

SEQ ID NO: 574267 - DNA, 120 bp, Artificial Sequence
  ENSG00000171202_8 (sequence is synthesized)
acgagtcagccaaagatggctgcgcccaggtaatttgagcaaaggccacagtgaactccggcgtggctgaggaaggaggaggcacccacaggctgctgggaggagagcataaggaatcta

SEQ ID NO: 574268 - DNA, 120 bp, Artificial Sequence
  ENSG00000171204_0 (sequence is synthesized)
ggcaagtcacatgagccaccaaaatggtggtgttcgggtatgaggctgggactaagccaagggattcaggtgtggtgccggtgggaactgaggaagcgcccaaggttttcaagatggcag

SEQ ID NO: 574269 - DNA, 120 bp, Artificial Sequence
  ENSG00000171204_1 (sequence is synthesized)
catctatgcatggtcagcccagtccttctctagaagatgcaaaactcagaagaccaatggtcatagaaatcatagaaaaaaattttgactatcttagaaaagaaatgacacaaaatatat

SEQ ID NO: 574270 - DNA, 120 bp, Artificial Sequence
  ENSG00000171204_2 (sequence is synthesized)
atcaaatggcgacatttggaacaacagctggtttctctggaatattctcaaacttcctgttcagacgctgcttcaaggttaaacatgatgctttgaagacatatgcatcattggctacac

SEQ ID NO: 574271 - DNA, 120 bp, Artificial Sequence
  ENSG00000171204_3 (sequence is synthesized)
ttccatttttgtctactgttgttactgacaagctttttgtaattgatgctttgtattcagataatataagcaaggaaaactgtgttttcagaagctcactgattggcatagtttgtggtg

SEQ ID NO: 574272 - DNA, 120 bp, Artificial Sequence
  ENSG00000171204_4 (sequence is synthesized)
aaaaatggacgcctggcaaccaagtatcataccgttccactgccaccaaaaggaagggttttaatccattggatgacgctttgtcaaacacaaatgaaattaatggcgattcctctagtc

SEQ ID NO: 574273 - DNA, 120 bp, Artificial Sequence
  ENSG00000171204_5 (sequence is synthesized)
tttcagattatgtttggaatattaaatggtctataccattatgcagtatttgaagagacacttgagaaaactatacatgaagagtaaccaaaaaaatgaatggttgctaacttagcaaaa

SEQ ID NO: 574274 - DNA, 120 bp, Artificial Sequence
  ENSG00000171204_6 (sequence is synthesized)
tgaagtttctataaagaggactcaggcattgctgaaagagttaaaagtaactgtgaacaaataatttgttctgtgccttttgcctggtatatagcaaatactcaaaaagtattcaataat

SEQ ID NO: 574275 - DNA, 120 bp, Artificial Sequence
  ENSG00000171204_7 (sequence is synthesized)
tcaatcaataaatataagtttcatcttacacgtaagatacaggtcttatctcctgatggtgtgtccattttgcctggtatataacagataataaatatccagtgtcaataaatgtaacaa

SEQ ID NO: 574276 - DNA, 120 bp, Artificial Sequence
  ENSG00000171204_8 (sequence is synthesized)
tccccgcccaccggcaagtcacatgagccaccaaaatggtggtgttcgggtatgaggctgggactaagccaagggattcaggtgtggtgccggtgggaactgaggaagcgcccaaggaaa

SEQ ID NO: 574277 - DNA, 120 bp, Artificial Sequence
  ENSG00000171204_9 (sequence is synthesized)
tgaaacacgatttccaaaatgaacttaatctttcatgagaaactgaggatagagatgtcaataagcagccactgtttccacctccccacctgaagagctaggaggacaactacaaagagc

SEQ ID NO: 574278 - DNA, 120 bp, Artificial Sequence
  ENSG00000171204_10 (sequence is synthesized)
actgattggcatagtttgtggtgttttctatcccagttctttggcttttactaaaaatggacgcctggcaaccaagtaagttcttccttttccttcttttttcttttcttttcttttctt

SEQ ID NO: 574279 - DNA, 120 bp, Artificial Sequence
  ENSG00000171204_11 (sequence is synthesized)
gctctctacattatagatctagaaaggcaattatcaatttaggagaagtcaacaaacttctaatagcattcatatccaggagaggtgattaactcttttttctttttaggtatcataccg

SEQ ID NO: 574280 - DNA, 120 bp, Artificial Sequence
  ENSG00000171204_12 (sequence is synthesized)
gagccaccaaaatggtggtgttcgggtatgaggctgggactaagccaagggattcaggtgtggtgccggtgggaactgaggaagcgcccaagcttttttgttctgaactcccactgcgtt

SEQ ID NO: 574281 - DNA, 120 bp, Artificial Sequence
  ENSG00000171204_13 (sequence is synthesized)
ctgggactaagccaagggattcaggtgtggtgccggtgggaactgaggaagcgcccaaggacacaaaatatatatcaaatggcgacatttggaacaacagctggtttctctggaatattc

SEQ ID NO: 574282 - DNA, 120 bp, Artificial Sequence
  ENSG00000171204_14 (sequence is synthesized)
ctttacatttatatattgctatacagtttacaaagtccatataccttgtcatatttaatccctgcaacaatcctcctaatcaggtaaactgtatttttttatttctgtagataagcaacc

SEQ ID NO: 574283 - DNA, 120 bp, Artificial Sequence
  ENSG00000171204_15 (sequence is synthesized)
caaactgaggcatgttcaagtacgctaataagcaacatactgggaaaagaattggctgtggcatacaacgcacatcatttcagtatgctacctcctgccacttaagttttgtgacattca

SEQ ID NO: 574284 - DNA, 120 bp, Artificial Sequence
  ENSG00000171204_16 (sequence is synthesized)
gtaaggcatttcatctctgagcctccgttgtcttatctataagttaggactaatagtacttacctcacaggattgttgtgagaattaaaagatactgtaggttaaatgactaccacaata

SEQ ID NO: 574285 - DNA, 120 bp, Artificial Sequence
  ENSG00000171204_17 (sequence is synthesized)
tctgtcatattatgggcttttaatgttatttcctgcccctcaccttaccttgagtttcacaactagtaattgatagagcatctatcccttgttcattcttcaggttcctgcttaagtatc

SEQ ID NO: 574286 - DNA, 120 bp, Artificial Sequence
  ENSG00000171204_18 (sequence is synthesized)
ttttccccagggagacctctgattgcctcattgtacactaggtgtctggatacattctctatatagtttatcttcaaagtattgtgtacactgataattatctatttaaatatttatctc

SEQ ID NO: 574287 - DNA, 120 bp, Artificial Sequence
  ENSG00000171204_19 (sequence is synthesized)
gtgtctttcatctctgtaaactggccagaaggtcagagatcaggtctcttttatgtaccaccgtattcctagctcctagcacgttcctgatatatagtagataataaaaatgtattaacc

SEQ ID NO: 574288 - DNA, 120 bp, Artificial Sequence
  ENSG00000171206_0 (sequence is synthesized)
tcccccccaccgcgcccgtttctttcgccagtgccgggtgggccgaaccggcgggtgccgattaaaggcgccgcctgccgctttctcctcgccccccagcgccgcagctctccgccccct

SEQ ID NO: 574289 - DNA, 120 bp, Artificial Sequence
  ENSG00000171206_1 (sequence is synthesized)
tcccgagtagcgggaccggccttgatgtagggacaccaccccccgtctccttccgccccagcccgggagctcggctcgctgcagcccctggccctcccgtttccccaccctgcctgcccc

SEQ ID NO: 574290 - DNA, 120 bp, Artificial Sequence
  ENSG00000171206_2 (sequence is synthesized)
ttccccaccctgcctgccccgctctgctccgaacccattgtatacggccggctgcggactcccaggccgggccgtggcgggggccccgggacccccgagtgcccctccggctggtcccgc

SEQ ID NO: 574291 - DNA, 80 bp, Artificial Sequence
  ENSG00000171206_3 (sequence is synthesized)
gcgggtgacggggacgcacccccaccccggggcgccccttcgcggggggagagccgggcccgagcaagtcgaggcaggaa

SEQ ID NO: 574292 - DNA, 120 bp, Artificial Sequence
  ENSG00000171206_4 (sequence is synthesized)
ggaaagggccgccacggactgcccggcccgccgatcgtttttattatcgagattattattaaaagggggcggggaccccaggacgcgggggaggggctggatacgcaggtatttttatta

SEQ ID NO: 574293 - DNA, 120 bp, Artificial Sequence
  ENSG00000171206_5 (sequence is synthesized)
aacagattattcctgaaataataatacgcgcaagatggctgaaggtggctgtgatgagagtgttggggttgggatttttttcttcctgttttttcttttttgatctgaggataaagctct

SEQ ID NO: 574294 - DNA, 120 bp, Artificial Sequence
  ENSG00000171206_6 (sequence is synthesized)
gaggcgacagcggctgcggagaccctgcccgaagcgccctcccctcccttgagaagccgcgggcagacagacggacctcggaccgagcaacgggtgcgggcccgccccggacgcgtcgcc

SEQ ID NO: 574295 - DNA, 120 bp, Artificial Sequence
  ENSG00000171206_7 (sequence is synthesized)
tgggcagcagccggggaccgcgggctctcgcctttctgccgacttcttccaattctcatcttcttttattttttggacaggaccggggtgggtggagcagaggtggagagaaatcgggac

SEQ ID NO: 574296 - DNA, 120 bp, Artificial Sequence
  ENSG00000171206_8 (sequence is synthesized)
ttggcattttctccctctctctctcctaatttgttggaggccgccagccctccccttggaaaaaaaaaaatcccaccaaaaaaaaaaaaaaaagaatcaggagcgagaggacgccgcggg

SEQ ID NO: 574297 - DNA, 120 bp, Artificial Sequence
  ENSG00000171206_9 (sequence is synthesized)
aaaaagaatcaggagcgagaggacgccgcggggccctcagcgagcgcgcccagaccccggccgccgccgcggagcccaagatggctgggcgctgagggtggcggctcggcctggccccgc

SEQ ID NO: 574298 - DNA, 120 bp, Artificial Sequence
  ENSG00000171206_10 (sequence is synthesized)
ccttccaggccccagcagaggccgagaagaaaagaaagtggggaggagggggccgggggggcgaagggggagggccgggggaggggaggggagggccgggagccgagcctcctgttcatt

SEQ ID NO: 574299 - DNA, 120 bp, Artificial Sequence
  ENSG00000171206_11 (sequence is synthesized)
agcagttgagaaaaattcctttctagtttgatcaatccttgttttcctcggcagagcccgggcgcccgcccagcgcggagacgggcgcgcggggtctctccgcggcgggggcgccgggcc

SEQ ID NO: 574300 - DNA, 120 bp, Artificial Sequence
  ENSG00000171206_12 (sequence is synthesized)
tcgggggagcgcagaagtagccgcccgggggtcaggccggagcgccgccggggcttctccctccctccctcgccggttgcctttttttccacttctctccctcccccttccgtttctatt

SEQ ID NO: 574301 - DNA, 120 bp, Artificial Sequence
  ENSG00000171206_13 (sequence is synthesized)
tgtgaagggaggaggaaggcagaggcgggctggtgtctctggccggggactggaatttcatctgaatgactgcccctgcgcgcacgcagcgccccggagtcggcccgcccgcgccccgca

SEQ ID NO: 574302 - DNA, 80 bp, Artificial Sequence
  ENSG00000171206_14 (sequence is synthesized)
gaccgccggcctgcccctcccgccccgtccggatctagcagccctcggcgcggccgccctcgcctcctggccccgcagac

SEQ ID NO: 574303 - DNA, 120 bp, Artificial Sequence
  ENSG00000171206_15 (sequence is synthesized)
tcctggccccgcagaccccgggctccggcccctgcgagggaggtgcggcgccgacgagccaggcaggagccgccgctgccgccgccgccggaagaagtgtgctgctcccaagctccgtct

SEQ ID NO: 574304 - DNA, 120 bp, Artificial Sequence
  ENSG00000171206_16 (sequence is synthesized)
gcgcgccccaatgtcagccgcggggacgagcgcaggccgcgggccgccactgccctagccgcgccgacggggaggcggcctcttatatggaatttggaccccggcgctcccctccaaggc

SEQ ID NO: 574305 - DNA, 120 bp, Artificial Sequence
  ENSG00000171206_17 (sequence is synthesized)
tccaaggctggagtcccggccgcggccctggcgcagtccgccgcctcccgctaggcgctcgggaggaggaggagacgcagcccgctgcgcgcgcggcgtgaggaccgcggctccctcctc

SEQ ID NO: 574306 - DNA, 80 bp, Artificial Sequence
  ENSG00000171206_18 (sequence is synthesized)
gggcacgcggaaggcgctgctgactgagcgaccgtcggggccggctggggccggagctcggggctcggtgggcctacagc

SEQ ID NO: 574307 - DNA, 120 bp, Artificial Sequence
  ENSG00000171206_19 (sequence is synthesized)
ctgccccggccccctgcccgcggccgccatggcggagaattggaagaactgcttcgaggaggagctcatctgccctatctgcctgcacgttttcgtggagccagtgcagctgccgtgcaa

SEQ ID NO: 574308 - DNA, 120 bp, Artificial Sequence
  ENSG00000171206_20 (sequence is synthesized)
acacaacttctgccggggctgcatcggcgaggcgtgggccaaggacagcggcctcgtacgctgcccagagtgcaaccaggcctacaaccagaagccgggcctggagaagaacctgaagct

SEQ ID NO: 574309 - DNA, 120 bp, Artificial Sequence
  ENSG00000171206_21 (sequence is synthesized)
caccaacatcgtggagaagttcaatgccctgcacgtggagaagccgccggcggcgctgcactgcgtgttctgccgccgcggccccccgctgcccgcgcagaaggtctgcctgcgctgcga

SEQ ID NO: 574310 - DNA, 120 bp, Artificial Sequence
  ENSG00000171206_22 (sequence is synthesized)
ggcgccctgctgccagtcccacgtgcagacgcacctgcagcagccctccaccgcccgcgggcacctcctggtggaggcggacgacgtgcgggcctggagctgcccgcagcacaacgccta

SEQ ID NO: 574311 - DNA, 120 bp, Artificial Sequence
  ENSG00000171206_23 (sequence is synthesized)
ccgcctctaccactgcgaggccgagcaggtggccgtgtgccagtactgctgctactacagcggcgcgcatcagggacactcggtgtgcgacgtggagatccgaaggaatgaaatccggaa

SEQ ID NO: 574312 - DNA, 120 bp, Artificial Sequence
  ENSG00000171206_24 (sequence is synthesized)
gatgctcatgaagcagcaggaccggctggaggagcgagagcaggacattgaggaccagctgtacaaactcgagtcagacaagcgcctggtggaggagaaagtgaaccaactgaaggagga

SEQ ID NO: 574313 - DNA, 120 bp, Artificial Sequence
  ENSG00000171206_25 (sequence is synthesized)
agttcggctgcagtacgagaagctgcaccagctgctggacgaggacctgcggcagacagtggaggtcctagacaaggcccaggccaagttctgcagcgagaacgcagcgcaggcgctgca

SEQ ID NO: 574314 - DNA, 120 bp, Artificial Sequence
  ENSG00000171206_26 (sequence is synthesized)
cctcggggagcgcatgcaggaggccaagaagctgctgggctccctgcagctgctctttgataagacggaggatgtcagcttcatgaagaacaccaagtctgtgaaaatcctgatggacag

SEQ ID NO: 574315 - DNA, 120 bp, Artificial Sequence
  ENSG00000171206_27 (sequence is synthesized)
gacccagacctgcacgagcagcagcctttcccccactaagatcggccacctgaactccaagctcttcctgaacgaagtggccaagaaggagaagcagctgcggaaaatgctagaaggccc

SEQ ID NO: 574316 - DNA, 120 bp, Artificial Sequence
  ENSG00000171206_28 (sequence is synthesized)
cttcagcacgccggtgcccttcctgcagagtgtccccctgtacccttgcggcgtgagcagctctggggcggaaaagcgcaagcactcaacggccttcccagaggccagtttcctagagac

SEQ ID NO: 574317 - DNA, 120 bp, Artificial Sequence
  ENSG00000171206_29 (sequence is synthesized)
agacgtcgtcgggccctgtgggcggccagtacggggcggcgggcacagccagcggtgagggccagtctgggcagcccctggggccctgcagctccacgcagcacttggtggccctgccgg

SEQ ID NO: 574318 - DNA, 120 bp, Artificial Sequence
  ENSG00000171206_30 (sequence is synthesized)
cggccgcaagattctcgtctgttctgtggacaactgttactgttcttccgtggccaaccatggcggccaccagccctacccccgctccggccactttccctggacagtgccctcgcagga

SEQ ID NO: 574319 - DNA, 120 bp, Artificial Sequence
  ENSG00000171206_31 (sequence is synthesized)
gtactcacacccgctcccgcccacaccctccgtcccccagtcccttcccagcctggcggtcagagactggcttgacgcctcccagcagcccggccaccaggatttctacagggtgtatgg

SEQ ID NO: 574320 - DNA, 120 bp, Artificial Sequence
  ENSG00000171206_32 (sequence is synthesized)
gcagccgtccaccaaacactacgtgacgagctaacgccacgcaggcggcggggcgctggggaatcttcctccccagcccccgggctcgggagttatgcatccagagacctgcccttctac

SEQ ID NO: 574321 - DNA, 120 bp, Artificial Sequence
  ENSG00000171206_33 (sequence is synthesized)
cttcctcgcctcccctcttcctcattccattgccccaggtcttttccttttggattttgttttggttttggctttgtttttgatttttttttattatgaatctcctggacgcagaggtga

SEQ ID NO: 574322 - DNA, 120 bp, Artificial Sequence
  ENSG00000171206_34 (sequence is synthesized)
cagtgggagctggcctgggccaggacggcaggtggccctggagatgggaaagtgtctgtgtcgaggcgctgagctctctctctgtttctccttttttcctctactccttccccttcacac

SEQ ID NO: 574323 - DNA, 120 bp, Artificial Sequence
  ENSG00000171206_35 (sequence is synthesized)
ccccgtggctggaaggaacctcggcttccctgaaagcttgggggtcccacccttcttaccccacccgggaggaacgcccagggccccgggcttgtttctcctcttgttttccttttgggc

SEQ ID NO: 574324 - DNA, 120 bp, Artificial Sequence
  ENSG00000171206_36 (sequence is synthesized)
agtttgatcactgatcgagtaaggaatgacctttagattgtgcgacttttgtttttgtttttttaaatttttttaaaccaagaatgatttctcctgcttccttctcctcaccatcttccc

SEQ ID NO: 574325 - DNA, 120 bp, Artificial Sequence
  ENSG00000171206_37 (sequence is synthesized)
agacggagttcaaaggccacttctcaagcagcttttggcaccttcagcctcagagtggaatcttttaaagacaggacccctatgtccaggaaaggggaaaaggaactttgccaatgatag

SEQ ID NO: 574326 - DNA, 120 bp, Artificial Sequence
  ENSG00000171206_38 (sequence is synthesized)
tgaccacagcaaaagcaaataataataatattaataataataaagagaaataaaataataaaataaaaaacaatagcacagcccttgttgaggtcagcagggaggaggggctgcccggag

SEQ ID NO: 574327 - DNA, 120 bp, Artificial Sequence
  ENSG00000171206_39 (sequence is synthesized)
ttgggtccttgcctggattttgacacagcaacttcctgtagtgagcactttgtatgaatcgtggacttcctgttctcaaggcgcaggtatttattctgtatctgtctagagcacacacca

SEQ ID NO: 574328 - DNA, 120 bp, Artificial Sequence
  ENSG00000171206_40 (sequence is synthesized)
aaatccaaccttctaataaacatgatggcgcagtcccactccctgcctcgcctgttcccctatcccccccaggcctgggatcttcaggcgtcggtgtggggaggggcccctgccctcctt

SEQ ID NO: 574329 - DNA, 120 bp, Artificial Sequence
  ENSG00000171206_41 (sequence is synthesized)
gccttgattttgctcccctgggtccagctggttccaggcctgtgaatgtcagttcgtcgggcactgactccgtctgctcttggccttgggttcatttgacaaatatttgcccagggcctc

SEQ ID NO: 574330 - DNA, 120 bp, Artificial Sequence
  ENSG00000171206_42 (sequence is synthesized)
ccaggcccagccccatgccacctgggccccggcatctctttgaggttctgccaatgtgctcttagctgaggacgaaggaggaacacctttctatgagtcttgcaaagtttacctccttca

SEQ ID NO: 574331 - DNA, 120 bp, Artificial Sequence
  ENSG00000171206_43 (sequence is synthesized)
ggccacaaatatttgagtgcacactacgtgccaggcactgtgcagggctgcaggcatagagacagaatgtaatctagctgggccttggaccccatagggagaggggaccactcaggtcca

SEQ ID NO: 574332 - DNA, 120 bp, Artificial Sequence
  ENSG00000171206_44 (sequence is synthesized)
tacttcctttggacttggggctttggccttgggaggggtggaggtggggtggcaagatgaaaaagacatcctgcccccatccacttcggcagagcttctcaaagtctcaagcatgtcttg

SEQ ID NO: 574333 - DNA, 120 bp, Artificial Sequence
  ENSG00000171206_45 (sequence is synthesized)
aaagtctcaagcatgtcttgggagcttgttaaaagggccgattccttgctgtggctcacgcctgtaatcctgacattttgggaggccaaggcaaattgcctgagctcaggggtttgagac

SEQ ID NO: 574334 - DNA, 120 bp, Artificial Sequence
  ENSG00000171206_46 (sequence is synthesized)
aaccctgtttctacaaaaaatacaagaattagttgggcgtggtggggcacaccacacctgtggtcccagctactctgggactgaggtgggagaactgcttgagcctgggaggcagaggtt

SEQ ID NO: 574335 - DNA, 76 bp, Artificial Sequence
  ENSG00000171206_47 (sequence is synthesized)
gcttgagcctgggaggcagaggttgcagtaggtctagatcaagtcactgcactccagcctgtgcaacaaagtaagg

SEQ ID NO: 574336 - DNA, 120 bp, Artificial Sequence
  ENSG00000171206_48 (sequence is synthesized)
agactcatcgggaatctctgagagcccaggaatttgcatttttaactctattctcccatatcctgggtttagagaagtgctgccattgtggtggtcagggtcctccctgctgcttgtcac

SEQ ID NO: 574337 - DNA, 120 bp, Artificial Sequence
  ENSG00000171206_49 (sequence is synthesized)
agaggccactgcggggagaggaagctgggacacccccaaggcccttctctggagaggggcctcaccttcaaaaaggctccggttgttgcctgatgctctgcacagagctgtaagtccgca

SEQ ID NO: 574338 - DNA, 120 bp, Artificial Sequence
  ENSG00000171206_50 (sequence is synthesized)
gcccatgcacttctgtaatctgctgggtgcctagttatctttcttcttgtttgggcagaatccgggcctgaatgccacccaccccaggaagcccaggacaaggcagacagccttgtaaag

SEQ ID NO: 574339 - DNA, 90 bp, Artificial Sequence
  ENSG00000171206_51 (sequence is synthesized)
ccatgccagtggtccaagcctcactgacccctagccacccctcccctcagaaaaataaaggcttgccgagcacgttggctcatgcctgga

SEQ ID NO: 574340 - DNA, 120 bp, Artificial Sequence
  ENSG00000171206_52 (sequence is synthesized)
aaaaataaaggcttgccgagcacgttggctcatgcctggaatcccagcagtttgaaggtggatggatcacttgagttcaggagttcaaaaccagcctgggccacatggtgaaaccccatc

SEQ ID NO: 574341 - DNA, 120 bp, Artificial Sequence
  ENSG00000171206_53 (sequence is synthesized)
tctactaaaacgaaaaattagccaggcgtggtgccacgggcctgtggtcctagctactctggaggctgaagtgggaggattgcttgattgaggctgggaggtggaggttgcagtgagctg

SEQ ID NO: 574342 - DNA, 120 bp, Artificial Sequence
  ENSG00000171206_54 (sequence is synthesized)
tgcactccaacctgggcaacagagcaagatcctgtctcaaagaaaaaaaagaaaaataaagactttggggctggccagaccaaaccatagccttggtcttgctaactgcctccgccttcc

SEQ ID NO: 574343 - DNA, 120 bp, Artificial Sequence
  ENSG00000171206_55 (sequence is synthesized)
cctccgccttcctgccctgagggagtagaggatgactcgggtggggtggtggacccttgcttcattgttcccctccccagtgtggcagggagccaggagcagtatgacaacagctggcct

SEQ ID NO: 574344 - DNA, 120 bp, Artificial Sequence
  ENSG00000171206_56 (sequence is synthesized)
accccttccctccccgtgcacctgtttggggctaaagggagtggggaaatgactggagcacagtgcccctccagcccagggtgcaggatgcctgggggcaggtgccggtggacagtcact

SEQ ID NO: 574345 - DNA, 120 bp, Artificial Sequence
  ENSG00000171206_57 (sequence is synthesized)
tcactccactcaaatctgcttctgtctcactgtccctttctccagttctcaggagccctgagacatcccccgtgccaagagttgggagccaagataaaaagctgcctaatttctttccca

SEQ ID NO: 574346 - DNA, 120 bp, Artificial Sequence
  ENSG00000171206_58 (sequence is synthesized)
tctcatgacattactgggatgattagataaatctgtacaggaaaagtgtttagaacagaggttggtgtagccctgccctcagaaagctcagggtttaaatatgcatgggggctgggcatg

SEQ ID NO: 574347 - DNA, 71 bp, Artificial Sequence
  ENSG00000171206_59 (sequence is synthesized)
agaaagctcagggtttaaatatgcatgggggctgggcatggtggctcacgcccatagtttgagaccagcct

SEQ ID NO: 574348 - DNA, 120 bp, Artificial Sequence
  ENSG00000171206_60 (sequence is synthesized)
gcctgggcaacagagtgagaatccatctaaaaaaataataagataaataaatatgcatgggaagctattctggggagagctgggaataggcccctgggattggagggggccaaaggggct

SEQ ID NO: 574349 - DNA, 120 bp, Artificial Sequence
  ENSG00000171206_61 (sequence is synthesized)
ggctgggtagcagaggcttggtgccatcgggtcaaaggatccataggatgcatgtgttgtgtagagggaagcatgggtcagggttggagccacagtccctctgatactcccacccaaatg

SEQ ID NO: 574350 - DNA, 120 bp, Artificial Sequence
  ENSG00000171206_62 (sequence is synthesized)
ggacggagtcacggagagtttttgagcaggggagagagcctgtctaaagaggcatatctggtgagaggagggcaggagagatggagtgactggcaggaaaggggttgtggggacaggaga

SEQ ID NO: 574351 - DNA, 120 bp, Artificial Sequence
  ENSG00000171206_63 (sequence is synthesized)
ttatgagctgagaagagcactttggtccagcaccttccagcagcctggcctcaggtcttaggagacctcaaatctcctttctgcctgggtcccactgagggggctgagggagctagccag

SEQ ID NO: 574352 - DNA, 120 bp, Artificial Sequence
  ENSG00000171206_64 (sequence is synthesized)
gactccagagtcctagctctcagtcttaagaacaagggagggggtgactggcctgatgccccctaatgtaaggcgagggtaaagtgagatctttggactgggacagaggttcacgtggct

SEQ ID NO: 574353 - DNA, 120 bp, Artificial Sequence
  ENSG00000171206_65 (sequence is synthesized)
atggaagggaatttgaccccctgcatcttagggtactcatctcttagaggatgctccccagggagaggcagcacagcctgggtaagaacggaccctgctgccagatcacctgtgtttgtg

SEQ ID NO: 574354 - DNA, 120 bp, Artificial Sequence
  ENSG00000171206_66 (sequence is synthesized)
gaggggttcagcgccacagccttccctccaagaggcagtgtggcccagtctgggagacctgtcctcatatccaggctttgccacttgtagctgtgggacagtgggtaagcaacatgacct

SEQ ID NO: 574355 - DNA, 120 bp, Artificial Sequence
  ENSG00000171206_67 (sequence is synthesized)
ccccagcctccatttcttcagcttaaagtggggatataactattctgtacctcctaatggtagaggagcaagcatcacctgagatgtaacattcttgggcctctaggtgtcaatggtccc

SEQ ID NO: 574356 - DNA, 120 bp, Artificial Sequence
  ENSG00000171206_68 (sequence is synthesized)
gccccgggaccacccatcccgacaggctgactcttgtgacatcaggccagtggcccctggccaaactcttctctgaaagtttggggacagggtcctgggaagaagggccccgggtcgcta

SEQ ID NO: 574357 - DNA, 120 bp, Artificial Sequence
  ENSG00000171206_69 (sequence is synthesized)
gtggggggagtttccagagggagagcagaactccggccgtctctctggacagggcctgggcagccagcgaggccccgacagcggctccgctatttggattcctcccgagagccggctctc

SEQ ID NO: 574358 - DNA, 120 bp, Artificial Sequence
  ENSG00000171206_70 (sequence is synthesized)
ggtgagttccttactaaggattgattgtgtagccctatgccagaaccactccatcagtcattcaatcaactgcccgtggatgcccactggtgccaggggatgctggcccagagccctgtg

SEQ ID NO: 574359 - DNA, 120 bp, Artificial Sequence
  ENSG00000171206_71 (sequence is synthesized)
ctaccagtggggaactggcaggtcagaccttgcccttgggagcctggggcagcctggtgacttagggttctaggatgtgagaagggtaagagggggggaaaccaaaggtttccagtgctt

SEQ ID NO: 574360 - DNA, 80 bp, Artificial Sequence
  ENSG00000171208_0 (sequence is synthesized)
acttcagtggatcccgcgccggggccgcgggcggagctgcctgccggtcccgcgccgcgcgtccgcactcctcggccctc

SEQ ID NO: 574361 - DNA, 120 bp, Artificial Sequence
  ENSG00000171208_1 (sequence is synthesized)
cgtcggggtgctcgggccgcgcgggagcccactgtggggctcgggcatggcgggccgcaggacctgagctctcctcaggggagcggggaggcagctgctggccggcgatggggacggagt

SEQ ID NO: 574362 - DNA, 120 bp, Artificial Sequence
  ENSG00000171208_2 (sequence is synthesized)
gagtggggccgtcgccgccgcgccgagccgtgagcgccgagccaccgccgccgctacctcagcccttcgcgaagcgccgggcagctcgggaacatggccctggagcggctctgctcggtc

SEQ ID NO: 574363 - DNA, 120 bp, Artificial Sequence
  ENSG00000171208_3 (sequence is synthesized)
ctcaaagtgttgttaataacagtactggtagtggaagggattgccgtggcccaaaaaacccaagatggacaaaatattggaatcaagcatattcctgcaacccagtgtggcatttgggtt

SEQ ID NO: 574364 - DNA, 120 bp, Artificial Sequence
  ENSG00000171208_4 (sequence is synthesized)
cgaaccagcaatggaggtcattttgcttcgccaaattatcctgactcatatccaccaaacaaggagtgtatctacattttggaagctgctccacgtcaaagaatagagttgacctttgat

SEQ ID NO: 574365 - DNA, 120 bp, Artificial Sequence
  ENSG00000171208_5 (sequence is synthesized)
gaacattattatatagaaccatcatttgagtgtcggtttgatcacttggaagttcgagatgggccatttggtttctctcctcttatagatcgttactgtggcgtgaaaagccctccatta

SEQ ID NO: 574366 - DNA, 120 bp, Artificial Sequence
  ENSG00000171208_6 (sequence is synthesized)
attagatcaacagggagattcatgtggattaagtttagttctgatgaagagcttgaaggactgggatttcgagcaaaatattcatttattccagatccagactttacttacctaggaggt

SEQ ID NO: 574367 - DNA, 120 bp, Artificial Sequence
  ENSG00000171208_7 (sequence is synthesized)
attttaaatcccattccagattgtcagttcgagctctcgggagctgatggaatagtgcgctctagtcaggtagaacaagaggagaaaacaaaaccaggccaagccgttgattgcatctgg

SEQ ID NO: 574368 - DNA, 120 bp, Artificial Sequence
  ENSG00000171208_8 (sequence is synthesized)
accattaaagccactccaaaagctaagatttatttgaggttcctagattatcaaatggagcactcaaatgaatgcaagagaaacttcgttgcagtctatgatggaagcagttctattgaa

SEQ ID NO: 574369 - DNA, 120 bp, Artificial Sequence
  ENSG00000171208_9 (sequence is synthesized)
aacctgaaggccaagttttgcagcactgtggccaatgatgtaatgcttaaaacaggaattggagtgattcgaatgtgggcagatgaaggtagtcggcttagcaggtttcgaatgctcttt

SEQ ID NO: 574370 - DNA, 120 bp, Artificial Sequence
  ENSG00000171208_10 (sequence is synthesized)
acttcctttgtggagcctccctgcacaagcagcactttcttttgccatagcaacatgtgcatcaataattctttagtctgtaatggtgtccaaaattgtgcatacccttgggatgaaaat

SEQ ID NO: 574371 - DNA, 120 bp, Artificial Sequence
  ENSG00000171208_11 (sequence is synthesized)
cattgtaaagaaaagaaaaaagcaggagtatttgaacaaatcactaagactcatggaacaattattggcattacttcagggattgtcttggtccttctcattatttctattttagtacaa

SEQ ID NO: 574372 - DNA, 120 bp, Artificial Sequence
  ENSG00000171208_12 (sequence is synthesized)
gtgaaacagcctcgaaaaaaggtcatggcttgcaaaaccgcttttaataaaaccgggttccaagaagtgtttgatcctcctcattatgaactgttttcactaagggacaaagagatttct

SEQ ID NO: 574373 - DNA, 120 bp, Artificial Sequence
  ENSG00000171208_13 (sequence is synthesized)
gcagacctggcagacttgtcggaagaattggacaactaccagaagatgcggcgctcctccaccgcctcccgctgcatccacgaccaccactgtgggtcgcaggcctccagcgtcaaacaa

SEQ ID NO: 574374 - DNA, 120 bp, Artificial Sequence
  ENSG00000171208_14 (sequence is synthesized)
agcaggaccaacctcagttccatggaacttcctttccgaaatgactttgcacaaccacagccaatgaaaacatttaatagcaccttcaagaaaagtagttacactttcaaacagggacat

SEQ ID NO: 574375 - DNA, 120 bp, Artificial Sequence
  ENSG00000171208_15 (sequence is synthesized)
gagtgccctgagcaggccctggaagaccgagtaatggaggagattccctgtgaaatttatgtcagggggcgagaagattctgcacaagcatccatatccattgacttctaatcttctgct

SEQ ID NO: 574376 - DNA, 120 bp, Artificial Sequence
  ENSG00000171208_16 (sequence is synthesized)
aatggtgatgtgaattcttagggtgtgtacgtacgcagcctccagggcaccatactgtttccagcagccaacccttttctcccatcacaactacgaagaccttgatttaccgttaaccta

SEQ ID NO: 574377 - DNA, 120 bp, Artificial Sequence
  ENSG00000171208_17 (sequence is synthesized)
ttgtatggtgatgtttttattctctcaggcagtctatatatgttaaaccaatcaaggaacttactctattcagtggaaacaataatcatctctattgcttggtgtcatttataggaagca

SEQ ID NO: 574378 - DNA, 120 bp, Artificial Sequence
  ENSG00000171208_18 (sequence is synthesized)
ctgccagttaaagagcattagaagaggtggttggatggagccaggctcaggctgcctcttcgttttagcaacaagaagactgctcttgactgataacagctctgtcaatattttgatgcc

SEQ ID NO: 574379 - DNA, 120 bp, Artificial Sequence
  ENSG00000171208_19 (sequence is synthesized)
acaataaacttgatttttctttacattccttttatttttcctttctctaaatttaatttgttttataagcctatcgttttaccatttcattttcttacataagtacaagtggttaatgta

SEQ ID NO: 574380 - DNA, 120 bp, Artificial Sequence
  ENSG00000171208_20 (sequence is synthesized)
ccacatacttcagtataggcatttgttcttgagtgtgtcaaaatacagctagttactgtgccaattaagacccagttgtatttcacccatctgtttcttcttggctaatctctgtacttc

SEQ ID NO: 574381 - DNA, 120 bp, Artificial Sequence
  ENSG00000171208_21 (sequence is synthesized)
tgccttttaattactgggcccttattccttattttctgtgagaaataatagatgatatgatttattacctttcaattatatttttctcagttatactagaaaatttcataatcctgggat

SEQ ID NO: 574382 - DNA, 120 bp, Artificial Sequence
  ENSG00000171208_22 (sequence is synthesized)
atatgtaccattgtcagctatgactaaaaatttgaaaaagataaaaatttctagcaagcctttgaagtttaccaagtatagtcacattcagtgacagcccattcattccagtaaagaatc

SEQ ID NO: 574383 - DNA, 120 bp, Artificial Sequence
  ENSG00000171208_23 (sequence is synthesized)
atttcattcactttgggagaggcctataattacatttatttgcaatgtttctcttcgctagattgttacatagctcccattctgttggttttgcttacagcatatggtaaccaaggttag

SEQ ID NO: 574384 - DNA, 120 bp, Artificial Sequence
  ENSG00000171208_24 (sequence is synthesized)
atgccagttaaaattccttagaaattggatgagccttgagattgcttcttaactgggacatgacatttttctagctcttatcaagaataacaacttccacttttttttaaactgcacttt

SEQ ID NO: 574385 - DNA, 120 bp, Artificial Sequence
  ENSG00000171208_25 (sequence is synthesized)
tgactttttttatggtataaaaacaataatttataaacataaaagctcattgtgttttttagacttttgatattatttgatactgtacaaactttattaaatcaagatgaaagacctaca

SEQ ID NO: 574386 - DNA, 120 bp, Artificial Sequence
  ENSG00000171208_26 (sequence is synthesized)
ggacagattcctttcagtgttcacatcagtggctttgtatgcaaatatgctgtgttggacctggacgctataacttattgtaaagaccttggaaatgtggacataagctctttctttcct

SEQ ID NO: 574387 - DNA, 120 bp, Artificial Sequence
  ENSG00000171208_27 (sequence is synthesized)
tttgttactgtatttagtttgtgataaatttttcactgtgtgatatttatgctctaaatcactacacaaatcccatattaaaatatacattgtacctgaccctttaatcatgttatttat

SEQ ID NO: 574388 - DNA, 120 bp, Artificial Sequence
  ENSG00000171208_28 (sequence is synthesized)
gccaccaaggttgtggatcttaaggtatgtatggaaaggaactcatttatcaaattgtaagtaatacagacatgccatttaaaagaggtaaattcttgttttctatattttgttagtaaa

SEQ ID NO: 574389 - DNA, 120 bp, Artificial Sequence
  ENSG00000171208_29 (sequence is synthesized)
ttctcaatgaaataagttgaagtttcactggatttcattaacttttaaatattacatatatgtgttttctcagattagtgaaaattgtgaccttaaatttaatacacatatactgcctca

SEQ ID NO: 574390 - DNA, 120 bp, Artificial Sequence
  ENSG00000171208_30 (sequence is synthesized)
ctagtttcttgttttaaaaatataacgtggaaacatgaaaagacttgatgcatataatattcaatgaactaataccagagacagctaagttttttcagtagttatgctgaataagcattt

SEQ ID NO: 574391 - DNA, 120 bp, Artificial Sequence
  ENSG00000171208_31 (sequence is synthesized)
tagtaggtaacttacaccagctaacatttgaacagcataataaatacttaatataacaacaactatgatcttatgatgataaaagggaagttagcatattttctatgtaaaattattcat

SEQ ID NO: 574392 - DNA, 120 bp, Artificial Sequence
  ENSG00000171208_32 (sequence is synthesized)
atagctgttaaacctatatttaatctttagattataatagcaaataatacagtatgctaaactatagtcacttgtaactacatttttgtttttgaaatttgatttctatttataaggtct

SEQ ID NO: 574393 - DNA, 120 bp, Artificial Sequence
  ENSG00000171208_33 (sequence is synthesized)
taaggtcttgaagaggcctacaaaatacagagcctttaaagaagacataacagtaaaatagaagtacacagttttatacgagtcaatgtagcaagtaacatttagacagtaagtttggtt

SEQ ID NO: 574394 - DNA, 120 bp, Artificial Sequence
  ENSG00000171208_34 (sequence is synthesized)
ctgaattttctggctgctaaaacactttttgcttttcacagtaaaaaaacttatgtgcagaggctaatttcctcttgaactacagcatgagggtctgtatataggaacatttcttcagaa

SEQ ID NO: 574395 - DNA, 120 bp, Artificial Sequence
  ENSG00000171208_35 (sequence is synthesized)
tgtaaaaaagatgcaaaatggagacagaggttataatggtgcttcttaacccagtgaaggcacaacttaatgtcgtctaggaacattggtttagggtcagtctgtattttcagggataga

SEQ ID NO: 574396 - DNA, 120 bp, Artificial Sequence
  ENSG00000171208_36 (sequence is synthesized)
actaaagaaccagatgatcaatagctaagccagccttagcctgtcacatgttatacaccttcattgaatcatagatgggcattagatctcatttatttattaaacttctctatgcttttg

SEQ ID NO: 574397 - DNA, 120 bp, Artificial Sequence
  ENSG00000171208_37 (sequence is synthesized)
gaagaggtaagaatggaactaataaatcttaggcattattgccagaataatgctaattgctgtatatacagcctttaatctttgagatcagtgagaaaactttataaattgcttactaaa

SEQ ID NO: 574398 - DNA, 120 bp, Artificial Sequence
  ENSG00000171208_38 (sequence is synthesized)
atgaaagccataaaatttaataacagaagacatgaaatttagcaatcttgtggaattcattacacagtattaactgtcacgcagggtaccccacacagtgtcccagtgttgaacacaaaa

SEQ ID NO: 574399 - DNA, 120 bp, Artificial Sequence
  ENSG00000171208_39 (sequence is synthesized)
tgcaaatctggaagggataaatatcttcaattcagaaacagcattaagtatacctgtataatactgtcaccattatcttccatctgcaattcaccgcatcatcccccaaatgcccacaga

SEQ ID NO: 574400 - DNA, 120 bp, Artificial Sequence
  ENSG00000171208_40 (sequence is synthesized)
tctattgcaggaaacctactaatcccaacatctaaagcatgtaggaataagatgtgatattccttttgtgtgtggggagagtgtcaatctaaacgtttaacaaaaggcaaagaatgttca

SEQ ID NO: 574401 - DNA, 120 bp, Artificial Sequence
  ENSG00000171208_41 (sequence is synthesized)
catttcacatcacaaaagagatttcaaagactcctttaacccgacagcgcttatgtcagtgtctttgtcatgtttcatagaattgttagactttaaaagaacctcctgaaagtctgcctc

SEQ ID NO: 574402 - DNA, 120 bp, Artificial Sequence
  ENSG00000171208_42 (sequence is synthesized)
tgaacatttgtatggttctgccaatgtctgatgagaagaatgcttccctgtttgaggagtgtgttcactgatgagaggggacgggagaagcctggttgtgatttcaggaataattctcaa

SEQ ID NO: 574403 - DNA, 120 bp, Artificial Sequence
  ENSG00000171208_43 (sequence is synthesized)
aggagattatactcttattgcaaaatggggtctgctatatattgttcatgtcactttattgcaagtgacatgaattatatgacattaaaaataatatgccttgaatcacactgattagac

SEQ ID NO: 574404 - DNA, 120 bp, Artificial Sequence
  ENSG00000171208_44 (sequence is synthesized)
ccagaaggatcattgagtttttggtggttttaaagatccaagaaagacctatctagcccaagtgtatgaatgagaagactgaagcccacagaagtgaactcagcaccagtgtctcaagaa

SEQ ID NO: 574405 - DNA, 120 bp, Artificial Sequence
  ENSG00000171208_45 (sequence is synthesized)
ggagtgagccaaggcgcccagcccagctgtacgttttaaaagtcaagcacttctgtttagcagcccatgtaagcttgtcaatcattctgaattgaaatgtaatttattctgtaatttctt

SEQ ID NO: 574406 - DNA, 120 bp, Artificial Sequence
  ENSG00000171208_46 (sequence is synthesized)
caatgcattatatttccccttttctttaaatgtatgtaacattgtgttctacagttttgctgccatgattccttggcaccgtgaattcttactaagcaatgtttgttaacagtatacagg

SEQ ID NO: 574407 - DNA, 120 bp, Artificial Sequence
  ENSG00000171208_47 (sequence is synthesized)
ctcgatactaggcaggaagagctcctgtgttcttgcttttttgatcttttttaaatctaaaggagacgtgtattctagaaattaaatatttgtgtgccatatctcttgagttttggagaa

SEQ ID NO: 574408 - DNA, 120 bp, Artificial Sequence
  ENSG00000171208_48 (sequence is synthesized)
tgattggagtttgagttactgtaaataacaagattatcttggatattttagttttctgcaaaatcacttatgttttatatacctctgctaataattcaaaactctgaatttgctttactt

SEQ ID NO: 574409 - DNA, 120 bp, Artificial Sequence
  ENSG00000171208_49 (sequence is synthesized)
taactttttaaaaatgtatttttgcaattggtttaatgactaccaaagcctaaaaagctaatgactagggtgcatgtttagtatgcactgtctagtgtaagctttttaaaagcagtagat

SEQ ID NO: 574410 - DNA, 120 bp, Artificial Sequence
  ENSG00000171208_50 (sequence is synthesized)
ttttattagagatgaacttccaggccatatgagaatatgcttaatcctagatttggcattttatagaaaagaattttgactcttgaactagaattaaaaacttgttctgatttccttgct

SEQ ID NO: 574411 - DNA, 120 bp, Artificial Sequence
  ENSG00000171208_51 (sequence is synthesized)
tgcctcaatttctaaagtctagaagtggcaaataatttagatcacttataccaacagaatctgtatttccttccggggcaaagttggcatttcctatccactagcttccaaaatacaata

SEQ ID NO: 574412 - DNA, 120 bp, Artificial Sequence
  ENSG00000171208_52 (sequence is synthesized)
atcctagttatgataagggcaactttattttattacacttagaaccattttatgttttcaaattcattaatcttcaagtgaagatgaactaaagaaaaaaatgcgttttgtcccaggttg

SEQ ID NO: 574413 - DNA, 120 bp, Artificial Sequence
  ENSG00000171208_53 (sequence is synthesized)
cctgcaggttgcagtctgctgcatccggtcactgaagaggcagtgaggactgtcacagagtgggctggagagccaagctgttctttcggggtgcacagtgcaccagccataacacagctt

SEQ ID NO: 574414 - DNA, 120 bp, Artificial Sequence
  ENSG00000171208_54 (sequence is synthesized)
agaaacatggatgagtatacctcaagacaggtgaacacggagtggggagcaaaagaaggcagaaactcctctgagtttcacaagcatcaggcacagatcagggcacagaggaagaagaaa

SEQ ID NO: 574415 - DNA, 120 bp, Artificial Sequence
  ENSG00000171208_55 (sequence is synthesized)
gaaggtttaccactggtctgtctctgtaaattgttacagagcaattttactttgtgttatttaggatcaagaaacaagtgttatttaaaagttctcttaccctccaacctttgtcatact

SEQ ID NO: 574416 - DNA, 120 bp, Artificial Sequence
  ENSG00000171209_0 (sequence is synthesized)
atttttcttgggtcttctctacagctgacaggccaactcaacctactgccaaccaagacctgactggcacgaggaaaggtgcaataatgaagagttttcttctagttgtcaatgccctgg

SEQ ID NO: 574417 - DNA, 120 bp, Artificial Sequence
  ENSG00000171209_1 (sequence is synthesized)
cattaaccctgccttttttggctgtggaggttcaaaaccagaaacaaccagcatgccatgagaatgatgaaagaccattctatcagaaaacagctccatatgtcccaatgtattatgtgc

SEQ ID NO: 574418 - DNA, 120 bp, Artificial Sequence
  ENSG00000171209_2 (sequence is synthesized)
caaatagctatccttattatggaaccaatttgtaccaacgtagaccagctatagcaattaataatccatatgtgcctcgcacatattatgcaaacccagctgtagttaggccacatgccc

SEQ ID NO: 574419 - DNA, 120 bp, Artificial Sequence
  ENSG00000171209_3 (sequence is synthesized)
atccctaccatcaataccattgctactgttgaacctacaccagctcctgccactgaaccaacggtggacagtgtagtcactccagaagctttttcagagtccatcatcacgagcacccct

SEQ ID NO: 574420 - DNA, 120 bp, Artificial Sequence
  ENSG00000171209_4 (sequence is synthesized)
gagacaaccacagttgcagttactccacctacggcataaaaacaccaaggaaatatcaaagaacacaacgcaggacttgctgaaaccaaattactacttcacactctccttcagccattt

SEQ ID NO: 574421 - DNA, 120 bp, Artificial Sequence
  ENSG00000171209_5 (sequence is synthesized)
gtctgccttcagtcaacagaaaatgtgattttcacagattcagctcttctctccttacattttacattcatgccacattcaatattttgattcttgcacaataaagccaactgattgcaa

SEQ ID NO: 574422 - DNA, 120 bp, Artificial Sequence
  ENSG00000171217_0 (sequence is synthesized)
aaagttcgaagtgggatgatcacgggcagacctgggtggttgggaacaggaagcatatggcatcttgcaggctataggcaccacaaaatggaacgcaggaggacaggggcttgggagagc

SEQ ID NO: 574423 - DNA, 120 bp, Artificial Sequence
  ENSG00000171217_1 (sequence is synthesized)
cacttcactgtcgggtaaaacaacggagcaagatgagtgcctccggatgcttggtttccccaccctccagtgtctgcttgctcttcaagtacctccaccaagctaatgacagtccacttt

SEQ ID NO: 574424 - DNA, 120 bp, Artificial Sequence
  ENSG00000171217_2 (sequence is synthesized)
aggacatcacgggcctcgaggttacaactttcccaggctttgttatttggttctctactgcacagaaatagatagaattctgacagccatcattgttaaacatcaggattttctaagagg

SEQ ID NO: 574425 - DNA, 120 bp, Artificial Sequence
  ENSG00000171217_3 (sequence is synthesized)
acagacttaacagtaacatcatggcctcagcaggactccagctccttgctttcatcctggccttatctggggtctctggagtgctcacagccactctgctgcccaactggaaggtgaatg

SEQ ID NO: 574426 - DNA, 120 bp, Artificial Sequence
  ENSG00000171217_4 (sequence is synthesized)
tggatgtggactccaacatcataacagccattgtacagctgcacgggctctggatggactgtacgtggtacagcactgggatgttcagctgtgccctgaaacactccattctgtccctcc

SEQ ID NO: 574427 - DNA, 120 bp, Artificial Sequence
  ENSG00000171217_5 (sequence is synthesized)
tgcaggctgcgagagccaccatggtcctggcgtgtgttctgtctgctttggggatctgcacttccacagtaggaatgaaatgtactcgcttaggaggggacagagaaaccaagagccatg

SEQ ID NO: 574428 - DNA, 120 bp, Artificial Sequence
  ENSG00000171217_6 (sequence is synthesized)
cttcctttgctggaggagtctgtttcatgtctgcaggaatctctagtttaatctcgacagtgtggtacacaaaggagatcatagcaaactttctggatctgacagttccagaaagcaaca

SEQ ID NO: 574429 - DNA, 120 bp, Artificial Sequence
  ENSG00000171217_7 (sequence is synthesized)
aacatgaacctggaggagctatctatatcggattcatttctgcaatgctgttgtttatctctggcatgattttctgcacctcctgtataaaaaggaatccagaagctagactcgacccac

SEQ ID NO: 574430 - DNA, 120 bp, Artificial Sequence
  ENSG00000171217_8 (sequence is synthesized)
ccacacagcagcctatctctaacacacagctcgagaacaattccacacacaatctgaaggattatgtgtaaataactgagtaatgcatatgaaatggaacttttgggtgccaaatgggac

SEQ ID NO: 574431 - DNA, 120 bp, Artificial Sequence
  ENSG00000171217_9 (sequence is synthesized)
ttttagattaaaaaaaaatcagaattatgcttaactttccctacaaagaaagtagaatgtaaaatactttaacaactacaaagtagtttaaaatgccaataaaactatcatatacaatta

SEQ ID NO: 574432 - DNA, 120 bp, Artificial Sequence
  ENSG00000171219_0 (sequence is synthesized)
agacggttgggcggacggacggcccgacaggcgggcatgcgggcggccagactgtagccgagcagcgaggctccggccgcagccatggagcggcggctgcgcgcgctggagcagctggcg

SEQ ID NO: 574433 - DNA, 120 bp, Artificial Sequence
  ENSG00000171219_1 (sequence is synthesized)
cggggcgaggccggcggctgcccggggctcgacggcctcctagatctgctgctggcgctgcaccacgagctcagcagcggccccctacggcgggagcgcagcgtggcgcagttcctgagc

SEQ ID NO: 574434 - DNA, 120 bp, Artificial Sequence
  ENSG00000171219_2 (sequence is synthesized)
tgggccagccccttcgtatcaaaggtgaaagaactgcgtctgcagagagatgactttgagatcttgaaggtgatcggccgaggagcctttggggaggtcaccgtggtgaggcagagggac

SEQ ID NO: 574435 - DNA, 120 bp, Artificial Sequence
  ENSG00000171219_3 (sequence is synthesized)
actgggcagatttttgccatgaaaatgctgcacaagtgggagatgctgaagagggctgagacagcctgtttccgggaggagcgggatgtgctcgtgaaaggggacagccgttgggtgacc

SEQ ID NO: 574436 - DNA, 120 bp, Artificial Sequence
  ENSG00000171219_4 (sequence is synthesized)
actctgcactatgccttccaagacgaggagtacctgtaccttgtgatggactactatgctggtggggacctcctgacgctgctgagccgcttcgaggaccgtctcccgcccgagctggcc

SEQ ID NO: 574437 - DNA, 120 bp, Artificial Sequence
  ENSG00000171219_5 (sequence is synthesized)
cagttctacctggctgagatggtgctggccatccactcgctgcaccagctgggttatgtccacagggatgtcaagccagacaacgtcctgctggatgtgaacgggcacattcgcctggct

SEQ ID NO: 574438 - DNA, 120 bp, Artificial Sequence
  ENSG00000171219_6 (sequence is synthesized)
gacttcggctcctgcctgcgtctcaacaccaacggcatggtggattcatcagtggcagtagggacgccggactatatctcccctgagatcctgcaggccatggaggagggcaagggccac

SEQ ID NO: 574439 - DNA, 120 bp, Artificial Sequence
  ENSG00000171219_7 (sequence is synthesized)
tacggcccacagtgtgactggtggtcgcttggagtctgcgcctatgagctgctctttggggagacgcccttctatgctgagtccttggtggaaacctacggcaagatcatgaaccacgag

SEQ ID NO: 574440 - DNA, 120 bp, Artificial Sequence
  ENSG00000171219_8 (sequence is synthesized)
gaccacctgcagttccccccggacgtgcctgacgtgccagccagcgcccaagacctgatccgccagctgctgtgtcgccaggaagagcggctaggccgtggtgggctggatgacttccgg

SEQ ID NO: 574441 - DNA, 120 bp, Artificial Sequence
  ENSG00000171219_9 (sequence is synthesized)
aaccatcctttcttcgaaggcgtggactgggagcggctggcgagcagcacggccccctatattcctgagctgcgggggcccatggacacctccaactttgatgtggatgacgacaccctc

SEQ ID NO: 574442 - DNA, 120 bp, Artificial Sequence
  ENSG00000171219_10 (sequence is synthesized)
aaccatccagggaccctgccaccgccctcccacggggccttctccggccatcacctgccattcgtgggcttcacctacacctcaggcagtcacagtcctgagagcagctctgaggcttgg

SEQ ID NO: 574443 - DNA, 120 bp, Artificial Sequence
  ENSG00000171219_11 (sequence is synthesized)
gctgccctggagcggaagctccagtgtctggagcaggagaaggtggagctgagcaggaagcaccaagaggccctgcacgcccccacagaccatcgggagctggagcagctacggaaggaa

SEQ ID NO: 574444 - DNA, 120 bp, Artificial Sequence
  ENSG00000171219_12 (sequence is synthesized)
gtgcagactctgcgggacaggctgccagagatgctgagggacaaggcctcattgtcccagacggatgggcccccagctggtagcccaggtcaggacagtgacctacggcaggagcttgac

SEQ ID NO: 574445 - DNA, 120 bp, Artificial Sequence
  ENSG00000171219_13 (sequence is synthesized)
cgacttcaccgggagctggccgagggtcgggcagggctgcaggctcaggagcaggagctctgcagggcccaggggcagcaggaggagctgcttcagaggctacaggaggcccaggagaga

SEQ ID NO: 574446 - DNA, 120 bp, Artificial Sequence
  ENSG00000171219_14 (sequence is synthesized)
gaggcggccacagctagccagacccgggccctgagctcccagctggaggaagcccgggctgcccagagggagctggaggcccaggtgtcctccctgagccggcaggtgacgcagctgcag

SEQ ID NO: 574447 - DNA, 120 bp, Artificial Sequence
  ENSG00000171219_15 (sequence is synthesized)
ggacagtgggagcaacgccttgaggagtcgtcccaggccaagaccatccacacagcctctgagaccaacgggatgggaccccctgagggtgggcctcaggaggcccaactgaggaaggag

SEQ ID NO: 574448 - DNA, 120 bp, Artificial Sequence
  ENSG00000171219_16 (sequence is synthesized)
gtggccgccctgcgagagcagctggagcaggcccacagccacaggccgagtggtaaggaggaggctctgtgccagctgcaggaggaaaaccggaggctgagccgggagcaggagcggcta

SEQ ID NO: 574449 - DNA, 120 bp, Artificial Sequence
  ENSG00000171219_17 (sequence is synthesized)
gaagcagagctggcccaggagcaggagagcaagcagcggctggagggtgagcggcgggagacggagagcaactgggaggcccagctcgccgacatcctcagctgggtgaatgatgagaag

SEQ ID NO: 574450 - DNA, 120 bp, Artificial Sequence
  ENSG00000171219_18 (sequence is synthesized)
gtctcaagaggctacctgcaggccctggccaccaagatggcagaggagctggagtccttgaggaacgtaggcacccagacgctccctgcccggccactggaccaccagtggaaggcgcgg

SEQ ID NO: 574451 - DNA, 120 bp, Artificial Sequence
  ENSG00000171219_19 (sequence is synthesized)
cgactgcagaagatggaggcctcggccaggctggagctgcagtcagcgctggaggccgagatccgcgccaagcagggcctgcaggagcggctgacacaggtgcaggaggcccagctgcag

SEQ ID NO: 574452 - DNA, 120 bp, Artificial Sequence
  ENSG00000171219_20 (sequence is synthesized)
gctgagcgccgtctgcaggaggccgagaagcagagccaggccctgcaacaggagctcgccatgctgcgggaggagctgcgggcccgagggccagtggacaccaagccctcaaactccctg

SEQ ID NO: 574453 - DNA, 120 bp, Artificial Sequence
  ENSG00000171219_21 (sequence is synthesized)
attcccttcctgtccttccggagctcagagaaggattctgccaaggaccctggcatctcaggagaggccacaaggcatggaggagagccagatctgaggccggagggccgacgcagcctg

SEQ ID NO: 574454 - DNA, 120 bp, Artificial Sequence
  ENSG00000171219_22 (sequence is synthesized)
cgcatgggggctgtgttccccagagcacccactgccaacacagcctctacagaaggtcttcctgctaagcccggctcacacacgctgcgcccccggagcttcccatccccgaccaagtgt

SEQ ID NO: 574455 - DNA, 120 bp, Artificial Sequence
  ENSG00000171219_23 (sequence is synthesized)
ctccgctgcacctcgctgatgctgggcctgggccgccagggcctgggttgtgatgcctgcggctacttttgtcacacaacctgtgccccacaggccccaccctgccccgtgccccctgac

SEQ ID NO: 574456 - DNA, 120 bp, Artificial Sequence
  ENSG00000171219_24 (sequence is synthesized)
ctcctccgcacagccctgggagtacaccccgaaacaggcacaggcactgcctatgagggctttctgtcggtgccgcggccctcaggtgtccggcggggctggcagcgcgtgtttgctgcc

SEQ ID NO: 574457 - DNA, 120 bp, Artificial Sequence
  ENSG00000171219_25 (sequence is synthesized)
gaggctcagcccgcccagtggggccctcctgcaggtcctagatctgagggacccccagttctcggctacccctgtcctggcctctgatgttatccatgcccaatccagggacctgccacg

SEQ ID NO: 574458 - DNA, 120 bp, Artificial Sequence
  ENSG00000171219_26 (sequence is synthesized)
catctttagggtgacaacctcccagctggcagtgccgcccaccacgtgcactgtgctgctgctggcagagagcgagggggagcgggaacgctggctgcaggtgctgggtgagctgcagcg

SEQ ID NO: 574459 - DNA, 120 bp, Artificial Sequence
  ENSG00000171219_27 (sequence is synthesized)
gctgctgctggacgcgcggccaagaccccggcccgtgtacacactcaaggaggcttacgacaacgggctgccgctgctgcctcacacgctctgcgctgccatcctcgaccaggatcgact

SEQ ID NO: 574460 - DNA, 120 bp, Artificial Sequence
  ENSG00000171219_28 (sequence is synthesized)
tgcgcttggcaccgaggaggggctctttgtcatccatctgcgcagcaacgacatcttccaggtgggggagtgccggcgcgtgcagcagctgaccttgagccccagtgcaggcctgctggt

SEQ ID NO: 574461 - DNA, 120 bp, Artificial Sequence
  ENSG00000171219_29 (sequence is synthesized)
cgtgctgtgtggccgcggccccagcgtgcgtctctttgccctggcggagctggagaacatagaggtagcaggtgccaagatccccgagtctcgaggctgccaggtgctggcagctggaag

SEQ ID NO: 574462 - DNA, 120 bp, Artificial Sequence
  ENSG00000171219_30 (sequence is synthesized)
catcctgcaggcccgcaccccggtgctctgtgtagccgtcaagcgccaggtgctctgctaccagctgggcccgggccctgggccctggcagcgccgcatccgtgagctgcaggcacctgc

SEQ ID NO: 574463 - DNA, 120 bp, Artificial Sequence
  ENSG00000171219_31 (sequence is synthesized)
cactgtgcagagcctggggctgctgggcgaccggctatgtgtgggcgccgccggtggctttgcactctacccgctgctcaacgaggctgcgccgttggcgctgggggccggtttggtgcc

SEQ ID NO: 574464 - DNA, 120 bp, Artificial Sequence
  ENSG00000171219_32 (sequence is synthesized)
tgaggagctgccaccatcccgcgggggcctgggtgaggcactgggtgccgtggagcttagcctcagcgagttcctgctactcttcaccactgctggcatctacgtggatggcgcaggccg

SEQ ID NO: 574465 - DNA, 120 bp, Artificial Sequence
  ENSG00000171219_33 (sequence is synthesized)
caagtctcgtggccacgagctgttgtggccagcagcgcccatgggctgggggtatgcggccccctacctgacagtgttcagcgagaactccatcgatgtgtttgacgtgaggagggcaga

SEQ ID NO: 574466 - DNA, 120 bp, Artificial Sequence
  ENSG00000171219_34 (sequence is synthesized)
atgggtgcagaccgtgccgctcaagaaggtgcggcccctcaatccagagggctccctgttcctctacggcaccgagaaggtccgcctgacctacctcaggaaccagctggcagagaagga

SEQ ID NO: 574467 - DNA, 120 bp, Artificial Sequence
  ENSG00000171219_35 (sequence is synthesized)
cgagttcgacatcccggacctcaccgacaacagccggcgccagctgttccgcaccaagagcaagcgccgcttctttttccgcgtgtcggaggagcagcagaagcagcagcgcagggagat

SEQ ID NO: 574468 - DNA, 120 bp, Artificial Sequence
  ENSG00000171219_36 (sequence is synthesized)
gctgaaggacccttttgtgcgctccaagctcatctcgccgcctaccaacttcaaccacctagtacacgtgggccctgccaacgggcggcccggcgccagggacaagtccccggctcccga

SEQ ID NO: 574469 - DNA, 120 bp, Artificial Sequence
  ENSG00000171219_37 (sequence is synthesized)
agagaagggccgagttgcccgcggctccggcccacagcggccccacagcttctccgaggcgttgcggcgcccagcctccatgggcagcgaaggcctcggtggagacgcagaccccatgaa

SEQ ID NO: 574470 - DNA, 120 bp, Artificial Sequence
  ENSG00000171219_38 (sequence is synthesized)
gaggaaaccctggacatccctgtccagcgagtctgtgtcctgcccccagggatcgctgagccctgcaacctccctaatgcaggtctcagaacggccccgaagcctccccctatcccctga

SEQ ID NO: 574471 - DNA, 120 bp, Artificial Sequence
  ENSG00000171219_39 (sequence is synthesized)
attggagagctctccttgatgccctctgttagggcccaccccaatcccagggcagaaggacatgagggagcaaagagcttgaggaatgccatactccggctggtccgggacatggaaatt

SEQ ID NO: 574472 - DNA, 120 bp, Artificial Sequence
  ENSG00000171219_40 (sequence is synthesized)
cggactcagggaggacccgggctgggcaatgactgggagacttgcctgggttcccaggacttgggggtcctgactcccagccctcatcctgccttacccctctgttcccagccccagcct

SEQ ID NO: 574473 - DNA, 120 bp, Artificial Sequence
  ENSG00000171219_41 (sequence is synthesized)
ttctaagccattgggaatagaatggccccttttgttctggtgtccaggggtgattgtgccaaagctcttatttccagtgccaagcccccagaggcttgtaagagttgggatgagggatgg

SEQ ID NO: 574474 - DNA, 120 bp, Artificial Sequence
  ENSG00000171219_42 (sequence is synthesized)
agagggactgggtctctgggaacaggttggaggtcttatctgtggactgtctgactcccagctgaggccaagatggggcatgtccccgtctctgcttagcgtctgggtgagaaaaacagg

SEQ ID NO: 574475 - DNA, 120 bp, Artificial Sequence
  ENSG00000171219_43 (sequence is synthesized)
ctgtgatccagaagaagggaagatagagaaggagggaaaggatgtaggcgaaggaggtgagagacaggataggaggaaggaagtggaggaggaggtgataggaattggaaggaggtagaa

SEQ ID NO: 574476 - DNA, 120 bp, Artificial Sequence
  ENSG00000171219_44 (sequence is synthesized)
gccgtgcagaggaagaggggagagggacgaaggaggagcgatgaagaagaggagggagacaaaaagagggatggaggagagagggagtctggagaacaaagggtcctttctctggggagg

SEQ ID NO: 574477 - DNA, 120 bp, Artificial Sequence
  ENSG00000171219_45 (sequence is synthesized)
ggtgcagtgggcggggctgacactgtcagccaatcctcccatcggggaagagaatcctggacagggacaggatggggagggtatttataagggctttttggtgggagatgggtacccagt

SEQ ID NO: 574478 - DNA, 120 bp, Artificial Sequence
  ENSG00000171219_46 (sequence is synthesized)
gggggccactggagggtctccgggcacactctggcccttcccagaaagggggtcgtttttctcgaatcttcaaccagttgtgtattggaaactagggcgcattttactattgatcacagt

SEQ ID NO: 574479 - DNA, 120 bp, Artificial Sequence
  ENSG00000171219_47 (sequence is synthesized)
cattatattgttattatattactatttttattaaacctccccccactgaagtgtggggggcaaaataagtatttatctcctcaaatgccacattcccaggagggacagaccctgatgctc

SEQ ID NO: 574480 - DNA, 63 bp, Artificial Sequence
  ENSG00000171219_48 (sequence is synthesized)
tcaaatgccacattcccaggagggacagaccctgatgctctgtgaggcgcaagaaaccaataa

SEQ ID NO: 574481 - DNA, 120 bp, Artificial Sequence
  ENSG00000171219_49 (sequence is synthesized)
ctgatgctgggcctgggccgccagggcctgggttgtgatggtgagagtccccacccactatgctccagccacggtcccagcctgcggctacttttgtcacacaacctgtgccccacaggc

SEQ ID NO: 574482 - DNA, 120 bp, Artificial Sequence
  ENSG00000171219_50 (sequence is synthesized)
gtgcatcgtggctagcaggcacaattggggtggaggtggtggcgatgagcttgcctgccgccatagattggctgggactcggaggtcactgttgcctggctcagccccttgtctttcctg

SEQ ID NO: 574483 - DNA, 120 bp, Artificial Sequence
  ENSG00000171219_51 (sequence is synthesized)
acccctcagggatggggcatggggccctgggaggccttgggtaatggctgtccccctccccagcccggctcacacacgctgcgcccccggagcttcccatccccgaccaagtgtctccgc

SEQ ID NO: 574484 - DNA, 120 bp, Artificial Sequence
  ENSG00000171222_0 (sequence is synthesized)
cacgcgcagctcgccctcccgcaccgcgagggcagcagccgcctcatgcgactcgagaacgctagagggcgccgcttccgggagcccgcaagcggcttccgggtgctcgcgcgccgacct

SEQ ID NO: 574485 - DNA, 120 bp, Artificial Sequence
  ENSG00000171222_1 (sequence is synthesized)
ggacgcagagaagccagagactttcgcttccggctgccgcaggcgcttcgctggtgcagacgcagtgctgagcacacagctaccggacaaagagtgacgcccggagctggagttatggcg

SEQ ID NO: 574486 - DNA, 120 bp, Artificial Sequence
  ENSG00000171222_2 (sequence is synthesized)
gctacggagccgatcttggcggccactgggagtcccgcggcggtgccaccggagaaactggaaggagccggttcgagctcagcccctgagcgtaactgtgtgggctcctcgctgccagag

SEQ ID NO: 574487 - DNA, 120 bp, Artificial Sequence
  ENSG00000171222_3 (sequence is synthesized)
gccccgagctgcggcctccgcggccctggagctgcctctcgggcccgcacccgtgagcgtagcgcctcaggccgaagctgaagcgcgctccacaccaggccccgccggctctagactcgg

SEQ ID NO: 574488 - DNA, 120 bp, Artificial Sequence
  ENSG00000171222_4 (sequence is synthesized)
tcccgagacgttccgccagcgtttccggcagttccgctaccaggatgcggcgggtccccgggaggctttccggcagctgcgggagctgtcccgccagtggctgcggcctgacatccgcac

SEQ ID NO: 574489 - DNA, 120 bp, Artificial Sequence
  ENSG00000171222_5 (sequence is synthesized)
caaggagcagatcgtggagatgctggtgcaagagcagctgctcgccatcctgcccgaggcggctcgggcccggcggatccgccgccgcacggatgtgcgcatcactggctgagcggtgga

SEQ ID NO: 574490 - DNA, 120 bp, Artificial Sequence
  ENSG00000171222_6 (sequence is synthesized)
gctgcgggcggccagggccgggcgctctgtgcggactggggccatgatcgggcccgggggcctgagcctgggaccccaccccgtgttaatgaaaaatgagttttggcagcgcctgtggtc

SEQ ID NO: 574491 - DNA, 120 bp, Artificial Sequence
  ENSG00000171222_7 (sequence is synthesized)
gtgacttgctcctccttgtcttccaccacgattgtgaggcctccctagccacgtggagctctcaaaggtggagacaacccaaatgtccttcaatggatggttaaatataccatggtacat

SEQ ID NO: 574492 - DNA, 120 bp, Artificial Sequence
  ENSG00000171222_8 (sequence is synthesized)
ctataccatagattactactcagcaataaaaaggacaaactattgatacaagcaaccacttgggtgaatctccagggaattgtgccaagtggaaagagccaagcccaaatgattatacac

SEQ ID NO: 574493 - DNA, 120 bp, Artificial Sequence
  ENSG00000171222_9 (sequence is synthesized)
tatatgattccagaacccacagagccgcatttcccttggtttcggaggacacgcgaaaaataacaacagcaaagggttctcgagcatctccttcgcgccagacggtgtgttgtactttgt

SEQ ID NO: 574494 - DNA, 120 bp, Artificial Sequence
  ENSG00000171222_10 (sequence is synthesized)
catcgtcgcagtaaggccggtgctatcgccctcctagtttgaccaagcgagaggactttctccagatgggcccctcccgagagaatggtcgccgtcccgctctcctgttcgggtcaccac

SEQ ID NO: 574495 - DNA, 120 bp, Artificial Sequence
  ENSG00000171222_11 (sequence is synthesized)
cggccgggcgccactcgaacgagccccggccagccgtcaccctaatcattcccgaaggaggggccatcagagctacagctcatcagggtcaatcagaaggggcgcccgcacgcaaaggtc

SEQ ID NO: 574496 - DNA, 120 bp, Artificial Sequence
  ENSG00000171222_12 (sequence is synthesized)
acctgcaaaccgaagcggcgcacggataaggtccgggacttgaagtctatctccaaacattcaggctcctcctccgactcctcctcgaactggcgctcagaggcgccaccattcggaagg

SEQ ID NO: 574497 - DNA, 120 bp, Artificial Sequence
  ENSG00000171222_13 (sequence is synthesized)
gcaggcgcttcgctggtgcaggtaagctccgcacactctcggccggtcccgagtccgactccctcaagggtgacgcgagctctgccctttaaccggaaacgtctccctgctcaccccacc

SEQ ID NO: 574498 - DNA, 120 bp, Artificial Sequence
  ENSG00000171222_14 (sequence is synthesized)
taacatttttatttgacccaatatatgcaaaacattatattccaacatgtaatcagtattaaaaagtattgagataatttttacatcagttttttcgtactaagtcccgtattttacaat

SEQ ID NO: 574499 - DNA, 120 bp, Artificial Sequence
  ENSG00000171222_15 (sequence is synthesized)
atagcacatctcaattcgctatatttcgagggttatcaactagctacgttgcaagagctgagtcaactcaggaggccagcggccaccataaggggcaatgcatttagagttcacttatta

SEQ ID NO: 574500 - DNA, 120 bp, Artificial Sequence
  ENSG00000171223_0 (sequence is synthesized)
gggaccttgagagcggccaggccagcctcggagccagcagggagctgggagctgggggaaacgacgccaggaaagctatcgcgccagagagggcgacgggggctcgggaagcctgacagg

SEQ ID NO: 574501 - DNA, 120 bp, Artificial Sequence
  ENSG00000171223_1 (sequence is synthesized)
gcttttgcgcacagctgccggctggctgctacccgcccgcgccagcccccgagaacgcgcgaccaggcacccagtccggtcaccgcagcggagagctcgccgctcgctgcagcgaggccc

SEQ ID NO: 574502 - DNA, 120 bp, Artificial Sequence
  ENSG00000171223_2 (sequence is synthesized)
ggagcggccccgcagggaccctccccagaccgcctgggccgcccggatgtgcactaaaatggaacagcccttctaccacgacgactcatacacagctacgggatacggccgggcccctgg

SEQ ID NO: 574503 - DNA, 120 bp, Artificial Sequence
  ENSG00000171223_3 (sequence is synthesized)
tggcctctctctacacgactacaaactcctgaaaccgagcctggcggtcaacctggccgacccctaccggagtctcaaagcgcctggggctcgcggacccggcccagagggcggcggtgg

SEQ ID NO: 574504 - DNA, 120 bp, Artificial Sequence
  ENSG00000171223_4 (sequence is synthesized)
cggcagctacttttctggtcagggctcggacaccggcgcgtctctcaagctcgcctcttcggagctggaacgcctgattgtccccaacagcaacggcgtgatcacgacgacgcctacacc

SEQ ID NO: 574505 - DNA, 120 bp, Artificial Sequence
  ENSG00000171223_5 (sequence is synthesized)
cccgggacagtacttttacccccgcgggggtggcagcggtggaggtgcagggggcgcagggggcggcgtcaccgaggagcaggagggcttcgccgacggctttgtcaaagccctggacga

SEQ ID NO: 574506 - DNA, 120 bp, Artificial Sequence
  ENSG00000171223_6 (sequence is synthesized)
tctgcacaagatgaaccacgtgacaccccccaacgtgtccctgggcgctaccggggggcccccggctgggcccgggggcgtctacgccggcccggagccacctcccgtttacaccaacct

SEQ ID NO: 574507 - DNA, 120 bp, Artificial Sequence
  ENSG00000171223_7 (sequence is synthesized)
gggaggcgccggggctgccgtcgggaccgggagctcgtacccgacgaccaccatcagctacctcccacacgcgccgcccttcgccggtggccacccggcgcagctgggcttgggccgcgg

SEQ ID NO: 574508 - DNA, 120 bp, Artificial Sequence
  ENSG00000171223_8 (sequence is synthesized)
cgcctccaccttcaaggaggaaccgcagaccgtgccggaggcgcgcagccgggacgccacgccgccggtgtcccccatcaacatggaagaccaagagcgcatcaaagtggagcgcaagcg

SEQ ID NO: 574509 - DNA, 120 bp, Artificial Sequence
  ENSG00000171223_9 (sequence is synthesized)
gctgcggaaccggctggcggccaccaagtgccggaagcggaagctggagcgcatcgcgcgcctggaggacaaggtgaagacgctcaaggccgagaacgcggggctgtcgagtaccgccgg

SEQ ID NO: 574510 - DNA, 120 bp, Artificial Sequence
  ENSG00000171223_10 (sequence is synthesized)
cctcctccgggagcaggtggcccagctcaaacagaaggtcatgacccacgtcagcaacggctgtcagctgctgcttggggtcaagggacacgccttctgaacgtcccctgcccctttacg

SEQ ID NO: 574511 - DNA, 120 bp, Artificial Sequence
  ENSG00000171223_11 (sequence is synthesized)
gacaccccctcgcttggacggctgggcacacgcctcccactggggtccagggagcaggcggtgggcacccaccctgggacctaggggcgccgcaaaccacactggactccggccctccta

SEQ ID NO: 574512 - DNA, 120 bp, Artificial Sequence
  ENSG00000171223_12 (sequence is synthesized)
ccctgcgcccagtccttccacctcgacgtttacaagcccccccttccacttttttttgtatgttttttttctgctggaaacagactcgattcatattgaatataatatatttgtgtattt

SEQ ID NO: 574513 - DNA, 120 bp, Artificial Sequence
  ENSG00000171223_13 (sequence is synthesized)
aacagggaggggaagagggggcgatcgcggcggagctggccccgccgcctggtactcaagcccgcggggacattgggaaggggacccccgccccctgccctcccctctctgcaccgtact

SEQ ID NO: 574514 - DNA, 120 bp, Artificial Sequence
  ENSG00000171223_14 (sequence is synthesized)
gtggaaaagaaacacgcacttagtctctaaagagtttattttaagacgtgtttgtgtttgtgtgtgtttgttctttttattgaatctatttaagtaaaaaaaaaattggttctttattaa

SEQ ID NO: 574515 - DNA, 120 bp, Artificial Sequence
  ENSG00000171224_0 (sequence is synthesized)
aggtgggaggaaaccgcctggagccgccgggagtggacgccgccgaggcccggagtcgcgcctgcagacacagcatctactcagcgtgggtcacctctgtgaacatcactgactgcaagc

SEQ ID NO: 574516 - DNA, 120 bp, Artificial Sequence
  ENSG00000171224_1 (sequence is synthesized)
ctccctcaatttctggtgcagcccatcagggacccacagcgcctgggaggatggtgcggatcttggccaatggggaaatcgtgcaggatgacgacccccgagtgaggaccactacccagc

SEQ ID NO: 574517 - DNA, 120 bp, Artificial Sequence
  ENSG00000171224_2 (sequence is synthesized)
caccaagaggtagcattcctcgacagagcttcttcaacaggggccatggtgctcccccagggggtcctggcccccgccagcagcaggcaggtgccaggctgggtgctgctcagtccccct

SEQ ID NO: 574518 - DNA, 120 bp, Artificial Sequence
  ENSG00000171224_3 (sequence is synthesized)
tcaatgacctcaaccggcagctggtgaacatgggctttccgcagtggcatcttggcaaccatgctgtggagccggtgacctccatcctgctcctcttcctgctcatgatgcttggtgttc

SEQ ID NO: 574519 - DNA, 120 bp, Artificial Sequence
  ENSG00000171224_4 (sequence is synthesized)
agagcaggcatatttggaggggatctggtggtgccttgaaggtatgatcagagaggggaccacaggtgtgtgtttcccctttgtgttaagcgtgaggcagagggagacgttagtccagca

SEQ ID NO: 574520 - DNA, 120 bp, Artificial Sequence
  ENSG00000171224_5 (sequence is synthesized)
tttccaaagtgtgggtgggtccgttggttcccaagatacttttaggtggtatggggcctgcattaagtggcacaaaatcagagcaagaaagcgatgcccttcccaattctctcaatcctt

SEQ ID NO: 574521 - DNA, 120 bp, Artificial Sequence
  ENSG00000171224_6 (sequence is synthesized)
ttatgccgagaagatctcagctggatgccaacatgttccgatgcctgtggaagacatgccgacgtctcctctgcctagggagcaggacttgggcttagggcaggtggaaaaaattccaga

SEQ ID NO: 574522 - DNA, 120 bp, Artificial Sequence
  ENSG00000171224_7 (sequence is synthesized)
cttttttagcactgtttttgttttaatggtatatttttattggctactttattgtttaggacaagtggtagtggcattctatttattgtgaccttttcaataaatagatttaagtaaaaa

SEQ ID NO: 574523 - DNA, 120 bp, Artificial Sequence
  ENSG00000171224_8 (sequence is synthesized)
gccagggccagcgggcttcaggagggggacgcgcctgtcccgggctccaggctacgggcaagaccacagggctcctgacctttttcggcatacatgtcaccagtgctatctggaatacac

SEQ ID NO: 574524 - DNA, 120 bp, Artificial Sequence
  ENSG00000171224_9 (sequence is synthesized)
ctcaatttctggtaaattttttccttcaagctttttgaggtcagggggaaaatcctccacagatcttcacgagtctggtcccagatcactaacagctaaaggttttgtggtggggagaac

SEQ ID NO: 574525 - DNA, 120 bp, Artificial Sequence
  ENSG00000171227_0 (sequence is synthesized)
agcggagcagctggagcgatcgaggctgcagcgcggccgccgggcgcagcatgactgccgtcggcgtgcaggcccagaggcctttgggccaaaggcagccccgccggtccttctttgaat

SEQ ID NO: 574526 - DNA, 120 bp, Artificial Sequence
  ENSG00000171227_1 (sequence is synthesized)
ccttcatccggaccctcatcatcacgtgtgtggccctggctgtggtcctgtcctcggtctccatttgtgatgggcactggctcctggctgaggaccgcctcttcgggctctggcacttct

SEQ ID NO: 574527 - DNA, 120 bp, Artificial Sequence
  ENSG00000171227_2 (sequence is synthesized)
gcaccaccaccaaccagacgatctgcttcagagacctgggccaggcccatgtgcccgggctggccgtgggcatgggcctggtacgcagcgtgggcgccttggccgtggtggccgccattt

SEQ ID NO: 574528 - DNA, 120 bp, Artificial Sequence
  ENSG00000171227_3 (sequence is synthesized)
ttggcctggagttcctcatggtgtcccagttgtgcgaggacaaacactcacagtgcaagtgggtcatgggttccatcctcctcctggtgtctttcgtcctctcctccggcgggctcctgg

SEQ ID NO: 574529 - DNA, 120 bp, Artificial Sequence
  ENSG00000171227_4 (sequence is synthesized)
gttttgtgatcctcctcaggaaccaagtcacactcatcggcttcaccctaatgttttggtgcgaattcactgcctccttcctcctcttcctgaacgccatcagcggccttcacatcaaca

SEQ ID NO: 574530 - DNA, 120 bp, Artificial Sequence
  ENSG00000171227_5 (sequence is synthesized)
gcatcacccatccctgggaatgaccgtggaaattttaggccccctccagggacatcagattccacaagaaaatatggtcaaaatgggacttttccagcatgtggcctctggtggggctgg

SEQ ID NO: 574531 - DNA, 120 bp, Artificial Sequence
  ENSG00000171227_6 (sequence is synthesized)
gttggacaagggccttgaaacggctgcctgtttgccgataacttgtgggtggtcagccagaaatggcccgggggcctctgcacctggtctgcagggccagaggccaggagggtgcctcag

SEQ ID NO: 574532 - DNA, 120 bp, Artificial Sequence
  ENSG00000171227_7 (sequence is synthesized)
aactgcacaggcttagccagatgttgattttagaggaagaaaaaaacattttaaaactccttcttgaattttcttccctggactggaatacagttggaagcacaggggtaactggtacct

SEQ ID NO: 574533 - DNA, 120 bp, Artificial Sequence
  ENSG00000171227_8 (sequence is synthesized)
gagctagctgcacagccaaggatagttcatgcctgtttcattgacacgtgctgggataggggctgcagaatccctggggctcccagggttgttaagaatggatcattcttccagctaagg

SEQ ID NO: 574534 - DNA, 120 bp, Artificial Sequence
  ENSG00000171227_9 (sequence is synthesized)
gtccaatcagtgcctaggactttcttccaccagctcaaagggccttcgtatgtatgtccctggcttcagctttggtcatgccaaagaggcagagttcaggattccctcagaatgccctgc

SEQ ID NO: 574535 - DNA, 120 bp, Artificial Sequence
  ENSG00000171227_10 (sequence is synthesized)
acacagtaggtttccaaaccatttgactcggtttgcctccctgcccgttgtttaaaccttacaaaccctggataaccccatcttctagcagctggctgtgcctctgggagctctgcctat

SEQ ID NO: 574536 - DNA, 120 bp, Artificial Sequence
  ENSG00000171227_11 (sequence is synthesized)
cagaaccctaccttaaggtgggtttccttccgagaagagttcttgagcaagctctcccaggagggcccacctgactgctaatacacagccctccccaaggcccgtgtgtgcatgtgtctg

SEQ ID NO: 574537 - DNA, 120 bp, Artificial Sequence
  ENSG00000171227_12 (sequence is synthesized)
tcttttgtgagggttagacagcctcagggcaccatttttaatcccagaacacatttcaaagagcacgtatctagacctgctggactctgcagggggtgagggggaacagcgagagcttgg

SEQ ID NO: 574538 - DNA, 120 bp, Artificial Sequence
  ENSG00000171227_13 (sequence is synthesized)
gtaatgattaacacccatgctggggatgcatggaggtgaagggggccaggaaccagtggagatttccatccttgccagcacgtctgtacttctgttcattaaagtgctccctttctagtc

SEQ ID NO: 574539 - DNA, 120 bp, Artificial Sequence
  ENSG00000171227_14 (sequence is synthesized)
gaaactggagaaggcagtgggtgcagatgacccgacctgactgttcttctgattttaattccaggcacttccctcttggccaggcccagaggcctttgggccaaaggcagccccgccggt

SEQ ID NO: 574540 - DNA, 120 bp, Artificial Sequence
  ENSG00000171227_15 (sequence is synthesized)
gtgaaaggatacccccgcaacaggacaggtcttcctttcccatgtgggctctttatccagaacccagagctgcggagagtctggcttctgggacccttgactggggagaaagcaggtggg

SEQ ID NO: 574541 - DNA, 120 bp, Artificial Sequence
  ENSG00000171227_16 (sequence is synthesized)
ggccacggagggaaggccccagagcagagaggcaccaggctggctgagcctgggcagctgccctttgccttagctcagtggttctcaaagcctggcccccaggccagcagcaccaacatc

SEQ ID NO: 574542 - DNA, 120 bp, Artificial Sequence
  ENSG00000171227_17 (sequence is synthesized)
aatctgttttaacaaaccttccaggtgactctggtgcagaatggtggcaagaactcaaacctggactaggcctgctgggcccagaggcctttgggccaaaggcagccccgccggtccttc

SEQ ID NO: 574543 - DNA, 120 bp, Artificial Sequence
  ENSG00000171227_18 (sequence is synthesized)
ggctgggcggggagcaacctcggggggcctgcctgcctcacatagctgctcccgaggcgcggactccggctgcttctgctcgcggccttgcaagcacccgaggctcccaaacttcatttg

SEQ ID NO: 574544 - DNA, 120 bp, Artificial Sequence
  ENSG00000171234_0 (sequence is synthesized)
gacagaaaggaacagcaactggaaaacaagcattgcattgcaccaggatgtctgtgaaatggacttcagtaattttgctaatacaactgagcttttgctttagctctgggaattgtggaa

SEQ ID NO: 574545 - DNA, 120 bp, Artificial Sequence
  ENSG00000171234_1 (sequence is synthesized)
aggtgctggtgtgggcagcagaatacagccattggatgaatataaagacaatcctggatgagcttattcagagaggtcatgaggtgactgtactggcatcttcagcttccattctttttg

SEQ ID NO: 574546 - DNA, 120 bp, Artificial Sequence
  ENSG00000171234_2 (sequence is synthesized)
atcccaacaactcatccgctcttaaaattgaaatttatcccacatctttaactaaaactgagttggagaatttcatcatgcaacagattaagagatggtcagaccttccaaaagatacat

SEQ ID NO: 574547 - DNA, 120 bp, Artificial Sequence
  ENSG00000171234_3 (sequence is synthesized)
tttggttatatttttcacaagtacaggaaatcatgtcaatatttggtgacataactagaaagttctgtaaagatgtagtttcaaataagaaatttatgaaaaaagtacaagagtcaagat

SEQ ID NO: 574548 - DNA, 120 bp, Artificial Sequence
  ENSG00000171234_4 (sequence is synthesized)
ttgacgtcatttttgcagatgctatttttccctgtagtgagctgctggctgagctatttaacataccctttgtgtacagtctcagcttctctcctggctacacttttgaaaagcatagtg

SEQ ID NO: 574549 - DNA, 120 bp, Artificial Sequence
  ENSG00000171234_5 (sequence is synthesized)
gaggatttattttccctccttcctacgtacctgttgttatgtcagaattaactgatcaaatgactttcatggagagggtaaaaaatatgatctatgtgctttactttgacttttggttcg

SEQ ID NO: 574550 - DNA, 120 bp, Artificial Sequence
  ENSG00000171234_6 (sequence is synthesized)
aaatatttgacatgaagaagtgggatcagttttatagtgaagttctaggaagacccactacattatctgagacaatggggaaagctgacgtatggcttattcgaaactcctggaattttc

SEQ ID NO: 574551 - DNA, 120 bp, Artificial Sequence
  ENSG00000171234_7 (sequence is synthesized)
ctttgtacagagctctggagaaaatggtgttgtggtgttttctctggggtcaatggtcagtaacatgacagaagaaagggccaacgtaattgcatcagccctggcccagatcccacaaaa

SEQ ID NO: 574552 - DNA, 120 bp, Artificial Sequence
  ENSG00000171234_8 (sequence is synthesized)
ggttctgtggagatttgatgggaataaaccagataccttaggtctcaatactcggctctacaagtggataccccagaatgaccttctaggtcatccaaagaccagagcttttataactca

SEQ ID NO: 574553 - DNA, 120 bp, Artificial Sequence
  ENSG00000171234_9 (sequence is synthesized)
tggtggagccaatggcatctacgaggcaatctaccatgggatccctatggtggggattccattgtttgccgatcaacctgataacattgctcacatgaaggccaggggagcagctgttag

SEQ ID NO: 574554 - DNA, 120 bp, Artificial Sequence
  ENSG00000171234_10 (sequence is synthesized)
agtggacttcaacacaatgtcgagtacagacttgctgaatgcattgaagagagtaattaatgatccttcatataaagagaatgttatgaaattatcaagaattcaacatgatcaaccagt

SEQ ID NO: 574555 - DNA, 120 bp, Artificial Sequence
  ENSG00000171234_11 (sequence is synthesized)
gaagcccctggatcgagcagtcttctggattgaatttgtcatgcgccacaaaggagctaaacaccttcgggttgcagcccacgacctcacctggttccagtaccactctttggatgtgat

SEQ ID NO: 574556 - DNA, 120 bp, Artificial Sequence
  ENSG00000171234_12 (sequence is synthesized)
tgggttcctgctggtctgtgtggcaactgtgatatttatcgtcacaaaatgttgtctgttttgtttctggaagtttgctagaaaagcaaagaagggaaaaaatgattagttatatctgag

SEQ ID NO: 574557 - DNA, 120 bp, Artificial Sequence
  ENSG00000171234_13 (sequence is synthesized)
atttgaagctggaaaacctgataggtgagactacttcagtttattccagcaagaaagattgtgatgcaagatttctttcttcctgagacaaaaaaaaaaaaagaaaaaaaaatcttttca

SEQ ID NO: 574558 - DNA, 120 bp, Artificial Sequence
  ENSG00000171234_14 (sequence is synthesized)
aaatttactttgtcaaataaaaatttgtttttcagagatttaccacccagttcatggttagaaatattttgtggcaatgaagaaaacactacggaaaataaaaaataagataaagcctta

SEQ ID NO: 574559 - DNA, 120 bp, Artificial Sequence
  ENSG00000171234_15 (sequence is synthesized)
aacgtgactgacagacagctgaggcagccccttaggcaacttaagcctgccttgtggagtgcccctgtgggggactccagccagcctgagtgacatgatccaaagagccctcctgggtag

SEQ ID NO: 574560 - DNA, 120 bp, Artificial Sequence
  ENSG00000171234_16 (sequence is synthesized)
agtgacatgatccaaagagccctcctgggtaggaaattgccccggtggaatccctcaccagagaagcaggtagcaggccctcgcagaggattaacacagtggctgaacaccaggaaggaa

SEQ ID NO: 574561 - DNA, 120 bp, Artificial Sequence
  ENSG00000171234_17 (sequence is synthesized)
gaaatgaaagcatttgtccagatctctggcaaagatggcactgtggtgttttctctggggccagttgtgcaaaaccttatagaagagaaggctgatctcattgcttcagacttggcccag

SEQ ID NO: 574562 - DNA, 120 bp, Artificial Sequence
  ENSG00000171236_0 (sequence is synthesized)
agaagcaaaagagcagagctaccatgtcctcttggagcagacagcgaccaaaaagcccagggggcattcaaccccatgtttctagaactctgttcctgctgctgctgttggcagcctcag

SEQ ID NO: 574563 - DNA, 120 bp, Artificial Sequence
  ENSG00000171236_1 (sequence is synthesized)
cctggggggtcaccctgagccccaaagactgccaggtgttccgctcagaccatggcagctccatctcctgtcaaccacctgccgaaatccccggctacctgccagccgacaccgtgcacc

SEQ ID NO: 574564 - DNA, 120 bp, Artificial Sequence
  ENSG00000171236_2 (sequence is synthesized)
tggccgtggaattcttcaacctgacccacctgccagccaacctcctccagggcgcctctaagctccaagaattgcacctctccagcaatgggctggaaagcctctcgcccgaattcctgc

SEQ ID NO: 574565 - DNA, 120 bp, Artificial Sequence
  ENSG00000171236_3 (sequence is synthesized)
ggccagtgccgcagctgagggtgctggatctaacccgaaacgccctgaccgggctgcccccgggcctcttccaggcctcagccaccctggacaccctggtattgaaagaaaaccagctgg

SEQ ID NO: 574566 - DNA, 120 bp, Artificial Sequence
  ENSG00000171236_4 (sequence is synthesized)
aggtcctggaggtctcgtggctacacggcctgaaagctctggggcatctggacctgtctgggaaccgcctccggaaactgccccccgggctgctggccaacttcaccctcctgcgcaccc

SEQ ID NO: 574567 - DNA, 120 bp, Artificial Sequence
  ENSG00000171236_5 (sequence is synthesized)
ttgaccttggggagaaccagttggagaccttgccacctgacctcctgaggggtccgctgcaattagaacggctacatctagaaggcaacaaattgcaagtactgggaaaagatctcctct

SEQ ID NO: 574568 - DNA, 120 bp, Artificial Sequence
  ENSG00000171236_6 (sequence is synthesized)
tgccgcagccggacctgcgctacctcttcctgaacggcaacaagctggccagggtggcagccggtgccttccagggcctgcggcagctggacatgctggacctctccaataactcactgg

SEQ ID NO: 574569 - DNA, 120 bp, Artificial Sequence
  ENSG00000171236_7 (sequence is synthesized)
ccagcgtgcccgaggggctctgggcatccctagggcagccaaactgggacatgcgggatggcttcgacatctccggcaacccctggatctgtgaccagaacctgagcgacctctatcgtt

SEQ ID NO: 574570 - DNA, 120 bp, Artificial Sequence
  ENSG00000171236_8 (sequence is synthesized)
ggcttcaggcccaaaaagacaagatgttttcccagaatgacacgcgctgtgctgggcctgaagccgtgaagggccagacgctcctggcagtggccaagtcccagtgagaccaggggcttg

SEQ ID NO: 574571 - DNA, 120 bp, Artificial Sequence
  ENSG00000171236_9 (sequence is synthesized)
gccaagtcccagtgagaccaggggcttgggttgagggtggggggtctggtagaacactgcaacccgcttaacaaataatcctgcctttggccgggtgcgggggctcacgcctgtaatccc

SEQ ID NO: 574572 - DNA, 120 bp, Artificial Sequence
  ENSG00000171236_10 (sequence is synthesized)
agcaagactgtctcaaaaaaattaaaattaaaattaaaaacaaataatcctgccttttacaggtgaaactcggggctgtccatagcggctgggaccccgtttcatccatccatgcttcct

SEQ ID NO: 574573 - DNA, 120 bp, Artificial Sequence
  ENSG00000171236_11 (sequence is synthesized)
agaacacacgatgggctttccttacccatgcccaaggtgtgccctccgtctggaatgccgttccctgtttcccagatctcttgaactctgggttctcccagccccttgtccttccttcca

SEQ ID NO: 574574 - DNA, 120 bp, Artificial Sequence
  ENSG00000171236_12 (sequence is synthesized)
gctgagccctggccacactggggctgcctttctctgactctgtcttccccaagtcagggggctctctgagtgcagggtctgatgctgagtcccacttagcttggggtcagaaccaagggg

SEQ ID NO: 574575 - DNA, 120 bp, Artificial Sequence
  ENSG00000171236_13 (sequence is synthesized)
tttaataaataacccttgaaaactggatcggatgaattggctttcattgtgttcctagcatcttctcaaatcaacttcccaggactccagggtgaaggaggaaaagaggcatggcccagg

SEQ ID NO: 574576 - DNA, 120 bp, Artificial Sequence
  ENSG00000171236_14 (sequence is synthesized)
ccctggggtgtgggatatggtctccctaggggatgacagttgggatcaatggcctgtgacttctcctctcccttcccccatcctgggacctaactggaaataaaaccttgactgttgccc

SEQ ID NO: 574577 - DNA, 120 bp, Artificial Sequence
  ENSG00000171236_15 (sequence is synthesized)
gggtgtcattttaccagtggatttctgccagggcttgtgtcctaggagaaggtttaagttaaaccagattgcccaggtctccaaacgatttgtcatgctgacctgagatcatcgaagggg

SEQ ID NO: 574578 - DNA, 120 bp, Artificial Sequence
  ENSG00000171236_16 (sequence is synthesized)
gcacctgcccccgggcaaggttgcaggggcaggatggggctgaagggatgagcagggtcccgggcccacctgctgatacagcattggccatgtgggggctgcaatcggatttggaagacc

SEQ ID NO: 574579 - DNA, 120 bp, Artificial Sequence
  ENSG00000171236_17 (sequence is synthesized)
ggaagaccctggggcttgggggcatgtccagttttcccagctccctaaaaaatgaccatgcagcctggcgccgtggctcatgcctgtaatccaaacactttgggaggctgaggcaggcag

SEQ ID NO: 574580 - DNA, 120 bp, Artificial Sequence
  ENSG00000171236_18 (sequence is synthesized)
agaagcaaaagagcagagctaccatgtcctcttggagcagacagcgaccaaaaagaattataattctccctggaacaggggccacttctggcagctgtcgggggtgagggtagaagctgg

SEQ ID NO: 574581 - DNA, 120 bp, Artificial Sequence
  ENSG00000171241_0 (sequence is synthesized)
gccgtccgcggaaatttgaaatggctgacgggtcgctgacgggcggcggtctggaggcagcggccatggcgccggagcgcatgggctgggcggtggagcaggagctggcgtctctggaga

SEQ ID NO: 574582 - DNA, 120 bp, Artificial Sequence
  ENSG00000171241_1 (sequence is synthesized)
aaggtttgttccaagatgaagattcatgcagtgattgtagctaccgtgataaaccaggttctagtttacaaagttttatgccagaaggaaaaacctttttcccagaaattttccaaacaa

SEQ ID NO: 574583 - DNA, 120 bp, Artificial Sequence
  ENSG00000171241_2 (sequence is synthesized)
atcaacttttgttctatgagcgattcagagcctatcaagattacattttagctgactgcaaggcctctgaggtacaggaattcacagctgagttcttggagaaggtccttgagccatctg

SEQ ID NO: 574584 - DNA, 120 bp, Artificial Sequence
  ENSG00000171241_3 (sequence is synthesized)
gatggcgggcagtctggcacactaatgtgttcaaggtgctggttgagatcacagatgtggactttgcagccttgaaggcagtggtgaggcttgctgaaccatacctctgtgactctcaag

SEQ ID NO: 574585 - DNA, 120 bp, Artificial Sequence
  ENSG00000171241_4 (sequence is synthesized)
tgagcacttttaccatggagtgcatgaaggagctccttgatctgaaggagcatcggttgcccctgcaggagctgtgggtggtgtttgatgattcaggagtgtttgaccagacagcccttg

SEQ ID NO: 574586 - DNA, 120 bp, Artificial Sequence
  ENSG00000171241_5 (sequence is synthesized)
caattgagcatgtcagatttttctaccaaaacatttggaggagttgggatgaagaagaggaggatgaatacgattattttgtcagatgtgttgaacctcgattaagattgcattatgaca

SEQ ID NO: 574587 - DNA, 120 bp, Artificial Sequence
  ENSG00000171241_6 (sequence is synthesized)
ttcttgaagaccgagttccatcaggacttattgttgactaccacaatctgttgtctcaatgtgaggagagttacaggaaatttttaaatctgagaagcagtttgtcaaattgtaactctg

SEQ ID NO: 574588 - DNA, 120 bp, Artificial Sequence
  ENSG00000171241_7 (sequence is synthesized)
attccgagcaggaaaatatctccatggtggaagggttaaaattgtattcggagatggaacagttgaaacaaaagctgaaactcattgagaatcctttgttgaggtatgtgtttggttatc

SEQ ID NO: 574589 - DNA, 120 bp, Artificial Sequence
  ENSG00000171241_8 (sequence is synthesized)
agaagaattctaacatccaagcaaagggtgtccgttccagcggtcagaagatcactcatgtggtctcctccaccatgatggctggtctcctgcggtccctgcttacggacaggctttgcc

SEQ ID NO: 574590 - DNA, 120 bp, Artificial Sequence
  ENSG00000171241_9 (sequence is synthesized)
aggagcctggtgaggaagaaagagaaattcagttccatagtgatccattgtctgctataaatgcctgcttcgaaggtgacactgttattgtttgtcctggccattatgtggtacatggca

SEQ ID NO: 574591 - DNA, 120 bp, Artificial Sequence
  ENSG00000171241_10 (sequence is synthesized)
ctttctccattgctgactccattgagttggaaggatatggcctaccagatgacattgtgatagaaaagaggggcaaaggcgacacttttgtggactgcactggtgctgatattaaaatct

SEQ ID NO: 574592 - DNA, 120 bp, Artificial Sequence
  ENSG00000171241_11 (sequence is synthesized)
caggcataaaatttgttcagcatgatgctgtagagggaatcttaattgttcaccgtggtaagactacgctggaaaactgtgtgctgcagtgtgagacgaccggagtcacagtgcggacat

SEQ ID NO: 574593 - DNA, 120 bp, Artificial Sequence
  ENSG00000171241_12 (sequence is synthesized)
cagcagagtttctaatgaagaactcggatttatatggcgccaagggtgctggtatagaaatctaccctgggagtcagtgcaccctgagtgacaatgggatccatcactgcaaggaaggga

SEQ ID NO: 574594 - DNA, 120 bp, Artificial Sequence
  ENSG00000171241_13 (sequence is synthesized)
tcctcattaaggacttcttagatgaacattatgacattcccaagatatccatggtgaataatataatacataataatgaaggttatggtgttgtcttggtgaaacctacaatcttctctg

SEQ ID NO: 574595 - DNA, 120 bp, Artificial Sequence
  ENSG00000171241_14 (sequence is synthesized)
acctgcaagaaaatgctgaagatggaactgaagaaaataaagcgcttaaaattcagacaagtggagagccagatgtggctgaaagagtggatctagaagagctgattgagtgtgcaactg

SEQ ID NO: 574596 - DNA, 120 bp, Artificial Sequence
  ENSG00000171241_15 (sequence is synthesized)
gtaaaatggagctttgtgcaagaactgacccttctgagcaagtcgagggaaattgtgaaattgtaaatgaactaattgctgcctccacacagaaaggccagataaagaagaaaaggttga

SEQ ID NO: 574597 - DNA, 120 bp, Artificial Sequence
  ENSG00000171241_16 (sequence is synthesized)
gtgaactggggatcacgcaagctgatgacaacttaatgtcacaggagatgtttgttgggattgtggggaaccagttcaagtggaatgggaaaggtagttttggcacatttcttttctgac

SEQ ID NO: 574598 - DNA, 120 bp, Artificial Sequence
  ENSG00000171241_17 (sequence is synthesized)
tacagtgatgtaagtagatagcaaaatactggattttgcacatgctgccctaagaatcactgctgccattgtagtttgctgtattgtctgtattttatatttgattatttgggcttgagt

SEQ ID NO: 574599 - DNA, 120 bp, Artificial Sequence
  ENSG00000171241_18 (sequence is synthesized)
gaaaggtagatttatttccatttgcaggtgttgcacataaaacactccctctttataagaaaaatcataaatgcatataaaatagaaaatatttggagattgcttatctgaaagtcttgc

SEQ ID NO: 574600 - DNA, 120 bp, Artificial Sequence
  ENSG00000171241_19 (sequence is synthesized)
tttcttatacacatggttctctcatattaagcctggtagtaactttttagtgtaattacctttagcacttcaaagacgaggaagtaaggaagggaatgcaagactagtgcataaaaatgc

SEQ ID NO: 574601 - DNA, 120 bp, Artificial Sequence
  ENSG00000171241_20 (sequence is synthesized)
aataggtgtcatatgtacagcattcttcttagagttgccttttcatcccaattacagtgagtctgatttccatcctgtatttgcataatacttgtcttaaaataaaagcttttatgattg

SEQ ID NO: 574602 - DNA, 120 bp, Artificial Sequence
  ENSG00000171241_21 (sequence is synthesized)
tcagacttattattgagacgtcaatgggacgcatttttctgttgagctatgcagtcgtcaaaacagcgatagacagcataggaggtttgaagcagaaatgaaatgtgttattcagagcca

SEQ ID NO: 574603 - DNA, 120 bp, Artificial Sequence
  ENSG00000171241_22 (sequence is synthesized)
cagagccaatgttgtacatagagcattttcactattgctgaatgggaatgattaaaaacaaggtatttttcgggccaggcggtggctcacgcttgtaatcgcagcactttgggaggctga

SEQ ID NO: 574604 - DNA, 90 bp, Artificial Sequence
  ENSG00000171241_23 (sequence is synthesized)
taggcaacatagtgagaccctgtctctactaaaaataaatttaaaaaaaattagctgagtgtggtggtgcatgcatagaggatccttgag

SEQ ID NO: 574605 - DNA, 120 bp, Artificial Sequence
  ENSG00000171241_24 (sequence is synthesized)
tgagcccaggaggttgaggctgcagtgaggtgtgattgcgccactgcattccagcttgggcgacagagcgagacccagtctcaaaaaaaaaaaaaagtatttttctcttaccgttacagt

SEQ ID NO: 574606 - DNA, 120 bp, Artificial Sequence
  ENSG00000171241_25 (sequence is synthesized)
aaaagtatttttctcttaccgttacagtattctgattatattactgacacagtcaaaatgattaactgtacaacctgtatctgctgggtgttcttgttatcatattgtaaaacagcttta

SEQ ID NO: 574607 - DNA, 120 bp, Artificial Sequence
  ENSG00000171241_26 (sequence is synthesized)
aaaatatttatattttaaaaactgtatgtgacattaatatgcctaatgattaaaattatagtgatgaaataacaaaattgaatcttgttatatcttttcaaactcactgtgggccatagt

SEQ ID NO: 574608 - DNA, 120 bp, Artificial Sequence
  ENSG00000171241_27 (sequence is synthesized)
gtcagtgtagcatatgtggtcatttaagaatacatggtattttggtatctgttttcatgctttagaaagagtattacattttttcccattaagtgtggttatgtttgttttttaaatttg

SEQ ID NO: 574609 - DNA, 120 bp, Artificial Sequence
  ENSG00000171241_28 (sequence is synthesized)
agtaaaaaataattcttattttttggatgctactaaatgtaggatttatgttagatttattatttgatcattgaaaggtatttttacttttaaaaaatcttgttgcaaggaggtttaaaa

SEQ ID NO: 574610 - DNA, 120 bp, Artificial Sequence
  ENSG00000171241_29 (sequence is synthesized)
agtaatgttcatttctgcatcagtttcagccaaatgttgatattaaaaccttttattcttttttttaatttttgcctctagatgtgatgccttaagataaaaaccatttattcaacttaa

SEQ ID NO: 574611 - DNA, 63 bp, Artificial Sequence
  ENSG00000171241_30 (sequence is synthesized)
ttattttattttgttttgtttttgagatggagcagtctcctgggttcaagtgattctcatgcc

SEQ ID NO: 574612 - DNA, 120 bp, Artificial Sequence
  ENSG00000171241_31 (sequence is synthesized)
attgatttttcaattgaatttctactttatcttggtttagattttgtagataagttagtaacatttataccttccttgtttctttttataacatggagtttttcagatttcatgtctatt

SEQ ID NO: 574613 - DNA, 120 bp, Artificial Sequence
  ENSG00000171241_32 (sequence is synthesized)
ttagcttaaatctaagcttatattaatttttattcacatgattcattataatgagtaggcctactttgttcttatttaagttatatgcagtacattttgcctcaatcatggagagttaaa

SEQ ID NO: 574614 - DNA, 120 bp, Artificial Sequence
  ENSG00000171241_33 (sequence is synthesized)
catctcaaatggtatagcatagggaatttagggagtgccctagaggggtatgggtttgatatttgagatgaaaacactgatgtggagaaaggatagccttctgtgttgactaattgtgtg

SEQ ID NO: 574615 - DNA, 120 bp, Artificial Sequence
  ENSG00000171241_34 (sequence is synthesized)
tcctgtccttatggtccactcttagtgtgaccttgaatttatggcaggtagcaaaattctattttgctgatttgagtattttattttagcttctttagatgtatttcccttcttcagttt

SEQ ID NO: 574616 - DNA, 120 bp, Artificial Sequence
  ENSG00000171241_35 (sequence is synthesized)
cttgttgtattattgcaccatagatattaacacgaatatatttttaaaaactgcccagagatcatttgatctcaagtgtatatacacttcacttttctggagttacagaaggatggtgaa

SEQ ID NO: 574617 - DNA, 120 bp, Artificial Sequence
  ENSG00000171241_36 (sequence is synthesized)
ataatcattttctggattttgcttttcagagggagattgaagaaagttcaatagaacactgatgagctcataagaaccgtgtcgttcatgtttctttgtaattcagtttgctgtttttat

SEQ ID NO: 574618 - DNA, 120 bp, Artificial Sequence
  ENSG00000171241_37 (sequence is synthesized)
tcttattcctttctaggaagtacattccacaggcttctatggaaattaagttgaaataaattttgataattggcctttgatgcaaaatttatgcatagcatttaattttataacattttg

SEQ ID NO: 574619 - DNA, 120 bp, Artificial Sequence
  ENSG00000171241_38 (sequence is synthesized)
tgcaaaatttatgcatagcatttaattttataacattttgttttattctgtgattaaatatatatatgtatatgttttaaagtcttatatgtggtgaacattctcctctttttttagttc

SEQ ID NO: 574620 - DNA, 120 bp, Artificial Sequence
  ENSG00000171241_39 (sequence is synthesized)
ccaggtggctttttttccttctgattcaccacaggttttcacaaatcccacaaagtatttacaggagctttcccaagacggttttctgtgcatgggaagtagtgagagccctgcctttca

SEQ ID NO: 574621 - DNA, 120 bp, Artificial Sequence
  ENSG00000171241_40 (sequence is synthesized)
tcagcagtagtcacttaccaggcatgtgttaggtcagtgcgctatcaaaggagatgcttcaatatgcagtttttggcttccattttcaaagtaagacatgaagtcacctagagtaatact

SEQ ID NO: 574622 - DNA, 120 bp, Artificial Sequence
  ENSG00000171241_41 (sequence is synthesized)
atggaaatgttgattaaaaatggctggtaaaacttatctgtaaagtactttatctttgtgctgtacatttgtactgtgttaaaggctaagaagtaattgtaataaactcttatagtcttg

SEQ ID NO: 574623 - DNA, 120 bp, Artificial Sequence
  ENSG00000171241_42 (sequence is synthesized)
cgggtcgctgacgggcggcggtctggaggcagcggccatggcgccggagcgcatgggctgggcggtggagcaggagctggcgtctctggagaaaggagatcacgaaccacacttcccttt

SEQ ID NO: 574624 - DNA, 120 bp, Artificial Sequence
  ENSG00000171241_43 (sequence is synthesized)
tccgaagaagagaaaagcttgaacccttggcttagatggctgtcctgtgcacggagggtagtgacgtgtccaaagtgaggagcgccaacttgggccggagtccagaaatagaaccggggt

SEQ ID NO: 574625 - DNA, 120 bp, Artificial Sequence
  ENSG00000171241_44 (sequence is synthesized)
tttttttctgatattttaagctggttcatgtttttacgttaacactttcggttgtattgtgtagcagagagtcccaacaaagtgagaaaacataagtgtgacaattccactattaaccca

SEQ ID NO: 574626 - DNA, 120 bp, Artificial Sequence
  ENSG00000171241_45 (sequence is synthesized)
cctatccaactggcaaaagtcacttggcttcagttttcccatctggaagactatgccaatggttgtacttgtggtgaagttgaagtgaaataaagtttttaaagtggctgcaaaaataaa

SEQ ID NO: 574627 - DNA, 120 bp, Artificial Sequence
  ENSG00000171243_0 (sequence is synthesized)
acagttacagtgcagaagcagaagcaaaagaattaaccagctcttcagtcaagcaaatcctctactcaccatgcttcctcctgccattcatttctatctccttccccttgcatgcatcct

SEQ ID NO: 574628 - DNA, 120 bp, Artificial Sequence
  ENSG00000171243_1 (sequence is synthesized)
aatgaaaagctgtttggcttttaaaaatgatgccacagaaatcctttattcacatgtggttaaacctgttccagcacaccccagcagcaacagcacgttgaatcaagccagaaatggagg

SEQ ID NO: 574629 - DNA, 120 bp, Artificial Sequence
  ENSG00000171243_2 (sequence is synthesized)
caggcatttcagtaacactggactggatcggaacactcgggttcaagtgggttgccgggaactgcgttccaccaaatacatctctgatggccagtgcaccagcatcagccctctgaagga

SEQ ID NO: 574630 - DNA, 120 bp, Artificial Sequence
  ENSG00000171243_3 (sequence is synthesized)
gctggtgtgtgctggcgagtgcttgcccctgccagtgctccctaactggattggaggaggctatggaacaaagtactggagcaggaggagctcccaggagtggcggtgtgtcaatgacaa

SEQ ID NO: 574631 - DNA, 120 bp, Artificial Sequence
  ENSG00000171243_4 (sequence is synthesized)
aacccgtacccagagaatccagctgcagtgccaagatggcagcacacgcacctacaaaatcacagtagtcactgcctgcaagtgcaagaggtacacccggcagcacaacgagtccagtca

SEQ ID NO: 574632 - DNA, 120 bp, Artificial Sequence
  ENSG00000171243_5 (sequence is synthesized)
caactttgagagcatgtcacctgccaagccagtccagcatcacagagagcggaaaagagccagcaaatccagcaagcacagcatgagttagaactcagactcccataactagacttacta

SEQ ID NO: 574633 - DNA, 120 bp, Artificial Sequence
  ENSG00000171243_6 (sequence is synthesized)
gtaaccatctgctttacagatttgattgcttggaagactcaagcctgccactgctgttttctcacttgaaagtatatgctttctgctttgatcaaacccagcaagctgtcttaagtatca

SEQ ID NO: 574634 - DNA, 120 bp, Artificial Sequence
  ENSG00000171243_7 (sequence is synthesized)
attccacgtatcctgtagttttaattcctcattgttcttaaaagactgttgatactataaacatcagtgaatcattatattttaaaacagaaaagggcttctcagataccctccatctac

SEQ ID NO: 574635 - DNA, 120 bp, Artificial Sequence
  ENSG00000171243_8 (sequence is synthesized)
tggcccatcccctctcctaaacaaaactccttcaaaacaggttaaaaaaaatatgttgtcatgaatcttcacagtaacatttcagaaaggtgcttttttggtactcttcatgggaacagt

SEQ ID NO: 574636 - DNA, 120 bp, Artificial Sequence
  ENSG00000171243_9 (sequence is synthesized)
ttagcagccatgagtgatcttcctttgaaagagaatgaaagaccctgtgacatttcacttcaaaaataagccctgtagctctttacggtcgcatagtatgaaattataccctgcatgctg

SEQ ID NO: 574637 - DNA, 120 bp, Artificial Sequence
  ENSG00000171243_10 (sequence is synthesized)
accctcgcttggaatggaatgccagaaatgcatggcagcagctaataagtaaagctgattaactatttatttgtcaatgttattatttaatgagctttcacatgtgatttgtttcaaaac

SEQ ID NO: 574638 - DNA, 120 bp, Artificial Sequence
  ENSG00000171243_11 (sequence is synthesized)
tttaattttttaatgttttgaaactttttcatggacctaaatattttcctatatgatttgtggttgattagaaatatgaaatacatgttgtagatatgtaaaatgaatattttagtctcc

SEQ ID NO: 574639 - DNA, 120 bp, Artificial Sequence
  ENSG00000171243_12 (sequence is synthesized)
ttattacatatatgttcatggtgaactttatcaatagtatggatctttttaaatcaataagatgctttgtaaagttgaaataagtaatactttcttgtttaatctgtgcaatcagaaggt

SEQ ID NO: 574640 - DNA, 120 bp, Artificial Sequence
  ENSG00000171243_13 (sequence is synthesized)
gtcttgaccttcaattcaattggtttcttttaacaaaaataaacactgctaaaagttattgttgttgcctctaacatgtataaagggtgcaaaaattgtagaataaatgtataagggtaa

SEQ ID NO: 574641 - DNA, 120 bp, Artificial Sequence
  ENSG00000171243_14 (sequence is synthesized)
aaaatatagagaagtggtctgatggttaattttatatataaatttgactggactaggggatgcccagaagctggtaaaacattatttatgggtgtgtttctgaggatgtttttggaagag

SEQ ID NO: 574642 - DNA, 120 bp, Artificial Sequence
  ENSG00000171243_15 (sequence is synthesized)
attagcattagtattagtggactgagtaaacaagatcaccctcgccaacaggggtggatattatccaatccactgagggccccaatagaacagaaaaacagaggaatgtgaattcatgct

SEQ ID NO: 574643 - DNA, 120 bp, Artificial Sequence
  ENSG00000171243_16 (sequence is synthesized)
tgcttctggagttaggacatccatcttctgccttcagacatcagcattcctagttctcaggtctctgggcttggactaaactacattactggctctctcctgggctccagattgcagaca

SEQ ID NO: 574644 - DNA, 120 bp, Artificial Sequence
  ENSG00000171243_17 (sequence is synthesized)
gcagattgtgggacttctcagcctccgtaatcaatcctgtcttggaacctgcttcttagagggcctggactaacatactctggtagtgcatgaagcatctgtgatcacagcgtgacaaga

SEQ ID NO: 574645 - DNA, 120 bp, Artificial Sequence
  ENSG00000171243_18 (sequence is synthesized)
aaatagcacaaacaaacctatgaggacttgagagaattcaaaagggtcatgtagggatcccaccccttctctgtgttttcactctgaagctctacacaactttacacctgaatgaacgcc

SEQ ID NO: 574646 - DNA, 80 bp, Artificial Sequence
  ENSG00000171246_0 (sequence is synthesized)
ggcagtgggggcctgatagcgcggcggtgtggaccgcgcggccgaagagcgcggcgcccagagcgcgggccgctcgcgga

SEQ ID NO: 574647 - DNA, 120 bp, Artificial Sequence
  ENSG00000171246_1 (sequence is synthesized)
cccgcagccatgccggccggccgcgccgcgcgcacctgtgcgctgctcgccctctgcctcctgggcgccggggcccaggatttcgggccgacgcgcttcatctgcacctcggtgcccgtg

SEQ ID NO: 574648 - DNA, 120 bp, Artificial Sequence
  ENSG00000171246_2 (sequence is synthesized)
cgacgcgcttcatctgcacctcggtgcccgtggacgccgacatgtgcgccgcgtccgtggccgccggcggcgccgaggagctccggagcagcgtgctgcagctccgcgagacggtgctgc

SEQ ID NO: 574649 - DNA, 120 bp, Artificial Sequence
  ENSG00000171246_3 (sequence is synthesized)
agcagaaggagaccatcctgagccagaaggagaccatccgcgagctgaccgccaagctgggccgctgcgagagccagagcacgctggaccccggagccggcgaggcccgggcgggcggcg

SEQ ID NO: 574650 - DNA, 120 bp, Artificial Sequence
  ENSG00000171246_4 (sequence is synthesized)
gccgcaagcagcccggctcgggcaagaacaccatgggcgacctgtcccggacaccggccgccgagacgctcagccaactcgggcaaactttgcaatcgctcaaaacccgcctggagaacc

SEQ ID NO: 574651 - DNA, 120 bp, Artificial Sequence
  ENSG00000171246_5 (sequence is synthesized)
tcgagcagtacagccgcctcaattcctccagccagaccaacagcctcaaggatctgctgcagagcaagatcgatgagctggagaggcaggtgctgtcccgggtgaacaccctggaggagg

SEQ ID NO: 574652 - DNA, 120 bp, Artificial Sequence
  ENSG00000171246_6 (sequence is synthesized)
gcaaggggggccccaggaacgacaccgaggagagggtcaagatcgagaccgccctgacctccctgcaccagcggatcagcgagctcgagaaaggtcagaaagacaaccgccctggagaca

SEQ ID NO: 574653 - DNA, 120 bp, Artificial Sequence
  ENSG00000171246_7 (sequence is synthesized)
agttccagctcacattcccactgcggaccaactatatgtatgccaaggtgaagaagagcctgccagagatgtacgccttcactgtctgcatgtggctcaagtccagcgccacgccaggtg

SEQ ID NO: 574654 - DNA, 120 bp, Artificial Sequence
  ENSG00000171246_8 (sequence is synthesized)
tgggcacgcccttctcctacgctgtgcccggccaggccaacgagctggtcctcattgagtggggcaacaaccccatggagatcctcatcaatgacaaggtggccaagttgccttttgtca

SEQ ID NO: 574655 - DNA, 120 bp, Artificial Sequence
  ENSG00000171246_9 (sequence is synthesized)
tcaatgatggcaagtggcaccacatctgtgtcacctggaccacccgggacggggtctgggaggcctaccaggatggcacgcagggtggcagtggcgagaacttggcgccctatcacccca

SEQ ID NO: 574656 - DNA, 120 bp, Artificial Sequence
  ENSG00000171246_10 (sequence is synthesized)
tcaagccccagggcgtgctggtgctgggccaggagcaggacactctgggtggtgggtttgatgccacccaggcatttgtgggtgagctggcccacttcaacatctgggaccgcaagctga

SEQ ID NO: 574657 - DNA, 120 bp, Artificial Sequence
  ENSG00000171246_11 (sequence is synthesized)
cccccggggaggtgtacaacctggccacctgcagcaccaaggctctgtccggcaatgtcatcgcctgggctgaatcccacatcgagatctacggaggggccaccaagtggaccttcgagg

SEQ ID NO: 574658 - DNA, 120 bp, Artificial Sequence
  ENSG00000171246_12 (sequence is synthesized)
cctgtcgccagatcaactgagcacggcaggccaggctgagcccgcccgccctcgccccctgcttgtgcggcgatgatctgttttgtgcgtctcttctctcccttttccccaggaatgaac

SEQ ID NO: 574659 - DNA, 120 bp, Artificial Sequence
  ENSG00000171246_13 (sequence is synthesized)
cgaggccgtcgcccctgcacacgcacacgcacacagcctggttttgtcctcatgcacacgaagcagcccctgctcccatctgtccctgaggaagccccacttctctgtaggagcccggac

SEQ ID NO: 574660 - DNA, 120 bp, Artificial Sequence
  ENSG00000171246_14 (sequence is synthesized)
tctctcaggcatgccccattcacagctgaagtgggtgctgcaacgtcttgaacaaggcagaagttggtgagaggatctgtgtgtgcgtgtctacatgtgtgtgtctacgtgtgtgcgtgc

SEQ ID NO: 574661 - DNA, 120 bp, Artificial Sequence
  ENSG00000171246_15 (sequence is synthesized)
gtggctgggggaggccttttctttgaggacgtacctcatttccttctttcttctggctttggaaaaatctcatgatgaaaattcatatttgccaactttgttagctgcgtgcgtgctttg

SEQ ID NO: 574662 - DNA, 120 bp, Artificial Sequence
  ENSG00000171246_16 (sequence is synthesized)
gggttggtgcaacctcagtacacgcatttgtctttgtttgcaaacctttctcagagcgacatatctttatattgatgtaataaatgtcttttagtggtttgtcaaaggccgggggcgggg

SEQ ID NO: 574663 - DNA, 120 bp, Artificial Sequence
  ENSG00000171246_17 (sequence is synthesized)
gctctctacagagaatttttattttgtaatagaagtgaactgtctctgaagggtgaaggcaggccgtcctgggatggtaccctgtgctctcccgtggaggagaggggatggctgaggaca

SEQ ID NO: 574664 - DNA, 120 bp, Artificial Sequence
  ENSG00000171246_18 (sequence is synthesized)
ctggcccttaccccagggccagacagcatccatccctgctgtttgcatctgagagcagcatggggcctgggaggtcggcctgtgtgcccagctcagctagctctgccccaggacggccct

SEQ ID NO: 574665 - DNA, 120 bp, Artificial Sequence
  ENSG00000171246_19 (sequence is synthesized)
gccctcgaccttcccacctcctcagatcctgcaaggctggggtctgcccctcccttctcacctctggagctgtgctgcactgcttcagcccagagggccctgagagaggagcgtgccacc

SEQ ID NO: 574666 - DNA, 120 bp, Artificial Sequence
  ENSG00000171246_20 (sequence is synthesized)
cacagcccgggaagccgggccccagcacccctctcctttggcctccggcagtgcagaccagaggggaccttttaaggaaagaagccgtgtttcgatgaagacctggccacatggggccac

SEQ ID NO: 574667 - DNA, 120 bp, Artificial Sequence
  ENSG00000171246_21 (sequence is synthesized)
tgggacttcaacccagcccatcggtgggaaggtcctttttgggggactttgacagccatatccctcccagcacaccaggcgccaggtgagctggttcagacccctccaggggtactccag

SEQ ID NO: 574668 - DNA, 120 bp, Artificial Sequence
  ENSG00000171246_22 (sequence is synthesized)
cctgaaacccactcctccatctcatggggctcacggcctacagcagcccacaagctgccactggccggcgacactgacacctgagcagtgtccagaacctttttgcctttttttgttccc

SEQ ID NO: 574669 - DNA, 120 bp, Artificial Sequence
  ENSG00000171246_23 (sequence is synthesized)
cgtgaaaagcaacatggacatttccttctagtccttccaaggaggggagagaagtgtatgtgcatttgtgtgtgtgtgtgtgtgttgtgtgtgtgtgtgcgctaagtgagaaagagagca

SEQ ID NO: 574670 - DNA, 120 bp, Artificial Sequence
  ENSG00000171246_24 (sequence is synthesized)
ggctcgggaggccctgcccagggtaggaggagcttcctgctttgcaccatctggtggtcgcacgccctgagggcaccccgactctgtctccaggagtctcatcagcaaaccgctgacaag

SEQ ID NO: 574671 - DNA, 120 bp, Artificial Sequence
  ENSG00000171246_25 (sequence is synthesized)
tctttctagaaattctactgcactgcctggctcagctgcagctgcagacatttctgcaggaggagcaggtgtttctgtcttctgttccttctagggccacctgtccccttaaacacaggt

SEQ ID NO: 574672 - DNA, 120 bp, Artificial Sequence
  ENSG00000171246_26 (sequence is synthesized)
ccacgttgtgtcaagaacctagtgcatctgtgtgtgtctgtcagtgtctctgtgtcagtgttctcgtgggtgtctgcacggtacccggccgccgttctgcaatgcatcactcccgcagag

SEQ ID NO: 574673 - DNA, 120 bp, Artificial Sequence
  ENSG00000171246_27 (sequence is synthesized)
gggggtgcagatcaggcgccgtgctgcgcgttgttgttcaacagtggctttttcttagataatcgtgcttcctcagcgcccgtcgggttgtggcatccttggatctgcagggatcttctc

SEQ ID NO: 574674 - DNA, 120 bp, Artificial Sequence
  ENSG00000171246_28 (sequence is synthesized)
cgtttgcatgttcctcggggtggcgtgttccttgctccctgggtccgacatgtgttcccgcacctgcatggactgccccggttctgtgttgtgtgccgagtgccgcccagtgttctgtga

SEQ ID NO: 574675 - DNA, 120 bp, Artificial Sequence
  ENSG00000171246_29 (sequence is synthesized)
ccacccgtgtagctactgaaaatggctgggtaagcaagtcaagggtgttggaggaggtcaagagagagctcagtttccctctccccctccccaaacacaccaagaagcatttttaacgtg

SEQ ID NO: 574676 - DNA, 120 bp, Artificial Sequence
  ENSG00000171246_30 (sequence is synthesized)
taggttgagaacaagcctaaaggattcccacagctgggagccagcaagagagcttggagtcgcctctctagaccagatctagccccaccctcactccagccatctcggagcccttgtgta

SEQ ID NO: 574677 - DNA, 120 bp, Artificial Sequence
  ENSG00000171246_31 (sequence is synthesized)
ggcaacgcccggtgcgggctgtgtggggtgctcccctgccagcacctccggccagccccgcccctgccgatctactggaccgcagaccaccttctgcccccgtgggccaggtgggagctg

SEQ ID NO: 574678 - DNA, 120 bp, Artificial Sequence
  ENSG00000171246_32 (sequence is synthesized)
tccgttcaggaccatgagccatcctctgccctgactagcgaggggcagagcacaccccagtgcttacgcctccacccctgcagcctcctggcccgctcaccttcctcacccctcctctga

SEQ ID NO: 574679 - DNA, 120 bp, Artificial Sequence
  ENSG00000171246_33 (sequence is synthesized)
cccacccatggtgccagggccgaagctgacctttagctccctcctgccccttgctagggtctgagccaagcccctcgactccctcactgtgttgacacttggcactttgctggccccgag

SEQ ID NO: 574680 - DNA, 120 bp, Artificial Sequence
  ENSG00000171246_34 (sequence is synthesized)
aaaggtcgatgacacagccgcaaatctaatccacgtagttcccatttactccttaatctgattgatgttccctcttgcactgaataatacatgcctctctcaggtaagccattttataaa

SEQ ID NO: 574681 - DNA, 120 bp, Artificial Sequence
  ENSG00000171246_35 (sequence is synthesized)
acaagaagataaaaagcactgttgaggcagtgtttgcttttgccgagctggtgtccgacagctccctgggtgtccggggtgggagagctgttgacagaagctctccgggccctcaggggc

SEQ ID NO: 574682 - DNA, 120 bp, Artificial Sequence
  ENSG00000171246_36 (sequence is synthesized)
ttagatcccacttgagtcgtaagccttcttgcttttgataacacagtattatttctcttactgtagaagaaaaagtttattaccaaacaagagtatttttatgaaagaaaaggacaaacc

SEQ ID NO: 574683 - DNA, 120 bp, Artificial Sequence
  ENSG00000171246_37 (sequence is synthesized)
tataaattaactcaacctatatctcccttgaaaatactttcaggctccaccaaaacgtagaactgaaagcatgtattttggaagaaagagatacattttgtatgctttcttttccttttg

SEQ ID NO: 574684 - DNA, 120 bp, Artificial Sequence
  ENSG00000171246_38 (sequence is synthesized)
tagattcccagtttattttctaagactgcaaagatcactttgtcaccagccctgggacctgagaccaagggggtgtcttgtgggcagtgagggggtgaggagaggctggcatgaggttca

SEQ ID NO: 574685 - DNA, 120 bp, Artificial Sequence
  ENSG00000171246_39 (sequence is synthesized)
gtcattccagtgagctccaaagaggggccacctgttctcaaaagcatgttggggaccaggaggtaaaactggccatttatggtgaacctgtgtcttggagctgacttactaagtggaatg

SEQ ID NO: 574686 - DNA, 120 bp, Artificial Sequence
  ENSG00000171246_40 (sequence is synthesized)
agccgaggatttgaatatcagttctaaccttgatagaagaaccttgggttacatgtggttcacattaagaggatagaatcctttggaatcttatggcaaccaaatgtggcttgacgaagt

SEQ ID NO: 574687 - DNA, 120 bp, Artificial Sequence
  ENSG00000171246_41 (sequence is synthesized)
cgtggtttcatctcttaaacacagtgtgtaaatttattcaactaacgatgggaaatgtattacttctgtacacagtggactgaagtgcaatttgttgaaagggaacaagtcattgaagag

SEQ ID NO: 574688 - DNA, 120 bp, Artificial Sequence
  ENSG00000171246_42 (sequence is synthesized)
aaaaaaaaagcccaatacttagagtcccaattttgtctcatttgccaaaaaaaaaaaaaaaaaaaaagcaaaccccctatggttgatattgttataatgtatatactgtataatatgaaa

SEQ ID NO: 574689 - DNA, 120 bp, Artificial Sequence
  ENSG00000171246_43 (sequence is synthesized)
gagaatcgatgtatctcactttttcattatttgctaaccaaagctgtacatttttcatatgatctgcagccttttgggtatcaaatgggtcaaaaccatgggacctgccacctcccatca

SEQ ID NO: 574690 - DNA, 120 bp, Artificial Sequence
  ENSG00000171246_44 (sequence is synthesized)
gcaattctggaaatgcactatttctactggtattcttgctttttttttttttttcattttcttgctgaaatgacatgaattgttgagtttatttttacacagtaaagagtggagaaagac

SEQ ID NO: 574691 - DNA, 120 bp, Artificial Sequence
  ENSG00000171246_45 (sequence is synthesized)
agtttccttctctgtaccacgggagcgtggacggagggatttccgaggctttgaccgctctgatagccccggggcggggcggggcggggcggctgcgccagccctggtcctgagccccca

SEQ ID NO: 574692 - DNA, 120 bp, Artificial Sequence
  ENSG00000171246_46 (sequence is synthesized)
agatcagaaggaaggacctcaggagggagggagagggaaggagcggagattggggaatgaaaaacacccggagaaaggccaggggctgggcccctccctatcccccactgcaggcctcaa

SEQ ID NO: 574693 - DNA, 120 bp, Artificial Sequence
  ENSG00000171246_47 (sequence is synthesized)
tgggttggggtagccgctggggtgctgcactgagggggcctgccctgctctgctccctgccagttggtttagaggagggggtggttgctgaccgggcaggatgtcttctagaaataattt

SEQ ID NO: 574694 - DNA, 120 bp, Artificial Sequence
  ENSG00000171246_48 (sequence is synthesized)
ttggcctggggaactggtttctttctgggcttcctggcaggaccacggctgctcacccagggattgaccaaggggtgtgtgttcctgggctctgggcctgctactgtgcccattgctggc

SEQ ID NO: 574695 - DNA, 120 bp, Artificial Sequence
  ENSG00000171246_49 (sequence is synthesized)
caggaatgttttgcctggagtcagtcacaccatacccagggtgccacagtatatagatgggctatgggggttggcgcttacgggagaagtggccggtggggagggagaaggtgggccttg

SEQ ID NO: 574696 - DNA, 120 bp, Artificial Sequence
  ENSG00000171246_50 (sequence is synthesized)
tggaaagggaggccaccaggcctggaacctgagctgtgaggacacttactcacctgagagtgtggcggcatcctagagcagtcaccttggggagccctggcgcccagagtactcccagct

SEQ ID NO: 574697 - DNA, 120 bp, Artificial Sequence
  ENSG00000171246_51 (sequence is synthesized)
ccttgctgccctgccctctcagcagagctccaggcagagtccctgctccaaggaagggccttggaggtggggagctgcccagcctcacacccaagaggcattggtgggtcagaggcacat

SEQ ID NO: 574698 - DNA, 120 bp, Artificial Sequence
  ENSG00000171246_52 (sequence is synthesized)
ctggcctggagggaagtgtgtgggcaccagggcctggctgtcgggtggggagaggcaggagcagagcctgggattgagcgaggagaggctctgagccccgccccatcctggaatcaggtc

SEQ ID NO: 574699 - DNA, 120 bp, Artificial Sequence
  ENSG00000171246_53 (sequence is synthesized)
ggttactctcagggtagctagcctcgttcctcctctgcagccacccctgctccttgggttgacttggcttggcggctgtccccattcccttctcatgcccaccacgcagcccagtgttga

SEQ ID NO: 574700 - DNA, 120 bp, Artificial Sequence
  ENSG00000171246_54 (sequence is synthesized)
tgcagcagcccaccaggcactgccccccacccccatctccccaaggatgccagcacatgggcgtgacagcaggccagacctggagcatgaagagcttgggtcagctctttacagactggc

SEQ ID NO: 574701 - DNA, 120 bp, Artificial Sequence
  ENSG00000171246_55 (sequence is synthesized)
cctgtgccttggggcaaagtacttgacctgggaagctacccgctctgcgtctccagaatggagaccggagcctgccctggccacgcatcacagagcttggtggggaccgaactcaactca

SEQ ID NO: 574702 - DNA, 120 bp, Artificial Sequence
  ENSG00000171262_0 (sequence is synthesized)
acttagagcgccgaacagctctgggccaaaggaccatgagagggccggagccgggtccccaaccgacgatggagggagacgtgctggacacactggaggcgctggggtataaaggaccat

SEQ ID NO: 574703 - DNA, 120 bp, Artificial Sequence
  ENSG00000171262_1 (sequence is synthesized)
tgttagaagagcaagcccttacaaaggcggcagagggtggattatcttcacctgaattttcagagctctgtatttggttaggctctcaaataaaatcattatgcaacttggaagaaagta

SEQ ID NO: 574704 - DNA, 120 bp, Artificial Sequence
  ENSG00000171262_2 (sequence is synthesized)
tcacgtctgctggaagagatgatctagagagcttccagcttgagataagtggctttttaaaagaaatggcatgtccatattctgtactcatatcaggagatattaaagatcgtttaaaaa

SEQ ID NO: 574705 - DNA, 120 bp, Artificial Sequence
  ENSG00000171262_3 (sequence is synthesized)
agaaggaggactgtttgaaacttctattatttttaagtacagaacttcaagcttcacagatattacagaacaagaaacataaaaattctcaattagataaaaatagtgaagtttatcagg

SEQ ID NO: 574706 - DNA, 120 bp, Artificial Sequence
  ENSG00000171262_4 (sequence is synthesized)
aagttcaagctatgtttgatacacttggtatacccaagtcaacaacttctgacattccgcatatgctaaaccaagtggaatcaaaggtgaaagatattctctcaaaggtccagaaaaatc

SEQ ID NO: 574707 - DNA, 120 bp, Artificial Sequence
  ENSG00000171262_5 (sequence is synthesized)
atgtgggaaaaccactgctgaaaatggatttaaattcagaacaggcggaacaactggaaagaatcaatgatgctctttcctgtgaatatgagtgccgccgacgaatgttaatgaaacgat

SEQ ID NO: 574708 - DNA, 120 bp, Artificial Sequence
  ENSG00000171262_6 (sequence is synthesized)
tagatgtgactgtacagtcctttggatggtctgatagagcaaaggtaaaaacagatgatatagcaagaatttatcagcctaagcgttatgctttgtcacccaagacaacgattacaatgg

SEQ ID NO: 574709 - DNA, 120 bp, Artificial Sequence
  ENSG00000171262_7 (sequence is synthesized)
cacatctacttgctgctcgtgaagatctatccaagatcattaggacaagtagtggcaccagccgggagaagaccgcatgtgccattaataaggtgctgatgggaagggtgcctgacaggg

SEQ ID NO: 574710 - DNA, 120 bp, Artificial Sequence
  ENSG00000171262_8 (sequence is synthesized)
gaggccggccgaatgaaattgaaccaccacctccagaaatgcccccttggcaaaagagacaagaaggcggcggtggaaggggtggttggggtggtggtggtggaggtggtggtagaggag

SEQ ID NO: 574711 - DNA, 120 bp, Artificial Sequence
  ENSG00000171262_9 (sequence is synthesized)
gtggtgggggtgggggtgggagaggtggctgggggggtggaggaggaggttggggaggtggtgggggagggggaggagggtgggggggaggaggaggaggtggtagaggaggtttccaag

SEQ ID NO: 574712 - DNA, 120 bp, Artificial Sequence
  ENSG00000171262_10 (sequence is synthesized)
gaggtttccaaggcaggggagattatggtggaagagggggttatggtggaagagggggctatggtggaagaggctatggagatccatatggaggaggtggtggtggtggtggtggtggtg

SEQ ID NO: 574713 - DNA, 120 bp, Artificial Sequence
  ENSG00000171262_11 (sequence is synthesized)
gatatagaagatactaaaaactataaaaattagatagcagtgcttgcttctttatagatacattagaaatagtgttccaaataacatacttgaatatcatctttgaagtaaacaccatgt

SEQ ID NO: 574714 - DNA, 120 bp, Artificial Sequence
  ENSG00000171262_12 (sequence is synthesized)
tagactccctggtgataccactcttgaattggttaatatgtaagaacattgttttttattaccagttgatctctcaaatgaagtgatgactttttccatattctgtgtacccttgagcat

SEQ ID NO: 574715 - DNA, 120 bp, Artificial Sequence
  ENSG00000171262_13 (sequence is synthesized)
gttgtgtctttttaaaaaacaaaaaaaagaacaaaaattattttttaaaatgtaaatatttattaccatcagacttggaaaatggaaagtattttattgtcatgattgaatttagattgt

SEQ ID NO: 574716 - DNA, 120 bp, Artificial Sequence
  ENSG00000171262_14 (sequence is synthesized)
tacctgtattttgttcaggtttgagacatataaaagaccccacctgtaatagaaaggaatatagacccttgcctcacctgtattgctgtggatgtgttttgtgggtttttcattcgattt

SEQ ID NO: 574717 - DNA, 120 bp, Artificial Sequence
  ENSG00000171262_15 (sequence is synthesized)
tacaaaatagggaaaggcacttccagttgtatttagtaggcagttgttgtgaatcatttttttctcttataggaggagattcctctctagccatgtttctgttaaagtttcattaattga

SEQ ID NO: 574718 - DNA, 120 bp, Artificial Sequence
  ENSG00000171262_16 (sequence is synthesized)
agcccaagtttactttttactgtacatacttattttctaattggatttgaaatcagcatgattttgtttgacaaagcaaagtttaagattgaggtcagaaatactttaatggagcaaaga

SEQ ID NO: 574719 - DNA, 120 bp, Artificial Sequence
  ENSG00000171262_17 (sequence is synthesized)
cacataccaactttacatgacggtgtgagaaatagtcctataaactggtctcttcatcatttatgctctcactttagatatccaaatattaaaaggcaggctgacctgtatcacacagaa

SEQ ID NO: 574720 - DNA, 120 bp, Artificial Sequence
  ENSG00000171262_18 (sequence is synthesized)
cacagctagatttgggaaacacaaagttagggaatggctatatgtgatttgctagttggagcagtcaaagtcttagctatcaagagttgtgaatttgaatcatggcactaggtcaggggt

SEQ ID NO: 574721 - DNA, 120 bp, Artificial Sequence
  ENSG00000171262_19 (sequence is synthesized)
gctatggattgaaatgaccttagttctcaaggagtgatttgtcctcatttgtcaaatgaggaatgagacacttaccatcatctcaggttgtttcttaaagacctaaatacaaatacaatt

SEQ ID NO: 574722 - DNA, 120 bp, Artificial Sequence
  ENSG00000171262_20 (sequence is synthesized)
tgttaaaaacttacagagggcctattttgaatgctttaagatgtaggccaagtaatgtatttttctcttagtgtagaaagttaagagaaaaagagctggtaccataaattttttcaatct

SEQ ID NO: 574723 - DNA, 120 bp, Artificial Sequence
  ENSG00000171262_21 (sequence is synthesized)
tagtgtaaaatctgtatctcattgtaggcttctggtcaatacctatacataacaacttaatgtgatctaaccaactcaactgatagaaagctgaattgttcccagtggacaagtggtatt

SEQ ID NO: 574724 - DNA, 120 bp, Artificial Sequence
  ENSG00000171262_22 (sequence is synthesized)
tgatgtttagcaggtttttttgttgttatttttttggtaaactctgtggtaaaatctaaaataatgttaaaaccctaaaagtaactattgaatattctgtaatcttagacatgtattttt

SEQ ID NO: 574725 - DNA, 120 bp, Artificial Sequence
  ENSG00000171262_23 (sequence is synthesized)
caagctaaccctttgaagaaatgtgttcaaggtaggaaaatataaaattttttggttatttgtaaatttattttttgtgtgtttatatttaatgaaaagatgtaatttcatttgtgatag

SEQ ID NO: 574726 - DNA, 120 bp, Artificial Sequence
  ENSG00000171262_24 (sequence is synthesized)
ctgaaaaaaaggctttccataattaagaaaatacctttatcagtagctatgaactctgaaaaataatttttaaaaacttttaagaaaaaaactacttgagtaaaatatttcaagagttgt

SEQ ID NO: 574727 - DNA, 120 bp, Artificial Sequence
  ENSG00000171262_25 (sequence is synthesized)
ttaaaaatcttctttaaaacctttacatttctgcctcacttcttttttggtagcattagttgctgatgaaggagatttacaactactttcaacttttttaccactaaaggtttatggtaa

SEQ ID NO: 574728 - DNA, 120 bp, Artificial Sequence
  ENSG00000171262_26 (sequence is synthesized)
atatggcagaaacaatagtttatcagtttcattagattttccataagatttctttgtacctttataggagtgctgcttgggttattcactacaatcacttatttcctatcaaagtttagc

SEQ ID NO: 574729 - DNA, 120 bp, Artificial Sequence
  ENSG00000171262_27 (sequence is synthesized)
acttgctcctggaatcgtgttggagctgaaaccactcctatgtacacattcctataaaccttaattgaatgaaaagctgaatcaggtagactcttaatattttactctttcctgtaaggt

SEQ ID NO: 574730 - DNA, 120 bp, Artificial Sequence
  ENSG00000171262_28 (sequence is synthesized)
gggattttcctgataatctttgttcagtaaaaatttcttttgtagaacagtttgctgagcagtatctggaatagcaggaaggaaatttggggccttaatgggaaaggccatagtgtgaaa

SEQ ID NO: 574731 - DNA, 120 bp, Artificial Sequence
  ENSG00000171262_29 (sequence is synthesized)
atgttttataaattgagtgcaatacgacatggagtatgatgaatggcactccactgcttcctaaaatccaacactttttttgatacctccttttcattcttttttgcctggttctcaatt

SEQ ID NO: 574732 - DNA, 120 bp, Artificial Sequence
  ENSG00000171262_30 (sequence is synthesized)
tcattttttaattacctcattgtccttccccttttttcttctctttttgtccagcctggtacctaatagcaaatatagacatgatcttactgggagtttctgcctaaagtagtcatcttt

SEQ ID NO: 574733 - DNA, 120 bp, Artificial Sequence
  ENSG00000171262_31 (sequence is synthesized)
cctctcgaccgtataaagagcatgtattctgtctataacataatcaccacactattactcataagcacacatcaaaagggaaacaagggttttctttgaacttacttttgttttgcagat

SEQ ID NO: 574734 - DNA, 120 bp, Artificial Sequence
  ENSG00000171262_32 (sequence is synthesized)
cagggaaaccttgcctcattaaacagaaaaaggaaaacattttaaataaaaaacatcttattacctgtatctgtgacaagaggaggcatgacaacctaaaaaaaatttgtgaccagaaaa

SEQ ID NO: 574735 - DNA, 120 bp, Artificial Sequence
  ENSG00000171262_33 (sequence is synthesized)
atgtcctgagcagtgatactatctataccttggaaggagcacaggttagagaaatgtggggatgaaaattggggaaggtgagcaggcagtttaatcttgccttcaggatcaggctgtcag

SEQ ID NO: 574736 - DNA, 120 bp, Artificial Sequence
  ENSG00000171262_34 (sequence is synthesized)
tgtgactttattactttgtatgaagtattatgaattgcccaaatgataaatacacccccatctaaatgttccagaatgcattccacagaggaatttgagtgactgaaatttttcctcttt

SEQ ID NO: 574737 - DNA, 120 bp, Artificial Sequence
  ENSG00000171262_35 (sequence is synthesized)
cttcattggtgtggttaaacaaaaattagctggggattaagggaaaattgtggctatgtctgatcattctaaataatcatgaccacaaataaattgccctgagtaggtctgtaacctgga

SEQ ID NO: 574738 - DNA, 120 bp, Artificial Sequence
  ENSG00000171262_36 (sequence is synthesized)
ttttacagattttagtctatttttctttcatgtcctggtaaatgtttagaaaaaagagtggcaggggggttcagtctaggcttagttatgttatttttgtgtatgtgtgtatgttcactt

SEQ ID NO: 574739 - DNA, 120 bp, Artificial Sequence
  ENSG00000171262_37 (sequence is synthesized)
gaatttgtgtattcataaatcaaagtattttctgaattagaggaattatgaattgtttttgtcaaagctttagcaagaattatgttccatctttctaaaaagtaatcattttttgtcagt

SEQ ID NO: 574740 - DNA, 120 bp, Artificial Sequence
  ENSG00000171262_38 (sequence is synthesized)
aagaatctttcggaattgtttcaagtactgacagattcgttatatccttggtgtaaagggaagaagagtttgtgctttagagtcagaccaatctgggttcccatcctggctctgtcattt

SEQ ID NO: 574741 - DNA, 120 bp, Artificial Sequence
  ENSG00000171262_39 (sequence is synthesized)
acttacagaaatgaccctgagcaagctactgaacttctttgagcttctgtttcctgatttggagtatacatccatttctctgacagtagtctatttaaacaagctcaaggagtctgaatt

SEQ ID NO: 574742 - DNA, 120 bp, Artificial Sequence
  ENSG00000171262_40 (sequence is synthesized)
agagcaaaaaatcagaaataagggatttggataattttaaagcatcgcttctcactcagtgtaacttgagataaaataccttttcagagggatggttgtttttaaagtcattttgctaac

SEQ ID NO: 574743 - DNA, 120 bp, Artificial Sequence
  ENSG00000171262_41 (sequence is synthesized)
tattgctaagttaggcatcaccagtgtttgcctctgtgcttccactgtggctcaatcctatgttctgaaagtgttctctctttaaatatattacctaacatcttgcattgggtgataatt

SEQ ID NO: 574744 - DNA, 120 bp, Artificial Sequence
  ENSG00000171262_42 (sequence is synthesized)
tagtcttgctggatcaagagttctatttctgtaagtaacattggccatctcttctgagtttataatttatggtctcattatttgagggtagtcttatgatcagttctggcatctccatat

SEQ ID NO: 574745 - DNA, 120 bp, Artificial Sequence
  ENSG00000171262_43 (sequence is synthesized)
gcccaccaacataccatgtttggtagagagaccagtgagaataataaccaagaaaggctgttttttggatttggtagttaggacatcattgccatctttaaaagaatgttgcatacttag

SEQ ID NO: 574746 - DNA, 120 bp, Artificial Sequence
  ENSG00000171262_44 (sequence is synthesized)
aaccttgtctcactttgaggatattgcactttttatatttcatttgtgacataaatcctaaacttggttttgattggaggatcaatggaagtgtataattaattggtcattttggttgag

SEQ ID NO: 574747 - DNA, 120 bp, Artificial Sequence
  ENSG00000171262_45 (sequence is synthesized)
gcagttgcttttttactttctttcctgaaaggcagtagcaggaagctattggcttccccttgtctgtggtgagcagatgacacccttcttattgctatctttcctctgctcatggcatat

SEQ ID NO: 574748 - DNA, 120 bp, Artificial Sequence
  ENSG00000171262_46 (sequence is synthesized)
aaagctgctactttttatagaaggttggatacttaaactcttccctagtttatttttgaaaggattataaagcatagtaaaggaattatattaactgtgttttccttttaataatatggt

SEQ ID NO: 574749 - DNA, 120 bp, Artificial Sequence
  ENSG00000171262_47 (sequence is synthesized)
actagtatcatcactgaaagtaagtgagcttaagtttcttaaaagaagcagttcattgagaatccttctctctctttgcagtgatacctggaattatagtttttatatcaatctctgacc

SEQ ID NO: 574750 - DNA, 120 bp, Artificial Sequence
  ENSG00000171262_48 (sequence is synthesized)
tcattaaggtcccatgttatatgtacttcatacatttttgaaatgaaatgtgcttaggaatataatcttttattggataatcaattaccaaatcaatggcaatggaaagtccagagttgt

SEQ ID NO: 574751 - DNA, 120 bp, Artificial Sequence
  ENSG00000171262_49 (sequence is synthesized)
tattgtataaatggatattaagttaatgaatgtaaggtatgtcgttatatatataaaaaatgttttcctaaaagaacttcttagtgaaatgggtactacatttgttacagaatttgctaa

SEQ ID NO: 574752 - DNA, 120 bp, Artificial Sequence
  ENSG00000171262_50 (sequence is synthesized)
tttgttacagaatttgctaaacaaatttaagtgagaaaaaaattaagcctttaagtttcagaaatactctctcagattgtttaaaaataatatattctaggctgggtgtggtggctcatg

SEQ ID NO: 574753 - DNA, 120 bp, Artificial Sequence
  ENSG00000171262_51 (sequence is synthesized)
ttttccccaaaattcaactgaatggtaacatgtaagtgctatattaaaaatgaaactattccctataattatgaggtatacattttatttcaagagtttatcttcatataaacccagttt

SEQ ID NO: 574754 - DNA, 120 bp, Artificial Sequence
  ENSG00000171262_52 (sequence is synthesized)
tggattcagacttaacaggcatgtgacctaatctgtcagtagctgatattcaggaatcaaatcttaatgagttactggccttcagctttgccagagtttaccatgatagaaatcacttag

SEQ ID NO: 574755 - DNA, 120 bp, Artificial Sequence
  ENSG00000171291_0 (sequence is synthesized)
agattgcaccattgtactccagcctgggcaataagagtgaaattctgtctcaaaaaaataaaaaaaaaaattgctttatggaagaaagtaagtatagacagagagaaagggatctgatga

SEQ ID NO: 574756 - DNA, 120 bp, Artificial Sequence
  ENSG00000171291_1 (sequence is synthesized)
tctgatgaccaaagcagggaataaatgtttggagtccacggcatcctgagaacttcttgggaatagagtctaggcccccaatgctgtcactctcacccatcctcctctacacatgtgaga

SEQ ID NO: 574757 - DNA, 120 bp, Artificial Sequence
  ENSG00000171291_2 (sequence is synthesized)
tgtttcaggacccagtggcttttaaggatgtggctgtgaacttcacccaggaggagtgggctttgctggatatttcccagaagaatctctacagggaagtgatgctggaaactttctgga

SEQ ID NO: 574758 - DNA, 120 bp, Artificial Sequence
  ENSG00000171291_3 (sequence is synthesized)
acctgacctctataggaaaaaagtggaaagaccagaacattgaatatgagtaccaaaaccccaggagaaacttcaggagtgtcacagaagagaaagtcaatgaaattaaagaagacagtc

SEQ ID NO: 574759 - DNA, 120 bp, Artificial Sequence
  ENSG00000171291_4 (sequence is synthesized)
attgtggagaaacttttaccccagttccagatgacaggctgaacttccagaagaagaaagcttctcctgaagtaaaatcatgtgacagctttgtgtgtgaagttggcctaggtaactcat

SEQ ID NO: 574760 - DNA, 120 bp, Artificial Sequence
  ENSG00000171291_5 (sequence is synthesized)
cttctaatatgaacatcagaggtgacactggacacaaggcatgtgaatgtcaggaatatggaccaaagccatggaagagtcaacaacctaaaaaagccttcagatatcacccctccttga

SEQ ID NO: 574761 - DNA, 120 bp, Artificial Sequence
  ENSG00000171291_6 (sequence is synthesized)
gaacacaagaaagggatcacactggaaagaaaccctatgcttgtaaagaatgtggaaaaaacattatttaccattcaagcattcaaagacacatggtagtgcacagtggggatggacctt

SEQ ID NO: 574762 - DNA, 120 bp, Artificial Sequence
  ENSG00000171291_7 (sequence is synthesized)
acacatggtagtgcacagtggggatggaccttataaatgtaagttttgtgggaaagcattccattgtctcagtttatatcttatccatgaaagaactcacactggagagaaaccgtatga

SEQ ID NO: 574763 - DNA, 120 bp, Artificial Sequence
  ENSG00000171291_8 (sequence is synthesized)
ctgctacccatcgaatacatgaaagaactcacattggagaaaagccttatgaatgtcaggaatgtgggaaagcattccatagtcccagatcctgtcacagacatgaaaggagtcacatgg

SEQ ID NO: 574764 - DNA, 120 bp, Artificial Sequence
  ENSG00000171291_9 (sequence is synthesized)
gagagaaggcttatcaatgtaaggaatgtggaaaagcattcatgtgtccccgttatgttcgtagacatgaaaggacccactctaggaaaaaactttatgaatgtaagcagtgtgggaaag

SEQ ID NO: 574765 - DNA, 120 bp, Artificial Sequence
  ENSG00000171291_10 (sequence is synthesized)
catttcaaagacatgaaaaaactcacagtggagagaaaccgtataaatgcaagcaatgtggtaaagccttcactcgttccggttcctttcgatatcatgaaaggactcacactggagaga

SEQ ID NO: 574766 - DNA, 120 bp, Artificial Sequence
  ENSG00000171291_11 (sequence is synthesized)
gagtgtaagcaatgtgggaaagccttcagatctgccccaaatcttcaattgcatggtaggactcacactggagagaaaccgtatcaatgtaaggaatgtgggaaagctttcagatctgcc

SEQ ID NO: 574767 - DNA, 120 bp, Artificial Sequence
  ENSG00000171291_12 (sequence is synthesized)
acactggagagaaaccctatgaatgtaagaaatgtgggaaagccttcagatatgtccagaactttcgatttcatgaaaggacacaaacacataagaatgcactctggagaaagaccttat

SEQ ID NO: 574768 - DNA, 120 bp, Artificial Sequence
  ENSG00000171291_13 (sequence is synthesized)
aaacacataagaatgcactctggagaaagaccttataaatataagatatatgggaaacacttttattctgccaagttatttcaaacacatgaaaaaattcacactggagagaaaccctat

SEQ ID NO: 574769 - DNA, 120 bp, Artificial Sequence
  ENSG00000171291_14 (sequence is synthesized)
aaatgcaagcaatgtggtaaagccttaattgttccagttcctttcgatatctaaaaggactcacagtggagaaaaactctatgagtgtaagcaatgtgggaaagtcttcagatctgtcaa

SEQ ID NO: 574770 - DNA, 120 bp, Artificial Sequence
  ENSG00000171291_15 (sequence is synthesized)
gaacctttcaatttatgaaaggacacacactggagagaaaccctatgaatgtaagaaatgtggaaaagcgttccataatttctcttcttttcaaatacatgaaagttgcacagaggagag

SEQ ID NO: 574771 - DNA, 120 bp, Artificial Sequence
  ENSG00000171291_16 (sequence is synthesized)
gcgccctaagaatgtaagcattgtgggaaagcattcatatctgccaagatcgtttgaatacatgcaaaacacacactggagagaaacctatgaatgtaaggaatgcaaacaagcattcaa

SEQ ID NO: 574772 - DNA, 120 bp, Artificial Sequence
  ENSG00000171291_17 (sequence is synthesized)
ttatttttcttccttgcatatacatgaaaggactcatacgagagagaatccgtatgaatgtaaggattgtgggaaagcattcagcttgcttaattgctttcatagacatgtaaagacaca

SEQ ID NO: 574773 - DNA, 120 bp, Artificial Sequence
  ENSG00000171291_18 (sequence is synthesized)
ccagaaggaaaccctatgaatgtaagcaatgtggcaaaagctttcacttcttccagttcttttcaatatcatgaaaggactcacactggggagaaaccgtatcaatgtaagcaatgtggg

SEQ ID NO: 574774 - DNA, 120 bp, Artificial Sequence
  ENSG00000171291_19 (sequence is synthesized)
aaagccgtcagatcagcctcaagacttcaaatgcatggaagcactcacacttggcagaaactctatgaatgtaagcagtatgggaaagccttcagatcggctaggattctttgaatacaa

SEQ ID NO: 574775 - DNA, 120 bp, Artificial Sequence
  ENSG00000171291_20 (sequence is synthesized)
ccttcagatcggctaggattctttgaatacaaataatgaatgtaaacaattaactgtttataataactgtatactaacaaatgttattctttttaaataattaagaagctataataaaat

SEQ ID NO: 574776 - DNA, 120 bp, Artificial Sequence
  ENSG00000171291_21 (sequence is synthesized)
gccgtcacctttgtcgctgcgagggcggcggttgggatctggcctttccagccccgagagggacctagtgcctctacccagatttctgtcgctctgtcacctgcgctatgccctgcttta

SEQ ID NO: 574777 - DNA, 120 bp, Artificial Sequence
  ENSG00000171291_22 (sequence is synthesized)
tggacagcagagaaaggatagacccatcacacccgagtcaagaaagcaccgccacccccaaagtcgtaggccattattccaggggaaaaccccctcaaactaaagctaagaaaaatttaa

SEQ ID NO: 574778 - DNA, 120 bp, Artificial Sequence
  ENSG00000171291_23 (sequence is synthesized)
ggccgctggatgtgggtgggccggcagccgggactccgggcgtcctgtcccgtccctgcccgtcgactgcggccttggccccgaagcccttttgtgcagctccgcgcccgcagcccgacg

SEQ ID NO: 574779 - DNA, 120 bp, Artificial Sequence
  ENSG00000171291_24 (sequence is synthesized)
ccccagcttgtgcgggggccacgggagggtcatgcgcggatttcgactcgggtgtggatttcgtccgtaggaggagcagcggtctgtggggcccacagcctccactttctcctgttaaaa

SEQ ID NO: 574780 - DNA, 120 bp, Artificial Sequence
  ENSG00000171291_25 (sequence is synthesized)
aaagttcatttgaggaaacagccattcacgaatgagaaacacccggtcctggcttgtggtttgtcaacggaaaaaaaacagactatgtaaaatacagaagtgtattcagagccgagtagg

SEQ ID NO: 574781 - DNA, 120 bp, Artificial Sequence
  ENSG00000171291_26 (sequence is synthesized)
agagaccttggccgagggaaacacaaccccaagcagcctggagtaagtggtccggaggcggctcaggacagtttggttttattcatttcagagagacaggaattgcagggaaaatgatgg

SEQ ID NO: 574782 - DNA, 120 bp, Artificial Sequence
  ENSG00000171291_27 (sequence is synthesized)
atcaaggctggaaggtgtaaattccattggcagaaagggtgggacctgtggaaggggggttaggaggcacaggtggttgagggattctgtaggtggcagctggttgagagtgtgaagctt

SEQ ID NO: 574783 - DNA, 120 bp, Artificial Sequence
  ENSG00000171291_28 (sequence is synthesized)
tgtctaaagtttggaggaggtaggaaggaatgctgaaggaagggggtctgttatctgccacttcattccatcccagccaaaaaacagtcctgtttctctagattttatgaattctaagac

SEQ ID NO: 574784 - DNA, 120 bp, Artificial Sequence
  ENSG00000171291_29 (sequence is synthesized)
gaatgtgcgtcagttgctgcatgtaaactcctaaagggagagggtataaggagacctgtctcacctcccatcctgtcatacagaggcactcaattttcagggtgttttgggggttccctt

SEQ ID NO: 574785 - DNA, 120 bp, Artificial Sequence
  ENSG00000171291_30 (sequence is synthesized)
ggcactcaattttcagggtgttttgggggttcccttggccaagagccagtcacttcacttagctgggaaggtactttgtttgtttttgtttttgtttgagacggagtctccttctgtcgc

SEQ ID NO: 574786 - DNA, 67 bp, Artificial Sequence
  ENSG00000171291_31 (sequence is synthesized)
tcgccatgccagaagatatgtttttatttttgttttacatgtttaaggctaggcttttataaggtac

SEQ ID NO: 574787 - DNA, 120 bp, Artificial Sequence
  ENSG00000171291_32 (sequence is synthesized)
ttttgttttacatgtttaaggctaggcttttataaggtacatgaggagacaaaccagataaatgcttgattggttgcagagatgcagtcgccttatttggacttgtcaaccggaaataat

SEQ ID NO: 574788 - DNA, 120 bp, Artificial Sequence
  ENSG00000171291_33 (sequence is synthesized)
caaaaggttcagatttcagttggaagagtttattcaagcagaaagatagcaatgaccaaaacacagactccagaaaaatggactcagtactccaaaattggaagttatgttcttgcttat

SEQ ID NO: 574789 - DNA, 120 bp, Artificial Sequence
  ENSG00000171291_34 (sequence is synthesized)
attactgaaaaaagaggtcctgatcagaccccaagagagttcttggatctcacacaggaaggaattcaagacgagtcacaaagtgcagtgcgaagagagtttattgaaagctactctggg

SEQ ID NO: 574790 - DNA, 120 bp, Artificial Sequence
  ENSG00000171291_35 (sequence is synthesized)
aagtgcagtgcgaagagagtttattgaaagctactctgggccagcatgatggcttaggcctgtaatccaagcactttgggaggcccaggcgagaggatcacttgagctcaggagttcgag

SEQ ID NO: 574791 - DNA, 120 bp, Artificial Sequence
  ENSG00000171291_36 (sequence is synthesized)
tagcgaaaccccgtctcttccaaaaataagaaaaattagccggatgtggtggcctgtgcctgtagtctcagttactcaggaggctgaggtgggacaatcacttgaacctgggaggcagag

SEQ ID NO: 574792 - DNA, 120 bp, Artificial Sequence
  ENSG00000171295_0 (sequence is synthesized)
gccctccgtccattcctttagtgctgcgccgacagcggtcaggatctcggctttcttgcttcgagagggactaggtgcctccaccagagcttctgtcgctctgtaacctgcactgtgacc

SEQ ID NO: 574793 - DNA, 120 bp, Artificial Sequence
  ENSG00000171295_1 (sequence is synthesized)
tacactagtcgcgggagccacgcagaggacgccggaacaccctggaagccgagaaatggacccagtggcttttaaggatgtggctgtgaacttcacccaggaggagtgggctttgctgga

SEQ ID NO: 574794 - DNA, 120 bp, Artificial Sequence
  ENSG00000171295_2 (sequence is synthesized)
tatttcccagaggaaactctacagggaagtgatgctggaaactttcaggaacctgacctctttaggaaaaaggtggaaagaccagaacattgaatatgagcaccaaaaccccaggagaaa

SEQ ID NO: 574795 - DNA, 120 bp, Artificial Sequence
  ENSG00000171295_3 (sequence is synthesized)
cttcaggagtctcatagaagaaaaagtcaatgaaattaaagatgacagtcattgtggagaaacttttaccccagttccagatgacagactgaacttccaggagaagaaagcttctcctga

SEQ ID NO: 574796 - DNA, 120 bp, Artificial Sequence
  ENSG00000171295_4 (sequence is synthesized)
agtaaaatcatgtgaaagctttgtgtgtggagaagttggcctaggtaactcatcttttaatatgaacatcagaggtgacattggacacaaggcatatgagtatcaggaatatggaccaaa

SEQ ID NO: 574797 - DNA, 120 bp, Artificial Sequence
  ENSG00000171295_5 (sequence is synthesized)
gccatgtaagtgtcaacaacctaaaaaagccttcagataccgcccctcctttagaacacaagaaagggatcacactggagagaaacccaatgcttgtaaagtatgtggaaaaacctttat

SEQ ID NO: 574798 - DNA, 120 bp, Artificial Sequence
  ENSG00000171295_6 (sequence is synthesized)
ttcccattcaagtgttcgaagacacatggtaatgcacagtggggatggaccttataaatgtaagttttgtgggaaagcattccattgtctcagattatatcttatccatgaaagaattca

SEQ ID NO: 574799 - DNA, 120 bp, Artificial Sequence
  ENSG00000171295_7 (sequence is synthesized)
cactggagagaaaccatgtgaatgtaaacagtgtggtaaatcctttagttattctgctacccatcgaatacataaaagaactcacactggagaaaagccttatgaatatcaggagtgtgg

SEQ ID NO: 574800 - DNA, 120 bp, Artificial Sequence
  ENSG00000171295_8 (sequence is synthesized)
gaaagcatttcatagtcccagatcctatcgtagacatgaaaggattcacatgggagaaaaggcttatcaatgtaaggaatgtggaaaagcattcacgtgtccccgttatgttcgtataca

SEQ ID NO: 574801 - DNA, 120 bp, Artificial Sequence
  ENSG00000171295_9 (sequence is synthesized)
tgaaaggacccactctaggaaaaatctctatgaatgtaagcagtgtgggaaagcattatcctctcttacaagttttcaaacacacgtaagattgcactctggagaaagaccttatgaatg

SEQ ID NO: 574802 - DNA, 120 bp, Artificial Sequence
  ENSG00000171295_10 (sequence is synthesized)
taagatatgtggaaaagacttttgttctgtgaattcatttcaaagacatgaaaaaattcacagtggagagaaaccctataaatgtaagcagtgtggtaaagccttccctcattccagttc

SEQ ID NO: 574803 - DNA, 62 bp, Artificial Sequence
  ENSG00000171295_11 (sequence is synthesized)
agatctgcctcacaccttcgagtgcatggtaggactcacactggagagaaaccgtatgaatg

SEQ ID NO: 574804 - DNA, 120 bp, Artificial Sequence
  ENSG00000171295_12 (sequence is synthesized)
accgtatgaatgtaaggaatgtgggaaagccttcagatatgtgaataaccttcaaagtcatgaaaggacacaaacacacataagaatacactctggagaaagacgttataaatgtaagat

SEQ ID NO: 574805 - DNA, 120 bp, Artificial Sequence
  ENSG00000171295_13 (sequence is synthesized)
atgtgggaaaggcttttattgtcccaaatcatttcaaagacatgaaaaaactcacactggagagaaactctatgaatgcaagcaacgttcagtagttccttcagtagttccagttccttt

SEQ ID NO: 574806 - DNA, 120 bp, Artificial Sequence
  ENSG00000171295_14 (sequence is synthesized)
tgatatcatgaaaggactcacactggagagaagccctataaatgcgagcaatgtgggaaagccttcagagctgtgtcaatcctttgaatgcatggtaggactcaccctgaagagaaaccc

SEQ ID NO: 574807 - DNA, 120 bp, Artificial Sequence
  ENSG00000171295_15 (sequence is synthesized)
tatgagtgtgagcaatgacggaaagccttcagatctgccccacacctttgaatacgtggtaggacacacaatggagagaagccctatgcatgtaaggaatgtgggaaacccttcggatct

SEQ ID NO: 574808 - DNA, 120 bp, Artificial Sequence
  ENSG00000171295_16 (sequence is synthesized)
gcccagaaccttcgaattcatgaaaggacacaaacacacataatgcactctgtagagagaccttataaatgtaagatatgtgggaggggcttttattctgccaagtcatttcaaatacat

SEQ ID NO: 574809 - DNA, 120 bp, Artificial Sequence
  ENSG00000171295_17 (sequence is synthesized)
agtgtaagcaatgtgggaaagcctttgtttccttcacttcctttcgatatcatgaaaggactcacactggagagaacccctatgagtgtaagcaatttgggaaagccttcagatctgtca

SEQ ID NO: 574810 - DNA, 120 bp, Artificial Sequence
  ENSG00000171295_18 (sequence is synthesized)
gccttcagatctgtcaaaaatcttcgatttcataaaaggacacacactggagagaaaccctgtgaatgtaagaaatgtagaaaagcattccataatttctcttctttgcaaatacatgaa

SEQ ID NO: 574811 - DNA, 120 bp, Artificial Sequence
  ENSG00000171295_19 (sequence is synthesized)
aggatgcacagaggagagaagctctgtgaatgtaagcattgtgggaaagcattcatatctgccaagatcctttgaatacatgcaagaacacacaatggagagaaaccctatgaatgtaaa

SEQ ID NO: 574812 - DNA, 120 bp, Artificial Sequence
  ENSG00000171295_20 (sequence is synthesized)
gaatgcagaaaagcattcagcttgcctacttcctttcatagacatgaaaagactcacactggaaggaaacactatgaatgcaagcaatgtggcaaagctttcacttcttccagttctttt

SEQ ID NO: 574813 - DNA, 120 bp, Artificial Sequence
  ENSG00000171295_21 (sequence is synthesized)
caatatcatgaaagaacacactagggagaaaccctatcaatgtaagcaatgtgcaaaagcctttatttcttccacttcttttcaatatcatgaaaggactcacatgggagagaaacccta

SEQ ID NO: 574814 - DNA, 120 bp, Artificial Sequence
  ENSG00000171295_22 (sequence is synthesized)
tgagtgtatgccaagtgggaaagccttcatttcttctagttcccttcaatatcatgaaaggactcacactggagagaagccctatgaatataagcaatgtgggaaagccttcagatcagc

SEQ ID NO: 574815 - DNA, 120 bp, Artificial Sequence
  ENSG00000171295_23 (sequence is synthesized)
ctcgcaccttcaaatgcatggaaggactcacactggagaaaaaccctatgaatgtaagcagtatgggaaagcgttcagacctgacaagattctttgaatacagataatgaatgtaaacaa

SEQ ID NO: 574816 - DNA, 120 bp, Artificial Sequence
  ENSG00000171295_24 (sequence is synthesized)
ttaactgtttataataactgtatactaacaaatgatattctttttaaataagaagctataatatcccattggtgtcatgtattagatcagccttatactgttaaattgttattatttgga

SEQ ID NO: 574817 - DNA, 120 bp, Artificial Sequence
  ENSG00000171295_25 (sequence is synthesized)
cattgtgagtcagtataaccatgtggataaaatgccagacatctttttattcgaaaattttacttttcatgcttctgtacttacatttttatctcaaccttaatttttctttcttttttt

SEQ ID NO: 574818 - DNA, 120 bp, Artificial Sequence
  ENSG00000171295_26 (sequence is synthesized)
ccaaaatgctgggattacagacatgaaccatcatgcccagctgcaaccctaatttttcattcagtcataataccaatagttatctcatgcacctctgagtgccttcttccccaaaaccag

SEQ ID NO: 574819 - DNA, 120 bp, Artificial Sequence
  ENSG00000171295_27 (sequence is synthesized)
aaaaccagcagtgccatacctgctgtcagcaagggtgtaatataccatagtgataaatatgaccaaaagccataaatgactgtgagatgtatgagaattacaagtcacattagtaagaag

SEQ ID NO: 574820 - DNA, 120 bp, Artificial Sequence
  ENSG00000171295_28 (sequence is synthesized)
agaaaaattttggtcatgtttatgatttgaaatacgttttcctctatcacatttaaaaatatagttacaaaatgcccttgtttttgtcctgattcatcatggtcactgaggagcatcgtc

SEQ ID NO: 574821 - DNA, 89 bp, Artificial Sequence
  ENSG00000171295_29 (sequence is synthesized)
tttttgtcctgattcatcatggtcactgaggagcatcgtctcatatgcctggtatgtgacacgtgtctctccaacaataaaagacttgg

SEQ ID NO: 574822 - DNA, 120 bp, Artificial Sequence
  ENSG00000171295_30 (sequence is synthesized)
ccgtctctactaaaaatacaaaagttagcagggcgtggtggcatgctcctgtaatcctagctattcaggaggctgacataggagaattgcttgaatataggaagcagaggttgcagtgag

SEQ ID NO: 574823 - DNA, 65 bp, Artificial Sequence
  ENSG00000171295_31 (sequence is synthesized)
tgagccgagcacaaaaaaagacttggccttagggccgagtgcggtggctcacgcctataatccca

SEQ ID NO: 574824 - DNA, 120 bp, Artificial Sequence
  ENSG00000171295_32 (sequence is synthesized)
tgaacccaggaggcggcggttgcagtcagccaagacggcgtcactccagcctggcaacagagccagactccatctcaaaacaacaacaacgattcacgaatgagaaacacccagtcctgg

SEQ ID NO: 574825 - DNA, 120 bp, Artificial Sequence
  ENSG00000171295_33 (sequence is synthesized)
acccagtcctggcttgtggtttgtcaacggaaaaagccaagctatgtaaaataaagaagtttattaggagccgaataggagagccgttggccgagggaaacacaaccccaagcagcctgg

SEQ ID NO: 574826 - DNA, 120 bp, Artificial Sequence
  ENSG00000171295_34 (sequence is synthesized)
taggtgcctccaccagagcttctgtcgctctgtaacctgcactgtgacctacactagtcgcgggagccacgcagaggacgccggaacaccctggaagccgagaaatgatgtttcaggacc

SEQ ID NO: 574827 - DNA, 120 bp, Artificial Sequence
  ENSG00000171295_35 (sequence is synthesized)
ggccgagggaaacacaaccccaagcagcctggagtaagtggtcccgaggcagctcaagacagtttggttttattcatttcagagagacaggaattgcagggaaaatcatgaatcagtgcc

SEQ ID NO: 574828 - DNA, 120 bp, Artificial Sequence
  ENSG00000171295_36 (sequence is synthesized)
tggaaggtgtaagttccattggcagaaagggtgggacctgtggaaggggggttagaaggcacaggtagttgagggattctgtaggtggcagctggttgagagtgttgaatctttgtctaa

SEQ ID NO: 574829 - DNA, 120 bp, Artificial Sequence
  ENSG00000171295_37 (sequence is synthesized)
agtttggaggaggtaggaaggaatgctgaaggaagggggtctgttatctgccacttcattccatcccagccaaaaaacagacctgtttctcgagattttatgaattctaaggcgtaactt

SEQ ID NO: 574830 - DNA, 120 bp, Artificial Sequence
  ENSG00000171295_38 (sequence is synthesized)
tacctttgccttgcgtggccttaggtcttgtttgtaatttggtatcttgttgccacaaggagtctgtttttccagtcagataatgtctgtttttacatgaatgtgcgtcagttgctgcat

SEQ ID NO: 574831 - DNA, 120 bp, Artificial Sequence
  ENSG00000171295_39 (sequence is synthesized)
gtaaactcctaaagggagagggtataaggagacctgtctcacctcccatcctgtcatacagaggcactcaattttcagggttttttgggggttcccttggccaagagccagtcacttcac

SEQ ID NO: 574832 - DNA, 120 bp, Artificial Sequence
  ENSG00000171295_40 (sequence is synthesized)
gagccagtcacttcacttagctgggaaggtactttgtttttgtttttgtttgagacagagtctcctgtagcccagggtggtgtgcagtggctctatcttggctcactgcaacctccacct

SEQ ID NO: 574833 - DNA, 89 bp, Artificial Sequence
  ENSG00000171295_41 (sequence is synthesized)
ttgtgtgagccacctcaccaggccagaaggtatgtttttatttttagtttacaggttgaaggctggacttttataaggtacatgaggag

SEQ ID NO: 574834 - DNA, 120 bp, Artificial Sequence
  ENSG00000171295_42 (sequence is synthesized)
tacaggttgaaggctggacttttataaggtacatgaggagacaaaccagataaatgcttgattggttgcagagatgcagtcaccttatttggacttgtcaacccgaaataatcgaaagtt

SEQ ID NO: 574835 - DNA, 120 bp, Artificial Sequence
  ENSG00000171295_43 (sequence is synthesized)
tcagatttcaactggaagagtttattcaagcaaaaagatagcaatggcccatttgggaaaaacacagactccagagaaatggactcagtactccaaaattggaagttaagttcttgctta

SEQ ID NO: 574836 - DNA, 120 bp, Artificial Sequence
  ENSG00000171295_44 (sequence is synthesized)
tattactgggaaaagaggtcctgatcagatcccaagagagttcttggatctcatacaggaaggaattcaagacgagtcggaaagtacagtgcaaagagagtttattgaaagctactctgg

SEQ ID NO: 574837 - DNA, 69 bp, Artificial Sequence
  ENSG00000171295_45 (sequence is synthesized)
aaagtacagtgcaaagagagtttattgaaagctactctgggccagcatgatggcttaggcctgtaatct

SEQ ID NO: 574838 - DNA, 89 bp, Artificial Sequence
  ENSG00000171295_46 (sequence is synthesized)
gaccagcctgggcaatatagtgaaaccccatctcttccaaaaataacaaaaattagccgggtgtggtggcctgatgggacaatcacttg

SEQ ID NO: 574839 - DNA, 120 bp, Artificial Sequence
  ENSG00000171295_47 (sequence is synthesized)
cactgcactccagcttgggtaacagagtgagaccccatctcaaaaaacaaaaacaaaacaaacaaacaagacagagttcaagaccaacgtggccaacacagtgagaccctgtctctattt

SEQ ID NO: 574840 - DNA, 66 bp, Artificial Sequence
  ENSG00000171295_48 (sequence is synthesized)
tgtaatcttagctactcaggaggctgaggaagaagaagtgctagaaccccaaaaaaacaagttgct

SEQ ID NO: 574841 - DNA, 120 bp, Artificial Sequence
  ENSG00000171295_49 (sequence is synthesized)
aaacaagttgctttgtggaagaaagtaagtatacacagggagaaagagatctgatgaccaaagcagggaatacgtgtttggagtccacggcatcctgagaacttcttgggaatagagtct

SEQ ID NO: 574842 - DNA, 80 bp, Artificial Sequence
  ENSG00000171298_0 (sequence is synthesized)
cggggctgcggggcttccctgagcgcgggccgggtcggtggggcggtcggctgcccgcgcggcctctcagttgggaaagc

SEQ ID NO: 574843 - DNA, 120 bp, Artificial Sequence
  ENSG00000171298_1 (sequence is synthesized)
tctcagttgggaaagctgaggttgtcgccggggccgcgggtggaggtcggggatgaggcagcaggtaggacagtgacctcggtgacgcgaaggaccccggccacctctaggttctcctcg

SEQ ID NO: 574844 - DNA, 120 bp, Artificial Sequence
  ENSG00000171298_2 (sequence is synthesized)
tccgcccgttgttcagcgagggaggctctgcgcgtgccgcagctgacggggaaactgaggcacggagcgggcctgtaggagctgtccaggccatctccaaccatgggagtgaggcacccg

SEQ ID NO: 574845 - DNA, 120 bp, Artificial Sequence
  ENSG00000171298_3 (sequence is synthesized)
ccctgctcccaccggctcctggccgtctgcgccctcgtgtccttggcaaccgctgcactcctggggcacatcctactccatgatttcctgctggttccccgagagctgagtggctcctcc

SEQ ID NO: 574846 - DNA, 120 bp, Artificial Sequence
  ENSG00000171298_4 (sequence is synthesized)
ccagtcctggaggagactcacccagctcaccagcagggagccagcagaccagggccccgggatgcccaggcacaccccggccgtcccagagcagtgcccacacagtgcgacgtccccccc

SEQ ID NO: 574847 - DNA, 120 bp, Artificial Sequence
  ENSG00000171298_5 (sequence is synthesized)
aacagccgcttcgattgcgcccctgacaaggccatcacccaggaacagtgcgaggcccgcggctgttgctacatccctgcaaagcaggggctgcagggagcccagatggggcagccctgg

SEQ ID NO: 574848 - DNA, 120 bp, Artificial Sequence
  ENSG00000171298_6 (sequence is synthesized)
tgcttcttcccacccagctaccccagctacaagctggagaacctgagctcctctgaaatgggctacacggccaccctgacccgtaccacccccaccttcttccccaaggacatcctgacc

SEQ ID NO: 574849 - DNA, 120 bp, Artificial Sequence
  ENSG00000171298_7 (sequence is synthesized)
ctgcggctggacgtgatgatggagactgagaaccgcctccacttcacgatcaaagatccagctaacaggcgctacgaggtgcccttggagaccccgcatgtccacagccgggcaccgtcc

SEQ ID NO: 574850 - DNA, 120 bp, Artificial Sequence
  ENSG00000171298_8 (sequence is synthesized)
ccactctacagcgtggagttctccgaggagcccttcggggtgatcgtgcgccggcagctggacggccgcgtgctgctgaacacgacggtggcgcccctgttctttgcggaccagttcctt

SEQ ID NO: 574851 - DNA, 120 bp, Artificial Sequence
  ENSG00000171298_9 (sequence is synthesized)
cagctgtccacctcgctgccctcgcagtatatcacaggcctcgccgagcacctcagtcccctgatgctcagcaccagctggaccaggatcaccctgtggaaccgggaccttgcgcccacg

SEQ ID NO: 574852 - DNA, 120 bp, Artificial Sequence
  ENSG00000171298_10 (sequence is synthesized)
cccggtgcgaacctctacgggtctcaccctttctacctggcgctggaggacggcgggtcggcacacggggtgttcctgctaaacagcaatgccatggatgtggtcctgcagccgagccct

SEQ ID NO: 574853 - DNA, 120 bp, Artificial Sequence
  ENSG00000171298_11 (sequence is synthesized)
gcccttagctggaggtcgacaggtgggatcctggatgtctacatcttcctgggcccagagcccaagagcgtggtgcagcagtacctggacgttgtgggatacccgttcatgccgccatac

SEQ ID NO: 574854 - DNA, 120 bp, Artificial Sequence
  ENSG00000171298_12 (sequence is synthesized)
tggggcctgggcttccacctgtgccgctggggctactcctccaccgctatcacccgccaggtggtggagaacatgaccagggcccacttccccctggacgtccagtggaacgacctggac

SEQ ID NO: 574855 - DNA, 120 bp, Artificial Sequence
  ENSG00000171298_13 (sequence is synthesized)
tacatggactcccggagggacttcacgttcaacaaggatggcttccgggacttcccggccatggtgcaggagctgcaccagggcggccggcgctacatgatgatcgtggatcctgccatc

SEQ ID NO: 574856 - DNA, 120 bp, Artificial Sequence
  ENSG00000171298_14 (sequence is synthesized)
agcagctcgggccctgccgggagctacaggccctacgacgagggtctgcggaggggggttttcatcaccaacgagaccggccagccgctgattgggaaggtatggcccgggtccactgcc

SEQ ID NO: 574857 - DNA, 120 bp, Artificial Sequence
  ENSG00000171298_15 (sequence is synthesized)
cctggtgggaggacatggtggctgagttccatgaccaggtgcccttcgacggcatgtggattgacatgaacgagccttccaacttcatcaggggctctgaggacggctgccccaacaatg

SEQ ID NO: 574858 - DNA, 120 bp, Artificial Sequence
  ENSG00000171298_16 (sequence is synthesized)
agctggagaacccaccctacgtgcctggggtggttggggggaccctccaggcggccaccatctgtgcctccagccaccagtttctctccacacactacaacctgcacaacctctacggcc

SEQ ID NO: 574859 - DNA, 120 bp, Artificial Sequence
  ENSG00000171298_17 (sequence is synthesized)
tgaccgaagccatcgcctcccacagggcgctggtgaaggctcgggggacacgcccatttgtgatctcccgctcgacctttgctggccacggccgatacgccggccactggacgggggacg

SEQ ID NO: 574860 - DNA, 120 bp, Artificial Sequence
  ENSG00000171298_18 (sequence is synthesized)
tgtggagctcctgggagcagctcgcctcctccgtgccagaaatcctgcagtttaacctgctgggggtgcctctggtcggggccgacgtctgcggcttcctgggcaacacctcagaggagc

SEQ ID NO: 574861 - DNA, 120 bp, Artificial Sequence
  ENSG00000171298_19 (sequence is synthesized)
tgtgtgtgcgctggacccagctgggggccttctaccccttcatgcggaaccacaacagcctgctcagtctgccccaggagccgtacagcttcagcgagccggcccagcaggccatgagga

SEQ ID NO: 574862 - DNA, 120 bp, Artificial Sequence
  ENSG00000171298_20 (sequence is synthesized)
aggccctcaccctgcgctacgcactcctcccccacctctacacactgttccaccaggcccacgtcgcgggggagaccgtggcccggcccctcttcctggagttccccaaggactctagca

SEQ ID NO: 574863 - DNA, 120 bp, Artificial Sequence
  ENSG00000171298_21 (sequence is synthesized)
cctggactgtggaccaccagctcctgtggggggaggccctgctcatcaccccagtgctccaggccgggaaggccgaagtgactggctacttccccttgggcacatggtacgacctgcaga

SEQ ID NO: 574864 - DNA, 120 bp, Artificial Sequence
  ENSG00000171298_22 (sequence is synthesized)
cggtgccagtagaggcccttggcagcctcccacccccacctgcagctccccgtgagccagccatccacagcgaggggcagtgggtgacgctgccggcccccctggacaccatcaacgtcc

SEQ ID NO: 574865 - DNA, 120 bp, Artificial Sequence
  ENSG00000171298_23 (sequence is synthesized)
acctccgggctgggtacatcatccccctgcagggccctggcctcacaaccacagagtcccgccagcagcccatggccctggctgtggccctgaccaagggtggggaggcccgaggggagc

SEQ ID NO: 574866 - DNA, 120 bp, Artificial Sequence
  ENSG00000171298_24 (sequence is synthesized)
tgttctgggacgatggagagagcctggaagtgctggagcgaggggcctacacacaggtcatcttcctggccaggaataacacgatcgtgaatgagctggtacgtgtgaccagtgagggag

SEQ ID NO: 574867 - DNA, 120 bp, Artificial Sequence
  ENSG00000171298_25 (sequence is synthesized)
ctggcctgcagctgcagaaggtgactgtcctgggcgtggccacggcgccccagcaggtcctctccaacggtgtccctgtctccaacttcacctacagccccgacaccaaggtcctggaca

SEQ ID NO: 574868 - DNA, 120 bp, Artificial Sequence
  ENSG00000171298_26 (sequence is synthesized)
tctgtgtctcgctgttgatgggagagcagtttctcgtcagctggtgttagccgggcggagtgtgttagtctctccagagggaggctggttccccagggaagcagagcctgtgtgcgggca

SEQ ID NO: 574869 - DNA, 120 bp, Artificial Sequence
  ENSG00000171298_27 (sequence is synthesized)
gcagctgtgtgcgggcctgggggttgcatgtgtcacctggagctgggcactaaccattccaagccgccgcatcgcttgtttccacctcctgggccggggctctggcccccaacgtgtcta

SEQ ID NO: 574870 - DNA, 120 bp, Artificial Sequence
  ENSG00000171298_28 (sequence is synthesized)
ggagagctttctccctagatcgcactgtgggccggggccctggagggctgctctgtgttaataagattgtaaggtttgccctcctcacctgttgccggcatgcgggtagtattagccacc

SEQ ID NO: 574871 - DNA, 120 bp, Artificial Sequence
  ENSG00000171298_29 (sequence is synthesized)
cccctccatctgttcccagcaccggagaagggggtgctcaggtggaggtgtggggtatgcacctgagctcctgcttcgcgcctgctgctctgccccaacgcgaccgctgcccggctgccc

SEQ ID NO: 574872 - DNA, 120 bp, Artificial Sequence
  ENSG00000171298_30 (sequence is synthesized)
agagggctggatgcctgccggtccccgagcaagcctgggaactcaggaaaattcacaggacttgggagattctaaatcttaagtgcaattatttttaataaaaggggcatttggaatcag

SEQ ID NO: 574873 - DNA, 120 bp, Artificial Sequence
  ENSG00000171298_31 (sequence is synthesized)
gctcacctacaggcatcaggtggcccagacagaggcaactgtgcccgcagacatgggcagtagcctcgccgtcctcctccccagcctctgcctcatcccagaaagctccttgctcccagc

SEQ ID NO: 574874 - DNA, 120 bp, Artificial Sequence
  ENSG00000171298_32 (sequence is synthesized)
tctgggggtctgcagagcccaggctccagcacccgcccagccctgtcttagaagcagtggagatgattacccaggttcccgggtaacgccagccccacagaggcgtggggagcggctgca

SEQ ID NO: 574875 - DNA, 120 bp, Artificial Sequence
  ENSG00000171298_33 (sequence is synthesized)
ggtgcacctccagggccagcctgaagaggcagcgacctgcacaggggctcctgggaggtggggggcagggagggcaccttggagcctgccgggaggaagctccctggaaaccagcccccg

SEQ ID NO: 574876 - DNA, 120 bp, Artificial Sequence
  ENSG00000171298_34 (sequence is synthesized)
acccgcctctgcgcgcccccgggcacgaccccggagtctccgcgggcggccagggcgcgcgtgcgcggaggcctgtaggagctgtccaggccatctccaaccatgggagtgaggcacccg

SEQ ID NO: 574877 - DNA, 120 bp, Artificial Sequence
  ENSG00000171298_35 (sequence is synthesized)
gacctgagtcctccaagtcctccggcaccttgagctccagagagcagaattcagcctcttcctgtgcctccccagggtgggcatatgagccagccccatcccattcatcacccgtatgcc

SEQ ID NO: 574878 - DNA, 120 bp, Artificial Sequence
  ENSG00000171298_36 (sequence is synthesized)
cggagtctccgcgggcggccagggcgcgcgtgcgcggaggttctcctcgtccgcccgttgttcagcgagggaggctctgcgcgtgccgcagctgacggggaaactgaggcacggagcggg

SEQ ID NO: 574879 - DNA, 120 bp, Artificial Sequence
  ENSG00000171298_37 (sequence is synthesized)
gacgtctgccccgcgctgccggcggtaacatcccagaagcgggtttgaacgtgcctagccgtgcccccagcctcttcccctgagcggagcttgagccccagacctctagtcctcccggtc

SEQ ID NO: 574880 - DNA, 120 bp, Artificial Sequence
  ENSG00000171298_38 (sequence is synthesized)
tttatctgagttcagcttagagatgaacggggagccgccctcctgtgctgggcttggggctggaggctgcatcttcccgtttctagggtttcctttccccttttgatcgacgcagtgctc

SEQ ID NO: 574881 - DNA, 120 bp, Artificial Sequence
  ENSG00000171298_39 (sequence is synthesized)
tctgaaatctgaatgtctcaatcacaaagacccccttaggccaggccaggggtgactgtctctggtctttgtccctggttgctggcacatagcacccgaaacccttggaaaccgagtgat

SEQ ID NO: 574882 - DNA, 120 bp, Artificial Sequence
  ENSG00000171298_40 (sequence is synthesized)
gagagagccttttgctcatgaggtgactgatgaccggggacaccaggtggcttcaggatggaagcagatggccagaaagaccaaggcctgatgacgggttgggatggaaaaggggtgagg

SEQ ID NO: 574883 - DNA, 120 bp, Artificial Sequence
  ENSG00000171298_41 (sequence is synthesized)
ggctggagattgagtgaatcaccagtggcttagtcaaccatgcctgcacaatggaaccccgtaagaaaccacagggatcagagggcttcccgccgggttgtggaacacaccaaggcactg

SEQ ID NO: 574884 - DNA, 120 bp, Artificial Sequence
  ENSG00000171298_42 (sequence is synthesized)
gagggtggtgcgagcagagagcacagcatcactgcccccacctcacaccaggccctacgcatctcttccatacggctgtctgagttttatcctttgtaataaaccagcaactgtaagaaa

SEQ ID NO: 574885 - DNA, 120 bp, Artificial Sequence
  ENSG00000171302_0 (sequence is synthesized)
agaggctgccgggaacgcgggcccagaggcggggcgagcgcgcgcggggcggaagtcggccaccttcctccgtcccggccgttagcccagccaagcccagccaagcccagccaagccccg

SEQ ID NO: 574886 - DNA, 120 bp, Artificial Sequence
  ENSG00000171302_1 (sequence is synthesized)
ccgatcgcgggcaccggagccagccccgcagcggagggaccacagagcaccagcctgcatggaacttccttcctcactcagcttcccacgttgccagctgggacaggggagatggagtaa

SEQ ID NO: 574887 - DNA, 120 bp, Artificial Sequence
  ENSG00000171302_2 (sequence is synthesized)
ttttgctgtggaaagacttcacgtcttgccgaatgaaagtaagcaaagatactgctagagtcgggaatctagagtcgggaattcattaagccaagggagtaagaatggccacagagtagt

SEQ ID NO: 574888 - DNA, 120 bp, Artificial Sequence
  ENSG00000171302_3 (sequence is synthesized)
gaaatactgtttcttctggaaaagtcagcctccagcgcctgcagcttccggaactaagatgtgactgggcttgcggaggcgctgactcctctcctccctccctggctgtgcaggtcccgc

SEQ ID NO: 574889 - DNA, 120 bp, Artificial Sequence
  ENSG00000171302_4 (sequence is synthesized)
ctgtctgtcacgctgatgcccgtgcagctgtctgagcacccggaatggaatgagtctatgcactccctccggatcagtgtggggggccttcctgtgctggcgtccatgaccaaggccgcg

SEQ ID NO: 574890 - DNA, 120 bp, Artificial Sequence
  ENSG00000171302_5 (sequence is synthesized)
gacccccgcttccgcccccgctggaaggtgatcctgacgttctttgtgggtgctgccatcctctggctgctctgctcccaccgcccggcccccggcaggccccccacccacaatgcacac

SEQ ID NO: 574891 - DNA, 120 bp, Artificial Sequence
  ENSG00000171302_6 (sequence is synthesized)
aactggaggctcggccaggcgcccgccaactggtacaatgacacctaccccctgtctcccccacaaaggacaccggctgggattcggtatcgaatcgcagttatcgcagacctggacaca

SEQ ID NO: 574892 - DNA, 120 bp, Artificial Sequence
  ENSG00000171302_7 (sequence is synthesized)
gagtcaagggcccaagaggaaaacacctggttcagttacctgaaaaagggctacctgaccctgtcagacagtggggacaaggtggccgtggaatgggacaaagaccatggggtcctggag

SEQ ID NO: 574893 - DNA, 120 bp, Artificial Sequence
  ENSG00000171302_8 (sequence is synthesized)
tcccacctggcggagaaggggagaggcatggagctatccgacctgattgttttcaatgggaaactctactccgtggatgaccggacgggggtcgtctaccagatcgaaggcagcaaagcc

SEQ ID NO: 574894 - DNA, 120 bp, Artificial Sequence
  ENSG00000171302_9 (sequence is synthesized)
gtgccctgggtgattctgtccgacggcgacggcaccgtggagaaaggcttcaaggccgaatggctggcagtgaaggacgagcgtctgtacgtgggcggcctgggcaaggagtggacgacc

SEQ ID NO: 574895 - DNA, 120 bp, Artificial Sequence
  ENSG00000171302_10 (sequence is synthesized)
actacgggtgatgtggtgaacgagaacccggagtgggtgaaggtggtgggctacaagggcagcgtggaccacgagaactgggtgtccaactacaacgccctgcgggctgctgccggcatc

SEQ ID NO: 574896 - DNA, 120 bp, Artificial Sequence
  ENSG00000171302_11 (sequence is synthesized)
cagccgccaggctacctcatccatgagtctgcctgctggagtgacacgctgcagcgctggttcttcctgccgcgccgcgccagccaggagcgctacagcgagaaggacgacgagcgcaag

SEQ ID NO: 574897 - DNA, 120 bp, Artificial Sequence
  ENSG00000171302_12 (sequence is synthesized)
ggcgccaacctgctgctgagcgcctcccctgacttcggcgacatcgctgtgagccacgtcggggcggtggtccccactcacggcttctcgtccttcaagttcatccccaacaccgacgac

SEQ ID NO: 574898 - DNA, 120 bp, Artificial Sequence
  ENSG00000171302_13 (sequence is synthesized)
cagatcattgtggccctcaaatccgaggaggacagcggcagagtcgcctcctacatcatggccttcacgctggacgggcgcttcctgttgccggagaccaagatcggaagcgtgaaatac

SEQ ID NO: 574899 - DNA, 120 bp, Artificial Sequence
  ENSG00000171302_14 (sequence is synthesized)
actcagcttttataaaaacaagaggagtgcacttttgttttgttttgttctttttggaactgtgcctgggttggaggtctggacagggagcccagtcccgggccccatagtggtgcgggc

SEQ ID NO: 574900 - DNA, 120 bp, Artificial Sequence
  ENSG00000171302_15 (sequence is synthesized)
actggacccccgggccccacggaggccgcggtctgaactgctttccatgctgccatctggtggtgatttcggtcacttcaggcattgactcaaggcctgcctaactggctgggtcgtttc

SEQ ID NO: 574901 - DNA, 120 bp, Artificial Sequence
  ENSG00000171302_16 (sequence is synthesized)
ttccatccgacctcgtttcttttctttcctatgttcttttgttcagtgaatatccctagagctcctaccatatgtcaggccctatgcctcaccctgagaacgcagtgagcatgaggtgga

SEQ ID NO: 574902 - DNA, 120 bp, Artificial Sequence
  ENSG00000171302_17 (sequence is synthesized)
cctgtttgctgggaaccccaggtcacccccttttcttcctactctgtgcctggagcatcatgtccacccctgcagatccttggaaaagaaaatgtttatgttgcagggtattgcatggtc

SEQ ID NO: 574903 - DNA, 120 bp, Artificial Sequence
  ENSG00000171302_18 (sequence is synthesized)
acgagtgagggcaggcccctggggacacatctgcccacagctgcacaggccagggcgcaggcacatctgttggttctcaggcctcagataaaaccatctccgcatcatatggccagtgac

SEQ ID NO: 574904 - DNA, 120 bp, Artificial Sequence
  ENSG00000171302_19 (sequence is synthesized)
cgctttctcccttcaagaaaattctgtggctgtgcagtactttgaagttttaattattaacctgctttaattaaagcagtttcctttcttataaagtggaatcaccaaatcttatcacac

SEQ ID NO: 574905 - DNA, 120 bp, Artificial Sequence
  ENSG00000171302_20 (sequence is synthesized)
agagcacagtcctgtagttacccagcccgctccagcagtgcgggagattgtaaggaagcggtggcggctggtgaagcaagtctcacatgtcggcgttcttggccaatggatacaaagata

SEQ ID NO: 574906 - DNA, 120 bp, Artificial Sequence
  ENSG00000171302_21 (sequence is synthesized)
aagaaaatgttgcctttttctaggaactgtcagaaatcctcatgcctttcaagacttctgtgaatgacttgaattttttattccctgcctagggtctgtgaacgaggcctgtctcttccc

SEQ ID NO: 574907 - DNA, 120 bp, Artificial Sequence
  ENSG00000171302_22 (sequence is synthesized)
tggggtttctttccatggcctttatttctcctcttccagtgggagttttgcaggctcttctctgtggaaacttcacgagcgttggctgggcctcggcttcgctggagtgtactccagggt

SEQ ID NO: 574908 - DNA, 120 bp, Artificial Sequence
  ENSG00000171302_23 (sequence is synthesized)
gaaggcagagtgggatttgagacccaggttaggcacgacccaggctgagaagggacgtttccatcattcacagtgccctccccacagcactacctcaccccgacccccaccctcactcct

SEQ ID NO: 574909 - DNA, 120 bp, Artificial Sequence
  ENSG00000171302_24 (sequence is synthesized)
accccaccccgcgatcgtcaggggtgccacggtgggccggagggtgccggctctggctgtccctgtgccggtccctcacaaacctctccccctttgaaactcaagcacagctgcgaggag

SEQ ID NO: 574910 - DNA, 120 bp, Artificial Sequence
  ENSG00000171302_25 (sequence is synthesized)
ggcagcgaggagggacccctctctcatggttgtctctttcccccgctatgtcataggtagtggaggaagcgaaggaagtgaacgctgaatgtgacgcatttctgaagagctcagctgtca

SEQ ID NO: 574911 - DNA, 120 bp, Artificial Sequence
  ENSG00000171302_26 (sequence is synthesized)
ccgggcatagcctggaagccccaagtctgttctgactttgcctggctgtctccttgacccgcctcctagatcattgtccttgatgtccaggctgggtcatttaaaatagagatgcaatca

SEQ ID NO: 574912 - DNA, 120 bp, Artificial Sequence
  ENSG00000171302_27 (sequence is synthesized)
ggaaggttgggggacttgggactgtggctgaattgagaccttgctgatgtattcatgtcagcacctgagtcacagcccaggtgcccggaagcagcctcttcgcataggcagtgatttgcg

SEQ ID NO: 574913 - DNA, 120 bp, Artificial Sequence
  ENSG00000171302_28 (sequence is synthesized)
attactttaaagctcaccttttttcttcccctctctgttcgctgctgtcagcataatgattgtgttccttccctatgggatccatctgttttgtaaacaataaagcgtctgagggagtgt

SEQ ID NO: 574914 - DNA, 120 bp, Artificial Sequence
  ENSG00000171302_29 (sequence is synthesized)
gcggggcggaagtcggccaccttcctccgtcccggccgttagcccagccaagcccagccaagcccagccaagccccgccgatcgcgggcaccggagccagccccgcagcgggagcctaac

SEQ ID NO: 574915 - DNA, 120 bp, Artificial Sequence
  ENSG00000171302_30 (sequence is synthesized)
taacccagaggaagtggagactcctttactgcacatctgtctgctccaggccaggcactgttctaggagccaggatacagaggtggagacagaaacaaacaaaccgataactgtatacaa

SEQ ID NO: 574916 - DNA, 120 bp, Artificial Sequence
  ENSG00000171302_31 (sequence is synthesized)
cccgcagcgggaagctggagaaacaaaccctcttggctgtctgctgtccagggagtcgccactcccttcattatagccttgctcagagtgcagcggcaggcctggggatggcctcgggag

SEQ ID NO: 574917 - DNA, 120 bp, Artificial Sequence
  ENSG00000171302_32 (sequence is synthesized)
cccgcagcggaaaagcacatctcccaggatcctgagagagcttgaaccagaccactgtggacacggtggccacccgtcaccactacccttcccaaggggagacgaggagcaagtaggctt

SEQ ID NO: 574918 - DNA, 120 bp, Artificial Sequence
  ENSG00000171302_33 (sequence is synthesized)
agaagctggaagaggcatgagaatggagccatggcccgtgtgaggcttctgtcccacaggacggtgcctgctgcctgccgtgtgctggatactaggggcggggacaggtgcagaagtcag

SEQ ID NO: 574919 - DNA, 120 bp, Artificial Sequence
  ENSG00000171302_34 (sequence is synthesized)
tcagatcctgagcttgacctttaaggagcgtgctgtctgtggaggcaggatggcctaaccagactccctgtgaccttcttcctttctggtttccttgtactgcccacccccgaggagatt

SEQ ID NO: 574920 - DNA, 120 bp, Artificial Sequence
  ENSG00000171302_35 (sequence is synthesized)
cccgcagcggcacacgcccctgctgaaaggcacactgaaggagccaaccctctcccctctggacgtggcaagggtttcctgtcggggcagccccaggcatcttcacggccaggactcagg

SEQ ID NO: 574921 - DNA, 120 bp, Artificial Sequence
  ENSG00000171303_0 (sequence is synthesized)
gcgccggggggccggcggcggcccgggcgggacgatgaagcggcagaacgtgcgcacgctggcgctcatcgtgtgcaccttcacctacctgctggtgggcgccgcggtcttcgacgcgct

SEQ ID NO: 574922 - DNA, 120 bp, Artificial Sequence
  ENSG00000171303_1 (sequence is synthesized)
ggagtcggagcccgagctgatcgagcggcagcggctggagctgcggcagcaggagctgcgggcgcgctacaacctcagccagggcggctacgaggagctggagcgcgtcgtgctgcgcct

SEQ ID NO: 574923 - DNA, 120 bp, Artificial Sequence
  ENSG00000171303_2 (sequence is synthesized)
caagccgcacaaggccggcgtgcagtggcgcttcgccggctccttctacttcgccatcaccgtcatcaccaccatcggctacgggcacgcggcacccagcacggatggcggcaaggtgtt

SEQ ID NO: 574924 - DNA, 120 bp, Artificial Sequence
  ENSG00000171303_3 (sequence is synthesized)
ctgcatgttctacgcgctgctgggcatcccgctcacgctcgtcatgttccagagcctgggcgagcgcatcaacaccttggtgaggtacctgctgcaccgcgccaagaaggggctgggcat

SEQ ID NO: 574925 - DNA, 120 bp, Artificial Sequence
  ENSG00000171303_4 (sequence is synthesized)
gcggcgcgccgacgtgtccatggccaacatggtgctcatcggcttcttctcgtgcatcagcacgctgtgcatcggcgccgccgccttctcccactacgagcactggaccttcttccaggc

SEQ ID NO: 574926 - DNA, 120 bp, Artificial Sequence
  ENSG00000171303_5 (sequence is synthesized)
ctactactactgcttcatcaccctcaccaccatcggcttcggcgactacgtggcgctgcagaaggaccaggccctgcagacgcagccgcagtacgtggccttcagcttcgtctacatcct

SEQ ID NO: 574927 - DNA, 120 bp, Artificial Sequence
  ENSG00000171303_6 (sequence is synthesized)
tacgggcctcacggtcatcggcgccttcctcaacctcgtggtgctgcgcttcatgaccatgaacgccgaggacgagaagcgcgacgccgagcaccgcgcgctgctcacgcgcaacgggca

SEQ ID NO: 574928 - DNA, 120 bp, Artificial Sequence
  ENSG00000171303_7 (sequence is synthesized)
ggcgggcggcggcggagggggtggcagcgcgcacactacggacaccgcctcatccacggcggcagcgggcggcggcggcttccgcaacgtctacgcggaggtgctgcacttccagtccat

SEQ ID NO: 574929 - DNA, 120 bp, Artificial Sequence
  ENSG00000171303_8 (sequence is synthesized)
gtgctcgtgcctgtggtacaagagccgcgagaagctgcagtactccatccccatgatcatcccgcgggacctctccacgtccgacacgtgcgtggagcagagccactcgtcgccgggagg

SEQ ID NO: 574930 - DNA, 120 bp, Artificial Sequence
  ENSG00000171303_9 (sequence is synthesized)
gggcggccgctacagcgacacgccctcgcgacgctgcctgtgcagcggggcgccacgctccgccatcagctcggtgtccacgggtctgcacagcctgtccaccttccgcggcctcatgaa

SEQ ID NO: 574931 - DNA, 120 bp, Artificial Sequence
  ENSG00000171303_10 (sequence is synthesized)
gcgcaggagctccgtgtgactgccccgaggggcctggagcacctgggggcgcgggcgggggacccctgctgggaggccaggagactgcccctgctgccttctgcccagtgggaccccgca

SEQ ID NO: 574932 - DNA, 120 bp, Artificial Sequence
  ENSG00000171303_11 (sequence is synthesized)
caacatccctcaccactctcccccagcacccccatctccgactgtgcctgcttgcaccagccggcaggaggccgggctctgaggacccctggggcccccatcggagccctgcaaattccg

SEQ ID NO: 574933 - DNA, 120 bp, Artificial Sequence
  ENSG00000171303_12 (sequence is synthesized)
agaaatgtgaaacttggtggggtcagggaggaaaggcagaagctgggagcctcccttccctttgaaaatctaagaagctcccagtcctcagagaccctgctggtacccagacccccacct

SEQ ID NO: 574934 - DNA, 120 bp, Artificial Sequence
  ENSG00000171303_13 (sequence is synthesized)
tcggaggggacttcatgttccgtgtacgtttgcatctctatttatacctctgtcctgctaggtctcccaccttcccttggttccaaaagccagggtgtctatgtccaagtcacccctact

SEQ ID NO: 574935 - DNA, 120 bp, Artificial Sequence
  ENSG00000171303_14 (sequence is synthesized)
cagccccactccccttcctcatccccagctgtgtctcccaacctcccttcgtgttgttttgcatggctttgcagttatggagaaagtggaaacccagcagtccctaaagctggtccccag

SEQ ID NO: 574936 - DNA, 120 bp, Artificial Sequence
  ENSG00000171303_15 (sequence is synthesized)
aaagcaggacagaaagaaggagggacaggcaggcagcaggaggggcgagctgggaggcaggaggcagcggcctgtcagtctgcagaatggtcgcactggaggttcaagctaactggcctc

SEQ ID NO: 574937 - DNA, 120 bp, Artificial Sequence
  ENSG00000171303_16 (sequence is synthesized)
cagccacattctcatagcaggtaggacttcagccttccagacactgcccttagaatctggaacagaagacttcagactcaccataattgctgataattacccactcttaaatttgtcgag

SEQ ID NO: 574938 - DNA, 120 bp, Artificial Sequence
  ENSG00000171303_17 (sequence is synthesized)
tgatttttagcctctgaaaactctatgctggccactgattcctttgagtctcacaaaaccctacttaggtcatcagggcaggagttctcactcccattttacagatgagaatactgaggc

SEQ ID NO: 574939 - DNA, 120 bp, Artificial Sequence
  ENSG00000171303_18 (sequence is synthesized)
ctggacaggtgaagtgaccagagagcaaaaggcaaaggggtgggggctgggtgcagtggctcacacctgtattcccaacacttttggaggctgaggttggaggattgcttgagcccagga

SEQ ID NO: 574940 - DNA, 87 bp, Artificial Sequence
  ENSG00000171303_19 (sequence is synthesized)
cccatctctacaaaaaataaaaaattaaccaggtgtggtggcacgtgcctgggagtcccagcgactgggaggtcgaggctgtagtga

SEQ ID NO: 574941 - DNA, 120 bp, Artificial Sequence
  ENSG00000171303_20 (sequence is synthesized)
agcccagcctgcttgttgctagccaaagtgttctttccttccagcttggcctgctcttaaaagcaaagctcctgcagtgtacatcctggcattgtgtggctacctgggttttaaaccaga

SEQ ID NO: 574942 - DNA, 120 bp, Artificial Sequence
  ENSG00000171303_21 (sequence is synthesized)
atcagaagtcccggatcagagggcactgctgaggttcagcctcttctcttcttggccaggaggcagcagctctgaatgggcccctgaggctgcacaggggcctttgtcactggggcgcat

SEQ ID NO: 574943 - DNA, 120 bp, Artificial Sequence
  ENSG00000171303_22 (sequence is synthesized)
gcttacaaacagtgcagttcttgggaccgaggtaagcagggctgggtctcatggcagaaaggccaggatctggggctctaggaatttgggaattgggcagagtggccaagaaagctggca

SEQ ID NO: 574944 - DNA, 120 bp, Artificial Sequence
  ENSG00000171303_23 (sequence is synthesized)
taagctgaggctgcagcaagaaacacccttcccaggtgggggagtttggaccagaggtgccctctgcccaccacacctgcaacccagaagcccagatggaacgcagctgacgaaggtgat

SEQ ID NO: 574945 - DNA, 120 bp, Artificial Sequence
  ENSG00000171303_24 (sequence is synthesized)
gcttgaggctcacttttggggccccacagctggagccggtataatgactgggacaacatcaaggggtggatgaggggcctctcctcccgcaacactgccttcccatgctgttcccctgcc

SEQ ID NO: 574946 - DNA, 120 bp, Artificial Sequence
  ENSG00000171303_25 (sequence is synthesized)
agctccttaacactgccgaccaaggccagccctggcattcagggaaattggagggcagcacccgtagggtggccagcctcaggccccaccccagctgtgtcctctagtctctggggaccc

SEQ ID NO: 574947 - DNA, 120 bp, Artificial Sequence
  ENSG00000171303_26 (sequence is synthesized)
ctggggggaagaagtctaccctgcttgtgagtcccgtctcagtgtggaggaactggctgcacgtgggacctgaaggtgccctctgtgtttatgttgggggtgggggggcagtgctggctg

SEQ ID NO: 574948 - DNA, 120 bp, Artificial Sequence
  ENSG00000171303_27 (sequence is synthesized)
cctctgtcctgtgtgtgaccctgccctcgaagggtcctgtcctgtcagtcccgagggagccacaaccaaagctgcggagagaaggtggggaagggtgcagaatggccgtggggcacagcg

SEQ ID NO: 574949 - DNA, 120 bp, Artificial Sequence
  ENSG00000171303_28 (sequence is synthesized)
tggcagactgttcagtctctgctgggtctttcctagggacctggaaggccagtgttgcttccccctcactccctttcactgcaggcagcctctctgcttccccaatgccttatgcctggg

SEQ ID NO: 574950 - DNA, 120 bp, Artificial Sequence
  ENSG00000171303_29 (sequence is synthesized)
cacactgccacagaatatgcaatatgtgtgggtgaccatgccctcacgaccacacccccaccccgggcagcccccggactccaaaggtcgtggctgccacagcctccctcagctcttcct

SEQ ID NO: 574951 - DNA, 120 bp, Artificial Sequence
  ENSG00000171303_30 (sequence is synthesized)
gcctatctgtcttcacactgagaatggcgcccaataaatgctatccacggagaccaggctcaggctccagctgcctctgtcatcgtatgcccttgctgctgccagggaggggccatctcc

SEQ ID NO: 574952 - DNA, 120 bp, Artificial Sequence
  ENSG00000171303_31 (sequence is synthesized)
gggaggggccatctcccaccccctcccctgccggggtctacaaacatatctagctgctgggtgccgtggctcacacctatagtcacagcactaggcgggcagatcacctgaggtcagaag

SEQ ID NO: 574953 - DNA, 68 bp, Artificial Sequence
  ENSG00000171303_32 (sequence is synthesized)
tacaaaaattagctgagcgtggtggcgcatgtctgtagtcccagctactcggctactcaggaggctga

SEQ ID NO: 574954 - DNA, 84 bp, Artificial Sequence
  ENSG00000171303_33 (sequence is synthesized)
aaaaaaaaacaataataataaaataaaataacatacctagctgactcgccatgggctcgctggcctgtgggcgacactggcttc

SEQ ID NO: 574955 - DNA, 120 bp, Artificial Sequence
  ENSG00000171303_34 (sequence is synthesized)
ctcgccatgggctcgctggcctgtgggcgacactggcttcccttttgggatttcccagaagatccagattttcttaagtccccttggaacagactaagaaaggatcaccttagaaatcac

SEQ ID NO: 574956 - DNA, 120 bp, Artificial Sequence
  ENSG00000171303_35 (sequence is synthesized)
ctggtcctattgtcccccccgtacatgagtaactgaggcccacagagagcaaatcgcctgcctgagtcacacagcagtgagtggcagacctaggctaggaactaggactggggattgcta

SEQ ID NO: 574957 - DNA, 120 bp, Artificial Sequence
  ENSG00000171303_36 (sequence is synthesized)
ttccagtgctccccatcctcacacagactgcacagtccgcctggacacaccccagctgacagtggtacctcccagtcagccaggagaatggattccttctcctgcagtaggggccccctg

SEQ ID NO: 574958 - DNA, 120 bp, Artificial Sequence
  ENSG00000171303_37 (sequence is synthesized)
gctgagtggcctgattgactaaaacatatgtctttgaaggagagtgcatcacaagcacctttctttggggtagatttttctctgggtctagagggacagctcaggcttgggactgggcct

SEQ ID NO: 574959 - DNA, 120 bp, Artificial Sequence
  ENSG00000171303_38 (sequence is synthesized)
cagaacctacgacagaccgtgagagcagacccaccttatccatctggtgccagctccccaggtcagctacagcgacccccggacttcatagagtacaatccacagtaatagcacacagct

SEQ ID NO: 574960 - DNA, 120 bp, Artificial Sequence
  ENSG00000171303_39 (sequence is synthesized)
ctgtacctatctagctccatgcctatctatctgcctacctttcacaaaataattcttagcaaccctgctacagccaatgattctaatacgttctgttctattgcatgttataaaatgctg

SEQ ID NO: 574961 - DNA, 120 bp, Artificial Sequence
  ENSG00000171303_40 (sequence is synthesized)
gtcacgatccactaaattgatgtctctacctgctaatggtttaatacctgcagattgaaatatactggagaaataaagagagtgggagtagggacactttctcccagtgcccacaccgcc

SEQ ID NO: 574962 - DNA, 120 bp, Artificial Sequence
  ENSG00000171303_41 (sequence is synthesized)
cctcgttacccgcataggtcaactgaaagatacagagagggaagctttgatggggggttcagagttcaaaggaagaaatgatggcacctgcactccctgcccccagaggcaggacacagc

SEQ ID NO: 574963 - DNA, 120 bp, Artificial Sequence
  ENSG00000171303_42 (sequence is synthesized)
cagccctcctgtgacagcactcctggcagctccttgttggcctgcagccctcagggggcttagttgccattgactcacccactcctaaggccaccacatcaaaatctgaggcttactgcc

SEQ ID NO: 574964 - DNA, 120 bp, Artificial Sequence
  ENSG00000171303_43 (sequence is synthesized)
ctgtcccacctgcctctgtctttcttaaaacagctaaatgcaacaatagcagaaattagcttgtttttgaggttggcaatgaccagttcaaggtgactcttattttcttaagcagtgctt

SEQ ID NO: 574965 - DNA, 120 bp, Artificial Sequence
  ENSG00000171303_44 (sequence is synthesized)
gcaggacataaatgtgatgacacttgccctcctttctttatcgcctgggacagactttacaaacagacctgggagaagtcccctaaggggctgcatttatccccatctccctaggggtga

SEQ ID NO: 574966 - DNA, 120 bp, Artificial Sequence
  ENSG00000171303_45 (sequence is synthesized)
tcagcattgtgacagctgggcagagcagtggtgaactgcacccatgtccctgctcacatctcctaagatctcagaattgcctgaggttctagcgtgggctccttctctccagatgatgcc

SEQ ID NO: 574967 - DNA, 120 bp, Artificial Sequence
  ENSG00000171303_46 (sequence is synthesized)
atccccacccccctcatttccacacagcatctgaggcatcctgcactaaaagatatatgtacagcaaaacaaaaatagaaaaccagcacagcagagtggaggtggggtataaatataccc

SEQ ID NO: 574968 - DNA, 120 bp, Artificial Sequence
  ENSG00000171303_47 (sequence is synthesized)
agatccccgctgatttggttactcggggtgagcatcagatggaaatagaagtttccgggggccaagagagaaagagggatgtaacgacaattcttttcaaaacgtgtcccatggtatgcc

SEQ ID NO: 574969 - DNA, 120 bp, Artificial Sequence
  ENSG00000171303_48 (sequence is synthesized)
tcgtggaaaaaatggttcgttggtcaaatgaatttgggaaaatgctgtcaatatcaccgactcatggagcttcgcaaggcatcttagcttaataaaggttatgaaaagtcttgcagcaaa

SEQ ID NO: 574970 - DNA, 120 bp, Artificial Sequence
  ENSG00000171307_0 (sequence is synthesized)
gttgaggatgggctggcggcgggtccgggtccgctgcctggcgctgcgggcggcgggccatggtggtttggattgagccgggcccggccggggcgccgagtcggagggggtggcagtgag

SEQ ID NO: 574971 - DNA, 120 bp, Artificial Sequence
  ENSG00000171307_1 (sequence is synthesized)
gcagtgagcggcggcagaggctacggggctcggtttggctgactggggagtcggcaggcggcaggaaccatgcgaggccagcggagcctgctgctgggcccggcccgcctctgcctccgc

SEQ ID NO: 574972 - DNA, 120 bp, Artificial Sequence
  ENSG00000171307_2 (sequence is synthesized)
ctccttctgctgctgggttacaggcgccgctgtccacctctactccggggtctagtacagcgctggcgctacggcaaggtctgcctgcgctccctgctctacaactcctttgggggcagt

SEQ ID NO: 574973 - DNA, 120 bp, Artificial Sequence
  ENSG00000171307_3 (sequence is synthesized)
gacaccgctgttgatgctgcctttgagcctgtctactggctggtagacaacgtgatccgctggtttggagtggtgttcgtggtcctggtgatcgtgctgacaggctccattgtagctatc

SEQ ID NO: 574974 - DNA, 120 bp, Artificial Sequence
  ENSG00000171307_4 (sequence is synthesized)
gcctacctgtgtgtcctgcctctcatcctccgaacctactcagtgccacgactctgctggcatttcttctatagccactggaatctgatcctgattgtcttccactactaccaggccatc

SEQ ID NO: 574975 - DNA, 120 bp, Artificial Sequence
  ENSG00000171307_5 (sequence is synthesized)
accactccgcctgggtacccaccccagggcaggaatgatatcgccaccgtctccatctgtaagaagtgcatttaccccaagccagcccgaacacaccactgcagcatctgcaacaggtgt

SEQ ID NO: 574976 - DNA, 120 bp, Artificial Sequence
  ENSG00000171307_6 (sequence is synthesized)
gtgctgaagatggatcaccactgcccctggctaaacaattgtgtgggccactataaccatcggtacttcttctctttctgctttttcatgactctgggctgtgtctactgcagctatgga

SEQ ID NO: 574977 - DNA, 120 bp, Artificial Sequence
  ENSG00000171307_7 (sequence is synthesized)
cctttcgagaaaggatgactcacaagagtcttgtctacctctggttcctgtgcagttctgtggcacttgccctgggtgccctaactgtatggcatgctgttctcatcagtcgaggtgaga

SEQ ID NO: 574978 - DNA, 120 bp, Artificial Sequence
  ENSG00000171307_8 (sequence is synthesized)
ctagcatcgaaaggcacatcaacaagaaggagagacgtcggctacaggccaagggcagagtatttaggaatccttacaactacggctgcttggacaactggaaggtattcctgggtgtgg

SEQ ID NO: 574979 - DNA, 120 bp, Artificial Sequence
  ENSG00000171307_9 (sequence is synthesized)
atacaggaaggcactggcttactcgggtgctcttaccttctagtcacttgccccatgggaatggaatgagctgggagccccctccctgggtgactgctcactcagcctctgtgatggcag

SEQ ID NO: 574980 - DNA, 120 bp, Artificial Sequence
  ENSG00000171307_10 (sequence is synthesized)
tgtgagctggactgtgtcagccacgactcgagcactcattctgctccctatgttatttcaagggcctccaagggcagcttttctcagaatccttgatcaaaaagagccagtgggcctgcc

SEQ ID NO: 574981 - DNA, 120 bp, Artificial Sequence
  ENSG00000171307_11 (sequence is synthesized)
ttagggtaccatgcaggacaattcaaggaccagcctttttaccactgcagaagaaagacacaatgtggagaaatcttaggactgacatccctttactcaggcaaacagaagttccaaccc

SEQ ID NO: 574982 - DNA, 120 bp, Artificial Sequence
  ENSG00000171307_12 (sequence is synthesized)
cagactaggggtcaggcagctagctacctaccttgcccagtgctgacccggacctcctccaggatacagcactggagttggccaccacctcttctacttgctgtctgaaaaaacacctga

SEQ ID NO: 574983 - DNA, 120 bp, Artificial Sequence
  ENSG00000171307_13 (sequence is synthesized)
ctagtacagctgagatcttggcttctcaacagggcaaagataccaggcctgctgctgaggtcactgccacttctcacatgctgcttaagggagcacaaataaaggtattcgatttttaaa

SEQ ID NO: 574984 - DNA, 120 bp, Artificial Sequence
  ENSG00000171307_14 (sequence is synthesized)
accatccctgcagtggagcagcctcctccagtttctgttgggttttgagctacctgttaaataagtcagtgggattgtcaaggacaaagccctccctggctgcctcagggcaaaatcagg

SEQ ID NO: 574985 - DNA, 120 bp, Artificial Sequence
  ENSG00000171307_15 (sequence is synthesized)
ttggctgactggggagtcggcaggcggcaggaagaatgataacagcagacacttatttagtgttaccacattggcaggagtgtccttgctggtatttgtaggacagatagacatctggcc

SEQ ID NO: 574986 - DNA, 120 bp, Artificial Sequence
  ENSG00000171307_16 (sequence is synthesized)
aggctttccacttctgcatccctccaggtcattcattcaacaaatatttattgagtacttccatgagccgggaaccatgcgaggccagcggagcctgctgctgggcccggcccgcctctg

SEQ ID NO: 574987 - DNA, 120 bp, Artificial Sequence
  ENSG00000171307_17 (sequence is synthesized)
gatcaccactgccacatacttcctccagccctctctaaactacccaccagtcttcgcccctcttttcttagttctgtggcacttgccctgggtgccctaactgtatggcatgctgttctc

SEQ ID NO: 574988 - DNA, 120 bp, Artificial Sequence
  ENSG00000171307_18 (sequence is synthesized)
tgaaccagaaaggcttgaggccaatactgtgtggttttaagtaacagatgaggcttcaacgtgactacagtggaatcctaggaaagctgtgctcaggaaggggcctctgggtgtaggata

SEQ ID NO: 574989 - DNA, 120 bp, Artificial Sequence
  ENSG00000171307_19 (sequence is synthesized)
tggtggccaccagtcacctctcacttggagagcagtgtctagagttcaagccaataatttgtgagattaaaataatctacttgtcatagaggccctaagacagtaactggagctagctct

SEQ ID NO: 574990 - DNA, 120 bp, Artificial Sequence
  ENSG00000171307_20 (sequence is synthesized)
aggtcaggacccgaggccttcatgaatcaacatggaggtcccctcccattgactccttcctgtgttctgctcagaatacctggagttgtcttggctaccatttccttggggtggggctgg

SEQ ID NO: 574991 - DNA, 120 bp, Artificial Sequence
  ENSG00000171307_21 (sequence is synthesized)
gaatggaattggagacaaagcattttctgtcatgcaaggggtagctggctgtcctgacaggagacagggaatctcctgctaccaggttgagttggctagcctgtgacatcagcccagagg

SEQ ID NO: 574992 - DNA, 120 bp, Artificial Sequence
  ENSG00000171307_22 (sequence is synthesized)
gagtaggaagaagagtatcttttgccaagacttaaatagcaccaggaaatacctcggtacaggatccacattctgtgtactcattcttccattggctgttctttggtgaggaataatcat

SEQ ID NO: 574993 - DNA, 120 bp, Artificial Sequence
  ENSG00000171310_0 (sequence is synthesized)
atttggtaaaacccagccccggaatatatagatcgttggagcgcaatgaagtagcctttggagagaagggagagggcccgtcggacagccacagcggccagcgcagcggcagcggcggcg

SEQ ID NO: 574994 - DNA, 120 bp, Artificial Sequence
  ENSG00000171310_1 (sequence is synthesized)
cagccgcccggcccgcgaccaggcagcggcggccgccggcgggatcggaggaggcggcggagcggcgaggaggaggagcaggagcgcgcagccagcgggtccacgcatctcagcacttcc

SEQ ID NO: 574995 - DNA, 120 bp, Artificial Sequence
  ENSG00000171310_2 (sequence is synthesized)
gggtccacgcatctcagcacttccagaccaactccggcaccttccacacccctgcccgggctgggggctccgagagcggccgcgaagcgactccgatcctccctctgagccttgctcagc

SEQ ID NO: 574996 - DNA, 120 bp, Artificial Sequence
  ENSG00000171310_3 (sequence is synthesized)
gcgcctcccgggctccggtccgcgcggcggggtccctgctcctgcgccccgggcgcgcttcccggacaccccggtccccgcagccaggacaaagccatgaagccagcgctgctggaagtg

SEQ ID NO: 574997 - DNA, 120 bp, Artificial Sequence
  ENSG00000171310_4 (sequence is synthesized)
tggaagtgatgaggatgaacagaatctgccggatggtgctggccacttgcttgggatcctttatcctggtcatcttctatttccaaagtatgttgcacccagtcatgcggaggaatccct

SEQ ID NO: 574998 - DNA, 120 bp, Artificial Sequence
  ENSG00000171310_5 (sequence is synthesized)
ttggtgtggacatctgctgccggaaggggtcccgaagccccctgcaggaactctacaacccaatccagctggagctctcaaacactgctgtcctgcaccagatgcggcgggaccaggtga

SEQ ID NO: 574999 - DNA, 120 bp, Artificial Sequence
  ENSG00000171310_6 (sequence is synthesized)
cagacacgtgccgagccaacagcgccacaagccgtaagcggagggtgctgacccccaacgacctgaagcacttggtggtggatgaggaccacgagctcatctactgctacgtgcccaagg

SEQ ID NO: 575000 - DNA, 120 bp, Artificial Sequence
  ENSG00000171310_7 (sequence is synthesized)
tggcctgcaccaactggaagcggctcatgatggtcctgaccgggcgggggaagtacagcgaccccatggagatcccggccaacgaggcacacgtctccgccaacctgaagaccctgaacc

SEQ ID NO: 575001 - DNA, 120 bp, Artificial Sequence
  ENSG00000171310_8 (sequence is synthesized)
agtacagcatcccagaaatcaaccaccgcttgaaaagctacatgaagttcctgtttgtccgggagcccttcgagaggctagtgtccgcctaccgcaacaagttcacccagaagtacaaca

SEQ ID NO: 575002 - DNA, 120 bp, Artificial Sequence
  ENSG00000171310_9 (sequence is synthesized)
tctccttccacaagcggtacggcaccaagatcatcaaacgccagcggaagaacgccacccaggaggccctgcgcaaaggggacgatgtcaaattcgaggagtttgtggcctatctcatcg

SEQ ID NO: 575003 - DNA, 120 bp, Artificial Sequence
  ENSG00000171310_10 (sequence is synthesized)
acccacacacccagcgggaggagcctttcaacgaacactggcaaaccgtctactcactctgccatccctgccacatccactatgacctcgtgggcaagtacgagacactggaagaggatt

SEQ ID NO: 575004 - DNA, 120 bp, Artificial Sequence
  ENSG00000171310_11 (sequence is synthesized)
ctaattacgtcctgcagctggcaggagtgggcagctacctgaagttccccacctatgcaaagtctacgagaactactgatgaaatgaccacagaattcttccagaacatcagctcagagc

SEQ ID NO: 575005 - DNA, 120 bp, Artificial Sequence
  ENSG00000171310_12 (sequence is synthesized)
accaaacgcagctgtacgaagtctacaaactcgattttttaatgttcaattactcagtgccaagctacctgaaattggaataaagggggtggggagagggagagaatcatgctttttaat

SEQ ID NO: 575006 - DNA, 120 bp, Artificial Sequence
  ENSG00000171310_13 (sequence is synthesized)
ttaagatttttatttgtcaaaagaattatatggatattgggttattttgtaaattaatatttctttggggatgatgctgcgagcagcatagtgagaattatttaaaatccttcgtaggga

SEQ ID NO: 575007 - DNA, 120 bp, Artificial Sequence
  ENSG00000171310_14 (sequence is synthesized)
aggacagctgtctttgcaggggaaataggatgggtcgtccttgtctgtagaagtgaatactgcaacactgtctcaaaggtttcttgtgttctggtgaattccatgaattgtgcattccat

SEQ ID NO: 575008 - DNA, 120 bp, Artificial Sequence
  ENSG00000171310_15 (sequence is synthesized)
aaattctaattaatattatttatagttatttaaacatggtctcattatttctttttgtggcagcaaaattctaacatctttccagaagaaatctatgattcctgctttgcttgctacagc

SEQ ID NO: 575009 - DNA, 120 bp, Artificial Sequence
  ENSG00000171310_16 (sequence is synthesized)
tcatttgggggcatgaatgttctccttactaacctctcatggagtcatgtgataacagccattgtcatgtgtatggatgccaccattcttgaatttctgctagaaataagtaggttgcta

SEQ ID NO: 575010 - DNA, 120 bp, Artificial Sequence
  ENSG00000171310_17 (sequence is synthesized)
ttgcacttagagtcatctttgcaagggactcattccaaaccaattccaatcgacctgaaagtcccttgcactaaagaaatgtgatttttttttaacccaaggagaaagttggttgtaaca

SEQ ID NO: 575011 - DNA, 120 bp, Artificial Sequence
  ENSG00000171310_18 (sequence is synthesized)
atttttcaccagaattagcaatctgatagaataggcttttttaacaggaattttaaactggcggtgccagttgcagtgaaggtgaagtggctattgctttatattcgacaaatatttatt

SEQ ID NO: 575012 - DNA, 120 bp, Artificial Sequence
  ENSG00000171310_19 (sequence is synthesized)
gagcatctactatatactaggccctgaagatagagcgttgaacaaacccaatagtcttggccctcaaaaagctttatgtgacatagagcatccagctcgacaattagcaaacccctgata

SEQ ID NO: 575013 - DNA, 120 bp, Artificial Sequence
  ENSG00000171310_20 (sequence is synthesized)
ttattcatggacttgacatgaggtttggactattcatgagcaacagcagaaggtccatgacccctacaaatttacatttttctatggcccatatttgaaaacctcacattcggagcaggc

SEQ ID NO: 575014 - DNA, 120 bp, Artificial Sequence
  ENSG00000171310_21 (sequence is synthesized)
cactttatattcgtgagtgatcccaagctcactgaccaacagaaaagatgctaaaaaaatgtgtcctatcatgtgcctgctccaactgatgggtaatgtctgcctttaagccccagaatg

SEQ ID NO: 575015 - DNA, 120 bp, Artificial Sequence
  ENSG00000171310_22 (sequence is synthesized)
gattctccaggcacagtgtggaagagtgctgtggttgattagcaatgtctgccttgggtgaggaaaggggaacactcctcaagtgcctcctactgtcatctccattcagcctagcaccac

SEQ ID NO: 575016 - DNA, 120 bp, Artificial Sequence
  ENSG00000171310_23 (sequence is synthesized)
ttacccctcatgaaggtcagaggtggactatttgtacacatacacacatgcacaccctctcacgtcctccagaggctgaaagactatcagcatcttggtaactgccatgcatgagcagca

SEQ ID NO: 575017 - DNA, 120 bp, Artificial Sequence
  ENSG00000171310_24 (sequence is synthesized)
aggacagccttccataatccatgccccatttcctctggaagcctggaaacttttcatttcctgttccttgctaattaacatctaaacatgcttctcatttccagccattgctgatgcttc

SEQ ID NO: 575018 - DNA, 120 bp, Artificial Sequence
  ENSG00000171310_25 (sequence is synthesized)
tcagttgaagtttgagccacatccctcttacagctagtgaatgagttggtagcagctactgtatataataataataatagttttaataataggggagggtgggatggggtgtgggtaagt

SEQ ID NO: 575019 - DNA, 120 bp, Artificial Sequence
  ENSG00000171310_26 (sequence is synthesized)
tttgccttttgttttgtttttgatgccgtatatagtgaaggggtgaggatattctaaacaaacaaaaattgaataatttattcacagaaactattaagattgtattgtaaagctcacagc

SEQ ID NO: 575020 - DNA, 120 bp, Artificial Sequence
  ENSG00000171310_27 (sequence is synthesized)
aagctcagtgggcagcagctgcaacatctcaccggggaaattattttatttaacgtgagtgagatgtgggccggagaaggtagctgaagctatttataaaacgttgtgtaccttcttccg

SEQ ID NO: 575021 - DNA, 120 bp, Artificial Sequence
  ENSG00000171310_28 (sequence is synthesized)
agctctctcccctttgtgaagggcgcagcaactatacccttgatggatggagatttacgcaatgtgttttactgggtagagtgacagaccttggctgtccctggaattgagaatctggac

SEQ ID NO: 575022 - DNA, 120 bp, Artificial Sequence
  ENSG00000171310_29 (sequence is synthesized)
cttatttccaggcagagaacactgtcctcagaaatgggacttctgataatgaaacaggttgtccaacattttctaatacgcattctacagaacacaggttccaggaggcatcaggttggt

SEQ ID NO: 575023 - DNA, 120 bp, Artificial Sequence
  ENSG00000171310_30 (sequence is synthesized)
gtgatgcagactaagggttttgtggtcaaatatccttaagaaacaaagttaagtcagtttcctttctgcaaggacttttcagccttcaatgtgtgctgtgcatggtgaatccccaaaaat

SEQ ID NO: 575024 - DNA, 120 bp, Artificial Sequence
  ENSG00000171310_31 (sequence is synthesized)
aatccttgagtctgtagcatttcctgaacttacatgaccaggatactctattttgcagatcaccccacagagctagggttccaccgagtatactttgcttaggttgacttagcatatctg

SEQ ID NO: 575025 - DNA, 120 bp, Artificial Sequence
  ENSG00000171310_32 (sequence is synthesized)
aggtcttcaaggataaaaactgccaccccaacacccttccattaaaaaaaaaatacaaaatagcaccacagtctccatctggtttatagcaacagaggtactttatttaatgaagcaatg

SEQ ID NO: 575026 - DNA, 120 bp, Artificial Sequence
  ENSG00000171310_33 (sequence is synthesized)
gttctaatcctggatactgccacggactacaattctatccctcccagagggagtggaggaagtcttgggtggtgtggacagaaggaagagaggagagggtgagtggggtatagggcccag

SEQ ID NO: 575027 - DNA, 120 bp, Artificial Sequence
  ENSG00000171310_34 (sequence is synthesized)
ggtggctccctactcctcaggctcaaaaggatgctcagtgggaacagatgatctcttgatgagtgcttcttcagtttcatagtttggaatcgttcactgtgtgctttttggggggttttc

SEQ ID NO: 575028 - DNA, 120 bp, Artificial Sequence
  ENSG00000171310_35 (sequence is synthesized)
aatggaaattcacgttgctttgcatttctgtgtccgtctttggtcagttgtgcaagcctgctcactgtcatgtgaagatggcctttcatctggcttctctctcttaagtgagaaagattg

SEQ ID NO: 575029 - DNA, 120 bp, Artificial Sequence
  ENSG00000171310_36 (sequence is synthesized)
tccttcaggggacatgacatcaataggtttctggaatgagggactctttctccccgtgttttgctttgtgttcacattttcttttctaatggcattgaaactttaaaaaaaatggattca

SEQ ID NO: 575030 - DNA, 120 bp, Artificial Sequence
  ENSG00000171310_37 (sequence is synthesized)
actgtttttgcagaatgtagaaagtattctgtgtccttggttaaagaaatccacttgtgaagtgtgcctggaaaatgaaagtttgtgttttttaaagaggaatatttgaaactgctttct

SEQ ID NO: 575031 - DNA, 120 bp, Artificial Sequence
  ENSG00000171310_38 (sequence is synthesized)
atgcatgcttagctggagaaaagtacaggcaggcgtcccatctcccagccacttctcaaaggtgctgctgtgttttaaagaccaggtacagccagggcagtatttgcaaggacattcctg

SEQ ID NO: 575032 - DNA, 120 bp, Artificial Sequence
  ENSG00000171310_39 (sequence is synthesized)
cttactttatccctttggttggaaagctctagatgattcccgcagctcctccagaccccgcctccctgccctccccagctggtctgggaagaggtggtctgctgacctgtggtatctcag

SEQ ID NO: 575033 - DNA, 120 bp, Artificial Sequence
  ENSG00000171310_40 (sequence is synthesized)
aggggacgttcctcctcctccctgtgcaccaggtgggctgcaccctcctgcctattcaggatgtggatgccacaggagagcagcaggcagtggaaacttcagttgcactggttctcctgg

SEQ ID NO: 575034 - DNA, 120 bp, Artificial Sequence
  ENSG00000171310_41 (sequence is synthesized)
tggcaaaggcatgaagcacaggggtcgattaatccaggctactagaaagctccagagcaaagtgtgcgggtcccacaaatgcttggctggtggggtctggatcagtgctgagatagagtt

SEQ ID NO: 575035 - DNA, 83 bp, Artificial Sequence
  ENSG00000171310_42 (sequence is synthesized)
gcttggctggtggggtctggatcagtgctgagatagagttggcagaagaagcagaggcactctgcttgctttcctagccagtc

SEQ ID NO: 575036 - DNA, 120 bp, Artificial Sequence
  ENSG00000171310_43 (sequence is synthesized)
accaaatcccttccttgcccacctctatgtcagcaggactgaccacatcactcccccgagttcccaccaccagcatttcctccaacctttttccatcacaaccagttagaaccctacagg

SEQ ID NO: 575037 - DNA, 120 bp, Artificial Sequence
  ENSG00000171310_44 (sequence is synthesized)
caacaaggccttctagaatccgcttaacccttggctgataacaggcaaatttcagtctgctacactttgttaggtccagaaggagctgcccatactactttcttatgagcatgctcagta

SEQ ID NO: 575038 - DNA, 120 bp, Artificial Sequence
  ENSG00000171310_45 (sequence is synthesized)
tggcatatggacatgtaatgtcacatctttgtggagtgtgattttcttttttcacatatttgtatgcagtagagagcctgttgtagaaaacgctccctgtatcttgctgtactgttaaag

SEQ ID NO: 575039 - DNA, 120 bp, Artificial Sequence
  ENSG00000171310_46 (sequence is synthesized)
aaagctgaattccacattgccaacaaaagcgtgaaaatgttcatgaaccttcctccaggaaaagccattcaagcctgattatttttctaagtaacttcaattaaattgaagaaaaaagaa

SEQ ID NO: 575040 - DNA, 120 bp, Artificial Sequence
  ENSG00000171310_47 (sequence is synthesized)
gtgcatgtccaggctttggggcaggtaactgaagtctttggcctatgaggtgagaggtcacttgggtgacctgggagtaaatcccttcccctccctggctctgtaaagccaagtgttaaa

SEQ ID NO: 575041 - DNA, 120 bp, Artificial Sequence
  ENSG00000171310_48 (sequence is synthesized)
aggaatcccctttcttagtgatgatggtggggaggtggggagggtgcagtgcaactcccattcctgatctcctatcaccagagcagaagaatcactggagaacgactctgtctgaagctt

SEQ ID NO: 575042 - DNA, 120 bp, Artificial Sequence
  ENSG00000171310_49 (sequence is synthesized)
gttcagcctggcttccttgagcaagcaacttattcacaggcgccctcccctcgccgggggccgcgagttgcatttggtaaaacccagccccggaatatatagatcgttggagcgcaatga

SEQ ID NO: 575043 - DNA, 120 bp, Artificial Sequence
  ENSG00000171310_50 (sequence is synthesized)
tttttttgtaggtatggatactaaaaactctaaaattgtggtctttgggggatttaaaacttcctttcacagcctggcattttaccttcagtggttgctttctccgtcaccctttttcta

SEQ ID NO: 575044 - DNA, 120 bp, Artificial Sequence
  ENSG00000171310_51 (sequence is synthesized)
gaaaaatctagcaggggatgtttagaattagagaaatgcctaggtttagtgctaagcattcagacctgcccagggtttgaactcctgagattaacagtctcaagttcgagcaatgggact

SEQ ID NO: 575045 - DNA, 120 bp, Artificial Sequence
  ENSG00000171311_0 (sequence is synthesized)
ggttttgggacagcggcaatcatggcgccacctgtgagatactgcatccccggcgaacgtctgtgtaacttggaggagggcagcccgggcagcggcacctacacccgccacggctacatc

SEQ ID NO: 575046 - DNA, 120 bp, Artificial Sequence
  ENSG00000171311_1 (sequence is synthesized)
ttttcgtcgcttgccggctgtctgatgaagagcagcgagaatggcgcgcttccagtggtgtctgtagtgagagaaacagagtcccagttactgccagatgtgggagctattgtaacctgt

SEQ ID NO: 575047 - DNA, 120 bp, Artificial Sequence
  ENSG00000171311_2 (sequence is synthesized)
aaggtctctagcatcaattcacgctttgccaaagtacacatcctgtatgtggggtccatgcctcttaagaactcttttcgaggaactatccgcaaggaagatgtccgagcaactgaaaaa

SEQ ID NO: 575048 - DNA, 120 bp, Artificial Sequence
  ENSG00000171311_3 (sequence is synthesized)
gacaaggttgaaatttataagagtttccgcccaggtgacattgtcttggccaaagtgatctccttaggtgatgcacagtccaactacctgctaaccaccgccgagaacgagctgggagtg

SEQ ID NO: 575049 - DNA, 120 bp, Artificial Sequence
  ENSG00000171311_4 (sequence is synthesized)
taagacccacactaaagaattccggaaagtagcccgagtacaacccgaattcttgcagacctaagaagccactttttaccctatggaagggggtaagctgttcctgagtataacaccaag

SEQ ID NO: 575050 - DNA, 120 bp, Artificial Sequence
  ENSG00000171311_5 (sequence is synthesized)
atgctgctgtctttattcaaacacctggcgtcggccaacagccacttccagaaaaatcttccagtttacgctgtagatggaacatgtttctgtgaacctatcagtggatttcattctctt

SEQ ID NO: 575051 - DNA, 120 bp, Artificial Sequence
  ENSG00000171311_6 (sequence is synthesized)
gagtaataaatcttatcttttcaaggcaccaacaaacaaaactgtgatattggaaatagcctatccctcctgacagtccttataaatacatattttttgctatgataaaacttttttact

SEQ ID NO: 575052 - DNA, 120 bp, Artificial Sequence
  ENSG00000171311_7 (sequence is synthesized)
aaaaggatgttatagagtctgttgtcttaagcagagaaagacatctaaatggtgtcaggacatttcagtacttctgcttattgagtacttactgtgctaggcactgagtcaggtgcttta

SEQ ID NO: 575053 - DNA, 120 bp, Artificial Sequence
  ENSG00000171311_8 (sequence is synthesized)
catacgtccccttcatttaggtacattgtgatttaatgaaaatttgaggacacgtggtgatacagatagcatgtgaggcaggcatggtggctcatgtttgtaaatcccagcactttggga

SEQ ID NO: 575054 - DNA, 120 bp, Artificial Sequence
  ENSG00000171311_9 (sequence is synthesized)
aacttggaggagggcagcccgggcagcggcacctacacccgccacggctacatcttttcgtcgcttgccggctgtctgatgaagagcagcgagaatggcgcgtttcagagatagatccag

SEQ ID NO: 575055 - DNA, 120 bp, Artificial Sequence
  ENSG00000171311_10 (sequence is synthesized)
agcaatatttgaaggagcacaatagaaagaggattcagaattagaacagttacgttctggctaacttgactttgattctgctttgaccaataccatgctcaaagagaaaactctgcaagt

SEQ ID NO: 575056 - DNA, 120 bp, Artificial Sequence
  ENSG00000171311_11 (sequence is synthesized)
agcgagaatggcgcgtttcttctagccgtatcgccgctgtggtgcacttagccaccacacactagttgtgttgatctcgcttggttgtgctgctgaccctcggggagggaagttgggaca

SEQ ID NO: 575057 - DNA, 120 bp, Artificial Sequence
  ENSG00000171311_12 (sequence is synthesized)
aggatagactaggacaccagaattttgagcaacagttacaattcctatttttcttttgcccgtttttctttcttctttgtgctttgattctcccctagtagtatccaaaaaatacatgga

SEQ ID NO: 575058 - DNA, 90 bp, Artificial Sequence
  ENSG00000171311_13 (sequence is synthesized)
gctttgattctcccctagtagtatccaaaaaatacatggatgatctaggacaaaaggaaaatattaacgagagggtttaaaagtaaagta

SEQ ID NO: 575059 - DNA, 61 bp, Artificial Sequence
  ENSG00000171311_14 (sequence is synthesized)
tcctagcactttgagaagctgaggcgggtggtaaaaaatacaaaaattagccaggcacagt

SEQ ID NO: 575060 - DNA, 120 bp, Artificial Sequence
  ENSG00000171311_15 (sequence is synthesized)
ttttcgtcgcttgccggctgtctgatgaagagcagcgagaatggcgcggtaaaggaagcggcatgccatctcccctctgtttttcccttaggctgcccttgagttccagtccttaggcat

SEQ ID NO: 575061 - DNA, 120 bp, Artificial Sequence
  ENSG00000171311_16 (sequence is synthesized)
ttccgactttatctagcgccactatctccacctcactgacgcaatctagtcatactgtcttttctgtgtttaaaagttataatcacagtctctgcttgccctttaaaaattttttataac

SEQ ID NO: 575062 - DNA, 120 bp, Artificial Sequence
  ENSG00000171311_17 (sequence is synthesized)
atactagcttctttcagtgtcggtaatgcgccaagctttctcctgctacagagcctttgtaacatgccatctatctggaacgcttctatcttcctaggcctatttaattcctacctcctt

SEQ ID NO: 575063 - DNA, 120 bp, Artificial Sequence
  ENSG00000171311_18 (sequence is synthesized)
tagatagcttctctactatcacctcagagaagtccttctggacccactaattgaggaaaggagttttgtggggtgttttgtttttgtttgttttgttaaagactcacaaaaaactctgtt

SEQ ID NO: 575064 - DNA, 120 bp, Artificial Sequence
  ENSG00000171311_19 (sequence is synthesized)
ccttttcttccaagcactatgtcagcatatgatgagacactcaggtatatgtttcctactagacttctcccctgcttaaatctaagtccgtgaaagcaggccctaccaccataccatccg

SEQ ID NO: 575065 - DNA, 120 bp, Artificial Sequence
  ENSG00000171311_20 (sequence is synthesized)
acttaagctgtctgattcaaggggctttctattcagtcattgttgggaatgttcttaacagtcctgagtttgttcatttcatagatatcacttgagtattttcatgtgtcaggcacagcg

SEQ ID NO: 575066 - DNA, 120 bp, Artificial Sequence
  ENSG00000171311_21 (sequence is synthesized)
ctgacttggtttctgctatcaaaggacacagacacaaattgtaaacaaataaatgctcaaatgagcatatggttacatatgtggtggtgctttgaaagaatattacagggcaccttgaga

SEQ ID NO: 575067 - DNA, 120 bp, Artificial Sequence
  ENSG00000171311_22 (sequence is synthesized)
acatgtaacaggcaaacccatcctagtcagcagaagtgacatttaagctgaatcatctaaagagtaggtaagagtcaggtgggtggagagagtgcagctctggcagaaagaataggttga

SEQ ID NO: 575068 - DNA, 120 bp, Artificial Sequence
  ENSG00000171311_23 (sequence is synthesized)
agagagatctgaaagtgggaagaatttagtaagttggggaaactgaaagaaggccaggagagctgaagcattgtgagcaacggagagattgataaaagatgaggctcaaaatatctgtct

SEQ ID NO: 575069 - DNA, 120 bp, Artificial Sequence
  ENSG00000171311_24 (sequence is synthesized)
tataccaacagccaataccatgctcaaagagaaaactctgcaagtattcacttaaaatagaagaaaacaagcatagccgctattatgtaacatttttgtggaaatttcagcctgtgcaat

SEQ ID NO: 575070 - DNA, 120 bp, Artificial Sequence
  ENSG00000171311_25 (sequence is synthesized)
tattatgtaacatttttgtggaaatttcagcctgtgcaataaaataagaaacagaaggaagcagtataactttggaggaaagagtaaattgtcggcagggcgcagtggctcacacctgta

SEQ ID NO: 575071 - DNA, 120 bp, Artificial Sequence
  ENSG00000171314_0 (sequence is synthesized)
gagaacttgcgcgggagccggactgagcggtgcgagcgcgcaggcgcggccgacggggcgggctgctactccggaatctgctaatcccagtcggtgccgcatccccagcccgccgccatg

SEQ ID NO: 575072 - DNA, 120 bp, Artificial Sequence
  ENSG00000171314_1 (sequence is synthesized)
gccgcctacaaactggtgctgatccggcacggcgagagcgcatggaacctggagaaccgcttcagcggctggtacgacgccgacctgagcccggcgggccacgaggaggcgaagcgcggc

SEQ ID NO: 575073 - DNA, 120 bp, Artificial Sequence
  ENSG00000171314_2 (sequence is synthesized)
gggcaggcgctacgagatgctggctatgagtttgacatctgcttcacctcagtgcagaagagagcgatccggaccctctggacagtgctagatgccattgatcagatgtggctgccagtg

SEQ ID NO: 575074 - DNA, 120 bp, Artificial Sequence
  ENSG00000171314_3 (sequence is synthesized)
gtgaggacttggcgcctcaatgagcggcactatgggggtctaaccggtctcaataaagcagaaactgctgcaaagcatggtgaggcccaggtgaagatctggaggcgctcctatgatgtc

SEQ ID NO: 575075 - DNA, 120 bp, Artificial Sequence
  ENSG00000171314_4 (sequence is synthesized)
ccaccacctccgatggagcccgaccatcctttctacagcaacatcagtaaggatcgcaggtatgcagacctcacagaagatcagctaccctcctgtgagagtctgaaggatactattgcc

SEQ ID NO: 575076 - DNA, 120 bp, Artificial Sequence
  ENSG00000171314_5 (sequence is synthesized)
agagctctgcccttctggaatgaagaaatagttccccagatcaaggaggggaaacgtgtactgattgcagcccatggcaacagcctccggggcattgtcaagcatctggagggtctctct

SEQ ID NO: 575077 - DNA, 120 bp, Artificial Sequence
  ENSG00000171314_6 (sequence is synthesized)
gaagaggctatcatggagctgaacctgccgactggtattcccattgtctatgaattggacaagaacttgaagcctatcaagcccatgcagtttctgggggatgaagagacggtgcgcaaa

SEQ ID NO: 575078 - DNA, 120 bp, Artificial Sequence
  ENSG00000171314_7 (sequence is synthesized)
catggaagctgtggctgcccagggcaaggccaagaagtgaaggccggcggggaggatactgtccccaggagcaccctccctgcccgtcttgtccctctgcccctcccacctgcacatgtc

SEQ ID NO: 575079 - DNA, 120 bp, Artificial Sequence
  ENSG00000171314_8 (sequence is synthesized)
acactgaccacatctgtagacatcttgagttgtagctgcagacggggaccagtggctcccattttcattttagccattttgtcgcctgcacccactcccttcatacaatctagtcagaat

SEQ ID NO: 575080 - DNA, 120 bp, Artificial Sequence
  ENSG00000171314_9 (sequence is synthesized)
agcagttctagagcacaggttctcagtctaagctatggaaaagctccccttatccaacagagtttaaaagtagtgacttgggtttttgcgagtgctttgtttactaaggactttggggag

SEQ ID NO: 575081 - DNA, 120 bp, Artificial Sequence
  ENSG00000171314_10 (sequence is synthesized)
gaaccatgctaagccatgaccagtgaggagaagcaacagagcctgtctgtccccatgagcggagtctgtcctctgctcttctgcagtcaggtcactgcctactgcctgggggctctagtc

SEQ ID NO: 575082 - DNA, 120 bp, Artificial Sequence
  ENSG00000171314_11 (sequence is synthesized)
attccagtggaagacgaatgtaacctgcgtggtgatgtgacaactgtttcctccctgaccccagaggatctggctctaggttgggatcaatcctgaatttcgttatgtgttaatttactt

SEQ ID NO: 575083 - DNA, 120 bp, Artificial Sequence
  ENSG00000171314_12 (sequence is synthesized)
ttattaaaaaagtatagtatatataatacaaaacaataacccttctggggtttcttgtggcggttgaaatagtcccacatgtggtcatcagaaaataagccattcctcataccaatatag

SEQ ID NO: 575084 - DNA, 120 bp, Artificial Sequence
  ENSG00000171314_13 (sequence is synthesized)
gatcagctccttgacctctgaggggcaggagtgcttcctggtgtgtgtattagaatcccttcctgccttgtttcatggcagtgaaatgcctcttggtcctgtccaagtgtatctttcact

SEQ ID NO: 575085 - DNA, 120 bp, Artificial Sequence
  ENSG00000171314_14 (sequence is synthesized)
gatttctgaatcatgttctagttgcttgaccctgccacatgggtccagtgttcatctgagcataactgtactaaatcctttttccatatcagtataataaaggagtgatgtgcaatagct

SEQ ID NO: 575086 - DNA, 120 bp, Artificial Sequence
  ENSG00000171314_15 (sequence is synthesized)
cagtgtcctcgccctagtcctgggtgaagtaacaggtaggtgtgaggaactggtaggcttttggctaaggacgctgggcaaaggtggaagtggctgtgagataatgcttgcctatccagg

SEQ ID NO: 575087 - DNA, 120 bp, Artificial Sequence
  ENSG00000171314_16 (sequence is synthesized)
cttgctcccgccccagtctgctctttgtggtgttggaatgctaataaggaagcattccctgctgccggcacggccaagaatccctggactgaagaggtgcttccgctgatgataggggca

SEQ ID NO: 575088 - DNA, 120 bp, Artificial Sequence
  ENSG00000171314_17 (sequence is synthesized)
gatcctcctttgctcccttctaacctctggacaaagaagcagccattcacaagggtcattgatgaggcacaggtatttggcctcagattgctctcctagcttcttgccttcactgtacca

SEQ ID NO: 575089 - DNA, 120 bp, Artificial Sequence
  ENSG00000171314_18 (sequence is synthesized)
gcggctacggatcctagcggatcgacacgccacacagcctcgtccccagcagtaggtggaggccctgggggtgcctaacaagcctcagaacaccaagaaatccgcgtggttgtgcaggtc

SEQ ID NO: 575090 - DNA, 120 bp, Artificial Sequence
  ENSG00000171314_19 (sequence is synthesized)
tttgctgttcagtagcattccacaaatagtgtgtccaaaacgcatctgtagatgtaacttgagtgaatgaatgaatgattcgagttgctccttctacccaataaagtagataagatttta

SEQ ID NO: 575091 - DNA, 120 bp, Artificial Sequence
  ENSG00000171316_0 (sequence is synthesized)
gctggggccgcggcggcggcggcggcggcggcggcagcggcggcggcggcggcggcgcgggggttgagtcgtggtggtgcggacgcgctcgtgctcgggaactatcggattaaacttgaa

SEQ ID NO: 575092 - DNA, 120 bp, Artificial Sequence
  ENSG00000171316_1 (sequence is synthesized)
tcggattaaacttgaatcgagtgaaattacacaaaggagcgccgcggaggaggcggcccggggacccggacaccctgaaactcaccagagacccgttcgcccccggccaactccgtgccc

SEQ ID NO: 575093 - DNA, 120 bp, Artificial Sequence
  ENSG00000171316_2 (sequence is synthesized)
gtggattcagccccctggccgcagctgccgagccaactccggagcccgctctgcgttttgttttcccctcggcactaggcagcggaggagcccgaccgacccggacctatatccagactt

SEQ ID NO: 575094 - DNA, 120 bp, Artificial Sequence
  ENSG00000171316_3 (sequence is synthesized)
tgcctgacactgcagggtccaagagaattaaagaaatatggaatgacatgaagaagattagttaaggattataggctttgagggcaaacacctcagtgaagtgaagcacaggcaagctcc

SEQ ID NO: 575095 - DNA, 120 bp, Artificial Sequence
  ENSG00000171316_4 (sequence is synthesized)
tgagctgtggtttggaggagccgtgtgttggaagaagatggcagatccaggaatgatgagtctttttggcgaggatgggaatattttcagtgaaggtcttgaaggcctcggagaatgtgg

SEQ ID NO: 575096 - DNA, 120 bp, Artificial Sequence
  ENSG00000171316_5 (sequence is synthesized)
ttacccggaaaatccagtaaatcctatgggtcagcaaatgccaatagaccaaggctttgcctctttacagccatcccttcatcatccttcaactaatcaaaatcaaacaaagctgacaca

SEQ ID NO: 575097 - DNA, 120 bp, Artificial Sequence
  ENSG00000171316_6 (sequence is synthesized)
ttttgatcactataatcagtatgaacaacaaaagatgcatctgatggatcagccgaacagaatgatgagcaacacccctgggaacggactcgcgtctccgcactcgcagtatcacacccc

SEQ ID NO: 575098 - DNA, 120 bp, Artificial Sequence
  ENSG00000171316_7 (sequence is synthesized)
tcccgttcctcaggtgccccatggtggcagtggtggcggtcagatgggtgtctaccctggcatgcagaatgagaggcatgggcaatcctttgtggacagcagctccatgtggggccccag

SEQ ID NO: 575099 - DNA, 120 bp, Artificial Sequence
  ENSG00000171316_8 (sequence is synthesized)
ggctgttcaggtaccagaccagatacgagccccctaccagcagcagcagccacagccgcagccaccgcagccggctccgtcggggccccctgcacagggccaccctcagcacatgcagca

SEQ ID NO: 575100 - DNA, 120 bp, Artificial Sequence
  ENSG00000171316_9 (sequence is synthesized)
gatgggcagctatatggcacgtggggatttttccatgcagcagcatggtcagccacagcagaggatgagccagttttcccaaggccaagagggcctcaatcagggaaatccttttattgc

SEQ ID NO: 575101 - DNA, 120 bp, Artificial Sequence
  ENSG00000171316_10 (sequence is synthesized)
cacctcaggacctggccacttgtcccacgtgccccagcagagtcccagcatggcaccttccttgcgtcactcggtgcagcagttccatcaccacccctctactgctctccatggagaatc

SEQ ID NO: 575102 - DNA, 120 bp, Artificial Sequence
  ENSG00000171316_11 (sequence is synthesized)
cgttgcccacagtcccagattctccccgaatcctccccaacaaggggctgttaggccgcaaacccttaactttagttctcggagccagacagtcccctctcctactataaacaactcagg

SEQ ID NO: 575103 - DNA, 120 bp, Artificial Sequence
  ENSG00000171316_12 (sequence is synthesized)
gcagtattctcgatatccttacagtaacctaaatcagggattagttaacaatacagggatgaatcaaaatttaggccttacaaataatactccaatgaatcagtccgtaccaagataccc

SEQ ID NO: 575104 - DNA, 120 bp, Artificial Sequence
  ENSG00000171316_13 (sequence is synthesized)
caatgctgtaggattcccatcaaacagtggtcaaggactaatgcaccagcagcccatccaccccagtggctcacttaaccaaatgaacacacaaactatgcatccttcacagcctcaggg

SEQ ID NO: 575105 - DNA, 120 bp, Artificial Sequence
  ENSG00000171316_14 (sequence is synthesized)
aacttatgcctctccacctcccatgtcacccatgaaagcaatgagtaatccagcaggcactcctcctccacaagtcaggccgggaagtgctgggataccaatggaagttggcagttatcc

SEQ ID NO: 575106 - DNA, 120 bp, Artificial Sequence
  ENSG00000171316_15 (sequence is synthesized)
aaatatgccccatcctcagccatctcaccagccccctggtgccatgggaatcggacagaggaatatgggccccagaaacatgcagcagtctcgtccatttataggcatgtcctcggcacc

SEQ ID NO: 575107 - DNA, 120 bp, Artificial Sequence
  ENSG00000171316_16 (sequence is synthesized)
aagggaattgactgggcacatgaggccaaatggttgtcctggtgttggccttggagacccacaagcaatccaggaacgactgatacctggccaacaacatcctggtcaacagccatcttt

SEQ ID NO: 575108 - DNA, 120 bp, Artificial Sequence
  ENSG00000171316_17 (sequence is synthesized)
tcagcagttgccaacctgtcctccactgcagcctcacccgggcttgcaccaccagtcttcacctccacaccctcatcaccagccttgggcacagctccacccatcaccccagaacacccc

SEQ ID NO: 575109 - DNA, 120 bp, Artificial Sequence
  ENSG00000171316_18 (sequence is synthesized)
gcagaaagtgcctgtgcatcagcattccccgtcggagccctttctagagaaaccagtgccggatatgactcaggttagtggaccgaatgctcagctagtgaagagtgatgattacctgcc

SEQ ID NO: 575110 - DNA, 120 bp, Artificial Sequence
  ENSG00000171316_19 (sequence is synthesized)
atcaatagaacagcagccacaacaaaagaagaagaaaaagaaaaacaaccacattgtagcagaggatcccagtaaaggttttggtaaagatgacttccctggtggggtagataaccaaga

SEQ ID NO: 575111 - DNA, 120 bp, Artificial Sequence
  ENSG00000171316_20 (sequence is synthesized)
actaaataggaactcactggatgggtcccaagaagaaaaaaagaaaaagaaaaggtcaaaggcaaaaaaagacccgaaggaaccgaaagaacccaaggagaaaaaagagcccaaggaacc

SEQ ID NO: 575112 - DNA, 120 bp, Artificial Sequence
  ENSG00000171316_21 (sequence is synthesized)
caagaccccgaaagcccctaagattcccaaagagccaaaggaaaagaaagcaaaaactgccacgccaaaacccaaatccagcaaaaagtcaagtaataagaaacctgactcagaagcaag

SEQ ID NO: 575113 - DNA, 120 bp, Artificial Sequence
  ENSG00000171316_22 (sequence is synthesized)
tgctttgaagaaaaaggtcaacaagggaaaaacagaaggttctgaaaattcagacttagacaaaacacccccaccatctcctcctcctgaagaagatgaggacccaggtgttcagaagag

SEQ ID NO: 575114 - DNA, 120 bp, Artificial Sequence
  ENSG00000171316_23 (sequence is synthesized)
acggtccagcagacaggtgaagagaaagcgctacactgaagacctggagttcaagatttctgatgaggaggcagatgatgcagatgctgctgggagggattccccctccaacacctccca

SEQ ID NO: 575115 - DNA, 120 bp, Artificial Sequence
  ENSG00000171316_24 (sequence is synthesized)
gtcagaacagcaggaatctgttgatgcagaaggcccagtggtagaaaaaattatgagcagtcgttcagtaaaaaagcagaaggaatctggagaggaggtagaaattgaggaattctatgt

SEQ ID NO: 575116 - DNA, 120 bp, Artificial Sequence
  ENSG00000171316_25 (sequence is synthesized)
gaaatacaaaaacttctcttatcttcattgtcagtgggcatctatagaagatctggaaaaagataagagaattcagcaaaaaattaaacgatttaaggcaaagcagggccagaacaagtt

SEQ ID NO: 575117 - DNA, 120 bp, Artificial Sequence
  ENSG00000171316_26 (sequence is synthesized)
cctttcagagattgaggatgagctttttaatccagattatgtggaggttgaccggataatggactttgcacgtagcacagatgaccggggagagcctgtgactcactatctggtgaagtg

SEQ ID NO: 575118 - DNA, 120 bp, Artificial Sequence
  ENSG00000171316_27 (sequence is synthesized)
gtgttcacttccttatgaagacagcacgtgggagcggaggcaggacatagatcaagcaaagatcgaggagtttgagaaactaatgtccagggagccggaaacagagcgtgtggagcgacc

SEQ ID NO: 575119 - DNA, 120 bp, Artificial Sequence
  ENSG00000171316_28 (sequence is synthesized)
tcctgctgatgattggaagaaatcggagagttccagggagtataaaaacaataacaaactcagggaataccagttggagggagtaaactggctacttttcaattggtacaacatgcgaaa

SEQ ID NO: 575120 - DNA, 120 bp, Artificial Sequence
  ENSG00000171316_29 (sequence is synthesized)
ctgcattttagcagatgaaatgggtttgggaaaaactatccagtccattacatttctctatgagatatatttgaaaggaatccatggcccttttttagtaattgccccattgtccacaat

SEQ ID NO: 575121 - DNA, 120 bp, Artificial Sequence
  ENSG00000171316_30 (sequence is synthesized)
ccccaactgggaaagggaattccgaacctggacagagttgaacgtggttgtgtatcatgggagtcaagctagtcgtcggaccattcagttgtatgaaatgtacttcaaagatccccaggg

SEQ ID NO: 575122 - DNA, 120 bp, Artificial Sequence
  ENSG00000171316_31 (sequence is synthesized)
tcgagtgataaaggggtcctataagtttcatgccatcatcactacatttgagatgattttgactgattgtcctgagctgcggaatattccatggcgctgtgtagtcattgatgaagccca

SEQ ID NO: 575123 - DNA, 120 bp, Artificial Sequence
  ENSG00000171316_32 (sequence is synthesized)
caggctgaagaacaggaactgcaagctgttggagggactcaagatgatggacttggaacacaaagtgctgctgacgggaaccccactccagaacactgtggaagaactcttcagcttgct

SEQ ID NO: 575124 - DNA, 120 bp, Artificial Sequence
  ENSG00000171316_33 (sequence is synthesized)
tcatttcttggaaccaagtcgcttcccttcagaaaccacatttatgcaagaatttggtgatctaaaaacagaagagcaggtgcaaaaacttcaagctattctaaagccaatgatgttgag

SEQ ID NO: 575125 - DNA, 120 bp, Artificial Sequence
  ENSG00000171316_34 (sequence is synthesized)
acgtctcaaagaggatgtagaaaagaacttggcccccaaagaagaaactattattgaagttgagctaacaaacattcagaagaaatattaccgagccatccttgagaagaatttcacatt

SEQ ID NO: 575126 - DNA, 120 bp, Artificial Sequence
  ENSG00000171316_35 (sequence is synthesized)
tctttccaaaggcggtggtcaagctaacgtacctaacctattaaacactatgatggaattgcggaagtgctgcaatcatccgtaccttatcaatggtgctgaagagaaaattttggaaga

SEQ ID NO: 575127 - DNA, 120 bp, Artificial Sequence
  ENSG00000171316_36 (sequence is synthesized)
gtttaaagaaacacacaatgcagagtctccagattttcagctccaggcaatgatccaggctgctggcaagctagtgctgattgacaagctgctgccaaaactgaaggctggtggccacag

SEQ ID NO: 575128 - DNA, 120 bp, Artificial Sequence
  ENSG00000171316_37 (sequence is synthesized)
ggtgcttatcttttcccagatggtgcgctgcttggacatactggaagactacctcattcaaagacggtacccatatgaaaggatcgacggccgagtaagaggcaacctccgccaggcagc

SEQ ID NO: 575129 - DNA, 120 bp, Artificial Sequence
  ENSG00000171316_38 (sequence is synthesized)
tatcgacagattctccaaacctgattctgataggtttgttttcctcctgtgtacaagggcaggaggtttaggcattaacctcactgctgctgatacctgcatcatctttgattcagactg

SEQ ID NO: 575130 - DNA, 120 bp, Artificial Sequence
  ENSG00000171316_39 (sequence is synthesized)
gaatccccaaaatgacctccaggctcaggctagatgtcatagaataggacagagcaaatctgtgaaaatctacaggctgattacaagaaattcctatgaaagggaaatgttcgacaaggc

SEQ ID NO: 575131 - DNA, 120 bp, Artificial Sequence
  ENSG00000171316_40 (sequence is synthesized)
tagtttgaaactgggcctggataaagctgtgctacagtctatgagtggaagagaaaatgctaccaatggggtacaacagctttccaagaaagaaatagaggatcttctacgaaaaggggc

SEQ ID NO: 575132 - DNA, 120 bp, Artificial Sequence
  ENSG00000171316_41 (sequence is synthesized)
ctatggtgcactcatggatgaggaggatgaagggtctaaattctgtgaagaagatattgatcagatcctcctacgtcgaacccacaccattaccattgagtcagaagggaaaggttccac

SEQ ID NO: 575133 - DNA, 120 bp, Artificial Sequence
  ENSG00000171316_42 (sequence is synthesized)
atttgctaaggccagttttgttgcatctggaaataggacagatatttccttggatgatccaaatttctggcaaaagtgggctaagaaggctgaattggatattgatgccttaaatgggag

SEQ ID NO: 575134 - DNA, 120 bp, Artificial Sequence
  ENSG00000171316_43 (sequence is synthesized)
gaacaacctggttattgatactccaagagtgagaaagcagaccaggctctacagtgcagtgaaggaagatgagctgatggagttctcagacttggaaagtgattctgaagaaaagccctg

SEQ ID NO: 575135 - DNA, 120 bp, Artificial Sequence
  ENSG00000171316_44 (sequence is synthesized)
tgcaaagccacggcgtccccaggataagtcacagggctatgcaaggagtgaatgtttcagggtggagaagaatctgcttgtctatggttggggacggtggacagacattctttcccacgg

SEQ ID NO: 575136 - DNA, 120 bp, Artificial Sequence
  ENSG00000171316_45 (sequence is synthesized)
acgctataaacgccaactcactgagcaagatgtagaaaccatctgcagaaccatcctggtgtactgtcttaatcattacaaaggggatgagaatatcaaaagcttcatctgggatctgat

SEQ ID NO: 575137 - DNA, 120 bp, Artificial Sequence
  ENSG00000171316_46 (sequence is synthesized)
cacacccacagcggatggccagactcgagccttggtcaaccattccggtttgtcagctcctgtgccaaggggaaggaagggaaagaaggtgaaagcccagagcacacagccggtggtgca

SEQ ID NO: 575138 - DNA, 120 bp, Artificial Sequence
  ENSG00000171316_47 (sequence is synthesized)
ggatgccgactggctggccagctgcaacccagatgccctgttccaggaggacagctacaagaaacacctgaagcatcactgtaacaaggtcctgctgcgtgtccgcatgctgtactacct

SEQ ID NO: 575139 - DNA, 120 bp, Artificial Sequence
  ENSG00000171316_48 (sequence is synthesized)
tccatgctgaagttcctgcagattggtgggataaggaagcagacaaatccctcttaattggagtgttcaaacatggctatgagaagtacaactccatgcgagctgaccccgcgctgtgct

SEQ ID NO: 575140 - DNA, 120 bp, Artificial Sequence
  ENSG00000171316_49 (sequence is synthesized)
ttctggaacgagtcggtatgcctgatgccaaggccatagctgccgagcaaagaggaacagacatgctagcagatggtggtgacgggggagaatttgatagagaagatgaagacccagaat

SEQ ID NO: 575141 - DNA, 120 bp, Artificial Sequence
  ENSG00000171316_50 (sequence is synthesized)
ataaaccaaccagaacaccgttcaaagatgaaatagatgaatttgcaaattctccttcagaggataaggaagaatccatggaaatacatgccacaggcaagcacagtgagagtaatgctg

SEQ ID NO: 575142 - DNA, 120 bp, Artificial Sequence
  ENSG00000171316_51 (sequence is synthesized)
agttaggccaactttactggcctaacacttcaaccctgactacacgtctgcgccggctcattactgcctatcagcgcagctataaaaggcaacagatgaggcaagaggccctaatgaaga

SEQ ID NO: 575143 - DNA, 120 bp, Artificial Sequence
  ENSG00000171316_52 (sequence is synthesized)
ctgaccggcgcagacggcggcctcgagaggaagtgagagctctggaagcggaaagggaagctattatatctgagaagcggcaaaagtggacaagaagagaagaggctgatttttaccgtg

SEQ ID NO: 575144 - DNA, 120 bp, Artificial Sequence
  ENSG00000171316_53 (sequence is synthesized)
tggtatccacctttggggttatttttgaccctgtgaaacagcaatttgactggaaccaatttagagcctttgccaggcttgacaaaaaatctgatgagagtttggagaaatacttcagtt

SEQ ID NO: 575145 - DNA, 120 bp, Artificial Sequence
  ENSG00000171316_54 (sequence is synthesized)
gttttgtggccatgtgtaggcgagtatgtcgaatgcccgtcaagccagatgatgaaccgcccgacctctcctccataattgagccgatcacagaggagcgagcctctcgaactctgtacc

SEQ ID NO: 575146 - DNA, 120 bp, Artificial Sequence
  ENSG00000171316_55 (sequence is synthesized)
gcattgagctgctacggaagatccgcgagcaggttctccatcacccccagctgggagagaggcttaagctctgccagccaagcttggatctgccagagtggtgggagtgtggacggcatg

SEQ ID NO: 575147 - DNA, 120 bp, Artificial Sequence
  ENSG00000171316_56 (sequence is synthesized)
accgagacttgctggttggtgctgctaaacacggggtcagtcggacggattatcacatcctcaatgaccctgagttatccttcttggatgcacataaaaactttgctcaaaacagagggg

SEQ ID NO: 575148 - DNA, 120 bp, Artificial Sequence
  ENSG00000171316_57 (sequence is synthesized)
caggtaatacatcttccttgaacccactggcagttggatttgtccagactcctccagtcatctcatctgctcatattcaagatgagagggtactggaacaagccgaaggcaaagtggagg

SEQ ID NO: 575149 - DNA, 120 bp, Artificial Sequence
  ENSG00000171316_58 (sequence is synthesized)
agcctgaaaacccagctgccaaggagaaatgtgagggcaaagaagaggaagaagaaaccgatggcagcgggaaggagagcaagcaggaatgtgaggcagaggccagctctgtgaaaaatg

SEQ ID NO: 575150 - DNA, 120 bp, Artificial Sequence
  ENSG00000171316_59 (sequence is synthesized)
aactgaaaggtgttgaggtcggcgcagacactgggtccaaatctatttcagagaaaggttccgaagaggatgaagaggaaaagctggaggatgacgataagtcggaagagtcttcccagc

SEQ ID NO: 575151 - DNA, 120 bp, Artificial Sequence
  ENSG00000171316_60 (sequence is synthesized)
ccgaagcaggagctgtctctagagggaagaattttgatgaagaaagcaatgcttccatgagcactgctagagatgaaacccgagatggattctacatggaggacggagatccttcagtag

SEQ ID NO: 575152 - DNA, 120 bp, Artificial Sequence
  ENSG00000171316_61 (sequence is synthesized)
ctcagctccttcatgaaagaacatttgccttctcgttttggcctaaggatagagtaatgataaaccgcttagacaacatctgtgaagcagtgttgaaaggcaaatggccagtaaataggc

SEQ ID NO: 575153 - DNA, 120 bp, Artificial Sequence
  ENSG00000171316_62 (sequence is synthesized)
gccagatgtttgatttccaaggcctcatcccaggttacacacccaccacagtggacagccccttgcagaagaggagctttgctgagctctccatggtcggccaagccagcattagtggga

SEQ ID NO: 575154 - DNA, 120 bp, Artificial Sequence
  ENSG00000171316_63 (sequence is synthesized)
gtgaggacatcactacgtctcctcagttgtcaaaggaagatgccctcaacctctctgtccctcgccagcggaggaggaggaggagaaaaatcgaaattgaggccgaaagagctgccaaga

SEQ ID NO: 575155 - DNA, 120 bp, Artificial Sequence
  ENSG00000171316_64 (sequence is synthesized)
ggcgaaatctcatggagatggttgcccagcttcgagagtctcaggtggtctcagaaaatggacaagaaaaagttgtagatttatcaaaggcctcaagagaggcaacaagctctacctcaa

SEQ ID NO: 575156 - DNA, 120 bp, Artificial Sequence
  ENSG00000171316_65 (sequence is synthesized)
atttttcatctctttcttcaaagtttatcttgcctaatgtctcaacaccagtgtctgatgcctttaagactcaaatggaactgctccaagcaggcctttcgcgcacacccacaaggcatc

SEQ ID NO: 575157 - DNA, 120 bp, Artificial Sequence
  ENSG00000171316_66 (sequence is synthesized)
tccttaatggctccctagtggatggagagcctcccatgaagaggaggcggggaaggaggaaaaatgtggagggacttgatctgcttttcatgagccacaaacggacgtcattgagtgcag

SEQ ID NO: 575158 - DNA, 120 bp, Artificial Sequence
  ENSG00000171316_67 (sequence is synthesized)
aggatgctgaggtgaccaaagcttttgaagaagatatagagaccccaccaacaagaaacattccttctcccggacagctggacccagacacacggatccctgttatcaatcttgaagatg

SEQ ID NO: 575159 - DNA, 120 bp, Artificial Sequence
  ENSG00000171316_68 (sequence is synthesized)
ggactaggctggtgggggaagatgctcctaaaaataaggatttagttgaatggctgaagctgcaccctacttacactgttgatatgccaagttatgtaccaaagaatgcagatgtgctgt

SEQ ID NO: 575160 - DNA, 120 bp, Artificial Sequence
  ENSG00000171316_69 (sequence is synthesized)
tttcctcatttcagaaaccgaaacagaaacgacatagatgtcgaaaccctaataaattggatataaacactttgacaggagaagaaagggtgcctgttgtcaataaacgaaatgggaaga

SEQ ID NO: 575161 - DNA, 120 bp, Artificial Sequence
  ENSG00000171316_70 (sequence is synthesized)
agatgggtggagctatggcgcctccaatgaaggatctacccaggtggctggaagaaaatcctgaatttgcagttgctccagactggactgatatagttaagcagtctggttttgttcctg

SEQ ID NO: 575162 - DNA, 120 bp, Artificial Sequence
  ENSG00000171316_71 (sequence is synthesized)
agtcgatgtttgaccgccttctcactgggcctgtagtgcggggagagggagcgagcagaagaggaagaaggcccaaaagtgagatcgccagagcagccgcggccgccgctgctgtggcct

SEQ ID NO: 575163 - DNA, 120 bp, Artificial Sequence
  ENSG00000171316_72 (sequence is synthesized)
ccacgtcagggatcaaccctttgctggtgaacagcctgtttgctggaatggacctgacgagccttcagaatctccagaatctccagtcgctccagctggcaggcctcatgggcttccctc

SEQ ID NO: 575164 - DNA, 120 bp, Artificial Sequence
  ENSG00000171316_73 (sequence is synthesized)
caggactggcaacagctgccaccgccggaggcgatgcgaagaaccctgctgctgtgctgcccctgatgctgccaggaatggcgggcctgcccaacgtgtttggcttgggcgggctgttga

SEQ ID NO: 575165 - DNA, 120 bp, Artificial Sequence
  ENSG00000171316_74 (sequence is synthesized)
ataaccctctgtcagctgctactggaaacaccactactgcttctagtcaaggagaaccggaagacagcacttcaaaaggagaggagaaaggaaatgagaatgaagacgagaacaaagact

SEQ ID NO: 575166 - DNA, 120 bp, Artificial Sequence
  ENSG00000171316_75 (sequence is synthesized)
ctgagaaaagcacagatgctgtttcggctgctgactctgcgaatggatctgttggtgctgctactgccccggctggattgccctcaaacccgctagccttcaaccctttcctcctgtcca

SEQ ID NO: 575167 - DNA, 120 bp, Artificial Sequence
  ENSG00000171316_76 (sequence is synthesized)
caatggccccgggcctcttctacccatccatgtttctacctccaggactggggggattgacgctgcctgggttcccagcattggcaggacttcagaatgccgtgggctccagcgaagaaa

SEQ ID NO: 575168 - DNA, 120 bp, Artificial Sequence
  ENSG00000171316_77 (sequence is synthesized)
aggctgctgacaaggctgagggaggaccctttaaagatggagagacccttgaaggcagcgatgccgaggagagcctggataagactgcagagtcctccctcttagaagacgaaatagcac

SEQ ID NO: 575169 - DNA, 120 bp, Artificial Sequence
  ENSG00000171316_78 (sequence is synthesized)
agggtgaagagctagactcacttgatgggggggatgaaatagaaaacaatgaaaatgatgaataaccagtaccagttccagttcaagtgtttaaaacttttgacaagtggtagtcctact

SEQ ID NO: 575170 - DNA, 120 bp, Artificial Sequence
  ENSG00000171316_79 (sequence is synthesized)
gtttacactcacagttaatgttcatacctagttttataagctgttctgtaacatagtgtagcaaaaaaaaaagttcaagtcatgttatacaggtgtgtcaaaaggtatcttggtcattaa

SEQ ID NO: 575171 - DNA, 120 bp, Artificial Sequence
  ENSG00000171316_80 (sequence is synthesized)
gtattgtgcagtgcattatttattatccctaggagagatgaaatttgagaggtgatcatgtctttttaaggaaacttacataatgctctgctttttttttttctcttggtaccattggta

SEQ ID NO: 575172 - DNA, 120 bp, Artificial Sequence
  ENSG00000171316_81 (sequence is synthesized)
ttataataaagagcaatttgtaactgagtggcactaatggaagaaagtgctgctcaaaggaagtatgaagttatatatttaattttttaattttaatttttaatttttttgctgtgaagg

SEQ ID NO: 575173 - DNA, 120 bp, Artificial Sequence
  ENSG00000171316_82 (sequence is synthesized)
tcaagctgaaatttaccatacatatcatacttgctcatttgtttccctttttgactgtatgggggttcccacactcgtgcatacacacacatccatacactctgacaatctccacgctag

SEQ ID NO: 575174 - DNA, 120 bp, Artificial Sequence
  ENSG00000171316_83 (sequence is synthesized)
tgtgaacgcctctgtcccgaggcgcagcaataataaggcagctgttgaatgtgaagggtccctttggaaaattaacctactgggagggttcttgccagacagaactacagttccattgtc

SEQ ID NO: 575175 - DNA, 120 bp, Artificial Sequence
  ENSG00000171316_84 (sequence is synthesized)
tcgtggtcttgtaatgcactggtaaaaacaaaataaatagatgaataaataaagagtgagagaagagagaatcaggtaccttttttaaattaaaggactttgttactttagccacaaagc

SEQ ID NO: 575176 - DNA, 120 bp, Artificial Sequence
  ENSG00000171316_85 (sequence is synthesized)
taaaacagcattacctcagctctaaactagccttgaagtttacagacatgactttgtaaatgtattgtttttctttgttgtgatgtccttttatttttttctttgaaaactgctatcatg

SEQ ID NO: 575177 - DNA, 120 bp, Artificial Sequence
  ENSG00000171316_86 (sequence is synthesized)
taagataaaatgtaaattgctgccaactgtagtaatgatgcttttaataaaagtgacccatgatatgcagagatgtaattatagaatgtagtatatagggaaactggtgttcactctatt

SEQ ID NO: 575178 - DNA, 120 bp, Artificial Sequence
  ENSG00000171316_87 (sequence is synthesized)
ttttttgtattcgcaatagatgcaaatacagcattctggcttttgtacagtttcttgatatatcctcttatactagattagcttttggtaagacactaaactgtctcgaagactagacag

SEQ ID NO: 575179 - DNA, 120 bp, Artificial Sequence
  ENSG00000171316_88 (sequence is synthesized)
gaaggaaaaccttgaattactctcacataattccactccagatatctcaacagaaatgcatacaaaaagctcctattactccctcaaaagggcatctgagaccgagaatacttagaaatg

SEQ ID NO: 575180 - DNA, 120 bp, Artificial Sequence
  ENSG00000171316_89 (sequence is synthesized)
tgtgcagcgtgtgataatgtggtacactgaagaacaaaagggcaaaagaaaaatgaggctttaacaggcacaatatctaggtcatttatccttggttaatgggtagaaaaacacaatgcg

SEQ ID NO: 575181 - DNA, 120 bp, Artificial Sequence
  ENSG00000171316_90 (sequence is synthesized)
gtagtgtcagcaagggacacaaaggcactctggtgtcctgcagaccagcgctcgatgccagaaaccagtgtgtggaaaaacccatgtggaattgaaacagacccacttaagcacgcacgc

SEQ ID NO: 575182 - DNA, 120 bp, Artificial Sequence
  ENSG00000171316_91 (sequence is synthesized)
gcgcacgcacggtctcaggagctactgatttgtggacccctttttgacctttggtatttaaagtaaaatataatttgagatctactgttttcacctttttatgtcacctgaaccaacaca

SEQ ID NO: 575183 - DNA, 120 bp, Artificial Sequence
  ENSG00000171316_92 (sequence is synthesized)
aagccatatttccatccagttaaaaagcaggggaagggatgtggacgagagtgtttcgtgtgtgttgccttcctccacacccttcccccaggacgtccgcacacagtccacctccagcca

SEQ ID NO: 575184 - DNA, 120 bp, Artificial Sequence
  ENSG00000171316_93 (sequence is synthesized)
gtgtgctgccagacaggtggtctaaattcctcccagactgtgagattcagttcgtttatgccccaagatgaaaatatgccccttaatgattctgggaaagaaacaacctgaaccctccac

SEQ ID NO: 575185 - DNA, 120 bp, Artificial Sequence
  ENSG00000171316_94 (sequence is synthesized)
cttacagatcctgtgattgcttttatttatcatcgtcgttgtctgctgaaagtgaatgggccgtgcacactggaggaaagtgccttgaagagaatattttttgaaagggaattatttgaa

SEQ ID NO: 575186 - DNA, 120 bp, Artificial Sequence
  ENSG00000171316_95 (sequence is synthesized)
cacgggaaagtgaaactaggtctgcatgaagtataggaaatttaagtatttaagtaacaaagatgttagcagggagaatttgcttaataaaatgagtcattaaagggtgttttttttaaa

SEQ ID NO: 575187 - DNA, 120 bp, Artificial Sequence
  ENSG00000171316_96 (sequence is synthesized)
agaaaaactttaagtgaggttattgatagataaaaggaaaagccaattctcacttatgtattccttaatggacgggtaaaataggagttttttctttcaaagagaaaaatatggtttcta

SEQ ID NO: 575188 - DNA, 120 bp, Artificial Sequence
  ENSG00000171316_97 (sequence is synthesized)
atattaataattaaaatgattcttgaaacttccataataattgaagatgatctgacagttctctttggcatttatatagagaagaataagtactaaataccaattttactaaatatgttt

SEQ ID NO: 575189 - DNA, 120 bp, Artificial Sequence
  ENSG00000171316_98 (sequence is synthesized)
aataatcatcctaatcaccataacagggctgtctggtttaaaacaacacaaaaaatgagcttcagtcagcctaccccccaggctcgtctttcccagtattattgtgtaagaaacaaggat

SEQ ID NO: 575190 - DNA, 120 bp, Artificial Sequence
  ENSG00000171316_99 (sequence is synthesized)
agtttagagttggaaggaatcttgcaggccggtccacttcattcccttacaacatagaaatccctgacagctggtccctctgccttttccttgaatgtttcctggtctcaaacatttccc

SEQ ID NO: 575191 - DNA, 120 bp, Artificial Sequence
  ENSG00000171316_100 (sequence is synthesized)
aggtctttgttgttgaatcttcttcattacagatactagcttcaggtctgtcttactgaaggcagccttacagttatttgaagatgcgcgttatgcatttccttactgtttgcttctccc

SEQ ID NO: 575192 - DNA, 80 bp, Artificial Sequence
  ENSG00000171316_101 (sequence is synthesized)
ttgggctccaactcaagtgcgagcgggcgatgggcgcgcgggcgcggggcggctgagcagcggcggcggcggctcgggga

SEQ ID NO: 575193 - DNA, 120 bp, Artificial Sequence
  ENSG00000171316_102 (sequence is synthesized)
gaccgaccacgccgcgctcgccgggagctgcggccgcaccggcgcgaacaaagtgcgttcctcccggcgcggcggcgccagcccgcgcggggaccgccaccgagcgaggacctatatcca

SEQ ID NO: 575194 - DNA, 120 bp, Artificial Sequence
  ENSG00000171316_103 (sequence is synthesized)
actcatgtgacttcttcagttattctttccatggcatcgtttccaggcagtcttagtattggggtaacactgttgaatgcactttctccagtctccagacgaggccccgccatcccagag

SEQ ID NO: 575195 - DNA, 120 bp, Artificial Sequence
  ENSG00000171316_104 (sequence is synthesized)
tgctatgaagccaattacttccagagatttgaccagttagtgcagcccaagattgtattagctgcttttatggcaactaatcctggtgccttatattaaacgttagacagttcatatctc

SEQ ID NO: 575196 - DNA, 120 bp, Artificial Sequence
  ENSG00000171316_105 (sequence is synthesized)
caaatggtttgtcacacgaactgtttgctagctagcaatgcaagtcttttgctttctgtatttatgtgattgattttttaaaacttaaatgtagagttttacattttattttgttgggtt

SEQ ID NO: 575197 - DNA, 120 bp, Artificial Sequence
  ENSG00000171316_106 (sequence is synthesized)
cagcctagagttcttgccactcagaaagtacccccaccccctacaagatctgtctgtttgttggttagttctcattacagacagtctcatgttgttgatggggtatcatctctgtgttca

SEQ ID NO: 575198 - DNA, 120 bp, Artificial Sequence
  ENSG00000171316_107 (sequence is synthesized)
ctgggaaagggaattgatcactatgcgatttcttagcccagaaggaagtgttttatcctgccttcttctataggggaaaagaatcctgtctgcccgaatgcgtgtgtgcgtgtatgtgtg

SEQ ID NO: 575199 - DNA, 120 bp, Artificial Sequence
  ENSG00000171316_108 (sequence is synthesized)
tccttagtctttcttattttctgttggccattaattattcagttgtaacttagcttaaaagaattgacataatacatcattttcatacatcatttcatacatcattaatacatcattaat

SEQ ID NO: 575200 - DNA, 120 bp, Artificial Sequence
  ENSG00000171316_109 (sequence is synthesized)
ccaaagtgaattcatttatcagctccaatttaaaaggtttgtatggaaacatacattcacaatcttagaggtagacttctccaggggggattgccccagctaagcctacttaacagctca

SEQ ID NO: 575201 - DNA, 120 bp, Artificial Sequence
  ENSG00000171316_110 (sequence is synthesized)
aacaaaacaaaacaaaacaaaacaaaaatacaacagttctgcctaaaagatttgttaccattagctttttaaaaattcgttcatgacatgctggttctttgttttaattatacattaaaa

SEQ ID NO: 575202 - DNA, 120 bp, Artificial Sequence
  ENSG00000171316_111 (sequence is synthesized)
tcatgacatgctggttctttgttttaattatacattaaaaatgtctttcggtgtaacattctgttgatcttaacacacgtgtgagtttgtgaactgacaccgtagtcagaatagggttcc

SEQ ID NO: 575203 - DNA, 120 bp, Artificial Sequence
  ENSG00000171316_112 (sequence is synthesized)
atcccccacccccaccaccccgagttccctcacaccgtcctttccccgaccccagcccctggctgccgctgacctgttgtccatccctgtctttttgagaatgtcctgaaatggaagcat

SEQ ID NO: 575204 - DNA, 120 bp, Artificial Sequence
  ENSG00000171316_113 (sequence is synthesized)
gaaggacataagtcttgaagcagtttctttcgctcatcatatggaaggtcatcgatggtcacatgtgtcacagttatctcctttctgttgccaagtagctgtctccattgcatagatgtg

SEQ ID NO: 575205 - DNA, 120 bp, Artificial Sequence
  ENSG00000171316_114 (sequence is synthesized)
acactggacggcttagccctcacacactgaaggacatctgggttatttcctgatttttgaaactatgattagagctgctataagcaattgtgtacaggttttggtgtgaacataagtttt

SEQ ID NO: 575206 - DNA, 120 bp, Artificial Sequence
  ENSG00000171316_115 (sequence is synthesized)
catttttctagggtagatactaaaatataattacattttccatatttcaaaaatacttttacatatatttgaaatatccaaaataacacattatagagggcataaaacatcctgggttta

SEQ ID NO: 575207 - DNA, 80 bp, Artificial Sequence
  ENSG00000171316_116 (sequence is synthesized)
aaataacacattatagagggcataaaacatcctgggtttatattatgttatactattttataatttttctcccatacagg

SEQ ID NO: 575208 - DNA, 120 bp, Artificial Sequence
  ENSG00000171316_117 (sequence is synthesized)
ctcccacctcagcctcccaagcagctggcactacaggcacacatcaccaagcttggctagtttttgtattttttgtagagaaggcattttgccacgttgcccaggctggtctcaaactca

SEQ ID NO: 575209 - DNA, 120 bp, Artificial Sequence
  ENSG00000171316_118 (sequence is synthesized)
aagcttggctagtttttgtattttttgtagagaaggcattttgccacgttgcccaggctggtctcaaactcacctcaagcaatctgcctgccctgacctcccaaagtgctgagattacag

SEQ ID NO: 575210 - DNA, 120 bp, Artificial Sequence
  ENSG00000171316_119 (sequence is synthesized)
attgacagatatttaattgacaaaaattaattgatgaatcaaatatatatgcaaggtgtacagcacagtgtttttttcttttaagagacagggtcttgctgtgtcacccaggctggagtg

SEQ ID NO: 575211 - DNA, 87 bp, Artificial Sequence
  ENSG00000171316_120 (sequence is synthesized)
ttagccaagtagctgggatgacaagcatatgccaccacacctggatattttttttttattttgtagagatagggtcttgctatgtgc

SEQ ID NO: 575212 - DNA, 89 bp, Artificial Sequence
  ENSG00000171316_121 (sequence is synthesized)
agtagctgggatgacaagcatatgccaccacacctggatattttttttttattttgtagagatagggtcttgctatgtgcaaatcctct

SEQ ID NO: 575213 - DNA, 120 bp, Artificial Sequence
  ENSG00000171316_122 (sequence is synthesized)
cacggcacctggcttcaaagtgatgatttgatataattatacattatgtactttcctttttaaaaatttgttatgggtacatagtaggtgtatatatagggtacatgagatattttgtac

SEQ ID NO: 575214 - DNA, 120 bp, Artificial Sequence
  ENSG00000171316_123 (sequence is synthesized)
aagcacacagtgcataatgatcatgttgggtagatgaggtatgcatcacctcaagcatttaccctttgtattacaaacaatgtgattatactcttttagttattttaaaatatacagtaa

SEQ ID NO: 575215 - DNA, 120 bp, Artificial Sequence
  ENSG00000171316_124 (sequence is synthesized)
attattgttgactgtgtagtcaccctgttgtgttatcaaaaactagatcttactcatcctgtctaactctatttttgtaccccataatgtactttctgatgtatgatttcttgagttagt

SEQ ID NO: 575216 - DNA, 120 bp, Artificial Sequence
  ENSG00000171316_125 (sequence is synthesized)
tatggatgcagctaacttgacatttacctcactgatgagtagccttgagcaatttttctgcagttcagcaagctaacataataataaaaacaagttttgctgtcattaagttttatcatt

SEQ ID NO: 575217 - DNA, 120 bp, Artificial Sequence
  ENSG00000171316_126 (sequence is synthesized)
gagctgttaggagggaagaactacttaggtatttccatttggaatggcaggttcaccacagaggctcacattgagatcaagttgtcttcgacagcctttatagccactgtttgcctcccc

SEQ ID NO: 575218 - DNA, 120 bp, Artificial Sequence
  ENSG00000171316_127 (sequence is synthesized)
tgtactccagggttttgttcctgagtcgatgtttgaccgccttctcactgggcctgtagtgcggggagagggagcgagcagaagaggaagaaggcccaaaagtgagatcgccagagcagc

SEQ ID NO: 575219 - DNA, 120 bp, Artificial Sequence
  ENSG00000171316_128 (sequence is synthesized)
caccagccttgggcacagctccacccatcaccccagaacaccccgcagaaagtgcctgtgcatcagcattccccgtcggagccctttctagagaaaccagtgccggatatgactcagtaa

SEQ ID NO: 575220 - DNA, 120 bp, Artificial Sequence
  ENSG00000171316_129 (sequence is synthesized)
ggaactgcaagctgttggagggactcaagatgatggacttggtcagtgaccatattggtgattgcactgaacctgaatagaattgttgctgacttgatagtcccgttgctcagaatttga

SEQ ID NO: 575221 - DNA, 120 bp, Artificial Sequence
  ENSG00000171316_130 (sequence is synthesized)
tgcctgtaaacagtatttgaaaagcttgtcaaatattgtgatatattctctggcactttcagttattcaaaagttgttgccttttggattcttacattgttggctagtgtctgttaaaca

SEQ ID NO: 575222 - DNA, 120 bp, Artificial Sequence
  ENSG00000171316_131 (sequence is synthesized)
gttgtattatagcagagtgtaatcatgatagtttcactaaagtgagtttcaagtatttgttttaccctttgttcataaatacaggttgatcataccaaatacaaaaatcccagaatccaa

SEQ ID NO: 575223 - DNA, 120 bp, Artificial Sequence
  ENSG00000171316_132 (sequence is synthesized)
aacgttttgagtacccacataatgctaaaaggaaatgctcattggagcattttggattttggattttctcatttgggatgttcaacccgtaagtataaatgcagatattccaaaatctaa

SEQ ID NO: 575224 - DNA, 120 bp, Artificial Sequence
  ENSG00000171316_133 (sequence is synthesized)
aaatatctgaaatctgaaacactctggtcccaagaattttggataagggatacttaacctgtactgccatttcattaactgttgggccaagctttacttcagtgatgatagtccagttat

SEQ ID NO: 575225 - DNA, 120 bp, Artificial Sequence
  ENSG00000171316_134 (sequence is synthesized)
ttttcagtgctcataggttttgccatactgtggccagcaggacttgtagatgcaagttctcaatgagttgggtaggatatctggggttggtttagttcgcacagatgcttagaagtttgg

SEQ ID NO: 575226 - DNA, 120 bp, Artificial Sequence
  ENSG00000171316_135 (sequence is synthesized)
ggcattacagtgcctcagatttgatctggagttttacaccacacttatcccatagtcttccagcttcccaagagatgatcaggtcttcctgattagattttctagatttttttttcagca

SEQ ID NO: 575227 - DNA, 120 bp, Artificial Sequence
  ENSG00000171316_136 (sequence is synthesized)
ggagcatcatggaataacatatcgtaggagtagaaggatttgatttattttctgtctgatactgctgtgtgtgatttcctagtgggaattgcaacatgacctgtcatcctcaggcttctt

SEQ ID NO: 575228 - DNA, 120 bp, Artificial Sequence
  ENSG00000171316_137 (sequence is synthesized)
ttcactccatagtttatatagtggttatgatcacttatattttatttttaatgtacatttggaaagcaaagctcctgtcatttagcatgccttggatgatttgatgagtttcacggaagt

SEQ ID NO: 575229 - DNA, 120 bp, Artificial Sequence
  ENSG00000171316_138 (sequence is synthesized)
acaaaaagggtttcaaagtatttttaatgctaatttctgcaggctaatttgatcttttgttaactgagagtttgagatgagaaggagtgttctgtatattcatggccatatgtttttagc

SEQ ID NO: 575230 - DNA, 120 bp, Artificial Sequence
  ENSG00000171316_139 (sequence is synthesized)
tgaagactggtattaccaaaaaacacctaaaagctttttgttgcagctgattctctgaaagagcagcttattttattcttaaagagattagaattgccagctatgcttttagtttaaaac

SEQ ID NO: 575231 - DNA, 120 bp, Artificial Sequence
  ENSG00000171316_140 (sequence is synthesized)
aaacaaaatctagttttgcttaaaggaaaaagtctgactgaattatcctatttagggtgggatttcccatttttcttcctaatgaattattattaaagcgatcctaagatctgtctcaaa

SEQ ID NO: 575232 - DNA, 120 bp, Artificial Sequence
  ENSG00000171320_0 (sequence is synthesized)
gctcacggagcggctggctaggctgaggagagctcgccgggctctgaggcgcaggaattcaataaagaaaatggcagctcttactccaaggaagaggaagcaggattctttgaagtgtga

SEQ ID NO: 575233 - DNA, 120 bp, Artificial Sequence
  ENSG00000171320_1 (sequence is synthesized)
cagccttttacacttcactgaaaatctgtttccatcacctaataaaaagcactgtttttatcaaaacagtgataaaaatgaagaaaacctgcattgctctcaacaagagcattttgtttt

SEQ ID NO: 575234 - DNA, 120 bp, Artificial Sequence
  ENSG00000171320_2 (sequence is synthesized)
aagtgcgctcaaaacaactgaaataaatagactgccatcagcaaatcaaggctcaccatttaaatctgcgctctccactgtatctttttacaaccaaaataagtggtacctcaatccact

SEQ ID NO: 575235 - DNA, 120 bp, Artificial Sequence
  ENSG00000171320_3 (sequence is synthesized)
ggagagaaagctgataaaagagagtagatctacttgtctaaaaactaatgatgaagataaatcttttcccattgtgacagaaaaaatgcaaggaaaaccagtctgctccaagaagaacaa

SEQ ID NO: 575236 - DNA, 120 bp, Artificial Sequence
  ENSG00000171320_4 (sequence is synthesized)
caaaaaaccacagaagagtttaactgctaagtatcaaccaaagtatagacacatcaagcctgtatcaaggaattctagaaattccaagcaaaatcgagtgatctataagccaattgtgga

SEQ ID NO: 575237 - DNA, 120 bp, Artificial Sequence
  ENSG00000171320_5 (sequence is synthesized)
gaaggaaaataattgtcattcagctgaaaataattccaatgctcctcgggttctgagccaaaaaataaaaccacaagttacactccagggtggagcagcattttttgttagaaaaaaatc

SEQ ID NO: 575238 - DNA, 120 bp, Artificial Sequence
  ENSG00000171320_6 (sequence is synthesized)
ttctcttagaaaatcgtccctggaaaatgagccgtcactgggacgcacccaaaagagtaaatcagaagtcattgaagattctgatgtagagactgtcagtgaaaaaaaaacttttgcgac

SEQ ID NO: 575239 - DNA, 120 bp, Artificial Sequence
  ENSG00000171320_7 (sequence is synthesized)
aaggcaagtgccaaagtgcttggtcctagaagagaaattgaaaattggactactgagtgcaagcagtaaaaataaagagaaattaataaaggattcatcagatgacagagtttcttcaaa

SEQ ID NO: 575240 - DNA, 120 bp, Artificial Sequence
  ENSG00000171320_8 (sequence is synthesized)
ggaacataaagttgataaaaatgaggctttttcttcagaggattctcttggtgagaataagacaatttctcctaagtccactgtctatccaatcttcagtgcatcttcagtcaattcaaa

SEQ ID NO: 575241 - DNA, 120 bp, Artificial Sequence
  ENSG00000171320_9 (sequence is synthesized)
aagatctttaggtgaagaacagttttctgtgggatctgtcaacttcatgaaacagaccaatatccagaaaaatactaataccagagatacaagtaaaaaaacaaaagaccagctcatcat

SEQ ID NO: 575242 - DNA, 120 bp, Artificial Sequence
  ENSG00000171320_10 (sequence is synthesized)
cgacgctggtcagaaacattttggggctactgtgtgcaagtcttgtggtatgatatatactgcttccaaccctgaagatgaaatgcagcatgtacagcatcaccacaggtttctggaagg

SEQ ID NO: 575243 - DNA, 120 bp, Artificial Sequence
  ENSG00000171320_11 (sequence is synthesized)
aatcaaatatgtgggttggaagaaagaacgtgtagtagcagagttttgggatgggaaaatcgtgttggttctgccacatgatccaagctttgctatcaaaaaggtagaagatgtccaaga

SEQ ID NO: 575244 - DNA, 120 bp, Artificial Sequence
  ENSG00000171320_12 (sequence is synthesized)
acttgttgataatgaattgggcttccagcaagttgttcctaaatgtccaaacaaaataaaaacttttctttttatatctgatgaaaagagagtagttgggtgtttaattgcagaacccat

SEQ ID NO: 575245 - DNA, 120 bp, Artificial Sequence
  ENSG00000171320_13 (sequence is synthesized)
caaacaggcatttcgtgtcctgtctgaaccaattggtccagaatccccaagctctacggaatgtcctagggcttggcaatgttcagatgtaccagaacctgcagtctgtgggataagtag

SEQ ID NO: 575246 - DNA, 120 bp, Artificial Sequence
  ENSG00000171320_14 (sequence is synthesized)
aatctgggttttcagactgaagagaagaaagcgcattgcaagacgactggttgataccctcaggaattgcttcatgtttggctgttttctcagcactgatgaaatagcattttctgaccc

SEQ ID NO: 575247 - DNA, 120 bp, Artificial Sequence
  ENSG00000171320_15 (sequence is synthesized)
tgcaacacccctaatttcctcgtatataattttaatagttaaagctgatttcagttataaaggagttactatctggataagttcaaagagctccttattataaaatacaaactatttaat

SEQ ID NO: 575248 - DNA, 120 bp, Artificial Sequence
  ENSG00000171320_16 (sequence is synthesized)
atcaaaataaaaaataccgagactcacactcatacacacacacacacacacgcacacacacatatcacagttttgttccttatgagttgaaaagtcaggaataaatttgttgaaaattat

SEQ ID NO: 575249 - DNA, 120 bp, Artificial Sequence
  ENSG00000171320_17 (sequence is synthesized)
ctggggattcaaaggaaaaatctttgggtgattccctgattagcactctgaatgtttaattatgaaactttgtagctataactggaaaattacctgactctttgtaagagtattaaatac

SEQ ID NO: 575250 - DNA, 120 bp, Artificial Sequence
  ENSG00000171320_18 (sequence is synthesized)
aaagtgatttttctctagaaatgtgacctggtcttttataaagcccactcttagaccaggattatctaatgccacatcagaagcaaacaggcaaatttaaacttgggcaagtaatttctg

SEQ ID NO: 575251 - DNA, 120 bp, Artificial Sequence
  ENSG00000171320_19 (sequence is synthesized)
aagcaaacaggcaaatttaaacttgggcaagtaatttctgtgcccaatttgtaaagggaattcctgaatttttttttttttttaatagaggcatgggtctcactgtgttgcccaggctgg

SEQ ID NO: 575252 - DNA, 120 bp, Artificial Sequence
  ENSG00000171320_20 (sequence is synthesized)
ggattacagtcatgagccaccgtgcccagcctaattcctgacttctctatacagagtcttcacttgataggcactcgtctgtagtaactcagtttgaatatctttagaaaatgtttagaa

SEQ ID NO: 575253 - DNA, 120 bp, Artificial Sequence
  ENSG00000171320_21 (sequence is synthesized)
tttatttgtaacaagatggtaaggaataagattatcccatatgcatttctgtagagcagaatttgatagcttagtgttcaatctttttgaaaataaatgtttacctgtcatcagatttaa

SEQ ID NO: 575254 - DNA, 120 bp, Artificial Sequence
  ENSG00000171320_22 (sequence is synthesized)
ttaaaattatacttagtaattgcactattacttagttaatttttgttgtatggaaatattggtagtactactttgggaacctgttactgacaattgatgtcattaacaaaatgcctagtt

SEQ ID NO: 575255 - DNA, 120 bp, Artificial Sequence
  ENSG00000171320_23 (sequence is synthesized)
ggattagatgttttcattttctaattttttgcttgtttaaaatgcaccttacttgttctgagatacctggcaaaagtctttacaaaatgtatggtaatagaaccaaggttagtaaatata

SEQ ID NO: 575256 - DNA, 120 bp, Artificial Sequence
  ENSG00000171320_24 (sequence is synthesized)
cataggctggtggatgagagaccatggaactgtgtaaatacacttaaatgttcacacatttttctagtgtaattcttggatactttaaaaagcaaaacattgttcaaattgttttgattc

SEQ ID NO: 575257 - DNA, 120 bp, Artificial Sequence
  ENSG00000171320_25 (sequence is synthesized)
tgaaaaatcattcaactgctaactggcaataagactctaggcaagtcgttttccagattgtaattatatgtagaaactattcatctgcattcattttatttgcctgtaagttaacatgtt

SEQ ID NO: 575258 - DNA, 120 bp, Artificial Sequence
  ENSG00000171320_26 (sequence is synthesized)
tccaaaatttaaaagcctgggtccccaaaagaatgtggaagtattaaaatgtatgtaattatgcaaacattttaatgctattttctgcacttatttcttttaaatattttatttaaaatt

SEQ ID NO: 575259 - DNA, 120 bp, Artificial Sequence
  ENSG00000171320_27 (sequence is synthesized)
tagaagattaaataggtaccaggagacatgaaagaatcatcttcaacatttctcaagtagctgctgattatctccttttatggaggcataacaagctcctggaggcttctacagattcta

SEQ ID NO: 575260 - DNA, 120 bp, Artificial Sequence
  ENSG00000171320_28 (sequence is synthesized)
aagggaaagatttcctgggaggttggtaaatattcaagaagctggtcagttggcagctgttttatagattccttgggattttctacctaaacaacatatcaactgcaaacggggacagtt

SEQ ID NO: 575261 - DNA, 120 bp, Artificial Sequence
  ENSG00000171320_29 (sequence is synthesized)
tcgtctcctttccaattttgccttctccattttcttgccttattttagtggctagggctataggactgctaaataaaactggcaagagcaggcatcctggtcttgttccctacttcagta

SEQ ID NO: 575262 - DNA, 120 bp, Artificial Sequence
  ENSG00000171320_30 (sequence is synthesized)
tgatacctgcaggtttttcttgtagacagcctttttcaagctaagatcccttctatttctagttagctgagaggttaactagattttaaactaacttttaaatcaagaatggatgttgga

SEQ ID NO: 575263 - DNA, 90 bp, Artificial Sequence
  ENSG00000171320_31 (sequence is synthesized)
agattttaaactaacttttaaatcaagaatggatgttggattttgtcaaacactttttcggtatctattgagatatgtagttttcaaatt

SEQ ID NO: 575264 - DNA, 120 bp, Artificial Sequence
  ENSG00000171320_32 (sequence is synthesized)
accataggtcacttctgagatctgggacatcaactgcccggagagtggctgggtggacatcccagggtctttttattgttttctgttgcatcccagaccctacaaccccttcctgaaagg

SEQ ID NO: 575265 - DNA, 120 bp, Artificial Sequence
  ENSG00000171320_33 (sequence is synthesized)
tctggactgcttttataaagccagatagcatagtgtttagttactgtaaggagtttatttatttatttattttaagacagggtctttctttatgacccaggctgtagtgcagtggcacac

SEQ ID NO: 575266 - DNA, 90 bp, Artificial Sequence
  ENSG00000171320_34 (sequence is synthesized)
aggctcaagcaatatagatgcacaccacctcacccggctaattcttgcattttttgtagaggctggggtttcaccatgttgcccaggctg

SEQ ID NO: 575267 - DNA, 120 bp, Artificial Sequence
  ENSG00000171320_35 (sequence is synthesized)
tcaccatgttgcccaggctggtctcgcactgctgggctatagtgatccacctgcctcaccctcccaaattgctgggattatgggtgtgaaccactgcacctggcccagccacattttaag

SEQ ID NO: 575268 - DNA, 120 bp, Artificial Sequence
  ENSG00000171320_36 (sequence is synthesized)
taagttctcaatagttacatgtagctggtggctaccatattagaccatgctggtctagaacttctgttgctgacctcctgtttatatccttcatcagaaaaaaagttgagttttgtgggg

SEQ ID NO: 575269 - DNA, 120 bp, Artificial Sequence
  ENSG00000171320_37 (sequence is synthesized)
cagctaggggcagaaagccattgaagcaaccttaagagaggttgtctccagatcagggcttccatgtatggtggcttgtttatattcatcacaacccttgtagctggagaaatgataggc

SEQ ID NO: 575270 - DNA, 120 bp, Artificial Sequence
  ENSG00000171320_38 (sequence is synthesized)
ttatatgatacccagtacactcaggcttatagtcatgtctttcctaacccacctctcatcattgccttcctcactagtttctctcaaattcaaccccagtccatatctctcgtaatcacc

SEQ ID NO: 575271 - DNA, 120 bp, Artificial Sequence
  ENSG00000171320_39 (sequence is synthesized)
taaatttcaaacctcagtggcaaagataataaattggtggccagtaaaccaaatctcacccataaatgttttgcttggcctacataatttaaaagttggagccaaaattatttttaaata

SEQ ID NO: 575272 - DNA, 120 bp, Artificial Sequence
  ENSG00000171320_40 (sequence is synthesized)
ctgagtatcataccatttgacaaatatgggttcttcatttctctaagtcagtgtatatctatctatttagatcagtttagttttgatcattttacttactgctgcccttgtaaggcattt

SEQ ID NO: 575273 - DNA, 120 bp, Artificial Sequence
  ENSG00000171320_41 (sequence is synthesized)
aagtttttagtcctcactgtaaatgtttgttttttttcctgtttatcgagtatggccaagtagattgttaaatgagatacgttcttgctagctaagccatgacagtctaattttactaat

SEQ ID NO: 575274 - DNA, 120 bp, Artificial Sequence
  ENSG00000171320_42 (sequence is synthesized)
tcattttctgtttatatcaacaaaacacttctgtgtcttgatagggattttgattacaagagtaagctttatcaaaatgtattaaactgtgctttatacttatacatttgtatgaaaatt

SEQ ID NO: 575275 - DNA, 120 bp, Artificial Sequence
  ENSG00000171320_43 (sequence is synthesized)
aagttttttgaaagtttggggcgtaactcaagctaaaattgtctcaatccagtaaaacaaaggaagagtctgcagtttccccatgcatctcctgatgattattcttatctgtttggtaca

SEQ ID NO: 575276 - DNA, 120 bp, Artificial Sequence
  ENSG00000171320_44 (sequence is synthesized)
gcctggtggtgtaccaaatgaatggtgacctgatgaattctctgtaaccagtgtaacagagaattctgtaattctcttttctgtcttattttctttttcttagcttcactttacgggttt

SEQ ID NO: 575277 - DNA, 120 bp, Artificial Sequence
  ENSG00000171320_45 (sequence is synthesized)
ggtattgagttagttttcagtagtttgggaagctgggcttttgtgcattttaaatttgtggaacggggctatgctctttcaagattttgctaaatacccatgtctgggattcgtctctgc

SEQ ID NO: 575278 - DNA, 73 bp, Artificial Sequence
  ENSG00000171320_46 (sequence is synthesized)
aagattttgctaaatacccatgtctgggattcgtctctgctagctaagggcgaatctgattttctgttttttt

SEQ ID NO: 575279 - DNA, 80 bp, Artificial Sequence
  ENSG00000171320_47 (sequence is synthesized)
cctcagcctcccaagtagctggtattgtaggcaaacggggtttcaccctctcagccaggctggtcttgaactcctgactt

SEQ ID NO: 575280 - DNA, 120 bp, Artificial Sequence
  ENSG00000171320_48 (sequence is synthesized)
acctgccttggccacccaaagtgctggtattacaagtgtgagccaccgcgcctggccggtgaatctgatttttgtgaggataccctttccccaactcatggagccctgaaaagtgttaaa

SEQ ID NO: 575281 - DNA, 120 bp, Artificial Sequence
  ENSG00000171320_49 (sequence is synthesized)
gagccctgaaaagtgttaaactgatgggttatcccacctctgctgggatattatggttttgagtagaagttctactttaaccaagagtttttttcctttttccccaagctatatattccc

SEQ ID NO: 575282 - DNA, 120 bp, Artificial Sequence
  ENSG00000171320_50 (sequence is synthesized)
tagtaattcccaaattagtatgagggaaatctgtcaggatttttttctactttgcttttcccacattcctgctactctccagtgactctagaatgttctttccttagctgctgattttta

SEQ ID NO: 575283 - DNA, 120 bp, Artificial Sequence
  ENSG00000171320_51 (sequence is synthesized)
aagtttatggcaaaaagttgtccctttccagtttggtggctgctggggaaacttttgccatttttactggcttttttgttcatttcattatggaagtgatggtctgtaatcattctgcca

SEQ ID NO: 575284 - DNA, 120 bp, Artificial Sequence
  ENSG00000171320_52 (sequence is synthesized)
ggtctgtaatcattctgccatctctgtcaggaagtataacacatttttgagaggatgacagattacaacacgtgtactctggcttttttttcttttgagacagtcttgctctgttgccag

SEQ ID NO: 575285 - DNA, 67 bp, Artificial Sequence
  ENSG00000171320_53 (sequence is synthesized)
acctcgcggccctgctgtactctggctttaaaggtaatgtacgcttagtgaatacaggggaagtttt

SEQ ID NO: 575286 - DNA, 120 bp, Artificial Sequence
  ENSG00000171320_54 (sequence is synthesized)
ttaaaggtaatgtacgcttagtgaatacaggggaagttttcctaaaaatagtttgaaaattgattgaaaatcacattatgaaatgtaattcataataaaccaaatcttttgttttagaaa

SEQ ID NO: 575287 - DNA, 120 bp, Artificial Sequence
  ENSG00000171320_55 (sequence is synthesized)
gtggaacgtgggggcgaatgtcacggggaaagagcttttgctcggcgctcggcaggtccgcaggcccgagaccgaagaagccactgactcgttctccgcgctcacaggcgccgggtttcc

SEQ ID NO: 575288 - DNA, 120 bp, Artificial Sequence
  ENSG00000171345_0 (sequence is synthesized)
gctcctcccgcgaatcgcagcttctgagaccagggttgctccgtccgtgctccgcctcgccatgacttcctacagctatcgccagtcgtcggccacgtcgtccttcggaggcctgggcgg

SEQ ID NO: 575289 - DNA, 120 bp, Artificial Sequence
  ENSG00000171345_1 (sequence is synthesized)
cggctccgtgcgttttgggccgggggtcgcctttcgcgcgcccagcattcacgggggctccggcggccgcggcgtatccgtgtcctccgcccgctttgtgtcctcgtcctcctcgggggc

SEQ ID NO: 575290 - DNA, 120 bp, Artificial Sequence
  ENSG00000171345_2 (sequence is synthesized)
ctacggcggcggctacggcggcgtcctgaccgcgtccgacgggctgctggcgggcaacgagaagctaaccatgcagaacctcaacgaccgcctggcctcctacctggacaaggtgcgcgc

SEQ ID NO: 575291 - DNA, 120 bp, Artificial Sequence
  ENSG00000171345_3 (sequence is synthesized)
cctggaggcggccaacggcgagctagaggtgaagatccgcgactggtaccagaagcaggggcctgggccctcccgcgactacagccactactacacgaccatccaggacctgcgggacaa

SEQ ID NO: 575292 - DNA, 120 bp, Artificial Sequence
  ENSG00000171345_4 (sequence is synthesized)
gattcttggtgccaccattgagaactccaggattgtcctgcagatcgacaatgcccgtctggctgcagatgacttccgaaccaagtttgagacggaacaggctctgcgcatgagcgtgga

SEQ ID NO: 575293 - DNA, 120 bp, Artificial Sequence
  ENSG00000171345_5 (sequence is synthesized)
atcgaaggcctgaaggaagagctggcctacctgaagaagaaccatgaggaggaaatcagtacgctgaggggccaagtgggaggccaggtcagtgtggaggtggattccgctccgggcacc

SEQ ID NO: 575294 - DNA, 120 bp, Artificial Sequence
  ENSG00000171345_6 (sequence is synthesized)
gatctcgccaagatcctgagtgacatgcgaagccaatatgaggtcatggccgagcagaaccggaaggatgctgaagcctggttcaccagccggactgaagaattgaaccgggaggtcgct

SEQ ID NO: 575295 - DNA, 120 bp, Artificial Sequence
  ENSG00000171345_7 (sequence is synthesized)
ggccacacggagcagctccagatgagcaggtccgaggttactgacctgcggcgcacccttcagggtcttgagattgagctgcagtcacagctgagcatgaaagctgccttggaagacaca

SEQ ID NO: 575296 - DNA, 120 bp, Artificial Sequence
  ENSG00000171345_8 (sequence is synthesized)
ctggcagaaacggaggcgcgctttggagcccagctggcgcatatccaggcgctgatcagcggtattgaagcccagctgggcgatgtgcgagctgatagtgagcggcagaatcaggagtac

SEQ ID NO: 575297 - DNA, 120 bp, Artificial Sequence
  ENSG00000171345_9 (sequence is synthesized)
cagcggctcatggacatcaagtcgcggctggagcaggagattgccacctaccgcagcctgctcgagggacaggaagatcactacaacaatttgtctgcctccaaggtcctctgaggcagc

SEQ ID NO: 575298 - DNA, 120 bp, Artificial Sequence
  ENSG00000171345_10 (sequence is synthesized)
aggctctggggcttctgctgtcctttggagggtgtcttctgggtagagggatgggaaggaagggacccttacccccggctcttctcctgacctgccaataaaaatttatggtccaaggga

SEQ ID NO: 575299 - DNA, 120 bp, Artificial Sequence
  ENSG00000171345_11 (sequence is synthesized)
cccgtctggctgcagatgacttccgaaccaagtgagtgtctctgtcctgggggctgcagaagccaggactggggtaggggttggggggtttagaatctgccctcacctagcctagatggc

SEQ ID NO: 575300 - DNA, 120 bp, Artificial Sequence
  ENSG00000171345_12 (sequence is synthesized)
aacaaatgggattctcttccctgggggcaaaatatgcttcgcatagtggggggggcaggtatagacaaaatctaccccccatctggtttatagacccccttcaggccatttagagtttca

SEQ ID NO: 575301 - DNA, 120 bp, Artificial Sequence
  ENSG00000171345_13 (sequence is synthesized)
ttgcacacaggtctcagagatttcctccccaggcttgccttcctgccctcccccacccaagtccccctggctccagttttcttcctgccccagcttctgggcatggactgtttgcaaggc

SEQ ID NO: 575302 - DNA, 120 bp, Artificial Sequence
  ENSG00000171345_14 (sequence is synthesized)
ggcagatgctggctagggctttggtctctagggtgccggggtatattcatttgctcccctctctcttctgggaagaaagtgagtgggcagtgcctgtgtgttgaactggtaccaacctct

SEQ ID NO: 575303 - DNA, 120 bp, Artificial Sequence
  ENSG00000171345_15 (sequence is synthesized)
gcctctgccttccagattcttggtgccaccattgagaactccaggattgtcctgcagatcgacaatgcccgtctggctgcagatgacttccgaaccaagtttgagacggaacaggctctg

SEQ ID NO: 575304 - DNA, 120 bp, Artificial Sequence
  ENSG00000171345_16 (sequence is synthesized)
ttggtgcaccctcaccatggccctgggtgtgggatcatggatcccagggttccaagaggaatcagtgatgacccagtctgtcccccagtgctagttactaggcctgcacctgaaaactaa

SEQ ID NO: 575305 - DNA, 120 bp, Artificial Sequence
  ENSG00000171345_17 (sequence is synthesized)
gcccctttagcctgaagggtggggaagtgacctgggccaggcccagtggggtctgggccctgacatgcccatctctgctgtatctttacaggaaatcagtacgctgaggggccaagtggg

SEQ ID NO: 575306 - DNA, 120 bp, Artificial Sequence
  ENSG00000171345_18 (sequence is synthesized)
aattcacacttatacccttgcagcctagggcagcctggccggtggctgtgcccatgccctctccgggaaccaggctctgctgagtcacaaccccctctccctatcctcagaaagctgcct

SEQ ID NO: 575307 - DNA, 120 bp, Artificial Sequence
  ENSG00000171346_0 (sequence is synthesized)
ctggtacctcctgccagcatctcttgggtttgctgagaactcacgggctccagctacctggccatgaccaccacatttctgcaaacttcttcctccacctttgggggtggctcaacccga

SEQ ID NO: 575308 - DNA, 120 bp, Artificial Sequence
  ENSG00000171346_1 (sequence is synthesized)
gggggttccctcctggctgggggaggtggctttggtggggggagtctctctgggggaggtggaagccgaagtatctcagcttcttctgctaggtttgtctcttcagggtcaggaggagga

SEQ ID NO: 575309 - DNA, 120 bp, Artificial Sequence
  ENSG00000171346_2 (sequence is synthesized)
tatgggggtggcatgagggtctgtggctttggtggaggggctggtagtgttttcggtggaggctttggagggggcgttggtgggggttttggtggtggctttggtggtggcgatggtggt

SEQ ID NO: 575310 - DNA, 120 bp, Artificial Sequence
  ENSG00000171346_3 (sequence is synthesized)
ctcctctctggcaatgagaaaattaccatgcagaacctcaatgaccgcctggcctcctacctggacaaggtacgtgccctggaggaggccaatgctgacctggaggtgaagatccatgac

SEQ ID NO: 575311 - DNA, 120 bp, Artificial Sequence
  ENSG00000171346_4 (sequence is synthesized)
tggtaccagaagcagaccccaaccagcccagaatgcgactacagccaatacttcaagaccattgaagagctccgggacaagatcatggccaccaccatcgacaactcccgggtcatcctg

SEQ ID NO: 575312 - DNA, 120 bp, Artificial Sequence
  ENSG00000171346_5 (sequence is synthesized)
gagatcgacaatgccaggctggctgcggacgacttcaggctcaagtatgagaatgagctggccctgcgccagggcgttgaggctgacatcaacggcttgcgccgagtcctggatgagctg

SEQ ID NO: 575313 - DNA, 120 bp, Artificial Sequence
  ENSG00000171346_6 (sequence is synthesized)
accctggccaggactgacctggagatgcagatcgagggcctgaatgaggagctagcctacctgaagaagaaccacgaagaggagatgaaggagttcagcagccagctggccggccaggtc

SEQ ID NO: 575314 - DNA, 120 bp, Artificial Sequence
  ENSG00000171346_7 (sequence is synthesized)
cctgacccgtgtgctggcagagatgagggagcagtacgaggccatggcggagaagaaccgccgggatgtcgaggcctggttcttcagcaagactgaggagctgaacaaagaggtggcctc

SEQ ID NO: 575315 - DNA, 120 bp, Artificial Sequence
  ENSG00000171346_8 (sequence is synthesized)
caacacagaaatgatccagaccagcaagacggagatcacagacctgagacgcacgatgcaggagctggagatcgagctgcagtcccagctcagcatgaaagctgggctggagaactcact

SEQ ID NO: 575316 - DNA, 120 bp, Artificial Sequence
  ENSG00000171346_9 (sequence is synthesized)
ggccgagacagagtgccgctatgccacgcagctgcagcagatccaggggctcattggtggcctggaggcccagctgagtgagctccgatgcgagatggaggctcagaaccaggagtacaa

SEQ ID NO: 575317 - DNA, 120 bp, Artificial Sequence
  ENSG00000171346_10 (sequence is synthesized)
gatgctgcttgacataaagacacggctggagcaggagatcgctacttaccgcagcctgctcgagggccaggatgccaagatggctggcattgccatcagggaagcctcttcaggaggtgg

SEQ ID NO: 575318 - DNA, 120 bp, Artificial Sequence
  ENSG00000171346_11 (sequence is synthesized)
tggtagcagcagcaatttccacatcaatgtagaagagtcagtggatggacaggtggtttcttcccacaagagagaaatctaagtgtctattgcaggagaaacgtcccttgccactcccca

SEQ ID NO: 575319 - DNA, 120 bp, Artificial Sequence
  ENSG00000171346_12 (sequence is synthesized)
ctctcatcaggccaagtggaggactggccagagggcctgcacatgcaaactccagtccctgccttcagagagctgaaaagggtccctcggtcttttatttcagggctttgcatgcgctct

SEQ ID NO: 575320 - DNA, 120 bp, Artificial Sequence
  ENSG00000171346_13 (sequence is synthesized)
attccccctctgcctctccccaccttctttggagcaaggagatgcagctgtattgtgtaacaagctcatttgtacagtgtctgttcatgtaataaagaattacttttccttttgcaaata

SEQ ID NO: 575321 - DNA, 120 bp, Artificial Sequence
  ENSG00000171346_14 (sequence is synthesized)
gcacagctggtaaatgggaaaagaggggtttaaagcattcaggcacatagagccttctgcagcggcccgtccccagccagcacttgacaggacagatgggggctaatctggccctgctaa

SEQ ID NO: 575322 - DNA, 120 bp, Artificial Sequence
  ENSG00000171346_15 (sequence is synthesized)
gcagcgacatgcctctcctggagaaggcaggggcttcctggaacttgccccagccttatcagcggaggtttgccccaacacatcccagaaacgagcaaaggttcagcgccgtgcagttgg

SEQ ID NO: 575323 - DNA, 120 bp, Artificial Sequence
  ENSG00000171346_16 (sequence is synthesized)
caggtgtcgggatcatcagtcatccccttgtcagtcccaagcctgctgggcttttgtgagggtgccaggaacacaggctggaggatggcaggaggggagtagaggtgggaggaggggagt

SEQ ID NO: 575324 - DNA, 120 bp, Artificial Sequence
  ENSG00000171346_17 (sequence is synthesized)
ccatctgcagcaccaggtaaggggatggatgctggctcctctggtcacctcagctggaacactactcaaggtccctggctcctgtcctccacctgcccccaggggccctgcattcccatc

SEQ ID NO: 575325 - DNA, 120 bp, Artificial Sequence
  ENSG00000171346_18 (sequence is synthesized)
cccagggcctccactctccctgagccctgcagtctctcactcactcactcactcactcattcactcactcactcactcacagggtgtgcaggcagctgtgtttgtcaggaaggcagaagg

SEQ ID NO: 575326 - DNA, 120 bp, Artificial Sequence
  ENSG00000171346_19 (sequence is synthesized)
atggcagggtgtccctaagcagccttgagggactgtgaaaagagaactgagcaaggagggaggatctggactcctcactctggtccttggctgttacctgggacaggtcacttcctctct

SEQ ID NO: 575327 - DNA, 120 bp, Artificial Sequence
  ENSG00000171346_20 (sequence is synthesized)
ctggatccgtgtttcttctgtaaatgatagaggctgggctagtggtagttaagatctagtgctcattccattctctgcatgagatagatgggtattcttgtagttcagaatcttgaccag

SEQ ID NO: 575328 - DNA, 86 bp, Artificial Sequence
  ENSG00000171346_21 (sequence is synthesized)
gacagagtgagattctgtctacttggggatagcaggcctggatgggctagcaggatgtcccacccctagaggagtcagatgtgtgg

SEQ ID NO: 575329 - DNA, 120 bp, Artificial Sequence
  ENSG00000171346_22 (sequence is synthesized)
ctagcaggatgtcccacccctagaggagtcagatgtgtgggtggtggtggtgtagggtctgaagaacactgcatagctatctacatgagcttcccttacggacacttgagcttgtgccct

SEQ ID NO: 575330 - DNA, 120 bp, Artificial Sequence
  ENSG00000171346_23 (sequence is synthesized)
ttgcttaaatcagcttccctctttctttcaggatggctggcattgccatcagggaaggtaggaaggctttactcttctggtgtggggtggggaggggagatgttgaagccaccaccccct

SEQ ID NO: 575331 - DNA, 120 bp, Artificial Sequence
  ENSG00000171346_24 (sequence is synthesized)
tcggaatagggaggaaggagaaagagcccaaacatcccattaggtgggaacattcccattcattagatgcctcttccccagtgggaacttctgtcagccccaggtgagattgcagctggt

SEQ ID NO: 575332 - DNA, 120 bp, Artificial Sequence
  ENSG00000171346_25 (sequence is synthesized)
gatttattgagaaacttccaggttgagtaggcttcattcagggcatgtctctcccccaggccccatcttcatacacttccgctaagatgcccacaattcatcccccttcatgtgcagctt

SEQ ID NO: 575333 - DNA, 120 bp, Artificial Sequence
  ENSG00000171346_26 (sequence is synthesized)
gaaaaaccctgacattgttgctccctgccgggcatacctgccattgccactgcccatctctgtgatgaggaattcaacaccagatctctggcagctcttgagggattggccagtggccat

SEQ ID NO: 575334 - DNA, 120 bp, Artificial Sequence
  ENSG00000171346_27 (sequence is synthesized)
tctcaggggtgctgtctagttttcccagagccccgccaaggtcctggccaccgtggcagagcggggaggttcccccactctaaagcctactccttctctctctagcctcttcaggaggtg

SEQ ID NO: 575335 - DNA, 120 bp, Artificial Sequence
  ENSG00000171346_28 (sequence is synthesized)
gaagaggccccaaaagaagtcccacttcttcctggtggagaggtgagggctgcaggcccaaccctatgagtgatgggggcaagtgagggacactagttccacgcccgcatgctgccaaat

SEQ ID NO: 575336 - DNA, 120 bp, Artificial Sequence
  ENSG00000171346_29 (sequence is synthesized)
gtactcagcaccctgctaaggaggctggagaccccatcacggccatggcaatcccgaaggaggagctgtttcaaggtacgtgccctggaggaggccaatgctgacctggaggtgaagatc

SEQ ID NO: 575337 - DNA, 120 bp, Artificial Sequence
  ENSG00000171346_30 (sequence is synthesized)
catagctatctacatgagcttcccttacggacacttgagcttgtgccctttgcttaaatcagcttccctctttctttcaggatggctggcattgccatcagggaagcctcttcaggaggt

SEQ ID NO: 575338 - DNA, 120 bp, Artificial Sequence
  ENSG00000171346_31 (sequence is synthesized)
aagaccattgaagagctccgggacaaggttgctactggctggaatgttctgtagatccatggctgtgtccaaggtgtgcaggaggcagtgaccatgagttgtccacagtggggctggtgg

SEQ ID NO: 575339 - DNA, 120 bp, Artificial Sequence
  ENSG00000171346_32 (sequence is synthesized)
caaccaattcccacaggcaatactgcctccttggtctttcgtgccctggagataaggaaggcagctcctcaggtgtctcaaggaggctggatgggacaaaacaagaaatggacactgaaa

SEQ ID NO: 575340 - DNA, 120 bp, Artificial Sequence
  ENSG00000171346_33 (sequence is synthesized)
ggagtggggaagttgaggggagtgcctttacatcctgctggtcatcgtggccacttcagtctgttgagcatttcctgtgagtcatcttgctccaactgagagtcaggctgagctggagtt

SEQ ID NO: 575341 - DNA, 120 bp, Artificial Sequence
  ENSG00000171346_34 (sequence is synthesized)
agctctggatgatctgagtttgattatttttctttcggaggaaaagacaataccctcccacccatgagacaataccacactgtctgtgcccagcattggaggccaggctcactgcgaaga

SEQ ID NO: 575342 - DNA, 120 bp, Artificial Sequence
  ENSG00000171346_35 (sequence is synthesized)
tggatgagaaggaacccacccccagccttgctggctggcagttccccttgccagcccagctcagatgcaggaatttggggtctgcaggaaggactctttccctgtgccctgtttggttga

SEQ ID NO: 575343 - DNA, 120 bp, Artificial Sequence
  ENSG00000171346_36 (sequence is synthesized)
gggtgtgaggacctgtttgagtcctggctttgccccttaccagtggtgccacctggcacaagttgcttcacctctccaagtttcaatttcattctttctgaatcttgggtgggggtcacc

SEQ ID NO: 575344 - DNA, 120 bp, Artificial Sequence
  ENSG00000171346_37 (sequence is synthesized)
ctctgttgtgaggatgagaggaggtgatggatgcaaaagtgctttgtaaatcacaaagtgcagggtagaagtaaaggattatgctattatagcaaaataagaacctaagaacaacctgcg

SEQ ID NO: 575345 - DNA, 120 bp, Artificial Sequence
  ENSG00000171346_38 (sequence is synthesized)
ttgccccataggagctggctatggaaggtcgatgccgttgagcctaagaacatgctcaggctcacagggcatgttctgatgcccaacgacaaagcccctcctggtgagggcactcaggcg

SEQ ID NO: 575346 - DNA, 120 bp, Artificial Sequence
  ENSG00000171346_39 (sequence is synthesized)
caggtgccggtcatgcaccctggcccctgcatgtctggcacctgggtggggatccaggagggggcaggatgggggctcttgggccacagggcttccctggaagtgagagttgagagcgcc

SEQ ID NO: 575347 - DNA, 120 bp, Artificial Sequence
  ENSG00000171346_40 (sequence is synthesized)
ccttgccacagggaaacagagacttaaaaaggtaaatgtccacagtcttaccatggtaattggtagggtcaggatttgaacccaggcctcacagtcttaccatgataattgataaagcca

SEQ ID NO: 575348 - DNA, 120 bp, Artificial Sequence
  ENSG00000171346_41 (sequence is synthesized)
ggattcaaacccgggcctgagggactccagagccctgtccacttcaccatgctgcaacctgggctaggaatcctcctcctgagtttctgtaagccctggggccaggtccagagggctgag

SEQ ID NO: 575349 - DNA, 120 bp, Artificial Sequence
  ENSG00000171346_42 (sequence is synthesized)
ccacacctccaagtggcactgcccacaggtatcaggtgtccctggaaaggtgtccctgagctggtggcagagaaaagggctctcctgagtgttcaactccccgtctgtgtgaagcaatgc

SEQ ID NO: 575350 - DNA, 120 bp, Artificial Sequence
  ENSG00000171346_43 (sequence is synthesized)
gagttggataacacagcataatgatcggccagtggactcccaaactaagaacacggagctgtcctcttggggagaggctcagggctcggggaagtgaagtccagctgagggcacagttgg

SEQ ID NO: 575351 - DNA, 120 bp, Artificial Sequence
  ENSG00000171346_44 (sequence is synthesized)
tgtgctgtgatgagagttcgctccctgctgctctcttctggcatggagagatgaacctgtaatccaagtgttaaaaccgtgccctggggaaaaacactattaattctgaatcatctcttt

SEQ ID NO: 575352 - DNA, 120 bp, Artificial Sequence
  ENSG00000171346_45 (sequence is synthesized)
tgttgcattaaaaaaaaatagaagagaaaaacttcacatgacccactcaaggtgtgcaggcagctgtgtttgtcaggaaggcagaaggagttggctttgctttaggggaggagacgaggt

SEQ ID NO: 575353 - DNA, 120 bp, Artificial Sequence
  ENSG00000171357_0 (sequence is synthesized)
ggttttgctccgctttagcagcggcgaagggaggacccccgggagccggtccccggcgtccggtcgcccagcccttttcaggcttgggcccgcatggaggggaccgtggagtcccagacg

SEQ ID NO: 575354 - DNA, 120 bp, Artificial Sequence
  ENSG00000171357_1 (sequence is synthesized)
cctgacctgcgggatgtggagggtaaggtgggcaggaagacccctgaagggctgctccgcgggctgcgaggcgagtgtgagctgggaacctctggcgccctgctgctcccaggggcgtct

SEQ ID NO: 575355 - DNA, 120 bp, Artificial Sequence
  ENSG00000171357_2 (sequence is synthesized)
agcaccggccacgacttgggggacaagatcatggcgctgaagatggagctggcttacctgcgagccatcgatgtgaagatcctgcagcagctggtgaccttgaatgagggcatcgaggca

SEQ ID NO: 575356 - DNA, 120 bp, Artificial Sequence
  ENSG00000171357_3 (sequence is synthesized)
gtgcgctggctgttggaggagcgggggacgttgaccagtcattgcagcagcctcaccagcagtcaatatagcctgacaggcgggagcccaggccgctcaaggcgaggcagctgggacagc

SEQ ID NO: 575357 - DNA, 120 bp, Artificial Sequence
  ENSG00000171357_4 (sequence is synthesized)
ctgccagacaccagcaccaccgaccggctggacagtgtctctattggcagcttcctggacacagtggcccccagcgagctggatgaacagggcccacctggggctccacgttccgagatg

SEQ ID NO: 575358 - DNA, 120 bp, Artificial Sequence
  ENSG00000171357_5 (sequence is synthesized)
gactgggcaaaagttatagctggtggagagagggccaggactgaggtggatgtggcagccaccaggctagggagcttgagagctgtgtggaagcccccaggggagaggcttcaaggtgga

SEQ ID NO: 575359 - DNA, 120 bp, Artificial Sequence
  ENSG00000171357_6 (sequence is synthesized)
ccacctgagtcaccagaggatgagagtgccaagctgggcttcgaggcccactggttctgggagcagtgccaggatgatgtgaccttcttgtaacaactattccacccttttgtaatcctg

SEQ ID NO: 575360 - DNA, 120 bp, Artificial Sequence
  ENSG00000171357_7 (sequence is synthesized)
cagtctgagactaggaagaggctgcactgaaatcagttaccatggaaacctggctcatcatttctctagtccctagggagtctctgcctttatccctcaattattgggtccctagagcta

SEQ ID NO: 575361 - DNA, 88 bp, Artificial Sequence
  ENSG00000171357_8 (sequence is synthesized)
tccctcaattattgggtccctagagctagcttgcggtcttatgctgttacccaagatagagagcagtggcatgatcacagctcactgc

SEQ ID NO: 575362 - DNA, 85 bp, Artificial Sequence
  ENSG00000171357_9 (sequence is synthesized)
tatttcagcctcccccatagttagtttatttatttattttttttttgtagagatagggtttccctgtgttgcccaggctggtctc

SEQ ID NO: 575363 - DNA, 120 bp, Artificial Sequence
  ENSG00000171357_10 (sequence is synthesized)
cctcagcctcccaaagtgctgggattatgcccagcccctagagatacttctatagagatattgactctaaaggattgacctatggcttttggtatttagtatctctcactactcccccca

SEQ ID NO: 575364 - DNA, 120 bp, Artificial Sequence
  ENSG00000171357_11 (sequence is synthesized)
ttggtatttagtatctctcactactccccccagctaagtaaggatttaaggaatttaggactccctggagttaacagatgaagagatgggggcataattacttcacccaaagtctagaag

SEQ ID NO: 575365 - DNA, 120 bp, Artificial Sequence
  ENSG00000171357_12 (sequence is synthesized)
ccttggcctctctcttggccaagatggaggattgaggagggacatggaccttcaggactaaccctctatggattggccctcccagaagcgtttgggctggtagacccaccccttcctacc

SEQ ID NO: 575366 - DNA, 120 bp, Artificial Sequence
  ENSG00000171357_13 (sequence is synthesized)
tgctgagtgatgtcatttcctgccaggatgggtagccctttgtacgggtccttggatggtagtaggtcatataggggcatctgagcccctgctgctaagtgagatcacattatttatcgt

SEQ ID NO: 575367 - DNA, 120 bp, Artificial Sequence
  ENSG00000171357_14 (sequence is synthesized)
ccataccattacttcttgtgaacagtaacatgtcactcctcctggcaggaaagtttctcattgtcagatgtttgtgcttcttttcaggtcttactttttaaatagagtgttctcatttta

SEQ ID NO: 575368 - DNA, 120 bp, Artificial Sequence
  ENSG00000171360_0 (sequence is synthesized)
atgacctcttcctacagcagctcctcatgccctctgggttgcaccatggctcctggagcaagaaatgtctctgtctctcccatcgacattgggtgccagcctggggcagaggccaacatt

SEQ ID NO: 575369 - DNA, 120 bp, Artificial Sequence
  ENSG00000171360_1 (sequence is synthesized)
gcccccatgtgccttttggccaacgtggcacatgccaaccgagtccgtgtggggtccactcccctgggccgccccagcctctgtctgccgcctacctgccacactgcttgtcccttgcca

SEQ ID NO: 575370 - DNA, 120 bp, Artificial Sequence
  ENSG00000171360_2 (sequence is synthesized)
gggacctgccacattcctggcaacattggaatctgtggggcctatggtgaaaacaccctgaatggccatgagaaggagaccatgcagttcctgaatgaccgcctggccaactacctggag

SEQ ID NO: 575371 - DNA, 120 bp, Artificial Sequence
  ENSG00000171360_3 (sequence is synthesized)
aaggtgcgccagctggagcaggagaatgcggagctggaggccacactcctcgagaggagcaagtgccacgagtccaccgtgtgccccgactaccagtcttacttccacaccatcgaggag

SEQ ID NO: 575372 - DNA, 120 bp, Artificial Sequence
  ENSG00000171360_4 (sequence is synthesized)
ctccaacagaagatcctgtgcagcaaggccgagaatgccaggctgattgtacaaattgacaatgccaagctggctgccgatgactttaggatcaagctggagagtgagcgctccctgcgc

SEQ ID NO: 575373 - DNA, 120 bp, Artificial Sequence
  ENSG00000171360_5 (sequence is synthesized)
cagctggtggaggcagacaagtgtgggacacagaagctcctggatgatgcgaccctggccaaggccgacctggaggcccagcaggagtccctgaaggaggagcagctctccctcaagagc

SEQ ID NO: 575374 - DNA, 120 bp, Artificial Sequence
  ENSG00000171360_6 (sequence is synthesized)
aaccacgagcaggaagtaaagattctgaggagtcagctgggggagaagctccggattgagctggacattgagcccaccattgacctgaacagggtgctgggggagatgcgggctcagtat

SEQ ID NO: 575375 - DNA, 120 bp, Artificial Sequence
  ENSG00000171360_7 (sequence is synthesized)
gaggccatgttggagaccaaccgccaggatgtggaacagtggttccaagcccagtctgaaggcatcagcctgcaggacatgtcctgctccgaggagctgcagtgctgccagtcggagatc

SEQ ID NO: 575376 - DNA, 120 bp, Artificial Sequence
  ENSG00000171360_8 (sequence is synthesized)
ctggagctgagatgcacggtgaatgccctggaggtggagcgccaagcccagcacaccttgaaggactgtctgcagaactccctgtgtgaagccgaggaccgcttcggcacggagctggcc

SEQ ID NO: 575377 - DNA, 120 bp, Artificial Sequence
  ENSG00000171360_9 (sequence is synthesized)
ctggagcggcaaaaccaggagtaccaggtgctgctggacgtgaagacccggctggagaatgagattgccacgtaccggaaccttctggaaagcgaggactgcaaactcccctgcaatccg

SEQ ID NO: 575378 - DNA, 120 bp, Artificial Sequence
  ENSG00000171360_10 (sequence is synthesized)
tgctccacgtctccctcctgcgtgactgccccctgtgctcctcgcccaagctgtggcccctgcaccacctgtgggcccacctgtggagccagcaccaccggaagccgattctgaattcct

SEQ ID NO: 575379 - DNA, 120 bp, Artificial Sequence
  ENSG00000171360_11 (sequence is synthesized)
gtggacccacaggggctggctaaggcgagggatacccaaagagagatgcttgttatacctttagaaaatctggcttctaactttctgtatgtataggcctgtccaaaggctatgagatac

SEQ ID NO: 575380 - DNA, 120 bp, Artificial Sequence
  ENSG00000171360_12 (sequence is synthesized)
cagggacagtggaatcttgatggaaatccttcctttcctgctcttggttttcccaggtgagctctatgccctcagtggctggattgcagccacccatggtggctcagaatatctggattg

SEQ ID NO: 575381 - DNA, 120 bp, Artificial Sequence
  ENSG00000171360_13 (sequence is synthesized)
gagaggcataaggttgaaaagcattttggagtaggaacacggcatgatttaaaattgcacttgcacttcaagaacaccaactttaacttgaaatttttatagtttatgacaaaggaagtg

SEQ ID NO: 575382 - DNA, 120 bp, Artificial Sequence
  ENSG00000171360_14 (sequence is synthesized)
aagaacagacttcactgtctgagatttcccacatttcttgggttgtttctaacattggcagcctggattatggccctagggagagggaaatagaatcagaattgtacctgaccctgtctt

SEQ ID NO: 575383 - DNA, 120 bp, Artificial Sequence
  ENSG00000171360_15 (sequence is synthesized)
ttctaattcccttctcctatcctcctgcctccctatcttggaaactgattaagtggaaactttccttgtatcaaatcctgagttttctctacttcagggtttctagctttgacaaaggac

SEQ ID NO: 575384 - DNA, 120 bp, Artificial Sequence
  ENSG00000171360_16 (sequence is synthesized)
caggcttgccttttctgtggcaacacagcctcttacatatggcttccatagcttcttgctatgtgaaaggaactttcagattaagaaatttctctcttttttctctataaattctgactc

SEQ ID NO: 575385 - DNA, 120 bp, Artificial Sequence
  ENSG00000171360_17 (sequence is synthesized)
tccagacttgtctggctataacccctgtccctgtctaattctcccagtctaaaatctaaacaatgacttcatttttttctagtactttctcctgaagtattgaaacctattgattcaatg

SEQ ID NO: 575386 - DNA, 120 bp, Artificial Sequence
  ENSG00000171360_18 (sequence is synthesized)
ggtagagatttgctaagtatgatgtgcttccacctcttctcttcatactctctaccttccttaccatgattcagccacactggcctttctgttccttggacatgcctggagacctgtccc

SEQ ID NO: 575387 - DNA, 120 bp, Artificial Sequence
  ENSG00000171365_0 (sequence is synthesized)
tgatgtgatatggctgcaagtgcctttgacccttttgtctcccttccataaactgaaatacctaagctgctccaacctcctttttgtcttttgtttcataaatcctttcccattgcacat

SEQ ID NO: 575388 - DNA, 120 bp, Artificial Sequence
  ENSG00000171365_1 (sequence is synthesized)
caactcctgtctctctttgtactgtcactctcatctgttgctttccattcacactgcctttagccactcatcattttgtgcctacaccacagaaacctctgaatgtaatggatgttccta

SEQ ID NO: 575389 - DNA, 120 bp, Artificial Sequence
  ENSG00000171365_2 (sequence is synthesized)
ccagaggacaagtcgtacaatggtggaggaataggttcttcaaataggatcatggacttcttggaggagccaatccctggtgtagggacctatgatgatttcaatacaattgattgggtg

SEQ ID NO: 575390 - DNA, 120 bp, Artificial Sequence
  ENSG00000171365_3 (sequence is synthesized)
agagagaagtctcgagaccgggataggcaccgagagattaccaataaaagcaaagagtcaacatgggccttaattcacagtgtgagtgatgctttttccggctggttgttgatgctcctt

SEQ ID NO: 575391 - DNA, 120 bp, Artificial Sequence
  ENSG00000171365_4 (sequence is synthesized)
attgggcttttatcaggttcgttagctggtttgatagacatctctgctcattggatgacagacttaaaagaaggtatatgcacagggggattctggtttaaccatgaacattgttgctgg

SEQ ID NO: 575392 - DNA, 120 bp, Artificial Sequence
  ENSG00000171365_5 (sequence is synthesized)
aactctgagcatgtcacctttgaagagagagacaaatgtccagagtggaatagttggtcccagcttatcatcagcacagatgagggagcctttgcctacatagtcaattatttcatgtac

SEQ ID NO: 575393 - DNA, 120 bp, Artificial Sequence
  ENSG00000171365_6 (sequence is synthesized)
gtcctctgggctctcctatttgccttccttgccgtatctcttgtcaaggtgtttgcgccttatgcctgtggctctggaatccctgagataaaaactatcttgagtggtttcattattagg

SEQ ID NO: 575394 - DNA, 120 bp, Artificial Sequence
  ENSG00000171365_7 (sequence is synthesized)
ggctatttgggtaagtggactctggttatcaaaaccatcaccttggtgctggcagtgtcatctggcttgagcctgggcaaagagggccctctagtgcacgtggcttgctgctgtgggaac

SEQ ID NO: 575395 - DNA, 120 bp, Artificial Sequence
  ENSG00000171365_8 (sequence is synthesized)
atcctgtgccactgcttcaacaaatacaggaagaatgaagccaagcgcagagaggtcttgtcggctgcagcagcagctggtgtatctgtagcctttggagcacctataggtggagtatta

SEQ ID NO: 575396 - DNA, 120 bp, Artificial Sequence
  ENSG00000171365_9 (sequence is synthesized)
ttcagccttgaagaggtcagctactattttcccctcaaaacattgtggcgttcattctttgctgccttggtggcagcattcactctacgctccatcaatccatttgggaacagccgcctg

SEQ ID NO: 575397 - DNA, 120 bp, Artificial Sequence
  ENSG00000171365_10 (sequence is synthesized)
gtactattttatgtggagtttcacaccccatggcatctctttgagctcgtgccattcattctgctgggcatatttggtggtctgtggggagcactgtttatccgcacaaacattgcctgg

SEQ ID NO: 575398 - DNA, 120 bp, Artificial Sequence
  ENSG00000171365_11 (sequence is synthesized)
tgtcggaagcgaaagaccacccagttgggcaagtatcctgttatagaggtactcgtcgtgacagccatcactgccatcctggctttccccaatgaatacactcggatgagcacaagtgag

SEQ ID NO: 575399 - DNA, 120 bp, Artificial Sequence
  ENSG00000171365_12 (sequence is synthesized)
ctcatttctgagctgtttaatgactgtggccttctggactcctccaagctctgtgattatgagaaccgtttcaacacaagcaaagggggtgaactgcctgacagaccggctggcgtggga

SEQ ID NO: 575400 - DNA, 120 bp, Artificial Sequence
  ENSG00000171365_13 (sequence is synthesized)
atattcacctttggcatgaagatcccttctggcctctttatccctagcatggctgttggtgctatagcaggtcgacttctaggagtaggaatggaacagctggcttattaccaccaggaa

SEQ ID NO: 575401 - DNA, 120 bp, Artificial Sequence
  ENSG00000171365_14 (sequence is synthesized)
tggaccgtcttcaatagctggtgtagtcagggagctgattgcatcacccccggcctttatgcaatggttggggctgcagcctgcttaggtggggtgactcggatgactgtttctcttgtt

SEQ ID NO: 575402 - DNA, 120 bp, Artificial Sequence
  ENSG00000171365_15 (sequence is synthesized)
gtcataatgtttgaactgactggtggcttagaatacatcgtgcctctgatggctgcagccatgacaagcaagtgggtggcagatgctcttgggcgggagggcatctatgatgcccacatc

SEQ ID NO: 575403 - DNA, 120 bp, Artificial Sequence
  ENSG00000171365_16 (sequence is synthesized)
cgtctcaatggatacccctttcttgaagccaaagaagagtttgctcataagaccctggcaatggatgtgatgaaaccccggagaaatgatcctttgttgactgtccttactcaggacagt

SEQ ID NO: 575404 - DNA, 120 bp, Artificial Sequence
  ENSG00000171365_17 (sequence is synthesized)
atgactgtggaagatgtagagaccataatcagtgaaaccacttacagtggcttcccagtggtggtatcccgggagtcccaaagacttgtgggctttgtcctccgaagagatctcattatt

SEQ ID NO: 575405 - DNA, 120 bp, Artificial Sequence
  ENSG00000171365_18 (sequence is synthesized)
tcaattgaaaatgctcgaaagaaacaggatggggttgttagcacttccatcatttatttcacggagcattctcctccattgccaccatacactccacccactctaaagcttcggaacatc

SEQ ID NO: 575406 - DNA, 120 bp, Artificial Sequence
  ENSG00000171365_19 (sequence is synthesized)
ctcgatctcagccccttcactgtgactgaccttacacccatggagatcgtagtggatattttccgaaagctgggactgcggcagtgcctggttacacacaacgggcgattgcttggaatc

SEQ ID NO: 575407 - DNA, 120 bp, Artificial Sequence
  ENSG00000171365_20 (sequence is synthesized)
attaccaaaaaggatgtgttaaagcatatagcacagatggcgaaccaagatcctgattccattctcttcaactagaatcatagagttctggatgtaaagcgggaaggacattacagacca

SEQ ID NO: 575408 - DNA, 120 bp, Artificial Sequence
  ENSG00000171365_21 (sequence is synthesized)
tggatatgttgtattaactgggtacccaaaacacattttccatatttggatggtgaagtcacattagtgtgttgtctctttcctacaagttaaccagttgcactacataatctctggaaa

SEQ ID NO: 575409 - DNA, 120 bp, Artificial Sequence
  ENSG00000171365_22 (sequence is synthesized)
ttaattttctctttaggagaaattatagttaggcttccatgatgttacattaggaagatatcatgaaagaataaataagattgctatggtttaattatatttgctttttaaaagattttt

SEQ ID NO: 575410 - DNA, 120 bp, Artificial Sequence
  ENSG00000171365_23 (sequence is synthesized)
ttaacttaaaaagtagttagccaatatgcaatcactgaaaactatgcaagagaaattccaaccgtcctgacctataacctgtaggaaaccgacgaaaaagtcactcttttgggatctaac

SEQ ID NO: 575411 - DNA, 120 bp, Artificial Sequence
  ENSG00000171365_24 (sequence is synthesized)
tgttgttactggaagacgaagtgtaaactaaggggctttgcttttcaaaccagagaaaggaaagccagaaggaaaagagtaatggtattttctagactgtgaagattcagttcaaatgtt

SEQ ID NO: 575412 - DNA, 120 bp, Artificial Sequence
  ENSG00000171365_25 (sequence is synthesized)
atccttgttcctgttacaatatttagcattattagtttgttatgtgtgtatgtttatgttaattttaatttctgattataagacaatgctgctttggttaatctcttctaaatgaattta

SEQ ID NO: 575413 - DNA, 120 bp, Artificial Sequence
  ENSG00000171365_26 (sequence is synthesized)
gggaacactggtagttctttaggtggcgtttgttgctgtgaaaggcagagaatgcagcaagtgcccttctaaagcacttcagactggggcttcttttgtaaaagctccccaacctgaatg

SEQ ID NO: 575414 - DNA, 120 bp, Artificial Sequence
  ENSG00000171365_27 (sequence is synthesized)
gtcacatgagccgcgcgcccgcttcgctccccctcctccccggctgggctgtgtgaatgaagctctgccggctacgtggggcgctcactcaacttggtgtcctggacgccagagccgacc

SEQ ID NO: 575415 - DNA, 120 bp, Artificial Sequence
  ENSG00000171365_28 (sequence is synthesized)
gagcgcgctgcccaccggcggcggacacgggctccgccgctccggacctcggcgacagagcaaatcagttgcctggagttcccagtgaagttgtacctgtgcccgtgcgataacgtcagt

SEQ ID NO: 575416 - DNA, 120 bp, Artificial Sequence
  ENSG00000171365_29 (sequence is synthesized)
ggaagctgccccgagtaagtgagggaaatctagaagtttggagcataaaaaaccagcacgaatcaactttacataaacttcatacatttattagcaactgctcgggtttaacttcaggga

SEQ ID NO: 575417 - DNA, 120 bp, Artificial Sequence
  ENSG00000171365_30 (sequence is synthesized)
tgttaaatttcgcctagtcccacgggacgatgatcattacttcttaactgcacgcgaaataggagaagaaaaaaggcaaatcaaaacagactgtcccaggtctcagagaagtcatcggag

SEQ ID NO: 575418 - DNA, 120 bp, Artificial Sequence
  ENSG00000171365_31 (sequence is synthesized)
cgctttttcctgctgaattcaccctaggagtttgtttggggctttagccccttggagaaaacagggccacatagctgcctttctatcaagtctccctacaaaactgagaggctctgggaa

SEQ ID NO: 575419 - DNA, 120 bp, Artificial Sequence
  ENSG00000171365_32 (sequence is synthesized)
actcagcctgtgaccccagcgtgggtgaagataggatcaagatggccatgtggcagggtgccatggataacagaggctttcagcaggggagttttagtagcttccagaacagctccagtg

SEQ ID NO: 575420 - DNA, 120 bp, Artificial Sequence
  ENSG00000171365_33 (sequence is synthesized)
ggtggcatttgttagctggtagacaaggactttgccgtgaatttgttagtagcaaggaatgatttcttccagcttccttgaaatgaataattagtaaacttctaagcaaagtcaatgact

SEQ ID NO: 575421 - DNA, 120 bp, Artificial Sequence
  ENSG00000171365_34 (sequence is synthesized)
aggagtttcacatgtttgtgaggtcctaactaattctcttacccagatgccacctccatgaatgatggtgctttaggcttctggaatatgtaaaaacagcaaagggaaccaagtctagac

SEQ ID NO: 575422 - DNA, 120 bp, Artificial Sequence
  ENSG00000171365_35 (sequence is synthesized)
tgcatactggtaaaccagggaagactcagaactgcatatgcatcctcatgcattcctttgtaaagaccaccagtactaaaataactggacactcattgtacctcccagcgataagtatgt

SEQ ID NO: 575423 - DNA, 120 bp, Artificial Sequence
  ENSG00000171365_36 (sequence is synthesized)
gtaacaggccagtgtgttgtccccatgatcatgaattaggcttgggatgcttccaaatatattcaaggtgttggaacaggataggcagctgtgactccctcaagagtccttagaattcta

SEQ ID NO: 575424 - DNA, 120 bp, Artificial Sequence
  ENSG00000171365_37 (sequence is synthesized)
aataaaatgcagagccatcctaagacacaggggtatggacaaggcctggtgacaccaaaggtgcttgtatccaattgaaaaggtgcctgtctcaatttcataccacctttattgcagtta

SEQ ID NO: 575425 - DNA, 120 bp, Artificial Sequence
  ENSG00000171365_38 (sequence is synthesized)
aaaaaaaatcacactctggggacacttggtggaattacagagccaccatcatcattccaaccactatttcattttctgtagttttacctgtgtgcaattactccccctccattctgttcc

SEQ ID NO: 575426 - DNA, 120 bp, Artificial Sequence
  ENSG00000171365_39 (sequence is synthesized)
acttcttactccttagtaccaaatcctctgtttgggattgagcgctgctcctggttaatcattcctactacaaaaaaaaataactcccagggctagttaaattgtaaaccaaggctcagc

SEQ ID NO: 575427 - DNA, 120 bp, Artificial Sequence
  ENSG00000171365_40 (sequence is synthesized)
agtctcacaacacatggaccagaggtgacacacagccatttcctttgccatgtggcccagttgctgctgccatgcctccatttccacactggatgcctacggcagtgagatttcactgcc

SEQ ID NO: 575428 - DNA, 120 bp, Artificial Sequence
  ENSG00000171365_41 (sequence is synthesized)
ggggtaagagttcagcctggatgattttatagctctgttcctagcacttctcatcatccttccagcccagaatcagcggtcattctgcatattcccaccaaccctctacccccaaacact

SEQ ID NO: 575429 - DNA, 120 bp, Artificial Sequence
  ENSG00000171365_42 (sequence is synthesized)
tcagtgtacctcattttaagagttgctgatccctgattctaggacgtttttacccatagttcttgtctttccaaaatctgaaattcttttttttgctcagaactgggtagccaagggtta

SEQ ID NO: 575430 - DNA, 120 bp, Artificial Sequence
  ENSG00000171365_43 (sequence is synthesized)
gcagtcgctagagtttctccttgtgaatagatcactctagcattttaatgaaaaagaaaaaaatctttctggggtatgttgtatcatagtaatggctcagtaaccacatattttgtcctt

SEQ ID NO: 575431 - DNA, 120 bp, Artificial Sequence
  ENSG00000171365_44 (sequence is synthesized)
tccatgtcactgattccttcatatgagactatttggcttgactaccctgtatattgtgtagaaatcaaagttcttatctgtacatttctggtccaatacctgtcttattagttgtccttc

SEQ ID NO: 575432 - DNA, 120 bp, Artificial Sequence
  ENSG00000171365_45 (sequence is synthesized)
cccactaaagtttgcaaaacagaaaatgttactatttctggtatttaatgacaatgaaaggtttggtcatatttcatagtgcagtagcgataaggagggtgtctcaagtttgcttttgtg

SEQ ID NO: 575433 - DNA, 120 bp, Artificial Sequence
  ENSG00000171365_46 (sequence is synthesized)
tttcttctaggctttgttcttgattttagacagatgagccagtgttaaggtgctacttcagagaataaattagagaaatcagataacactgtgccaaggtatactttgtagatgctaagc

SEQ ID NO: 575434 - DNA, 120 bp, Artificial Sequence
  ENSG00000171365_47 (sequence is synthesized)
accgattggccctccagagaatgacaatatccctttgatacctcactcctgatcaatctcattcattaacctcagcttctcaggaatccttgtagcttgtatgctagaagtagctatggt

SEQ ID NO: 575435 - DNA, 120 bp, Artificial Sequence
  ENSG00000171365_48 (sequence is synthesized)
atatggtatccactatatgtccagtcctatggtttggctcaaaggttggctaattgcagctagagctctcaactgctagctcagcaccttgacatttgaagtttcttgtcttgaggagaa

SEQ ID NO: 575436 - DNA, 120 bp, Artificial Sequence
  ENSG00000171365_49 (sequence is synthesized)
ggaaaatgttctttctgccattgccactttaacagttggacatgcttaagcaacaaatacagccagtatagggaggactgtcagtagcatcaaatggccacatacctcaatggcaaaaga

SEQ ID NO: 575437 - DNA, 120 bp, Artificial Sequence
  ENSG00000171365_50 (sequence is synthesized)
ctagatggtttgtgatttaaaaattaatgagtcgagatgagactattttggtattaaatgagaaaattgcctaacacaagggaagggtttacaaaagaatgccaattagtgtttcaacag

SEQ ID NO: 575438 - DNA, 120 bp, Artificial Sequence
  ENSG00000171365_51 (sequence is synthesized)
agttaggattttccaagtaagagtagctggtagccatccagccataaaaggaacgagagtctatagatttgtaaaagtaaaactgctatattttgtatcttcaaatcttcaatataaaga

SEQ ID NO: 575439 - DNA, 120 bp, Artificial Sequence
  ENSG00000171365_52 (sequence is synthesized)
atttaaagaacctgaaacagttaatgcatgattcgttatattggagggaaaaagcaggggactgataatacaaaataatggcaactttaaagatcatttctacgtggatgtttggttaga

SEQ ID NO: 575440 - DNA, 120 bp, Artificial Sequence
  ENSG00000171365_53 (sequence is synthesized)
aacatattccaatgctctcctctttctctggccacagcatcctggctcagcccagctgtggagtagaggtggtaagatccacagaacagatatcctctggtagataagctgacattgatg

SEQ ID NO: 575441 - DNA, 120 bp, Artificial Sequence
  ENSG00000171365_54 (sequence is synthesized)
atactttgaatttaccagctggtgaagcaaacgattaatttgtgattgaactgaaaagcagttgaattgttttgacaccagaggctgaatctaaaccctttacaggaagagcagagcata

SEQ ID NO: 575442 - DNA, 120 bp, Artificial Sequence
  ENSG00000171365_55 (sequence is synthesized)
ctatacatttcttagcagatcttcaattctgtttgaacatgatgaagtaaccagggtttagtgagatctaaggccgtgaagtaattcacaaccaagatcttatgaacgcattcagatgtg

SEQ ID NO: 575443 - DNA, 120 bp, Artificial Sequence
  ENSG00000171365_56 (sequence is synthesized)
aggggggcaaatatgttttcaaaaacttagtgtgcaatagagtccattatagaaattaaccactgctatatgttttaagtagttcaatcacctgttgtggttcagtcttgattattgttt

SEQ ID NO: 575444 - DNA, 120 bp, Artificial Sequence
  ENSG00000171365_57 (sequence is synthesized)
attttgttaggtgataagtaggaagatgcacttgttatcccacactatctcttgttttgttttgttttgtttttaaataatgaacagtgcaatctttgaacttgagtttttaataatgat

SEQ ID NO: 575445 - DNA, 120 bp, Artificial Sequence
  ENSG00000171365_58 (sequence is synthesized)
agcaaagacaatggtgagaacttgaaacagccagcatattttatattgccaaagtacttactgatgactgaccacactgtcttgtgaggaactgggtcccctgcactggatcagagccaa

SEQ ID NO: 575446 - DNA, 120 bp, Artificial Sequence
  ENSG00000171365_59 (sequence is synthesized)
atgcaagccacccatcagttcagaggaagcaggaaaacatcttttgggtggtgcatagaacattgagctcttaaaaacccggagaaaaattaggaatttagaaagtaagtgggaggtaga

SEQ ID NO: 575447 - DNA, 120 bp, Artificial Sequence
  ENSG00000171365_60 (sequence is synthesized)
atattgagtccttttttaaaaaaaagaattgatgtctaaatatgtagtctgaacttaagtgtcctaaaaccttgttttttgtttttttgttttttgaggagtcgtcttgctctatcacca

SEQ ID NO: 575448 - DNA, 74 bp, Artificial Sequence
  ENSG00000171365_61 (sequence is synthesized)
cctcccgggtccaagcaattcccctgcctcagtctcccaagtaggtgggactacaggcgcacaccaccatgccc

SEQ ID NO: 575449 - DNA, 120 bp, Artificial Sequence
  ENSG00000171365_62 (sequence is synthesized)
tgtgagccaccgcacccagccaaaccttgatttttttagccacctctgggattgcctgggttccctttggagaagaaactaaaagttatggccatagaaaaagccctggtaagaaaatat

SEQ ID NO: 575450 - DNA, 120 bp, Artificial Sequence
  ENSG00000171365_63 (sequence is synthesized)
ttgaatggtgtaagatggtggaaggaaagccatcccacacccctacaacatatgttctggcatttataaactgcttgattgtgtgcctcaaggggagaaaaagtcaagcaatgcttcaaa

SEQ ID NO: 575451 - DNA, 120 bp, Artificial Sequence
  ENSG00000171365_64 (sequence is synthesized)
ggccaggctttctaagcaaatgagtggttcaaagcagtgtttggctcaagggcagtctggttttatggatagggccgacccaagacatctgctcatgaagaaatgtggcatctgttgcca

SEQ ID NO: 575452 - DNA, 120 bp, Artificial Sequence
  ENSG00000171365_65 (sequence is synthesized)
tttcctaaactataaggtttagatagattgtcttgaattttgatagcaaatttttttaaatttatatttctgcctcctcgtacatccttatatatggaaaaaaaagtaagagttcctcag

SEQ ID NO: 575453 - DNA, 120 bp, Artificial Sequence
  ENSG00000171365_66 (sequence is synthesized)
atcagagctcagtagctgtgtcaatttgaagttcaatcagtgtagttgtcctggggtgatcgctgactctgctctgtttcatatttcagttgcttgctccaaggagagaatttctgagaa

SEQ ID NO: 575454 - DNA, 120 bp, Artificial Sequence
  ENSG00000171365_67 (sequence is synthesized)
caatgggtgttagcaactttaagttactccccaaacgtttgctggccacattctcatttctaaacatctggatctgggtaaaggtttgaatagatgtagggaacaaaattggtttttcca

SEQ ID NO: 575455 - DNA, 120 bp, Artificial Sequence
  ENSG00000171365_68 (sequence is synthesized)
tggtgtagtctaattttgccaaatcacccaagaaagaaagtatatgacgtgtggagtttgcatttcttggatgggacctatcgggtcacccagcccagtcttacagtcataaattcctac

SEQ ID NO: 575456 - DNA, 120 bp, Artificial Sequence
  ENSG00000171365_69 (sequence is synthesized)
ctcttagttcctgccaaagggccttcagcctctgtgtgcacacttattgaatgaatgctttgcctaaagtttggccttttgaagaaaaacagcatgtgataatataaaaatatgagagtt

SEQ ID NO: 575457 - DNA, 120 bp, Artificial Sequence
  ENSG00000171365_70 (sequence is synthesized)
taaaaaaaaaaaagatctctgcctctcttctctctgcctcgtcccaccttgctgtctgtctcattgtctttctctcccctcaccatgcgctgaattcagatttctctttcttttattata

SEQ ID NO: 575458 - DNA, 120 bp, Artificial Sequence
  ENSG00000171365_71 (sequence is synthesized)
ggcatgttgttttgaatgtggactttgtgggagggagaggattgttctgagaacagaaactggaagatacgtctgagttgatgggaccaacagggctttgctcctctgtgagggccaaag

SEQ ID NO: 575459 - DNA, 120 bp, Artificial Sequence
  ENSG00000171365_72 (sequence is synthesized)
ccattgatacttgtcgggggtgatgagggctttagcatctcaaggcagacatatgaagtatttactgctaaactatattacttactagtacaaatctgttggaattcaggggcagtctaa

SEQ ID NO: 575460 - DNA, 120 bp, Artificial Sequence
  ENSG00000171365_73 (sequence is synthesized)
gatttggtgagtgaaatgccatctggcaaaatcgagaagagagtgtggcctgagaggggaatgttcagcctcactgtcacattaagggtacctcaaaatacatggtccttccagtgtgtt

SEQ ID NO: 575461 - DNA, 120 bp, Artificial Sequence
  ENSG00000171365_74 (sequence is synthesized)
ccttttccttcctccatttcactttgtcccctcttcttcctttctctcccattttcctggctttttagcactcagcttttttttataagtatgtatttactttttattatatatttggtc

SEQ ID NO: 575462 - DNA, 120 bp, Artificial Sequence
  ENSG00000171365_75 (sequence is synthesized)
ctttgggactttgtgatgattaagaatttattccattcaggattttaaaatgatgtgtttaatattttgttctcttaaactcttttgaagctatgctgctaaccaggtataggccagaaa

SEQ ID NO: 575463 - DNA, 120 bp, Artificial Sequence
  ENSG00000171365_76 (sequence is synthesized)
ggaggtggcccagtcagtaccttgctcacgtcagctaagggggacagtgatgtcatgtgggtgactcttcttcatttgaccaaggccagcctcctgttcttacctctgcccattcatttc

SEQ ID NO: 575464 - DNA, 120 bp, Artificial Sequence
  ENSG00000171365_77 (sequence is synthesized)
tggctatgggaaaactaccacctgttgagtgagccaatgaggccaggaagatcagaggggctgggttccggcccatgggccactatttgaatttctctgtagtaagctctttgtagggct

SEQ ID NO: 575465 - DNA, 120 bp, Artificial Sequence
  ENSG00000171365_78 (sequence is synthesized)
ggctccaactgcagtagccaaagaaaacctgtctgactcgacattttaatgcctgagagttggtgaaagttcagctgaagctaatgtctagacatcagcagtaactaggcatccagaaag

SEQ ID NO: 575466 - DNA, 120 bp, Artificial Sequence
  ENSG00000171365_79 (sequence is synthesized)
tagcttcaaccaaagctaatagagcccaagtttccgcaggaagtttggtgctgagctgtccagagcagttgtttatctgagtgttgctagcccttagccatgctttcttagctttattct

SEQ ID NO: 575467 - DNA, 120 bp, Artificial Sequence
  ENSG00000171365_80 (sequence is synthesized)
cgcctgttcctaggcatagcctgaaccagagctatggctcactgctcgctttattctactccctagtcatgcggaacaacatagtctaaaaaggaagatgtggactggggagttaggaga

SEQ ID NO: 575468 - DNA, 120 bp, Artificial Sequence
  ENSG00000171365_81 (sequence is synthesized)
cctgatttctattccctatgcttctactaactagcctcgagatcttaaccgctctgtgcctcagtgttcccatctgcaaaatggggatagtgttaattgccctacctacctcacagggtt

SEQ ID NO: 575469 - DNA, 120 bp, Artificial Sequence
  ENSG00000171365_82 (sequence is synthesized)
gttgtgaggataaactgagacaatgaattcaaagcaagttgacaagtaagtgctatgcaaattgtaagaaatggaaacaatcatgttaaaagcaatggaatggacattggcagaagggtt

SEQ ID NO: 575470 - DNA, 120 bp, Artificial Sequence
  ENSG00000171365_83 (sequence is synthesized)
aatggattgtccagccctttctctgtgtggcttaaacccaggtcgccattgctttatacattttcacttagcacagatttgtaattatgcatgtaataaagcacagccttatccaccctg

SEQ ID NO: 575471 - DNA, 120 bp, Artificial Sequence
  ENSG00000171365_84 (sequence is synthesized)
aggagtgccaccaaactgtctgccaaagtgccaaagtggctataccattttgcattcctaccagctatgaatgagagttcctgttagtttgcatccttggtattgtcagtgttttggatt

SEQ ID NO: 575472 - DNA, 120 bp, Artificial Sequence
  ENSG00000171365_85 (sequence is synthesized)
ttagccattctaatagagccaggagggattcttagatcttcactgtgagaacttggtggggttcctggatgtagagctttggtgtgggagctcccctaagaccgtggtccccaagagttt

SEQ ID NO: 575473 - DNA, 120 bp, Artificial Sequence
  ENSG00000171365_86 (sequence is synthesized)
ccaagcgcagagaggttattgggcatggagtaggacacagggtacgagagactctaaatacctattgcatgaatacttgcagctgctgaataactgtgaaccaattgtgacttcagtttt

SEQ ID NO: 575474 - DNA, 120 bp, Artificial Sequence
  ENSG00000171365_87 (sequence is synthesized)
atgtcattagagccttcttgaacatctcatttaaaaagcattcctttgcaaagttccatataaataaatacatcactgtcttgtcggctgcagcagcagctggtgtatctgtagcctttg

SEQ ID NO: 575475 - DNA, 120 bp, Artificial Sequence
  ENSG00000171365_88 (sequence is synthesized)
catgagagatgatgttcctcccttagaccgagaagtaggaggtatcattattggtgatgataatttatcttaattttttaaaatttatgtacaataaaattttatttttttttaatttta

SEQ ID NO: 575476 - DNA, 120 bp, Artificial Sequence
  ENSG00000171368_0 (sequence is synthesized)
agagctccgctgagcaccgggtcgcgcgcggccgagtcgcggaggcgcctccgctgcagtcgctgcgtctccaagcaacatggctgacaaggccaagcctgccaaagctgccaacaggac

SEQ ID NO: 575477 - DNA, 120 bp, Artificial Sequence
  ENSG00000171368_1 (sequence is synthesized)
gccccccaagtccccgggggacccctcgaaggaccgggcagccaagaggctgtcgctggaatcggagggtgctggtgagggggcagccgcatcccctgagctcagtgccctggaggaggc

SEQ ID NO: 575478 - DNA, 120 bp, Artificial Sequence
  ENSG00000171368_2 (sequence is synthesized)
cttccggcgctttgccgtgcacggggacgccagggccaccgggagggagatgcacggcaagaactggtcgaagctgtgcaaggactgccaggtgatcgacggcaggaacgtgaccgtcac

SEQ ID NO: 575479 - DNA, 120 bp, Artificial Sequence
  ENSG00000171368_3 (sequence is synthesized)
tgacgtggacatcgtcttcagcaagatcaaagggaagtcttgccggaccatcacctttgagcagttccaggaggcgctggaggagctcgccaagaagcgattcaaagacaagagcagcga

SEQ ID NO: 575480 - DNA, 120 bp, Artificial Sequence
  ENSG00000171368_4 (sequence is synthesized)
ggaggccgttcgcgaggtgcacaggctcatcgagggcaaggcgcccatcatctcaggggtgacgaaagccatctcgtcgcccacagtgtcgaggctcacggacaccaccaagttcacggg

SEQ ID NO: 575481 - DNA, 120 bp, Artificial Sequence
  ENSG00000171368_5 (sequence is synthesized)
ctcccacaaggagcgcttcgacccctctggcaagggcaagggcaaggctggccgcgtggatctggtggacgagtcaggctatgtgtccggctacaagcacgcaggcacctacgaccagaa

SEQ ID NO: 575482 - DNA, 120 bp, Artificial Sequence
  ENSG00000171368_6 (sequence is synthesized)
ggtgcaagggggcaagtagcccccgctccatgcctcgcggcactgccggtgtccccagagcagggactctgtcacctcgcacttcattacattcctgtactaactggggcagaactcaga

SEQ ID NO: 575483 - DNA, 120 bp, Artificial Sequence
  ENSG00000171368_7 (sequence is synthesized)
cgggtgccccagagggggctggggggcggccaggcccaggcctccctcctgcccctcctcctaccggatgcccccagcactcccctctcaaaccaggtttgggccccagttcgctgaccc

SEQ ID NO: 575484 - DNA, 120 bp, Artificial Sequence
  ENSG00000171368_8 (sequence is synthesized)
tcctaatacacctgcctcgtcctcagccatttccaaagtgtctcgcggatcacaccacactgggcacgtggtttgcaggtcaaaggggcgttttaaagcagctggctgtcatggcaacag

SEQ ID NO: 575485 - DNA, 120 bp, Artificial Sequence
  ENSG00000171368_9 (sequence is synthesized)
gaggctgtgctgacctcctgagcggcagacaccttccaggagccctgagggtggcaggagctaaccccaaccagcaggcaactaacacggaattggccccacaccggacgtgggaggtgt

SEQ ID NO: 575486 - DNA, 120 bp, Artificial Sequence
  ENSG00000171368_10 (sequence is synthesized)
ctgtggggcccgaggcctgtcctgtgtgcagcggacaccacggggccttcctgctttcctgggcagagggcagagtgaggccacctggcgggggtgctgggcgcctggcacatgtgtggg

SEQ ID NO: 575487 - DNA, 120 bp, Artificial Sequence
  ENSG00000171368_11 (sequence is synthesized)
gaagccggtcacatggacacacctgtgcacacatgcctacaggccagctctgtgccaagggcaacctaggtaaaacgaaagccgtcaggggcagtgggcggcttcccggctgaccacagt

SEQ ID NO: 575488 - DNA, 120 bp, Artificial Sequence
  ENSG00000171368_12 (sequence is synthesized)
ggcttggactgtgagggtagagtaggctcgctttgctttcctgagaagatgcggtggctgcctatgttctcagagcgggtctgggaagattcagaatgtccggtccctgtggtgttgcca

SEQ ID NO: 575489 - DNA, 120 bp, Artificial Sequence
  ENSG00000171368_13 (sequence is synthesized)
ggcaagagacacgaagtgccgagacactcctcgcctcaccgcgtgacagagcctctgcccggccctcccgttcgcccgtcctcactagctgcaccctgtttgctcgcagacctcccattg

SEQ ID NO: 575490 - DNA, 120 bp, Artificial Sequence
  ENSG00000171368_14 (sequence is synthesized)
ccacagcccaagcaccttcttcaactctcccaaaatggctcagcctaacctctcctggccaatcccccccgccggagagcaggacactagggaggacccccagtcctgcagtgtctgtgg

SEQ ID NO: 575491 - DNA, 120 bp, Artificial Sequence
  ENSG00000171368_15 (sequence is synthesized)
gggtttctctgccagcagggggctgagcagagcccatccaggacactccacactgccaggacacacccaggcggcccgcccttgcctgtctgcacctggggagaagccggcgctcctgct

SEQ ID NO: 575492 - DNA, 120 bp, Artificial Sequence
  ENSG00000171368_16 (sequence is synthesized)
ccctcctggggaggctgacgggtgtggccacccgctgtcacaatggcacactgccactgtcccttggcacgcacacagccacagccacacgtgtgacctgctgggccgtggttctggagt

SEQ ID NO: 575493 - DNA, 120 bp, Artificial Sequence
  ENSG00000171368_17 (sequence is synthesized)
ctacctgcggatgagcctgcggcagtcctggggaaacttttccagagcctgttagcccgtggctacggtcaggctctggccagggcagagggctgcccagggccaggctcacagtacagg

SEQ ID NO: 575494 - DNA, 120 bp, Artificial Sequence
  ENSG00000171368_18 (sequence is synthesized)
agggtggcgaggcccctccctcactggcacgcatgagcaccacccgcctccccgactcccaagagtgcacctgctgcggccacagctccgtggaaggactccccctacctgagcagagca

SEQ ID NO: 575495 - DNA, 120 bp, Artificial Sequence
  ENSG00000171368_19 (sequence is synthesized)
gaagccccagggcggagctcccagccagcatggtccgctgagggctggggggcggtctccgaggcccctcaacagagaagcctccacctgaggatggggaggacctggcaggcagcttcc

SEQ ID NO: 575496 - DNA, 120 bp, Artificial Sequence
  ENSG00000171368_20 (sequence is synthesized)
acggcagggctgggaagttcagtgcctggaaataaagagcaaggaaaaatggacctcaggcttcgtggctcctttaggatgtcacctcaccggcctggggaaggcggggggtgcccaagc

SEQ ID NO: 575497 - DNA, 120 bp, Artificial Sequence
  ENSG00000171368_21 (sequence is synthesized)
ccagccctgtgcccccgctgaacctggctggaccgcgtgtgaaaggcagaactaacgtgcggaaacatttgaaaacaactctgaatgtgcggttcggaatcacccgatcacagacgagcg

SEQ ID NO: 575498 - DNA, 120 bp, Artificial Sequence
  ENSG00000171368_22 (sequence is synthesized)
gtcaccggaatcgcccggtcacagacgagcagtcatcggactcacccgatcacagacgagcggtcaccggaatcgcccgatcacagacgagcggccaccggaatcgcccaatcacagaca

SEQ ID NO: 575499 - DNA, 120 bp, Artificial Sequence
  ENSG00000171368_23 (sequence is synthesized)
agcagtcatcggaatcacccgatcacagacgagcagtcatcggactcacccgatcacagacgagcggtcaccagactcgcccgatcacagacgagcagtcatcggaatcacccgatcaca

SEQ ID NO: 575500 - DNA, 120 bp, Artificial Sequence
  ENSG00000171368_24 (sequence is synthesized)
tggccaccggaatcacccgataacagcccatcacaactccaaagcccttgtgttgaaaaggccgaggacgagtggtcaccaaacagggtggctccccaggtcccgaagcctgagacccgg

SEQ ID NO: 575501 - DNA, 120 bp, Artificial Sequence
  ENSG00000171368_25 (sequence is synthesized)
aaggccctggcacccttacaccctcggactcctgccctcctcggcctccctggccccagcgcggctccaccctgggctgcgtctcctggtcacaggctgcgtttctcctttctgtccgtg

SEQ ID NO: 575502 - DNA, 120 bp, Artificial Sequence
  ENSG00000171368_26 (sequence is synthesized)
ggcagcccagtccccacagtcacggccaagccacgcagaacgaacatgactccagaggacctcgccctggagctgagcctggcgccgggtcaggacggagggaagggcgggttggggtcc

SEQ ID NO: 575503 - DNA, 120 bp, Artificial Sequence
  ENSG00000171368_27 (sequence is synthesized)
gcgggtcctcacaccgcacggcaggcacagaggctcgccaggccctgatccggtctgtggggacgagggacactgaggagaggtgctgggcaccaggacgctgcctcctggtccctggtt

SEQ ID NO: 575504 - DNA, 120 bp, Artificial Sequence
  ENSG00000171368_28 (sequence is synthesized)
ggcctcagacaagcacggcctcgagaaaagagccaagcgcatcgggagcacaccagaaaccggccctgagcacgagaagagcctccgcccggcccgggcaccacccgacctcgcagggag

SEQ ID NO: 575505 - DNA, 120 bp, Artificial Sequence
  ENSG00000171368_29 (sequence is synthesized)
caggccctgtcaccgacgggtcacctcgcccacacggccagcaccgactcaccacagcccttcccagacctggctggagtggccggagcggcggggctcatggctcccatcttggcccct

SEQ ID NO: 575506 - DNA, 120 bp, Artificial Sequence
  ENSG00000171368_30 (sequence is synthesized)
ggaggtgagctcattcacagaagtggtcccttcactctgagagagaaaatcgtggcgtgcatcccaaaccctaggccacgcctgtgggtttcgtgaatgagatcgaggctgctgtggcac

SEQ ID NO: 575507 - DNA, 120 bp, Artificial Sequence
  ENSG00000171368_31 (sequence is synthesized)
cctgcccgtcctggcctggagcaccctgggatcctggagggagaggccccacgcccccactctccctccacacttccagggttggtgcccacgagttagaggcacgccctcccccagcgg

SEQ ID NO: 575508 - DNA, 120 bp, Artificial Sequence
  ENSG00000171368_32 (sequence is synthesized)
ccctcaggcttttctcagacatgcgggagccaggagagcacccttctccactcagctccaaagcgaatctttgaaaacacccactcggctcccatctctgtcacctagccaggaggggta

SEQ ID NO: 575509 - DNA, 120 bp, Artificial Sequence
  ENSG00000171368_33 (sequence is synthesized)
gcaaaaataaagtcacgaggacatagtggtcaccactgtcagttacaacttgtctgtggaatccgtaattgcatctgtgtgccgcctccgaacacagaacattgtttggacggcagcccc

SEQ ID NO: 575510 - DNA, 120 bp, Artificial Sequence
  ENSG00000171368_34 (sequence is synthesized)
actgcacataacagacccgtgcatcttcctcagtcagtttctgaatattgtgaattcaggcaggtgtgtgttctcttctgcatgtttttatgcactgccaattagcttctactaaccacg

SEQ ID NO: 575511 - DNA, 120 bp, Artificial Sequence
  ENSG00000171368_35 (sequence is synthesized)
gttcaacagaaaataaatgtgtatttgtgaataacaaactgcacaacctgcaaaccaggagagagggacaggttctgtcaggggtgacaccaggacacagggacaggttctgtcgggggt

SEQ ID NO: 575512 - DNA, 120 bp, Artificial Sequence
  ENSG00000171368_36 (sequence is synthesized)
gacaccaggacacagggacaggttctgtcatgggtgacacgaggacacagggacaggttctatcatgggtgacaccaggagagagggacaggttctgttgggggtgacaagaggagacag

SEQ ID NO: 575513 - DNA, 120 bp, Artificial Sequence
  ENSG00000171368_37 (sequence is synthesized)
ggacaggttctgtcgggggtgacaccaggagagagggacaggttctgtcaggggtgacaccaggagagagggacaggttctgttgggggtgacaccaggacacaggaataggttctgtcg

SEQ ID NO: 575514 - DNA, 120 bp, Artificial Sequence
  ENSG00000171368_38 (sequence is synthesized)
ggaggacagtgctgatcgtgtctcagcatcaggaaaggagaaaggcagagggagagcgctgagaagactgttcacgccagagtgcttatttatttttaatttactgctataggataagca

SEQ ID NO: 575515 - DNA, 120 bp, Artificial Sequence
  ENSG00000171368_39 (sequence is synthesized)
accaggtagtgttcctaacaattagcgttaccaaaattaaagttcaaattatatgtttaaaatattgtagaagatatatatttatactggactacttttacaccttctaatatcctgtcc

SEQ ID NO: 575516 - DNA, 120 bp, Artificial Sequence
  ENSG00000171368_40 (sequence is synthesized)
aagtttgggcgcagatggtggagttgggctggcatcatgtcctgtggccgccccacttgcctgttggtgccactccatcccgggccccagggatgccagctcagggctgaccacagcagc

SEQ ID NO: 575517 - DNA, 120 bp, Artificial Sequence
  ENSG00000171368_41 (sequence is synthesized)
cctgcgtgggcatcacctcctaccccagcccccatcctgggctgctgcggccgcctgcttttgtgaatggtgttttgttggcacagggcctgtcctgtgttttcacacaggcctgtggct

SEQ ID NO: 575518 - DNA, 120 bp, Artificial Sequence
  ENSG00000171368_42 (sequence is synthesized)
cctgctgtacaagtggagtggggaggagttgagatggagatgccttggccctggacacttacctgtccctctactggcccagctcatctcctcctgtgggcaatcacgcgtgcactggcc

SEQ ID NO: 575519 - DNA, 120 bp, Artificial Sequence
  ENSG00000171368_43 (sequence is synthesized)
accctcccaccccacagcacacaccacgaggggatggcacagggggaagatgaggctggaccgtgatgttatcaataggctagaacgtccttcaaacactgaacctgcatctttcctcct

SEQ ID NO: 575520 - DNA, 120 bp, Artificial Sequence
  ENSG00000171368_44 (sequence is synthesized)
cttactactgaacactttgtgagctctggtggtccagggtgcagcgtttgtccctgggcatgtgatggggagtcctgggcacatcgagatgctttacttctttctttcgacctcttaaaa

SEQ ID NO: 575521 - DNA, 120 bp, Artificial Sequence
  ENSG00000171368_45 (sequence is synthesized)
aactaaaccaagccaaaccacaaaggaaatctgcacaacttaagagaaacttgaaagggatcgtgtaactactagtttgtactaagtttttttcaagaaagggaaacaaatttatatata

SEQ ID NO: 575522 - DNA, 120 bp, Artificial Sequence
  ENSG00000171368_46 (sequence is synthesized)
tatatatatatatatatgtgcaatatatttttacactgtgtgattaacattagggagtactgagtgcatcactttatcagtgtgacgggtgatgtccacgtcatggctgttctgactctg

SEQ ID NO: 575523 - DNA, 120 bp, Artificial Sequence
  ENSG00000171368_47 (sequence is synthesized)
aaagccacttctgctgatgtctaaaccgcactcaccgcggacgtccgcggggtggggtggccctgctgttcctcctgcaggtgagaggtgtggtgttgcctgttggacttgctgttgagc

SEQ ID NO: 575524 - DNA, 120 bp, Artificial Sequence
  ENSG00000171368_48 (sequence is synthesized)
ctggcttgcaaacctgtagtgaaacagctcgtgtctgtgtgcacactgctcctgtgtctgctgtcgttaacattgtgtgtcaagttggtaaagtgacaaataaaggtgttaaaacatgga

SEQ ID NO: 575525 - DNA, 120 bp, Artificial Sequence
  ENSG00000171385_0 (sequence is synthesized)
ggagagaaatggctgaaagtggaaacccggagcggtttggggcgcttcgcaaagttctccagctcggcgagccggcggtgtgtctaccagaggctgggggccagtccatctggtcctgcc

SEQ ID NO: 575526 - DNA, 120 bp, Artificial Sequence
  ENSG00000171385_1 (sequence is synthesized)
cgacgccacttccaccccgcgagctctgggaaaggtctctacgtgacgccaagggccgtcgcggccccggggagagggatcgaaagactcactctgcgaggtgtttacactggaggtggg

SEQ ID NO: 575527 - DNA, 120 bp, Artificial Sequence
  ENSG00000171385_2 (sequence is synthesized)
ggacgggaagggactgggcaaagttacctggactcaactaaattcctgcgcttgcttagtgttgacatttgaataggatccgagatgttctgcttttatcccgggcagccctgatatgtc

SEQ ID NO: 575528 - DNA, 120 bp, Artificial Sequence
  ENSG00000171385_3 (sequence is synthesized)
agcaacaggctgaggttccagacctgaaatcgcactgcaagaaaaaggggtttgctgaactaactccaagctggtgtgcctagcgtccgcgcggctgccggcccaagagctggagtcacc

SEQ ID NO: 575529 - DNA, 120 bp, Artificial Sequence
  ENSG00000171385_4 (sequence is synthesized)
atggcggccggagttgcggcctggctgccttttgcccgggctgcggccatcgggtggatgccggtggccaactgccccatgcccctggccccggccgacaagaacaagcggcaggatgag

SEQ ID NO: 575530 - DNA, 120 bp, Artificial Sequence
  ENSG00000171385_5 (sequence is synthesized)
ctgattgtcctcaacgtgagtgggcggaggttccagacctggaggaccacgctggagcgctacccggacaccctgctgggcagcacggagaaggagttcttcttcaacgaggacaccaag

SEQ ID NO: 575531 - DNA, 120 bp, Artificial Sequence
  ENSG00000171385_6 (sequence is synthesized)
gagtacttcttcgaccgggaccccgaggtgttccgctgcgtgctcaacttctaccgcacggggaagctgcactacccgcgctacgagtgcatctctgcctacgacgacgagctggccttc

SEQ ID NO: 575532 - DNA, 120 bp, Artificial Sequence
  ENSG00000171385_7 (sequence is synthesized)
tacggcatcctcccggagatcatcggggactgctgctacgaggagtacaaggaccgcaagagggagaacgccgagcggctcatggacgacaacgactcggagaacaaccaggagtccatg

SEQ ID NO: 575533 - DNA, 120 bp, Artificial Sequence
  ENSG00000171385_8 (sequence is synthesized)
ccctcgctcagcttccgccagaccatgtggcgggccttcgagaacccccacaccagcacgctggccctggtcttctactacgtgactggcttcttcatcgctgtctcggtcatcaccaac

SEQ ID NO: 575534 - DNA, 120 bp, Artificial Sequence
  ENSG00000171385_9 (sequence is synthesized)
gtggtggagacggtgccgtgcggcacggtcccgggcagcaaggagctgccgtgcggggagcgctactcggtggccttcttctgcctggacacggcgtgcgtcatgatcttcaccgtggag

SEQ ID NO: 575535 - DNA, 120 bp, Artificial Sequence
  ENSG00000171385_10 (sequence is synthesized)
tacctcctgcggctcttcgcggctcccagccgctaccgcttcatccgcagcgtcatgagcatcatcgacgtggtggccatcatgccctactacatcggtctggtcatgaccaacaacgag

SEQ ID NO: 575536 - DNA, 120 bp, Artificial Sequence
  ENSG00000171385_11 (sequence is synthesized)
gcctgcggatcctgggctacacactgaagagctgtgcctccgaactgggctttcttctcttctccctcaccatggccatcatcatctttgccactgtgatgttttatgccgagaagggct

SEQ ID NO: 575537 - DNA, 120 bp, Artificial Sequence
  ENSG00000171385_12 (sequence is synthesized)
cctcggccagcaagttcacaagcatccctgcctcgttttggtacaccattgtcaccatgaccacactgggatacggagacatggtgcctaagacgattgcagggaagatcttcggctcca

SEQ ID NO: 575538 - DNA, 120 bp, Artificial Sequence
  ENSG00000171385_13 (sequence is synthesized)
tctgctccttgagtggcgtcctggtcattgccctgccagtccctgtgattgtttccaactttagccggatttaccaccagaatcagagagctgataaacgcagggcacaaaagaaggccc

SEQ ID NO: 575539 - DNA, 120 bp, Artificial Sequence
  ENSG00000171385_14 (sequence is synthesized)
gccttgccaggatccgtgtggccaaaacaggcagttcgaatgcatacctgcacagcaagcgcaacgggctcctcaacgaggcgctggagctgacgggcaccccagaagaggagcacatgg

SEQ ID NO: 575540 - DNA, 120 bp, Artificial Sequence
  ENSG00000171385_15 (sequence is synthesized)
gcaagaccacctcactcatcgagagccagcatcatcacctgctgcactgcctggaaaaaaccactgggttgtcctatcttgtggatgatcccctgttatctgtacgaacctccaccatca

SEQ ID NO: 575541 - DNA, 120 bp, Artificial Sequence
  ENSG00000171385_16 (sequence is synthesized)
agaaccacgagtttattgatgagcagatgtttgagcagaactgcatggagagttcaatgcagaactacccatccacaagaagtccctcactgtccagccacccaggcctcactaccacct

SEQ ID NO: 575542 - DNA, 120 bp, Artificial Sequence
  ENSG00000171385_17 (sequence is synthesized)
gctgctcccgtcgtagtaagaagaccacacacctgcccaattctaacctgccagctactcgcctgcgcagcatgcaagagctcagcacgatccacatccagggcagtgagcagccctccc

SEQ ID NO: 575543 - DNA, 120 bp, Artificial Sequence
  ENSG00000171385_18 (sequence is synthesized)
tcacaaccagtcgctccagccttaatttgaaagcagacgacggactgagaccaaactgcaaaacatcccagatcaccacagccatcatcagcatccccactcccccagcgctaaccccag

SEQ ID NO: 575544 - DNA, 120 bp, Artificial Sequence
  ENSG00000171385_19 (sequence is synthesized)
agggggaaagtcggccaccccctgccagcccaggccccaacacgaacattccttccatagccagcaatgttgtcaaggtctccgccttgtaaaaccactggacagagggccagagtgggt

SEQ ID NO: 575545 - DNA, 120 bp, Artificial Sequence
  ENSG00000171385_20 (sequence is synthesized)
agtggggaatgaaggggactggcatgttggtgggtggtcactgagaccactccctcccccctttccccactatttctgcctgccccattgtacccctagcactgagacttgtgcctggaa

SEQ ID NO: 575546 - DNA, 120 bp, Artificial Sequence
  ENSG00000171385_21 (sequence is synthesized)
ggaaaaagaggtagcaaaggggcacctgaggttcacgctgctagcgtggacatagccctgtgatactgcatctcactggggccagaggaagggagggagggtgggggggtcggggatagg

SEQ ID NO: 575547 - DNA, 120 bp, Artificial Sequence
  ENSG00000171385_22 (sequence is synthesized)
gcctggatggaggagcctcagactcagaccaaataacagtcgtttctggagaccccagtgaggaaaatacaagaccaagagcagcaaagaggccaagttgtcacaagcaaaacaggaaga

SEQ ID NO: 575548 - DNA, 120 bp, Artificial Sequence
  ENSG00000171385_23 (sequence is synthesized)
aaatataacactgtgtatttaagcacctttttcaaggctcttaatggataatatttattcatgggaaaaggtggaaaacaaaaacaccaacggatttttgtgaaatgtttttctccatgg

SEQ ID NO: 575549 - DNA, 120 bp, Artificial Sequence
  ENSG00000171385_24 (sequence is synthesized)
acccaacacctttgaaccaaaacaatgcattttgtgagggatttttttttctccttttatagcaaaagcttttaggctaagaagtcagttattgctgagttctctctccattcccccagg

SEQ ID NO: 575550 - DNA, 120 bp, Artificial Sequence
  ENSG00000171385_25 (sequence is synthesized)
tgggtgaggtcaactgagcctgggcccccactgcccagctgacctgtgcagagctgccaagtgaccacacggcaatccttaccctttgtctgtccctgtctcccttgtctctgtacctct

SEQ ID NO: 575551 - DNA, 120 bp, Artificial Sequence
  ENSG00000171385_26 (sequence is synthesized)
ctgcttacccctagctgtttctgtgtccagccatctgtctctacctggatcccaatgatcctgaaacacatcagtaaagccttcttcatcactgccacgcacaacagacttgtgcctggg

SEQ ID NO: 575552 - DNA, 120 bp, Artificial Sequence
  ENSG00000171385_27 (sequence is synthesized)
agttctatctgtgtgaatgcaactgcagaggaggaaagagtgaagcaaaaattgggagagtttaggggtaagggaagtctacctcacagaacagaggtacttcccttggggttggaacca

SEQ ID NO: 575553 - DNA, 120 bp, Artificial Sequence
  ENSG00000171385_28 (sequence is synthesized)
ctcgtgtttgcagtttcagtttctgggaaagaaagggaatgaacagatttatcacactggaatcttgaaaaggcaaatcgccaacacctgagacgcggtcaactctggtatgtgccagtg

SEQ ID NO: 575554 - DNA, 120 bp, Artificial Sequence
  ENSG00000171385_29 (sequence is synthesized)
aggggagaacggaaggacccagggctcgcagcctcagccggtcattagggcaccttgctatggacccttccttcaagacccaccataaagcccatccagagcccttccaagaggccccgg

SEQ ID NO: 575555 - DNA, 120 bp, Artificial Sequence
  ENSG00000171385_30 (sequence is synthesized)
gagtagttttctccagagagggcagtggtacggggaccaagattcctctgacttatatcaaaccagaggcaactcccacacagaggctgtggaagggtaagcctgtgtgcctcaagaaaa

SEQ ID NO: 575556 - DNA, 120 bp, Artificial Sequence
  ENSG00000171385_31 (sequence is synthesized)
atgcttcaaagcaaaagcaagtaagagattctagatgattcttacctgctatgaaagatgccttgatgtctgaagaggcttcggcctgatctccctgaagatgctgaaatgggggagaag

SEQ ID NO: 575557 - DNA, 120 bp, Artificial Sequence
  ENSG00000171385_32 (sequence is synthesized)
cctcatcacctctgtgcaagcaaaggagtgaagattatttcttgaacacctggacaacatatctattcaactagcttgcaccctggtggagctgggggcagcatttctggaatcctccta

SEQ ID NO: 575558 - DNA, 120 bp, Artificial Sequence
  ENSG00000171385_33 (sequence is synthesized)
ccagccaccttgctgcagtctctgtagcctgggctctgaaatacatgagctcctcgggagctgcctatccatcctacagcttagtggttagctgtttaattgtaggccaagaatttctct

SEQ ID NO: 575559 - DNA, 120 bp, Artificial Sequence
  ENSG00000171385_34 (sequence is synthesized)
ccccaccacagccatctaaatgagttttactagccaggaacctaaaaacacccttcgtgggcttccctatgaccccagctcgattgaccctgtaggttcaaaaggtttcgaggtggcacc

SEQ ID NO: 575560 - DNA, 120 bp, Artificial Sequence
  ENSG00000171385_35 (sequence is synthesized)
taaccagaatgtgggcagaaggcagaggagagggagccttctttctgtctttatctctttatgcttatcctcattgaccatgggctgagttctttctctgggtcccctaatgtgggaatg

SEQ ID NO: 575561 - DNA, 120 bp, Artificial Sequence
  ENSG00000171385_36 (sequence is synthesized)
gagtggttcttgccctctgagcttacagactaagaaggcagaaaagctttacaactacagagtacatgtgtatacacacaaccaacctaaacacatcagagaatacatacttaaatcaat

SEQ ID NO: 575562 - DNA, 120 bp, Artificial Sequence
  ENSG00000171385_37 (sequence is synthesized)
tcacttcatatacacatctcattagaagaccaagctaaacttcacttagagggcgggcaaaggactagaaaagaatttttctcttaaaaaaaatgagtactagagcaaaattatgagtgt

SEQ ID NO: 575563 - DNA, 120 bp, Artificial Sequence
  ENSG00000171385_38 (sequence is synthesized)
aaaaatgagtactagagcaaaattatgagtgtctaagtatcttagttatgcttcataagatctgactggggtaagagataaagaggtaaatagggctgggcgcggtggctcacatctgta

SEQ ID NO: 575564 - DNA, 120 bp, Artificial Sequence
  ENSG00000171385_39 (sequence is synthesized)
agaaaaaaaaaaaggaggtaaattagaactggttgcacacacatacaaacttcctgtgatgaatttaagaacagatcattacagggttagaatagtgacagattcaacaaaggatctgtt

SEQ ID NO: 575565 - DNA, 120 bp, Artificial Sequence
  ENSG00000171385_40 (sequence is synthesized)
tgatagggcaccaagggaacattttactggttcccacaaaaattaataaatgttaaatatcatgtcccaagcaatttcccatgtttttttattggtcctaatcaacagaatgttttgtgt

SEQ ID NO: 575566 - DNA, 120 bp, Artificial Sequence
  ENSG00000171385_41 (sequence is synthesized)
tccttccacttcacgttcagagcccacgtcatgccacttcctaaaagaccattagaccatccccttttcctccatcctccactgtagccttagccagagaaaagatccagctcacttctg

SEQ ID NO: 575567 - DNA, 120 bp, Artificial Sequence
  ENSG00000171385_42 (sequence is synthesized)
gtccaaaaaatgtcaacgtttggaaaatggctcatctacactacagaacacagccagatgacactgctaaagggtactgtaagaaaacacaaggtccaaagtatgctgaattggtttcat

SEQ ID NO: 575568 - DNA, 120 bp, Artificial Sequence
  ENSG00000171385_43 (sequence is synthesized)
aagtctaactcattggccagtgactgaaaaaccaggatatcaggattttctgggggccaatagccatgacccttgagctttcatagttcatgaaccactttgacataataaaatattccc

SEQ ID NO: 575569 - DNA, 120 bp, Artificial Sequence
  ENSG00000171385_44 (sequence is synthesized)
aaaaccacctattccattcagtcccactcagcattaagagggggagggaaaaacaaaccaaccaaccaacctaacagttacattcaaatgtcaaatgaatgtgaacctagaaaatgtagt

SEQ ID NO: 575570 - DNA, 120 bp, Artificial Sequence
  ENSG00000171385_45 (sequence is synthesized)
attaagagcatatcagaactagaaaagatttaagaatatctaattcattttacagtatagaaaactgagacccagagaaattaaatgacttgttcaaggtcatgcagttatttaatgaca

SEQ ID NO: 575571 - DNA, 120 bp, Artificial Sequence
  ENSG00000171385_46 (sequence is synthesized)
gatctgagaccagaacacgagtcttttggctattagtctaatgcattttctaccacacccactgcctctgagagcagtgatgctttggagaagatccatcaaagaatccatactgtaatt

SEQ ID NO: 575572 - DNA, 120 bp, Artificial Sequence
  ENSG00000171385_47 (sequence is synthesized)
ggagacatagtcttatatgtcaatacgtatatgtcaatactacttggacacagcccttggaaatcacctgactgtaccaatacaaaccatactttggaaaccaccattctctgggtagaa

SEQ ID NO: 575573 - DNA, 120 bp, Artificial Sequence
  ENSG00000171385_48 (sequence is synthesized)
acatctatggactatcaattttgtcagaaatcagtgaacaagtgaagagtcaattttttttagtcaaatattttctcttctcaatgaagagaagactaggacagtgacattttgaagcat

SEQ ID NO: 575574 - DNA, 120 bp, Artificial Sequence
  ENSG00000171385_49 (sequence is synthesized)
accttttatactccttgtggttcttatgacagtctgtgatggtagtaggtaaagtagctaaatccttgattcagagaggggaaaacatgtggaaagaaactgaacgacttatccaagttc

SEQ ID NO: 575575 - DNA, 120 bp, Artificial Sequence
  ENSG00000171385_50 (sequence is synthesized)
acatgacaagttagtggcagaaccattattgcaatccaggacttaagacatcttgtcctaggatttttcctccacattatattgcactgctctgaggcttgcttatatttttcatacctg

SEQ ID NO: 575576 - DNA, 120 bp, Artificial Sequence
  ENSG00000171385_51 (sequence is synthesized)
gatttccagggtggtgacgtgggggagggaagtattcaattcagaaccaccgtgaaccaagatctctggaaacaaactctgtactatttctccttcatctcctattttcataactagtgc

SEQ ID NO: 575577 - DNA, 120 bp, Artificial Sequence
  ENSG00000171385_52 (sequence is synthesized)
caagctcaggactaactgcatagactccctttcaaaagaccaatagatattctcagtgacagttgaacacattagtttacaatcacacagaatttgaacagaacttaaagttgacagtta

SEQ ID NO: 575578 - DNA, 120 bp, Artificial Sequence
  ENSG00000171385_53 (sequence is synthesized)
atgccgatctataattaacaaaaatgtcaacttgtggatatgctgatgattttatccagttttcaaaatatgattcctacagttcaggatatcacttattagattgtagacaaggaaaat

SEQ ID NO: 575579 - DNA, 120 bp, Artificial Sequence
  ENSG00000171385_54 (sequence is synthesized)
gtacattgggacattatgtacttaagagtttttccttaagttttgcagaggaagtggttgaaaattgagctaacactagatttcgaggttactaaagaattccagttttccagtctccca

SEQ ID NO: 575580 - DNA, 120 bp, Artificial Sequence
  ENSG00000171385_55 (sequence is synthesized)
cttcaattaccaggtaactataaggcaaaaatatcccaatgctgtgaacttaaggcaatattcatttcctttctacactacttggcatggtaaccatgacaaacttttattttctctttc

SEQ ID NO: 575581 - DNA, 120 bp, Artificial Sequence
  ENSG00000171385_56 (sequence is synthesized)
tgatttcctaatgaaatctcattatttgcaaagctttaaaatgactagatgaaggaaaaacattgttatgacccatgaccctcggagcccaaacagcaccatgaagagcatcattaaaac

SEQ ID NO: 575582 - DNA, 120 bp, Artificial Sequence
  ENSG00000171385_57 (sequence is synthesized)
taagagaaagtggctatcagaaaatgaaacagctttaaaggggttccttttaagtcttgttttctattcagaatgttctgtgttttttctcaagtgtgggaatgacatttatcttagcag

SEQ ID NO: 575583 - DNA, 120 bp, Artificial Sequence
  ENSG00000171385_58 (sequence is synthesized)
gttactcaactacactggatgatgtcactctaaccagtgtacggcactgacccaagtcctggggggctccttggaccaatggactattttacaaacctgggaggtgggagggatggtata

SEQ ID NO: 575584 - DNA, 120 bp, Artificial Sequence
  ENSG00000171385_59 (sequence is synthesized)
tttttgataatcagacattccaatgtaatgttttccttagaggtcacacccttccccccattaatgtcatcgtgagatacatcaagtgtgttcttttctattttcgtataataaatgggc

SEQ ID NO: 575585 - DNA, 120 bp, Artificial Sequence
  ENSG00000171385_60 (sequence is synthesized)
tttgcttatcaacatcacaatggcaaagaagaaatatactgtacaaaactgcaggaagataaaacatgaaaactttctatgaaaaaaaaaaaacacccttgagtttcctgtcgtcttctt

SEQ ID NO: 575586 - DNA, 120 bp, Artificial Sequence
  ENSG00000171385_61 (sequence is synthesized)
ttgaaactgtagtgcatatgttaaaacatgtatatcatttacagtattgagtcgtgtgccactgctgtacctgatgtatccaatctggattaaacaaattatgtgccacaaaccctaaaa

SEQ ID NO: 575587 - DNA, 120 bp, Artificial Sequence
  ENSG00000171388_0 (sequence is synthesized)
gagcattctctctggcagccggggtcacgggcagttgcagccgcggccgagcagccagccgctaagaaagagctcgccgctgccgctcccggagccgccgaggccagcttcgcggcgctg

SEQ ID NO: 575588 - DNA, 120 bp, Artificial Sequence
  ENSG00000171388_1 (sequence is synthesized)
cagcttcgcggcgctgccccgcggcgggagaggaggctgcagaagagcggaggcggccagcgggagcggcggggctcagcgcgcacactcagcggccggggagcctcccgagctctgcgc

SEQ ID NO: 575589 - DNA, 120 bp, Artificial Sequence
  ENSG00000171388_2 (sequence is synthesized)
cggctcgcgcctttcttggcctccgggcgcccgacctctcctcccccgcgccggctcgccggggccgcggcggcccaaggagcagcatgaatctgcggctctgcgtgcaggcgctcctgc

SEQ ID NO: 575590 - DNA, 120 bp, Artificial Sequence
  ENSG00000171388_3 (sequence is synthesized)
tgctctggctctccttgaccgcggtgtgtggagggtccctgatgccgcttcccgatgggaatgggctggaagacggcaatgtccgccacctggtgcagcccagagggtcaaggaatgggc

SEQ ID NO: 575591 - DNA, 120 bp, Artificial Sequence
  ENSG00000171388_4 (sequence is synthesized)
cagggccctggcagggaggtcggaggaaattccgccgccagcggccccgcctctcccataagggacccatgcctttctgaagcaggactgaaggggcccccaagtgcccacccccggcgg

SEQ ID NO: 575592 - DNA, 120 bp, Artificial Sequence
  ENSG00000171388_5 (sequence is synthesized)
ttatgtctcctccatagattggtctgcttctctggaggcctcacgtccattcagctctcacctcgcacctgctgtagccaccagtgggcccagctcttctcacctgcctgcttcccccag

SEQ ID NO: 575593 - DNA, 120 bp, Artificial Sequence
  ENSG00000171388_6 (sequence is synthesized)
tggcgtgctcctggctgtagtttggatgattcccgttctctcacaagaatccgtccagtccatcttcctggcccctccctggactgactttggagacctagccccagaaagcctcccttc

SEQ ID NO: 575594 - DNA, 120 bp, Artificial Sequence
  ENSG00000171388_7 (sequence is synthesized)
ttctccaggtcccctccgccctagtccctgcctgtctcatctaacgccccaaaccttcatttgggccttccttcctcatgtctgccctgagcgcggggtggaagtgctcccttctgtggg

SEQ ID NO: 575595 - DNA, 120 bp, Artificial Sequence
  ENSG00000171388_8 (sequence is synthesized)
ctccagcagatcccttgttttcctgtcagttggacccctcacctggcctccagggaagaatgcagagaaaagcaaggagagactctagttaagaggtgctggctgcggggatccagacag

SEQ ID NO: 575596 - DNA, 120 bp, Artificial Sequence
  ENSG00000171388_9 (sequence is synthesized)
ggcacattgggggcatggaagtgccagggtggttttcaggagctctggtgaagtgggtggagcatcagcgtttgctcagttaagggagaggtagagaggggcccgtgaagtcctttgtca

SEQ ID NO: 575597 - DNA, 120 bp, Artificial Sequence
  ENSG00000171388_10 (sequence is synthesized)
cttctcttgccttagtgtgcctcccaatactcccttcttcctgcccccacaccccatccccagctagcccaagctccaggtcaggaggggagggtgctgggcctgacatggctatatacc

SEQ ID NO: 575598 - DNA, 120 bp, Artificial Sequence
  ENSG00000171388_11 (sequence is synthesized)
ctcccaggagtaaaagccaagcaagaggttgtttttgccaagaatcacagaatgttagagctgacaggacccttgaaggtcacttagccttcttaggcaaacgcctgcaaaacagaagcc

SEQ ID NO: 575599 - DNA, 120 bp, Artificial Sequence
  ENSG00000171388_12 (sequence is synthesized)
tggagaggggagtgacctgctcagagtcattgcagagccgggatggggaccaggtctcccatctcctactttatgacgccctcttccctcttgatgatgtcttttcaaagcaaatgaagt

SEQ ID NO: 575600 - DNA, 120 bp, Artificial Sequence
  ENSG00000171388_13 (sequence is synthesized)
ccctgacctacccctgctgcaccattcccccagctgggctggaaggttccataactggccagctgcccccataactggcagcattcccagacccagggtactctaataggggcggctcag

SEQ ID NO: 575601 - DNA, 120 bp, Artificial Sequence
  ENSG00000171388_14 (sequence is synthesized)
gcactgagactaccgctcaaccccagggtggttttcaggagtccgaggtagccttcaatcactggactccatggccttcccttcgtgttgaccggaccttccttccagggcttttccttt

SEQ ID NO: 575602 - DNA, 120 bp, Artificial Sequence
  ENSG00000171388_15 (sequence is synthesized)
gggggaggcggagaggggagaagaaggaagggaagggcagaaggaaggagggaagaaaagaaagcaaaggaacagaaggaaggaaagaaagatgggaggaagtgcagcaggaatagcacc

SEQ ID NO: 575603 - DNA, 120 bp, Artificial Sequence
  ENSG00000171388_16 (sequence is synthesized)
ctctccccgggaggccctagcttccgtgaggggccatcaccagccattccttggagggggctttctccccttttgcttgagcagggttcccaggagggagaaagagaagacaagagcctg

SEQ ID NO: 575604 - DNA, 120 bp, Artificial Sequence
  ENSG00000171388_17 (sequence is synthesized)
atgcccaactttgtgtgtgtggggacgggggagtcagggccccccaagtcccacaatagccccaatgtttgcctatccacctcccccaagcccctttacctatgctgctgctaacgctgc

SEQ ID NO: 575605 - DNA, 120 bp, Artificial Sequence
  ENSG00000171388_18 (sequence is synthesized)
tgctgctgctgctgctgcttaaaggctcatgcttggagtggggactggtcggtgcccagaaagtctcttctgccactgacgcccccatcagggattgggccttctttcccccttcctttc

SEQ ID NO: 575606 - DNA, 120 bp, Artificial Sequence
  ENSG00000171388_19 (sequence is synthesized)
tgtgtctcctgcctcatcggcctgccatgacctgcagccaagcccagccccgtggggaaggggagaaagtgggggatggctaagaaagctgggagatagggaacagaagagggtagtggg

SEQ ID NO: 575607 - DNA, 120 bp, Artificial Sequence
  ENSG00000171388_20 (sequence is synthesized)
tgggctaggggggctgccttatttaaagtggttgtttatgattcttatactaatttatacaaagatattaaggccctgttcattaagaaattgttcccttcccctgtgttcaatgtttgt

SEQ ID NO: 575608 - DNA, 120 bp, Artificial Sequence
  ENSG00000171388_21 (sequence is synthesized)
aaagattgttctgtgtaaatatgtctttataataaacagttaaaagctgacagttcgcccttactcttggaggtcatgttcaggaggggcattcctttcccctgggggtcatgggtgtcc

SEQ ID NO: 575609 - DNA, 120 bp, Artificial Sequence
  ENSG00000171388_22 (sequence is synthesized)
ccatgcccacatattgcacgtgcagggaggtaagtgcctgcatcccaaatcggttctaggtcaactggcctcaaactgatttgccatgagctcacaaaatgaatccctatgcttaatgac

SEQ ID NO: 575610 - DNA, 120 bp, Artificial Sequence
  ENSG00000171388_23 (sequence is synthesized)
caggtcacataaaatccagcccacttacaggttttctggcatctgtttgggtgtcctaatttttttggcagtgtcatttgaagaatttttttaaagcagtttatttaagaacatactgat

SEQ ID NO: 575611 - DNA, 120 bp, Artificial Sequence
  ENSG00000171388_24 (sequence is synthesized)
taaatgcaggatcgctactaaaaattgttttgtatccttggtgggtgtcttctgctattttatctacttttgaacactttcaggactttttagccagtttgcctttcttgaaaaatgtta

SEQ ID NO: 575612 - DNA, 120 bp, Artificial Sequence
  ENSG00000171388_25 (sequence is synthesized)
tgttttcagcaataaatacatttgataatgactttgtttgtatcattttatgtttcacaaagtagagttgcttgatgaatgagatagcctgaaaaataaaatgcaaagagttcaatataa

SEQ ID NO: 575613 - DNA, 120 bp, Artificial Sequence
  ENSG00000171396_0 (sequence is synthesized)
aagccttccaaaccctccttcctggaaacccacccagaacctccaccctctgacaccatggtcaactcctgttgtggctctgtgtgctctgaccagggctgtggcctagagaactgctgc

SEQ ID NO: 575614 - DNA, 120 bp, Artificial Sequence
  ENSG00000171396_1 (sequence is synthesized)
cgtcccagctactgccagaccacctgctgcaggaccacctgctgccgccccagctgctgtgtgtccagctgctgcagaccccagtgctgccagaccacctgctgcaggaccacctgctgc

SEQ ID NO: 575615 - DNA, 85 bp, Artificial Sequence
  ENSG00000171396_2 (sequence is synthesized)
agaccccaatgctgccagactacctgctgtaggaccacctgctgccgccccagctgctgcaggccccagtgctgccagtctgtgt

SEQ ID NO: 575616 - DNA, 120 bp, Artificial Sequence
  ENSG00000171396_3 (sequence is synthesized)
gtctgtgtgctgccagcccacctgctgctgccccagctactgtgtgtccagctgctgcagaccccagtgctgccagaccacctgctgcagaaccacctgctgccgccccagctgctgtgt

SEQ ID NO: 575617 - DNA, 120 bp, Artificial Sequence
  ENSG00000171396_4 (sequence is synthesized)
cagctgctgtgtgtccaggtgctacaggccccattgtggccagtctctatgctgctagcccatctgctggcaaaccacctgctacaggaccacctgctgccaccccagctattgcatttc

SEQ ID NO: 575618 - DNA, 120 bp, Artificial Sequence
  ENSG00000171396_5 (sequence is synthesized)
cagctgctgccagccttcctgcagtatctctagcagcagtagctcctcctgctgtggcttcagctgctgcaggctctcctgctgcatctccagttgctgccgccccaactgctgccagac

SEQ ID NO: 575619 - DNA, 120 bp, Artificial Sequence
  ENSG00000171396_6 (sequence is synthesized)
catgtgctgccgcccaacctgctctagtgcttcttgctgctgaggctgtcatctggactcaccagattctcatcaaccagcattcttgatgtagctcatctatgagctgagttatgggaa

SEQ ID NO: 575620 - DNA, 120 bp, Artificial Sequence
  ENSG00000171396_7 (sequence is synthesized)
gctagttggaaaacttcagttccaaccaattcttagattgaatctggcctccaaatatatgctccccccacattttacctctctaccaaatgaacataagttgtaatttgctctgaaatc

SEQ ID NO: 575621 - DNA, 120 bp, Artificial Sequence
  ENSG00000171396_8 (sequence is synthesized)
tgtcaactatcttaattgaaatatttgctctctgccataatttctcatatggagctattccattttaaacaaatatttatctaaataaatcttaaataaattttcaggcatagaaatata

SEQ ID NO: 575622 - DNA, 120 bp, Artificial Sequence
  ENSG00000171401_0 (sequence is synthesized)
acagtcctcggcccaggccaagcaagcttctatctgcacctgctctcaatcctgctctcaccatgagcctccgcctgcagagctcctctgccagctatggaggtggtttcgggggtggct

SEQ ID NO: 575623 - DNA, 120 bp, Artificial Sequence
  ENSG00000171401_1 (sequence is synthesized)
cttgccagctgggaggaggccgtggtgtctctacctgttcaactcggtttgtgtccgggggatcagctgggggctatggaggcggcgtgagctgtggttttggtggaggggctggtagtg

SEQ ID NO: 575624 - DNA, 120 bp, Artificial Sequence
  ENSG00000171401_2 (sequence is synthesized)
gctttggaggtggctatggaggtggccttggaggtggctatggaggtggccttggaggtggctttggtgggggttttgctggtggctttgttgactttggtgcttgtgatggcggcctcc

SEQ ID NO: 575625 - DNA, 120 bp, Artificial Sequence
  ENSG00000171401_3 (sequence is synthesized)
tcactggcaatgagaagatcaccatgcagaacctcaacgaccgcctggcttcctacctggagaaggtgcgcgccctggaggaggccaacgctgacctggaggtgaagatccgtgactggc

SEQ ID NO: 575626 - DNA, 120 bp, Artificial Sequence
  ENSG00000171401_4 (sequence is synthesized)
acctgaagcagagcccagctagccctgagcgggactacagcccctactacaagaccattgaagagctccgggacaagatcctgaccgccaccattgaaaacaaccgggtcatcctggaga

SEQ ID NO: 575627 - DNA, 120 bp, Artificial Sequence
  ENSG00000171401_5 (sequence is synthesized)
ttgacaatgccaggctggctgcggacgacttcaggctcaagtatgagaatgagctggccctgcgccagagcgtggaggccgacatcaacggcctgcgccgggtgctggatgagctcactc

SEQ ID NO: 575628 - DNA, 120 bp, Artificial Sequence
  ENSG00000171401_6 (sequence is synthesized)
tgtctaagactgacctggagatgcagatcgagagcctgaatgaagagctagcctacatgaagaagaaccatgaagaggagatgaaggaatttagcaaccaggtggtcggccaggtcaacg

SEQ ID NO: 575629 - DNA, 120 bp, Artificial Sequence
  ENSG00000171401_7 (sequence is synthesized)
ccgcgtgctggcagagatgagggagcagtacgaggccatggcagagaggaaccgccgggatgctgaggaatggttccacaccaagagtgcagagctgaacaaggaggtgtctaccaacac

SEQ ID NO: 575630 - DNA, 120 bp, Artificial Sequence
  ENSG00000171401_8 (sequence is synthesized)
tgccatgattcagaccagcaagacagagatcacggagctcaggcgcacgctccaaggcctggagattgagctgcagtcccagctgagcatgaaagcggggctggagaacacggtggcaga

SEQ ID NO: 575631 - DNA, 120 bp, Artificial Sequence
  ENSG00000171401_9 (sequence is synthesized)
gacggagtgccgctatgccctgcagctgcagcagatccagggactcatcagcagcatcgaggcccagctgagcgagctccgcagtgagatggagtgccagaaccaagagtacaagatgct

SEQ ID NO: 575632 - DNA, 120 bp, Artificial Sequence
  ENSG00000171401_10 (sequence is synthesized)
gctggacatcaagacacgtctggagcaggagatcgccacctaccgcagcctgctcgagggccaggacgccaagatgattggtttcccttcctcagcaggaagcgtcagcccccgtagcac

SEQ ID NO: 575633 - DNA, 120 bp, Artificial Sequence
  ENSG00000171401_11 (sequence is synthesized)
ctctgttaccacgacttctagtgcctctgttaccaccacctctaatgcctctggtcgccgcacttctgatgtccgtaggccttaaatctgcctggcgtcccctccctctgtcttcagcac

SEQ ID NO: 575634 - DNA, 120 bp, Artificial Sequence
  ENSG00000171401_12 (sequence is synthesized)
ccagaggaggagagagccggcagttccctgcaggagagaggaggggctgctggacccaaggctcagtccctctgctctcaggaccccctgtcctgactctctcctgatggtgggccctct

SEQ ID NO: 575635 - DNA, 120 bp, Artificial Sequence
  ENSG00000171401_13 (sequence is synthesized)
gtgctcttctcttccggtcggatctctctcctctctgacctggatacgctttggtttctcaacttctctaccccaaagaaaagattattcaataaagtttcctgcctttctgcaaacata

SEQ ID NO: 575636 - DNA, 120 bp, Artificial Sequence
  ENSG00000171401_14 (sequence is synthesized)
tagtgactgcaggacccgtgggtgtcagagcaggcagggccttagagatccaccccctcatgtcagagaggagacccctcactgtctgactttacggggacatttccttggtaggctgca

SEQ ID NO: 575637 - DNA, 120 bp, Artificial Sequence
  ENSG00000171401_15 (sequence is synthesized)
cagccccgtggtgtagggggaggcagagttagcctcccattcactgccccaatgggggtgggagctggcggggagggagggagccagtgctgggctctccagtgtagggagggggagagc

SEQ ID NO: 575638 - DNA, 120 bp, Artificial Sequence
  ENSG00000171401_16 (sequence is synthesized)
tggggtggaagtggtcattcgctcactgattttccttttgaaactgatggctctgccccacagagctatttggctgtcttgggaagagccatctttggggacaataaagagtctccatcc

SEQ ID NO: 575639 - DNA, 120 bp, Artificial Sequence
  ENSG00000171401_17 (sequence is synthesized)
acgcaccacctgactaatgaggagtttgtgagccctccaggggggccctgccctgtcctgaggtgggtcttctccagcctgagcatgtcttgtctcttgtttcccaggaagcgtcagccc

SEQ ID NO: 575640 - DNA, 120 bp, Artificial Sequence
  ENSG00000171401_18 (sequence is synthesized)
agtgggcacctgatgctgctgtcccttgagctgggggcacagctaggaggcactagagtccagcccaggggcttgaaatgataagccgaggcacttccccagaggaacaggaagcgtcag

SEQ ID NO: 575641 - DNA, 120 bp, Artificial Sequence
  ENSG00000171401_19 (sequence is synthesized)
agtgccgagcctgggtgccctttgttgagccctgtctgttgtgctgtgataccagcctgttggagcagaaatctaccagcctgggctgagtctcagccatgtggagcaggctttcactgc

SEQ ID NO: 575642 - DNA, 120 bp, Artificial Sequence
  ENSG00000171401_20 (sequence is synthesized)
tttggaatataaacgtttagacaagaaattcaaagggatgggaatatttgttggatttcccctccactcagctgggaagtcagctctagcaaagtgattgtgagatatgtggcaccaagc

SEQ ID NO: 575643 - DNA, 120 bp, Artificial Sequence
  ENSG00000171401_21 (sequence is synthesized)
agcaggtcgttcctcagaaatgcactccctgcatctcccccagggtgctcagacatggaatattaaagtgttagaaacgattggaggggatgcagccccactcctcactttacagaagag

SEQ ID NO: 575644 - DNA, 120 bp, Artificial Sequence
  ENSG00000171401_22 (sequence is synthesized)
caatggaggcccagagggaaatgccttgtcccagctcacaggacagtttagagatcctgaccgccaccattgaaaacaaccgggtcatcctggagattgacaatgccaggctggctgcgg

SEQ ID NO: 575645 - DNA, 120 bp, Artificial Sequence
  ENSG00000171402_0 (sequence is synthesized)
gaatgccctggagttgtgagggtgtgagggtcgcgttcctgctgtctggactttttctgtcccactgagacgcagctgtgtgaaatatgatttggcgaggaagatcaacatataggccta

SEQ ID NO: 575646 - DNA, 120 bp, Artificial Sequence
  ENSG00000171402_1 (sequence is synthesized)
ggccgaggagaagtgtaccacctcctgagctgattgggcctatgctggagcccggtgatgaggagcctcagcaagaggaaccaccaactgaaagtcgggatcctgcacctggtcaggaga

SEQ ID NO: 575647 - DNA, 120 bp, Artificial Sequence
  ENSG00000171402_2 (sequence is synthesized)
gtgcctgacctggaagctgatctccaggagctgtctcagtcaaagactgggggtgaatgtggaaatggtcctgatgaccaggggaagattctgccaaaatcagaacaatttaaaatgcca

SEQ ID NO: 575648 - DNA, 120 bp, Artificial Sequence
  ENSG00000171402_3 (sequence is synthesized)
gaaggaggtgacaggcaaccacaggtttaaatgaagacaagctgaaacaacacaaaactgtttttatctaagatatttgacttaaaaatatcgaaataaacttttgcagctttctccaaa

SEQ ID NO: 575649 - DNA, 120 bp, Artificial Sequence
  ENSG00000171403_0 (sequence is synthesized)
accctgcacttgggagccggtagcactcctatcactgcttctcaacccgtgagctaccagctgtgtcatgagctgcagacagttctcctcgtcctacttgagccgcagcggcgggggtgg

SEQ ID NO: 575650 - DNA, 120 bp, Artificial Sequence
  ENSG00000171403_1 (sequence is synthesized)
cgggggcggcctgggcagcgggggcagcataaggtcttcctacagccgcttcagctcctcagggggcggtggaggagggggccgattcagctcttctagtggctatggtgggggaagctc

SEQ ID NO: 575651 - DNA, 120 bp, Artificial Sequence
  ENSG00000171403_2 (sequence is synthesized)
tcgtgtctgtgggaggggaggcggtggcagttttggctacagctacggcggaggatctgggggtggttttagtgccagtagtttaggcggtggctttgggggtggttccagaggttttgg

SEQ ID NO: 575652 - DNA, 120 bp, Artificial Sequence
  ENSG00000171403_3 (sequence is synthesized)
tggtgcttctggaggaggctatagtagttctgggggttttggaggtggctttggtggtggttctggaggtggctttggtggtggctatgggagtgggtttggggggtttgggggctttgg

SEQ ID NO: 575653 - DNA, 120 bp, Artificial Sequence
  ENSG00000171403_4 (sequence is synthesized)
aggtggtgctggaggaggtgatggtggtattctgactgctaatgagaagagcaccatgcaggaactcaattctcggctggcctcttacttggataaggtgcaggctctagaggaggccaa

SEQ ID NO: 575654 - DNA, 120 bp, Artificial Sequence
  ENSG00000171403_5 (sequence is synthesized)
caacgacctggagaataagatccaggattggtacgacaagaagggacctgctgctatccagaagaactactccccttattataacactattgatgatctcaaggaccagattgtggacct

SEQ ID NO: 575655 - DNA, 120 bp, Artificial Sequence
  ENSG00000171403_6 (sequence is synthesized)
gacagtgggcaacaacaaaactctcctggacattgacaacactcgcatgacactggatgacttcaggataaagtttgagatggagcaaaacctgcggcaaggagtggatgctgacatcaa

SEQ ID NO: 575656 - DNA, 120 bp, Artificial Sequence
  ENSG00000171403_7 (sequence is synthesized)
tggcctgcggcaggtgctggacaatctgaccatggagaagtctgacctggagatgcagtatgagactctgcaggaggagctgatggccctcaagaagaatcataaggaggagatgagtca

SEQ ID NO: 575657 - DNA, 120 bp, Artificial Sequence
  ENSG00000171403_8 (sequence is synthesized)
gctgactgggcagaacagtggagatgtcaatgtggagataaacgttgctcctggcaaagatctcaccaagaccctcaatgacatgcgtcaggagtatgagcagctcattgctaagaacag

SEQ ID NO: 575658 - DNA, 120 bp, Artificial Sequence
  ENSG00000171403_9 (sequence is synthesized)
caatatgagactcagataacccagatcgagcatgaggtatccagtagtggtcaggaggtgcagtccagtgccaaggaggtgacccagctccggcacggtgtccaggagttggagattgag

SEQ ID NO: 575659 - DNA, 120 bp, Artificial Sequence
  ENSG00000171403_10 (sequence is synthesized)
ctgcagtctcagctcagcaagaaagcagctctggagaagagcttggaagacacgaagaaccgctactgtggccagctgcagatgatccaggagcagatcagtaacttggaggcccagatc

SEQ ID NO: 575660 - DNA, 120 bp, Artificial Sequence
  ENSG00000171403_11 (sequence is synthesized)
actgacgtccggcaagagatcgagtgccagaatcaggaatacagccttctgctcagcattaagatgcggctggagaaggaaatcgagacctaccacaacctccttgagggaggccaggaa

SEQ ID NO: 575661 - DNA, 120 bp, Artificial Sequence
  ENSG00000171403_12 (sequence is synthesized)
gactttgaatcctccggagctggaaaaattggccttggaggtcgaggaggaagtggaggcagttatggaagaggatccaggggaggaagtggaggcagctatggtggaggaggaagtgga

SEQ ID NO: 575662 - DNA, 120 bp, Artificial Sequence
  ENSG00000171403_13 (sequence is synthesized)
ggtggctatggtggaggaagtgggtccaggggaggaagtggaggcagctacggtggaggaagtggttctggaggaggtagtggaggtggctatggtggaggaagtggaggtggccatagc

SEQ ID NO: 575663 - DNA, 120 bp, Artificial Sequence
  ENSG00000171403_14 (sequence is synthesized)
ggaggaagtggaggtggtcatagtggaggaagtgggggcaactatggaggaggaagtggctctggaggaggaagtgggggtggctatggtggaggaagtgggtccaggggaggaagtgga

SEQ ID NO: 575664 - DNA, 120 bp, Artificial Sequence
  ENSG00000171403_15 (sequence is synthesized)
ggcagccatggtggaggaagtggttttggaggtgaaagtggaggcagctacggaggcggtgaagaagcgagtggaagtggtggcggctacggaggaggaagcggaaaatcatcccattcc

SEQ ID NO: 575665 - DNA, 120 bp, Artificial Sequence
  ENSG00000171403_16 (sequence is synthesized)
tagtcttcttcctcaaaatctggtgaccaagatgagacaaaaggcttcctttcgcgatactagagcctctgtaaacttctcctgcccagccccagctgagcatccccagatgggcagact

SEQ ID NO: 575666 - DNA, 120 bp, Artificial Sequence
  ENSG00000171403_17 (sequence is synthesized)
cccgatgaagcctgcttattggatcctgacatcaggaatagctggcaacaagcccctgtgcccgtttgggactgaactgacttggcatatgtgcctctggctttccattggcttccaacc

SEQ ID NO: 575667 - DNA, 120 bp, Artificial Sequence
  ENSG00000171403_18 (sequence is synthesized)
ctgcttggctttgatgccttcagggttggggagacagacctctttcctctctctggcctggggtgctctcacaccctgcacgatcttgactataataaagcttccctactgcaaatcaaa

SEQ ID NO: 575668 - DNA, 120 bp, Artificial Sequence
  ENSG00000171405_0 (sequence is synthesized)
tggaagtgctcaagtgtggtatacactcaggtgcatttttccaatcacaatattctggactgaaatatgagttggcgaggaagaagatatagaccaagacgatgtttacgacttgctcag

SEQ ID NO: 575669 - DNA, 120 bp, Artificial Sequence
  ENSG00000171405_1 (sequence is synthesized)
ttcaagtgcctaacctggaagctgatctccaggagctgtctcagtcaaagactggggatgaatgcggagatagtcctgatgtccaggggaagattctgccaaaatcagagcaatttaaaa

SEQ ID NO: 575670 - DNA, 120 bp, Artificial Sequence
  ENSG00000171405_2 (sequence is synthesized)
tgccagaaggaggggaagggaaaccacagctttaaacgaagacaaccaaaagaatgcaaactggatttatccgagatatttgacttttaaaaatctcaataaagttttccagttttctcc

SEQ ID NO: 575671 - DNA, 80 bp, Artificial Sequence
  ENSG00000171405_3 (sequence is synthesized)
tggaagtgctcaagtgtggtatacactcaggtgcatttttccaatcacaatattctggtttttgctttggtttggtttgg

SEQ ID NO: 575672 - DNA, 80 bp, Artificial Sequence
  ENSG00000171405_4 (sequence is synthesized)
ctggagtgcaatggtgcaatctcggctggctgcaacattcgccccccggttcaagtgtgctcgctaccacacccagctac

SEQ ID NO: 575673 - DNA, 120 bp, Artificial Sequence
  ENSG00000171405_5 (sequence is synthesized)
tagagacggggtttcaccattttggccaagctggcctcgagcttctgacctcaggtgatccatccccctcagcctcccaaagtgcacactattctgtttgcagactgaaatatgagttgg

SEQ ID NO: 575674 - DNA, 120 bp, Artificial Sequence
  ENSG00000171405_6 (sequence is synthesized)
gaagatgatcagggtgcagctgagattcaaggtacttcgatattggctcaggacaaaacgcagttcagtgaaacaggatagcaactccagaaaagaggtcaatgaatgacagccactgtt

SEQ ID NO: 575675 - DNA, 120 bp, Artificial Sequence
  ENSG00000171405_7 (sequence is synthesized)
tgctgagacttatcctcagattgtcatttaagataagatatcataatacaggaaaacaaacatttattaccacagtagcctctaggcttttattgcacaacactgaggaaaagaatagga

SEQ ID NO: 575676 - DNA, 120 bp, Artificial Sequence
  ENSG00000171408_0 (sequence is synthesized)
agttggtctgggcactgcagcaggctcggctctgtcccagcacttgtctgggagaaaagtggtgttactcacccagggagagtctctctttctaccttccttctttctcgatctccttgt

SEQ ID NO: 575677 - DNA, 120 bp, Artificial Sequence
  ENSG00000171408_1 (sequence is synthesized)
tttttctttttttttttttgttacttaattatattcctaatcctggatgaagttgctggattctgcagcacaagtcttcatgaacaagcagcaccgctcagagatttcacggcattcaaa

SEQ ID NO: 575678 - DNA, 120 bp, Artificial Sequence
  ENSG00000171408_2 (sequence is synthesized)
cagcaccgctcagagatttcacggcattcaaaggtcacagaactgccactatggttaaatgtcttgtttaatggttgagaggtgtggcgaaatcttgtttgagaaccccgatcagaatgc

SEQ ID NO: 575679 - DNA, 120 bp, Artificial Sequence
  ENSG00000171408_3 (sequence is synthesized)
caaatgtgtttgcatgctgggagatatacgactaaggggtcagacgggggttcgtgctgaacgccgtggctcctacccattcattgacttccgcctacttaacagtacaacatactcagg

SEQ ID NO: 575680 - DNA, 120 bp, Artificial Sequence
  ENSG00000171408_4 (sequence is synthesized)
ggagattggcaccaagaaaaaggtgaaaagactattaagctttcaaagatacttccatgcatcaaggctgcttcgtggaattataccacaagcccctctgcacctgctggatgaagacta

SEQ ID NO: 575681 - DNA, 120 bp, Artificial Sequence
  ENSG00000171408_5 (sequence is synthesized)
ccttggacaagcaaggcatatgctctccaaagtgggaatgtgggattttgacattttcttgtttgatcgcttgacaaatggaaacagcctggtaacactgttgtgccacctcttcaatac

SEQ ID NO: 575682 - DNA, 120 bp, Artificial Sequence
  ENSG00000171408_6 (sequence is synthesized)
ccatggactcattcaccatttcaagttagatatggtgaccttacaccgatttttagtcatggttcaagaagattaccacagccaaaacccgtatcacaatgctgttcacgcagccgacgt

SEQ ID NO: 575683 - DNA, 120 bp, Artificial Sequence
  ENSG00000171408_7 (sequence is synthesized)
cacccaggccatgcactgctacctgaaagagccaaagcttgccagcttcctcacgcctctggacatcatgcttggactgctggctgcagcagcacacgatgtggaccacccaggggtgaa

SEQ ID NO: 575684 - DNA, 120 bp, Artificial Sequence
  ENSG00000171408_8 (sequence is synthesized)
ccagccatttttgataaaaactaaccaccatcttgcaaacctatatcagaatatgtctgtgctggagaatcatcactggcgatctacaattggcatgcttcgagaatcaaggcttcttgc

SEQ ID NO: 575685 - DNA, 120 bp, Artificial Sequence
  ENSG00000171408_9 (sequence is synthesized)
tcatttgccaaaggaaatgacacaggatattgaacagcagctgggctccttgatcttggcaacagacatcaacaggcagaatgaatttttgaccagattgaaagctcacctccacaataa

SEQ ID NO: 575686 - DNA, 120 bp, Artificial Sequence
  ENSG00000171408_10 (sequence is synthesized)
agacttaagactggaggatgcacaggacaggcactttatgcttcagatcgccttgaagtgtgctgacatttgcaatccttgtagaatctgggagatgagcaagcagtggagtgaaagggt

SEQ ID NO: 575687 - DNA, 120 bp, Artificial Sequence
  ENSG00000171408_11 (sequence is synthesized)
ctgtgaagaattctacaggcaaggtgaacttgaacagaaatttgaactggaaatcagtcctctttgtaatcaacagaaagattccatccctagtatacaaattggtttcatgagctacat

SEQ ID NO: 575688 - DNA, 120 bp, Artificial Sequence
  ENSG00000171408_12 (sequence is synthesized)
cgtggagccgctcttccgggaatgggcccatttcacgggtaacagcaccctgtcggagaacatgctgggccacctcgcacacaacaaggcccagtggaagagcctgttgcccaggcagca

SEQ ID NO: 575689 - DNA, 120 bp, Artificial Sequence
  ENSG00000171408_13 (sequence is synthesized)
cagaagcaggggcagcagtggcagcgggcctgaccacgaccacgcaggccaagggactgagagcgaggagcaggaaggcgacagcccctaggggccggcccaacttagacgcggctctcc

SEQ ID NO: 575690 - DNA, 120 bp, Artificial Sequence
  ENSG00000171408_14 (sequence is synthesized)
tccggcagggcccccagagggcagaagcagcgtggaggggccctcacgcagcagcccagccactttctgagtgttgtcctggggctctttggaacgccatcttcctcccacttacctgcc

SEQ ID NO: 575691 - DNA, 120 bp, Artificial Sequence
  ENSG00000171408_15 (sequence is synthesized)
tcccctccttttcgcaaatgtacagaagccatttgtcacctcagcattcgctgccgaaatgagcaactccattcagtaacgtgggagctgatcccacgggcaggctctccctgctccagg

SEQ ID NO: 575692 - DNA, 120 bp, Artificial Sequence
  ENSG00000171408_16 (sequence is synthesized)
agaagactaggaggaagaatgaggtgctcctgccgtgtccgccttgttccgggtcgcactggaacaggcagcaattcctaagtccggagcgtttgagcgtttgctatctgactgctgatc

SEQ ID NO: 575693 - DNA, 120 bp, Artificial Sequence
  ENSG00000171408_17 (sequence is synthesized)
tgcgtgacagaaacaccagcatatttgcaacgccaaggatattggtcttaagtgcaagagcacaaatgagagtgtgagagaaagtaccttctattttaataataatattattataaaaat

SEQ ID NO: 575694 - DNA, 120 bp, Artificial Sequence
  ENSG00000171408_18 (sequence is synthesized)
aataaatctttttaacttttatattttatgcactagacaatggatctgcaactttggactaaggtcattcaatgtacccaaacttgaacagggggttcattgttttgctattgactttat

SEQ ID NO: 575695 - DNA, 120 bp, Artificial Sequence
  ENSG00000171408_19 (sequence is synthesized)
tatgccactttggggcagagacttggcatcttcgcagtttaagaaaccacgtttcctatccaatccgaagggaaggtgctgtacagttcattcctttgcaccattagccaatctgtcttt

SEQ ID NO: 575696 - DNA, 120 bp, Artificial Sequence
  ENSG00000171408_20 (sequence is synthesized)
tatggattctgtgacatgtttatattcacccatgtacattttctgtaaataccaaacgctactgattcccatgccaaaatacatgagtattatgggattgctacctgtataaacaatggc

SEQ ID NO: 575697 - DNA, 120 bp, Artificial Sequence
  ENSG00000171408_21 (sequence is synthesized)
actgtgaaaatactgttagttttaatacaagagaatgcatttgtaaatatggtatagagtttattaatatactattgtttgcagataaaggccttaactttaaacatctttcatcttctg

SEQ ID NO: 575698 - DNA, 120 bp, Artificial Sequence
  ENSG00000171408_22 (sequence is synthesized)
ttgaggaaacattttggaaacttcacatgcattccgcttgagaccatagtgtttaatctatggcaccaagcatcgtttcctcagattaatgagacccttcaacaagcctgaatcagtcac

SEQ ID NO: 575699 - DNA, 120 bp, Artificial Sequence
  ENSG00000171408_23 (sequence is synthesized)
ttttcaacacagcgatgttttaacaagccagctgctaagcttgtgtttatgtgactcttgttacagatcatggcggtgcgtcagcctcacaggagacatagcaggtctcagaaaccttct

SEQ ID NO: 575700 - DNA, 120 bp, Artificial Sequence
  ENSG00000171408_24 (sequence is synthesized)
atgaccctgtcatctaaccatcagggaattccctgctcccatgccacacatttgtctattatggctatagtaccaaagtacttttggtgtttggttggtgtgcatttctttagtgtcgat

SEQ ID NO: 575701 - DNA, 120 bp, Artificial Sequence
  ENSG00000171408_25 (sequence is synthesized)
agtaactggatttttctttttccttaatctcatgtgaacaactacccaactgtttagctgaagttcatattatttaagtaaagaaaatatttcagttttataacagactttaccttcctg

SEQ ID NO: 575702 - DNA, 120 bp, Artificial Sequence
  ENSG00000171408_26 (sequence is synthesized)
gcaggtcattgtagttaattatgtctctagcttggagtgtcaccttggaatttcgttgccattttttctcagacacctggccgtaaaatcagtttgttacagcattcttctctaggctgc

SEQ ID NO: 575703 - DNA, 120 bp, Artificial Sequence
  ENSG00000171408_27 (sequence is synthesized)
taaacgctgtgcattgaaccttttctttagaagtttcagcgtaactaatgttagatgaaaattgttgatgcccctttctttttactttaaacaatgtggtagtgggagaatgactgtttc

SEQ ID NO: 575704 - DNA, 120 bp, Artificial Sequence
  ENSG00000171408_28 (sequence is synthesized)
tgccactatcaacctgatcctcatgctgatagaatgacagctagcacttatttcctaagtgcaactgttttagagatttttctcctaacatgcaaaggaaatactgattggcctataata

SEQ ID NO: 575705 - DNA, 120 bp, Artificial Sequence
  ENSG00000171408_29 (sequence is synthesized)
agttcctatagggagactgaggcttgcagaattaaggttcaggggaaattttggaaagttggttgtattttcattgaagtaggagagattatcagatggtgctaaagaaagtgtgaagat

SEQ ID NO: 575706 - DNA, 120 bp, Artificial Sequence
  ENSG00000171408_30 (sequence is synthesized)
cttatgaaataggtggatggtaagttgaaattattgatgtgggtaagaagggaggttgtggaaagttaacactagctttgtatttttttttctgtaaaactgtgaactgatatattttcc

SEQ ID NO: 575707 - DNA, 120 bp, Artificial Sequence
  ENSG00000171408_31 (sequence is synthesized)
tttatcactttagtattctgcagttctcagcttggtgaggctccaaaagagaatatgtcagatgtattcctacttccaaacctgtcttactttggtttgatggtacacatagggcttttg

SEQ ID NO: 575708 - DNA, 120 bp, Artificial Sequence
  ENSG00000171408_32 (sequence is synthesized)
aacagtctatttttaatgtatatgaggtcaaatcaaggaaggcaattgctggggacaagaaaagtagaggtaggaaagaagacactattttagctaatggggtttcttgggactaaaaaa

SEQ ID NO: 575709 - DNA, 120 bp, Artificial Sequence
  ENSG00000171408_33 (sequence is synthesized)
tggctttgtttaaattataattatataataatttaaataaatgagattggaggtattcttagtagttctgagttgatagtttacattacaattaggtcttgaagaagagctcacagagaa

SEQ ID NO: 575710 - DNA, 120 bp, Artificial Sequence
  ENSG00000171408_34 (sequence is synthesized)
aaaactaccaaatatccaatgggtaagcccatgatgtagccactagtacaataaaaatctgaagtaaaatgaggcataaacttgatgcagctgcctccctcattcaactggggagttctt

SEQ ID NO: 575711 - DNA, 120 bp, Artificial Sequence
  ENSG00000171408_35 (sequence is synthesized)
gagttcctcatttgttggtaaaaagaaaaagaatgtgaaaatgtctctttttttcttggctattagtggctgtcttgcaatatttcaataggagtccaattactagttaaaacactggcg

SEQ ID NO: 575712 - DNA, 72 bp, Artificial Sequence
  ENSG00000171408_36 (sequence is synthesized)
agtccaattactagttaaaacactggcgtgggcagatcacaagttcaagagatcgagaccattctggccaac

SEQ ID NO: 575713 - DNA, 120 bp, Artificial Sequence
  ENSG00000171408_37 (sequence is synthesized)
cactccagcctggcaacagagctagaatccgtctcaaacaaacaaacaaaaaatcccacagctattggatcatccacagattttttctttacaatcttgttctccttgtccatggaccat

SEQ ID NO: 575714 - DNA, 120 bp, Artificial Sequence
  ENSG00000171408_38 (sequence is synthesized)
caatagttgacttgccaggtttaattctttcattgcttgagaagaaaggaatcaaaggactgtgtgtagtaagctgacggtaaagttaagattaaattaagacagagagagaatacatat

SEQ ID NO: 575715 - DNA, 120 bp, Artificial Sequence
  ENSG00000171408_39 (sequence is synthesized)
cactgccaggcctgataggaaaaatctgctcttccttttaataacagtgatgaattgtcaggaccttatttaggaaaccctgacctacccataactccctgctaggctaagtagaaacca

SEQ ID NO: 575716 - DNA, 120 bp, Artificial Sequence
  ENSG00000171408_40 (sequence is synthesized)
ggttatttctccctgcttatggctccccgcaaagggacttgcagcgtgtcctgcaactttgtcttcagatagtgcttcctacaaaactaggtcttgttttgtaatcttttctcgtgttga

SEQ ID NO: 575717 - DNA, 120 bp, Artificial Sequence
  ENSG00000171408_41 (sequence is synthesized)
atcagatctgcttacttatttaggtttggttatgagcttgtatctcactgtatttctcatgctttgttcttttaaacaaatcctttaaactgtgtcattttgtatacacatgtgaggttt

SEQ ID NO: 575718 - DNA, 89 bp, Artificial Sequence
  ENSG00000171408_42 (sequence is synthesized)
ttgtgagttttgctcaaaatgtggcctaagtagccattggcatgtctagatgaacaaataaaaataaagataatttctttaaaatatca

SEQ ID NO: 575719 - DNA, 120 bp, Artificial Sequence
  ENSG00000171408_43 (sequence is synthesized)
atgcctgtgctagagcgatatttccacccagcagagctaggcaggaggtggacaggcccagaaggtgtgctgccctcctccccgggaagccggccggggtgccagcaggggccgctgccc

SEQ ID NO: 575720 - DNA, 120 bp, Artificial Sequence
  ENSG00000171408_44 (sequence is synthesized)
tgggacttgccagagatgatcaggatggtaaagctggtttggaaatccaaaagtgagctgcaggcgaccaaacagagaggcattctggacaatgaagatgctctccgcagctttccagga

SEQ ID NO: 575721 - DNA, 120 bp, Artificial Sequence
  ENSG00000171408_45 (sequence is synthesized)
atttttgataaaaactaaccaccatcttgcaaacctatatcaggtaagggagcccaacctggagccagccacagtatggtcaatcgccttaggcccggtgctcaagcctgaatcttgccc

SEQ ID NO: 575722 - DNA, 120 bp, Artificial Sequence
  ENSG00000171408_46 (sequence is synthesized)
atggagaaagccttgttttagggtcctagaagttcaaagacgaatgaaacacaatctctgccctcaaaaatttgttcaaactcagatgctcaaaatgagcaaaatccaagcaaacttaat

SEQ ID NO: 575723 - DNA, 120 bp, Artificial Sequence
  ENSG00000171408_47 (sequence is synthesized)
cccagtttgaaagaggtttgaggaattagctcatgtcgatacaattgttttttaaaatctctaaagagtaaatacttgtgctgttctttgtatccaaagaccttactagaataaagtgag

SEQ ID NO: 575724 - DNA, 120 bp, Artificial Sequence
  ENSG00000171421_0 (sequence is synthesized)
cagtgcgcagacgcaggggtcggcgccggattcaccacaacatggcaaatctttttataaggaaaatggtgaaccctctgctctatctcagtcgtcacacggtgaagcctcgagccctct

SEQ ID NO: 575725 - DNA, 120 bp, Artificial Sequence
  ENSG00000171421_1 (sequence is synthesized)
ccacatttctatttggatccattcgaggtgcagcccccgtggctgtggaacccggggcagcagtgcgctcacttctctcacccggcctcctgccccatctgctgcctgcgctggggttca

SEQ ID NO: 575726 - DNA, 120 bp, Artificial Sequence
  ENSG00000171421_2 (sequence is synthesized)
atgtagaccctttccctccagagtcacgcacatactcgtcatcgcatcacttgggagaatggttgtatcttatggaaggaattatcacatcaaggagtcaggggaaagtgactggaagca

SEQ ID NO: 575727 - DNA, 120 bp, Artificial Sequence
  ENSG00000171421_3 (sequence is synthesized)
aacgccctaaaagttacccatcacgtttcagtgtaaatgagtaactatagaagacattgcgttatcttatttccaaaacgttccaactaaaaaacattttcctattaaaatagaccttcc

SEQ ID NO: 575728 - DNA, 120 bp, Artificial Sequence
  ENSG00000171421_4 (sequence is synthesized)
gccacgtgacccccccccccgccgccatcttccttcctggcagcagcgtccgcgtgccagtgcgcagacgcaggggtcggcgccgggtgagagcgtgcggccgggtaagggagccgtctt

SEQ ID NO: 575729 - DNA, 120 bp, Artificial Sequence
  ENSG00000171421_5 (sequence is synthesized)
tgagagtgggggctgcgagagggtggggccggccaccttgggaccctcgggcgtgtctccccgagtgggctgcggtcagaggagcgtgggccggggcctggcggtctcagagggccaggg

SEQ ID NO: 575730 - DNA, 120 bp, Artificial Sequence
  ENSG00000171421_6 (sequence is synthesized)
ttggggggtgcgggtccgaccgtgggcgcccgacctggcgacaggagggggtgtccagcgaccccggggcgggagaactggcggctcccgaacgcgacctcacagcccgcgcgcagggcc

SEQ ID NO: 575731 - DNA, 120 bp, Artificial Sequence
  ENSG00000171421_7 (sequence is synthesized)
ccggtgccgcagtgtcctccgggccctgcaggcccagctcttcccagccggggccgctgaaccctaagggccggggcgcgtggggaagcaggggcgggcgaccggggtgccagagttccg

SEQ ID NO: 575732 - DNA, 120 bp, Artificial Sequence
  ENSG00000171421_8 (sequence is synthesized)
gagggaggagctcatcagttgaaccgtccttgacctggtgtctgtttggaaagggatgcggcctaagtttaagctccctcccagccaagtgagcggctcctcaacatcgcagggctttgc

SEQ ID NO: 575733 - DNA, 120 bp, Artificial Sequence
  ENSG00000171421_9 (sequence is synthesized)
acactcacctacacttgcagcaggcgggaaagggaaggaagccaccgtccactgccccttattctcctggcacacttggctgattaaggcagtgttcaagctcaggtcgaggctgcagct

SEQ ID NO: 575734 - DNA, 120 bp, Artificial Sequence
  ENSG00000171425_0 (sequence is synthesized)
ctctttcggccggcgccgccagttcctggggcacacccagaggtccccttctcgccgccgcctgcaactgcgagggtagcccggggccgcttggagtcgcccggacctgagaggctgctg

SEQ ID NO: 575735 - DNA, 120 bp, Artificial Sequence
  ENSG00000171425_1 (sequence is synthesized)
cactgggcctcagccagccctccggatgctggtgctgccatccccctgccctcagcctctggcattttcctccgttgagaccatggagggccctccccgtcggacttgccgctccccaga

SEQ ID NO: 575736 - DNA, 120 bp, Artificial Sequence
  ENSG00000171425_2 (sequence is synthesized)
acctggaccttcctcctccatcggatctccccaggcttcatctcctccaaggcccaaccactacctgcttattgacactcagggtgtcccctacacagtgctggtggacgaggagtcaca

SEQ ID NO: 575737 - DNA, 120 bp, Artificial Sequence
  ENSG00000171425_3 (sequence is synthesized)
gagggagccaggggccagtggggctccaggccagaaaaagtgctacagctgccccgtgtgctcaagggtcttcgagtacatgtcctaccttcagcgacacagcatcacccactcggaggt

SEQ ID NO: 575738 - DNA, 120 bp, Artificial Sequence
  ENSG00000171425_4 (sequence is synthesized)
tcgccgcttccgggatgcgggtgagctggcccagcacagccgggtgcactctggggaacgcccgtttcagtgtccacactgccctcgccgctttatggagcagaacacactgcagaaaca

SEQ ID NO: 575739 - DNA, 120 bp, Artificial Sequence
  ENSG00000171425_5 (sequence is synthesized)
cacgcggtggaagcatccatgagccgggctgccgggtgccccaggtaccacaggactttgcagggagcctggactcctgtccagacacctggtgagagcctgaggctggtgttcagggcc

SEQ ID NO: 575740 - DNA, 120 bp, Artificial Sequence
  ENSG00000171425_6 (sequence is synthesized)
ctggacacagacacagagcagccgcatctcaaaggcagagccctgcctgaaggaggaatccgtgagtaatcttcaggtcctccgtgttctggagctgagatgggaatgagcccctacaca

SEQ ID NO: 575741 - DNA, 120 bp, Artificial Sequence
  ENSG00000171425_7 (sequence is synthesized)
gaatggagtcctctagcctaaagatatcagctgttccatggcagagccttgactggatggaggtggggagtgtggtgtgtaaagtctctggcctcataaaaggtggctgtgggtcgtcag

SEQ ID NO: 575742 - DNA, 120 bp, Artificial Sequence
  ENSG00000171425_8 (sequence is synthesized)
gaatctgcgccatcttcctggggcttctgcgctgttgttggggaagggaccccagtcctgccttccaccccccaaccaggcctgagactgatcaaacaataaacacgtttcccactctga

SEQ ID NO: 575743 - DNA, 120 bp, Artificial Sequence
  ENSG00000171425_9 (sequence is synthesized)
gggaggtgagggtgctggagcgggggtcaatcggtcactccggccggagatctgagtggcctctgccccctctgcgctgtggagtgcatctgattgccagcctcgctggaccgttgagag

SEQ ID NO: 575744 - DNA, 120 bp, Artificial Sequence
  ENSG00000171425_10 (sequence is synthesized)
gattcatcgagaccctggatatgaatatgcagtgtgaactgaagtttggggacatgagtaatcagtcacagtggcccaagatttgaggtgtaaatggagaagtcagaatgattcgctgca

SEQ ID NO: 575745 - DNA, 80 bp, Artificial Sequence
  ENSG00000171425_11 (sequence is synthesized)
ccggagctgcccggaagtctcggttccgccgccggcgctcgccaggggaagcccggggccgcccgggacctcggcccgtt

SEQ ID NO: 575746 - DNA, 120 bp, Artificial Sequence
  ENSG00000171428_0 (sequence is synthesized)
acttcctcatagaccttggatgtgggaggattgcattcagtctagttcctggttgccggctgaaataacctgaattcaagccaggaagaagcagcaatctgtcttctggattaaaactga

SEQ ID NO: 575747 - DNA, 120 bp, Artificial Sequence
  ENSG00000171428_1 (sequence is synthesized)
agatcaacctactttcaacttactaagaaaggggatcatggacattgaagcatatcttgaaagaattggctataagaagtctaggaacaaattggacttggaaacattaactgacattct

SEQ ID NO: 575748 - DNA, 120 bp, Artificial Sequence
  ENSG00000171428_2 (sequence is synthesized)
tcaacaccagatccgagctgttccctttgagaaccttaacatccattgtggggatgccatggacttaggcttagaggccatttttgatcaagttgtgagaagaaatcggggtggatggtg

SEQ ID NO: 575749 - DNA, 120 bp, Artificial Sequence
  ENSG00000171428_3 (sequence is synthesized)
tctccaggtcaatcatcttctgtactgggctctgaccactattggttttgagaccacgatgttgggagggtatgtttacagcactccagccaaaaaatacagcactggcatgattcacct

SEQ ID NO: 575750 - DNA, 120 bp, Artificial Sequence
  ENSG00000171428_4 (sequence is synthesized)
tctcctgcaggtgaccattgatggcaggaactacattgtcgatgctgggtttggacgctcataccagatgtggcagcctctggagttaatttctgggaaggatcagcctcaggtgccttg

SEQ ID NO: 575751 - DNA, 120 bp, Artificial Sequence
  ENSG00000171428_5 (sequence is synthesized)
tgtcttccgtttgacggaagagaatggattctggtatctagaccaaatcagaagggaacagtacattccaaatgaagaatttcttcattctgatctcctagaagacagcaaataccgaaa

SEQ ID NO: 575752 - DNA, 120 bp, Artificial Sequence
  ENSG00000171428_6 (sequence is synthesized)
aatctactcctttactcttaagcctcgaacaattgaagattttgagtctatgaatacatacctgcagacatctccatcatctgtgtttactagtaaatcattttgttccttgcagacccc

SEQ ID NO: 575753 - DNA, 120 bp, Artificial Sequence
  ENSG00000171428_7 (sequence is synthesized)
aaaatatatttaatatttccttgcagagaaagcttgtgcccaaacatggtgatagattttttactatttagaataaggagtaaaacaatcttgtctatttgtcatccagctcaccagtta

SEQ ID NO: 575754 - DNA, 120 bp, Artificial Sequence
  ENSG00000171428_8 (sequence is synthesized)
tcaactgacgacctatcatgtatcttctgtacccttaccttattttgaagaaaatcctagacatcaaatcatttcacctataaaaatgtcatcatatataattaaacagctttttaaaga

SEQ ID NO: 575755 - DNA, 120 bp, Artificial Sequence
  ENSG00000171428_9 (sequence is synthesized)
aacataaccacaaaccttttcaaataataataataataataataaaaaatgtattttaaagatggcctgtggttatcttggaaattggtgatttatgctagaaagcttttaatgttggtt

SEQ ID NO: 575756 - DNA, 120 bp, Artificial Sequence
  ENSG00000171428_10 (sequence is synthesized)
cctagaaaagttttattggtagatgagtaaataaaatattgtaaaaaaacttattgtctataaagtatattaaaacattgttggctaatataatttgaaaaaaagtggttttttggaaga

SEQ ID NO: 575757 - DNA, 120 bp, Artificial Sequence
  ENSG00000171428_11 (sequence is synthesized)
ttttttggaagacttaggatattatggtgctacataatttttcctcgatgctctcttcctctcatctttcttgtctcttaaattactttacttccttgcacactttgccatacaagaatg

SEQ ID NO: 575758 - DNA, 120 bp, Artificial Sequence
  ENSG00000171428_12 (sequence is synthesized)
aacatgagcttttcttgtgtagatctgagttgaaatcctgtggacactgggcgaattactttttagatctgtagctctgactcctcaggcataaaatgggaataatgcttttacagttta

SEQ ID NO: 575759 - DNA, 120 bp, Artificial Sequence
  ENSG00000171428_13 (sequence is synthesized)
gtggcggaactaaactcccaaaattatttgttatatggatcaagtaataacgtcagtaatgtttttggtacaaagtcattatttaataaaagttattgttccatcttgcttgccccccca

SEQ ID NO: 575760 - DNA, 120 bp, Artificial Sequence
  ENSG00000171428_14 (sequence is synthesized)
caagtcacatagggataaatcacaatagttggtcaactgttgaatcttgatccttcaactaaacaatattcatgaactctgcagaaaaacaccagcattttgctcaacattcaggaccct

SEQ ID NO: 575761 - DNA, 120 bp, Artificial Sequence
  ENSG00000171428_15 (sequence is synthesized)
ctagaagttgcctcattctactctcctttcttacctttcttttacacagctctccaaaatgtccacaaaagtgacttaagtcaggttcccccaaaccagacaccaagacaagaatccatg

SEQ ID NO: 575762 - DNA, 120 bp, Artificial Sequence
  ENSG00000171428_16 (sequence is synthesized)
tgtgtgtgactgaaggaagtgctgggagagccccagctgcagcctggatgtgaactgcaactccaaagtgtgtccagactcaaggcaagggcactaggctttccagacctcctactaagt

SEQ ID NO: 575763 - DNA, 120 bp, Artificial Sequence
  ENSG00000171428_17 (sequence is synthesized)
cattgatccagcactgccctgccaggacataaatccctggcacctcttgctctctgcaaaggagggcaaagcagcttcaggagcccttgggagtcctccaaagagagtctagggtacagg

SEQ ID NO: 575764 - DNA, 120 bp, Artificial Sequence
  ENSG00000171428_18 (sequence is synthesized)
tccgaaagtagaagaacacagaaggcaggccaggggcactgtgagatggtaaaagagatctgaagggatccagaattcaagccaggaagaagcagcaatctgtcttctggattaaaactg

SEQ ID NO: 575765 - DNA, 120 bp, Artificial Sequence
  ENSG00000171428_19 (sequence is synthesized)
gctgtttatcatttgactcatcatttaatcttgatttccagcttctcacacttgaaagaagacataatacatttctcacaggattctgggactattaactgaacttatgtgtgtaaaagg

SEQ ID NO: 575766 - DNA, 120 bp, Artificial Sequence
  ENSG00000171428_20 (sequence is synthesized)
aattcatacaatgaaagcactagaaataattattatacttataaccattgtatttttacatgtttaaaatatagccataattagcctactcaaatccaagtgtaaaagtaaaatgatttg

SEQ ID NO: 575767 - DNA, 120 bp, Artificial Sequence
  ENSG00000171428_21 (sequence is synthesized)
acttcctcatagaccttggatgtgggaggattgcattcagtctagttcctggttgccggctgaaataacctgaccgagagcatcaccccctgaacatggacttgcagaattccacagaag

SEQ ID NO: 575768 - DNA, 120 bp, Artificial Sequence
  ENSG00000171428_22 (sequence is synthesized)
agaggagactggcctagacagacagccccaggagctgagggcccaacaggctttctaccctggatgctgctcccatgccctgacatgaggcccactacaatgaattcaagccaggaagaa

SEQ ID NO: 575769 - DNA, 120 bp, Artificial Sequence
  ENSG00000171428_23 (sequence is synthesized)
aataaagcctaggccaaactgcacaaatcagattgacccagtcgacaggatctgaacttccagtgaccatcccaggaacagaaagcaactgtgttaccagttctgcttttcctggacctg

SEQ ID NO: 575770 - DNA, 120 bp, Artificial Sequence
  ENSG00000171428_24 (sequence is synthesized)
ttccaagctctcacgttccacatcacacatgggacatctagtgtcaggctcccagagagcaggaaccaggtgaaatataagagcacagtcctcccagccggtggcatggggataatcgga

SEQ ID NO: 575771 - DNA, 120 bp, Artificial Sequence
  ENSG00000171428_25 (sequence is synthesized)
atgctgttattactcttacacaaggaggcagccctcgagccacagggtccagctgttggctataatagcctaccggtctctgatgatcaccatgtttctggaattcaagccaggaagaag

SEQ ID NO: 575772 - DNA, 120 bp, Artificial Sequence
  ENSG00000171431_0 (sequence is synthesized)
agacacactctgccccaaccatcctgaagctacaggtgctccctcctggaatctccaatggatttcagtcgcagaagcttccacagaagcctgagctcctccttgcaggcccctgtagtc

SEQ ID NO: 575773 - DNA, 120 bp, Artificial Sequence
  ENSG00000171431_1 (sequence is synthesized)
agtacagtgggcatgcagcgcctcgggacgacacccagcgtttatgggggtgctggaggccggggcatccgcatctccaactccagacacacggtgaactatgggagcgatctcacaggc

SEQ ID NO: 575774 - DNA, 120 bp, Artificial Sequence
  ENSG00000171431_2 (sequence is synthesized)
ggcggggacctgtttgttggcaatgagaaaatggccatgcagaacctaaatgaccgtctagcgagctacctagaaaaggtgcggaccctggagcagtccaactccaaacttgaagtgcaa

SEQ ID NO: 575775 - DNA, 120 bp, Artificial Sequence
  ENSG00000171431_3 (sequence is synthesized)
atcaagcagtggtacgaaaccaacgccccgagggctggtcgcgactacagtgcatattacagacaaattgaagagctgcgaagtcagattaaggatgctcaactgcaaaatgctcggtgt

SEQ ID NO: 575776 - DNA, 120 bp, Artificial Sequence
  ENSG00000171431_4 (sequence is synthesized)
gtcctgcaaattgataatgctaaactggctgctgaggacttcagactgaagtatgagactgagagaggaatacgtctaacagtggaagctgatctccaaggcctgaataaggtctttgat

SEQ ID NO: 575777 - DNA, 120 bp, Artificial Sequence
  ENSG00000171431_5 (sequence is synthesized)
gacctaaccctacataaaacagatttggagattcaaattgaagaactgaataaagacctagctctcctcaaaaaggagcatcaggaggaagtcgatggcctacacaagcatctgggcaac

SEQ ID NO: 575778 - DNA, 120 bp, Artificial Sequence
  ENSG00000171431_6 (sequence is synthesized)
actgtcaatgtggaggttgatgctgctccaggcctgaaccttggcgtcatcatgaatgaaatgaggcagaagtatgaagtcatggcccagaagaaccttcaagaggccaaagaacagttt

SEQ ID NO: 575779 - DNA, 120 bp, Artificial Sequence
  ENSG00000171431_7 (sequence is synthesized)
gacagactgcagttctgcagcaacaggtcacagtgaatactgaagaattaaaaggaactgaggttcaactaacggagctgagacgcacctcccagagccttgagatagaactccagtccc

SEQ ID NO: 575780 - DNA, 120 bp, Artificial Sequence
  ENSG00000171431_8 (sequence is synthesized)
atctcagcatgaaagagtctttggagcacactctagaggagaccaaggcccgttacagcagccagttagccaacctccagtcgctgttgagctctctggaggcccaactgatgcagattc

SEQ ID NO: 575781 - DNA, 120 bp, Artificial Sequence
  ENSG00000171431_9 (sequence is synthesized)
ggagtaacatggaacgccagaacaacgaataccatatccttcttgacataaagactcgacttgaacaggaaattgctacttaccgccgccttctggaaggagaagacgtaaaaactacag

SEQ ID NO: 575782 - DNA, 120 bp, Artificial Sequence
  ENSG00000171431_10 (sequence is synthesized)
aatatcagttaagcaccctggaagagagagatataaagaaaaccaggaagattaagacagtcgtgcaagaagtagtggatggcaaggtcgtgtcatctgaagtcaaagaggtggaagaaa

SEQ ID NO: 575783 - DNA, 120 bp, Artificial Sequence
  ENSG00000171431_11 (sequence is synthesized)
atatctaaatagctaccagaaggagatgctgctgaggttttgaaagaaatttggctataatcttatctttgctccctgcaagaaatcagccataagaaagcactattaatactctgcagt

SEQ ID NO: 575784 - DNA, 120 bp, Artificial Sequence
  ENSG00000171431_12 (sequence is synthesized)
gattagaaggggtggggtggcgggaatcctatttatcagactctgtaattgaatataaatgttttactcagaggagctgcaaattgcctgcaaaaatgaaatccagtgagcactagaata

SEQ ID NO: 575785 - DNA, 120 bp, Artificial Sequence
  ENSG00000171431_13 (sequence is synthesized)
tttaaaacatcattactgccatctttatcatgaagcacatcaattacaagctgtagaccacctaatatcaatttgtaggtaatgttcctgaaaattgcaatacatttcaattatactaaa

SEQ ID NO: 575786 - DNA, 120 bp, Artificial Sequence
  ENSG00000171431_14 (sequence is synthesized)
cctcacaaagtagaggaatccatgtaaattgcaaataaaccactttctaattttttcctgtttctgaattgtaaaaccccctttgggagtccctggtttcttattgagccaatttctggg

SEQ ID NO: 575787 - DNA, 120 bp, Artificial Sequence
  ENSG00000171431_15 (sequence is synthesized)
ttcagactgaagtaggttccctaatacgtggcaaaagtttctgaaaaagaattcctttagtagtccttccagatactcagctttccatatcattgttgataaaggaagcacggttcaatg

SEQ ID NO: 575788 - DNA, 120 bp, Artificial Sequence
  ENSG00000171433_0 (sequence is synthesized)
agaggattgtcgggaggaccctgggcaaagacgcctaccctgccatgctgcgccatctgccctccaggctgccagtcaagatgtggggcaggactttggagaaacagtcatggagggaca

SEQ ID NO: 575789 - DNA, 120 bp, Artificial Sequence
  ENSG00000171433_1 (sequence is synthesized)
gcagtcagacccctcccccatgtcttatccgtagacttgaccacatcgtgatgacggtgaagagcatcaaagacaccaccatgttttattccaagatcctgggcatggaggtcatgactt

SEQ ID NO: 575790 - DNA, 120 bp, Artificial Sequence
  ENSG00000171433_2 (sequence is synthesized)
ttaaggaagaccggaaagcactgtgttttggagaccagaaatttaacctccacgaggtgggaaaggaatttgaacccaaagccgctcacccagttcctggctccctggacatatgtctga

SEQ ID NO: 575791 - DNA, 120 bp, Artificial Sequence
  ENSG00000171433_3 (sequence is synthesized)
gaaatgatccagcacctcaaggcttgtgatgtccctattgaggaggggccagtccccagaacaggggcaaaagggcctatcatgtccatctacttccgagaccccgacagaaatctgatt

SEQ ID NO: 575792 - DNA, 120 bp, Artificial Sequence
  ENSG00000171433_4 (sequence is synthesized)
gaggtgtccaactacatctcctcgtgatggaggctggacctcctccattctgtcccccttgatgtcgccctctcctttccttcctgcaaacccccacccaggcccagagatctccaaaga

SEQ ID NO: 575793 - DNA, 120 bp, Artificial Sequence
  ENSG00000171433_5 (sequence is synthesized)
ctgaggacttaggcacttcacacatcctgctgaggggggacccaagacaggtttgggaccaaacctacatgtctgtatgtcatcaaagttggcctaataaatgcataacctctcaatgaa

SEQ ID NO: 575794 - DNA, 120 bp, Artificial Sequence
  ENSG00000171433_6 (sequence is synthesized)
ttcaggtgggctaaaatttgttgataacactttaacatataacttaactctaaaaggaaaaccacaggaaatctgagagaaaatataaagagatcaatagaggagattccaaactgaata

SEQ ID NO: 575795 - DNA, 120 bp, Artificial Sequence
  ENSG00000171433_7 (sequence is synthesized)
tttggacttccagagagagaatggagaaaaaagagaggaggaaattatcatagaaacaatgcaagataactttgcagtctctacatggaaaaggttaaccaagtatccagcatgttgaca

SEQ ID NO: 575796 - DNA, 120 bp, Artificial Sequence
  ENSG00000171435_0 (sequence is synthesized)
gattgacaggcaagatgtcggtgtggagcgaggcaggagcgattgcagcaaccgtcacccccggagcccggcggcggcagcagcagcagcagcagcagcgcggggaggagacagcagcca

SEQ ID NO: 575797 - DNA, 120 bp, Artificial Sequence
  ENSG00000171435_1 (sequence is synthesized)
gccgcagtagccgccgcagccgcgggagcaatgcagacagcaccttgagaacgcgctaaagcactccaaaccgtggaccatgccgtgtccctgcaactgggaggggggaaaaccagattt

SEQ ID NO: 575798 - DNA, 120 bp, Artificial Sequence
  ENSG00000171435_2 (sequence is synthesized)
tttttgacataaaagcaagccagccaaaaatatataattttgtccttcaaggagccggtgtgtaaagagtgagcgctattttccttctcctcctcctcctctccctcctcctcctctccc

SEQ ID NO: 575799 - DNA, 120 bp, Artificial Sequence
  ENSG00000171435_3 (sequence is synthesized)
tcctcctctctctcctccttctcctcttctttttcctcctcctcctcctccctaagtgtacagacagcatcacatcacctggtttgcttctgagaaacagcatctctccttttcagggac

SEQ ID NO: 575800 - DNA, 120 bp, Artificial Sequence
  ENSG00000171435_4 (sequence is synthesized)
cagagactcagagagagaggagacattctaatggagtccgcttgatatcccaaaataaaataataaattttggctcttgtcccctcctcccactcccaccccctcaaccctgtgtgagat

SEQ ID NO: 575801 - DNA, 120 bp, Artificial Sequence
  ENSG00000171435_5 (sequence is synthesized)
gttggatttcttcttcatgagacattgttgagaagtcgcagtggttggagaggcggagggtagactacctctactcccccccctcttttttctctctgggaggaggaggaggggaagggg

SEQ ID NO: 575802 - DNA, 120 bp, Artificial Sequence
  ENSG00000171435_6 (sequence is synthesized)
gttgcagagcaagcgatggatgaggaaaacatgacgaaaagcgaggagcagcagcctctgagtttgcaaaaagccttacagcagtgcgaactggtccaaaacatgatagacttgagcatc

SEQ ID NO: 575803 - DNA, 120 bp, Artificial Sequence
  ENSG00000171435_7 (sequence is synthesized)
tccaacctggaagggcttaggaccaaatgtgctacctccaacgacctcacacaaaaagaaatccggaccctggagagcaagctggtgaagtacttcagccggcagctgtcctgcaaaaag

SEQ ID NO: 575804 - DNA, 120 bp, Artificial Sequence
  ENSG00000171435_8 (sequence is synthesized)
aaggtagccttgcaggagcgcaacgcggagctggacggcttcccccagctacggcactggttccgaatcgtcgatgtgcgcaaggaggtcctggaggaaatctcccccggccagctgagc

SEQ ID NO: 575805 - DNA, 120 bp, Artificial Sequence
  ENSG00000171435_9 (sequence is synthesized)
ctggaggacctcttggagatgacggatgaacaggtgtgcgagactgtggagaaatacggagccaaccgggaggagtgtgcccgcctcaacgcctccctctcctgcctcaggaatgtccac

SEQ ID NO: 575806 - DNA, 120 bp, Artificial Sequence
  ENSG00000171435_10 (sequence is synthesized)
atgtcaggaggcaacctttccaaacaagactggaccatccagtggcccacgacagagacggggaaggagaacaatcccgtgtgccccccggagcccaccccgtggatccgcacccatctc

SEQ ID NO: 575807 - DNA, 120 bp, Artificial Sequence
  ENSG00000171435_11 (sequence is synthesized)
tcccagagccccagggtcccgtccaagtgcgtccagcactattgtcacaccagccccactcccggggcccctgtgtacacccacgtggacaggcttaccgtggacgcctacccgggcttg

SEQ ID NO: 575808 - DNA, 120 bp, Artificial Sequence
  ENSG00000171435_12 (sequence is synthesized)
tacccgggcttgtgcccgcccccgccactggagtcgggccaccgttccctgcccccatcgccccggcagcggcacgcggtccgcaccccgccgcgcacccccaacatcgtcaccaccgtg

SEQ ID NO: 575809 - DNA, 120 bp, Artificial Sequence
  ENSG00000171435_13 (sequence is synthesized)
acgccgcccatgaggaagaagaacaagctgaagcccccggggaccccaccgccctcctcccgaaaactgatacacttgatcccgggattcaccgcgctgcatcggagcaaatcccacgag

SEQ ID NO: 575810 - DNA, 120 bp, Artificial Sequence
  ENSG00000171435_14 (sequence is synthesized)
ttccagctggggcaccgcgtggacgaggcccacacgcccaaagccaagaagaagagcaaacccttgaacctcaagatccacagcagcgtaggcagctgcgagaacatcccctctcagcag

SEQ ID NO: 575811 - DNA, 120 bp, Artificial Sequence
  ENSG00000171435_15 (sequence is synthesized)
cgctccccgctgctgtccgagcgctccctccgctccttctttgtgggacacgcacctttcctgccttccacccctcctgttcacactgaggccaacttctctgcaaacacactgtcagtg

SEQ ID NO: 575812 - DNA, 120 bp, Artificial Sequence
  ENSG00000171435_16 (sequence is synthesized)
ccacgctggtccccgcagatccctcgcagagatctcggcaactccatcaagcacaggttttccaccaagtactggatgtctcagacgtgcacagtctgtgggaaagggatgctttttggc

SEQ ID NO: 575813 - DNA, 120 bp, Artificial Sequence
  ENSG00000171435_17 (sequence is synthesized)
ctcaagtgtaaaaactgcaagttaaagtgccacaacaaatgcaccaaagaagccccaccctgtcatcttctgatcatccaccgaggagatccagcaaggttagtccggacagagtccgtt

SEQ ID NO: 575814 - DNA, 120 bp, Artificial Sequence
  ENSG00000171435_18 (sequence is synthesized)
ccgtgtgacatcaacaaccctctacggaagccacctcgctattcagacctgcacatcagtcagacgctccccaaaaccaacaaaatcaacaaggaccacatccctgtcccttaccagcca

SEQ ID NO: 575815 - DNA, 120 bp, Artificial Sequence
  ENSG00000171435_19 (sequence is synthesized)
gactccagcagcaacccctcctccacgacgtcctccacgccctcctcgccagcaccccccctccctcctagtgccacgccgccttctcccctacacccttccccacagtgcacacggcag

SEQ ID NO: 575816 - DNA, 120 bp, Artificial Sequence
  ENSG00000171435_20 (sequence is synthesized)
cagaagaacttcaacctgccagcatcccactactacaaatacaagcagcagttcatcttcccagatgtggtgccggtgccggagacgccgacccgggcgccccaggtcatcctgcatccg

SEQ ID NO: 575817 - DNA, 120 bp, Artificial Sequence
  ENSG00000171435_21 (sequence is synthesized)
gtgacctcgaatccaatcttggaaggaaatccattacttcaaattgaagtggagccaacgtcggagaatgaagaggtccatgatgaggccgaagagtcagaggatgacttcgaggagatg

SEQ ID NO: 575818 - DNA, 120 bp, Artificial Sequence
  ENSG00000171435_22 (sequence is synthesized)
aacctgtccctcctctcggcccggagcttcccacgcaaggccagccagaccagcatcttccttcaggagtgggacatcccctttgagcagctggagatcggcgagctcattggaaagggc

SEQ ID NO: 575819 - DNA, 120 bp, Artificial Sequence
  ENSG00000171435_23 (sequence is synthesized)
cgctttgggcaagtgtaccacggccgctggcatggcgaggtggccatccggctgattgacattgagagggacaacgaggaccagctcaaggccttcaagcgggaggtgatggcctacagg

SEQ ID NO: 575820 - DNA, 120 bp, Artificial Sequence
  ENSG00000171435_24 (sequence is synthesized)
cagacacggcatgagaacgtggtgcttttcatgggtgcctgcatgagcccgcctcacctggccatcatcaccagcctctgtaagggacggacgctctattccgttgtgagggatgccaaa

SEQ ID NO: 575821 - DNA, 120 bp, Artificial Sequence
  ENSG00000171435_25 (sequence is synthesized)
atcgttttggatgtcaacaaaaccaggcagattgctcaagaaattgtgaagggcatgggctacctccacgccaagggaatcctacacaaggacctcaagtcaaagaacgtcttctatgac

SEQ ID NO: 575822 - DNA, 120 bp, Artificial Sequence
  ENSG00000171435_26 (sequence is synthesized)
aacggcaaagtggtcatcacggactttggactcttcagcatttctggggtgctgcaggctggcaggcgggaggacaaactgcgcatccagaatggctggctatgccacctggcaccagag

SEQ ID NO: 575823 - DNA, 120 bp, Artificial Sequence
  ENSG00000171435_27 (sequence is synthesized)
atcatccgccagctgtcccccgacacagaggaggataagctccccttctccaagcactctgacgtctttgcccttggcacaatctggtatgaactccacgccagggaatggcctttcaag

SEQ ID NO: 575824 - DNA, 120 bp, Artificial Sequence
  ENSG00000171435_28 (sequence is synthesized)
acccaaccagcagaggcaataatctggcaaatgggcacaggcatgaaacccaacctcagccagattggcatgggaaaagaaatctcggacattcttctcttctgctgggcctttgaacaa

SEQ ID NO: 575825 - DNA, 120 bp, Artificial Sequence
  ENSG00000171435_29 (sequence is synthesized)
gaagagagacctaccttcaccaagctcatggacatgctggagaaactgccaaagcgaaaccgtcgcctgtctcaccctggacatttctggaagtctgcagagctgtgacctttggacatc

SEQ ID NO: 575826 - DNA, 120 bp, Artificial Sequence
  ENSG00000171435_30 (sequence is synthesized)
gggacggcgcccagctgcctgggctcccgtcacctctccctccctactctgtcctctgccagctcaggaggccagagactcagcatcagagggtaccaaccccgaccgacctgggagcac

SEQ ID NO: 575827 - DNA, 120 bp, Artificial Sequence
  ENSG00000171435_31 (sequence is synthesized)
tggacaactgctcggcggcctccctgcacctcagacttgagcccttttcctcgggcagggttggggacccccgagctaggactgaaccggaccagccagggtgatgcgttattgatcagt

SEQ ID NO: 575828 - DNA, 120 bp, Artificial Sequence
  ENSG00000171435_32 (sequence is synthesized)
gcggcccaggggacagcactaatgagagcactgcaggctgcacgtggtgcctttgggctatgggactaggacaggagaccccacgtgggggggctcacagacggggctatgtgtgtgtgt

SEQ ID NO: 575829 - DNA, 120 bp, Artificial Sequence
  ENSG00000171435_33 (sequence is synthesized)
gtctgtgtgtttgacgttgttcactcttgtttccccttgacaagcaagagccagactgtcccaatgacggggcactcctcagttctgtctgtatgtggtaggttccagctgtaccatctg

SEQ ID NO: 575830 - DNA, 120 bp, Artificial Sequence
  ENSG00000171435_34 (sequence is synthesized)
ggaagctaagaggagggtacagagccgagtggcagcttagtcaaggctactgagccaagatcgagcagggaaggtcgggagtggctaagctcgttcctttggaaatatctgttttcagac

SEQ ID NO: 575831 - DNA, 120 bp, Artificial Sequence
  ENSG00000171435_35 (sequence is synthesized)
accccaacccgagcctgtcatggcgtgtggcacctttgcatagagctctgaagtacagtaggaaagttagaacgtcttttgagttctgggtctctctgggggacctattcccccatttct

SEQ ID NO: 575832 - DNA, 120 bp, Artificial Sequence
  ENSG00000171435_36 (sequence is synthesized)
gctgttttctcctgttctctgagagtagcatcccttttcacctcactgcccgcacctccttgccatttggaaagccaagatgacttctgaggggctccttagagctcaccgtcattcagg

SEQ ID NO: 575833 - DNA, 120 bp, Artificial Sequence
  ENSG00000171435_37 (sequence is synthesized)
gcaccccctgaagtctggtccctgagaatcagggctctgggcagggagttctaggacattccttttcttccctcttctctgctactcacaccagtgaagcttattcccccaccaaggtgg

SEQ ID NO: 575834 - DNA, 120 bp, Artificial Sequence
  ENSG00000171435_38 (sequence is synthesized)
atgcgggttcttggggtacgtccatgttgggttatgtggctgtacctatgataacacgtttgcaaaagatttccctgcctgtcacccttgaggagtcctgttgggggagcacaaagggag

SEQ ID NO: 575835 - DNA, 120 bp, Artificial Sequence
  ENSG00000171435_39 (sequence is synthesized)
gatgtttgttacacttctgcgttctttgctctagcctggtgcggggtcctcaagtagcttccccatcggaagcctgtgtccctcacctgtgtgtgttccctcagtgccccaccttccctc

SEQ ID NO: 575836 - DNA, 120 bp, Artificial Sequence
  ENSG00000171435_40 (sequence is synthesized)
cctcctcttgatcccaacctgggccggcgactcttcctgaccatgttggggaagcccctggtgttctgtatctgtaggaaggatgccgagagcaggctgggcatgcagatgggagaggag

SEQ ID NO: 575837 - DNA, 120 bp, Artificial Sequence
  ENSG00000171435_41 (sequence is synthesized)
aacctctgggtcatttgcccatgttttcaaagccctgaccccctgcatgtgacctgatacaaaagggaaatctgtccccaagcagagcaatagcaggattatctgggcagtgaacaggaa

SEQ ID NO: 575838 - DNA, 120 bp, Artificial Sequence
  ENSG00000171435_42 (sequence is synthesized)
gcccagggcggccacagcccctctgtgtttcctgggtactacctgggccttagttttcttgtagctactatctatccaggcatctccctcctagagggccagagagaggaactggaactt

SEQ ID NO: 575839 - DNA, 120 bp, Artificial Sequence
  ENSG00000171435_43 (sequence is synthesized)
caaaaaccctacctgatcttactttcaaaatccaaatagacctatgaggatctcttccccaccttgggtgactcccagactggttcatgctctgggggccaaacctgcttccaaaccggg

SEQ ID NO: 575840 - DNA, 120 bp, Artificial Sequence
  ENSG00000171435_44 (sequence is synthesized)
aagaatggtgagatcagtcatgcttcccaggagcctggctacaggaaacccctgtgtttcccaaagggccctcctgaattgcctttccaacactcccagcttactgggactagaggacta

SEQ ID NO: 575841 - DNA, 120 bp, Artificial Sequence
  ENSG00000171435_45 (sequence is synthesized)
aagaccccggcttgggctgctcctaagcagacactgctcttctggggacatctatggctcttggcttgacgacgtgtgtgtgtcttggaggcattttatatatgtttgcctgagccccag

SEQ ID NO: 575842 - DNA, 120 bp, Artificial Sequence
  ENSG00000171435_46 (sequence is synthesized)
ccactctggggttgctggggatggctcttgtcaatggacacctccccatcccaacacaacactctgtgtcccagccctgggcctggacttgcacctgtcttggctctgcccagcagccta

SEQ ID NO: 575843 - DNA, 120 bp, Artificial Sequence
  ENSG00000171435_47 (sequence is synthesized)
ctgagtgcctgaaacccaaccactcacttctcttccatcacaccaggacttcttgggtccacaggctccagtccttgtcatgttcccttgtgccaagagacaggatatgaggaagggaag

SEQ ID NO: 575844 - DNA, 120 bp, Artificial Sequence
  ENSG00000171435_48 (sequence is synthesized)
aggcagccagggtctactaccctgcagctgaaatgtccacaagaactggcaccttctcactcttgcctctcttgtttccagaattaactaaaatgtccaaccacagcctttggcaaggcc

SEQ ID NO: 575845 - DNA, 120 bp, Artificial Sequence
  ENSG00000171435_49 (sequence is synthesized)
tagcatgatctccaacagctgatttttccattcattcatgagcaccagtttgggattaaggacagggcctgagtgatccaggggaaaacccagccctttgtggaacagggtgccttgggt

SEQ ID NO: 575846 - DNA, 120 bp, Artificial Sequence
  ENSG00000171435_50 (sequence is synthesized)
ccatccctgaatctgagtcacttgctcttgacttctcgatctttccccacttcactactctgtccccacctgcattggtctctgctgcagccaggccaggatcctggccttcagtgcctt

SEQ ID NO: 575847 - DNA, 120 bp, Artificial Sequence
  ENSG00000171435_51 (sequence is synthesized)
cctgacgcccctaccctgtcccctctacaccgccctgacttgttgagaaaccagctttaatttgcacacatttaaatccaggaagaaccaaaccgctgctttccctgctggcttccatct

SEQ ID NO: 575848 - DNA, 120 bp, Artificial Sequence
  ENSG00000171435_52 (sequence is synthesized)
ttattcgctgatgaggttttgggaggaggttatattcatcttacgcagggaggaaaaaaaaagaggaaagaggctgtatatttttacatcataattaccagcctcacctgcaactcattc

SEQ ID NO: 575849 - DNA, 120 bp, Artificial Sequence
  ENSG00000171435_53 (sequence is synthesized)
tatacaatgacacgaccaagatttgtgtgtttgcccttgtcccatcacagctgcacacaggtgccctgtacacataagtcactgactcagcagcgagttgttccagtcagtcttgctttt

SEQ ID NO: 575850 - DNA, 120 bp, Artificial Sequence
  ENSG00000171435_54 (sequence is synthesized)
agcaaaccgtcatatacatgggcttcccgaggggaccagtccacagggtgaagattcaccaggaagccttggctttgcagagagaaacatctcagctttctttaaagggcatgtggattt

SEQ ID NO: 575851 - DNA, 120 bp, Artificial Sequence
  ENSG00000171435_55 (sequence is synthesized)
gcacataaatttcacccaactcttccaggatacagattattcataaaaccaaggagcttccttcttggccccctgtgggaggacgtgccccttgtgtccccatccccagagccaagctgg

SEQ ID NO: 575852 - DNA, 120 bp, Artificial Sequence
  ENSG00000171435_56 (sequence is synthesized)
aaacccaaagtcattgcttagatccattttgtcctggtattccttttactgatcaaagagaaaattttcatcttgccatggacccccccatcctcaccccatccacttgtctccacagct

SEQ ID NO: 575853 - DNA, 120 bp, Artificial Sequence
  ENSG00000171435_57 (sequence is synthesized)
accttggattgtcagtcaatagaagcccttgactgatattgaccactagacttttgtatccagggaacctagttcttccctttttctcacctcccatgccatatacacacatcatgcccc

SEQ ID NO: 575854 - DNA, 120 bp, Artificial Sequence
  ENSG00000171435_58 (sequence is synthesized)
tccccacaaacacacgaaaccagccttatctcaccttccaccattcccatccccacctacagctgatcatcaaaggtacacggaggaagtagtagacacggagctcaggccaatcattat

SEQ ID NO: 575855 - DNA, 120 bp, Artificial Sequence
  ENSG00000171435_59 (sequence is synthesized)
cttgagaaatctaaacccagggctgtcaggctatgccccataggccatacccagcctgccaaatggtttttacatgttttaattgaggaaaaatcaaaagaataatatttcatgacatga

SEQ ID NO: 575856 - DNA, 120 bp, Artificial Sequence
  ENSG00000171435_60 (sequence is synthesized)
aaattctataacattcaaatttcatgtcaataaacaaaatgttattggagcacagtcacctctccatttacacaaccacggctgctcctatgcaactgtgacagagccagctatttgcaa

SEQ ID NO: 575857 - DNA, 120 bp, Artificial Sequence
  ENSG00000171435_61 (sequence is synthesized)
cagagacgatgtggcccacacagtcaaaaacttttacaatctggccctttcctaactttgctagcctttgatagagaggattggatatggctgtcaggggaggaacaggagcctttgata

SEQ ID NO: 575858 - DNA, 120 bp, Artificial Sequence
  ENSG00000171435_62 (sequence is synthesized)
gagagggttggatatggctctcaggggaggaacaggaagttggagggggagagaacttgtttcagcggaagaaggccagcttgccccaagatgcagcgggctgcctccggaagtagagaa

SEQ ID NO: 575859 - DNA, 120 bp, Artificial Sequence
  ENSG00000171435_63 (sequence is synthesized)
ctccctgtccttggatagggtggagcagatgttgactgcttggcctgtgtgatatggaggcaattcaggccctgaaggctggaccaactccctggactttaaaactcttcgtttgctaag

SEQ ID NO: 575860 - DNA, 120 bp, Artificial Sequence
  ENSG00000171435_64 (sequence is synthesized)
gggggccataataacaaaatgtcacacactgagtggcttaaacaacacgaatttattcctcacaattcttgaggctggaagtcccaagatcaaggtgtcagcagggttggtttctggtga

SEQ ID NO: 575861 - DNA, 120 bp, Artificial Sequence
  ENSG00000171435_65 (sequence is synthesized)
ggcctctttctttggcttgcagacagctgccctctgatcgtgacctcacgtggcctttcctctgtgactgcacatccccagtatctcctcctcttctgataaagacaacaatcttattag

SEQ ID NO: 575862 - DNA, 120 bp, Artificial Sequence
  ENSG00000171435_66 (sequence is synthesized)
attagggttccaacgctctgtgattttattcccatccccggctttctttccccacactggttctcaatcttgagtcccgaaatatgccctccctatcctcatcctgtgcctaccttcact

SEQ ID NO: 575863 - DNA, 120 bp, Artificial Sequence
  ENSG00000171435_67 (sequence is synthesized)
tcacccatccatcccctgcaggctggtcttgttccactgtgccaccatatccccaagcccccctcacctccgtgaggctcctaggactgctgcagcaaaccaccacccactggggcctac

SEQ ID NO: 575864 - DNA, 120 bp, Artificial Sequence
  ENSG00000171435_68 (sequence is synthesized)
aacaacagatgtatcatctctcacccatctggatgccagaagtccaaaatcaaagtgttagcagggccatgttccccctgaaatctgtaagggaatccttcctggcggcttctgaattcc

SEQ ID NO: 575865 - DNA, 120 bp, Artificial Sequence
  ENSG00000171435_69 (sequence is synthesized)
tggtgctttcctggtcatcattggcattccttggcttgcagctgtgtcagtccaatccctgccctcatcatctctctgtgtgtccctatcttcatatggccatcttcttataaggacacg

SEQ ID NO: 575866 - DNA, 120 bp, Artificial Sequence
  ENSG00000171435_70 (sequence is synthesized)
agtcacattggattaagggcccaccctatttcagtatgacctcatcttaactaattatatctgcaaagaccctctctccaaatgaagtctcattctgaggtactaggaatgaggacttca

SEQ ID NO: 575867 - DNA, 120 bp, Artificial Sequence
  ENSG00000171435_71 (sequence is synthesized)
ttttttttttttttttttttttgttggggacaccacaacttataacaccctctaagacattttctcttgtgccttgactggtcctccactgtagaacccaggtgcccttgaagatagatt

SEQ ID NO: 575868 - DNA, 120 bp, Artificial Sequence
  ENSG00000171435_72 (sequence is synthesized)
gatagattccccagaattcctggtctacaaggtcaggctgttgctgtcatgcttaccaagcttgccccaatcaacacgtcccatcactgaattccaacagctctggatctcagttctgtg

SEQ ID NO: 575869 - DNA, 120 bp, Artificial Sequence
  ENSG00000171435_73 (sequence is synthesized)
gctgtatgggaacagcctgtgtgtaagtggcttgtctgtagcggactgtcacttgacccctgaatgtgcctcatgaccctatccaaagcagttggtgacacagcatctgattttatctat

SEQ ID NO: 575870 - DNA, 120 bp, Artificial Sequence
  ENSG00000171435_74 (sequence is synthesized)
caaaggagtggattttgatgagctacattttgctgtttccttttttggctttgcctgtgatgtggggaagttcctaggcagactcatgtggccactctccctggctcccagcctcacctc

SEQ ID NO: 575871 - DNA, 120 bp, Artificial Sequence
  ENSG00000171435_75 (sequence is synthesized)
ctcccgtaccacctcaccctcacctgcacacacctgcaagggaatcactttgaactccaaggggagtgacaggcagcaaatgtcagtctgggtcctggaatgtggagccgcagtgaacct

SEQ ID NO: 575872 - DNA, 120 bp, Artificial Sequence
  ENSG00000171435_76 (sequence is synthesized)
ctgtcctctctggtcagtgcctgactatgatattaacccaaatcccagactcccttctcgaggccctgcaatccatacccattctgttaccagtttagttttgaaaccagtagtggggca

SEQ ID NO: 575873 - DNA, 120 bp, Artificial Sequence
  ENSG00000171435_77 (sequence is synthesized)
ggaggttgatggaaaatctgcggtcccagtgacctcctggacttgtcttagtagtgcctggcacatagtaagtgctcaagaaatgtttacagaatgcagacagagaggtttgctgggtaa

SEQ ID NO: 575874 - DNA, 120 bp, Artificial Sequence
  ENSG00000171435_78 (sequence is synthesized)
gagtaagaccctggcacagggagttagaagggcaccattggcagggctggatggtattgggattcccctttgccagaccatgttgtgggtgccatatcaaccccaatgagtttgtttgtt

SEQ ID NO: 575875 - DNA, 86 bp, Artificial Sequence
  ENSG00000171435_79 (sequence is synthesized)
cacccaggctggagtacagcccacaagcaatcctcccaccttagcctctcaagttgctggtactacaggtgcacaccatcatgcct

SEQ ID NO: 575876 - DNA, 88 bp, Artificial Sequence
  ENSG00000171435_80 (sequence is synthesized)
gcacaccatcatgcctggctaattttttatttgttgtacagacagggtcttgctatgttgcccgcccctgcttcagcctcccaaagca

SEQ ID NO: 575877 - DNA, 120 bp, Artificial Sequence
  ENSG00000171435_81 (sequence is synthesized)
cccctgcttcagcctcccaaagcactgggattacagggctaagccattgtgctgagccagtttgccaggtttaatatctgtgacgtatgaagcgacccattgagtcaggtggcccaggat

SEQ ID NO: 575878 - DNA, 120 bp, Artificial Sequence
  ENSG00000171435_82 (sequence is synthesized)
gtctaggaggcagagtaacaatccaccctgaacagccctcattcacagagcacttactacgtgccaggctggaattcctatgatggtttggggagatcagtagtcttattctcgttccaa

SEQ ID NO: 575879 - DNA, 120 bp, Artificial Sequence
  ENSG00000171435_83 (sequence is synthesized)
tggggcaactgtggtacagggacagaaaccagcctccaaattgcagacccagcattttaaaaacgagtctttgggctcatccattcccaggaacccacctccaggtcaaggggttcatgt

SEQ ID NO: 575880 - DNA, 120 bp, Artificial Sequence
  ENSG00000171435_84 (sequence is synthesized)
ccagctgctcatggggatgttacaatcccagcctctgagacttattggcaacttggaaccaggaaagagagagaggaaaagcaggaagttgtggaagggagggtgcaggggctggcaggg

SEQ ID NO: 575881 - DNA, 120 bp, Artificial Sequence
  ENSG00000171435_85 (sequence is synthesized)
accatactgggagtttgcacggaagcttgaacttatgttctcaaactgacaggctgccagcagcagcccggatttccaggaaatgtacatctgggttggcagagtccctcctgggtccct

SEQ ID NO: 575882 - DNA, 120 bp, Artificial Sequence
  ENSG00000171435_86 (sequence is synthesized)
ccagtatccctgctccaggcttcctatcccctccgtctctcctgctggatgttgcactgtggtcccgtgttcctgagaggcgtacatcagtgagtgctcttccctctcaggggtgggaaa

SEQ ID NO: 575883 - DNA, 120 bp, Artificial Sequence
  ENSG00000171435_87 (sequence is synthesized)
gggcccttccttcccactcattgggatcatgcagctcccatttcctaacaccaagaatatgaaggattcatctcatggggttgagaatggctgtcctccttccactgaggactgagctgg

SEQ ID NO: 575884 - DNA, 120 bp, Artificial Sequence
  ENSG00000171435_88 (sequence is synthesized)
aggagatggactctgtctagaatgtgcctgatctaaataagaccttgtttcccaagcatgtcccatagacctttcattccatggaaaactcgccggatttgcattattgaaagggtcctg

SEQ ID NO: 575885 - DNA, 120 bp, Artificial Sequence
  ENSG00000171435_89 (sequence is synthesized)
ggacaagcatgcattggaaatgcttaggtaaaatgaaactaatttcttgattgcaggacttatcagaacttttaagacactattgtgtggttgaatctctaaatgcctgataggaggctg

SEQ ID NO: 575886 - DNA, 120 bp, Artificial Sequence
  ENSG00000171435_90 (sequence is synthesized)
ttcttcccaagctttcccaggcttgtttctgaatctccaacaaggtcaacctctgtgaatgagacttgataccttacctggtactgaaggaggcaatgtcaatgtactggcccacagaaa

SEQ ID NO: 575887 - DNA, 120 bp, Artificial Sequence
  ENSG00000171435_91 (sequence is synthesized)
agagctgaccactagcattcatagacactgctaggagatgagaaaggtagcttagagcccgattccatccatgtggacagtggttccatgaacaagaacaccacatctggctgatggtgt

SEQ ID NO: 575888 - DNA, 120 bp, Artificial Sequence
  ENSG00000171435_92 (sequence is synthesized)
cttccaatggaggggtcaaatctgctgtgtgttggtggcttctccaacataccatggcttggaggccaatgtgaaaagtatataagatgtaacaccctcagaagggttaagttttcacct

SEQ ID NO: 575889 - DNA, 120 bp, Artificial Sequence
  ENSG00000171435_93 (sequence is synthesized)
gagttttcatcttcaaccaagtcattgggatggtgatctagaaggacctctaagatctagaaggataaagatctggtccaaggagtacaaatatgtaatggatctaccaccagtgtcccc

SEQ ID NO: 575890 - DNA, 120 bp, Artificial Sequence
  ENSG00000171435_94 (sequence is synthesized)
tgctgtactcttggcagacatcactaatccatcacagcatgccttcccactgatcacagatgtagcttcagggcattcgagttaccacttaagatggatatgagtgaccctcccttatct

SEQ ID NO: 575891 - DNA, 120 bp, Artificial Sequence
  ENSG00000171435_95 (sequence is synthesized)
cactcttctcctttcacagaagcaggatctgaggcccagagagggaagctataataaactcccctaagtcaggtcccttctaagaggcagaggtaggtttagaactcaggcctcagaaac

SEQ ID NO: 575892 - DNA, 120 bp, Artificial Sequence
  ENSG00000171435_96 (sequence is synthesized)
ttccagaagccaagccatttgggctgtagttggtggacagtctatcagcgctctgcagatgtttcttctcagttagggaacttggaaaatgcagaaagaaagattctgtctctaagactc

SEQ ID NO: 575893 - DNA, 120 bp, Artificial Sequence
  ENSG00000171435_97 (sequence is synthesized)
tgtgtatgatcctactcggtaatctgcctgcttggagaaaaatcatttatcttctgggacggcttcaccacaaggcctgaatgctatgcccagtctagtaacagctgggctggaagtcac

SEQ ID NO: 575894 - DNA, 120 bp, Artificial Sequence
  ENSG00000171435_98 (sequence is synthesized)
ggcatatgggggccttaaggaataacagtgtgcgtggtggtgtgcaggagagctgcaagggcttttctttcttgaggaggtttgtaaaatttctgctgttcagtctgggcttctgggaag

SEQ ID NO: 575895 - DNA, 120 bp, Artificial Sequence
  ENSG00000171435_99 (sequence is synthesized)
tcagggggtgctgcatataaagggcaggaaaaggagcctgactccaattgctctttggtttcttccctgaatggaaggctcaaaatcaagtttccacccagataagatcttgaggtccta

SEQ ID NO: 575896 - DNA, 120 bp, Artificial Sequence
  ENSG00000171435_100 (sequence is synthesized)
gtggaccaccagctctactcctgagctcttgaaatacctctaatcaccagctcggtggctgagagtaccttcttgtccactgcctcttcttttccttctcgtcttcacttatcccccatc

SEQ ID NO: 575897 - DNA, 120 bp, Artificial Sequence
  ENSG00000171435_101 (sequence is synthesized)
caacttctgcccgataatatctcccctgtattgtaaactgaggagaaagttgcacaattgtagagatgaaaaatagctgccatgtatttagcttaaattagctcagaagaaaggctccct

SEQ ID NO: 575898 - DNA, 120 bp, Artificial Sequence
  ENSG00000171435_102 (sequence is synthesized)
ccctccattgagcgggcagcacttgtttatgccaacatgctatttgcatcgcgccttcttaaatttgaaagtctaatgattaaaaacaaatcttagtttttcttttccaccacttaaaaa

SEQ ID NO: 575899 - DNA, 120 bp, Artificial Sequence
  ENSG00000171435_103 (sequence is synthesized)
aaaaaaaccagcttggctagttcttctagtttaaaaataccctgacctccagcactacagtgagaattttggaaaggctggtaccaggatatcaggaggaaataaatacaggccaacaat

SEQ ID NO: 575900 - DNA, 120 bp, Artificial Sequence
  ENSG00000171435_104 (sequence is synthesized)
aaccagaggccttttctgagtggtgggcgacaggatgaacaaggtagaagagaggtctttgtgtcctcacacagatgctggcattctgggtttgtctggaattcagtgaacctctgtcct

SEQ ID NO: 575901 - DNA, 120 bp, Artificial Sequence
  ENSG00000171435_105 (sequence is synthesized)
ctctgacagagatttcttcaccaaccattcattcagtgggtgatttgttgagcatctactatgtgttagaccctgggcattcagtgatgagtgatacaatgtctcacctgttctgaagcc

SEQ ID NO: 575902 - DNA, 120 bp, Artificial Sequence
  ENSG00000171435_106 (sequence is synthesized)
taaagcccaatggggaagagagacaagaagcaagtcaaccacaaatatataaatttgcaactcatgtagatctatggaaagaaaactcacgggggaccagaaacatgggagagggtatac

SEQ ID NO: 575903 - DNA, 120 bp, Artificial Sequence
  ENSG00000171435_107 (sequence is synthesized)
tgtgggagagctgctgacaaaggtctttctgaggaggtgacatttaagtcaagatctaaaggaagagaaggataaagagatgttcattctaagccagggtttctcaacctcagtactgtt

SEQ ID NO: 575904 - DNA, 120 bp, Artificial Sequence
  ENSG00000171435_108 (sequence is synthesized)
gagctatttggggccagataattctttgaggtggcgactgtcctgggcattggaggatgttaagcagcttcctcaactctccccacaagataccagtagcacctggtactggtgacatcc

SEQ ID NO: 575905 - DNA, 120 bp, Artificial Sequence
  ENSG00000171435_109 (sequence is synthesized)
aaaaacatccccagacacaccctgactttgctgtctggaatcaatcctcataaagccccaagccttggagcacagaggctggaagcccatatggtggcatgtcaggcatggtgtcacctg

SEQ ID NO: 575906 - DNA, 120 bp, Artificial Sequence
  ENSG00000171435_110 (sequence is synthesized)
agcttctctgacccccacttctgatatggcatccagtttggagtctctgttctccatgagctcccatagctgtcccatattccacaaggcattgcttctgggccacggtcctctagttcc

SEQ ID NO: 575907 - DNA, 120 bp, Artificial Sequence
  ENSG00000171435_111 (sequence is synthesized)
agcatagccctatttttgggtatgttggtggatttcaaaagcctccagttgacatccaaagtgtgacatccaaaaccatctccagacattgccagatgtcccctgagttgtctccaggcc

SEQ ID NO: 575908 - DNA, 120 bp, Artificial Sequence
  ENSG00000171435_112 (sequence is synthesized)
acgcgactaggattcaaatccagcatcctgccatctgcaaccttccatgggagaaaggaaatcagaggagaacaggaaaacacaaggaggggactccttaagtgaacattgcagggaaat

SEQ ID NO: 575909 - DNA, 120 bp, Artificial Sequence
  ENSG00000171435_113 (sequence is synthesized)
aggtttttaaagcactagttagcatcaccagtggtttgaaggctgtctaggtaaggagaatgtggacttgcctttcaccgtctgcacggacaggggctgaaatctccagtcattctctcc

SEQ ID NO: 575910 - DNA, 120 bp, Artificial Sequence
  ENSG00000171435_114 (sequence is synthesized)
atccttccacagcccttctaagaagcagatcctcttgctgagctgaaatcttgagacttgcatccggcaatcttggtgttgctttctgaggctactcagggaaagcccttctgtattccc

SEQ ID NO: 575911 - DNA, 120 bp, Artificial Sequence
  ENSG00000171435_115 (sequence is synthesized)
caggaaggaaagtctcccagatagtgaagggccttttctaccttccttgcaattcccagttcactgtgaagaagagagtcaggccgggttagaatggctgtctctggtagcaatgaagca

SEQ ID NO: 575912 - DNA, 120 bp, Artificial Sequence
  ENSG00000171435_116 (sequence is synthesized)
acaacatagacagtctggacaagatgtggcagttctgtccagtcccgtgtgactgatttgggcatggagacaggcagtgggtgaggatggcctctgtaggtccagctgttttacccctag

SEQ ID NO: 575913 - DNA, 120 bp, Artificial Sequence
  ENSG00000171435_117 (sequence is synthesized)
aatcaaatccctggagcttccggcagtcccaggattgggaagggtaacagagaggacgagtcgggcactgcaaaagaccagatcttggaaaattgctttgggaattgggacaccttccaa

SEQ ID NO: 575914 - DNA, 120 bp, Artificial Sequence
  ENSG00000171435_118 (sequence is synthesized)
gaagacagttgagttggctggggctctgccctagatggggtcaacctctccccaacacagccctgcccaggttggggcattggcagcttaagtgcgtcctggacaacaaatgtaatgtat

SEQ ID NO: 575915 - DNA, 120 bp, Artificial Sequence
  ENSG00000171435_119 (sequence is synthesized)
tggtcctgtaagattctagccattttcctctgcttatttttctacatgtgttacaagtaataatgtttagatgggtacatatgaacttgtgtaagttcaagtaactgctatgtagctaca

SEQ ID NO: 575916 - DNA, 120 bp, Artificial Sequence
  ENSG00000171435_120 (sequence is synthesized)
gcatgggcatcaaggtactctaaggtacttgccctgccacaccgaggccccctgccccggccccctttccctcctagccagccttctagggagcactgcacaccctgccccttcaaagct

SEQ ID NO: 575917 - DNA, 120 bp, Artificial Sequence
  ENSG00000171435_121 (sequence is synthesized)
atctggacagtcctggctcgactggagcattaagggaggggctgtccttggtcaggcttctgcccaactgtgtgatgcataaatctttgcctggctccttcttccttcttttcggaagtc

SEQ ID NO: 575918 - DNA, 120 bp, Artificial Sequence
  ENSG00000171435_122 (sequence is synthesized)
tatctcctcctgagggcctctgcggtcctaacctatcaaggaatatcatagattgtactccccaccccatcaaaacacaccctgactttgcgtctggaatcaatcctcataaagccccaa

SEQ ID NO: 575919 - DNA, 120 bp, Artificial Sequence
  ENSG00000171435_123 (sequence is synthesized)
ggcttggagcacagaggccagaagcccatatggtggcatgtcaggcatgctgtcacatgagcttctctgactccacttccaagatggcatccaatttggagtctctgttctccatgagct

SEQ ID NO: 575920 - DNA, 120 bp, Artificial Sequence
  ENSG00000171435_124 (sequence is synthesized)
cccatagctgtcccatattccacaaggcactgcttctgggccccggtcctctagtttcctcatagccctatttttgggtacattggtggatttcaaatgcctacagttgagcagccgaag

SEQ ID NO: 575921 - DNA, 120 bp, Artificial Sequence
  ENSG00000171435_125 (sequence is synthesized)
gattctaagaaaattttgcttgtatttcaaaggctcatgtccccagccccattcactacaccctcagcagagcccagcgtggagcaaccttgtcccttcattccccaaatcttcatttta

SEQ ID NO: 575922 - DNA, 120 bp, Artificial Sequence
  ENSG00000171435_126 (sequence is synthesized)
tatagtcatttagtaaatatttgttaagtgcctcctgtgattctggaaaaaatggagaaaagtgggtgctgccttcagggtactaggagtccgatgaagagagggaggagttccagtagg

SEQ ID NO: 575923 - DNA, 120 bp, Artificial Sequence
  ENSG00000171435_127 (sequence is synthesized)
gtcccgaggccccacaggagctcccaacccagagaaagaccctccaggaaggattctcagaggaggagacttctgaaccctgtcttgaaatttgagtagaatggtagggaacggtgtgtc

SEQ ID NO: 575924 - DNA, 120 bp, Artificial Sequence
  ENSG00000171435_128 (sequence is synthesized)
agacagaaggaacagcctatgtgtggactcagaggcaagatcatgatttattgagggtaactgcaagtggctaaaatcctgccccctggcacttgcctgcctttccctgctttccccaaa

SEQ ID NO: 575925 - DNA, 120 bp, Artificial Sequence
  ENSG00000171435_129 (sequence is synthesized)
gcctgattttgggaccctggagtctccatctccaaacagagggtgccctggctcagatgtggagaccttgacttctttccccagcatgctctggttcctactgttagccttggtgtcctg

SEQ ID NO: 575926 - DNA, 120 bp, Artificial Sequence
  ENSG00000171435_130 (sequence is synthesized)
tgggggaagatgtctgaggagagttttgtgcttgctggagtcagaccagtactcaggccacctcaggcctgctctgcatccctctctggctctacagacctctctctctctctctctctc

SEQ ID NO: 575927 - DNA, 120 bp, Artificial Sequence
  ENSG00000171435_131 (sequence is synthesized)
tctctctctctctgtctgtctgtctctgtgtctgtctctgtctctgcctgcctccacacagtgaaggatgtgtctctatttcttagtgccctgcattgggtcctgaagtccatgggcatc

SEQ ID NO: 575928 - DNA, 120 bp, Artificial Sequence
  ENSG00000171435_132 (sequence is synthesized)
catcttggctatagatgggttggccatgagcccttctctctaatgcatttttcattcctgttcctcttttgcttcactttccctctatcgactcttgcgacctgtgtctctgatgtctct

SEQ ID NO: 575929 - DNA, 120 bp, Artificial Sequence
  ENSG00000171435_133 (sequence is synthesized)
ggggcccccagttctgtcttgccataccaaaaaaccttcttcagcaaaaaacctctttctgggacagttcatatcactctatgaataggcccctgaagtgttgaggtcaaggacatgtgt

SEQ ID NO: 575930 - DNA, 120 bp, Artificial Sequence
  ENSG00000171435_134 (sequence is synthesized)
gaacgtggaaatgtatttatggaaagaccctacactgagggtctctaactaaacatttcaggtatgatgggcaaaatgctggtttgttacagaaatgactgaagaagacctaggggccat

SEQ ID NO: 575931 - DNA, 120 bp, Artificial Sequence
  ENSG00000171435_135 (sequence is synthesized)
agtgggccacaggccaagcctgcaatacagcctgaagtgtgggaaagaatgtatcagtcctgttgatggagtggtgtgtttgctgtctctataaatatgtcagggtttgaaagacagaaa

SEQ ID NO: 575932 - DNA, 120 bp, Artificial Sequence
  ENSG00000171435_136 (sequence is synthesized)
acaaagcatctttgctgaccgccagactcccagggtatatgtggctactgcaaattagcgaggcttgtttatctgcttcaacttgactcaatttgcatttcttgagccactgtctattgt

SEQ ID NO: 575933 - DNA, 120 bp, Artificial Sequence
  ENSG00000171435_137 (sequence is synthesized)
ggataatgatttcatcaacactttctcagcatcagcagcccctccagagtattccttgaattttcttagctttgtgcaacccacgagcacttaatatatcactaacccttgagtttattg

SEQ ID NO: 575934 - DNA, 120 bp, Artificial Sequence
  ENSG00000171435_138 (sequence is synthesized)
gagggagtgaatgaaataatgaatgtcaataacgttacgcaatacctggcacacagtaggtgcttcatcaatgtggcttttcttctcaatcacccaaatgaacctcccccagaatcccac

SEQ ID NO: 575935 - DNA, 120 bp, Artificial Sequence
  ENSG00000171435_139 (sequence is synthesized)
ctctagggggacattcctgaaaaataagggactagaatagcgaggtggtgggtgttacccatttatttagatatttgtgtcctggtgaacatggggagggatgcccaagtgtcataagga

SEQ ID NO: 575936 - DNA, 120 bp, Artificial Sequence
  ENSG00000171435_140 (sequence is synthesized)
caccccctccccccgtctacaaggcagaggtctcttaggatgtgagagagtctctggcaagaccagcccccaccccaccaaggccctcatagaaacagaacattcttcctccctatccca

SEQ ID NO: 575937 - DNA, 120 bp, Artificial Sequence
  ENSG00000171435_141 (sequence is synthesized)
aagcagaagttgactggggcagataaggcaagtcacattacatctgtgcccttgaccatacctggaccaggcagagaagatcccagacttaggtggtcaacgtttccaccccaagcctct

SEQ ID NO: 575938 - DNA, 120 bp, Artificial Sequence
  ENSG00000171435_142 (sequence is synthesized)
catttctcgctctctttgagacttgatcttgtaccaggatccactcgacagacttaacgcatgattaatttgattgattactcttgaagttactgaccttaggaaaattcctcaattgta

SEQ ID NO: 575939 - DNA, 120 bp, Artificial Sequence
  ENSG00000171435_143 (sequence is synthesized)
ggctttctctatatgtaaattatgctgttatctttttctatacacaaagtatatagacctataaatattatacatatatattatatatataaagactaattcttgtacagaccaacgcgg

SEQ ID NO: 575940 - DNA, 120 bp, Artificial Sequence
  ENSG00000171435_144 (sequence is synthesized)
gcggaccgatggtccatattcttttctccatgtttgtttgtgtcgactgttgcagagtgagttgatgtaagaaggtggtttcatgttttcttttggggggccacttctttcttttccttt

SEQ ID NO: 575941 - DNA, 120 bp, Artificial Sequence
  ENSG00000171435_145 (sequence is synthesized)
ccgtttctatctctgtctgtctccgtctctgtctctctctttctcacttgttgccaatgtcttgttgctgagaaggaacactctattcagatgccatccaggaaagaaaggccagatgga

SEQ ID NO: 575942 - DNA, 120 bp, Artificial Sequence
  ENSG00000171435_146 (sequence is synthesized)
tggagggtccactgtgtatatttgtacagaatcatttataaagttttctacacttctaaaaaaagtatttctaacttgggctgttggacagtttgtgtgcctctgagccagcaagcctgt

SEQ ID NO: 575943 - DNA, 120 bp, Artificial Sequence
  ENSG00000171435_147 (sequence is synthesized)
tgtttcttgtgtttagtgcaatgtttagtgagaaaccaatgtctgaattatttatgccaataaaaaatttgagaattactgcattgcactactgccaagacaggtctgaattctattgtt

SEQ ID NO: 575944 - DNA, 120 bp, Artificial Sequence
  ENSG00000171435_148 (sequence is synthesized)
aggacttcaacataggaacttgagggggacaaaattcagcccataacatgcattgatgtataacaaaaaagcaaaaatggaaccaaatgcaagtgagtctgcgattccagcgaggaggca

SEQ ID NO: 575945 - DNA, 120 bp, Artificial Sequence
  ENSG00000171435_149 (sequence is synthesized)
tacaggagttggggggcctgagcacatgaagattccgtccccatcatcgagtggaagcggcttccttttatgttcaaaaagctgaatcgctttccctttataaagcacagctgaaaaggt

SEQ ID NO: 575946 - DNA, 120 bp, Artificial Sequence
  ENSG00000171435_150 (sequence is synthesized)
catgcttggggagacatgaggggtgcagcgttggaggggcagagattagggagggggtgggttcatgccagagccctgatgcagcaagtctctgcaggaaagcgaatgggtcaatgacca

SEQ ID NO: 575947 - DNA, 120 bp, Artificial Sequence
  ENSG00000171435_151 (sequence is synthesized)
gagaggggcaaggaagtatgtggactgacccttatcgtaccctaagcaattacccttatatcacttatttaatctttggaacagccacaaggtaagcattatcagctcattttacagatg

SEQ ID NO: 575948 - DNA, 120 bp, Artificial Sequence
  ENSG00000171443_0 (sequence is synthesized)
gccgaggggcagggccccctcaccccctccccttcccacgcgccggccccgttgcccccgcgcgcgcgcacactcgcgagccccggcgacatgcaaatgagctggctccagtgcccagac

SEQ ID NO: 575949 - DNA, 120 bp, Artificial Sequence
  ENSG00000171443_1 (sequence is synthesized)
gctggctccagtgcccagacccaagccccccactgctcaatggacacccccagcccagacccgttgccttcgcctttgcccggggaggaagagaaacctctggccttatctcctcctgtt

SEQ ID NO: 575950 - DNA, 120 bp, Artificial Sequence
  ENSG00000171443_2 (sequence is synthesized)
ccccggggccgccgaggccgtcgtcctgggggagccacctcctcaaatcggacactcaaggcctccctccctcgcaagcggggccgcccccccaagtcagggcaggagcccccactggtg

SEQ ID NO: 575951 - DNA, 120 bp, Artificial Sequence
  ENSG00000171443_3 (sequence is synthesized)
caggtgcagggggtgacagccccagtaggcagcagtggcgggagcgacctcctcctgatcgatgatcagggtgtgccctatacggtctctgaaggttcagcggctgggcctgagggctct

SEQ ID NO: 575952 - DNA, 120 bp, Artificial Sequence
  ENSG00000171443_4 (sequence is synthesized)
cagtgcaaggtttgcggcaagaccttcaagcgctccagccacctgcggcggcactgcaacatccatgccggcctgcggcccttccgctgcccgctgtgcccccgccgcttccgcgaggcg

SEQ ID NO: 575953 - DNA, 120 bp, Artificial Sequence
  ENSG00000171443_5 (sequence is synthesized)
ggcgagctggcgcaccaccaccgcgtgcactcgggggagcgcccgtaccagtgccccatctgccggctgcgctttacagaggccaacacgctccggcgccatgcgaagcgcaagcacccg

SEQ ID NO: 575954 - DNA, 120 bp, Artificial Sequence
  ENSG00000171443_6 (sequence is synthesized)
gaggccatgggggtacccctgtgtgcaccagatccagggtctgaaccgccgtgggacgaggagggcatcccggccacagcaggggccgaggaggaggaggagacagaggggaaaggggag

SEQ ID NO: 575955 - DNA, 120 bp, Artificial Sequence
  ENSG00000171443_7 (sequence is synthesized)
ccggcctgacccacacccccggccatcgctccctgggccaggtttagagcagggagtttggctggtgctgggcctgagccagggggccgggacacccttgtttccggtggtcttcccgtt

SEQ ID NO: 575956 - DNA, 120 bp, Artificial Sequence
  ENSG00000171443_8 (sequence is synthesized)
gtgggagcaggtggagggtggagacctaaactttggggtccagctgccttcagcccccctcccccagactaacagacccttggaggcaggggctgtggaaataaatctctgcctgctggc

SEQ ID NO: 575957 - DNA, 120 bp, Artificial Sequence
  ENSG00000171443_9 (sequence is synthesized)
agggaagtgcctgtttatcagctgatacaagatcatctcactgttttacccaccagcatagctaaaattgtgtatctggatgaatgtcaaacacacctttgtcaagagacttggagagag

SEQ ID NO: 575958 - DNA, 120 bp, Artificial Sequence
  ENSG00000171444_0 (sequence is synthesized)
gtactcctcctcccaagtagggagcgggcgcatgatggcggccgcggcggcagcggctgcggggagctccagcagcggcggcggcggcggcggcagcggcagcagcagcagcagcagcga

SEQ ID NO: 575959 - DNA, 120 bp, Artificial Sequence
  ENSG00000171444_1 (sequence is synthesized)
agcagcgacacgtccagcaccggcgaggaggagaggatgcggcgcctcttccagacgtgcgacggcgacggggacggatacatcagcagaaatgacttgctaatggtctgtcgccagctg

SEQ ID NO: 575960 - DNA, 120 bp, Artificial Sequence
  ENSG00000171444_2 (sequence is synthesized)
aatatggaagagtctgtggctgagatcatgaaccagttgggagcagatgaaaatgggaagatttcctttcaggatttcacaagatgccgcatgcagcttgttcgagaaattaggaaggag

SEQ ID NO: 575961 - DNA, 120 bp, Artificial Sequence
  ENSG00000171444_3 (sequence is synthesized)
gaagtagatctttctgcaaagtcagacaactcctgtacaaagaagctgagggatagaattgcttcctggcccacgagcagtgacaacagtttgggtgccttatcagcagccagggagagc

SEQ ID NO: 575962 - DNA, 120 bp, Artificial Sequence
  ENSG00000171444_4 (sequence is synthesized)
tgggaatacgactctggtgccagggacctccagagcccggatgtgcagagccagtcagccctccagaagctgctcgagtatggcggaagctctttgcatcagcaggctgctctccacaaa

SEQ ID NO: 575963 - DNA, 120 bp, Artificial Sequence
  ENSG00000171444_5 (sequence is synthesized)
ctgctcacacagtccccgcacattggcaactctgtaggaggaagctatctagagctggccaacacactccattcagcagccctggcatcactaaagggagatatagtggaacttaataaa

SEQ ID NO: 575964 - DNA, 120 bp, Artificial Sequence
  ENSG00000171444_6 (sequence is synthesized)
cgtctccagcaaacagagagggaacgggaccttctggaaaagaaattggccaaggcacagtgcgagcagtcccacctcatgagagagcatgaggatgtccaggagcgaacgacacttcgc

SEQ ID NO: 575965 - DNA, 120 bp, Artificial Sequence
  ENSG00000171444_7 (sequence is synthesized)
tatgaggaacgcatcacagagctccacagcgtcattgcggagctcaacaagaagatagaccgtctgcaaggcaccaccatcagggaggaagatgagtactcagaactgcgatcagaactc

SEQ ID NO: 575966 - DNA, 120 bp, Artificial Sequence
  ENSG00000171444_8 (sequence is synthesized)
agccagagccaacacgaggtcaacgaggactctcgaagcatggaccaagaccagacctctgtctctatccccgaaaaccagtctaccatggttactgctgacatggacaactgcagtgac

SEQ ID NO: 575967 - DNA, 120 bp, Artificial Sequence
  ENSG00000171444_9 (sequence is synthesized)
ctgaactcagaactgcagagggtgctgacagggctggagaatgttgtctgcggcaggaagaagagcagctgcagcctctccgtggccgaggtggacaagcacattgagcagctcaccaca

SEQ ID NO: 575968 - DNA, 120 bp, Artificial Sequence
  ENSG00000171444_10 (sequence is synthesized)
gccagcgagcactgtgacctggctattaagacagtcgaggagattgagggggtgcttggccgggacctgtatcccaacctggctgaagagaggtctcggtgggagaaggagctggctggg

SEQ ID NO: 575969 - DNA, 120 bp, Artificial Sequence
  ENSG00000171444_11 (sequence is synthesized)
ctgagggaagagaatgagagcctgactgccatgctgtgcagcaaagaggaagaactgaaccggactaaggccaccatgaatgccatccgggaagagcgggaccggctccggaggagggtc

SEQ ID NO: 575970 - DNA, 120 bp, Artificial Sequence
  ENSG00000171444_12 (sequence is synthesized)
agagagcttcaaactcgactacagagcgtgcaggccacaggtccctccagccctggccgcctcacttccaccaaccgcccgattaaccccagcactggggagctgagcacaagcagcagc

SEQ ID NO: 575971 - DNA, 120 bp, Artificial Sequence
  ENSG00000171444_13 (sequence is synthesized)
agcaatgacattcccatcgccaagattgctgagagggtgaagctatcaaagacaaggtccgaatcgtcatcatctgatcggccagtcctgggctcagaaatcagtagcataggggtatcc

SEQ ID NO: 575972 - DNA, 120 bp, Artificial Sequence
  ENSG00000171444_14 (sequence is synthesized)
agcagtgtggctgaacacctggcccactcacttcaggactgctccaatatccaagagattttccaaacactctactcacacggatctgccatctcagaaagcaagattagagagtttgag

SEQ ID NO: 575973 - DNA, 120 bp, Artificial Sequence
  ENSG00000171444_15 (sequence is synthesized)
gtggaaacagaacggctgaatagccggattgagcacctcaaatcccaaaatgacctcctgaccataaccttggaggaatgtaaaagcaatgccgagaggatgagcatgctggtgggaaaa

SEQ ID NO: 575974 - DNA, 120 bp, Artificial Sequence
  ENSG00000171444_16 (sequence is synthesized)
tacgaatccaatgccacagcgctgaggctggccttgcagtacagcgagcagtgcatcgaagcctacgaactcctcctggcgctggcagagagtgagcagagcctcatcctggggcagttc

SEQ ID NO: 575975 - DNA, 120 bp, Artificial Sequence
  ENSG00000171444_17 (sequence is synthesized)
cgagcggcgggcgtggggtcctcccctggagaccagtcgggggatgaaaacatcactcagatgctcaagcgagctcatgactgccggaagacagctgagaacgctgccaaggccctgctc

SEQ ID NO: 575976 - DNA, 120 bp, Artificial Sequence
  ENSG00000171444_18 (sequence is synthesized)
atgaagctggacggcagctgtgggggagcctttgccgtggccggctgcagcgtgcagccctgggagagcctttcctccaacagccacaccagcacaaccagctccacagccagtagttgc

SEQ ID NO: 575977 - DNA, 120 bp, Artificial Sequence
  ENSG00000171444_19 (sequence is synthesized)
gacaccgagttcactaaagaagacgagcagaggctgaaggattatatccagcagctcaagaatgacagggctgcggtcaagctgaccatgctggagctggaaagcatccacatcgatcct

SEQ ID NO: 575978 - DNA, 120 bp, Artificial Sequence
  ENSG00000171444_20 (sequence is synthesized)
ctcagctatgacgtcaagcctcggggagacagccagaggctggatctggaaaacgcagtgcttatgcaggagctcatggccatgaaggaggagatggccgagttgaaggcccagctctac

SEQ ID NO: 575979 - DNA, 120 bp, Artificial Sequence
  ENSG00000171444_21 (sequence is synthesized)
ctactggagaaagagaagaaggccctggagctgaagctgagcacgcgggaggcccaggagcaggcctacctggtgcacattgagcacctgaagtccgaggtggaggagcagaaggagcag

SEQ ID NO: 575980 - DNA, 120 bp, Artificial Sequence
  ENSG00000171444_22 (sequence is synthesized)
cggatgcgatccctcagctccaccagcagcggcagcaaagacaaacctggcaaggagtgtgctgatgctgcctccccagctctgtccctagccgaactcaggacaacgtgcagcgagaat

SEQ ID NO: 575981 - DNA, 120 bp, Artificial Sequence
  ENSG00000171444_23 (sequence is synthesized)
gagctggctgcggagttcaccaacgccattcgtcgagaaaagaagttgaaggccagagttcaagagctggtgagtgccttggagagactcaccaagagcagtgaaatccgacatcagcaa

SEQ ID NO: 575982 - DNA, 120 bp, Artificial Sequence
  ENSG00000171444_24 (sequence is synthesized)
tctgcagagttcgtgaatgatctaaagcgggccaacagcaacctggtggctgcctatgagaaagcaaagaaaaagcatcaaaacaaactgaagaagttagagtcgcagatgatggccatg

SEQ ID NO: 575983 - DNA, 120 bp, Artificial Sequence
  ENSG00000171444_25 (sequence is synthesized)
gtggagagacatgagacccaagtgaggatgctcaagcaaagaatagctctgctagaggaggagaactccaggccacacaccaatgaaacttcgctttaatcagcactcacgcaccggagt

SEQ ID NO: 575984 - DNA, 120 bp, Artificial Sequence
  ENSG00000171444_26 (sequence is synthesized)
tctgcccatgggaagtaaactgcagcaggccactggggacagaagggcccatgtacttgttgggaggaggaggaaagggaaggctggcaggtaggtcggcacttggacaatggagtgccc

SEQ ID NO: 575985 - DNA, 120 bp, Artificial Sequence
  ENSG00000171444_27 (sequence is synthesized)
caactcaacccttggggcgactggccatggtgacattgtggactgtatccagaggtgcccgctcttccctcctgggcccacaacagcgtgtaaacacatgttctgtgcctgctcagcaga

SEQ ID NO: 575986 - DNA, 120 bp, Artificial Sequence
  ENSG00000171444_28 (sequence is synthesized)
gcctcgtttctgctttcagcactcactctccccctcctcttctggtctggcggctgtgcatcagtgggatcccagacatttgtttctgtaagattttccattgtatcctctttttggtag

SEQ ID NO: 575987 - DNA, 120 bp, Artificial Sequence
  ENSG00000171444_29 (sequence is synthesized)
atgctgggctcatcttctagaatctcgtttctcctctttcctcctgcttcatgggaaaacagacctgtgtgtgcctccagcatttaaaaggactgctgatttgtttactacagcaaggct

SEQ ID NO: 575988 - DNA, 120 bp, Artificial Sequence
  ENSG00000171444_30 (sequence is synthesized)
ttggtttccaagtcccgggtctcaactttaagatagaggcggccataagaggtgatctctgggagttataggtcatgggaagagcgtagacaggtgttacttacagtcccagatacacta

SEQ ID NO: 575989 - DNA, 120 bp, Artificial Sequence
  ENSG00000171444_31 (sequence is synthesized)
aagttacaaacagaccaccaccaggactgtgcctgaacaattttgtattgagagaataaaaacttccttcaatcttcattttggaggcagggctgggaagggagcgctctcttgattctg

SEQ ID NO: 575990 - DNA, 120 bp, Artificial Sequence
  ENSG00000171444_32 (sequence is synthesized)
ggatttctccctctcagtggagccttattaatatccaagacttagagctgggaatctttttgatacctgtagtggaactaaaattctgtcaggggtttcttcaagagctgagaaacatta

SEQ ID NO: 575991 - DNA, 120 bp, Artificial Sequence
  ENSG00000171444_33 (sequence is synthesized)
ttagcacttcccgccccagggcactacataattgctgttctgctgaatcaaatctcttccacatgggtgcatttgtagctctggacctgtctctacctaaggacaagacactgaggagat

SEQ ID NO: 575992 - DNA, 120 bp, Artificial Sequence
  ENSG00000171444_34 (sequence is synthesized)
aaacttatcacgcctacttaagagtgctgtgtaacccccagttcaagacttagctcctgttgtcatgacggggacagagtgagggaatggtagttaaggcttcttttttgcccccagata

SEQ ID NO: 575993 - DNA, 120 bp, Artificial Sequence
  ENSG00000171444_35 (sequence is synthesized)
catggtgatggttagcatatggtgcttaaaaggttaaatttcaagcaaaatgcttacagggctaggcagtaccaaagtaactgaattatttcaggaaggtcttcaatcttaaaacaaatt

SEQ ID NO: 575994 - DNA, 120 bp, Artificial Sequence
  ENSG00000171444_36 (sequence is synthesized)
cattattctttttcagttttacctcttctctctcagttctacactgatacacttgaaggaccatttactgtttttttctgtagcaccagagaatccatccaaagttccctatgaaaaatg

SEQ ID NO: 575995 - DNA, 120 bp, Artificial Sequence
  ENSG00000171444_37 (sequence is synthesized)
tgttccattgccatagctgactacaaattaaagttgaggaggtttctgcatagagtctttatgtccataagctacgggtaggtctattttcagagcatgatacaaattccacagccttct

SEQ ID NO: 575996 - DNA, 120 bp, Artificial Sequence
  ENSG00000171444_38 (sequence is synthesized)
gttcgctggaggatactccagccaccagttcggagggcagacagctgtatcctaaaagcaaccactgagaggccagcagtgaggctgcccatctccaaaacgaaacaacagatcaactgg

SEQ ID NO: 575997 - DNA, 120 bp, Artificial Sequence
  ENSG00000171444_39 (sequence is synthesized)
tatcagtctagaaggaccagctttggggtgctttgatcactatgaaaatgttcactggtttctgtcaatcatttggtcaaagttagttcctgtgattttttttttttttttttgagatgg

SEQ ID NO: 575998 - DNA, 120 bp, Artificial Sequence
  ENSG00000171444_40 (sequence is synthesized)
attcctgtgattttttagaatttttcacttttcatataaagttgcattttatcatgaggaaaatgttttggctgaaaaacatatgccccaaaaaaaaaaaaatcagttttcactattttt

SEQ ID NO: 575999 - DNA, 120 bp, Artificial Sequence
  ENSG00000171444_41 (sequence is synthesized)
ccagcttgcctagggaaacgtcctcccctgagcaaagtgggatgtgcatggctcttttttgtgattaagcaggcatcaaatgggcagttttcattttcactgacacagaaacatgtggct

SEQ ID NO: 576000 - DNA, 120 bp, Artificial Sequence
  ENSG00000171444_42 (sequence is synthesized)
gaagcaggaataaaatcctgcctactgacttctgtctccattcttgctccaggtaaaatcagagaacctccccttctctgagaattcccccaggcagaggcggctccagctcctgttaag

SEQ ID NO: 576001 - DNA, 120 bp, Artificial Sequence
  ENSG00000171444_43 (sequence is synthesized)
ggccccagttttactcatgctacctgaccttagttttagtactttcaaatgtgatttgggtaaaaactattttgcaggcaaaagtgttaattttttataaatatgtataataaaaaagct

SEQ ID NO: 576002 - DNA, 120 bp, Artificial Sequence
  ENSG00000171444_44 (sequence is synthesized)
ataaaagtttttccttttcttgtatttttcaaatactccccaagacacaatccttgaaggtgaactaggtggcacttgattatgctaattgtgggagctactgaactaaactatactgat

SEQ ID NO: 576003 - DNA, 120 bp, Artificial Sequence
  ENSG00000171444_45 (sequence is synthesized)
taaattaaatgcttgcaggttcctgggtaattttcctttgtgaataacctggcgctacctgaatttttctctaacaaacatctccaatgagggtaaacaatgatcttgattctaatttat

SEQ ID NO: 576004 - DNA, 120 bp, Artificial Sequence
  ENSG00000171444_46 (sequence is synthesized)
atgaggttaaaaaccttcagatttcgtattttgaattgttctccctagtttcctcagtggttacccccttttagtcagtaaccatctctgttcagaattcagtctttggcttttgaagaa

SEQ ID NO: 576005 - DNA, 120 bp, Artificial Sequence
  ENSG00000171444_47 (sequence is synthesized)
atgggcacagagccaaaggacccatttcacagttcccttggaatatatttcccattgttggactgaggcaaacaaaaccaactgtgcaaatcacaagcaaaagagacttctgtccgtagt

SEQ ID NO: 576006 - DNA, 120 bp, Artificial Sequence
  ENSG00000171444_48 (sequence is synthesized)
tgcgagtgccatcagtgtgagcttaccagctacaaaaatctgtcatggactggggaacagtatgattccttattgaaactttcatcctcatcggctggcttgtcagcgttctgaagttaa

SEQ ID NO: 576007 - DNA, 120 bp, Artificial Sequence
  ENSG00000171444_49 (sequence is synthesized)
tatccatgctgcctgaaacaaatgttatgtttaactagcacttaacttttaaaattgcttaattctcctttcagatgcatgcactaagtcttctctgagcctgcagcaatattttagagg

SEQ ID NO: 576008 - DNA, 120 bp, Artificial Sequence
  ENSG00000171444_50 (sequence is synthesized)
gacctcttctaagtcagagccttgacattctactccaaaaggaagtccaaattagagcccataggctttttcttaaaagctgttaaggagtagtaaagaaagttaccactctaaggaaaa

SEQ ID NO: 576009 - DNA, 120 bp, Artificial Sequence
  ENSG00000171444_51 (sequence is synthesized)
catgaaactatctgaaagtcttctggttcctaactggatacagattagattattttaaatgagaaaaaagtgcaccgtagttacccgatcaagattggactgcctgtgtccctggcatga

SEQ ID NO: 576010 - DNA, 120 bp, Artificial Sequence
  ENSG00000171444_52 (sequence is synthesized)
attaaagaacctccatagttgcttgttcccttctgaaggtgtttcctatggcccacgagaattataaagcaatcactttttaagtctatcagtcaaccttaatagctctcaagagtttcg

SEQ ID NO: 576011 - DNA, 120 bp, Artificial Sequence
  ENSG00000171444_53 (sequence is synthesized)
attatcaagctttaaagtgataacatatcaagatgactattaaaaaataaacatctctgaaagtgtcctttcctccataaggctttaaacaatttgcaaattcttaattgggagtatgtc

SEQ ID NO: 576012 - DNA, 120 bp, Artificial Sequence
  ENSG00000171444_54 (sequence is synthesized)
ccaatcattctattaaactatttacagctctacctacttctagattcagcaaacagagctactagttagagtattttgagagccaaaatagtaagagacttctgtaatggttgagatttc

SEQ ID NO: 576013 - DNA, 120 bp, Artificial Sequence
  ENSG00000171444_55 (sequence is synthesized)
tgcactgaccttaattagggtaccgccatagggctaccaaagtttttagtgagggctggggaggtggagcataagtaacattttttttctgcagaaggtgatggctttgtagaacactat

SEQ ID NO: 576014 - DNA, 120 bp, Artificial Sequence
  ENSG00000171444_56 (sequence is synthesized)
aaaatttttcaggaaaacatacagcaaattttcttatccagtgggaacagcctatttgacaaggaatgatatacaagtttgattcacctttgagcactcttatagagtttacagaagagg

SEQ ID NO: 576015 - DNA, 120 bp, Artificial Sequence
  ENSG00000171444_57 (sequence is synthesized)
cgtaactggttacaaaacaaaagttacgccttcactatccagttcttaaagtttatccacatcctacaaatcttatgttcatgtaggtcaggttaaagtaagctccaaacttgtggcctt

SEQ ID NO: 576016 - DNA, 120 bp, Artificial Sequence
  ENSG00000171444_58 (sequence is synthesized)
cagaagcatctcctgtttaacacacctgaaattactctaacttaatacatttgtattctctaagaaataatgctgactgctgtcaccacagcatcactgatctctcagtggctgttaaaa

SEQ ID NO: 576017 - DNA, 120 bp, Artificial Sequence
  ENSG00000171444_59 (sequence is synthesized)
tataaacaagtggaaaaaaagtatacaagttgatagcagctgttcatgtattcttgttttgctaatacctgtgtagagaaagacagtttcacatgcagatcaccatacatttttgcttaa

SEQ ID NO: 576018 - DNA, 120 bp, Artificial Sequence
  ENSG00000171444_60 (sequence is synthesized)
aggttacactgggtaaactgtttgtttatcacattacatctgggtgagattttgcatgtgaccaagaggaagaaatcattcagtcccggaaatagcaactgctatgtaaaaccacatcct

SEQ ID NO: 576019 - DNA, 120 bp, Artificial Sequence
  ENSG00000171444_61 (sequence is synthesized)
tgactagtacttcatctttccacagtcatccatctgctaatcaggtgaaatatcagctcagcagaacaaagcaagttatacacaaatttcccccacattcacactgatgccgtacttagt

SEQ ID NO: 576020 - DNA, 120 bp, Artificial Sequence
  ENSG00000171444_62 (sequence is synthesized)
aattctggttctaccattcccttttgcactttttgcaagtcaaattcatgtggaaaaatgttctgtttgtagaactcatagtattcacttatagtgctcatgtcaggaatggcaagtgag

SEQ ID NO: 576021 - DNA, 120 bp, Artificial Sequence
  ENSG00000171444_63 (sequence is synthesized)
taagagcccctgataatctgcttttgttagaacgtaatgcaaagataataaaacatgtccacttcttttctagttctaatcagtttttagacatcaagatttatttactttgcatgagat

SEQ ID NO: 576022 - DNA, 120 bp, Artificial Sequence
  ENSG00000171444_64 (sequence is synthesized)
ttgtttcctattatttgaatatgtgctatacacttgaattagaaaaacctgcttgaatgtattgtcagttattaaagcacatgtgactaagtttgcatttgtcagtattgttctactgtt

SEQ ID NO: 576023 - DNA, 120 bp, Artificial Sequence
  ENSG00000171444_65 (sequence is synthesized)
tgtactgaaagtctcattttaaaattgctacttaacactgtactataccttgtaattttttagattctccacttgtattctttaaatgtttccagatgcctttagttttagctgctgtaa

SEQ ID NO: 576024 - DNA, 120 bp, Artificial Sequence
  ENSG00000171444_66 (sequence is synthesized)
tagctgctgtaaaatagctactttgcgttatttgatatagaattgttttttaaaaactccatttatttatacagagacatttataatattttacaaacattcttatattctgaataaata

SEQ ID NO: 576025 - DNA, 120 bp, Artificial Sequence
  ENSG00000171444_67 (sequence is synthesized)
agaaaccacttacaactccagacgattcgaaggggaaacttcggcgtgaagtgcagctccgctccggctccctctagctttctttccttctctggaatccgaggcgcggatcttcctcgc

SEQ ID NO: 576026 - DNA, 120 bp, Artificial Sequence
  ENSG00000171444_68 (sequence is synthesized)
cccaccgccctagttttttcgggagctcgccggtgccctctagggtgtcggctcgtgctgggaagtgccctccatcctggtaatggggggcggcgaggcaccgtaggagtggcgaggcgg

SEQ ID NO: 576027 - DNA, 120 bp, Artificial Sequence
  ENSG00000171444_69 (sequence is synthesized)
ctgggtgcgcgcgggagggtccccgcgcgggctccgccgctgccgcagctgcgagcgcgccgcgccaccgagcctcctgcagcaatggctcgtccgtgaaacgcgagccacggctgctct

SEQ ID NO: 576028 - DNA, 120 bp, Artificial Sequence
  ENSG00000171444_70 (sequence is synthesized)
ctcgtccgtgaaacgcgagccacggctgctctttttaagagtgcctgcatcctccgtttgcgcttcgcaactgtcctgggtgaaaatggctgtctagactaaaatgtggcagaagggacc

SEQ ID NO: 576029 - DNA, 120 bp, Artificial Sequence
  ENSG00000171444_71 (sequence is synthesized)
aagcagtggatattgagcctgtgaagtccaactcttaagctccgagacctgggggactgagagcccagctctgaaaagtgcatcatgaattccggagttgccatgaaatatggaaacgac

SEQ ID NO: 576030 - DNA, 120 bp, Artificial Sequence
  ENSG00000171444_72 (sequence is synthesized)
atactgaacccttatatattctacgttttcccctatacatacatacctgtgttgaagtttaatttataaattaggcacagtaaaagattaacaactaataaaatattaatagaacaatta

SEQ ID NO: 576031 - DNA, 120 bp, Artificial Sequence
  ENSG00000171444_73 (sequence is synthesized)
gtctctttcctgttatgaagtccttcttgaaagtagttcgaaattgctaaggtatagaggtaagatttaaaaaaaaaaagcaaacacttttctctggaatcttaaatctgactggttgat

SEQ ID NO: 576032 - DNA, 120 bp, Artificial Sequence
  ENSG00000171444_74 (sequence is synthesized)
ttcttactaaagaaactcaagatgtggctgctttgagtgaaagacaagagaattcagaaaatgaccatcatctgaaactctttaataaaaagagctttgcattggctccaagtctcagag

SEQ ID NO: 576033 - DNA, 120 bp, Artificial Sequence
  ENSG00000171444_75 (sequence is synthesized)
gcagtgcctgtgaggttaggctggctggtgttgaactttgaaatgtcaggctccattgccatcccattacctgaatgagtccctcatggtaagcaaaacagacagcatttgttgccctgt

SEQ ID NO: 576034 - DNA, 120 bp, Artificial Sequence
  ENSG00000171444_76 (sequence is synthesized)
ttttctatatataatatctgcactcaacagatattctctgtttttctgtatttttaaagggaaattggaaactatgggtagagatagagacctcttttgagggatttgggtttagtaaaa

SEQ ID NO: 576035 - DNA, 120 bp, Artificial Sequence
  ENSG00000171444_77 (sequence is synthesized)
agcccgtctaggggggcttccctggcatgctgaagcataggaagatgctgcagtgtgctcctctactgtgatctgatgcagagttgccacttctagtcacactccacaaaggaagaatgt

SEQ ID NO: 576036 - DNA, 120 bp, Artificial Sequence
  ENSG00000171444_78 (sequence is synthesized)
gcagcaaagacaaacctggcaaggtagggccggagtggcttggggacacccttaggctcagtgactgcccagtgactgcccagtgaccactggccacacctcaccgccctgctgcctcag

SEQ ID NO: 576037 - DNA, 120 bp, Artificial Sequence
  ENSG00000171444_79 (sequence is synthesized)
ttcttgtatttgcataggaaatgcaggccattcgtaggtatctaagaaggtgacattttgagtgtaatgaaaccaggtctacattttagaaataccaaatctcactttatgtaatagttg

SEQ ID NO: 576038 - DNA, 120 bp, Artificial Sequence
  ENSG00000171444_80 (sequence is synthesized)
ggcgagaccaaccccggactgtgcctccaccacacccatccccacacctcttgggcaaggaggaccagagcacatgtcaagctccattcagcagccctggcatcactaaagggagatata

SEQ ID NO: 576039 - DNA, 120 bp, Artificial Sequence
  ENSG00000171444_81 (sequence is synthesized)
cgggcggtcggagaaggtctgccgggagtacacctgccctctgcctgaagcgtccccaagtgtcccgggcccgcgtcgttgccggatgcacaatgctgacacccttcccgggggcttcca

SEQ ID NO: 576040 - DNA, 120 bp, Artificial Sequence
  ENSG00000171444_82 (sequence is synthesized)
gtgtattctgcctcctcttgtgttcccgttgccacccttagctccctgactcttccagccaccttcccctcctccctcttccctgaggtgcctcctcgggcgattccagagcgcccatct

SEQ ID NO: 576041 - DNA, 120 bp, Artificial Sequence
  ENSG00000171444_83 (sequence is synthesized)
tcccagtccgggcaaaacccggagaggtggaatccctcgcccggagcgccccggcggccactgggcatgctccgttgtcaggcaagttcggggctgcaggcagcttgcgcgccgcgcgga

SEQ ID NO: 576042 - DNA, 120 bp, Artificial Sequence
  ENSG00000171444_84 (sequence is synthesized)
accccactcatggtgcctgcccatcctgtggatcctccatcttttgaaaaagagctctgaatcttgtcatacttaaaaacttttggaatctaaaagtaggcacatgacagaaaaatccta

SEQ ID NO: 576043 - DNA, 120 bp, Artificial Sequence
  ENSG00000171446_0 (sequence is synthesized)
aggccgttcaccatcagagcatcaccgcagaaacaaaggctccagcctccggacaccatgtctgtgcgcttttcttctacctccaggagacttggctcttgcgggggcactggctctgtg

SEQ ID NO: 576044 - DNA, 120 bp, Artificial Sequence
  ENSG00000171446_1 (sequence is synthesized)
aggctctctagtgggggagcaggctttggggctggaaacacatgcggtgtgccaggcattggaagtggcttctcttgtgcttttgggggcagctcatctgcaggaggctatggcggaggt

SEQ ID NO: 576045 - DNA, 120 bp, Artificial Sequence
  ENSG00000171446_2 (sequence is synthesized)
ctgggcgggggaagtgcttcctgtgctgccttcacagggaatgagcacggcctcctctctggcaatgagaaggtgaccatgcagaacctcaacgaccgcttggcctcctacctggagaat

SEQ ID NO: 576046 - DNA, 120 bp, Artificial Sequence
  ENSG00000171446_3 (sequence is synthesized)
gttcgagccctagaggaggccaacgctgacttggagcagaagatcaaggggtggtatgagaaatttggacctggttcttgccgtggccttgatcatgattacagcagatatttcccaatt

SEQ ID NO: 576047 - DNA, 120 bp, Artificial Sequence
  ENSG00000171446_4 (sequence is synthesized)
attgacgaacttaagaaccagataatttctgcaactaccagtaatgcccatgttgtcctgcaaaatgataatgcaagactaacagctgatgacttcagactaaagtttgaaaacgagcta

SEQ ID NO: 576048 - DNA, 120 bp, Artificial Sequence
  ENSG00000171446_5 (sequence is synthesized)
gcgcttcaccagagcgtggaggcggacatcaatggtttgcgaagagtcctggatgagctgaccttgtgcagaacggacctggagatccagctggaaactctcagtgaggagctcgcttac

SEQ ID NO: 576049 - DNA, 120 bp, Artificial Sequence
  ENSG00000171446_6 (sequence is synthesized)
gatgaacgcggcccccggggtagacctcacggttctgctgaacaatatgcgagctgagtacgaagccctcgcagagcagaaccgcagggacgcggaggcctggttcaacgaaaagagcgc

SEQ ID NO: 576050 - DNA, 120 bp, Artificial Sequence
  ENSG00000171446_7 (sequence is synthesized)
ctcgctgcagcagcagatctctgacgacgctggcgccaccacctcagcccggaatgagcttatcgagatgaaacgcactcttcaaacccttgagattgaacttcagtccctcttagcaac

SEQ ID NO: 576051 - DNA, 120 bp, Artificial Sequence
  ENSG00000171446_8 (sequence is synthesized)
gaaacactccctggagtgctccttgacagagaccgagagtaactactgtgcacagctggcacagatccaggctcagatcggggccctggaggagcagctgcaccaggtcagaaccgagac

SEQ ID NO: 576052 - DNA, 120 bp, Artificial Sequence
  ENSG00000171446_9 (sequence is synthesized)
cgagggccagaagctcgagtatgagcagctccttgacatcaaggtccacctggaaaaagaaattgagacctactgcctcctgatagatggagaagatggctcctgttctaaatcaaaagg

SEQ ID NO: 576053 - DNA, 120 bp, Artificial Sequence
  ENSG00000171446_10 (sequence is synthesized)
ctatggaggcccaggaaatcaaacaaaagattcatctaaaaccaccattgtcaaaacagttgttgaagagatagatcctcgtggcaaagttctctcatccagagttcacactgtggaaga

SEQ ID NO: 576054 - DNA, 120 bp, Artificial Sequence
  ENSG00000171446_11 (sequence is synthesized)
gaaatccaccaaagtcaacaacaagaatgaacagagggtgtcttcctgaactccagcctctgagacagaatggcccccaaattaaaataccaaaatgaagctagtttcctaaataagggt

SEQ ID NO: 576055 - DNA, 120 bp, Artificial Sequence
  ENSG00000171446_12 (sequence is synthesized)
ccccttatttttctgcttttcttccaatgaattaagacaagttatttttagaatagtaccatttctttggctttttctctatggtggtgtttcaataaaagttcttcctgttgcaagtca

SEQ ID NO: 576056 - DNA, 120 bp, Artificial Sequence
  ENSG00000171446_13 (sequence is synthesized)
tgcaggggagggatctttcagtctgtgccctatgaagagacaatttcatcttttttagcacacctgggcatctgagggacattcagcaccagctgtgtcattctcaaatagaaaagtagt

SEQ ID NO: 576057 - DNA, 120 bp, Artificial Sequence
  ENSG00000171448_0 (sequence is synthesized)
ctttcccttccctgtgactggagtggggagcctgaggatgcccctgggaccgcctcataggaccccagctgagggcccagcagttggcttgggggcctgactctggcatcttataagaag

SEQ ID NO: 576058 - DNA, 120 bp, Artificial Sequence
  ENSG00000171448_1 (sequence is synthesized)
tgccagaggtgaggccctaagaaaacgagcctcgggagccagcccaagaccaggcattcagtgccagtctttgagaaccactgtctgccaaaatgtctgaaagatcagatctccttcact

SEQ ID NO: 576059 - DNA, 120 bp, Artificial Sequence
  ENSG00000171448_2 (sequence is synthesized)
tcaagtttgaaaattatggagattcaatgttacaaaaaatgaacaaattaagagaagagaataaattttgtgatgttacagttctcatagatgatattgaggtacagggacataaaattg

SEQ ID NO: 576060 - DNA, 120 bp, Artificial Sequence
  ENSG00000171448_3 (sequence is synthesized)
tgtttgctgcaggttcccccttcttaagagaccaatttttactgaatgattccagagaggtgaaaatctccatattacagagttccgaagtggggagacaattgctcttatcctgttata

SEQ ID NO: 576061 - DNA, 120 bp, Artificial Sequence
  ENSG00000171448_4 (sequence is synthesized)
gtggtgtgctggaattccctgagatggaactggtaaattacttgactgctgcaagttttcttcagatgagccacattgtagaacggtgcacacaggccctgtggaagtttataaagccaa

SEQ ID NO: 576062 - DNA, 120 bp, Artificial Sequence
  ENSG00000171448_5 (sequence is synthesized)
aacaaccaatggatagtaaagagggatgtgaaccacagagtgcttctccccagtcaaaagaacagcagggagatgccagaggctccccaaagcaggactcaccttgtattcatccatctg

SEQ ID NO: 576063 - DNA, 120 bp, Artificial Sequence
  ENSG00000171448_6 (sequence is synthesized)
aagacagtatggatatggaggacagtgatattcagattgttaaggtagaatctattggggatgtatcagaggttagaagtaaaaaagatcagaaccagtttatttcttctgaacccactg

SEQ ID NO: 576064 - DNA, 120 bp, Artificial Sequence
  ENSG00000171448_7 (sequence is synthesized)
ctttacattcatcagagccccagcactccctgataaattcaactgtggaaaacagagtaagtgaaatagaacaaaaccatctccacaattatgccctttcttatacaggcagtgataaca

SEQ ID NO: 576065 - DNA, 120 bp, Artificial Sequence
  ENSG00000171448_8 (sequence is synthesized)
ggcctcaaaagatgtctttggccctaatattcgaggtgtagacaaaggcctacagtggcatcaccagtgcccaaagtgtaccagggtgtttcgtcacctggagaactacgccaaccattt

SEQ ID NO: 576066 - DNA, 120 bp, Artificial Sequence
  ENSG00000171448_9 (sequence is synthesized)
aaaaatgcacaaactctttatgtgtctactctgcggcaagactttcactcagaaaggcaaccttcatcgacacatgcgtgtgcatgccggaattaaacctttccagtgtaaaatctgtgg

SEQ ID NO: 576067 - DNA, 120 bp, Artificial Sequence
  ENSG00000171448_10 (sequence is synthesized)
gaaaaccttttctcagaagtgttccttacaggatcatcttaaccttcacagtggagataagccccataaatgtaactattgtgatatggtttttgcacataaaccagttttgaggaaaca

SEQ ID NO: 576068 - DNA, 120 bp, Artificial Sequence
  ENSG00000171448_11 (sequence is synthesized)
ccttaaacagctgcatggcaaaaacagctttgataatgccaatgagagaaatgtacaagacctcacagtggattttgattcttttgcatgtacaacagtcacagactctaaagggtgtca

SEQ ID NO: 576069 - DNA, 120 bp, Artificial Sequence
  ENSG00000171448_12 (sequence is synthesized)
gccacaacccgatgcaacacaggtcctggatgcaggtaaactggcccaagctgtcctgaacttaagaaatgatagtacttgtgtgaattgagtaggggcttcatgctcacaactcgaact

SEQ ID NO: 576070 - DNA, 120 bp, Artificial Sequence
  ENSG00000171448_13 (sequence is synthesized)
gactgacaatgtggcaatagtcttagtctttttaggagtgattttgctagtttgacttctccaaagcctctgtgtaggtggtagggagtgagtcaaagcactaatagaccaggcaactta

SEQ ID NO: 576071 - DNA, 120 bp, Artificial Sequence
  ENSG00000171448_14 (sequence is synthesized)
ccacttggagtggatttgccttacttttgccctctcccattttctgttttgagttatttatcttgtaaagtctgttttcctttcccaaggaataattccttttgtctacctaacattgac

SEQ ID NO: 576072 - DNA, 120 bp, Artificial Sequence
  ENSG00000171448_15 (sequence is synthesized)
ttatgtcttagactgacactgttttaggcttttcactaggcacattccgaaggtaccaacaagttaataacgtcacctactctccactaatagatgctatgctaagagaagtgaataatc

SEQ ID NO: 576073 - DNA, 120 bp, Artificial Sequence
  ENSG00000171448_16 (sequence is synthesized)
tttctttggtagaaaataggctgagatataaggtgatattgctattgacctgaaaatgtgatagaacttctggttgcctattgattattcctccatgtctgataaatgaatctgcttcct

SEQ ID NO: 576074 - DNA, 120 bp, Artificial Sequence
  ENSG00000171448_17 (sequence is synthesized)
tctctcttgaggaacacctgcaggcagatagttagggatgaccatgaggagcataatcaacagggatagaagtacacttatacaacagcacttacatgggcggtttctctggtagcatgt

SEQ ID NO: 576075 - DNA, 120 bp, Artificial Sequence
  ENSG00000171448_18 (sequence is synthesized)
atgcttataattaatgtgtaacttgttgatgcttttgagatcaggactgctccaggcacgctaaaaatgtgctaaagtatagtgggctctctaaaaagaggctatttgggagtctctgaa

SEQ ID NO: 576076 - DNA, 120 bp, Artificial Sequence
  ENSG00000171448_19 (sequence is synthesized)
ttttgtttcagagtttagccatcagaaaggtgagtttggccatcagagttttgtcctgtgcaccataaaagtctctgaattttcgtttcctcatgtaccttaatttctaaaacggatgat

SEQ ID NO: 576077 - DNA, 120 bp, Artificial Sequence
  ENSG00000171448_20 (sequence is synthesized)
aaaagttaggttggacacagaaggggcaatcaaatttctgtattcagatacctcttaaaggtacactgtgccaccttgctgcctttgattgcaaatacaaagttaattttcaaaaaggaa

SEQ ID NO: 576078 - DNA, 120 bp, Artificial Sequence
  ENSG00000171448_21 (sequence is synthesized)
aaacaaaacagctctttttcctaaaacacatgttgtacttcagacctaaaattctaagtcttatttgtttctcacccatgagttagatttaggtaatagtattagtagagtccttagaga

SEQ ID NO: 576079 - DNA, 120 bp, Artificial Sequence
  ENSG00000171448_22 (sequence is synthesized)
atcttaagaggtcatttactccacctctttcattttaaattggggtatccaaagcctgaagaggtggcctggccaatattgaccaaggtataactaaatatgagctagcatcttcttcct

SEQ ID NO: 576080 - DNA, 120 bp, Artificial Sequence
  ENSG00000171448_23 (sequence is synthesized)
tcttctcgctatcccttggctttaaaagatttagtacatgaagaataatgcattagcaaaaagctcctagtttgtgtttcccctttgtgtctccctgttggctttctgagacaacctgaa

SEQ ID NO: 576081 - DNA, 120 bp, Artificial Sequence
  ENSG00000171448_24 (sequence is synthesized)
ttttgccaacaaaatatcgcagagggatttatattaattattttttagttagatgaatattatattcttcccatccaagtgagtgatttgctaggtttgtttagggagggaaaaagcaag

SEQ ID NO: 576082 - DNA, 120 bp, Artificial Sequence
  ENSG00000171448_25 (sequence is synthesized)
aataatgtgagaagaatctaaatgcgaagttgattttgtgtggaaaactgtttattagtttccatcaggattttctgtttttatttttgagctatgagagtgcatgcagatttgaaaaat

SEQ ID NO: 576083 - DNA, 120 bp, Artificial Sequence
  ENSG00000171448_26 (sequence is synthesized)
taggcttgcatagtcagaggggatcttcaattgttatatttgatacgtttacatgtatcattgttatcatatgtaaattatcatcatgtgagtcagatgtgaagtatgatttttgtcttt

SEQ ID NO: 576084 - DNA, 120 bp, Artificial Sequence
  ENSG00000171448_27 (sequence is synthesized)
tgttcaaatatttaaaatgataatacagttgagtggtaagactaataggtaccttatgcctaacatcactcattatatggtctaatgatgcttcctagcattgtgatttttacatgatcc

SEQ ID NO: 576085 - DNA, 120 bp, Artificial Sequence
  ENSG00000171448_28 (sequence is synthesized)
agccaaagagtaccaattctatgcaatagtgagactctaccctgtcaaccaaacagcattttttggtattttctgtcaacatcatttcttcacagggaaatttcaagttggagtgcttcg

SEQ ID NO: 576086 - DNA, 120 bp, Artificial Sequence
  ENSG00000171448_29 (sequence is synthesized)
tttgctcacattcatgtcttgtttttgttactggtttgaagactaaaaggcacgggttcaaataagattggtctctttggttggagactatttctgggttcattcagttgttcaagaaac

SEQ ID NO: 576087 - DNA, 120 bp, Artificial Sequence
  ENSG00000171448_30 (sequence is synthesized)
attagttaagcacctactgttgctagacactatgctagatactgaggataatgaaggtaagattgatatagtccctgccctcatggagcttatagtctcatgtggtcttagtgaaacaaa

SEQ ID NO: 576088 - DNA, 120 bp, Artificial Sequence
  ENSG00000171448_31 (sequence is synthesized)
gtctcaatttgcttttatactagaaataataaagaaagctgccttgctgtattcgatcagttaaaatcagcaactttgtgcttttgtatcagtaaaacatttagttctcaccttttgaaa

SEQ ID NO: 576089 - DNA, 120 bp, Artificial Sequence
  ENSG00000171448_32 (sequence is synthesized)
atgcaaaccactgaagtgatttacagtctcctccatttttggctggagaggtgttctgtttctgtgagacatttttctaatttttgtggaacttcactttcctccttctttgcttatacg

SEQ ID NO: 576090 - DNA, 120 bp, Artificial Sequence
  ENSG00000171448_33 (sequence is synthesized)
tgtttgttagattatattgcaaagaagtcaagttactgatatccagtattttacagaggaagatgactttcaaaactagtcatatttctgtagaggaggaagatttttaaaacctttatc

SEQ ID NO: 576091 - DNA, 120 bp, Artificial Sequence
  ENSG00000171448_34 (sequence is synthesized)
attcagcatttgtattttatggatccccaggagaactaaaaaggagatgactctctaccatagtttggtttaaaaaaaaattactctgtcagttatttatttattatttaatactaaact

SEQ ID NO: 576092 - DNA, 120 bp, Artificial Sequence
  ENSG00000171448_35 (sequence is synthesized)
ccaaactgaagtggctctgaggtaaatcagatatgattttaatttaagtttctttattagcagatctataaatggaaggtgaccaatgtcactgcttctaaaatactgtcctaaacaacc

SEQ ID NO: 576093 - DNA, 120 bp, Artificial Sequence
  ENSG00000171448_36 (sequence is synthesized)
cagaagattttatttcagctcatgaatagctgttctaaatctgttgtatgttagacatactatgaactacctcttcacttattatggggaagtttccttaataaaagtgtgacgattaaa

SEQ ID NO: 576094 - DNA, 120 bp, Artificial Sequence
  ENSG00000171450_0 (sequence is synthesized)
ccgctggggcctgggcgccggccccgctctgcaggatgggcacagtgctgtctctttcgcctgcctcctcggccaagggccggaggcccggcgggctgcccgaggagaagaagaaggcgc

SEQ ID NO: 576095 - DNA, 120 bp, Artificial Sequence
  ENSG00000171450_1 (sequence is synthesized)
cgcccgcgggggacgaggcgctggggggctacggggcgccgccagtgggcaagggcggcaaaggcgagagccgactcaagcggccgtccgtgctcatctcggcgctcacctggaagcgcc

SEQ ID NO: 576096 - DNA, 120 bp, Artificial Sequence
  ENSG00000171450_2 (sequence is synthesized)
tggtggccgcgtccgccaagaagaagaaaggcagcaagaaggtgacacccaagccggcatccacgggccccgaccccctggtccagcaacgcaaccgcgagaaccttctccgcaagggcc

SEQ ID NO: 576097 - DNA, 120 bp, Artificial Sequence
  ENSG00000171450_3 (sequence is synthesized)
aaccgcgagaaccttctccgcaagggccgggatccccccgacggcggcggcaccgccaagcccctggcggtgccagtgcccaccgtgcccgcggctgccgccacctgcgagccaccgtcg

SEQ ID NO: 576098 - DNA, 120 bp, Artificial Sequence
  ENSG00000171450_4 (sequence is synthesized)
gcctcccccagccccgcaggtggcgccgccggtgcctggcggctcgccgcggcgggtcatcgtgcaggcgtccaccggcgagctgctgcgctgtctgggcgacttcgtgtgccgacgctg

SEQ ID NO: 576099 - DNA, 120 bp, Artificial Sequence
  ENSG00000171450_5 (sequence is synthesized)
gtctgggcgacttcgtgtgccgacgctgctatcgcctcaaggagctgagcccgggcgagctggtgggctggttccgcggtgtggaccgctcgctgctgctgcagggctggcaagaccagg

SEQ ID NO: 576100 - DNA, 120 bp, Artificial Sequence
  ENSG00000171450_6 (sequence is synthesized)
ccttcattacgcctgcaaacctggtgttcgtgtacctgctgtgccgcgagtcgctgcgtggggacgagctggcgtcggccgccgagctgcaggccgccttcctcacctgcctctacctcg

SEQ ID NO: 576101 - DNA, 120 bp, Artificial Sequence
  ENSG00000171450_7 (sequence is synthesized)
cctactcctacatgggcaacgagatctcctacccactcaagcccttcctcgtggagcccgacaaggagcgcttctggcagcgctgcctgcgcctcatccagcggctcagcccgcagatgc

SEQ ID NO: 576102 - DNA, 120 bp, Artificial Sequence
  ENSG00000171450_8 (sequence is synthesized)
tgcggctcaacgccgacccccacttcttcacgcaggtctttcaagacctcaagaacgagggcgaggccgccgccagcggcgggggcccaccgagcgggggcgcgcccgccgcctcctcgg

SEQ ID NO: 576103 - DNA, 120 bp, Artificial Sequence
  ENSG00000171450_9 (sequence is synthesized)
ccagcccctgacacacactcggaccccccgggaccacaaagccaccgccgctgttaccgccgctcagcgccccggctgggcggaggaggagacgcccatgcccctcaggggaaagtggag

SEQ ID NO: 576104 - DNA, 120 bp, Artificial Sequence
  ENSG00000171450_10 (sequence is synthesized)
accgggacaccagaggccgcggtgtttggatttgctgggcgtggagtggggacggaagatgagcgcgggaaaggcactccaacctcactcttcccgtctgtctgcgcccccatttctcca

SEQ ID NO: 576105 - DNA, 120 bp, Artificial Sequence
  ENSG00000171450_11 (sequence is synthesized)
tttctgccggggtctcccccttcccttcagcccattccccctcggttttatccatttccttgcctcctttttgtgtcttcatttttcctcctgtctgcattcctctctctctctctccct

SEQ ID NO: 576106 - DNA, 120 bp, Artificial Sequence
  ENSG00000171450_12 (sequence is synthesized)
ctctctcctgttcctctctttcttcctccctctccctgcctttccattttccgttccttgggtttgtgtgtctgcatctccatcttaccccttgcctgactgtaccccgtagacccctgt

SEQ ID NO: 576107 - DNA, 120 bp, Artificial Sequence
  ENSG00000171450_13 (sequence is synthesized)
ttctcctcctgcacctgtgtccccatctgcccttcttgttgctcctgtcatgtgtcaccatcttccctcctgtctgccttcttcctccacttgtgtcagcttgcatttttttattcctga

SEQ ID NO: 576108 - DNA, 120 bp, Artificial Sequence
  ENSG00000171450_14 (sequence is synthesized)
ctgagtcaccacacccctctcccctgatcaaagggaatattagtttttaatttggatcgactgaggtgccaggagaaactgcagtcccaggtatccagacagccaccaggatggtccctc

SEQ ID NO: 576109 - DNA, 120 bp, Artificial Sequence
  ENSG00000171450_15 (sequence is synthesized)
gccccacccccaccgcctctccccaccttttccaacgtgttgcatgctgggagctggggggtgtgggggaaggggctgccggcttctttcaggaggctgaggtttggaggcaaaatcaac

SEQ ID NO: 576110 - DNA, 120 bp, Artificial Sequence
  ENSG00000171450_16 (sequence is synthesized)
ctgggagaccaccccggccgcggcgcctcagtggacaggtgggaggaaaagaaaacttcttaccttggaggagggacatcccgcttccttatccttagcttttttgttgctcctccccac

SEQ ID NO: 576111 - DNA, 120 bp, Artificial Sequence
  ENSG00000171450_17 (sequence is synthesized)
tgccccttttaatttatttggttgtttgcggagggaggggggaggggggtaggctgggccgggaactgtccgaggtgctgagctggggcgggaccggaatcctcccggtagggtaccagg

SEQ ID NO: 576112 - DNA, 120 bp, Artificial Sequence
  ENSG00000171450_18 (sequence is synthesized)
gactgagttgggcctggggccgtgtccaaggtgccaatgatgcgggccgacagagcgggccgcactgtctgtctgtccgtctgtcccggaaagaactataaagcgctggaagcgcctgca

SEQ ID NO: 576113 - DNA, 120 bp, Artificial Sequence
  ENSG00000171451_0 (sequence is synthesized)
acagaggatcctcggccgcggcgacatcaccgcctgggcacgcgggcgctgctctggatacggcgccaccgagagaacccgccgcccgcgggtctctgtcctgcggtccgtggttgcccc

SEQ ID NO: 576114 - DNA, 120 bp, Artificial Sequence
  ENSG00000171451_1 (sequence is synthesized)
cacaagcgtccggcgtttcctgagggcgggcgtgtccgggccgtgcgggtcgcggggaccgagcgcggctgaggagaccgagctggggcagcgcctgccgtagcgcgggagacgacgcgg

SEQ ID NO: 576115 - DNA, 120 bp, Artificial Sequence
  ENSG00000171451_2 (sequence is synthesized)
gggtcttgcggagccccgcgggagcctggcccgccgtgcagagcagttttctggaactctccacctccgtctcccttggggcccagtgcggcgccgagcccccgtcgggatctgcctgag

SEQ ID NO: 576116 - DNA, 120 bp, Artificial Sequence
  ENSG00000171451_3 (sequence is synthesized)
aaaagtgtcatgaaaaaagagcagaagagagacctcactgttgctgaaaggggaattttctttccccgttggcggttacttcatgatcggacgagaagtatctaggtgactgaagatatt

SEQ ID NO: 576117 - DNA, 120 bp, Artificial Sequence
  ENSG00000171451_4 (sequence is synthesized)
ccatttttatgtttgtacacatgaagctgataaaagaagatgtgaacatgatttctctttgtcataataggctgatgagtaagtaagcctgaaaaatatttgaaatgaaggcaagaattt

SEQ ID NO: 576118 - DNA, 120 bp, Artificial Sequence
  ENSG00000171451_5 (sequence is synthesized)
tgaatttttaaaaaccaactaagactttgatcacttgttgaggatgtttctctctcataaatgaaagaaaaacgtattcacaagacaagaagtataaaaagttgagaggaatgacaactg

SEQ ID NO: 576119 - DNA, 120 bp, Artificial Sequence
  ENSG00000171451_6 (sequence is synthesized)
agtccactcactcgaagaatgtcagtacttcatcatcttctttgggcaaacatacacaaatgcatcatacatgtgtggtgagcttatcaccagtgatggttttctgtgctagaaatgact

SEQ ID NO: 576120 - DNA, 120 bp, Artificial Sequence
  ENSG00000171451_7 (sequence is synthesized)
cttaatttgaattttggagtgctttttctctttttttacaatgtgtgttccaactctttgtgttaaatagatttaagtaaaggaggtaaatgctaaattcatagtgttttttacctgtat

SEQ ID NO: 576121 - DNA, 120 bp, Artificial Sequence
  ENSG00000171451_8 (sequence is synthesized)
cacttccctgtgtattatggaaaaattagagattttaacgttattcaaagttttactggaagcaaaactgtgccagggacagagatatacaatttaagttttctctttttggcaactgca

SEQ ID NO: 576122 - DNA, 120 bp, Artificial Sequence
  ENSG00000171451_9 (sequence is synthesized)
cttgcttaaaatgtactgaatgtcagctggatttcacagcatatcagatttacagtctttgtcttatcaaggcctttactgtatgttttatactaaccagatgggaaacacattgagcat

SEQ ID NO: 576123 - DNA, 120 bp, Artificial Sequence
  ENSG00000171451_10 (sequence is synthesized)
catatctgacatgtatgcctaagggaggagctcccccatggatcatggcgttaatgtttacaggacatttactattcttagcattattgatgtttgctttctctacttttgaggaatctg

SEQ ID NO: 576124 - DNA, 120 bp, Artificial Sequence
  ENSG00000171451_11 (sequence is synthesized)
tgagcaattattccgaatgggcagttttcacagatgatatagatcagtttaaaacacagaaagtgcaagatttcagacccaaccaaaagctgaagaaaagtatgcttcatccaagtttat

SEQ ID NO: 576125 - DNA, 120 bp, Artificial Sequence
  ENSG00000171451_12 (sequence is synthesized)
attttgatgctggagaaatccaagcaatgagacaaaagtctcgtgcaagccatttgcatctttttagagctatcagaagtgcagtgacagttatgctgtccaacccaacatactacctac

SEQ ID NO: 576126 - DNA, 120 bp, Artificial Sequence
  ENSG00000171451_13 (sequence is synthesized)
ctccaccaaagcatgctgattttgctgccaagtggaatgaaatttatggtaacaatctgcctcctttagcattgtactgtttgttatgcccagaagacaaagttgcctttgaatttgtct

SEQ ID NO: 576127 - DNA, 120 bp, Artificial Sequence
  ENSG00000171451_14 (sequence is synthesized)
tggaatatatggacaggatggttggctacaaagactggctagtagagaatgcaccaggagatgaggttccaattggccattccttaacaggttttgccactgcctttgactttttatata

SEQ ID NO: 576128 - DNA, 120 bp, Artificial Sequence
  ENSG00000171451_15 (sequence is synthesized)
acttattagataatcatcgaagacaaaaatacctggaaaaaatatgggttattactgaggaaatgtacgagtattccaaggtccgctcatggggcaaacagcttctccataaccaccaag

SEQ ID NO: 576129 - DNA, 120 bp, Artificial Sequence
  ENSG00000171451_16 (sequence is synthesized)
ccactaatatgatagcattactcacaggggccttggtgactggagtagataaaggatctaaagcaaatatatggaaacaggctgtagtggatgtcatggaaaagacaatgtttctattga

SEQ ID NO: 576130 - DNA, 120 bp, Artificial Sequence
  ENSG00000171451_17 (sequence is synthesized)
atcatattgttgatggttctttggatgaaggtgtggcctatggaagctacacagctaaatccgtcacacagtatgtttttctggcccagcgccattttaatatcaacaacttggataata

SEQ ID NO: 576131 - DNA, 120 bp, Artificial Sequence
  ENSG00000171451_18 (sequence is synthesized)
actggttaaagatgcacttttggttctattatgccacccttttacctggcttccaaagaactgtgggtatagcagattccaattataattggttttatggtccagaaagccagctagttt

SEQ ID NO: 576132 - DNA, 120 bp, Artificial Sequence
  ENSG00000171451_19 (sequence is synthesized)
tcttggataagttcatcttaaagaatggagctggaaattggttagctcagcaaattagaaagcaccgacctaaagatggaccgatggttccttcaactgcccaaaggtggagtactcttc

SEQ ID NO: 576133 - DNA, 120 bp, Artificial Sequence
  ENSG00000171451_20 (sequence is synthesized)
acactgaatacatctggtatgatccccagctcacaccacagccacctgctgattatggtactgcaaaaatacacacattccctaactggggtgtggttacttatggggctgggttgccaa

SEQ ID NO: 576134 - DNA, 120 bp, Artificial Sequence
  ENSG00000171451_21 (sequence is synthesized)
acacacagaccaacacctttgtgtcttttaaatctgggaagctggggggacgagctgtgtatgacatagttcattttcagccatattcctggattgatgggtggagaagttttaacccag

SEQ ID NO: 576135 - DNA, 120 bp, Artificial Sequence
  ENSG00000171451_22 (sequence is synthesized)
gacatgagcatccagatcagaactcatttacttttgcccccaatggacaagtatttgtttctgaagctctctatggacccaagttgagccaccttaacaatgtattggtgtttgctccat

SEQ ID NO: 576136 - DNA, 120 bp, Artificial Sequence
  ENSG00000171451_23 (sequence is synthesized)
caccctcaagccagtgtaataagccctgggaaggtcaactgggagaatgtgcgcagtggcttaagtggactggcgaggaggttggtgatgcagctggggaaataatcactgcctctcaac

SEQ ID NO: 576137 - DNA, 120 bp, Artificial Sequence
  ENSG00000171451_24 (sequence is synthesized)
atggggaaatggtatttgtgagtggggaagccgtgtctgcttattcttcagcaatgagactgaaaagtgtatatcgtgctttgcttctcttaaattcccaaactctgctagttgttgatc

SEQ ID NO: 576138 - DNA, 120 bp, Artificial Sequence
  ENSG00000171451_25 (sequence is synthesized)
atattgagaggcaagaagattccccaataaattctgtcagtgccttctttcataatttggatattgattttaaatatatcccatataagtttatgaataggtataatggtgccatgatgg

SEQ ID NO: 576139 - DNA, 120 bp, Artificial Sequence
  ENSG00000171451_26 (sequence is synthesized)
atgtgtgggatgcacattacaaaatgttttggtttgatcatcatggcaatagtcccatggccagtatacaggaagcagagcaagctgctgaatttaaaaaacgatggactcaatttgtta

SEQ ID NO: 576140 - DNA, 120 bp, Artificial Sequence
  ENSG00000171451_27 (sequence is synthesized)
atgttacttttcagatggaacccacaatcacaagaattgcatatgtcttttatgggccatatatcaatgtctccagctgcagatttattgatagttccaatcctggacttcagatttctc

SEQ ID NO: 576141 - DNA, 120 bp, Artificial Sequence
  ENSG00000171451_28 (sequence is synthesized)
tcaatgtcaataatactgaacatgttgtttctattgtaactgattaccataacctgaagacaagattcaattatctgggattcggtggctttgccagtgtggctgatcaaggccaaataa

SEQ ID NO: 576142 - DNA, 120 bp, Artificial Sequence
  ENSG00000171451_29 (sequence is synthesized)
cccgatttggtttgggcactcaagcaatagtaaagcctgtaagacatgataggattattttcccctttggatttaaatttaatatagcagttggattaattttgtgcattagcttggtga

SEQ ID NO: 576143 - DNA, 120 bp, Artificial Sequence
  ENSG00000171451_30 (sequence is synthesized)
ttttaactttccaatggcgtttttacctttcttttagaaaactaatgcgatggatattaatacttgttattgccttgtggtttattgagcttttggatgtgtggagcacttgtagtcagc

SEQ ID NO: 576144 - DNA, 120 bp, Artificial Sequence
  ENSG00000171451_31 (sequence is synthesized)
ccatttgtgcaaaatggacaaggacagaggctgagggaagcaagaagtctttgtcttctgaagggcaccacatggatcttcctgatgttgtcattacctcacttcctggttcaggagctg

SEQ ID NO: 576145 - DNA, 120 bp, Artificial Sequence
  ENSG00000171451_32 (sequence is synthesized)
aaattctcaaacaactttttttcaacagtagtgattttctctacatcagggttcctacagcctacattgatattcctgaaactgagttggaaatcgactcatttgtagatgcttgtgaat

SEQ ID NO: 576146 - DNA, 120 bp, Artificial Sequence
  ENSG00000171451_33 (sequence is synthesized)
ggaaggtgtcagatatccgcagtgggcattttcgtttactccgaggctggttgcagtctttagtccaggacacaaaattacatttgcaaaacatccatctgcatgaacccaataggggta

SEQ ID NO: 576147 - DNA, 120 bp, Artificial Sequence
  ENSG00000171451_34 (sequence is synthesized)
aactggcccaatattttgcaatgaataaggacaaaaaaagaaaatttaaaaggagagagtctttgccagaacaaagaagtcaaatgaaaggcgcctttgatagagatgctgaatatatta

SEQ ID NO: 576148 - DNA, 120 bp, Artificial Sequence
  ENSG00000171451_35 (sequence is synthesized)
gggctttgaggagacacctggtttactatccaagtgcacgtcctgtgctcagtttaagcagtggaagctggacgttaaagcttcatttttttcaggaagttttaggagcttcgatgaggg

SEQ ID NO: 576149 - DNA, 120 bp, Artificial Sequence
  ENSG00000171451_36 (sequence is synthesized)
cattgtacatagtaagagaccctcgggcatggatttattcaatgttgtacaatagtaaaccaagtctttattctttgaagaatgtaccagagcatttagcaaaattgtttaaaatagagg

SEQ ID NO: 576150 - DNA, 120 bp, Artificial Sequence
  ENSG00000171451_37 (sequence is synthesized)
gaggtaaaggcaaatgtaacttaaattcgggttatgctttcgagtatgaaccattgaggaaagaattatcaaaatccaaatcaaatgcagtgtccctcttgtctcacttgtggctagcaa

SEQ ID NO: 576151 - DNA, 120 bp, Artificial Sequence
  ENSG00000171451_38 (sequence is synthesized)
acagatttgctgcctactagctaccagctggtcaagtttgaagatattgtgcattttcctcagaaaactactgaaaggatttttgcctttcttggaattcctttgtctcctgctagttta

SEQ ID NO: 576152 - DNA, 120 bp, Artificial Sequence
  ENSG00000171451_39 (sequence is synthesized)
aaccaaatattgtttgccacctctacaaaccttttttaccttccctatgaaggggaaatatcaccaactaatactaatgtttggaaacagaacttgcctagagatgaaattaaactaatt

SEQ ID NO: 576153 - DNA, 120 bp, Artificial Sequence
  ENSG00000171451_40 (sequence is synthesized)
gaaaacatctgctggactctgatggatcgcctaggatatccaaagtttatggactaaatgctgcaggtcagcagaaatttgcactaataatacttaccaacccactttgtggatatgaat

SEQ ID NO: 576154 - DNA, 120 bp, Artificial Sequence
  ENSG00000171451_41 (sequence is synthesized)
cagaagagtttgtttattctttagtgtgtgtgtgtgtgtgcacgcgtgtatgtgttcagtgttgtttgcacagagagattgttttaaaaaatggcaccatatttggcctagcaggattta

SEQ ID NO: 576155 - DNA, 120 bp, Artificial Sequence
  ENSG00000171451_42 (sequence is synthesized)
tttttatgtcatcacctcccttgcctttgtttctgaaaattttgtctgctaaaaagtttctgctacagagtggtagatgaagttatatcatggggtcaggggagatgggaaaattttaag

SEQ ID NO: 576156 - DNA, 120 bp, Artificial Sequence
  ENSG00000171451_43 (sequence is synthesized)
tttttgtctaactccccttcatctgtaactgtgctaatctatctagagacctcaaacactgctaaaggccttgcaattgctgctttacccacgcatctcttgctttcaagatggactaca

SEQ ID NO: 576157 - DNA, 120 bp, Artificial Sequence
  ENSG00000171451_44 (sequence is synthesized)
aaagttccttatccttttgaaaaggtcttctgacacacttatcttgcacaaagaaaaagaaaatttcttttactgtgtttaatgttcagtgatatcactgaggaaatggtgaaagctcct

SEQ ID NO: 576158 - DNA, 120 bp, Artificial Sequence
  ENSG00000171451_45 (sequence is synthesized)
atcagaactataggatttcttctgggaaatacagatggaaatacagaatgaatatgtttttttgaggtcggaaactgactttaaaagcctccttgaagttttttacttagaaatataagg

SEQ ID NO: 576159 - DNA, 120 bp, Artificial Sequence
  ENSG00000171451_46 (sequence is synthesized)
aataagtctttgaacaatctgggtggcaagggctggtagattattttagacatgattgtctgtttaaaactctcctttcactttttatcctccctggagctacagctgttcgccatcaca

SEQ ID NO: 576160 - DNA, 120 bp, Artificial Sequence
  ENSG00000171451_47 (sequence is synthesized)
tcactcccatcctatcctttctgtcactgtcaagcaaaacaatcagtagttactaatcgctgaactctcaatattgtggggcattttccccccagttgattaattttgcgttaaagactg

SEQ ID NO: 576161 - DNA, 120 bp, Artificial Sequence
  ENSG00000171451_48 (sequence is synthesized)
acacagacttagaatcaaatttatttttctggaattaacactctgtgactcaaagtagtgccactgcagtgtctttttaaactggaaacagaattggaaaactgcctgacttatcttgca

SEQ ID NO: 576162 - DNA, 120 bp, Artificial Sequence
  ENSG00000171451_49 (sequence is synthesized)
tccctttgaatgagtttacagactgccagtgtctgcaaaagttgaaagcaaatgggagatgatgtcagaggcatctgtttcctttaccatctgcatcttattataaatgtagtcgtcata

SEQ ID NO: 576163 - DNA, 120 bp, Artificial Sequence
  ENSG00000171451_50 (sequence is synthesized)
aagtgtggtttattttattttggtaggctctgaaatcaaaatgctacgccattataagccagtggagtaattacaatgtattggatgaaaacataaggcagtgtggagacttgatgaaaa

SEQ ID NO: 576164 - DNA, 120 bp, Artificial Sequence
  ENSG00000171451_51 (sequence is synthesized)
tctctgtacagattgcagtcttcttcctgatgtttcaaactgtggttcccccaagctctctaacacttggaagtctgtcattctgacctagataaaagtggttctttctcagtagttatt

SEQ ID NO: 576165 - DNA, 120 bp, Artificial Sequence
  ENSG00000171451_52 (sequence is synthesized)
attatgtcaaaatgtgcctccagagtgataaagctctgtatatgttagattccagctaaacctaacttggctgtcatttttcttccattatagtgtgagtggagactgccccccctcccc

SEQ ID NO: 576166 - DNA, 120 bp, Artificial Sequence
  ENSG00000171451_53 (sequence is synthesized)
aacatattccttcccatatctctcatgattgtccctctgtaatttcaaaatgaatgaaattcatgtgaatgtaggttgagagggcactgaagacctgaatctacactagtaatctcaaga

SEQ ID NO: 576167 - DNA, 120 bp, Artificial Sequence
  ENSG00000171451_54 (sequence is synthesized)
aagattattcattctatctcagagttaccggcaagcatataaaatgctacttggataatatctacatgaatattgcatgctacatggttgataacactatttccattattgggcagaatc

SEQ ID NO: 576168 - DNA, 120 bp, Artificial Sequence
  ENSG00000171451_55 (sequence is synthesized)
tcagtgtttactttcaattcctaggatatgtgatcgtgaatcagatcacatataaaaagtctggattgtcagtagtattagatctgatcaaggtaggaattacaattgcatgcaggtagc

SEQ ID NO: 576169 - DNA, 120 bp, Artificial Sequence
  ENSG00000171451_56 (sequence is synthesized)
gaattacaattgcatgcaggtagcaagcaagaaagcagaaactactgttccctttattttaacattgtacagacaatacagaaatgtacctgttggcggccgggtgcagtggctcacgcc

SEQ ID NO: 576170 - DNA, 120 bp, Artificial Sequence
  ENSG00000171451_57 (sequence is synthesized)
aaaaaaaaaaagaaaaaaagaaatgtacctgttggcaggagaaggccagatggagtatgtggagtaatagggaaagaagagttacagaaaatgaaaaagaaaatgagttacactgagaat

SEQ ID NO: 576171 - DNA, 120 bp, Artificial Sequence
  ENSG00000171451_58 (sequence is synthesized)
gaatgaatatgggaacacgtcattgatagcaaaagaaaggtacaggcttacgaaaatgatctttacaatgtatcccagctttcacccccacatggcaatgcagagttgtatttacttgtt

SEQ ID NO: 576172 - DNA, 120 bp, Artificial Sequence
  ENSG00000171451_59 (sequence is synthesized)
tctgtactcacctactcccaccccaagggaaaattttagacatgaaccctactatttagttattctaaaatagaaagtttgctggagaaagcgtccactcacagattgttctgtaaggaa

SEQ ID NO: 576173 - DNA, 120 bp, Artificial Sequence
  ENSG00000171451_60 (sequence is synthesized)
tgttatgtatgggtgagcgggtgacacatccattgggtatgtatgcatgtgatggtgcctgagacccctgccttagaaacagaattcctaaggggattgactctcccagcatgttcccag

SEQ ID NO: 576174 - DNA, 120 bp, Artificial Sequence
  ENSG00000171451_61 (sequence is synthesized)
gtcctgcacccttagggtgatctaggaaaattttaaatagcttctactcttatttttgttctttgaaataattaaaagagggattatcactatctgatacttctgaaagaaacacttaca

SEQ ID NO: 576175 - DNA, 120 bp, Artificial Sequence
  ENSG00000171451_62 (sequence is synthesized)
aaatttcttatctgtaaaatccgtctttttctacattaacttccccaaacataggcctaattgagataattgcttttattataataataggattgaaattttaaaattttgaaaggactt

SEQ ID NO: 576176 - DNA, 120 bp, Artificial Sequence
  ENSG00000171451_63 (sequence is synthesized)
attaattttgctgacaaaagtgaagtaacaaatataatgataattggctttttaaattttcaaacaacatagatttactcaagatgaaataaaaaggccatattcagagttgaatttaat

SEQ ID NO: 576177 - DNA, 120 bp, Artificial Sequence
  ENSG00000171451_64 (sequence is synthesized)
gaaaactcagaggaaataggaaaatctgctcaggagaaagaagctaaatctgcatagatttagtttgtagaatttaatttaaaatttaaattttaacaaagtgatgacacaacaatatgt

SEQ ID NO: 576178 - DNA, 120 bp, Artificial Sequence
  ENSG00000171451_65 (sequence is synthesized)
acgtttaggtgtggacaccaaaatattagacatttgattgtccttttacatagagaataactaataaatgcctgacaagaatgggacaatccttccttgtatcaaaattcccaggtcttg

SEQ ID NO: 576179 - DNA, 120 bp, Artificial Sequence
  ENSG00000171451_66 (sequence is synthesized)
ctacattgccctctgcaaatgtattcaaagaagaacctcctccaccacttacttttggttggcataattgttcagcaacgatttctgtacatcaccaagtatctttggcattcttggtat

SEQ ID NO: 576180 - DNA, 120 bp, Artificial Sequence
  ENSG00000171451_67 (sequence is synthesized)
acaaagtatatcacaattttaagtgagtaaatattaatgataatttttgaattgctttgtttggcttgattaactttgatcagaaatagaaacgttttcatttgttgatttaggaaaaag

SEQ ID NO: 576181 - DNA, 86 bp, Artificial Sequence
  ENSG00000171451_68 (sequence is synthesized)
cagaaatagaaacgttttcatttgttgatttaggaaaaagcataaatagaatgcagtataacaccacttccaaaggtaaggatacc

SEQ ID NO: 576182 - DNA, 76 bp, Artificial Sequence
  ENSG00000171451_69 (sequence is synthesized)
caagtgattctcctacgttggctcatttttgtatttttagtagtgacagcgtttcaccacattggtcaggctggtc

SEQ ID NO: 576183 - DNA, 90 bp, Artificial Sequence
  ENSG00000171451_70 (sequence is synthesized)
tacaggtgcacgccaccatgcttggctcatttttgtatttttagtagtgacagctctcttgacctggtgatctgcccacctgggcctccc

SEQ ID NO: 576184 - DNA, 120 bp, Artificial Sequence
  ENSG00000171451_71 (sequence is synthesized)
agggtacctgacattctaagatatcaagacacttaatatgtgggctattagctgcttatttaaatgttgaccaaattgtctgatatatctgattaatcatgatttcacttcatttcggaa

SEQ ID NO: 576185 - DNA, 120 bp, Artificial Sequence
  ENSG00000171451_72 (sequence is synthesized)
gaaaaattatccatatcatttttaaagacgcaaatgactttggatttttgcatagagtacaatagacacttcaaacaatagattctaacattctctgaaacacttgagatgtttgagcta

SEQ ID NO: 576186 - DNA, 120 bp, Artificial Sequence
  ENSG00000171451_73 (sequence is synthesized)
ccatttatatgggttatttatatttagtctaagtaacacatacatgtttaattgattctgttttcatggatagattcaactaagtcttccaagcaattaattttttgttcgtcgtcgttt

SEQ ID NO: 576187 - DNA, 120 bp, Artificial Sequence
  ENSG00000171451_74 (sequence is synthesized)
ttccttcatacgttatctagttatgcagcactggaaacagactgaagatcataaaccagttttatcagacctatgtgtaataagactcctgttaatacaaaaataaaaagctaaaagcaa

SEQ ID NO: 576188 - DNA, 120 bp, Artificial Sequence
  ENSG00000171453_0 (sequence is synthesized)
agtctcgtggagagattgaagatggcggcttctcaggcggtggaggaaatgcggagccgcgtggttctgggggagtttggggttcgcaatgtccatactactgactttcccggtaactat

SEQ ID NO: 576189 - DNA, 120 bp, Artificial Sequence
  ENSG00000171453_1 (sequence is synthesized)
tccggttatgatgatgcctgggaccaggaccgcttcgagaagaatttccgtgtggatgtagtacacatggatgaaaactcactggagtttgacatggtgggaattgacgcagccattgcc

SEQ ID NO: 576190 - DNA, 120 bp, Artificial Sequence
  ENSG00000171453_2 (sequence is synthesized)
aatgcttttcgacgaattctgctagctgaggtgccaactatggctgtggagaaggtcctggtgtacaataatacatccattgttcaggatgagattcttgctcaccgtctggggctcatt

SEQ ID NO: 576191 - DNA, 120 bp, Artificial Sequence
  ENSG00000171453_3 (sequence is synthesized)
cccattcatgctgatccccgtctttttgagtatcggaaccaaggagatgaagaaggcacagagatagatactctacagtttcgtctccaggtcagatgcactcggaacccccatgctgct

SEQ ID NO: 576192 - DNA, 120 bp, Artificial Sequence
  ENSG00000171453_4 (sequence is synthesized)
aaagattcctctgaccccaacgaactgtacgtgaaccacaaagtgtataccaggcatatgacatggatccccctggggaaccaggctgatctctttccagagggcactatccgaccagtg

SEQ ID NO: 576193 - DNA, 120 bp, Artificial Sequence
  ENSG00000171453_5 (sequence is synthesized)
ggcaaagatcatgccaagttttcaccagtggcaacagccagttacaggctcctgccagacatcaccctgcttgagcccgtggaaggggaggcagctgaggagttgagcaggtgcttctca

SEQ ID NO: 576194 - DNA, 120 bp, Artificial Sequence
  ENSG00000171453_6 (sequence is synthesized)
cctggtgttattgaggtgcaggaagtccaaggtaaaaaggtggccagagttgccaacccccggctggataccttcagcagagaaatcttccggaatgagaagctaaagaaggttgtgagg

SEQ ID NO: 576195 - DNA, 120 bp, Artificial Sequence
  ENSG00000171453_7 (sequence is synthesized)
cttgcccgggttcgagatcattatatcttctctgttgagtcaacgggggtgttgccaccagatgtgctggtgagtgaagccatcaaagtactgatggggaagtgccggcgcttcttggat

SEQ ID NO: 576196 - DNA, 120 bp, Artificial Sequence
  ENSG00000171453_8 (sequence is synthesized)
gaactagatgcggttcagatggactgagcttggatgcttctgaggcaagctgaagctttgggttctgactgacccaccctacaggactgctgaacagagagcccagtgtgactagggatc

SEQ ID NO: 576197 - DNA, 120 bp, Artificial Sequence
  ENSG00000171453_9 (sequence is synthesized)
ctgagttttctgggacaattccagctttaatcaatacattttgttaaatgtgccataaaatgagactttttacgcctttataaggccttagatgtaaataaactcacccaaacaaaaaaa

SEQ ID NO: 576198 - DNA, 120 bp, Artificial Sequence
  ENSG00000171453_10 (sequence is synthesized)
aggcactagcatggtacctgatccacatgttcgaaacatctgggtgataacactttccaaaaaaagagtcatggcttcccactgcacgaatgaaggtgagaagacggaacagaggcttcc

SEQ ID NO: 576199 - DNA, 87 bp, Artificial Sequence
  ENSG00000171453_11 (sequence is synthesized)
ttatcagcattgaaagatcgcagaagacacagagagacaatggagccttagagaacacctgagaatttcatgattgaaggagcaggg

SEQ ID NO: 576200 - DNA, 90 bp, Artificial Sequence
  ENSG00000171453_12 (sequence is synthesized)
agaacacctgagaatttcatgattgaaggagcagggtaatctaacccctctcagctggggcaaagaaaagatgatgtgtgctgaaagcaa

SEQ ID NO: 576201 - DNA, 81 bp, Artificial Sequence
  ENSG00000171453_13 (sequence is synthesized)
tcactgcatccagcctttttgctttattaatactgtcacacacatatagcatgcattaagatgagagacaaaacatttgga

SEQ ID NO: 576202 - DNA, 120 bp, Artificial Sequence
  ENSG00000171453_14 (sequence is synthesized)
acatatagcatgcattaagatgagagacaaaacatttggagtacagagaagttaactggctgaggcattcggtagagggggattattctgaatttatgtaaagtataatttcacaaaagc

SEQ ID NO: 576203 - DNA, 120 bp, Artificial Sequence
  ENSG00000171453_15 (sequence is synthesized)
tttggagtggctgagtgatatgagaagtccctgtattattcctgttatgtctaacaggagatcctttctgatttcaggaatagtgctatgcaagactttggctgaaaagttttaaagtta

SEQ ID NO: 576204 - DNA, 120 bp, Artificial Sequence
  ENSG00000171453_16 (sequence is synthesized)
ggtctacgcatgaaatttgttaagctggtgcctgaagtgaagcaaataaaatcaacaataaataattggttgattctgttagaaatggaaaatgatggcaaaactgataaggacatggtt

SEQ ID NO: 576205 - DNA, 120 bp, Artificial Sequence
  ENSG00000171453_17 (sequence is synthesized)
ttaccctaatttaaaacaaatttaaaatgtgtcatctgctttctttgtgtcagccaatgaaaacgctccctctccaggatgagcaaagctatttttgaatagtataagtatatcgttctg

SEQ ID NO: 576206 - DNA, 120 bp, Artificial Sequence
  ENSG00000171453_18 (sequence is synthesized)
atgtgtgtatagctcaggctcatttcctatatatagttttgatactgtcctaacatttcactaacattcagtaatgaaaaaaacttacaattcacagaaccagcatcaagaaaagttgat

SEQ ID NO: 576207 - DNA, 120 bp, Artificial Sequence
  ENSG00000171453_19 (sequence is synthesized)
agttgatactttagccactccccagccatctggaagctagttttgggatccaaacgacatgccaacctcatcacctctccttgttgtgctcgggaggctgccaagagaaaatgccaaggg

SEQ ID NO: 576208 - DNA, 120 bp, Artificial Sequence
  ENSG00000171453_20 (sequence is synthesized)
aaggacaggaatcaataactggtataaaataagtacttaatgtttattaatttaccaccctaggggaaaagcattcaaaggaactgttttgcagacttgtgctttgcatgtaataatcac

SEQ ID NO: 576209 - DNA, 120 bp, Artificial Sequence
  ENSG00000171453_21 (sequence is synthesized)
tgagaaaatgaaattttgggagaagtggactatctgggttcaaatcctggttgactgtgatgttgggtaagttacttatctttgtacatcagtgtctttcatctgtgagaacacttgcct

SEQ ID NO: 576210 - DNA, 120 bp, Artificial Sequence
  ENSG00000171453_22 (sequence is synthesized)
tgtctcccaagtttgccataattaaatgggaaacacgtaaagcattcagcatagtgctggcactcagacgtttactagttcttaggagctccctccatttgtgcaggagatgaagaaggc

SEQ ID NO: 576211 - DNA, 120 bp, Artificial Sequence
  ENSG00000171453_23 (sequence is synthesized)
gctcatgcactgtgtcaagggcattggtgagaaccctgtgtgccttcctgggaagggggatagttcggttgcagtggggcaagctgactagggaactcagctgagacattcccggcaggt

SEQ ID NO: 576212 - DNA, 120 bp, Artificial Sequence
  ENSG00000171453_24 (sequence is synthesized)
caggaagtccaaggtatggtatttgggatgctgttcaagttaggacctaaattatattttctttcaaggtgacagaaataaaaaccctgggctcctaaaagtataacctggtttgctacc

SEQ ID NO: 576213 - DNA, 120 bp, Artificial Sequence
  ENSG00000171453_25 (sequence is synthesized)
gcgagtggatcacggggtcaagagagcgagaccatcctggctaacatgagtgttcctaaagagtgaggcactagcatggtacctgatccacaatggagtctcactctgttgctcaggctg

SEQ ID NO: 576214 - DNA, 73 bp, Artificial Sequence
  ENSG00000171453_26 (sequence is synthesized)
ctgcccacctcaccctcaatggttgcttatctctgaaactatcctctctaaccatttaaaccaccacaaaaag

SEQ ID NO: 576215 - DNA, 120 bp, Artificial Sequence
  ENSG00000171453_27 (sequence is synthesized)
tgaaactatcctctctaaccatttaaaccaccacaaaaagatataacatcaattgcaaatgtctgttccaatgtcctatcttccaacttataagactgagtattaaatatttctctaatg

SEQ ID NO: 576216 - DNA, 120 bp, Artificial Sequence
  ENSG00000171453_28 (sequence is synthesized)
gcaggttttccaggtcaatcagactcaagttttcttttgtgctccaataatacatcccttagattgggaaaagagttctttattcaagtccatgtttcgtgggctaacagaatgtaaaag

SEQ ID NO: 576217 - DNA, 120 bp, Artificial Sequence
  ENSG00000171453_29 (sequence is synthesized)
cataaagcactcagcagattgaggttctgtaagtaccaaaattcacaagaaaccaacgttgactttatggaataatagacgtggatatctgacgttggtataactattttattgttaaaa

SEQ ID NO: 576218 - DNA, 120 bp, Artificial Sequence
  ENSG00000171453_30 (sequence is synthesized)
gaaatttagatcactcaaacactattctattaagataatttaatctatagaatcatgcaataacttgtatggcactgccccatcaggctaaaatcaatgacatttgcaacccctcattga

SEQ ID NO: 576219 - DNA, 120 bp, Artificial Sequence
  ENSG00000171453_31 (sequence is synthesized)
aacataagtttctaaatgctcttcccaaatgggcttgaagctctccagaaagcaaacactagctcaccagcaatgcacacagctgattgcccagcgcacacaacacctgacagagcctct

SEQ ID NO: 576220 - DNA, 120 bp, Artificial Sequence
  ENSG00000171453_32 (sequence is synthesized)
tcagaaagacgtagtgtttttctaccaaacctcctccatcagcagtcctgtaagatgagaattccttatatcaccaacaaaattaaaaaggctgtaataaaaacatcactttgtgtctca

SEQ ID NO: 576221 - DNA, 79 bp, Artificial Sequence
  ENSG00000171453_33 (sequence is synthesized)
gggcatgggggcgagcgcctgtagtcccagctactcgagaagctaaggcaagagaatggtgtgaacctgggaggcgaag

SEQ ID NO: 576222 - DNA, 120 bp, Artificial Sequence
  ENSG00000171453_34 (sequence is synthesized)
gttgtcgcgaaggccgcggcagatgtcccgcacctcggcgccggacagcggctcccccgaaatctggatggagctgggcagcatcgtgcccacggctgggcctccgggtccatactactg

SEQ ID NO: 576223 - DNA, 120 bp, Artificial Sequence
  ENSG00000171453_35 (sequence is synthesized)
cctcacttggagaattaagtgtctcaagctgtccttccctccttaattttcctggaattttgctgagcattttaccttctcattctttgtaaatttctcattaaacattctaggaagaga

SEQ ID NO: 576224 - DNA, 120 bp, Artificial Sequence
  ENSG00000171453_36 (sequence is synthesized)
gatagctccctacctctggaggttggggttacggggataggtagggggtctgttgggtttttgcagataagtggttatttttccttgggcaggtgccaactatggctgtggagaaggtcc

SEQ ID NO: 576225 - DNA, 120 bp, Artificial Sequence
  ENSG00000171453_37 (sequence is synthesized)
gagctaccgggactgagccggagccggccagaggctttggggccccaggacagatgccgaccaaggcctggctactctttttaacatcactcttgcccaccacacctggctccttaccag

SEQ ID NO: 576226 - DNA, 120 bp, Artificial Sequence
  ENSG00000171456_0 (sequence is synthesized)
cacacacactcacacacacccacggcagacacgcacgcacccgggcgccgaagggaaagccgcgtctcgccctcccgccccgccgtcggtcctgtctcagtccctcagcagagcgggaaa

SEQ ID NO: 576227 - DNA, 120 bp, Artificial Sequence
  ENSG00000171456_1 (sequence is synthesized)
gcggaggccggagccgtgacctctgaccccgtggttatgcggagccgccgcattccttagcgatcgcggggcagccgccgctgccgccgtgggcgactgacgcagcgcgggcgcgtggag

SEQ ID NO: 576228 - DNA, 80 bp, Artificial Sequence
  ENSG00000171456_2 (sequence is synthesized)
ctcccccaccgccgctctcgcgccagccggtccccgcgtgcccgccccttctccccggccgcacccgagacctcgcgcgc

SEQ ID NO: 576229 - DNA, 120 bp, Artificial Sequence
  ENSG00000171456_3 (sequence is synthesized)
cgccgccgccccagccccgcgccaccgccccagcccgcccagcccggaggtcccgcgtggagctgccgccgccgccggggagaaggatgaaggacaaacagaagaagaagaaggagcgca

SEQ ID NO: 576230 - DNA, 120 bp, Artificial Sequence
  ENSG00000171456_4 (sequence is synthesized)
cgtgggccgaggccgcgcgcctggtattagaaaactactcggatgctccaatgacaccaaaacagattctgcaggtcatagaggcagaaggactaaaggaaatgagaagtgggacttccc

SEQ ID NO: 576231 - DNA, 120 bp, Artificial Sequence
  ENSG00000171456_5 (sequence is synthesized)
ctctcgcatgcctcaatgctatgctacattccaattcaagaggaggagaggggttgttttataaactgcctggccgaatcagccttttcacgctcaagaaggatgccctgcagtggtctc

SEQ ID NO: 576232 - DNA, 120 bp, Artificial Sequence
  ENSG00000171456_6 (sequence is synthesized)
gccatccagctacagtggagggagaggagccagaggacacggctgatgtggagagctgtgggtctaatgaagccagcactgtgagtggtgaaaacgatgtatctcttgatgaaacatctt

SEQ ID NO: 576233 - DNA, 120 bp, Artificial Sequence
  ENSG00000171456_7 (sequence is synthesized)
cgaacgcatcctgttctacagaatctcagagtcgacctctttccaatcccagggacagctacagagcttcctcacaggcgaacaaacaaaagaaaaagactggggtgatgctgcctcgag

SEQ ID NO: 576234 - DNA, 120 bp, Artificial Sequence
  ENSG00000171456_8 (sequence is synthesized)
ttgtcctgactcctctgaaggtaaacggggcccacgtggaatctgcatcagggttctcgggctgccacgccgatggcgagagcggcagcccgtccagcagcagcagcggctctctggccc

SEQ ID NO: 576235 - DNA, 120 bp, Artificial Sequence
  ENSG00000171456_9 (sequence is synthesized)
tgggcagcgctgctattcgtggccaggccgaggtcacccaggaccctgccccgctcctgagaggcttccggaagccagccacaggtcaaatgaagcgcaacagaggggaagaaatagatt

SEQ ID NO: 576236 - DNA, 120 bp, Artificial Sequence
  ENSG00000171456_10 (sequence is synthesized)
ttgagacacctgggtccattcttgtcaacaccaacctccgtgccctgatcaactctcggaccttccatgccttaccatcacacttccagcagcagctcctcttcctcctgcctgaagtag

SEQ ID NO: 576237 - DNA, 120 bp, Artificial Sequence
  ENSG00000171456_11 (sequence is synthesized)
acagacaggtggggacggatggcctgttgcgtctcagcagcagtgcactaaataacgagttttttacccatgcggctcagagctggcgggagcgcctggctgatggtgaatttactcatg

SEQ ID NO: 576238 - DNA, 120 bp, Artificial Sequence
  ENSG00000171456_12 (sequence is synthesized)
agatgcaagtcaggatacgacaggaaatggagaaggaaaagaaggtggaacaatggaaagaaaagttctttgaagactactatggacagaagctgggtttgaccaaagaagagtcattgc

SEQ ID NO: 576239 - DNA, 120 bp, Artificial Sequence
  ENSG00000171456_13 (sequence is synthesized)
agcagaacgtgggccaggaggaggctgaaatcaaaagtggcttgtgtgtcccaggagaatcagtgcgtatacagcgtggtccagccacccgacagcgagatgggcattttaagaaacgct

SEQ ID NO: 576240 - DNA, 120 bp, Artificial Sequence
  ENSG00000171456_14 (sequence is synthesized)
ctcggccagatctccgaaccagagccagaaggaatctgtacaaaaaacaggagtcagaacaagcaggggttgctaaggatgcaaaatctgtggcctcagatgttcccctctacaaggatg

SEQ ID NO: 576241 - DNA, 120 bp, Artificial Sequence
  ENSG00000171456_15 (sequence is synthesized)
gggaggctaagactgacccagcagggctgagcagtccccatctgccaggcacatcctctgcagcacccgacctggagggtcccgaattcccagttgagtctgtggcttctcggatccagg

SEQ ID NO: 576242 - DNA, 120 bp, Artificial Sequence
  ENSG00000171456_16 (sequence is synthesized)
ctgagccagacaacttggcacgtgcctctgcatctccagacagaattcctagcctgcctcaggaaactgtggatcaggaacccaaggatcagaagaggaaatcctttgagcaggcggcct

SEQ ID NO: 576243 - DNA, 120 bp, Artificial Sequence
  ENSG00000171456_17 (sequence is synthesized)
ctgcatcctttcccgaaaagaagccccggcttgaagatcgtcagtcctttcgtaacacaattgaaagtgttcacaccgaaaagccacagcccactaaagaggagcccaaagtcccgccca

SEQ ID NO: 576244 - DNA, 120 bp, Artificial Sequence
  ENSG00000171456_18 (sequence is synthesized)
tccggattcaactttcacgtatcaaaccaccctgggtggttaaaggtcagcccacttaccagatatgcccccggatcatccccaccacggagtcctcctgccggggttggactggcgcca

SEQ ID NO: 576245 - DNA, 120 bp, Artificial Sequence
  ENSG00000171456_19 (sequence is synthesized)
ggaccctcgcagacattaaagcccgtgctctgcaggtccgaggggcgagaggtcaccactgccatagagaggcggccaccactgccatcggaggggggggtggcccgggtggaggtggcg

SEQ ID NO: 576246 - DNA, 120 bp, Artificial Sequence
  ENSG00000171456_20 (sequence is synthesized)
gcggggccaccgatgagggaggtggcagaggcagcagcagtggtgatggtggtgaggcctgtggccaccctgagcccaggggaggcccgagcacccctggaaagtgtacgtcagatctac

SEQ ID NO: 576247 - DNA, 120 bp, Artificial Sequence
  ENSG00000171456_21 (sequence is synthesized)
agcgaacacaactactgccgccttatcctctaaatggggagcatacccaggccggaactgccatgtccagagctaggagagaggacctgccttctctgagaaaggaggaaagctgcctac

SEQ ID NO: 576248 - DNA, 120 bp, Artificial Sequence
  ENSG00000171456_22 (sequence is synthesized)
tacagagggctacagttggactcacagatgggctaggagatgcctcccaactccccgttgctcccactggggaccagccatgccaggccttgcccctactgtcctcccaaacctcagtag

SEQ ID NO: 576249 - DNA, 120 bp, Artificial Sequence
  ENSG00000171456_23 (sequence is synthesized)
ctgagagattagtggagcagcctcagttgcatccggatgttagaactgaatgtgagtctggcaccacttcctgggaaagtgatgatgaggagcaaggacccaccgttcctgcagacaatg

SEQ ID NO: 576250 - DNA, 120 bp, Artificial Sequence
  ENSG00000171456_24 (sequence is synthesized)
gtcccattccgtctctagtgggagatgatacattagagaaaggaactggccaagctcttgacagtcatcccactatgaaggatcctgtaaatgtgacccccagttccacacctgaatcct

SEQ ID NO: 576251 - DNA, 120 bp, Artificial Sequence
  ENSG00000171456_25 (sequence is synthesized)
caccgactgattgcctgcagaacagagcatttgatgacgaattagggcttggtggctcatgccctcctatgagggaaagtgatactagacaagaaaacttgaaaaccaaggctctcgttt

SEQ ID NO: 576252 - DNA, 120 bp, Artificial Sequence
  ENSG00000171456_26 (sequence is synthesized)
ctaacagttctttgcattggatacccatcccatcgaatgatgaggtagtgaaacagcccaaaccagaatccagagaacacataccatctgttgagccccaggttggagaggagtgggaga

SEQ ID NO: 576253 - DNA, 120 bp, Artificial Sequence
  ENSG00000171456_27 (sequence is synthesized)
aagctgctcccacccctcctgcattgcctggggatttgacagctgaggagggtctagatcctcttgacagccttacttcactctggactgtgccatctcgaggaggcagtgacagcaatg

SEQ ID NO: 576254 - DNA, 120 bp, Artificial Sequence
  ENSG00000171456_28 (sequence is synthesized)
gcagttactgtcaacaggtggacattgaaaagctgaaaatcaacggagactctgaagcactgagtcctcacggtgagtccacggatacagcctctgactttgaaggtcacctcacggagg

SEQ ID NO: 576255 - DNA, 120 bp, Artificial Sequence
  ENSG00000171456_29 (sequence is synthesized)
tgtccaaggtgaatggtgacatgcgtctggttacaaggacagatgggatggttgctcctcagagctgggtgtctcgagtatgtgcggtccgccaaaagatcccagattccctactgctgg

SEQ ID NO: 576256 - DNA, 120 bp, Artificial Sequence
  ENSG00000171456_30 (sequence is synthesized)
ccagtactgagtaccagccaagagccgtgtgcctgtccatgcctgggtcctcagtggaggccactaacccacttgtgatgcagttgctgcagggtagcttgcccctagagaaggttcttc

SEQ ID NO: 576257 - DNA, 120 bp, Artificial Sequence
  ENSG00000171456_31 (sequence is synthesized)
caccagcccacgatgacagcatgtcagaatccccacaagtaccacttacaaaagaccagagccatggctcgctacgcatgggatctttacatggtcttggaaaaaacagtggcatggttg

SEQ ID NO: 576258 - DNA, 120 bp, Artificial Sequence
  ENSG00000171456_32 (sequence is synthesized)
atggaagcagccccagttctttaagggctttgaaggagcctcttctgccagatagctgtgaaacaggcactggtcttgccaggattgaggccacccaggctcctggagcaccccaaaaga

SEQ ID NO: 576259 - DNA, 120 bp, Artificial Sequence
  ENSG00000171456_33 (sequence is synthesized)
attgcaaggcagtcccaagttttgactccctccatccagtgacaaatcccattacatcctctaggaaactggaagaaatggattccaaagagcagttctcttcctttagttgtgaagatc

SEQ ID NO: 576260 - DNA, 120 bp, Artificial Sequence
  ENSG00000171456_34 (sequence is synthesized)
agaaggaagtccgtgctatgtcacaggacagtaattcaaatgctgctccaggaaagagcccaggagatcttactacctcgagaacacctcgtttctcatctccaaatgtgatctcctttg

SEQ ID NO: 576261 - DNA, 120 bp, Artificial Sequence
  ENSG00000171456_35 (sequence is synthesized)
gtccagagcagacaggtcgggccctgggtgatcagagcaatgttacaggccaagggaagaagctttttggctctgggaatgtggctgcaacccttcagcgccccaggcctgcggacccga

SEQ ID NO: 576262 - DNA, 120 bp, Artificial Sequence
  ENSG00000171456_36 (sequence is synthesized)
tgcctcttcctgctgagatccctccagtttttcccagtgggaagttgggaccaagcacaaactccatgtctggtggggtacagactccaagggaagactgggctccaaagccacatgcct

SEQ ID NO: 576263 - DNA, 120 bp, Artificial Sequence
  ENSG00000171456_37 (sequence is synthesized)
ttgttggcagcgtcaagaatgagaagacttttgtggggggtcctcttaaggcaaatgccgagaacaggaaagctactgggcatagtcccctggaactggtgggtcacttggaagggatgc

SEQ ID NO: 576264 - DNA, 120 bp, Artificial Sequence
  ENSG00000171456_38 (sequence is synthesized)
cctttgtcatggacttgcccttctggaaattaccccgagagccagggaaggggctcagtgagcctctggagccttcttctctcccctcccaactcagcatcaagcaggcattttatggga

SEQ ID NO: 576265 - DNA, 120 bp, Artificial Sequence
  ENSG00000171456_39 (sequence is synthesized)
agctttctaaactccaactgagttccaccagctttaattattcctctagctctcccacctttcccaaaggccttgctggaagtgtggtgcagctgagccacaaagcaaactttggtgcga

SEQ ID NO: 576266 - DNA, 120 bp, Artificial Sequence
  ENSG00000171456_40 (sequence is synthesized)
gccacagtgcatcactttccttgcaaatgttcactgacagcagcacggtggaaagcatctcgctccagtgtgcgtgcagcctgaaagccatgatcatgtgccaaggctgcggtgcgttct

SEQ ID NO: 576267 - DNA, 120 bp, Artificial Sequence
  ENSG00000171456_41 (sequence is synthesized)
gtcacgatgactgtattggaccctcaaagctctgtgtattgtgccttgtggtgagataataaattatggccatgggaaacattgtatatttagtgtgtgtattttgataatgattgatct

SEQ ID NO: 576268 - DNA, 120 bp, Artificial Sequence
  ENSG00000171456_42 (sequence is synthesized)
taaatctgtatacagaatatcattgatataatactctttaggcaggagcactcttgccttcccccaaaatttacactgctaaagccctctgtcacttggcgacccttctggtcttgctgg

SEQ ID NO: 576269 - DNA, 120 bp, Artificial Sequence
  ENSG00000171456_43 (sequence is synthesized)
aggggtttcctgggtataacccattgggctgcccaaggccagccagcctgagctctcctgcaagacagagcctgatgtggcacggagtggggttgcggggggtggggggactgcctgact

SEQ ID NO: 576270 - DNA, 120 bp, Artificial Sequence
  ENSG00000171456_44 (sequence is synthesized)
cccagagggacttgaaactgaagcaagaaggttgcattctccaccaagggagttaacctacctgaactaagtagaaatgccagtcttccactaccccctccctgccatcttttcttctgc

SEQ ID NO: 576271 - DNA, 120 bp, Artificial Sequence
  ENSG00000171456_45 (sequence is synthesized)
tactttggggagttgatggccaggaaagaagccagcacagggttaaagtaactcctggcattgcccaccagggggctggtgcacctgctgacctcagggtcacagttgagtcatttgcca

SEQ ID NO: 576272 - DNA, 120 bp, Artificial Sequence
  ENSG00000171456_46 (sequence is synthesized)
gttgacggagcaagtttgaccttggttctgttgctgaagcaaatttggaacttttctgtctcagtgtgatccactaacccacaggatcatttggaaccttgaatagctctgcttggacaa

SEQ ID NO: 576273 - DNA, 120 bp, Artificial Sequence
  ENSG00000171456_47 (sequence is synthesized)
tggggttggggaatagggttgtctttcctatgaaaatgccatctgtagaccttgtgagtcagccgtccagatgtttgcaggtgaattcctctgcttgacatcctccctgtcactttggac

SEQ ID NO: 576274 - DNA, 120 bp, Artificial Sequence
  ENSG00000171456_48 (sequence is synthesized)
cctatgggagtgggcatctccacgcacctgtgtatgtgaaagtcattttacatttcaaagcagtgtgtgtttcttatttttatatttttaactctttattcttggatgtataaagtgaac

SEQ ID NO: 576275 - DNA, 120 bp, Artificial Sequence
  ENSG00000171456_49 (sequence is synthesized)
tttttggcttctgtaagtatgctctatgcacctctaatgttttatcatgtatttatatgttgtacacagtactggctgattctgtaaatggatgtattgtacagagaacatgaacgtctc

SEQ ID NO: 576276 - DNA, 120 bp, Artificial Sequence
  ENSG00000171456_50 (sequence is synthesized)
ttcctaattttacatcttcagcatcattgcattaaagtggtgtaatctccttctctacatctgttgtcagagccactgagtgctgtgctgctcgacgtgagggtgaaatgattgacttgt

SEQ ID NO: 576277 - DNA, 120 bp, Artificial Sequence
  ENSG00000171456_51 (sequence is synthesized)
gacctgccaggttgcccgatgccctgttgggtcaccggctggacctgctgcagcctgcagagccacagtcagcctgcccacatgccaccgagcaaacgcatcttgcttttcacatctctc

SEQ ID NO: 576278 - DNA, 120 bp, Artificial Sequence
  ENSG00000171456_52 (sequence is synthesized)
ctcctacagccttaatggctgcttgctgccatatgtgacaaatcaccaccaccagtgttaagtgcttctggattcatgggtgagttccctgggcagcccccaggaaggccttccagatct

SEQ ID NO: 576279 - DNA, 120 bp, Artificial Sequence
  ENSG00000171456_53 (sequence is synthesized)
ggctccagggtcaccacctgtcacagcaatacctgggaccatgctctcctgggactgtgaggctccttttgacgtacttttgacatcaggcaggtttgggaagaaacaaagccatgcctg

SEQ ID NO: 576280 - DNA, 120 bp, Artificial Sequence
  ENSG00000171456_54 (sequence is synthesized)
ctcctgcctctctcccaacatgtttccagcaagtagatgcccctgtgtgtgttttcccttgccttgtttcctgccttatatcttgtatttcgacttattacagagttgagggttcttgct

SEQ ID NO: 576281 - DNA, 120 bp, Artificial Sequence
  ENSG00000171456_55 (sequence is synthesized)
taatttagatcaagtataaaatttgtatgacttcaagtctcattttatctgaaaggtttttttctcatttaatctgatgtggcattttcgtcatctgaagcatgagtgacaagttgggaa

SEQ ID NO: 576282 - DNA, 120 bp, Artificial Sequence
  ENSG00000171456_56 (sequence is synthesized)
tgatgtggtgatttagaatgcagtattggccaagtccaagttgtcaacttaagcgtctgtttaccaaagaccgggaacaggggcccaaacatgtccagtcctcttcttccctctgctgga

SEQ ID NO: 576283 - DNA, 120 bp, Artificial Sequence
  ENSG00000171456_57 (sequence is synthesized)
acctttggggacactcaagggtacagtttgacactgatctggtccatgaggctgcccagagaaagcactgcttctgtatgtctcttgtggtattggaacaataaacccgtacaacctgca

SEQ ID NO: 576284 - DNA, 120 bp, Artificial Sequence
  ENSG00000171456_58 (sequence is synthesized)
aaattccggcggaggggcgagctggcaggccggctcctcccactctgggcagcggggtcccgcgtcccctcccccactatttggcagcgtctgggggtctggggcagcttcgttcattca

SEQ ID NO: 576285 - DNA, 120 bp, Artificial Sequence
  ENSG00000171456_59 (sequence is synthesized)
cccgggggagttgggtttccgggaagggtcggaagctcctccctcgcttcctggtgggtaatggggtggtgcctttgactccgggggtggaaaagcgaccccacattcaaggacgccaat

SEQ ID NO: 576286 - DNA, 120 bp, Artificial Sequence
  ENSG00000171456_60 (sequence is synthesized)
tgatgctttttcctcaggtcctggggacctggcctccctctgtcagcagtttctgacctaatagtgcgatactaggagagctgtcgggccacaggcaagagccctgccaatggatgaggc

SEQ ID NO: 576287 - DNA, 120 bp, Artificial Sequence
  ENSG00000171456_61 (sequence is synthesized)
ctgccataggttctagtgctgggctctgctgtgtgccttcctctttgtctcccagggcagtcgtgaggatccaacggaggatttgattatgccagtgctttgtaaaaggtgtagtgctat

SEQ ID NO: 576288 - DNA, 120 bp, Artificial Sequence
  ENSG00000171456_62 (sequence is synthesized)
acaaataaagatggcagtttggcacctgtaaggtgatattttaaagccagaccatgaagtggtggtttctctcagcctaaggctgggagatggaagcatcccagtattgctggcagcatc

SEQ ID NO: 576289 - DNA, 120 bp, Artificial Sequence
  ENSG00000171456_63 (sequence is synthesized)
tcagggagagctgggagaaatgagcttgtctgagagccatgggcgcggcttggtgatacttttgaccagtggaatgctgtgccttcagggttctcgggctgccacgccgatggcgagagc

SEQ ID NO: 576290 - DNA, 120 bp, Artificial Sequence
  ENSG00000171456_64 (sequence is synthesized)
ttgttttataaactgcctggccgaatcagccttttcacgctcaaggtgtgagccactgcaccaggccccttcatcttaattttaatatatctttgaataaacaccattgtatgaacctgc

SEQ ID NO: 576291 - DNA, 120 bp, Artificial Sequence
  ENSG00000171456_65 (sequence is synthesized)
ttactcccagcttgaaccctgagcagcggttctctaactttagtgtcctgtgggcgacacctgggaggcggttaggaacgctactcctagggcccttcgtaagacctgctgagcctcagg

SEQ ID NO: 576292 - DNA, 120 bp, Artificial Sequence
  ENSG00000171456_66 (sequence is synthesized)
gtctgggatagagcctgggaatctgcgctttcaccagcttcccaggtgattcaaacgcagtggctcacggaccccactttgagaaacgcagactgggctgtttgccttcagaagctggac

SEQ ID NO: 576293 - DNA, 120 bp, Artificial Sequence
  ENSG00000171456_67 (sequence is synthesized)
ccactttgcaaagaatgtatgttggacaaagacaaagtatctctgttgggagacgttgttcactgaggatttagcaagggagagcgtaacttgagtgtttgaagccgtctcgttcaaccg

SEQ ID NO: 576294 - DNA, 120 bp, Artificial Sequence
  ENSG00000171456_68 (sequence is synthesized)
atgggggttgtgaattttgtgttcagagcgtcagaggacttgcaggtgaaatagcttccttttggattactcccacaaagctcagacactttgagacatattcggccaggttatcagggt

SEQ ID NO: 576295 - DNA, 90 bp, Artificial Sequence
  ENSG00000171456_69 (sequence is synthesized)
tcaagtgatcttcccaccacagcttcacaaagcactgggatcccttcatcttaattttaatatatctttgaataaacaccattgtatgaa

SEQ ID NO: 576296 - DNA, 120 bp, Artificial Sequence
  ENSG00000171456_70 (sequence is synthesized)
tcaaaattggaagcttgggctagttttcaggatcttgtagaaatttcaggatttctctaacggttctgcacctggaaacaaatataggcctgatggggagtgggagagagctctcgttct

SEQ ID NO: 576297 - DNA, 120 bp, Artificial Sequence
  ENSG00000171456_71 (sequence is synthesized)
cctcctcgacaatgagttttgtgtgttcattgacattctccttggcgttcctgttatgcgggtgtttatgaccctgggcacccaaggaaatttgcttgccagagttttacttgttagagg

SEQ ID NO: 576298 - DNA, 120 bp, Artificial Sequence
  ENSG00000171456_72 (sequence is synthesized)
tctgccccaacttatcttcttcttgtctccaactgccagtattctcatccacactctttgtagttttgaggtgtgagataactcccaagttcttcttgggaatgggtagagtttaattct

SEQ ID NO: 576299 - DNA, 120 bp, Artificial Sequence
  ENSG00000171456_73 (sequence is synthesized)
gagtctacatgtcgtgagtctattggaagaagcttttcttaggaggtgaaatttgggatggagttctcctctacactctagccctgtagccacaatctttggtttagatctttggcattt

SEQ ID NO: 576300 - DNA, 120 bp, Artificial Sequence
  ENSG00000171456_74 (sequence is synthesized)
tttgttggacatctttcatagtgtctacctcttcttcctgcctctaggcttcccgcggttgccagatgaaattccgaaaactcaaatcattcctgtagttaatattcttcagtgactccg

SEQ ID NO: 576301 - DNA, 120 bp, Artificial Sequence
  ENSG00000171456_75 (sequence is synthesized)
gaacaatcaaattcttgatccctccacatgggtcttaccatctgccctcgtgccctctctagcttcctgcatattgagttccccacagccctagtttccctgagtttggaatattctttc

SEQ ID NO: 576302 - DNA, 120 bp, Artificial Sequence
  ENSG00000171456_76 (sequence is synthesized)
acatttgctcatcccactatctagaaacttcctacaatctctctactgccaacctgtctgtctagttgctaatttattttaaaacccagcttaagcaacacatccttttggatgtgttac

SEQ ID NO: 576303 - DNA, 120 bp, Artificial Sequence
  ENSG00000171456_77 (sequence is synthesized)
ccctgatcgttattcacctccatgccgtctttcgctcaactcattgaagttaggtgcccctcttctgggctgccacggctctccatgttcacctatgtactgtactttgtattgtaatca

SEQ ID NO: 576304 - DNA, 120 bp, Artificial Sequence
  ENSG00000171456_78 (sequence is synthesized)
gtttaattgacccccctacttatttgagctccttgagagcagggccttgattcctgctccttagcactccaccctccccagaactaacatggtatagcttataggaggcaccctataaat

SEQ ID NO: 576305 - DNA, 120 bp, Artificial Sequence
  ENSG00000171456_79 (sequence is synthesized)
gtttaatgaatgtttgaatgcaaaagtgtatctaactttcttaatgatatatttatgaaaagaacttgctgagaaaaaggtcagttagaaagggttaggaacttgtcagtattctaaatc

SEQ ID NO: 576306 - DNA, 120 bp, Artificial Sequence
  ENSG00000171456_80 (sequence is synthesized)
acagtccttagtacatttctgcatggagatcatccctctccagcccattcacagaaggcttctgcagatttttctatagtatactaactagatttacttttagataattctcatgatttc

SEQ ID NO: 576307 - DNA, 120 bp, Artificial Sequence
  ENSG00000171456_81 (sequence is synthesized)
tccagttgagctttgtggagcctgttctccagctttggagggaagctcagaacctgccccttgcctgattttctgtgggaagtgtccttttcaggctgtgacacagcacggtacagagtt

SEQ ID NO: 576308 - DNA, 120 bp, Artificial Sequence
  ENSG00000171456_82 (sequence is synthesized)
cggtgcccagggtttttatcaagggctgatcatgtaggaagccactgcttggcacatacccagcttccagattcccaaaaggaaggcaggtgttcagcataagccgtattgtttgcataa

SEQ ID NO: 576309 - DNA, 120 bp, Artificial Sequence
  ENSG00000171456_83 (sequence is synthesized)
acaatttaggcacagtgaacaactcatatcagttagggtggttgggaaccctcctgaaatctaagttcccagatgtcagccaagggctgttcttttaagtaggcctttctaagagtaaac

SEQ ID NO: 576310 - DNA, 120 bp, Artificial Sequence
  ENSG00000171456_84 (sequence is synthesized)
aatcaggcctacctactatgttaactttttatctacacaggaaatatgaatggttcttttgtttgttgttttgctttttcgatcaaggagttgcttggtctcactttaaggaagagtgaa

SEQ ID NO: 576311 - DNA, 120 bp, Artificial Sequence
  ENSG00000171456_85 (sequence is synthesized)
tttcccttatagtagatgtgttagctctgtccctataagagcatgatgtgagagagcctttagaagagacgtgttgttttaaaactgggagattcagctgtccataagacagacattaat

SEQ ID NO: 576312 - DNA, 120 bp, Artificial Sequence
  ENSG00000171456_86 (sequence is synthesized)
aattttctctcttattttgaagtgagttttctgcttcaaaggtgttgtgcaaaaaaaaaaaaaatagactgtattgggggggttgacacaaacctgaagtacacctttttctttctcgaa

SEQ ID NO: 576313 - DNA, 120 bp, Artificial Sequence
  ENSG00000171456_87 (sequence is synthesized)
gtctgtaaaagttacagatttataaaaactgaaggaatttgggctacagaattttcattggtgcttgctatcctcttccctagtcatttgttgcccagggaacaaaaatagcaattgttt

SEQ ID NO: 576314 - DNA, 87 bp, Artificial Sequence
  ENSG00000171456_88 (sequence is synthesized)
agcctgattctgttcattcttgtaatatacacgtgaacattcagggagaagtgtggttagtgcagagtagagagaacaggagattgg

SEQ ID NO: 576315 - DNA, 120 bp, Artificial Sequence
  ENSG00000171456_89 (sequence is synthesized)
gaagtgtggttagtgcagagtagagagaacaggagattgggagtgagcagtttgaatgataaccctgcacttactagccttgagacttggggaaaattccttacctgtaaaatggggata

SEQ ID NO: 576316 - DNA, 120 bp, Artificial Sequence
  ENSG00000171456_90 (sequence is synthesized)
acagtacatttttgtagcttggaatgatgcttggcacagtgaccagcacgtagctcagtaacattaaccagtgctcttgtcagcattatttgacagatctggttgaagacgaacttcatt

SEQ ID NO: 576317 - DNA, 120 bp, Artificial Sequence
  ENSG00000171456_91 (sequence is synthesized)
ttacaagagcgtgagtagagatagtgtcgccagggaatgcttttgtggctctgcagttgacttgggctctcttttgttctctcttggaacgcaggcgaacaaacaaaagaaaaagactgg

SEQ ID NO: 576318 - DNA, 120 bp, Artificial Sequence
  ENSG00000171456_92 (sequence is synthesized)
gtaaagggggcccctgcaggcctagtgagaagatgatgtcttctattccaattcctttaccagtttatttttacttcttgggtggccctctattttttgtttatttttactttgtaattt

SEQ ID NO: 576319 - DNA, 120 bp, Artificial Sequence
  ENSG00000171456_93 (sequence is synthesized)
gcttatttcatttgtagctctctgctaaactgtgagaactcctttcaggcagagatgatgccatactgtttctcgtatgtccctgtaggcctagtctatgcctgccttgtactgcatagt

SEQ ID NO: 576320 - DNA, 120 bp, Artificial Sequence
  ENSG00000171456_94 (sequence is synthesized)
aagtgtttgagtgagtgaaaactgcttctgagcttctcagtgaagaattccaacaccccttttctctcttcggtagcatgttgccacatttgttcccaacatctgtagtctgtatcagac

SEQ ID NO: 576321 - DNA, 120 bp, Artificial Sequence
  ENSG00000171456_95 (sequence is synthesized)
gctcccttttttacaacctagtcagtatgttgagtggaagcatgtgttgaattttggggatgcaaacaaattcagtagtgctattatctatacctcccacccctcaccccaccccacccc

SEQ ID NO: 576322 - DNA, 120 bp, Artificial Sequence
  ENSG00000171456_96 (sequence is synthesized)
cattagggttatttgcaatattagtatgctctttgctatttcaggatttaattcttaatgacccacatgctggttttttttgtagatgaaaccattaagaagacaagcttttgcttctga

SEQ ID NO: 576323 - DNA, 120 bp, Artificial Sequence
  ENSG00000171456_97 (sequence is synthesized)
gaattagagtaaacctttgcccatgtgagaactaggtttgctgtcttgctgcttttccagctcatcagcagtgctcaatctaaggtctcacaggtctctagtcctagtgagtttttcaga

SEQ ID NO: 576324 - DNA, 120 bp, Artificial Sequence
  ENSG00000171456_98 (sequence is synthesized)
aaagaatatacaggttaggatggactggacaattgagcagattgtgtgcagataactcctgggtagcttgggtgctgtcaccaaagttttcccatcagttggcatttgttttttctttta

SEQ ID NO: 576325 - DNA, 120 bp, Artificial Sequence
  ENSG00000171456_99 (sequence is synthesized)
tctttgagggtcatgagattatagagcccttaactctggggccctgaagttaattatgtgggaatgtagagctttttatgagaggtttgcttgagacagccttcaagtttagtgagatag

SEQ ID NO: 576326 - DNA, 120 bp, Artificial Sequence
  ENSG00000171456_100 (sequence is synthesized)
gttcttttcttcctcacttttttgttcactctgttgaagttatcttgagaggtcaaaatcctttggggttttaaaatctttttaagatagcattagattctttgctatagtgactcacac

SEQ ID NO: 576327 - DNA, 120 bp, Artificial Sequence
  ENSG00000171456_101 (sequence is synthesized)
agtcccaccagaaattaaatttagaagtgtggcatataacagcccttgagcagaatcttctctgaatggtgtgttatggcgccattttactatgatgatttcattgttttaaggaaatta

SEQ ID NO: 576328 - DNA, 120 bp, Artificial Sequence
  ENSG00000171456_102 (sequence is synthesized)
atcttaactgcctttggctttatgttgcttatccttcatagtatcttgttcattggccttttacatccataggcatcacttctctgatattcgttgtgctcttttaatggattaatggtt

SEQ ID NO: 576329 - DNA, 120 bp, Artificial Sequence
  ENSG00000171456_103 (sequence is synthesized)
tgcttggttggttcctctagttagactgtaaactccttgagagcagagtctgtattttattaattacccacagtactaggtacatagttgccttcaataaatatatatttaatgaacgaa

SEQ ID NO: 576330 - DNA, 120 bp, Artificial Sequence
  ENSG00000171456_104 (sequence is synthesized)
attatgaaatctgtttgtctcaaagttctgttggctcttactagttgactttaggaatttggggtccactgttaagtctctttagattctcgaatttaccgtggtctgaacttcaacatc

SEQ ID NO: 576331 - DNA, 120 bp, Artificial Sequence
  ENSG00000171456_105 (sequence is synthesized)
acagctacagagcttcctcacagcattatttgacagatctggttgaagacgaacttcattttacaagagcgtgagtagagatagtgtcgccagggaatgcttttgtggctctgcagttga

SEQ ID NO: 576332 - DNA, 120 bp, Artificial Sequence
  ENSG00000171459_0 (sequence is synthesized)
gcctgatcttaaccccatggcagatcccgaagtctttttaggcccctgaatctcctttgtcaagcccacaggaagtccagagacatggagataaagaactacagcagcagcacctcaggc

SEQ ID NO: 576333 - DNA, 120 bp, Artificial Sequence
  ENSG00000171459_1 (sequence is synthesized)
ttcatcctcctgggcctctcttccaaccctcagctgcagaaacctctctttgccatcttcctcatcatgtacctgctcgctgcggtggggaatgtgctcatcatcccggccatctactct

SEQ ID NO: 576334 - DNA, 120 bp, Artificial Sequence
  ENSG00000171459_2 (sequence is synthesized)
gaccccaggctccacacccctatgtacttttttctcagcaacttgtctttcatggatatctgcttcacaacagtcatagtgcctaagatgctggtgaattttctatcagagacaaaggtt

SEQ ID NO: 576335 - DNA, 120 bp, Artificial Sequence
  ENSG00000171459_3 (sequence is synthesized)
atctcctatgtgggctgcctggcccagatgtacttctttatggcatttgggaacactgacagctacctgctggcctctatggccatcgaccggctggtggccatctgcaaccccttacac

SEQ ID NO: 576336 - DNA, 120 bp, Artificial Sequence; identical to SEQ ID NO: 333010
  ENSG00000171459_4 (sequence is synthesized)

SEQ ID NO: 576337 - DNA, 120 bp, Artificial Sequence
  ENSG00000171459_5 (sequence is synthesized)
acatcctccagccagatggtggtgatgactgagaccttagctgtcattgtgacccccttcctgtgtatcatcttctcctacctgcgaatcatggtcactgtgctcagaatcccctctgca

SEQ ID NO: 576338 - DNA, 120 bp, Artificial Sequence
  ENSG00000171459_6 (sequence is synthesized)
gccgggaagtggaaggccttctctacctgtggctcccacctcactgcagtagcccttttctatgggagtattatttatgtctattttaggcccctgtccatgtactcagtggttagggac

SEQ ID NO: 576339 - DNA, 120 bp, Artificial Sequence
  ENSG00000171459_7 (sequence is synthesized)
cgggtagccacagttatgtacacagtagtgacacccatgctgaaccctttcatctacagcctgaggaacaaagatatgaagaggggtttgaagaaattacaggacagaatttaccggtaa

SEQ ID NO: 576340 - DNA, 120 bp, Artificial Sequence
  ENSG00000171459_8 (sequence is synthesized)
atgagctatttttacaggcttaagcttatgaaagaagctgtcttggtcaaactgccctttacatctctcccactgcttctccaaaccctatccaggaagtccagagacatggagataaag

SEQ ID NO: 576341 - DNA, 120 bp, Artificial Sequence
  ENSG00000171462_0 (sequence is synthesized)
aagtgctggaattataggcgtgagcccaccgagcttggctgggtccttgtcttgaaatgtgtctctgagccattagccagaagggggcaaagaggcctggagggcagctttcccccactc

SEQ ID NO: 576342 - DNA, 120 bp, Artificial Sequence
  ENSG00000171462_1 (sequence is synthesized)
aagggggcaaagaggcctggagggcagctttcccccactccccctccgttactctctgaatctgagctccaggtttgggcagttgaggtttagcctgaggccaaggacgaacgtgatggg

SEQ ID NO: 576343 - DNA, 120 bp, Artificial Sequence
  ENSG00000171462_2 (sequence is synthesized)
gtacaggagaagacttggcggtggagggggttttgtgtgcacatttacagagtcaggggcattcccagtccagaaaggattctcagaggcagtcacaaaaaggaatggggtggaagggct

SEQ ID NO: 576344 - DNA, 120 bp, Artificial Sequence
  ENSG00000171462_3 (sequence is synthesized)
gagacttgagggagggaagggtggtgggggtagggccggggtgtggttgggtggatcgggttgatatttatatagggataggttgatcttggaaggctggagacggcaacgtggacagga

SEQ ID NO: 576345 - DNA, 120 bp, Artificial Sequence
  ENSG00000171462_4 (sequence is synthesized)
agaagcggagggcgaggaggagcagaggagcacacagatgaagcaggtgtccacgcgtccggccgtccatccgtccgtccctcctggggccggcgctgaccatgcccagcggctgccgct

SEQ ID NO: 576346 - DNA, 120 bp, Artificial Sequence
  ENSG00000171462_5 (sequence is synthesized)
gcctgcatctcgtgtgcctgttgtgcattctgggggctcccggtcagcctgtccgagccgatgactgcagctcccactgtgacctggcccacggctgctgtgcacctgacggctcctgca

SEQ ID NO: 576347 - DNA, 120 bp, Artificial Sequence
  ENSG00000171462_6 (sequence is synthesized)
ggtgtgacccgggctgggaggggctgcactgtgagcgctgtgtgaggatgcctggctgccagcacggtacctgccaccagccatggcagtgcatctgccacagtggctgggcaggcaagt

SEQ ID NO: 576348 - DNA, 120 bp, Artificial Sequence
  ENSG00000171462_7 (sequence is synthesized)
tgactgcgagcgcaaggctggaccctgtgaacaggcaggctccccatgccgcaatggcgggcagtgccaggacgaccagggctttgctctcaacttcacgtgccgctgcttggtgggctt

SEQ ID NO: 576349 - DNA, 120 bp, Artificial Sequence
  ENSG00000171462_8 (sequence is synthesized)
tgtgggtgcccgctgtgaggtaaatgtggatgactgcctgatgcggccttgtgctaacggtgccacctgccttgacggcataaaccgcttctcctgcctctgtcctgagggctttgctgg

SEQ ID NO: 576350 - DNA, 120 bp, Artificial Sequence
  ENSG00000171462_9 (sequence is synthesized)
acgcttctgcaccatcaacctggatgactgtgccagccgcccatgccagagaggggcccgctgtcgggaccgtgtccacgacttcgactgcctctgccccagtggctatggtggcaagac

SEQ ID NO: 576351 - DNA, 120 bp, Artificial Sequence
  ENSG00000171462_10 (sequence is synthesized)
ctgtgagcttgtcttacctgtcccagaccccccaaccacagtggacacccctctagggcccacctcagctgtagtggtacctgccacggggccagccccccacagcgcaggggctggtct

SEQ ID NO: 576352 - DNA, 120 bp, Artificial Sequence
  ENSG00000171462_11 (sequence is synthesized)
gctgcggatctcagtgaaggaggtggtgcggaggcaagaggctgggctaggtgagcctagcttggtggccctggtggtgtttggggccctcactgctgccctggttctggctactgtgtt

SEQ ID NO: 576353 - DNA, 120 bp, Artificial Sequence
  ENSG00000171462_12 (sequence is synthesized)
gctgaccctgagggcctggcgccggggtgtctgcccccctggaccctgttgctaccctgccccacactatgctccagcgtgccaggaccaggagtgtcaggttagcatgctgccagcagg

SEQ ID NO: 576354 - DNA, 120 bp, Artificial Sequence
  ENSG00000171462_13 (sequence is synthesized)
gctccccctgccacgtgacttgccccctgagcctggaaagaccacagcactgtgatggaggtgggggctttctggcccccttcctcacctcttccacccctcagactggagtggtccgtt

SEQ ID NO: 576355 - DNA, 120 bp, Artificial Sequence
  ENSG00000171462_14 (sequence is synthesized)
ctcaccacccttcagcttgggtacacacacagaggagacctcagcctcacaccagaaatattatttttttaatacacagaatgtaagatggaattttatcaaataaaactatgaaaatgc

SEQ ID NO: 576356 - DNA, 80 bp, Artificial Sequence
  ENSG00000171462_15 (sequence is synthesized)
agattcccgagcgctcggctcgcatggcagccgcttcggcgcccggccccgcggccagctaggggcggccccgcgctccc

SEQ ID NO: 576357 - DNA, 120 bp, Artificial Sequence
  ENSG00000171466_0 (sequence is synthesized)
agtgtgccaccgccatctttaccggctgtggctcagcatggtcagtgccgtttaacctttattgtggtggagtccaccccgctgtgggcctcagataaccctgtacaaaggggaatggag

SEQ ID NO: 576358 - DNA, 120 bp, Artificial Sequence
  ENSG00000171466_1 (sequence is synthesized)
attgcctgtatccacctagattcataagctgccctgaggcgatcttggcatcaagaaagacagcattgaggcacatctcaccatcagcttcagaggatgtcagcctttgatatgtcccat

SEQ ID NO: 576359 - DNA, 120 bp, Artificial Sequence
  ENSG00000171466_2 (sequence is synthesized)
gggttttttcccagggaaccaatctgtccttttgaagaaaagacaaagataggaacgatggtagaggaccaccggtcaaattcttaccaggattcagtgacgtttgatgatgtggctgtg

SEQ ID NO: 576360 - DNA, 120 bp, Artificial Sequence
  ENSG00000171466_3 (sequence is synthesized)
gagttcaccccagaggagtgggctttactggacacaactcagaaatacctctacagagatgtgatgctggagaactacatgaacctggcctctgtggatttctttttctgcttaacttca

SEQ ID NO: 576361 - DNA, 120 bp, Artificial Sequence
  ENSG00000171466_4 (sequence is synthesized)
gaatgggaaatacaacctagaaccaaacggtcatcacttcagcagggttttttgaagaatcaaatattcactgggatacaaatgcagacaagaagctacagtggatggaaactctgtgag

SEQ ID NO: 576362 - DNA, 120 bp, Artificial Sequence
  ENSG00000171466_5 (sequence is synthesized)
aattgtggagaggtcttcagtgaacagttttgccttaagacacacatgagagctcagaatggagggaacacttttgagggtaattgttatggaaaagacagcatcagtgtgcacaaggaa

SEQ ID NO: 576363 - DNA, 120 bp, Artificial Sequence
  ENSG00000171466_6 (sequence is synthesized)
gcctctattggacaagaactttccaaatttaatccatgtggaaaagtcttcaccttaactccaggccttgctgtgcatcttgaaattctcaatggaagacaaccctacaaatgtaaggaa

SEQ ID NO: 576364 - DNA, 120 bp, Artificial Sequence
  ENSG00000171466_7 (sequence is synthesized)
tgtggaaaaggctttaagtattttgcaagccttgataatcacatgggaatccacattggagagaaactctgtgaatttcaggaatgtgagagagccatcacaacttcctcacacttaaag

SEQ ID NO: 576365 - DNA, 120 bp, Artificial Sequence
  ENSG00000171466_8 (sequence is synthesized)
cagtgtgtagcagttcatactggaaagaaatccgaaaagactaagaactgtgggaaatccttcactaatttttctcaactttctgcacatgcaaaaactcataaaggagagaagtccttt

SEQ ID NO: 576366 - DNA, 120 bp, Artificial Sequence
  ENSG00000171466_9 (sequence is synthesized)
gaatgtaaagaatgtggaagatcctttagaaattcctcatcctttaatgttcacattcaaattcacactggaataaaaccacacaaatgtacggaatgtgggaaagccttcactagatca

SEQ ID NO: 576367 - DNA, 120 bp, Artificial Sequence
  ENSG00000171466_10 (sequence is synthesized)
actcaccttactcaacatgtaagaactcacactggaataaaaccctatgaatgtaaggaatgtggccaagccttcactcagtacacgggccttgctatacacatacgaaatcacactgga

SEQ ID NO: 576368 - DNA, 120 bp, Artificial Sequence
  ENSG00000171466_11 (sequence is synthesized)
gagaaaccctatcagtgtaaggaatgtgggaaagccttcaatagatcttcaacgcttactcaacatagaagaattcacacaggagagaagccttatgaatgtgttgaatgtgggaagacc

SEQ ID NO: 576369 - DNA, 120 bp, Artificial Sequence
  ENSG00000171466_12 (sequence is synthesized)
ttcattacttcttcccatcgtagtaaacatttgaaaactcacagtggagaaaggtaaatgcaagatatgtgggaaagaatttctgtattcctcaccccacctgtgaactcctaccagaga

SEQ ID NO: 576370 - DNA, 120 bp, Artificial Sequence
  ENSG00000171466_13 (sequence is synthesized)
gaaaccttttgtatgtaaagaatttgggaaagcatttgctctttcctcatgcctaagtatgcatgaaagaattcacactggggagaaatactatgaatgtaaggatatgagtgttgttac

SEQ ID NO: 576371 - DNA, 120 bp, Artificial Sequence
  ENSG00000171466_14 (sequence is synthesized)
catttagcccattggttgccatctttaattattggcagtgcaaagatcatcagattagtcctaaatgccttttggaggttgtaatggctcacagattggccttagatgcatcccgagggt

SEQ ID NO: 576372 - DNA, 120 bp, Artificial Sequence
  ENSG00000171466_15 (sequence is synthesized)
ctgaaattaaacctacaggttctgaatacaacatcatggttacctgagtctgggcatctgtgaagaagggtcatggatggtgaggtcagtactgcaggctgcctcaccttggtgattaga

SEQ ID NO: 576373 - DNA, 120 bp, Artificial Sequence
  ENSG00000171466_16 (sequence is synthesized)
ttcctaagatcatagcattaacaagttctgtacgagataaatcatgcagattgatcccagcccctgttggttagtggctgccagtgtggcacattcatgtcaaaatttaccagaagccaa

SEQ ID NO: 576374 - DNA, 120 bp, Artificial Sequence
  ENSG00000171466_17 (sequence is synthesized)
gatgatgtaggccccagaggtggattgttaaaaagatgctcctccaaggttctcttctgttcccatggatcctgcagagcatgtcaggagtgaaaccatccataactgccagtgcccttt

SEQ ID NO: 576375 - DNA, 120 bp, Artificial Sequence
  ENSG00000171466_18 (sequence is synthesized)
cacagctgattatttctatgtccccttcttgtaaaataagaagtgtgacaaccttgactgttctgttctgtcttctctgtccattttaggtggcacaatgtaagtggcagtgtctcttat

SEQ ID NO: 576376 - DNA, 120 bp, Artificial Sequence
  ENSG00000171466_19 (sequence is synthesized)
agtataatccagtctctcttctcacttctgttaagatggctgatatagtccatgaatcccactcatgatctctttatcaaatgattgttcagccacactttgaggattctcttcagtaca

SEQ ID NO: 576377 - DNA, 120 bp, Artificial Sequence
  ENSG00000171466_20 (sequence is synthesized)
agttttctaatttttgcagtatggataggctgagaattttccaaatctccaagttctggttcctttttccttaacaatttcttctgcaattcaggtctccttttgcatttttgccgagac

SEQ ID NO: 576378 - DNA, 120 bp, Artificial Sequence
  ENSG00000171466_21 (sequence is synthesized)
cagctgggtcgtggagaccctaacccagtggctctagaggaattaagacaaagacacagaaatatagtgcagagtgggaatcggggctcacagccttcagagctgagcttgaacagagtt

SEQ ID NO: 576379 - DNA, 120 bp, Artificial Sequence
  ENSG00000171466_22 (sequence is synthesized)
tgacccacatatttattgacagtaagcctgtgataaacattattcctatagattgtagatcagctataagtattccttatgagaaagaaagggacaggctctggcttgttatctgcaaca

SEQ ID NO: 576380 - DNA, 120 bp, Artificial Sequence
  ENSG00000171466_23 (sequence is synthesized)
ggctctggcttgttatctgcaacaggaatatgtccttaaggcacaaatcactcatgctattgtttgtggtttaggaatgccttgagcagttttccagttttctgccctgggtgggccagg

SEQ ID NO: 576381 - DNA, 81 bp, Artificial Sequence
  ENSG00000171466_24 (sequence is synthesized)
ctcattgcctgtttatggccagatttggggggcctgttcccagcacattttcctgtaagcactcaggaataatgaagcttc

SEQ ID NO: 576382 - DNA, 120 bp, Artificial Sequence
  ENSG00000171466_25 (sequence is synthesized)
agcacattttcctgtaagcactcaggaataatgaagcttcctgtgtcctttaacactttaattacagatcttagtgatacataccattttatctgtctcaagctctaccttccgtaaaat

SEQ ID NO: 576383 - DNA, 120 bp, Artificial Sequence
  ENSG00000171466_26 (sequence is synthesized)
gctagaatacagttctgccaagttcttcaccactttatatcaagggttgtcttttcttcatttcccaatagcatgttcctcattccccaatgacacctcaccagaataacccttaccaac

SEQ ID NO: 576384 - DNA, 120 bp, Artificial Sequence
  ENSG00000171466_27 (sequence is synthesized)
cttatttccagcttgcacatcagaatttttccagcctctactcatttgtcagtttcaaagctgcttcacatttttagtttttttgtttgtttttaattgcagtacctcacttctcagtac

SEQ ID NO: 576385 - DNA, 120 bp, Artificial Sequence
  ENSG00000171466_28 (sequence is synthesized)
caatatctgccttagtcagctcagacaaccataagagaataccgcagaccaaatggcttagaaattaatttaattttaaatcaatgaggttaaaaacacaggattttttttttttttttt

SEQ ID NO: 576386 - DNA, 72 bp, Artificial Sequence
  ENSG00000171466_29 (sequence is synthesized)
agttccagtgattctcctgcctcaccctcagtagctgggattattggcatgcaccacaaaccttagctaagt

SEQ ID NO: 576387 - DNA, 79 bp, Artificial Sequence
  ENSG00000171466_30 (sequence is synthesized)
acctcctgagttccagtgattctcctgcctcaccctcagtagctgggattattggcatgcaccacaaaccttagctaag

SEQ ID NO: 576388 - DNA, 120 bp, Artificial Sequence
  ENSG00000171466_31 (sequence is synthesized)
ctgggattacaggcctgagccaccgtatctggcccaaaacacaaatttatattctcacatatctggaggctggaagtctgagatcagagtgccagcatggtcaacctctagtgagagctc

SEQ ID NO: 576389 - DNA, 120 bp, Artificial Sequence
  ENSG00000171466_32 (sequence is synthesized)
atggtcaacctctagtgagagctctcttcctggcatgtaagtgcccacttcctcatgttttcacacgatggagaccaacaaataggtcggtcggtctcccccctccccgcccccttctct

SEQ ID NO: 576390 - DNA, 120 bp, Artificial Sequence
  ENSG00000171466_33 (sequence is synthesized)
aataggtcggtcggtctcccccctccccgcccccttctcttttcacatacagtcacattgaggtttggaacttcatatgaaatttggggggtcactgtgtgtgtgtgtgtgtgtgtgtgt

SEQ ID NO: 576391 - DNA, 120 bp, Artificial Sequence
  ENSG00000171466_34 (sequence is synthesized)
atacctaactcctaaagtggaacagtaagagtcattatttatagattatctgattctctatgtggaaagagaaaagaatcatattaagtactttggactgaacaatgacccccaaaattc

SEQ ID NO: 576392 - DNA, 120 bp, Artificial Sequence
  ENSG00000171466_35 (sequence is synthesized)
gtatgatgatgaagctctctctaaatattttcttgctttactggactgattttaacccgctgcacaacaccaactaaaagtagtaataccagcatacttgtctttgcagttctggtgaga

SEQ ID NO: 576393 - DNA, 120 bp, Artificial Sequence
  ENSG00000171466_36 (sequence is synthesized)
tatgcactctattttgttggtttggctgtaggcttttatttcttttttattttttgaagaggttatgtcctgtcagggaaccagccccgatattcacataggttcttttctattttccct

SEQ ID NO: 576394 - DNA, 60 bp, Artificial Sequence
  ENSG00000171466_37 (sequence is synthesized)
ggttcttttctattttccctaagtgtcagccacagacatcacatgtcggtaggttccgtg

SEQ ID NO: 576395 - DNA, 80 bp, Artificial Sequence
  ENSG00000171466_38 (sequence is synthesized)
agatggctacacccaggggggccagttcagagacccactcccaggtgtgcattctctttctcaaggatgttccttgctga

SEQ ID NO: 576396 - DNA, 77 bp, Artificial Sequence
  ENSG00000171466_39 (sequence is synthesized)
gtgaaagaagagaaatgtggctttgttccacctggctcaccggcggtcagaatttaaggttatctctcttgtttcct

SEQ ID NO: 576397 - DNA, 79 bp, Artificial Sequence
  ENSG00000171466_40 (sequence is synthesized)
ttgctcaaacacacatgctgtaaatatacatcctcctcagctgacaggattgagagattaaagtaaagacaggcatagg

SEQ ID NO: 576398 - DNA, 64 bp, Artificial Sequence
  ENSG00000171466_41 (sequence is synthesized)
ccttcacaatccatgtttttctgccatggcttcagccagtccccccgtttggggtccctgactt

SEQ ID NO: 576399 - DNA, 120 bp, Artificial Sequence
  ENSG00000171466_42 (sequence is synthesized)
catggcttcagccagtccccccgtttggggtccctgacttcctgcaacaatgtcctgcaggaaaagttttttctttatatccagtttttacatgatgaattatttcccaatatttcatag

SEQ ID NO: 576400 - DNA, 120 bp, Artificial Sequence
  ENSG00000171466_43 (sequence is synthesized)
tttatgaggctgaattcctcttgaatttattaaatgcttccttcacatcctctgtgatgatcatgtttatttactgataaaactcaatacctagaactgcacctagctcatgatggtacc

SEQ ID NO: 576401 - DNA, 120 bp, Artificial Sequence
  ENSG00000171466_44 (sequence is synthesized)
taataaatacttcaatgaaatgatgtggtgatgcatgcctatagttttagctacttgggagggtggcctgagcccaggggttctagaccagcttaggcaacatagcaagaccccatctca

SEQ ID NO: 576402 - DNA, 90 bp, Artificial Sequence
  ENSG00000171466_45 (sequence is synthesized)
tgaagaagtgaatgcatggaaaggcgcttttctaaaacaaatgtggtcaggctgggtgtgggggcttatgcctgtaatcccagcaatttg

SEQ ID NO: 576403 - DNA, 64 bp, Artificial Sequence
  ENSG00000171466_46 (sequence is synthesized)
tgctgggtgacagggtgcgactctgtcaaaaataaataaattaaattaaataaatgtggtattt

SEQ ID NO: 576404 - DNA, 120 bp, Artificial Sequence
  ENSG00000171466_47 (sequence is synthesized)
gtcaaaaataaataaattaaattaaataaatgtggtatttgtatttattgcttttccaatgttacatcaaccttgtattcctggataagctcgactgtgacataatggatcacttaaaaa

SEQ ID NO: 576405 - DNA, 120 bp, Artificial Sequence
  ENSG00000171466_48 (sequence is synthesized)
tgaataacattgtgatttttaaaaaattgtcccttaatgatatttgtatataatgactgtcatatactgtagtggggcatgttcctactatttctaaattcttaatctataagagtcatc

SEQ ID NO: 576406 - DNA, 120 bp, Artificial Sequence
  ENSG00000171466_49 (sequence is synthesized)
aatcccagcacttttggaggctgaggcaaaaagatcccttgagccaaggagttcaaaccagcctgggcaacatagcgaaaccacatctctatttaaaaatactacaagatattttcattt

SEQ ID NO: 576407 - DNA, 120 bp, Artificial Sequence
  ENSG00000171466_50 (sequence is synthesized)
atctctatttaaaaatactacaagatattttcatttttttggtttgtttctttgtttttgagttggtgtttgtttctttgtttttgagttagtgtttcactcgttgcccaggctggagtg

SEQ ID NO: 576408 - DNA, 74 bp, Artificial Sequence
  ENSG00000171466_51 (sequence is synthesized)
ctggagtgcaatggtgtgatctcaacttactgcaaattccacctcctgggttccgcctccaccttgcctggctg

SEQ ID NO: 576409 - DNA, 90 bp, Artificial Sequence
  ENSG00000171466_52 (sequence is synthesized)
tcctgacctcaggtgatctgcatgcctcatactcccaaagtaggccaatactgcaaaatattttaaaaagttaaaattatctcttctggc

SEQ ID NO: 576410 - DNA, 120 bp, Artificial Sequence
  ENSG00000171466_53 (sequence is synthesized)
ctgcaaaatattttaaaaagttaaaattatctcttctggctggtcatagtggctcacacttttaatcccagcacactgggaagctcagtcagaaggattccttgaggccaggagttcaag

SEQ ID NO: 576411 - DNA, 120 bp, Artificial Sequence
  ENSG00000171466_54 (sequence is synthesized)
aaggattccttgaggccaggagttcaagatcagtctgggcaacacagaccccatatctccaaaaaaataaaaataaataaataaaacagttatcaggctgggagtggtggctcatgcctg

SEQ ID NO: 576412 - DNA, 120 bp, Artificial Sequence
  ENSG00000171466_55 (sequence is synthesized)
cgagaatccgtctcaaaaaaaaaaaaaaagacaactaggttgggcacggtgcttcacggctttaatcacagcactttgggaggtcaaggcagggggtcacctgaggtcaggagttcgaga

SEQ ID NO: 576413 - DNA, 120 bp, Artificial Sequence
  ENSG00000171466_56 (sequence is synthesized)
ccagcctggccaatgcggtgaaacttttgtctctactaaaaattcaaaaaataaaattagccaggtgagttggcgggcgcctgtaatcccagccgcttgggaggctgaggcaggagaatt

SEQ ID NO: 576414 - DNA, 120 bp, Artificial Sequence
  ENSG00000171466_57 (sequence is synthesized)
gggtgacaagagcaaaactccatctcataaaaaaaaaaaaaaaaagacaactaaggcttgcataagtattttgagaatattcttctaggcatgtttttatttccaaatgtgtagcaaaaa

SEQ ID NO: 576415 - DNA, 120 bp, Artificial Sequence
  ENSG00000171466_58 (sequence is synthesized)
gcatgtttttatttccaaatgtgtagcaaaaatttatactttttatatttttcatttttgctggttgtataacttcagtctccttttgcattctggaataacttattaattgtgcattct

SEQ ID NO: 576416 - DNA, 120 bp, Artificial Sequence
  ENSG00000171466_59 (sequence is synthesized)
ttccctttgcttgtgttaatcttggtagagagtacccaggtttatgaattctttcagatatttcgcttgaaaaatctacactatttcttgcatgttttctgttccactaattctgttaga

SEQ ID NO: 576417 - DNA, 120 bp, Artificial Sequence
  ENSG00000171466_60 (sequence is synthesized)
tatttatatagttacatcagcttgattttcctctacttcttagtctttctgtatgctttttaaaaaaatgtgtctttttatacatactttagctggagttttaaaaaatctgtataccgc

SEQ ID NO: 576418 - DNA, 71 bp, Artificial Sequence
  ENSG00000171466_61 (sequence is synthesized)
tacatactttagctggagttttaaaaaatctgtataccgctgggcatagtggctgatgtgggagttcgaga

SEQ ID NO: 576419 - DNA, 120 bp, Artificial Sequence
  ENSG00000171466_62 (sequence is synthesized)
aaaaaaaaaaaaaaagaaaaaatacttgaataataccaattaacaatccttttatgttgcacatttagtgcctgacatttaattagtaataatttggattaatttctagcatctaatttt

SEQ ID NO: 576420 - DNA, 120 bp, Artificial Sequence
  ENSG00000171466_63 (sequence is synthesized)
aattagtaataatttggattaatttctagcatctaattttttttgtttgtttcattgtgttcccctctttgtactgatgtgtattgatcatacctttaatttattttattcttgatgttt

SEQ ID NO: 576421 - DNA, 120 bp, Artificial Sequence
  ENSG00000171466_64 (sequence is synthesized)
gaaatttgtatgttacttttcgttgttaccataaataacaattttaaatataagtcttccttaataccttttctttctaactaagtgcactacactgtttgaataaagtgattcccatat

SEQ ID NO: 576422 - DNA, 120 bp, Artificial Sequence
  ENSG00000171466_65 (sequence is synthesized)
acacttactacacttggagagagacccagaaggaagtgcattgtcacacaagctattagacagatctggtggcagaaagaataggctccttgacagaggcccagtgacaccctgtggtag

SEQ ID NO: 576423 - DNA, 120 bp, Artificial Sequence
  ENSG00000171466_66 (sequence is synthesized)
attacagatgtcttgagattactctctgaaggtgcaatctctctcctttttatgtgagccagtccttgctttgaccagtagaaaccagcacaactttggtttgcaagtccatcctcaaga

SEQ ID NO: 576424 - DNA, 120 bp, Artificial Sequence
  ENSG00000171466_67 (sequence is synthesized)
ggcttctgctaattaagtagctgctgttttcagctagtaatttttgtggctgtttattacacagtaaaggccaactgatacacatacccctttgcccacaagccaataaactgtggttct

SEQ ID NO: 576425 - DNA, 120 bp, Artificial Sequence
  ENSG00000171466_68 (sequence is synthesized)
tcaggacccactgggaaatcctccagaaccaggcccactcgtgttagcagtaaagaattctgggccaggcacagtggctcatgcctttaaacccagcactttgggaggctgagatggttg

SEQ ID NO: 576426 - DNA, 73 bp, Artificial Sequence
  ENSG00000171466_69 (sequence is synthesized)
atgcctttaaacccagcactttgggaggctgagatggttggatcacgaggccaagagattgagaccattttgg

SEQ ID NO: 576427 - DNA, 89 bp, Artificial Sequence
  ENSG00000171466_70 (sequence is synthesized)
ggtgtggtggcactcacctgtagtcccagctacttgggggctgagatgggagaatcacttctattgcgccacggcactccagcctggtg

SEQ ID NO: 576428 - DNA, 120 bp, Artificial Sequence
  ENSG00000171466_71 (sequence is synthesized)
gtcaatgttcacagagagactgggcatctcccactatgagctgcaatgagaaaatcaagatttgaattcgtattcctctgcttagggactcaggaggccggaagtcagcaggactgaagg

SEQ ID NO: 576429 - DNA, 83 bp, Artificial Sequence
  ENSG00000171466_72 (sequence is synthesized)
cttagggactcaggaggccggaagtcagcaggactgaaggcccaaagaaacagttgatgttatgagctgcaagcaagttgcca

SEQ ID NO: 576430 - DNA, 120 bp, Artificial Sequence
  ENSG00000171466_73 (sequence is synthesized)
agagaccaggtgggaggtaatagaatcatgggggggggtttccccatgctgttcaagtaattctcatgcctcagtcagccaagtagctgggataataggcgtgtgctgtttttgtcacag

SEQ ID NO: 576431 - DNA, 120 bp, Artificial Sequence
  ENSG00000171466_74 (sequence is synthesized)
tgagtaaatctcatgaggtctgtcagttttataagcagctgttcccctggacaggctctcttgccttctgccatataagatgtgcctttgctcctccttcaccttctgtcatgattttga

SEQ ID NO: 576432 - DNA, 120 bp, Artificial Sequence
  ENSG00000171466_75 (sequence is synthesized)
tccattaaacctctttttcttcataacttacccagtctcggccaggcacggtggctcacactgtaacaacaacaaggaacacagcacctaaactcacacttttttattttggtagagaag

SEQ ID NO: 576433 - DNA, 120 bp, Artificial Sequence
  ENSG00000171466_76 (sequence is synthesized)
cacctaaactcacacttttttattttggtagagaaggtatctcactccattgcccaggctgtcctcaaactcctgagctagagtaatcctctcttctgggcctcccaaagtgctgggatt

SEQ ID NO: 576434 - DNA, 120 bp, Artificial Sequence
  ENSG00000171466_77 (sequence is synthesized)
gagccaccatgcccagccagacatctttacatgacattttcaaggtccaattggtcctaattctccataaatcctttcagagtattaacaatgaagcaaatcttgctaaatctttttatg

SEQ ID NO: 576435 - DNA, 120 bp, Artificial Sequence
  ENSG00000171466_78 (sequence is synthesized)
atgcagtacaagatgtatatatgtatcgtttttatcactgataaaaacagtacagtcattaaaaactacagaattatattggtaatgaatattggtacaaattcactaagtaagccaggt

SEQ ID NO: 576436 - DNA, 120 bp, Artificial Sequence
  ENSG00000171466_79 (sequence is synthesized)
ctgaggcaggtggatcacaaggtcagattgagatgatcctggctaaaacggtgaaaccttgtatctactaaaactaaaaaaatatagctgggcgtggtggcatgtgcatgtattcctagc

SEQ ID NO: 576437 - DNA, 90 bp, Artificial Sequence
  ENSG00000171466_80 (sequence is synthesized)
ggctaaaacggtgaaaccttgtatctactaaaactaaaaaaatatagctgggcgtggtggcatgtgcatgtatgttacagtgaaccgaga

SEQ ID NO: 576438 - DNA, 120 bp, Artificial Sequence
  ENSG00000171466_81 (sequence is synthesized)
gtctcaaaaaacaaacaaacaaaaaaatgcgctaagtataatagtagcaactgggcaaagtggcttatgcctggagtctcaacactttgaaaggaggcaaaaggattacttgagctcagg

SEQ ID NO: 576439 - DNA, 120 bp, Artificial Sequence
  ENSG00000171466_82 (sequence is synthesized)
ggaggcaaaaggattacttgagctcaggagttcgagacctgcctggacagcatagcaagccccccatctacaaaaaacttaaaaattaaaaaatgcagtgagccaagatcatgccactgc

SEQ ID NO: 576440 - DNA, 120 bp, Artificial Sequence
  ENSG00000171466_83 (sequence is synthesized)
aaaaaaaaaaaaaagaaggaaaaaaggaagctaggaaggaacggattagcaaataaattccaactgcttgataagaaaatagtaaacccagtggcatttactgcaggaatataaggttgg

SEQ ID NO: 576441 - DNA, 120 bp, Artificial Sequence
  ENSG00000171466_84 (sequence is synthesized)
aaggttggctctggctcattcgtatctttgtatttgtgcattcatcattatggatgatgcctggaatttgcccagagggatgctcaagaccctttcagacacattttttttttctaaact

SEQ ID NO: 576442 - DNA, 85 bp, Artificial Sequence
  ENSG00000171466_85 (sequence is synthesized)
caaagtggccggtggtgttctttttttttttttttttttccagagacagtgtcttgccatgtcacctaggctggagtgcagtggt

SEQ ID NO: 576443 - DNA, 89 bp, Artificial Sequence
  ENSG00000171466_86 (sequence is synthesized)
gggctcaagcaatcctctcacctcagccttctgagtagctgggaatgcaggcatgtaccaccaggcccggctagtcgagactgtgtctc

SEQ ID NO: 576444 - DNA, 120 bp, Artificial Sequence
  ENSG00000171466_87 (sequence is synthesized)
actatattgcccaggctggtcttgaaatcctgttcaagttatccttctgcatcagcctcccaaaatgctaggatgacagggttgagccactgtgcctggcctctatttctaatgtctagg

SEQ ID NO: 576445 - DNA, 120 bp, Artificial Sequence
  ENSG00000171466_88 (sequence is synthesized)
gttgagccactgtgcctggcctctatttctaatgtctaggcagcaactgttgttgtgttgttcctgttacatagtcttattacccatttgatacaaagttcagattgattgttcctgttc

SEQ ID NO: 576446 - DNA, 120 bp, Artificial Sequence
  ENSG00000171466_89 (sequence is synthesized)
gtattccattttgggttttccctctatctttgttgattttttaaaaaattaaatatgtaaaagaataaagggccaagcagagtggctcacagttgtaatgccaacaatgtgggaggccaa

SEQ ID NO: 576447 - DNA, 120 bp, Artificial Sequence
  ENSG00000171466_90 (sequence is synthesized)
ggaaggatgatcgcttgagctcaggagtttgagggcagcctaggcaacatagagagatctcttctctacaaaatatatttttaaaaattagctggatgtggtggtgcacgtatgtagtcc

SEQ ID NO: 576448 - DNA, 120 bp, Artificial Sequence
  ENSG00000171466_91 (sequence is synthesized)
ctggtactcaggcaaaggactgcttgagcccaggaagtaaaggctgcagtgagccatgataatgccactatacttcagcctgtgtgacagagtgaaaccctgttttttttttttttttta

SEQ ID NO: 576449 - DNA, 120 bp, Artificial Sequence
  ENSG00000171466_92 (sequence is synthesized)
aagaaaaaaaagaatgtaattttaaacatcagaactgtaaggtactctgagctggccataccatggtcaagccattgtgacatccccccgcccttgtgataatgtactttgtgatattcc

SEQ ID NO: 576450 - DNA, 120 bp, Artificial Sequence
  ENSG00000171466_93 (sequence is synthesized)
cctgcccttgtgaatgtactttataagatacatcctcccccacctagtgaatgtaccctgccattggcccttgtgacagtacacctttcctctccttgtaaatgtactttgtaaccttcc

SEQ ID NO: 576451 - DNA, 120 bp, Artificial Sequence
  ENSG00000171466_94 (sequence is synthesized)
tccccacccttgtgatgatacaccctccccgcccttgtgaatgtactttgtaacatcctccccgcccttgagaatgtactttgtaacgtccaccccactgcctacaaaaaaaattgctcc

SEQ ID NO: 576452 - DNA, 85 bp, Artificial Sequence
  ENSG00000171466_95 (sequence is synthesized)
ttgtaacgtccaccccactgcctacaaaaaaaattgctcctaactccaccgcttatcccaaacctatggttttgttggacagccc

SEQ ID NO: 576453 - DNA, 62 bp, Artificial Sequence
  ENSG00000171466_96 (sequence is synthesized)
tagctgggcacggtattgaagtggaggtttcaatgagcctagatcacaccactgcactccag

SEQ ID NO: 576454 - DNA, 70 bp, Artificial Sequence
  ENSG00000171466_97 (sequence is synthesized)
cagctaatttttgtattttcgacccccctgattcagcctgattcaacctcccaaagtgctgggattacag

SEQ ID NO: 576455 - DNA, 120 bp, Artificial Sequence
  ENSG00000171466_98 (sequence is synthesized)
taacctttattgtggtggagtccaccccgctgtggtgagttctacctgcttgggggtccgggacataccagcggggcggcaaaggaaggattgggcgtggtcgcccaggagcctctcaga

SEQ ID NO: 576456 - DNA, 120 bp, Artificial Sequence
  ENSG00000171466_99 (sequence is synthesized)
tccgcctagtttcactcgcttttctaggggctgtcagtcctcctggtgcggcctctggccagttccgagaggccgcacagtccgtctggctgcgtcgggaagtgtgtttgttccgcctcc

SEQ ID NO: 576457 - DNA, 80 bp, Artificial Sequence
  ENSG00000171467_0 (sequence is synthesized)
cttggttcctgcggccgctccctgagtggaggagcggggaaccccggaggcgggggggggtgtgtcggacgcgtgctcgc

SEQ ID NO: 576458 - DNA, 80 bp, Artificial Sequence
  ENSG00000171467_1 (sequence is synthesized)
tcccgcggctgaggcggcgcgcagcggccgaggtggcggcggctgcagctgcggcggcgcgctccgagcctgcgtctagg

SEQ ID NO: 576459 - DNA, 120 bp, Artificial Sequence
  ENSG00000171467_2 (sequence is synthesized)
ccccgggtcagagctgtcgccgtggccgccgctgcaagaaccatgtaccgcagcagcgctcgctcctccgtctcttcccaccggcctaaagacgacggcgggggcggcccgcgcagcggc

SEQ ID NO: 576460 - DNA, 80 bp, Artificial Sequence
  ENSG00000171467_3 (sequence is synthesized)
cgcagctctggctcctcctcaggcccggctcgccgcagctcaccgccgcctccgccctccggctcctcgtcgcggacccc

SEQ ID NO: 576461 - DNA, 80 bp, Artificial Sequence
  ENSG00000171467_4 (sequence is synthesized)
cccgcctcgggcccgtcgcggctccccgtcgccaccgcggggccgacgactcttcccgccgggcccggccggcttcagag

SEQ ID NO: 576462 - DNA, 120 bp, Artificial Sequence
  ENSG00000171467_5 (sequence is synthesized)
agaggcagcagccggggggagtcccgcgccgactatgcccgggacggccgcggagaccatccaggcgacagcggcagccggagacgctctcctggtctgtgttctgactctttggaaaag

SEQ ID NO: 576463 - DNA, 120 bp, Artificial Sequence
  ENSG00000171467_6 (sequence is synthesized)
agcttaaggatcactgttggcaatgaccacttctgtgttagcacaccagaacggcgacggcttagtgatcggctggggtcaccagtggataatctggaagacatggacagggatgacctg

SEQ ID NO: 576464 - DNA, 120 bp, Artificial Sequence
  ENSG00000171467_7 (sequence is synthesized)
actgatgattctgtcttcactcgaagctcccagtgctctcggggtcttgagcgatatatttcccaggaggaagggcctctcagtcccttcttgggacaacttgatgaggactaccgaaca

SEQ ID NO: 576465 - DNA, 120 bp, Artificial Sequence
  ENSG00000171467_8 (sequence is synthesized)
aaagaaactttcctgcatcgatctgattatagtccccatatcagttgtcatgatgagctgttgcggggaacagaacggaatcgagaaaaactcaaaggctactccatacgatctgaagaa

SEQ ID NO: 576466 - DNA, 120 bp, Artificial Sequence
  ENSG00000171467_9 (sequence is synthesized)
aggagccgggaggccaaaagaccccgttatgatgacacagtgaagataaacagcatgggaggggatcacccaagttttacatcaggaactcgcaactatcgacagcgtagaagaagccca

SEQ ID NO: 576467 - DNA, 120 bp, Artificial Sequence
  ENSG00000171467_10 (sequence is synthesized)
agtcctaggtttctcgaccctgagtttcgagaactggatcttgccagacgaaagcgagaggaagaggaggagcgaagtaggagcttgagtcaggagctggttggagttgatggtggtggt

SEQ ID NO: 576468 - DNA, 120 bp, Artificial Sequence
  ENSG00000171467_11 (sequence is synthesized)
actggctgttccatccctggattgtcaggtgtcctaacagcatcggagccaggatattctttgcatcggcctgaggaagtatctgtgatgcccaagaaatccattttgaagaagcggatt

SEQ ID NO: 576469 - DNA, 120 bp, Artificial Sequence
  ENSG00000171467_12 (sequence is synthesized)
gaggtggacataatggagccctccatgcagcttgagagtttttccagcagtaccagctccagccaggatcaccctctctactctgggcacccatcccttccactaagtggtgctattgct

SEQ ID NO: 576470 - DNA, 120 bp, Artificial Sequence
  ENSG00000171467_13 (sequence is synthesized)
gcttttgcctcagagattgaaaacaaggggactatggtagagactgccttgaaggaacctcagggcaacctctaccaatggggtccccttcctgggattcccaaagacaacagtcctctc

SEQ ID NO: 576471 - DNA, 120 bp, Artificial Sequence
  ENSG00000171467_14 (sequence is synthesized)
agagaaaaatttggaagttttctatgccacaaggataatttggatttgaaggctgagggacctgagcgacacacagacttcctgctgccccatgagagagctagccaggatggcagtggt

SEQ ID NO: 576472 - DNA, 120 bp, Artificial Sequence
  ENSG00000171467_15 (sequence is synthesized)
ttttcccgcattctgagcatgttggctgattctaccagtacacaggaaaaaaggcgacgtagctttcccgacattgaagatgaggagaaatttctctatggggatgaagaagaggattta

SEQ ID NO: 576473 - DNA, 120 bp, Artificial Sequence
  ENSG00000171467_16 (sequence is synthesized)
aaggcagaatccgtaccaaagccccttgggagctctgagagtgaagttatgaggcagaaggcaagctccctgccgtcttcagctccagctgtaaagctagaatcactagaagagaccaat

SEQ ID NO: 576474 - DNA, 120 bp, Artificial Sequence
  ENSG00000171467_17 (sequence is synthesized)
ccagaatatgcgaagatccatgacttgctcaagacaatagggctggatattggagtagcagagattagtcaattggctgcacgcacccaggaacgacttcatggcaagaagccatcatta

SEQ ID NO: 576475 - DNA, 120 bp, Artificial Sequence
  ENSG00000171467_18 (sequence is synthesized)
cgctcctcagctgaccgccgttcctcagttgaccgatacttttcagctgaccactgttcctcagttgaccaccgcttctcagctgaccgctgttcctcagttgaccactgcttctcagct

SEQ ID NO: 576476 - DNA, 120 bp, Artificial Sequence
  ENSG00000171467_19 (sequence is synthesized)
gatcgacgttcctcagatccccacagactagagagcagggaggcacatcatagcaatacccactctccagaggtgtcccatccacacccaccttctcctgtggatccttacctgctcaca

SEQ ID NO: 576477 - DNA, 120 bp, Artificial Sequence
  ENSG00000171467_20 (sequence is synthesized)
aaaaacagccctccattcctaaagtctgaccatccagtgggtcatatttcaggaccagaggtggttggtagtgggtttcagtcatctgttgcagtcaggtgcatgttgccatcagcccca

SEQ ID NO: 576478 - DNA, 120 bp, Artificial Sequence
  ENSG00000171467_21 (sequence is synthesized)
tctgccccaattagacttccacacactgctgctttatctcagtttcacatgccaagggcctctcagtttgctgcagctcggatacctccgaactaccagggacctgccattccccctgcc

SEQ ID NO: 576479 - DNA, 120 bp, Artificial Sequence
  ENSG00000171467_22 (sequence is synthesized)
tcttttgatgcctataggcactacatggcatatgcagcctccagatggcccatgtatcccacctctcaaccgtcaaaccaccctgtacctgaaccacacaggataatgccaataaccaaa

SEQ ID NO: 576480 - DNA, 120 bp, Artificial Sequence
  ENSG00000171467_23 (sequence is synthesized)
caagctactcgtagccgtcccaatcttcgtgtgatccccactgtgactcctgataagcctaagcagaaagagtctctgcgaggctcaattcctgcggcccaagtgcctgtccaggtgtcc

SEQ ID NO: 576481 - DNA, 120 bp, Artificial Sequence
  ENSG00000171467_24 (sequence is synthesized)
attccatcactcataagatataatccagagaagatctctgatgagaagaaccgtgcttcccagaagcaaaaggttattgaagagagggaaaaactaaagaatgaccgggaagcccgccag

SEQ ID NO: 576482 - DNA, 120 bp, Artificial Sequence
  ENSG00000171467_25 (sequence is synthesized)
aagaagatgtactatcttaggaccgagttagagcggcttcataaacaacaaggagaaatgctgcgcaagaaacgaagggagaaggatggccacaaagatcctctcttggtggaggtgagt

SEQ ID NO: 576483 - DNA, 120 bp, Artificial Sequence
  ENSG00000171467_26 (sequence is synthesized)
cggcttcaggataacattatgaaggacattgcagagctacggcaagaggcagaagaggcagaaaagaagcaatctgaactggacaaagtggctcagatcttgggaattaacatcttcgat

SEQ ID NO: 576484 - DNA, 120 bp, Artificial Sequence
  ENSG00000171467_27 (sequence is synthesized)
aaatcccagaagtctttaagtgacagtagagagcctacagagaagcctgggaaagcagaaaaatctaagagcccagaaaaagtgtcatcgttctcaaactcctcctccaacaaggaatca

SEQ ID NO: 576485 - DNA, 120 bp, Artificial Sequence
  ENSG00000171467_28 (sequence is synthesized)
aaagtaaacaatgagaagtttcgtactaagagccccaagcctgccgaaagcccccagtcagccactaagcagttggatcagcccactgctgcttatgagtattatgatgctggcaatcac

SEQ ID NO: 576486 - DNA, 120 bp, Artificial Sequence
  ENSG00000171467_29 (sequence is synthesized)
tggtgcaaagactgcaacaccatctgtgggaccatgtttgatttcttcactcatatgcacaataagaagcacacacagacactggatccctacaacagaccttgggcttcaaagacccag

SEQ ID NO: 576487 - DNA, 120 bp, Artificial Sequence
  ENSG00000171467_30 (sequence is synthesized)
agtgaggccaagcaagatgccataaagcgcactgacaagataactgttcctgcaaaaggctctgagtttctggttcccatcagtggattttattgccagctctgtgaggaatttttgggg

SEQ ID NO: 576488 - DNA, 120 bp, Artificial Sequence
  ENSG00000171467_31 (sequence is synthesized)
gatccaatttctggggagcaacatgtgaagggtcaccaacacaatgagaaatacaagaaatatgtggatgaaaacccattatatgaggagcggcggaatctggaccgccaagctggcttg

SEQ ID NO: 576489 - DNA, 120 bp, Artificial Sequence
  ENSG00000171467_32 (sequence is synthesized)
gctgtggtcctagagacagaacggcgacggcagagtgagctaaagcgcaaacttagtgagaaaccaaaggaggagaagaaagaaaaaaaggcaaaggctgtgaaagaagtaaaggaggat

SEQ ID NO: 576490 - DNA, 120 bp, Artificial Sequence
  ENSG00000171467_33 (sequence is synthesized)
gacaaggtctctgagaaattagaagaccaactctctgagggtaggaactcccctgaaaaagctgaaaataaaaggaacactggcatcaaactccagttaaaagaagaggtaaagaaggaa

SEQ ID NO: 576491 - DNA, 120 bp, Artificial Sequence
  ENSG00000171467_34 (sequence is synthesized)
agaagaggagaaaagttcattggtgaccccaagtatctctaaagaagagattctagaaagtagtaaggacaaagaggatggcaaaactgaagctgggaaggcaaagcctatcaaaatcaa

SEQ ID NO: 576492 - DNA, 120 bp, Artificial Sequence
  ENSG00000171467_35 (sequence is synthesized)
gctctctgggaaaactgttgttgcacataccagcccttggatgcctgttgtgacaacttccacacagactaagatccgacccaacctgcctattccatccacagtactccgcaagtcatg

SEQ ID NO: 576493 - DNA, 120 bp, Artificial Sequence
  ENSG00000171467_36 (sequence is synthesized)
ttcagccacaatgagcaagccagctcctcttaacacctttctgtctattaagtcctctggaaccactgctaaacctctgccagtggttaaagagtcttcagctgatctcctcttacctcc

SEQ ID NO: 576494 - DNA, 120 bp, Artificial Sequence
  ENSG00000171467_37 (sequence is synthesized)
agacatcatctccaaagcatttggaggggaagaggtgattctaaaagggtctccagaggaaaaagtggtgttggctgaaaagagtgagccatctcatttacctgaacaaatactaccacc

SEQ ID NO: 576495 - DNA, 120 bp, Artificial Sequence
  ENSG00000171467_38 (sequence is synthesized)
tcctccaccacccccacctccaccacctccaccaccccccgttatacctcatccagctgccccgtctgctgctcaagcaaatgctatcttggctccagtaaaatcaaacccagttgtatc

SEQ ID NO: 576496 - DNA, 120 bp, Artificial Sequence
  ENSG00000171467_39 (sequence is synthesized)
tcagactctcagccctggcttcgtgggtcctaacattttgaacccagtgttgcctgtagccatcatggcctcagcacagccagctgccattccttctgatgagacagctcctggggtgag

SEQ ID NO: 576497 - DNA, 120 bp, Artificial Sequence
  ENSG00000171467_40 (sequence is synthesized)
tgagagtgaccgagaccagaccctgttctctgtgttagtacgtcctccaccacccctctcaagtgtgttcagtgaacaagccaaaaaattagagaagcgaaattcatgcttagccacagc

SEQ ID NO: 576498 - DNA, 120 bp, Artificial Sequence
  ENSG00000171467_41 (sequence is synthesized)
caatgctaaggacctgtatgacatattctatagtagtggtggaaagggggcccctgagactaagggggcccctgagactaagctaagtggtggtccattggccaatggggaaaatagcaa

SEQ ID NO: 576499 - DNA, 120 bp, Artificial Sequence
  ENSG00000171467_42 (sequence is synthesized)
cctctctagaaccaaaagttcagacacctcttctacttctcctttgaacagcagtgcatcccaagaggagttgcatcaagatgagggtttggtcgctgctcctatagttagcaactctga

SEQ ID NO: 576500 - DNA, 120 bp, Artificial Sequence
  ENSG00000171467_43 (sequence is synthesized)
aaagcccattgcaaaaactctggtggccctagggaaatggtcagttgtagaacatgtaggcccaaaaagcacaggcagcacctatggcttcctacagcctctgacaaggttgtgccaaag

SEQ ID NO: 576501 - DNA, 120 bp, Artificial Sequence
  ENSG00000171467_44 (sequence is synthesized)
caggccttatgaaacaattaccccaaagacagacactttggccatatggacctctagttccttccagagtgacactagtagggatatatctccagagaagagtgagcttgacctgggaga

SEQ ID NO: 576502 - DNA, 120 bp, Artificial Sequence
  ENSG00000171467_45 (sequence is synthesized)
gccaggaccacctggtgtagaaccacctcctcaactgttagatatacagtgcaaagaatctcagaagttggtagaaatccacctcagagaatctgttaaccaggataaggaaagccaaga

SEQ ID NO: 576503 - DNA, 120 bp, Artificial Sequence
  ENSG00000171467_46 (sequence is synthesized)
gctccgtaaatctgaggattgtagagaaagtgagatagagacaaacactgaactaaaagaaagggtaaaggagctgtctgaggggatagttgatgagggagtaagtaccagcattggacc

SEQ ID NO: 576504 - DNA, 120 bp, Artificial Sequence
  ENSG00000171467_47 (sequence is synthesized)
ccacagcatagatgattctaatttgaaccatggaaacagatacatgtgggagggagaagtaaaacagcccaacttgctaatgattgacaaagaggctgaacagtccaataaattgatgac

SEQ ID NO: 576505 - DNA, 120 bp, Artificial Sequence
  ENSG00000171467_48 (sequence is synthesized)
aggaagtgaaactccaagtaaagtagtgatcaaattgagtccacaggcttgctctttcacaaaggcaaaattagactcatttttatcagaagctaggtctttactcaacccacaagatac

SEQ ID NO: 576506 - DNA, 120 bp, Artificial Sequence
  ENSG00000171467_49 (sequence is synthesized)
acctgtgaaaatttctgccccagagttgctgcttcattccccagccagatcagctatgtgtttaacaggtagtccacaagagcaaggagtttcagttgttagtgaggaggggctagagaa

SEQ ID NO: 576507 - DNA, 120 bp, Artificial Sequence
  ENSG00000171467_50 (sequence is synthesized)
ttcagctccagaatcagcttctagaacttctaggtacagaagtctcaaactcaagagagaaagatcaaaagactttcaagttaaaaagatctatgagttggctgtttgggatgaaaacaa

SEQ ID NO: 576508 - DNA, 120 bp, Artificial Sequence
  ENSG00000171467_51 (sequence is synthesized)
gaagaggccagagacctgggagagcccagagaaaccaaaaacagaagcactggagctacaagatgtccatccagagttaacagtgacaatagaaagcaaggccctagaagactttgaagc

SEQ ID NO: 576509 - DNA, 120 bp, Artificial Sequence
  ENSG00000171467_52 (sequence is synthesized)
tacagacttaaaggtagaggagcttactgccctggggaatctgggggatatgcctgttgatttctgcactactcgggtaagcccagcacatagatccccaactgtcttgtgtcagaaagt

SEQ ID NO: 576510 - DNA, 120 bp, Artificial Sequence
  ENSG00000171467_53 (sequence is synthesized)
gtgtgaagaaaattctgtatcacctatagggtgtaattcctccgatcccgctgacttcgaaccaatcccatctttttctgggtttccgttagattctcccaaaaccttggtgcttgactt

SEQ ID NO: 576511 - DNA, 120 bp, Artificial Sequence
  ENSG00000171467_54 (sequence is synthesized)
tgagacagagggtgaacgaaactcacctaatcccaggagtgttaggatcccttctcctaacattttgaaaactggacttacagaaaatgttgaccgtggcttggggggcctagagggaac

SEQ ID NO: 576512 - DNA, 120 bp, Artificial Sequence
  ENSG00000171467_55 (sequence is synthesized)
acaccaggcccttgacctgttagcaggaggaatgatgcctgaggaagtaaaagaatcttcccaattagacaaacaagagtcactcggattggaattaaaaacaattaattctgcaggcct

SEQ ID NO: 576513 - DNA, 120 bp, Artificial Sequence
  ENSG00000171467_56 (sequence is synthesized)
tgggccatctccttgccttccagaccttgttgactttgtcacacggacctctggagttcaaaaagataaactgtgttctccactctctgagccaggtgacccttctaaatgtagttccct

SEQ ID NO: 576514 - DNA, 120 bp, Artificial Sequence
  ENSG00000171467_57 (sequence is synthesized)
ggagttggggccattacagctagaaatatcgaatgcatccaccacagaggtggcaattctgcaagtagatgatgacagtggcgaccctctgaatttggttaaagctccagtgtcaaggtc

SEQ ID NO: 576515 - DNA, 120 bp, Artificial Sequence
  ENSG00000171467_58 (sequence is synthesized)
ccctccaagggagcaggtaattgaagacaatatggtccctcagggaatgcctgaacaggaaactacagttggtgccatccaggaccacacagaatccagtgttcacaactaagaataaat

SEQ ID NO: 576516 - DNA, 120 bp, Artificial Sequence
  ENSG00000171467_59 (sequence is synthesized)
acctagagctacttgtgagtgaatcattggcttctagaaatcagatgcccagatgatccaagactagtttgttatctcatctggaacctacaccaagagatgcagtcagcatcttaaagt

SEQ ID NO: 576517 - DNA, 120 bp, Artificial Sequence
  ENSG00000171467_60 (sequence is synthesized)
aaatgttcatggaagctaaaaaatttacctcctttccttttccctttccccttaaaacaccagacaaatcgataacaacttatatatatatatatatatctgtaaaaatgtattttgtta

SEQ ID NO: 576518 - DNA, 120 bp, Artificial Sequence
  ENSG00000171467_61 (sequence is synthesized)
atttttttggccaatttattttctcccactttgtcattaaaatcacatgtctaactggctcaccacatagtgtgctttgattgtattttggctttgactctgccatttctgaaatgtggg

SEQ ID NO: 576519 - DNA, 120 bp, Artificial Sequence
  ENSG00000171467_62 (sequence is synthesized)
ggaggatggaggcagctgacctctccagttgctgtgttgtattcctacccaatttcctgggcagttgatgcatctctgggaaaaacaccagaaagcttgctgaaatggaaaacttggaag

SEQ ID NO: 576520 - DNA, 120 bp, Artificial Sequence
  ENSG00000171467_63 (sequence is synthesized)
aattgttcatctcttaggcttccatttggatgggcctgccttaacattgtttgaaatgcagcgtgagtagctcttttgtttactgtttacaccccttattggcatgtcaactcctgtact

SEQ ID NO: 576521 - DNA, 120 bp, Artificial Sequence
  ENSG00000171467_64 (sequence is synthesized)
tcccttactctgttgcctttcttgagatgcattgtcctgctaacccacaaacctgtttggaaataaacatggaagaatatctggcaggcttacttttagaagacgacaaatcggtaaggc

SEQ ID NO: 576522 - DNA, 120 bp, Artificial Sequence
  ENSG00000171467_65 (sequence is synthesized)
ttattcatggttcattgccaggagcagatatgcttttgagatcacttttatttttgaaatggcctttgttcattgtattgtgatccaataacactttgtattaaattgtttagcagccat

SEQ ID NO: 576523 - DNA, 120 bp, Artificial Sequence
  ENSG00000171467_66 (sequence is synthesized)
ttgtgttgtgaaggggtagaagatctctgaaacttgtcttgagattgaactcattccctgttccacaaacccatatgtatcctttcctctacctcctcctttcccaattaatttcaacca

SEQ ID NO: 576524 - DNA, 120 bp, Artificial Sequence
  ENSG00000171467_67 (sequence is synthesized)
tagtacgatgtttggggttgtatattttgttaaaaagattaaagaatttatgagttggcttggacaagtttaactttatttttaatgtgttaattacttggaataaatgcattaatctca

SEQ ID NO: 576525 - DNA, 120 bp, Artificial Sequence
  ENSG00000171467_68 (sequence is synthesized)
ttgatttcttcactcatatgcacaataagaagcacacacaggggcaattccaaaagtcttcagatttccaaaaggaaggactgcagcagacatttctgcccccagaaaggcagggataga

SEQ ID NO: 576526 - DNA, 120 bp, Artificial Sequence
  ENSG00000171467_69 (sequence is synthesized)
gcaatcacctgaaggatctgacttccagaaggtgggtatgactgatgggggtggggataagttgtagagaagatcctgtcattttagctgccaggaaatggtgagttgggtgagtgaatg

SEQ ID NO: 576527 - DNA, 120 bp, Artificial Sequence
  ENSG00000171467_70 (sequence is synthesized)
tgtatattgttgtacctgtagaggatgaacaagattagaatgtacatagagggtatgtattttagacttgccactcctcaccttatttagcattgaataaattattcctgaagtcccata

SEQ ID NO: 576528 - DNA, 120 bp, Artificial Sequence
  ENSG00000171467_71 (sequence is synthesized)
gccagtaggcaatcacctgaaggatctgacttccagaaggagggtagaaattacaaataagcgctttatagctctgcctgttccaaaagcccaggagaagaagaggaaaagcccaatcat

SEQ ID NO: 576529 - DNA, 120 bp, Artificial Sequence
  ENSG00000171467_72 (sequence is synthesized)
tttggatttgggaagagggtggaatttgactcctgattctgtgaccttgagcttcatagaggaaatgaaagactcctctatggaaagctgagaaggtgagctccctgggcaagaactggc

SEQ ID NO: 576530 - DNA, 120 bp, Artificial Sequence
  ENSG00000171467_73 (sequence is synthesized)
accgcttctgcctgaaatgtgagcgctgccacagcatcctgtcccctggcgggcatgcagagcacaatgggaggccatactgccacaagccatgctatggggctctctttggacccaggg

SEQ ID NO: 576531 - DNA, 120 bp, Artificial Sequence
  ENSG00000171467_74 (sequence is synthesized)
tggtggtgtaggctcctacttgtacaatccccccactcccagccctggctgcaccactcctctcagccccagcagcttcagccctcccaggccaaggactggcctcccccaaggcaagaa

SEQ ID NO: 576532 - DNA, 120 bp, Artificial Sequence
  ENSG00000171467_75 (sequence is synthesized)
aagtaaggctgggctcagctcctcccagtcctcctcccgacccttccccaagctggagcggaggttgggccaggtggcagtctcctatccagccctctgcttcacattctcacaacttca

SEQ ID NO: 576533 - DNA, 120 bp, Artificial Sequence
  ENSG00000171467_76 (sequence is synthesized)
ttcttggcaaagtcttctctatctactccccgctttttttttctttctttctttctattccctcatgtgagctgctgagttaagaggtaaattgttgggaggccgaggcaggtggatcat

SEQ ID NO: 576534 - DNA, 120 bp, Artificial Sequence
  ENSG00000171467_77 (sequence is synthesized)
gcttcgaacccattagtggacatttccaattccatctccttgactggccaaccactaatctactgtctgtctctgtggatttacctattctaaatatttcatatgaattgattcatatga

SEQ ID NO: 576535 - DNA, 120 bp, Artificial Sequence
  ENSG00000171469_0 (sequence is synthesized)
cttttccggcgctggctcctctccgtcagtgcggtttcgcctttatggtggtggagtctgcccaggctgtggaccgcaaataaccctgtacaaagaggaatggagattgcctctatccac

SEQ ID NO: 576536 - DNA, 120 bp, Artificial Sequence
  ENSG00000171469_1 (sequence is synthesized)
ctagattcataagctggcctgaggtgatcttggcatcaaggaagggatgcacatcatcacaccatcagcttcagagaatggcagccatttatttgtcccgtgggtttttttccagggaac

SEQ ID NO: 576537 - DNA, 120 bp, Artificial Sequence
  ENSG00000171469_2 (sequence is synthesized)
caatctgcccttttgaagaaaagacaaaggtagaaaggatggtggaggactacctggcaagtggttatcaggattcagtgacgtttgatgatgtggctgtggacttcaccccagaggagt

SEQ ID NO: 576538 - DNA, 120 bp, Artificial Sequence
  ENSG00000171469_3 (sequence is synthesized)
gggctttactggacacaactgagaaatacctctacagagatgtgatgctggagaactacatgaacctggcctctgtggaatgggaaatacaacctagaaccaaacggtcatcacttcagc

SEQ ID NO: 576539 - DNA, 120 bp, Artificial Sequence
  ENSG00000171469_4 (sequence is synthesized)
agggttttttgaagaatcaaatattcagtgggatacaaatgacaagaggctacagtggatggaaactctgtgactgtaagaattgtggagaggtcttcagggaacagttttgccttaaga

SEQ ID NO: 576540 - DNA, 120 bp, Artificial Sequence
  ENSG00000171469_5 (sequence is synthesized)
cacacatgagagttcagaatggagggaatacttctgagggtaattgttatggaaaagacaccctcagtgtgcacaaggaagcctctactggacaggaactttccaaatttaatccatgtg

SEQ ID NO: 576541 - DNA, 120 bp, Artificial Sequence
  ENSG00000171469_6 (sequence is synthesized)
gaaaagtctttactctaactccaggtcttgctgtacatcttgaagttctcaatgcaagacaaccctacaaatgtaaggaatgtggaaaaggctttaagtattttgcaagccttgataatc

SEQ ID NO: 576542 - DNA, 120 bp, Artificial Sequence
  ENSG00000171469_7 (sequence is synthesized)
atatgggaatccacactgatgagaaactctgtgaatttcaggaatatgggagagctgtcacagcttcttcacacctaaagcagtgtgtagcagttcatacaggaaagaaatccaaaaaga

SEQ ID NO: 576543 - DNA, 120 bp, Artificial Sequence
  ENSG00000171469_8 (sequence is synthesized)
ctaagaaatgtgggaaatccttcactaatttttctcaactttatgcacctgtgaaaactcataaaggagagaagtcctttgaatgtaaagaatgtggaagatcctttagaaattcctcat

SEQ ID NO: 576544 - DNA, 120 bp, Artificial Sequence
  ENSG00000171469_9 (sequence is synthesized)
gccttaatgatcacattcaaattcacactggaataaaaccacacaagtgtacttactgtgggaaagccttcactagatcaactcaacttactgaacatgtaagaactcacactggaataa

SEQ ID NO: 576545 - DNA, 120 bp, Artificial Sequence
  ENSG00000171469_10 (sequence is synthesized)
aaccctatgaatgtaaggaatgtggccaagcctttgctcagtactcgggcctttctatacacatacgaagtcacagtggaaagaaaccctatcagtgtaaggaatgtgggaaagccttca

SEQ ID NO: 576546 - DNA, 120 bp, Artificial Sequence
  ENSG00000171469_11 (sequence is synthesized)
ctacatccacaagtcttattcagcatacaagaattcacacaggagagaagccttatgaatgtgttgaatgtgggaagaccttcattacttcttcccgtcgtagtaaacatttgaaaactc

SEQ ID NO: 576547 - DNA, 120 bp, Artificial Sequence
  ENSG00000171469_12 (sequence is synthesized)
atagtggagaaaagccctttgtatgcaagatatgtgggaaagcatttctatattcctcacgccttaatgttcacctgcgaactcataccggagagaaacccttcgtatgtaaagaatgtg

SEQ ID NO: 576548 - DNA, 120 bp, Artificial Sequence
  ENSG00000171469_13 (sequence is synthesized)
ggaaagcatttgctgtttcctcacgcctaagtagacatgaaagaattcacactggggagaaaccctatgaatgcaaggatatgagtgttaccatttagcccatcggttgccatctttaat

SEQ ID NO: 576549 - DNA, 120 bp, Artificial Sequence
  ENSG00000171469_14 (sequence is synthesized)
tattggcaatgacaccaaagattatcagatttgtcctaaatgccttttggaggttgtaatgactcatggattggccttagataccatcctgagggtctgaaattaaacctacaggttctg

SEQ ID NO: 576550 - DNA, 120 bp, Artificial Sequence
  ENSG00000171469_15 (sequence is synthesized)
aatacaacatcatggttgcctgagtctgggcatctgtgaagaagggtcatggatggtgaggtcagtactgcaggctgcctcaccttggtgattagattcctaagatcatagcattaacaa

SEQ ID NO: 576551 - DNA, 120 bp, Artificial Sequence
  ENSG00000171469_16 (sequence is synthesized)
gttgtgtatgagataaatcatgcagattgaccccagcccctgttggttagtggctgccagtgtggcacatttatgtcaaaatttaccagaagccaagatgatgtaggaccccaaaggtgg

SEQ ID NO: 576552 - DNA, 120 bp, Artificial Sequence
  ENSG00000171469_17 (sequence is synthesized)
gttgttaagagatgctcctccaagggtctcttctgatcccacggatcctgcagagcgtgtcaggaatgaaaccatccataactgccagtgccctttcacagctgattatttctgtgtccc

SEQ ID NO: 576553 - DNA, 120 bp, Artificial Sequence
  ENSG00000171469_18 (sequence is synthesized)
tagtataatccagtctctcttctcacttctgtcaaggtggctgatatagtccatgaatcccactcatgatctctttatcagatgatcgttcagccacactttgaggattctcttcagtac

SEQ ID NO: 576554 - DNA, 120 bp, Artificial Sequence
  ENSG00000171469_19 (sequence is synthesized)
aagttttctaatttttgcattatggataggctgagaattttccaaatctccaagttctggttcctttttccttaacaattttttctgcaattcaggtctccttttgcatttttgctgaga

SEQ ID NO: 576555 - DNA, 120 bp, Artificial Sequence
  ENSG00000171469_20 (sequence is synthesized)
gagaccagctgggtcatggagaccctgacccagcagctctagaggaattaagacaaagacacagaaatagagtgcagagtgggaatcggggctcacagccttcagagctgagagccttga

SEQ ID NO: 576556 - DNA, 120 bp, Artificial Sequence
  ENSG00000171469_21 (sequence is synthesized)
agtttgacccacatatttattgacagtaagcctgtgataaacattatttctatagattatagattagctaaaagtattccttacaagaaagaaagggacaggctctggcttgttatctgc

SEQ ID NO: 576557 - DNA, 120 bp, Artificial Sequence
  ENSG00000171469_22 (sequence is synthesized)
ttatctgcaacaggaacatgtccttaaggcacaaatcactcatggtattgtttgtggtttaggaatgcctgagcagttttccagttttccaccgtgggtgggccaggtgttccttgccct

SEQ ID NO: 576558 - DNA, 120 bp, Artificial Sequence
  ENSG00000171469_23 (sequence is synthesized)
taaaccagcaacctccagcatgggtgtcatagccatcacgagcatgtcacagtgccgcagagattttgtttatgggcagtttctcatggcctgtttatgtccaaatttggggggcctgtt

SEQ ID NO: 576559 - DNA, 120 bp, Artificial Sequence
  ENSG00000171469_24 (sequence is synthesized)
ctgagcacattttcctgtaagcactcaggaagaatgaagcttcctgtgtcctttaacactttaagtacagatcttagtgatacataaccagttttatctctctcaagctctaccttccgc

SEQ ID NO: 576560 - DNA, 120 bp, Artificial Sequence
  ENSG00000171469_25 (sequence is synthesized)
aaagtgctagaatacagttctgccaagttcttcactacttcgtatcaagggttgtattttctttatttcccaatagcatgttcctcattccccaatgacacctcaccaggatcaccctta

SEQ ID NO: 576561 - DNA, 120 bp, Artificial Sequence
  ENSG00000171469_26 (sequence is synthesized)
ccaaccttacttccagcttgcacatcagaatttttccagcctcatttgtcagtttcaaatctgcttcacatttttagtttttttgtttgtttgtttttaatctgccttaatgagctcagg

SEQ ID NO: 576562 - DNA, 120 bp, Artificial Sequence
  ENSG00000171469_27 (sequence is synthesized)
ccactatcacaaaataccacagaccaaatggcttacaaatttgttaattttaaataaatgaggttaaaaacaaatttatattctcacatttctcgaggctggaagtctgagatcagagtg

SEQ ID NO: 576563 - DNA, 120 bp, Artificial Sequence
  ENSG00000171469_28 (sequence is synthesized)
ccagcatggtcaacttctggcgagagctctcttcctggtatgtaaatgcccacttcctcatgtcttcacaggaaggaaaccaacaaataggtctctctctcctctctcctttctcctctc

SEQ ID NO: 576564 - DNA, 120 bp, Artificial Sequence
  ENSG00000171469_29 (sequence is synthesized)
tcctctctcctctttctctctctctccccaccatctctctccttcccctccctccccctccctccccctacccatctcttgacatcatttcacgatacttctaaagagcctattttcagg

SEQ ID NO: 576565 - DNA, 120 bp, Artificial Sequence
  ENSG00000171469_30 (sequence is synthesized)
agcgagactctgtctcaaaaacaaaactaaaaaaccctattttcacatacagtcacattgggatttggagcttcaacatatgaattttcagggttatcattcagtccaaagtacttaata

SEQ ID NO: 576566 - DNA, 120 bp, Artificial Sequence
  ENSG00000171469_31 (sequence is synthesized)
tcattcagtccaaagtacttaatatgattcttttccgtttccacatagacaatcacataatctgtaaataatgactcttacttttccactttagtcgttaggttatacctatatatatat

SEQ ID NO: 576567 - DNA, 120 bp, Artificial Sequence
  ENSG00000171469_32 (sequence is synthesized)
tttcttgctttactggactaatttcaacctccagcacaccaccaatgaatagcagtaataccagcataattgtctgcagttctgctgagatacgtgctctattttattggcttggctgta

SEQ ID NO: 576568 - DNA, 120 bp, Artificial Sequence
  ENSG00000171469_33 (sequence is synthesized)
ggtttttattttattttttgaagaggctaatctcttacaggaaaggtttctttttatatccagtttttacatgatgaatgatttcccagtatttcataattcatgaggctgaattcctct

SEQ ID NO: 576569 - DNA, 120 bp, Artificial Sequence
  ENSG00000171469_34 (sequence is synthesized)
tgaatttattaaatgcttcctgtgcatcctctgtgatgatcatgtttatttactgctagaactcaagtacctagaactgttcctggccaatgatggtatgtaataaatacttcaatgaaa

SEQ ID NO: 576570 - DNA, 120 bp, Artificial Sequence
  ENSG00000171469_35 (sequence is synthesized)
tcagttatgtaataaaccccacatcattatagccaaatttttgatgtaccaaaatcctcaaggttctctggcttttattttattgctgtgtttaatttgaaaacaagtaaaaatgactca

SEQ ID NO: 576571 - DNA, 75 bp, Artificial Sequence
  ENSG00000171469_36 (sequence is synthesized)
gcctgagcaggcatgcagctggttcttttaggaggaattgaagtgaaccacagaacagaatgctgtgttccgtca

SEQ ID NO: 576572 - DNA, 70 bp, Artificial Sequence
  ENSG00000171469_37 (sequence is synthesized)
tctgggaccacaagcacatactgccagacctggctaatttttgtttgtttgtttgtttttgtttttgaga

SEQ ID NO: 576573 - DNA, 120 bp, Artificial Sequence
  ENSG00000171469_38 (sequence is synthesized)
gctggctcctctccgtcagtgcggtttcgcctttatggtggtggagtctgcccaggctgtgggtcaagcagttctcctgcctcagccttccgagtacctgggattacaggaccgcaaata

SEQ ID NO: 576574 - DNA, 120 bp, Artificial Sequence
  ENSG00000171469_39 (sequence is synthesized)
atcttttccggcgctggctcctctccgtcagtgcggtttcgcctttatggtggtggagtctgcccaggctgtgggactatcagtcctccctgtgcgtccagttcggagaggctgcgcgct

SEQ ID NO: 576575 - DNA, 120 bp, Artificial Sequence
  ENSG00000171469_40 (sequence is synthesized)
ttttccggcgctggctcctctccgtcagtgcggtttcgcctttatggtggtggagtctgcccaggctgtggtgagttccacctccttggcggtcccggggatagcagggggcggcaaagg

SEQ ID NO: 576576 - DNA, 120 bp, Artificial Sequence
  ENSG00000171469_41 (sequence is synthesized)
aatgattgcgcgctgtcgcctaggagcctctcagatccgcttcacttcactcgcttctccagggactatcagtcctccctgtgcgtccagttcggagaggctgcgcgctctctcggctca

SEQ ID NO: 576577 - DNA, 120 bp, Artificial Sequence
  ENSG00000171469_42 (sequence is synthesized)
gtgtgctgaggagtgtgctgcatagacaccaatgggacaggaagagctcctagcctggttgtgctgagatcaagcgtaagcagtgtgcagtggctcatgcctgtaattccagctactcag

SEQ ID NO: 576578 - DNA, 120 bp, Artificial Sequence
  ENSG00000171469_43 (sequence is synthesized)
gctcctgaacctggttggatggactgacagaagagtgttcttgaagcccccagagtgactctccccacctgaaagtagggactcagccctatccagagttgcagagggccagagaattga

SEQ ID NO: 576579 - DNA, 120 bp, Artificial Sequence
  ENSG00000171469_44 (sequence is synthesized)
ctgctgtctggcgaggctgccgtctatcccccactgcattctctagtccgtcagagcagagggtttcatctgtcctccactgaggctgcagttttacccctgagaacaggtgaatgttcc

SEQ ID NO: 576580 - DNA, 120 bp, Artificial Sequence
  ENSG00000171469_45 (sequence is synthesized)
tcatccaataggtagacagatttctttctagacagactcatcttcagagttttcttagagcaaatgaagccttactcaaggactgagtccccagatgaatttccccagggaatgaagtct

SEQ ID NO: 576581 - DNA, 120 bp, Artificial Sequence
  ENSG00000171469_46 (sequence is synthesized)
cctatacataaaatgttaacttgaaaatcagtccagtagctcagtaattactacttaagcttgaccttcatggtgccaactgcatctttcttacattgctgggtgcggtgacggatgata

SEQ ID NO: 576582 - DNA, 120 bp, Artificial Sequence
  ENSG00000171469_47 (sequence is synthesized)
aatagatcagcaaaaaaagatttaaaaaaattttaaaaagtgctgtttaaggcatatgcctgtaggaggtcaaccttgagtgtttagacacaagagctcctgagacattaaaccctggag

SEQ ID NO: 576583 - DNA, 120 bp, Artificial Sequence
  ENSG00000171469_48 (sequence is synthesized)
tagatcatgggagacctgacaaccacgtgtaagtgagtataaggttccccttcatcattctccagtgaatattggtggaagtgttcattggctcaaaccagcatgtgtatgatgacatag

SEQ ID NO: 576584 - DNA, 88 bp, Artificial Sequence
  ENSG00000171475_0 (sequence is synthesized)
attttgttcgcggacgctggggacggtgggagcagatccatttccgggttggcaaaaggggcggacggcgagaaagagcttgccgggg

SEQ ID NO: 576585 - DNA, 120 bp, Artificial Sequence
  ENSG00000171475_1 (sequence is synthesized)
ggcgagcaggacaggacgaagccggagtgtaggcggcagaggattcgctcccagagcagctgcggccaggtatatgaatgacctaaaggtacaaataaagacggagagagaacagtgcca

SEQ ID NO: 576586 - DNA, 120 bp, Artificial Sequence
  ENSG00000171475_2 (sequence is synthesized)
actgggagcagggcaagaatgccaattcctcctcccccgccacccccacctggtcctcctccacctcccacatttcatcaggcaaacacagagcagcccaagctgagtagagatgagcag

SEQ ID NO: 576587 - DNA, 120 bp, Artificial Sequence
  ENSG00000171475_3 (sequence is synthesized)
cggggtcgaggcgccctcttacaggacatttgcaaagggaccaagctgaagaaggtgaccaacattaatgatcggagtgctcccatcctcgagaagccgaaaggaagcagtggtggctat

SEQ ID NO: 576588 - DNA, 120 bp, Artificial Sequence
  ENSG00000171475_4 (sequence is synthesized)
ggctctggaggagctgccctgcagcccaagggaggtctcttccaaggaggagtgctgaagcttcgacctgtgggagccaaggatggttcagagaacctagctggtaagccagccctgcaa

SEQ ID NO: 576589 - DNA, 120 bp, Artificial Sequence
  ENSG00000171475_5 (sequence is synthesized)
atccccagttctcgagctgctgccccaaggcctccagtatctgccgccagcgggcgtcctcaggatgatacagacagcagccgggcctcactcccagaactgccccggatgcagagaccc

SEQ ID NO: 576590 - DNA, 120 bp, Artificial Sequence
  ENSG00000171475_6 (sequence is synthesized)
tctttaccggacctctctcggcctaataccaccagcagtacgggcatgaagcacagctcctctgcccctcccccaccacccccagggcggcgtgccaacgcaccccccacacctctgcct

SEQ ID NO: 576591 - DNA, 120 bp, Artificial Sequence
  ENSG00000171475_7 (sequence is synthesized)
atgcacagcagcaaagcccccgcctacaacagagagaaacccttgccaccgacgcctggacaaaggcttcaccctggtcgagagggacctcctgctccacccccagtcaaaccacctcct

SEQ ID NO: 576592 - DNA, 120 bp, Artificial Sequence
  ENSG00000171475_8 (sequence is synthesized)
tcccctgtgaatatcagaacaggaccaagtggccagtctctggctcctcctcctccgccttaccgccagcctcctggggtccccaatggaccctctagccccactaatgagtcagcccct

SEQ ID NO: 576593 - DNA, 120 bp, Artificial Sequence
  ENSG00000171475_9 (sequence is synthesized)
gagctgccacagagacacaattctttgcataggaagacaccagggcctgtcagaggcctagcacctcctccacccacctcggcctccccatctttactgagtaataggccacctccccca

SEQ ID NO: 576594 - DNA, 120 bp, Artificial Sequence
  ENSG00000171475_10 (sequence is synthesized)
gcccgagaccctcccagtcggggagcagctcctccacccccaccacctgtgatccgaaatggtgccagggatgctccccctcccccaccaccataccgaatgcatgggtcagaacccccg

SEQ ID NO: 576595 - DNA, 120 bp, Artificial Sequence
  ENSG00000171475_11 (sequence is synthesized)
agccgaggaaagcccccacctccaccctcaaggacgccagctgggccaccccctcctcctccaccgcccctgaggaatggccacagagattctatcaccactgtccggtctttcttggat

SEQ ID NO: 576596 - DNA, 120 bp, Artificial Sequence
  ENSG00000171475_12 (sequence is synthesized)
gattttgagtcaaagtattccttccatccagtagaagactttcctgctccagaagaatataaacactttcagaggatatatcccagcaaaacaaaccgagctgcccgtggagccccacct

SEQ ID NO: 576597 - DNA, 120 bp, Artificial Sequence
  ENSG00000171475_13 (sequence is synthesized)
ctgccacccattctcaggtgaagcctggcttggtcccgttcctcaggaaaaggatggaccttctcttcttctcagatggtcccttccattcccctgaaacctgcatgagagctcctaaca

SEQ ID NO: 576598 - DNA, 120 bp, Artificial Sequence
  ENSG00000171475_14 (sequence is synthesized)
tgtttctccaatgcaatcaagccctagactccaaatgtcctcccagctcacctccatctatgcatctcatctctggatttggtgatcagactctatattgacagtaggatctcaaaccct

SEQ ID NO: 576599 - DNA, 120 bp, Artificial Sequence
  ENSG00000171475_15 (sequence is synthesized)
gcatccatccttcctccagcaagccctgctagccacatgaggaacaagtttccgtgtcttctgccttcctcttggggaaaggtgccttgttgtgatgaattaactcactgttagggcagg

SEQ ID NO: 576600 - DNA, 120 bp, Artificial Sequence
  ENSG00000171475_16 (sequence is synthesized)
gtggagaatggtactccttccttctcctgtccactgtgggggaagcttggcaggtatattatatttcatcatttaggaggctggcatgaccaggacttatgggtgggaggggagcatttt

SEQ ID NO: 576601 - DNA, 120 bp, Artificial Sequence
  ENSG00000171475_17 (sequence is synthesized)
tagtgaagcaagaaaggagtttgccaagaagtgatctgttttaaaggtcatatttggagaaagggcaaggaattgggtctgctttatttttgggggtattttgtttttgttctcacctgc

SEQ ID NO: 576602 - DNA, 120 bp, Artificial Sequence
  ENSG00000171475_18 (sequence is synthesized)
tgcccccccaccccaccaccccagggataaattggatataaacactaaatactaatcagttgaacttaacatttaataaaaagaaagggtgaaataaactgaagaccattttagaactag

SEQ ID NO: 576603 - DNA, 120 bp, Artificial Sequence
  ENSG00000171475_19 (sequence is synthesized)
tcagttctctgcagcaaagggaacaggagccatttgaaccctctgggacccctcaccccactgcttcagggtgctaggctgagggatgtttttcctcccccttaccgcccatgcccttga

SEQ ID NO: 576604 - DNA, 120 bp, Artificial Sequence
  ENSG00000171475_20 (sequence is synthesized)
aagaaaagtcactttttgtggagggcatcattcattcctgattcacaaaccccaaaaacctctggtgggagataggaagatagggcgtgggcctgggccttaacctcaatcttgtgtctg

SEQ ID NO: 576605 - DNA, 120 bp, Artificial Sequence
  ENSG00000171475_21 (sequence is synthesized)
cctcagtcttttctgactggccctgaagttgtcagtggctctttctgtccttcagcccctggaaggtgctccaggataacaaagaagggcaggttgaagcccctcatggaaggagctggc

SEQ ID NO: 576606 - DNA, 120 bp, Artificial Sequence
  ENSG00000171475_22 (sequence is synthesized)
tttgtggggctgcaaaggacttttaagtcctgcctgtactgaagttcacagcccacctgactgagcagactcttcctgttcctttctctaccacccttgccttcccaggactgcacggtt

SEQ ID NO: 576607 - DNA, 120 bp, Artificial Sequence
  ENSG00000171475_23 (sequence is synthesized)
taacacagcagagtacagaagggtgaagaagtgagcagaggcttatgaagatattcagatactcttctatgccaggaagcacaaagactttgttgagatttgcctcagttcagtagatct

SEQ ID NO: 576608 - DNA, 120 bp, Artificial Sequence
  ENSG00000171475_24 (sequence is synthesized)
tccttggcagccagccataggttgtttctttgtcttccgggtcctaaagagcacagagaaaatggaggtccccagtctaggtaggaagctgattggatgaggacttctttttttccgaca

SEQ ID NO: 576609 - DNA, 120 bp, Artificial Sequence
  ENSG00000171475_25 (sequence is synthesized)
gcaggatggggctcttgggctccacacaccagatgctttggttttctacaactgttgctatgtgtagagggtgctcagagcgtggcatgagagcaaggagaccatggctactctttgaaa

SEQ ID NO: 576610 - DNA, 72 bp, Artificial Sequence
  ENSG00000171475_26 (sequence is synthesized)
cgtggcatgagagcaaggagaccatggctactctttgaaatggatggggaaaattagcttaaaaatttaatc

SEQ ID NO: 576611 - DNA, 120 bp, Artificial Sequence
  ENSG00000171475_27 (sequence is synthesized)
atcacaggcttaaactgtcttagagacctttccagttgattggatcacaggctagggatctgtgcatggtgccaggtgaaacccaagtctccccagtgctaggtgagggagggctcaacg

SEQ ID NO: 576612 - DNA, 120 bp, Artificial Sequence
  ENSG00000171475_28 (sequence is synthesized)
ggggtaatgtgtatggggtctgctgtcctttgccatcccctggaccatattaactctgggacagaccatgattaggtctgtcaccaaacttttcctaatcattttttatgtatcattctt

SEQ ID NO: 576613 - DNA, 120 bp, Artificial Sequence
  ENSG00000171475_29 (sequence is synthesized)
tcattcttctttctaatctgttagcagttatctcccagaagtatccctagcatcctgaagcaaacagaactgccgggcgctgtggcttatgcctgtaatctcagcaatttgggaggccga

SEQ ID NO: 576614 - DNA, 120 bp, Artificial Sequence
  ENSG00000171475_30 (sequence is synthesized)
ggagatggcgccactgcgctccagcccgggtgacagagtgaaactccatctcagaaaacaaacaaaccaaacaactgagagagggcatgctagtggagggaaaaggagagagtacaagag

SEQ ID NO: 576615 - DNA, 120 bp, Artificial Sequence
  ENSG00000171475_31 (sequence is synthesized)
ttgatactgcatcagagttccagggcagatactgacaagtgactgaactttgactgtgaagtcttcccatttatttttgaaatgggagtcgatgccttttgtacgttatcaaagtgtttt

SEQ ID NO: 576616 - DNA, 120 bp, Artificial Sequence
  ENSG00000171475_32 (sequence is synthesized)
tttttttttcctcctttactcagacatagagcatcaaaatatcacgagtaaagccaaaccccagcttttcactggggctgatatcttcctccccatggcccactgccccctcatattccc

SEQ ID NO: 576617 - DNA, 120 bp, Artificial Sequence
  ENSG00000171475_33 (sequence is synthesized)
cagcacttggactgtgtcacatgggtattgattgtatacttgttgtcttggcctcatgcaaaaaggcctgggtctagatctagtcagatgagttttttttagagcatgttgatgatacaa

SEQ ID NO: 576618 - DNA, 120 bp, Artificial Sequence
  ENSG00000171475_34 (sequence is synthesized)
cacctgtttaaatgtctgccttatatgttatttggtcccactgttaataatagatttattactatgtatatttactattgaagatgggaatgtgatctgcatagttatcagtctattttg

SEQ ID NO: 576619 - DNA, 120 bp, Artificial Sequence
  ENSG00000171475_35 (sequence is synthesized)
tatgttgtaaaaagcttctaatttaggtttaaggtgggctggctacaagagcactaaaactcctcaccttttaaactgctctttttatctgcttgtgggaatgtcgtctctttcgtggaa

SEQ ID NO: 576620 - DNA, 120 bp, Artificial Sequence
  ENSG00000171475_36 (sequence is synthesized)
gattgggtggtctcatgttgaggctgttgcccagtcccattaactcccttgtccccccacagaaggaagagacattgcccagctaagcatcaggaagctgtgttaaaagcccttctatgg

SEQ ID NO: 576621 - DNA, 120 bp, Artificial Sequence
  ENSG00000171475_37 (sequence is synthesized)
gtttggttttgtgatgtttttccctaatgggaaaaacgttatagttgtttcttactgccctgtctgggaagcagggcaaacctccaggtttttaaatgagctagatgcccctcttcctct

SEQ ID NO: 576622 - DNA, 120 bp, Artificial Sequence
  ENSG00000171475_38 (sequence is synthesized)
tctctggtcactgaacctggaccaaagcactttgatattccaggtgtgattttctctgtcatggggatttgctccactgcagagccccatcattttcacagcgtaggccaacagagtgag

SEQ ID NO: 576623 - DNA, 120 bp, Artificial Sequence
  ENSG00000171475_39 (sequence is synthesized)
aacctagggctaccctagctgatggatgtgaggctgctgtctacaggagctcatcccagccctgttaactggcagtggcaaggatactcgtcatcggccattgcactggggaactccctc

SEQ ID NO: 576624 - DNA, 120 bp, Artificial Sequence
  ENSG00000171475_40 (sequence is synthesized)
accccatggcttcccaacttgaaacccagatttacctccagggagaggtgagaaaaaaattgtaaatagacttgctaaagagcaactcagggttggggtgtgttttaattctcctgatca

SEQ ID NO: 576625 - DNA, 120 bp, Artificial Sequence
  ENSG00000171475_41 (sequence is synthesized)
cttgaaataatctgtaggctgagtgcttatgggggtgggggagaagggtgactccagggtccttccattttgtgaagctctgggggtggagtgtgggcatctgaggccctatgatggcac

SEQ ID NO: 576626 - DNA, 120 bp, Artificial Sequence
  ENSG00000171475_42 (sequence is synthesized)
tacattgagctgtctgcccttccggaaacccaacctgcaatcaactgcaaatcaaattcttcacattccagctacagtctttctttccccattgaatctcagtccctggccatgtggtca

SEQ ID NO: 576627 - DNA, 120 bp, Artificial Sequence
  ENSG00000171475_43 (sequence is synthesized)
aggtggctttctgttaagctaccctaatttcgggaatgggaggggagagaggagggccattacaactctgccttcaagactcatctcttaaaaacaaaacgaaacaaaactacaaccacc

SEQ ID NO: 576628 - DNA, 120 bp, Artificial Sequence
  ENSG00000171475_44 (sequence is synthesized)
aaaaaaaaaaaaaaaaaaggataactttaaccgaaggaagggtttggttccattcaactccacattcattgtgcctttacttgcattagatttctgtgctttcttcctttccctctttga

SEQ ID NO: 576629 - DNA, 120 bp, Artificial Sequence
  ENSG00000171475_45 (sequence is synthesized)
ttcttcctttccctctttgaagcaattaaaatcttccttgataactgctgtttctttctactcttgtttctggcaatttagtgggttccttctctagtggtcttaaatctcattccactg

SEQ ID NO: 576630 - DNA, 120 bp, Artificial Sequence
  ENSG00000171475_46 (sequence is synthesized)
gtggcaagatggggcctagccttcttttcacatgtctaatcttttcctttctcatggtgccctccatggaagtcacagtcaacactgaataaatgactagaatgacacgtgtgcgtgcgc

SEQ ID NO: 576631 - DNA, 120 bp, Artificial Sequence
  ENSG00000171475_47 (sequence is synthesized)
acgcgtgtgcgtgtgtgtgttcatctgtctgcatgtggatcaatttcttttagaaaataatttattgtatgatttattttggagttatattctgattacagtgctccctctcccaaatag

SEQ ID NO: 576632 - DNA, 120 bp, Artificial Sequence
  ENSG00000171475_48 (sequence is synthesized)
cattgattttttcccccctctaaaatgtataatctggtctcaggttggattctttggtacatttctctcttctggatgccatgcagcttaattaaaaccttgcttaaaaacaaaaagtga

SEQ ID NO: 576633 - DNA, 120 bp, Artificial Sequence
  ENSG00000171475_49 (sequence is synthesized)
aaattgtgtactcttgtctggaataccgcctcaggtggtggcacagagaggggagaaaacctttgcctcataatttgggtaagtgtagtggtttgattccaggtcccttgaaaaagtaga

SEQ ID NO: 576634 - DNA, 120 bp, Artificial Sequence
  ENSG00000171475_50 (sequence is synthesized)
tctactgaattgggcagactcatctatagctttctgagggtcttctctcctcctctccagctgtattttgaaaattacagttctagttggctgggcgcgatggctcatgtctgtaatccc

SEQ ID NO: 576635 - DNA, 120 bp, Artificial Sequence
  ENSG00000171475_51 (sequence is synthesized)
aaaaaaaaaaaaaaaattctagagttctagttacccttcctgggagattctgatggtccttattttattattattattatttttttttgagacaggatgttgctgtcatccaggctggag

SEQ ID NO: 576636 - DNA, 86 bp, Artificial Sequence
  ENSG00000171475_52 (sequence is synthesized)
tgtagctgggaccacaggtgtgtaccactatgcctggctaattttgaaaatttttttgtaaagacagggtctccctatgttgccca

SEQ ID NO: 576637 - DNA, 120 bp, Artificial Sequence
  ENSG00000171475_53 (sequence is synthesized)
actatgcctggctaattttgaaaatttttttgtaaagacagggtctccctatgttgcccagactggtctcaaattcctgggcttaagtgattgtcccacctcagcttctcaaagtgctgg

SEQ ID NO: 576638 - DNA, 120 bp, Artificial Sequence
  ENSG00000171475_54 (sequence is synthesized)
gcacccagccagtccttattttatatttccacctaactcccctttgcccacgatttcagggaacctaggaggcttcctggccttgtgaccttttccttgaatctcttataattctttcta

SEQ ID NO: 576639 - DNA, 120 bp, Artificial Sequence
  ENSG00000171475_55 (sequence is synthesized)
cctgtgttgcatggcagattctcagattgaggctaaagaaaagaagggtggggacaaagcatacagaatgtgtgtatctgtttttatgtgggtgttggctgtttttcgtcactgcttttt

SEQ ID NO: 576640 - DNA, 120 bp, Artificial Sequence
  ENSG00000171475_56 (sequence is synthesized)
aagctgaatcttagctggttttcttgaactttgactttaggtgtaaaaattcaaccagacattctctccttactgtggtcagctgacatcataaccactaaggcttaatgagcttaactt

SEQ ID NO: 576641 - DNA, 120 bp, Artificial Sequence
  ENSG00000171475_57 (sequence is synthesized)
gcactttcatcactagcaaaggtcttgaagttatttctcttactgattcataatgggtgtgtgtatgaatcactctcacataatttagatataaaaacctatgaggatgagggagggagg

SEQ ID NO: 576642 - DNA, 120 bp, Artificial Sequence
  ENSG00000171475_58 (sequence is synthesized)
ggaagaaaaaaaaggactcctttcattttcatccgtacttcccagatgggctgaatctccgattatttgacccatcattgttattaatatggttaataaactacctatttattgattgaa

SEQ ID NO: 576643 - DNA, 120 bp, Artificial Sequence
  ENSG00000171475_59 (sequence is synthesized)
aggcaataagggctcctgaagggttgggtgagttaaggcggcaactctgtgaggaacgaggtaatcgtgcgcaaaaagggagacgggaacggaggacctgttgggaacggctaattagca

SEQ ID NO: 576644 - DNA, 120 bp, Artificial Sequence
  ENSG00000171475_60 (sequence is synthesized)
attctgaatgttggtatctggaagaatggtgatgctgttcaagtaataaggacaaaggggaaccaggcactgtgagcctctgtggggtgtgttactcttttagctcatgtgtttcaagtc

SEQ ID NO: 576645 - DNA, 79 bp, Artificial Sequence
  ENSG00000171475_61 (sequence is synthesized)
aatcgtgcgcaaaaagggagacgggaacggaggacctgttgggaacggctaattagcaggatgctgtggagacgtgatg

SEQ ID NO: 576646 - DNA, 120 bp, Artificial Sequence
  ENSG00000171475_62 (sequence is synthesized)
gctccttaaagcctcgacctcccgggctgaagtggtccttccacctaagccccgccaatagctgggaccacaggtatatgaatgacctaaaggtacaaataaagacggagagagaacagt

SEQ ID NO: 576647 - DNA, 120 bp, Artificial Sequence
  ENSG00000171475_63 (sequence is synthesized)
tggagacttggctgggttcttatttttattgggccttgagtgggagagttttgtcctgggatgtgctttggctctcttcttattcattcttctgaaccttagaagtttcttcttgactct

SEQ ID NO: 576648 - DNA, 120 bp, Artificial Sequence
  ENSG00000171476_0 (sequence is synthesized)
gaaggccgcctaccggggaggccggaggccggctagtcgcggactcgggcgaacccaccctcgcgatctgtcaagtctgtccccaggggaggtccccctttcgggaggaagtttttaagg

SEQ ID NO: 576649 - DNA, 120 bp, Artificial Sequence
  ENSG00000171476_1 (sequence is synthesized)
ggatttctcaaaatcacccccgcgcttccttcactccttccttagagccggagcgcgcagggaccatgtcggcggagaccgcgagcggccccacagaggaccaggtggaaatcctggagt

SEQ ID NO: 576650 - DNA, 120 bp, Artificial Sequence
  ENSG00000171476_2 (sequence is synthesized)
acaacttcaacaaggtcgacaagcacccggattccaccacgctgtgcctcatcgcggccgaggcaggcctttccgaggaggagacccagaaatggtttaagcagcgcctggcaaagtggc

SEQ ID NO: 576651 - DNA, 120 bp, Artificial Sequence
  ENSG00000171476_3 (sequence is synthesized)
ggcgctcagaaggcctgccctcagagtgcagatccgtcacagactaaggagatggcaggcattgacagcttcactccatgaaggccatctctgtttctctcctccgcttaaccaagctgt

SEQ ID NO: 576652 - DNA, 120 bp, Artificial Sequence
  ENSG00000171476_4 (sequence is synthesized)
gtttaacacagtgttgtattttttttctaaatgtacataattagaaaagaaaataacaataggaagctatgtgtatcttctgtgtaaagcagtggcttcactggaaaaatggtgtggcta

SEQ ID NO: 576653 - DNA, 120 bp, Artificial Sequence
  ENSG00000171476_5 (sequence is synthesized)
gcatttccctttgagtcatgatgacagatggtgtgaaaaccatctaagtttgcttttgaccatcacctcccagtagcaatttgctttcataatccatttagcaatccaggcctctgttga

SEQ ID NO: 576654 - DNA, 120 bp, Artificial Sequence
  ENSG00000171476_6 (sequence is synthesized)
aaagataatatgagggagaagggaacacatttccttctgaacttacttccctaagtcactttccttatgtatcatctaatacaatgatggttgagtgaaaatacagaaggggtgtttgag

SEQ ID NO: 576655 - DNA, 120 bp, Artificial Sequence
  ENSG00000171476_7 (sequence is synthesized)
tattcagatttcataaaacacttccttggaatatagctgcattaacttggaaagaagcctgttgggccagaagacagaaactccaactggcaaaaaagcaagcatctaagaaaaaaaacc

SEQ ID NO: 576656 - DNA, 120 bp, Artificial Sequence
  ENSG00000171476_8 (sequence is synthesized)
accaaagttcttgaatttactatatttaaatgcattggttaagtttattttgctaaataaagtgaactgctttttgtctctaaaatgatattctaaataaaaccttaactttttgttgaa

SEQ ID NO: 576657 - DNA, 120 bp, Artificial Sequence
  ENSG00000171476_9 (sequence is synthesized)
acagatgcaggggaaataaatgagaatcgtttttgagggagacctaaaactgtatcatcctagcccgaatctctcccttttaactgttctttatgtgtacattctgtgcccaaaagaaaa

SEQ ID NO: 576658 - DNA, 120 bp, Artificial Sequence
  ENSG00000171476_10 (sequence is synthesized)
caacctttcattaattgggcaattgtccaggctcttagcttggcatccagctctcagagctgtgaaatcaaccgcaccagatctacgctttgaaatgaggcaacatctaactggaaactc

SEQ ID NO: 576659 - DNA, 120 bp, Artificial Sequence
  ENSG00000171476_11 (sequence is synthesized)
gctcaaagtaaggaagtggatgagaagactcagggtcccttttctcttccccgtcttctctcagccacatctctcttatcctatcttggtgaagaagcttgcttggctaggagagaggtc

SEQ ID NO: 576660 - DNA, 120 bp, Artificial Sequence
  ENSG00000171476_12 (sequence is synthesized)
agggacgagaagatagtgacgagaaagttccatgagactctcagaagtcccagcctgaacatcaaacctgaataaccaggagagacgtaacctcggcatactttcagtggtttacctcct

SEQ ID NO: 576661 - DNA, 120 bp, Artificial Sequence
  ENSG00000171476_13 (sequence is synthesized)
gcccacgctgcaggtttttcaggtccttgctcgagtgtgtgctcataggcgtaaataaacgtgctatcagcagcctgcgtcagccagcccagctatttaagcaggctggcatcagcaaac

SEQ ID NO: 576662 - DNA, 120 bp, Artificial Sequence
  ENSG00000171476_14 (sequence is synthesized)
aaaatcacccccgcgcttccttcactccttccttagagccggaggtcggtgagggcccgcggaatcatctatctcgcccccgtcgcagcgcgcagggaccatgtcggcggagaccgcgag

SEQ ID NO: 576663 - DNA, 120 bp, Artificial Sequence
  ENSG00000171476_15 (sequence is synthesized)
cgcaggcagggatacagttcctgcaaggggtcccggggggcgcgggaggcgcaggacgctaggctctgccgtcagcccgcaacagcgctcagtccagggagggaggcccgggtggggggc

SEQ ID NO: 576664 - DNA, 80 bp, Artificial Sequence
  ENSG00000171476_16 (sequence is synthesized)
agccgtaagcccccgctcagcgtgcagccaccggggacttgcgcggccgtggcaccgctggagggggcggcctggggctg

SEQ ID NO: 576665 - DNA, 87 bp, Artificial Sequence
  ENSG00000171476_17 (sequence is synthesized)
agtttctcgacaagtttgcaagactgataaaacagcgcgcagggaccatgtcggcggagaccgcgagcggccccacagaggaccagg

SEQ ID NO: 576666 - DNA, 120 bp, Artificial Sequence
  ENSG00000171476_18 (sequence is synthesized)
agcttccaaacccagggcttgcgcttgcctttgcctcttccacgtaagtacctttcaaaggtctgccttttatgcagaggaatgagtttgtgcaggaactagaccaaaatgctatcgtta

SEQ ID NO: 576667 - DNA, 120 bp, Artificial Sequence
  ENSG00000171476_19 (sequence is synthesized)
ccgtatttgctcatctgttggaaaacggtagaggtgaaagggagaataggaatgacaagcttacccccaagcagaagctaggaaatgctgctgggtgtaagacatcagtcccttacaaac

SEQ ID NO: 576668 - DNA, 120 bp, Artificial Sequence
  ENSG00000171476_20 (sequence is synthesized)
aaaactgcatggggtcgaggggaatttggaggaaggggagttggtgttggtcttttggccaagcaggtgagatgtttttcttactcgcttctattttggaaagataactttgaaaccagc

SEQ ID NO: 576669 - DNA, 120 bp, Artificial Sequence
  ENSG00000171476_21 (sequence is synthesized)
atttgtcagatgcctatgattttctcatttagaagcagattattgttattctacatcccagacttttatctaaaatcagacataatatcgttttaaaatatgttttgtgtttgacaaggg

SEQ ID NO: 576670 - DNA, 120 bp, Artificial Sequence
  ENSG00000171476_22 (sequence is synthesized)
gaagtgagggagctgtctctggatggagaagtggcttgattttgaatttgcagtttattgttacttctggttctcataatacttatttataacaacaaaaacagtgattttttttttttg

SEQ ID NO: 576671 - DNA, 120 bp, Artificial Sequence
  ENSG00000171476_23 (sequence is synthesized)
agatgaaaaggaatcccaggctctggggtttagagaaagtataggtttgtgatatgtgagtggcatccaagtattcagggtaaactgttaagtaaagtggaataagaatcattgaataaa

SEQ ID NO: 576672 - DNA, 120 bp, Artificial Sequence
  ENSG00000171476_24 (sequence is synthesized)
aaggtacaatctatcacatagttcagataagaagctcttaaagagaaaaggaatgcaaacagttcccatgaagtggcactgctactggacagggccctgtagtgtgtttagttaagtaag

SEQ ID NO: 576673 - DNA, 120 bp, Artificial Sequence
  ENSG00000171476_25 (sequence is synthesized)
gttaagtataaccagggcaggcagagaacaaaacgaaggtgctggggaggtgggaagggaggagaagggaggagcagatagtaaaggatttataattaaacaacagattcatgaaaagca

SEQ ID NO: 576674 - DNA, 120 bp, Artificial Sequence
  ENSG00000171476_26 (sequence is synthesized)
gataggaatagagcagggcattaattccatagtctatccctttgtatcaagaatctggtgaaagccaaggacctttctcaggtattcattcctcgcttcctgagcctccccttccacccc

SEQ ID NO: 576675 - DNA, 120 bp, Artificial Sequence
  ENSG00000171476_27 (sequence is synthesized)
acaccccaacccacaccttgactctcactttctggactcctagaagtccacggacctaaatgaagctcatatgcttattattatttttttttaactgggctgaagctgccgactgaggaa

SEQ ID NO: 576676 - DNA, 120 bp, Artificial Sequence
  ENSG00000171476_28 (sequence is synthesized)
agttaaaaaccttcaacgtggcaggcacttcttagccaccaaactgaagcttggttttaagttcatgaaggtcttatgtcaatcaagcaaataatgattaagggctatatctgagaaaag

SEQ ID NO: 576677 - DNA, 120 bp, Artificial Sequence
  ENSG00000171476_29 (sequence is synthesized)
ataagttgaaggccaagaggaagagaaaagaaaaaatggatcttgttctcaaagagcttgaaatctaaagtccagggagataattagatgttatgtccatgcacaaaataggatgtgttg

SEQ ID NO: 576678 - DNA, 120 bp, Artificial Sequence
  ENSG00000171476_30 (sequence is synthesized)
tgttatgtccatgcacaaaataggatgtgttgagtgattacatttgtataaaatgatagaaaatgcaaactaatctatagcaaaaagaaagtggctgggtgcggtggcccacgcctgtaa

SEQ ID NO: 576679 - DNA, 120 bp, Artificial Sequence
  ENSG00000171476_31 (sequence is synthesized)
aaagaaagaagatccatggttacttgggaaggtaggggcaggagaaaaaatgtttggggggactcccaaggtacacaggaaacttttgagggtgatggatatgttcattattgtgactgt

SEQ ID NO: 576680 - DNA, 120 bp, Artificial Sequence
  ENSG00000171476_32 (sequence is synthesized)
gaccatttcttatatgggaagatttatcaaattgtgtactttaaacattcagtattatagctgattactcccaacaaacaatactttaaccacattatttttatttttatttttttgaga

SEQ ID NO: 576681 - DNA, 120 bp, Artificial Sequence
  ENSG00000171476_33 (sequence is synthesized)
gtgtgagccactgtgcctaaccaacaatataatttttaaataagtaaaagcatttctaaaaatcagcctatgtaacatgctgaacataaaagatgagtatttatggagaaaaaaataaat

SEQ ID NO: 576682 - DNA, 120 bp, Artificial Sequence
  ENSG00000171476_34 (sequence is synthesized)
tcagtaaagcacagagaccagacagtaaggatcatagacttttatagaactgggagggtccctggagataatctaacctagtggttgtggggcctggagaacttaaaaaagaaaaaaaaa

SEQ ID NO: 576683 - DNA, 120 bp, Artificial Sequence
  ENSG00000171476_35 (sequence is synthesized)
gaccagcctggccaacatggcaaaaacttgtctctactaaaaatacaaaaatagacagctcttgtgctagcctggagaggcagatgaatactcaacttctgtttttcaatttctggggcg

SEQ ID NO: 576684 - DNA, 120 bp, Artificial Sequence
  ENSG00000171476_36 (sequence is synthesized)
agacccaccacttctcttgcggaagtggccacacatcattttcctcacttaggaaaatacaaaatgtttcaagagcccattgcttccaggaagttcacagtgagcataaaagaaatatag

SEQ ID NO: 576685 - DNA, 120 bp, Artificial Sequence
  ENSG00000171476_37 (sequence is synthesized)
gctaaagaataatccactggcttgtttcccttttggccagctcaccacaggactctgggtttatttggagaatctgccattgataaccttttgttcttggtttgatattagtgctattac

SEQ ID NO: 576686 - DNA, 120 bp, Artificial Sequence
  ENSG00000171476_38 (sequence is synthesized)
atggcacccagaaagtagcccccaaagagaaggctacccccatgatagtctgccgtgcttggctttcgattacttttctctactgccgccccagtgtaaagaaatggtttaagcagcgcc

SEQ ID NO: 576687 - DNA, 120 bp, Artificial Sequence
  ENSG00000171476_39 (sequence is synthesized)
ttcagtaacagtccatcaatattctgcttcattacatagtgtaaagatgtgggtggctcttttaaatgagaccagctcaaccattttttcttaaatgaaatctgatagaaagtgagattt

SEQ ID NO: 576688 - DNA, 120 bp, Artificial Sequence
  ENSG00000171476_40 (sequence is synthesized)
tcctcctccagattttaattagtcagtctttacaatgctgccatttcttcagctgtagtaactggaaatcctatttaatcagaccttgcatccttgaaaccccccacagagctacctcat

SEQ ID NO: 576689 - DNA, 120 bp, Artificial Sequence
  ENSG00000171476_41 (sequence is synthesized)
taatgaaactggaaccttgctgctctcataccagaatccagagttaactaaacacacgcacacaggttacagaagaaaatgggcccacccttagcagtagaatttcgattgaagctgcca

SEQ ID NO: 576690 - DNA, 120 bp, Artificial Sequence
  ENSG00000171476_42 (sequence is synthesized)
cccatgctattcagcctgcttagcattgatgtggagcccaaagcagtcctgcagagccttacccccattcaagctcaacagcctctcctctaggccttgctccttctccccctgtgattc

SEQ ID NO: 576691 - DNA, 120 bp, Artificial Sequence
  ENSG00000171476_43 (sequence is synthesized)
tcacactttcttctgatcttgggcttatatactgaattccctttcagcttcctagagcccatcctgttcattctgagtatctgtataggcatcaagccatgctatgtggggagccctcta

SEQ ID NO: 576692 - DNA, 120 bp, Artificial Sequence
  ENSG00000171476_44 (sequence is synthesized)
gaggtttctcaccatcccatctccatcagcacatcccagatctggcatctcacagctgtgctctttctgcttccttcctgttcctcgtccccttacccctagaacaggtgaattatagaa

SEQ ID NO: 576693 - DNA, 120 bp, Artificial Sequence
  ENSG00000171476_45 (sequence is synthesized)
ataccagaagggacagtagaaaccccctaagcttacgtttttatttacagatgattggtgctctatttttagggacttcctcaagttctcatagccaattagttactctagagcttcctg

SEQ ID NO: 576694 - DNA, 120 bp, Artificial Sequence
  ENSG00000171476_46 (sequence is synthesized)
ttggcagagcccagggctgcagagccctgggtggtcacctaccacacagcctgcctacacaccagtgacacacaaatattgtccttctcaatgtaccccatgacatgtgaatggttggga

SEQ ID NO: 576695 - DNA, 120 bp, Artificial Sequence
  ENSG00000171476_47 (sequence is synthesized)
agcacaggagaacagagcttgggggaggtgctgacttcccatagagctctgtcctcatcctctccaatgtaggtcaatgcttgctcatctgtttcctcactagtctctcttcaaagttgt

SEQ ID NO: 576696 - DNA, 120 bp, Artificial Sequence
  ENSG00000171476_48 (sequence is synthesized)
tttgctttgttttttattcccagtttcctcttgatcaacctggtccagaccctggccctatccccagcatggttctcctgttctcctctttggggagctctgtaccaccccggttagcaa

SEQ ID NO: 576697 - DNA, 120 bp, Artificial Sequence
  ENSG00000171476_49 (sequence is synthesized)
gataaaggcagccactgatttctcaagggtataccacactgccttacaacatataggcatgttctaggcctcatatgataccgtgtctagaaacatcccatctggggccttctgtacatc

SEQ ID NO: 576698 - DNA, 120 bp, Artificial Sequence
  ENSG00000171476_50 (sequence is synthesized)
ctctcactgctcagtggccctggagcaggatagattgggctggcctactccatgcatccccaaggagtgctctgaggttgtgcagcgctcagttacctattaatcttattcaacaaattc

SEQ ID NO: 576699 - DNA, 120 bp, Artificial Sequence
  ENSG00000171476_51 (sequence is synthesized)
ttactaactgctaccaatgaggaaggcctttggtgagctgagcatacattgatgaaatacagcagccatagagatctatctggggcattaaggagatgctttaacttcttttatttattc

SEQ ID NO: 576700 - DNA, 120 bp, Artificial Sequence
  ENSG00000171476_52 (sequence is synthesized)
agcaaatattgattaatttctaactcttaaacctttgtactagtggctaaggatgcaatggtgataggatgaatacagtctctgctttcatggatcttacattctagaagggaatataga

SEQ ID NO: 576701 - DNA, 120 bp, Artificial Sequence
  ENSG00000171476_53 (sequence is synthesized)
tttaaaacaagtgaatacacaagtaaatcatgacagatgctaaaagttctgtgaaagtaacaaaatactaaattgggaagtaaggagatgagtgggaaacccattttagatagagtgatc

SEQ ID NO: 576702 - DNA, 120 bp, Artificial Sequence
  ENSG00000171476_54 (sequence is synthesized)
agggaaggcttcattgagaaggtcctgtttaagctgagatgtgaggatgacagggagatcatcagataaagaataaagagagaatattctaaacataggaaatagcatgtgcaaaggtcc

SEQ ID NO: 576703 - DNA, 120 bp, Artificial Sequence
  ENSG00000171476_55 (sequence is synthesized)
tgaggcaggaaagtttagtgtcacagtgagaaccatccctatgggaacattccttgattctctcctttccacttgtgccacagaggctaccttttagaaagggaacaggcatttcagttt

SEQ ID NO: 576704 - DNA, 120 bp, Artificial Sequence
  ENSG00000171476_56 (sequence is synthesized)
gcttccaaacccagggcttgcgcttgcctttgcctcttccacactaatgacagactgccccactgagaagggtctagcggagcacaggtcaccagctgggcaacattcagaaagttagtc

SEQ ID NO: 576705 - DNA, 120 bp, Artificial Sequence
  ENSG00000171478_0 (sequence is synthesized)
aagtcacctgggagggcttacaggtgccataatgaaggcctggggcactgtggtagtgaccttggccacgctgatggttgtcactgtggatgccaagatctatgaacgctgcgagctggc

SEQ ID NO: 576706 - DNA, 120 bp, Artificial Sequence
  ENSG00000171478_1 (sequence is synthesized)
ggcaagactggagagagcagggctgaacggctacaagggctacggcgttggagactggctgtgcatggctcattatgagagtggctttgacaccgccttcgtggaccacaatcctgatgg

SEQ ID NO: 576707 - DNA, 120 bp, Artificial Sequence
  ENSG00000171478_2 (sequence is synthesized)
ctggatgacatcaggtgtgccaagcagattgtgtcctcacagaatgggctttctgcctggacttcttggaggctacactgttctggccatgatttatctgaatggctcaaggggtgtgat

SEQ ID NO: 576708 - DNA, 120 bp, Artificial Sequence
  ENSG00000171478_3 (sequence is synthesized)
atgcatgtgaaaattgatccaaaaattcatccatgactcagattcgaagagacagattttatcttcctttcatttctttctcttgtgcatttaataaaggatggtatctataaacaatgc

SEQ ID NO: 576709 - DNA, 120 bp, Artificial Sequence
  ENSG00000171481_0 (sequence is synthesized)
tgtaagaacaacgtggaaagatgcatgttgtagatgacataagaattatgtcattaattgacagtgttgcttatctttaggtgagtacaagtccatgggaatgtccaacctgacaagact

SEQ ID NO: 576710 - DNA, 120 bp, Artificial Sequence
  ENSG00000171481_1 (sequence is synthesized)
ctctgaatttattctcttgggactctcctctcggtctgaagaccagaggccactctttgccctctttcttatcatatacctggtcactttgatgggaaatctgctcatcatcttggctat

SEQ ID NO: 576711 - DNA, 120 bp, Artificial Sequence
  ENSG00000171481_2 (sequence is synthesized)
ccactctgatcctcgacttcaaaaccctatgtattttttcctaagcatcttgtcctttgctgatatttgctacacaacagtcatagtcccaaagatgctcgtgaacttcttatcagagaa

SEQ ID NO: 576712 - DNA, 120 bp, Artificial Sequence
  ENSG00000171481_3 (sequence is synthesized)
aaagaccatttcctatgctgaatgtctggcacagatgtatttcttcctggtttttggaaacatagatagttatctcctggcggctatggccatcaaccgctgtgtagccatttgtaaccc

SEQ ID NO: 576713 - DNA, 120 bp, Artificial Sequence
  ENSG00000171481_4 (sequence is synthesized)
tgttgctactagcattccccatcactttctcctatttccactctctcctacatgtcctcctggtgaatcggctcaccttttgtacatcaaatgttatccatcattttttttgtgatgtca

SEQ ID NO: 576714 - DNA, 120 bp, Artificial Sequence
  ENSG00000171481_5 (sequence is synthesized)
accctgtgctgaaactgtcctgctcctccacctttgtcaatgaaattgtggccatgacagaagggctggcctctgtgatggctccatttgtctgtatcatcatctcttatctaagaattc

SEQ ID NO: 576715 - DNA, 120 bp, Artificial Sequence
  ENSG00000171481_6 (sequence is synthesized)
tcatcgctgttctcaagattccctcagcagctggaaaacacaaagccttctccacctgcagctcccatctcactgtggtgattctgttttatgggagtattagctatgtctatttgcagc

SEQ ID NO: 576716 - DNA, 120 bp, Artificial Sequence
  ENSG00000171481_7 (sequence is synthesized)
ctttgtccagctatactgtcaaggaccgaatagcaacaatcaactacactgtgttgacatcagtgttgaacccatttatctacagtttaagaaacaaagacatgaaacggggcttacaga

SEQ ID NO: 576717 - DNA, 120 bp, Artificial Sequence
  ENSG00000171481_8 (sequence is synthesized)
catgaaacggggcttacagaaattgataaacaagattaagtctcaaatgagtaggttctctacaaagaccaataaaatctgtggaccctgattacaaggtgtgtgtgtgtgtgtgtgtgt

SEQ ID NO: 576718 - DNA, 120 bp, Artificial Sequence
  ENSG00000171487_0 (sequence is synthesized)
atgaaggttgcaggaggacttgaacttggagctgctgctctgctctcagcatcaccacgtgctcttgtcactctttccacaggtcctacttgctctatattaccaaagaatccacttttc

SEQ ID NO: 576719 - DNA, 120 bp, Artificial Sequence
  ENSG00000171487_1 (sequence is synthesized)
ccccaaaacctgagctctcagccttgtatcaagatggaaggagacaaatcgctcaccttttccagctacgggctgcaatggtgtctctatgagctagacaaggaagaatttcagacattc

SEQ ID NO: 576720 - DNA, 120 bp, Artificial Sequence
  ENSG00000171487_2 (sequence is synthesized)
aaggaattactaaagaagaaatcttcagaatcgaccacatgctctattccacagtttgaaatcgagaatgccaacgtggaatgtctggcactcctcttgcatgagtattatggagcatcg

SEQ ID NO: 576721 - DNA, 120 bp, Artificial Sequence
  ENSG00000171487_3 (sequence is synthesized)
ctggcctgggctacgtccattagcatctttgaaaacatgaacctgcgaaccctctcggagaaggcacgggatgacatgaaaagacattcaccagaagatcctgaagcaacgatgactgac

SEQ ID NO: 576722 - DNA, 120 bp, Artificial Sequence
  ENSG00000171487_4 (sequence is synthesized)
caaggaccaagcaaggaaaaagtgccaggaatttcacaagctgtgcaacaagatagtgccacagctgcagagacaaaagaacaagaaatttcacaagctatggaacaagaaggtgccaca

SEQ ID NO: 576723 - DNA, 120 bp, Artificial Sequence
  ENSG00000171487_5 (sequence is synthesized)
gcagcagagacagaagaacaagaaatttcacaagctatggaacaagaaggtgccacagcagcagagacagaagaacaaggacatggaggtgacacatgggactacaagagtcacgtgatg

SEQ ID NO: 576724 - DNA, 120 bp, Artificial Sequence
  ENSG00000171487_6 (sequence is synthesized)
accaaattcgctgaggaggaggatgtacgtcgtagttttgaaaacactgctgctgactggccggaaatgcaaacgttggctggtgcttttgattcagaccggtggggcttccggcctcgc

SEQ ID NO: 576725 - DNA, 120 bp, Artificial Sequence
  ENSG00000171487_7 (sequence is synthesized)
acggtggttctgcacggaaagtcaggaattgggaaatcggctctagccagaaggatcgtgctgtgctgggcgcaaggtggactctaccagggaatgttctcctacgtcttcttcctcccc

SEQ ID NO: 576726 - DNA, 120 bp, Artificial Sequence
  ENSG00000171487_8 (sequence is synthesized)
gttagagagatgcagcggaagaaggagagcagtgtcacagagttcatctccagggagtggccagactcccaggctccggtgacggagatcatgtcccgaccagaaaggctgttgttcatc

SEQ ID NO: 576727 - DNA, 120 bp, Artificial Sequence
  ENSG00000171487_9 (sequence is synthesized)
attgacggtttcgatgacctgggctctgtcctcaacaatgacacaaagctctgcaaagactgggctgagaagcagcctccgttcaccctcatacgcagtctgctgaggaaggtcctgctc

SEQ ID NO: 576728 - DNA, 120 bp, Artificial Sequence
  ENSG00000171487_10 (sequence is synthesized)
cctgagtccttcctgatcgtcaccgtcagagacgtgggcacagagaagctcaagtcagaggtcgtgtctccccgttacctgttagttagaggaatctccggggaacaaagaatccacttg

SEQ ID NO: 576729 - DNA, 120 bp, Artificial Sequence
  ENSG00000171487_11 (sequence is synthesized)
ctccttgagcgcgggattggtgagcatcagaagacacaagggttgcgtgcgatcatgaacaaccgtgagctgctcgaccagtgccaggtgcccgccgtgggctctctcatctgcgtggcc

SEQ ID NO: 576730 - DNA, 120 bp, Artificial Sequence
  ENSG00000171487_12 (sequence is synthesized)
ctgcagctgcaggacgtggtgggggagagcgtcgcccccttcaaccaaacgctcacaggcctgcacgccgcttttgtgtttcatcagctcacccctcgaggcgtggtccggcgctgtctc

SEQ ID NO: 576731 - DNA, 120 bp, Artificial Sequence
  ENSG00000171487_13 (sequence is synthesized)
aatctggaggaaagagttgtcctgaagcgcttctgccgtatggctgtggagggagtgtggaataggaagtcagtgtttgacggtgacgacctcatggttcaaggactcggggagtctgag

SEQ ID NO: 576732 - DNA, 120 bp, Artificial Sequence
  ENSG00000171487_14 (sequence is synthesized)
ctccgtgctctgtttcacatgaacatccttctcccagacagccactgtgaggagtactacaccttcttccacctcagtctccaggacttctgtgccgccttgtactacgtgttagagggc

SEQ ID NO: 576733 - DNA, 120 bp, Artificial Sequence
  ENSG00000171487_15 (sequence is synthesized)
ctggaaatcgagccagctctctgccctctgtacgttgagaagacaaagaggtccatggagcttaaacaggcaggcttccatatccactcgctttggatgaagcgtttcttgtttggcctc

SEQ ID NO: 576734 - DNA, 120 bp, Artificial Sequence
  ENSG00000171487_16 (sequence is synthesized)
cccgttcccctgggggtgaagcagaagcttctgcactgggtctctctgttgggtcagcagcctaatgccaccaccccaggagacaccctggacgccttccactgtcttttcgagactcaa

SEQ ID NO: 576735 - DNA, 120 bp, Artificial Sequence
  ENSG00000171487_17 (sequence is synthesized)
gacaaagagtttgttcgcttggcattaaacagcttccaagaagtgtggcttccgattaaccagaacctggacttgatagcatcttccttctgcctccagcactgtccgtatttgcggaaa

SEQ ID NO: 576736 - DNA, 120 bp, Artificial Sequence
  ENSG00000171487_18 (sequence is synthesized)
attcgggtggatgtcaaagggatcttcccaagagatgagtccgctgaggcatgtcctgtggtccctctatggatgcgggataagaccctcattgaggagcagtgggaagatttctgctcc

SEQ ID NO: 576737 - DNA, 120 bp, Artificial Sequence
  ENSG00000171487_19 (sequence is synthesized)
atgcttggcacccacccacacctgcggcagctggacctgggcagcagcatcctgacagagcgggccatgaagaccctgtgtgccaagctgaggcatcccacctgcaagatacagaccctg

SEQ ID NO: 576738 - DNA, 120 bp, Artificial Sequence
  ENSG00000171487_20 (sequence is synthesized)
atgtttagaaatgcacagattacccctggtgtgcagcacctctggagaatcgtcatggccaaccgtaacctaagatccctcaacttgggaggcacccacctgaaggaagaggatgtaagg

SEQ ID NO: 576739 - DNA, 120 bp, Artificial Sequence
  ENSG00000171487_21 (sequence is synthesized)
atggcgtgtgaagccttaaaacacccaaaatgtttgttggagtctttgaggctggattgctgtggattgacccatgcctgttacctgaagatctcccaaatccttacgacctcccccagc

SEQ ID NO: 576740 - DNA, 120 bp, Artificial Sequence
  ENSG00000171487_22 (sequence is synthesized)
ctgaaatctctgagcctggcaggaaacaaggtgacagaccagggagtaatgcctctcagtgatgccttgagagtctcccagtgcgccctgcagaagctgatactggaggactgtggcatc

SEQ ID NO: 576741 - DNA, 120 bp, Artificial Sequence
  ENSG00000171487_23 (sequence is synthesized)
acagccacgggttgccagagtctggcctcagccctcgtcagcaaccggagcttgacacacctgtgcctatccaacaacagcctggggaacgaaggtgtaaatctactgtgtcgatccatg

SEQ ID NO: 576742 - DNA, 120 bp, Artificial Sequence
  ENSG00000171487_24 (sequence is synthesized)
aggcttccccactgtagtctgcagaggctgatgctgaatcagtgccacctggacacggctggctgtggttttcttgcacttgcgcttatgggtaactcatggctgacgcacctgagcctt

SEQ ID NO: 576743 - DNA, 120 bp, Artificial Sequence
  ENSG00000171487_25 (sequence is synthesized)
agcatgaaccctgtggaagacaatggcgtgaagcttctgtgcgaggtcatgagagaaccatcttgtcatctccaggacctggagttggtaaagtgtcatctcaccgccgcgtgctgtgag

SEQ ID NO: 576744 - DNA, 120 bp, Artificial Sequence
  ENSG00000171487_26 (sequence is synthesized)
agtctgtcctgtgtgatctcgaggagcagacacctgaagagcctggatctcacggacaatgccctgggtgacggtggggttgctgcgctgtgcgagggactgaagcaaaagaacagtgtt

SEQ ID NO: 576745 - DNA, 120 bp, Artificial Sequence
  ENSG00000171487_27 (sequence is synthesized)
ctggcgagactcgggttgaaggcatgtggactgacttctgattgctgtgaggcactctccttggccctttcctgcaaccggcatctgaccagtctaaacctggtgcagaataacttcagt

SEQ ID NO: 576746 - DNA, 120 bp, Artificial Sequence
  ENSG00000171487_28 (sequence is synthesized)
cccaaaggaatgatgaagctgtgttcggcctttgcctgtcccacgtctaacttacagataattgggctgtggaaatggcagtaccctgtgcaaataaggaagctgctggaggaagtgcag

SEQ ID NO: 576747 - DNA, 120 bp, Artificial Sequence
  ENSG00000171487_29 (sequence is synthesized)
ctactcaagccccgagtcgtaattgacggtagttggcattcttttgatgaagatgaccggtactggtggaaaaactgaagatacggaaacctgccccactcacacccatctgatggagga

SEQ ID NO: 576748 - DNA, 120 bp, Artificial Sequence
  ENSG00000171487_30 (sequence is synthesized)
actttaaacgctgttttctcagagcaagctatgcacctgggagttccttctcaaagatggagaatgatttctgattctcacaaagccctcaatggtagtgattcttctgtgttcactcta

SEQ ID NO: 576749 - DNA, 120 bp, Artificial Sequence
  ENSG00000171487_31 (sequence is synthesized)
cgttggttactggatttgaaggctagagaccttcaagtcataggactcagtatctgtgaaatgtccgtcatatctcagagcatatagagggaattaaataaacacaaagcatttggaaaa

SEQ ID NO: 576750 - DNA, 120 bp, Artificial Sequence
  ENSG00000171487_32 (sequence is synthesized)
caaggaccaagcaaggaaaaagtgccagacatctctgactcaaataataaacacaagtatgttggaattcattcttcttttgcagaaatttcacaagctatggaacaagaaggtgccaca

SEQ ID NO: 576751 - DNA, 63 bp, Artificial Sequence
  ENSG00000171487_33 (sequence is synthesized)
tacaatgcagtggctatccacaagcatgaccgtagctcactacagcctcaaactgaatttcac

SEQ ID NO: 576752 - DNA, 120 bp, Artificial Sequence
  ENSG00000171488_0 (sequence is synthesized)
gttagctgcgtcccggctggaagcccgcgaagagaagtaggaggaaggcgccgccgtggccgcggccgcagtgctcgggcgcgacaagccatgagcagcgaccccgcgggcgacgccgcc

SEQ ID NO: 576753 - DNA, 120 bp, Artificial Sequence
  ENSG00000171488_1 (sequence is synthesized)
gtccctggcagccgctgagcccgacccccaggcagctcgccgctccctagcaccttctccagtcgacactctcgcgcccggagaaacatgattcccgtgacagaattccggcagttctct

SEQ ID NO: 576754 - DNA, 120 bp, Artificial Sequence
  ENSG00000171488_2 (sequence is synthesized)
gagcagcagcctgccttccgagtgctgaagccatggtgggatgtgtttaccgattacctctcagtagccatgctcatgatcggcgtgtttggatgtactttacaggtcatgcaagacaag

SEQ ID NO: 576755 - DNA, 120 bp, Artificial Sequence
  ENSG00000171488_3 (sequence is synthesized)
ataatctgccttccgaaaagagtgcagcctgctcagaaccactcttccctttcgaatgtctctcaagcagttgccagtaccactccactgcctccacctaaaccatctcctgctaacccc

SEQ ID NO: 576756 - DNA, 120 bp, Artificial Sequence
  ENSG00000171488_4 (sequence is synthesized)
atcactgtggaaatgaaaggcctgaagacagatttggaccttcagcagtacagctttataaatcagatgtgttatgagcgagccctccactggtatgccaagtatttcccttaccttgtc

SEQ ID NO: 576757 - DNA, 120 bp, Artificial Sequence
  ENSG00000171488_5 (sequence is synthesized)
ctcatccataccctggtctttatgctctgcagtaacttttggttcaaattccctggttccagctccaaaatagaacatttcatctccattctggggaagtgttttgactctccttggacc

SEQ ID NO: 576758 - DNA, 120 bp, Artificial Sequence
  ENSG00000171488_6 (sequence is synthesized)
acacgggctttatctgaagtgtctggggaggactcagaagaaaaggacaacaggaagaacaacatgaacaggtccaacaccatccaatctggtccagaagacagcctggtcaactctcag

SEQ ID NO: 576759 - DNA, 120 bp, Artificial Sequence
  ENSG00000171488_7 (sequence is synthesized)
tctttaaagtccattcctgagaagtttgtagttgataaatccactgcaggggctctggataaaaaggaaggtgagcaggctaaggccttatttgagaaggtgaagaagttcaggctgcat

SEQ ID NO: 576760 - DNA, 120 bp, Artificial Sequence
  ENSG00000171488_8 (sequence is synthesized)
gtggaagaaggtgatattctatatgccatgtatgttcgccagactgtacttaaagttatcaaattcctaatcatcattgcatataatagtgctctggtttccaaggtccagtttacagtg

SEQ ID NO: 576761 - DNA, 120 bp, Artificial Sequence
  ENSG00000171488_9 (sequence is synthesized)
gactgtaatgtggacattcaggacatgactggatataaaaacttttcttgcaatcataccatggcacacttgttctcaaaactgtccttttgctatctgtgctttgttagtatctatgga

SEQ ID NO: 576762 - DNA, 120 bp, Artificial Sequence
  ENSG00000171488_10 (sequence is synthesized)
ttgacgtgcctttataccttatactggctgttctaccgttctctacgggaatattcctttgagtatgtccgtcaggagactggaattgatgatattccagatgtgaaaaatgactttgct

SEQ ID NO: 576763 - DNA, 120 bp, Artificial Sequence
  ENSG00000171488_11 (sequence is synthesized)
tttatgcttcatatgatagatcagtatgaccctctctattccaagagatttgcagtgttcctgtctgaagtcagtgaaaacaaattaaagcagctgaacttaaataacgaatggactcct

SEQ ID NO: 576764 - DNA, 120 bp, Artificial Sequence
  ENSG00000171488_12 (sequence is synthesized)
gataaactgaggcagaagctacagacaaatgcccataatcgactggaattgcctcttatcatgctctctggccttccagacactgtttttgaaatcacagagttgcaatctctaaaactt

SEQ ID NO: 576765 - DNA, 120 bp, Artificial Sequence
  ENSG00000171488_13 (sequence is synthesized)
gaaatcattaagaacgtaatgataccagccaccattgcacagctagacaatcttcaagagctctctctgcaccagtgttctgtcaaaatccacagtgcggcgctctctttcctgaaggaa

SEQ ID NO: 576766 - DNA, 120 bp, Artificial Sequence
  ENSG00000171488_14 (sequence is synthesized)
aacctcaaggtcttgagcgtcaagtttgatgacatgagggaactccccccctggatgtatgggctccgaaatctggaagagctgtacctagttggctctctaagtcatgatatttccaga

SEQ ID NO: 576767 - DNA, 120 bp, Artificial Sequence
  ENSG00000171488_15 (sequence is synthesized)
aatgtcacccttgagtctctgcgggatctcaaaagccttaaaattctctctatcaaaagcaacgtttccaaaatccctcaggcagtggttgatgtttccagccatctccagaagatgtgc

SEQ ID NO: 576768 - DNA, 120 bp, Artificial Sequence
  ENSG00000171488_16 (sequence is synthesized)
atacataatgatggcaccaagctggtgatgctcaacaacttaaagaagatgaccaatctgacagagctggagctggtccactgtgacctggagcgtattcctcatgctgtgttcagccta

SEQ ID NO: 576769 - DNA, 120 bp, Artificial Sequence
  ENSG00000171488_17 (sequence is synthesized)
ctcagcctccaggaattggacctgaaggaaaacaatctgaaatctatagaagaaatcgttagctttcagcacttaagaaagttgacagtgctaaaactgtggcataacagcatcacctac

SEQ ID NO: 576770 - DNA, 120 bp, Artificial Sequence
  ENSG00000171488_18 (sequence is synthesized)
atcccagagcatataaagaaactcaccagcctggaacgcctgtcctttagtcacaataaaatagaggtgctgccttcccacctcttcctatgcaacaagatccgatacttggacttatcg

SEQ ID NO: 576771 - DNA, 120 bp, Artificial Sequence
  ENSG00000171488_19 (sequence is synthesized)
tacaatgacattcgatttatcccccctgaaattggagttctacaaagtttacagtatttttccatcacatgtaacaaagtggaaagccttccagatgaactctacttctgcaagaaactt

SEQ ID NO: 576772 - DNA, 120 bp, Artificial Sequence
  ENSG00000171488_20 (sequence is synthesized)
aaaactctgaagattggaaaaaacagcctatctgtactttcaccgaaaattggaaatttgctatttctttcctacttagatgtaaaaggtaatcactttgaaatcctccctcctgaactg

SEQ ID NO: 576773 - DNA, 120 bp, Artificial Sequence
  ENSG00000171488_21 (sequence is synthesized)
ggtgactgtcgggctctgaagcgagctggtttagttgtagaagatgctctgtttgaaactctgccttctgacgtccgggagcaaatgaaaacagaataacttatttttcgttaaagtttg

SEQ ID NO: 576774 - DNA, 120 bp, Artificial Sequence
  ENSG00000171488_22 (sequence is synthesized)
actgaaacacgcttctaccaaatacagtataaataattaggtagtcttaatgcctttcctatttttttttccttttcacacaaaatgtacacaaagatcgcgtaaggagtatgtattttt

SEQ ID NO: 576775 - DNA, 120 bp, Artificial Sequence
  ENSG00000171488_23 (sequence is synthesized)
aataaaaatttaattgtattttttcaatattaatattttgaagttttatttgtcttgaaacacaatgtatctattatctactgacagaaagagatagttccatttggttttttgtttttg

SEQ ID NO: 576776 - DNA, 120 bp, Artificial Sequence
  ENSG00000171488_24 (sequence is synthesized)
ttttttagttcattcttgtggaaaggagggaattataagttgcatgctttttggcattttttaaatagaggaagatattttgccaaggccatttttaacttgtttacacctgtacagggt

SEQ ID NO: 576777 - DNA, 120 bp, Artificial Sequence
  ENSG00000171488_25 (sequence is synthesized)
tcttatttttgttttcattgtgtgtgtatcaaggaatctgtgctagttattttaataccagctgtcttctccattggccaagaccttcattcagtggaacttcacataagtgcattgtca

SEQ ID NO: 576778 - DNA, 120 bp, Artificial Sequence
  ENSG00000171488_26 (sequence is synthesized)
tagagtattttaaatgttcccctgcctccaacaaaaccctaaactgtgttatttcatatacctgacagttattgttatccttaggcaaggtttttgtgagtgaagaaaataatctttagt

SEQ ID NO: 576779 - DNA, 120 bp, Artificial Sequence
  ENSG00000171488_27 (sequence is synthesized)
ggctggtatgtttgaattaggcctttatcatttaacttatttgcattttaccaacattttaaaaatatttaaaacctaaatacagaggctcctcccaccttaatctcaatactgctatgt

SEQ ID NO: 576780 - DNA, 120 bp, Artificial Sequence
  ENSG00000171488_28 (sequence is synthesized)
agtactggtgaacaactttggagaacctagatttattttaatattctaatagataattaaattttaaaatgatagaagcctggtttttgagtaatttaatcatctttcatatcttgatat

SEQ ID NO: 576781 - DNA, 120 bp, Artificial Sequence
  ENSG00000171488_29 (sequence is synthesized)
tgtggcagtggtaatctattcaaattttgcctgttacacaaaataatccacttatatatacagtcagccttccgtacttgtgggttctgcatctgtggattccaccaactgtagatggaa

SEQ ID NO: 576782 - DNA, 120 bp, Artificial Sequence
  ENSG00000171488_30 (sequence is synthesized)
aatactcaaaaagaaagttgtgtctgtactgaatatgtacagactttttccttgtcattattccctaaacaatacagcgtaacaactatttaaataggatttacattgttttaggtatta

SEQ ID NO: 576783 - DNA, 120 bp, Artificial Sequence
  ENSG00000171488_31 (sequence is synthesized)
atgggaggatgtgcataggttatatgcaatttctgcaccattttatgtcaaggattttgaacatcctcagattttggtgttcgagggcatcctggaatcaattccccatgataccgaggg

SEQ ID NO: 576784 - DNA, 120 bp, Artificial Sequence
  ENSG00000171488_32 (sequence is synthesized)
tggaatcaattccccatgataccgagggatgactggatattaatcgatttccctcaagcctgcccttgctgtgaactagtgctacaagcacgggaaatccatctgctctctggcttaaaa

SEQ ID NO: 576785 - DNA, 120 bp, Artificial Sequence
  ENSG00000171488_33 (sequence is synthesized)
tatgtatctcatctaaaattgttcgttaaagtgtgaataaattgctaagtggttgttgcttagcaataatttttgcctgaccatcagcagagcttttatttacctttgtaattaaaatcc

SEQ ID NO: 576786 - DNA, 120 bp, Artificial Sequence
  ENSG00000171488_34 (sequence is synthesized)
aacatagcatgggctcttgggcaaaatatttcactgactattaagcatgtagaacaggaaaatgaaatacactatttgtgcccttgacctagaaccagaaccactaattatgagaacttt

SEQ ID NO: 576787 - DNA, 120 bp, Artificial Sequence
  ENSG00000171488_35 (sequence is synthesized)
gttttatgtaccaaattcacattgaccattttctgagctctagactgatcgtagtaagttttgtgacttaacaatgaaagaaagtagaaagatgctttgggttttcaaaatgttgttttt

SEQ ID NO: 576788 - DNA, 120 bp, Artificial Sequence
  ENSG00000171488_36 (sequence is synthesized)
taaaattgttctttgggtgaatttactcagtgctgctttgagttgtatacagaaacaaatgttgggaattgctcctcagaaatgtgttcctaagttgtgttttcaactttacatcatgag

SEQ ID NO: 576789 - DNA, 120 bp, Artificial Sequence
  ENSG00000171488_37 (sequence is synthesized)
gtgaagcattagggaaagagattctttcgatttgtttaataatctaattatacagaccaaagtgctttacgtttctgctctatgttaatgttttagaatggtgattttgctgattaattt

SEQ ID NO: 576790 - DNA, 120 bp, Artificial Sequence
  ENSG00000171488_38 (sequence is synthesized)
agacctggaattgaaataatgtgctcagaataataacatggttatagttcttgtatgataaagtattcaatttcagaatagtgttggaatcctgagtttgaataatgtgttgtatttaga

SEQ ID NO: 576791 - DNA, 120 bp, Artificial Sequence
  ENSG00000171488_39 (sequence is synthesized)
aacatagccctatctgttttaaacaaataatttgttggccgattgtccatggttgagcatgacaaaaatacctcgtcgaaaggcaagcttaggtaactgctggcaaaacactgggtgcac

SEQ ID NO: 576792 - DNA, 120 bp, Artificial Sequence
  ENSG00000171488_40 (sequence is synthesized)
tatttttctggataaaatttatagttattttctatattacccttcaaaagggatctcttcaggttaaaaatcacgcttatgctgaagtctttatctggtgttaactaaaaatctcatatg

SEQ ID NO: 576793 - DNA, 120 bp, Artificial Sequence
  ENSG00000171488_41 (sequence is synthesized)
ggttcataaccgaggtcactaataattcatttttatcacttgtaaaaatttgctcaaaattccaaaaaaatattgatttgttttttagtgattttgcaggctgacccccaacctaagttt

SEQ ID NO: 576794 - DNA, 120 bp, Artificial Sequence
  ENSG00000171488_42 (sequence is synthesized)
tgataacatctggtaagtcagtatagttctgtgacttcatgttttaactaagaaggaaaattcatagatattcctattagattttataaaccttcaaaagtctgaaacttaattttgagt

SEQ ID NO: 576795 - DNA, 120 bp, Artificial Sequence
  ENSG00000171488_43 (sequence is synthesized)
ctaaattttctgacactggccccttttaatattgtaagtttttgttcactttcttaagtaaaaaaaacatttaattactagttagcccttaactgggaaactcaggtaatgaactgctga

SEQ ID NO: 576796 - DNA, 120 bp, Artificial Sequence
  ENSG00000171488_44 (sequence is synthesized)
cttttctaaagttctttaactgatcaattctgtatagagggatatttatctaaccactttccgtattttacaagtgctctttctaaaaaggaataactattatagctctatttccccaat

SEQ ID NO: 576797 - DNA, 120 bp, Artificial Sequence
  ENSG00000171488_45 (sequence is synthesized)
ctctataggactcatgagagattgcttgtgtaaatataaaagcaccatatgtgttcttaactcctatggctgcttgaagctcatgatgaaaaagtctttttgtcagttttaattgttaag

SEQ ID NO: 576798 - DNA, 120 bp, Artificial Sequence
  ENSG00000171488_46 (sequence is synthesized)
tacagaacaaacaattgtttggtgatggcctggttgaaagagagcatataaatatatcccagtggaactcaccaaagaagaccacacctcagaaattattgcattttctcattatgtgtt

SEQ ID NO: 576799 - DNA, 120 bp, Artificial Sequence
  ENSG00000171488_47 (sequence is synthesized)
gggtttgatttgcttttgtttttaatgcagctcttttaatataaagattcttgatacagtgaaatctcttatttcaagtgtaagttattcttcacccaccccttcccctgccattgtatt

SEQ ID NO: 576800 - DNA, 120 bp, Artificial Sequence
  ENSG00000171488_48 (sequence is synthesized)
tcccatctgtttcaaggagtttcaacaatttacattgcatcgtatgcagtaggtactgctttttcagaaagacctggaaaacatacctgctatgaatattttgttcagatgtagccattt

SEQ ID NO: 576801 - DNA, 120 bp, Artificial Sequence
  ENSG00000171488_49 (sequence is synthesized)
acctggctctcaagttgtctttgtggagagggtcttagacaaaaatcttccttgtatttacttgggttaagtgaagtccaaattcttacagtatgctatttcaggatttctgatattaaa

SEQ ID NO: 576802 - DNA, 120 bp, Artificial Sequence
  ENSG00000171488_50 (sequence is synthesized)
aaagaaaaaacaaaatctttatatctcttattaacacttcccccaagaagggttgtgctgttatttattttctattataagaaaagttcattctttaagtagtttcttttacctctaatc

SEQ ID NO: 576803 - DNA, 120 bp, Artificial Sequence
  ENSG00000171488_51 (sequence is synthesized)
taatttcataccaaatacctgatcaatagaaatgatatatttaagcagcaaagattcctaatccatcattatgaaaagtgtcagcatacttagtagtgaacagataaagtcaatttgaat

SEQ ID NO: 576804 - DNA, 120 bp, Artificial Sequence
  ENSG00000171488_52 (sequence is synthesized)
ataattccactttgtttttagagactaaattaagattcaattaacattatcctatgaattctgaatgtgataatgtgattcaaacagtcaaattttattaagctcttagtaactcaggat

SEQ ID NO: 576805 - DNA, 120 bp, Artificial Sequence
  ENSG00000171488_53 (sequence is synthesized)
agcattccatactaacctcaagttagcaaaacaaattagttaaacagcttggttcttagcagactgcttaaaagatcaagaaaattttctcatcttttctttctacttagaaacattgca

SEQ ID NO: 576806 - DNA, 120 bp, Artificial Sequence
  ENSG00000171488_54 (sequence is synthesized)
agaaaccttggacagtcttcaccagacctgccatgattttataagatttaggcctcagtgacatgctcctgaaagtttcctgccagccatccaaactaagcatccactcattccatcttc

SEQ ID NO: 576807 - DNA, 120 bp, Artificial Sequence
  ENSG00000171488_55 (sequence is synthesized)
ccaaagtcactcaccgataaaggtagcatccttaagttcatttttgaaaggtggaggaggatctccccctgcccaaaggaatttttttatcagaataccttgaaaggggggtatataaat

SEQ ID NO: 576808 - DNA, 120 bp, Artificial Sequence
  ENSG00000171488_56 (sequence is synthesized)
ttggaaaacttaatttcttggctgtgtttgataacagttcctatgcatggtttttaatgtgaggtaaatttgtttctttcttcagaatacctctctccaccccccaccttattcttcctc

SEQ ID NO: 576809 - DNA, 120 bp, Artificial Sequence
  ENSG00000171488_57 (sequence is synthesized)
tttaatgaatatttttattggagctcaaactccatgacttacgtgctcactaagttttcttttttccccttgtttactctgtctgtatgtatgtcaaaagctggcaaaacctctaaaact

SEQ ID NO: 576810 - DNA, 120 bp, Artificial Sequence
  ENSG00000171488_58 (sequence is synthesized)
gtcaagaaaatgcttgaaagttgatttgtcatagtgcaaattcatgataaaatgtcttaatgttatttggatatgtagtacatagaaacagaaaaataaagtcatttttataacttaaaa

SEQ ID NO: 576811 - DNA, 120 bp, Artificial Sequence
  ENSG00000171488_59 (sequence is synthesized)
ctgctgttacaaagatatggcaaaaacactgtttaaccttttgaagaagaagaagaagatgacgaagaagaagacaaagaagaagaagctgcctgccttattttttttcttatttttctc

SEQ ID NO: 576812 - DNA, 120 bp, Artificial Sequence
  ENSG00000171488_60 (sequence is synthesized)
gcaagagaagagtctaaggagcagcaggcaacgtgctgaagtgcagagccaggtcaaggctgggtttgtctgagcagctggtgagtaagagagctgtgaccagggctctgagaaatatgg

SEQ ID NO: 576813 - DNA, 120 bp, Artificial Sequence
  ENSG00000171488_61 (sequence is synthesized)
acaggggccagcctgacaaagacaacaaagaactgcccaggggaaggtgaagaaggtaactgtcaacccttcaaaaagtgaaatggcgttagtaagatgaaggccagcccataagagatg

SEQ ID NO: 576814 - DNA, 120 bp, Artificial Sequence
  ENSG00000171488_62 (sequence is synthesized)
ccagccaagatggaataatgcgcagattttcatctaagggtgggaatgacctgtcggcctgatccaggcacactggcttctgagattcccttcctagccctgcccacacaccccccaccc

SEQ ID NO: 576815 - DNA, 120 bp, Artificial Sequence
  ENSG00000171488_63 (sequence is synthesized)
gacgccctttccccagcctaggtccctgagtttctcattcgttgctcacttgtgtctattgtatgtcttcttcgtcaaaatcgagcagggactaattagcggtgaaagcagagactccag

SEQ ID NO: 576816 - DNA, 120 bp, Artificial Sequence
  ENSG00000171488_64 (sequence is synthesized)
ctcatttccgttcacctcattatttgtttctcttttgggctgaagccaaacaacaatcaaacattaacattccccctgcagagcgggcacacggacacatgggagcatgttacacacacc

SEQ ID NO: 576817 - DNA, 120 bp, Artificial Sequence
  ENSG00000171488_65 (sequence is synthesized)
acaccctcacagcgtgcacacatgcacatgcacacacacacacctgctccactgctattcggctgtgcgaggtctctgcggccccgctgtctccgggcatctagggtaacatctctttcc

SEQ ID NO: 576818 - DNA, 120 bp, Artificial Sequence
  ENSG00000171488_66 (sequence is synthesized)
atttcagacctgggactggtctgaaactgtataatggaatggccctgggcaagcagggaaaggacgttgggaatttccggaagcacaatccccctggccagcactggtgttaattaaggg

SEQ ID NO: 576819 - DNA, 120 bp, Artificial Sequence
  ENSG00000171488_67 (sequence is synthesized)
cgctgctggtgttttgcaggcagctgtttcctcctccggccctcctgttccccgggccgcctgggcaccggcgcctgcactctggcattcattgctctaccgtaagccttgtttctagcc

SEQ ID NO: 576820 - DNA, 120 bp, Artificial Sequence
  ENSG00000171488_68 (sequence is synthesized)
gcagcgcagccctccctggagtgagcggcggccggggctccagataaggcgggcctgcctcctagtggccaaggtgctgcagggcagctctgagggctggagggctgcgcagccgccacc

SEQ ID NO: 576821 - DNA, 120 bp, Artificial Sequence
  ENSG00000171488_69 (sequence is synthesized)
cgaggacacggggaggaggcacagtaagagaatccttagagcctaacgcccccttctccgtcgctctcgagccgctccagtccccaagtcccatcccctttccttccccgacatctctcc

SEQ ID NO: 576822 - DNA, 120 bp, Artificial Sequence
  ENSG00000171488_70 (sequence is synthesized)
tcgttgcctcactctggctccgtcgaactgcagtggtctgttagctggactctatctccagcttctgtatcgaatccatgcacctcgctgccaattcgtcttccggacgctcgttgtcag

SEQ ID NO: 576823 - DNA, 120 bp, Artificial Sequence
  ENSG00000171488_71 (sequence is synthesized)
tcctctgtgatctctaattaaggctctgctgagtctcctctttatctatagggagaatcctcaagcggggagacacacccttcctgcagaggcgtatcgccagccacgacaaggcgagcc

SEQ ID NO: 576824 - DNA, 120 bp, Artificial Sequence
  ENSG00000171488_72 (sequence is synthesized)
gcgtttctccccacactccccaaaaaggcgatgaccctccccaggccgcgctcacgctgaacccctgttgctgagctgcagttcctggaggtgtcctgtcctcaaatgtggggatgcggg

SEQ ID NO: 576825 - DNA, 120 bp, Artificial Sequence
  ENSG00000171488_73 (sequence is synthesized)
gaaaagattaagaaggtaaaagttcaaaccaggcaaaagttcaaacctcttggcactccacaatgtggcctcaagcttcccttctagctttagtgctagagtagaatgaaatgaagggtt

SEQ ID NO: 576826 - DNA, 120 bp, Artificial Sequence
  ENSG00000171488_74 (sequence is synthesized)
ggaatgccaggtgtgctacgttttagtcatggaactgtatgaaaggttctaaattctaaatgtctttacagggttgtcatggagactaaaagaggtcgccggagtatcaaatttagcaca

SEQ ID NO: 576827 - DNA, 120 bp, Artificial Sequence
  ENSG00000171488_75 (sequence is synthesized)
atgcttgccacatagtgaatgttcaataaatggcagctgtcattttccttcccccgttagaaagacaactggtttgctcacagttctgataccggccttgaactgaactttccatctctg

SEQ ID NO: 576828 - DNA, 120 bp, Artificial Sequence
  ENSG00000171488_76 (sequence is synthesized)
cacctcggcttttgacaccctatttgcctggagcgtccactatcaccactttggttaaagctactgtcacctcctgcaatagactaattcatctccctgctcctgcccacagttattttt

SEQ ID NO: 576829 - DNA, 120 bp, Artificial Sequence
  ENSG00000171488_77 (sequence is synthesized)
aatctagccaccagaatttttttaagtgtaaatcagattatgtcactcatctgctcaaacccctattgtagctccctatttcactcggtgtaaaagccaaagcactcaccatgtcctgga

SEQ ID NO: 576830 - DNA, 120 bp, Artificial Sequence
  ENSG00000171488_78 (sequence is synthesized)
ggccctacatgatctggctcttttcccccttcatgttatttcccatacctttctcccttgttcactctgtttcttccacaatgaccaattgcttttgctggaaagcaccagcaatttatt

SEQ ID NO: 576831 - DNA, 120 bp, Artificial Sequence
  ENSG00000171488_79 (sequence is synthesized)
aatagcctttgtgttggcttttccctctacctagaatattttcctcacatacctgcatagctctttcgcttactttttcatgactttgttcagttgtcaccttcaaaaaaaaaaaaaaaa

SEQ ID NO: 576832 - DNA, 120 bp, Artificial Sequence
  ENSG00000171488_80 (sequence is synthesized)
aactacaaaaggattggcattttaaaatttgtaatttgtggatttttctcattccaagtaaatagttgtttacatacccaattttttatctttgtttttgttttaattttttatttcttt

SEQ ID NO: 576833 - DNA, 120 bp, Artificial Sequence
  ENSG00000171488_81 (sequence is synthesized)
attttttattttttctatttattttttctattttctacaaccaattttttattcctaactttgcgttctttttcttaaagaaagcctctgccaaattgtgtaagctcctacacaacgcat

SEQ ID NO: 576834 - DNA, 120 bp, Artificial Sequence
  ENSG00000171488_82 (sequence is synthesized)
aactacccctggtgatcaggcaacagtcacaatcagtgaaggctccaaatgatatttaccagtttggttactttggaagtactttcaacgtcaggctttaaaagggcaagaatattaact

SEQ ID NO: 576835 - DNA, 120 bp, Artificial Sequence
  ENSG00000171488_83 (sequence is synthesized)
gagaagaattgaagctactttattgaatgccctacatggtttgttaagtgaacataacctaatattaaaatagaacgcttctcacctcagaagcgtcagtccagagggactgacattgtg

SEQ ID NO: 576836 - DNA, 120 bp, Artificial Sequence
  ENSG00000171488_84 (sequence is synthesized)
gctctcaggtaccaatgtgcgcatgggacagaacaccataagagtaatctaaaacaaaacaaaccctgatgtttgggtttggttgcaaattttaaggtcatttatccaagggcttctttc

SEQ ID NO: 576837 - DNA, 120 bp, Artificial Sequence
  ENSG00000171488_85 (sequence is synthesized)
agaagaaagaagaaagattctagtgagaaggattttttggaaaagtttttgctgtaagcctgaagtcctgtatctcaagaggaaataaggggtgaggggacacctgaacctccctcaggt

SEQ ID NO: 576838 - DNA, 120 bp, Artificial Sequence
  ENSG00000171488_86 (sequence is synthesized)
tttgagggccttcaacacggccattctgagagtctaatatgtgtcacctgaagtttgaaagaccgtgagctgagggctgatttctgccccagaaaatgtgcagagtaagagagaagctgg

SEQ ID NO: 576839 - DNA, 120 bp, Artificial Sequence
  ENSG00000171488_87 (sequence is synthesized)
ccagttgtgttgaggatgatgaagccaaagcaagtagctgctacacctgggaaattcccgcaaccccaaggccctgccgtggaaggacacggcatgttaccccaatgcaggacaggatag

SEQ ID NO: 576840 - DNA, 120 bp, Artificial Sequence
  ENSG00000171488_88 (sequence is synthesized)
aggaccagcaatcctgaggctgtgttaggctctatcagacaggacctcctagaaggggcaatgggacttcatagtgtgtgtgggtggaccctctaaaggggggagctgtcagcagaaggg

SEQ ID NO: 576841 - DNA, 120 bp, Artificial Sequence
  ENSG00000171488_89 (sequence is synthesized)
gcatcaacacagctccagagatcccacagagcgggtaccccccaaaagagtgctcaagagaatatcagctttaaacgtcagccacactcagcacaaagccaaattatggcagatagagct

SEQ ID NO: 576842 - DNA, 120 bp, Artificial Sequence
  ENSG00000171488_90 (sequence is synthesized)
gagtaagaaaattcccttctactatttttgattcctctctttatgtcccaaacctaggggcaagcctaatgaggaagaggagcaggaaaggagaaatgaaggatcaagccttcctctctc

SEQ ID NO: 576843 - DNA, 120 bp, Artificial Sequence
  ENSG00000171488_91 (sequence is synthesized)
actgcaggcagccagctcatactggggctgcccaagaatgggatacaattcaacattaaataaaattcaaggttttagatttttccacggctcagtattctaatgtgtgtattgggctgt

SEQ ID NO: 576844 - DNA, 120 bp, Artificial Sequence
  ENSG00000171488_92 (sequence is synthesized)
gtttgtgacttaaaatgaccacaggacagactgtaaattaccttggggtgaactgtattcatccaaggcaggaaaagattaccatacaaaataaactttataggatcaataagaacaaaa

SEQ ID NO: 576845 - DNA, 120 bp, Artificial Sequence
  ENSG00000171489_0 (sequence is synthesized)
ggcagcaacagggttgcaggtgtaaaataacgggaaggcgggatgcgtggctaaattgctctgcgtgcacaaagagtaggagagcccagagttccagaatgcccctaattccgaacacca

SEQ ID NO: 576846 - DNA, 120 bp, Artificial Sequence
  ENSG00000171489_1 (sequence is synthesized)
cagggtgagtctggagcaagtcacctgggagggcttacaggtgccataatgaaggcctggggcactgtggtagtgaccttggccacgctgatggttgtcactgtggatgccaagatctat

SEQ ID NO: 576847 - DNA, 120 bp, Artificial Sequence
  ENSG00000171489_2 (sequence is synthesized)
tacaagggctacggcgttggagactggctgtgcatggctcattatgagagtggctttgacaccgccttcgtggaccacaatcctgatggcagcagtgaatatggcattttccaactgaat

SEQ ID NO: 576848 - DNA, 120 bp, Artificial Sequence
  ENSG00000171489_3 (sequence is synthesized)
tctgcctggtggtgtgacaatggcattacacccaccaagaacctctgccacatggattgtcatgacctgctcaatcgccatattctggatgacatcaggtgtgccaagcagattgtgtcc

SEQ ID NO: 576849 - DNA, 120 bp, Artificial Sequence
  ENSG00000171489_4 (sequence is synthesized)
tcacagaatgggctttctgcctggacttcttggaggctacactgttctggccatgatttatctgaatggctcaaggggtgtgatatgcatgtgaaaattgatccaaaaattcatccatga

SEQ ID NO: 576850 - DNA, 120 bp, Artificial Sequence
  ENSG00000171490_0 (sequence is synthesized)
acacgcgcctcttcacgaggtggaaacaagatggaggattcggcctcggcctcgctgtcttctgcagccgctactggaacctccacctcgactccagcggccccgacagcacggaagcag

SEQ ID NO: 576851 - DNA, 120 bp, Artificial Sequence
  ENSG00000171490_1 (sequence is synthesized)
ctggataaagaacaggttagaaaggcagtggacgctctcttgacgcattgcaagtccaggaaaaacaattatgggttgcttttgaatgagaatgaaagtttatttttaatggtggtatta

SEQ ID NO: 576852 - DNA, 120 bp, Artificial Sequence
  ENSG00000171490_2 (sequence is synthesized)
tggaaaattccaagtaaagaactgagggtcagattgaccttgcctcatagtattcgatcagattcagaagatatctgtttatttacgaaggatgaacccaattcaactcctgaaaagaca

SEQ ID NO: 576853 - DNA, 120 bp, Artificial Sequence
  ENSG00000171490_3 (sequence is synthesized)
gaacagttttatagaaagcttttaaacaagcatggaattaaaaccgtttctcagattatctccctccaaactctaaagaaggaatataaatcctatgaagccaagctccgccttctgagc

SEQ ID NO: 576854 - DNA, 120 bp, Artificial Sequence
  ENSG00000171490_4 (sequence is synthesized)
agttttgatttcttccttactgatgccagaattaggcggctcttaccctcactcattgggagacatttctatcaaagaaagaaagttccagtatctgtaaaccttctgtccaagaattta

SEQ ID NO: 576855 - DNA, 120 bp, Artificial Sequence
  ENSG00000171490_5 (sequence is synthesized)
tcaagagagatcaatgactgtataggtggaacagtcttaaacatttctaaaagtggttcttgcagtgctatacgtattggtcacgttggaatgcaaattgagcacatcattgaaaacatt

SEQ ID NO: 576856 - DNA, 120 bp, Artificial Sequence
  ENSG00000171490_6 (sequence is synthesized)
gttgctgtcaccaaaggactttcagaaaaattgccagagaagtgggagagcgtgaaactcctgtttgtgaaaactgagaaatcggctgcacttcccatcttttcctcgtttgtcagcaat

SEQ ID NO: 576857 - DNA, 120 bp, Artificial Sequence
  ENSG00000171490_7 (sequence is synthesized)
tgggatgaagccaccaaaagatctttgcttaataagaagaaaaaagaggcaaggagaaaacgaagagaaagaaattttgaaaaacaaaaggagaggaagaagaagaggcagcaggctagg

SEQ ID NO: 576858 - DNA, 120 bp, Artificial Sequence
  ENSG00000171490_8 (sequence is synthesized)
aagactgcatcagttcttagtaaagatgatgtggcacctgaaagtggtgatactacagtgaagaaacctgaatcaaagaaggaacagaccccagagcatgggaagaaaaaacgtggcaga

SEQ ID NO: 576859 - DNA, 120 bp, Artificial Sequence
  ENSG00000171490_9 (sequence is synthesized)
ggaaaagcccaagttaaagcaacaaatgaatccgaagacgaaatcccacagctggtaccaataggaaagaagactccagctaatgaaaaagtagagattcaaaaacatgccacaggaaag

SEQ ID NO: 576860 - DNA, 120 bp, Artificial Sequence
  ENSG00000171490_10 (sequence is synthesized)
aagtctccagcaaagagtcctaatcccagcacacctcgtgggaagaaaagaaaggctttgccagcatctgagaccccaaaagctgcagagtctgagaccccagggaaaagcccagagaag

SEQ ID NO: 576861 - DNA, 120 bp, Artificial Sequence
  ENSG00000171490_11 (sequence is synthesized)
aagccaaaaatcaaagaagaggcagtgaaggaaaaaagtccttcgctggggaaaaaagatgcgagacagactccaaaaaagccagaggccaagtttttcaccactcctagtaaatctgtg

SEQ ID NO: 576862 - DNA, 120 bp, Artificial Sequence
  ENSG00000171490_12 (sequence is synthesized)
agaaaagcttcccacacccccaaaaaatggcccaaaaaacccaaagtaccccagtcgacctaaagtcagtgattcaactggaaggaaacctcaatgctgcctccagagctttttggaaat

SEQ ID NO: 576863 - DNA, 120 bp, Artificial Sequence
  ENSG00000171490_13 (sequence is synthesized)
ctttttggaaatactcagatcctggccgcctttgtaaccttctctaaacgtcaggcctggacttaaaagattttttaaaacctccataagtagtccaggggcggtggctcacgcctgtaa

SEQ ID NO: 576864 - DNA, 74 bp, Artificial Sequence
  ENSG00000171490_14 (sequence is synthesized)
atgacagagcaagactcagtctcaaaaataaataaaaataataaaacctccataagtaatcctgacatatgttc

SEQ ID NO: 576865 - DNA, 120 bp, Artificial Sequence
  ENSG00000171490_15 (sequence is synthesized)
aaaataataaaacctccataagtaatcctgacatatgttcctgggtataatctgtttctaaattgtccttctgtgtatttgctaatgtaatagagggaaaaatagagtgcttctctgtgg

SEQ ID NO: 576866 - DNA, 88 bp, Artificial Sequence
  ENSG00000171490_16 (sequence is synthesized)
ttggtaaaaccccatctctacaaaagaaaaaaaaaaattagtgtggcatggtggcatgcatctgtgctcccagctcctcacgaggctg

SEQ ID NO: 576867 - DNA, 120 bp, Artificial Sequence
  ENSG00000171490_17 (sequence is synthesized)
tggtggcatgcatctgtgctcccagctcctcacgaggctgaggtggaaggatcaagtgagcgcaagaggttgaggctccagtgagccacgatcaccccactgtgctgtagcctgggtgac

SEQ ID NO: 576868 - DNA, 120 bp, Artificial Sequence
  ENSG00000171490_18 (sequence is synthesized)
agtgtgagattctgtctcagaaaaaacaaagtataacattgctttgcttctgagtatactgttggctttccaaatcagtgggtctgacttgaggtctgtgatgtgacccttttcctcacc

SEQ ID NO: 576869 - DNA, 120 bp, Artificial Sequence
  ENSG00000171490_19 (sequence is synthesized)
tgctcaaccattattcacatggactccatcatattcatttgtagtcattcccagagtggcccagtgagggtctcgctgtatgagagtcggctacggaatttaggagaaacagaagtttct

SEQ ID NO: 576870 - DNA, 120 bp, Artificial Sequence
  ENSG00000171490_20 (sequence is synthesized)
tggctttcatgctgagcttgttggtctaagcttatgagtcactggattagcatccatatgggaagggaaattaacatggagtcatttatacagggactaaattgaatcctacctaccgga

SEQ ID NO: 576871 - DNA, 120 bp, Artificial Sequence
  ENSG00000171490_21 (sequence is synthesized)
cctccttattcctcagtccatatggatttgcttatgtatgacaactccaaggaatcttggaagagtagattgctaacgtttccacaattgtcaagtatattctgaggcagtaaacacctt

SEQ ID NO: 576872 - DNA, 120 bp, Artificial Sequence
  ENSG00000171490_22 (sequence is synthesized)
tttaggtacgtggcctttcactggttgtgaattggtatgcatccgtagtagtaagttcacagattcactgcagtgcaggaatgttcttgcatgccaaagactcaactgctttcaaagata

SEQ ID NO: 576873 - DNA, 90 bp, Artificial Sequence
  ENSG00000171490_23 (sequence is synthesized)
atgttcttgcatgccaaagactcaactgctttcaaagataatgtgggtgctagatgcagtggcttacatctgtaaccctgttagggtgac

SEQ ID NO: 576874 - DNA, 79 bp, Artificial Sequence
  ENSG00000171490_24 (sequence is synthesized)
aagtccagtaggaccagcagaccatcgggatggtggaggctgtgaaggccgtgagctctgggagcccacactatttatt

SEQ ID NO: 576875 - DNA, 120 bp, Artificial Sequence
  ENSG00000171490_25 (sequence is synthesized)
ctgtgatggtttagcatttgctctgctacttgagatgatggagagcaggttcttttaactcaagttacagtcgatcctgggagagcaaggagccagcaagtctagacattccagagccac

SEQ ID NO: 576876 - DNA, 89 bp, Artificial Sequence
  ENSG00000171490_26 (sequence is synthesized)
gcaggttcttttaactcaagttacagtcgatcctgggagagcaaggagccagcaagtctagacattccagagccacaggccctggattt

SEQ ID NO: 576877 - DNA, 90 bp, Artificial Sequence
  ENSG00000171490_27 (sequence is synthesized)
tttagcacagagcttggtgttccaaagaccacaaggggttttagacccttgaccctggacatattccaagactcttttacattatgtcag

SEQ ID NO: 576878 - DNA, 89 bp, Artificial Sequence
  ENSG00000171490_28 (sequence is synthesized)
tcctgggcaatatggcaaaaccccatctttaccaaaaataagctgggtgtggtggaacatgcctgtggtcccagcttcttgggaggctg

SEQ ID NO: 576879 - DNA, 89 bp, Artificial Sequence
  ENSG00000171490_29 (sequence is synthesized)
gctgaggtgggaggattgcttgaacccgggaggtagaggctgcaatgggccatgatcacgatcagtccctggcccactgcccccttccc

SEQ ID NO: 576880 - DNA, 89 bp, Artificial Sequence
  ENSG00000171490_30 (sequence is synthesized)
tgatcacgatcagtccctggcccactgcccccttccctggcccagtctcaaaaaaaatgaggctgggcgtggtggctcacatctgtaat

SEQ ID NO: 576881 - DNA, 62 bp, Artificial Sequence
  ENSG00000171490_31 (sequence is synthesized)
tctgtaatcccagccaaggctggcagatcacttgaggccaggagttctgagaccagcctgga

SEQ ID NO: 576882 - DNA, 81 bp, Artificial Sequence
  ENSG00000171490_32 (sequence is synthesized)
aactgaaaaaaagagaaaaaaaaaaacatctagctctccctgaaattagaggagtctagcctgcttttgctgtttttttgg

SEQ ID NO: 576883 - DNA, 120 bp, Artificial Sequence
  ENSG00000171490_33 (sequence is synthesized)
gaaattagaggagtctagcctgcttttgctgtttttttggtagcgagagtagcgggcagtgggggagatggtcttactctgttccccaggctggagtgcactagtgtcatcacagctcca

SEQ ID NO: 576884 - DNA, 120 bp, Artificial Sequence
  ENSG00000171490_34 (sequence is synthesized)
ttcccacctcagcctcccaagtagctcagactacaggggcatgccatcacagctggccagtttttacgtcttgcgtagagatgggttttccctgtgttccctaggctgggctcgaactcc

SEQ ID NO: 576885 - DNA, 120 bp, Artificial Sequence
  ENSG00000171490_35 (sequence is synthesized)
tgtgttccctaggctgggctcgaactcctgggctcaagtcctcctgcctcagcctcccaaaatgttcagattacaggcatgaggcagcatgccaatcctgtttttgcattttagtaacac

SEQ ID NO: 576886 - DNA, 120 bp, Artificial Sequence
  ENSG00000171490_36 (sequence is synthesized)
aaattgtaatgttaactttttaaattatgaaagcatctaaaatataaaattatttgtaaccccactgtccttttgggcttctataaatgaatatacatctaaaatgtgggggtttagctt

SEQ ID NO: 576887 - DNA, 120 bp, Artificial Sequence
  ENSG00000171490_37 (sequence is synthesized)
aattgattgttttccatagaaactaggttttatgggaagatggttggatagacttgtttcacttaaaggtctggtttgtgtaggacaaacccacatatgtaatcgtgccagtctgttctc

SEQ ID NO: 576888 - DNA, 120 bp, Artificial Sequence
  ENSG00000171490_38 (sequence is synthesized)
tgcatgacataattttccagcaatagctgtgtggtttttgtaatcctatcatctagtcagttcaagatcttgcaacactgtgtgattctttgctccgtagttcagtcttgttgaacatga

SEQ ID NO: 576889 - DNA, 120 bp, Artificial Sequence
  ENSG00000171490_39 (sequence is synthesized)
cacaggtgtttactttcctgttcttgcatctagtttcattctaataatgttctctgttgaaaaagctggcttcaatttattgagcaagatgctggtgttatcatctaacataaaacctat

SEQ ID NO: 576890 - DNA, 120 bp, Artificial Sequence
  ENSG00000171490_40 (sequence is synthesized)
cttataataaagtgttgacacatgtaatgagtactgtactgaaaaatggtggtatgtatatggtttgtactgattatgtatcgcttttataccatcaaaaagttgaaaaatcataaagtt

SEQ ID NO: 576891 - DNA, 120 bp, Artificial Sequence
  ENSG00000171490_41 (sequence is synthesized)
gaatcatcctaaaatgggtacattctgtactatgtttccaaggcttcagaagtgttgcatacacattcctagccagctgatagtgctaggagccaacagtagtctcccccgggggccaag

SEQ ID NO: 576892 - DNA, 120 bp, Artificial Sequence
  ENSG00000171490_42 (sequence is synthesized)
aggagggcgaaatctctactatggtatatgatgttctcgtgggccaagtatgagggtgatatttcattgttggcactgggtttctggaatccatcctcttcaccagggagatttaatgaa

SEQ ID NO: 576893 - DNA, 120 bp, Artificial Sequence
  ENSG00000171490_43 (sequence is synthesized)
ccaaatgagatctgatgggagaaatttgagtgtaacgtttttgttctgaaggaagtaattgagttttagttcatttgttttttaggaatcgtaataattaaaatttcattttaaatgcca

SEQ ID NO: 576894 - DNA, 120 bp, Artificial Sequence
  ENSG00000171490_44 (sequence is synthesized)
agcatggaattaaaaccgtttctcaggtaggaagcctggttaatattttcaagttatttagaggatttaattcaggcgaaatggtatcacaaatacattgctatatttcctagtattttt

SEQ ID NO: 576895 - DNA, 120 bp, Artificial Sequence
  ENSG00000171490_45 (sequence is synthesized)
aacaagatggaggattcggcctcggcctcgctgtcttctgcagccgctactggaacctccacctcgactccagcggccccgacagcacggaagcagctggataaagaacaggactttcag

SEQ ID NO: 576896 - DNA, 120 bp, Artificial Sequence
  ENSG00000171490_46 (sequence is synthesized)
aacaagatggaggattcggcctcggcctcgctgtcttctgcagccgctactggaacctccacctcgactccagcggccccgacagcacggaagcagctggataaagaacagtgctatacg

SEQ ID NO: 576897 - DNA, 120 bp, Artificial Sequence
  ENSG00000171490_47 (sequence is synthesized)
tgagggtcagattagacgagatcttgcgctgttgcccagctggagtacaatagtgagatctgtgttcactgcaacctcaacctccctgacctgactcaagtgatcctcccacctcagcct

SEQ ID NO: 576898 - DNA, 120 bp, Artificial Sequence
  ENSG00000171490_48 (sequence is synthesized)
tttccctggtcctgcggcctggcgctagtgaattgggttgcaagtgtgctgtggagctagatgagatagacctggcgacctggcttagcttccctatcattagcgcttgaccgaatcgct

SEQ ID NO: 576899 - DNA, 120 bp, Artificial Sequence
  ENSG00000171490_49 (sequence is synthesized)
tcagtcactaggagagaagtagaccatcatcgctgcccgacttttcagttatcttctggttttgtggtggttgtgcttttgtcactttacatgaggtaaaatgggtatgcttttgtcact

SEQ ID NO: 576900 - DNA, 120 bp, Artificial Sequence
  ENSG00000171490_50 (sequence is synthesized)
ttacatgaggtagttgatgttagtaatgcgcattaagatagaaatatcttgtatttattgataaattggattttttttttatttttgttagatccagtgcttgctgggtttttttagaga

SEQ ID NO: 576901 - DNA, 120 bp, Artificial Sequence
  ENSG00000171492_0 (sequence is synthesized)
aattcccctcgttacagagtcatgtgctgctgctcccgtcgccgctgctgccgctgccgctgccgccgcccgtggtgccccggctcctccgccgcgcttcgaggtggcagccgcgggcgg

SEQ ID NO: 576902 - DNA, 120 bp, Artificial Sequence
  ENSG00000171492_1 (sequence is synthesized)
ccttcgccgccccggcgcgtcccggtgcagccgccgcccgccgcgggtgatgccgccacctccggcctcagcataagccgtggcttggcggccgagctgcaccccaaggaagtgcacggc

SEQ ID NO: 576903 - DNA, 120 bp, Artificial Sequence
  ENSG00000171492_2 (sequence is synthesized)
cggccgagctgcaccccaaggaagtgcacggctgtctataacgtgctgccgggtctcaggatggaggagtgaagtctcctgtcgccgtggttccagcctccggagctcgcccaagccgcg

SEQ ID NO: 576904 - DNA, 120 bp, Artificial Sequence
  ENSG00000171492_3 (sequence is synthesized)
tccccagagagcgccctgagagaacagggtggccgcttggtccaggaatgtttacccttgcggaagttgcatcacttaatgacattcagccaacttaccgaatcctgaaaccatggtggg

SEQ ID NO: 576905 - DNA, 120 bp, Artificial Sequence
  ENSG00000171492_4 (sequence is synthesized)
atgtgtttatggattacctagctgttgttatgttaatggtagccatctttgcaggaaccatgcaacttaccaaagatcaggtggtctgtttgccagtattgccatctcctgtaaattcaa

SEQ ID NO: 576906 - DNA, 120 bp, Artificial Sequence
  ENSG00000171492_5 (sequence is synthesized)
aggcacatacaccaccaggaaatgccgaggtcaccaccaacatcccaaagatggaagcagccaccaaccaagaccaagatgggcggacaacaaacgacatttcctttgggacatctgctg

SEQ ID NO: 576907 - DNA, 120 bp, Artificial Sequence
  ENSG00000171492_6 (sequence is synthesized)
tgacacctgacatacctctcagagccacatatcctcgcacagatttcgcacttccaaatcaggaggcaaagaaagagaagaaagatccaacaggtcgaaaaacaaacttggattttcagc

SEQ ID NO: 576908 - DNA, 120 bp, Artificial Sequence
  ENSG00000171492_7 (sequence is synthesized)
aatatgtatttattaatcaaatgtgttaccatctggcccttccgtggtattctaagtactttccatacctagctcttatacatactattattctcatggtcagtagcaacttttggttca

SEQ ID NO: 576909 - DNA, 120 bp, Artificial Sequence
  ENSG00000171492_8 (sequence is synthesized)
aatatcccaaaacatgctcaaaagtagaacattttgtttcaatattaggaaagtgctttgaatccccttggacgacaaaagcgttgtctgagacagcatgcgaagactcagaggaaaaca

SEQ ID NO: 576910 - DNA, 120 bp, Artificial Sequence
  ENSG00000171492_9 (sequence is synthesized)
agcagagaataacaggtgcccagactctaccaaagcatgtttctaccagcagtgatgaagggagccccagtgccagtacaccaatgatcaataaaactggctttaaattttcagctgaga

SEQ ID NO: 576911 - DNA, 120 bp, Artificial Sequence
  ENSG00000171492_10 (sequence is synthesized)
agcctgtgattgaagttcccagcatgacaatcctggataaaaaggatggagagcaggccaaagccctgtttgagaaagtgaggaagttccgtgcccatgtggaagatagtgacttgatct

SEQ ID NO: 576912 - DNA, 120 bp, Artificial Sequence
  ENSG00000171492_11 (sequence is synthesized)
ataaactctatgtggtccaaacagttatcaaaacagccaagttcatttttattctctgctatacagcgaactttgtcaacgcaatcagctttgaacacgtctgcaagcccaaagttgagc

SEQ ID NO: 576913 - DNA, 120 bp, Artificial Sequence
  ENSG00000171492_12 (sequence is synthesized)
atctgattggttatgaggtatttgagtgcacccacaatatggcttacatgttgaaaaagcttctcatcagttacatatccattatttgtgtttatggctttatctgcctctacactctct

SEQ ID NO: 576914 - DNA, 120 bp, Artificial Sequence
  ENSG00000171492_13 (sequence is synthesized)
tctggttattcaggatacctttgaaggaatattctttcgaaaaagtcagagaagagagcagttttagtgacattccagatgtcaaaaacgattttgcgttccttcttcacatggtagacc

SEQ ID NO: 576915 - DNA, 120 bp, Artificial Sequence
  ENSG00000171492_14 (sequence is synthesized)
agtatgaccagctatattccaagcgttttggtgtgttcttgtcagaagttagtgaaaataaacttagggaaattagtttgaaccatgagtggacatttgaaaaactcaggcagcacattt

SEQ ID NO: 576916 - DNA, 120 bp, Artificial Sequence
  ENSG00000171492_15 (sequence is synthesized)
cacgcaacgcccaggacaagcaggagttgcatctgttcatgctgtcgggggtgcccgatgctgtctttgacctcacagacctggatgtgctaaagcttgaactaattccagaagctaaaa

SEQ ID NO: 576917 - DNA, 120 bp, Artificial Sequence
  ENSG00000171492_16 (sequence is synthesized)
cttcacgtgaagttcactgatgtggctgaaattcctgcctgggtgtatttgctcaaaaaccttcgagagttgtacttaataggcaatttgaactctgaaaacaataagatgataggactt

SEQ ID NO: 576918 - DNA, 120 bp, Artificial Sequence
  ENSG00000171492_17 (sequence is synthesized)
gaatctctccgagagttgcggcaccttaagattctccacgtgaagagcaatttgaccaaagttccctccaacattacagatgtggctccacatcttacaaagttagtcattcataatgac

SEQ ID NO: 576919 - DNA, 120 bp, Artificial Sequence
  ENSG00000171492_18 (sequence is synthesized)
ggcactaaactcttggtactgaacagccttaagaaaatgatgaatgtcgctgagctggaactccagaactgtgagctagagagaatcccacatgctattttcagcctctctaatttacag

SEQ ID NO: 576920 - DNA, 120 bp, Artificial Sequence
  ENSG00000171492_19 (sequence is synthesized)
gaactggatttaaagtccaataacattcgcacaattgaggaaatcatcagtttccagcatttaaaacgactgacttgtttaaaattatggcataacaaaattgttactattcctccctct

SEQ ID NO: 576921 - DNA, 120 bp, Artificial Sequence
  ENSG00000171492_20 (sequence is synthesized)
attacccatgtcaaaaacttggagtcactttatttctctaacaacaagctcgaatccttaccagtggcagtatttagtttacagaaactcagatgcttagatgtgagctacaacaacatt

SEQ ID NO: 576922 - DNA, 120 bp, Artificial Sequence
  ENSG00000171492_21 (sequence is synthesized)
tcaatgattccaatagaaataggattgcttcagaacctgcagcatttgcatatcactgggaacaaagtggacattctgccaaaacaattgtttaaatgcataaagttgaggactttgaat

SEQ ID NO: 576923 - DNA, 120 bp, Artificial Sequence
  ENSG00000171492_22 (sequence is synthesized)
ctgggacagaactgcatcacctcactcccagagaaagttggtcagctctcccagctcactcagctggagctgaaggggaactgcttggaccgcctgccagcccagctgggccagtgtcgg

SEQ ID NO: 576924 - DNA, 120 bp, Artificial Sequence
  ENSG00000171492_23 (sequence is synthesized)
atgctcaagaaaagcgggcttgttgtggaagatcacctttttgataccctgccactcgaagtcaaagaggcattgaatcaagacataaatattccctttgcaaatgggatttaaactaag

SEQ ID NO: 576925 - DNA, 120 bp, Artificial Sequence
  ENSG00000171492_24 (sequence is synthesized)
ataatatatgcacagtgatgtgcaggaacaacttcctagattgcaagtgctcacgtacaagttattacaagataatgcattttaggagtagatacatcttttaaaataaaacagagagga

SEQ ID NO: 576926 - DNA, 120 bp, Artificial Sequence
  ENSG00000171492_25 (sequence is synthesized)
tgcatagaaggctgatagaagacataactgaatgttcaatgtttgtagggttttaagtcattcatttccaaatcatttttttttttcttttggggaaagggaaggaaaaattataatcac

SEQ ID NO: 576927 - DNA, 120 bp, Artificial Sequence
  ENSG00000171492_26 (sequence is synthesized)
taatcttggttctttttaaattgtttgtaacttggatgctgccgctactgaatgtttacaaattgcttgcctgctaaagtaaatgattaaattgacattttcttactatatcaccttttt

SEQ ID NO: 576928 - DNA, 120 bp, Artificial Sequence
  ENSG00000171492_27 (sequence is synthesized)
tgaggggtcttaatttactttgcttaattggtgcaatattgctttaactccgttcactaaagacaaacacatcaagtccaaacttgtaaatttagatttgctgaaatactgatttatttc

SEQ ID NO: 576929 - DNA, 120 bp, Artificial Sequence
  ENSG00000171492_28 (sequence is synthesized)
ctgttttaatttaaagtgcctcaagtaagcacctctcacaacagttgactggtactgctgctcctgagcacctcgtgtcatagattttatactcttacagacttggaatgcagtagaggt

SEQ ID NO: 576930 - DNA, 120 bp, Artificial Sequence
  ENSG00000171492_29 (sequence is synthesized)
atgtggatttttaggggttttgtttttttaagaataagtaacaagaaataacacatttcttaataatagcttttttgacatagtttggagttctgattatatggtacatttttctaccag

SEQ ID NO: 576931 - DNA, 120 bp, Artificial Sequence
  ENSG00000171492_30 (sequence is synthesized)
taatatagggttgccaataaatagaaaatgttttctaaaaataaattttattacaacaaaataaaaattttaatgacttattaacacaacctccagtatcaccaccatttggaagataac

SEQ ID NO: 576932 - DNA, 120 bp, Artificial Sequence
  ENSG00000171492_31 (sequence is synthesized)
acagaatcacaagtatcatttaatttcttgcccttttcagtgttgttctggtgttggtgggaaaataataggaaatgtagttcattgggtagggaaactcttacctttccctatcttaat

SEQ ID NO: 576933 - DNA, 120 bp, Artificial Sequence
  ENSG00000171492_32 (sequence is synthesized)
ataatccgcttctagcttgtttggaggcgtgggctcttgggagcgggacttctgctcaaatcctgtccaggggcttgaaaaggaggagaattgggggtggttgccgggaggaccagcacc

SEQ ID NO: 576934 - DNA, 120 bp, Artificial Sequence
  ENSG00000171492_33 (sequence is synthesized)
tccagttactggagggttgataggggccttctcctttccgtcaccctttactagggggtatcccttgcagataaatgagattttttgatttcttaaaaagccagctgcagtgaagaagaa

SEQ ID NO: 576935 - DNA, 120 bp, Artificial Sequence
  ENSG00000171492_34 (sequence is synthesized)
tcttttgagccagcgaggcacaagacaagtaatttcccatcttgaatctctcacagctgctgagctgtagtggatatactgggatgtggctatgaactttaaaaatttgcataaatccag

SEQ ID NO: 576936 - DNA, 120 bp, Artificial Sequence
  ENSG00000171492_35 (sequence is synthesized)
aaaagaaagctggattgccttaccaaatctccaggtttttcgttatacctcttcactcaggctctgcccagaactcaaggaatgtttacccttgcggaagttgcatcacttaatgacatt

SEQ ID NO: 576937 - DNA, 120 bp, Artificial Sequence
  ENSG00000171492_36 (sequence is synthesized)
ttaggaactgggcttcacggcagtaggaatgtttacccttgcggaagttgcatcacttaatgacattcagccaacttaccgaatcctgaaaccatggtgggatgtgtttatggattacct

SEQ ID NO: 576938 - DNA, 120 bp, Artificial Sequence
  ENSG00000171492_37 (sequence is synthesized)
ggccgaggccgcgccacctcggcaccacgcgggcagccggtgcggcggggtcgccacggccaggggagcgctgggtgcccaccatggcagttatgcaagcggtgaccccctggtcttgcc

SEQ ID NO: 576939 - DNA, 120 bp, Artificial Sequence
  ENSG00000171495_0 (sequence is synthesized)
agttcatatgactgattttcactaagtgtaacaatcaacgagttcaccataaagcctttcccaacatcaggacagtaaagcaactactgaaaaccattcctgaatttgtgatcaatggac

SEQ ID NO: 576940 - DNA, 120 bp, Artificial Sequence
  ENSG00000171495_1 (sequence is synthesized)
tcaagtttagggagaggagcacctttggtctgcaacaatggtttgaatcccagtctctaattacttctttcccaaatactctggtcaccaaagggacaatatttggtgagatgcagccat

SEQ ID NO: 576941 - DNA, 120 bp, Artificial Sequence
  ENSG00000171495_2 (sequence is synthesized)
tttgttggttagcaggagttcagacgcaagacaatgtcatagtggtagaatacagtatcaacttcaacagcaagcccatctctggaagctcccagaccattgtgccaatcaagtggagga

SEQ ID NO: 576942 - DNA, 120 bp, Artificial Sequence
  ENSG00000171495_3 (sequence is synthesized)
ggcactttcatttagagaggcttatgtgaaccttatatgagaaacttgccaacctgcctctttgattttttagccttactatttctaatacttaggtgctatcttttagagaccctgaaa

SEQ ID NO: 576943 - DNA, 120 bp, Artificial Sequence
  ENSG00000171495_4 (sequence is synthesized)
cagccaagacatgacacttagtacagaggaatccatagagatgtttggggatattaacctcactcttggcatgctgaacaaggaagatattgttaacaaggaagacatttacagtcatct

SEQ ID NO: 576944 - DNA, 120 bp, Artificial Sequence
  ENSG00000171495_5 (sequence is synthesized)
cacttctgttattcagaatactgacatcttggatgatgcaattgtccaacgattgatttattatgcttctaaggatatgagagacaacaatatgctcagagaaatcagaatgctagctgg

SEQ ID NO: 576945 - DNA, 120 bp, Artificial Sequence
  ENSG00000171495_6 (sequence is synthesized)
tgaggttttggtgtctcttgctgcacatgatttcaactctgtgatgtatgaagtacaaagtaacttcaggatcttagagctaccagatgaattcgttgtgcttgccctggctgaattggc

SEQ ID NO: 576946 - DNA, 120 bp, Artificial Sequence
  ENSG00000171495_7 (sequence is synthesized)
aaccagctatgtgtcccagagtattcctttcatgatgatgaccctgctcaccatgcaaaccatgctcaggctggccgaggatgaaaggatgaaggggactttctgtattgcccttgagaa

SEQ ID NO: 576947 - DNA, 120 bp, Artificial Sequence
  ENSG00000171495_8 (sequence is synthesized)
attcagcaaagccatttacaaatatgtcaaccactggagagattttccctaccccagactggatgccaaccgactgtctgacaagatcttcatgctgttctggtatataatggagaagtg

SEQ ID NO: 576948 - DNA, 120 bp, Artificial Sequence
  ENSG00000171495_9 (sequence is synthesized)
ggcccctttggcctcacccatgcagactttgagcatcgttaaggcccacgggcccacggtgagcttgctgctgcatcgggaagacttccgtggatacgccctgggccaggtgccctggct

SEQ ID NO: 576949 - DNA, 120 bp, Artificial Sequence
  ENSG00000171495_10 (sequence is synthesized)
cctgaaccagtataaagacaaagagattgatttccatgtcactcagagcctaaaacaaatactgactgcagcagttctttatgacattggccttccaaggagcttgagaagatccatctt

SEQ ID NO: 576950 - DNA, 120 bp, Artificial Sequence
  ENSG00000171495_11 (sequence is synthesized)
tatcaatttactccagcagatctgcagagctccagagcctccagtaaaggaaaatgaaatgaaagcttcaagctgttttctcattctagcccattccaatcctggagagctgatggaatt

SEQ ID NO: 576951 - DNA, 120 bp, Artificial Sequence
  ENSG00000171495_12 (sequence is synthesized)
ttttgatgaacaagtaagaagtaataatgaagccattcgagtgggaatcttgactttgttaagattggctgtcaatgctgatgagcccaggttgagggatcacatcatttcaatagaaag

SEQ ID NO: 576952 - DNA, 120 bp, Artificial Sequence
  ENSG00000171495_13 (sequence is synthesized)
aacagtcaaaatcgtcatgggtgatctcagtacaaaagtaagaaattctgttcttctcctcatccaaaccatgtgtgaaaagtcctatattgaagctcgggaaggatggccattgattga

SEQ ID NO: 576953 - DNA, 120 bp, Artificial Sequence
  ENSG00000171495_14 (sequence is synthesized)
ttatgtcttctcccagtttgcaacgttgaacaggaatctggagaaaccagtgaaaactaactttcatgagaatgaaaaggaagaggaatctgtccgagaaacaagccttgaggtcttaaa

SEQ ID NO: 576954 - DNA, 120 bp, Artificial Sequence
  ENSG00000171495_15 (sequence is synthesized)
aaccctggacccactggtcattggaatgcctcaggtgctatggccaaggatcctgacttttgtggtacctgcagaatacacagaagctctggagcccctgtttagtatcatcagaattct

SEQ ID NO: 576955 - DNA, 120 bp, Artificial Sequence
  ENSG00000171495_16 (sequence is synthesized)
gattatggcagaggagaagaagcagcacagtgccaaggagtcgacagcacttgtcgtctctacaggagctgtgaaacttccttcaccacagcagctactggccagacttctggtaatatc

SEQ ID NO: 576956 - DNA, 120 bp, Artificial Sequence
  ENSG00000171495_17 (sequence is synthesized)
tatgcctgccagtttaggggagttacgtggggctggtgcaatagggcttttgaagatactgcctgagataattcacccaaaattggtagacctatggaaaacacgtttacctgagcttct

SEQ ID NO: 576957 - DNA, 120 bp, Artificial Sequence
  ENSG00000171495_18 (sequence is synthesized)
gcagcctctggaaggaaagaacatcagtaccgttctatgggaaaccatgctgcttcagttgctcaaagaatccttatggaagatcagtgatgtggcctggaccattcagctgactcagga

SEQ ID NO: 576958 - DNA, 120 bp, Artificial Sequence
  ENSG00000171495_19 (sequence is synthesized)
tttcaaacagcaaatgggcagttacagcaataactccactgagaagaaattcctttggaaagccttgggaaccaccttagcatgctgccaagattcagactttgtaaactcacagattaa

SEQ ID NO: 576959 - DNA, 120 bp, Artificial Sequence
  ENSG00000171495_20 (sequence is synthesized)
ggagtttctgactgctcccaaccaactgggggatcaaagacagggaataacatctattttaggatactgtgccgagaaccatttggatattgttttaaaagttcttaaaacattccaaaa

SEQ ID NO: 576960 - DNA, 120 bp, Artificial Sequence
  ENSG00000171495_21 (sequence is synthesized)
tcaggaaaagtttttcatgaatcgatgtaagagccttttttctgggaaaaagagcctgaccaagacagatgtcatggtcatctatggagcagtggccctccatgctcccaagaagcaact

SEQ ID NO: 576961 - DNA, 120 bp, Artificial Sequence
  ENSG00000171495_22 (sequence is synthesized)
tctctccagacttaatcaagatatcatatcccaagtcctgtctcttcatggccagtgctctcaggttctgggcatgtctgtgatgaacaaggacatggatctgcaaatgagtttcacaag

SEQ ID NO: 576962 - DNA, 120 bp, Artificial Sequence
  ENSG00000171495_23 (sequence is synthesized)
aagcatcactgagattggcattgctgtccaagatgctgaggatcaggggttccagttttcctacaaggagatgctgattggttacatgctggacttcattagagacgagcccctggattc

SEQ ID NO: 576963 - DNA, 120 bp, Artificial Sequence
  ENSG00000171495_24 (sequence is synthesized)
cttagctagccctattcggtggaaagccttaatcgccattaggtatctcagtaaactgaaacctcagctctcactacaagaccaccttaacattcttgaggagaatattcggaggctgct

SEQ ID NO: 576964 - DNA, 120 bp, Artificial Sequence
  ENSG00000171495_25 (sequence is synthesized)
gccccttccacctctggaaaatctgaaaagtgaaggccagacagacaaggacaaggagcacattcaatttctctatgaacgatccatggacgccctaggaaaacttctgaagaccatgat

SEQ ID NO: 576965 - DNA, 120 bp, Artificial Sequence
  ENSG00000171495_26 (sequence is synthesized)
gtgggataatgtgaatgcagaggactgtcaagaaatgtttaatcttctccaaatgtggcttgtttcacaaaaagagtgggaaagagaaagagccttccagatcactgcgaaagtgctgac

SEQ ID NO: 576966 - DNA, 120 bp, Artificial Sequence
  ENSG00000171495_27 (sequence is synthesized)
aaatgatattgaggcaccagagaactttaaaattggttcactgcttggacttctggctcctcactcctgtgataccctgcccaccatccgtcaggcggctgctagctcaactattggtct

SEQ ID NO: 576967 - DNA, 120 bp, Artificial Sequence
  ENSG00000171495_28 (sequence is synthesized)
gttctatataaaaggcattcacttggaagtggaaagactgcagggtttgcaggaagggctggaaagtgatgacgtgcaggttcagatcaagatttcttctaaaatagctaagattgtcag

SEQ ID NO: 576968 - DNA, 120 bp, Artificial Sequence
  ENSG00000171495_29 (sequence is synthesized)
taagttcatcccaaatgaagaaattctgatgttcctagaggaaatgctggacggtctggagagcctcaaccccacttgtacaaaggcctgtggcatatggatgatcactgtcctgaagca

SEQ ID NO: 576969 - DNA, 120 bp, Artificial Sequence
  ENSG00000171495_30 (sequence is synthesized)
gcagggagctgctctggaagatcagctattggagatcttaggcacaatctaccatcacatgccagtcctcagacaaaaagaagaaagttttcagttcattctagaagccatctcccagat

SEQ ID NO: 576970 - DNA, 120 bp, Artificial Sequence
  ENSG00000171495_31 (sequence is synthesized)
agccagctttcacatggatacagttgttgtcaaccttttacagaagcctctgccttttgacagggacacaaagacattgtggaaggcgctggctgaaaagccagcctccagtgggaaact

SEQ ID NO: 576971 - DNA, 120 bp, Artificial Sequence
  ENSG00000171495_32 (sequence is synthesized)
cttgcaagccttaatagacaaactggagactgagttagaagatgacatcgccagggttgaggcaatttcagtggcctgtgctatgtatgaagtgatctcaatgggcacctctgtcaccgg

SEQ ID NO: 576972 - DNA, 120 bp, Artificial Sequence
  ENSG00000171495_33 (sequence is synthesized)
cttgtatccagagctgttcactctcctcctgaagctggttagctgcacactgggccagaagatgctcacttgtccctggagccataggcggcatgtgatgcagcagggagaacagcagca

SEQ ID NO: 576973 - DNA, 120 bp, Artificial Sequence
  ENSG00000171495_34 (sequence is synthesized)
gatcccagacccctgcaggctttcaactgctactttaaaatgtttgcaagcccaagccatgagagaaggccttgcaaaggaatctgatgagggggacaacttatggactctactcagcag

SEQ ID NO: 576974 - DNA, 120 bp, Artificial Sequence
  ENSG00000171495_35 (sequence is synthesized)
tcctagtacccaccacataggcgtatgttcactggccaggagcatggcagtgtggcaacacggagtcatactggacatcatggaacagctgctctcatctcttacctcctcctcggagaa

SEQ ID NO: 576975 - DNA, 120 bp, Artificial Sequence
  ENSG00000171495_36 (sequence is synthesized)
ctaccggataaccggcgcagctttcttctctgagctcatgaaggaaccaatcctttggaagcatgggaatctgcgaaatgtgctgatcttgatggatcaaagtgcctgggactccaacgc

SEQ ID NO: 576976 - DNA, 120 bp, Artificial Sequence
  ENSG00000171495_37 (sequence is synthesized)
cactctgaggcagatggccatccgagggctcggcaacacagcatccggggctcctcacaaggtgaagaaacataagcagttaatgctagaatctatcatcagaggcctgtatcacctagc

SEQ ID NO: 576977 - DNA, 120 bp, Artificial Sequence
  ENSG00000171495_38 (sequence is synthesized)
tcgcactgaagtcgtctgtgaaagcttgaaggctctaaaaaaaatcctggagctgctgacagaccgagacgtgagcttctacttcaaggaaatagtgctgcaaacaaggaccttctttga

SEQ ID NO: 576978 - DNA, 120 bp, Artificial Sequence
  ENSG00000171495_39 (sequence is synthesized)
agatgagcaggatgatgtgagattgactgccatcttcttatttgaggacctggcacccctaacaggaagaaggtggaagattttttttgctgaagaaataaaaaagagcctgatttcatt

SEQ ID NO: 576979 - DNA, 120 bp, Artificial Sequence
  ENSG00000171495_40 (sequence is synthesized)
ccttctgcacctttgggatcccaaccccaagattggagttgcttgccgtgatgtcttgatggtctgcattccctttttgggcctccaggagctctatggggtattagaccgtctccttga

SEQ ID NO: 576980 - DNA, 120 bp, Artificial Sequence
  ENSG00000171495_41 (sequence is synthesized)
tcaggatctaccaagggccagggatttctacaggcaattctgtgtgaaactggccaagaaaaaccaggaaattctgtggatcctccacacacactccttcaccttcttcaccagcacctg

SEQ ID NO: 576981 - DNA, 120 bp, Artificial Sequence
  ENSG00000171495_42 (sequence is synthesized)
ggaggtgatcaggagtgcagctgtcaaactcacagatgccgttgttctcaatttgaccagccaatatgtggagttactagacagagaacaactgaccacacgactccaagcacttcgtca

SEQ ID NO: 576982 - DNA, 120 bp, Artificial Sequence
  ENSG00000171495_43 (sequence is synthesized)
agatccgtgtattagtgtccagagagcagctgaggctgctttgcaaaccctcctgagaaggtgtaaagagacaagcattcctctgtaagccatcaagaaataaactgctggcttttccta

SEQ ID NO: 576983 - DNA, 120 bp, Artificial Sequence
  ENSG00000171495_44 (sequence is synthesized)
gtacaagggattggggccaggtctttacccagggggcaagaacataaagaaataatgcaccgtttctctgtgtaaagccattaatgctcattttaggcaataaaaatgatgaacttgata

SEQ ID NO: 576984 - DNA, 120 bp, Artificial Sequence
  ENSG00000171495_45 (sequence is synthesized)
ttatgagggatccatttccaggaaggctacagtgctttgaccttaaacccaaccccaatctctaacccctgcagtgatgatgaaaattgctttctctttctagtgaaacttccttcacca

SEQ ID NO: 576985 - DNA, 120 bp, Artificial Sequence
  ENSG00000171495_46 (sequence is synthesized)
aataaatctgtgagggatcaaacaaagcattgtagcactgacgcttcaaattccggcctgaagactattccagccaatccagagaaggaaaactatcagtcattcctgttttccctgccc

SEQ ID NO: 576986 - DNA, 120 bp, Artificial Sequence
  ENSG00000171495_47 (sequence is synthesized)
gacatagaggtatcctgccacaggaccctctgctccattcccaagtcctgactgggatatattctccttggttcctaaaattcatatctgttgattaatcccttaaactctgatggcttc

SEQ ID NO: 576987 - DNA, 120 bp, Artificial Sequence
  ENSG00000171495_48 (sequence is synthesized)
ctgattaaatgtagatcaaaatacccataagacaattttcagccaattaatttatggctgtgtgagtgctcactggcctttacaaatccgttctgaggacctataggatgccaaatgtca

SEQ ID NO: 576988 - DNA, 120 bp, Artificial Sequence
  ENSG00000171496_0 (sequence is synthesized)
ttgctaggttctcatgattggtgttatgaaatcagagcatgttaaatgacaaaacttcttgtttataactgagcccaagtcaatggaaagaatcaaccacaccagcagtgtctccgagtt

SEQ ID NO: 576989 - DNA, 120 bp, Artificial Sequence
  ENSG00000171496_1 (sequence is synthesized)
tatcctcctgggactctcctcccggcctgaggaccaaaagacactctttgttctcttcctcatcgtgtacctggtcaccataacagggaacctgctcatcatcctggccattcgcttcaa

SEQ ID NO: 576990 - DNA, 120 bp, Artificial Sequence
  ENSG00000171496_2 (sequence is synthesized)
cccccatcttcagacccctatgtatttcttcttgagttttctgtctctcactgatatttgctttacaacaagcgttgtccccaagatgctgatgaacttcctgtcagaaaagaagaccat

SEQ ID NO: 576991 - DNA, 120 bp, Artificial Sequence
  ENSG00000171496_3 (sequence is synthesized)
ctcctatgctgggtgtctgacacagatgtattttctctatgccttgggcaacagtgacagctgccttctggcagtcatggcctttgaccgctatgtggccgtctgtgaccctttccacta

SEQ ID NO: 576992 - DNA, 120 bp, Artificial Sequence
  ENSG00000171496_4 (sequence is synthesized)
tcaccttctgtgactccaatgttatccaccactttctctgtgacctcagccctgtgctgaaattgtcctgctcttccatatttgtcaatgaaattgtgcagatgacagaagcacctattg

SEQ ID NO: 576993 - DNA, 120 bp, Artificial Sequence
  ENSG00000171496_5 (sequence is synthesized)
ttttggtgactcgttttctctgcattgctttctcttatatacgaatcctcactacagttctcaagattccctctacttctgggaaacgcaaagccttctccacctgtggtttttacctca

SEQ ID NO: 576994 - DNA, 120 bp, Artificial Sequence
  ENSG00000171496_6 (sequence is synthesized)
ccgtggtgacgctcttttatggaagcatcttctgtgtctatttacagcccccatccacctacgctgtcaaggaccacgtggcaacaattgtttacacagttttgtcatccatgctcaatc

SEQ ID NO: 576995 - DNA, 120 bp, Artificial Sequence
  ENSG00000171496_7 (sequence is synthesized)
cttttatctacagcctgagaaacaaagacctgaaacagggcctgaggaagcttatgagcaagagatcctaggaagcaccctcttgaaaaactcgtaagtggaatctgctcaacttggacg

SEQ ID NO: 576996 - DNA, 71 bp, Artificial Sequence
  ENSG00000171496_8 (sequence is synthesized)
caggatcccatcgaggatattatattatattcagtcatcctgtctccttcggcttctcttgactactcact

SEQ ID NO: 576997 - DNA, 120 bp, Artificial Sequence
  ENSG00000171496_9 (sequence is synthesized)
agcctcccgagtatctgggattacagatccatcagagaagtgaggtcacacggcaacccactgccccccaaattggagagacagacaacaaaaatacaaagaatcacagcttactggagc

SEQ ID NO: 576998 - DNA, 120 bp, Artificial Sequence
  ENSG00000171496_10 (sequence is synthesized)
acagacaacaaaaatacaaagaatcacagcttactggagcagaaacccacaaacagaagcctctgcaggaatcagtgctaagtccagaagttcagaggagaaacatgaggaagctgagct

SEQ ID NO: 576999 - DNA, 120 bp, Artificial Sequence
  ENSG00000171496_11 (sequence is synthesized)
ttggctaagaagcagagttggaaatcacagatgtgcagaagatccacttcttgagacacatggaagcaaaggaaaaacgctggatacagagatttcaatataatgcccttatggagccca

SEQ ID NO: 577000 - DNA, 120 bp, Artificial Sequence
  ENSG00000171496_12 (sequence is synthesized)
aacagtcaaagctgttggaagctagcacttctgacccatgtgagacaaggctattgtgggcacttacatccattgatgatgacccaacaattcggcctgtatctcttaaatcacaatcgt

SEQ ID NO: 577001 - DNA, 120 bp, Artificial Sequence
  ENSG00000171496_13 (sequence is synthesized)
ttcctgtctgtgtctcctctttcttggaaagatttattttttccactttctcattttccaaaaactgctttaatctaatcctttccccatgaatatttcctaaacaaatttctctccttt

SEQ ID NO: 577002 - DNA, 120 bp, Artificial Sequence
  ENSG00000171496_14 (sequence is synthesized)
tattaaggcagatcctccaaaattcttcacatttcaatatattgctgaaaaatgtgtaatttgtagccattgaatgtttttgcaaaaaaattgaaaagagaaagaatgaaggaagaggag

SEQ ID NO: 577003 - DNA, 120 bp, Artificial Sequence
  ENSG00000171497_0 (sequence is synthesized)
ggtcagcgtcgctgccggtctccggcggagacggactctggagtttgggcggcccgggcggccactaggtactctgatattccgtactaaacacgtctgcaagtcaagatgtcgcacccg

SEQ ID NO: 577004 - DNA, 120 bp, Artificial Sequence
  ENSG00000171497_1 (sequence is synthesized)
tccccccaagccaagccctccaaccccagtaaccctcgagtcttctttgacgtggacatcggaggggagcgagttggtcgaattgtcttagaattgtttgcagatatcgtacccaaaact

SEQ ID NO: 577005 - DNA, 120 bp, Artificial Sequence
  ENSG00000171497_2 (sequence is synthesized)
gcggaaaattttcgtgcactgtgtacaggagaaaaaggcattggacacacgactgggaaacctctccatttcaaaggatgcccttttcatcgaattattaagaaatttatgattcagggt

SEQ ID NO: 577006 - DNA, 120 bp, Artificial Sequence
  ENSG00000171497_3 (sequence is synthesized)
ggagacttctcaaatcagaatgggacaggtggagaaagtatttatggtgaaaaatttgaagatgaaaatttccattacaagcatgatcgggagggtttactgagcatggcaaatgcaggc

SEQ ID NO: 577007 - DNA, 120 bp, Artificial Sequence
  ENSG00000171497_4 (sequence is synthesized)
cgcaacacaaacggttctcagttttttatcacaacagttccaactcctcatttggatgggaaacatgtggtgtttggccaagtaattaaaggaataggagtggcaaggatattggaaaat

SEQ ID NO: 577008 - DNA, 120 bp, Artificial Sequence
  ENSG00000171497_5 (sequence is synthesized)
gtggaagtgaaaggtgaaaaacctgctaaattgtgcgttattgcagaatgtggagaattgaaggaaggagatgacgggggaatattcccaaaagatggctctggcgacagtcatccagat

SEQ ID NO: 577009 - DNA, 120 bp, Artificial Sequence
  ENSG00000171497_6 (sequence is synthesized)
ttccctgaggatgcggatatagatttaaaagatgtagataaaattttattaataacagaagacttaaaaaacattggaaatacttttttcaaatcccagaactgggagatggctattaaa

SEQ ID NO: 577010 - DNA, 120 bp, Artificial Sequence
  ENSG00000171497_7 (sequence is synthesized)
agttcaaaggctgttattgagacagcagatagagccaagctgcaacctatagctttaagctgtgtactgaatattggtgcttgtaaactgaagatgtcaaattggcagggagcaattgac

SEQ ID NO: 577011 - DNA, 120 bp, Artificial Sequence
  ENSG00000171497_8 (sequence is synthesized)
agttgtttagaggctcttgaactagacccatcaaataccaaagcattgtaccgcagagctcaaggatggcaaggattaaaagaatatgatcaagcattggctgatcttaagaaagctcag

SEQ ID NO: 577012 - DNA, 120 bp, Artificial Sequence
  ENSG00000171497_9 (sequence is synthesized)
gggatagcaccagaagataaagctatccaggcagaattgctgaaagtcaaacaaaagataaaggcacagaaagataaagagaaggcagtatatgcaaaaatgtttgcttagaaaggattc

SEQ ID NO: 577013 - DNA, 120 bp, Artificial Sequence
  ENSG00000171497_10 (sequence is synthesized)
agttttgcttattgtgtgttgattgtataaatgcaataagaaaatgtaaaggtttttgtctatgaatatgatccctaatgtgtttcttttgacaccttagttccttactgtttacagttt

SEQ ID NO: 577014 - DNA, 120 bp, Artificial Sequence
  ENSG00000171497_11 (sequence is synthesized)
ttagttccttactgtttacagtttaggagtactgataggggttcatgcttaataaacatgtcacaatacagtaagtaaagtggttttgtttgtttctttgagatggagtcttgctctgtc

SEQ ID NO: 577015 - DNA, 120 bp, Artificial Sequence
  ENSG00000171497_12 (sequence is synthesized)
caagtaaaatgttttttaaaatggttatgtgcattattcataaaaaataatggtgtccagtctttttaaacttgtaaagacacatcttattgaataaagagatgagagcttaagtttgta

SEQ ID NO: 577016 - DNA, 120 bp, Artificial Sequence
  ENSG00000171497_13 (sequence is synthesized)
aaagcattgtaccgcagagctcaaggatggcaaggattaaaagaatatgatcaagcattggctgatcttaagaaagctcaggggatagcaccagaagataaaggtaagttggcagctttt

SEQ ID NO: 577017 - DNA, 120 bp, Artificial Sequence
  ENSG00000171497_14 (sequence is synthesized)
gtagtgaaagttaattttgttatttaaatacttatcctcaggaaccattgttcactttgccagattttagatgtttgttcaacagacactacagaatgcctgctgttgggccaggcatta

SEQ ID NO: 577018 - DNA, 120 bp, Artificial Sequence
  ENSG00000171497_15 (sequence is synthesized)
tcatatagcaatgaacaagacagtcaaagtccctgccctcaaagagcttacattctactcccattcaagaatatagtagtttttcacgttatttattcttcaagttatcatctctgtagt

SEQ ID NO: 577019 - DNA, 120 bp, Artificial Sequence
  ENSG00000171497_16 (sequence is synthesized)
agtcgagagctcagcattgtaagacacagtattcatggtaaatttaacatttgggaccattcaagttgaatgtggctataaccttagtattgatgtactggttatatgttttaggaaact

SEQ ID NO: 577020 - DNA, 120 bp, Artificial Sequence
  ENSG00000171497_17 (sequence is synthesized)
atgacaaaaataagcttgtttttcaaataaaccaactatgaatagtgacactagatctgggtattacaaaatgtctttggtctcttattactaaaatgaaacaagggaagcaattactgt

SEQ ID NO: 577021 - DNA, 120 bp, Artificial Sequence
  ENSG00000171497_18 (sequence is synthesized)
tctctaatgtagaggcagaaggcaaatcttgatgtacttgagttctctcagttgacatcctctaaaattacgtttcatttctgtgtttgtgtgattgctcagattttctgttactagggc

SEQ ID NO: 577022 - DNA, 120 bp, Artificial Sequence
  ENSG00000171501_0 (sequence is synthesized)
atggaaggtttttatctgcgcagatcacacgaactacaagggatgggaaaaccaggcagagtgaaccaaaccactgtttcagacttcctccttctaggactctctgagtggccagaggag

SEQ ID NO: 577023 - DNA, 120 bp, Artificial Sequence
  ENSG00000171501_1 (sequence is synthesized)
cagcctcttctgtttggcatcttccttggcatgtacctggtcaccatggtggggaacctgctcattatcctggccatcagctctgacccacacctccatactcccatgtacttctttctg

SEQ ID NO: 577024 - DNA, 120 bp, Artificial Sequence
  ENSG00000171501_2 (sequence is synthesized)
gccaacctgtcattaactgatgcctgtttcacttctgcctccatccccaaaatgctggccaacattcatacccagagtcagatcatctcgtattctgggtgtcttgcacagctatatttc

SEQ ID NO: 577025 - DNA, 120 bp, Artificial Sequence
  ENSG00000171501_3 (sequence is synthesized)
ctccttatgtttggtggccttgacaactgcctgctggctgtgatggcatatgaccgctatgtggccatctgccaaccactccattacagcacatctatgagtccccagctctgtgcacta

SEQ ID NO: 577026 - DNA, 120 bp, Artificial Sequence
  ENSG00000171501_4 (sequence is synthesized)
cctgccctgatgcacacactgttgctgacccgcgtggctttctgtgcccagaaagccatccctcatttctattgtgatcctagtgctctcctgaagcttgcctgctcagatacccatgta

SEQ ID NO: 577027 - DNA, 120 bp, Artificial Sequence
  ENSG00000171501_5 (sequence is synthesized)
aacgagctgatgatcatcaccatgggcttgctgttcctcactgttcccctcctgctgatcgtcttctcctatgtccgcattttctgggctgtgtttgtcatctcatctcctggagggaga

SEQ ID NO: 577028 - DNA, 120 bp, Artificial Sequence
  ENSG00000171501_6 (sequence is synthesized)
tggaaggccttctctacctgtggttctcatctcacggtggttctgctcttctatgggtctcttatgggtgtgtatttacttcctccatcaacttactctacagagagggaaagtagggct

SEQ ID NO: 577029 - DNA, 120 bp, Artificial Sequence
  ENSG00000171501_7 (sequence is synthesized)
gctgttctctatatggtgattattcccacgctaaacccattcatttatagcttgaggaacagagacatgaaggaggctttgggtaaactttttgtcagtggaaaaacattctttttatga

SEQ ID NO: 577030 - DNA, 120 bp, Artificial Sequence
  ENSG00000171502_0 (sequence is synthesized)
actggagtcacagagtcgcctttgaaccgcaagtgaacttgagtgctgcactagcagcccggctcccgctgccgccggcgccccgaggcctcccagtgaggtttacctcctcgcccgccc

SEQ ID NO: 577031 - DNA, 120 bp, Artificial Sequence
  ENSG00000171502_1 (sequence is synthesized)
tccccggggagcgcaaccctgggctcgttcgttaccgagccagagagctaggaagcctgtcctccccttcgggtgctatttcctacctcctcccgacttcaccccctcccctcctttttt

SEQ ID NO: 577032 - DNA, 120 bp, Artificial Sequence
  ENSG00000171502_2 (sequence is synthesized)
tcttgttgcgggtttgaagcatggttttcatgtgattgttttttccctttttcatggacagtacctgcaccctaagcagttcagagttggcttctgttttccgttagcgctttgctgcac

SEQ ID NO: 577033 - DNA, 120 bp, Artificial Sequence
  ENSG00000171502_3 (sequence is synthesized)
ggacaaatgcatacaaatgcatttaagagcccacagaacaaggcgtggaaaagtctcccccacggcaaaaacgaaatcacttcttcattttattgtactatgtgtggctggggtggttgt

SEQ ID NO: 577034 - DNA, 120 bp, Artificial Sequence
  ENSG00000171502_4 (sequence is synthesized)
tcatgcacaagaacaaggcatagatattcttcatcaactaggccttggaggcaaagacgtaagacactcatcaccagcgactgctgtaccatcagcatctacaccgttacctcagggggt

SEQ ID NO: 577035 - DNA, 120 bp, Artificial Sequence
  ENSG00000171502_5 (sequence is synthesized)
ccatttaacagaatcaggagtcatttttaaaaatgatgcttatatcgagacacctttcgtgaaaattttaccagtcaacttggggcagccgtttacaatattaactgggttacagtcaca

SEQ ID NO: 577036 - DNA, 120 bp, Artificial Sequence
  ENSG00000171502_6 (sequence is synthesized)
tcgggtgaacaatgcatttctcttcagcattagaaataaaaatagactgcaattaggagtacaattactacctaaaaaattagtagtacacattagaggaaagcagcctgcagttttcaa

SEQ ID NO: 577037 - DNA, 120 bp, Artificial Sequence
  ENSG00000171502_7 (sequence is synthesized)
ctacagtgttcatgatgagcaatggcactcatttgccattactattagaaaccaaagtgtctcaatgtttgttgagtgtggaaagaaatattttagcacagagactattccagaagttca

SEQ ID NO: 577038 - DNA, 120 bp, Artificial Sequence
  ENSG00000171502_8 (sequence is synthesized)
gacctttgattctaatagtgtgtttactttaggaagtatgaataataattctatccattttgaaggaatagtatgtcagttagatattattccttctgcagaagcatctgcagactactg

SEQ ID NO: 577039 - DNA, 120 bp, Artificial Sequence
  ENSG00000171502_9 (sequence is synthesized)
cagatatgtgaaacagcagtgtcgccaagcagacaaataccaacctgaaacaagcattccttgtacaactctcataccaacaaagataccggaacactctcccccgcccaaactatttgc

SEQ ID NO: 577040 - DNA, 120 bp, Artificial Sequence
  ENSG00000171502_10 (sequence is synthesized)
tgaaaaagtactgtcagaggatacatttactgaaggcaaaagcattccaaatatcataaaaaatgattctgaaaccgtgtataaaagacaagaacaccagatatcaagatctcagttatc

SEQ ID NO: 577041 - DNA, 120 bp, Artificial Sequence
  ENSG00000171502_11 (sequence is synthesized)
ttctcttcagtcaggaaatgtctctgctgtggatctcacaaaccatgggattcaggccaaagaaatgatcactgaggaagatactcagacaaatttcagcctgtcagtgaccactcatcg

SEQ ID NO: 577042 - DNA, 120 bp, Artificial Sequence
  ENSG00000171502_12 (sequence is synthesized)
catcagtgaggcaaaaatgaataccaaagagaaatttagctctctcctaaacatgtctgacaatatcacacaacatgatgatagagtaactggtctgtcactgtttaagaagatgccatc

SEQ ID NO: 577043 - DNA, 120 bp, Artificial Sequence
  ENSG00000171502_13 (sequence is synthesized)
tattcttccacaaattaaacaagatacaattactaatctcaagaaggctatcacagcaaatctacacactaacgaactcatggaaatgcaaccaattttaaacacaagcttgcatagagt

SEQ ID NO: 577044 - DNA, 120 bp, Artificial Sequence
  ENSG00000171502_14 (sequence is synthesized)
gacaaatgagccatctgtggataatcaccttgatctaaggaaagaaggtgaattttatcctgatgctacttatcccatcgaaaatagctatgaaactgagctttatgattattattatta

SEQ ID NO: 577045 - DNA, 120 bp, Artificial Sequence
  ENSG00000171502_15 (sequence is synthesized)
tgaggatctaaatacaatgcttgaaatggagtatctgagagggccaaaaggagacactggacctcccggtccacctggtccagcaggtatcccaggtccgtcagggaagagaggtccacg

SEQ ID NO: 577046 - DNA, 120 bp, Artificial Sequence
  ENSG00000171502_16 (sequence is synthesized)
gggcataccagggccacatggaaatcctggtttacctggattacctggtccaaagggccccaaaggagatccaggattttccccaggtcaacctgttcctggagaaaagggtgatcaagg

SEQ ID NO: 577047 - DNA, 120 bp, Artificial Sequence
  ENSG00000171502_17 (sequence is synthesized)
cctttctggattaatgggcccccctggtatgcaaggtgataagggtctcaaaggacatcctggactcccaggacttccaggtgaacaaggaattccaggatttgctggtaatattggttc

SEQ ID NO: 577048 - DNA, 120 bp, Artificial Sequence
  ENSG00000171502_18 (sequence is synthesized)
acccggttaccctggcaggcagggtttagctggaccagaaggtaatccaggtcctaaaggtgcacaaggttttattggctctcctggagaagcgggacaactgggacctgaaggagaacg

SEQ ID NO: 577049 - DNA, 120 bp, Artificial Sequence
  ENSG00000171502_19 (sequence is synthesized)
gggcattcctgggatccgtggaaagaagggttttaaggggagacagggttttccaggtgactttggagacagaggccctgctggtcttgatggcagtcctggacttgtaggtggcactgg

SEQ ID NO: 577050 - DNA, 120 bp, Artificial Sequence
  ENSG00000171502_20 (sequence is synthesized)
tcctccggggtttcctgggcttagaggcagtgttggccctgtgggaccaattggacctgctggaattcctggcccaatgggcctttcagggaataaaggactacctggaatcaaaggtga

SEQ ID NO: 577051 - DNA, 120 bp, Artificial Sequence
  ENSG00000171502_21 (sequence is synthesized)
taagggtgaacaaggcacagcaggagagctaggagaacccgggtatcctggagacaagggtgctgttggtttaccaggaccaccagggatgagaggaaagtcagggccttcaggccaaac

SEQ ID NO: 577052 - DNA, 120 bp, Artificial Sequence
  ENSG00000171502_22 (sequence is synthesized)
aggtgacccaggactccaaggaccatctggccctccaggaccagagggttttccaggagatattgggattcctggacaaaacggccctgaaggaccaaagggactccttggaaatagagg

SEQ ID NO: 577053 - DNA, 120 bp, Artificial Sequence
  ENSG00000171502_23 (sequence is synthesized)
acctcctggacctcctggtctcaaaggaactcagggagaagaaggaccaattggagcctttggggaactggggccaagaggaaaaccaggtcaaaaggggtatgcaggtgaaccaggacc

SEQ ID NO: 577054 - DNA, 120 bp, Artificial Sequence
  ENSG00000171502_24 (sequence is synthesized)
agaaggcttaaagggagaagtaggagatcaaggaaatattggaaaaattggtgaaacaggacctgttggcttacctggagaagttgggatgactggaagcattggcgaaaagggagaacg

SEQ ID NO: 577055 - DNA, 120 bp, Artificial Sequence
  ENSG00000171502_25 (sequence is synthesized)
tggaagtccaggcccactaggtccgcagggagaaaaaggtgttatgggatatccaggtcctcctggggttccaggacctatcggtccattgggattacctggtcatgtgggggcaagagg

SEQ ID NO: 577056 - DNA, 120 bp, Artificial Sequence
  ENSG00000171502_26 (sequence is synthesized)
accacctgggagtcaaggtcctaaaggacaaagaggatcaagaggaccagatggtctcttaggggaacaaggtatacaaggtgccaagggtgaaaaaggagatcaaggaaaaagagggcc

SEQ ID NO: 577057 - DNA, 120 bp, Artificial Sequence
  ENSG00000171502_27 (sequence is synthesized)
tcatggtcttattggtaagactggaaaccctggagaaagaggatttcaagggaaaccaggtttacagggattgcctggaagtacaggtgacagaggacttccaggagagccaggactgcg

SEQ ID NO: 577058 - DNA, 120 bp, Artificial Sequence
  ENSG00000171502_28 (sequence is synthesized)
tgctggcagtgttggaggaactggggaaccaggtttacggggtgaaccaggagctcctggagaagaaggtctccagggaaaagatgggttaaagggagtaccaggaggaaggggacttcc

SEQ ID NO: 577059 - DNA, 120 bp, Artificial Sequence
  ENSG00000171502_29 (sequence is synthesized)
tggagaggatggagaaaaaggagagatgggcttaccaggaattataggacccttgggtagatcaggccaaacaggccttccgggacctgaaggaattgtgggaattccagggcaaagagg

SEQ ID NO: 577060 - DNA, 120 bp, Artificial Sequence
  ENSG00000171502_30 (sequence is synthesized)
tcgtccaggaaaaaagggtgataaaggacaaataggacccacaggagaagttggaagcagaggtcctcctggaaaaattgggaaaagtggtcctaagggtgccagaggaactagaggtgc

SEQ ID NO: 577061 - DNA, 120 bp, Artificial Sequence
  ENSG00000171502_31 (sequence is synthesized)
tgtgggacatttaggattgatgggacctgatggagaaccaggaattccagggtacaggggccatcagggccaaccaggaccctctggattgccaggacctaaaggagaaaagggctaccc

SEQ ID NO: 577062 - DNA, 120 bp, Artificial Sequence
  ENSG00000171502_32 (sequence is synthesized)
aggagaagatagcacagtcctaggaccacctgggcctcgaggtgaaccaggtccagtgggggaccaaggagagagaggagagcctggagcagagggatataagggccatgtgggtgtacc

SEQ ID NO: 577063 - DNA, 120 bp, Artificial Sequence
  ENSG00000171502_33 (sequence is synthesized)
aggactaagaggtgccactggacaacaaggacccccaggcgaaccaggtgaccagggtgaacaaggactaaaaggagagagaggatctgaaggtaataaggggaaaaaaggagctcctgg

SEQ ID NO: 577064 - DNA, 120 bp, Artificial Sequence
  ENSG00000171502_34 (sequence is synthesized)
tccttctgggaaacctgggattcctggacttcaaggcctacttgggccaaaaggcatacaaggataccatggagcagatggcatttcaggaaaccctggaaaaattgggccaccaggaaa

SEQ ID NO: 577065 - DNA, 120 bp, Artificial Sequence
  ENSG00000171502_35 (sequence is synthesized)
acagggacttcctggcatcagaggcggcccaggaagaacaggtcttgctggggctccaggtcctccaggagtaaagggttcatcaggcttgccaggaagcccaggaattcaaggcccaaa

SEQ ID NO: 577066 - DNA, 120 bp, Artificial Sequence
  ENSG00000171502_36 (sequence is synthesized)
gggtgaacaagggctacctggtcaacctggaattcaaggtaaaagaggtcaccgaggagcacaaggtgatcaaggaccatgtggagaccctggcctgaaagggcagcctggagaatatgg

SEQ ID NO: 577067 - DNA, 120 bp, Artificial Sequence
  ENSG00000171502_37 (sequence is synthesized)
tgttcaaggtttgacaggtttccaaggattcccaggccctaaaggtcctgaaggggatgctggcattgttgggatatcaggtcctaaaggtcctattggacacagaggaaacactggtcc

SEQ ID NO: 577068 - DNA, 120 bp, Artificial Sequence
  ENSG00000171502_38 (sequence is synthesized)
ccttggcagagaaggtataataggcccaacaggtagaactggacccagaggtgaaaagggctttagaggtgaaactggtcctcaaggaccaagaggtcaaccagggcctccaggtccacc

SEQ ID NO: 577069 - DNA, 120 bp, Artificial Sequence
  ENSG00000171502_39 (sequence is synthesized)
tggagcaccaggcccaagaaagcaaatggatatcaatgctgctattcaagccttgattgaatcaaatactgccctacagatggagagctaccagaatactgaagtgactttaattgacca

SEQ ID NO: 577070 - DNA, 120 bp, Artificial Sequence
  ENSG00000171502_40 (sequence is synthesized)
cagtgaagagatattcaaaaccctgaactaccttagcaatttattgcacagcatcaagaatcctcttggcacacgagataacccagcacgaatctgcaaagatttacttaactgtgaaca

SEQ ID NO: 577071 - DNA, 120 bp, Artificial Sequence
  ENSG00000171502_41 (sequence is synthesized)
aaaagtatcagatggaaaatactggattgacccaaatcttggctgtccttcagatgccattgaggttttctgcaatttcagtgctggtggccagacatgcttacctcctgtttctgtaac

SEQ ID NO: 577072 - DNA, 120 bp, Artificial Sequence
  ENSG00000171502_42 (sequence is synthesized)
aaagttggagtttggagttgggaaagtccagatgaacttccttcatttactgagttcggaagccacccatatcatcaccattcactgtctaaacaccccaaggtggacaagcacacaaac

SEQ ID NO: 577073 - DNA, 120 bp, Artificial Sequence
  ENSG00000171502_43 (sequence is synthesized)
aagtggcccaggattgcctattggtttcaagggatggaatggccagatttttaaagtaaacactctacttgaacctaaagtgctttcagatgactgcaagattcaagatggcagctggca

SEQ ID NO: 577074 - DNA, 120 bp, Artificial Sequence
  ENSG00000171502_44 (sequence is synthesized)
taaggcaacatttctttttcacacccaggaacctaatcaacttccagtgattgaagtacaaaaacttcctcatctcaaaactgaacgaaagtattacattgacagcagttctgtatgctt

SEQ ID NO: 577075 - DNA, 120 bp, Artificial Sequence
  ENSG00000171502_45 (sequence is synthesized)
tctgtaaagtctctgaattagttccgaattcaggctgttggccaggtaattgctgcagagggagaaataagacagacagatacagtcattatgaaatgcatgtaataaagcattggctaa

SEQ ID NO: 577076 - DNA, 120 bp, Artificial Sequence
  ENSG00000171502_46 (sequence is synthesized)
atcttaaagaatctcaggaagaacagacttcctcctaagaaggagaaaaggcatttttaaaggactatgattgataaagtatttaattcttttaaaaattatattcatctcagctttctt

SEQ ID NO: 577077 - DNA, 120 bp, Artificial Sequence
  ENSG00000171502_47 (sequence is synthesized)
agagaattccctagaactaaaaatttataaatatggaattcttcagggtatcttatatttttgactgagtgcgtagtacccattagacagctggagatgcagagcactatggagcaatac

SEQ ID NO: 577078 - DNA, 120 bp, Artificial Sequence
  ENSG00000171502_48 (sequence is synthesized)
tggctaatgcttccagatgtgcactgcttctgtctaaaaattacaagccacagtctaatatgtcttattttccaaaacactaagctgtattcaggtccccgatgggcatatacatcttag

SEQ ID NO: 577079 - DNA, 120 bp, Artificial Sequence
  ENSG00000171502_49 (sequence is synthesized)
ccggtgatacactacctcttacgtgttgcctctttgtgttgcttggtgctctttcgaaaacaaggtgcttatggctttcatagactatttcctttttcatctttgtcattctttaaaagt

SEQ ID NO: 577080 - DNA, 120 bp, Artificial Sequence
  ENSG00000171502_50 (sequence is synthesized)
gtatgtactggttacatcaagatatgttttggttgttagtacttattttaatttgtttggtcacacacttaataacacgtgaaactatttatgtgaagtccttgttttattttaaaattc

SEQ ID NO: 577081 - DNA, 120 bp, Artificial Sequence
  ENSG00000171502_51 (sequence is synthesized)
tctttgtgtatttggaatcaaagccagcacattgtaacctgtgcttgtacgcaaaagaattagatttctttgtttttgttttattttttaaattgttgtaaaaattattataggccagct

SEQ ID NO: 577082 - DNA, 120 bp, Artificial Sequence
  ENSG00000171502_52 (sequence is synthesized)
acatctagtagtaggtttggggtacagattgggggttgtgccatactgtttttaaagttcatgatcatctggaatgatacttagtgtatatatattttgtaaagttttaattcagcaaat

SEQ ID NO: 577083 - DNA, 120 bp, Artificial Sequence
  ENSG00000171502_53 (sequence is synthesized)
tttttgaaattgctgctgttttaaattataaaacctttatatttctgctttgtagaaattatatgttttgtagtattcattgattttctttcactgtacttaaatttagtgttagtactt

SEQ ID NO: 577084 - DNA, 120 bp, Artificial Sequence
  ENSG00000171502_54 (sequence is synthesized)
taaaatttttaatttaccagtctttaaagcaacatccagaaaaaaaaaagtcttttcccatttaaaataggctcagccagttcaatgtctccttgttatcagagaaatattagttcaata

SEQ ID NO: 577085 - DNA, 120 bp, Artificial Sequence
  ENSG00000171502_55 (sequence is synthesized)
ctgaaagaaaaatattatacctcttggtatctagaaaagcttgttcatccattataaatatatctttagccacagcaaaccacacttaacctatctataataaaaatgtgctttaaataa

SEQ ID NO: 577086 - DNA, 89 bp, Artificial Sequence
  ENSG00000171502_56 (sequence is synthesized)
gtcaaaaggggtatgcaggtgaaccaggaccagaaggcttaaagggagaagtaggagatcaaggaaatattggaaaaattggtgaaaca

SEQ ID NO: 577087 - DNA, 120 bp, Artificial Sequence
  ENSG00000171502_57 (sequence is synthesized)
actggagtcacagagtcgcctttgaaccgcaagtgaacttgagtgctgcactagcagcccggctcccgctgccgccggcgccccgaggcctcccatacctgcaccctaagcagttcagag

SEQ ID NO: 577088 - DNA, 120 bp, Artificial Sequence
  ENSG00000171502_58 (sequence is synthesized)
ccgcggtatcttccccttgtcttctcagcttgcaaaataccgtgtttgaaaggatgcctcgtgccagcagatctcagacagtttatgctaaagcgatcttttggctcgagaggaaaagct

SEQ ID NO: 577089 - DNA, 120 bp, Artificial Sequence
  ENSG00000171502_59 (sequence is synthesized)
cgctggcgcgagtcccgaggtccagggcagcggctccctaagctccagagctgggctccgacgatctctctggctccagctcccgccgccctcgcgccctcctccccttctcctcccgca

SEQ ID NO: 577090 - DNA, 120 bp, Artificial Sequence
  ENSG00000171502_60 (sequence is synthesized)
gggccctgtcgaggtcctgcttccccgaggtgcttctcagggcgtccagcctggcgattgctgtgacgctagaggtcccccagggtcagtgtgcgcagcctggaccactggactcaggcg

SEQ ID NO: 577091 - DNA, 120 bp, Artificial Sequence
  ENSG00000171502_61 (sequence is synthesized)
tgaggaagggtcgccagcggggggaagggggtggctgcagaacctcgggcgtcggggggttgttttacccacgggctcagaggcaatcccctctggttagaaggccaacaaacgttgccc

SEQ ID NO: 577092 - DNA, 120 bp, Artificial Sequence
  ENSG00000171502_62 (sequence is synthesized)
atccgagccgaggctgcgccctgatcattgccctgtcactggggaagtggcactcgcggcggggactggggaggggagcaggacacgggggcgggcctgcccctcctgcggaggttttgg

SEQ ID NO: 577093 - DNA, 120 bp, Artificial Sequence
  ENSG00000171502_63 (sequence is synthesized)
gcgggtcctgacgggcaccccacctcccctttgggcgctgtacctgctcccatgccttccctgggaaaagggctcggaccaggggttgcgcggctttggctggatgccctggtccccctg

SEQ ID NO: 577094 - DNA, 120 bp, Artificial Sequence
  ENSG00000171502_64 (sequence is synthesized)
gaagaggtcagtgggttacacaagtttgcttctggcccctgggcgagaagggtgaacgcggctgtggaagtcttctgcagagaggctgcccctcaggaggctaggtgggaggagggcaag

SEQ ID NO: 577095 - DNA, 120 bp, Artificial Sequence
  ENSG00000171502_65 (sequence is synthesized)
cgcgtgcagcccagcctggctggggctcgcgcgcgcgctctcttccgacccctggaagcctcgctgctgggcttcccagctgaccacatgcacctccccgcacacccccatccccatgca

SEQ ID NO: 577096 - DNA, 120 bp, Artificial Sequence
  ENSG00000171502_66 (sequence is synthesized)
acagtgaagaggaaacctcccaatctcctcaaccccgtgcgggcagcggggtgctggaggctggggagtccctggagcgagtagaggtcaagctctgcgggttgccttctcagagcggct

SEQ ID NO: 577097 - DNA, 120 bp, Artificial Sequence
  ENSG00000171502_67 (sequence is synthesized)
cacgcaggtcgcatggggttcccaggcagaagatttcccgccactgttctcgataaacatccctctgtgtggaccagcctggagagtcgggggttgcagccgatcctgcggaactgacag

SEQ ID NO: 577098 - DNA, 120 bp, Artificial Sequence
  ENSG00000171502_68 (sequence is synthesized)
atcttcccgctgatcaggggcggatgcagagaggctctagccctgccagcctggagactccaggagaggcggagtgaggccctccacttcttgcccagccagcctccgcatgcggccctc

SEQ ID NO: 577099 - DNA, 120 bp, Artificial Sequence
  ENSG00000171502_69 (sequence is synthesized)
ctgcagctcctgccccgagggctttccctctgccaccgcgcgaggcccacgctggtgactaacactccccttggtagttgtgaccaaccaccggagttaaagcagatctgctcctgggtt

SEQ ID NO: 577100 - DNA, 120 bp, Artificial Sequence
  ENSG00000171502_70 (sequence is synthesized)
ttgtcttgtctggtttacacttcccttccagacgctcccagaaaaggccctgcataaattcttgggcagtttggggtttgtaaattgggtccagatgatttggggggagggaggcagaga

SEQ ID NO: 577101 - DNA, 120 bp, Artificial Sequence
  ENSG00000171502_71 (sequence is synthesized)
aaccaaatagaatggattgcaccggaggaacttctgaagaaaaattataaaacgtggaatgggaagagaacccttgtgcagagacatggggataagtagcaggttctggatgaaggtgtt

SEQ ID NO: 577102 - DNA, 120 bp, Artificial Sequence
  ENSG00000171502_72 (sequence is synthesized)
tgtctcccatgaccaccagaggccttgcagcccttggttatctcataatatccaatttgttctgttacaggggccactggggatgggctgcagagaattaagggtaattcataattacat

SEQ ID NO: 577103 - DNA, 120 bp, Artificial Sequence
  ENSG00000171502_73 (sequence is synthesized)
cagattacagaactcacagctccaaccacacatgcaaacttgggaaagatagctaatgattggactgaaaaaattgtttctagaaaatccaattttcataaataatttggaatttttccc

SEQ ID NO: 577104 - DNA, 120 bp, Artificial Sequence
  ENSG00000171502_74 (sequence is synthesized)
tttgaaaaataatgccaccaacccttcggagtttgaggcggggtggggcgggggggctggatttggaagaagtagctgatttataatgtcaggccactgaattaaaccttagagtctctg

SEQ ID NO: 577105 - DNA, 120 bp, Artificial Sequence
  ENSG00000171502_75 (sequence is synthesized)
cattcctagggaatcatgaacctctaataaagagcagcatgatagtcctacttccaaaatatccacatcatcatcctcattccagtggaagttggcataggattatcatagaaggaaaga

SEQ ID NO: 577106 - DNA, 120 bp, Artificial Sequence
  ENSG00000171502_76 (sequence is synthesized)
ccatgaccaaatcacttctctaatttctttgattcataaactcaacccaaggaagaccagagaagtactgggatgaacagtagacttggaatcagggactggggttctagtctctattct

SEQ ID NO: 577107 - DNA, 120 bp, Artificial Sequence
  ENSG00000171503_0 (sequence is synthesized)
gtgaagcaagagcggtcggcagagcggggaggcgaactgcagcagagttcttgctttccggcaggtgatggcgccccccgcggcctagaggtccagcgcccgccgcgagcagcggacagt

SEQ ID NO: 577108 - DNA, 120 bp, Artificial Sequence
  ENSG00000171503_1 (sequence is synthesized)
cctcctgttgtgtccgaccgagagtcctggtgactttgaacatgctggtgccgctagccaagctgtcctgcctggcatatcagtgctttcatgccttaaaaattaagaaaaattatctac

SEQ ID NO: 577109 - DNA, 120 bp, Artificial Sequence
  ENSG00000171503_2 (sequence is synthesized)
ctctatgtgctacaagatggtcttcaacttctactgtgcctcgaattactacccattatactatttatccccgggataaggacaagagatgggaaggagtgaacatggaaaggtttgcag

SEQ ID NO: 577110 - DNA, 120 bp, Artificial Sequence
  ENSG00000171503_3 (sequence is synthesized)
aagaagcagatgttgtaatagttggtgcaggccctgcagggctctctgcagctgttcgtctaaaacagttggctgtggcacatgaaaaggacatccgtgtgtgtctagtggagaaagctg

SEQ ID NO: 577111 - DNA, 120 bp, Artificial Sequence
  ENSG00000171503_4 (sequence is synthesized)
cccagataggagctcatactctctcaggggcttgccttgatccaggtgcttttaaagaactcttcccagactggaaagagaagggggctccacttaacactcctgtaacagaagacagat

SEQ ID NO: 577112 - DNA, 120 bp, Artificial Sequence
  ENSG00000171503_5 (sequence is synthesized)
ttggaattttaacagagaaatacagaattcctgtgccaattcttccagggcttccaatgaataatcatggcaattacattgtacgcttgggacatttagtgagctggatgggcgaacaag

SEQ ID NO: 577113 - DNA, 120 bp, Artificial Sequence
  ENSG00000171503_6 (sequence is synthesized)
cagaagcccttggtgttgaagtataccctggttatgcagctgctgaggtcctttttcatgatgatggtagtgtaaaaggaattgccactaacgatgtagggatacaaaaggatggtgcac

SEQ ID NO: 577114 - DNA, 120 bp, Artificial Sequence
  ENSG00000171503_7 (sequence is synthesized)
caaaggcaacatttgagagaggactggaactacatgctaaagtcacaatttttgcagaaggttgccatggacatctagccaagcaactatataagaagtttgatttgagagcaaattgtg

SEQ ID NO: 577115 - DNA, 120 bp, Artificial Sequence
  ENSG00000171503_8 (sequence is synthesized)
aacctcaaacctacgggattggactgaaggagttatgggttattgatgaaaagaactggaaacctgggagagtagatcacactgttggttggcccttggacagacatacctatggaggat

SEQ ID NO: 577116 - DNA, 120 bp, Artificial Sequence
  ENSG00000171503_9 (sequence is synthesized)
ctttcctctatcatttgaatgaaggtgaacccctagtagctcttggtcttgtggttggtctagactatcagaatccatacctgagtccatttagagagttccaaaggtggaaacaccatc

SEQ ID NO: 577117 - DNA, 120 bp, Artificial Sequence
  ENSG00000171503_10 (sequence is synthesized)
ctagcattcggccaaccttggaaggtggaaaaaggattgcatacggagccagagctctcaatgaaggtggctttcagtctataccaaaactcacctttcctggtggtttactaattggtt

SEQ ID NO: 577118 - DNA, 120 bp, Artificial Sequence
  ENSG00000171503_11 (sequence is synthesized)
gtagtcctggttttatgaatgttcccaagatcaaaggtactcacacagcaatgaaaagtggaattttagcagcagaatctatttttaatcaactaactagtgaaaatctccaatcaaaga

SEQ ID NO: 577119 - DNA, 120 bp, Artificial Sequence
  ENSG00000171503_12 (sequence is synthesized)
tatatggagggatgatttacactggaatcttttactggatattgagaggaatggagccgtggactctgaaacataaaggttctgactttgaacggctcaagccagccaaggattgcacac

SEQ ID NO: 577120 - DNA, 120 bp, Artificial Sequence
  ENSG00000171503_13 (sequence is synthesized)
ctattgagtatccaaaacccgatggacagatcagttttgacctcttgtcatctgtggctctgagtggtactaatcatgaacatgaccagccggcacacttaaccttaagggatgacagta

SEQ ID NO: 577121 - DNA, 120 bp, Artificial Sequence
  ENSG00000171503_14 (sequence is synthesized)
tacctgtaaatagaaatctgtcgatatatgatgggcccgagcagcgattctgtcctgcaggagtttatgaatttgtacctgtggaacaaggtgatggatttcggttacagataaatgctc

SEQ ID NO: 577122 - DNA, 120 bp, Artificial Sequence
  ENSG00000171503_15 (sequence is synthesized)
agaactgtgtacattgtaaaacatgtgatattaaagatccaagtcagaatattaactgggtggtacctgaaggtggaggaggacctgcttacaatggaatgtaaactgcagctagccagt

SEQ ID NO: 577123 - DNA, 120 bp, Artificial Sequence
  ENSG00000171503_16 (sequence is synthesized)
ttctttcaagtatggcaagctaacgttaaaatgtttagagattaacagatttcagaatgtctttctgcatattactgaacagaatagtcacaaaatgattatcaaataaaaattttatac

SEQ ID NO: 577124 - DNA, 120 bp, Artificial Sequence
  ENSG00000171503_17 (sequence is synthesized)
tatatgtaagattgtcccataaagaaattacgggtattgcttttaaataacctttataagaatgcagcatcttcctacctcttcagttcttcagagattcagtaccaagagcaaaattca

SEQ ID NO: 577125 - DNA, 120 bp, Artificial Sequence
  ENSG00000171503_18 (sequence is synthesized)
ctactggactttacatttgacttgccaaagttaagtaatcaaatataaaaatgaatatatattctagactaaagttttattgaaacacagccatacccattggttacacattgtctatgg

SEQ ID NO: 577126 - DNA, 120 bp, Artificial Sequence
  ENSG00000171503_19 (sequence is synthesized)
ctaattttgaattacaactgtgcaggtgagtgggtgtgacattacatggtctacaaagcctaaaaactttatgatctggcccttgcagaagaagtatgcccatccctgaacaagtttgtg

SEQ ID NO: 577127 - DNA, 120 bp, Artificial Sequence
  ENSG00000171503_20 (sequence is synthesized)
tgtgtgtgtgtgtgtgtgtgtgtattatctataagtatgaaaacctagcatcatccaccatggatacatcaaagaatcgaaggaaacaatatacaaacttaagctctcatctctttattc

SEQ ID NO: 577128 - DNA, 120 bp, Artificial Sequence
  ENSG00000171503_21 (sequence is synthesized)
atctctttattcaataagatgtgtctttacaagtttaaaaagactggacaccattattttttatgaataatgcacataaccattttaaaaaacattttacttggccgggcacggtggctc

SEQ ID NO: 577129 - DNA, 84 bp, Artificial Sequence
  ENSG00000171503_22 (sequence is synthesized)
aaacaaaaccactttacttactgtattgtgacatgtttattaagcatgaacccctatcagtactcctaaactgtaaacagtaag

SEQ ID NO: 577130 - DNA, 120 bp, Artificial Sequence
  ENSG00000171503_23 (sequence is synthesized)
ttgctaaatgtataataataaatctcaaagccaagaattagtttatggaaactgaaataaagtatgtactggaacagaacctaagaatataatcatactaatacagtaatatgcttaata

SEQ ID NO: 577131 - DNA, 120 bp, Artificial Sequence
  ENSG00000171503_24 (sequence is synthesized)
taattattgtgcaaaacacagggagaatttccataaataatactctaaagcacagtggatattttttaactgtcatgtgatttatcatgtgattattgggttatattaatcccagaattt

SEQ ID NO: 577132 - DNA, 120 bp, Artificial Sequence
  ENSG00000171503_25 (sequence is synthesized)
ctgtgccaattcttccaggtaaggtatagtgaatatgcatagaactatggaattccacagctggaaggaactacatttcatctgacgaaatttcctccttttacagacaagaactgagac

SEQ ID NO: 577133 - DNA, 120 bp, Artificial Sequence
  ENSG00000171503_26 (sequence is synthesized)
gtgctgtgggattcgcggacccctctggccgcgctgtggctgtttcaccgctccccggctgggacttggagtcccttatctttccctggtttggtacatgacccggaagcctcggctggc

SEQ ID NO: 577134 - DNA, 120 bp, Artificial Sequence
  ENSG00000171503_27 (sequence is synthesized)
ttgaacatgctggtgccgctagccaagctgtcctgcctggatggtcttcaacttctactgtgcctcgaattactacccattatactatttatccccgggataaggacaagagatgggaag

SEQ ID NO: 577135 - DNA, 120 bp, Artificial Sequence
  ENSG00000171503_28 (sequence is synthesized)
cagcggacagtcctcctgttgtgtccgaccgagagtcctggtgactttgaacatgctggtgccgctagccaagctgtcctgcctggtctataccaaaactcacctttcctggtggtttac

SEQ ID NO: 577136 - DNA, 120 bp, Artificial Sequence
  ENSG00000171503_29 (sequence is synthesized)
tcagatggaggaatgtctctagacaacgggagagataagccttctcatccagctagaaagattaaccccagtggagaagaatatagtctgtttcactatattcattgagtacaatcaacg

SEQ ID NO: 577137 - DNA, 120 bp, Artificial Sequence
  ENSG00000171503_30 (sequence is synthesized)
ggagaaaagacatctcttctgctataaactgagataatgaacaaagtatgggcacaaatacagattatattagaagttactgccaaggagttgagaaaattcccatctaattgcttctgt

SEQ ID NO: 577138 - DNA, 120 bp, Artificial Sequence
  ENSG00000171503_31 (sequence is synthesized)
tgccctggataaaggaaagaagaggtggagttgaaggtttgaggacaacagagaaggttcagtgaacatttttgcagataaatctttgcatatttctgttcatttccataaaatactttt

SEQ ID NO: 577139 - DNA, 120 bp, Artificial Sequence
  ENSG00000171503_32 (sequence is synthesized)
tttttgctgactcaaaaatgtatacatttttaaggatatcagaagatactgtggccaggtgcagtggctcacgcctatgatcccagcaattttagaggctgaggcaggcagatcacttga

SEQ ID NO: 577140 - DNA, 77 bp, Artificial Sequence
  ENSG00000171503_33 (sequence is synthesized)
tctctactaaaaaaaaaaaacaaaaatatactctggaggctgaggcgtgagaatcgcttgaaaccaggaggcagagg

SEQ ID NO: 577141 - DNA, 120 bp, Artificial Sequence
  ENSG00000171505_0 (sequence is synthesized)
atggaaaaccaatccagcatttctgaatttttcctccgaggaatatcagcgcctccagagcaacagcagtccctcttcggaattttcctgtgtatgtatcttgtcaccttgactgggaac

SEQ ID NO: 577142 - DNA, 120 bp, Artificial Sequence
  ENSG00000171505_1 (sequence is synthesized)
ctgctcatcatcctggccattggctctgacctgcacctccacacccccatgtactttttcttggccaacctgtcttttgttgacatgggtttaacgtcctccacagttaccaagatgctg

SEQ ID NO: 577143 - DNA, 120 bp, Artificial Sequence
  ENSG00000171505_2 (sequence is synthesized)
gtgaatatacagactcggcatcacaccatctcctatacgggttgcctcacgcaaatgtatttctttctgatgtttggtgatctagacagcttcttcctggctgccatggcgtatgaccgc

SEQ ID NO: 577144 - DNA, 120 bp, Artificial Sequence
  ENSG00000171505_3 (sequence is synthesized)
gttgccctgactcacacgttcctcatggctcggttgtccttctgtgtgactggggaaattgctcactttttctgtgacatcactcctgtcctgaagctgtcatgttctgacacccacatc

SEQ ID NO: 577145 - DNA, 120 bp, Artificial Sequence
  ENSG00000171505_4 (sequence is synthesized)
aacgagatgatggtttttgtcttgggaggcaccgtactcatcgtcccctttttatgcattgtcacctcctacatccacattgtgccagctatcctgagggtccgaacccgtggtggggtg

SEQ ID NO: 577146 - DNA, 120 bp, Artificial Sequence
  ENSG00000171505_5 (sequence is synthesized)
ggcaaggccttttccacctgcagttcccacctctgcgttgtttgtgtgttctatgggaccctcttcagtgcctacctgtgtcctccctccattgcctctgaagagaaggacattgcagca

SEQ ID NO: 577147 - DNA, 120 bp, Artificial Sequence
  ENSG00000171505_6 (sequence is synthesized)
gctgcaatgtacaccatagtgactcccatgttgaacccctttatctatagcctaaggaacaaggacatgaagggggccctaaagaggctcttcagtcacaggagtattgtttcctcttag

SEQ ID NO: 577148 - DNA, 120 bp, Artificial Sequence
  ENSG00000171509_0 (sequence is synthesized)
agaaatagcacacaaccactgtgagctgtatgcgattcagaaaccaagaccaaattttgctcactttcattaatcagttgctcagatagaaggaaatgacatctggttctgtcttcttct

SEQ ID NO: 577149 - DNA, 120 bp, Artificial Sequence
  ENSG00000171509_1 (sequence is synthesized)
acatcttaatttttggaaaatatttttctcatgggggtggacaggatgtcaagtgctcccttggctatttcccctgtgggaacatcacaaagtgcttgcctcagctcctgcactgtaacg

SEQ ID NO: 577150 - DNA, 120 bp, Artificial Sequence
  ENSG00000171509_2 (sequence is synthesized)
gtgtggacgactgcgggaatcaggccgatgaggacaactgtggagacaacaatggatggtctctgcaatttgacaaatattttgccagttactacaaaatgacttcccaatatccttttg

SEQ ID NO: 577151 - DNA, 120 bp, Artificial Sequence
  ENSG00000171509_3 (sequence is synthesized)
aggcagaaacacctgaatgtttggtcggttctgtgccagtgcaatgtctttgccaaggtctggagcttgactgtgatgaaaccaatttacgagctgttccatcggtttcttcaaatgtga

SEQ ID NO: 577152 - DNA, 120 bp, Artificial Sequence
  ENSG00000171509_4 (sequence is synthesized)
ctgcaatgtcacttcagtggaacttaataagaaagcttcctcctgattgcttcaagaattatcatgatcttcagaagctgtacctgcaaaacaataagattacatccatctccatctatg

SEQ ID NO: 577153 - DNA, 120 bp, Artificial Sequence
  ENSG00000171509_5 (sequence is synthesized)
ctttcagaggactgaatagccttactaaactgtatctcagtcataacagaataaccttcctgaagccgggtgtttttgaagatcttcacagactagaatggctgataattgaagataatc

SEQ ID NO: 577154 - DNA, 120 bp, Artificial Sequence
  ENSG00000171509_6 (sequence is synthesized)
acctcagtcgaatttccccaccaacattttatggactaaattctcttattctcttagtcctgatgaataacgtcctcacccgtttacctgataaacctctctgtcaacacatgccaagac

SEQ ID NO: 577155 - DNA, 120 bp, Artificial Sequence
  ENSG00000171509_7 (sequence is synthesized)
tacattggctggaccttgaaggcaaccatatccataatttaagaaatttgacttttatttcctgcagtaatttaactgttttagtgatgaggaaaaacaaaattaatcacttaaatgaaa

SEQ ID NO: 577156 - DNA, 120 bp, Artificial Sequence
  ENSG00000171509_8 (sequence is synthesized)
atacttttgcacctctccagaaactggatgaattggatttaggaagtaataagattgaaaatcttccaccgcttatattcaaggacctgaaggagctgtcacaattgaatctttcctata

SEQ ID NO: 577157 - DNA, 120 bp, Artificial Sequence
  ENSG00000171509_9 (sequence is synthesized)
atccaatccagaaaattcaagcaaaccaatttgattatcttgtcaaactcaagtctctcagcctagaagggattgaaatttcaaatatccaacaaaggatgtttagacctcttatgaatc

SEQ ID NO: 577158 - DNA, 120 bp, Artificial Sequence
  ENSG00000171509_10 (sequence is synthesized)
tctctcacatatattttaagaaattccagtactgtgggtatgcaccacatgttcgcagctgtaaaccaaacactgatggaatttcatctctagagaatctcttggcaagcattattcaga

SEQ ID NO: 577159 - DNA, 120 bp, Artificial Sequence
  ENSG00000171509_11 (sequence is synthesized)
gagtatttgtctgggttgtatctgcagttacctgctttggaaacatttttgtcatttgcatgcgaccttatatcaggtctgagaacaagctgtatgccatgtcaatcatttctctctgct

SEQ ID NO: 577160 - DNA, 120 bp, Artificial Sequence
  ENSG00000171509_12 (sequence is synthesized)
gtgccgactgcttaatgggaatatatttattcgtgatcggaggctttgacctaaagtttcgtggagaatacaataagcatgcgcagctgtggatggagagtactcattgtcagcttgtag

SEQ ID NO: 577161 - DNA, 120 bp, Artificial Sequence
  ENSG00000171509_13 (sequence is synthesized)
gatctttggccattctgtccacagaagtatcagttttactgttaacatttctgacattggaaaaatacatctgcattgtctatccttttagatgtgtgagacctggaaaatgcagaacaa

SEQ ID NO: 577162 - DNA, 120 bp, Artificial Sequence
  ENSG00000171509_14 (sequence is synthesized)
ttacagttctgattctcatttggattactggttttatagtggctttcattccattgagcaataaggaatttttcaaaaactactatggcaccaatggagtatgcttccctcttcattcag

SEQ ID NO: 577163 - DNA, 120 bp, Artificial Sequence
  ENSG00000171509_15 (sequence is synthesized)
tcctatggaagcatgttttatagtgttcatcaaagtgccataacagcaactgaaatacggaatcaagttaaaaaagagatgatccttgccaaacgttttttctttatagtatttactgat

SEQ ID NO: 577164 - DNA, 120 bp, Artificial Sequence
  ENSG00000171509_16 (sequence is synthesized)
gcattatgctggatacccatttttgtagtgaaatttctttcactgcttcaggtagaaataccaggtaccataacctcttgggtagtgatttttattctgcccattaacagtgctttgaac

SEQ ID NO: 577165 - DNA, 120 bp, Artificial Sequence
  ENSG00000171509_17 (sequence is synthesized)
ccaattctctatactctgaccacaagaccatttaaagaaatgattcatcggttttggtataactacagacaaagaaaatctatggacagcaaaggtcagaaaacatatgctccatcattc

SEQ ID NO: 577166 - DNA, 120 bp, Artificial Sequence
  ENSG00000171509_18 (sequence is synthesized)
atctgggtggaaatgtggccactgcaggagatgccacctgagttaatgaagccggaccttttcacatacccctgtgaaatgtcactgatttctcaatcaacgagactcaattcctattca

SEQ ID NO: 577167 - DNA, 120 bp, Artificial Sequence
  ENSG00000171509_19 (sequence is synthesized)
tgactgactctgaaattcatttcttcgcagagaatactgtgggggtgcttcatgagggatttactggtatgaaatgaataccacaaaattaatttataataatagctaagataaatattt

SEQ ID NO: 577168 - DNA, 120 bp, Artificial Sequence
  ENSG00000171509_20 (sequence is synthesized)
tacaaggacatgaggaaaaataaaaatgactaatgctcttacaaagggaagtaattatatcaataatgtatatatattagtagacattttgcataagaaattaagagaaatctacttcag

SEQ ID NO: 577169 - DNA, 120 bp, Artificial Sequence
  ENSG00000171509_21 (sequence is synthesized)
taacattcattcatttttctaacatgcatttattgagtacccactactatgtgcatagcattgcaatatagtcctggaagtagacagtgcagaacctttcaatctgtagatggtgtttaa

SEQ ID NO: 577170 - DNA, 120 bp, Artificial Sequence
  ENSG00000171509_22 (sequence is synthesized)
tgacaaaagactatacaaagtccatctgcagttcctagtttaaagtagagctttacctgtcatgtgcatcagcaagaatcataggcacttttaaataaaggtttaaagttttggaatact

SEQ ID NO: 577171 - DNA, 120 bp, Artificial Sequence
  ENSG00000171509_23 (sequence is synthesized)
cagtgtatttgcatcatagaaaatgtctgactgtttgcaaaataatattctgttttaagaatccatcttacctctctttaagtttccatacacttgagagccaacacaacatatttatta

SEQ ID NO: 577172 - DNA, 120 bp, Artificial Sequence
  ENSG00000171509_24 (sequence is synthesized)
ctaaaaagatgctttgctagaaactcaaaaacagcacttcttttggcacttcctgcccagttttctctttgctttaaatgaacatcatcatatggaattggaataggagagtatgagtac

SEQ ID NO: 577173 - DNA, 120 bp, Artificial Sequence
  ENSG00000171509_25 (sequence is synthesized)
ggcagagaagtggatcagaaaaactagaatgaggataaacatttacattagtggaaactcctgaaataaatccttgtattgtcagttaactgattttcaacaaggatgccaagacaaaaa

SEQ ID NO: 577174 - DNA, 120 bp, Artificial Sequence
  ENSG00000171509_26 (sequence is synthesized)
ggcttttcaacaaaccgtgctgttttaagaacagacctaagtggtttaattcacccactttagatgggtgaatgttatggtgtgtgaaatatctcagtaaagcagttaaaaggaaaaaga

SEQ ID NO: 577175 - DNA, 120 bp, Artificial Sequence
  ENSG00000171509_27 (sequence is synthesized)
gctggaatgcactgattcaggaacttaatttcaggaaggaaaggtctgtatgtacacatttcactttaagcagaaaatctttcttcaagaaatgactttactttctctttgcactgccag

SEQ ID NO: 577176 - DNA, 120 bp, Artificial Sequence
  ENSG00000171509_28 (sequence is synthesized)
cacgtgagatactaactttttaactagttgttcttctctagtctctacgttattagaattttttgctttcataatgtgaaacctttaagcaggagaagaaaatgttttcagatagtttca

SEQ ID NO: 577177 - DNA, 120 bp, Artificial Sequence
  ENSG00000171509_29 (sequence is synthesized)
aatacaccaaaaatgtttgaaacacaaaaatactggaatcaaaccataatgcacttattgaatatatagttgtatagatttgttctgaaaataaattatctgaaatttaactattaaaaa

SEQ ID NO: 577178 - DNA, 120 bp, Artificial Sequence
  ENSG00000171509_30 (sequence is synthesized)
gtgcgtgtgtgtaaagaaggagattaggacatttagagaaggagggcggggaggagagatcctgagaatagaaaggaggaaagaaaaaaagaggaatggaaagagacagagaaaggaaat

SEQ ID NO: 577179 - DNA, 120 bp, Artificial Sequence
  ENSG00000171509_31 (sequence is synthesized)
gagaaatatgtctatttacatacatcatgtttgtttctgaccttgtgggacaataacttggaatgccctgagcaacaaaaacataaaacactctgatgagacagcatctcatccttgcac

SEQ ID NO: 577180 - DNA, 120 bp, Artificial Sequence
  ENSG00000171509_32 (sequence is synthesized)
cagtcacggtgagagaaaggagcagaaaggactgaaggtgaagtcgctgagacttctctcaacaaaaagacaaaactaaattgaaatacaaaacatatgttgcttaaggaaatcttacac

SEQ ID NO: 577181 - DNA, 64 bp, Artificial Sequence
  ENSG00000171509_33 (sequence is synthesized)
caaaacatatgttgcttaaggaaatcttacacttatttcagtagcttaaaatatccactctgga

SEQ ID NO: 577182 - DNA, 120 bp, Artificial Sequence
  ENSG00000171509_34 (sequence is synthesized)
ctcttccttcgacacagaagaaaacctaaaatccagtaagacagagtggcatgccaaatttgcccatcaatttattggcacattcaagaataaagcaaaactctactgaatatcgatata

SEQ ID NO: 577183 - DNA, 120 bp, Artificial Sequence
  ENSG00000171509_35 (sequence is synthesized)
gtagtatctgcctctgaggattcttggtgcatatttttgcattctgccatgtttcgtccattttgcccctaccttgggcatttaaatataaagattcccatgagatcggatcaattcagc

SEQ ID NO: 577184 - DNA, 120 bp, Artificial Sequence
  ENSG00000171509_36 (sequence is synthesized)
tgtttatttctagaaatgtctataaagagaagaactaacaagagaaccatctttttatttttttaatttacttcctaaatataaatgaaggagaatctagaaccactgtcttcattggaa

SEQ ID NO: 577185 - DNA, 120 bp, Artificial Sequence
  ENSG00000171509_37 (sequence is synthesized)
aaccacaagatcataggccctaaagcagaaacaagcttaaactatggaggaatagaaagaagacaatgtgagtagggtgtgaagcaagggagaaagtcgtagggaatcgagactggacag

SEQ ID NO: 577186 - DNA, 120 bp, Artificial Sequence
  ENSG00000171509_38 (sequence is synthesized)
acagaggcaacaaaaaccattgagaaccttgtacgtgttggacatatctagaaggagtcatctttgaagcagagagaaagccctctccagataccaaatctgctggcaccttgatcctgg

SEQ ID NO: 577187 - DNA, 120 bp, Artificial Sequence
  ENSG00000171509_39 (sequence is synthesized)
attcccagcctccagaactatcatctaacctatactgactgataagccttctaaaagcaaaaggaagaaaacagctttgttaatcgaggcctcttctgcaaagttcaccatagtttctca

SEQ ID NO: 577188 - DNA, 120 bp, Artificial Sequence
  ENSG00000171509_40 (sequence is synthesized)
ttattctatcataggaacttgtgaattactttctccaagattttatatgacaccttgagcttgttgcgttgggagaatttcagtggaagagcagaaccaagtaatgccatcctcatctga

SEQ ID NO: 577189 - DNA, 120 bp, Artificial Sequence
  ENSG00000171509_41 (sequence is synthesized)
gtccctaactgaatgctctacgtgattgcattttgttcatttattcgacacttctatgtgatgggtctagaacaatagacaagatctgtgctgttagagacttgcactttaaaggaaaat

SEQ ID NO: 577190 - DNA, 120 bp, Artificial Sequence
  ENSG00000171509_42 (sequence is synthesized)
gaagaaatgattgcataattaactgtagagagtaactttgagagtggttaccaaagagagtctatgaatagatcctcatctgtaaatgaattattaggagaataaaaattacctcttcct

SEQ ID NO: 577191 - DNA, 120 bp, Artificial Sequence
  ENSG00000171509_43 (sequence is synthesized)
agaagctgacactctaaagaacaatggtgacctgcactcagaacatgaaggcagccttgaaatccttactttatcattcccgcaatctggggtacctgcaaaacaataagattacatcca

SEQ ID NO: 577192 - DNA, 80 bp, Artificial Sequence
  ENSG00000171517_0 (sequence is synthesized)
cctttggctctggacgcgtcgcaggggtcgctggagaggaggcgctccgcccgcccgccgcgtcctccgctgcttctccg

SEQ ID NO: 577193 - DNA, 120 bp, Artificial Sequence
  ENSG00000171517_1 (sequence is synthesized)
cgaccccgagggcatgcggcagccgcaggggcccccgctcccgggctcggcggcgcgggtgaacgtgagcggatgttcacttctccacaatgaatgagtgtcactatgacaagcacatgg

SEQ ID NO: 577194 - DNA, 120 bp, Artificial Sequence
  ENSG00000171517_2 (sequence is synthesized)
actttttttataataggagcaacactgatactgtcgatgactggacaggaacaaagcttgtgattgttttgtgtgttgggacgtttttctgcctgtttatttttttttctaattctctgg

SEQ ID NO: 577195 - DNA, 120 bp, Artificial Sequence
  ENSG00000171517_3 (sequence is synthesized)
tcatcgcggcagtgatcaaaaacagaaaatttcatttccccttctactacctgttggctaatttagctgctgccgatttcttcgctggaattgcctatgtattcctgatgtttaacacag

SEQ ID NO: 577196 - DNA, 120 bp, Artificial Sequence
  ENSG00000171517_4 (sequence is synthesized)
gcccagtttcaaaaactttgactgtcaaccgctggtttctccgtcaggggcttctggacagtagcttgactgcttccctcaccaacttgctggttatcgccgtggagaggcacatgtcaa

SEQ ID NO: 577197 - DNA, 120 bp, Artificial Sequence
  ENSG00000171517_5 (sequence is synthesized)
tcatgaggatgcgggtccatagcaacctgaccaaaaagagggtgacactgctcattttgcttgtctgggccatcgccatttttatgggggcggtccccacactgggctggaattgcctct

SEQ ID NO: 577198 - DNA, 120 bp, Artificial Sequence
  ENSG00000171517_6 (sequence is synthesized)
gcaacatctctgcctgctcttccctggcccccatttacagcaggagttaccttgttttctggacagtgtccaacctcatggccttcctcatcatggttgtggtgtacctgcggatctacg

SEQ ID NO: 577199 - DNA, 120 bp, Artificial Sequence
  ENSG00000171517_7 (sequence is synthesized)
tgtacgtcaagaggaaaaccaacgtcttgtctccgcatacaagtgggtccatcagccgccggaggacacccatgaagctaatgaagacggtgatgactgtcttaggggcgtttgtggtat

SEQ ID NO: 577200 - DNA, 120 bp, Artificial Sequence
  ENSG00000171517_8 (sequence is synthesized)
gctggaccccgggcctggtggttctgctcctcgacggcctgaactgcaggcagtgtggcgtgcagcatgtgaaaaggtggttcctgctgctggcgctgctcaactccgtcgtgaacccca

SEQ ID NO: 577201 - DNA, 120 bp, Artificial Sequence
  ENSG00000171517_9 (sequence is synthesized)
tcatctactcctacaaggacgaggacatgtatggcaccatgaagaagatgatctgctgcttctctcaggagaacccagagaggcgtccctctcgcatcccctccacagtcctcagcagga

SEQ ID NO: 577202 - DNA, 120 bp, Artificial Sequence
  ENSG00000171517_10 (sequence is synthesized)
gtgacacaggcagccagtacatagaggatagtattagccaaggtgcagtctgcaataaaagcacttcctaaactctggatgcctctcggcccacccaggcctcctctgggaaaagagctg

SEQ ID NO: 577203 - DNA, 120 bp, Artificial Sequence
  ENSG00000171517_11 (sequence is synthesized)
ttaagaatgattacctgtctctaacaaagcccatgtacagtgttatttgaggtctccattaatcactgctagatttctttaaaaaattttttttcatagtttaaaagcatgggcagtaaa

SEQ ID NO: 577204 - DNA, 120 bp, Artificial Sequence
  ENSG00000171517_12 (sequence is synthesized)
gagaggacctgctgcatttagagaaagcacagaaacgggagaggttcggcgggtccctgcttgtcctatgaactgctcagagctcctgtcagtccagctgggccttctgggttctggcac

SEQ ID NO: 577205 - DNA, 120 bp, Artificial Sequence
  ENSG00000171517_13 (sequence is synthesized)
catttcgtagccattctctttgtattttaaaaggacgttatgaaagggcttagaccaaaataaatcataatgttacttgagccaccttatatagctgcttggagagtctatgtagttctt

SEQ ID NO: 577206 - DNA, 120 bp, Artificial Sequence
  ENSG00000171517_14 (sequence is synthesized)
caatggtgtttttttcctcaaagaaaccatggccagtagctaggtgttcagtaggaatcaaagaaaaatcagtaagagctccagattaaacctgatttttaactgaaggaacattctgag

SEQ ID NO: 577207 - DNA, 120 bp, Artificial Sequence
  ENSG00000171517_15 (sequence is synthesized)
tgaggaaaaatacttaaaagtaaaaaaggtcaatgtgaaaaccctttttgacctgaaaaaggccttagtatggtcctccatgcatgtgtgtgtatatgcatgtgtgtgtgtgtgtgtgtg

SEQ ID NO: 577208 - DNA, 120 bp, Artificial Sequence
  ENSG00000171517_16 (sequence is synthesized)
tatatatatatatatatatatattcctgtttttactgatttttattgattttgttcaaagatatctggggattggattggggaatgcttaatctgactattgaaagaaacatggatccct

SEQ ID NO: 577209 - DNA, 120 bp, Artificial Sequence
  ENSG00000171517_17 (sequence is synthesized)
acatggatccctggagtatttcagatacggggttaccgccccagactgcctcccgccagtccacattagttctcattttccctcatgatggtgaaaaacagtggagagctagtaaagggt

SEQ ID NO: 577210 - DNA, 120 bp, Artificial Sequence
  ENSG00000171517_18 (sequence is synthesized)
ttatgcagaaaacaaggagaagagaatgtgaagtttgaagtgcctatggaacatccagctgataatcttgcctagtaagagcaaaagaagccaagagaacaccaacgtttaaggagcagg

SEQ ID NO: 577211 - DNA, 120 bp, Artificial Sequence
  ENSG00000171517_19 (sequence is synthesized)
accaacgtttaaggagcaggtagagaaaacccagcaaaaggacagaggaataagaggaccaaagaacaatgttaagaatcaaggagagaggtcaggcacgctggctcatgcctgtaatcc

SEQ ID NO: 577212 - DNA, 72 bp, Artificial Sequence
  ENSG00000171517_20 (sequence is synthesized)
gggcaatgtggtgaaattgcatcttaccaggtacttgggaagctgaggcataagaatcacttgaacccggga

SEQ ID NO: 577213 - DNA, 82 bp, Artificial Sequence
  ENSG00000171517_21 (sequence is synthesized)
agccaggcatggtggcacatgcctgtaataccaggtacttgggaagctgaggcatgagccaagatcgcagcactgcactcta

SEQ ID NO: 577214 - DNA, 120 bp, Artificial Sequence
  ENSG00000171517_22 (sequence is synthesized)
aaaaaaaaaaaaaaaaaagactagagaatgtcagggaacacatgtgtatatttaaacaacttcactttgcatttaaaaactcgaaggacagcgaaggtgaaatcaattcacgggccacct

SEQ ID NO: 577215 - DNA, 120 bp, Artificial Sequence
  ENSG00000171517_23 (sequence is synthesized)
agactttccagtctaggactagagctgtagcaatgatctgttgtgctgtacaagaaaagagaaagaggtgttcatttgagaacagatgtttttatacatcagagtaaaagctgtattgaa

SEQ ID NO: 577216 - DNA, 120 bp, Artificial Sequence
  ENSG00000171517_24 (sequence is synthesized)
gagcaggctgaatcccttccatatagaatgaaatatgagcttgaccccagtccttatcttcagttacctccataccaactggtggcatgttggatttagcatgtagaataatttcccatc

SEQ ID NO: 577217 - DNA, 120 bp, Artificial Sequence
  ENSG00000171517_25 (sequence is synthesized)
tcttatttttcccaaggttaatggcatccttctggtacctggcttacatgtgaactgaattttgatctgggttctattttgaatttttctccttcagagacctaagtaggcaacatgaaa

SEQ ID NO: 577218 - DNA, 120 bp, Artificial Sequence
  ENSG00000171517_26 (sequence is synthesized)
gacaagtagttaagaaagaaaaaatgatgtttcatacacacaggctaccaacgagagttttctatgtaaaacatttagagtgtattctgatttaaaatgagaataacttcaaggtagata

SEQ ID NO: 577219 - DNA, 120 bp, Artificial Sequence
  ENSG00000171517_27 (sequence is synthesized)
ttatagtatttatgtagtttgcaaaagaagtttacatttttttgctattgtgatataacatttatgtgcaagaactacttgtaataaaaggatttgagatgtcatgcttctaaatataat

SEQ ID NO: 577220 - DNA, 120 bp, Artificial Sequence
  ENSG00000171517_28 (sequence is synthesized)
agcctaaaatagagaatattatgatttgaaagtgtagatttcacaaactctgtatagtatgtgggtctatctgaagcttttatcgaagctacctataaaataaaattttaaaagatctgt

SEQ ID NO: 577221 - DNA, 120 bp, Artificial Sequence
  ENSG00000171522_0 (sequence is synthesized)
acagagggtggaaaggcgagagcggagctccaagcccggcagcccgagaggaagatgaacagccccaggccagagcctctggcagagtggaccccgagccgcccccaggtagccaggagc

SEQ ID NO: 577222 - DNA, 120 bp, Artificial Sequence
  ENSG00000171522_1 (sequence is synthesized)
ggcctcagcggcagccgcaaactccagtagccgcccgtgctgcccgtggctggggcggagggcagccagagctggggaccaaggctccgcgccacctgcgcgcacagcctcacacctgaa

SEQ ID NO: 577223 - DNA, 120 bp, Artificial Sequence
  ENSG00000171522_2 (sequence is synthesized)
cgctgtcctcccgcagacgagaccggcgggcactgcaaagctgggactcgtctttgaaggaaaaaaaatagcgagtaagaaatccagcaccattcttcactgacccatcccgctgcacct

SEQ ID NO: 577224 - DNA, 120 bp, Artificial Sequence
  ENSG00000171522_3 (sequence is synthesized)
cttgtttcccaagtttttgaaagctggcaactctgacctcggtgtccaaaaatcgacagccactgagaccggctttgagaagccgaagatttggcagtttccagactgagcaggacaagg

SEQ ID NO: 577225 - DNA, 120 bp, Artificial Sequence
  ENSG00000171522_4 (sequence is synthesized)
tgaaagcaggttggaggcgggtccaggacatctgagggctgaccctgggggctcgtgaggctgccaccgctgctgccgctacagacccagccttgcactccaaggctgcgcaccgccagc

SEQ ID NO: 577226 - DNA, 120 bp, Artificial Sequence
  ENSG00000171522_5 (sequence is synthesized)
cactatcatgtccactcccggggtcaattcgtccgcctccttgagccccgaccggctgaacagcccagtgaccatcccggcggtgatgttcatcttcggggtggtgggcaacctggtggc

SEQ ID NO: 577227 - DNA, 120 bp, Artificial Sequence
  ENSG00000171522_6 (sequence is synthesized)
catcgtggtgctgtgcaagtcgcgcaaggagcagaaggagacgaccttctacacgctggtatgtgggctggctgtcaccgacctgttgggcactttgttggtgagcccggtgaccatcgc

SEQ ID NO: 577228 - DNA, 120 bp, Artificial Sequence
  ENSG00000171522_7 (sequence is synthesized)
cacgtacatgaagggccaatggcccgggggccagccgctgtgcgagtacagcaccttcattctgctcttcttcagcctgtccggcctcagcatcatctgcgccatgagtgtcgagcgcta

SEQ ID NO: 577229 - DNA, 120 bp, Artificial Sequence
  ENSG00000171522_8 (sequence is synthesized)
cctggccatcaaccatgcctatttctacagccactacgtggacaagcgattggcgggcctcacgctctttgcagtctatgcgtccaacgtgctcttttgcgcgctgcccaacatgggtct

SEQ ID NO: 577230 - DNA, 120 bp, Artificial Sequence
  ENSG00000171522_9 (sequence is synthesized)
cggtagctcgcggctgcagtacccagacacctggtgcttcatcgactggaccaccaacgtgacggcgcacgccgcctactcctacatgtacgcgggcttcagctccttcctcattctcgc

SEQ ID NO: 577231 - DNA, 120 bp, Artificial Sequence
  ENSG00000171522_10 (sequence is synthesized)
caccgtcctctgcaacgtgcttgtgtgcggcgcgctgctccgcatgcaccgccagttcatgcgccgcacctcgctgggcaccgagcagcaccacgcggccgcggccgcctcggttgcctc

SEQ ID NO: 577232 - DNA, 120 bp, Artificial Sequence
  ENSG00000171522_11 (sequence is synthesized)
ccggggccaccccgctgcctccccagccttgccgcgcctcagcgactttcggcgccgccggagcttccgccgcatcgcgggcgccgagatccagatggtcatcttactcattgccacctc

SEQ ID NO: 577233 - DNA, 120 bp, Artificial Sequence
  ENSG00000171522_12 (sequence is synthesized)
cctggtggtgctcatctgctccatcccgctcgtggtgcgagtattcgtcaaccagttatatcagccaagtttggagcgagaagtcagtaaaaatccagatttgcaggccatccgaattgc

SEQ ID NO: 577234 - DNA, 120 bp, Artificial Sequence
  ENSG00000171522_13 (sequence is synthesized)
ttctgtgaaccccatcctagacccctggatatatatcctcctgagaaagacagtgctcagtaaagcaatagagaagatcaaatgcctcttctgccgcattggcgggtcccgcagggagcg

SEQ ID NO: 577235 - DNA, 120 bp, Artificial Sequence
  ENSG00000171522_14 (sequence is synthesized)
cccgggagctgaaggagatcagcagtacatctcagaccctcctgccagacctctcactgccagacctcagtgaaaatggccttggaggcaggaatttgcttccaggtgtgcctggcatgg

SEQ ID NO: 577236 - DNA, 120 bp, Artificial Sequence
  ENSG00000171522_15 (sequence is synthesized)
gcctggcccaggaagacaccacctcactgaggactttgcgaatatcagagacctcagactcttcacagggtcaggactcagagagtgtcttactggtggatgaggctggtgggagcggca

SEQ ID NO: 577237 - DNA, 120 bp, Artificial Sequence
  ENSG00000171522_16 (sequence is synthesized)
gggctgggcctgcccctaaggggagctccctgcaagtcacatttcccagtgaaacactgaacttatcagaaaaatgtatataataggcaaggaaagaaatacagtactgtttctggaccc

SEQ ID NO: 577238 - DNA, 120 bp, Artificial Sequence
  ENSG00000171522_17 (sequence is synthesized)
ttataaaatcctgtgcaatagacacatacatgtcacatttagctgtgctcagaagggctatcatcatcctacaactcacattagagaacatcctggcttttgagcacttttcaaacaatc

SEQ ID NO: 577239 - DNA, 120 bp, Artificial Sequence
  ENSG00000171522_18 (sequence is synthesized)
aagttgactcacgtgggtcctgaggcctgcagcacgtcggatgctaccccactatgacagaggattgtggtcacaacttgatggctgcgaagacctaccctccgtttttctactagatag

SEQ ID NO: 577240 - DNA, 120 bp, Artificial Sequence
  ENSG00000171522_19 (sequence is synthesized)
gaggatggtagaagtttggctgctgtcataacatccagagctttgtcgtatttggcacacagcagaggcccagatattagaaaggctctattccaataaactatgaggactgccttatgg

SEQ ID NO: 577241 - DNA, 120 bp, Artificial Sequence
  ENSG00000171522_20 (sequence is synthesized)
atgatttaagtgtctcactaaagcatgaaatgtgaatttttattgttgtacatacgatttaaggtatttaaagtattttcttctctgtgagaaggtttattgttaatacaaggtataata

SEQ ID NO: 577242 - DNA, 120 bp, Artificial Sequence
  ENSG00000171522_21 (sequence is synthesized)
aaattatcgcaacccctctccttccagtataaccagctgaagttgcagatgttagatatttttcataaacaagttcgagtcaaagttgaaaattcatagtaagattgatatctataaaat

SEQ ID NO: 577243 - DNA, 120 bp, Artificial Sequence
  ENSG00000171522_22 (sequence is synthesized)
agatataaatttttaagagaaagaatttagtattatcaaagggataaagaaaaaaatactatttaagatgtgaaaattacagtccaaaatactgttctttccaggctatgtataaaatac

SEQ ID NO: 577244 - DNA, 120 bp, Artificial Sequence
  ENSG00000171522_23 (sequence is synthesized)
atagtgaaaattgtttagtgatattacatttatttatccagaaaactgtgatttcaggagaacctaacatgctggtgaatattttcaactttttccctcactaattggtacttttaaaaa

SEQ ID NO: 577245 - DNA, 120 bp, Artificial Sequence
  ENSG00000171522_24 (sequence is synthesized)
cataacataaattttttgaagtctttaataaataacccataattgaagtgtataatataaaaaattttaaaaatctaagcagcttattgtttctctgaaagtgtgtgtagttttactttc

SEQ ID NO: 577246 - DNA, 120 bp, Artificial Sequence
  ENSG00000171522_25 (sequence is synthesized)
ctaaggaattaccaagaatatcctttaaaatttaaaaggatggcaagttgcatcagaaagctttattttgagatgtaaaaagattcccaaacgtggttacattagccattcatgtatgtc

SEQ ID NO: 577247 - DNA, 120 bp, Artificial Sequence
  ENSG00000171522_26 (sequence is synthesized)
agaagtgcagaattggggcacttaatggtcaccttgtaacagttttgtgtaactcccagtgatgctgtacacatatttgaagggtctttctcaaagaaatattaagcatgttttgttgct

SEQ ID NO: 577248 - DNA, 120 bp, Artificial Sequence
  ENSG00000171522_27 (sequence is synthesized)
cagtgtttttgtgaattgcttggttgtaattaaattctgagcctgatattgatatggttttaagaagcagttgtaccaagtgaaattattttggagattataataaatatatacattcaa

SEQ ID NO: 577249 - DNA, 120 bp, Artificial Sequence
  ENSG00000171530_0 (sequence is synthesized)
gcatgcgcgccggcgaccacgcctaaatagccgcagcctctgcgcgtcgccctccacggttaccccggctctccgcccctccttctcgcggcgctcgagggaccatggccgatcctcgcg

SEQ ID NO: 577250 - DNA, 120 bp, Artificial Sequence
  ENSG00000171530_1 (sequence is synthesized)
tgagacagatcaagatcaagaccggcgtggtgaagcggttggtcaaagaaaaagtgatgtatgaaaaagaggcaaaacaacaagaagaaaagattgaaaaaatgagagctgaagacggtg

SEQ ID NO: 577251 - DNA, 120 bp, Artificial Sequence
  ENSG00000171530_2 (sequence is synthesized)
gcatatttggatcttcaacggatactagaaaatgaaaaagacttggaagaagctgaggaatataaagaagcacgtttagtactggattcagtgaagttagaagcctgaaacttttctcgt

SEQ ID NO: 577252 - DNA, 120 bp, Artificial Sequence
  ENSG00000171530_3 (sequence is synthesized)
atggggtggtttttgcattaaatcctggggtccattttacaatccattatttttgaccactgctatgtgttcaagtagtatgagaatgtgattgtttttatctggttacatatatatttc

SEQ ID NO: 577253 - DNA, 120 bp, Artificial Sequence
  ENSG00000171530_4 (sequence is synthesized)
ttggaagccgcatatttggatcttcaacggatactagtaagcaaagacttctgtgtcatgtttaaattttttttttcaatccaatacatggaaagccaaaagtttaaatatttaacactg

SEQ ID NO: 577254 - DNA, 120 bp, Artificial Sequence
  ENSG00000171530_5 (sequence is synthesized)
agaactagttggcagtatttcttattcacttgccctttataccgctatattttaaaataattaatggagtttaaattgtgttttgaattatgcctccagtaaaagtactgttttctagca

SEQ ID NO: 577255 - DNA, 120 bp, Artificial Sequence
  ENSG00000171530_6 (sequence is synthesized)
tgtttgttcagtttattaaaatttagctagttaaatttatttaagttatgatagtaccagtattgtccagcaatgtcttgattatttggttttcatacataaagatcttttgagacattg

SEQ ID NO: 577256 - DNA, 120 bp, Artificial Sequence
  ENSG00000171530_7 (sequence is synthesized)
aggatgagttgactgattaaaattttaaaagatctaatgtttcaaaagaatttgggatcttattaaaaggatcttgaattctttcacattcaaacctagatcagtttgagagggggaaaa

SEQ ID NO: 577257 - DNA, 120 bp, Artificial Sequence
  ENSG00000171530_8 (sequence is synthesized)
aacctggtaatctatgtagtcccctcatactaacttggagctgaataacacttatacttgctggtataaatgccttgtgatacagaaggtagataaagcaggaaataataactgttaaaa

SEQ ID NO: 577258 - DNA, 120 bp, Artificial Sequence
  ENSG00000171530_9 (sequence is synthesized)
tactatctaagacaggaagcatcatttgtatttcttgacagtttaaatgcttttttctctcatgaatctagtagctgagaaagtaatagaaattgcttggaaaaaaataatgttggccgc

SEQ ID NO: 577259 - DNA, 120 bp, Artificial Sequence
  ENSG00000171530_10 (sequence is synthesized)
ataatgtatttggatgatatatttgtatgtgaagatgtattcaacaatatctctgcccttgaagagcttgtatttactaacagagaacaaagatgtgtttaaggtataacatggaggttt

SEQ ID NO: 577260 - DNA, 120 bp, Artificial Sequence
  ENSG00000171530_11 (sequence is synthesized)
aagaaattcttacgtatagtttgagctaagcaaattctcagtcgttttgctttcagttttcatattaaatacacacatactttatttcctctactgtttgtatatctccatcttttattg

SEQ ID NO: 577261 - DNA, 120 bp, Artificial Sequence
  ENSG00000171530_12 (sequence is synthesized)
acctgacataaattgctaaccatagcttcatttaaaaatcaaacaaaatttcctgtgtactttagataatattatttcatttgtctgttatcattacaatatattagtaaaagttgcctg

SEQ ID NO: 577262 - DNA, 120 bp, Artificial Sequence
  ENSG00000171530_13 (sequence is synthesized)
tatatcagtattatggaaaaactcaatctttaaatatcagaaaatgaaagatgtattttgtttcctttagtgtagggtatgtaatacccattagcaagcaggcaattcatttgtttaatt

SEQ ID NO: 577263 - DNA, 120 bp, Artificial Sequence
  ENSG00000171530_14 (sequence is synthesized)
caaagattatatttaactctgttgtgacatcagaagccttctttgtcattgtgaatagtcagtggattattttggcctgaatgctgtcatatatgtaacatgttagtaaatcttcctttt

SEQ ID NO: 577264 - DNA, 120 bp, Artificial Sequence
  ENSG00000171530_15 (sequence is synthesized)
tacttttctcttttgtatgatgatgatgggtcaacaaaatgagaataaactttttctgaggtttttatttaattaatgctggtagctttagaagactgttattcacttattttatgagaa

SEQ ID NO: 577265 - DNA, 120 bp, Artificial Sequence
  ENSG00000171530_16 (sequence is synthesized)
tatatacagtgaaacaaaaccaccagttatttcttcctttccttgtaaagaaggaacagaatgtgggaaacctgtggaattacaatatatttagatgaggcttgggattttttactttta

SEQ ID NO: 577266 - DNA, 120 bp, Artificial Sequence
  ENSG00000171530_17 (sequence is synthesized)
tttagttattaacattaatggtttgtaatatttgagtaaataacaaagtactgaaacttgaaaaggataaacttaatttttattgtatttcattttaggaaaatgaaaaagacttggaag

SEQ ID NO: 577267 - DNA, 120 bp, Artificial Sequence
  ENSG00000171530_18 (sequence is synthesized)
aggtgcgcaagtttatttcagcctgcaaacgtgcttctgtggccctcagcgggacggagaaccaggcggttgcggcaaaaagagcttgggatttcaaggcaggattttctccaggcctag

SEQ ID NO: 577268 - DNA, 120 bp, Artificial Sequence
  ENSG00000171530_19 (sequence is synthesized)
tagggattatgttgacaaggacttcctggtttcatggcttcttttcttggttttcgtcttcaatttgctggagtacattaagtaaatttctcaggttggtcaaagaaaaagtgatgtatg

SEQ ID NO: 577269 - DNA, 120 bp, Artificial Sequence
  ENSG00000171530_20 (sequence is synthesized)
tgggagacagagcgagactgtctcaaagaaaaaaaagaatttcatgctttgatagattgcacttacgttaggcaggtataggacttaagagcatgaggatcatgcttatatttatgacta

SEQ ID NO: 577270 - DNA, 120 bp, Artificial Sequence
  ENSG00000171530_21 (sequence is synthesized)
aactatttttcttctgttccttcctccccccatctagtatatctactttggtattttaaatataatatgttttatatttacacagtttctttcttatggtctggagagaaagctaatttt

SEQ ID NO: 577271 - DNA, 120 bp, Artificial Sequence
  ENSG00000171530_22 (sequence is synthesized)
acagatcaagatcaagaccggcgtggtgaagcggcagagatcctacaagaatccaggatgatgatcccagattgccagcgcaggttggaagccgcatatttggatcttcaacggatacta

SEQ ID NO: 577272 - DNA, 120 bp, Artificial Sequence
  ENSG00000171532_0 (sequence is synthesized)
agagatgccacactcgctccgcggttcgcatggcgctctgaagacgccggcgcccgccgccttgaggagccgctgcccccgctccctgaagatgggggaacaatgaaataagcgagaaga

SEQ ID NO: 577273 - DNA, 120 bp, Artificial Sequence
  ENSG00000171532_1 (sequence is synthesized)
cccctccccccctcccctcccctctccccttgactcctctccgaggcaccatgctgacccgcctgttcagcgagcccggccttctctcggacgtgcccaagttcgccagctggggcgacg

SEQ ID NO: 577274 - DNA, 120 bp, Artificial Sequence
  ENSG00000171532_2 (sequence is synthesized)
tctcggacgtgcccaagttcgccagctggggcgacggcgaagacgacgagccgaggagcgacaagggcgacgcgccgccaccgccaccgcctgcgcccgggccaggggctccggggccag

SEQ ID NO: 577275 - DNA, 120 bp, Artificial Sequence
  ENSG00000171532_3 (sequence is synthesized)
ccagcccgggcggccaagccagtccctctccgtggagaagaggggacggaggccacgttggccgaggtcaaggaggaaggcgagctggggggagaggaggaggaggaagaggaggaggaa

SEQ ID NO: 577276 - DNA, 120 bp, Artificial Sequence
  ENSG00000171532_4 (sequence is synthesized)
gaggcggagggcgagcggcccaagaagcgcgggcccaagaagcgcaagatgaccaaggcgcgcttggagcgctccaagcttcggcggcagaaggcgaacgcgcgggagcgcaaccgcatg

SEQ ID NO: 577277 - DNA, 120 bp, Artificial Sequence
  ENSG00000171532_5 (sequence is synthesized)
cacgacctgaacgcagccctggacaacctgcgcaaggtggtgccctgctactccaagacgcagaagctgtccaagatcgagacgctgcgcctagccaagaactatatctgggcgctctcg

SEQ ID NO: 577278 - DNA, 120 bp, Artificial Sequence
  ENSG00000171532_6 (sequence is synthesized)
gagatcctgcgctccggcaagcggccagacctagtgtcctacgtgcagactctgtgcaagggtctgtcgcagcccaccaccaatctggtggccggctgtctgcagctcaactctcgcaac

SEQ ID NO: 577279 - DNA, 120 bp, Artificial Sequence
  ENSG00000171532_7 (sequence is synthesized)
ttcctcacggagcaaggcgccgacggtgccggccgcttccacggctcgggcggcccgttcgccatgcacccctacccgtacccgtgctcgcgcctggcgggcgcacagtgccaggcggcc

SEQ ID NO: 577280 - DNA, 120 bp, Artificial Sequence
  ENSG00000171532_8 (sequence is synthesized)
ggcggcctgggcggcggcgcggcgcacgccctgcggacccacggctactgcgccgcctacgagacgctgtatgcggcggcaggcggtggcggcgcgagcccggactacaacagctccgag

SEQ ID NO: 577281 - DNA, 120 bp, Artificial Sequence
  ENSG00000171532_9 (sequence is synthesized)
tacgagggcccgctcagccccccgctctgtctcaatggcaacttctcactcaagcaggactcctcgcccgaccacgagaaaagctaccactactctatgcactactcggcgctgcccggt

SEQ ID NO: 577282 - DNA, 120 bp, Artificial Sequence
  ENSG00000171532_10 (sequence is synthesized)
tcgcggcccacgggccacgggctagtcttcggctcgtcggctgtgcgcgggggcgtccactcggagaatctcttgtcttacgatatgcaccttcaccacgaccggggccccatgtacgag

SEQ ID NO: 577283 - DNA, 120 bp, Artificial Sequence
  ENSG00000171532_11 (sequence is synthesized)
gagctcaatgcgttttttcataactgagacttcgcgccggctcccttctttttcttttgcctttgcccgcccccctgtccccagcccccagagcgcagggacacccccatcctaccccgg

SEQ ID NO: 577284 - DNA, 120 bp, Artificial Sequence
  ENSG00000171532_12 (sequence is synthesized)
tgccgctctcctggggcagcgcagtcctgttacctgtgggtggcctgtcccaggggcctcgcttcccccaggggactcgccttctctctccccaaggggttccctcctcctctctcccaa

SEQ ID NO: 577285 - DNA, 120 bp, Artificial Sequence
  ENSG00000171532_13 (sequence is synthesized)
ggagtgcttctccagggacctctctccgggggctccctggaggcacccctcccccattcccaatatcttcgctgaggtttcctcctccccctcctccctgcaggcccaaggcgttggtaa

SEQ ID NO: 577286 - DNA, 120 bp, Artificial Sequence
  ENSG00000171532_14 (sequence is synthesized)
gggggcagctgagcaatggaacgcgtttccccctctcattattattttaaaaacagacacccagctgccgaggcaaaaaggagccaggcgctccctctttcttgaagagggtagaagtta

SEQ ID NO: 577287 - DNA, 120 bp, Artificial Sequence
  ENSG00000171532_15 (sequence is synthesized)
gggcgccggagcccgggcctggaacgccctcacccccaacctccagtctccgcgttttgcgattttaattttggcgggaggggaagtggattgagaggaaagagagaggccaagacaatt

SEQ ID NO: 577288 - DNA, 76 bp, Artificial Sequence
  ENSG00000171532_16 (sequence is synthesized)
gggaagtggattgagaggaaagagagaggccaagacaatttgtaactagaatccgtttttcccttttccttttttt

SEQ ID NO: 577289 - DNA, 90 bp, Artificial Sequence
  ENSG00000171532_17 (sequence is synthesized)
aaaaaaaaaaaagctaagaggcgacggaagccgaacgcagagtccggatcggagagaaaacgcagtaaggacttttagaagcaatcaaac

SEQ ID NO: 577290 - DNA, 120 bp, Artificial Sequence
  ENSG00000171532_18 (sequence is synthesized)
aatatctatgcaaggaggctccactgagcctcgcggcccggcccggccccgggatgccccgcccggcctgcgggccgccccgcccgagcgcggatctgtgcactttggtgaagtgggggc

SEQ ID NO: 577291 - DNA, 120 bp, Artificial Sequence
  ENSG00000171532_19 (sequence is synthesized)
gccgccccctccccctccccaggttcttacaatcagtgactcggagatttggggccccagtgccactgccctcccccgccccgtccccgttgtgcgtcatgctgttttttaaaaacctgt

SEQ ID NO: 577292 - DNA, 120 bp, Artificial Sequence
  ENSG00000171532_20 (sequence is synthesized)
ttccaaatttgtatggaatggcaaactgttggggggtcggtttggggagggagggtttgcatgaaagacacacgcacaccacaccgcacgcacaagcaggcccggcgccggcgtccgggg

SEQ ID NO: 577293 - DNA, 120 bp, Artificial Sequence
  ENSG00000171532_21 (sequence is synthesized)
ggcagaaggaggtgagctcgccggctcctcctccccgcggccattctgtcccctcctggggtgaggggtggggatggagacctgggggcagccccacccctgcccggactgtgcctcggt

SEQ ID NO: 577294 - DNA, 120 bp, Artificial Sequence
  ENSG00000171532_22 (sequence is synthesized)
gggtgccacctggcgatttccggtgtctggagagagtattttttggtccaaggagtcctcttggctttagctggtgggtgggcggggagaggtctgagggctcctactggaggttccccc

SEQ ID NO: 577295 - DNA, 120 bp, Artificial Sequence
  ENSG00000171532_23 (sequence is synthesized)
aaaaaggggcaaaaggagaccctctgcccaccggaggcaggggatcaggcatccaaatacacgatgcaaaaatgcaatcccacaggcgacacacccacacactcacccacacacacgcaa

SEQ ID NO: 577296 - DNA, 120 bp, Artificial Sequence
  ENSG00000171532_24 (sequence is synthesized)
ttttaccttcctcttgtagcgaagatgaaactcccgtcggacacccgaagtgcattgcgtgtttctgttcagtttaatgacgattaataaatatttatgtaaatgagatgcaaagccgga

SEQ ID NO: 577297 - DNA, 120 bp, Artificial Sequence
  ENSG00000171532_25 (sequence is synthesized)
gaattctaggcccagttctgtgtttcccctgtgtgttcctaggcaggtcagtttccctccatgggcctctgtaagatgaggagttggagaggtacattctcaggctactttcaactccca

SEQ ID NO: 577298 - DNA, 120 bp, Artificial Sequence
  ENSG00000171532_26 (sequence is synthesized)
gccaagtgactcaagagtcccaggcagcaccagcacccctatctccaaggcctcctgatgtgtgtctctatttagaacttaatccaacctacccaacatcagatcagtgtcttaccagcc

SEQ ID NO: 577299 - DNA, 120 bp, Artificial Sequence
  ENSG00000171532_27 (sequence is synthesized)
caaggtccctggggagcctcctagagggagagagccctgcccacccagattgagggtaaaggcctccccgtgctcatttttgtaccaccacagtgcttggcacatggtagacatcaaaat

SEQ ID NO: 577300 - DNA, 120 bp, Artificial Sequence
  ENSG00000171532_28 (sequence is synthesized)
gtgtgtgctgaaagtataattgaagttgtgtatatatgtcagctagagtgtctggaggggcagaaatgtgggtctaaaacatacaaatgctccaaatggggtgtgggcaagggtctgtct

SEQ ID NO: 577301 - DNA, 120 bp, Artificial Sequence
  ENSG00000171532_29 (sequence is synthesized)
acaccaggctgtgattacctgctcacatacatgtgtctatctgagtaggggtatgttatctatttttctacaccacagggtgaggaacaggtatatgtgtgcatgtgtatgcatccgtgt

SEQ ID NO: 577302 - DNA, 120 bp, Artificial Sequence
  ENSG00000171532_30 (sequence is synthesized)
gtgtgtgtatgtgtgtgtgcatgagtgtgtgtgtgtgtgtccaaagccacctcttcaacctgtgccatttgtatctgtgtctggcccaatgagagtgttgaaaggtgagccacaagataa

SEQ ID NO: 577303 - DNA, 120 bp, Artificial Sequence
  ENSG00000171532_31 (sequence is synthesized)
aacagcaacttcctacctcccttatcaagacagctgtctgacctacctccccttggccactcttgggattactggggttggcttcagtattttcagatttttcagaaggggaggagaatg

SEQ ID NO: 577304 - DNA, 120 bp, Artificial Sequence
  ENSG00000171532_32 (sequence is synthesized)
cttgagtctcatccaggaacttaggcagttctcagcactgcctgctcctcctccctcaaataaccaagtctgaagaccaggagagaaagccgctggtggactggtcacctgtctggcagt

SEQ ID NO: 577305 - DNA, 120 bp, Artificial Sequence
  ENSG00000171532_33 (sequence is synthesized)
gggaggaggagagtgagaggtttctaggttaggaatccagacttagaccctcccctccacccccagatgggtggtgcacaggctcatctcgcggcccctccccactccaccctaacatgg

SEQ ID NO: 577306 - DNA, 120 bp, Artificial Sequence
  ENSG00000171532_34 (sequence is synthesized)
atacgcccccaacaaccaaggaaagatctcccatcggctgactccacagatacacacatgtccccacagacacacacacgcccatgcagaggcacagacatccaggcacatctttccctt

SEQ ID NO: 577307 - DNA, 120 bp, Artificial Sequence
  ENSG00000171532_35 (sequence is synthesized)
tctctgtctttcccttggtttgaatttcgtttagccacatatgttgtgtgtgcgtgagggtgggtgggggaggggcagacagggatgagggatggcatggtgccaacatctacctatggg

SEQ ID NO: 577308 - DNA, 120 bp, Artificial Sequence
  ENSG00000171532_36 (sequence is synthesized)
gctcgggccagggacgccccttacagccatcctgggagggggtctcagctgtccctttgtggccaaggggaccctcctggggagtgggggcaagcacagaggtcctttctccccaacccg

SEQ ID NO: 577309 - DNA, 120 bp, Artificial Sequence
  ENSG00000171532_37 (sequence is synthesized)
gggtctggtccctgacccaccttgggggcctgcaggggaggaaatggacagagcgggaccctgagggagcatagaattggccaccacgagcccccagtgtccagccttgccaccccattg

SEQ ID NO: 577310 - DNA, 120 bp, Artificial Sequence
  ENSG00000171532_38 (sequence is synthesized)
ttcccgtgagggggtctctatatacagggggcaactcctcccaccttcctctcaatccctgctttccctgcgttgggcggggaggggagggcggcagaaatatttatttatttcctttat

SEQ ID NO: 577311 - DNA, 120 bp, Artificial Sequence
  ENSG00000171532_39 (sequence is synthesized)
ttatttaatttttttttttttttttggagtagagagtgacagatggcggcgggtcccgggggagccggctctcccccagtgcagacgcatgccaatcaccgtctctcatgtgatagctgc

SEQ ID NO: 577312 - DNA, 120 bp, Artificial Sequence
  ENSG00000171532_40 (sequence is synthesized)
cctctccgaggtaagttgtccgaaagggagcgagatctgacccgccggttgggaggaggggcggcagcttcggccgacaggagggtcctcaaatacctccttcctgggatgatgcccccc

SEQ ID NO: 577313 - DNA, 120 bp, Artificial Sequence
  ENSG00000171532_41 (sequence is synthesized)
tcattgggtgggcatcggaggggccccaggttctctctcccttaggggctgcagcccagggggctgcagaggaggtgtctctgcctgcgatgggctcggtggggggggaaggcaggatca

SEQ ID NO: 577314 - DNA, 120 bp, Artificial Sequence
  ENSG00000171532_42 (sequence is synthesized)
cggagggggatatgcgaagaggccgagacggaggacccctccatggttgtcccaaaaagcctgccacctttccccaccaccgaaaaaagggaagcaaacaaacaaatttggatttttccc

SEQ ID NO: 577315 - DNA, 120 bp, Artificial Sequence
  ENSG00000171532_43 (sequence is synthesized)
ccatcaatcccaaaatacaacgagatctgaagagccttgtgggagggagtcagcttgaagggggaagggggtccctgaccgcagaggggacggactgggctcgcttctctcagtctcctc

SEQ ID NO: 577316 - DNA, 120 bp, Artificial Sequence
  ENSG00000171532_44 (sequence is synthesized)
cccacgccccgctgcttcagtcctcgccgcccagagccggctccgggagctggggacgcatcggctagaggagacgatcctcccgcctctggaattgggggtgcgggggtgggggccgag

SEQ ID NO: 577317 - DNA, 120 bp, Artificial Sequence
  ENSG00000171532_45 (sequence is synthesized)
caaggggcggcgcgcagccaagttgcaaattggattagggagcgtgggggtgagagccacgggaggggtgagggagctgggccggggggcccgggccgcgagagcgcggagcggggcagc

SEQ ID NO: 577318 - DNA, 120 bp, Artificial Sequence
  ENSG00000171532_46 (sequence is synthesized)
tgtccccaccggcggccgaccagcctctctccaccgccaggagagaacgggctttcagggcgagcgcgccgcctcccctggcaaagatatctggtccctaaaacccccacccggtccctg

SEQ ID NO: 577319 - DNA, 120 bp, Artificial Sequence
  ENSG00000171532_47 (sequence is synthesized)
ccctgaccctgagaagaagcaggcgcggggagcagccccccattcaagcgaggggcggagccggggcccagcgccggggagagggcctgggccgagatcccaggccggcagccgggtagg

SEQ ID NO: 577320 - DNA, 120 bp, Artificial Sequence
  ENSG00000171532_48 (sequence is synthesized)
gctgggccggctctgggcggggcaggcggcggaggtgggcatccagggtagcctaggcaggagcccgcacgagactcgggggtggaggagggttgtgggggggcgtcggtaccccagcgc

SEQ ID NO: 577321 - DNA, 120 bp, Artificial Sequence
  ENSG00000171532_49 (sequence is synthesized)
cctggacattcttgggtagtattctctccctaaccaccccccatacacccactgggctatactagctacccctcccagacccaacccaggctcgcaccttcccagcactaaagcactgat

SEQ ID NO: 577322 - DNA, 120 bp, Artificial Sequence
  ENSG00000171533_0 (sequence is synthesized)
agcactctttcagtcagcatcgttcctggatttttttctcactgctgagcagcataaaagggtggggccgcttccctgcagcagaggcagaggcggcggcggcagcggctgcagcatcat

SEQ ID NO: 577323 - DNA, 120 bp, Artificial Sequence
  ENSG00000171533_1 (sequence is synthesized)
tcgcgggcagcggcggagaccgagagctgcagaaaagggtggggtcgcttcccaggagaagaggcggtggcggcggcggctgcggcatcctcgcgggcagcggcggaggcagcaatgctc

SEQ ID NO: 577324 - DNA, 120 bp, Artificial Sequence
  ENSG00000171533_2 (sequence is synthesized)
ggtctccgctggaggtgatggcctcccagccctgctaggtggccggctgcactaggacgccggcaggaaggagactcgagcccggtccgcggaccctgcggccacaccgcccggcccctc

SEQ ID NO: 577325 - DNA, 120 bp, Artificial Sequence
  ENSG00000171533_3 (sequence is synthesized)
ctctgcgccatggcttaagcctgtagccacctctcctcacgtcgcctcgctcgaccgaggtctgtgcgccgccgcagccgcagggaggggcgcgtcccagacaccctcgccggggactcg

SEQ ID NO: 577326 - DNA, 120 bp, Artificial Sequence
  ENSG00000171533_4 (sequence is synthesized)
ggaacgccgtgcgtctcacccttcggcgctcgcagcagactgcgctcccaaaggcgtttgcgaccggtaatcgagggactctacagactctcctaggacagctctccccgggtgctcgct

SEQ ID NO: 577327 - DNA, 120 bp, Artificial Sequence
  ENSG00000171533_5 (sequence is synthesized)
gagggaggagggcgaactagctccggctgatcgggggtagaaaacggtgggaaccacattggccggtcaggatcggaggctgaaggaagattatagagacttgctttagaaccacaagaa

SEQ ID NO: 577328 - DNA, 120 bp, Artificial Sequence
  ENSG00000171533_6 (sequence is synthesized)
gaaagaggaggccggcttttcagctagcatcatggcgtggccgtgcatcacgagggcctgctgcatcgcccgcttctggaaccagttggacaaagcggacatcgctgtgccgctggtttt

SEQ ID NO: 577329 - DNA, 120 bp, Artificial Sequence
  ENSG00000171533_7 (sequence is synthesized)
ttttcaccaagtactcggaggccaccgagcacccgggcgccccgccgcagccaccgccgccgcagcagcaggcgcagccggcgctcgcgcccccctcggcgcgcgcggttgccatagaga

SEQ ID NO: 577330 - DNA, 120 bp, Artificial Sequence
  ENSG00000171533_8 (sequence is synthesized)
gcgcgcggttgccatagagacgcagccagcccagggcgagttggatgcagttgcccgggcaacggggccagcgcctgggcctaccggcgagcgcgagccggcggcgggccccggccggag

SEQ ID NO: 577331 - DNA, 120 bp, Artificial Sequence
  ENSG00000171533_9 (sequence is synthesized)
cggctccacctccggccccgcggactcggtgatgcggcaggattaccgagcctggaaggtgcagcggcccgagcccagctgccggccgcgcagcgaataccagccctccgacgctccctt

SEQ ID NO: 577332 - DNA, 120 bp, Artificial Sequence
  ENSG00000171533_10 (sequence is synthesized)
cgagcgcgagacccagtaccagaaggacttccgcgcctggccgctgccgcgccgcggggaccacccgtggatccccaagcccgtgcagatctctgcggcctcccaggcgtcggcgcccat

SEQ ID NO: 577333 - DNA, 120 bp, Artificial Sequence
  ENSG00000171533_11 (sequence is synthesized)
gcagatctctgcggcctcccaggcgtcggcgcccattctcggggcgcccaagcgccggccgcagagccaggagcgctggccagtgcaggccgccgctgaggcccgggagcaggaggcggc

SEQ ID NO: 577334 - DNA, 80 bp, Artificial Sequence
  ENSG00000171533_12 (sequence is synthesized)
gtccggggcggacgagcgcgacacgcgcaggaaggccgggcctgcctggattgtgcgccgcgccgagggcctggggcacg

SEQ ID NO: 577335 - DNA, 120 bp, Artificial Sequence
  ENSG00000171533_13 (sequence is synthesized)
aggaatgaattcagggcatggacggacatcaagcctgtgaaaccaataaaggccaagccccagtacaagcccccagatgataagatggttcatgagaccagctacagtgctcagttcaaa

SEQ ID NO: 577336 - DNA, 120 bp, Artificial Sequence
  ENSG00000171533_14 (sequence is synthesized)
ggagaggccagcaagccaacaacagctgacaataaggtcattgatcgcagaagaatacgcagcctctacagcgaacccttcaaggaacccccaaaggtggaaaaacctagtgttcagagt

SEQ ID NO: 577337 - DNA, 120 bp, Artificial Sequence
  ENSG00000171533_15 (sequence is synthesized)
tccaaaccaaaaaagacctcagcgagccataagcccacgaggaaggccaaagacaagcaggcggtgtcaggccaggctgccaagaaaaagagcgcggagggcccgagtaccaccaagcca

SEQ ID NO: 577338 - DNA, 120 bp, Artificial Sequence
  ENSG00000171533_16 (sequence is synthesized)
gacgacaaggagcaaagcaaagagatgaacaataaactggctgaggcgaaagagagcctggctcaacccgtcagtgattcaagtaagactcaaggtcctgtagccacagagccagacaag

SEQ ID NO: 577339 - DNA, 120 bp, Artificial Sequence
  ENSG00000171533_17 (sequence is synthesized)
gatcaaggttctgtggtcccaggccttctgaaaggtcaaggtcctatggtgcaagagcctctgaagaagcaaggttctgtggtcccagggcctccaaaggatctaggtcccatgatccca

SEQ ID NO: 577340 - DNA, 120 bp, Artificial Sequence
  ENSG00000171533_18 (sequence is synthesized)
ttaccagtcaaggatcaagatcacacggtccctgagcctttaaagaatgaaagccctgttatctcagcaccagtcaaggaccaaggtccctcggtcccagttcctccaaagaatcaaagt

SEQ ID NO: 577341 - DNA, 120 bp, Artificial Sequence
  ENSG00000171533_19 (sequence is synthesized)
cctatggttccagcaaaagttaaggatcaaggctctgtggtaccagagtctctaaaggatcaaggtcctaggattcctgagcctgtgaagaatcaagctcctatggtcccagcacctgtc

SEQ ID NO: 577342 - DNA, 120 bp, Artificial Sequence
  ENSG00000171533_20 (sequence is synthesized)
aaggatgaaggtcccatggtctcagcatctgtcaaggatcaaggtcccatggtctcagcacctgtcaaggatcaaggtcccatagtcccagcacctgtcaagggtgaaggtcccatagtc

SEQ ID NO: 577343 - DNA, 120 bp, Artificial Sequence
  ENSG00000171533_21 (sequence is synthesized)
ccagcacctgtcaaggatgaaggtcccatggtctcagcacctatcaaggatcaagatcccatggtcccagagcatccgaaggatgaaagtgccatggccacagcacccataaagaatcaa

SEQ ID NO: 577344 - DNA, 120 bp, Artificial Sequence
  ENSG00000171533_22 (sequence is synthesized)
ggttccatggtctctgagcctgtaaagaatcaaggtttagtggtctcagggccagtcaaggatcaagatgttgtagtcccagagcatgcaaaggttcacgattctgcagttgtggcacct

SEQ ID NO: 577345 - DNA, 120 bp, Artificial Sequence
  ENSG00000171533_23 (sequence is synthesized)
gtaaagaatcaaggtcctgtggtccccgagtccgtgaagaatcaagaccccattctcccagtactagttaaggatcaaggccccacagtcctacagcctccaaagaatcaaggtcgtata

SEQ ID NO: 577346 - DNA, 120 bp, Artificial Sequence
  ENSG00000171533_24 (sequence is synthesized)
gtccctgaacctctgaagaatcaagttcctatagtcccagtgcctctgaaggatcaagatcctctggtgccagtaccagcaaaggaccaaggtcctgcagtccctgaacctctgaagact

SEQ ID NO: 577347 - DNA, 120 bp, Artificial Sequence
  ENSG00000171533_25 (sequence is synthesized)
caaggtcccagggaccctcagctacctactgtctcacctctaccccgagtcatgatcccaactgccccccatacggaatacattgagagctccccttgacactcaccccttgacacacca

SEQ ID NO: 577348 - DNA, 120 bp, Artificial Sequence
  ENSG00000171533_26 (sequence is synthesized)
atgaaggagctgacagtgagagtgctcccctcccaggggcagtgaagacacatatttaatctgcatgaaacatgtacagtagtcttgctggaatctaataaaaatggtccctctggctca

SEQ ID NO: 577349 - DNA, 120 bp, Artificial Sequence
  ENSG00000171533_27 (sequence is synthesized)
ttttttaaaccaacaaaccaaaaaaggccacaaaattaattagaggcttctcatctgccttggtcctgagtgttccaggagctctttggtttggcttcttttgatggaagaatcctgctt

SEQ ID NO: 577350 - DNA, 120 bp, Artificial Sequence
  ENSG00000171533_28 (sequence is synthesized)
cacagactgagtggcaggcctcctcctgagggcagcccctggagcaccaggaagcgttgccgctggctgtgccctcccctggcactctgactgcatgctgatgagcaaggcaggcaggtc

SEQ ID NO: 577351 - DNA, 120 bp, Artificial Sequence
  ENSG00000171533_29 (sequence is synthesized)
tgagaggcgaaacgaatctcccggcagtgcttggaagtgtctgtggggtctcctcctcccagatccccaagatctgtgtcactggtcgattttgaactttaggtacatgtgttcttttca

SEQ ID NO: 577352 - DNA, 120 bp, Artificial Sequence
  ENSG00000171533_30 (sequence is synthesized)
aaaattcagagaatcgtcatgtgccacagaagctcagcctgggcttcagcaattgacaaaatttgaagaaatattaaacaaaaataacaaaaaaagaaacaaccttggccttaatgtcaa

SEQ ID NO: 577353 - DNA, 120 bp, Artificial Sequence
  ENSG00000171533_31 (sequence is synthesized)
taaaagggagttgtgtctgttaagtggtcttttcatagaatcgtccattagaaatgtgtgcctgtgtttagcttcctatcagtgggctttaaattgtataccgagtcatagatacgccac

SEQ ID NO: 577354 - DNA, 120 bp, Artificial Sequence
  ENSG00000171533_32 (sequence is synthesized)
tgataactaaaactagatcagggctggtgaagaaggttaggtgttttaggtacattccagctgtcataggaagatcacagaaatgaggaggctgttttcctctgattctcctcggccgac

SEQ ID NO: 577355 - DNA, 120 bp, Artificial Sequence
  ENSG00000171533_33 (sequence is synthesized)
aatgctgctggtttcgcagagcgaccggttggagatgtctgaggaagaaagttcaaggtgtagggatagtgtgtttggaatttgactttccatttctgagacccaagggggcgtagatgt

SEQ ID NO: 577356 - DNA, 120 bp, Artificial Sequence
  ENSG00000171533_34 (sequence is synthesized)
agtggcaagtgtggcgatgtttactctcccttcctgaaccgctctggtctgctcctcagagagggcagcggtgccaggcctcaggtcagggagaatgtctgtgacttagctgcagactag

SEQ ID NO: 577357 - DNA, 120 bp, Artificial Sequence
  ENSG00000171533_35 (sequence is synthesized)
gagactgccctgctaactaattagcaagcagctttgacctcattaatatataaaagcagctctcagtatattccgtgtcgtgtgtgtgtgtggccaaagcccccaagggtggcaagtgcc

SEQ ID NO: 577358 - DNA, 120 bp, Artificial Sequence
  ENSG00000171533_36 (sequence is synthesized)
accttcgctgtgctagagttgtgttgtaggaattagtcagggagttgttgtgaaaaaaaaaaccccagtgcttgtgagggaactcaaaatagttaccagaaaaataatatttgccaatat

SEQ ID NO: 577359 - DNA, 120 bp, Artificial Sequence
  ENSG00000171533_37 (sequence is synthesized)
gacgtgtatattgctcagcacactctgtatctcctgtccttaaaatcctcttgtccccggcattctgacacactgggctgccgtccggtgtcaagccccggcgcaggcttgctcttcttt

SEQ ID NO: 577360 - DNA, 120 bp, Artificial Sequence
  ENSG00000171533_38 (sequence is synthesized)
tacaatgaaaggggtgaagagtgagggtctcacagttccttacctcaaagtccctttaggtccttctggtttggaggaagtggagcctccacgaactctctcttactccgaccattcagg

SEQ ID NO: 577361 - DNA, 120 bp, Artificial Sequence
  ENSG00000171533_39 (sequence is synthesized)
cagcaaagtctctgcttacatcattttggttgtcaccttggggctgagtgagaagtcttttgtaaattaattcggcgtgtgctacatgagccataattattaacagaacaggaatatcag

SEQ ID NO: 577362 - DNA, 120 bp, Artificial Sequence
  ENSG00000171533_40 (sequence is synthesized)
aaacgaagttgttgatcaggcccactgcgaccttcctttctatctcagggtttaaaactgtgaggaaggagaagtatgaaggaaggtagaaaatgctggtgggtctccgtgtttatgagt

SEQ ID NO: 577363 - DNA, 120 bp, Artificial Sequence
  ENSG00000171533_41 (sequence is synthesized)
cacagattttgaaagctatcaggaaatgactagagtggatcctggcactgattccaactctttgccagctaatcttaacatttagcagaaagctctagcaacatgatcttaattgtatcc

SEQ ID NO: 577364 - DNA, 120 bp, Artificial Sequence
  ENSG00000171533_42 (sequence is synthesized)
agaggatttgccaatgtatgttcagtctctcaagatttggcattagtcagacatgttgatgctagccacaatttggatttctccatagaataatcatttatttttgcagatcaaataaat

SEQ ID NO: 577365 - DNA, 120 bp, Artificial Sequence
  ENSG00000171533_43 (sequence is synthesized)
cagagtttacaatgcacaggggatcatttatttagcattcccttgctagaagcccgtgtgccaggcactgtgctaggcgtggtgggcagtataaagaaatctgtctccacagccacacaa

SEQ ID NO: 577366 - DNA, 120 bp, Artificial Sequence
  ENSG00000171533_44 (sequence is synthesized)
ccagagggtgcacatgacttgatccctatgaccaagtcaagttggtgttgcccaaatcgcagtttgacataagggtcccacaggcttccccaccccccgcccccactcactgccccaggg

SEQ ID NO: 577367 - DNA, 120 bp, Artificial Sequence
  ENSG00000171533_45 (sequence is synthesized)
accaacttcctaccctcacccaaggctttagaggacctgtagcatgtctttttcaacctgtcagtatccccttctgcttaacacacccactgagaaaaccctgtttgtagttcactttga

SEQ ID NO: 577368 - DNA, 120 bp, Artificial Sequence
  ENSG00000171533_46 (sequence is synthesized)
ctcttgaatgtgtcactttactggcaagagacttcctttgatttctactgtttacaaataaaactcagccagtctcattctatatcccaaacgtactgaatgaaactgattttggttcca

SEQ ID NO: 577369 - DNA, 120 bp, Artificial Sequence
  ENSG00000171533_47 (sequence is synthesized)
caagcagtgtttgggtgttgccttcctgaaggtgaccaagcttccaaagctcgtcccactggcctctgtacatttccctgtggttctccgtccttccctggcgagggagctgggactgaa

SEQ ID NO: 577370 - DNA, 120 bp, Artificial Sequence
  ENSG00000171533_48 (sequence is synthesized)
gctttcccgctgtttccctgcctgcaaaagcagccccaagagctgcgcattggcttccctcagcaatctgtcctgtctgtgctcccattcggtccacatagctttctttgcctctctgag

SEQ ID NO: 577371 - DNA, 120 bp, Artificial Sequence
  ENSG00000171533_49 (sequence is synthesized)
gcagacaggaagtgtctaattacgattttgtggcctgggttttgttgcataccacagattgtctatgtaacatgtagcgcacacctctcttggtgctatttcattcctgctgtaagagaa

SEQ ID NO: 577372 - DNA, 120 bp, Artificial Sequence
  ENSG00000171533_50 (sequence is synthesized)
tgacaaaaatattcatgtatagccaattgattgtgacgtgcttgtggtctgtgcttgctcagaaaaacaaacaaacaaacagtttttccaattataaataaatgctaaagacgaacacca

SEQ ID NO: 577373 - DNA, 120 bp, Artificial Sequence
  ENSG00000171533_51 (sequence is synthesized)
gcaccatgctgcttctcacctccatgcctttacccttgctgtccacctgcctggaatgcccttctcctgcttctccacctggctaactcatccttcaagactctgctcaggggacagctc

SEQ ID NO: 577374 - DNA, 120 bp, Artificial Sequence
  ENSG00000171540_0 (sequence is synthesized)
tactctggttagaaatatattactaatctaaactttgttgttggctggctctgaaaaatcagaacattagaaatggttcgcttcacttgtgcaaagcactttaaattgttcaagtagttt

SEQ ID NO: 577375 - DNA, 120 bp, Artificial Sequence
  ENSG00000171540_1 (sequence is synthesized)
aacatattcaagaggaaaataaagagcatttaactttatttacagccttaagtggagttgggagccgagctgaacttagaaactttgaccaaaagagcgagttaggggcgaggatgcggg

SEQ ID NO: 577376 - DNA, 120 bp, Artificial Sequence
  ENSG00000171540_2 (sequence is synthesized)
cgtgggccaagcggaagagcaggagccgggaagaagcccggtgagaagagtgcagagcgctcgaacccacactccgcgagggtccccaaagcagacagcgggcgctggcggtgccaggga

SEQ ID NO: 577377 - DNA, 120 bp, Artificial Sequence
  ENSG00000171540_3 (sequence is synthesized)
agccgactcctctttgcgctctaggcccactgtggggttggggctcgtatagaccccagggcacagccagggcgcctggaccctaggcgcaggcctactgagccgcggcgaagtccaggc

SEQ ID NO: 577378 - DNA, 120 bp, Artificial Sequence
  ENSG00000171540_4 (sequence is synthesized)
gttgtctgaaggccgcggtgtgccctcgtcgcgccctgggctggcgggccaatatgagcggcaggcccagagagcgcaggtgggggcgaccctcaggtcacgccagggtcatggcccgct

SEQ ID NO: 577379 - DNA, 120 bp, Artificial Sequence
  ENSG00000171540_5 (sequence is synthesized)
ctgacccctgctctgcccctgccctaggaagatgttagctcagaggcacagagctacgccttcgaagcgcgcagcgccggccaaggggaaggaaaggggagcctggagaaaatcgcaggg

SEQ ID NO: 577380 - DNA, 120 bp, Artificial Sequence
  ENSG00000171540_6 (sequence is synthesized)
aagaactagagggagccgggcccagaagctcagggcgaggccgaggcggctgaggctgctttagctcctgctccgggctggagctgccagggctgccgccgccgcctccttcaggcgggc

SEQ ID NO: 577381 - DNA, 120 bp, Artificial Sequence
  ENSG00000171540_7 (sequence is synthesized)
gcaggcgagcgggcgggcggagtgggggactctccgggcgctgacatttgcaggctgccctcctgattggtcccctcgccgagctgctcacgggttcattcaactgttaagcacctcccc

SEQ ID NO: 577382 - DNA, 120 bp, Artificial Sequence
  ENSG00000171540_8 (sequence is synthesized)
gtctctctaaaggacattataatgcaagaagccccctttttaaccacaaaccgaattttctttcatttaggtgatctatatatatctatatcgtatagcttatagcttatatctatttta

SEQ ID NO: 577383 - DNA, 120 bp, Artificial Sequence
  ENSG00000171540_9 (sequence is synthesized)
aataacttaaagccgctaaaatttgggggggaacagctttcgccctggagcggtgcgcgatgctgtctcatgccgacctcctggacgccaggctaggtatgaaagatgccgccgagcttc

SEQ ID NO: 577384 - DNA, 120 bp, Artificial Sequence
  ENSG00000171540_10 (sequence is synthesized)
tgggccaccgggaggcggtgaagtgtaggctgggcgtggggggctccgaccccgggggccatccgggggacctggcgcccaactctgacccagtggagggagccactctgctgcccgggg

SEQ ID NO: 577385 - DNA, 120 bp, Artificial Sequence
  ENSG00000171540_11 (sequence is synthesized)
aggacatcaccacagtgggctctactccggcctcgctggcggtgagcgccaaagacccggacaagcagcccgggccccagggcggcccgaaccccagccaagccggccagcagcagggcc

SEQ ID NO: 577386 - DNA, 120 bp, Artificial Sequence
  ENSG00000171540_12 (sequence is synthesized)
aacagaagcagaagcgccaccggacgcgcttcacccccgcacagctcaacgagttggagaggagcttcgccaagactcactaccccgacatctttatgcgtgaggagctggcactgcgta

SEQ ID NO: 577387 - DNA, 120 bp, Artificial Sequence
  ENSG00000171540_13 (sequence is synthesized)
tcgggctgaccgagtcccgagtgcaggtctggttccagaaccgacgcgccaagtggaagaagcgcaaaaagacgaccaacgtgttccgtgcgcccggcacactgctgcccacgccaggcc

SEQ ID NO: 577388 - DNA, 120 bp, Artificial Sequence
  ENSG00000171540_14 (sequence is synthesized)
tgcctcagttcccgtcggctgccgccgccgctgccgccgccatgggcgacagcctgtgctctttccacgccaacgacacccgctgggcggcggccgccatgcctggcgtgtcacagctgc

SEQ ID NO: 577389 - DNA, 120 bp, Artificial Sequence
  ENSG00000171540_15 (sequence is synthesized)
gtccgccgcccaactccatgggcctgtccaacagcctggcgggttccaacggcgcggggctgcagtcgcacctctaccagcccgccttccccggcatggtgcccgcctccctccccggcc

SEQ ID NO: 577390 - DNA, 120 bp, Artificial Sequence
  ENSG00000171540_16 (sequence is synthesized)
ccagcaacgtctccggttcgccccagctctgcagctccccggacagcagcgacgtgtggcggggcaccagcatcgcctccctccgccgcaaggcgctagagcacacagtctctatgagct

SEQ ID NO: 577391 - DNA, 120 bp, Artificial Sequence
  ENSG00000171540_17 (sequence is synthesized)
tagagcacacagtctctatgagcttcacttaatgcagccgcgccccggcccgctccgcccccagcaccgccccgggggccgccccgaggcccttccggcgcgcacccggaccccggcgcc

SEQ ID NO: 577392 - DNA, 120 bp, Artificial Sequence
  ENSG00000171540_18 (sequence is synthesized)
gccccgtctcgtttcgtcctcgcctctctcctccactcgctcgggctcaccccaagccccagcccgcgaggcctcccctccgcctgatttcgatcgcccgcggtcccccgtctcccggcc

SEQ ID NO: 577393 - DNA, 120 bp, Artificial Sequence
  ENSG00000171540_19 (sequence is synthesized)
gcccctcttcccttcccacccagctgcgccctcggctcggtctccagcgcctcagcccacccttcccgccaccctggcctccctgcttgcgctggccgtgctcgcgccctcctcctggcc

SEQ ID NO: 577394 - DNA, 120 bp, Artificial Sequence
  ENSG00000171540_20 (sequence is synthesized)
ttctgacgggcggcgttcccacccacaccttcgacgcgacgcctacgacccccctcgcccgccgcctcccctccggtcccctctttccccacacttcgcgaccctcctcccgcgcccggc

SEQ ID NO: 577395 - DNA, 120 bp, Artificial Sequence
  ENSG00000171540_21 (sequence is synthesized)
aaaaagtatccttcccgccattttacgtaccagggagtcgactcaggatctgaaatcagacaccaatggactggtttgtgggcagaaacacacacactcgcactctcgctcacgctcaga

SEQ ID NO: 577396 - DNA, 120 bp, Artificial Sequence
  ENSG00000171540_22 (sequence is synthesized)
cgctacacacgcgcgcgcacagacacggtgcacctaggtcacacacggacgtgttcaagggacagcacaatgttagggatttttgtcttaaaggaggacaagcattgctaccaaccgcct

SEQ ID NO: 577397 - DNA, 120 bp, Artificial Sequence
  ENSG00000171540_23 (sequence is synthesized)
catctgagggcccaactgatatgatttgatttatccttgtactctccaagctcctgtctttctttcctctcccaccacgctacccttgcccagtccacccagtcacatccgtgcagccct

SEQ ID NO: 577398 - DNA, 120 bp, Artificial Sequence
  ENSG00000171540_24 (sequence is synthesized)
ctcttggcttgcaagataacgcttttatttttattttatcttattttcattttcttaagcacaactgtgtgagagtgtagaagggaaggcttctcaggaggaacgtgacagtggattggg

SEQ ID NO: 577399 - DNA, 120 bp, Artificial Sequence
  ENSG00000171540_25 (sequence is synthesized)
tggctggagtagactaaagcagtcatgtgacgaggaagaggtgatctgacccattttgataagtctttataaggaagaataaaataaacgtgtaagcaaaattttcttttgtaaaagcaa

SEQ ID NO: 577400 - DNA, 120 bp, Artificial Sequence
  ENSG00000171540_26 (sequence is synthesized)
aagccacatctcttttctggatccttcaggactggggtttgtttgcttccttttctgtttctgtcttctcgctgctctgtgcccttggttgttttgtggtggtcctgtcgtccctcgtgc

SEQ ID NO: 577401 - DNA, 120 bp, Artificial Sequence
  ENSG00000171540_27 (sequence is synthesized)
ccctcggccacctgctggcagccgatgggggcactcggacatctacaaccctgcaactttgtacagagaaacacaatcagctctttctgcatgtgctggtcaaatccaaacccagagaac

SEQ ID NO: 577402 - DNA, 120 bp, Artificial Sequence
  ENSG00000171540_28 (sequence is synthesized)
agaagcgctttctaagaatgaacaaatatgtgaaataggatgttttgtgtagataaagcattcttgttacatactggtcaatttgtgatatgttttaacttaatgtctgtgtttatttat

SEQ ID NO: 577403 - DNA, 120 bp, Artificial Sequence
  ENSG00000171540_29 (sequence is synthesized)
ggaattcggttttcttaataaatgtttgagctaatataaagcatattatttgacttttccggacaagtttatatcaagttaaatgtaaatggataaaataaaatcattttcagtatgtga

SEQ ID NO: 577404 - DNA, 120 bp, Artificial Sequence
  ENSG00000171540_30 (sequence is synthesized)
cccaatggacacgcaaggcccgtctccggccagtatagcgacatcccggaagaagctcctcaaaatcgaagcccggcgttgtcgggctacagggttcgcctcctccgcctgagaaggcaa

SEQ ID NO: 577405 - DNA, 120 bp, Artificial Sequence
  ENSG00000171540_31 (sequence is synthesized)
gcaacaattatacagaaaacaagagaaaagagcaaataaggcgaatgagcgccttttaaaaaagtgctacacccaggtttcacggcgtggctttattaccttaagtatcaccctccctct

SEQ ID NO: 577406 - DNA, 120 bp, Artificial Sequence
  ENSG00000171540_32 (sequence is synthesized)
gcactcaggcgaaatattcctagctttgatgtttgcaaggggtttgaactttcgtagtctaccagtgcgctgggggcagctgacgagattcccaaagccggtgagccccgttttgttttg

SEQ ID NO: 577407 - DNA, 120 bp, Artificial Sequence
  ENSG00000171540_33 (sequence is synthesized)
gagtcctctaaggaagctacggtgggggaggggaaatgaaggctttctgttgtggatatcatgtctgaagaaggggcattcagaacgggaaaggttgacaggcagtagaggaaatcattg

SEQ ID NO: 577408 - DNA, 120 bp, Artificial Sequence
  ENSG00000171540_34 (sequence is synthesized)
ctgaccccttattctcctccaaccactctccaagctgtaaattatatataacctagaaaatcacacctataattattctgaaaattggtgaataaaagtataagcctagtgaatcccaga

SEQ ID NO: 577409 - DNA, 80 bp, Artificial Sequence
  ENSG00000171551_0 (sequence is synthesized)
agaggaggcggcgggcgctgggagacaccggacgcccgctcggctgcgctgcggctcaggcccccgctcgggcccgaccc

SEQ ID NO: 577410 - DNA, 120 bp, Artificial Sequence
  ENSG00000171551_1 (sequence is synthesized)
ggccccagggccatgcggaggcccacgaggaggccggcggccacgcgcatcccgtagcccaggtggcccaggtctgcaccgcggcggcctcggcgccatggagcccccgtattcgctgac

SEQ ID NO: 577411 - DNA, 120 bp, Artificial Sequence
  ENSG00000171551_2 (sequence is synthesized)
ggcgcactacgatgagttccaagaggtcaagtacgtgagccgctgcggcgcggggggcgcgcgcggggcctccctgcccccgggcttcccgttgggcgctgcgcgcagcgccaccggggc

SEQ ID NO: 577412 - DNA, 120 bp, Artificial Sequence
  ENSG00000171551_3 (sequence is synthesized)
ccggtccgggctgccgcgctggaaccggcgcgaggtgtgcctgctgtcggggctggtgttcgccgccggcctctgcgccattctggcggctatgctggccctcaagtacctgggcccggt

SEQ ID NO: 577413 - DNA, 120 bp, Artificial Sequence
  ENSG00000171551_4 (sequence is synthesized)
cgcggccggcggcggcgcctgtcccgagggctgccctgagcgcaaggccttcgcgcgcgccgctcgcttcctggccgccaacctggacgccagcatcgacccatgccaggacttctactc

SEQ ID NO: 577414 - DNA, 120 bp, Artificial Sequence
  ENSG00000171551_5 (sequence is synthesized)
gttcgcctgcggcggttggctgcggcgccacgccatccccgacgacaagctcacctatggcaccatcgcggccatcggcgagcaaaacgaggagcgcctacggcgcctgctggcgcggcc

SEQ ID NO: 577415 - DNA, 120 bp, Artificial Sequence
  ENSG00000171551_6 (sequence is synthesized)
cgggggtgggcctggcggcgcggcccagcgcaaggtgcgcgccttcttccgctcgtgcctcgacatgcgcgagatcgagcgactgggcccgcgacccatgctagaggtcatcgaggactg

SEQ ID NO: 577416 - DNA, 120 bp, Artificial Sequence
  ENSG00000171551_7 (sequence is synthesized)
cgggggctgggacctgggcggcgcggaggagcgtccgggggtcgcggcgcgatgggacctcaaccggctgctgtacaaggcgcagggcgtgtacagcgccgccgcgctcttctcgctcac

SEQ ID NO: 577417 - DNA, 120 bp, Artificial Sequence
  ENSG00000171551_8 (sequence is synthesized)
ggtcagcctggacgacaggaactcctcgcgctacgtcatccgcattgaccaggatgggctcaccctgccagagaggaccctgtacctcgctcaggatgaggacagtgagaagatcctggc

SEQ ID NO: 577418 - DNA, 120 bp, Artificial Sequence
  ENSG00000171551_9 (sequence is synthesized)
agcatacagggtgttcatggagcgagtgctcagcctcctgggtgcagacgctgtggaacagaaggcccaagagatcctgcaagtggagcagcagctggccaacatcactgtgtcagagca

SEQ ID NO: 577419 - DNA, 120 bp, Artificial Sequence
  ENSG00000171551_10 (sequence is synthesized)
tgacgacctacggcgagatgtcagctccatgtacaacaaggtgacgctggggcagctgcagaagatcaccccccacttgcggtggaagtggctgctagaccagatcttccaggaggactt

SEQ ID NO: 577420 - DNA, 120 bp, Artificial Sequence
  ENSG00000171551_11 (sequence is synthesized)
ggtggtggtcctgagtgaacacctgtccccgccattccgtgaggcactgcacgagctggcacaggagatggagggcagcgacaagccacaggagctggcccgggtctgcttgggccaggc

SEQ ID NO: 577421 - DNA, 120 bp, Artificial Sequence
  ENSG00000171551_12 (sequence is synthesized)
caatcgccactttggcatggcgcttggcgccctctttgtacatgagcacttctcagctgccagcaaagccaaggtgcagcagctagtggaagacatcaagtacatcctgggccagcgcct

SEQ ID NO: 577422 - DNA, 120 bp, Artificial Sequence
  ENSG00000171551_13 (sequence is synthesized)
ggaggagctggactggatggacgccgagaccagggctgctgctcgggccaagctccagtacatgatggtgatggtcggctacccggacttcctgctgaaacccgatgctgtggacaagga

SEQ ID NO: 577423 - DNA, 120 bp, Artificial Sequence
  ENSG00000171551_14 (sequence is synthesized)
gtatgagtttgaggtccatgagaagacctacttcaagaacatcttgaacagcatccgcttcagcatccagctctcagttaagaagattcggcaggaggtggacaagtccacgtggctgct

SEQ ID NO: 577424 - DNA, 120 bp, Artificial Sequence
  ENSG00000171551_15 (sequence is synthesized)
ccccccacaggcgctcaatgcctactatctacccaacaagaaccagatggtgttccccgcgggcatcctgcagcccaccctgtacgaccctgacttcccacagtctctcaactacggggg

SEQ ID NO: 577425 - DNA, 120 bp, Artificial Sequence
  ENSG00000171551_16 (sequence is synthesized)
catcggcaccatcattggacatgagctgacccacggctacgacgactgggggggccagtatgaccgctcagggaacctgctgcactggtggacggaggcctcctacagccgcttcctgcg

SEQ ID NO: 577426 - DNA, 120 bp, Artificial Sequence
  ENSG00000171551_17 (sequence is synthesized)
aaaggctgagtgcatcgtccgtctctatgacaacttcactgtctacaaccagcgggtgaacgggaaacacacgcttggggagaacatcgcagatatgggcggcctcaagctggcctacca

SEQ ID NO: 577427 - DNA, 120 bp, Artificial Sequence
  ENSG00000171551_18 (sequence is synthesized)
cgcctatcagaagtgggtgcgggagcacggcccagagcacccacttccccggctcaagtacacacatgaccagctcttcttcattgcctttgcccagaactggtgcatcaagcggcggtc

SEQ ID NO: 577428 - DNA, 120 bp, Artificial Sequence
  ENSG00000171551_19 (sequence is synthesized)
gcagtccatctacctgcaggtgctgactgacaagcatgcccctgagcactacagggtgctgggcagtgtgtcccagtttgaggagtttggccgggctttccactgtcccaaggactcacc

SEQ ID NO: 577429 - DNA, 120 bp, Artificial Sequence
  ENSG00000171551_20 (sequence is synthesized)
catgaaccctgcccacaagtgttccgtgtggtgagcctggctgcccgcctgcacgcccccactgcccccgcacgaatcacctcctgctggctaccggggcaggcatgcacccggtgccag

SEQ ID NO: 577430 - DNA, 120 bp, Artificial Sequence
  ENSG00000171551_21 (sequence is synthesized)
ccccgctctgggcaccacctgccttccagcccctccaggacccggtccccctgctgcccctcacttcaggaggggcctggagcagggtgaggctggactttggggggctgtgagggaaat

SEQ ID NO: 577431 - DNA, 120 bp, Artificial Sequence
  ENSG00000171551_22 (sequence is synthesized)
atactggggtccccagattctgctctaagggggccagaccctctgccaggctggattgtacgggccccaccttcgctgtgttcttgctgcaaagtctggtcaataaatcactgcactgtt

SEQ ID NO: 577432 - DNA, 120 bp, Artificial Sequence
  ENSG00000171552_0 (sequence is synthesized)
ctcgatccgggcgatggaggaggaagcaagcgagggggctggttcctgagcttcgcaattcctgtgtcgccttctgggctcccagcctgccgggtcgcatgatccctccggccggagctg

SEQ ID NO: 577433 - DNA, 120 bp, Artificial Sequence
  ENSG00000171552_1 (sequence is synthesized)
gtttttttgccagccaccgcgaggccggctgagttaccggcatccccgcagccacctcctctcccgacctgtgatacaaaagatcttccgggggctgcacctgcctgcctttgcctaagg

SEQ ID NO: 577434 - DNA, 120 bp, Artificial Sequence
  ENSG00000171552_2 (sequence is synthesized)
cggatttgaatctctttctctcccttcagaatcttatcttggctttggatcttagaagagaatcactaaccagagacgagactcagtgagtgagcaggtgttttggacaatggactggtt

SEQ ID NO: 577435 - DNA, 120 bp, Artificial Sequence
  ENSG00000171552_3 (sequence is synthesized)
gagcccatccctattataaaaatgtctcagagcaaccgggagctggtggttgactttctctcctacaagctttcccagaaaggatacagctggagtcagtttagtgatgtggaagagaac

SEQ ID NO: 577436 - DNA, 120 bp, Artificial Sequence
  ENSG00000171552_4 (sequence is synthesized)
aggactgaggccccagaagggactgaatcggagatggagacccccagtgccatcaatggcaacccatcctggcacctggcagacagccccgcggtgaatggagccactggccacagcagc

SEQ ID NO: 577437 - DNA, 120 bp, Artificial Sequence
  ENSG00000171552_5 (sequence is synthesized)
agtttggatgcccgggaggtgatccccatggcagcagtaaagcaagcgctgagggaggcaggcgacgagtttgaactgcggtaccggcgggcattcagtgacctgacatcccagctccac

SEQ ID NO: 577438 - DNA, 120 bp, Artificial Sequence
  ENSG00000171552_6 (sequence is synthesized)
atcaccccagggacagcatatcagagctttgaacaggtagtgaatgaactcttccgggatggggtaaactggggtcgcattgtggcctttttctccttcggcggggcactgtgcgtggaa

SEQ ID NO: 577439 - DNA, 120 bp, Artificial Sequence
  ENSG00000171552_7 (sequence is synthesized)
agcgtagacaaggagatgcaggtattggtgagtcggatcgcagcttggatggccacttacctgaatgaccacctagagccttggatccaggagaacggcggctgggatacttttgtggaa

SEQ ID NO: 577440 - DNA, 120 bp, Artificial Sequence
  ENSG00000171552_8 (sequence is synthesized)
ctctatgggaacaatgcagcagccgagagccgaaagggccaggaacgcttcaaccgctggttcctgacgggcatgactgtggccggcgtggttctgctgggctcactcttcagtcggaaa

SEQ ID NO: 577441 - DNA, 120 bp, Artificial Sequence
  ENSG00000171552_9 (sequence is synthesized)
tgaccagacactgaccatccactctaccctcccacccccttctctgctccaccacatcctccgtccagccgccattgccaccaggagaaccactacatgcagcccatgcccacctgccca

SEQ ID NO: 577442 - DNA, 120 bp, Artificial Sequence
  ENSG00000171552_10 (sequence is synthesized)
acacttctgtgagacccccacacctcagttcccttggcctcagaattcacaaaatttccacaaaatctgtccaaaggaggctggcaggtatggaagggtttgtggctgggggcaggaggg

SEQ ID NO: 577443 - DNA, 120 bp, Artificial Sequence
  ENSG00000171552_11 (sequence is synthesized)
ccctacctgattggtgcaacccttaccccttagcctccctgaaaatgtttttctgccagggagcttgaaagttttcagaacctcttccccagaaaggagactagattgcctttgttttga

SEQ ID NO: 577444 - DNA, 120 bp, Artificial Sequence
  ENSG00000171552_12 (sequence is synthesized)
tgtttgtggcctcagaattgatcattttccccccactctccccacactaacctgggttccctttccttccatccctaccccctaagagccatttaggggccacttttgactagggattca

SEQ ID NO: 577445 - DNA, 120 bp, Artificial Sequence
  ENSG00000171552_13 (sequence is synthesized)
ggctgcttgggataaagatgcaaggaccaggactccctcctcacctctggactggctagagtcctcactcccagtccaaatgtcctccagaagcctctggctagaggccagccccaccca

SEQ ID NO: 577446 - DNA, 120 bp, Artificial Sequence
  ENSG00000171552_14 (sequence is synthesized)
ggagggagggggctatagctacaggaagcaccccatgccaaagctagggtggcccttgcagttcagcaccaccctagtcccttcccctccctggctcccatgaccatactgagggaccaa

SEQ ID NO: 577447 - DNA, 120 bp, Artificial Sequence
  ENSG00000171552_15 (sequence is synthesized)
ctgggcccaagacagatgccccagagctgtttatggcctcagctgcctcacttcctacaagagcagcctgtggcatctttgccttgggctgctcctcatggtgggttcaggggactcagc

SEQ ID NO: 577448 - DNA, 120 bp, Artificial Sequence
  ENSG00000171552_16 (sequence is synthesized)
cctgaggtgaaagggagctatcaggaacagctatgggagccccagggtcttccctacctcaggcaggaagggcaggaaggagagcctgctgcatggggtggggtagggctgactagaagg

SEQ ID NO: 577449 - DNA, 120 bp, Artificial Sequence
  ENSG00000171552_17 (sequence is synthesized)
gccagtcctgcctggccaggcagatctgtgccccatgcctgtccagcctgggcagccaggctgccaaggccagagtggcctggccaggagctcttcaggcctccctctctcttctgctcc

SEQ ID NO: 577450 - DNA, 120 bp, Artificial Sequence
  ENSG00000171552_18 (sequence is synthesized)
acccttggcctgtctcatccccaggggtcccagccaccccgggctctctgctgtacatatttgagactagtttttattccttgtgaagatgatatactatttttgttaagcgtgtctgta

SEQ ID NO: 577451 - DNA, 120 bp, Artificial Sequence
  ENSG00000171552_19 (sequence is synthesized)
tttatgtgtgaggagctgctggcttgcagtgcgcgtgcacgtggagagctggtgcccggagattggacggcctgatgctccctcccctgccctggtccagggaagctggccgagggtcct

SEQ ID NO: 577452 - DNA, 120 bp, Artificial Sequence
  ENSG00000171552_20 (sequence is synthesized)
ggctcctgaggggcatctgcccctcccccaacccccaccccacacttgttccagctctttgaaatagtctgtgtgaaggtgaaagtgcagttcagtaataaactgtgtttactcagtgaa

SEQ ID NO: 577453 - DNA, 120 bp, Artificial Sequence
  ENSG00000171552_21 (sequence is synthesized)
ggagtggggcgggggggactgcccagggagtgactttccgaggaaggcatttcggagaagacgggggtagaaaaggctggtgggagattcagagtccactggtgctttcgatttgactta

SEQ ID NO: 577454 - DNA, 120 bp, Artificial Sequence
  ENSG00000171552_22 (sequence is synthesized)
agtgaagtatcttggaacctagacccagaccttcgtaagacccacaaagaaaccagttctggtacctggagggggaatggaatttttagggtaaatggcatgcatattaattattttttt

SEQ ID NO: 577455 - DNA, 120 bp, Artificial Sequence
  ENSG00000171552_23 (sequence is synthesized)
ggcttgttcgggagagacggcgcgagcagtcagccaggtaggccggcagccaggtaggccggcccgggtccgcggcgcggaactcggccgcgaagagctcttgcgtctggaagctaccgg

SEQ ID NO: 577456 - DNA, 120 bp, Artificial Sequence
  ENSG00000171552_24 (sequence is synthesized)
ctttgcgtctcgggctcgcgcgcgttgccgcggcaccggaagtgactgagcttgcaagttcccctgtctcttcaggggaaactgaggccggcttgttcgggagagacggcgcgagcagtc

SEQ ID NO: 577457 - DNA, 120 bp, Artificial Sequence
  ENSG00000171552_25 (sequence is synthesized)
gaaaccttgaaccccattgagaagtccctttagggtttcggacgcctccacctcaccctgggctggtgcttaaatagaaaaaagaaaaacaaaaaccaactaaatccataccagccacct

SEQ ID NO: 577458 - DNA, 120 bp, Artificial Sequence
  ENSG00000171557_0 (sequence is synthesized)
aaaaaggaggagcttcaacctgtgtgcaaaatctgggaacctgacagtataggttgggggccaggatgaggaaaaaggaacgggaaagacctgcccacccttctggtaaggaggccccgt

SEQ ID NO: 577459 - DNA, 120 bp, Artificial Sequence
  ENSG00000171557_1 (sequence is synthesized)
gatcagctccagccatttgcagtcctggctatcccaggagcttacataaagggacaattggagcctgagaggtgacagtgctgacactacaaggctcggagctccgggcactcagacatc

SEQ ID NO: 577460 - DNA, 120 bp, Artificial Sequence
  ENSG00000171557_2 (sequence is synthesized)
atgagttggtccttgcacccccggaatttaattctctacttctatgctcttttatttctctcttcaacatgtgtagcatatgttgctaccagagacaactgctgcatcttagatgaaaga

SEQ ID NO: 577461 - DNA, 120 bp, Artificial Sequence
  ENSG00000171557_3 (sequence is synthesized)
ttcggtagttattgtccaactacctgtggcattgcagatttcctgtctacttatcaaaccaaagtagacaaggatctacagtctttggaagacatcttacatcaagttgaaaacaaaaca

SEQ ID NO: 577462 - DNA, 120 bp, Artificial Sequence
  ENSG00000171557_4 (sequence is synthesized)
tcagaagtcaaacagctgataaaagcaatccaactcacttataatcctgatgaatcatcaaaaccaaatatgatagacgctgctactttgaagtccaggaaaatgttagaagaaattatg

SEQ ID NO: 577463 - DNA, 120 bp, Artificial Sequence
  ENSG00000171557_5 (sequence is synthesized)
aaatatgaagcatcgattttaacacatgactcaagtattcgatatttgcaggaaatatataattcaaataatcaaaagattgttaacctgaaagagaaggtagcccagcttgaagcacag

SEQ ID NO: 577464 - DNA, 120 bp, Artificial Sequence
  ENSG00000171557_6 (sequence is synthesized)
tgccaggaaccttgcaaagacacggtgcaaatccatgatatcactgggaaagattgtcaagacattgccaataagggagctaaacagagcgggctttactttattaaacctctgaaagct

SEQ ID NO: 577465 - DNA, 120 bp, Artificial Sequence
  ENSG00000171557_7 (sequence is synthesized)
tgtagatttcaagaaaaactggattcaatataaagaaggatttggacatctgtctcctactggcacaacagaattttggctgggaaatgagaagattcatttgataagcacacagtctgc

SEQ ID NO: 577466 - DNA, 120 bp, Artificial Sequence
  ENSG00000171557_8 (sequence is synthesized)
catcccatatgcattaagagtggaactggaagactggaatggcagaaccagtactgcagactatgccatgttcaaggtgggacctgaagctgacaagtaccgcctaacatatgcctactt

SEQ ID NO: 577467 - DNA, 120 bp, Artificial Sequence
  ENSG00000171557_9 (sequence is synthesized)
cgctggtggggatgctggagatgcctttgatggctttgattttggcgatgatcctagtgacaagtttttcacatcccataatggcatgcagttcagtacctgggacaatgacaatgataa

SEQ ID NO: 577468 - DNA, 120 bp, Artificial Sequence
  ENSG00000171557_10 (sequence is synthesized)
gtttgaaggcaactgtgctgaacaggatggatctggttggtggatgaacaagtgtcacgctggccatctcaatggagtttattaccaaggtggcacttactcaaaagcatctactcctaa

SEQ ID NO: 577469 - DNA, 120 bp, Artificial Sequence
  ENSG00000171557_11 (sequence is synthesized)
tggttatgataatggcattatttgggccacttggaaaacccggtggtattccatgaagaaaaccactatgaagataatcccattcaacagactcacaattggagaaggacagcaacacca

SEQ ID NO: 577470 - DNA, 120 bp, Artificial Sequence
  ENSG00000171557_12 (sequence is synthesized)
cctggggggagccaaacaggctggagacgtttaaaagaccgtttcaaaagagatttacttttttaaaggactttatctgaacagagagatataatatttttcctattggacaatggactt

SEQ ID NO: 577471 - DNA, 120 bp, Artificial Sequence
  ENSG00000171557_13 (sequence is synthesized)
gcaaagcttcacttcattttaagagcaaaagaccccatgttgaaaactccataacagttttatgctgatgataatttatctacatgcatttcaataaaccttttgtttcctaagactaga

SEQ ID NO: 577472 - DNA, 120 bp, Artificial Sequence
  ENSG00000171557_14 (sequence is synthesized)
tttccccatttataatatcccagtgacattatgcctgattatgttgagcatagtagagatagaagtttttagtgcaatataaattatactgggttataattgcttattaataatcacatt

SEQ ID NO: 577473 - DNA, 120 bp, Artificial Sequence
  ENSG00000171557_15 (sequence is synthesized)
gaagaaagatgttctagatgtcttcaaatgctagtttgaccatatttatcaaaaattttttccccatcccccatttatcttacaacataaaatcaatctcataggaatttgggtgttgaa

SEQ ID NO: 577474 - DNA, 120 bp, Artificial Sequence
  ENSG00000171557_16 (sequence is synthesized)
aataaaatcctctttataaaaatgctgacaaattggtggttaaaaaaattagcaagcagaggcatagtaaggattttggctcctaaagtaaattatattgaatgtggagcaggaagaaac

SEQ ID NO: 577475 - DNA, 120 bp, Artificial Sequence
  ENSG00000171557_17 (sequence is synthesized)
atgtcttgagagactaagtgtggcaaatattgcaaagctcatattgatcattgcagaatgaacctgcatagtctcttcccttcatttggaagtgaatgtctctgttaaagcttctcaggg

SEQ ID NO: 577476 - DNA, 120 bp, Artificial Sequence
  ENSG00000171557_18 (sequence is synthesized)
cctcataaatatcatctggcacttgtaactttttaaaaacatagtctaggttttacctatttttcttaatagattttaagagtagcatctgtctacatttttaatcactgttatattttc

SEQ ID NO: 577477 - DNA, 120 bp, Artificial Sequence
  ENSG00000171557_19 (sequence is synthesized)
gccaggaaccttgcaaagacacggtgcaaatccatgatatcactgggaaaggtaactgatgaaggttatattgggattaggttcatcaaagtaagtaatgtaaaggagaaagtatgtact

SEQ ID NO: 577478 - DNA, 120 bp, Artificial Sequence
  ENSG00000171557_20 (sequence is synthesized)
ggaaagtataggaatagtttagaaagtggctacccattaagtctaagaatttcagttgtctagacctttcttgaatagctaaaaaaaacagtttaaaaggaatgctgatgtgaaaagtaa

SEQ ID NO: 577479 - DNA, 120 bp, Artificial Sequence
  ENSG00000171557_21 (sequence is synthesized)
tgaggatgatttgtagaaaattaactgctaacttctattgacccacaaagtttcagaaattctctgaaagtttcttccttttttctcttactatatttattgatttcaagtcttctatta

SEQ ID NO: 577480 - DNA, 120 bp, Artificial Sequence
  ENSG00000171557_22 (sequence is synthesized)
aggacatttagccttcaatggaaattaaaactcatttaggactgtatttccaaattactgatatcagagttatttaaaaattgtttatttgaggagataacatttcaactttgttcctaa

SEQ ID NO: 577481 - DNA, 120 bp, Artificial Sequence
  ENSG00000171557_23 (sequence is synthesized)
ctgttgttttagttgttctatttgcttaaggatttttatgtctctgatcctatattacagatatgatagacgctgctactttgaagtccaggaaaatgttagaagaaattatgaaatatg

SEQ ID NO: 577482 - DNA, 120 bp, Artificial Sequence
  ENSG00000171557_24 (sequence is synthesized)
actggaagaagttgcatcacacagcctccaggactgccctcctcctcacagcaatggataatgcttcactagcctttgcagataattttggatcagagaaaaaaccttgagctgggccaa

SEQ ID NO: 577483 - DNA, 120 bp, Artificial Sequence
  ENSG00000171557_25 (sequence is synthesized)
aaaggaggagcttcaacctgtgtgcaaaatctgggaacctgacagtataggttgggggccaggatgaggaaaaaggaacgggaaagacctgcccacccttctgtatgttgctaccagaga

SEQ ID NO: 577484 - DNA, 120 bp, Artificial Sequence
  ENSG00000171557_26 (sequence is synthesized)
cattatatcaaatattttagtatgtacttaataaaataggagaacattttagagtttcaaattcccaggtattttccttgtttattacccctaaatcattcctatttaattcttcttttt

SEQ ID NO: 577485 - DNA, 120 bp, Artificial Sequence
  ENSG00000171557_27 (sequence is synthesized)
atgttaaaagctatttttcaaggctggcacagtcttacctgcatttcaaaccacagtaaaagtcgattctccttctctagattgtcaagacattgccaataagggagctaaacagagcgg

SEQ ID NO: 577486 - DNA, 120 bp, Artificial Sequence
  ENSG00000171560_0 (sequence is synthesized)
agcaatcctttctttcagctggagtgctcctcaggagccagccccacccttagaaaagatgttttccatgaggatcgtctgcctggtcctaagtgtggtgggcacagcatggactgcaga

SEQ ID NO: 577487 - DNA, 120 bp, Artificial Sequence
  ENSG00000171560_1 (sequence is synthesized)
tagtggtgaaggtgactttctagctgaaggaggaggcgtgcgtggcccaagggttgtggaaagacatcaatctgcctgcaaagattcagactggcccttctgctctgatgaagactggaa

SEQ ID NO: 577488 - DNA, 120 bp, Artificial Sequence
  ENSG00000171560_2 (sequence is synthesized)
ctacaaatgcccttctggctgcaggatgaaagggttgattgatgaagtcaatcaagattttacaaacagaataaataagctcaaaaattcactatttgaatatcagaagaacaataagga

SEQ ID NO: 577489 - DNA, 120 bp, Artificial Sequence
  ENSG00000171560_3 (sequence is synthesized)
ttctcattcgttgaccactaatataatggaaattttgagaggcgatttttcctcagccaataaccgtgataatacctacaaccgagtgtcagaggatctgagaagcagaattgaagtcct

SEQ ID NO: 577490 - DNA, 120 bp, Artificial Sequence
  ENSG00000171560_4 (sequence is synthesized)
gaagcgcaaagtcatagaaaaagtacagcatatccagcttctgcagaaaaatgttagagctcagttggttgatatgaaacgactggaggtggacattgatattaagatccgatcttgtcg

SEQ ID NO: 577491 - DNA, 120 bp, Artificial Sequence
  ENSG00000171560_5 (sequence is synthesized)
agggtcatgcagtagggctttagctcgtgaagtagatctgaaggactatgaagatcagcagaagcaacttgaacaggtcattgccaaagacttacttccctctagagataggcaacactt

SEQ ID NO: 577492 - DNA, 120 bp, Artificial Sequence
  ENSG00000171560_6 (sequence is synthesized)
accactgataaaaatgaaaccagttccagacttggttcccggaaattttaagagccagcttcagaaggtacccccagagtggaaggcattaacagacatgccgcagatgagaatggagtt

SEQ ID NO: 577493 - DNA, 120 bp, Artificial Sequence
  ENSG00000171560_7 (sequence is synthesized)
agagagacctggtggaaatgagattactcgaggaggctccacctcttatggaaccggatcagagacggaaagccccaggaaccctagcagtgctggaagctggaactctgggagctctgg

SEQ ID NO: 577494 - DNA, 120 bp, Artificial Sequence
  ENSG00000171560_8 (sequence is synthesized)
acctggaagtactggaaaccgaaaccctgggagctctgggactggagggactgcaacctggaaacctgggagctctggacctggaagtactggaagctggaactctgggagctctggaac

SEQ ID NO: 577495 - DNA, 120 bp, Artificial Sequence
  ENSG00000171560_9 (sequence is synthesized)
tggaagtactggaaaccaaaaccctgggagccctagacctggtagtaccggaacctggaatcctggcagctctgaacgcggaagtgctgggcactggacctctgagagctctgtatctgg

SEQ ID NO: 577496 - DNA, 120 bp, Artificial Sequence
  ENSG00000171560_10 (sequence is synthesized)
tagtactggacaatggcactctgaatctggaagttttaggccagatagcccaggctctgggaacgcgaggcctaacaacccagactggggcacatttgaagaggtgtcaggaaatgtaag

SEQ ID NO: 577497 - DNA, 120 bp, Artificial Sequence
  ENSG00000171560_11 (sequence is synthesized)
tccagggacaaggagagagtaccacacagaaaaactggtcacttctaaaggagataaagagctcaggactggtaaagagaaggtcacctctggtagcacaaccaccacgcgtcgttcatg

SEQ ID NO: 577498 - DNA, 120 bp, Artificial Sequence
  ENSG00000171560_12 (sequence is synthesized)
ctctaaaaccgttactaagactgttattggtcctgatggtcacaaagaagttaccaaagaagtggtgacctccgaagatggttctgactgtcccgaggcaatggatttaggcacattgtc

SEQ ID NO: 577499 - DNA, 120 bp, Artificial Sequence
  ENSG00000171560_13 (sequence is synthesized)
tggcataggtactctggatgggttccgccataggcaccctgatgaagctgccttcttcgacactgcctcaactggaaaaacattcccaggtttcttctcacctatgttaggagagtttgt

SEQ ID NO: 577500 - DNA, 120 bp, Artificial Sequence
  ENSG00000171560_14 (sequence is synthesized)
cagtgagactgagtctaggggctcagaatctggcatcttcacaaatacaaaggaatccagttctcatcaccctgggatagctgaattcccttcccgtggtaaatcttcaagttacagcaa

SEQ ID NO: 577501 - DNA, 120 bp, Artificial Sequence
  ENSG00000171560_15 (sequence is synthesized)
agctataaaatggcagatgaggccggaagtgaagccgatcatgaaggaacacatagcaccaagagaggccatgctaaatctcgccctgtcagagactgtgatgatgtcctccaaacacat

SEQ ID NO: 577502 - DNA, 120 bp, Artificial Sequence
  ENSG00000171560_16 (sequence is synthesized)
ccttcaggtacccaaagtggcattttcaatatcaagctaccgggatccagtaagattttttctgtttattgcgatcaagagaccagtttgggaggatggcttttgatccagcaaagaatg

SEQ ID NO: 577503 - DNA, 120 bp, Artificial Sequence
  ENSG00000171560_17 (sequence is synthesized)
gatggatcactgaattttaaccggacctggcaagactacaagagaggtttcggcagcctgaatgacgagggggaaggagaattctggctaggcaatgactacctccacttactaacccaa

SEQ ID NO: 577504 - DNA, 120 bp, Artificial Sequence
  ENSG00000171560_18 (sequence is synthesized)
aggggctctgttcttagggttgaattagaggactgggctgggaatgaagcttatgcagaatatcacttccgggtaggctctgaggctgaaggctatgccctccaagtctcctcctatgaa

SEQ ID NO: 577505 - DNA, 120 bp, Artificial Sequence
  ENSG00000171560_19 (sequence is synthesized)
ggcactgcgggtgatgctctgattgagggttccgtagaggaaggggcagagtacacctctcacaacaacatgcagttcagcacctttgacagggatgcagaccagtgggaagagaactgt

SEQ ID NO: 577506 - DNA, 120 bp, Artificial Sequence
  ENSG00000171560_20 (sequence is synthesized)
gcagaagtctatgggggaggctggtggtataataactgccaagcagccaatctcaatggaatctactaccctgggggctcctatgacccaaggaataacagtccttatgagattgagaat

SEQ ID NO: 577507 - DNA, 120 bp, Artificial Sequence
  ENSG00000171560_21 (sequence is synthesized)
ggagtggtctgggtttcctttagaggggcagattattccctcagggctgttcgcatgaaaattaggccccttgtgacccaataggctgaagaagtgggaatgggagcactctgtcttctt

SEQ ID NO: 577508 - DNA, 120 bp, Artificial Sequence
  ENSG00000171560_22 (sequence is synthesized)
tgctagagaagtggagagaaaatacaaaaggtaaagcagttgagattctctacaacctaaaaaattcctaggtgctattttcttatcctttgtactgtagctaaatgtacctgagacata

SEQ ID NO: 577509 - DNA, 120 bp, Artificial Sequence
  ENSG00000171560_23 (sequence is synthesized)
ttagtctttgaaaaataaagttatgtaaggttttttttatctttaaatagctctgtgggttttaacatttttataaagatataccaagggccattcagtacatcaggaaagtggcagaca

SEQ ID NO: 577510 - DNA, 120 bp, Artificial Sequence
  ENSG00000171560_24 (sequence is synthesized)
gaagcttctctctgcaaccttgaagactattggtttgagaacttctcttcccataccacccaaaatcataatgccattggaaagcaaaaagttgttttatccatttgatttgaattgttt

SEQ ID NO: 577511 - DNA, 120 bp, Artificial Sequence
  ENSG00000171560_25 (sequence is synthesized)
taagccaatattttaaggtaaaactcactgaatctaaccatagctgacctttgtagtagaatttacaacttataattacaatgcacaatttataattacaatatgtatttatgtcttttg

SEQ ID NO: 577512 - DNA, 120 bp, Artificial Sequence
  ENSG00000171560_26 (sequence is synthesized)
ctatggagcaaatccaggaaggcaagagaaacattctttcctaaatataaatgaaaatctatcctttaaactcttccactagacgttgtaatgcacacttatttttttcccaaggagtaa

SEQ ID NO: 577513 - DNA, 120 bp, Artificial Sequence
  ENSG00000171560_27 (sequence is synthesized)
aggagtaaccaatttctttctaaaacacatttaaaattttaaaactatttatgaatattaaaaaaagacataattcacacattaataaacaatctcccaagtattgatttaacttcattt

SEQ ID NO: 577514 - DNA, 120 bp, Artificial Sequence
  ENSG00000171560_28 (sequence is synthesized)
atcataaactatattctgtgacatgctaattattattaaatgtaagtcgttagttcgaaagcctctcactaagtatgatctatgctatattcaaaattcaacccatttactttggtcaat

SEQ ID NO: 577515 - DNA, 120 bp, Artificial Sequence
  ENSG00000171560_29 (sequence is synthesized)
atttgatctaagttgcatctttaatcctggtggtcttgccttctgatttttaatttgtatccttttctattaagatatatttgtcattttctcttgaatatgtattaaaatatcccaagc

SEQ ID NO: 577516 - DNA, 120 bp, Artificial Sequence
  ENSG00000171560_30 (sequence is synthesized)
aagccttccctgtccccctagactaagttaaatatttctgcacagtgttcccatggccccttgcatttccttcttaactctctgttacacgtcattgaaactacacttttttggtctgtt

SEQ ID NO: 577517 - DNA, 120 bp, Artificial Sequence
  ENSG00000171560_31 (sequence is synthesized)
tttgtgctagactgtaagttccttgggggcagggcctttgtctgtctcatctctgtattcccaaatgcctaacagtacagagccatgactcaataaatacatgttaaatggatgaatgaa

SEQ ID NO: 577518 - DNA, 120 bp, Artificial Sequence
  ENSG00000171561_0 (sequence is synthesized)
ttccagctgcccatctctgagaaatccagctgtgtctcacaatggatgccacagcctgtaatgaatcagtggatggctcacccgtcttctatctattgggcatcccctctctgccagaga

SEQ ID NO: 577519 - DNA, 120 bp, Artificial Sequence
  ENSG00000171561_1 (sequence is synthesized)
ccttcttcctccctgtgttttttattttcctcctcttctaccttctcatcctgatgggtaatgccctgatcctggtggccgtggtggcagagcccagcctccacaagcccatgtacttct

SEQ ID NO: 577520 - DNA, 120 bp, Artificial Sequence
  ENSG00000171561_2 (sequence is synthesized)
ttctgatcaatctctccaccttggacatccttttcaccacaaccactgtccccaagatgctgtccttattcttgcttggggaccgcttcctcagcttttcttcctgcttactgcagatgt

SEQ ID NO: 577521 - DNA, 120 bp, Artificial Sequence
  ENSG00000171561_3 (sequence is synthesized)
acctcttccaaagttttacatgttcagaagccttcatcctggtggtcatggcctatgaccgctatgtggctatctgccacccactgcactaccctgtcctcatgaacccacagaccaatg

SEQ ID NO: 577522 - DNA, 120 bp, Artificial Sequence
  ENSG00000171561_4 (sequence is synthesized)
cagcattgcctacatctaccactgcttctgtgatcatctggctgtggtccaggcctcctgctctgacaccaccccccagaccctcatgggcttctgcatcgccatggtggtgtccttcct

SEQ ID NO: 577523 - DNA, 120 bp, Artificial Sequence
  ENSG00000171561_5 (sequence is synthesized)
cccccttctcctggtgcttctctcctatgtccacatcctggcctcagtgcttcgcatcagttccctagaaggacgggcaaaagccttctccacctgcagctcccaccttctggtcgtggg

SEQ ID NO: 577524 - DNA, 120 bp, Artificial Sequence
  ENSG00000171561_6 (sequence is synthesized)
cacctactactcatctattgccatagcctacgtggcctacagggctgacctgccccttgacttccatatcatgggcaatgtggtatatgccattctcacaccaattctcaaccccctcat

SEQ ID NO: 577525 - DNA, 120 bp, Artificial Sequence
  ENSG00000171561_7 (sequence is synthesized)
ttacacgctgagaaacagggatgtaaaggcagccatcaccaaaatcatgtctcaagacccaggctgtgacaggagcatttgacctttaaatgcagctaactctgcttccaggacaccaaa

SEQ ID NO: 577526 - DNA, 120 bp, Artificial Sequence
  ENSG00000171561_8 (sequence is synthesized)
aggccaactgtgacgactctacacaagacatcaaggcggaccaggattggagcagaagtccagacacctagcttaaatggagtcagaaagaaccactagtcaaggcatacaagaaagaaa

SEQ ID NO: 577527 - DNA, 120 bp, Artificial Sequence
  ENSG00000171561_9 (sequence is synthesized)
cttaataagagtgtgagcagctgcatagtacacacagccttggagaaagaagcccctcaatggaacatgatggaactttgagtgagtacaaaagtagagacatgagcttaaggacttgat

SEQ ID NO: 577528 - DNA, 120 bp, Artificial Sequence
  ENSG00000171561_10 (sequence is synthesized)
ttatgagatctgacatcaacttaaaccacacagcatggaaactaagatgaagaccagaagaagcctttccaaagcactttcacaattataattcaacaatcaactgtttagatctgattt

SEQ ID NO: 577529 - DNA, 120 bp, Artificial Sequence
  ENSG00000171561_11 (sequence is synthesized)
tcccagtaaaatataaactctgggaagacaggaactttgcctgccttcttcaatttgatcacttcatcacctaaacaaagcatacagacttctatttggttggttattaattaattaata

SEQ ID NO: 577530 - DNA, 120 bp, Artificial Sequence
  ENSG00000171561_12 (sequence is synthesized)
atcaatatttgacaaattttgcgttcacatggcaaaagtcaataccatagcccctcatcagtcctctacagttggttgtaaataattctgcttatattacctacagagtaaacattatag

SEQ ID NO: 577531 - DNA, 120 bp, Artificial Sequence
  ENSG00000171561_13 (sequence is synthesized)
gtaattcaagaaacctttactaaaataaaaaaaaaatcttcatggcaaaaaattcttaaaagcaaagtcaaaaaacaaataaaaaacgtatcacagggaaaggcaaatattcatattata

SEQ ID NO: 577532 - DNA, 120 bp, Artificial Sequence
  ENSG00000171561_14 (sequence is synthesized)
caaagaatgtagaagattgaaataaacatttcaataaaaacatgggcaaaatatatgtgtagacaaataaaaaaaaatgcagtggcctttaaataatgagtatttactatataaaaagaa

SEQ ID NO: 577533 - DNA, 120 bp, Artificial Sequence
  ENSG00000171561_15 (sequence is synthesized)
tacgaatttaaattgtgctgaaatgttatttttcacttaatcagattagcagattagcaaaaatccaatattttgacaatatgcatgtagaaaaacagaacttttataacttgcttgtga

SEQ ID NO: 577534 - DNA, 120 bp, Artificial Sequence
  ENSG00000171561_16 (sequence is synthesized)
ggatgcaaactggtataacactaccgcaatacctaccaaaattacatatgcatttaccctttgactcagcagtatcacttctagggatctatcccgaggagtcaccatcaatcattcatt

SEQ ID NO: 577535 - DNA, 120 bp, Artificial Sequence
  ENSG00000171561_17 (sequence is synthesized)
aggttacgtattcatcactatacagggaactgattgaataaaccataaaaatgcatgatgcagtaataaaaaggaaataaggaagctctctactgatatgatatcatctctaggatatgt

SEQ ID NO: 577536 - DNA, 120 bp, Artificial Sequence
  ENSG00000171561_18 (sequence is synthesized)
gttaagtgaaaaaaagcaagctgcagaaaagtgtttttgtaagaaaggagatagtttgcttaaaatttcaggaaaaaactagagggaaaatgtgaactcataaagatggttatctataag

SEQ ID NO: 577537 - DNA, 120 bp, Artificial Sequence
  ENSG00000171561_19 (sequence is synthesized)
gagaggcaaggaacaggaaggagaggaccagaatggaagcaagtctagacatatgtaattatttttacatagttcaaagaaatcagaaagaaaaaccccacaattccctcaatttaaaat

SEQ ID NO: 577538 - DNA, 120 bp, Artificial Sequence
  ENSG00000171561_20 (sequence is synthesized)
aaacagaagcacttgaccctggctgtctctcaagttagtggcatgaccacaaagaaaattactgtaagtgacttttacacaatgttttgactatacatcctaaaagggatgtattaaaag

SEQ ID NO: 577539 - DNA, 120 bp, Artificial Sequence
  ENSG00000171561_21 (sequence is synthesized)
taaaagggatgtattaaaaggacaagaaaaatcacatcttaaactacattgaggagtttttgttgttgttgttgtttgtctgttctgagaagaggccttgctctgtcacccaggctggag

SEQ ID NO: 577540 - DNA, 120 bp, Artificial Sequence
  ENSG00000171561_22 (sequence is synthesized)
tcattgcagccttgaccgctagggctcaagtgatcctcccacctcagctccctgagtagctgggaccacaggcacatgcaccactacccccagctagagtagttttaaaaacatgaatat

SEQ ID NO: 577541 - DNA, 120 bp, Artificial Sequence
  ENSG00000171561_23 (sequence is synthesized)
tacttctttaatatatattagataaattatatgttcgtataaccaaaaccatttttatcattttattttaccatgcatggttttatatttacagagagtttcaaagatagtatgagagtt

SEQ ID NO: 577542 - DNA, 120 bp, Artificial Sequence
  ENSG00000171561_24 (sequence is synthesized)
tgagagttcccatatatccttcacctaacttcctctgtgtcaacatcttacataaccatgatacatttatcaaaagtaagaagttaacatttgtaaaatacgtactattaattatactag

SEQ ID NO: 577543 - DNA, 120 bp, Artificial Sequence
  ENSG00000171561_25 (sequence is synthesized)
agactttattcaaatttctccagtttttccagtaatgtcttctttccattccaggatccaatcagaatgccacattgcattttattatatcttcttagttgcctgacattttattggtct

SEQ ID NO: 577544 - DNA, 120 bp, Artificial Sequence
  ENSG00000171561_26 (sequence is synthesized)
ttccttatctttcatgaccttgacacttttgaagagtcaatagtaaatttaaatgcatatggctaagtgaaagaagccaatctaaaaaggttacataatgtatgattttaactgtatgac

SEQ ID NO: 577545 - DNA, 120 bp, Artificial Sequence
  ENSG00000171561_27 (sequence is synthesized)
attctggaaaaggcaaaactatgaagacagtaaagagctcaggggctgccagggagactaggagaagggagggattaataggcagaacacggagggcttttaggacagtgaaactattct

SEQ ID NO: 577546 - DNA, 120 bp, Artificial Sequence
  ENSG00000171561_28 (sequence is synthesized)
gtatgatactataatggtggatacatgttatatatttgtcaagactcatagaatgtactacaccaagtgtatactatgggctttgggtcataatgatgtgtcaatgtaggcttgaatgta

SEQ ID NO: 577547 - DNA, 120 bp, Artificial Sequence
  ENSG00000171561_29 (sequence is synthesized)
acaaatgtaaccactctggtgggggatgtcattctaacaggtatgtagtggtatcttattgtggttgtaatttaatttaattacatttccctatgactaattgtgttgaccatctttcat

SEQ ID NO: 577548 - DNA, 120 bp, Artificial Sequence
  ENSG00000171561_30 (sequence is synthesized)
gtgctcattttctatccatatatcttttttggtgaagtctgtccagatcttttgcctgctttttaatccaggttgtttgttttcataccattgaatttcaagtgttctttgtatattcta

SEQ ID NO: 577549 - DNA, 120 bp, Artificial Sequence
  ENSG00000171561_31 (sequence is synthesized)
ggtacaaattcattattagatatttgatatacaagtagtttccccagtcaatgactagcctttgaattcgcttacagtgtcttttgcagagcagaggttttcaattttgataaagcctaa

SEQ ID NO: 577550 - DNA, 120 bp, Artificial Sequence
  ENSG00000171561_32 (sequence is synthesized)
cttatcatttttcccttatggattatgctgtttgataacatatctaaatactcatcaccaaaccaaaggtcatgcagattttgccctatagaaaacgaagtttctagaagttttctattt

SEQ ID NO: 577551 - DNA, 120 bp, Artificial Sequence
  ENSG00000171561_33 (sequence is synthesized)
ttgatttcattctatgaacaattttgagttaattcttgggtaaggtgtgaggtttaggttgagattctttttttgtgtgcatatgaacatacaatcattccagcaccatttgttataaac

SEQ ID NO: 577552 - DNA, 120 bp, Artificial Sequence
  ENSG00000171561_34 (sequence is synthesized)
cctttacacttttgtcaaatatcagttgattatatttgtgtgtatctatttgtgggctctctattctgttccactgatatatatgtctatcctttaccgataccacacggtcttgaatac

SEQ ID NO: 577553 - DNA, 120 bp, Artificial Sequence
  ENSG00000171561_35 (sequence is synthesized)
tgtagctttatagtcaatgttgaaattccataatgtgactcctctgactttattaatttttttgcagttgtttggttattctagttcctttgctttttgatataaattttagaaccaagt

SEQ ID NO: 577554 - DNA, 120 bp, Artificial Sequence
  ENSG00000171561_36 (sequence is synthesized)
tactgggatttggggaggggagggactatgttaaatctatagattaaatttgggacagttgtcattttaacaatgtcgagtcttccattccatgaatataatatatctctccatttactt

SEQ ID NO: 577555 - DNA, 120 bp, Artificial Sequence
  ENSG00000171561_37 (sequence is synthesized)
agctctttaattttattcattacaaactgcattcctgggatgaaccccatttggttgtgacatgttttgccctttatatattactagatttgacttgtgaatattttgttcaggattttt

SEQ ID NO: 577556 - DNA, 120 bp, Artificial Sequence
  ENSG00000171561_38 (sequence is synthesized)
gcatcaatatttatgagagataccagagtgtagttttcttgtaatttctttgtctggtttggtattagataaatgctggcctcataaaatgaattaggaagctttcccgtctcttctaca

SEQ ID NO: 577557 - DNA, 120 bp, Artificial Sequence
  ENSG00000171561_39 (sequence is synthesized)
ttctcaaaaacattgtatagaattggtgctatttcttccttaaatatttggtagaatttgcctgtaaaatttccagggcctggaattttctttcaggaagtttttaactacaaaattaac

SEQ ID NO: 577558 - DNA, 120 bp, Artificial Sequence
  ENSG00000171561_40 (sequence is synthesized)
taatagatatagaaatttttccattatctatttctttttgaatgaactttataatttctgccttttaagaaatttgtccattttgtccaaattttagaatttataaacatagagttgttt

SEQ ID NO: 577559 - DNA, 120 bp, Artificial Sequence
  ENSG00000171561_41 (sequence is synthesized)
gtttgtactgttcccttattatccttttaatgtctgtgatgtctcctctttcattcctaatattggcaatttgtgttttctgtgattttttcttggtcagtttagctataggtttaccaa

SEQ ID NO: 577560 - DNA, 120 bp, Artificial Sequence
  ENSG00000171561_42 (sequence is synthesized)
tttactgatttttcaaagaatcagcatttagtttgtttcttctcattttcctgttttcaattttattgattcttcctctaatctttatattttttttccttctacatactttgggtttaa

SEQ ID NO: 577561 - DNA, 120 bp, Artificial Sequence
  ENSG00000171561_43 (sequence is synthesized)
tttgatcatttttctaatttcctgacatgggagattagatcattgatacgagacttttatttttcaatgtaagcattgaagtctgtacatttcccaatagctcctgcattagcaacttca

SEQ ID NO: 577562 - DNA, 120 bp, Artificial Sequence
  ENSG00000171561_44 (sequence is synthesized)
cacgaattttaatatgttgcatttttattttcattttattccaaatgtattttaaatttcccctaaaacatcctaattgacccatgcttatttcaaagtgtttttatttaatttcagaat

SEQ ID NO: 577563 - DNA, 120 bp, Artificial Sequence
  ENSG00000171561_45 (sequence is synthesized)
atttggaagattttcccaatcactttctgttactcctgtctagtttaattcccttatggttcaagaatatgctttgtatgattactattgtttaaaaagcttttctattcttttaaattt

SEQ ID NO: 577564 - DNA, 120 bp, Artificial Sequence
  ENSG00000171561_46 (sequence is synthesized)
ttttaatggcctattcttttaaattttttagtggcctaaaatatgacctaccttggtgaatgttctgtgcacccttggaagtgtattctgctattatgtggagtgttctataaatgtcaa

SEQ ID NO: 577565 - DNA, 120 bp, Artificial Sequence
  ENSG00000171561_47 (sequence is synthesized)
ttaggtctagttgtttgatagtgctgtttagaccttctatatcttaactgattttctatctgcttgatcaattcctgaaagggaaatattaaagtttctaacaataattatggatttgtc

SEQ ID NO: 577566 - DNA, 120 bp, Artificial Sequence
  ENSG00000171561_48 (sequence is synthesized)
catttctcccttcaatttcaccagtttgtaagaaaatttccactttttagattcagggggtacacatgcaggtttgtgacatgggtacatttcatgatgctgaggtttgggatatgaatg

SEQ ID NO: 577567 - DNA, 120 bp, Artificial Sequence
  ENSG00000171561_49 (sequence is synthesized)
gtttgggatatgaatgatcccgtcacccagatagtgagcatagtacgcagcaggtagttttacaaacctcgctaccctccctccaccctctattagtccccagtgtctattgttgccatc

SEQ ID NO: 577568 - DNA, 120 bp, Artificial Sequence
  ENSG00000171561_50 (sequence is synthesized)
ctcccacttataagtgagaacatgcagtacatggttttctgatcctgtgttaattcgcttaggataatgggctccagctgcatccatgatttcattcttttttatggctatgtagcattt

SEQ ID NO: 577569 - DNA, 76 bp, Artificial Sequence
  ENSG00000171561_51 (sequence is synthesized)
gggctccagctgcatccatgatttcattcttttttatggctatgtagcatttcatgctgtatatggaccacgcctt

SEQ ID NO: 577570 - DNA, 120 bp, Artificial Sequence
  ENSG00000171561_52 (sequence is synthesized)
ctttacccagcccaccgctgatgggcacctaggttgaatccatgtttttactattgtgaatactaatgcaatgaacatatgagtgcatgtgtcttttgatagaataacgtattttctttt

SEQ ID NO: 577571 - DNA, 72 bp, Artificial Sequence
  ENSG00000171561_53 (sequence is synthesized)
taacgatagctctattttatgttctttgagaaattgccaaaccactttccacagtggctgaactaatttaca

SEQ ID NO: 577572 - DNA, 120 bp, Artificial Sequence
  ENSG00000171561_54 (sequence is synthesized)
ataagcattccattttctctacagcctggtcagcacctgttcttctttgactttaatgatagccattctgactggtatgagataatatctcatggttttgatttgcacttctctgatgat

SEQ ID NO: 577573 - DNA, 120 bp, Artificial Sequence
  ENSG00000171561_55 (sequence is synthesized)
tagtgatgttgagcattttttcatgtctgttggctgcttatatgtcttctttttagaagtgtctgtttatgtgttttgcccactttttaatggtattatttggtttttgcttattgaatt

SEQ ID NO: 577574 - DNA, 120 bp, Artificial Sequence
  ENSG00000171561_56 (sequence is synthesized)
aagttccttatagattctgaatactagacctttgtcagatacatagtttgcaaatattctctttcttttctttcttttccttctctctccccacccctcccccaccctccttttttgaga

SEQ ID NO: 577575 - DNA, 89 bp, Artificial Sequence
  ENSG00000171561_57 (sequence is synthesized)
ggctggaagtgacctcctgggcctaagcaatcttcccaccccagcctcccgagtagctggagctacaggcatgtgccaccacacctggc

SEQ ID NO: 577576 - DNA, 120 bp, Artificial Sequence
  ENSG00000171561_58 (sequence is synthesized)
accacacctggctaatttttaaatttctgtagagacaggttctctctatgttgcccaagtgtctcaaactcctgagctcaagggatccttccacctccgcctcccaaagttctgggatta

SEQ ID NO: 577577 - DNA, 81 bp, Artificial Sequence
  ENSG00000171561_59 (sequence is synthesized)
ttgatagtttctttcgctgtgcagaaactgtttagtttaattaggttccacttgtcaattttcgtttttgttgcagttgtt

SEQ ID NO: 577578 - DNA, 120 bp, Artificial Sequence
  ENSG00000171561_60 (sequence is synthesized)
gtttagtttaattaggttccacttgtcaattttcgtttttgttgcagttgtttttcaggacttagtcataaattctttcccaaggccaatatttagaatggtgtttcctaggttttcttc

SEQ ID NO: 577579 - DNA, 120 bp, Artificial Sequence
  ENSG00000171561_61 (sequence is synthesized)
ctttaatctatcttgagttaatttttgtttatggtgaaaggtaggggtgcagtttcattcttctgcatatggctagccagctatcctagcactatttatttatttatttatttattttat

SEQ ID NO: 577580 - DNA, 120 bp, Artificial Sequence
  ENSG00000171561_62 (sequence is synthesized)
gctatccctccccactcccccaccccagcactatttattgaagagggagtccttttcccatacttatttttgctgacttttttgaagatcatatggctgtaggtatgcagctttatttct

SEQ ID NO: 577581 - DNA, 72 bp, Artificial Sequence
  ENSG00000171561_63 (sequence is synthesized)
ctgttccattggtctatgtgtctgttcttatgccaatatcatgctgttttgattactgtagccttagagttt

SEQ ID NO: 577582 - DNA, 90 bp, Artificial Sequence
  ENSG00000171561_64 (sequence is synthesized)
gtgaatttaagaatagctttttttctaattctgtgaaaaaaatgatgttggtagtttgagaggaatagcattcaatctgtatattgctgt

SEQ ID NO: 577583 - DNA, 120 bp, Artificial Sequence
  ENSG00000171561_65 (sequence is synthesized)
gtagtttgagaggaatagcattcaatctgtatattgctgtgggcagtatggtcattttagtgttgttgattcttccaattcatgagcatggaatgtttgtccatttctttgtttcatcta

SEQ ID NO: 577584 - DNA, 120 bp, Artificial Sequence
  ENSG00000171561_66 (sequence is synthesized)
tagttttttcagcaatgttttgagttcttcttgtagagatctttcacctctttggttaggtgtattcctaggtttcttgtgcttgtgtgtggctattataaatgggattgtgtatttaaa

SEQ ID NO: 577585 - DNA, 120 bp, Artificial Sequence
  ENSG00000171561_67 (sequence is synthesized)
aggccaactgtgacgactctacacaagacatcaaggcggaccaggattgagtagatactcaaaatatttatcaagctggagatcattgcttccaaagtcctcattttatagatgggaaaa

SEQ ID NO: 577586 - DNA, 120 bp, Artificial Sequence
  ENSG00000171561_68 (sequence is synthesized)
aggccaactgtgacgactctacacaagacatcaaggcggaccaggattgatgggaaaactgaggctcagagacccagcatcacagcaagagagtggcagagctggtccaggagagctcaa

SEQ ID NO: 577587 - DNA, 120 bp, Artificial Sequence
  ENSG00000171564_0 (sequence is synthesized)
gaagtcattcctagcagaggactcagatatatataggattgaagatctctcagttaagtctacatgaaaaggatggtttcttggagcttccacaaacttaaaaccatgaaacatctatta

SEQ ID NO: 577588 - DNA, 120 bp, Artificial Sequence
  ENSG00000171564_1 (sequence is synthesized)
ttgctactattgtgtgtttttctagttaagtcccaaggtgtcaacgacaatgaggagggtttcttcagtgcccgtggtcatcgaccccttgacaagaagagagaagaggctcccagcctg

SEQ ID NO: 577589 - DNA, 120 bp, Artificial Sequence
  ENSG00000171564_2 (sequence is synthesized)
aggcctgccccaccgcccatcagtggaggtggctatcgggctcgtccagccaaagcagctgccactcaaaagaaagtagaaagaaaagcccctgatgctggaggctgtcttcacgctgac

SEQ ID NO: 577590 - DNA, 120 bp, Artificial Sequence
  ENSG00000171564_3 (sequence is synthesized)
ccagacctgggggtgttgtgtcctacaggatgtcagttgcaagaggctttgctacaacaggaaaggccaatcagaaatagtgttgatgagttaaataacaatgtggaagctgtttcccag

SEQ ID NO: 577591 - DNA, 120 bp, Artificial Sequence
  ENSG00000171564_4 (sequence is synthesized)
acctcctcttcttcctttcagtacatgtatttgctgaaagacctgtggcaaaagaggcagaagcaagtaaaagataatgaaaatgtagtcaatgagtactcctcagaactggaaaagcac

SEQ ID NO: 577592 - DNA, 120 bp, Artificial Sequence
  ENSG00000171564_5 (sequence is synthesized)
caattatatatagatgagactgtgaatagcaatatcccaactaaccttcgtgtgcttcgttcaatcctggaaaacctgagaagcaaaatacaaaagttagaatctgatgtctcagctcaa

SEQ ID NO: 577593 - DNA, 120 bp, Artificial Sequence
  ENSG00000171564_6 (sequence is synthesized)
atggaatattgtcgcaccccatgcactgtcagttgcaatattcctgtggtgtctggcaaagaatgtgaggaaattatcaggaaaggaggtgaaacatctgaaatgtatctcattcaacct

SEQ ID NO: 577594 - DNA, 120 bp, Artificial Sequence
  ENSG00000171564_7 (sequence is synthesized)
gacagttctgtcaaaccgtatagagtatactgtgacatgaatacagaaaatggaggatggacagtgattcagaaccgtcaagacggtagtgttgactttggcaggaaatgggatccatat

SEQ ID NO: 577595 - DNA, 120 bp, Artificial Sequence
  ENSG00000171564_8 (sequence is synthesized)
taccaggtgaatattggcttggaaatgataaaattagccagcttaccaggatgggacccacagaacttttgatagaaatggaggactggaaaggagacaaagtaaaggctcactatggag

SEQ ID NO: 577596 - DNA, 120 bp, Artificial Sequence
  ENSG00000171564_9 (sequence is synthesized)
gattcactgtacagaatgaagccaacaaataccagatctcagtgaacaaatacagaggaacagccggtaatgccctcatggatggagcatctcagctgatgggagaaaacaggaccatga

SEQ ID NO: 577597 - DNA, 120 bp, Artificial Sequence
  ENSG00000171564_10 (sequence is synthesized)
ccattcacaacggcatgttcttcagcacgtatgacagagacaatgacggctggttaacatcagatcccagaaaacagtgttctaaagaagacggtggtggatggtggtataatagatgtc

SEQ ID NO: 577598 - DNA, 120 bp, Artificial Sequence
  ENSG00000171564_11 (sequence is synthesized)
atgcagccaatccaaacggcagatactactggggtggacagtacacctgggacatggcaaagcatggcacagatgatggtgtagtatggatgaattggaaggggtcatggtactcaatga

SEQ ID NO: 577599 - DNA, 120 bp, Artificial Sequence
  ENSG00000171564_12 (sequence is synthesized)
ggaagatgagtatgaagatcaggcccttcttcccacagcaatagtccccaatacgtagatttttgctcttctgtatgtgacaacatttttgtacattatgttattggaattttctttcat

SEQ ID NO: 577600 - DNA, 120 bp, Artificial Sequence
  ENSG00000171564_13 (sequence is synthesized)
acattatattcctctaaaactctcaagcagacgtgagtgtgactttttgaaaaaagtataggataaattacattaaaatagcacatgattttcttttgttttcttcatttctcttgctca

SEQ ID NO: 577601 - DNA, 120 bp, Artificial Sequence
  ENSG00000171564_14 (sequence is synthesized)
ccaagaagtaacaaaagtatagttttgacagagttggtgttcataatttcagttctagttgattgcgagaattttcaaataaggaagaggggtcttttatccttgtcgtaggaaaaccat

SEQ ID NO: 577602 - DNA, 120 bp, Artificial Sequence
  ENSG00000171564_15 (sequence is synthesized)
gacggaaaggaaaaactgatgtttaaaagtccacttttaaaactatatttatttatgtaggatctgtcaaagaaaacttccaaaaagatttattaattaaaccagactctgttgcaataa

SEQ ID NO: 577603 - DNA, 120 bp, Artificial Sequence
  ENSG00000171564_16 (sequence is synthesized)
agatgagaaaactggggcacagataaagcaacttgcccaaggtctcatagctgtaagtcaaccctacggtcaagacctacaagtagccgagctccagagtacattatgagggtcaaagat

SEQ ID NO: 577604 - DNA, 120 bp, Artificial Sequence
  ENSG00000171564_17 (sequence is synthesized)
tgtcttattacaaataaattccaagtagaatcaacctttaataagtctttaatgtctcttaaatatgtttatataggagtctaatcaccaattcacaaaaatgaaagtagggaaatgatt

SEQ ID NO: 577605 - DNA, 120 bp, Artificial Sequence
  ENSG00000171564_18 (sequence is synthesized)
aacaataatcataggaatctaacaatccaagtggcttgagaatattcattcttcttgacagtatagattctttacaatttcgtaagttccaatgtatgttttaggaatatgaggtcatta

SEQ ID NO: 577606 - DNA, 120 bp, Artificial Sequence
  ENSG00000171564_19 (sequence is synthesized)
tctgatacagctttatcctaaggcctctctttaaaaactacactgcatcatagcttttttgtgcagttggtctttctactgttactgaacagtaagcaacctacagattcactatcacca

SEQ ID NO: 577607 - DNA, 120 bp, Artificial Sequence
  ENSG00000171564_20 (sequence is synthesized)
accagccagttgatggatcttaagcaaattatcaagcttgtgataacctaaattataaaatgagggtgttggaatagttacattccaaatcttctataacactctgtattatatttctgc

SEQ ID NO: 577608 - DNA, 120 bp, Artificial Sequence
  ENSG00000171564_21 (sequence is synthesized)
ttgctgaaagacctgtggcaaaagaggcagaagcaagtaaaaggtagatatccttgtgctttccattcgattttcagctataaaattggaaccgttagactgccacgagaatgcatggtt

SEQ ID NO: 577609 - DNA, 120 bp, Artificial Sequence
  ENSG00000171564_22 (sequence is synthesized)
ggatggtttcttggagcttccacaaacttaaaaccatgaaacatctattattgctactattgtgtgtttttctagttaagtcccaaggtgtcaacgacaatgaggagataatgaaaatgt

SEQ ID NO: 577610 - DNA, 120 bp, Artificial Sequence
  ENSG00000171566_0 (sequence is synthesized)
aattccggaaggtgctgcacagctgtggcggcgggtactgcgttagtgattagagtttcttccctgccggaggtgggatacacggtagcatcatggtcgaggaggtacagaaacattctg

SEQ ID NO: 577611 - DNA, 120 bp, Artificial Sequence
  ENSG00000171566_1 (sequence is synthesized)
tacacacccttgtgttcaggtcgttgaagaggacccatgacatgtttgtagctgataatggaaaacctgtgcctttagatgaagagagtcacaaacgaaaaatggcaatcaagcttcgta

SEQ ID NO: 577612 - DNA, 120 bp, Artificial Sequence
  ENSG00000171566_2 (sequence is synthesized)
atgagtatggtcctgtgttgcatatgcctacttcaaaagaaaatcttaaagagaagggtcctcagaatgcaacggattcatatgttcataaacagtaccctgccaatcaaggacaagaag

SEQ ID NO: 577613 - DNA, 120 bp, Artificial Sequence
  ENSG00000171566_3 (sequence is synthesized)
ttgaatactttgtggcaggtacacatccatacccaccaggacctggggttgctttgacagcagatactaagatccagagaatgccaagtgaatcagctgcacagtccttagcggtggcat

SEQ ID NO: 577614 - DNA, 120 bp, Artificial Sequence
  ENSG00000171566_4 (sequence is synthesized)
tacctttgcagaccaaggctgatgcaaatcgtactgcccctagtggaagtgaataccgacatcctggggcttctgaccgtccacagcctacagcgatgaattcaattgtcatggagactg

SEQ ID NO: 577615 - DNA, 120 bp, Artificial Sequence
  ENSG00000171566_5 (sequence is synthesized)
gcaataccaagaactctgcactgatggctaaaaaagcccctacaatgccaaaaccccagtggcacccaccgtggaaactctacagggttatcagtgggcatcttggctgggttcgatgta

SEQ ID NO: 577616 - DNA, 120 bp, Artificial Sequence
  ENSG00000171566_6 (sequence is synthesized)
ttgctgtggaacctggaaatcagtggtttgttactggatctgctgacagaactataaagatctgggacttggctagtggcaaattaaaactgtcattgactgggcatattagtactgtgc

SEQ ID NO: 577617 - DNA, 120 bp, Artificial Sequence
  ENSG00000171566_7 (sequence is synthesized)
ggggcgtgatagtaagcacaaggagcccatatctgttctcttgtggagaagacaaacaagtgaaatgctgggatctcgaatacaataaggttatacggcattatcatggacatttaagtg

SEQ ID NO: 577618 - DNA, 120 bp, Artificial Sequence
  ENSG00000171566_8 (sequence is synthesized)
cagtgtatggtttggatttgcacccgacaatcgatgtgttggtaacctgtagtcgagattcaactgcacggatttgggatgtgagaactaaagccagtgtacacacattatctggacata

SEQ ID NO: 577619 - DNA, 120 bp, Artificial Sequence
  ENSG00000171566_9 (sequence is synthesized)
caaatgcagttgctacagtgagatgtcaggctgcagaaccacaaattattacaggaagccatgatactacaattcgattatgggatctggtggctggaaaaacaagagtgacattaacaa

SEQ ID NO: 577620 - DNA, 120 bp, Artificial Sequence
  ENSG00000171566_10 (sequence is synthesized)
atcacaaaaaatcagttagggctgtggttttacatccaagacattacacatttgcatctggttctccagataacataaagcagtggaaattccctgatggaagtttcattcaaaatcttt

SEQ ID NO: 577621 - DNA, 120 bp, Artificial Sequence
  ENSG00000171566_11 (sequence is synthesized)
ccggtcataatgctattattaacacattgacggtaaattctgatggagtgcttgtatctggagctgacaatggcaccatgcatctttgggactggagaactggctacaattttcagagag

SEQ ID NO: 577622 - DNA, 120 bp, Artificial Sequence
  ENSG00000171566_12 (sequence is synthesized)
ttcacgcagctgtgcaacctgggtctttggacagtgaatcaggaatatttgcttgtgcttttgatcagtctgaaagtcgattactaacagctgaagctgataaaaccattaaagtataca

SEQ ID NO: 577623 - DNA, 120 bp, Artificial Sequence
  ENSG00000171566_13 (sequence is synthesized)
tgaatgtggaattttttctctctctttttttttctttttaattaaaaaaaaaaaagcttggcgttcatgaggatatccagtcattttgtgctctggctgggaatataaaggagaaattca

SEQ ID NO: 577624 - DNA, 120 bp, Artificial Sequence
  ENSG00000171566_14 (sequence is synthesized)
cttgcttcaatcattgctgcttcatattttacaataaactgtcccctgtcccctacccctgtgtttttatttctaaaacaatttgtgatactaggaagatgcagatatcaagtaaatgca

SEQ ID NO: 577625 - DNA, 120 bp, Artificial Sequence
  ENSG00000171566_15 (sequence is synthesized)
ggtttattgaacataactattctagatgtaatattttgacagtcttattagaaaacccccttttttaaaaaaaatgtatgaaaccgataattaggacatttgaaggagcagtagtttttt

SEQ ID NO: 577626 - DNA, 120 bp, Artificial Sequence
  ENSG00000171566_16 (sequence is synthesized)
tttagtcctttaaaaaataacatctgtgactaataatttgagattaaaagatttgaagtcttaatttatgtatgtttattccaaaaacagtttttgagtgtatgttctacaaagttctgc

SEQ ID NO: 577627 - DNA, 120 bp, Artificial Sequence
  ENSG00000171566_17 (sequence is synthesized)
actagatactgttcaggaaatagacaagtaagatgtgtctatcctctaagacttccagtttggtagcttagtatagaaattctgtaacagaggtgcaggtgaaatgctgggggaacagaa

SEQ ID NO: 577628 - DNA, 120 bp, Artificial Sequence
  ENSG00000171566_18 (sequence is synthesized)
gggataagaccatttatttttctcaggaaggattgtggaagacttcatagagtaagtggcattggagattaccttgaagtgaaggaagacaaagaaggaaaagagatgaggcataaagtg

SEQ ID NO: 577629 - DNA, 120 bp, Artificial Sequence
  ENSG00000171566_19 (sequence is synthesized)
atgaaaccaggcacaagaaagtgtgcggtgtgttctgggacaaagaatgttctgctactgtcgaataatgggactaaagctggcttgttctggggaaagctcatataagtatggatttta

SEQ ID NO: 577630 - DNA, 120 bp, Artificial Sequence
  ENSG00000171566_20 (sequence is synthesized)
ttcctcaactagtaggataccaatactggtattgaaacttggggaaaataactggagataccagtgcagctatttaaagctgtagcaagggctgcaatcttgcggagattttaaagagaa

SEQ ID NO: 577631 - DNA, 120 bp, Artificial Sequence
  ENSG00000171566_21 (sequence is synthesized)
gttttaaagtttctaatactgatgcctctttttggtaaatacaagttttataaatcctgccctgggatcctgattccccattaatcaagatttgtcagacttcaccttctataattagaa

SEQ ID NO: 577632 - DNA, 120 bp, Artificial Sequence
  ENSG00000171566_22 (sequence is synthesized)
aacacagttataagaacagtcaattttttaaattttccaaattaaaaaattgcaccatgattttgaacaagcacttccaattacattacccatcttgtatgccataggtgggagtataat

SEQ ID NO: 577633 - DNA, 120 bp, Artificial Sequence
  ENSG00000171566_23 (sequence is synthesized)
tgtcacagcctttaggaatgtagttttctgggatttattgaaactttgaaccttttggcctactaagttcattcctaggaaactgcctaatgggaatgatctgacaagtgtacacaagca

SEQ ID NO: 577634 - DNA, 120 bp, Artificial Sequence
  ENSG00000171566_24 (sequence is synthesized)
aagtcattgcacctttgttctttaatacttaaaactagcccaaatgccctgtcagtaagggactggtttaatagatggtacctttatgcaatttgtttctaagtattcgttaagagagtg

SEQ ID NO: 577635 - DNA, 120 bp, Artificial Sequence
  ENSG00000171566_25 (sequence is synthesized)
aggaatgtctggattattagggcaagatttctaaacttgggtaaaaaaaaaagttgtgcaagcatttttgtggacaacttgatgctctaaaatataagtaacaccacattactaacagtg

SEQ ID NO: 577636 - DNA, 120 bp, Artificial Sequence
  ENSG00000171566_26 (sequence is synthesized)
gctttgttaggaagcagaattatggaagaactttcatgggtggctttacatatttctataatgttttaattttctataagcatgtatttcgtaaacttaaataaagaaaaaagaacacta

SEQ ID NO: 577637 - DNA, 120 bp, Artificial Sequence
  ENSG00000171566_27 (sequence is synthesized)
tatttaatggccgtacctgtattataatggaagttttgatcctcatgggaatactgttgatgacttttttcttataggaaataaaaatggtagtataatgatggcagagattcttagagt

SEQ ID NO: 577638 - DNA, 120 bp, Artificial Sequence
  ENSG00000171566_28 (sequence is synthesized)
taaatgtttgtcaagctgtactgctgaggggataccaggtgtaactagatttttccctttaagctgacaatggcaccatgcatctttgggactggagaactggctacaattttcagagag

SEQ ID NO: 577639 - DNA, 120 bp, Artificial Sequence
  ENSG00000171566_29 (sequence is synthesized)
gaactataaaggtaataatgaaggaagaaaaaataaacatgactttgtgtttgtcatgtaagtttaatcagttattatttcctgtggcaggaattgctattgcagttcctctgttatttt

SEQ ID NO: 577640 - DNA, 120 bp, Artificial Sequence
  ENSG00000171566_30 (sequence is synthesized)
agacctgaataaggagtaaaatttatcatttatactaataagtgttctaaataaatatctgtttgaaaagtgctatttaaaccactttttctttacctactgaatacctaccactaattc

SEQ ID NO: 577641 - DNA, 120 bp, Artificial Sequence
  ENSG00000171566_31 (sequence is synthesized)
cagtaccctgatcttttagctttttagaattcttgcaagttgtctcctatttatattcgtcctccagtttgtaaatcattatctttcacttaagcattttctttattatattcaggcact

SEQ ID NO: 577642 - DNA, 120 bp, Artificial Sequence
  ENSG00000171566_32 (sequence is synthesized)
agttatgtagtaaattttcagccttgaattgatccagttatcttcttgagataatgaatacctattctctttcctaatatgtctattgtgtttttatagatttgggatgtgagaactaaa

SEQ ID NO: 577643 - DNA, 120 bp, Artificial Sequence
  ENSG00000171566_33 (sequence is synthesized)
gttagggctgtggttttacatccaagacagtaagtgtattttcctaattagcttcttgtttttcttcagttcttaagataatgctgaaatgctagtggtgttagcactgcttttggcagt

SEQ ID NO: 577644 - DNA, 120 bp, Artificial Sequence
  ENSG00000171566_34 (sequence is synthesized)
caccaggacctggttagtgagctgttatatattgaaaatgtcttaaaaatgtcacatatattttcactaacgagccaataatgagattcttgttgcctataaaatgcaagataagctcag

SEQ ID NO: 577645 - DNA, 120 bp, Artificial Sequence
  ENSG00000171566_35 (sequence is synthesized)
tagccaagcatccatgcatagctttgtaggtaataatgaatactcatatgccttcattcagcaaacattcttaagtacgtataatttttcaggcaatgtgctaggaattcaaagacagta

SEQ ID NO: 577646 - DNA, 120 bp, Artificial Sequence
  ENSG00000171566_36 (sequence is synthesized)
aaactgttgcaggcctagttatttattatctggtggtttaggcagacatgtaaatatcactaagcttgtaaaaatgatggaaatgttagaagcagtatctgagaaacatgtcctctgtct

SEQ ID NO: 577647 - DNA, 120 bp, Artificial Sequence
  ENSG00000171566_37 (sequence is synthesized)
gtattaaggcattggtccacagatggagtggccagtgtaacagggtagaggacaaaaggcttagtatgtaaagaaagtacagggaaattgggtgtttctagttttagtaagttacatcca

SEQ ID NO: 577648 - DNA, 120 bp, Artificial Sequence
  ENSG00000171566_38 (sequence is synthesized)
ggaaggtgctgcacagctgtggcggcgggtactgcgttagtgattagagtttcttccctgccggaggtgggatacacggtagcatcatggtcgagtccaccttaattgagaccaacatca

SEQ ID NO: 577649 - DNA, 120 bp, Artificial Sequence
  ENSG00000171566_39 (sequence is synthesized)
aaagcatatttcactgttcacattttttctttttaaaatttctttataactattatatgacattttcctttatcaggactttataacaatttaaaataaagggttagttttgcagaatac

SEQ ID NO: 577650 - DNA, 120 bp, Artificial Sequence
  ENSG00000171566_40 (sequence is synthesized)
atgactggaggcattaattactttgaaaatattatttcttttgccccagggctgatgcaaatcgtactgcccctagtggaagtgaataccgacatcctggggcttctgaccgtccacagc

SEQ ID NO: 577651 - DNA, 120 bp, Artificial Sequence
  ENSG00000171574_0 (sequence is synthesized)
gccttggcaacgacccagccgcgccgcgaggagagccgggaatggaggtcgtggcgtgaggggcgccgagcgaggggaggcgcgggccacgggagttccgggagttccggcgttgcccgg

SEQ ID NO: 577652 - DNA, 120 bp, Artificial Sequence
  ENSG00000171574_1 (sequence is synthesized)
cagtccgcagtcctcggcgggaaggctgtcccggcgcctcaggcagctctgcgtgggccggggtgacttcctcgcgatcccctgcgcgaggtgaagggcagggacctttgccgcgccttc

SEQ ID NO: 577653 - DNA, 120 bp, Artificial Sequence
  ENSG00000171574_2 (sequence is synthesized)
cacgcgccgtgccccaccggcgagtggctccatcttcctcagacttatcgctcgcggacaggcgccgtgggtctcccgggcctccgtaccgtcctccttcccagcggctccgggaagcgg

SEQ ID NO: 577654 - DNA, 120 bp, Artificial Sequence
  ENSG00000171574_3 (sequence is synthesized)
ttccctgtcttcggacgcatttcacccgcgcggggagagcttcccgggaaggttccacggcggccgagggtttccgcgcccgggacgcgtttcggctgaggccgtgggtccagtccacgg

SEQ ID NO: 577655 - DNA, 120 bp, Artificial Sequence
  ENSG00000171574_4 (sequence is synthesized)
gttctgcccgcacggtccaatggccggggaggcggaggctcagttggacccatcattgcagggcttggtgatgtttgaggatgtgacggtatatttctccagggaggagtgggggctcct

SEQ ID NO: 577656 - DNA, 120 bp, Artificial Sequence
  ENSG00000171574_5 (sequence is synthesized)
taatgtgacccagaagggcctataccgggatgtgatgctggagaactttgcactcgttagctcactgggacttgcaccttcgagatcccctgtgtttacccagctggaggatgatgaaca

SEQ ID NO: 577657 - DNA, 120 bp, Artificial Sequence
  ENSG00000171574_6 (sequence is synthesized)
gtcgtgggtgcccagctgggtggatgtgactccagtcagcagagcagaagccaggagaggttttggtcttgatggtttgtgtagagtggaggatgagagagcccatcctgagcatctaaa

SEQ ID NO: 577658 - DNA, 120 bp, Artificial Sequence
  ENSG00000171574_7 (sequence is synthesized)
gagctacagagtcatccagcaccaggacactcatagtgaggggaaaccaagaaggcacactgagcatggggcagctttcccacctggttccagttgtgggcaacagcaagaagtccatgt

SEQ ID NO: 577659 - DNA, 120 bp, Artificial Sequence
  ENSG00000171574_8 (sequence is synthesized)
ggcagagaagctgttcaaatgcagtgactgtgggaaggtgttcttaaaggcctttgccctccttgaccatctgataacgcattctgaagagagacccttcagatgcccaacaggcagaag

SEQ ID NO: 577660 - DNA, 120 bp, Artificial Sequence
  ENSG00000171574_9 (sequence is synthesized)
ccccgaaaaattcacactggagaaacagcccatgtgtgtaatgaatgtgggaaggccttcagttacccgtctaagctgaggaaacaccagaaggttcacacaggcataaaaccttttaag

SEQ ID NO: 577661 - DNA, 120 bp, Artificial Sequence
  ENSG00000171574_10 (sequence is synthesized)
tgtagtgactgtggtaaaaccttcaaccgcaaagacgcacttgttctacaccagaggattcacactggagaaaggccttacgagtgcagcaaatgtggtaaaaccttcagtgttctgtct

SEQ ID NO: 577662 - DNA, 120 bp, Artificial Sequence
  ENSG00000171574_11 (sequence is synthesized)
accctcattcggcaccggaaagtgcacattggagaaaggccctatgagtgtacagaatgtgggaagttctttaaatacaataatagcttcattcttcaccagagagttcacactggagaa

SEQ ID NO: 577663 - DNA, 120 bp, Artificial Sequence
  ENSG00000171574_12 (sequence is synthesized)
aggccttttgaatgcaagcaatgtgggaaaggctacgtgacccgttcaggcctctatcagcactggaaagtccacactggggaacggccctatgaatgtagcctgtgtgggaaaaccttc

SEQ ID NO: 577664 - DNA, 120 bp, Artificial Sequence
  ENSG00000171574_13 (sequence is synthesized)
actaccagatcctaccgcaatcggcaccagcagttccacactgaagagaggtcttatgaatgtacagagtgtgggaaggccttcaaacatagttccaccctccttcagcacaagaaagtc

SEQ ID NO: 577665 - DNA, 120 bp, Artificial Sequence
  ENSG00000171574_14 (sequence is synthesized)
catactccagaaaggcgtcaggaggacagggcacatgggaaggtcgttagctgctagcaccgtgttcatcaggaaaggtcttattccagaaaggaggttaaggagagtggccgtgagagt

SEQ ID NO: 577666 - DNA, 120 bp, Artificial Sequence
  ENSG00000171574_15 (sequence is synthesized)
gccatccgaaagaagctaaaccttgcacatcccaacacccaccccagggagagttcccgtgtgtgcctggtgtgtgggacgctttcgggagccacattgcactctgacttgcctggggct

SEQ ID NO: 577667 - DNA, 120 bp, Artificial Sequence
  ENSG00000171574_16 (sequence is synthesized)
gttggcagtgtcacatcactgagtttatccaccgccatccacctctatccaccccataaggtccctacagcaagtgggacagcagaccttgtgctccttgctctaaacagtagagaatcg

SEQ ID NO: 577668 - DNA, 120 bp, Artificial Sequence
  ENSG00000171574_17 (sequence is synthesized)
ttaatagtggagcccaaaacaggcctcattccctacccttgactggtttagctgtggacatgacccacctctggccggaggagctgagctggtatctgctgggggcttcctgggaaggtt

SEQ ID NO: 577669 - DNA, 120 bp, Artificial Sequence
  ENSG00000171574_18 (sequence is synthesized)
taccattttcatggaaatggttgacattacacatggtatttgtcatgccctagcatggactgtctcatactgctctggactatgtggtaataaaggctttattgtttaagccgcttaaaa

SEQ ID NO: 577670 - DNA, 120 bp, Artificial Sequence
  ENSG00000171574_19 (sequence is synthesized)
cagagcagaagccaggagaggttttggtcttggtaagtggagtggaggggaataccttggtttcagcagtgggctcacagaatgctgagtacctgcatacaccgataccttggtgttgag

SEQ ID NO: 577671 - DNA, 120 bp, Artificial Sequence
  ENSG00000171574_20 (sequence is synthesized)
ggcagtgaccataccttatttccttccacctttcctgtcttatgtggacactgtgcagtctgccatctctaccatgattttcaggccccgcatgttcctgcctctctggcctgcgtctcc

SEQ ID NO: 577672 - DNA, 120 bp, Artificial Sequence
  ENSG00000171574_21 (sequence is synthesized)
tcattgcccttctctgtatctgtgcagagctgtctactgttggcgactcagtgcgtgtcttgaaatgtgcacatatccttaaacaggtatttgaacttcagccaatccttaattaatact

SEQ ID NO: 577673 - DNA, 120 bp, Artificial Sequence
  ENSG00000171574_22 (sequence is synthesized)
taaacaccagctactattttggaatcacattttgctgggactagacacatgcctcctcatagtgcttggctgtcaccagcagccaaggccctgctgaaaccctttgcagaggagtgactt

SEQ ID NO: 577674 - DNA, 120 bp, Artificial Sequence
  ENSG00000171574_23 (sequence is synthesized)
ggagaccccacctctcttccctgcaccatatcctatcttgtgccctcatctcagttgaggttttccttagtctgtagtctggtggagccatattcagttgtgccaggctttcccaaccca

SEQ ID NO: 577675 - DNA, 79 bp, Artificial Sequence
  ENSG00000171574_24 (sequence is synthesized)
ggtggagccatattcagttgtgccaggctttcccaacccagacctttcctagcaacctctcagcaattctttttttttt

SEQ ID NO: 577676 - DNA, 120 bp, Artificial Sequence
  ENSG00000171574_25 (sequence is synthesized)
cctggccctttcagcagttctatggagtccttctgggtgtgtctgacatgcactggtgattaaggtacctcctccctctagttcaactcttagtaatgattcatctctgctttcagatgg

SEQ ID NO: 577677 - DNA, 120 bp, Artificial Sequence
  ENSG00000171574_26 (sequence is synthesized)
actccgatggcgctggcgagaggaaaggctgcggcgcgcagagcgaggctgcgggaccccaggatgggggacaggaggctgcggggcctcaggacttgcaccttcgagatcccctgtgtt

SEQ ID NO: 577678 - DNA, 120 bp, Artificial Sequence
  ENSG00000171574_27 (sequence is synthesized)
tccaatggccggggaggcggaggacttgcaccttcgagatcccctgtgtttacccagctggaggatgatgaacagtcgtgggtgcccagctgggtggatgtgactccagtcagcagagca

SEQ ID NO: 577679 - DNA, 120 bp, Artificial Sequence
  ENSG00000171587_0 (sequence is synthesized)
actcgcccggctcgcaggcagggaaggttggcagagggatccatgtgactgaggccggagcacggcaaagatgagcctgcccgcccgcctgctgcctggatgcggagggtgagggctggc

SEQ ID NO: 577680 - DNA, 120 bp, Artificial Sequence
  ENSG00000171587_1 (sequence is synthesized)
gcacgggaggccgctggctgcgcattctgggcgccgagtgcccgggatgagctcacgcccgcgtctgcggctctctccacctgccgacctgccgggggcccactgagctgacggcgcacc

SEQ ID NO: 577681 - DNA, 80 bp, Artificial Sequence
  ENSG00000171587_2 (sequence is synthesized)
gagctgacggcgcacctgggctccggccgcagcgtggggcgcggcgcccgggagcaggtgtgcaggagcgcagcgcgcgg

SEQ ID NO: 577682 - DNA, 80 bp, Artificial Sequence
  ENSG00000171587_3 (sequence is synthesized)
ggcggagcgcggggggcgaggccggcgcgtcgctcgcgggaggccggggagcggcaggggcatgtggatactggctctct

SEQ ID NO: 577683 - DNA, 120 bp, Artificial Sequence
  ENSG00000171587_4 (sequence is synthesized)
cggggagcggcaggggcatgtggatactggctctctccttgttccagagcttcgcgaatgttttcagtgaagacctacactccagcctctactttgtcaatgcatctctgcaagaggtag

SEQ ID NO: 577684 - DNA, 120 bp, Artificial Sequence
  ENSG00000171587_5 (sequence is synthesized)
tgtttgccagcaccacggggactctggtgccctgccccgcagcaggcatccctcctgtgactctcagatggtacctagccacgggcgaggagatctacgatgtccccgggatccgccacg

SEQ ID NO: 577685 - DNA, 120 bp, Artificial Sequence
  ENSG00000171587_6 (sequence is synthesized)
tccaccccaacggcactctccaaattttccccttccctccttcaagcttcagtaccttaatccatgataatacttattattgcacagctgaaaatccttcagggaaaattagaagtcagg

SEQ ID NO: 577686 - DNA, 120 bp, Artificial Sequence
  ENSG00000171587_7 (sequence is synthesized)
atgtccacatcaaggctgttttacgggagccctatacagtccgtgtggaggaccagaaaaccatgagaggcaatgttgcggtcttcaagtgcattatcccctcctcggtggaggcgtaca

SEQ ID NO: 577687 - DNA, 120 bp, Artificial Sequence
  ENSG00000171587_8 (sequence is synthesized)
tcactgtcgtctcatgggagaaagacactgtttcacttgtctcaggatctagatttctcatcacatccacgggagccttgtatattaaagatgtacagaatgaagatggattgtataact

SEQ ID NO: 577688 - DNA, 120 bp, Artificial Sequence
  ENSG00000171587_9 (sequence is synthesized)
accgctgcatcacgcggcatcgatacaccggagagacgaggcagagcaacagcgccagactttttgtatcagacccagcgaactcagccccatccatactggatgggtttgaccatcgca

SEQ ID NO: 577689 - DNA, 120 bp, Artificial Sequence
  ENSG00000171587_10 (sequence is synthesized)
aagccatggctgggcagcgtgtggagctgccttgcaaagcgctcgggcaccctgagccagattaccgctggctgaaggacaacatgcccctggaactttcagggaggttccagaagaccg

SEQ ID NO: 577690 - DNA, 120 bp, Artificial Sequence
  ENSG00000171587_11 (sequence is synthesized)
tgacggggctgctcattgagaacattcgcccctcggactcaggcagctatgtttgtgaagtgtccaacagatacggaactgctaaggtgataggccgcctgtacgtgaaacagccactga

SEQ ID NO: 577691 - DNA, 120 bp, Artificial Sequence
  ENSG00000171587_12 (sequence is synthesized)
aagccaccatcagtcccaggaaggttaaaagcagcgtgggtagccaagtttccttgtcctgcagcgtgacaggaactgaggaccaggaactctcctggtaccgcaatggtgaaatcctca

SEQ ID NO: 577692 - DNA, 120 bp, Artificial Sequence
  ENSG00000171587_13 (sequence is synthesized)
accctggaaaaaatgtgaggatcacagggatcaaccacgaaaaccttataatggatcacatggtcaaaagtgacgggggcgcataccagtgctttgtgcgcaaggacaagctgtccgctc

SEQ ID NO: 577693 - DNA, 120 bp, Artificial Sequence
  ENSG00000171587_14 (sequence is synthesized)
aagactatgtgcaggtggtccttgaagatggaactcccaaaattatttctgcctttagtgaaaaggtggtgagtccagcagagccggtttcccttatgtgcaacgtgaagggaacacctt

SEQ ID NO: 577694 - DNA, 120 bp, Artificial Sequence
  ENSG00000171587_15 (sequence is synthesized)
tgcccacgatcacgtggaccctggacgatgacccgattctcaagggtggcagtcaccgcatcagccagatgatcacgtcggaggggaacgtggtcagctacctgaacatctccagctccc

SEQ ID NO: 577695 - DNA, 120 bp, Artificial Sequence
  ENSG00000171587_16 (sequence is synthesized)
aggtccgggacgggggagtctaccgctgcactgccaacaactcggcgggagtcgtcctgtaccaggctcgaataaacgtaagagggcctgcaagcattcgaccaatgaaaaacatcacag

SEQ ID NO: 577696 - DNA, 120 bp, Artificial Sequence
  ENSG00000171587_17 (sequence is synthesized)
caatagcaggacgggacacatacattcactgtcgtgtgattggctatccgtattactccattaaatggtacaagaactctaacctgcttcctttcaaccaccgccaagtggcatttgaga

SEQ ID NO: 577697 - DNA, 120 bp, Artificial Sequence
  ENSG00000171587_18 (sequence is synthesized)
acaatggaactcttaaactttcagatgtgcaaaaggaagtggacgagggggagtacacgtgcaacgtgttggttcaaccacaactctccaccagccagagcgtccacgtgaccgtgaaag

SEQ ID NO: 577698 - DNA, 120 bp, Artificial Sequence
  ENSG00000171587_19 (sequence is synthesized)
ttccgcctttcatacaaccctttgagtttccaagattctccattgggcagcgggtcttcatcccctgtgttgtggtctcaggggacttacccatcacgatcacctggcagaaggatggcc

SEQ ID NO: 577699 - DNA, 120 bp, Artificial Sequence
  ENSG00000171587_20 (sequence is synthesized)
ggccaatccctgggagccttggggtgaccattgacaatattgacttcacgagctccttgaggatttccaatctctcgctcatgcacaatgggaattacacctgcatagcccggaatgagg

SEQ ID NO: 577700 - DNA, 120 bp, Artificial Sequence
  ENSG00000171587_21 (sequence is synthesized)
ccgccgctgtggagcaccaaagccagttgattgtcagagttcctcccaagtttgtggttcagccacgggaccaggacgggatttatggcaaagcagtcatcctcaattgttctgctgagg

SEQ ID NO: 577701 - DNA, 120 bp, Artificial Sequence
  ENSG00000171587_22 (sequence is synthesized)
gttaccctgtacctaccatcgtgtggaaattctctaaaggtgctggggttccccagttccagccaattgccctaaatggccgaatccaagttctcagcaatgggtcgttgctgatcaagc

SEQ ID NO: 577702 - DNA, 120 bp, Artificial Sequence
  ENSG00000171587_23 (sequence is synthesized)
atgtcgtggaggaagacagtggctactacctctgcaaggtcagcaacgatgtgggcgcagacgtcagcaagtccatgtacctcacggttaaaattcctgcgatgataacatcctatccaa

SEQ ID NO: 577703 - DNA, 120 bp, Artificial Sequence
  ENSG00000171587_24 (sequence is synthesized)
atactaccctggccacgcaggggcagaaaaaggagatgagctgcacggcgcatggtgagaagcccattatagtccgctgggagaaggaggaccgaatcattaaccctgagatggcccgtt

SEQ ID NO: 577704 - DNA, 120 bp, Artificial Sequence
  ENSG00000171587_25 (sequence is synthesized)
atcttgtgtccaccaaggaggtgggagaagaggtgatttctactctgcagattttgccaactgtgagagaagattctggtttcttttcctgccatgctattaattcttatggggaggacc

SEQ ID NO: 577705 - DNA, 120 bp, Artificial Sequence
  ENSG00000171587_26 (sequence is synthesized)
gtggaataattcagctcacagtgcaagagcccccagaccctcccgaaattgagatcaaagatgtcaaagcacgcacaattacgctcaggtggaccatggggtttgatggaaacagtccca

SEQ ID NO: 577706 - DNA, 120 bp, Artificial Sequence
  ENSG00000171587_27 (sequence is synthesized)
tcacaggctacgatattgaatgcaaaaataaatcagactcctgggattctgctcagagaaccaaagatgtttcccctcagctgaactcggccaccatcattgatatccacccttcctcca

SEQ ID NO: 577707 - DNA, 120 bp, Artificial Sequence
  ENSG00000171587_28 (sequence is synthesized)
cctacagcatccgcatgtacgccaagaaccggattggcaagagcgagcccagcaacgagctcaccatcacggcggacgaggcagctcctgatggtccacctcaggaagttcacctggagc

SEQ ID NO: 577708 - DNA, 120 bp, Artificial Sequence
  ENSG00000171587_29 (sequence is synthesized)
ctatatcatctcagagcatcagggtcacatggaaggctcccaagaaacatttgcaaaatgggattatccgtggctaccaaataggttaccgagagtacagcactgggggtaacttccaat

SEQ ID NO: 577709 - DNA, 120 bp, Artificial Sequence
  ENSG00000171587_30 (sequence is synthesized)
tcaacattatcagtgtcgacaccagcggggacagtgaggtttacaccctggacaacctgaataagttcactcagtacggcctggtggtgcaggcctgtaaccgggccggcacggggcctt

SEQ ID NO: 577710 - DNA, 120 bp, Artificial Sequence
  ENSG00000171587_31 (sequence is synthesized)
cttctcaggaaatcatcaccaccactctcgaggatgtgcccagttacccccccgaaaatgtccaagccatagcaacatcaccagaaagcatatcaatatcctggtccacactttccaagg

SEQ ID NO: 577711 - DNA, 120 bp, Artificial Sequence
  ENSG00000171587_32 (sequence is synthesized)
aagccttgaatggaattctccaggggttcagagtcatttactgggccaacctcatggacggagagctgggtgagattaaaaacatcaccaccacacagccttcactggagctggacgggc

SEQ ID NO: 577712 - DNA, 120 bp, Artificial Sequence
  ENSG00000171587_33 (sequence is synthesized)
tggaaaagtacaccaactacagcatccaggtgctggccttcacccgcgcaggagacggggtcaggagtgagcagatcttcacccggaccaaagaggatgttccaggtcctcccgcgggtg

SEQ ID NO: 577713 - DNA, 120 bp, Artificial Sequence
  ENSG00000171587_34 (sequence is synthesized)
tgaaggcagcggcggcctcagcctccatggtctttgtgtcctggcttccccctctcaagctgaacggcatcatccgaaagtacactgtattctgctcccacccctatcccacagtgatca

SEQ ID NO: 577714 - DNA, 120 bp, Artificial Sequence
  ENSG00000171587_35 (sequence is synthesized)
gtaggaatcgtcagtacagcgtctgggtggtggctgttacttcagccggaagaggcaacagcagtgaaatcatcacagtcgagccactagcaaaagctcctgcacgaatcctgaccttca

SEQ ID NO: 577715 - DNA, 120 bp, Artificial Sequence
  ENSG00000171587_36 (sequence is synthesized)
gtgggacagtgactactccatggatgaaagacattgtcttgccttgtaaggctgttggggacccttctcctgcagtcaaatggatgaaagacagtaacgggacacccagtctagtaacga

SEQ ID NO: 577716 - DNA, 120 bp, Artificial Sequence
  ENSG00000171587_37 (sequence is synthesized)
ttgatgggcggaggagcatctttagcaacggaagcttcattattcgcacggtgaaagcagaagactccggctattacagctgcattgccaataacaactggggatctgatgaaattattt

SEQ ID NO: 577717 - DNA, 120 bp, Artificial Sequence
  ENSG00000171587_38 (sequence is synthesized)
taaacttacaagtacaagttccaccagatcagcctcggcttacagtctccaagaccacgtcttcctccatcaccctttcttggctccctggagacaacgggggcagctctatcagaggat

SEQ ID NO: 577718 - DNA, 120 bp, Artificial Sequence
  ENSG00000171587_39 (sequence is synthesized)
acatactgcagtactccgaggacaatagtgagcagtgggggagttttccaatcagccccagcgaacgttcctatcgcttggaaaatctcaaatgtgggacttggtataagttcacactga

SEQ ID NO: 577719 - DNA, 120 bp, Artificial Sequence
  ENSG00000171587_40 (sequence is synthesized)
cagcccaaaatggagtgggcccagggcgcataagtgaaatcatagaagcaaagaccttaggaaaagagccccagttctcaaaggagcaggagctgtttgccagcatcaacaccacacgcg

SEQ ID NO: 577720 - DNA, 120 bp, Artificial Sequence
  ENSG00000171587_41 (sequence is synthesized)
tgaggctgaacctcattggctggaatgatggcggctgccccatcacctccttcacactagagtacaggccctttgggaccacagtttggaccacagctcagaggacctctctctccaagt

SEQ ID NO: 577721 - DNA, 120 bp, Artificial Sequence
  ENSG00000171587_42 (sequence is synthesized)
cctacatcctgtatgacctgcaggaagccacctggtatgagctgcagatgcgggtgtgcaacagtgcgggctgcgcggagaagcaggccaacttcgctacgctgaactacgatggcagta

SEQ ID NO: 577722 - DNA, 120 bp, Artificial Sequence
  ENSG00000171587_43 (sequence is synthesized)
caattcctccactcattaagtcagttgtccaaaacgaagaagggctgacgaccaacgaggggctcaagatgctggtgaccatctcctgtatcctggtgggggtcttgctgctgtttgtgc

SEQ ID NO: 577723 - DNA, 120 bp, Artificial Sequence
  ENSG00000171587_44 (sequence is synthesized)
tcctgctggttgtgcggaggaggcggcgggagcagaggctaaagaggctgcgagatgcaaagagtttagctgaaatgctcatgagtaagaatacccggacttcagatacgttaagcaagc

SEQ ID NO: 577724 - DNA, 120 bp, Artificial Sequence
  ENSG00000171587_45 (sequence is synthesized)
aacagcagaccctgcgaatgcacatcgacatacccagggctcagcttttgattgaagagagagacacgatggagaccattgatgatcgctccacggttctgttgacggatgctgactttg

SEQ ID NO: 577725 - DNA, 120 bp, Artificial Sequence
  ENSG00000171587_46 (sequence is synthesized)
gagaggcagctaagcagaagtccctgacggtcactcacacggtccattaccaatcggtgtctcaggccactgggcccttagtggatgtttcagacgctcggccgggaacgaatcccacca

SEQ ID NO: 577726 - DNA, 120 bp, Artificial Sequence
  ENSG00000171587_47 (sequence is synthesized)
ccaggaggaatgccaaggctgggcccacagcgagaaaccgctatgccagccagtggaccctcaaccgaccccaccccaccatctcagcacacaccctcaccacagactggaggctgccaa

SEQ ID NO: 577727 - DNA, 120 bp, Artificial Sequence
  ENSG00000171587_48 (sequence is synthesized)
cacccagggctgcaggatcagtagacaaagagagcgacagttacagcgtcagcccctcgcaagacacagatcgagcaagaagcagcatggtctccacagaaagtgcctcctccacttacg

SEQ ID NO: 577728 - DNA, 120 bp, Artificial Sequence
  ENSG00000171587_49 (sequence is synthesized)
aagaactggccagggcctacgaacacgccaagatggaagagcaactgaggcacgccaagttcaccatcacggagtgcttcatatcagacacgtcatcggagcagttgacggcagggacaa

SEQ ID NO: 577729 - DNA, 120 bp, Artificial Sequence
  ENSG00000171587_50 (sequence is synthesized)
atgagtacacggacagtctgacctccagcaccccttccgaatcgggaatctgcaggttcactgcatctccccccaaacctcaggatggaggaagagtaatgaatatggcagttccaaagg

SEQ ID NO: 577730 - DNA, 120 bp, Artificial Sequence
  ENSG00000171587_51 (sequence is synthesized)
cacatcggccaggtgacctcatacatttgcctccataccttagaatggactttttgttaaaccgaggtggtccaggcaccagcagggacctgagcttaggacaagcatgcttggaacctc

SEQ ID NO: 577731 - DNA, 120 bp, Artificial Sequence
  ENSG00000171587_52 (sequence is synthesized)
agaaaagccggaccctgaagcgccccacggtcctggagcccatcccgatggaagccgcctcctccgcctcctccacgagagaaggacagtcgtggcagccgggggccgtggccacattac

SEQ ID NO: 577732 - DNA, 120 bp, Artificial Sequence
  ENSG00000171587_53 (sequence is synthesized)
ctcagcgggagggagcagagctgggacaggcagctaaaatgagcagctcccaagaatcactgctcgactcccggggccatttgaaaggaaacaatccttacgcaaaatcttacaccctgg

SEQ ID NO: 577733 - DNA, 120 bp, Artificial Sequence
  ENSG00000171587_54 (sequence is synthesized)
tataacagacagcatgactggacagcggttgtaaatacaattcaaacaattcaatcaaagctaccttttttttacggaattccaatatttataattaaagaaaattgccaaaatatatta

SEQ ID NO: 577734 - DNA, 120 bp, Artificial Sequence
  ENSG00000171587_55 (sequence is synthesized)
aaaaaaaaaaagagaaaatactgaaaccacagacagtgcaaagactctcctgctttttttctgtctgagtgtgagctccatccgcctgggcatctgattttttgggaaagaagtccagtt

SEQ ID NO: 577735 - DNA, 120 bp, Artificial Sequence
  ENSG00000171587_56 (sequence is synthesized)
ttatgatcttcacaggctattgcatttttactgattttctacaaaagtgcatgggggggattaattaaaccttctgactggaagttctatcacacaagaggcaagaaagaaaacagggtg

SEQ ID NO: 577736 - DNA, 120 bp, Artificial Sequence
  ENSG00000171587_57 (sequence is synthesized)
ggtgggaaatcagcctatttgtgaatttaaaaggaacaccgatttgcgggcaggggaaaacttcagtcacgtttgcacacctttctttcccattagaaaccgggttctcaatttggtctt

SEQ ID NO: 577737 - DNA, 120 bp, Artificial Sequence
  ENSG00000171587_58 (sequence is synthesized)
cttttgttgttaattaggatgagtgccgtcagtgaaggggtggggggaatcaatttggttttctctcttgtttcttttttaatttaatgagacactctttgcattttgtctaagcgaaat

SEQ ID NO: 577738 - DNA, 120 bp, Artificial Sequence
  ENSG00000171587_59 (sequence is synthesized)
aaaaaagaaaaggttgtctgcctttatttccatgtctgcttctctcgtcttctgccagtggcctggtcctccttcccattgacacttctgtttggaaacaccaggcctgaacccagagcc

SEQ ID NO: 577739 - DNA, 120 bp, Artificial Sequence
  ENSG00000171587_60 (sequence is synthesized)
caattcaataaaccagagtcgatactaacaccctgaactcctcaggaatctccaggaagcacaaagaaggtgcagctcctgctctcaagctggagaggacaaaatgcaggctggtctcca

SEQ ID NO: 577740 - DNA, 120 bp, Artificial Sequence
  ENSG00000171587_61 (sequence is synthesized)
ccgcaaccagaggccagcccaagtattcgaagcccgtcgcaaagctctgccccttgcctgcccatggccagagttcaactgactgtggcctatgggccaaatccagcctcctgctgtttt

SEQ ID NO: 577741 - DNA, 120 bp, Artificial Sequence
  ENSG00000171587_62 (sequence is synthesized)
ttaaataaagttttattgaaacaaggccacatgcactatttgctattgtctatggctgctttcatggcacaatggtagagctgaatagttgcagcagagatggtatagcccatgaagcct

SEQ ID NO: 577742 - DNA, 120 bp, Artificial Sequence
  ENSG00000171587_63 (sequence is synthesized)
aaaatatttattacctggcccattacaggaaacatttgccagacccgtgctctggagtctgaaatgtagccccagcttgcgtgacaaggggcaagatcgtgcatcttaccctccatgact

SEQ ID NO: 577743 - DNA, 120 bp, Artificial Sequence
  ENSG00000171587_64 (sequence is synthesized)
tttcctatctccactatgcctggtatgcaaatttgtgatagaccatcttaataaacattgcctgaatcctctgtaaccagaggaaagtgatgttcctctaaaatctaagtttttactttc

SEQ ID NO: 577744 - DNA, 120 bp, Artificial Sequence
  ENSG00000171587_65 (sequence is synthesized)
ctttccctcactttatctcccatgtggctcatcctaagagagaatttactcataaatagtcggaactgcattctttatcccacaaccctcacagggtttgctttatgaaagaggatgtaa

SEQ ID NO: 577745 - DNA, 120 bp, Artificial Sequence
  ENSG00000171587_66 (sequence is synthesized)
tcctcccctggctgcaacactccattccaggctcacttccataaaatggaaagataaacaggtctttgtgtcagagatttggcattaaccagaaaacatgatcaaatatccacagctgct

SEQ ID NO: 577746 - DNA, 120 bp, Artificial Sequence
  ENSG00000171587_67 (sequence is synthesized)
cagtctcccaggctgaagattctctacaggcttccattaaggccaccaacatagactggtgccagttattaccatcttgggaacatattcagaaatgtctttccttccctccctccctcc

SEQ ID NO: 577747 - DNA, 120 bp, Artificial Sequence
  ENSG00000171587_68 (sequence is synthesized)
ttctttcccatcctttcttccttctatttattttccaggcaggcccatttgtctgcttagattcagtgacacagaatgggtccaggaccatgtcaagaccacctgctgatgctagtgtta

SEQ ID NO: 577748 - DNA, 120 bp, Artificial Sequence
  ENSG00000171587_69 (sequence is synthesized)
gatgactccaggaatgtgaggtgtgcatccatggtttcagaatgtaatccgtgttgacgtgtactgtttgcatactctcagactgttttttttttatgcaaaagaaatgttactttctgg

SEQ ID NO: 577749 - DNA, 120 bp, Artificial Sequence
  ENSG00000171587_70 (sequence is synthesized)
gggaaaaaattaaaagtctatctttcatcaacctaaaacttctatatcccccaaacatagaagtttacctttttaacatttttctctcaacctgtacaaaaataaaaaaattctacatta

SEQ ID NO: 577750 - DNA, 120 bp, Artificial Sequence
  ENSG00000171595_0 (sequence is synthesized)
aggccggggttgccaagcaaccggtaaacgccgccgtttgaggagcaccggagccgcgaccgtggattgaacgcttccccagagacccagaagcagaaggagcggacccaggcagccggc

SEQ ID NO: 577751 - DNA, 120 bp, Artificial Sequence
  ENSG00000171595_1 (sequence is synthesized)
accatggagattgtgtacgtgtacgtcaagaagcgcagcgagttcgggaagcagtgcaatttctcggaccgccaggccgagctgaacatcgacatcatgcccaaccctgagctggccgag

SEQ ID NO: 577752 - DNA, 120 bp, Artificial Sequence
  ENSG00000171595_2 (sequence is synthesized)
cagttcgtggagcggaacccagtggacacgggcatccagtgctcgatcagcatgtcggaacacgaggccaactcagagcggtttgagatggagacccggggagttaaccatgtcgagggg

SEQ ID NO: 577753 - DNA, 120 bp, Artificial Sequence
  ENSG00000171595_3 (sequence is synthesized)
ggctggcccaaggacgtgaaccccctggagctggagcagaccatccgtttccggaagaaagtggagaaagatgagaactacgttaacgccatcatgcagctcggctctatcatggagcac

SEQ ID NO: 577754 - DNA, 120 bp, Artificial Sequence
  ENSG00000171595_4 (sequence is synthesized)
tgcatcaagcagaacaatgccattgacatctatgaagagtatttcaatgacgaggaggccatggaagtgatggaggaggacccttcagctaaaaccatcaatgtgttcagggacccccag

SEQ ID NO: 577755 - DNA, 120 bp, Artificial Sequence
  ENSG00000171595_5 (sequence is synthesized)
gaaatcaagagggctgccacacacctctcctggcaccccgatggcaacaggaagttggcagtggcatactcctgcttggattttcagcgggcacctgtgggcatgagcagcgattcatac

SEQ ID NO: 577756 - DNA, 120 bp, Artificial Sequence
  ENSG00000171595_6 (sequence is synthesized)
atctgggacctggaaaaccccaacaagcctgaacttgctctgaagccatcgtctccactcgtgacgttggagttcaaccccaaagattcccacgtactcctgggtggctgctacaatgga

SEQ ID NO: 577757 - DNA, 120 bp, Artificial Sequence
  ENSG00000171595_7 (sequence is synthesized)
cagatagcctgctgggacacccgaaagggcagcctggtggcggagctatccaccattgagtccagccaccgagaccctgtgtatggcaccatctggctgcagtcgaagacgggcaccgag

SEQ ID NO: 577758 - DNA, 120 bp, Artificial Sequence
  ENSG00000171595_8 (sequence is synthesized)
tgcttctcagcttccacggatgggcaggtcatgtggtgggacatccgaaagatgagcgagcccactgaagttgtgatcttggacatcaccaagaaggaacagttggaaaatgccttgggg

SEQ ID NO: 577759 - DNA, 120 bp, Artificial Sequence
  ENSG00000171595_9 (sequence is synthesized)
gagttcgaatctactttgcccaccaagttcatggtggggaccgagcagggcatcgtcatctcctgcaaccgcaaggccaagacgtcagctgaaaagattgtgtgcaccttcccgggccat

SEQ ID NO: 577760 - DNA, 120 bp, Artificial Sequence
  ENSG00000171595_10 (sequence is synthesized)
catggccccatctacgccctccagagaaaccccttctacccgaagaacttcctgacggttggcgactggacagcccgcatttggtctgaagacagccgggaatcgtccatcatgtggacc

SEQ ID NO: 577761 - DNA, 120 bp, Artificial Sequence
  ENSG00000171595_11 (sequence is synthesized)
aagtaccacatggcttacctcactgatgctgcctggagccccgtgaggccgaccgttttctttaccaccaggatggacggaaccctggatatctgggacttcatgttcgagcagtgcgat

SEQ ID NO: 577762 - DNA, 120 bp, Artificial Sequence
  ENSG00000171595_12 (sequence is synthesized)
cccaccctcagcttgaaggtgtgtgacgaggccctcttctgcctccgggtgcaggacaatgggtgtctcatcgcctgcggctcccagctggggacaaccaccctgctggaggtctcgcct

SEQ ID NO: 577763 - DNA, 120 bp, Artificial Sequence
  ENSG00000171595_13 (sequence is synthesized)
gggctctctaccctccagaggaatgagaagaacgtagcctcttccatgtttgagcgtgagacccggcgagagaagatcctggaggccaggcaccgggagatgcggctgaaggagaagggt

SEQ ID NO: 577764 - DNA, 120 bp, Artificial Sequence
  ENSG00000171595_14 (sequence is synthesized)
aaggcggagggcagggatgaggagcagaccgatgaggagctggccgtagacctggaggcgctggtcagcaaggccgaggaggagttcttcgacatcatcttcgcagagctgaagaagaag

SEQ ID NO: 577765 - DNA, 120 bp, Artificial Sequence
  ENSG00000171595_15 (sequence is synthesized)
gaggcagacgccataaagctgacgccagtgcctcagcaaccaagtccagaagaagaccaggtggtggaggagggagaggaagcagcgggggaagaaggggatgaagaagtggaagaagac

SEQ ID NO: 577766 - DNA, 120 bp, Artificial Sequence
  ENSG00000171595_16 (sequence is synthesized)
ttagcctagaagtcagccttcgactgcggcgctatccctgtgtgccttcctttcccacctcttgaccctcaaccagacttgcatggccatggcagggcctcgggaagaccttcaggagtg

SEQ ID NO: 577767 - DNA, 120 bp, Artificial Sequence
  ENSG00000171595_17 (sequence is synthesized)
gggaagggtttctcctccatgatcgaccctcctcgtccacctacaaatcaggaacagaaagtctgtccactttgaaaatacctttccaggcagctccctgaccatttggacacattgcca

SEQ ID NO: 577768 - DNA, 120 bp, Artificial Sequence
  ENSG00000171595_18 (sequence is synthesized)
cgacaggagcctccaagtatgtgggaggggacgggcgggacgagcttggctgttctgctgcacctgaatgctttctgttatcctaattcttgtaaaattaaatgaatcgtaacaatgcca

SEQ ID NO: 577769 - DNA, 120 bp, Artificial Sequence
  ENSG00000171595_19 (sequence is synthesized)
cctcccaatgtgctgggattacagttgtcagctaccgcgcctggccaaaatttttattgccctcctcagagagcaactgcaataactaaacagggtaatgcttagcatatagtcggcact

SEQ ID NO: 577770 - DNA, 120 bp, Artificial Sequence
  ENSG00000171595_20 (sequence is synthesized)
caggatttttttttaatgcggatgcagcttctggacaaattcctaggatctccccaccaccccttgcttcctgccccaaccagattgagaacctggagctgtcctggcaggacctgtgga

SEQ ID NO: 577771 - DNA, 120 bp, Artificial Sequence
  ENSG00000171595_21 (sequence is synthesized)
aaggagactcaggaggagctagcccgaggcctcccagtctgcatgtggcagaagccaggcgtgaacccaagtctgccagattcccccagctctgcccactttccgcactgtctgggccct

SEQ ID NO: 577772 - DNA, 120 bp, Artificial Sequence
  ENSG00000171595_22 (sequence is synthesized)
caccagccgcagagctggcacccgggttccagggtgctcagcgacccaggcttcagccatttggctgctttggtcctcgtggggttcacatcccaggggagtggggaaggcctgtcccct

SEQ ID NO: 577773 - DNA, 120 bp, Artificial Sequence
  ENSG00000171596_0 (sequence is synthesized)
gtcagtcagtccactggctcccgcgccgcgtctgtgtccgtcgctcggagggtggaagccggggtctcgcgggccgcgggccgcatgactcctctctgcctcaattgctctgtcctccct

SEQ ID NO: 577774 - DNA, 120 bp, Artificial Sequence
  ENSG00000171596_1 (sequence is synthesized)
ggagacctgtacccagggggtgcaaggaaccccatggcttgcaatggcagtgcggccagggggcactttgaccctgaggacttgaacctgactgacgaggcactgagactcaagtacctg

SEQ ID NO: 577775 - DNA, 120 bp, Artificial Sequence
  ENSG00000171596_2 (sequence is synthesized)
gggccccagcagacagagctgttcatgcccatctgtgccacatacctgctgatcttcgtggtgggcgctgtgggcaatgggctgacctgtctggtcatcctgcgccacaaggccatgcgc

SEQ ID NO: 577776 - DNA, 120 bp, Artificial Sequence
  ENSG00000171596_3 (sequence is synthesized)
acgcctaccaactactacctcttcagcctggccgtgtcggacctgctggtgctgctggtgggcctgcccctggagctctatgagatgtggcacaactaccccttcctgctgggcgttggt

SEQ ID NO: 577777 - DNA, 120 bp, Artificial Sequence
  ENSG00000171596_4 (sequence is synthesized)
ggctgctatttccgcacgctactgtttgagatggtctgcctggcctcagtgctcaacgtcactgccctgagcgtggaacgctatgtggccgtggtgcacccactccaggccaggtccatg

SEQ ID NO: 577778 - DNA, 120 bp, Artificial Sequence
  ENSG00000171596_5 (sequence is synthesized)
gtgacgcgggcccatgtgcgccgagtgcttggggccgtctggggtcttgccatgctctgctccctgcccaacaccagcctgcacggcatccggcagctgcacgtgccctgccggggccca

SEQ ID NO: 577779 - DNA, 120 bp, Artificial Sequence
  ENSG00000171596_6 (sequence is synthesized)
gtgccagactcagctgtttgcatgctggtccgcccacgggccctctacaacatggtagtgcagaccaccgcgctgctcttcttctgcctgcccatggccatcatgagcgtgctctacctg

SEQ ID NO: 577780 - DNA, 120 bp, Artificial Sequence
  ENSG00000171596_7 (sequence is synthesized)
ctcattgggctgcgactgcggcgggagaggctgctgctcatgcaggaggccaagggcaggggctctgcagcagccaggtccagatacacctgcaggctccagcagcacgatcggggccgg

SEQ ID NO: 577781 - DNA, 120 bp, Artificial Sequence
  ENSG00000171596_8 (sequence is synthesized)
agacaagtgaccaagatgctgtttgtcctggtcgtggtgtttggcatctgctgggccccgttccacgccgaccgcgtcatgtggagcgtcgtgtcacagtggacagatggcctgcacctg

SEQ ID NO: 577782 - DNA, 120 bp, Artificial Sequence
  ENSG00000171596_9 (sequence is synthesized)
gccttccagcacgtgcacgtcatctccggcatcttcttctacctgggctcggcggccaaccccgtgctctatagcctcatgtccagccgcttccgagagaccttccaggaggccctgtgc

SEQ ID NO: 577783 - DNA, 120 bp, Artificial Sequence
  ENSG00000171596_10 (sequence is synthesized)
ctcggggcctgctgccatcgcctcagaccccgccacagctcccacagcctcagcaggatgaccacaggcagcaccctgtgtgatgtgggctccctgggcagctgggtccaccccctggct

SEQ ID NO: 577784 - DNA, 120 bp, Artificial Sequence
  ENSG00000171596_11 (sequence is synthesized)
gggaacgatggcccagaggcgcagcaagagaccgatccatcctgagtggagccttaaagtggcttcacctggaggggccagagggtcacctggagctggggagacacatctgccttcctc

SEQ ID NO: 577785 - DNA, 120 bp, Artificial Sequence
  ENSG00000171596_12 (sequence is synthesized)
tgcagggatgccttcacgtactgtccctagttcagcctagaaattctgaccagcacctcagtttccctcagagggaaacagcaggaggagggatccctgactgctgaggactcacactga

SEQ ID NO: 577786 - DNA, 120 bp, Artificial Sequence
  ENSG00000171596_13 (sequence is synthesized)
tccctctggggactccctgccaccactgccagtttctgaaacggtcccactgggtcctcactgtccttcccagttcctgttcaggttctggcaggggcccagggatccaggggacctggt

SEQ ID NO: 577787 - DNA, 120 bp, Artificial Sequence
  ENSG00000171596_14 (sequence is synthesized)
tggcaggggcccagggatccaggggacctggttccaatctcagccctgctgtcaccaccttgtcatgcaccatcaagcatatcagtctacctttctttttttctgagacagagtctcact

SEQ ID NO: 577788 - DNA, 86 bp, Artificial Sequence
  ENSG00000171596_15 (sequence is synthesized)
aaactcttgacctcaggtgatccgccgacctcggcctcccaaagtcctccagtccacctttctaggccttggttccttgcctgaaa

SEQ ID NO: 577789 - DNA, 120 bp, Artificial Sequence
  ENSG00000171596_16 (sequence is synthesized)
agtccacctttctaggccttggttccttgcctgaaaaatgaaagaggcgctggctttccacagtgtcatgctttggcactttagctatggttttctttctgtgtgtgtgtaagccactgc

SEQ ID NO: 577790 - DNA, 120 bp, Artificial Sequence
  ENSG00000171596_17 (sequence is synthesized)
ttataataaaaccaacaataccctcagactgaaagggcggaagttattatctgcatctttatcaaccccaagccccacttcctccctgacctccccatgccctccccagcctctcccagc

SEQ ID NO: 577791 - DNA, 120 bp, Artificial Sequence
  ENSG00000171596_18 (sequence is synthesized)
acaagtggggcaaagccagcatgcaagcagaccccaccaccacagcccacctccgtcctcacatacgtgcaggctggctcgggagtccagtgagcagagcattggacttggctggccaga

SEQ ID NO: 577792 - DNA, 120 bp, Artificial Sequence
  ENSG00000171596_19 (sequence is synthesized)
gggtctctgagggcaagagacatggccaaccaagggcaaggagtgaccctgtggagggttctgccgaactcaatgcagtgagaagagggacagggacaagtagtccttgaaactgagccc

SEQ ID NO: 577793 - DNA, 120 bp, Artificial Sequence
  ENSG00000171596_20 (sequence is synthesized)
cattctgaatccctgcaggccaagtcattgctcagccaggactcagttcatggaggaaacttgtcctgctgcagtccctgagtcttgtcctcctgagaggaagccctggcttccaaggct

SEQ ID NO: 577794 - DNA, 120 bp, Artificial Sequence
  ENSG00000171596_21 (sequence is synthesized)
gggagctggaggatgaccttcggtcggtctgtctgggttctccctgcagacagcttcctagctcatgcccatagctcatgctccctgccgagaaagtggaggacgtggtacagggttgca

SEQ ID NO: 577795 - DNA, 120 bp, Artificial Sequence
  ENSG00000171596_22 (sequence is synthesized)
gatgtttagttttaaaaattcaattataaaaataataaatgctcatgatagaaaatttggaaagtgcaaataagcaaaaatgaaaacaattttaaaaatgtaaaacctctcttgccaggg

SEQ ID NO: 577796 - DNA, 120 bp, Artificial Sequence
  ENSG00000171596_23 (sequence is synthesized)
aatgggggaagggcaagtgaggagttctttaatgggtgaagagtttcagttttgcaaaatgaaaaagttctggagatcagttgtgcaacaatatgaatatacataacaatactgaactat

SEQ ID NO: 577797 - DNA, 85 bp, Artificial Sequence
  ENSG00000171596_24 (sequence is synthesized)
acactgaaatggttaagatgttataaaaagaggattaaatctaaaggaaagaaaaaattaaaaccacccataactttactctgaa

SEQ ID NO: 577798 - DNA, 120 bp, Artificial Sequence
  ENSG00000171603_0 (sequence is synthesized)
gagagagagcgccgccgccatcttagttgctgccgctgccttcagcaagacgctgctctgaggcggggagggcgccgcgtcctgagcgcgcggcccagcgtcacggcggcggcggcggcg

SEQ ID NO: 577799 - DNA, 120 bp, Artificial Sequence
  ENSG00000171603_1 (sequence is synthesized)
gctcctccttggacccccggagctccccgcgccgcggagcagctagccccaggcccctagagccccgagagctccgagagctccgctcggcgtcccgcgcgcctccctgccgctcccgcc

SEQ ID NO: 577800 - DNA, 120 bp, Artificial Sequence
  ENSG00000171603_2 (sequence is synthesized)
tcccgcgctggccccggccgcccggctgctgctggccgggctgctgtgcggcggcggggtctgggccgcgcgagttaacaagcacaagccctggctggagcccacctaccacggcatagt

SEQ ID NO: 577801 - DNA, 120 bp, Artificial Sequence
  ENSG00000171603_3 (sequence is synthesized)
ggctggagcccacctaccacggcatagtcacagagaacgacaacaccgtgctcctcgaccccccactgatcgcgctggataaagatgcgcctctgcgatttgcaggtgagatttgtggat

SEQ ID NO: 577802 - DNA, 120 bp, Artificial Sequence
  ENSG00000171603_4 (sequence is synthesized)
ttaaaattcacgggcagaatgtcccctttgatgcagtggtagtggataaatccactggtgagggagtcattcgctccaaagagaaactggactgtgagctgcagaaagactattcattca

SEQ ID NO: 577803 - DNA, 120 bp, Artificial Sequence
  ENSG00000171603_5 (sequence is synthesized)
ccatccaggcctatgattgtgggaagggacctgatggcaccaacgtgaaaaagtctcataaagcaactgttcatattcaggtgaacgacgtgaatgagtacgcgcccgtgttcaaggaga

SEQ ID NO: 577804 - DNA, 120 bp, Artificial Sequence
  ENSG00000171603_6 (sequence is synthesized)
agtcctacaaagccacggtcatcgaggggaagcagtacgacagcattttgagggtggaggccgtggatgccgactgctcccctcagttcagccagatttgcagctacgaaatcatcactc

SEQ ID NO: 577805 - DNA, 120 bp, Artificial Sequence
  ENSG00000171603_7 (sequence is synthesized)
cagacgtgccctttactgttgacaaagatggttatataaaaaacacagagaaattaaactacgggaaagaacatcaatataagctgaccgtcactgcctatgactgtgggaagaaaagag

SEQ ID NO: 577806 - DNA, 120 bp, Artificial Sequence
  ENSG00000171603_8 (sequence is synthesized)
ccacagaagatgttttggtgaagatcagcattaagcccacctgcacccctgggtggcaaggatggaacaacaggattgagtatgagccgggcaccggcgcgttggccgtctttccaaata

SEQ ID NO: 577807 - DNA, 120 bp, Artificial Sequence
  ENSG00000171603_9 (sequence is synthesized)
tccacctggagacatgtgacgagccagtcgcctcagtacaggccacagtggagctagaaaccagccacatagggaaaggctgcgaccgagacacctactcagagaagtccctccaccggc

SEQ ID NO: 577808 - DNA, 120 bp, Artificial Sequence
  ENSG00000171603_10 (sequence is synthesized)
tctgtggtgcggccgcgggcactgccgagctgctgccatccccgagtggatccctcaactggaccatgggcctgcccaccgacaatggccacgacagcgaccaggtgtttgagttcaacg

SEQ ID NO: 577809 - DNA, 120 bp, Artificial Sequence
  ENSG00000171603_11 (sequence is synthesized)
gcacccaggcagtgaggatcccggatggcgtcgtgtcggtcagccccaaagagccgttcaccatctcggtgtggatgagacatgggccattcggcaggaagaaggagacaattctttgca

SEQ ID NO: 577810 - DNA, 120 bp, Artificial Sequence
  ENSG00000171603_12 (sequence is synthesized)
gttctgataaaacagatatgaatcggcaccactactccctctatgtccacgggtgccggctgatcttcctcttccgtcaggatccttctgaggagaagaaatacagacctgcagagttcc

SEQ ID NO: 577811 - DNA, 120 bp, Artificial Sequence
  ENSG00000171603_13 (sequence is synthesized)
actggaagttgaatcaggtctgtgatgaggaatggcaccactacgtcctcaatgtagaattcccgagtgtgactctctatgtggatggcacgtcccacgagcccttctctgtgactgagg

SEQ ID NO: 577812 - DNA, 120 bp, Artificial Sequence
  ENSG00000171603_14 (sequence is synthesized)
attacccgctccatccatccaagatagaaactcagctcgtggtgggggcttgctggcaagagttttcaggagttgaaaatgacaatgaaactgagcctgtgactgtggcctctgcaggtg

SEQ ID NO: 577813 - DNA, 120 bp, Artificial Sequence
  ENSG00000171603_15 (sequence is synthesized)
gcgacctgcacatgacccagtttttccgaggcaatctggctggcttaactctccgttccgggaaactcgcggataagaaggtgatcgactgtctgtatacctgcaaggaggggctggacc

SEQ ID NO: 577814 - DNA, 120 bp, Artificial Sequence
  ENSG00000171603_16 (sequence is synthesized)
tgcaggtcctcgaagacagtggcagaggcgtgcagatccaagcacaccccagccagttggtattgaccttggagggagaagacctcggggaattggataaggccatgcagcacatctcgt

SEQ ID NO: 577815 - DNA, 120 bp, Artificial Sequence
  ENSG00000171603_17 (sequence is synthesized)
acctgaactcccggcagttccccacgcccggaattcgcagactcaaaatcaccagcacaatcaagtgttttaacgaggccacctgcatttcggtccccccggtagatggctacgtgatgg

SEQ ID NO: 577816 - DNA, 120 bp, Artificial Sequence
  ENSG00000171603_18 (sequence is synthesized)
ttttacagcccgaggagcccaagatcagcctgagtggcgtccaccattttgcccgagcagcttctgaatttgaaagctcagaaggggtgttccttttccctgagcttcgcatcatcagca

SEQ ID NO: 577817 - DNA, 120 bp, Artificial Sequence
  ENSG00000171603_19 (sequence is synthesized)
acctggatacctgtgaggtcacggtggagggagaggagctgaaccacgagcaggagagcctggaggtggacatggcccgcctgcagcagaagggcattgaagtgagcagctctgaactgg

SEQ ID NO: 577818 - DNA, 120 bp, Artificial Sequence
  ENSG00000171603_20 (sequence is synthesized)
gcatgaccttcacaggcgtggacaccatggccagctacgaggaggttttgcacctgctgcgctatcggaactggcatgccaggtccttgcttgaccggaagtttaagctcatctgctcag

SEQ ID NO: 577819 - DNA, 120 bp, Artificial Sequence
  ENSG00000171603_21 (sequence is synthesized)
agctgaatggccgctacatcagcaacgaatttaaggtggaggtgaatgtaatccacacggccaaccccatggaacacgccaaccacatggctgcccagccacagttcgtgcacccggaac

SEQ ID NO: 577820 - DNA, 120 bp, Artificial Sequence
  ENSG00000171603_22 (sequence is synthesized)
accgctcctttgttgacctgtcaggccacaacctggccaacccccacccgttcgcagtcgtccccagcactgcgacagttgtgatcgtggtgtgcgtcagcttcctggtgttcatgatta

SEQ ID NO: 577821 - DNA, 120 bp, Artificial Sequence
  ENSG00000171603_23 (sequence is synthesized)
tcctgggggtatttcggatccgggccgcacatcggcggaccatgcgggatcaggacaccgggaaggagaacgagatggactgggacgactctgccctgaccatcaccgtcaaccccatgg

SEQ ID NO: 577822 - DNA, 120 bp, Artificial Sequence
  ENSG00000171603_24 (sequence is synthesized)
agacctatgaggaccagcacagcagtgaggaggaggaggaagaggaagaggaagaggaaagcgaggacggcgaagaagaggatgacatcaccagcgccgagtcggagagcagcgaggagg

SEQ ID NO: 577823 - DNA, 120 bp, Artificial Sequence
  ENSG00000171603_25 (sequence is synthesized)
aggagggggagcagggcgacccccagaacgcaacccggcagcagcagctggagtgggatgactccaccctcagctactgacccgtgcccccggccacctcggtttctgctttcgaagact

SEQ ID NO: 577824 - DNA, 120 bp, Artificial Sequence
  ENSG00000171603_26 (sequence is synthesized)
ctgctgccatccgttctcccagtcccaagggtccacgatgtacaaagtcatttcggccagtaggtgtgcagacccctccccgccacgatcgtcgctgtgcttggtgtgtaggaccctagg

SEQ ID NO: 577825 - DNA, 120 bp, Artificial Sequence
  ENSG00000171603_27 (sequence is synthesized)
ctccccgcccaccctctgcctggtcgcgctcttcagtcccacgaggagctgacacgtcctctctggccgccatccggctcgcacaggggcctcccagcgcctcaggccccgcgtttgtgt

SEQ ID NO: 577826 - DNA, 120 bp, Artificial Sequence
  ENSG00000171603_28 (sequence is synthesized)
ctggagtctccccccggggagaggacactggcccctcgcactccagaaaagccatgccagctgggctcgttgacaaagggtaaaacatgctcactcccacccggtaatcatttttttctt

SEQ ID NO: 577827 - DNA, 120 bp, Artificial Sequence
  ENSG00000171603_29 (sequence is synthesized)
tttttaaaaaaagtttttattttttccaaactagtgcatgtataaataatggcaggatggggggtactgtgtagatgattaactgactttttaatattttgtaaataaatcggattcctt

SEQ ID NO: 577828 - DNA, 120 bp, Artificial Sequence
  ENSG00000171603_30 (sequence is synthesized)
gtgtcctttgtgctagtgtaacccgggactggaatgtaaagtgaagttcggagctctgagcacgggctcttcccgccgggtcctccctccccagaccccagagggagaggcccaccccgc

SEQ ID NO: 577829 - DNA, 120 bp, Artificial Sequence
  ENSG00000171603_31 (sequence is synthesized)
ccagccccgccccagcccctgctcaggtctgagtatggctgggagtcgggggccacaggcctctagctgtgctgctcaagagactggatcagggtagctacaagtggccgggccttgcct

SEQ ID NO: 577830 - DNA, 120 bp, Artificial Sequence
  ENSG00000171603_32 (sequence is synthesized)
ttgggattctacctgttcctaatttggtgtggggtgcggggtccctggccccttttccacactcctcctccgacagcagctccctgggcagtggcctggtctcaccgtgtgcagccttgt

SEQ ID NO: 577831 - DNA, 120 bp, Artificial Sequence
  ENSG00000171603_33 (sequence is synthesized)
ggtttatgcttaaatgtacattttcctgctggtaaaaggagaaactgagaggtgtcctgcagaccggctgaccactccttttggagacggcaggaggcctgagcgatccgtactcagaac

SEQ ID NO: 577832 - DNA, 120 bp, Artificial Sequence
  ENSG00000171603_34 (sequence is synthesized)
gtccaggagagacgcatggcccgaagtcaaagtgctggaattttccaaaacagcctgttctctcctctctcctccccagagcaccccctgccatcaggggggttgaaatccctctccccc

SEQ ID NO: 577833 - DNA, 120 bp, Artificial Sequence
  ENSG00000171603_35 (sequence is synthesized)
aggagccctgctgctttgcttggtggtagggcaggagagcaaacaaacagtcatggtctaaaacccacatagcactttgctcttagttacatgtaaaattttagatttctaaaacaggtg

SEQ ID NO: 577834 - DNA, 120 bp, Artificial Sequence
  ENSG00000171603_36 (sequence is synthesized)
ggcaatcattttgaatactgttctgtgaccctgactgctagttctgaggacactggtggctgtgctatgtgtggccatcctccatgtcccgtccctgtagctgctctgtttagacagcgg

SEQ ID NO: 577835 - DNA, 120 bp, Artificial Sequence
  ENSG00000171603_37 (sequence is synthesized)
acagacgctcacgcccaggggatgtcctcacgctgtcgccgcgcggtttcccttcgcagatgtgtatactcatgataggtcagaaagtgtatccgctacaataaagttctggttctaact

SEQ ID NO: 577836 - DNA, 120 bp, Artificial Sequence
  ENSG00000171603_38 (sequence is synthesized)
gtctcctggaccccctttcgtgacccctctcaacacctctactggggagacgaggaccccgaggttctggggggcgacgcgacctgcccgaagtgacaagggtcctgggccgcactgctc

SEQ ID NO: 577837 - DNA, 120 bp, Artificial Sequence
  ENSG00000171603_39 (sequence is synthesized)
cgccggggtctgcgctcctcggcggagcgggtgggaaggatgagtcctcggggtggagaaggaggagcgggtccccgggtaccgctcacccggccttaggagcccgggagcgcgcgtagg

SEQ ID NO: 577838 - DNA, 120 bp, Artificial Sequence
  ENSG00000171603_40 (sequence is synthesized)
gacgcggagttgaggctctccatctgcggccagggaaagggatacagtcccccgggcccctcccggccgctcggaacccaccccaggcgcgtccccgcgggcgcgcgctccaggcggggc

SEQ ID NO: 577839 - DNA, 120 bp, Artificial Sequence
  ENSG00000171603_41 (sequence is synthesized)
atgtaacactgtgagagtaagtggagactgagctgtgtagctccgtctcttctgttgaaactcttcaggatggatttagtgcgtgttagggctcagggaggacaggttgagggttaagca

SEQ ID NO: 577840 - DNA, 120 bp, Artificial Sequence
  ENSG00000171603_42 (sequence is synthesized)
tcccaagcatatgtttatttctggctgagtatttacagggcttaaagcctatgcattttgtctttccgcctaggacaacaaaagtaaaaccagcatgggttttggctctcactgttgttt

SEQ ID NO: 577841 - DNA, 120 bp, Artificial Sequence
  ENSG00000171604_0 (sequence is synthesized)
ggcggcggcagaggcggctgagcctgagcggggatgtagaggcggcggcagcagaggcggcactggcggcaagagcagacgcccgagccgagcgagaagagcggcagagccttatcccct

SEQ ID NO: 577842 - DNA, 120 bp, Artificial Sequence
  ENSG00000171604_1 (sequence is synthesized)
cgcgtcccagccctgcccagcccgcgcccagccatgcgcgccgcctgctgagtccgggcgccgcacgctgagccctccgcccgcgagccgcgctcagctcgggggtgattagttgctttt

SEQ ID NO: 577843 - DNA, 120 bp, Artificial Sequence
  ENSG00000171604_2 (sequence is synthesized)
ttagttgctttttgttgttttttaatttgggccgcggggagggggaggaggggcaggtgctgcaggctcccccccctccccgcctcgggccagccgcggcggcgcgactcgggctccgga

SEQ ID NO: 577844 - DNA, 120 bp, Artificial Sequence
  ENSG00000171604_3 (sequence is synthesized)
cggagcgcaccgcggcggtggtgcccagagcggagcgcagctccctgccccgcccctccccctcggcctcgcggcgacggcggcggtggcggcttggacgactcggagagccgagtgaag

SEQ ID NO: 577845 - DNA, 120 bp, Artificial Sequence
  ENSG00000171604_4 (sequence is synthesized)
gacgactcggagagccgagtgaagacatttccacctggacacctgaccatgtgcctgccctgagcagcgaggcccaccaggcatctctgttgtgggcagcagggccaggtcctggtctgt

SEQ ID NO: 577846 - DNA, 120 bp, Artificial Sequence
  ENSG00000171604_5 (sequence is synthesized)
ggaccctcggcagttggcaggctccctctgcagtggggtctgggcctcggccccaccatgtcgagcctcggcggtggctcccaggatgccggcggcagtagcagcagcagcaccaatggc

SEQ ID NO: 577847 - DNA, 120 bp, Artificial Sequence
  ENSG00000171604_6 (sequence is synthesized)
agcggtggcagtggcagcagtggcccaaaggcaggagcagcagacaagagtgcagtggtggctgccgccgcaccagcctcagtggcagatgacacaccaccccccgagcgtcggaacaag

SEQ ID NO: 577848 - DNA, 120 bp, Artificial Sequence
  ENSG00000171604_7 (sequence is synthesized)
agcggtatcatcagtgagcccctcaacaagagcctgcgccgctcccgcccgctctcccactactcttcttttggcagcagtggtggtagtggcggtggcagcatgatgggcggagagtct

SEQ ID NO: 577849 - DNA, 120 bp, Artificial Sequence
  ENSG00000171604_8 (sequence is synthesized)
gctgacaaggccactgcggctgcagccgctgcctccctgttggccaatgggcatgacctggcggcggccatggcggtggacaaaagcaaccctacctcaaagcacaaaagtggtgctgtg

SEQ ID NO: 577850 - DNA, 120 bp, Artificial Sequence
  ENSG00000171604_9 (sequence is synthesized)
gccagcctgctgagcaaggcagagcgggccacggagctggcagccgagggacagctgacgctgcagcagtttgcgcagtccacagagatgctgaagcgcgtggtgcaggagcatctcccg

SEQ ID NO: 577851 - DNA, 120 bp, Artificial Sequence
  ENSG00000171604_10 (sequence is synthesized)
ccctacctgggcgctttccccatcaacccaggcctcttcattatgaccccggcaggtgtgttcctggccgagagcgcgctgcacatggcgggcctggctgagtaccccatgcagggagag

SEQ ID NO: 577852 - DNA, 120 bp, Artificial Sequence
  ENSG00000171604_11 (sequence is synthesized)
ctggcctctgccatcagctccggcaagaagaagcggaaacgctgcggcatgtgcgcgccctgccggcggcgcatcaactgcgagcagtgcagcagttgtaggaatcgaaagactggccat

SEQ ID NO: 577853 - DNA, 120 bp, Artificial Sequence
  ENSG00000171604_12 (sequence is synthesized)
cagatttgcaaattcagaaaatgtgaggaactcaaaaagaagccttccgctgctctggagaaggtgatgcttccgacgggagccgccttccggtggtttcagtgacggcggcggaaccca

SEQ ID NO: 577854 - DNA, 120 bp, Artificial Sequence
  ENSG00000171604_13 (sequence is synthesized)
aagctgccctctccgtgcaatgtcactgctcgtgtggtctccagcaagggattcgggcgaagacaaacggatgcacccgtctttagaaccaaaaatattctctcacagatttcattcctg

SEQ ID NO: 577855 - DNA, 120 bp, Artificial Sequence
  ENSG00000171604_14 (sequence is synthesized)
tttttatatatatattttttgttgtcgttttaacatctccacgtccctagcataaaaagaaaaagaaaaaaatttaaactgctttttcggaagaacaacaacaaaaaagaggtaaagacg

SEQ ID NO: 577856 - DNA, 120 bp, Artificial Sequence
  ENSG00000171604_15 (sequence is synthesized)
aatctataaagtaccgagacttcctgggcaaagaatggacaatcagtttccttcctgtgtcgatgtcgatgttgtctgtgcaggagatgcagtttttgtgtagagaatgtaaattttctg

SEQ ID NO: 577857 - DNA, 120 bp, Artificial Sequence
  ENSG00000171604_16 (sequence is synthesized)
taaccttttgaaatctagttactaataagcactactgtaatttagcacagtttaactccaccctcatttaaacttcctttgattctttccgaccatgaaatagtgcatagtttgcctgga

SEQ ID NO: 577858 - DNA, 120 bp, Artificial Sequence
  ENSG00000171604_17 (sequence is synthesized)
gaatccactcacgttcataaagagaatgttgatggcgccgtgtagaagccgctctgtatccatccacgcgtgcagagctgccagcagggagctcacagaaggggagggagcaccaggcca

SEQ ID NO: 577859 - DNA, 120 bp, Artificial Sequence
  ENSG00000171604_18 (sequence is synthesized)
gctgagctgcacccacagtcccgagactgggatcccccaccccaacagtgattttggaaaaaaaaatgaaagttctgttcgtttatccattgcgatctggggagccccatctcgatattt

SEQ ID NO: 577860 - DNA, 120 bp, Artificial Sequence
  ENSG00000171604_19 (sequence is synthesized)
ccaatcctggctacttttcttagagaaaataagtcctttttttctggccttgctaatggcaacagaagaaagggcttctttgcgtggtcccctgctggtgggggtgggtccccagggggc

SEQ ID NO: 577861 - DNA, 120 bp, Artificial Sequence
  ENSG00000171604_20 (sequence is synthesized)
cccctgcggcctgggcccccctgcccacggccagcttcctgctgatgaacatgctgtttgtattgttttaggaaaccaggctgttttgtgaataaaacgaatgcatgtttgtgtcacgaa

SEQ ID NO: 577862 - DNA, 120 bp, Artificial Sequence
  ENSG00000171604_21 (sequence is synthesized)
gcttagcattccaggccctgggcatctccaagtgccccaggtgggggcactctcctggggtctgtgacagcttgcccccaaccacggagaggtgacaggcacgagatagagtttcaccat

SEQ ID NO: 577863 - DNA, 120 bp, Artificial Sequence
  ENSG00000171604_22 (sequence is synthesized)
cggggttcggtgcgcggccggggccggagttcgctgcaagtcggcggaaagtttggctgcgcgggttcccccgaagttcagggtcctcttgcctgcccagcttgggctgatggagacaga

SEQ ID NO: 577864 - DNA, 120 bp, Artificial Sequence
  ENSG00000171604_23 (sequence is synthesized)
tgtaattatggaattttgcttgggaaattaatttgaaaaagttaattaattggtggttccggaggtggcgggctccacgcccggccagtcttgctgacgtcagtgctgacccactggaga

SEQ ID NO: 577865 - DNA, 120 bp, Artificial Sequence
  ENSG00000171604_24 (sequence is synthesized)
cccccggggttcggtgcgcggccggggccggagttcgctgcaagtcggcggaaagtttggctgcgcgggttcccccgaagttcagagatagagtttcaccatgttgtccagggtggtctc

SEQ ID NO: 577866 - DNA, 120 bp, Artificial Sequence
  ENSG00000171604_25 (sequence is synthesized)
actgcgttttcttcgcctcgcagaggaaggtcggccttgcacaaatccgcccccacgaatcccaaagaattggagaaaacttccactttgggattatatgcagttgggattatatgagcc

SEQ ID NO: 577867 - DNA, 120 bp, Artificial Sequence
  ENSG00000171604_26 (sequence is synthesized)
gatttttgccctgggaagagatgggaacagctgaaggagattggcctccgagttcccagccagcccccggaacttgggtagaacccccctacccctcatcctcgcagtagctgggtctct

SEQ ID NO: 577868 - DNA, 120 bp, Artificial Sequence
  ENSG00000171606_0 (sequence is synthesized)
gcgaaacctgcgtccgtcgggggctgcgctgggcgggtccagaaccgttagttgggggcgagcgcggcctctgcattttccgccgagctcgggtaccctgagccggccgtgcctgcagtc

SEQ ID NO: 577869 - DNA, 120 bp, Artificial Sequence
  ENSG00000171606_1 (sequence is synthesized)
ctcccgccgctctgtgggatggggactctgcccacttccaccagagacacattgagaaggaggaaactatggcctccaggcttccgacggcctggtcctgtgaaccagtgacctttgaag

SEQ ID NO: 577870 - DNA, 120 bp, Artificial Sequence
  ENSG00000171606_2 (sequence is synthesized)
atgtaacactgggttttaccccggaagagtggggactgctggacctcaaacagaagtccctgtacagggaagtgatgctggagaactacaggaacctggtctcagtggaacatcagcttt

SEQ ID NO: 577871 - DNA, 120 bp, Artificial Sequence
  ENSG00000171606_3 (sequence is synthesized)
ccaaaccagatgtggtatctcagttagaggaggcagaagatttctggccagtggagagaggaattcctcaagacaccattccagagtatcctgagctccagctggaccctaaattggatc

SEQ ID NO: 577872 - DNA, 120 bp, Artificial Sequence
  ENSG00000171606_4 (sequence is synthesized)
ctcttcctgctgagagtcccctaatgaacattgaggttgttgaggtcctcacactgaaccaggaggtggctggtccccggaatgcccagatccaggccctatatgctgaagatggaagcc

SEQ ID NO: 577873 - DNA, 120 bp, Artificial Sequence
  ENSG00000171606_5 (sequence is synthesized)
tgagtgcagatgcccccagtgagcaggtccaacagcagggcaagcatccaggtgaccctgaggccgcgcgccagaggttccggcagttccgttataaggacatgacaggtccccgggagg

SEQ ID NO: 577874 - DNA, 120 bp, Artificial Sequence
  ENSG00000171606_6 (sequence is synthesized)
ccctggaccagctccgagagctgtgtcaccagtggctacagcctaaggcacgctccaaggagcagatcctggagctgctggtgctggagcagttcctaggtgcactgcctgtgaagctcc

SEQ ID NO: 577875 - DNA, 120 bp, Artificial Sequence
  ENSG00000171606_7 (sequence is synthesized)
ggacatgggtggaatcgcagcacccagagaactgccaagaggtggtggccctggtagagggtgtgacctggatgtctgaggaggaagtacttcctgcaggacaacctgccgagggcacca

SEQ ID NO: 577876 - DNA, 120 bp, Artificial Sequence
  ENSG00000171606_8 (sequence is synthesized)
cctgctgcctcgaggtcactgcccagcaggaggagaagcaggaggatgcagccatctgcccagtgacagtgctccctgaggagccagtgaccttccaggatgtggctgtggacttcagcc

SEQ ID NO: 577877 - DNA, 120 bp, Artificial Sequence
  ENSG00000171606_9 (sequence is synthesized)
gggaggagtgggggctgctgggcccgacacagaggaccgagtaccgcgatgtgatgctggagacctttgggcacctggtctctgtggggtgggagactacactggaaaataaagagttag

SEQ ID NO: 577878 - DNA, 120 bp, Artificial Sequence
  ENSG00000171606_10 (sequence is synthesized)
gcctgaaagtacaagaatcctcaagggattgtgccttgtcctctacattagaagataccttgcagggtggggtccaggaagtccaagacacagtgttgaagcagatggagtctgctcagg

SEQ ID NO: 577879 - DNA, 120 bp, Artificial Sequence
  ENSG00000171606_11 (sequence is synthesized)
aaaaagaccttcctcagaagaagcactttgacaaccgtgagtcccaggcaaacagtggtgctcttgacacaaaccaagtttcgctccagaaaattgacaaccctgagtcccaggcaaaca

SEQ ID NO: 577880 - DNA, 120 bp, Artificial Sequence
  ENSG00000171606_12 (sequence is synthesized)
gtggcgctcttgacacaaaccaagttttgctccacaaaattcctcctagaaaacgattgcgcaaacgtgactcacaagttaaaagtatgaaacataattcacgtgtaaaaattcatcaga

SEQ ID NO: 577881 - DNA, 120 bp, Artificial Sequence
  ENSG00000171606_13 (sequence is synthesized)
agagctgtgaaaggcaaaaggccaaggaaggcaatggttgtaggaaaaccttcagtcggagtactaaacagattacgtttataagaattcacaaggggagccaagtttgccgatgcagtg

SEQ ID NO: 577882 - DNA, 120 bp, Artificial Sequence
  ENSG00000171606_14 (sequence is synthesized)
aatgtggtaaaatattccggaacccaagatacttttctgtgcataagaaaatccataccggagagaggccctatgtgtgtcaagactgtgggaaaggatttgttcagagctcttccctca

SEQ ID NO: 577883 - DNA, 120 bp, Artificial Sequence
  ENSG00000171606_15 (sequence is synthesized)
cacagcatcagagagttcattctggagagagaccatttgaatgtcaggagtgtgggaggaccttcaatgatcgctcagccatctcccagcacctgaggactcacactggcgctaagccct

SEQ ID NO: 577884 - DNA, 120 bp, Artificial Sequence
  ENSG00000171606_16 (sequence is synthesized)
acaagtgtcaggactgtggaaaagccttccgccagagctcccacctcatcagacatcagaggactcacaccggggagcgcccatatgcatgcaacaaatgtggaaaggccttcacccaga

SEQ ID NO: 577885 - DNA, 120 bp, Artificial Sequence
  ENSG00000171606_17 (sequence is synthesized)
gctcacaccttattgggcaccagagaacccacaataggacaaagcgaaagaagaaacagcctacctcatagctctcaagccagttgaagaaaccttgccttttcagcttgaccctgcaat

SEQ ID NO: 577886 - DNA, 120 bp, Artificial Sequence
  ENSG00000171606_18 (sequence is synthesized)
ataacatgcacaggcctgcttgtgaatcaggactgaatgtgaaagggaagtattgagtgaggacattcccaaaaccaaaggacaactgaggagactgcccagcacataatgaataaataa

SEQ ID NO: 577887 - DNA, 120 bp, Artificial Sequence
  ENSG00000171606_19 (sequence is synthesized)
gaaaatgagtgaggagttattaacatcatttggaaaaaagatttcccattcacttgatattgtttgttcactcatttagtcattaaaagtgagattaataaaatctgaaaatgttatata

SEQ ID NO: 577888 - DNA, 120 bp, Artificial Sequence
  ENSG00000171606_20 (sequence is synthesized)
ataactttaaaaagccaggtaattaataatctgcactgatattacatccacagtaccacagtatttatgtgtatgaattaaggattaaaagataatgtggataaataaactattgatcta

SEQ ID NO: 577889 - DNA, 120 bp, Artificial Sequence
  ENSG00000171606_21 (sequence is synthesized)
attccagcacttccggcctgacccctgtccagcgcctttcctttctccagcttctgctctgccccaagagtggtcgccttcgtggcagggcacgactctctcccagctcgggtcgccgcc

SEQ ID NO: 577890 - DNA, 120 bp, Artificial Sequence
  ENSG00000171606_22 (sequence is synthesized)
cacattagtgtggggccctgcggcctagcgtccctcaccagaggcctccccttgcctagctggaccgccgagggacatcgacgagtatcctcctcctgctgtccccggcttcgcctgccg

SEQ ID NO: 577891 - DNA, 120 bp, Artificial Sequence
  ENSG00000171606_23 (sequence is synthesized)
cccctaaccggccagtcaagatggccgccgctgggtgaggcaagctggcgcgccgcgggggcgtctgggagttgtagttcgggacggcgggctgacgcacttcgccgccggccgacgggc

SEQ ID NO: 577892 - DNA, 120 bp, Artificial Sequence
  ENSG00000171606_24 (sequence is synthesized)
cttcatcaggctgagtttcacagagcgtgcatgcttctgcattgctcacctccattttccacatttcacgggtgcccagaagatgtttctgatgtgaacgaatgattgactggttgatgt

SEQ ID NO: 577893 - DNA, 120 bp, Artificial Sequence
  ENSG00000171606_25 (sequence is synthesized)
ttgtgattgcaggaaaggggaaggtatcctgcagggggatggtgggattctaagaggccagggcatcctggagatcgggtatccgaggcagcagggcaggcacttgcatgagttgtgtca

SEQ ID NO: 577894 - DNA, 120 bp, Artificial Sequence
  ENSG00000171606_26 (sequence is synthesized)
gatgcaccaagtctggggtgctgtacttggcagaataattgccccaaaggtgtccatgtcctgactcctggaccctgtgaataagttgcctcacatgacaaaggggactttgcagaaaca

SEQ ID NO: 577895 - DNA, 120 bp, Artificial Sequence
  ENSG00000171606_27 (sequence is synthesized)
attaaggatcttgagagggagagatgcactggattatttgagtggatctaacataaccacaggggcccttaggagagggaggctggagggtcagaggagatgtaatgataggagcagctg

SEQ ID NO: 577896 - DNA, 120 bp, Artificial Sequence
  ENSG00000171606_28 (sequence is synthesized)
atagaggaagaagccataagccaaatgtttggggcagcctctagaagctggaaaaggcaaggaatggattctcccttggagcctccaaaaggaacatagccatgctgacaccttcatttt

SEQ ID NO: 577897 - DNA, 120 bp, Artificial Sequence
  ENSG00000171606_29 (sequence is synthesized)
agcccagtgaggcacaaaccagacttctcatctccagaaccataaggtaatacatttgcattaatctgagccgctggcattgtggcaattcactataacagcaataggaaactagttagt

SEQ ID NO: 577898 - DNA, 120 bp, Artificial Sequence
  ENSG00000171606_30 (sequence is synthesized)
taggtgccaaggagacagttgtggggttaatgaggtgaaagtcagtgaattcaccctgtgtttaacctcaggggtgaataaaataaattagtgccacagaagacaatgggaagaggcttt

SEQ ID NO: 577899 - DNA, 120 bp, Artificial Sequence
  ENSG00000171606_31 (sequence is synthesized)
ccagagaaccctgagaatctcacattatgtgatcagtgtgttagttgggacgcttgagtgtgactgctgcaaagccttgcacagaatggctcaagggagaaggagaatttattggaaaag

SEQ ID NO: 577900 - DNA, 120 bp, Artificial Sequence
  ENSG00000171606_32 (sequence is synthesized)
ttccagggtgctcgagcatcaggcagggctggacccaggagctccaatagtgtcctccagacttgtcctgtccctcattcttacctcttctgccctccactggcttcatcatgggcaggc

SEQ ID NO: 577901 - DNA, 120 bp, Artificial Sequence
  ENSG00000171606_33 (sequence is synthesized)
tgtctccctgcatgggatttctctttcccaaatgttccaactaaggccttgttggctccaatcatctggctataggctgtgttcatcccagatctaatcactgtggccaagagaaaggga

SEQ ID NO: 577902 - DNA, 120 bp, Artificial Sequence
  ENSG00000171606_34 (sequence is synthesized)
tggtccagtgtgccagcctaagtcatcttgtggcccaccttgatggtgggggtagattagcattgtggaagcctgtggaccatttggggtcatgtgaggaaggttagaatgaaggagccg

SEQ ID NO: 577903 - DNA, 120 bp, Artificial Sequence
  ENSG00000171606_35 (sequence is synthesized)
tggttacaggggcccttgggccaggtggagctgttgttttcttaggtggaggagacttggtgacgttcacctcaagatggctgcatttcatgggtccagggaaagtctcaccttccatga

SEQ ID NO: 577904 - DNA, 120 bp, Artificial Sequence
  ENSG00000171606_36 (sequence is synthesized)
ggtgggaggagagagggaagaaggaagaggtgcccaaataggcagggtgcagggcttggaggccggaaacaggggctttgactctaaggagggggcgtcagtcagctgcctcacaggagg

SEQ ID NO: 577905 - DNA, 120 bp, Artificial Sequence
  ENSG00000171606_37 (sequence is synthesized)
ggctggggccctcagcagcccccggaaagggaaggagtgggaccagagtctcagcagtgaggacactggtgccctgtgacccttggagggtgagccatcccgggcccatccaggtgtggg

SEQ ID NO: 577906 - DNA, 120 bp, Artificial Sequence
  ENSG00000171606_38 (sequence is synthesized)
cactcgggcacgtgctgtgaggggagcagagctggtgggaagggaggacaggagcagaggctgtcatggagccacagtacgatgcaggggtgcggtggccccatgggttgcagagaggcc

SEQ ID NO: 577907 - DNA, 120 bp, Artificial Sequence
  ENSG00000171606_39 (sequence is synthesized)
gcatccactctgccctgggctttcctaagacctcccacaggctgggacattctgagattctgagctcttaggtctgtgctgaagcaatctgagtatgaagagcagccctgccctccagcc

SEQ ID NO: 577908 - DNA, 120 bp, Artificial Sequence
  ENSG00000171606_40 (sequence is synthesized)
actgtggcatcactggagacaacgcatggtgacccgggagctgagaaagcaggaggcaagagggaagggactaagtgtttacagagacttgagaggtggaactaccacaggcaggcacat

SEQ ID NO: 577909 - DNA, 120 bp, Artificial Sequence
  ENSG00000171606_41 (sequence is synthesized)
ctgtatccaggtcagaacaagagagccctcaaccttcagaaatgcatacttaggtatttatctttggtatctgggatttgcttcagaataacccagagctggggtgtgggtgaaaaagat

SEQ ID NO: 577910 - DNA, 120 bp, Artificial Sequence
  ENSG00000171606_42 (sequence is synthesized)
gacctgtttgcactgcaaatggcttatactggctcaagcgtagaagtcaatttattggctctcatgtattctctggtaggcttcaggcaaggctgcatccaggtgctcccaggtgatggg

SEQ ID NO: 577911 - DNA, 89 bp, Artificial Sequence
  ENSG00000171606_43 (sequence is synthesized)
cttcaggcaaggctgcatccaggtgctcccaggtgatgggaagaatctctggccaacctgtttcatggctctgctttctcccctttctt

SEQ ID NO: 577912 - DNA, 60 bp, Artificial Sequence
  ENSG00000171606_44 (sequence is synthesized)
gtggccactcccctttcttcttaggcagattctgccccatgtaagcaaaatgcctcagat

SEQ ID NO: 577913 - DNA, 120 bp, Artificial Sequence
  ENSG00000171606_45 (sequence is synthesized)
ttaggcagattctgccccatgtaagcaaaatgcctcagatcctggcaaagcagcgttgggggtacctcttcttcccaaagtcctggtcagttccccagaaaggaccagtcatggctgtgc

SEQ ID NO: 577914 - DNA, 120 bp, Artificial Sequence
  ENSG00000171606_46 (sequence is synthesized)
cagggtgactgccctcccccaggtcagccctgtcgacaaaggcaggggcttggttgtcatttccaccaagtgggaagacagtattaatagatggagaaccctctgcagtgggaagatttc

SEQ ID NO: 577915 - DNA, 120 bp, Artificial Sequence
  ENSG00000171606_47 (sequence is synthesized)
agcaatgggcaagctggatagagccgtggttaggatggagttgtttgcttgttgcacttggagctctttatgaagcaagggctctgcctcccagcctgagacccagaccctggtttggac

SEQ ID NO: 577916 - DNA, 120 bp, Artificial Sequence
  ENSG00000171606_48 (sequence is synthesized)
ccagtagaactcttgtgggccctgggttggtgtctctgagcaaatccccaaagcaggagagtccctagcaccgtgagctctgtcagaacctcccagctggcctttcttctgccctcattg

SEQ ID NO: 577917 - DNA, 120 bp, Artificial Sequence
  ENSG00000171606_49 (sequence is synthesized)
cggggcgccgcggtggagagaacagatcgcctccggaagcgtggggtctgggccagggaggcgatcccctccgatgcgcgggacagaggaggctcggtgtcctctcggggaggggaaaac

SEQ ID NO: 577918 - DNA, 120 bp, Artificial Sequence
  ENSG00000171606_50 (sequence is synthesized)
tggtcctatccagtcctgtgggagtcctatgactcactctgggcgttttccagtttgggtggacttgtcatttcccgctgagggagccgttcctgggcggaggctgcggtagctccccag

SEQ ID NO: 577919 - DNA, 120 bp, Artificial Sequence
  ENSG00000171606_51 (sequence is synthesized)
cctgtgtgagtagaggcttccttcagcttttgagtccgctactgcacctgggaggatgcggatggtggtgagataccaccttccctgagatacccccatcctccagagcacctcggggag

SEQ ID NO: 577920 - DNA, 120 bp, Artificial Sequence
  ENSG00000171606_52 (sequence is synthesized)
ggggtagagattggttgggcatgagagatcctgcgtgatggtggaaccgcaggttgcttggttttccaagggtgtagttagaatagagaccagattgtaggggcttctgaaggccaggtt

SEQ ID NO: 577921 - DNA, 120 bp, Artificial Sequence
  ENSG00000171606_53 (sequence is synthesized)
agagaccagattgtaggggcttctgaaggccaggttaaggctcttgcttgtatcctttatattgggaagagtaattgacaggtcttttgtttgtttgttttttgttttttgagatggagt

SEQ ID NO: 577922 - DNA, 84 bp, Artificial Sequence
  ENSG00000171606_54 (sequence is synthesized)
aaggtgatccgaccatctcggcctcccaaaggtctatgcagggatcaggcttatgtttagatttcagcagataaattggcatca

SEQ ID NO: 577923 - DNA, 120 bp, Artificial Sequence
  ENSG00000171606_55 (sequence is synthesized)
tcaggcttatgtttagatttcagcagataaattggcatcaagcaagaggtgacagcagcagagttcaataacaagtagaaaagacaggtgaggatggatccctgacaggtgaaggagata

SEQ ID NO: 577924 - DNA, 120 bp, Artificial Sequence
  ENSG00000171606_56 (sequence is synthesized)
gaaagaagcatcagggccctgggtaggggctgacggcttgggtgtgatggtgcagctcagagaattccctaggaggcatacgcaccactcccaaagtcagaattttcaaatgaataagaa

SEQ ID NO: 577925 - DNA, 120 bp, Artificial Sequence
  ENSG00000171606_57 (sequence is synthesized)
atagggggccgggcgcgattttcatatgctacagagatctcatgtgttgctctccttattgtaacctgaatagagtcaagcttgggtttgcttggggtttcagacaaagacaggaactca

SEQ ID NO: 577926 - DNA, 120 bp, Artificial Sequence
  ENSG00000171606_58 (sequence is synthesized)
ggatgagactcccaaaatgcccttgggtcatcttgtagaccattctgtgctttcactggcctggtcagcctcccctgtctttcttttgtcgtggatgcggatggcctgtggctgaacaag

SEQ ID NO: 577927 - DNA, 120 bp, Artificial Sequence
  ENSG00000171606_59 (sequence is synthesized)
cagtaggaaaagggcagcttttcagtatgacttctgaatcattgcctagtccatccctccctgaataccagggagatgggtctgtcagggatgttttcagctgcagtagtggatgcttat

SEQ ID NO: 577928 - DNA, 90 bp, Artificial Sequence
  ENSG00000171606_60 (sequence is synthesized)
tctgtcagggatgttttcagctgcagtagtggatgcttattgttcttgcaacaagagttccggccaggcatggtggctcactttaggaga

SEQ ID NO: 577929 - DNA, 120 bp, Artificial Sequence
  ENSG00000171606_61 (sequence is synthesized)
aacatcagctttccaaaccagatgtggtatctcagttagaggaggcagaagatttctggccagtggagagaggaattcctcaagacaccattccagcattcactggcaaacagcactgtg

SEQ ID NO: 577930 - DNA, 120 bp, Artificial Sequence
  ENSG00000171606_62 (sequence is synthesized)
agcagcagctcccatcaagcccttaccacatgctgtgcctggactttggtatctcatcactttgggtgaagaaactcaggctcaagaagttaatctctcttgattaaaccccttgctttg

SEQ ID NO: 577931 - DNA, 120 bp, Artificial Sequence
  ENSG00000171606_63 (sequence is synthesized)
gtgcggcgcgcgccgggactctgcccacttccaccagagacacattgagaaggaggaaactatggcctccaggcttccgacggcctggtcctgtaatctggatttttaggaaccagtgac

SEQ ID NO: 577932 - DNA, 120 bp, Artificial Sequence
  ENSG00000171608_0 (sequence is synthesized)
actcgcgcccagcgcagtcgctccgagcggccgcgagcagagccgcccagccctgccagctgcgccgggacgataaggagtcaggccagggcgggatgacactcattgattctaaagcat

SEQ ID NO: 577933 - DNA, 120 bp, Artificial Sequence
  ENSG00000171608_1 (sequence is synthesized)
ctttaatctgccaggcggagggggctttgctggtctttcttggactattccagagaggacaactgtcatctgggaagtaacaacgcaggatgccccctggggtggactgccccatggaat

SEQ ID NO: 577934 - DNA, 120 bp, Artificial Sequence
  ENSG00000171608_2 (sequence is synthesized)
tctggaccaaggaggagaatcagagcgttgtggttgacttcctgctgcccacaggggtctacctgaacttccctgtgtcccgcaatgccaacctcagcaccatcaagcagctgctgtggc

SEQ ID NO: 577935 - DNA, 120 bp, Artificial Sequence
  ENSG00000171608_3 (sequence is synthesized)
accgcgcccagtatgagccgctcttccacatgctcagtggccccgaggcctatgtgttcacctgcatcaaccagacagcggagcagcaagagctggaggacgagcaacggcgtctgtgtg

SEQ ID NO: 577936 - DNA, 120 bp, Artificial Sequence
  ENSG00000171608_4 (sequence is synthesized)
acgtgcagcccttcctgcccgtcctgcgcctggtggcccgtgagggcgaccgcgtgaagaagctcatcaactcacagatcagcctcctcatcggcaaaggcctccacgagtttgactcct

SEQ ID NO: 577937 - DNA, 120 bp, Artificial Sequence
  ENSG00000171608_5 (sequence is synthesized)
tgtgcgacccagaagtgaacgactttcgcgccaagatgtgccaattctgcgaggaggcggccgcccgccggcagcagctgggctgggaggcctggctgcagtacagtttccccctgcagc

SEQ ID NO: 577938 - DNA, 120 bp, Artificial Sequence
  ENSG00000171608_6 (sequence is synthesized)
tggagccctcggctcaaacctgggggcctggtaccctgcggctcccgaaccgggcccttctggtcaacgttaagtttgagggcagcgaggagagcttcaccttccaggtgtccaccaagg

SEQ ID NO: 577939 - DNA, 120 bp, Artificial Sequence
  ENSG00000171608_7 (sequence is synthesized)
acgtgccgctggcgctgatggcctgtgccctgcggaagaaggccacagtgttccggcagccgctggtggagcagccggaagactacacgctgcaggtgaacggcaggcatgagtacctgt

SEQ ID NO: 577940 - DNA, 120 bp, Artificial Sequence
  ENSG00000171608_8 (sequence is synthesized)
atggcagctacccgctctgccagttccagtacatctgcagctgcctgcacagtgggttgacccctcacctgaccatggtccattcctcctccatcctcgccatgcgggatgagcagagca

SEQ ID NO: 577941 - DNA, 120 bp, Artificial Sequence
  ENSG00000171608_9 (sequence is synthesized)
accctgccccccaggtccagaaaccgcgtgccaaaccacctcccattcctgcgaagaagccttcctctgtgtccctgtggtccctggagcagccgttccgcatcgagctcatccagggca

SEQ ID NO: 577942 - DNA, 120 bp, Artificial Sequence
  ENSG00000171608_10 (sequence is synthesized)
gcaaagtgaacgccgacgagcggatgaagctggtggtgcaggccgggcttttccacggcaacgagatgctgtgcaagacggtgtccagctcggaggtgagcgtgtgctcggagcccgtgt

SEQ ID NO: 577943 - DNA, 120 bp, Artificial Sequence
  ENSG00000171608_11 (sequence is synthesized)
ggaagcagcggctggagttcgacatcaacatctgcgacctgccccgcatggcccgtctctgctttgcgctgtacgccgtgatcgagaaagccaagaaggctcgctccaccaagaagaagt

SEQ ID NO: 577944 - DNA, 120 bp, Artificial Sequence
  ENSG00000171608_12 (sequence is synthesized)
ccaagaaggcggactgccccattgcctgggccaacctcatgctgtttgactacaaggaccagcttaagaccggggaacgctgcctctacatgtggccctccgtcccagatgagaagggcg

SEQ ID NO: 577945 - DNA, 120 bp, Artificial Sequence
  ENSG00000171608_13 (sequence is synthesized)
agctgctgaaccccacgggcactgtgcgcagtaaccccaacacggatagcgccgctgccctgctcatctgcctgcccgaggtggccccgcaccccgtgtactaccccgccctggagaaga

SEQ ID NO: 577946 - DNA, 120 bp, Artificial Sequence
  ENSG00000171608_14 (sequence is synthesized)
tcttggagctggggcgacacagcgagtgtgtgcatgtcaccgaggaggagcagctgcagctgcgggaaatcctggagcggcgggggtctggggagctgtatgagcacgagaaggacctgg

SEQ ID NO: 577947 - DNA, 120 bp, Artificial Sequence
  ENSG00000171608_15 (sequence is synthesized)
tgtggaagctgcggcatgaagtccaggagcacttcccggaggcgctagcccggctgctgctggtcaccaagtggaacaagcatgaggatgtggcccagatgctctacctgctgtgctcct

SEQ ID NO: 577948 - DNA, 120 bp, Artificial Sequence
  ENSG00000171608_16 (sequence is synthesized)
ggccggagctgcccgtcctgagcgccctggagctgctagacttcagcttccccgattgccacgtaggctccttcgccatcaagtcgctgcggaaactgacggacgatgagctgttccagt

SEQ ID NO: 577949 - DNA, 120 bp, Artificial Sequence
  ENSG00000171608_17 (sequence is synthesized)
acctgctgcagctggtgcaggtgctcaagtacgagtcctacctggactgcgagctgaccaaattcctgctggaccgggccctggccaaccgcaagatcggccacttccttttctggcacc

SEQ ID NO: 577950 - DNA, 120 bp, Artificial Sequence
  ENSG00000171608_18 (sequence is synthesized)
tccgctccgagatgcacgtgccgtcggtggccctgcgcttcggcctcatcctggaggcctactgcaggggcagcacccaccacatgaaggtgctgatgaagcagggggaagcactgagca

SEQ ID NO: 577951 - DNA, 120 bp, Artificial Sequence
  ENSG00000171608_19 (sequence is synthesized)
aactgaaggccctgaatgacttcgtcaagctgagctctcagaagacccccaagccccagaccaaggagctgatgcacttgtgcatgcggcaggaggcctacctagaggccctctcccacc

SEQ ID NO: 577952 - DNA, 120 bp, Artificial Sequence
  ENSG00000171608_20 (sequence is synthesized)
tgcagtccccactcgaccccagcaccctgctggctgaagtctgcgtggagcagtgcaccttcatggactccaagatgaagcccctgtggatcatgtacagcaacgaggaggcaggcagcg

SEQ ID NO: 577953 - DNA, 120 bp, Artificial Sequence
  ENSG00000171608_21 (sequence is synthesized)
gcggcagcgtgggcatcatctttaagaacggggatgacctccggcaggacatgctgaccctgcagatgatccagctcatggacgtcctgtggaagcaggaggggctggacctgaggatga

SEQ ID NO: 577954 - DNA, 120 bp, Artificial Sequence
  ENSG00000171608_22 (sequence is synthesized)
gcctccccaccggggaccgcacaggcctcattgaggtggtactccgttcagacaccatcgccaacatccaactcaacaagagcaacatggcagccacagccgccttcaacaaggatgccc

SEQ ID NO: 577955 - DNA, 120 bp, Artificial Sequence
  ENSG00000171608_23 (sequence is synthesized)
tgctcaactggctgaagtccaagaacccgggggaggccctggatcgagccattgaggagttcaccctctcctgtgctggctattgtgtggccacatatgtgctgggcattggcgatcggc

SEQ ID NO: 577956 - DNA, 120 bp, Artificial Sequence
  ENSG00000171608_24 (sequence is synthesized)
acagcgacaacatcatgatccgagagagtgggcagctgttccacattgattttggccactttctggggaatttcaagaccaagtttggaatcaaccgcgagcgtgtcccattcatcctca

SEQ ID NO: 577957 - DNA, 120 bp, Artificial Sequence
  ENSG00000171608_25 (sequence is synthesized)
cctacgactttgtccatgtgattcagcaggggaagactaataatagtgagaaatttgaacggttccggggctactgtgaaagggcctacaccatcctgcggcgccacgggcttctcttcc

SEQ ID NO: 577958 - DNA, 120 bp, Artificial Sequence
  ENSG00000171608_26 (sequence is synthesized)
tccacctctttgccctgatgcgggcggcaggcctgcctgagctcagctgctccaaagacatccagtatctcaaggactccctggcactggggaaaacagaggaggaggcactgaagcact

SEQ ID NO: 577959 - DNA, 120 bp, Artificial Sequence
  ENSG00000171608_27 (sequence is synthesized)
tccgagtgaagtttaacgaagccctccgtgagagctggaaaaccaaagtgaactggctggcccacaacgtgtccaaagacaacaggcagtagtggctcctcccagccctgggcccaagag

SEQ ID NO: 577960 - DNA, 120 bp, Artificial Sequence
  ENSG00000171608_28 (sequence is synthesized)
gaggcggctgcgggtcgtggggaccaagcacattggtcctaaaggggctgaagagcctgaactgcacctaacgggaaagaaccgacatggctgccttttgtttacactggttatttattt

SEQ ID NO: 577961 - DNA, 120 bp, Artificial Sequence
  ENSG00000171608_29 (sequence is synthesized)
atgacttgaaatagtttaaggagctaaacagccataaacggaaacgcctccttcatgcagcggcggtgctgggccccccgaggctgcacctggctctcggctgaggattgtcaccccaag

SEQ ID NO: 577962 - DNA, 120 bp, Artificial Sequence
  ENSG00000171608_30 (sequence is synthesized)
tcttccagctggtggatctgggcccagcaaagactgttctcctcccgagggaaccttcttcccaggcctcccgccagactgcctgggtcctggcgcctggcggtcacctggtgcctactg

SEQ ID NO: 577963 - DNA, 120 bp, Artificial Sequence
  ENSG00000171608_31 (sequence is synthesized)
tccgacaggatgccttgatcctcgtgcgacccaccctgtgtatcctccctagactgagttctggcagctccccgaggcagccggggtaccctctagattcagggatgcttgctctccact

SEQ ID NO: 577964 - DNA, 120 bp, Artificial Sequence
  ENSG00000171608_32 (sequence is synthesized)
tttcaagtgggtcttgggtacgagaattccctcatctttctctactgtaaagtgattttgtttgcaggtaagaaaataatagatgactcaccacacctctacggctggggagatcaggcc

SEQ ID NO: 577965 - DNA, 120 bp, Artificial Sequence
  ENSG00000171608_33 (sequence is synthesized)
cagccccataaaggagaatctacgctggtcctcaggacgtgttaaagagatctgggcctcatgtagctcaccccggtcacgcatgaaggcaaaagcaggtcagaagcgaatactctgcca

SEQ ID NO: 577966 - DNA, 75 bp, Artificial Sequence
  ENSG00000171608_34 (sequence is synthesized)
gcatgaaggcaaaagcaggtcagaagcgaatactctgccattatctcaaaaatcttttttttttttttgagatgg

SEQ ID NO: 577967 - DNA, 86 bp, Artificial Sequence
  ENSG00000171608_35 (sequence is synthesized)
ctgccattgtctaagccacctctgaaagcaggttttaacaaaaggatgaggccagaactcttccagaaccatcacctttgggaacc

SEQ ID NO: 577968 - DNA, 120 bp, Artificial Sequence
  ENSG00000171608_36 (sequence is synthesized)
tgaggccagaactcttccagaaccatcacctttgggaacctgctgtgagagtgctgaggtaccagaagtgtgagaacgagggggcgtgctgggatctttctctctgactatacttagttt

SEQ ID NO: 577969 - DNA, 120 bp, Artificial Sequence
  ENSG00000171608_37 (sequence is synthesized)
gaaatggtgcaggcttagtcttaagcctccaaaggcctggatttgagcagctttagaaatgcaggttctagggcttctcccagccttcagaagccaactaactctgcagatggggctagg

SEQ ID NO: 577970 - DNA, 120 bp, Artificial Sequence
  ENSG00000171608_38 (sequence is synthesized)
actgtgggcttttagcagcccacaggtgatcctaacatatcaggccatggactcaggacctgcccggtgatgctgttgatttctcaaaggtcttccaaaactcaacagagccagaagtag

SEQ ID NO: 577971 - DNA, 120 bp, Artificial Sequence
  ENSG00000171608_39 (sequence is synthesized)
ccgcccgctcagcggctcaggtgccagctctgttctgattcaccaggggtccgtcagtagtcattgccacccgcggggcacctccctggccacacgcctgttcccagcaagtgctgaaac

SEQ ID NO: 577972 - DNA, 120 bp, Artificial Sequence
  ENSG00000171608_40 (sequence is synthesized)
tcactagaccgtctgcctgtttcgaaatggggaaagccgtgcgtgcgcgttatttatttaagtgcgcctgtgtgcgcgggtgtgggagcacactttgcaaagccacagcgtttctggttt

SEQ ID NO: 577973 - DNA, 120 bp, Artificial Sequence
  ENSG00000171608_41 (sequence is synthesized)
tgggtgtacagtcttgtgtgcctggcgagaagaatattttctatttttttaagtcatttcatgtttctgtctggggaaggcaagttagttaagtatcactgatgtgggttgagaccagca

SEQ ID NO: 577974 - DNA, 120 bp, Artificial Sequence
  ENSG00000171608_42 (sequence is synthesized)
ctctgtgaaaccttgaaatgagaagtaaaggcagatgaaaagaaagaaaaagcctttttatgttcttttatgttctcggctcaaaaagaaacaagggagtgtaggtttaaaaccaaaaca

SEQ ID NO: 577975 - DNA, 120 bp, Artificial Sequence
  ENSG00000171608_43 (sequence is synthesized)
ggagagaagacaaaccccgctccggctggagttagttagaaccagaactttattgtagcggatacactttctgacctatcatgagtatacacatctgcgaagggaaaccgcgcggcgaca

SEQ ID NO: 577976 - DNA, 120 bp, Artificial Sequence
  ENSG00000171608_44 (sequence is synthesized)
cctgggagaagaggcagctgaggccgtggcccggagtagtaggagccacaagccaccctgggcaggacgaggccctgagggaggacaactgtcatctgggaagtaacaacgcaggatgcc

SEQ ID NO: 577977 - DNA, 120 bp, Artificial Sequence
  ENSG00000171608_45 (sequence is synthesized)
ctgccttgacctcacgtgcagcaattaggaccaccaaggagtgttcttcaaaccaccttctaccaccccgcgggacacgccagggctgattctggtgctcgcaccccgcttcctcctctg

SEQ ID NO: 577978 - DNA, 120 bp, Artificial Sequence
  ENSG00000171608_46 (sequence is synthesized)
cgttcccctgtggcaaagataaggagtcaggccagggcgggatgacactcattgattctaaagcatctttaatctgccaggcggagggggctttgctggtctttcttggactattccaga

SEQ ID NO: 577979 - DNA, 120 bp, Artificial Sequence
  ENSG00000171608_47 (sequence is synthesized)
cccagaggaagagagtgacccaaattggtgctaggagcgaatgaatggggaagtgaactagacctcagccattcccaggagagagatgctgctgcctgggaaaagaaggaatggctttgc

SEQ ID NO: 577980 - DNA, 120 bp, Artificial Sequence
  ENSG00000171608_48 (sequence is synthesized)
tttgaggagtcctggagcccattactaagctgcagcatttggtatttgactcacactggccacggtagcgttggactcgcctgactggggagagaaatattaaaagttttctggaggaaa

SEQ ID NO: 577981 - DNA, 120 bp, Artificial Sequence
  ENSG00000171608_49 (sequence is synthesized)
ggggcattgggcatcagtttgttcattctttgaacaaatatttcccagtgtcatttgtgaactccccagaccctacccttgggggcaaataggcaaccctgccctgtgccccagaacccc

SEQ ID NO: 577982 - DNA, 120 bp, Artificial Sequence
  ENSG00000171611_0 (sequence is synthesized)
tagaaggcagtcttgtgggtgcctcctcccccagccgcaactcaggtctgcagctgggtcctgcctccttccgagtgggccatggccggtacatggctgctacttctcctggcccttggg

SEQ ID NO: 577983 - DNA, 120 bp, Artificial Sequence
  ENSG00000171611_1 (sequence is synthesized)
tgtccagccctacccacaggtgtgggcggcacaccctttccttctctggccccaccaatcatgctgctggtggatggaaagcagcagatggtggtggtctgcctggtccttgatgttgca

SEQ ID NO: 577984 - DNA, 120 bp, Artificial Sequence
  ENSG00000171611_2 (sequence is synthesized)
ccccctggccttgacagccccatctggttctcagccggcaatggcagtgcactggatgccttcacctatggcccttccccagcaacggatggcacctggaccaacttggcccatctctcc

SEQ ID NO: 577985 - DNA, 120 bp, Artificial Sequence
  ENSG00000171611_3 (sequence is synthesized)
ctgccttctgaggagctggcatcctgggagcctttggtctgccacactgggcctggggctgagggtcacagcaggagtacacagcccatgcatctgtcaggagaggcttctacagccagg

SEQ ID NO: 577986 - DNA, 120 bp, Artificial Sequence
  ENSG00000171611_4 (sequence is synthesized)
acctgcccccaggagcctctcagggggacaccgggtggggcgctgtggctgggggtcctgcggctgctgctcttcaagctgctgctgtttgacctgctcctgacctgcagctgcctgtgc

SEQ ID NO: 577987 - DNA, 120 bp, Artificial Sequence
  ENSG00000171611_5 (sequence is synthesized)
gaccccgcgggcccgctgccttcccccgcaaccaccacccgcctgcgagccctcggctcccatcgactgcacccggccacggagactgggggacgagaggccaccagctcacccagaccc

SEQ ID NO: 577988 - DNA, 120 bp, Artificial Sequence
  ENSG00000171611_6 (sequence is synthesized)
cagcctcgggaccgccgctggggtgacacccctccgggtcggaagcccgggagcccagtatggggggaagggtcttacctcagcagttaccccacttgcccagcacaggcctggtgctca

SEQ ID NO: 577989 - DNA, 120 bp, Artificial Sequence
  ENSG00000171611_7 (sequence is synthesized)
agatctgccctcagggctccttcctccagtcttggagcattttttgcaggtgacctgcctcctcctctgcaggctggagctgcctgagggcagggctctacctcccctgcgtcacactgt

SEQ ID NO: 577990 - DNA, 120 bp, Artificial Sequence
  ENSG00000171611_8 (sequence is synthesized)
gtgaggctgtgtctctgccatccaaaagggggccccttgagaatggtgatccacccagttacaggggcatttagggagcagatgactgagaacattaaaaaagaacttaaatgacacagc

SEQ ID NO: 577991 - DNA, 80 bp, Artificial Sequence
  ENSG00000171612_0 (sequence is synthesized)
cggccacgccgcggaaggcgcgggccgagcagagccgggcgttggagcccgcgcgcgcatggaggcgttgccggcagccc

SEQ ID NO: 577992 - DNA, 120 bp, Artificial Sequence
  ENSG00000171612_1 (sequence is synthesized)
ggggagacaagacccggcgacctcgcgcatccctcgagccgccacgcgctctcgccaccgggcggcgacgggccgcggagccggcgcggccatggcgacgggcggccagcagaaggagaa

SEQ ID NO: 577993 - DNA, 120 bp, Artificial Sequence
  ENSG00000171612_2 (sequence is synthesized)
gccagcagaaggagaacacgctgcttcacctcttcgccggcgggtgtggaggcacagttggtgctattttcacttgtccactagaagtcattaagacacggttgcagtcttcaagattag

SEQ ID NO: 577994 - DNA, 120 bp, Artificial Sequence
  ENSG00000171612_3 (sequence is synthesized)
ctctccggacagtctactatcctcaggttcatctggggaccattagtggagctggaatggtgagaccaacatccgtgacacctggactctttcaggttctgaagtcgatcttggagaaag

SEQ ID NO: 577995 - DNA, 120 bp, Artificial Sequence
  ENSG00000171612_4 (sequence is synthesized)
agggaccaaagtcactttttagaggcttgggtccaaatttggttggagttgcaccatcaagggctgtatactttgcatgttactccaaagccaaagagcaatttaatggcattttcgtgc

SEQ ID NO: 577996 - DNA, 120 bp, Artificial Sequence
  ENSG00000171612_5 (sequence is synthesized)
ctaacagcaatattgtgcatattttctcagctggctctgcagcttttatcacaaattccttaatgaatcctatatggatggttaaaacccgaatgcagctagaacagaaagtgaggggct

SEQ ID NO: 577997 - DNA, 120 bp, Artificial Sequence
  ENSG00000171612_6 (sequence is synthesized)
ctaagcagatgaatacactccagtgtgctcgttacgtttaccagaccgaaggcattcgtggcttctatagaggattaactgcctcgtatgctggaatttccgaaactataatctgctttg

SEQ ID NO: 577998 - DNA, 120 bp, Artificial Sequence
  ENSG00000171612_7 (sequence is synthesized)
ctatttatgaaagtttaaagaagtatctgaaagaagctccattagcctcttctgcaaatgggactgagaaaaattccacaagtttttttggacttatggcagctgctgctctttctaagg

SEQ ID NO: 577999 - DNA, 120 bp, Artificial Sequence
  ENSG00000171612_8 (sequence is synthesized)
gctgtgcctcctgcattgcttatccacacgaagtcataaggacgaggctccgggaagagggcaccaagtacaagtcttttgtccagacggcgcgcctggtgttccgggaagaaggctacc

SEQ ID NO: 578000 - DNA, 120 bp, Artificial Sequence
  ENSG00000171612_9 (sequence is synthesized)
ttgccttttatagaggactgtttgcccagcttatccggcagatcccaaatactgccattgtgttgtctacttatgagttaattgtgtacctgttagaagaccgtactcagtaacaggccg

SEQ ID NO: 578001 - DNA, 120 bp, Artificial Sequence
  ENSG00000171612_10 (sequence is synthesized)
gaaaattgtgctctagaagaataaaactgaaaaactctagagaattttttttccccattgatgtttagaaagtttgagactgaaacaggaaaggccataaaatatctggttcatatcacc

SEQ ID NO: 578002 - DNA, 120 bp, Artificial Sequence
  ENSG00000171612_11 (sequence is synthesized)
tgttggacatttccttttggattcatgctttctggaaggtttaaattcattaacgttaatagttaattataactttttttttaacttaagaggattcagggttaagcaccaactaaatta

SEQ ID NO: 578003 - DNA, 120 bp, Artificial Sequence
  ENSG00000171612_12 (sequence is synthesized)
aatcatgctatttaatttaagtatacatttggcttgtgtcctcttttatgctcactatactatgaaggacttaagtaattcagataaacctgccctagaactgcagagaaaaatgataaa

SEQ ID NO: 578004 - DNA, 120 bp, Artificial Sequence
  ENSG00000171612_13 (sequence is synthesized)
atgataaagtgagaatacaacttgttttataatctgactttaagatcttgcactgctagacagggaagaagtgtcgcattttggctgggcactgtggctcacgcccgtaatcccagcact

SEQ ID NO: 578005 - DNA, 66 bp, Artificial Sequence
  ENSG00000171612_14 (sequence is synthesized)
agggggcagaggttgcagcgagctgagatcacgtcacttcactccagcctggtcgacagagtgaga

SEQ ID NO: 578006 - DNA, 120 bp, Artificial Sequence
  ENSG00000171612_15 (sequence is synthesized)
gtgtggaccaggacaaacttcccagcaatttttcttctttgtacatttccaattacttgcagattgatcatctaagcgttcagactgctgagatgaatatatataactttctgagactca

SEQ ID NO: 578007 - DNA, 120 bp, Artificial Sequence
  ENSG00000171612_16 (sequence is synthesized)
atattttaagctataaaaaacttcctgaagttatccttttctccctactttgaaccaaaggcaagaatttttaaagaactgttttatcaatggcctggctcctggatatagttccggaag

SEQ ID NO: 578008 - DNA, 120 bp, Artificial Sequence
  ENSG00000171612_17 (sequence is synthesized)
ttaagaccagttgccttgttaagtgtgttgacagcacagctaccctgtttggctgtgaatccagaatgtgatgaagaacagtcattcccactgaggtctttagccctgttcttggacctc

SEQ ID NO: 578009 - DNA, 120 bp, Artificial Sequence
  ENSG00000171612_18 (sequence is synthesized)
tgctcttgcagaaaaggagcacaacgtaggactatggctcacccgtcagagagctcacattctgatagaaagcactgggattgtttaaatatcctagttcaacattaaaaaaaaaaaaaa

SEQ ID NO: 578010 - DNA, 120 bp, Artificial Sequence
  ENSG00000171612_19 (sequence is synthesized)
cacagagtgcgactccatctcaaaaaaaaaaaaaaaaccaggatgttacccccttggttttaaagcaaatttaataagggaacaaaaagatgatactaagaagaaggcaagtaaaacccc

SEQ ID NO: 578011 - DNA, 120 bp, Artificial Sequence
  ENSG00000171612_20 (sequence is synthesized)
tagtcttccattagctctttcactggaatttgagtatattgtacatgaaggttggttttcaatttgaacgtctagaaagatactcatttctaatacctatgcactgtagtttcaggttta

SEQ ID NO: 578012 - DNA, 120 bp, Artificial Sequence
  ENSG00000171612_21 (sequence is synthesized)
cttgcagacaccctggtagggttaagaggaggatatttccaagttattttaaattgagtttacttttaactggggttcttgactctagtgtaattgctccaacaactacgtagaagtcaa

SEQ ID NO: 578013 - DNA, 120 bp, Artificial Sequence
  ENSG00000171612_22 (sequence is synthesized)
tgtaattgctccaacaactacgtagaagtcaaaatgagtgactttagtgaagcttctgtactttacaatacatgacagtaatgctattccagaagttttgttttgttttgttttgagatg

SEQ ID NO: 578014 - DNA, 120 bp, Artificial Sequence
  ENSG00000171612_23 (sequence is synthesized)
accatacctggcccgcgccgccccttcctttgttgttattgttgttttgagacaaggtatcactcgatcactgaagctggatacagtggcaagatcatagctcactgtaacctcaaactc

SEQ ID NO: 578015 - DNA, 120 bp, Artificial Sequence
  ENSG00000171612_24 (sequence is synthesized)
aagggatcctcgcatctcagcctcccaagtagcttggaccacaggaaagtaccaccatgcccagctaatgttttttcattttttgtgcagacgaggttttgctatgttgtccaggctggt

SEQ ID NO: 578016 - DNA, 120 bp, Artificial Sequence
  ENSG00000171612_25 (sequence is synthesized)
ctcagactactggccagaagcgatcttacctcctcagcctcccaaagcactggaattacagagtaacatctaattttaatattcacattcctattttaatattcatattcgatgatggca

SEQ ID NO: 578017 - DNA, 120 bp, Artificial Sequence
  ENSG00000171612_26 (sequence is synthesized)
cttagcaacatcctcctatatccatattaaaacctgttttccaagattgtgtctaatatgaaggtgtaaaattgctttgttttcactccttcttgaatgaataaatttgatagtaaccaa

SEQ ID NO: 578018 - DNA, 120 bp, Artificial Sequence
  ENSG00000171617_0 (sequence is synthesized)
agagtccagccgggggtgccgcacccactggggagtggggagggaggacacataggaaatgcctggggctggagtctctttggctctctgccagcaagaaacttaaacgtcctggcttgc

SEQ ID NO: 578019 - DNA, 120 bp, Artificial Sequence
  ENSG00000171617_1 (sequence is synthesized)
tcaacccgagtgtccctaaactgtccagacttttgcccgtccattgccactatctctccccactctgggtgtcctacccaaggcgctgtctatgcgtgcccagggcctgtcctgcggata

SEQ ID NO: 578020 - DNA, 120 bp, Artificial Sequence
  ENSG00000171617_2 (sequence is synthesized)
cccagctcgccccttgcagccctttttagagcatctcgcgggctctggcatcaccaagcgcacagccccgggctgcgctcccctaaggtgggtccctcagatccggggctgtccattaac

SEQ ID NO: 578021 - DNA, 120 bp, Artificial Sequence
  ENSG00000171617_3 (sequence is synthesized)
caggctggcccaaagaggcgcagacactcgaacccgggaaaacttattttattctcggttcccggggttgcagctgccagcggctgagacagtgcgtccgctttgtctctctgcactccc

SEQ ID NO: 578022 - DNA, 120 bp, Artificial Sequence
  ENSG00000171617_4 (sequence is synthesized)
cgcagcccccctctcccgcttcctctcccgattaactcccccgacacgctcttctctagctcctctcctcctcccactccttctcctcctcttcctcctcctacaccacaggccgcgcta

SEQ ID NO: 578023 - DNA, 120 bp, Artificial Sequence
  ENSG00000171617_5 (sequence is synthesized)
atgcgcttcctccctcccccggtgtcggtctctttgcatacgcgccccctcccctccccgccgcgccacttatagcggggcgcacggcggcggggcgcagactgctctggcagccggaga

SEQ ID NO: 578024 - DNA, 120 bp, Artificial Sequence
  ENSG00000171617_6 (sequence is synthesized)
ggaggcggtgcggcggtggcgctgcggagacccggtccagacgcctggcggccgccggcacacaaggcgctttctagctccctcccccgagcgcacagcccgcctccttccgcggcgcct

SEQ ID NO: 578025 - DNA, 120 bp, Artificial Sequence
  ENSG00000171617_7 (sequence is synthesized)
gcagtggcaggcttgctctgccctaccgtgacgcgctccggagacgctctgcgggtcctggacaccgggtccgcggcgtggggacgacagacggaggcgaacgccatcggtagccggtcc

SEQ ID NO: 578026 - DNA, 120 bp, Artificial Sequence
  ENSG00000171617_8 (sequence is synthesized)
gcgagccatcgttcggggcgcagtcctctccccggctggccctcctttctccggggcattcgccaccgcttccctgggctgagacgaccggttcgtcgcctccttgcccgtgaccgtcgc

SEQ ID NO: 578027 - DNA, 120 bp, Artificial Sequence
  ENSG00000171617_9 (sequence is synthesized)
tagaactcagttgtgcgttgcggccagtcgccactgctgagtggaaacaaaatgtcagtcagtgtgcatgagaaccgcaagtccagggccagcagcggctccattaacatctatctgttt

SEQ ID NO: 578028 - DNA, 120 bp, Artificial Sequence
  ENSG00000171617_10 (sequence is synthesized)
cacaagtcctcctacgctgacagcgtcctcactcacctgaatcttttacgccagcagcgtctcttcactgacgtccttctccatgccggaaataggaccttcccttgccaccgggcagtg

SEQ ID NO: 578029 - DNA, 120 bp, Artificial Sequence
  ENSG00000171617_11 (sequence is synthesized)
ctggctgcatgcagtcgctactttgaggccatgttcagtggtggcctgaaagagagccaggacagtgaggtcaactttgacaattccatccacccagaagtcttggagctgctgcttgac

SEQ ID NO: 578030 - DNA, 120 bp, Artificial Sequence
  ENSG00000171617_12 (sequence is synthesized)
tatgcgtactcctcccgggtcatcatcaatgaagaaaatgcagaatcgctcctggaagctggtgacatgctggagtttcaagacatccgggatgcatgtgcagagttcctggaaaagaac

SEQ ID NO: 578031 - DNA, 120 bp, Artificial Sequence
  ENSG00000171617_13 (sequence is synthesized)
ctgcatcccaccaactgcctgggcatgctgctgctgtctgatgcacaccagtgcaccaagctgtacgaactatcttggagaatgtgtctcagcaacttccaaaccatcaggaagaatgaa

SEQ ID NO: 578032 - DNA, 120 bp, Artificial Sequence
  ENSG00000171617_14 (sequence is synthesized)
gatttcctccagctgccccaggacatggtagtgcaactcttgtccagtgaagagctggagacagaggatgaaaggcttgtgtacgagtctgcaattaactggatcagctatgacctgaag

SEQ ID NO: 578033 - DNA, 120 bp, Artificial Sequence
  ENSG00000171617_15 (sequence is synthesized)
aagcgctattgctacctcccagaactgttgcagacagtaaggctggcacttctgccagccatctatctcatggagaatgtggccatggaggaactcatcaccaagcagagaaagagtaag

SEQ ID NO: 578034 - DNA, 120 bp, Artificial Sequence
  ENSG00000171617_16 (sequence is synthesized)
gaaattgtggaagaggccatcaggtgcaaactgaaaatcctgcagaatgacggtgtggtaaccagcctctgtgcccgacctcggaaaactggccatgccctcttccttctgggaggacag

SEQ ID NO: 578035 - DNA, 120 bp, Artificial Sequence
  ENSG00000171617_17 (sequence is synthesized)
actttcatgtgtgacaagttgtatctggtagaccagaaggccaaagaaatcattcccaaggctgacattcccagcccaagaaaagagtttagtgcatgtgcgattggctgcaaagtgtac

SEQ ID NO: 578036 - DNA, 120 bp, Artificial Sequence
  ENSG00000171617_18 (sequence is synthesized)
attactggggggcgggggtctgaaaatggggtctcaaaagatgtctgggtttatgataccctgcacgaggagtggtccaaggctgcccccatgctggtggccaggtttggccatggctct

SEQ ID NO: 578037 - DNA, 120 bp, Artificial Sequence
  ENSG00000171617_19 (sequence is synthesized)
gctgaactgaagcactgcctgtatgtggttggggggcacacggccgcaactggctgcctcccggcctccccctcagtctctctaaagcaggtagaacattatgaccccacaatcaacaaa

SEQ ID NO: 578038 - DNA, 120 bp, Artificial Sequence
  ENSG00000171617_20 (sequence is synthesized)
tggaccatggtggccccactccgagaaggcgttagcaacgccgcagtagtgagtgccaaacttaagttatttgctttcggaggtaccagtgtcagtcatgacaagctccccaaagttcag

SEQ ID NO: 578039 - DNA, 120 bp, Artificial Sequence
  ENSG00000171617_21 (sequence is synthesized)
tgttacgatcagtgtgaaaacaggtggactgtaccggccacctgtccccagccctggcgttacacagcagcagctgtgctggggaaccagatttttattatggggggtgatacagaattc

SEQ ID NO: 578040 - DNA, 120 bp, Artificial Sequence
  ENSG00000171617_22 (sequence is synthesized)
tctgcctgctctgcttataaattcaacagtgagacttaccagtggaccaaggtgggagatgtgacagcaaagcgcatgagctgccatgctgtggcctctggaaacaaactctacgtggtt

SEQ ID NO: 578041 - DNA, 120 bp, Artificial Sequence
  ENSG00000171617_23 (sequence is synthesized)
ggaggatactttggcattcagcgatgcaagactttggactgctacgatccaacattagacgtgtggaacagcatcaccactgtcccgtactcgctgattcctactgcatttgtcagcacc

SEQ ID NO: 578042 - DNA, 120 bp, Artificial Sequence
  ENSG00000171617_24 (sequence is synthesized)
tggaaacatctgccttcttaaatgcagtacattctaaagagagtgagcatgagctcactccatcactcgatgagataatatgagatttctacttcggagaggccaagtctaatgaagaga

SEQ ID NO: 578043 - DNA, 120 bp, Artificial Sequence
  ENSG00000171617_25 (sequence is synthesized)
aaaaaaggaaaagaagttgcaagactcgaataaaatctgctgcaccttgtaaatgctctaactggacatgaaggaaaggggcgagggaggggggtgggatttttggtgcaagtagcacat

SEQ ID NO: 578044 - DNA, 120 bp, Artificial Sequence
  ENSG00000171617_26 (sequence is synthesized)
ggtttaaatatgaatgaacaaacctgtgatctagtccttgtcttgtaattgtggattaatgtcaatgttaatcagcccctcaaagggagagaaaagctggaccttttcccttgctgtacc

SEQ ID NO: 578045 - DNA, 120 bp, Artificial Sequence
  ENSG00000171617_27 (sequence is synthesized)
atattcagcatttgatttccatgggccccaccatttatgtgtagaatttgaaatggttgtcacctctctctgaggacagagcttgaagcctccacaccagctgctgctggagattcaaag

SEQ ID NO: 578046 - DNA, 120 bp, Artificial Sequence
  ENSG00000171617_28 (sequence is synthesized)
cccaactgtgggtccgagagggaagctggctgggctggctgaagaatgaagaccactggactctccgttaatctctaaggggtctgctccccaggaacgtttctgaacaatggggacttt

SEQ ID NO: 578047 - DNA, 120 bp, Artificial Sequence
  ENSG00000171617_29 (sequence is synthesized)
gttggtagccatttggtagatgttcttttctatttataagtgactttaaactttcccttggctgttaagaagtttgttatagatttagctatttattgttcgatgcctgcatgctgaaac

SEQ ID NO: 578048 - DNA, 120 bp, Artificial Sequence
  ENSG00000171617_30 (sequence is synthesized)
aatgcctacagctgtcttcacatgtatggacgtgtgtgaatggttgtacgttttgcacattttgtggctgttgagatgtgctttgctgcacaaacatgaaaatttttgagttacaatttg

SEQ ID NO: 578049 - DNA, 120 bp, Artificial Sequence
  ENSG00000171617_31 (sequence is synthesized)
gagcataactggagggtgggttggggaggggtggatttttaaaatgtcaagacagggaaggatgacaaaatggaaatttaaatgacatcctagaggtagagaaaccgtggagatcgcttt

SEQ ID NO: 578050 - DNA, 120 bp, Artificial Sequence
  ENSG00000171617_32 (sequence is synthesized)
tctcagactcaccaacttttaatgggatttcatggggtttggttgtgctgatagggtaaggggaggctgctttctgcccttctccccactcccatctgatttacttaattcagtctcagc

SEQ ID NO: 578051 - DNA, 120 bp, Artificial Sequence
  ENSG00000171617_33 (sequence is synthesized)
tgctgaaatttggaaaggaccaaattgctttacagtttttttctttgtgtagtatcttgaaatcctggaaaattctatggaatagttctgtatatagggcacaagtaaaggcattgtcca

SEQ ID NO: 578052 - DNA, 120 bp, Artificial Sequence
  ENSG00000171617_34 (sequence is synthesized)
aagtttatttatttatttattaccctaagaatgctttgccataaccacatttaatgggaaaaacggcagtatcacagatgtaaattaactcaccagatttactgggcctgaactcattct

SEQ ID NO: 578053 - DNA, 120 bp, Artificial Sequence
  ENSG00000171617_35 (sequence is synthesized)
cttcttgctatatgatttagcaagttctagaaggtctccaagacaataattacattggcacaatgtatacttcagtgctcacccgtaggcaaatctctttttaaaaaactctttggtgca

SEQ ID NO: 578054 - DNA, 120 bp, Artificial Sequence
  ENSG00000171617_36 (sequence is synthesized)
caagtaacacatttggccacaaaacaccaaagaattgtaggcagtggcccctattgagaagttttccggtagagttggaaatcagttgtgaatacattctttgctagttggagtgcttgt

SEQ ID NO: 578055 - DNA, 120 bp, Artificial Sequence
  ENSG00000171617_37 (sequence is synthesized)
ttactaagcatgtgccgtcgtaggtattagtgctagtctcagataggtgcttcccctgaggtgcaggggaagaccaaagtttgcaactcgaactgctttcgtccatgtttctcacattgc

SEQ ID NO: 578056 - DNA, 120 bp, Artificial Sequence
  ENSG00000171617_38 (sequence is synthesized)
tgtattttagaaaataggggttaagactgataacaaccttttacattgtgactgtgtttgcattgtctaatgacagataaatccttaacatttctctccaccttagtactttagactaat

SEQ ID NO: 578057 - DNA, 120 bp, Artificial Sequence
  ENSG00000171617_39 (sequence is synthesized)
tgtgtttgtccgtccatgccatgaatgagtgggctgtagttgggcctaaataaatgagctgttggaagaaaagaatcacagtactttccagcagtcagtccctggttcctagatgtgttc

SEQ ID NO: 578058 - DNA, 120 bp, Artificial Sequence
  ENSG00000171617_40 (sequence is synthesized)
taagcaatgcaaatgtctaattgtcccccagtgggcatagtcagtgtcgtttatattgtagcagttacagctctgtagtttatgatgcaaatctgccaagagagatgtatgtgtcactgc

SEQ ID NO: 578059 - DNA, 120 bp, Artificial Sequence
  ENSG00000171617_41 (sequence is synthesized)
atggcttctgaaagcaggatgaattttctgcagctgtttcaaagttggggtctgttcttgaatcctctattaattactgtgtgtgagccagagggagctgtggtaagggttgggccccca

SEQ ID NO: 578060 - DNA, 120 bp, Artificial Sequence
  ENSG00000171617_42 (sequence is synthesized)
gcctgtagggaactttctggactcccactctttgaatcgatataggcatttggtctcactacttgaccattctcaccctgtgaaacgtcccacactttgaagcaaatacaattcacagca

SEQ ID NO: 578061 - DNA, 120 bp, Artificial Sequence
  ENSG00000171617_43 (sequence is synthesized)
cagtacacacaaaaaccttggcataagacagagaaggttcttcttattttgtgggctggttgctgtagaaacacataacaaagggcagccctccacttctggtataattgtgtagcccct

SEQ ID NO: 578062 - DNA, 120 bp, Artificial Sequence
  ENSG00000171617_44 (sequence is synthesized)
tttctttgggcttgacacctgtcttgaataagagtgattagagctgcataatgtccctctcttggctattgaccatgtggttcacgtacaaaactctgtataagttgaaggaaaatgttc

SEQ ID NO: 578063 - DNA, 120 bp, Artificial Sequence
  ENSG00000171617_45 (sequence is synthesized)
atgttcatatgtacttgtttgctatgactacattttgaggttttgtaaaactgttatttttttttttttcacaatgtgaaactgaaggtcaataaattattagagattttctcttcatta

SEQ ID NO: 578064 - DNA, 120 bp, Artificial Sequence
  ENSG00000171617_46 (sequence is synthesized)
tagaactcagttgtgcgttgcggccagtcgccactgctgtgtcagcatttgcaggtatacaggaacagtcctagtgatgcactatttaatcaaaagacggatggatcttttgttcttgca

SEQ ID NO: 578065 - DNA, 120 bp, Artificial Sequence
  ENSG00000171617_47 (sequence is synthesized)
gaactcagttgtgcgttgcggccagtcgccactgctcaggcagaagccgggcatcgccggagaggtcgaccggcctcccctccgcggtgcaatgtctggggcgagccgctggggaagcga

SEQ ID NO: 578066 - DNA, 120 bp, Artificial Sequence
  ENSG00000171617_48 (sequence is synthesized)
ggagccgagctaaggatacagtcagcctctctcctctgcggaaagcagcgctttcctgggggtgaatgtcgcgctgcgtcgctccccgcagcctccagggccgagcgcgcgggatggttg

SEQ ID NO: 578067 - DNA, 120 bp, Artificial Sequence
  ENSG00000171617_49 (sequence is synthesized)
gcccacgttgcatcctccccggcttggaggaaagttggggccatgcacagacaccctgagtgcgggcatgttcactgcggcggaaatgtctatagagaatgaatgaaaactgctttctga

SEQ ID NO: 578068 - DNA, 120 bp, Artificial Sequence
  ENSG00000171617_50 (sequence is synthesized)
aaaactagtttcttgatctgtcgtgttaacattattagttacaaaggataggaattggtgggcctggagatgaaacactgaatttatccacatgcggtttggtgtcacacaggcatggcc

SEQ ID NO: 578069 - DNA, 120 bp, Artificial Sequence
  ENSG00000171617_51 (sequence is synthesized)
agcttgttaaatagcgttgcaagtgttaataaaaagactctggcaagaagctacttttgttaacaagatctttataatgttctattgttaccggtaatgtaaatgcccagaaaaaaatct

SEQ ID NO: 578070 - DNA, 120 bp, Artificial Sequence
  ENSG00000171617_52 (sequence is synthesized)
gcttagtttctcttttgattggattgagatcaggttcaaaacctggagaagggtgcgggacgctaagcattggaggcagagagcctgagttaggagcatgaagtgaactgaagttactgt

SEQ ID NO: 578071 - DNA, 120 bp, Artificial Sequence
  ENSG00000171617_53 (sequence is synthesized)
aactgaagcccttttgatgttcacagtaatagcagccctttctctgtcttctttgcagacgtaggttaagtacatgtgtgcattttcttggccacttacttggtatgcaaatgtgatttc

SEQ ID NO: 578072 - DNA, 120 bp, Artificial Sequence
  ENSG00000171617_54 (sequence is synthesized)
tctgggggcttaaaaatgctcgaaagatgattcattttatgttgaaggtgtgttcagtgacttgtatacatggtttctgctgatattttgaggtttgcacagttttaaaccagaaagcaa

SEQ ID NO: 578073 - DNA, 120 bp, Artificial Sequence
  ENSG00000171617_55 (sequence is synthesized)
gtatttcctcttgggtttccaagtttactttttattttaatcaaacattgttgcaagaatgttgattgtgattttgactgtgacgtgcttttccatctgggtggtatccaagatgacagg

SEQ ID NO: 578074 - DNA, 120 bp, Artificial Sequence
  ENSG00000171617_56 (sequence is synthesized)
ctaggctcttccttctggcttgttgggccaacctggaacatacaggagcataaacacaggatgcggagagatgtagatcctatatcctaaggtcttctaagcaaattgttttcttaggtg

SEQ ID NO: 578075 - DNA, 120 bp, Artificial Sequence
  ENSG00000171617_57 (sequence is synthesized)
taagtctggttgtgaatgttgttttgcaccatcctgaatttaatgttcaaggaaatgtgttctgggcctagcatgattccagctcaatgtgtaagcattttggtgcctgtgcacctagtt

SEQ ID NO: 578076 - DNA, 120 bp, Artificial Sequence
  ENSG00000171617_58 (sequence is synthesized)
tcagggagcctcattcttccttcactcagggcagcatttgctctgagagaggcggcagattcacaagagtaagtagacagtctattgaggtttaggtttaaagtcttcctccagatactc

SEQ ID NO: 578077 - DNA, 120 bp, Artificial Sequence
  ENSG00000171617_59 (sequence is synthesized)
cagattgaatgtactaattaaaatagcaactacagtggtggagcattgagaatgctaatgaatgttttaaccctttggaaacctgatgcattcccataggttcatatggtcattctccaa

SEQ ID NO: 578078 - DNA, 120 bp, Artificial Sequence
  ENSG00000171617_60 (sequence is synthesized)
aacactgggcattggttagaatggagtagacagtagatgcttagcttgaggtgggagtgaagctggctcctcaccattttttatatctcaagtcactgtggaaattactgggtgctttgt

SEQ ID NO: 578079 - DNA, 120 bp, Artificial Sequence
  ENSG00000171617_61 (sequence is synthesized)
aaagtcttcctaacactggagctctaggactttgttgcttcctttcttccactcagccatgtttactcatcataaaaaattatattccaaaaaggaaagaaaactagttgcatcacctaa

SEQ ID NO: 578080 - DNA, 120 bp, Artificial Sequence
  ENSG00000171617_62 (sequence is synthesized)
tggtatgaggtatatgtgtcatgcccctgcctttgtggttttctgtgcagtcttatagtggggctcacatctggttggggaggtgcaggttagtattttagcccatgaatctgtggcaaa

SEQ ID NO: 578081 - DNA, 120 bp, Artificial Sequence
  ENSG00000171617_63 (sequence is synthesized)
tcattcatttgcatttattaataattcttagaatatgcatttaaaaatgtctgaatggttaaaggaaacagagtttcagctgcgcttttgggactggctgttatgtgtctggaacagata

SEQ ID NO: 578082 - DNA, 120 bp, Artificial Sequence
  ENSG00000171617_64 (sequence is synthesized)
ctgcaaccagccacacagtttaccctctggggataaacagcgggataaacagcttccttaggaatccttggacaggcaggttcttgaggacttcattcctttgaagtaacagagggatgg

SEQ ID NO: 578083 - DNA, 120 bp, Artificial Sequence
  ENSG00000171617_65 (sequence is synthesized)
tgtaaaagaaaaggatgaaggcatgtgattcagtttttgaagatgggtgacaagcatttcctatgtctctaccctactgttttcttactgaagaaaaccaaaagatagcattagattcta

SEQ ID NO: 578084 - DNA, 120 bp, Artificial Sequence
  ENSG00000171617_66 (sequence is synthesized)
cattagattctactataatttcaatgtagataccaaggaaagcactgtagtcagcaaataaattctggggtggccctaaattaacaacagctggcaaaatacacacacacacacacacac

SEQ ID NO: 578085 - DNA, 120 bp, Artificial Sequence
  ENSG00000171617_67 (sequence is synthesized)
aacagcacacttagttgggtgttagtccagaactgactatatttgcacagaagagccataaaaattgctaccagggtggtggtacataaaaaatgacaatgggcaggctggctggaatcc

SEQ ID NO: 578086 - DNA, 80 bp, Artificial Sequence
  ENSG00000171621_0 (sequence is synthesized)
gcacagaagtcgcgctcgggcagcctgcgcgctcgcagcaggaaccaggctccaggcgccggcgccggggccggggccgc

SEQ ID NO: 578087 - DNA, 120 bp, Artificial Sequence
  ENSG00000171621_1 (sequence is synthesized)
gggcgcccgagcctcctcggccttggagagcagcggcggcggcggcaccccgggcgcggcaatactgaacactgcgcagcttgcagaggtctcctggcagccctcattaggaattctgtc

SEQ ID NO: 578088 - DNA, 120 bp, Artificial Sequence
  ENSG00000171621_2 (sequence is synthesized)
tggccccgatcagaatactggagacgagaccacgagattgatgagtttgccttgggagtcggtaagaaggtgaagccaggggcgaacatgggtcagaaggtcactggagggatcaagact

SEQ ID NO: 578089 - DNA, 120 bp, Artificial Sequence
  ENSG00000171621_3 (sequence is synthesized)
gtggacatgagggaccccacgtacaggcccctgaagcaggagctccagggtctggattactgcaagcccacccggctggatctgctactggacatgccccctgtgtcctatgatgtccag

SEQ ID NO: 578090 - DNA, 120 bp, Artificial Sequence
  ENSG00000171621_4 (sequence is synthesized)
ctgctgcattcatggaacaacaacgaccgatcgctcaatgtctttgtgaaggaggacgacaagctcatctttcaccggcatccggtggcccagagcacggacgctatcaggggcaaagtc

SEQ ID NO: 578091 - DNA, 120 bp, Artificial Sequence
  ENSG00000171621_5 (sequence is synthesized)
gggtatacccgtgggctgcacgtgtggcagatcacgtgggccatgagacagcggggcacacacgccgtggtgggggtggcgacggcagacgcccccctgcactctgtcgggtacacaacc

SEQ ID NO: 578092 - DNA, 120 bp, Artificial Sequence
  ENSG00000171621_6 (sequence is synthesized)
ctcgtggggaataaccacgagtcctggggctgggacttggggcgcaaccggctctaccacgatggcaagaaccagccaagcaaaacatacccagcctttctggaaccagatgagacattc

SEQ ID NO: 578093 - DNA, 120 bp, Artificial Sequence
  ENSG00000171621_7 (sequence is synthesized)
attgtccctgactccttcctggtagccctggacatggacgacgggactctgagcttcattgtggatggacagtacatgggagtggcttttcggggactcaagggcaaaaaactgtatcct

SEQ ID NO: 578094 - DNA, 120 bp, Artificial Sequence
  ENSG00000171621_8 (sequence is synthesized)
gtagtgagtgccgtctggggccactgtgagatccgaatgcgctacttgaacggactcgatcccgagccgctgccgctcatggatttgtgccgtcgctcggtgcgcctggccctggggagg

SEQ ID NO: 578095 - DNA, 120 bp, Artificial Sequence
  ENSG00000171621_9 (sequence is synthesized)
gagcgcctgggggagatccacacgctgccgctgccggcttccctcaaggcctacctcctctaccagtgacgttcgccatcataccgccagcgcgacagccacctggtgccaactcactga

SEQ ID NO: 578096 - DNA, 120 bp, Artificial Sequence
  ENSG00000171621_10 (sequence is synthesized)
gccgcctgccgctggggccgccgcaccctgcaccttggaccggcatccgtagccatggacagaggtccctggtcttccctcatcctccgtggctgcctccatgggacaaggaccgattcc

SEQ ID NO: 578097 - DNA, 120 bp, Artificial Sequence
  ENSG00000171621_11 (sequence is synthesized)
aacacaggctcctctttcccccttcccgacatcagcagaaggcagcatccctgcatgccgtccgtatacaacccctctttgaaaaaagacacagagaataaactcctacgaaagccctac

SEQ ID NO: 578098 - DNA, 120 bp, Artificial Sequence
  ENSG00000171621_12 (sequence is synthesized)
cagctctgagagcagataccaggggtactaagaggtgcttagacaagggctggtgcccggcccagggtgcccagcggggccatgccatggcagataaagctcaggacgtcaaaaactcac

SEQ ID NO: 578099 - DNA, 120 bp, Artificial Sequence
  ENSG00000171621_13 (sequence is synthesized)
catggaccccaaggcagaaaccaagaactgtctgcaggcaaataagcacccagcacccatcctggctgccggtgccccgtaccctgtatttattcttttaacaataacaaaagccattta

SEQ ID NO: 578100 - DNA, 120 bp, Artificial Sequence
  ENSG00000171621_14 (sequence is synthesized)
tttattccatctagaaaggaaaccctgtttcagtcccctctctctggctgttctgttactttccttccacctgtgccctccctgggatatgtatgcctcgcccgccctccctgggcacat

SEQ ID NO: 578101 - DNA, 120 bp, Artificial Sequence
  ENSG00000171621_15 (sequence is synthesized)
gtgcacacgtgcccaggcacaagtatgtctctgggtcccttgccctgcagtttccagggggctctgctccaagttccctagcgggcccctcagggagaaatagcctcacgtgcaatctgg

SEQ ID NO: 578102 - DNA, 120 bp, Artificial Sequence
  ENSG00000171621_16 (sequence is synthesized)
gtgtcttcgggggcccgtctggaagggctgcagcaattcccctgtgtctccaggtaaccagctaactcttgggctcaggcacccttgcacagggttgcatttctttagtcttctgtgggt

SEQ ID NO: 578103 - DNA, 120 bp, Artificial Sequence
  ENSG00000171621_17 (sequence is synthesized)
cttttgatgtgggtttgattttgcttttgcttttctagctgagatttcccaagtgcatcctcagaagctctgggtgtgccagaggacccccagaactaagaagggagggcgagtgggtct

SEQ ID NO: 578104 - DNA, 120 bp, Artificial Sequence
  ENSG00000171621_18 (sequence is synthesized)
ccattccccgagaagccgggggcagggtgggatggggaagaccaggagcagagtcgagcctcacagaagccagcgcgggtctctgctcagcaccccagccggggctctggacccagggta

SEQ ID NO: 578105 - DNA, 120 bp, Artificial Sequence
  ENSG00000171621_19 (sequence is synthesized)
acagccccagttcatcccaacccctctcagagcctcaagaggggtagctcggctgccggaagagaggggtgccctatccctggcaacccctccacgtagcgtaccccagcacctgccacc

SEQ ID NO: 578106 - DNA, 120 bp, Artificial Sequence
  ENSG00000171621_20 (sequence is synthesized)
gcctttgccatttctttgagcttgaagttaactctcttagagtctaactttggttcatttctgcacaggtacaatagatgactttatttgtttaaaatgtttaatatatatacatacata

SEQ ID NO: 578107 - DNA, 120 bp, Artificial Sequence
  ENSG00000171621_21 (sequence is synthesized)
tatatatatttgtctgtaagaattatgttttaaacagctgctgtagagtacctttttttaagtaaatcttacagtggagtatattttttaaagcacaaaattggtgccaagactgggtga

SEQ ID NO: 578108 - DNA, 120 bp, Artificial Sequence
  ENSG00000171621_22 (sequence is synthesized)
gaaatgtacattacccccttattattttgacggttttttttttcggggcaggggaccttacctgtaagacttttaaagattttcctccctcctgtttcaggtgggtcacattctgatgaa

SEQ ID NO: 578109 - DNA, 120 bp, Artificial Sequence
  ENSG00000171621_23 (sequence is synthesized)
tgtttcccttgtacagatcccagcttatggccttgacccagccgtcctcacagatgccgggtgaccctctagctctctctgcatctcccaccccccgacaccctgggaccctcgacccca

SEQ ID NO: 578110 - DNA, 120 bp, Artificial Sequence
  ENSG00000171621_24 (sequence is synthesized)
cccttctttcctaccagcccagagccttgtggcttgtacagttttgaaactcccgttctattttatgatggttgataatagtcagtaacctaataaaggaacgtttgttaaaatatcaaa

SEQ ID NO: 578111 - DNA, 120 bp, Artificial Sequence
  ENSG00000171621_25 (sequence is synthesized)
ccctctctggaacactgtctccactgagttttaggtaagtgtgtgacagacaaacgagcagaagcttggagaagctcagggtggatcttggtggccggagctactgtctcggcgcatgag

SEQ ID NO: 578112 - DNA, 120 bp, Artificial Sequence
  ENSG00000171621_26 (sequence is synthesized)
cctctctccatttctctgaaaatgaactacacagtttgggggtgagttggcaggggctgcttcctgagcaatactgaacactgcgcagcttgcagaggtctcctggcagccctcattagg

SEQ ID NO: 578113 - DNA, 120 bp, Artificial Sequence
  ENSG00000171631_0 (sequence is synthesized)
tctgggttccagggacgctggggccggagctgctgccgccgtctacacggtcccctcatttgacgggttcgcctcctagcagcgcctgggcgagtgacatctgggccggaccagctggtg

SEQ ID NO: 578114 - DNA, 120 bp, Artificial Sequence
  ENSG00000171631_1 (sequence is synthesized)
ctgcgcggcgcaggtctctcggtttcctcatctgctgcctctccagacttctgccagaacattgcacgcgacagtttcaggcacagaactgactggcagcaggggctgctccacgagtgg

SEQ ID NO: 578115 - DNA, 120 bp, Artificial Sequence
  ENSG00000171631_2 (sequence is synthesized)
gaatttgctccagcacttcacggactgcaagcgaggcacttgctaactcttggataacaagacctctgccagaagaaccatggctttggaaggcggagttcaggctgaggagatgggtgc

SEQ ID NO: 578116 - DNA, 120 bp, Artificial Sequence
  ENSG00000171631_3 (sequence is synthesized)
ggtcctcagtgagcccctgcctccctgaacataggaaacccacctgggcagccatggaatgggacaatggcacaggccaggctctgggcttgccacccaccacctgtgtctaccgcgaga

SEQ ID NO: 578117 - DNA, 120 bp, Artificial Sequence
  ENSG00000171631_4 (sequence is synthesized)
acttcaagcaactgctgctgccacctgtgtattcggcggtgctggcggctggcctgccgctgaacatctgtgtcattacccagatctgcacgtcccgccgggccctgacccgcacggccg

SEQ ID NO: 578118 - DNA, 120 bp, Artificial Sequence
  ENSG00000171631_5 (sequence is synthesized)
tgtacaccctaaaccttgctctggctgacctgctatatgcctgctccctgcccctgctcatctacaactatgcccaaggtgatcactggccctttggcgacttcgcctgccgcctggtcc

SEQ ID NO: 578119 - DNA, 120 bp, Artificial Sequence
  ENSG00000171631_6 (sequence is synthesized)
gcttcctcttctatgccaacctgcacggcagcatcctcttcctcacctgcatcagcttccagcgctacctgggcatctgccacccgctggccccctggcacaaacgtgggggccgccggg

SEQ ID NO: 578120 - DNA, 120 bp, Artificial Sequence
  ENSG00000171631_7 (sequence is synthesized)
gccgtgtggctggccgtgacaacccagtgcctgcccacagccatcttcgctgccacaggcatccagcgtaaccgcactgtctgctatgacctcagcccgcctgccctggccacccactat

SEQ ID NO: 578121 - DNA, 120 bp, Artificial Sequence
  ENSG00000171631_8 (sequence is synthesized)
atgccctatggcatggctctcactgtcatcggcttcctgctgccctttgctgccctgctggcctgctactgtctcctggcctgccgcctgtgccgccaggatggcccggcagagcctgtg

SEQ ID NO: 578122 - DNA, 120 bp, Artificial Sequence
  ENSG00000171631_9 (sequence is synthesized)
gcccaggagcggcgtggcaaggcggcccgcatggccgtggtggtggctgctgcctttgccatcagcttcctgccttttcacatcaccaagacagcctacctggcagtgcgctcgacgccg

SEQ ID NO: 578123 - DNA, 120 bp, Artificial Sequence
  ENSG00000171631_10 (sequence is synthesized)
ggcgtcccctgcactgtattggaggcctttgcagcggcctacaaaggcacgcggccgtttgccagtgccaacagcgtgctggaccccatcctcttctacttcacccagaagaagttccgc

SEQ ID NO: 578124 - DNA, 120 bp, Artificial Sequence
  ENSG00000171631_11 (sequence is synthesized)
cggcgaccacatgagctcctacagaaactcacagccaaatggcagaggcagggtcgctgagtcctccaggtcctgggcagccttcatatttgccattgtgtccggggcaccaggagcccc

SEQ ID NO: 578125 - DNA, 120 bp, Artificial Sequence
  ENSG00000171631_12 (sequence is synthesized)
accaaccccaaaccatgcggagaattagagttcagctcagctgggcatggagttaagatccctcacaggacccagaagctcaccaaaaactatttcttcagccccttctctggcccagac

SEQ ID NO: 578126 - DNA, 120 bp, Artificial Sequence
  ENSG00000171631_13 (sequence is synthesized)
cctgtgggcatggagatggacagacctgggcctggctcttgagaggtcccagtcagccatggagagctggggaaaccacattaaggtgctcacaaaaatacagtgtgacgtgtactgtca

SEQ ID NO: 578127 - DNA, 120 bp, Artificial Sequence
  ENSG00000171631_14 (sequence is synthesized)
gctgggttttgagggatgattatgagctctctggagaggagtgatattccatttatttagaaagcctttactgacaccttgtgctcaggcctgtgttggttctggggccctagaagaacc

SEQ ID NO: 578128 - DNA, 120 bp, Artificial Sequence
  ENSG00000171631_15 (sequence is synthesized)
agtcctagccctggtccatacgggctcccaactgctggaagtacagactggcacagcaacatcagggttgtgacagagggaagcatggctggggggagggggtacacagacagtgcccat

SEQ ID NO: 578129 - DNA, 120 bp, Artificial Sequence
  ENSG00000171631_16 (sequence is synthesized)
gacccagtccaaggagtcaggaaagagctctctgaggagggagcatctgagccagatgttgagggctgagtgggaacttggcaagcagaagtggggagcactttaatgcaacccaggtat

SEQ ID NO: 578130 - DNA, 120 bp, Artificial Sequence
  ENSG00000171631_17 (sequence is synthesized)
gctccatgcatatccagctgggccagcctcgtgctgggctctgccctgggcagacaggcagagggccagagcagaggacacatggccttgcgtgtgtgaaagctgagaaaatgggagctg

SEQ ID NO: 578131 - DNA, 120 bp, Artificial Sequence
  ENSG00000171631_18 (sequence is synthesized)
tgcttcagctaccctccagacaagggcaagagttagccagatgctccaggcagtgggaagccaatggagggattaagcggcggaagcttcttagaagaggcagggggcgaagtgcagtgg

SEQ ID NO: 578132 - DNA, 120 bp, Artificial Sequence
  ENSG00000171631_19 (sequence is synthesized)
ctcatgcctgtaatctcagcaatttgggaggccaaggaaggaggaatgcttgagcccaagagttttagaccagcctgggcaacacagtaagaccctgtttctacaaaaaaatataaaaaa

SEQ ID NO: 578133 - DNA, 120 bp, Artificial Sequence
  ENSG00000171631_20 (sequence is synthesized)
aaggacagaggaggggcccttcctgtcagctggctgggagcagaggtggctttgtcttttcggaagaactggttctgtggaatttgtgcttatttcccatcaaggatcaaggacctgctc

SEQ ID NO: 578134 - DNA, 120 bp, Artificial Sequence
  ENSG00000171631_21 (sequence is synthesized)
tggggctacctcagggccccacaggatgaggggctggttttcagatgagttttctgcttgcctgtcatctggatagtgtctaaaaatttgcaaactgccttcttgtcagtgtcttgctca

SEQ ID NO: 578135 - DNA, 120 bp, Artificial Sequence
  ENSG00000171631_22 (sequence is synthesized)
gccggagctgctgccgccgtctacacggtcccctcatttgacgggttcgcctcctagcagcgcctgggcgagtgacatctgggccggaccagctggtgctgcgcggcgcagataacaaga

SEQ ID NO: 578136 - DNA, 120 bp, Artificial Sequence
  ENSG00000171631_23 (sequence is synthesized)
gaaacagaggaagctgctcactctgtcagagaagttgcagcctagctgagggcaggagagtggggagcctcaggtctggcttccctttgccccaacacacttgggaccaccagcgtgctg

SEQ ID NO: 578137 - DNA, 85 bp, Artificial Sequence
  ENSG00000171631_24 (sequence is synthesized)
accggtggtcagagtgaaacagaacagaacgggaggtttcacaatgtccttccatacaatctctggaatctatagataacaacag

SEQ ID NO: 578138 - DNA, 120 bp, Artificial Sequence
  ENSG00000171631_25 (sequence is synthesized)
caggcctggtttcgggtctggttccttggtttcgggtctggttccttggtttcaggtctggtttttaggcgccgggctacctgcctttagtttcgcttctctttccttttccgagtataa

SEQ ID NO: 578139 - DNA, 120 bp, Artificial Sequence
  ENSG00000171631_26 (sequence is synthesized)
ccttttccgagtataaaacagtatgagagggtctctctcctccctcagtgccatcctcatccctgggtgggagttgtctggatccatagggttggagccacagataacagagccattaat

SEQ ID NO: 578140 - DNA, 120 bp, Artificial Sequence
  ENSG00000171631_27 (sequence is synthesized)
ctcggggtctcagcctctcttaacggaccttccaggcactgctgagaaaaccaggttaatggtttcctgcggcagcaatgagcagaagcagggccatctccagactccagagaagccagg

SEQ ID NO: 578141 - DNA, 120 bp, Artificial Sequence
  ENSG00000171631_28 (sequence is synthesized)
agagggctggggtgataatggggaggaggataaaaaacagccacccaatgcgtgccttccctgtgccaggcccttgtcctgaaatgttatctcactccatcctcccaacagtcccttggg

SEQ ID NO: 578142 - DNA, 120 bp, Artificial Sequence
  ENSG00000171631_29 (sequence is synthesized)
ctaaattggtgatgctgcttgtttgagtgagcaaacagagggtgaatgaagtgacttgcgggcagctgggtagaggatgagtcagcattggtgtaaaggactggagcttcagggttctcg

SEQ ID NO: 578143 - DNA, 120 bp, Artificial Sequence
  ENSG00000171631_30 (sequence is synthesized)
ggcttgggagagtgaaagctcacccggatctgggtggagaaagtatgacaggtcccaggctcaccctctcacacatacaaacacatgcacatacaagagaagctgctccgaaatctcatt

SEQ ID NO: 578144 - DNA, 120 bp, Artificial Sequence
  ENSG00000171631_31 (sequence is synthesized)
tttttatcttccaaaattcctgtggattttgcattcttctataatatttctgcatataaaaacactgttctgataaattaccatccaatgagttggctcaagtcttggagataacaagac

SEQ ID NO: 578145 - DNA, 120 bp, Artificial Sequence
  ENSG00000171634_0 (sequence is synthesized)
gggcgggggcggcggcggccacctggcccggaccaccgcggcccggagggccgtcaacaaagtggtgtacgatgaccacgagagcgaggaggaggaggaagaggaggacatggtctccga

SEQ ID NO: 578146 - DNA, 120 bp, Artificial Sequence
  ENSG00000171634_1 (sequence is synthesized)
ggaggaggaggaggaggacggcgacgccgaggagacccaggattctgaggacgacgaggaggatgagatggaagaggacgacgatgactccgattatccggaggagatggaagacgacga

SEQ ID NO: 578147 - DNA, 120 bp, Artificial Sequence
  ENSG00000171634_2 (sequence is synthesized)
cgacgacgccagttactgcacggaaagcagcttcaggagccatagtacctacagcagcactccaggtaggcgaaaaccaagagtacatcggcctcgttctcctatattggaagaaaaaga

SEQ ID NO: 578148 - DNA, 120 bp, Artificial Sequence
  ENSG00000171634_3 (sequence is synthesized)
catcccgccccttgaatttcccaagtcctctgaggatttaatggtgcctaatgagcatataatgaatgtcattgccatttacgaggtactgcggaactttggcactgttttgagattatc

SEQ ID NO: 578149 - DNA, 120 bp, Artificial Sequence
  ENSG00000171634_4 (sequence is synthesized)
tccttttcgctttgaggacttttgtgcagctctggtgagccaagagcagtgcacactcatggcagagatgcatgttgtgcttttgaaagcagttctgcgtgaagaagacacttccaatac

SEQ ID NO: 578150 - DNA, 120 bp, Artificial Sequence
  ENSG00000171634_5 (sequence is synthesized)
tacctttggacctgctgatctgaaagatagcgttaattccacactgtatttcatagatgggatgacgtggccagaggtgctgcgggtgtactgtgagagtgataaggagtaccatcacgt

SEQ ID NO: 578151 - DNA, 120 bp, Artificial Sequence
  ENSG00000171634_6 (sequence is synthesized)
tcttccttaccaagaggcagaggactacccatatggaccagtagagaacaagatcaaagttctacagtttctagtcgatcagtttcttacaacaaatattgctcgagaggaattgatgtc

SEQ ID NO: 578152 - DNA, 120 bp, Artificial Sequence
  ENSG00000171634_7 (sequence is synthesized)
tgaaggggtgatacagtatgatgaccattgtagggtttgtcacaaacttggggatttgctttgctgtgagacatgttcagcagtataccatttggaatgtgtgaagccacctcttgagga

SEQ ID NO: 578153 - DNA, 120 bp, Artificial Sequence
  ENSG00000171634_8 (sequence is synthesized)
ggtgccagaggacgagtggcagtgtgaagtctgtgtagcacacaaggtgcctggtgtgactgactgtgttgctgaaatccaaaaaaataaaccatatattcgacatgaacctattggata

SEQ ID NO: 578154 - DNA, 120 bp, Artificial Sequence
  ENSG00000171634_9 (sequence is synthesized)
tgatagaagtcggaggaaatactggttcttgaaccgaagactcataatagaagaagatacagaaaatgaaaatgaaaagaaaatttggtattacagcacaaaggtccaacttgcagaatt

SEQ ID NO: 578155 - DNA, 120 bp, Artificial Sequence
  ENSG00000171634_10 (sequence is synthesized)
aattgactgtctagacaaagattattgggaagcagaactctgcaaaattctagaagaaatgcgtgaagaaatccaccgacacatggacataactgaagacctgaccaataaggctcgggg

SEQ ID NO: 578156 - DNA, 120 bp, Artificial Sequence
  ENSG00000171634_11 (sequence is synthesized)
cagtaacaaatcctttctggcggcagctaatgaagaaattttggaatccataagagccaaaaagggagacattgataatgttaaaagcccagaagaaacagaaaaagacaagaatgagac

SEQ ID NO: 578157 - DNA, 120 bp, Artificial Sequence
  ENSG00000171634_12 (sequence is synthesized)
tgagaatgactctaaagatgctgagaaaaacagagaagaatttgaagaccagtcccttgaaaaagacagtgacgacaaaacaccagatgatgaccctgagcaaggaaaatctgaggagcc

SEQ ID NO: 578158 - DNA, 120 bp, Artificial Sequence
  ENSG00000171634_13 (sequence is synthesized)
aacagaagttggggataaaggtaactctgtgtcagcaaatcttggcgacaacacaacaaatgcaacttcagaagagactagtccctctgaagggaggagccctgtggggtgtctctcaga

SEQ ID NO: 578159 - DNA, 120 bp, Artificial Sequence
  ENSG00000171634_14 (sequence is synthesized)
aacccccgatagcagcaacatggcagagaagaaggtggcatctgagctcccccaggatgtgccagaagaacctaacaagacatgtgagagcagtaacactagtgctaccactacctccat

SEQ ID NO: 578160 - DNA, 120 bp, Artificial Sequence
  ENSG00000171634_15 (sequence is synthesized)
ccagcctaatctggaaaacagtaacagcagcagtgaactaaattcttcccagagtgaatctgctaaggcagctgatgatcctgaaaatggagaaagagaatctcatacacctgtctctat

SEQ ID NO: 578161 - DNA, 120 bp, Artificial Sequence
  ENSG00000171634_16 (sequence is synthesized)
tcaggaagagatagtaggtgatttcaaatcggagaagtccaacggggagctaagtgaatctcctggagctggaaaaggagcatctggctcaactcgaatcatcaccagattgcggaatcc

SEQ ID NO: 578162 - DNA, 120 bp, Artificial Sequence
  ENSG00000171634_17 (sequence is synthesized)
agatagcaaacttagtcagctgaagagccagcaggtggcagccgctgcacatgaagcaaataaattatttaaggagggcaaagaggtactggtagttaactctcaaggagaaatttcacg

SEQ ID NO: 578163 - DNA, 120 bp, Artificial Sequence
  ENSG00000171634_18 (sequence is synthesized)
gttgagcaccaaaaaggaagtgatcatgaaaggaaatatcaacaattattttaaattgggtcaagaagggaagtatcgcgtctaccacaatcaatactccaccaattcatttgctttgaa

SEQ ID NO: 578164 - DNA, 120 bp, Artificial Sequence
  ENSG00000171634_19 (sequence is synthesized)
taagcaccagcacagagaagaccatgataagagaaggcatcttgcacataagttctgtctgactccagcaggagagttcaaatggaacggttctgtccatgggtccaaagttcttaccat

SEQ ID NO: 578165 - DNA, 120 bp, Artificial Sequence
  ENSG00000171634_20 (sequence is synthesized)
atctactctgagactgactatcacccaattagaaaacaacatcccttcatcctttcttcatcccaactgggcatcacatagggcaaattggatcaaggcagttcagatgtgtagcaaacc

SEQ ID NO: 578166 - DNA, 120 bp, Artificial Sequence
  ENSG00000171634_21 (sequence is synthesized)
cagagaatttgcattggctttagccattttggagtgtgcagttaaaccagttgtgatgctaccaatatggcgagaatctttaggacataccaggttacaccggatgacatcaattgaaag

SEQ ID NO: 578167 - DNA, 120 bp, Artificial Sequence
  ENSG00000171634_22 (sequence is synthesized)
agaagaaaaggagaaagtcaaaaaaaaagagaagaaacaggaagaagaagaaacgatgcagcaagcgacatgggtaaaatacacatttccagttaagcatcaggtttggaaacaaaaagg

SEQ ID NO: 578168 - DNA, 120 bp, Artificial Sequence
  ENSG00000171634_23 (sequence is synthesized)
tgaagagtacagagtgacaggatatggtggttggagctggattagtaaaactcatgtttataggtttgttcctaaattgccaggcaatactaatgtgaattacagaaagtcgttagaagg

SEQ ID NO: 578169 - DNA, 120 bp, Artificial Sequence
  ENSG00000171634_24 (sequence is synthesized)
aaccaaaaataatatggatgaaaatatggatgagtcagataaaagaaaatgttcacgaagtccaaaaaaaataaaaatagagcctgattctgaaaaagatgaggtaaaaggttcagatgc

SEQ ID NO: 578170 - DNA, 120 bp, Artificial Sequence
  ENSG00000171634_25 (sequence is synthesized)
tgcaaaaggagcagaccaaaatgaaatggatatctcaaagattactgagaagaaggaccaagatgtgaaggagctcttagattctgacagtgataaaccctgcaaggaagaaccaatgga

SEQ ID NO: 578171 - DNA, 120 bp, Artificial Sequence
  ENSG00000171634_26 (sequence is synthesized)
agtagacgatgacatgaaaacagagtcacatgtaaattgtcaggagagttctcaagtagatgtggtcaatgttagtgagggttttcatctaaggactagttacaaaaagaaaacaaaatc

SEQ ID NO: 578172 - DNA, 120 bp, Artificial Sequence
  ENSG00000171634_27 (sequence is synthesized)
atccaaactagatggacttcttgaaaggagaattaaacagtttacactggaagaaaaacagcgactcgaaaaaatcaagttggagggtggaattaagggtataggaaagacttctacaaa

SEQ ID NO: 578173 - DNA, 120 bp, Artificial Sequence
  ENSG00000171634_28 (sequence is synthesized)
ttcttcaaaaaatctctctgaatcaccagtaataacgaaagcaaaagaagggtgtcagagtgactcgatgagacaagaacagagcccaaatgcaaataatgatcaacctgaggacttgat

SEQ ID NO: 578174 - DNA, 120 bp, Artificial Sequence
  ENSG00000171634_29 (sequence is synthesized)
tcagggatgttcagaaagtgattcctcagttcttagaatgagtgatcctagtcataccacaaacaaactttatccaaaagatcgagtgttagatgatgtctccattcggagcccagaaac

SEQ ID NO: 578175 - DNA, 120 bp, Artificial Sequence
  ENSG00000171634_30 (sequence is synthesized)
aaaatgtccgaaacaaaattccattgaaaatgacatagaagaaaaagtctctgaccttgccagtagaggccaggaacccagtaagagtaaaacaaaaggaaatgattttttcatcgatga

SEQ ID NO: 578176 - DNA, 120 bp, Artificial Sequence
  ENSG00000171634_31 (sequence is synthesized)
ctctaaactagccagtgcagatgatattggtactttgatctgtaagaacaaaaaaccgctcatacaggaggaaagtgacaccattgtttcttcttccaagagtgctttacattcatcagt

SEQ ID NO: 578177 - DNA, 120 bp, Artificial Sequence
  ENSG00000171634_32 (sequence is synthesized)
gcctaaaagtaccaatgacagagatgccacacctctgtcaagagcaatggactttgaaggaaaactgggatgtgactctgaatctaatagcactttggaaaatagttctgataccgtgtc

SEQ ID NO: 578178 - DNA, 120 bp, Artificial Sequence
  ENSG00000171634_33 (sequence is synthesized)
tattcaggatagcagtgaagaagatatgattgttcagaatagcaatgaaagcatttctgaacagttcagaactcgagaacaagatgttgaagtcttggagccgttaaagtgtgagttggt

SEQ ID NO: 578179 - DNA, 120 bp, Artificial Sequence
  ENSG00000171634_34 (sequence is synthesized)
ttctggtgagtccactggaaactgtgaggacaggctgccggtcaaggggactgaagcaaatggtaaaaaaccaagtcagcagaagaaattagaggagagaccagttaataaatgtagtga

SEQ ID NO: 578180 - DNA, 120 bp, Artificial Sequence
  ENSG00000171634_35 (sequence is synthesized)
tcaaataaagctaaaaaataccactgacaaaaagaataatgaaaatcgagagtctgaaaagaaaggacagagaacaagtacatttcaaataaatggaaaagataataaacccaaaatata

SEQ ID NO: 578181 - DNA, 120 bp, Artificial Sequence
  ENSG00000171634_36 (sequence is synthesized)
tttgaaaggtgaatgcttgaaagaaatttctgagagtagagtagtaagtggtaatgttgaaccaaaggttaataatataaataaaataatccctgagaatgatattaaatcattgactgt

SEQ ID NO: 578182 - DNA, 120 bp, Artificial Sequence
  ENSG00000171634_37 (sequence is synthesized)
taaagaatctgctataaggccattcattaatggtgatgtcatcatggaagattttaatgaaagaaacagctccgaaacaaaatcgcatttgctgagttcttcagatgctgaaggtaacta

SEQ ID NO: 578183 - DNA, 120 bp, Artificial Sequence
  ENSG00000171634_38 (sequence is synthesized)
ccgagatagccttgagaccctgccatcaaccaaagagtctgacagtacacagacgaccacaccctcagcatcttgtccagaaagcaattcagttaatcaggtagaagatatggaaataga

SEQ ID NO: 578184 - DNA, 120 bp, Artificial Sequence
  ENSG00000171634_39 (sequence is synthesized)
aacctcagaagttaagaaagttacttcatcacctattacttctgaagaggaatctaatctcagtaatgactttattgatgaaaatggtctgcccatcaacaaaaatgaaaatgtcaatgg

SEQ ID NO: 578185 - DNA, 120 bp, Artificial Sequence
  ENSG00000171634_40 (sequence is synthesized)
agaatctaaaagaaaaaccgtcatcacagaagtcaccacgatgacctccacagtggccacagaatcaaaaactgtgatcaaggtagaaaaaggcgataagcaaactgtggtttcttccac

SEQ ID NO: 578186 - DNA, 120 bp, Artificial Sequence
  ENSG00000171634_41 (sequence is synthesized)
agaaaattgtgcaaaatccactgtcacaaccaccactacaacagtgaccaagctttccacaccctccacaggcggcagtgtggacatcatctctgtaaaggagcagagcaaaaccgtggt

SEQ ID NO: 578187 - DNA, 120 bp, Artificial Sequence
  ENSG00000171634_42 (sequence is synthesized)
caccacgacagtgacagactccctgaccaccacgggaggcacactggttacatctatgactgtgagcaaagagtattccacacgagacaaagtgaaactgatgaaattttcaagaccaaa

SEQ ID NO: 578188 - DNA, 120 bp, Artificial Sequence
  ENSG00000171634_43 (sequence is synthesized)
gaagactcgttcaggtacagctctgccatcctatagaaaatttgttaccaagagcagcaagaagagcatttttgttttgcctaatgatgacttaaaaaagttggcccgaaaaggaggaat

SEQ ID NO: 578189 - DNA, 120 bp, Artificial Sequence
  ENSG00000171634_44 (sequence is synthesized)
ccgagaggtcccttattttaattacaatgcaaaacctgctttggatatatggccatatccttctcctagaccgacctttggcatcacttggaggtatagacttcagacagtaaagtcctt

SEQ ID NO: 578190 - DNA, 120 bp, Artificial Sequence
  ENSG00000171634_45 (sequence is synthesized)
tcacaacaacagaaataattaagaggagagatgttggtccttatggcattcgatctgaatattgtatcaggaaaatcatttgtcccattggagttccagaaacaccaaaagaaacgccta

SEQ ID NO: 578191 - DNA, 120 bp, Artificial Sequence
  ENSG00000171634_46 (sequence is synthesized)
cacctcagaggaaaggccttcgatcaagtgcactgcggccaaagagaccagaaacgcccaagcaaactggccctgttattattgaaacctgggtagcagaagaagaactggaattgtggg

SEQ ID NO: 578192 - DNA, 120 bp, Artificial Sequence
  ENSG00000171634_47 (sequence is synthesized)
agatcagggcatttgctgagagagtggagaaagaaaaggcacaagcagttgagcaacaggctaagaaacgactggagcagcagaagccgacagtgattgcaacttccactacttccccaa

SEQ ID NO: 578193 - DNA, 120 bp, Artificial Sequence
  ENSG00000171634_48 (sequence is synthesized)
caagcagtacaaccagcaccatctctccagcacagaaggttatggtggcccccataagtggctcagttacaactggaaccaaaatggtactaactactaaagttggatctccagctacag

SEQ ID NO: 578194 - DNA, 120 bp, Artificial Sequence
  ENSG00000171634_49 (sequence is synthesized)
taacattccaacaaaacaagaactttcatcaaacctttgctacatgggttaagcaaggccagtcaaattcaggcgttgttcaagtacagcagaaagtcctgggtatcattccatcaagta

SEQ ID NO: 578195 - DNA, 120 bp, Artificial Sequence
  ENSG00000171634_50 (sequence is synthesized)
caggtaccagtcagcaaacctttacttcattccagcccaggacagcaacagtcacaattaggcccaatacctcaggctctggaggaaccacaagcaattcacaagtaatcacagggcctc

SEQ ID NO: 578196 - DNA, 120 bp, Artificial Sequence
  ENSG00000171634_51 (sequence is synthesized)
agattcgccctggtatgaccgtgattagaacaccactccaacagtcaacactaggaaaggcaattattcgaacacctgtgatggtacagccaggtgctcctcagcaagtgatgactcaaa

SEQ ID NO: 578197 - DNA, 120 bp, Artificial Sequence
  ENSG00000171634_52 (sequence is synthesized)
tcatcagggggcagcctgtctccactgcagtctccgcccctaacacggtttcctcaacacctgggcagaaaagcttaacttcagcaacgtccacttcaaatatacagtcttcagcctcac

SEQ ID NO: 578198 - DNA, 120 bp, Artificial Sequence
  ENSG00000171634_53 (sequence is synthesized)
aaccccctcgcccccaacaaggacaagtgaagctcaccatggctcaacttactcagttaacacagggccacggtggcaatcaaggtttgacagtagtaattcaaggacaaggtcaaacta

SEQ ID NO: 578199 - DNA, 120 bp, Artificial Sequence
  ENSG00000171634_54 (sequence is synthesized)
ctggacagttgcagttgatacctcaaggggtgactgtactcccaggcccaggccagcagctaatgcaagctgcaatgccaaatggtactgttcagcgattcctctttaccccattggcaa

SEQ ID NO: 578200 - DNA, 120 bp, Artificial Sequence
  ENSG00000171634_55 (sequence is synthesized)
caacagccaccacagccagcaccaccaccaccactgtttccacgacagcagcaggtacaggtgaacaaaggcagagtaaactgtcaccccagatgcaggtacatcaagacaaaaccctgc

SEQ ID NO: 578201 - DNA, 120 bp, Artificial Sequence
  ENSG00000171634_56 (sequence is synthesized)
caccagctcagtcatcaagtgtgggtccagcagaagcccagccacagactgctcagccttcagctcagccccagccccaaacccagccccagtccccagctcagcctgaagttcagactc

SEQ ID NO: 578202 - DNA, 120 bp, Artificial Sequence
  ENSG00000171634_57 (sequence is synthesized)
agcctgaagttcagacccaaacaactgtttcatcccatgtcccttctgaagcacaacccacccacgcacagtcatccaagccccaagttgcagcacagtctcagcctcaaagtaatgtcc

SEQ ID NO: 578203 - DNA, 120 bp, Artificial Sequence
  ENSG00000171634_58 (sequence is synthesized)
aaggacagtctcctgttcgtgtccaaagtccatcacagactcgaatacgtccatcaactccatcccaactgtctcctggacaacaatcccaggttcagactacaacctcacaaccgattc

SEQ ID NO: 578204 - DNA, 120 bp, Artificial Sequence
  ENSG00000171634_59 (sequence is synthesized)
caattcaaccacatacatctcttcagataccttcccaaggccagccacagtcacaaccccaggtacagtcttcaactcaaactctttcatcaggacaaactttaaatcaagttactgttt

SEQ ID NO: 578205 - DNA, 120 bp, Artificial Sequence
  ENSG00000171634_60 (sequence is synthesized)
catccccatcccgtcctcagctacaaatacagcagccacagccccaagtcattgctgtgcctcagctgcaacaacaagtccaggttctctctcagatccagtcacaggttgtggctcaga

SEQ ID NO: 578206 - DNA, 120 bp, Artificial Sequence
  ENSG00000171634_61 (sequence is synthesized)
tacaggctcagcaaagtggtgtgccccagcaaatcaaactccagttacctatccaaattcagcaaagcagtgctgtgcagactcaccagattcagaatgtggttacagtgcaggcagcca

SEQ ID NO: 578207 - DNA, 120 bp, Artificial Sequence
  ENSG00000171634_62 (sequence is synthesized)
gtgtgcaagagcagttgcaaagggttcagcaactcagggatcagcagcaaaagaagaaacagcaacagatagaaattaagcgtgaacacaccctccaagcttctaatcaaagtgaaatca

SEQ ID NO: 578208 - DNA, 120 bp, Artificial Sequence
  ENSG00000171634_63 (sequence is synthesized)
ttcagaaacaggtggtgatgaagcataatgctgtaatagaacatttaaaacagaaaaagagcatgactccagctgaaagagaagagaatcaaagaatgattgtctgtaaccaggtgatga

SEQ ID NO: 578209 - DNA, 120 bp, Artificial Sequence
  ENSG00000171634_64 (sequence is synthesized)
agtatattttggataagatagataaagaagaaaaacaggcagcaaaaaaacggaagcgtgaagagagtgtggagcagaaacgtagcaagcagaatgccactaagctgtcagctctgctct

SEQ ID NO: 578210 - DNA, 120 bp, Artificial Sequence
  ENSG00000171634_65 (sequence is synthesized)
tcaagcacaaagagcagctcagagccgagatcctgaagaagagagcactcctggacaaggatctgcaaattgaagtgcaggaagagctgaagagagacctgaaaattaagaaagaaaaag

SEQ ID NO: 578211 - DNA, 120 bp, Artificial Sequence
  ENSG00000171634_66 (sequence is synthesized)
acctgatgcagttggctcaggccacagcagtagctgcaccctgccccccagtgacaccagctcctccagcccctccagcccctccaccttcacctccccctccacctgctgtgcaacaca

SEQ ID NO: 578212 - DNA, 120 bp, Artificial Sequence
  ENSG00000171634_67 (sequence is synthesized)
caggccttctgtccacgcccaccttacctgctgcttcccagaagaggaagcgggaagaggaaaaagactccagctcaaagtccaagaaaaagaaaatgatctctactacctcaaaggaaa

SEQ ID NO: 578213 - DNA, 120 bp, Artificial Sequence
  ENSG00000171634_68 (sequence is synthesized)
ctaagaaggacacaaagctttactgtatctgtaaaacgccttatgatgaatctaagttctatattggctgtgatctttgtactaactggtatcatggagaatgtgttggcatcacagaaa

SEQ ID NO: 578214 - DNA, 120 bp, Artificial Sequence
  ENSG00000171634_69 (sequence is synthesized)
aggaggctaagaaaatggatgtgtacatctgtaatgattgtaaacgggcacaagagggcagcagtgaggaattgtactgtatctgcagaacaccttatgatgagtcacaattttatattg

SEQ ID NO: 578215 - DNA, 120 bp, Artificial Sequence
  ENSG00000171634_70 (sequence is synthesized)
gctgtgatcggtgtcagaattggtaccatgggcgctgcgttggcatcttgcaaagtgaggcagagctcattgatgagtatgtctgtccacagtgccagtcaacagaggatgccatgacag

SEQ ID NO: 578216 - DNA, 120 bp, Artificial Sequence
  ENSG00000171634_71 (sequence is synthesized)
tgctcacgccactaacagagaaggattatgaggggttgaagagggtgctccgttccttacaggcccataagatggcctggcctttccttgaaccagtagaccctaatgatgcaccagatt

SEQ ID NO: 578217 - DNA, 120 bp, Artificial Sequence
  ENSG00000171634_72 (sequence is synthesized)
attatggtgttattaaggaacctatggaccttgccaccatggaagaaagagtacaaagacgatattatgaaaagctgacggaatttgtggcagatatgaccaaaatttttgataactgtc

SEQ ID NO: 578218 - DNA, 120 bp, Artificial Sequence
  ENSG00000171634_73 (sequence is synthesized)
gttactacaatccaagtgactccccattttaccagtgtgcagaagttctcgaatcattctttgtacagaaattgaaaggcttcaaagctagcaggtctcataacaacaaactgcagtcta

SEQ ID NO: 578219 - DNA, 120 bp, Artificial Sequence
  ENSG00000171634_74 (sequence is synthesized)
cagcttcttaaagttcagcgtgttaacctaacataaaacacagcaagaatctggttgtctgaactattttaaattaaggagccagatgtttttagtcaggctatcctgacaagacttgac

SEQ ID NO: 578220 - DNA, 120 bp, Artificial Sequence
  ENSG00000171634_75 (sequence is synthesized)
ctaaacttcgtttttattggtcataacagtccaattatattcttggccaattttgtccaacggacaagaaaaaagcaaagtcaacgacaccattatcttgtcaagatcagatggttttac

SEQ ID NO: 578221 - DNA, 120 bp, Artificial Sequence
  ENSG00000171634_76 (sequence is synthesized)
aaaaaaagaaaaagaaagcaagaaaaaaagatactatggggtcaagtgtaactccatggaaatgccacgtctgctcttcagtgaagaagctggtttagagtctcacagaaaacttttgac

SEQ ID NO: 578222 - DNA, 120 bp, Artificial Sequence
  ENSG00000171634_77 (sequence is synthesized)
agaagctggtttagagtctcacagaaaacttttgactgtatttatttattgttgcaaaaaagacgcttttttattgctgccctcatttgtcagctaattattttttcttataaaatccag

SEQ ID NO: 578223 - DNA, 120 bp, Artificial Sequence
  ENSG00000171634_78 (sequence is synthesized)
ccccggttacatataatcatctgtatcttatcatgattcctgtaggtaaaagtacaagacgacctctagatgtcttttctttctatgaaaggagctgctatgtacacatgtgcacacaca

SEQ ID NO: 578224 - DNA, 120 bp, Artificial Sequence
  ENSG00000171634_79 (sequence is synthesized)
cacaactgggaatcaacaatgagtttattgttcatggtagattaaaattaagcttgcataaaggttgggctaagtggtcctggactacagactctgttgccttgaatataacagtacaat

SEQ ID NO: 578225 - DNA, 120 bp, Artificial Sequence
  ENSG00000171634_80 (sequence is synthesized)
ttgtcaattactctgcaccaggctaaaatgagtaaaatctatttgaaggtatcttgtttgtaaacatttgtcagattctaatttttttcttttgtattaaaattcaactatggatgtata

SEQ ID NO: 578226 - DNA, 120 bp, Artificial Sequence
  ENSG00000171634_81 (sequence is synthesized)
tgaaacaaaataaatggagataatttttctcccacagacagaggtgtctttgaatgtgcgctaatgattatctgtaagcctttgtggggagggaggcctgcaaggtcatgaaaggcagaa

SEQ ID NO: 578227 - DNA, 120 bp, Artificial Sequence
  ENSG00000171634_82 (sequence is synthesized)
gagtctaattgtgcctggatttctccaggacagcagtggcccctcgttttatcattcccagtccattgtcatcacgtcagagaaaaatcttcaggggtgctaatcctgttgcatcagttg

SEQ ID NO: 578228 - DNA, 120 bp, Artificial Sequence
  ENSG00000171634_83 (sequence is synthesized)
atcatactaacgagaacggtaatgcgacaagatacacattgccttcatctgtacattctgtgataccaggcaaattaccaattacacacagctacttatattttatgaagggcatttttt

SEQ ID NO: 578229 - DNA, 120 bp, Artificial Sequence
  ENSG00000171634_84 (sequence is synthesized)
agatgacctcatcctctgtgttatttgttgattgggtttgttttctgtttgttggtttgtttgtttcttccacgtaaggaaaagtagtgtaaacagtagcgagaaaatggaaaccacaga

SEQ ID NO: 578230 - DNA, 120 bp, Artificial Sequence
  ENSG00000171634_85 (sequence is synthesized)
ggaagatgtattttgcatgtttttcctttcagtgttcttacacgttgtatcactgcattgtggtaatagcttctataaaatctgccatagttggattatgcagctttgcaaaaattttta

SEQ ID NO: 578231 - DNA, 120 bp, Artificial Sequence
  ENSG00000171634_86 (sequence is synthesized)
ctagattttgcactaactcatattagctttgtcctaccaacttctggaatttatctaattattgtttttcaaagtttctttccttttaatgtttccctgctatgcaaaacctttcccaga

SEQ ID NO: 578232 - DNA, 120 bp, Artificial Sequence
  ENSG00000171634_87 (sequence is synthesized)
cctcagtttcttaaaagaaagatgttgctacagttcccgattctttcttattacaggctcaggtgtacaggttattctgggttaattttatctaatgaagcccattcctttttgtacata

SEQ ID NO: 578233 - DNA, 120 bp, Artificial Sequence
  ENSG00000171634_88 (sequence is synthesized)
aagatgtcacttaaacttatgcttacaaactaaagactaatcgctcaatatgaaaacatgaaaaaatttttgcttaaagtattaagatggaagtagttaaatatgggttattttgtcctt

SEQ ID NO: 578234 - DNA, 120 bp, Artificial Sequence
  ENSG00000171634_89 (sequence is synthesized)
ttacttttttaaaaaatgttacatattgtatgcactgtgctgatgcaagaattctacattttaatgagttataaaattattctgcatctcatcacgtcacagtatttctgtactatttat

SEQ ID NO: 578235 - DNA, 120 bp, Artificial Sequence
  ENSG00000171634_90 (sequence is synthesized)
tcatatatataaatatatatgggcttaatcatttaaaatttgttgcagcaagaactttcctacctgtaggcaatagattgctatgtttttaacaaattgtggcaaattctaaacagcaat

SEQ ID NO: 578236 - DNA, 120 bp, Artificial Sequence
  ENSG00000171634_91 (sequence is synthesized)
acgttccaaattacaggcaatccagtcactatggcaggaaaagtaattaccaaactgccacttcctgcaaacagcaagattgtcgctgtaaatgtgccagcaacacaaggaggcgttgtt

SEQ ID NO: 578237 - DNA, 120 bp, Artificial Sequence
  ENSG00000171634_92 (sequence is synthesized)
tagttttttgtcttgaaagtttagctattaaattggattttgaagaaaatgaatattttgggagtgatataaatgaaaatattaaatttaagagtaatgtttcatccatggtcttgcatg

SEQ ID NO: 578238 - DNA, 120 bp, Artificial Sequence
  ENSG00000171634_93 (sequence is synthesized)
tgatattcttaccattgacgctagtaaagtaaaatttgctatttcacgtgtttgtgattgtcctttgttatattcttttctgtcaaaaacaagctttctgttgctcctttgctttctctt

SEQ ID NO: 578239 - DNA, 120 bp, Artificial Sequence
  ENSG00000171634_94 (sequence is synthesized)
cttccctctgaattaactccaaatcagtgagtaattgatgtctggagaaggaggtgtattactgttgcccaaaatggagagcatcctttctgggatctgttcaaagccctgcgaatacat

SEQ ID NO: 578240 - DNA, 120 bp, Artificial Sequence
  ENSG00000171634_95 (sequence is synthesized)
gaaatcctggaaaccagttgaacatgaatggtcagaggttttgaatttgagtggttcggtttcttaattgttttattttaagcagttgtttttttttgtattaaaatactgcaactcata

SEQ ID NO: 578241 - DNA, 120 bp, Artificial Sequence
  ENSG00000171634_96 (sequence is synthesized)
aaacaagatggcggctgaaggcgatccggagtggggccccagcaattcggattgagccttctccctccacccgcttccgtcggccgggcccctcccgcccggccccgcgggcctccccac

SEQ ID NO: 578242 - DNA, 80 bp, Artificial Sequence
  ENSG00000171634_97 (sequence is synthesized)
ctcccccttcgctttccttctccccccgcctcggctccgacatgaggggccggcggggcaggccgcccaagcagcccgcg

SEQ ID NO: 578243 - DNA, 80 bp, Artificial Sequence
  ENSG00000171634_98 (sequence is synthesized)
ccacgtccggacccatcggggggctccgctcgcggcaccgcggcagcagccggggcaggtgggccgccgcccaggctgag

SEQ ID NO: 578244 - DNA, 80 bp, Artificial Sequence
  ENSG00000171634_99 (sequence is synthesized)
gcccaggctgaggtggcgcccaagacgcggctgagctcgcccagggggggcagcagtagccggaggaagccgccgccgcc

SEQ ID NO: 578245 - DNA, 120 bp, Artificial Sequence
  ENSG00000171634_100 (sequence is synthesized)
actactacacgtggctgggctaacagaggccaacaggagaaccagtatttacctttggaaggatatgcctcaagccagtacaggtgaacaaaggcagagtaaactgtcaccccagatgca

SEQ ID NO: 578246 - DNA, 120 bp, Artificial Sequence
  ENSG00000171634_101 (sequence is synthesized)
atgcctcaagccagtgacctcaacagttgacatagtcagcctcacaacgtctcgaagcttttgtaccctattcttacagactccctgttaccaccaccctctccctcctattaaaaaaga

SEQ ID NO: 578247 - DNA, 120 bp, Artificial Sequence
  ENSG00000171634_102 (sequence is synthesized)
cttagcttttagacttcaaaagttctatcataagatttatcttaacttactttgaatgattaattttaattattgaaagacagttgattagatgaaattcacatctttgattgacataaa

SEQ ID NO: 578248 - DNA, 120 bp, Artificial Sequence
  ENSG00000171634_103 (sequence is synthesized)
agatgctgagaaaaacagagaagaatttgaagaccagtcccttgaaaaagacagtgacgacaaaacaccagatgatgaccctgagcaaggaaaatctgaggaagaacctaacaagacatg

SEQ ID NO: 578249 - DNA, 120 bp, Artificial Sequence
  ENSG00000171634_104 (sequence is synthesized)
ttcaaaaacttaaacctttttatacagaaatccatattgaatatataaggcaacactttgttagtttgctttttgagttattattatgtttgttacttgtaagtttgtagcagctcttcc

SEQ ID NO: 578250 - DNA, 120 bp, Artificial Sequence
  ENSG00000171634_105 (sequence is synthesized)
tgttttcaaacagatgagtttttaaacagataacccagcatgtttcaattttttgtggaataatagatgactcacagtaaagttacaacatattttcttttaagtaaaaaacttaaggaa

SEQ ID NO: 578251 - DNA, 120 bp, Artificial Sequence
  ENSG00000171634_106 (sequence is synthesized)
taatgatacttgctttgccattcaagggcctttttttatctgtttactttgtggatcttacacatacaccagatacgagttttggtgaaataaggtggttataattatttacttattgtc

SEQ ID NO: 578252 - DNA, 120 bp, Artificial Sequence
  ENSG00000171634_107 (sequence is synthesized)
taattcaaaattgccccccaaaaagtcagattagttaatataattttttaatgttaaagatgtatcgtggtaaaaaatttactctagcagccatgttgaacaatgtatttaaaaattgta

SEQ ID NO: 578253 - DNA, 120 bp, Artificial Sequence
  ENSG00000171634_108 (sequence is synthesized)
aactcttggaatactgtatttatctgctatttcaatataaagtcctttgacttagtcctggtaactgtacagtaatttggtttactaatgaaagttgtgaataaaactgtgaaactagaa

SEQ ID NO: 578254 - DNA, 80 bp, Artificial Sequence
  ENSG00000171634_109 (sequence is synthesized)
aaggatgaaaccccatggcgcaccagtaatcccaactactagggaggctgaggtaggagaatagcttgaacccgggaggc

SEQ ID NO: 578255 - DNA, 120 bp, Artificial Sequence
  ENSG00000171634_110 (sequence is synthesized)
gttgcagtgagccaagatcgagccacggcactctagcccaggtgacagtgtgagactctgtctcagaaaaaaaagaaaaacgggatcgagatggtttgcaggattagcaagtgatagaga

SEQ ID NO: 578256 - DNA, 120 bp, Artificial Sequence
  ENSG00000171634_111 (sequence is synthesized)
aaaaaagaaaaacgggatcgagatggtttgcaggattagcaagtgatagagatatattgaagacatagaaagccagtgtggttgctcacacctataatcccagcactgtgggaggccaag

SEQ ID NO: 578257 - DNA, 120 bp, Artificial Sequence
  ENSG00000171634_112 (sequence is synthesized)
gaggatcacttgagtcaatgagttagagaccaacctgggcagcaaagtgagaccccatctctacaaaaaaattttttaaaaatcagccaggtacggtggtgcacacctgtaatcccagct

SEQ ID NO: 578258 - DNA, 120 bp, Artificial Sequence
  ENSG00000171634_113 (sequence is synthesized)
gaggttgcagtgagccaagatcgagccacggcactctagcccaggtgacagtgtgagactccatctcagaacaaaaagaataacaggatagggatggtttgcaggattatcaagtgatac

SEQ ID NO: 578259 - DNA, 120 bp, Artificial Sequence
  ENSG00000171634_114 (sequence is synthesized)
taacaggatagggatggtttgcaggattatcaagtgatacagatgtactgaagacacagaaagccagtgtggttgctcacatctataatcccaacactttgggaggccagggcaggagga

SEQ ID NO: 578260 - DNA, 120 bp, Artificial Sequence
  ENSG00000171634_115 (sequence is synthesized)
aggatcacttgagttgacgagttagagaccaacctgggcaacaaagtgagacccccacctctacaaaacattaaaaaaaaatgagctgcacatgttggcacgcacttgtaatcccagcta

SEQ ID NO: 578261 - DNA, 120 bp, Artificial Sequence
  ENSG00000171634_116 (sequence is synthesized)
gggggaaataaaaggatatagtgcactggattgaaactttctcctgtcgttatcataatcagaagaattgaagtaactaaaaagagaatcatagtctcaatgtgtgcttgaatgttatct

SEQ ID NO: 578262 - DNA, 120 bp, Artificial Sequence
  ENSG00000171634_117 (sequence is synthesized)
aacatcacgtctctgctacctcatcattaaccagctgtggtaatgattccacactttgaacccatcccacctgttgacagaagcgattgcaatgccagcatcactcagtgacggctcatc

SEQ ID NO: 578263 - DNA, 120 bp, Artificial Sequence
  ENSG00000171634_118 (sequence is synthesized)
atgtagggcccagaatactgattttgtgacttctaagcttgtgctccattcccaacacaaagtcttctgaccagcctttgagtaccattattgtagaggaagctcatcttaggtaactat

SEQ ID NO: 578264 - DNA, 120 bp, Artificial Sequence
  ENSG00000171634_119 (sequence is synthesized)
tactagagcagaaatcacttaatataaaatatttcatgtatcaaatttaaaactcacttttgggttcattgatgtagtaactcaaccaggaaacttaaatggaattagtgttttcactga

SEQ ID NO: 578265 - DNA, 120 bp, Artificial Sequence
  ENSG00000171643_0 (sequence is synthesized)
gcagactcagaacagcactactcacagcagggcctcttgctcgctctagctgctgggaggaaaacggcttgctaatctccacgcccagaaattcagacaagagcattctccttatctcat

SEQ ID NO: 578266 - DNA, 120 bp, Artificial Sequence
  ENSG00000171643_1 (sequence is synthesized)
ctgcacaggaagcaggtctaagtgtaatttcacaagcccctgactctgtgtagacacccagctctccagaaaaatgctttgaagacaaaggatacagcatacagtcccgtgtctcggctg

SEQ ID NO: 578267 - DNA, 120 bp, Artificial Sequence
  ENSG00000171643_2 (sequence is synthesized)
agtcatcgcattccttaatagtgtcttctccccgggtttggtggcctgcttctggagtggtcagttctgctgccgacatgcccacccagctcgagatggccatggacaccatgattagaa

SEQ ID NO: 578268 - DNA, 120 bp, Artificial Sequence
  ENSG00000171643_3 (sequence is synthesized)
tcttccaccgctattctggcaaggaaaggaagagattcaagctcagcaagggggaactgaaactgctcctgcagcgagagctcacggaattcctctcgtgccaaaaggaaacccagttgg

SEQ ID NO: 578269 - DNA, 120 bp, Artificial Sequence
  ENSG00000171643_4 (sequence is synthesized)
ttgataagatagtgcaggacctggatgccaataaggacaacgaagtggattttaatgaattcgtggtcatggtggcagctctgacagttgcttgtaatgattactttgtagaacaattga

SEQ ID NO: 578270 - DNA, 120 bp, Artificial Sequence
  ENSG00000171643_5 (sequence is synthesized)
agaagaaaggaaaataaaggaagttcgtgaatgctaatcaagggctaaataaagtggaaagcagcatccttgaaaatcatcgctctcaggacggggtctgcctggaatagcactgaatgt

SEQ ID NO: 578271 - DNA, 120 bp, Artificial Sequence
  ENSG00000171643_6 (sequence is synthesized)
tgatgtgcctctacagctgtatgaagtagattctctgattttatcttgaaatccacaacttccacaaaaaagaaaaatcttttaccatttctcattaaaaaagtaatataagtttattgt

SEQ ID NO: 578272 - DNA, 120 bp, Artificial Sequence
  ENSG00000171643_7 (sequence is synthesized)
agggggaaataatcaaatgtaatctcattacccagatataatcactgttaacttcttcattcgaattttccctaggtccatgtatctatatatctatggttcataaaaatgagattacac

SEQ ID NO: 578273 - DNA, 120 bp, Artificial Sequence
  ENSG00000171643_8 (sequence is synthesized)
tgcatatagattatttctaatttttctattaataatactaagggagcttttaagtcaatacatctgaatcttgaataaaattcttgttccttctctttggatgggtattcagactcttaa

SEQ ID NO: 578274 - DNA, 120 bp, Artificial Sequence
  ENSG00000171643_9 (sequence is synthesized)
ttttacaaatgaagaaataaagtcccagaaggtaacagagatagaactaggcacgattttctattcttctttccttcctttctttgtgagagttaacgattatttaaaagtattcataat

SEQ ID NO: 578275 - DNA, 120 bp, Artificial Sequence
  ENSG00000171643_10 (sequence is synthesized)
tttctgataataaaagtaagacatggcattatgacactggatattcaaaaaccacgatgtccttttacttgaagattttaaaaggaaatgattacaataaatacccagagtcaacaatta

SEQ ID NO: 578276 - DNA, 120 bp, Artificial Sequence
  ENSG00000171643_11 (sequence is synthesized)
agaaatatatccaaagttatgtacttaatgttcatttataccgttcagatctatagacccagtaatgtcatttatagctataatatccagtgcatatattaataattaattgctactatt

SEQ ID NO: 578277 - DNA, 120 bp, Artificial Sequence
  ENSG00000171643_12 (sequence is synthesized)
gaattatgtgccccttaaaatattgactttatgtagatattctaaatctcatatgccctacttgaaacttgcctgtattattaagaggctatatgcatctttttggtttgtcaaaacgag

SEQ ID NO: 578278 - DNA, 120 bp, Artificial Sequence
  ENSG00000171643_13 (sequence is synthesized)
ggcattacaaaaatttagctactttcaaatgagacttgaatttggcaaatttctaagatggacattcatatccttaaattgtattttgaacttcttaccctattaaaaaaaattaactgg

SEQ ID NO: 578279 - DNA, 120 bp, Artificial Sequence
  ENSG00000171649_0 (sequence is synthesized)
agtggcggtcatttttgcagcgcttgggtgcatccagaccgtcagagctttgggagcgctttgtttggcgacagtcggaaggcgcgaggggaggggtcctcccgctgaacagtgggggtt

SEQ ID NO: 578280 - DNA, 120 bp, Artificial Sequence
  ENSG00000171649_1 (sequence is synthesized)
ctaagggtcggcggcggcggggttgacggctttgcctaggtccctccgcccgtagctgtcgggtcccggccccgctctgcccacagactccgatggctgcggccgcgctgagggccccga

SEQ ID NO: 578281 - DNA, 120 bp, Artificial Sequence
  ENSG00000171649_2 (sequence is synthesized)
ctcaggttactgtgtctccagaaacacatatggacctcacaaagggctgtgtgacctttgaggacatcgccatttacttctcacaggacgagtggggacttcttgatgaggctcagagac

SEQ ID NO: 578282 - DNA, 120 bp, Artificial Sequence
  ENSG00000171649_3 (sequence is synthesized)
tcctgtaccttgaagtgatgctggagaactttgcccttgtagcctcactgggttgtggccatggaacagaggatgaagagacaccttctgaccagaatgtttctgtaggagtgtcacagt

SEQ ID NO: 578283 - DNA, 120 bp, Artificial Sequence
  ENSG00000171649_4 (sequence is synthesized)
caaaggcaggttcatccacacagaagactcaatcctgtgagatgtgtgtcccagtcctgaaagatattttgcatctagctgatctccctgggcagaaaccatacttggttggagaatgta

SEQ ID NO: 578284 - DNA, 120 bp, Artificial Sequence
  ENSG00000171649_5 (sequence is synthesized)
caaaccatcaccagcaccagaagcatcacagtgcaaagaaatccttgaagagggacatggacagagcctcatatgtgaagtgctgcctattctgtatgtcattgaagccctttcgcaaat

SEQ ID NO: 578285 - DNA, 120 bp, Artificial Sequence
  ENSG00000171649_6 (sequence is synthesized)
gggaggttggaaaggaccttccagccatgttgcggcttctgaggtccctggtctttcctggaggcaagaaacccggcacaattactgaatgtggggaggacattcgcagtcaaaaaagtc

SEQ ID NO: 578286 - DNA, 120 bp, Artificial Sequence
  ENSG00000171649_7 (sequence is synthesized)
attacaagtcaggtgaatgtgggaaggcttccaggcacaaacacactcctgtttaccatccaagagtctacactggaaaaaagctttatgagtgtagcaaatgtgggaaagccttccgtg

SEQ ID NO: 578287 - DNA, 120 bp, Artificial Sequence
  ENSG00000171649_8 (sequence is synthesized)
gcaagtactcacttgttcagcaccagagagtccatactggagaaaggccttgggagtgcaatgaatgtggaaaattctttagccaaacctcccacctgaatgatcatcggagaatccaca

SEQ ID NO: 578288 - DNA, 120 bp, Artificial Sequence
  ENSG00000171649_9 (sequence is synthesized)
ccggagaaaggccttatgagtgcagcgaatgtggaaaattatttagacaaaactccagccttgttgaccaccagaaaatacacactggagcaaggccttatgagtgtagccagtgtggga

SEQ ID NO: 578289 - DNA, 120 bp, Artificial Sequence
  ENSG00000171649_10 (sequence is synthesized)
aatcctttagccaaaaagccacccttgttaaacaccaaagagttcacactggagaaaggccttataagtgtggtgaatgtgggaattcctttagtcaaagtgccattcttaatcaacacc

SEQ ID NO: 578290 - DNA, 120 bp, Artificial Sequence
  ENSG00000171649_11 (sequence is synthesized)
gaagaattcacactggagcaaagccttatgagtgtggccagtgtgggaaatcctttagtcaaaaagctaccctcattaaacaccagagagttcacactggagaaaggccttataagtgtg

SEQ ID NO: 578291 - DNA, 120 bp, Artificial Sequence
  ENSG00000171649_12 (sequence is synthesized)
gtgactgtgggaaatcctttagtcaaagctccatccttattcaacaccggagaattcatactggagcaaggccttatgagtgtggccagtgtggaaagtcctttagccaaaagtctggtc

SEQ ID NO: 578292 - DNA, 120 bp, Artificial Sequence
  ENSG00000171649_13 (sequence is synthesized)
tcattcaacaccaagtggttcacactggagaaaggccttatgagtgcaacaaatgtgggaattcctttagccaatgctccagcctcatacatcaccaaaaatgtcataacacatagaggc

SEQ ID NO: 578293 - DNA, 120 bp, Artificial Sequence
  ENSG00000171649_14 (sequence is synthesized)
ctcatgaatgcagcaaatgtggaagcgccttcaactcaagatctatcatcatttagctcctgaaagtccacacttaagtagagccttagacctacagggaaagtgctgtctctgtagtat

SEQ ID NO: 578294 - DNA, 120 bp, Artificial Sequence
  ENSG00000171649_15 (sequence is synthesized)
tgtagcagtagagagcctttgtgagggagccatctgcctgaagttgaacctcattcttccttgtttctctggtagaaaccatctaccctctaccaccttgcacagtgggcactggtcact

SEQ ID NO: 578295 - DNA, 120 bp, Artificial Sequence
  ENSG00000171649_16 (sequence is synthesized)
cctatgtgctaagacaaggcagacatctgtgtgttctcttaagtctttggaggaaatcttgagcagtctaagcctttagagaaaattcattcttttttctgactgatcacagcatacgtg

SEQ ID NO: 578296 - DNA, 120 bp, Artificial Sequence
  ENSG00000171649_17 (sequence is synthesized)
acacttggtcattcttccagcctccatgtcaccacgtggtgaatggctgcctcacattgctccagtttgtgcactaataaaagccttatatttgaatctacctgtagtcttggggttctg

SEQ ID NO: 578297 - DNA, 120 bp, Artificial Sequence
  ENSG00000171649_18 (sequence is synthesized)
tttactgtgtggggtggctgggagacagacttcaactctatatgaaggaatggatggcttttgtgggcctctgcaggaaagtaagatgacagagtaattctaattctggttttggtcata

SEQ ID NO: 578298 - DNA, 120 bp, Artificial Sequence
  ENSG00000171649_19 (sequence is synthesized)
cttgctttgctacctaaaatctcctaggaaaaaatgcaaggttttggttattctaatttgtggcctggatccctattctttctgtgagactagaggtcatcctgaggagaggccagctgt

SEQ ID NO: 578299 - DNA, 120 bp, Artificial Sequence
  ENSG00000171649_20 (sequence is synthesized)
tatgacaagcatgtgtgcttcagggaataggacaattttattccattgtttccagaggatgtcatatgatgcccagtgctgctgagaagcttttcatggggttctataaggaggcatgcc

SEQ ID NO: 578300 - DNA, 120 bp, Artificial Sequence
  ENSG00000171649_21 (sequence is synthesized)
ctgatatcaaacattccataggccgatgtcacgcagaagacaacgcgagtcacatgtgaactgtaattggtacagaaatacctgggtatttctgtactgtgtgtactgtagcaaactagt

SEQ ID NO: 578301 - DNA, 120 bp, Artificial Sequence
  ENSG00000171649_22 (sequence is synthesized)
tggaatgtgcctcttataaaagtacatttacaaatcttcccgtgactgtggctttgagcagtcataggacctagaaatctgtgtatgtccaatagctgaggttattttcagcaaaaataa

SEQ ID NO: 578302 - DNA, 120 bp, Artificial Sequence
  ENSG00000171649_23 (sequence is synthesized)
ttaaagggttttattttttaattcttgttggttttctaggttgttcacctcaagtgcattgctgtagaggcagaaaaaggaggataaagataacagaagtcctataggccagggatgtat

SEQ ID NO: 578303 - DNA, 120 bp, Artificial Sequence
  ENSG00000171649_24 (sequence is synthesized)
tgatagctcttgtgatttccaccagtgttgctgttgtctcaaattgccacagccttcattgcttgccaacatttcctgcatggagggactcatggttgcccttccccaggcctgaagaga

SEQ ID NO: 578304 - DNA, 120 bp, Artificial Sequence
  ENSG00000171649_25 (sequence is synthesized)
gagtgcagtcaacatgagattgctaggcattctggtttctgaaagttgggtgatcagatactttattgtgaaacatgttttacaaactttcttgatgtgtaagtgacatgccatagttta

SEQ ID NO: 578305 - DNA, 120 bp, Artificial Sequence
  ENSG00000171649_26 (sequence is synthesized)
catccatttatggtgtataatttgaagagtttgtcatacaagcctgtgaaaccataatcatgatcatgaacatattcatgattcacctcttgctgttttacaatctctgcgtgtactttc

SEQ ID NO: 578306 - DNA, 120 bp, Artificial Sequence
  ENSG00000171649_27 (sequence is synthesized)
caggccttcaggagtcctgtcatttactttccctacaggagaatagtttgtgttttctaggattttatgtgaattgaaacgtaaaatacttactccatttttcctgatgatgcacaattt

SEQ ID NO: 578307 - DNA, 67 bp, Artificial Sequence
  ENSG00000171649_28 (sequence is synthesized)
ttctcctgcctcagcctcctgagaagctaggactacaggcatgcacttgccaggatggtcttgatct

SEQ ID NO: 578308 - DNA, 120 bp, Artificial Sequence
  ENSG00000171649_29 (sequence is synthesized)
tgggattacaggcgtaagccaccacaccagctgatgcacaattacttttaagatttatcaatattgcttatgtgaatagttcatttgtattgctgagaaatagtctgtggatatgtcaca

SEQ ID NO: 578309 - DNA, 120 bp, Artificial Sequence
  ENSG00000171649_30 (sequence is synthesized)
ctgtggatatgtcacaatttggataaacagttggatgctttccagttttgggctgttgcaaataatgctactatgaacataggcatataactcttaatatgcagaaatgctttatttctc

SEQ ID NO: 578310 - DNA, 120 bp, Artificial Sequence
  ENSG00000171649_31 (sequence is synthesized)
ctgtgtcagtagtacagtgtacgtgaatgcgtcacttttaaagacaaggccagactataacctaactgtaccatttgcattctcatcaacagtatgtgaaccttcttatttctctacatt

SEQ ID NO: 578311 - DNA, 120 bp, Artificial Sequence
  ENSG00000171649_32 (sequence is synthesized)
cttgccatacttggtatggttagtctttttaattttagttgttttaatagctgtataatagcatctgtctgtgattttattgcatttttctggtattttatggtattgaacatttgaaca

SEQ ID NO: 578312 - DNA, 120 bp, Artificial Sequence
  ENSG00000171649_33 (sequence is synthesized)
tcttgtatctagttgccacctgtatatcctctttggaagaatgtttattaatgtcttttgcttatttttaaatggatgttggtgatactttttcattaataaatagacgtataacaaaga

SEQ ID NO: 578313 - DNA, 120 bp, Artificial Sequence
  ENSG00000171649_34 (sequence is synthesized)
gggggcgcggcccccacgtggcctcccgggacacgtgcccacagcgcgacacctaagtcgctcctttcacagaatagccttggccccggcacggcctcgaacgccttgaccccgcaaggg

SEQ ID NO: 578314 - DNA, 120 bp, Artificial Sequence
  ENSG00000171649_35 (sequence is synthesized)
aggggcacgaggctcctttgctcccgcaggagcgtcgaatacgtatggaatacgcgtcggtgtggatctggcctcagcttcctgagcctgaatcaatgcttctaatcacgtgggcgctca

SEQ ID NO: 578315 - DNA, 120 bp, Artificial Sequence
  ENSG00000171649_36 (sequence is synthesized)
gccgcgacgggaccacagaaatcgaccagcggcctgtttaaggagcgacaaggcccagccctctcctgcattgtggcgacgccatttccctgcgcccccagcgcggccgcttggcttttg

SEQ ID NO: 578316 - DNA, 120 bp, Artificial Sequence
  ENSG00000171649_37 (sequence is synthesized)
ccctatttccagaacttgggtgatggggcacggaagagggttacaggcaaagggaccagcgtttctaaactcttggagacacagtgaagaaggttcatacctggagtgccaagggctgtg

SEQ ID NO: 578317 - DNA, 120 bp, Artificial Sequence
  ENSG00000171649_38 (sequence is synthesized)
caaggttactgtgtctccagaaacacatatggacctcacaaagggctgtgtgacctttgaggacatcgccatttacttctcacaggacgagtggggacttcttgatgaggctcagagact

SEQ ID NO: 578318 - DNA, 120 bp, Artificial Sequence
  ENSG00000171649_39 (sequence is synthesized)
aatcgtcccagcaagattcacagaaaccggcccctccgcctgccacaccctccacagcccacgacaccaggcttgtaaatgggagccccacccgcgagggcctcatagtcctggactcta

SEQ ID NO: 578319 - DNA, 120 bp, Artificial Sequence
  ENSG00000171649_40 (sequence is synthesized)
gggtcgggctgcagggacgcaagcaggcgcccctcatgcagggtgttggatttccggcggagagggcaggtgaggcccgggagacgcagcactcaccgaagtcgaatccctaagcacggc

SEQ ID NO: 578320 - DNA, 120 bp, Artificial Sequence
  ENSG00000171649_41 (sequence is synthesized)
caccggctgatgcgcagcggggcgacccccgctctgtgccggaggcagcgtttctaactcaggcggcgtgggccgaggtagagaaccaccaaaattaccatctcggagcggtgccggaag

SEQ ID NO: 578321 - DNA, 120 bp, Artificial Sequence
  ENSG00000171649_42 (sequence is synthesized)
tcccgccttaccgtatgcaacaaacggagacagggctgtgtgacctttgaggacatcgccatttacttctcacaggacgagtggggacttcttgatgaggctcagagactcctgtacctt

SEQ ID NO: 578322 - DNA, 120 bp, Artificial Sequence
  ENSG00000171657_0 (sequence is synthesized)
acactgactaaagatattggaagagtgaagatcagagaattttaagtctgaaatttggcatcactgccctgaacaatataaccttagttggcataaactactcatacagacaaaggcatt

SEQ ID NO: 578323 - DNA, 120 bp, Artificial Sequence
  ENSG00000171657_1 (sequence is synthesized)
atccatcacaataagtaactttttgtctttatttcaaccggacaatcgtgattagaaaagctcctgtgacaaaattcaagaaaacctgacataaatgaacaacaatacaacatgtattca

SEQ ID NO: 578324 - DNA, 120 bp, Artificial Sequence
  ENSG00000171657_2 (sequence is synthesized)
accatctatgatctcttccatggctttaccaatcatttacatcctcctttgtattgttggtgtttttggaaacactctctctcaatggatatttttaacaaaaataggtaaaaaaacatc

SEQ ID NO: 578325 - DNA, 120 bp, Artificial Sequence
  ENSG00000171657_3 (sequence is synthesized)
aacgcacatctacctgtcacaccttgtgactgcaaacttacttgtgtgcagtgccatgcctttcatgagtatctatttcctgaaaggtttccaatgggaatatcaatctgctcaatgcag

SEQ ID NO: 578326 - DNA, 120 bp, Artificial Sequence
  ENSG00000171657_4 (sequence is synthesized)
agtggtcaattttctgggaactctatccatgcatgcaagtatgtttgtcagtctcttaattttaagttggattgccataagccgctatgctaccttaatgcaaaaggattcctcgcaaga

SEQ ID NO: 578327 - DNA, 120 bp, Artificial Sequence
  ENSG00000171657_5 (sequence is synthesized)
gactacttcatgctatgagaaaatattttatggccatttactgaaaaaatttcgccagcccaactttgctagaaaactatgcatttacatatggggagttgtactgggcataatcattcc

SEQ ID NO: 578328 - DNA, 120 bp, Artificial Sequence
  ENSG00000171657_6 (sequence is synthesized)
agttaccgtatactactcagtcatagaggctacagaaggagaagagagcctatgctacaatcggcagatggaactaggagccatgatctctcagattgcaggtctcattggaaccacatt

SEQ ID NO: 578329 - DNA, 120 bp, Artificial Sequence
  ENSG00000171657_7 (sequence is synthesized)
tattggattttcctttttagtagtactaacatcatactactcttttgtaagccatctgagaaaaataagaacctgtacgtccattatggagaaagatttgacttacagttctgtgaaaag

SEQ ID NO: 578330 - DNA, 120 bp, Artificial Sequence
  ENSG00000171657_8 (sequence is synthesized)
acatcttttggtcatccagattctactaatagtttgcttccttccttatagtatttttaaacccattttttatgttctacaccaaagagataactgtcagcaattgaattatttaataga

SEQ ID NO: 578331 - DNA, 120 bp, Artificial Sequence
  ENSG00000171657_9 (sequence is synthesized)
aacaaaaaacattctcacctgtcttgcttcggccagaagtagcacagaccccattatatttcttttattagataaaacattcaagaagacactatataatctctttacaaagtctaattc

SEQ ID NO: 578332 - DNA, 120 bp, Artificial Sequence
  ENSG00000171657_10 (sequence is synthesized)
agcacatatgcaatcatatggttgacttttgaatggaaaaccccacaatattaagaaaagcattcatgtgactttattagggacactaaactacatcattaacatgtcacagcttggttg

SEQ ID NO: 578333 - DNA, 120 bp, Artificial Sequence
  ENSG00000171657_11 (sequence is synthesized)
acaataatcaccaagaaaatctctttggtttttaaaaataaataaacatatattcataaaactcaaaaaacagttatactgaacgttgagatggcagaaactttcagaagcaaaaattaa

SEQ ID NO: 578334 - DNA, 120 bp, Artificial Sequence
  ENSG00000171657_12 (sequence is synthesized)
gcatattgaaaggatcccactcatatgaaactaacaggctgttttctgtttaaactcaactgtcagtgcttctgttcagaacacgttatttcatgactaggataaagaagcaaatggttt

SEQ ID NO: 578335 - DNA, 90 bp, Artificial Sequence
  ENSG00000171657_13 (sequence is synthesized)
gactctgtctcataaaactaaataagaaatatcctcattcacatcttacctaaatgcatgaataatacagtgaaaaaaatccaaggtttt

SEQ ID NO: 578336 - DNA, 120 bp, Artificial Sequence
  ENSG00000171657_14 (sequence is synthesized)
taaatgcatgaataatacagtgaaaaaaatccaaggttttataaacatattatttatttgaaattatctggctcatgttattggggagaagcaatattcattgactatatttttaaagca

SEQ ID NO: 578337 - DNA, 120 bp, Artificial Sequence
  ENSG00000171657_15 (sequence is synthesized)
gatgatacttataaaaatgcttaaatatttggattaggctttgtcaaagtaaaaagctatgtcattatatgcccatcttcatcacattgtgcatattttcttctgtattcaatataaata

SEQ ID NO: 578338 - DNA, 120 bp, Artificial Sequence
  ENSG00000171657_16 (sequence is synthesized)
atgttattagtgacaaacagtacctggcagttaattttttgtgaaataaatgaatgaataataagggagtgtaatagtattgcagttaagagattgatctctgaagttatacttcttggg

SEQ ID NO: 578339 - DNA, 120 bp, Artificial Sequence
  ENSG00000171657_17 (sequence is synthesized)
ttcaatctggctctactttttatttagctggacaatcttaggcaaattaacttatcctctgtacgtgttaatttcttcatttgtagagcagaaaatactatcttatttacagatcctatt

SEQ ID NO: 578340 - DNA, 120 bp, Artificial Sequence
  ENSG00000171657_18 (sequence is synthesized)
attaaatcagctgttactattatgagtagctaacgcttagtaagcacttgctgtttgccaagcattctacttatatgctttacatatattattttaatcaccacaactctaaagtatact

SEQ ID NO: 578341 - DNA, 120 bp, Artificial Sequence
  ENSG00000171657_19 (sequence is synthesized)
tatatgtatgtatgtatgtatatgtgcatagttaagtaaatcaccccaattttttctaatatttaagtgaacatttaaagataagcatttcttaatgttaatttcttttctttcatgtaa

SEQ ID NO: 578342 - DNA, 120 bp, Artificial Sequence
  ENSG00000171657_20 (sequence is synthesized)
ttcttaatgttaatttcttttctttcatgtaatcttgtcagtagacaaatgatggtgactatattctgtaataagtacatatattatgattaaaaaaaaaagcgtgtactatctgcccaa

SEQ ID NO: 578343 - DNA, 120 bp, Artificial Sequence
  ENSG00000171657_21 (sequence is synthesized)
agagatcataagcactttggagctataaacttcttgtctatttctacttccatggtactgatattctcttctcagataaccaaacaaaaacagctgaataaaatcaaccattaatagtaa

SEQ ID NO: 578344 - DNA, 120 bp, Artificial Sequence
  ENSG00000171657_22 (sequence is synthesized)
ggtttatgacttgtctgctttctggtagttagaatacaagggtcaatctatggctagtgtttattggtaattttaaaatctttaaaaataagtagctgggcacagtggcttacgcctgta

SEQ ID NO: 578345 - DNA, 120 bp, Artificial Sequence
  ENSG00000171659_0 (sequence is synthesized)
agctgacacaaccaagacgagtctcagtgtctagggaagcttggggttctgctccttttacttcaggcgaacctgaactttaatgcaattttgaagcatgccctgaatagattcagtcat

SEQ ID NO: 578346 - DNA, 120 bp, Artificial Sequence
  ENSG00000171659_1 (sequence is synthesized)
tatcaagtcaaactaaaaacggtgaaaggttgcgactattaccaaatagaagacaatgagaagtcataccataacaatgacgacaacttcagtcagcagctggccttactcctcccacag

SEQ ID NO: 578347 - DNA, 120 bp, Artificial Sequence
  ENSG00000171659_2 (sequence is synthesized)
aatgcgctttataaccaatcatagcgaccaaccgccacaaaacttctcagcaacaccaaatgttactacctgtcccatggatgaaaaattgctatctactgtgttaaccacatcctactc

SEQ ID NO: 578348 - DNA, 120 bp, Artificial Sequence
  ENSG00000171659_3 (sequence is synthesized)
tgttattttcatcgtgggactggttgggaacataatcgccctctatgtatttctgggtattcaccgtaaaagaaattccattcaaatttatctacttaacgtagccattgcagacctcct

SEQ ID NO: 578349 - DNA, 120 bp, Artificial Sequence
  ENSG00000171659_4 (sequence is synthesized)
actcatcttctgcctccctttccgaataatgtatcatattaaccaaaacaagtggacactaggtgtgattctgtgcaaggttgtgggaacactgttttatatgaacatgtacattagcat

SEQ ID NO: 578350 - DNA, 120 bp, Artificial Sequence
  ENSG00000171659_5 (sequence is synthesized)
tattttgcttggattcatcagtttggatcgctatataaaaattaatcggtctatacagcaacggaaggcaataacaaccaaacaaagtatttatgtctgttgtatagtatggatgcttgc

SEQ ID NO: 578351 - DNA, 120 bp, Artificial Sequence
  ENSG00000171659_6 (sequence is synthesized)
tcttggtggattcctaactatgattattttaacacttaagaaaggagggcataattccacaatgtgtttccattacagagataagcataacgcaaaaggagaagccatttttaacttcat

SEQ ID NO: 578352 - DNA, 120 bp, Artificial Sequence
  ENSG00000171659_7 (sequence is synthesized)
ctggctaattttcttactaataatcctttcatatattaagattgggaagaatctattgaggatttctaaaaggaggtcaaaatttcctaattctggtaaatatgccactacagctcgtaa

SEQ ID NO: 578353 - DNA, 120 bp, Artificial Sequence
  ENSG00000171659_8 (sequence is synthesized)
ctcctttattgtacttatcatttttactatatgttttgttccctatcatgcctttcgattcatctacatttcttcacagctaaatgtatcatcttgctactggaaagaaattgttcacaa

SEQ ID NO: 578354 - DNA, 120 bp, Artificial Sequence
  ENSG00000171659_9 (sequence is synthesized)
aaccaatgagatcatgctggttctctcatctttcaatagttgcttagatccagtcatgtatttcctgatgtccagtaacattcgcaaaataatgtgccaacttctttttagacgatttca

SEQ ID NO: 578355 - DNA, 120 bp, Artificial Sequence
  ENSG00000171659_10 (sequence is synthesized)
aggtgaaccaagtaggagtgaaagcacttcagaatttaaaccaggatactccctgcatgatacatctgtggcagtgaaaatacagtctagttctaaaagtacttgaggtaaacatactaa

SEQ ID NO: 578356 - DNA, 120 bp, Artificial Sequence
  ENSG00000171659_11 (sequence is synthesized)
aatgaattatataatgcagcctcttaattctttgaagaactaaaaaattaggaaacaaagttctagcatttacaaaactcagatctcaaagctctgcttgtatttgtgatatttcatttg

SEQ ID NO: 578357 - DNA, 120 bp, Artificial Sequence
  ENSG00000171659_12 (sequence is synthesized)
cttaactgtaaaccatttcaaggtactaacttttaaatctgtatgtaaaatcttttcaaaatacatttttaagctaatactcttaacatagattatgaagttaagtgaaatttatggctc

SEQ ID NO: 578358 - DNA, 120 bp, Artificial Sequence
  ENSG00000171659_13 (sequence is synthesized)
taacagcaaaataattaaagtgccatagtttctcaagtgactaaagtagttattaaaatcaagcacttgatactaatttgaagtgtgtttaaaagtaaatgatttgggaactgacaatgt

SEQ ID NO: 578359 - DNA, 120 bp, Artificial Sequence
  ENSG00000171659_14 (sequence is synthesized)
atgtgtcagaaaatatatgttcatttatcattttaaaatcttgtataatttgccactgtattcatttatgcctaaatctctataacagatgaaaagataattaataaaatcctaattaaa

SEQ ID NO: 578360 - DNA, 120 bp, Artificial Sequence
  ENSG00000171659_15 (sequence is synthesized)
aaccaattgcaccacgaccggatggaagagcccagctgacacaaccaagacgagtctcagtgtctagggaagcttggggttctgctccttttacttcaggcgaacctgaactcagttaat

SEQ ID NO: 578361 - DNA, 120 bp, Artificial Sequence
  ENSG00000171659_16 (sequence is synthesized)
ccaaataggaaaaatctgaagacataagaactacacatgaggaatatgtcatttagcactttcactttttgatctccacagaagacaatgagaagtcataccataacaatgacgacaact

SEQ ID NO: 578362 - DNA, 120 bp, Artificial Sequence
  ENSG00000171680_0 (sequence is synthesized)
agtttgcgctgagtcgactgagcccgtcccgcggctcccgtccccctctccccgcgcgccccatgaggctttggcagtctcggcccgagccttagagccttagacaccggggaggagacc

SEQ ID NO: 578363 - DNA, 120 bp, Artificial Sequence
  ENSG00000171680_1 (sequence is synthesized)
ctggtcctgttcctaggtatgtcaccacgccgactgccagcagctgcaccgccgggggcccctcaacctctgcgaggcctgtgacagcaagttccacagcaccatgcattatgatgggca

SEQ ID NO: 578364 - DNA, 120 bp, Artificial Sequence
  ENSG00000171680_2 (sequence is synthesized)
tgtccgcttcgaccttcccccacaaggctctgtgctggcccggaacgtgtccacccggtcatgcccgccgcgcaccagccccgcagtggacttggaggaggaggaggaggagagctctgt

SEQ ID NO: 578365 - DNA, 120 bp, Artificial Sequence
  ENSG00000171680_3 (sequence is synthesized)
ggatggcaaaggggaccggaagagcacaggcctgaaactctccaagaagaaagcaaggaggagacacacggatgacccaagcaaggaatgcttcactctgaaatttgacctgaatgtgga

SEQ ID NO: 578366 - DNA, 120 bp, Artificial Sequence
  ENSG00000171680_4 (sequence is synthesized)
cattgagacagagatcgtcccagccatgaagaagaagtcactgggggaggtgctgctgcctgtatttgaaaggaagggcattgcgctgggcaaagtggacatctacctggaccagtccaa

SEQ ID NO: 578367 - DNA, 120 bp, Artificial Sequence
  ENSG00000171680_5 (sequence is synthesized)
cacacccctgtccctcaccttcgaggcctacaggttcgggggacactaccttcgtgtcaaagccccagccaagcctggagatgagggcaaggtggagcagggcatgaaggactccaagtc

SEQ ID NO: 578368 - DNA, 120 bp, Artificial Sequence
  ENSG00000171680_6 (sequence is synthesized)
cctgagtttgccgattctgcggccagctgggaccgggccccccgccctggagcgtgtggacgcccagagccgccgggagagcctggacatcttggcccctggccgccgccgcaagaacat

SEQ ID NO: 578369 - DNA, 120 bp, Artificial Sequence
  ENSG00000171680_7 (sequence is synthesized)
gtcggagttcctgggggaggcgagcatccccgggcaggagccccccacgccctccagctgctctctgcccagcggcagcagtggcagcaccaacactggcgacagctggaagaaccgggc

SEQ ID NO: 578370 - DNA, 120 bp, Artificial Sequence
  ENSG00000171680_8 (sequence is synthesized)
ggccagtcgcttcagcggctttttcagctccggccccagcaccagcgcctttggccgggaggtagacaagatggagcagctggagggcaagctgcacacctacagcctcttcgggctgcc

SEQ ID NO: 578371 - DNA, 120 bp, Artificial Sequence
  ENSG00000171680_9 (sequence is synthesized)
caggctgccccgggggctgcgcttcgaccatgactcctgggaggaggagtacgatgaagacgaggatgaggacaatgcctgcctgaggctggaggacagctggcgggagctcattgatgg

SEQ ID NO: 578372 - DNA, 120 bp, Artificial Sequence
  ENSG00000171680_10 (sequence is synthesized)
gcatgagaagctgacccggcggcagtgccaccagcaggaggcggtgtgggagctgctgcacacggaggcctcctacatcaggaaactgcgggtgatcatcaacctgttcctgtgctgcct

SEQ ID NO: 578373 - DNA, 120 bp, Artificial Sequence
  ENSG00000171680_11 (sequence is synthesized)
cctgaacctgcaagagtcagggctgctgtgtgaggtggaggcggagcgcctgttcagcaacatcccggagatcgcgcagctgcaccgcaggctgtgggctagcgtgatggcgccggtgct

SEQ ID NO: 578374 - DNA, 120 bp, Artificial Sequence
  ENSG00000171680_12 (sequence is synthesized)
ggagaaggcgcggcgcacgcgagcgctgctacagcccggggacttcctcaaaggcttcaagatgttcggctcgctcttcaagccctacatccgctactgcatggaggaggagggctgcat

SEQ ID NO: 578375 - DNA, 120 bp, Artificial Sequence
  ENSG00000171680_13 (sequence is synthesized)
ggagtacatgcgcggcctgctgcgcgacaacgacctcttccgggcctacatcacgtgggcggagaagcacccacagtgccagaggctgaagctgagcgacatgctggccaaaccccacca

SEQ ID NO: 578376 - DNA, 120 bp, Artificial Sequence
  ENSG00000171680_14 (sequence is synthesized)
gcggctcaccaagtacccgctgctgctcaagtcggtgctgaggaagaccgaggagccgcgcgccaaggaggccgtcgtcgccatgatcggctccgtggagcgcttcatccaccacgtgaa

SEQ ID NO: 578377 - DNA, 120 bp, Artificial Sequence
  ENSG00000171680_15 (sequence is synthesized)
cgcgtgcatgcggcagcggcaggagcggcagcggctggcggccgtggtgagccgcatcgacgcctacgaggtggtggaaagcagcagcgacgaagtggacaagctcctgaaggaatttct

SEQ ID NO: 578378 - DNA, 120 bp, Artificial Sequence
  ENSG00000171680_16 (sequence is synthesized)
gcacctggacttgacagcgcccatccctggcgcctccccggaggagacgcggcagctgctgctggaggggagcctgaggatgaaggaggggaaggacagcaagatggatgtgtactgctt

SEQ ID NO: 578379 - DNA, 120 bp, Artificial Sequence
  ENSG00000171680_17 (sequence is synthesized)
cctcttcacggatctgctgttggtgaccaaagcagtgaagaaggcagagaggaccagggtcatcaggccacccctgctcgtggacaagattgtgtgccgggagctacgggaccctgggtc

SEQ ID NO: 578380 - DNA, 120 bp, Artificial Sequence
  ENSG00000171680_18 (sequence is synthesized)
cttcctccttatctacctgaatgagtttcacagtgctgtaggggcctacacgttccaggccagtggccaggccttgtgccgtggctgggtggacaccatttacaatgcccagaaccagct

SEQ ID NO: 578381 - DNA, 84 bp, Artificial Sequence
  ENSG00000171680_19 (sequence is synthesized)
aggcgaggacagtggcacttcagctgccagctcccctaccatcatgcggaaaagcagcggcagccccgactctcagcactgtgc

SEQ ID NO: 578382 - DNA, 120 bp, Artificial Sequence
  ENSG00000171680_20 (sequence is synthesized)
tgcggaaaagcagcggcagccccgactctcagcactgtgcctcagatggctccacggagaccctggccatggttgtggtagagcctggggacacgctgtcctcccccgagttcgacagcg

SEQ ID NO: 578383 - DNA, 120 bp, Artificial Sequence
  ENSG00000171680_21 (sequence is synthesized)
gtcctttcagctcccagtctgatgagacctctctcagcaccactgcctcatctgccacgcccaccagtgagctgctgcccctgggtccggtggacggccgctcctgctccatggactctg

SEQ ID NO: 578384 - DNA, 120 bp, Artificial Sequence
  ENSG00000171680_22 (sequence is synthesized)
cctacggcaccctctccccaacctccttacaagactttgtggccccaggcccaatggcagagctagtgcctcgggccccagagtccccacgagttccttcccctccaccctcgccccgtc

SEQ ID NO: 578385 - DNA, 120 bp, Artificial Sequence
  ENSG00000171680_23 (sequence is synthesized)
tccgccgccgcacccctgtccagctgttgagctgcccgccccacctgctcaagtctaagtccgaggccagcctcctccagctgctggcaggggctggcacccatgggacaccctctgccc

SEQ ID NO: 578386 - DNA, 120 bp, Artificial Sequence
  ENSG00000171680_24 (sequence is synthesized)
ccagccgcagcctgtcagagctctgcctggctgttccagccccaggtattaggactcagggctcccctcaggaagctgggcccagctgggattgccgaggggcccctagccctggcagcg

SEQ ID NO: 578387 - DNA, 120 bp, Artificial Sequence
  ENSG00000171680_25 (sequence is synthesized)
gtcctgggctagtcggctgcctggccggggaacctgcaggctcccacaggaagaggtgtggagacctgccctcgggggcctctcccagggtccagcctgagcccccaccaggggtctctg

SEQ ID NO: 578388 - DNA, 120 bp, Artificial Sequence
  ENSG00000171680_26 (sequence is synthesized)
cccagcacaggaagctgaccctggcccagctctaccgaatcaggaccaccctgctgcttaactccacgctcactgcctcggaggtctgagcagagggaggcccccaagagtgccattgac

SEQ ID NO: 578389 - DNA, 120 bp, Artificial Sequence
  ENSG00000171680_27 (sequence is synthesized)
caagagacagcagacagcctgcctcctggggcgtgccggcacctgcttcagctactgcctcctgtatgcatgagccggatgctgggcaggatccctgcctacgcccgggcccgatttgcg

SEQ ID NO: 578390 - DNA, 120 bp, Artificial Sequence
  ENSG00000171680_28 (sequence is synthesized)
ctttgccggactggatggagtggaggaggcccaggccacagtaccaccccacctgcccaggcagcccctcgtcacctactccccgaagttaccagctcagctcgagtcttcagggctggg

SEQ ID NO: 578391 - DNA, 120 bp, Artificial Sequence
  ENSG00000171680_29 (sequence is synthesized)
ctcctaggctgcccatcctacttctaccctcactggcctccagtgggattcactcctgccctgcccccaccttcccagtcccacaggccacccctggcttgggctgggttctgtgaagtt

SEQ ID NO: 578392 - DNA, 120 bp, Artificial Sequence
  ENSG00000171680_30 (sequence is synthesized)
acgtatttattgagcttttggttcttttataaagacttgtctagactccactgggaagagtcctttgctttggggcccagtgactcggggcacttgagttcagggcggcctccttgtgtt

SEQ ID NO: 578393 - DNA, 120 bp, Artificial Sequence
  ENSG00000171680_31 (sequence is synthesized)
cctgtgctcctccacttgccacggatgggccacggatggagcttgccatgggaagcactgggaagtaatggggtgtggggtgccaccagaccaacacccccagacttccccaccttcagc

SEQ ID NO: 578394 - DNA, 120 bp, Artificial Sequence
  ENSG00000171680_32 (sequence is synthesized)
caccatcagagcctctccccaggtgccccccggggattcagggctgaatctgcccagttcccacactcaggccagccctcttgggaaggtgggtcctccatgggggtcccttcaggaact

SEQ ID NO: 578395 - DNA, 83 bp, Artificial Sequence
  ENSG00000171680_33 (sequence is synthesized)
ttgggaaggtgggtcctccatgggggtcccttcaggaactttttttttttttttaatacagagtctcactctgtcacctaggt

SEQ ID NO: 578396 - DNA, 120 bp, Artificial Sequence
  ENSG00000171680_34 (sequence is synthesized)
aacgattctcctgccccagccactctagtagctggaactgcaggtgtgcaccaccacgccgggctagtttttgtattttaagtagagacggcatttcaccatattggtcaggctggtctc

SEQ ID NO: 578397 - DNA, 120 bp, Artificial Sequence
  ENSG00000171680_35 (sequence is synthesized)
cccgcctctgcctcccatagtgctagaattacaggcctgagctactgcgcttggccccttgcggtacttttggcccaacctcctccatggctggggacgcggaggccgagagagaagtca

SEQ ID NO: 578398 - DNA, 120 bp, Artificial Sequence
  ENSG00000171680_36 (sequence is synthesized)
cttgccctggctctaccttgaagtggttctcagggttggggcgagagtcggggtggggaccgagatgcagctctatcctgtgcccctggtcgcagcaggcagcccagcgcttcgcgtgtt

SEQ ID NO: 578399 - DNA, 120 bp, Artificial Sequence
  ENSG00000171680_37 (sequence is synthesized)
ctacttggcctgtccgctgccgcctaatgagctcaggtctaggccgagcagagggggcacctggtcggactcggttgggctcgggcggccccgcctccccccgcccgccaggcgggccct

SEQ ID NO: 578400 - DNA, 120 bp, Artificial Sequence
  ENSG00000171680_38 (sequence is synthesized)
cccttctcgacggcgcggggcgggccctgcgggcgcggggctgaaggcggaaccacgacgggcagagagcacggagccgggaagcccctgggcgcccgtcggagggctatggagcagcgg

SEQ ID NO: 578401 - DNA, 120 bp, Artificial Sequence
  ENSG00000171680_39 (sequence is synthesized)
agcattcaaggagctccccaggagaaagagcaagttctgaggagccctctgagcccggcattggtgttgaggagggagtcagagaagagaggggcccggggccgcgcagaggcgcagagg

SEQ ID NO: 578402 - DNA, 120 bp, Artificial Sequence
  ENSG00000171680_40 (sequence is synthesized)
ggacgctgacctcttttgaagggaggactgaggagatcaccccacccctcctccggttgggaggccagtggggcccaggggagcctgggtgccccgctgactgatgccctctgctcctcc

SEQ ID NO: 578403 - DNA, 120 bp, Artificial Sequence
  ENSG00000171680_41 (sequence is synthesized)
cttgatctcccgctgtgaccagcccctctctgcctggcaggggaaagccaccaaactaaggccttcctggtagccaaggagcccagcagaggggctgctgctggctgctgggattgcaga

SEQ ID NO: 578404 - DNA, 120 bp, Artificial Sequence
  ENSG00000171680_42 (sequence is synthesized)
ggccggggtctctgtggtgttgctttcctggaaaggagggacggcacctccagggcagccagcagtgtgggagcccattccagggcgcaaatgggcactcaggaatggaaaatccaagaa

SEQ ID NO: 578405 - DNA, 120 bp, Artificial Sequence
  ENSG00000171680_43 (sequence is synthesized)
ggaaccaaccaccaacaaggaaatgcagtgtgagcggcggctgcgaagtctgtgccttcaaatatacagcgcccaggggacctgtgttggacggggagcaaattggcagggctgagagcg

SEQ ID NO: 578406 - DNA, 120 bp, Artificial Sequence
  ENSG00000171680_44 (sequence is synthesized)
ccttggttttctgtgcagacaggtccagctgcagaaattaagactggggctgagtcggggagaagccttccatgttgagatggcaactgggcaaagcaggacggagacctgtgtgtctga

SEQ ID NO: 578407 - DNA, 120 bp, Artificial Sequence
  ENSG00000171680_45 (sequence is synthesized)
ttagagaggcctgtggcattggcatgtggctggaggtccaggcagggtgccaccaccgcagaggtcaagcatgaattcagtcctgacaaaacatgggtctccacctcgaagctggctcag

SEQ ID NO: 578408 - DNA, 120 bp, Artificial Sequence
  ENSG00000171680_46 (sequence is synthesized)
cgtccccggcgcccccgcccgccgcccgccccccgcgcggcacggggcctgctccatggacgaccagagccccgctgaaaagaagggactgcgctgtcagaaccccgcctgcatggacaa

SEQ ID NO: 578409 - DNA, 120 bp, Artificial Sequence
  ENSG00000171680_47 (sequence is synthesized)
cggcttcctccggccgccatggggacaggacccggtgtctccggacgcctagcagcctccaggccgggcccggggctgcccctccgggactcggagccctcctgggccgggggtcgtgcc

SEQ ID NO: 578410 - DNA, 120 bp, Artificial Sequence
  ENSG00000171680_48 (sequence is synthesized)
accgcggtgcactccagcccccaggaagagaggcagcttggagggggccaaattcagggtcaaagatgagtcttggggaacgggggtcgccccagaccttcgggggctcctctgtctcta

SEQ ID NO: 578411 - DNA, 120 bp, Artificial Sequence
  ENSG00000171680_49 (sequence is synthesized)
taggggtggccccatgttgcaggctccgggtctctgcaggtgtgacgtgtgtgtctgtgtggtggcccgtgagcgagcgcatccctgcgtgggcagacccgtgctggtgtgcacgccagt

SEQ ID NO: 578412 - DNA, 120 bp, Artificial Sequence
  ENSG00000171680_50 (sequence is synthesized)
gtgagggagtgcggtggggtctgtgtacttgtgcattttaatcatgtatgcaggagccaggcctgcgtgtgggcaggcgtgtgacaggtctgccgtggtatgcagatgcgcctgtgtgag

SEQ ID NO: 578413 - DNA, 120 bp, Artificial Sequence
  ENSG00000171680_51 (sequence is synthesized)
cacctctgcgggcaggtgtctgtggacctgcgtgtgatcccatgcgggcttcccttttccgttgggaaggtgggggcagctggggctgtgggtggggcgggggctcgtgggggcggggcc

SEQ ID NO: 578414 - DNA, 120 bp, Artificial Sequence
  ENSG00000171680_52 (sequence is synthesized)
aggctgtgggctagcgtgatggcgccggtgctggagaaggcgcggcgcacgcgagcgctgctacagcccggggacttcctcaaaggcttcaagatggtacgggcggggccgggcgcaggc

SEQ ID NO: 578415 - DNA, 120 bp, Artificial Sequence
  ENSG00000171680_53 (sequence is synthesized)
gggggcactgaggcagggctggggcgccgaaaagcctccacggcccgatccggtctgcccagcatccccaacctcccccaggcccgtaaccgcacttgaccccttgtggccaagggtgag

SEQ ID NO: 578416 - DNA, 120 bp, Artificial Sequence
  ENSG00000171680_54 (sequence is synthesized)
gaattacgaggcggtcgcccgggtttgagcctccacctgaccatctacccctgatccctggccacgggtggtcactttggctgaggctcagtttcctcatcaggaaacagggatcataag

SEQ ID NO: 578417 - DNA, 120 bp, Artificial Sequence
  ENSG00000171680_55 (sequence is synthesized)
cttgctgcccccttggggtggtcgcccaagtgcagtaaggaagcgcttgcgcagcgcctggcgcgggccggcccgcagggagcgcgcggtaaccggcgccgtggttgttctgccccgggc

SEQ ID NO: 578418 - DNA, 120 bp, Artificial Sequence
  ENSG00000171680_56 (sequence is synthesized)
atgtttctctactggaggaagcggggcacctacgagctggaggccctgcccggcgacctggccgagctggagctggggacggtggagcgtttctcgtggagctccaccctggacatcatc

SEQ ID NO: 578419 - DNA, 120 bp, Artificial Sequence
  ENSG00000171681_0 (sequence is synthesized)
aatttgcataacggccccggcgcgtgcaagggagaagcgggtttgtttttgaatctgcggaggcggcggcggtggcagcggcggcgcggcgactgaagcgcgcgaaaagctgaggcggca

SEQ ID NO: 578420 - DNA, 120 bp, Artificial Sequence
  ENSG00000171681_1 (sequence is synthesized)
acgtcggggacggctgcgcgggacggctctgtaggaaggaacttggttccccctccctcagcttccgccccaaaagattcagaatggacagtttagaagaacctcagaaaaaagtcttta

SEQ ID NO: 578421 - DNA, 120 bp, Artificial Sequence
  ENSG00000171681_2 (sequence is synthesized)
aggctcgaaaaacgatgagagtgagtgatcgtcagcaacttgaagcagtgtacaaggtcaaagaagaactgttgaaaactgatgtcaagctgttaaatggcaaccatgaaaatggagatt

SEQ ID NO: 578422 - DNA, 120 bp, Artificial Sequence
  ENSG00000171681_3 (sequence is synthesized)
tggacccaacctcacctttggaaaacatggattacattaaagacaaggaagaggtgaatggcattgaagagatttgttttgatcctgaaggaagtaaagcagaatggaaggaaacaccct

SEQ ID NO: 578423 - DNA, 120 bp, Artificial Sequence
  ENSG00000171681_4 (sequence is synthesized)
gtatcctaagtgttaatgtaaaaaacaagcaggatgatgatttaaattgtgaacctttgtctccccataatataactccagaaccagtctctaaactgcctgctgaaccagtttctggtg

SEQ ID NO: 578424 - DNA, 120 bp, Artificial Sequence
  ENSG00000171681_5 (sequence is synthesized)
atccagcccctggtgatctggatgccggagatccagcctccggagtactggcctctggtgattccacctctggtgatcccacctctagcgagccctcctctagtgatgctgcctctggtg

SEQ ID NO: 578425 - DNA, 120 bp, Artificial Sequence
  ENSG00000171681_6 (sequence is synthesized)
atgcaacctctggtgatgccccttctggtgatgtgtcccctggtgatgccacctctggtgatgccactgctgatgatctctcctctggtgatcccacctctagtgatcccatcccaggtg

SEQ ID NO: 578426 - DNA, 120 bp, Artificial Sequence
  ENSG00000171681_7 (sequence is synthesized)
aaccggtccctgttgaacccatttctggtgattgtgccgctgatgatatagcctctagtgaaataacttctgttgatctggcttctggagcaccagcttccactgatccagcctctgatg

SEQ ID NO: 578427 - DNA, 120 bp, Artificial Sequence
  ENSG00000171681_8 (sequence is synthesized)
atctggcctctggtgatctatcctctagtgaactggcctctgatgatctggccactggtgaactggcctctgatgagctgacttctgaatcaacctttgatcgtacctttgaaccaaagt

SEQ ID NO: 578428 - DNA, 120 bp, Artificial Sequence
  ENSG00000171681_9 (sequence is synthesized)
ctgtaccagtttgtgaaccagttcctgaaattgacaatatagaaccaagtagcaataaagatgatgattttcttgaaaaaaatggagctgatgaaaaattagagcaaattcagagtaaag

SEQ ID NO: 578429 - DNA, 120 bp, Artificial Sequence
  ENSG00000171681_10 (sequence is synthesized)
actcattggatgagaaaaataaagctgataataatattgatgctaatgaagaaactctagaaacagatgatacaactatttgttcagatcgacctcctgaaaatgaaaagaaggtagagg

SEQ ID NO: 578430 - DNA, 120 bp, Artificial Sequence
  ENSG00000171681_11 (sequence is synthesized)
aagatattatcacagagcttgctcttggagaagatgctatatctagcagtatggaaattgaccaaggtgaaaagaatgaagatgaaacttctgcagatcttgtagaaacgattaatgaaa

SEQ ID NO: 578431 - DNA, 120 bp, Artificial Sequence
  ENSG00000171681_12 (sequence is synthesized)
atgttattgaagataacaaaagtgagaatatcttagaaaatacagactctatggagacagatgaaatcattcctattttggaaaagcttgcaccttctgaggatgaacttacttgctttt

SEQ ID NO: 578432 - DNA, 120 bp, Artificial Sequence
  ENSG00000171681_13 (sequence is synthesized)
ctaaaacatctctccttccaatcgatgagacaaatccagatttggaagagaaaatggaaagttcttttggttcaccatctaaacaagaaagtagtgagagtttgccaaaagaagcctttc

SEQ ID NO: 578433 - DNA, 120 bp, Artificial Sequence
  ENSG00000171681_14 (sequence is synthesized)
tggtcctctctgatgaagaggatatttcgggtgaaaaagatgagtctgaagttatatcgcaaaatgaaacgtgctctccagcagaagtagaaagtaatgaaaaggacaacaaacctgagg

SEQ ID NO: 578434 - DNA, 120 bp, Artificial Sequence
  ENSG00000171681_15 (sequence is synthesized)
aagaagagcaagtaatacatgaagatgatgaaagaccttctgagaaaaatgaattttctagacgaaaacgttctaaatcagaagacatggacaatgtacagtctaaacgtcgtcgatata

SEQ ID NO: 578435 - DNA, 120 bp, Artificial Sequence
  ENSG00000171681_16 (sequence is synthesized)
tggaagaagaatatgaggcagaatttcaagtaaagattacagccaaaggagacattaaccagaaacttcaaaaggttatacagtggttgctggaagaaaaattgtgtgcgctgcagtgtg

SEQ ID NO: 578436 - DNA, 120 bp, Artificial Sequence
  ENSG00000171681_17 (sequence is synthesized)
ctgtatttgataagactttggcagaattgaaaacacgagtggaaaagattgaatgtaacaagaggcataaaacagttctcactgaactacaggccaagatagccaggttaaccaaacgct

SEQ ID NO: 578437 - DNA, 120 bp, Artificial Sequence
  ENSG00000171681_18 (sequence is synthesized)
ttgaagcagccaaagaagatcttaagaaaagacatgaacatccacccaacccaccagtatcaccaggaaaaactgtaaatgatgtcaacagcaataataacatgtcttacagaaatgcag

SEQ ID NO: 578438 - DNA, 120 bp, Artificial Sequence
  ENSG00000171681_19 (sequence is synthesized)
gcacagtgagacagatgctggagtccaaaagaaatgtaagcgagagtgcaccaccatcctttcaaactcctgtgaatacagtatcttcaaccaatcttgtcactcctccagcagttgtca

SEQ ID NO: 578439 - DNA, 120 bp, Artificial Sequence
  ENSG00000171681_20 (sequence is synthesized)
gtagtcaacctaaattgcagactccagtgacttcgggttccctcacagcaacgtcagttcttcctgcacccaatacagctactgtagttgctactactcaggtgcctagtggaaatcccc

SEQ ID NO: 578440 - DNA, 120 bp, Artificial Sequence
  ENSG00000171681_21 (sequence is synthesized)
agcctacaatctctttacagcctttgccagtgattttgcatgtacctgttgcagtatcctcccagcctcagcttctacagagccatccagggactttggtgactaatcaaccatctggca

SEQ ID NO: 578441 - DNA, 120 bp, Artificial Sequence
  ENSG00000171681_22 (sequence is synthesized)
atgttgaattcatttctgtgcaaagcccacctacagtgagtggtcttaccaaaaatccagtatccttgccatccttgccaaatcccactaaaccaaacaacgttccttctgtgcccagtc

SEQ ID NO: 578442 - DNA, 120 bp, Artificial Sequence
  ENSG00000171681_23 (sequence is synthesized)
ctagtattcaaaggaaccctactgccagtgctgcaccattgggaacaacacttgctgtgcaggctgttccaacagcacactctattgtacaagccacaaggacttctttacccacagtgg

SEQ ID NO: 578443 - DNA, 120 bp, Artificial Sequence
  ENSG00000171681_24 (sequence is synthesized)
gcccatcaggactctatagtccatcaactaatcgaggtcctatacagatgaaaattccaatttctgcatttagtacttcgtctgctgcagaacagaacagcaataccaccccaagaattg

SEQ ID NO: 578444 - DNA, 120 bp, Artificial Sequence
  ENSG00000171681_25 (sequence is synthesized)
aaaaccagacaaacaaaacaatagatgcttctgtcagtaagaaagcagctgatagcacatcacagtgtggaaaagccactggcagtgattcaagtggtgtcattgatctcacaatggatg

SEQ ID NO: 578445 - DNA, 120 bp, Artificial Sequence
  ENSG00000171681_26 (sequence is synthesized)
atgaagagagtggagcttcacaagaccccaaaaaactaaatcacactcctgtatcaaccatgagttcttctcagcctgtgtcacgaccattgcaacccatacaaccagcaccgcctcttc

SEQ ID NO: 578446 - DNA, 120 bp, Artificial Sequence
  ENSG00000171681_27 (sequence is synthesized)
aaccatctggggtgccaacaagtggaccatctcagaccaccatacacttactacctacagctccaactaccgtgaatgtaacacatcgtccagtaactcaggtgaccacaagactccctg

SEQ ID NO: 578447 - DNA, 120 bp, Artificial Sequence
  ENSG00000171681_28 (sequence is synthesized)
taccaagagctcctgcaaaccaccaggtggtttatacaactcttcctgcaccaccagctcaggctcccttgcgaggaactgttatgcaggctcctgctgttcggcaggtcaatccccaaa

SEQ ID NO: 578448 - DNA, 120 bp, Artificial Sequence
  ENSG00000171681_29 (sequence is synthesized)
atagtgttacagttcgagtgcctcaaacaaccacatatgttgtaaacaatggactaaccctgggatcaacaggacctcagctcacagtgcatcaccgaccaccacaagtgcatactgagc

SEQ ID NO: 578449 - DNA, 120 bp, Artificial Sequence
  ENSG00000171681_30 (sequence is synthesized)
ccccacgccccgtgcacccagcacccttaccagaagctccacaaccacagcgtctgcccccagaagctgccagcacatctctgcctcagaagccacacttgaagttagcacgcgttcaga

SEQ ID NO: 578450 - DNA, 120 bp, Artificial Sequence
  ENSG00000171681_31 (sequence is synthesized)
gtcaaaatggcatagtactgtcatggagtgtcctggaggtggatcgaagctgtgccactgttgatagctaccatctctatgcttaccatgaggaacccagtgccactgtgccctcacaat

SEQ ID NO: 578451 - DNA, 120 bp, Artificial Sequence
  ENSG00000171681_32 (sequence is synthesized)
ggaaaaagattggggaagtcaaggcacttcccttgcccatggcatgtactctcacccagtttgtatctggtagcaaatactactttgcagtacgagccaaggatatttatggacgttttg

SEQ ID NO: 578452 - DNA, 120 bp, Artificial Sequence
  ENSG00000171681_33 (sequence is synthesized)
ggcctttctgtgatcctcagtcaacagatgtgatctcttctacccagagcagttaaaccttggagcctttatattttcctcttttaaaatttccaccttttggtcttgtttttaatcttg

SEQ ID NO: 578453 - DNA, 120 bp, Artificial Sequence
  ENSG00000171681_34 (sequence is synthesized)
tgcatgataccccatgtaaaatccaccttgtgcaagatttcttggacagatgtgtgtatacactacatttgtttataaccagaagcaaaataaactcagcccacaaagctagaatctttt

SEQ ID NO: 578454 - DNA, 120 bp, Artificial Sequence
  ENSG00000171681_35 (sequence is synthesized)
cctggacagtttaggctttggggtttggaaatgtaaatgtgtaccttgctttagttttgaggctggggaatatgtgtgggtgtttatgtgtgtttttccttatgtaggtgttattgcatt

SEQ ID NO: 578455 - DNA, 120 bp, Artificial Sequence
  ENSG00000171681_36 (sequence is synthesized)
gttaagtgggtcaaacagaatcaaaacaaaacccaaagaaataaataaaaaacaaaatggctaaatagtttaaaataggttaattcgaacacaggaaaggatctatttgttgtttctttt

SEQ ID NO: 578456 - DNA, 120 bp, Artificial Sequence
  ENSG00000171681_37 (sequence is synthesized)
gtctggtctcctgagttgttaattaggtgaaaaaagatctgcaatggccccctccctttcctaatctggcttttacatttattttgtgccttaaagattaactacaaagataaacatggc

SEQ ID NO: 578457 - DNA, 120 bp, Artificial Sequence
  ENSG00000171681_38 (sequence is synthesized)
caaaaataaataaataaatatggccatatgtccgttgttgcttagtcttcccttgcagccttttacccttgatttctccttcatctctaccaaatatagcacaactcctcaagtaatttt

SEQ ID NO: 578458 - DNA, 120 bp, Artificial Sequence
  ENSG00000171681_39 (sequence is synthesized)
tcggcctcccagagtgctgcgattacagttgtgagccactgtatccagcctactcaagtgatttttaaaccaaggtgtgtgtatgtacatggatgtgtatgtacacacacacacaggtgc

SEQ ID NO: 578459 - DNA, 120 bp, Artificial Sequence
  ENSG00000171681_40 (sequence is synthesized)
atgcatagtctcatcttagccgggcatggtggcgacaatcacatttaactccaaaaatttgacgtgctattttcttctaaaactatagatgcttttatttttggtcactatttaactttg

SEQ ID NO: 578460 - DNA, 120 bp, Artificial Sequence
  ENSG00000171681_41 (sequence is synthesized)
tgtaaagtggaccaagagaaaaccatattgtggaagacagtttttcacacattttagtatccgtgttgcacactgtgttagagattatgaaaaccattctagttcagtttatcacccaaa

SEQ ID NO: 578461 - DNA, 120 bp, Artificial Sequence
  ENSG00000171681_42 (sequence is synthesized)
gctatcacccaacactaactccttagtattctttcaaaggaagcaaatagtaagattacaatatagaatgagctaaaatatcaaggggaaagcttcatttcctctttattctctttatcg

SEQ ID NO: 578462 - DNA, 120 bp, Artificial Sequence
  ENSG00000171681_43 (sequence is synthesized)
tccttcccattttaaccttttaactttgttttgatggtgccaagttgagtctgatgtacccattgttagctttggatagaatttaaagtatatcccagaattagctgggcatgttggtgc

SEQ ID NO: 578463 - DNA, 120 bp, Artificial Sequence
  ENSG00000171681_44 (sequence is synthesized)
ctctgcctcaaaaaaaaaagaatttaaagtatatcctttgaggtcattttatgtaacaattagatataacctcctgtgtatctctctgttcctcttcaaagttattaaaattcagcttag

SEQ ID NO: 578464 - DNA, 120 bp, Artificial Sequence
  ENSG00000171681_45 (sequence is synthesized)
gtcatggatttttaatatgagggccagctgtactggtgtcaggtaggtgttttgggtgtagataatttaggactggagggctgagttaagttttaggaggagaatgtggttgagaatatt

SEQ ID NO: 578465 - DNA, 120 bp, Artificial Sequence
  ENSG00000171681_46 (sequence is synthesized)
ttgaaaggaatttatggagtttgtgaaataacttcgaagtcctcttcctttacaatatttgaattcatatttgtaccttctcaaaatagtgattcatttttcctagaattacaggaggga

SEQ ID NO: 578466 - DNA, 120 bp, Artificial Sequence
  ENSG00000171681_47 (sequence is synthesized)
gctcttttactaatgttgttttgtttgcaactttgatggcttataataggaagtattctagttgtaaagaaaactctttagagacttttgactggtcagtatactgaggtgtgagatttg

SEQ ID NO: 578467 - DNA, 120 bp, Artificial Sequence
  ENSG00000171681_48 (sequence is synthesized)
attcatgatgaagaaagcctatagattgccaaaaaattaattctccaaaccacctttcactctcagaaaatgagaccacaaaggagtatgctataaatcaaatttgccaaccaattatgt

SEQ ID NO: 578468 - DNA, 120 bp, Artificial Sequence
  ENSG00000171681_49 (sequence is synthesized)
agatattactcattctaggactaatgatgatggtaaagaagttgccagtgttatggcaatgaaaatttcagaaaggaggagttgatgatcttctagatgtatatgaacacctgtctatat

SEQ ID NO: 578469 - DNA, 120 bp, Artificial Sequence
  ENSG00000171681_50 (sequence is synthesized)
ctgcatgtatatgttttgacctgcagtggttgcaatgttgatatgtgttcaagattattcctgtctacaaaactgaaggcccatgttcaaattgttctttattgggtgtttttatggtca

SEQ ID NO: 578470 - DNA, 120 bp, Artificial Sequence
  ENSG00000171681_51 (sequence is synthesized)
cgtggtaacaattttcttacctaacctacaaaaggttctcttgatgaacatttttatttatatttactaatcttttttaaaaaaagctttcatagcattatataatcagatgaagaaagc

SEQ ID NO: 578471 - DNA, 120 bp, Artificial Sequence
  ENSG00000171681_52 (sequence is synthesized)
ccagtagaataaaaaaaaaattcattagcctagcctatattatgttttctgtcaaaggaaaacaaattctcaaataggaattctaaaaatatttactaaagtaaaataactacttaaaat

SEQ ID NO: 578472 - DNA, 120 bp, Artificial Sequence
  ENSG00000171681_53 (sequence is synthesized)
gttttattccagttggaaggaaggtacagggagaaatcgcaattatttaggggagaagtatatttattataagatggtgtcctcaaattagcctaccatggcacgtaggggcagcagcta

SEQ ID NO: 578473 - DNA, 120 bp, Artificial Sequence
  ENSG00000171681_54 (sequence is synthesized)
tattagatttactagaggtgctaagttagaacactaggcttttattgaggcaggttttaatattgatagatgctttttgtttggtttgtttcttctgggagagaatggaggacttaagta

SEQ ID NO: 578474 - DNA, 120 bp, Artificial Sequence
  ENSG00000171681_55 (sequence is synthesized)
gaagtagctactgataacagactttctagtagcagtttccactccacggttacctttttagtttcatagtatcttttcacaaagtattacaaataagctagattctcccagtttgggaat

SEQ ID NO: 578475 - DNA, 120 bp, Artificial Sequence
  ENSG00000171681_56 (sequence is synthesized)
gcaagtttgctacatttttagcctggcaatatttgtgtaggtattgccttattggaaattctggaaacctgatactgcaacctgcaatgtaggatgtttgtatggcatttaaaggtaatg

SEQ ID NO: 578476 - DNA, 120 bp, Artificial Sequence
  ENSG00000171681_57 (sequence is synthesized)
gtgatgtttattattctatactttgcattctgtgagagtaattttcactctgtcttaagtgtgagtaagcctcttctaaaaatcttgttcttgccaagaaatttataaatcacatacgaa

SEQ ID NO: 578477 - DNA, 120 bp, Artificial Sequence
  ENSG00000171681_58 (sequence is synthesized)
gacgtctgttgctaacagttaactttatgaggtaactatatccttctatttctctggactcatttttaaaaaatatgccgaatactgcatactgtttaaggtagtatataagtttatgag

SEQ ID NO: 578478 - DNA, 120 bp, Artificial Sequence
  ENSG00000171681_59 (sequence is synthesized)
agaagtggagagctttcttccttgaaaagtcggtatttgttgagataccatttgcctcacagagaggtgttccccactcccatccccattgccagataataaatattttgagaaaagtga

SEQ ID NO: 578479 - DNA, 120 bp, Artificial Sequence
  ENSG00000171681_60 (sequence is synthesized)
cctaaaacagctgaaatcttaggtgcatctgtctgcagacctccttaagcaggctgtatcttacaattcccttactgcactgggtaagtgttaacttagtttttgttgtttgctcttttg

SEQ ID NO: 578480 - DNA, 120 bp, Artificial Sequence
  ENSG00000171681_61 (sequence is synthesized)
ctttaaatattctccaaattaccatttatgcaacatggttagggttaatactgcatggtattcatttatcttgtttcatgaactttccagtactgtacaaggtcaacaaagtaatgcctg

SEQ ID NO: 578481 - DNA, 120 bp, Artificial Sequence
  ENSG00000171681_62 (sequence is synthesized)
tggtatcctcatctctcacttttttactctgtgattttagcacagtaaggtactgcaaagaccttccttccaaatgttctccttgactttatttcttgggccaattcagtatcctcaaca

SEQ ID NO: 578482 - DNA, 120 bp, Artificial Sequence
  ENSG00000171681_63 (sequence is synthesized)
tcctaagattttgttgttttatcactgacctgtggttggcctgttttattctaatttccagaaaagtcaagtcccagtatttgcaatatcaaataactctaaaaccgatgtgtgattcta

SEQ ID NO: 578483 - DNA, 120 bp, Artificial Sequence
  ENSG00000171681_64 (sequence is synthesized)
ccttccttactatttttactgggcaaatgccctatttttttaattattattatttttaacttttgggacacacaaaaatcagcaattctcatgaagcgtttgttagtgtggcagacttgt

SEQ ID NO: 578484 - DNA, 120 bp, Artificial Sequence
  ENSG00000171681_65 (sequence is synthesized)
ctaattcctgaaactcattcatccccttgagccagccaatggggaggaataggataatgcaaacacatgttttgttttctcattttcaaataatttaccatgttaaaataaacttttctt

SEQ ID NO: 578485 - DNA, 120 bp, Artificial Sequence
  ENSG00000171681_66 (sequence is synthesized)
tgttttttatttgtagagtcagctaagtacccatatttaaatgccgtctttattatttttttgaggtctttgtttttgtctgtttttgttttgttttgttttgtaaataaggtaactggg

SEQ ID NO: 578486 - DNA, 120 bp, Artificial Sequence
  ENSG00000171681_67 (sequence is synthesized)
caatcaaacaccttttggggattctggctttagtattttatcagccattttaaaattaaatataaaaatcctttgtaagaaacttgcatcctaatttttctttattgcaattgaaagtgt

SEQ ID NO: 578487 - DNA, 120 bp, Artificial Sequence
  ENSG00000171681_68 (sequence is synthesized)
aaataataagacaatgtaagtaagaccttcctaatgtctaatacaaactgggctccagcaagtggccctatttttattagggttttgaaggtttgtgtgtgtgtgtgcgtgcgtgtgtgt

SEQ ID NO: 578488 - DNA, 120 bp, Artificial Sequence
  ENSG00000171681_69 (sequence is synthesized)
gtttttcttttttaaatgtatagtagagtggtgtctgtataagtgttacctgtagtggggttttgtccagcaagcctgaaatttatactttgaaataaaactactgggtttttaacattc

SEQ ID NO: 578489 - DNA, 120 bp, Artificial Sequence
  ENSG00000171681_70 (sequence is synthesized)
tagtatacaacaagcagtaggttttctatgtcttaaacattacatgaaatgtgctgcttgcatctcttctaagatcaatttgtattaagtctacaattaggtggcttctgtttcagttat

SEQ ID NO: 578490 - DNA, 120 bp, Artificial Sequence
  ENSG00000171681_71 (sequence is synthesized)
gacgggattcacaggcattatgttacaaaactggcttgctgccttctgttttctttttctgtgtcctgtgtagctgcattgtttgttgcagtatatgcattagctgttgtctatgttcag

SEQ ID NO: 578491 - DNA, 120 bp, Artificial Sequence
  ENSG00000171681_72 (sequence is synthesized)
tttcctgcaggctgacaaagtgggaggggctttgtttgttacatagctgagttttcactgtgtgagttcttgagtgcacattgcagccatcttaattacacttttgtgcaactgagactg

SEQ ID NO: 578492 - DNA, 120 bp, Artificial Sequence
  ENSG00000171681_73 (sequence is synthesized)
tgcagctgtctcaaaatggctgctaacctagtctttgtagctgcttaggcagcaagtatgtcagtgaggagacttgtcacatgcatcaggaccagagattcagaatggacagtttagaag

SEQ ID NO: 578493 - DNA, 120 bp, Artificial Sequence
  ENSG00000171681_74 (sequence is synthesized)
tttcttggatttactgcaactgtttctactgaatttattgggaacatttttgacatactaaatttttttctccaaaagaacatagtgtggaggaattatattttgtttaactatttcctc

SEQ ID NO: 578494 - DNA, 120 bp, Artificial Sequence
  ENSG00000171681_75 (sequence is synthesized)
atgttagaacatttaagttatgtgtatcttaaattatttccatgagatactgcttagagttaaaattgctgggccagtggaaagttttttttaatctgtattgtgatctgtatagtaatc

SEQ ID NO: 578495 - DNA, 120 bp, Artificial Sequence
  ENSG00000171681_76 (sequence is synthesized)
tgtatggtatctgaaagatactatagcagtggtctgtgaatttgagtttttatttatgtatgtgacatgttgacggaaaagtagttggagaaaactacatgaattgtttcatataaagca

SEQ ID NO: 578496 - DNA, 120 bp, Artificial Sequence
  ENSG00000171681_77 (sequence is synthesized)
tattctacaaagacagatgtttatggcattatgcttggtttatttgtgttctttttggaatggaagttttttagattagaattttaaaatttggccaggtgcagtgtctcacacctgtaa

SEQ ID NO: 578497 - DNA, 87 bp, Artificial Sequence
  ENSG00000171681_78 (sequence is synthesized)
tttctcaagagaatatttgacctgatgtaattcttggatctctgaggtcttctacacagaagtatatttagagagcacaggggtcaa

SEQ ID NO: 578498 - DNA, 120 bp, Artificial Sequence
  ENSG00000171681_79 (sequence is synthesized)
tgctgagattacaagcatgagccaccatgtccagcctgtactgcctttcctttttcctttatgatttctacagcacttgtctgcccagaaaatattacctgttgtaagattcagaatgga

SEQ ID NO: 578499 - DNA, 120 bp, Artificial Sequence
  ENSG00000171681_80 (sequence is synthesized)
caagaggtcaggagtttgagaccagcccgggcaatgcggtgaaaccccgtctctataaaaaatttaaaaattagctgggtgtgatggcatgtgtctgtggtcccagctgcatgggaggct

SEQ ID NO: 578500 - DNA, 89 bp, Artificial Sequence
  ENSG00000171681_81 (sequence is synthesized)
ggctgaggcaggaggatagcttgagcctgggaggttgaggctgccgtgagctgtgtttatgccactgcattccatcctgggtgacagaa

SEQ ID NO: 578501 - DNA, 120 bp, Artificial Sequence
  ENSG00000171681_82 (sequence is synthesized)
aagatacatgtagttctcttcagcatttagttggaatggcatataataatgttaaattttgcaaaaatttcttataatgtcatattaaaagtattgttataagttcaagagatctgtact

SEQ ID NO: 578502 - DNA, 120 bp, Artificial Sequence
  ENSG00000171681_83 (sequence is synthesized)
acaacatagaaactatagtatagttaaaatcaatgtagtatattcttgaaaatagctgatagagcagattttaagtattgtcaccacacacaaaaaaggtaagtatgtgagatcatgcat

SEQ ID NO: 578503 - DNA, 120 bp, Artificial Sequence
  ENSG00000171681_84 (sequence is synthesized)
atgtcagctagatttagccattctgcagtgtatgcatatttcaaacatgttgtataccataaatatatataatttttgtcaattaaaaaatagttttcaaaaaagaaatggcagtataac

SEQ ID NO: 578504 - DNA, 120 bp, Artificial Sequence
  ENSG00000171681_85 (sequence is synthesized)
caaaactaatctattattatttttcttcccttaggagagttaaacagagaaaattgttgatgtatactagttgatttgtgctctgagtgttgtctttaatttaactttatttatggcctg

SEQ ID NO: 578505 - DNA, 120 bp, Artificial Sequence
  ENSG00000171681_86 (sequence is synthesized)
tattagtatagtacacaatttgatattggtatattctctactctattaagaaacaccttacctagttagagtgggaatggtcaattgtgatttaccccagatgatggaaatcatggtaaa

SEQ ID NO: 578506 - DNA, 120 bp, Artificial Sequence
  ENSG00000171681_87 (sequence is synthesized)
ggatagccttcaatgagagtcttaaagatatggaaagtggctgagaaaagaagggaaaatgttaaagaaagcttgtagtttcttgtatatatcatatattagttacatacatatgttaca

SEQ ID NO: 578507 - DNA, 120 bp, Artificial Sequence
  ENSG00000171681_88 (sequence is synthesized)
acatatgttacatgcatgttacatatgtagatgacattttaaaattatatattaaccacatgtatataagcagtagtagaatatatcacataaacacaagcttatataaaaggtatattt

SEQ ID NO: 578508 - DNA, 120 bp, Artificial Sequence
  ENSG00000171681_89 (sequence is synthesized)
aaagaaaaataataaaatgaactacgtatgaactcttcatcaggttaagaagtagaaatttttcagtatcctgtaagtggtcttgtattcctgtcttgactacatcccttttcctttcca

SEQ ID NO: 578509 - DNA, 120 bp, Artificial Sequence
  ENSG00000171681_90 (sequence is synthesized)
tcaaaggtaaccactgttcctacttttctattagtcattctgcttttctttatgattttgccaccaaaattgatatcatttaaacatactagggttctctagaggacagaactaacagga

SEQ ID NO: 578510 - DNA, 120 bp, Artificial Sequence
  ENSG00000171681_91 (sequence is synthesized)
attaacttacatgatcacaaggtccctcaataggctgtctgcaagctgagcaaggaaagccagactgaatccccaaactgaagaatttggagtccagtgtcgaagggcaggaagcatcca

SEQ ID NO: 578511 - DNA, 90 bp, Artificial Sequence
  ENSG00000171681_92 (sequence is synthesized)
gcacaggagaaagatgtaggctggaaggctagccagtctctccatttcatgtttttctgcctgctttgtattcattgaaggtggatctgc

SEQ ID NO: 578512 - DNA, 120 bp, Artificial Sequence
  ENSG00000171681_93 (sequence is synthesized)
gattgtgcccaccagattaaaggtggatctgccttctccagcccattttctgcctgctttgtattcattgatagctgattagattgtgcacaccagattaaaggtggatctgccttcccc

SEQ ID NO: 578513 - DNA, 70 bp, Artificial Sequence
  ENSG00000171681_94 (sequence is synthesized)
aaccaaaactaagaaattgatgttagggaggacagactattacaagataaagctgtaattgataaagaag

SEQ ID NO: 578514 - DNA, 120 bp, Artificial Sequence
  ENSG00000171681_95 (sequence is synthesized)
ttcttctttttttctcaagagaatatttgacctgatgtaattcttggatctctgaggtcttctacacagaagtatatttagagagcaattcagaatggacagtttagaagaacctcagaa

SEQ ID NO: 578515 - DNA, 120 bp, Artificial Sequence
  ENSG00000171681_96 (sequence is synthesized)
aaggtaaccaaaactaagaaattgatgttaggtaatttgcccagtctcacacagtaggtttcctgggagagttggaattcaaatctgtgaatctgtctacagtctacagagttcatgttc

SEQ ID NO: 578516 - DNA, 120 bp, Artificial Sequence
  ENSG00000171681_97 (sequence is synthesized)
agaatctcaagctgaattggcttccagcaagtaggctaggcttattattttatgcgcttcagccaaagaccagcaggaacacctttgtaattgaaaaagttaggtttactatttgctgca

SEQ ID NO: 578517 - DNA, 120 bp, Artificial Sequence
  ENSG00000171681_98 (sequence is synthesized)
gggaggaaataatgttcactatggggaaactgtaaggcacatcaatcagtaagaggatgttagaaaaaacctagtataggatttgagtatagtataggttgggttattttggggagagat

SEQ ID NO: 578518 - DNA, 120 bp, Artificial Sequence
  ENSG00000171681_99 (sequence is synthesized)
agacctaatagttggcagcatagaaagcagtacaaagaattctgattctaggcattttcactttgaaatagtcattttgaagatatactctgtgtgttctgtgagcttcattgacatatt

SEQ ID NO: 578519 - DNA, 120 bp, Artificial Sequence
  ENSG00000171681_100 (sequence is synthesized)
gtctgacgttttttggcttttgtggtaaatgggatgtatgctgcacaaactacccaacagatgtgaaccactatttgaaaggaattttaatatgtagccaacctactgtattcttgtttt

SEQ ID NO: 578520 - DNA, 80 bp, Artificial Sequence
  ENSG00000171695_0 (sequence is synthesized)
gtgcggaactcaaaaccgactgcggagagcccagcgggcgggagctggggcgcacgttggggccctgccgaggggcgggc

SEQ ID NO: 578521 - DNA, 120 bp, Artificial Sequence
  ENSG00000171695_1 (sequence is synthesized)
ctcctccctccgcagggcgggaggatgccgccgccagcgaaggagggcgggcgcaagggcccgcgggagcgaagcgggaagagcgcgccaggcacggcgcagggtgaggagcgtgccaag

SEQ ID NO: 578522 - DNA, 120 bp, Artificial Sequence
  ENSG00000171695_2 (sequence is synthesized)
cgcccgcgacagagccccccaagccgggctgggccctgacgccgcagggactggcggccatgctccctgcgcagcgccaccgccatctgctcttcggcgacctgctggaggacgtgggcg

SEQ ID NO: 578523 - DNA, 120 bp, Artificial Sequence
  ENSG00000171695_3 (sequence is synthesized)
ggtggaaccggggtaccgcatgcccgacccgcgcccgtggacgcagtcgctcgagctgcccgccgagcgccagaaccggctcctcggcgtcctcaaggcagcggaggcccgcgggcgagt

SEQ ID NO: 578524 - DNA, 120 bp, Artificial Sequence
  ENSG00000171695_4 (sequence is synthesized)
ccgcgccctgcggctgcgctacacccgcatgcgggccgaggagatcgcgctgctcatccagcggcagaagtccgcgcgcgccgccatccggctggagctgttcctgccgccgcagctgaa

SEQ ID NO: 578525 - DNA, 120 bp, Artificial Sequence
  ENSG00000171695_5 (sequence is synthesized)
gcccgcgcggatcccggaccccctggaccgccaagaggtgcagacaagccccggtaggggcggggaaaggggaggggccctgcccgcctccgcacacgccggaccccagcctctctcccc

SEQ ID NO: 578526 - DNA, 120 bp, Artificial Sequence
  ENSG00000171695_6 (sequence is synthesized)
ggcagcggaggcgcgtggagaccatcctggaggagaacgtggatggcaccatcttcccgcggtgacggcgactgagagtgtgcgacgcgccccagcctcccacataaagttataattctc

SEQ ID NO: 578527 - DNA, 120 bp, Artificial Sequence
  ENSG00000171695_7 (sequence is synthesized)
ccggaccccctggaccgccaagagcggaggcgcgtggagaccatcctggaggagaacgtggatggcaccatcttcccgcggtgacggcgactgagagtgtgcgacgcgccccagcctccc

SEQ ID NO: 578528 - DNA, 120 bp, Artificial Sequence
  ENSG00000171700_0 (sequence is synthesized)
cccccgcgccccctccccgactgtcgggccggaccttggagcgcgcgggccggcggcggcgcgagtggctcgggagcgcggctgacccccaggctgtggtgagggtctgagagctggtac

SEQ ID NO: 578529 - DNA, 120 bp, Artificial Sequence
  ENSG00000171700_1 (sequence is synthesized)
ccaggctgtggtgagggtctgagagctggtaccacggagcctgggcaacctcctccgcccacccatgcccaccccgcatgaggctgagaagcagatcacagggccagaggaggcggaccg

SEQ ID NO: 578530 - DNA, 120 bp, Artificial Sequence
  ENSG00000171700_2 (sequence is synthesized)
gcccccttcaatgtccagtcatgatacagcctctccagcggcccccagccgcaacccctgctgcctgtgctggtgctgctgctgtagctgctcctggaaccaagagcggcggcgcgcgtg

SEQ ID NO: 578531 - DNA, 120 bp, Artificial Sequence
  ENSG00000171700_3 (sequence is synthesized)
gcaggcctcccgggagagcaagctgcagcccctccccagctgtgaagtatgtgccacgccaagtcctgaggaggtgcagagctgggcgcagtcttttgacaagctgatgcacagcccagc

SEQ ID NO: 578532 - DNA, 120 bp, Artificial Sequence
  ENSG00000171700_4 (sequence is synthesized)
gggacgcagcgtgttccgggcgttcctgcggacagagtacagcgaggagaacatgctcttctggttggcctgcgaggagctgaaggccgaggccaaccagcatgtggtagacgagaaggc

SEQ ID NO: 578533 - DNA, 120 bp, Artificial Sequence
  ENSG00000171700_5 (sequence is synthesized)
gaggctcatctacgaggactacgtatccatcctgtcccccaaggaggtgagcctggactcccgtgtgcgggagggcatcaacaagaagatgcaggagccgtccgcacacacgttcgacga

SEQ ID NO: 578534 - DNA, 120 bp, Artificial Sequence
  ENSG00000171700_6 (sequence is synthesized)
cgtgccctgctgctgcaggggccatcacagtcctcctccgaggcctaggccgcccccagcagcacagaccccgccgcctcctacggccgactctgggttcccttcaggtgttgttgtcgg

SEQ ID NO: 578535 - DNA, 120 bp, Artificial Sequence
  ENSG00000171700_7 (sequence is synthesized)
cagggctgtcagggcacatgcctggccggctggggtccccacccgcggagacggtcctagacccagtggggagtgctgtgtctcctgggtctgcccacccgtggccaagcaggaactcca

SEQ ID NO: 578536 - DNA, 120 bp, Artificial Sequence
  ENSG00000171700_8 (sequence is synthesized)
ggtgcagggcgggcctccaggtgcagggcgggccagaagccccctcatcggcccgcagctggctggcccagtgctcctggctgggggctcttgcgtggtgagagtaggggtccccccagg

SEQ ID NO: 578537 - DNA, 120 bp, Artificial Sequence
  ENSG00000171700_9 (sequence is synthesized)
agccatgctggacccatgagcctcgctggggcctcctccccaggcagccaatgggccccagacaagcctttggtggggaacagaacctccgcatcgtgtagttttgtgacataaggagac

SEQ ID NO: 578538 - DNA, 120 bp, Artificial Sequence
  ENSG00000171700_10 (sequence is synthesized)
ctcctacttgagctgtctgtaccccagaatcaaacacagaacctcagaaccagatttaggacctcagaatcctgcactcaaggtggcaggacccaatttctgttttatatgttcatgaac

SEQ ID NO: 578539 - DNA, 120 bp, Artificial Sequence
  ENSG00000171700_11 (sequence is synthesized)
tttaaacctggaaacatgtccttactaggtgttttatcaaaaaaaagttttcatatttatctctatccctaaccccccaaaaataggatgtcttattattgaagatatttttaaagcaaa

SEQ ID NO: 578540 - DNA, 120 bp, Artificial Sequence
  ENSG00000171700_12 (sequence is synthesized)
ggatctggcagccactcagcccttcgagctgtaggggaggcgctgcgcccccggccccagccgatcgggggctcctggcgctagcctccctccagagcgccgcaggagtccctcctgccg

SEQ ID NO: 578541 - DNA, 120 bp, Artificial Sequence
  ENSG00000171700_13 (sequence is synthesized)
tggcccctcctgcccccaccccgcctttgggtcgctgatcacagggccagaggaggcggaccggcccccttcaatgtccagtcatgatacagcctctccagcggcccccagccgcaaccc

SEQ ID NO: 578542 - DNA, 120 bp, Artificial Sequence
  ENSG00000171700_14 (sequence is synthesized)
accgtgctgggcgggagcttcgggagccggcgcacgggactcgaaccccaagggctcccgccgccaggtccacgtggaccctgggccgcagtggaagtggagcccgccccccgcgcgtgg

SEQ ID NO: 578543 - DNA, 120 bp, Artificial Sequence
  ENSG00000171700_15 (sequence is synthesized)
gggagggggcgccgcagccgggttcccctttttctggagctcaaagcctggggaagtgattgctcaaaggtgggggccggaagaacccaggtttccgcgtctccctccccctctcagccc

SEQ ID NO: 578544 - DNA, 120 bp, Artificial Sequence
  ENSG00000171703_0 (sequence is synthesized)
gcggcgggtgtgggaggtggcgacggccggggccggggtcctgcccggctgcggaggcgggcgcgacgggcgcgggggtcgctgctcctgaggcgatgatgggcaaggaagaggagattg

SEQ ID NO: 578545 - DNA, 120 bp, Artificial Sequence
  ENSG00000171703_1 (sequence is synthesized)
gggcaaggaagaggagattgcgcggatcgcccggaggctggacaagatggtgaccaagaagagcgcggagggagccatggatttgctgcgggagctgaaggccatgcctatcacgctgca

SEQ ID NO: 578546 - DNA, 120 bp, Artificial Sequence
  ENSG00000171703_2 (sequence is synthesized)
cctgctccagtccacccgagtcgggatgtctgtcaacgcccttcggaagcagagctcggatgaggaggtcattgcactggccaagtctctcatcaagtcctggaagaagctcctggatgc

SEQ ID NO: 578547 - DNA, 120 bp, Artificial Sequence
  ENSG00000171703_3 (sequence is synthesized)
ttccgatgccaaagccagggagcgggggaggggcatgcctctgcccacgtcctcgagggatgcctcagaggccccggatcccagccgcaagaggccggagctgcccagggcaccgtcgac

SEQ ID NO: 578548 - DNA, 120 bp, Artificial Sequence
  ENSG00000171703_4 (sequence is synthesized)
cgtggccatcggtgcggactgcgagcgcctgtcggctcagatcgaggaatgcatcttccgggacgttggaaacacagacatgaagtataagaaccgtgtacggagtcgtatctccaacct

SEQ ID NO: 578549 - DNA, 120 bp, Artificial Sequence
  ENSG00000171703_5 (sequence is synthesized)
gaaggatgccaagaaccctgacctgcggcggaatgtgctgtgtggggccataacaccccagcagatcgctgtgatgacctcagaggagatggccagtgatgagctgaaggagatccgtaa

SEQ ID NO: 578550 - DNA, 120 bp, Artificial Sequence
  ENSG00000171703_6 (sequence is synthesized)
ggccatgaccaaggaggccatccgagagcaccagatggcccgcactggcggcacgcagacagacctgttcacctgcggcaagtgcaggaaaaagaactgcacctacacacaggtgcagac

SEQ ID NO: 578551 - DNA, 120 bp, Artificial Sequence
  ENSG00000171703_7 (sequence is synthesized)
ccgcagctctgatgagcccatgaccacctttgttgtctgcaacgagtgtggaaaccgctggaagttctgctgacccctcgtgtagatgtgctgcagccttgggccctccccggcccacgt

SEQ ID NO: 578552 - DNA, 120 bp, Artificial Sequence
  ENSG00000171703_8 (sequence is synthesized)
cctccgttgacacagcttctctggagaccctagaaggcggcatgtcctgccctcaacctgcctgcctggattgcacctttctgccctttccccctcattattaaatgtttctttttgcca

SEQ ID NO: 578553 - DNA, 120 bp, Artificial Sequence
  ENSG00000171703_9 (sequence is synthesized)
ggacaagatggtgaccaagaagagcgcgcgtttgtcaccctccgtctcccatagcatttgtcgccggcaacagtttggagtctgaggagggagccatggatttgctgcgggagctgaagg

SEQ ID NO: 578554 - DNA, 120 bp, Artificial Sequence
  ENSG00000171703_10 (sequence is synthesized)
aggtggggtgtctcagcctctgtggggtctgtggtgtgaactggggatggccctgcccaaccagcctcctgggagtcttgggcatggtgggtggagagcccagccttgggtgagcctgtg

SEQ ID NO: 578555 - DNA, 120 bp, Artificial Sequence
  ENSG00000171703_11 (sequence is synthesized)
cggccttccactctgggggatctcatgtggccacaaggctggaggcctcaccccctttctcgcagttctgctgacccctcgtgtagatgtgctgcagccttgggccctccccggcccacg

SEQ ID NO: 578556 - DNA, 120 bp, Artificial Sequence
  ENSG00000171703_12 (sequence is synthesized)
aggctgcctggcctggtgccctctggtggctgctggatgccactgcccagctgtccaggggtcacctgcctgggtggtcacctgcctgggtggtcaggctgtctcacctcaggagggccc

SEQ ID NO: 578557 - DNA, 120 bp, Artificial Sequence
  ENSG00000171703_13 (sequence is synthesized)
ggctgtagcctgaagctgggtctcagtcaggaatgggcctggggcaggcttggccctgcagcccttcacctctccaccaggtgtgggtgggcagaccgacccctgtgtggctgggcagaa

SEQ ID NO: 578558 - DNA, 120 bp, Artificial Sequence
  ENSG00000171703_14 (sequence is synthesized)
cctttccagcccccaccccaacatggcccccagcggggcaggtggtaggtggagggcagcgacgttgtcctcaggtgggtccttaaaacacttgcacgcatcttccgggacgttggaaac

SEQ ID NO: 578559 - DNA, 120 bp, Artificial Sequence
  ENSG00000171703_15 (sequence is synthesized)
atgacctcagaggtgagcccctgttggaggggctggagggctgctccctcggagcggtgggctaagccactggccccgtgctccaggagatggccagtgatgagctgaaggagatccgta

SEQ ID NO: 578560 - DNA, 120 bp, Artificial Sequence
  ENSG00000171703_16 (sequence is synthesized)
ggcaggacgagacccctccccggcagagactaaccgggacgcaggggagacccccacccgtggccgagacccctgccccgggccagccctgccgttcactcccgcaaccccggcagaggc

SEQ ID NO: 578561 - DNA, 120 bp, Artificial Sequence
  ENSG00000171703_17 (sequence is synthesized)
cgcgatcaggcctggaccttgtcccgggagagccacccgctctggactcagacccctccctcgcccgcagtcacaggctccgcacccttccctgtcccttaactccagacccccagcctg

SEQ ID NO: 578562 - DNA, 120 bp, Artificial Sequence
  ENSG00000171703_18 (sequence is synthesized)
gcccgtcgactccttccttggccctgtcccgcctctcggagcccccggggtgttcgggcctcctctgcgggccgcgccagccccttgccttcctccatcccggcctgggcatcctcacag

SEQ ID NO: 578563 - DNA, 120 bp, Artificial Sequence
  ENSG00000171703_19 (sequence is synthesized)
gggtgggaaagaaagggctgctgatgagggccggtgctgccagactttcggaggcgagctgccacccacccacggagtcggacccccgggcagtaactgggggagggcggcagtgtcccg

SEQ ID NO: 578564 - DNA, 120 bp, Artificial Sequence
  ENSG00000171703_20 (sequence is synthesized)
ctggttgccgttccccgccccccgctgggaggctccatggggaggagagggccctttttcacaccaagttctggggaggctgccttcccaacagccggcatgtgatgtgaatcagctgac

SEQ ID NO: 578565 - DNA, 120 bp, Artificial Sequence
  ENSG00000171703_21 (sequence is synthesized)
ggagactgagacacagtggtcaacgtgcagagcccagaatctgctccctggtagctgactttgcaggcaggggccttgcccacgcagcctcggcagaggcccccgcacttcgcgaacccc

SEQ ID NO: 578566 - DNA, 120 bp, Artificial Sequence
  ENSG00000171703_22 (sequence is synthesized)
agcaatggccccttccagacgccacgtccagctaccgcgcgctcacacctgcagggccccacaagaggcctcccagtgtgcgcgggcctcttgaagaagtaactctactcagaagcccga

SEQ ID NO: 578567 - DNA, 120 bp, Artificial Sequence
  ENSG00000171703_23 (sequence is synthesized)
atgacccaaactgggctctgggaggctggggacggccttctaggccaagtggggcgcgcgcagggctcagcggggcccaagagaagggctgagggcactgggtcctgagccacccaccga

SEQ ID NO: 578568 - DNA, 120 bp, Artificial Sequence
  ENSG00000171703_24 (sequence is synthesized)
cttgtcatcctccttcacaggccagccagatacctgtcttgcctgtgggcccattttcttccctgtctgtccccaccccacaagaaccaggtttctctaataaattctctcccttcttta

SEQ ID NO: 578569 - DNA, 120 bp, Artificial Sequence
  ENSG00000171703_25 (sequence is synthesized)
ggagacgttgtgggaggccgccccaggcggtggagctgcaggtgcagagggcctcggtggcggctcagcgcccttggggagcactgagttgccgggcctggtgtggaaatgtgaccggtt

SEQ ID NO: 578570 - DNA, 120 bp, Artificial Sequence
  ENSG00000171703_26 (sequence is synthesized)
tgtgcctggcctcgtcagtgttgaggacctggaggaaacgcagatcttgggtggggagacaaggcggagagaacgaggtgcattggaacagtccaggcgaggggtgctggcctgcttggg

SEQ ID NO: 578571 - DNA, 120 bp, Artificial Sequence
  ENSG00000171703_27 (sequence is synthesized)
ggcaactcagaggcctggaggatagatgaggaggggggctgtgggccttgtaggtgttggctgtggccgtgcctggagtggagggacccttgaaagtttggcctcagctcgggacactga

SEQ ID NO: 578572 - DNA, 120 bp, Artificial Sequence
  ENSG00000171703_28 (sequence is synthesized)
tgttcccgggttggcccttcatgagagtttggcctcagctcgggacactgatgttcctgggttggcccttcacagctggtgggcggggggtgctttggggagaggctgccctgcgcatca

SEQ ID NO: 578573 - DNA, 120 bp, Artificial Sequence
  ENSG00000171703_29 (sequence is synthesized)
gggcatcaagacacaggggagtgaatgaacctggggctgcagtttcacctgggtgtggccctggctgctggggaggggccgtggctctgaagcctcatgattggccaggggagctggcat

SEQ ID NO: 578574 - DNA, 120 bp, Artificial Sequence
  ENSG00000171703_30 (sequence is synthesized)
ttctgttctggtttgggtcagtgacctgaggtggttacaacgaagtcagtgaggtcattgccacggatgtgggttacaacttggaatgcttgaggctgcagaacccctccccttcttgac

SEQ ID NO: 578575 - DNA, 120 bp, Artificial Sequence
  ENSG00000171703_31 (sequence is synthesized)
tgagcagtaagggttccctgctgtggtgcaggaacatgtgggcagagccctgggtgtctccaggtagaggaattttggtttctttttgaccccaggttgaatctccaaattgtcactgcc

SEQ ID NO: 578576 - DNA, 120 bp, Artificial Sequence
  ENSG00000171703_32 (sequence is synthesized)
ttgtgttctcctccagtaggcagaaggaggtgatattgtctgttgagatctaaagtcctttatgaaggtcctccttctccttccaggagggagccatggatttgctgcgggagctgaagg

SEQ ID NO: 578577 - DNA, 120 bp, Artificial Sequence
  ENSG00000171703_33 (sequence is synthesized)
agggtttaaccgaaaccgaacattaaccgtagccctaacgcggctgagggatccaggccttgcctctgggccgggtgagagacagacactcgccaaccagtccgcagtggctccccgtgt

SEQ ID NO: 578578 - DNA, 120 bp, Artificial Sequence
  ENSG00000171703_34 (sequence is synthesized)
gtgcgaggctcccgcctgcgtgtgtgcgtgtgcatgtgtgcctgcgcacaggggagggaaagttcttcagctgccgagggcgggagtaggggctggagcagcaccctgcggcgaggcccc

SEQ ID NO: 578579 - DNA, 120 bp, Artificial Sequence
  ENSG00000171703_35 (sequence is synthesized)
acaggagaatcgatggttctgatgctgtcagcctctgggtgcaaattctgagggcccgggagcgtctggcggccctgagcagcttgctggggaagctccgtggaggaggaagtccggagg

SEQ ID NO: 578580 - DNA, 120 bp, Artificial Sequence
  ENSG00000171703_36 (sequence is synthesized)
catgtgatgtgaatcagctgacatcatcttgacgggagccctgtgaggcggacacttaactccagtttcacaggagggagccatggatttgctgcgggagctgaaggccatgcctatcac

SEQ ID NO: 578581 - DNA, 120 bp, Artificial Sequence
  ENSG00000171703_37 (sequence is synthesized)
gaaccaggtttctctaataaattctctcccttctttagccaggacttagcccgcagcaacttgggttgtgggtagttatgtggacaccctccgaaaagagccggtgtgcttatataagag

SEQ ID NO: 578582 - DNA, 120 bp, Artificial Sequence
  ENSG00000171703_38 (sequence is synthesized)
ccaggaggtcgggcaagcctcctctgggagtgtctgggcgctggagcctctggccggctctgttcactgcggcctgggcctctgttgtcttgcggccacagcgagactttggaggaggct

SEQ ID NO: 578583 - DNA, 120 bp, Artificial Sequence
  ENSG00000171711_0 (sequence is synthesized)
gaccagggaccaggacctttataaggtggaaggcttgatgtcctccccagactcagctcctggtgaagctcccagccatcagccatgagggtcttgtatctcctcttctcgttcctcttc

SEQ ID NO: 578584 - DNA, 120 bp, Artificial Sequence
  ENSG00000171711_1 (sequence is synthesized)
aggtgtttttggtggtataggcgatcctgttacctgccttaagagtggagccatatgtcatccagtcttttgccctagaaggtataaacaaattggcacctgtggtctccctggaacaaa

SEQ ID NO: 578585 - DNA, 120 bp, Artificial Sequence
  ENSG00000171711_2 (sequence is synthesized)
atgctgcaaaaagccatgaggaggccaagaagctgctgtggctgatgcggattcagaaagggctccctcatcagagacgtgcgacatgtaaaccaaattaaactatggtgtccaaagata

SEQ ID NO: 578586 - DNA, 120 bp, Artificial Sequence
  ENSG00000171714_0 (sequence is synthesized)
agagcgcccaggagcgctaccggctgagggtggggaagcgcagggccaagcgcgcgaagcaggttgtgggggaccgggtcgagtggaagtacccgccggagaggaaggccggctggctgt

SEQ ID NO: 578587 - DNA, 120 bp, Artificial Sequence
  ENSG00000171714_1 (sequence is synthesized)
ggcgcccagagacggtggagtccgaggaggaggagaaggaggcctgcagaaggaagagcaggcccttagaagtccagcagcagcaactccggcggcccacagtcagattcagcacctgcc

SEQ ID NO: 578588 - DNA, 120 bp, Artificial Sequence
  ENSG00000171714_2 (sequence is synthesized)
tcagatctccacgtctgtctcagctgcccctctcctgctgcctctcaggcaccagtgccattaacgagctggcgaagatgggcgacccggatctcctggaagtgttggcggaggaagggg

SEQ ID NO: 578589 - DNA, 120 bp, Artificial Sequence
  ENSG00000171714_3 (sequence is synthesized)
aaaaagtcaataagcatatagactactctttccaaatgagtgagcagagcctgagcagcagagagaccagctttctcatcaatgaagaaacaatgcctgcaaagcgattcaatttgttcc

SEQ ID NO: 578590 - DNA, 120 bp, Artificial Sequence
  ENSG00000171714_4 (sequence is synthesized)
tgaggcggcggcttatgtttcaaaaaaatcagcaaagcaaagattctatcttcttccgagatgggattaggcaaattgattttgtgctttcctacgttgatgatgtaaagaaagacgcag

SEQ ID NO: 578591 - DNA, 120 bp, Artificial Sequence
  ENSG00000171714_5 (sequence is synthesized)
agttaaaggcggaaagaagaaaagagtttgaaactaatctcagaaaaacaggtcttgagttggaaatagaagacaaaagggactcggaagatggaagaacttattttgtcaagatccatg

SEQ ID NO: 578592 - DNA, 120 bp, Artificial Sequence
  ENSG00000171714_6 (sequence is synthesized)
ccccttgggaggtattagttacctatgctgaagtcttgggaatcaaaatgcctattaaggagagtgatattccccgccctaagcacactcctataagctatgtgcttggacctgtaagac

SEQ ID NO: 578593 - DNA, 120 bp, Artificial Sequence
  ENSG00000171714_7 (sequence is synthesized)
tcccactgagtgtgaagtatccccatcctgaatattttactgcacaattcagcagacatcggcaggagctcttcctcatcgaagatcaggcaaccttctttccatcctcatcaagaaaca

SEQ ID NO: 578594 - DNA, 120 bp, Artificial Sequence
  ENSG00000171714_8 (sequence is synthesized)
gaattgtgtactatattctctcaagatgtccttttggcatagaagatgggaagaaaaggtttgggattgaaagactgctaaactctaacacttactcatctgcctatccactccatgatg

SEQ ID NO: 578595 - DNA, 120 bp, Artificial Sequence
  ENSG00000171714_9 (sequence is synthesized)
gccaatattggaagccatcagaacctcccaatcctaccaatgaaagatacacacttcaccagaattgggctcgattttcctatttctacaaggagcagcctttagacttgattaagaatt

SEQ ID NO: 578596 - DNA, 120 bp, Artificial Sequence
  ENSG00000171714_10 (sequence is synthesized)
attatggagaaaaaattggtatctattttgtctttcttggattttacacagaaatgctattctttgcagctgtagttggcttagcttgttttatttatggcttattatcaatggaacata

SEQ ID NO: 578597 - DNA, 120 bp, Artificial Sequence
  ENSG00000171714_11 (sequence is synthesized)
acacaagcagcactgaaatctgtgaccctgagattggtggtcagatgatcatgtgcccactctgtgatcaagtgtgtgattattggagactaaatagtacgtgtttggcttcaaagttct

SEQ ID NO: 578598 - DNA, 120 bp, Artificial Sequence
  ENSG00000171714_12 (sequence is synthesized)
cccatttgtttgataatgagtcaacagtgttctttgcaatattcatgggaatttgggtcaccttatttttggagttttggaaacaacgacaagccagactggaatatgaatgggacctgg

SEQ ID NO: 578599 - DNA, 120 bp, Artificial Sequence
  ENSG00000171714_13 (sequence is synthesized)
tggactttgaagaggaacagcagcagcttcagctgagaccagaatttgaagctatgtgtaaacacaggaaattgaatgcagtgactaaggagatggaaccttacatgcctctatacacgc

SEQ ID NO: 578600 - DNA, 120 bp, Artificial Sequence
  ENSG00000171714_14 (sequence is synthesized)
gtattccatggtactttctttcaggagccacagtgacattatggatgtctcttgtcgtcaccagtatggtagctgtaattgtgtaccgcctgtcagtctttgctacatttgctagtttca

SEQ ID NO: 578601 - DNA, 120 bp, Artificial Sequence
  ENSG00000171714_15 (sequence is synthesized)
tggaaagtgatgcatccttaaagcaggtcaaaagcttccttactcctcagataaccacatcactcacaggatcatgcttgaactttattgtcatcttgatcttgaatttcttttatgaaa

SEQ ID NO: 578602 - DNA, 120 bp, Artificial Sequence
  ENSG00000171714_16 (sequence is synthesized)
agatatctgcctggatcacaaaaatggaaattcctcgaacataccaggagtatgagagcagtcttaccttgaaaatgttcctgtttcagtttgtaaatttttactcatcctgcttctacg

SEQ ID NO: 578603 - DNA, 120 bp, Artificial Sequence
  ENSG00000171714_17 (sequence is synthesized)
tagctttctttaaagggaagttcgtaggctatcctggaaaatacacatatttatttaatgagtggagaagtgaagagtgtgatcctggaggctgtcttatagaattgacaacccaattga

SEQ ID NO: 578604 - DNA, 120 bp, Artificial Sequence
  ENSG00000171714_18 (sequence is synthesized)
ccattataatgaccgggaaacagatttttggaaacattaaagaagccatttatcccttggctttgaattggtggagacgccgaaaagctcggacaaactctgagaagctgtatagtcgat

SEQ ID NO: 578605 - DNA, 120 bp, Artificial Sequence
  ENSG00000171714_19 (sequence is synthesized)
gggagcaggatcatgaccttgaaagttttggaccccttgggcttttctatgagtacttagaaacagttactcaatttggatttgttacactatttgtggcctcttttcctttggctcctc

SEQ ID NO: 578606 - DNA, 120 bp, Artificial Sequence
  ENSG00000171714_20 (sequence is synthesized)
ttcttgctctcataaataatattgtagagattcgagtggatgcctggaaacttaccactcaatacaggagaactgtagcttctaaagctcatagcataggtgtttggcaagacattcttt

SEQ ID NO: 578607 - DNA, 120 bp, Artificial Sequence
  ENSG00000171714_21 (sequence is synthesized)
atggaatggctgtcctttctgttgcaactaatgcctttattgttgcatttacgtcagacatcattccccgtctagtttactactatgcttactcaacaaatgccacacagcctatgacag

SEQ ID NO: 578608 - DNA, 120 bp, Artificial Sequence
  ENSG00000171714_22 (sequence is synthesized)
gatatgtgaataatagcctgtcagtattcctgatagctgattttccaaaccacactgcaccttcggaaaaacgagacttcatcacttgcaggtacagagattacagatatcctcctgatg

SEQ ID NO: 578609 - DNA, 120 bp, Artificial Sequence
  ENSG00000171714_23 (sequence is synthesized)
acgagaataaatattttcataatatgcaattctggcatgtccttgctgccaagatgaccttcatcattgttatggaacatgttgtgtttttagttaaatttttgctggcctggatgatac

SEQ ID NO: 578610 - DNA, 120 bp, Artificial Sequence
  ENSG00000171714_24 (sequence is synthesized)
ctgatgttccaaaagatgttgtggagagaatcaagagagaaaagttaatgactatcaagattctccatgattttgagctcaacaaattaaaagagaacttgggaattaattctaatgaat

SEQ ID NO: 578611 - DNA, 120 bp, Artificial Sequence
  ENSG00000171714_25 (sequence is synthesized)
ttgccaagcatgtcatgattgaggaaaacaaagcacagctggctaaatcaacactctaatcagtatagtgaggaagcagcaggtgatctgccttacttcactttatcctctggttttagg

SEQ ID NO: 578612 - DNA, 120 bp, Artificial Sequence
  ENSG00000171714_26 (sequence is synthesized)
ttttttttttttctttttttttttaaactcaaagtttttatacacttttatagaggccaactttgtgatgttggaaatgtactacttctctgcttcattgactgggccctctccagatgt

SEQ ID NO: 578613 - DNA, 120 bp, Artificial Sequence
  ENSG00000171714_27 (sequence is synthesized)
gtgctgtaaatgactgttgaaagtgcaggtagaatcagaatactgggaaattatggagtcttgcagtttagtaagaaacactggccttgggctgtcccatcactttccagtgcatctatt

SEQ ID NO: 578614 - DNA, 120 bp, Artificial Sequence
  ENSG00000171714_28 (sequence is synthesized)
tatttttgtggtcttctcttgggttatttgatacctccttccccattaagaaaaatgttggggcaaaaagaaatggatcaaagagactgactgagccctatatatcctatcattttaaaa

SEQ ID NO: 578615 - DNA, 120 bp, Artificial Sequence
  ENSG00000171714_29 (sequence is synthesized)
tatgcaaatgaattgccaagatcagatgacataagaaaactcacacattaaggtgttaatgtatcatagcagaggtttattcctaacacattcaactaccatcagaatcccagatagttc

SEQ ID NO: 578616 - DNA, 120 bp, Artificial Sequence
  ENSG00000171714_30 (sequence is synthesized)
ttcctggtaaaggcagaattccttttctcgagactgaaattttgggtttcaacataaaacaacttggttcttagagataataatttggttataatagtttcaagactgatcttatctgga

SEQ ID NO: 578617 - DNA, 120 bp, Artificial Sequence
  ENSG00000171714_31 (sequence is synthesized)
aagcaacattatgaagctgttagattgcttcaggttctcaagcaaagacacaatacagaagtaaatgtgttttcttagtagttaatggatgcaggacaatgtatattgattaatttgttg

SEQ ID NO: 578618 - DNA, 120 bp, Artificial Sequence
  ENSG00000171714_32 (sequence is synthesized)
attttaatttagaaaattgttaaattatttcttaaaaatcacttttcttctggaatgccaatttcacatcatgaagcctttttgtataagttagatacgagttgtttatgataaacattt

SEQ ID NO: 578619 - DNA, 120 bp, Artificial Sequence
  ENSG00000171714_33 (sequence is synthesized)
ctttgctttaaaataattgcaaatattttaataagtttacaaccttttctattgatgtatcatcttatacaatgctcagtgccttgttccaatacctctgacacacaagaagtcatgttg

SEQ ID NO: 578620 - DNA, 120 bp, Artificial Sequence
  ENSG00000171714_34 (sequence is synthesized)
ttagctagtgatttgatgtgatgtaacatcttaaatgtaagcttgtcttaatgaaattgtcagtgtaataacaactacagtcttgaaaaccaaaagtgaatcaaccaactaagaatgagt

SEQ ID NO: 578621 - DNA, 120 bp, Artificial Sequence
  ENSG00000171714_35 (sequence is synthesized)
tcatggacttaataatctaagggggaaaaaatgtttgttgaattattcctctcaaatttaggcttgtgttacatgcacaaaaatccttgttctgttttcacttaaaaaaactaaatatgt

SEQ ID NO: 578622 - DNA, 120 bp, Artificial Sequence
  ENSG00000171714_36 (sequence is synthesized)
ataactttgtgtatacacacacacacatctatatatataattattagcactagagggatatagtccagttatgtagtatttaaatctccagtttcaaattataattcacctccaaaagaa

SEQ ID NO: 578623 - DNA, 120 bp, Artificial Sequence
  ENSG00000171714_37 (sequence is synthesized)
tagttttttaatcacacacataagaaattttatcacaatatttaaaactaatatttcattatctaatgctaataaattattgtggtactgccagtattaaatatatggcagatggtatta

SEQ ID NO: 578624 - DNA, 120 bp, Artificial Sequence
  ENSG00000171714_38 (sequence is synthesized)
actactgatcaatagtaagcatacagaactggggattatggattttataaactatgagacagtcaccccagtttggactgggactaatccccagtactgatttgtcatccactgagtaga

SEQ ID NO: 578625 - DNA, 120 bp, Artificial Sequence
  ENSG00000171714_39 (sequence is synthesized)
ctttatgaatattttgggtaatttgaaatgatctcattattgaaagatgatttcatatgtagagaagataatatttctttcttgaaaaaacaagtcaggcttaccatgatgtgtgcaacc

SEQ ID NO: 578626 - DNA, 120 bp, Artificial Sequence
  ENSG00000171714_40 (sequence is synthesized)
aatgtaggatctttggcttgtcaaatcagattctccattgctatagtgtacagtgcacacagctcatattgcttccttcctgggtgctgataaaaataagaaagagcatggaaattggtt

SEQ ID NO: 578627 - DNA, 120 bp, Artificial Sequence
  ENSG00000171714_41 (sequence is synthesized)
tcttgaatataagctttaatttttaaggcttaaaagtattcatagaggtagactgtatgataaataaaaacaaatttaattcacaaagttatctgtacactgcagttttaaaatatacca

SEQ ID NO: 578628 - DNA, 120 bp, Artificial Sequence
  ENSG00000171714_42 (sequence is synthesized)
actaaattattgggtttctggaagtgaatggagaaaacagcaagggaagaaatcgtttttaagataagtaaataattcccatggattgataaatattttccttttaaaatgttatggact

SEQ ID NO: 578629 - DNA, 120 bp, Artificial Sequence
  ENSG00000171714_43 (sequence is synthesized)
gatattttttattcacctttaaatttcttatcaagaagtttatctttgtttttcagatttaaaaatgaaatacaggtattcgtcactttcctgaaaccatgctaaccaaaatcagtagcc

SEQ ID NO: 578630 - DNA, 120 bp, Artificial Sequence
  ENSG00000171714_44 (sequence is synthesized)
aaaccaattcagatagatgtgtctcatctaattaaacccattggtttttatgggagggctgcattaagagcacccaaccaccacatgtaagttgataattaccagcatggcaggtgattt

SEQ ID NO: 578631 - DNA, 120 bp, Artificial Sequence
  ENSG00000171714_45 (sequence is synthesized)
tatctgctgaccaagcgcatagttttgttttgttttcagaatgttctagggaacatttgagattttatgtgaaataaaattttaagtgccaaagccaaaaaaatacttaactcttttcaa

SEQ ID NO: 578632 - DNA, 120 bp, Artificial Sequence
  ENSG00000171714_46 (sequence is synthesized)
aggccctctttcatccttgccttcgtcaactttcctttgcacacaggaagcaaaatctacttcaagacatttattttagaggaatccattaagaaaggattgttttacttaaatgaaatg

SEQ ID NO: 578633 - DNA, 120 bp, Artificial Sequence
  ENSG00000171714_47 (sequence is synthesized)
ctgtcttatttttgctgtgtcttttgacacctcttagctttaacattcttcttttaaccaagccattatgcaaagttatcaaagaagaggagaaggaaaggaggacagatgaaagtgacg

SEQ ID NO: 578634 - DNA, 120 bp, Artificial Sequence
  ENSG00000171714_48 (sequence is synthesized)
ggaaatgagaaagaagaggagtgaggaaacagttatttccttatgaatcctgtgtgtttctttggaagaaagagctgttccgaggaagtttggtccagctgtggttgataagaggtatat

SEQ ID NO: 578635 - DNA, 120 bp, Artificial Sequence
  ENSG00000171714_49 (sequence is synthesized)
ctcttaaaaaagacacctaatgaaagtgagagaaaagctaaagaaaatttcaatgtgaccactattatgtgtcaaaataaaacttagattccaaagtggttttgtagtgttgggtgctat

SEQ ID NO: 578636 - DNA, 120 bp, Artificial Sequence
  ENSG00000171714_50 (sequence is synthesized)
gagtaggtatggatctctgttgattgactccagttgaaggtgagaaatctgtaccaatcattcaaaaagggaatctattgttttgaaagaaactctctcatatttcctttaaattgttaa

SEQ ID NO: 578637 - DNA, 120 bp, Artificial Sequence
  ENSG00000171714_51 (sequence is synthesized)
tagttgttatgcaactaaagaatgttatgaagaaaaatagcattgcaaaaagtaccattggccagccttacaagtcagccacaatgagtcggtataactactgtgttattctttttctag

SEQ ID NO: 578638 - DNA, 120 bp, Artificial Sequence
  ENSG00000171714_52 (sequence is synthesized)
acaaattttgactcttctacttttatgtgtaataattccagtattctatttatttcagcattatgtgaaaaatgataagaatgttaaaaagaaaataatagtgtggtttaattggtatga

SEQ ID NO: 578639 - DNA, 120 bp, Artificial Sequence
  ENSG00000171714_53 (sequence is synthesized)
gatacctgcttcctcctcctcaaaggtttgactgggtgtatctctcctatgtgtgacattatgtctcctggtgttaacacaggaaatgagtgctcctttttaaaatttctttcttccaag

SEQ ID NO: 578640 - DNA, 120 bp, Artificial Sequence
  ENSG00000171714_54 (sequence is synthesized)
tttttttttccaggaagagaaatatgcagttatgcaggaaaagctctcttaaataatgtgtacataaatctcaagagaatcaaattcacagagtgaataaagtaataatattaaactaca

SEQ ID NO: 578641 - DNA, 120 bp, Artificial Sequence
  ENSG00000171714_55 (sequence is synthesized)
cttttcgcatttttcatttggaatgaccgccttttgtgcttctgagatgttgcaaacagagacttgctttgttgcctaggctggactgaagtggcatgatcacagctcgctgcaacctta

SEQ ID NO: 578642 - DNA, 120 bp, Artificial Sequence
  ENSG00000171714_56 (sequence is synthesized)
acctcttggtctcaattgatcctcctacctgaacctctcaagtagagctgggactacagtgcacaccaccatgcccagcaatgtgtgaaagagcctctttccctactgcttcaccaagtt

SEQ ID NO: 578643 - DNA, 120 bp, Artificial Sequence
  ENSG00000171714_57 (sequence is synthesized)
taaaacttcaaattttttcaacttgatagggtataaccaggagttgcgaagtggtcgtagttgttcatgtctcaatctggatcatctttgctttttgcttctgctttgtgctatccctct

SEQ ID NO: 578644 - DNA, 120 bp, Artificial Sequence
  ENSG00000171714_58 (sequence is synthesized)
tcccgtacctcagttctatctggaaccatgatctgtgactgccatggaaaagtgttgggcaggaggaggccagctgggtctttgaagttgacaatggagccaggaatgaaagctgcactt

SEQ ID NO: 578645 - DNA, 120 bp, Artificial Sequence
  ENSG00000171714_59 (sequence is synthesized)
aggatgagaattgctttccctggagccaagtcagcaaatgcagtctggttgtcagagctgagaggggaaaaagtcaataagcatatagactactctttccaaatgagtgagcattatatc

SEQ ID NO: 578646 - DNA, 120 bp, Artificial Sequence
  ENSG00000171714_60 (sequence is synthesized)
ttccaaatgagtgagcattatatcttcccctggtactgttagcagagcctgagcagcagagagaccagctttctcatcaatgaagaaacaatgagtcttactctgtcgcccaggctggag

SEQ ID NO: 578647 - DNA, 120 bp, Artificial Sequence
  ENSG00000171714_61 (sequence is synthesized)
aagcatcatcctgggacttctcttcatcttgtcttctattgaagactaaattttctgcaatctatgtttctcccatttttggtttactagcttattttggtgaagcacatcttctagtaa

SEQ ID NO: 578648 - DNA, 120 bp, Artificial Sequence
  ENSG00000171714_62 (sequence is synthesized)
ttttctgaggaaaaattatgggcagtccatttttgagaaattgaagattgaaaatttcttttctttccttacatgtgattatttggaatagaatgtataattaaaagttgtttttcttaa

SEQ ID NO: 578649 - DNA, 120 bp, Artificial Sequence
  ENSG00000171720_0 (sequence is synthesized)
gctggcggcggccgcgggcggcgggcggcggaggtgcggggcctgctcccgccggcaccatggccaagaccgtggcctatttctacgaccccgacgtgggcaacttccactacggagctg

SEQ ID NO: 578650 - DNA, 120 bp, Artificial Sequence
  ENSG00000171720_1 (sequence is synthesized)
gacaccctatgaagccccatcgcctggcattgacccatagcctggtcctgcattacggtctctataagaagatgatcgtcttcaagccataccaggcctcccaacatgacatgtgccgct

SEQ ID NO: 578651 - DNA, 120 bp, Artificial Sequence
  ENSG00000171720_2 (sequence is synthesized)
tccactccgaggactacattgacttcctgcagagagtcagccccaccaatatgcaaggcttcaccaagagtcttaatgccttcaacgtaggcgatgactgcccagtgtttcccgggctct

SEQ ID NO: 578652 - DNA, 120 bp, Artificial Sequence
  ENSG00000171720_3 (sequence is synthesized)
ttgagttctgctcgcgttacacaggcgcatctctgcaaggagcaacccagctgaacaacaagatctgtgatattgccattaactgggctggtggtctgcaccatgccaagaagtttgagg

SEQ ID NO: 578653 - DNA, 120 bp, Artificial Sequence
  ENSG00000171720_4 (sequence is synthesized)
cctctggcttctgctatgtcaacgacattgtgattggcatcctggagctgctcaagtaccaccctcgggtgctctacattgacattgacatccaccatggtgacggggttcaagaagctt

SEQ ID NO: 578654 - DNA, 120 bp, Artificial Sequence
  ENSG00000171720_5 (sequence is synthesized)
tctacctcactgaccgggtcatgacggtgtccttccacaaatacggaaattacttcttccctggcacaggtgacatgtatgaagtcggggcagagagtggccgctactactgtctgaacg

SEQ ID NO: 578655 - DNA, 120 bp, Artificial Sequence
  ENSG00000171720_6 (sequence is synthesized)
tgcccctgcgggatggcattgatgaccagagttacaagcaccttttccagccggttatcaaccaggtagtggacttctaccaacccacgtgcattgtgctccagtgtggagctgactctc

SEQ ID NO: 578656 - DNA, 120 bp, Artificial Sequence
  ENSG00000171720_7 (sequence is synthesized)
tgggctgtgatcgattgggctgctttaacctcagcatccgagggcatggggaatgcgttgaatatgtcaagagcttcaatatccctctactcgtgctgggtggtggtggttatactgtcc

SEQ ID NO: 578657 - DNA, 120 bp, Artificial Sequence
  ENSG00000171720_8 (sequence is synthesized)
ctgctggacatatgagacatcgctgctggtagaagaggccattagtgaggagcttccctatagtgaatacttcgagtactttgccccagacttcacacttcatccagatgtcagcacccg

SEQ ID NO: 578658 - DNA, 120 bp, Artificial Sequence
  ENSG00000171720_9 (sequence is synthesized)
catcgagaatcagaactcacgccagtatctggaccagatccgccagacaatctttgaaaacctgaagatgctgaaccatgcacctagtgtccagattcatgacgtgcctgcagacctcct

SEQ ID NO: 578659 - DNA, 120 bp, Artificial Sequence
  ENSG00000171720_10 (sequence is synthesized)
gacctatgacaggactgatgaggctgatgcagaggagaggggtcctgaggagaactatagcaggccagaggcacccaatgagttctatgatggagaccatgacaatgacaaggaaagcga

SEQ ID NO: 578660 - DNA, 120 bp, Artificial Sequence
  ENSG00000171720_11 (sequence is synthesized)
tgtggagatttaagagtggcttgggatgctgtgtcccaaggaatttcttttcacctcttggttgggctggagggaaaaggagtggctcctagagtcctgggggtcaccccagggcttttg

SEQ ID NO: 578661 - DNA, 120 bp, Artificial Sequence
  ENSG00000171720_12 (sequence is synthesized)
ctgactctgggaaagagtctggagaccacatttggttctcgaaccatctacctgcttttcctctctctcccaaggcctgacaatggtacctattagggatgagatacagacaaggatagc

SEQ ID NO: 578662 - DNA, 120 bp, Artificial Sequence
  ENSG00000171720_13 (sequence is synthesized)
tatctgggacattattggcagtgggccctggaggccagtccctagccccccttgccccttatttcttccctgcttccctcgaacccagagatttttgagggatgaacgggtagacaagga

SEQ ID NO: 578663 - DNA, 120 bp, Artificial Sequence
  ENSG00000171720_14 (sequence is synthesized)
ctgagattgcctctgacttcctcctcccctgggttctgacttcttcctccccttgcttccagggaagatgaagagagagagatttggaaggggctctggctccctaacacctgaatccca

SEQ ID NO: 578664 - DNA, 120 bp, Artificial Sequence
  ENSG00000171720_15 (sequence is synthesized)
gatgatgggaagtatgttttcaagtgtggggaggatatgaaaatgttctgttctcacttttggctttatgtccattttaccactgtttttatccaataaactaagtcggtattttttgta

SEQ ID NO: 578665 - DNA, 120 bp, Artificial Sequence
  ENSG00000171720_16 (sequence is synthesized)
gctcccagcttgaggggtgggcaggaaggactgtgacttaggtgtttgtctttcagatctgtgatattgccattaactgggctggtggtctgcaccatgccaagaagtttgaggtgagtg

SEQ ID NO: 578666 - DNA, 120 bp, Artificial Sequence
  ENSG00000171720_17 (sequence is synthesized)
aggaggtgatgggaaagacagtggccatcctagggtaggtgtttaggatgatggtggggggcagctgggaggggaattgctcttctctttatgagaccactgtcttgccataggcctctg

SEQ ID NO: 578667 - DNA, 120 bp, Artificial Sequence
  ENSG00000171720_18 (sequence is synthesized)
gagaactatagcaggtctgggagcagggacttcagcctactttcaataggcttgctggggaggtttaaaagggaaaaagtaaatgggaaggtattagtttaattgcctctggcttacctc

SEQ ID NO: 578668 - DNA, 120 bp, Artificial Sequence
  ENSG00000171720_19 (sequence is synthesized)
ctttagtctgctacaatttcctcactcttttctttgttatttttaatgacaaaagtaacacgtatttattgcaaaattttaaaacagcaccaaaatatggtgttggcgttcacacaatcc

SEQ ID NO: 578669 - DNA, 120 bp, Artificial Sequence
  ENSG00000171720_20 (sequence is synthesized)
cagacctattccacaggagtaaccactgttaatagtttttattgttttggatagacctttttctatagattgcaaatatactattctgtatgtacatataaacaaacacatatacactca

SEQ ID NO: 578670 - DNA, 120 bp, Artificial Sequence
  ENSG00000171720_21 (sequence is synthesized)
ccgtagggataggtgggctggactgagtgcatgaagtgcgacccgcccctagagtatcggggagctggatagaagtcaccaggagtaccttgaaagtgcagggtgttgggggtggcgtcc

SEQ ID NO: 578671 - DNA, 120 bp, Artificial Sequence
  ENSG00000171720_22 (sequence is synthesized)
ggtgtgttcctcctctgcattttagagtgtggatagggccttggcctcaggaattagggttaggggagcggatatcactgtatcagggtgtgaggtttaccctcagttcccactcctctt

SEQ ID NO: 578672 - DNA, 120 bp, Artificial Sequence
  ENSG00000171720_23 (sequence is synthesized)
ttaccacctttctttacctccaaggagctagggctccagggtggaacgatgctgccgtctttgtaaatgtgtatgtgcgtgtggaacagaggcgatattttagatattcctttttcagcc

SEQ ID NO: 578673 - DNA, 120 bp, Artificial Sequence
  ENSG00000171720_24 (sequence is synthesized)
tggaatacctctacatggttctgcttaatcgctatccagtttttcatctaccagacatacacatgctgtcttcccagcttggaatttatggctgtgatatgggatagtaacagttaagcc

SEQ ID NO: 578674 - DNA, 120 bp, Artificial Sequence
  ENSG00000171720_25 (sequence is synthesized)
gtgctttattttaaaatttttattgagacacagcatataaagtatacccaaatcttaagggtataacataatgaatttcactatcaagataaagatttagaacatttatagttttcttgt

SEQ ID NO: 578675 - DNA, 120 bp, Artificial Sequence
  ENSG00000171720_26 (sequence is synthesized)
gctcctttcaggcaatacctaaaggtatttaccttgtcttttgataacctcctccacatcttcctctggttccttttaacagggaatgcgttgaatatgtcaagagcttcaatatccctc

SEQ ID NO: 578676 - DNA, 120 bp, Artificial Sequence
  ENSG00000171720_27 (sequence is synthesized)
tatctgtgatgttctgatcagttctgatcactgcactttcctggggttttgctttttgcagtgtggagctgactctctgggctgtgatcgattgggctgctttaacctcagcatccgagg

SEQ ID NO: 578677 - DNA, 120 bp, Artificial Sequence
  ENSG00000171720_28 (sequence is synthesized)
ggtggaaaggaaaagaagtggtcttcagggggctcatttgtaataacttacctggttaatcggagtctctctactgacttaaggattgtgggatgaggggaatgctatgtttggcttcat

SEQ ID NO: 578678 - DNA, 120 bp, Artificial Sequence
  ENSG00000171720_29 (sequence is synthesized)
atagtctccaggactgggttcagtatgggtggtctgagcctgtggagtggggctgaccctgcctgggttcatcttgtgtctccatcccgaggtcttcaagccataccaggcctcccaaca

SEQ ID NO: 578679 - DNA, 120 bp, Artificial Sequence
  ENSG00000171720_30 (sequence is synthesized)
taggcctctggcttctgctatgtcaacgacattgtgattggcatcctggagctgctcaagtaagtagcccaggaggagatgggggcagttacgggattcttggctgaggaggtctctcag

SEQ ID NO: 578680 - DNA, 120 bp, Artificial Sequence
  ENSG00000171720_31 (sequence is synthesized)
tctcaaccctgaccttgacctccctcctccctgattagcttctcccaagttcttgatgctttattcaggctgcctcttccactgctgcagattccctactgcctgctcacatttcagcct

SEQ ID NO: 578681 - DNA, 120 bp, Artificial Sequence
  ENSG00000171720_32 (sequence is synthesized)
gcatatccctctcctgtccctgcctctagcctctaggctggagcccccagttgcctttagggaactggtgacattaagtttcaggtgaccagggcagaagcagactcttcacaattcgag

SEQ ID NO: 578682 - DNA, 120 bp, Artificial Sequence
  ENSG00000171720_33 (sequence is synthesized)
acccggtgtttgagaggagtgggttggggggttcacttctagctcagaccctggctttggcttccctctaggtaccaccctcgggtgctctacattgacattgacatccaccatggtgac

SEQ ID NO: 578683 - DNA, 120 bp, Artificial Sequence
  ENSG00000171720_34 (sequence is synthesized)
attgtctgctgttgggccagttgtccttaaggatgaatggccttcagagggaccatgaatctctggaaattgtatgcaacatatcatgtgtatgtgcatttttctgggaaaagtcattgg

SEQ ID NO: 578684 - DNA, 120 bp, Artificial Sequence
  ENSG00000171720_35 (sequence is synthesized)
ttcttttgggtggcccctttcctgggctacatgctcgctcaaccccctttttccttttgttccctgtctccccatccccttggggtgccaggtgcccatctttggccctctcccaggtta

SEQ ID NO: 578685 - DNA, 120 bp, Artificial Sequence
  ENSG00000171722_0 (sequence is synthesized)
ggacaaaccagccagcctctccagagcaggcgtgtgatctctgtacccccgcagtggtcagaatatggagaacttctcactcctcagcatctctggacctccaatctcttcctccgccct

SEQ ID NO: 578686 - DNA, 120 bp, Artificial Sequence
  ENSG00000171722_1 (sequence is synthesized)
gagtgcttttcccgacattatgttctctcgtgccaccagcctgccagacattgcaaagacagcagtacccactgaggcatccagcccagctcaggccctgccaccccagtaccaaagcat

SEQ ID NO: 578687 - DNA, 120 bp, Artificial Sequence
  ENSG00000171722_2 (sequence is synthesized)
cattgtcaggcaagggatacagaacacagcgctctcaccagactgcagcttgggggatacccagcacggagagaagctgaggcggaactgcactatctaccggccctggttctcccccta

SEQ ID NO: 578688 - DNA, 120 bp, Artificial Sequence
  ENSG00000171722_3 (sequence is synthesized)
cagctacttcgtgtgtgcagacaaagagagccagctggaggcctatgacttcccagaggtgcagcaggatgagggcaagtgggacaactgcctttctgaggacatggctgagaacatctg

SEQ ID NO: 578689 - DNA, 120 bp, Artificial Sequence
  ENSG00000171722_4 (sequence is synthesized)
ttcgtcctcttcctccccagagaacacttgccctcgagaagccaccaagaaatccaggcatggcctggactccatcacatcccaggacatcctaatggcttccaggtggcacccagcaca

SEQ ID NO: 578690 - DNA, 120 bp, Artificial Sequence
  ENSG00000171722_5 (sequence is synthesized)
gcagaatggctacaagtgcgtggcctgctgccgcatgtaccccaccctggacttcctcaagagccacatcaagaggggcttcagggagggcttcagctgcaaggtgtactaccgcaagct

SEQ ID NO: 578691 - DNA, 120 bp, Artificial Sequence
  ENSG00000171722_6 (sequence is synthesized)
caaagccctctggagcaaggagcagaaggcccggctgggagacaggctctcctccggcagctgccaggccttcaatagtcctgctgaacaccttaggcaaattggcggtgaagcctactt

SEQ ID NO: 578692 - DNA, 120 bp, Artificial Sequence
  ENSG00000171722_7 (sequence is synthesized)
tgccaataaagttagtcacagccttctgtccagtctgaggtcaccccgcacagcctgctgtccttcccagaacccggctctcatcacctttggctaatggttgcctagcaacaccaggca

SEQ ID NO: 578693 - DNA, 120 bp, Artificial Sequence
  ENSG00000171722_8 (sequence is synthesized)
cacaccctcccctttctctcttttaaaaataaagacaatacttgaagtttgggaaaatcatctaagatagaggttctcaaaggtgcccagctggcagtaccagcaacccctgggaactct

SEQ ID NO: 578694 - DNA, 120 bp, Artificial Sequence
  ENSG00000171722_9 (sequence is synthesized)
caggccctcctcagacctactgaatcagaaactatgggtctggggctggcggtctatgtcctaaccagccctccaggtgactctgatgcagctcagctgtgagaagcactgctctaggat

SEQ ID NO: 578695 - DNA, 120 bp, Artificial Sequence
  ENSG00000171722_10 (sequence is synthesized)
tctggcctctgcttggtccctatgtggtcagtccttgccccaccctgggaagaaggggctggatgccctttcctatttgcatggggaagaatctctgcagttttaaaggcttctttgacg

SEQ ID NO: 578696 - DNA, 120 bp, Artificial Sequence
  ENSG00000171722_11 (sequence is synthesized)
gtagatcttctgaggggggaatgtggaggaaaatatgcctctgagtataaggcaggtaagaggcagatggggctgagctcacccgggactgagctctcaggcactaccatcattcactta

SEQ ID NO: 578697 - DNA, 120 bp, Artificial Sequence
  ENSG00000171722_12 (sequence is synthesized)
gaacagccatccagtgctggggcagaatagaatcagttttgacccaggagacgtcttttcttggctgctttgagccaggtgaaaataggcaggtaaacatgggaacctattgcttcctgt

SEQ ID NO: 578698 - DNA, 120 bp, Artificial Sequence
  ENSG00000171722_13 (sequence is synthesized)
taccaagtaatgtgtccagtgggcagccctgactctgcctccatttctgagtgaacctcctggtccatctgacccagaaagatggataagcatcagggatgcagcagagacatctatctt

SEQ ID NO: 578699 - DNA, 120 bp, Artificial Sequence
  ENSG00000171723_0 (sequence is synthesized)
agcagcgctcatggcgaagaggcttaaggccacaaaaccgtgggacagcaggaggaagagaagccaggtatctccactccagctgccctgcctcagactcctcagtttcgcacgtgagga

SEQ ID NO: 578700 - DNA, 120 bp, Artificial Sequence
  ENSG00000171723_1 (sequence is synthesized)
tcgtcttgcaggcactgactggagatggaatcctaaagcataggtgaagcggaaatcctccttcagggagagcccactgaggaagccagcggctagcacgaggcaggacaggatacctcc

SEQ ID NO: 578701 - DNA, 120 bp, Artificial Sequence
  ENSG00000171723_2 (sequence is synthesized)
ctcttcgcccacggcggcctctctgtcatagtagccaccgttctgccactcatgcagctttctaagacacctctcggttccccagcgctttcagtggggcggccggccattcccgagggt

SEQ ID NO: 578702 - DNA, 120 bp, Artificial Sequence
  ENSG00000171723_3 (sequence is synthesized)
tgcaagaggaggcccggggtgctgagccagcctcgctgcccccgcgtagaaagccggcccgccggcgagagccagcctaaggcgcggacaaccaacgaggtgtcaggctcggcaggggat

SEQ ID NO: 578703 - DNA, 120 bp, Artificial Sequence
  ENSG00000171723_4 (sequence is synthesized)
tgcttctgtctggggcccggccgaggttgcgttcgtgcctcgcgcgcacacgctccgcgttcactcagccaatccggtgctactcgcgcgcccaggagcgatccgcggtcctactcaggc

SEQ ID NO: 578704 - DNA, 120 bp, Artificial Sequence
  ENSG00000171723_5 (sequence is synthesized)
tgggccggctccttcccgctcccaatactcagcacccgagctctcactcctcccctcactctccacgagttccacgcctaggggtgtagctccgcccttgtccccgagtccgcccccgca

SEQ ID NO: 578705 - DNA, 120 bp, Artificial Sequence
  ENSG00000171723_6 (sequence is synthesized)
acctccagagcgtgtgctatcctttcctctcagtcctgccatctagctgccttgggtctcgcgctccgcagagcgttccgacactctccggcctcgttctgccgcctccgcgcgctctcc

SEQ ID NO: 578706 - DNA, 120 bp, Artificial Sequence
  ENSG00000171723_7 (sequence is synthesized)
ccgtgcggccaccgcgccccccaagcttgcctccttcttgccggacttggggccgcgcgccctgactccttcccctcccgcggacccgcgcactcccggcgcggcctctcccccacgcag

SEQ ID NO: 578707 - DNA, 120 bp, Artificial Sequence
  ENSG00000171723_8 (sequence is synthesized)
gccaccgtgcactctgtggcctccccctccttccccgctctcctcgcgcttctctggctccctagctgtcgcgctctcctcggcgagcgcgctcccggcccgcgcgctccgggctccggt

SEQ ID NO: 578708 - DNA, 120 bp, Artificial Sequence
  ENSG00000171723_9 (sequence is synthesized)
ttctcccggctcctgtcagtgcggtgactgcgctgggaaacatggcgaccgagggaatgatccttactaaccacgaccatcaaatccgtgtcggagtccttacagtgagtgatagttgct

SEQ ID NO: 578709 - DNA, 120 bp, Artificial Sequence
  ENSG00000171723_10 (sequence is synthesized)
tcaggaatcttgcagaagaccgcagtgggataaatctcaaagatctcgtacaagatccttctttgttgggtgggactatatcagcatacaagatagtaccagatgaaatagaagaaatca

SEQ ID NO: 578710 - DNA, 120 bp, Artificial Sequence
  ENSG00000171723_11 (sequence is synthesized)
aggaaaccctgatagattggtgtgatgaaaaggaacttaatttgatattaacaactggaggaacaggatttgcaccacgagatgtcactccagaggccacaaaagaagtaatagaacggg

SEQ ID NO: 578711 - DNA, 120 bp, Artificial Sequence
  ENSG00000171723_12 (sequence is synthesized)
aagcaccagggatggccctggcaatgctgatgggatcacttaatgttacacctctgggcatgctctctaggcctgtatgtggaatcagagggaaaacgctcataattaacctgccaggta

SEQ ID NO: 578712 - DNA, 120 bp, Artificial Sequence
  ENSG00000171723_13 (sequence is synthesized)
gcaagaaaggatctcaggaatgctttcaattcatactgccagctctacctcatgccattgaccttttacgtgatgccattgtaaaagtaaaggaggtgcatgatgaacttgaagatttgc

SEQ ID NO: 578713 - DNA, 120 bp, Artificial Sequence
  ENSG00000171723_14 (sequence is synthesized)
cttccccacctccccctctttcccctcctcctactaccagcccccataaacagacagaagacaaaggagttcaatgtgaggaagaggaagaagagaagaaagacagtggtgttgcttcaa

SEQ ID NO: 578714 - DNA, 120 bp, Artificial Sequence
  ENSG00000171723_15 (sequence is synthesized)
cagaagatagttcctcatcacatataactgcagcagccattgctgccaagaagcatccattctacaccagtcctgctgttgtcatggcacacggtgaacagcccatccctggtctcatca

SEQ ID NO: 578715 - DNA, 120 bp, Artificial Sequence
  ENSG00000171723_16 (sequence is synthesized)
attattcccatcattcaacagatgaacggattccagactccatcatttctcgtggtgttcaggtgctcccacgagacacagcctccctcagcactactccttcagaatcgcctcgtgctc

SEQ ID NO: 578716 - DNA, 120 bp, Artificial Sequence
  ENSG00000171723_17 (sequence is synthesized)
tgtcgatatcaccaaggtggctagaagacatcgcatgtctccttttcctctgacatctatggacaaagcctttatcacagtcctggagatgactccggtgcttgggacagaaatcatcaa

SEQ ID NO: 578717 - DNA, 120 bp, Artificial Sequence
  ENSG00000171723_18 (sequence is synthesized)
ttaccgagatggaatggggcgagtccttgctcaagatgtatatgcaaaagacaatttaccccccttcccagcatcagtaaaagatggctatgctgtccgagctgctgatggcccaggaga

SEQ ID NO: 578718 - DNA, 120 bp, Artificial Sequence
  ENSG00000171723_19 (sequence is synthesized)
tcgtttcatcattggggaatcccaagctggtgaacagccaactcagacagtaatgccaggacaagtcatgcgggttacaacaggtgctccaataccctgcggtgctgatgcagtagtaca

SEQ ID NO: 578719 - DNA, 120 bp, Artificial Sequence
  ENSG00000171723_20 (sequence is synthesized)
agtggaagataccgaacttatcagggaatcagatgatggcactgaagaacttgaagtgcgaattctggtgcaagctcggccaggccaagatatcagacccatcggccatgacattaaaag

SEQ ID NO: 578720 - DNA, 120 bp, Artificial Sequence
  ENSG00000171723_21 (sequence is synthesized)
aggggaatgtgttttggccaaaggaacccacatgggcccctcagagattggtcttctggcaactgtaggtgtcacagaggttgaagttaataagtttccagtggttgcagtcatgtcaac

SEQ ID NO: 578721 - DNA, 120 bp, Artificial Sequence
  ENSG00000171723_22 (sequence is synthesized)
agggaatgagctgctaaatcctgaagatgacctcttaccagggaagattcgagacagcaatcgttcaactcttctagcaacaattcaggaacatggttaccccacgatcaacttgggtat

SEQ ID NO: 578722 - DNA, 120 bp, Artificial Sequence
  ENSG00000171723_23 (sequence is synthesized)
tgtaggagacaacccagatgacttactcaatgccttgaatgagggtatcagtcgtgctgatgtcatcatcacatcagggggtgtatccatgggggaaaaggactatctcaagcaggtgct

SEQ ID NO: 578723 - DNA, 120 bp, Artificial Sequence
  ENSG00000171723_24 (sequence is synthesized)
ggacattgatcttcatgctcagatccattttggcagggtttttatgaaaccaggcttgccaacaacatttgcaactttggatattgatggtgtaagaaaaataatctttgcactacctgg

SEQ ID NO: 578724 - DNA, 120 bp, Artificial Sequence
  ENSG00000171723_25 (sequence is synthesized)
gaatcctgtatcggctgtggtcacctgcaatctctttgttgtgcctgcactgaggaaaatgcagggcatcttggatcctcggccaaccatcatcaaagcaaggttatcatgtgatgtaaa

SEQ ID NO: 578725 - DNA, 120 bp, Artificial Sequence
  ENSG00000171723_26 (sequence is synthesized)
acttgatcctcgtccagaataccatcggtgtatactaacttggcatcaccaagaaccactaccttgggcacagagtacaggtaatcaaatgagcagccgtctgatgagcatgcgcagtgc

SEQ ID NO: 578726 - DNA, 120 bp, Artificial Sequence
  ENSG00000171723_27 (sequence is synthesized)
caatggattgttgatgctacctccaaagacagaacagtacgtggagctccacaaaggcgaggtggtggatgtcatggtcattggacggctatgatggtcaccagcaggagaaagctttga

SEQ ID NO: 578727 - DNA, 120 bp, Artificial Sequence
  ENSG00000171723_28 (sequence is synthesized)
tgcatgtccacatatcattgactgtatcctgtaatatgcaacggcacagctagttttcccgatttggataaaagttgatctgtatagtcaacatcttgaactatatttcaaatgaattta

SEQ ID NO: 578728 - DNA, 120 bp, Artificial Sequence
  ENSG00000171723_29 (sequence is synthesized)
aatatcttttaaagaaaaaaacacctaaaaataaatcttaacagaaaattctgttctgattatatcaaggcaaatttttcctttcttgcaaattgctttgtgtgttcaatgctaggtctg

SEQ ID NO: 578729 - DNA, 120 bp, Artificial Sequence
  ENSG00000171723_30 (sequence is synthesized)
atagcgatagcttttagtagacagcggtaggtgcctgcagaacttgtgtttttctcatctttaaaatacaactacttatgctcttaaatcaaggctgtctgcttatttatactagcgtag

SEQ ID NO: 578730 - DNA, 120 bp, Artificial Sequence
  ENSG00000171723_31 (sequence is synthesized)
gcaacacttggatttcccttcttagtatgcttcataactgctttacagagagcttttgcttgttctttctcatgtatctcgtgtttatgtgcacagtgccaaaagaagactgactgggtg

SEQ ID NO: 578731 - DNA, 120 bp, Artificial Sequence
  ENSG00000171723_32 (sequence is synthesized)
gaggctctgccttgcctcaagaaccatcccctgcagagcatccagggaggtttctcgccccaatagcctcacggcacagtactcttgggcagtaactggacaccttttatttgaagaaac

SEQ ID NO: 578732 - DNA, 120 bp, Artificial Sequence
  ENSG00000171723_33 (sequence is synthesized)
aaactgaagaaaaaatgcttccttaagtgctgacagcctttttaaccaatacatttaaaattgtacagaacaaaaaaataaaatcaaagactgatcttgtacagatattagtgttaccag

SEQ ID NO: 578733 - DNA, 120 bp, Artificial Sequence
  ENSG00000171723_34 (sequence is synthesized)
cattcatgtggaaatcaagagcaaagacaaaataatgttaaacaattctgtaccataacattttctgtaatgatactgaaacttaatgaataaaaaaattccttgatcattatttaaaaa

SEQ ID NO: 578734 - DNA, 120 bp, Artificial Sequence
  ENSG00000171723_35 (sequence is synthesized)
ctattatatttgaccattgccctttcttttcttcatttttttccaaataagattcatgtaacattaatgcacagttttcctgaaaaagaaagattattaaccattattacagttatcatc

SEQ ID NO: 578735 - DNA, 120 bp, Artificial Sequence
  ENSG00000171723_36 (sequence is synthesized)
attctttttttttcttatttctactcaataagaaaaaggctaagggttcagccttaacagtatacagagtaaaatccatgaaactgccttttcattaaaaaaaggaaaaaaaaaaaaaaa

SEQ ID NO: 578736 - DNA, 120 bp, Artificial Sequence
  ENSG00000171723_37 (sequence is synthesized)
ataaatctcaaagatctcgtacaagatccttctttgggataaattccaaaactgccagtgaatggctgaaaccacagatactactgaacccaagtactgcgataccacaatagctgatct

SEQ ID NO: 578737 - DNA, 120 bp, Artificial Sequence
  ENSG00000171723_38 (sequence is synthesized)
ttgccttggattcctaggacatctgactttagtactaaaacaggaatattcctaggcaaaccaggatagttagacatcctccaacatctcattgtctcctttcattatagtggcttgtta

SEQ ID NO: 578738 - DNA, 120 bp, Artificial Sequence
  ENSG00000171723_39 (sequence is synthesized)
gaataaaaagccctgtgaaatcgccagtagccactacttcagcatgtacaaggtcctttctccataataagacttaatgctcctgttaggcagagacccttttgattcccacttcataca

SEQ ID NO: 578739 - DNA, 79 bp, Artificial Sequence
  ENSG00000171723_40 (sequence is synthesized)
gcgctgggaaacatggcgaccgagggaatgatccttactaaccacgaccatcaaatccgtgtcggagtccttacagtag

SEQ ID NO: 578740 - DNA, 72 bp, Artificial Sequence
  ENSG00000171723_41 (sequence is synthesized)
aggttcaagtgattctcttgcctcaatctcctgagtagctgggactacaagcgcgctccaccatgcttggcc

SEQ ID NO: 578741 - DNA, 83 bp, Artificial Sequence
  ENSG00000171723_42 (sequence is synthesized)
cacccagctggtttttttatataccagaaagaatagagagctatttataagagaaaccctgatagattggtgtgatgaaaagg

SEQ ID NO: 578742 - DNA, 120 bp, Artificial Sequence
  ENSG00000171723_43 (sequence is synthesized)
agtatctgtgcttgcctggacgagactcaggtgttaatcagatgaaactgctcctcctcgggttgtccctcgcgggccgggcgtcccctcagccacccatggggcacccttcgcctccct

SEQ ID NO: 578743 - DNA, 120 bp, Artificial Sequence
  ENSG00000171723_44 (sequence is synthesized)
cgggggatgggggatcggcttgcgtccggacctcggaaagtgtctgccttctgcctttccgcgcaaaaggccctctgtctgcctcgtcgtttccttagcgaggacgggctgcagcctgct

SEQ ID NO: 578744 - DNA, 120 bp, Artificial Sequence
  ENSG00000171724_0 (sequence is synthesized)
attgcacagccgagcatcccacattcaacaggaggaacccgcgggagaggagccccactcccccagcgccgcagccaccgcagccaccgcagcccgtgcgccccgcgccctcgagcgcca

SEQ ID NO: 578745 - DNA, 120 bp, Artificial Sequence
  ENSG00000171724_1 (sequence is synthesized)
tggccaaggaaggcgtggagaaggcggaggagacggagcaaatgatcgagaaggaggcaggcaaggagccggcggagggcggcggcggcgacggctcgcaccgcctcggggacgcccagg

SEQ ID NO: 578746 - DNA, 120 bp, Artificial Sequence
  ENSG00000171724_2 (sequence is synthesized)
agatgcgcgcggtggtgctggctggcttcggggggctcaacaagctgcggctcttcaggaaggccatgcccgagcctcaggacggcgagctcaagatccgcgtcaaagcctgtggattaa

SEQ ID NO: 578747 - DNA, 120 bp, Artificial Sequence
  ENSG00000171724_3 (sequence is synthesized)
acttcattgacttgatggtgcgacaagggaatattgacaaccctcccaagactcccctggtgccaggatttgagtgttctgggattgttgaagctctgggggacagcgtgaaaggatatg

SEQ ID NO: 578748 - DNA, 120 bp, Artificial Sequence
  ENSG00000171724_4 (sequence is synthesized)
agattggagaccgtgtcatggcatttgtcaattacaatgcctgggcagaggtggtctgcacaccagtggagtttgtctacaagatcccggatgacatgagcttctccgaggctgctgcat

SEQ ID NO: 578749 - DNA, 120 bp, Artificial Sequence
  ENSG00000171724_5 (sequence is synthesized)
tccccatgaacttcgtcacagcctatgtgatgctgtttgaagttgccaacctccgggaagggatgtctgtgctcgtgcactcagctggtgggggcgtgggtcaagctgtggctcagctgt

SEQ ID NO: 578750 - DNA, 120 bp, Artificial Sequence
  ENSG00000171724_6 (sequence is synthesized)
gttccactgtccccaacgtgactgtctttggaacagcctctactttcaagcatgaagcaatcaaagactctgtgacccacctctttgacagaaatgcagactacgtgcaagaagttaaaa

SEQ ID NO: 578751 - DNA, 120 bp, Artificial Sequence
  ENSG00000171724_7 (sequence is synthesized)
gaatctctgctgaaggtgtggacatcgttttggattgcctctgtggggacaacactggaaaaggtctcagtcttctcaaacccctgggaacctacattttatatggctcatccaacatgg

SEQ ID NO: 578752 - DNA, 120 bp, Artificial Sequence
  ENSG00000171724_8 (sequence is synthesized)
taactggagagaccaagagcttcttcagctttgcaaaatcatggtggcaggtggagaaggtgaaccccatcaagctgtatgaggagaacaaagtcatcgcggggttttcccttttaaatc

SEQ ID NO: 578753 - DNA, 120 bp, Artificial Sequence
  ENSG00000171724_9 (sequence is synthesized)
tgctcttcaaacaaggccgggcgggcctcattcggggagtggtggaaaaactcatagggctctacaaccagaagaagatcaagcctgtggtggactccttgtgggctctggaggaggtga

SEQ ID NO: 578754 - DNA, 120 bp, Artificial Sequence
  ENSG00000171724_10 (sequence is synthesized)
aggaggccatgcagcggattcacgaccgagggaacattggcaagttaattctggatgtagaaaagaccccaactccactgatggccaatgacagcacagagaccagtgaagcaggggaag

SEQ ID NO: 578755 - DNA, 120 bp, Artificial Sequence
  ENSG00000171724_11 (sequence is synthesized)
aggaggaggaccacgagggagacagcgagaacaaggagcggatgccctttatccagtaactgaggacccaggtgggagaatgtgaaggatggtttggaagatgaggacccggctgagaaa

SEQ ID NO: 578756 - DNA, 120 bp, Artificial Sequence
  ENSG00000171724_12 (sequence is synthesized)
actcttctgtgccccagtgaacaaatgctgtagtccagtgcgtgtcgtgtttgtctgcagtcagctgagctaaaaagctgttgatcactgttgttttttgaagtgccaatcccatgccat

SEQ ID NO: 578757 - DNA, 120 bp, Artificial Sequence
  ENSG00000171724_13 (sequence is synthesized)
gcagtattatgtccctctcctatctgtgtattacacattcccctctcccctgtatcaaaaccatccatctgtgggttcttcttgacagttctagaacagccttgcaaattaatacaagtc

SEQ ID NO: 578758 - DNA, 120 bp, Artificial Sequence
  ENSG00000171724_14 (sequence is synthesized)
ccaggcccaatgcctaagagaccagacgtgggcaaagacaagtttggatggaaaggtgttatcacagagccctgtccagctcctagaattcctcaggccagtgacacttttttgctgctg

SEQ ID NO: 578759 - DNA, 120 bp, Artificial Sequence
  ENSG00000171724_15 (sequence is synthesized)
gagcccacaaatttagaaactctcctagtagtactttttctctctccatttaagagacaactacggtcaaaagtttgagccattctcttctaccccttcagtgtctgaccctttcactgg

SEQ ID NO: 578760 - DNA, 120 bp, Artificial Sequence
  ENSG00000171724_16 (sequence is synthesized)
ctcttatctgtaaacacagggaggcaggtatggatttttcacagtagacaatgggtcaacagcatgagtttgaggacctgctgtgaagatttctcctccaaaatacatctcatgggcagg

SEQ ID NO: 578761 - DNA, 120 bp, Artificial Sequence
  ENSG00000171724_17 (sequence is synthesized)
attcttcctgctccatatctgtttcaattttaagaaagcaccacatacaagacacattcagaagtcattcctgagcattgctggtgtttgcacacttgccacctgcattaccaattctgt

SEQ ID NO: 578762 - DNA, 120 bp, Artificial Sequence
  ENSG00000171724_18 (sequence is synthesized)
aaatttcaattcctggtggaaagtgaccactttgaccatggatttcccaaagaagagttcctttgcagaccataggtggaaaagtcaatgagcatctccttccttgccaaagcatgtccc

SEQ ID NO: 578763 - DNA, 120 bp, Artificial Sequence
  ENSG00000171724_19 (sequence is synthesized)
aacatgtaacaaactctagggatacaaaaggtttatattcagcatctgatgtcagatgtacagttcctcccctcccatatataaaccccggtgtagaatctgcagcgccctgctcttcgg

SEQ ID NO: 578764 - DNA, 120 bp, Artificial Sequence
  ENSG00000171724_20 (sequence is synthesized)
aaaccaaggaacaagccacctgctcacacaccttgttcaacttttcagctcctaaggaaccccacccccatgcaatttgactgtgcttgagaggtgaatacagttaccttcgagaaacag

SEQ ID NO: 578765 - DNA, 120 bp, Artificial Sequence
  ENSG00000171724_21 (sequence is synthesized)
agggagctcctcaccccgtccttccagtccttttggctaaaatgcttaactatcactcacaaacaaatgtggagataccaggagctcatttgattcataccccaactttgtgttctgaaa

SEQ ID NO: 578766 - DNA, 120 bp, Artificial Sequence
  ENSG00000171724_22 (sequence is synthesized)
aacatcagagggattttacattgcccagtttctccaccaacaagccttagggtggacccaaccctttccgcaagtggtaggaacgaatgcatcttagcaattacctgatttccaaagtcc

SEQ ID NO: 578767 - DNA, 120 bp, Artificial Sequence
  ENSG00000171724_23 (sequence is synthesized)
ttttgtagcaaatgtcacctcattcgtggtctttttacctatcctaagcttatgatgatgagttatgtatgccaaatacttatctgaagagtttctcctcattgtgaatgtgtatgtaaa

SEQ ID NO: 578768 - DNA, 120 bp, Artificial Sequence
  ENSG00000171724_24 (sequence is synthesized)
atatgaagacaagaaagggtgctttcatctgaggaaccaaggggtgagagtatcccaaaggaggacaccagcatcatcttttcttcgtactccaggacccaccaatattccagttctggg

SEQ ID NO: 578769 - DNA, 120 bp, Artificial Sequence
  ENSG00000171724_25 (sequence is synthesized)
tcatttagagagataatggggcgtttattcccctattacctttgctaagtgctatattattggctgtttctcccgtaaccatgctgaaaagggggtcttagggagaactgtcatccaagt

SEQ ID NO: 578770 - DNA, 120 bp, Artificial Sequence
  ENSG00000171724_26 (sequence is synthesized)
ggcattcctagtaagttgggtagaaatgacattttccagagctgaaggagtgaagagcccttggccatactagggctctccttcccccggggagtgggaactcagccacattcagaattc

SEQ ID NO: 578771 - DNA, 120 bp, Artificial Sequence
  ENSG00000171724_27 (sequence is synthesized)
acatcgcctttgttatgtccagaggagaggcataaaaaggcactctcccccaccacccctaccaaatctgggtttggtttggttttatttaactagcaaagttaatccagtaatcgcaaa

SEQ ID NO: 578772 - DNA, 120 bp, Artificial Sequence
  ENSG00000171724_28 (sequence is synthesized)
ttactccagatggttaaagaaaaccctttcagaatacagaacgagaaaactagagtttgaccaataagaccaatttctgccatgaagaaccgggggacgcaagttaattgtttaacgtac

SEQ ID NO: 578773 - DNA, 120 bp, Artificial Sequence
  ENSG00000171724_29 (sequence is synthesized)
tctcattttaagcaccttctttcctgtctcttgattgttttttctgaaggaagtgtaaagaatgtctcagtctgccttaaaggaactgtgaaggcttctctgtaatttaagcttgataga

SEQ ID NO: 578774 - DNA, 120 bp, Artificial Sequence
  ENSG00000171724_30 (sequence is synthesized)
agtgaactgaaacattgtctaatgtctttgtggctttagagcttttgttatattgtgcctataaagcaaattatgtttacataaaaatataaataaagtattcagcatagcaaaacctca

SEQ ID NO: 578775 - DNA, 120 bp, Artificial Sequence
  ENSG00000171724_31 (sequence is synthesized)
tctgaaaagtcctagaaaaaaaatttttcaatgtattcaagaagggcttagaaattaaaggtcgactggaattatacaggaatttcccactcagctatcttaatgatgttgcatcttaaa

SEQ ID NO: 578776 - DNA, 120 bp, Artificial Sequence
  ENSG00000171724_32 (sequence is synthesized)
atcgctgcagtttgtgcctcactatttgtcaaacatgctattttctttcacaccataacgatgatgatactaatagaagaagttaacatttacagagcaatctgactccaaatttggagc

SEQ ID NO: 578777 - DNA, 120 bp, Artificial Sequence
  ENSG00000171729_0 (sequence is synthesized)
aggccgcgcttcctgcgtccccaacccggtccctgagagggcagtgcgccctctccaccactgcgttccctcggctaagaatcccccgaaccccagccccgcgatcgcggcgcccaccga

SEQ ID NO: 578778 - DNA, 120 bp, Artificial Sequence
  ENSG00000171729_1 (sequence is synthesized)
ggaggccgcccgggtggggcgcgggggtcgcgaagcccgcagtcccggaccgcccagccgagacggagccggacccgccgcctcccgggtggatctttaactcaagactagcatgaagag

SEQ ID NO: 578779 - DNA, 120 bp, Artificial Sequence
  ENSG00000171729_2 (sequence is synthesized)
ttgccttctggcctgccctgagtctcctcaaataacaacaggcccttccaccgcagccatccgcacgggaggcctcgcgattgctcggaaccatcccgcaggagttcagctgatattttc

SEQ ID NO: 578780 - DNA, 120 bp, Artificial Sequence
  ENSG00000171729_3 (sequence is synthesized)
tagtgtggggcgagagattttgtggagcgcatttaaggggtttttgttgtgactgctgccttgtatacatttattttctttcttggaactgggcctcgccctcctcccactgacatgatg

SEQ ID NO: 578781 - DNA, 120 bp, Artificial Sequence
  ENSG00000171729_4 (sequence is synthesized)
gcccagtccaaggccaatggctcgcactatgcgctgaccgccatcggcctggggatgctggtccttggggtgatcatggccatgtggaacctggtacccggcttcagcgcggccgagaag

SEQ ID NO: 578782 - DNA, 120 bp, Artificial Sequence
  ENSG00000171729_5 (sequence is synthesized)
ccaacagctcagggcagcaacaagaccgaggtgggtggcggcatcctcaagagcaagaccttctctgtggcctacgtgctggtcggggccggggtgatgctgctgctgctttctatctgc

SEQ ID NO: 578783 - DNA, 120 bp, Artificial Sequence
  ENSG00000171729_6 (sequence is synthesized)
ctgagtatcagggataagaggaagcagcggcagggcgaggacctggcccatgtccagcacccgacaggcgctgggcctcacgcccaggaggaagacagccaggaggaagaagaggaggat

SEQ ID NO: 578784 - DNA, 120 bp, Artificial Sequence
  ENSG00000171729_7 (sequence is synthesized)
gaggaggctgcctcaaggtactatgttcccagctacgaggaagtgatgaacacaaactactcagaagcaaggggagaggagcagaacccgaggttgagcatctctctcccgtcctatgag

SEQ ID NO: 578785 - DNA, 120 bp, Artificial Sequence
  ENSG00000171729_8 (sequence is synthesized)
gaggccagccctgggaacccccctgacaggcagaactctaagttggccaaacgactgaaaccgctgaaagttcgaaggattaaatctgaaaagcttcacctcaaagactttaggatcaac

SEQ ID NO: 578786 - DNA, 120 bp, Artificial Sequence
  ENSG00000171729_9 (sequence is synthesized)
ctcccagacaaaaacgtccctcctccctcgatagagcctttgactcctccaccgcagtatgatgaagtccaggagaaggcccccgacacccggccgcccgactgaatggccccacttgag

SEQ ID NO: 578787 - DNA, 120 bp, Artificial Sequence
  ENSG00000171729_10 (sequence is synthesized)
ccacgctccctcctgtctctcacacctttcacccccaagactctaacaaagccacatgagccacagttgagaagcggaggggccagctgtgcatggagccatttggatggcggcgggcgg

SEQ ID NO: 578788 - DNA, 120 bp, Artificial Sequence
  ENSG00000171729_11 (sequence is synthesized)
ggggggattctctgtatcaggagtgactttgttgccccacacagcctcctgctgcaggtgctttggaaagagatgctgccttggagctggtgaatctgtggaccacattcaagggtgtgg

SEQ ID NO: 578789 - DNA, 120 bp, Artificial Sequence
  ENSG00000171729_12 (sequence is synthesized)
cacaggcatcttcccatccttttcactccgaatcgctggcgacacattctcctttccagctaggaaagggttcctcgcggctggtttagattgtggttgtttgttttgcttctactaaga

SEQ ID NO: 578790 - DNA, 120 bp, Artificial Sequence
  ENSG00000171729_13 (sequence is synthesized)
ctgttttgtttcaaaaaggaaacaagttttgtgtttgctgtctacgctggagtcctgaactgtgggtagaaaacacgacctggctttgtagaaaggacacagggctgttttatgaactaa

SEQ ID NO: 578791 - DNA, 120 bp, Artificial Sequence
  ENSG00000171729_14 (sequence is synthesized)
gcggtgaggctcaggtggcggctctcgcagagcccctgatgctgttgttctttgagggcttaaggcctgatgaacgtaggcacgtgatgcataatagtcttcaatggtacacttaactag

SEQ ID NO: 578792 - DNA, 84 bp, Artificial Sequence
  ENSG00000171729_15 (sequence is synthesized)
tctcttctgtgtaactgtaggaaatgttctttttgaaatgccatgcaatggagctttttgtaataaaatattttatatgtagta

SEQ ID NO: 578793 - DNA, 120 bp, Artificial Sequence
  ENSG00000171729_16 (sequence is synthesized)
aaagggctggacgctcacccaagaaggggaccccggcctgacctctctcggaattcaaaaaaatctaaggctcagagagggaatgggagctggctcttccctctgtgtttagcatccacg

SEQ ID NO: 578794 - DNA, 120 bp, Artificial Sequence
  ENSG00000171729_17 (sequence is synthesized)
ttttttggcggtctggctgaaaccagcccaccctagttcgggcgccagagcaacgcagttccgagggcagatctccaaggggcggaggcagagccgcgggtggatctttaactcaagact

SEQ ID NO: 578795 - DNA, 120 bp, Artificial Sequence
  ENSG00000171735_0 (sequence is synthesized)
ggcggcggggtggctgggccggcggcggcggcggtacgaggcgcgcgctcggggtcccggtcgcgaggaggaggaggatgtggcgcgcggaggggaaatggctgccgaaaacaagccgga

SEQ ID NO: 578796 - DNA, 120 bp, Artificial Sequence
  ENSG00000171735_1 (sequence is synthesized)
agagcgtttcccaaagtgtattctgcggaactagcacctactgtgttctcaacaccgtgccacctatagaagatgatcatgggaacagcaatagtagtcatgtaaaaatctttttaccga

SEQ ID NO: 578797 - DNA, 120 bp, Artificial Sequence
  ENSG00000171735_2 (sequence is synthesized)
aaaagctgcttgaatgtctgccgaaatgttcaagtttaccaaaagagaggcaccgctggaacactaatgaggaaattgcagcttatttaataacatttgagaaacacgaagaatggctaa

SEQ ID NO: 578798 - DNA, 120 bp, Artificial Sequence
  ENSG00000171735_3 (sequence is synthesized)
ccacctcccctaagacaagaccacagaatggctcaatgatactctacaacaggaagaaagtgaaatacaggaaagatgggtattgctggaaaaagaggaaagatgggaaaacgaccagag

SEQ ID NO: 578799 - DNA, 120 bp, Artificial Sequence
  ENSG00000171735_4 (sequence is synthesized)
aggaccacatgaaactcaaggtccagggagtggagtgcttgtacggctgctatgtccattcctccatcatccccaccttccaccggaggtgctactggctccttcagaaccccgacatcg

SEQ ID NO: 578800 - DNA, 120 bp, Artificial Sequence
  ENSG00000171735_5 (sequence is synthesized)
tcctggtgcactacctgaacgtgccggccatcgaggactgcggcaagccttgcggccccatcctctgctccatcaacaccgacaagaaggagtgggcgaaatggacgaaagaagagctca

SEQ ID NO: 578801 - DNA, 120 bp, Artificial Sequence
  ENSG00000171735_6 (sequence is synthesized)
tcgggcagctgaaacccatgttccatggcatcaagtggacctgcagcaatgggaacagcagctcaggcttctcggtggaacagctggtgcagcagatcctcgacagccaccagaccaagc

SEQ ID NO: 578802 - DNA, 120 bp, Artificial Sequence
  ENSG00000171735_7 (sequence is synthesized)
cccagccgcggacccacaactgcctctgcaccggcagcctgggagctggcggcagcgtgcatcacaagtgtaacagcgccaaacaccgcatcatctcgcccaaggtggagccacggacag

SEQ ID NO: 578803 - DNA, 120 bp, Artificial Sequence
  ENSG00000171735_8 (sequence is synthesized)
gggggtacgggagccactcggaggtgcagcacaatgacgtgtcggagggcaagcacgagcacagccacagcaagggctccagccgtgagaagaggaacggcaaggtggccaagcccgtgc

SEQ ID NO: 578804 - DNA, 120 bp, Artificial Sequence
  ENSG00000171735_9 (sequence is synthesized)
tcctgcaccagagcagcaccgaggtctcctccaccaaccaggtggaagtccccgacaccacccagagctcccctgtgtccatcagcagcgggctcaacagcgacccggacatggtggaca

SEQ ID NO: 578805 - DNA, 120 bp, Artificial Sequence
  ENSG00000171735_10 (sequence is synthesized)
gcccggtggtcacaggtgtgtccggtatggcggtggcctctgtgatggggagcttgtcccagagcgccacggtgttcatgtcagaggtcaccaatgaggccgtgtacaccatgtccccca

SEQ ID NO: 578806 - DNA, 120 bp, Artificial Sequence
  ENSG00000171735_11 (sequence is synthesized)
ccgctggccccaaccaccacctcctctcacctgacgcctctcagggcctcgtcctggccgtgagctctgatggccacaagttcgcctttcccaccacgggcagctcggagagcctgtcca

SEQ ID NO: 578807 - DNA, 120 bp, Artificial Sequence
  ENSG00000171735_12 (sequence is synthesized)
tgctgcccaccaacgtgtccgaagagctggtcctctccaccaccctcgacggtggccggaagattccagaaaccaccatgaactttgaccccgactgtttccttaataacccaaagcagg

SEQ ID NO: 578808 - DNA, 120 bp, Artificial Sequence
  ENSG00000171735_13 (sequence is synthesized)
gccagacgtacgggggtggaggcctgaaagccgagatggtcagctccaacatccggcactcgccacccggggagcggagcttcagctttaccaccgtcctcaccaaggagatcaagaccg

SEQ ID NO: 578809 - DNA, 120 bp, Artificial Sequence
  ENSG00000171735_14 (sequence is synthesized)
aggacacctccttcgagcagcagatggccaaagaagcgtactcctcctccgcggcggctgtggcagccagctccctcaccctgaccgccggctccagcctcctgccgtcgggcggcggcc

SEQ ID NO: 578810 - DNA, 120 bp, Artificial Sequence
  ENSG00000171735_15 (sequence is synthesized)
tgagtcccagcaccaccctggagcagatggacttcagcgccatcgactccaacaaggactacacgtccagcttcagccagacgggccacagcccccacatccaccagaccccctccccga

SEQ ID NO: 578811 - DNA, 120 bp, Artificial Sequence
  ENSG00000171735_16 (sequence is synthesized)
gcttcttcctgcaggacgccagcaaacccctccccgtcgagcagaacacccacagcagcctgagtgactctgggggcaccttcgtgatgcccacggtgaaaacggaggcctcgtcccaaa

SEQ ID NO: 578812 - DNA, 120 bp, Artificial Sequence
  ENSG00000171735_17 (sequence is synthesized)
ccagctcctgcagcggtcacgtggagacgcggatcgagtccacttcctccctccacctcatgcagttccaggccaacttccaggccatgacggcagaaggggaggtcaccatggagacct

SEQ ID NO: 578813 - DNA, 120 bp, Artificial Sequence
  ENSG00000171735_18 (sequence is synthesized)
cgcaggcggcggaagggagcgaggtcctgctcaagtctggggagctgcaggcttgcagctctgagcactacctgcagccggagaccaacggggtaatccgaagcgccggcggcgtcccca

SEQ ID NO: 578814 - DNA, 120 bp, Artificial Sequence
  ENSG00000171735_19 (sequence is synthesized)
tcctcccgggcaacgtggtgcagggactctaccccgtggcccagcccagcctcggcaacgcctccaacatggagctcagcctggaccactttgacatctccttcagcaaccagttctccg

SEQ ID NO: 578815 - DNA, 120 bp, Artificial Sequence
  ENSG00000171735_20 (sequence is synthesized)
acctgatcaacgacttcatctccgtggaggggggcagcagcaccatctatgggcaccagctggtgtcgggggacagcacggcgctctcacagtcagaggacggggcgcgggcccccttca

SEQ ID NO: 578816 - DNA, 120 bp, Artificial Sequence
  ENSG00000171735_21 (sequence is synthesized)
cccaggcagagatgtgcctcccctgctgtagcccccagcagggtagcctgcagctgagcagctcggagggcggggccagcaccatggcctacatgcacgtcgccgaggtggtctcggccg

SEQ ID NO: 578817 - DNA, 120 bp, Artificial Sequence
  ENSG00000171735_22 (sequence is synthesized)
cctcggcccagggcaccctaggcatgctgcagcagagcggacgggtgttcatggtgaccgactactccccagagtggtcttacccagagggaggagtgaaggtcctcatcacaggcccgt

SEQ ID NO: 578818 - DNA, 120 bp, Artificial Sequence
  ENSG00000171735_23 (sequence is synthesized)
ggcaagaagccagcaataactacagctgcctgtttgaccagatctcagtgcctgcatccctgattcagcctggggtgctgcgctgctactgcccagcccatgacactggtcttgtgaccc

SEQ ID NO: 578819 - DNA, 120 bp, Artificial Sequence
  ENSG00000171735_24 (sequence is synthesized)
tacaagttgccttcaacaaccagatcatctccaactcggtggtgtttgagtacaaagcccgggctctgcccacgctcccttcctcccagcacgactggctgtcgttggacgataaccagt

SEQ ID NO: 578820 - DNA, 120 bp, Artificial Sequence
  ENSG00000171735_25 (sequence is synthesized)
tcaggatgtccatcctggaacgactggagcagatggagaggaggatggccgagatgacggggtcccagcagcacaaacaggcgagcggaggcggcagcagtggaggcggcagcgggagcg

SEQ ID NO: 578821 - DNA, 120 bp, Artificial Sequence
  ENSG00000171735_26 (sequence is synthesized)
ggaatggagggagccaggcacagtgtgcttctgggactggggccttggggagctgctttgagagccgtgtggtcgtggtatgcgagaagatgatgagccgagcctgctgggcgaagtcca

SEQ ID NO: 578822 - DNA, 120 bp, Artificial Sequence
  ENSG00000171735_27 (sequence is synthesized)
agcacttgatccactcaaagactttccgcggaatgaccctactccacctggccgctgcccagggctatgccaccctaatccagaccctcatcaaatggcgtacaaagcacgcggatagca

SEQ ID NO: 578823 - DNA, 120 bp, Artificial Sequence
  ENSG00000171735_28 (sequence is synthesized)
ttgacctggaactggaagttgaccccttgaatgtggaccacttctcctgtactcctctgatgtgggcgtgtgccctagggcacttggaagctgccgtcgtgctgtacaagtgggaccgtc

SEQ ID NO: 578824 - DNA, 120 bp, Artificial Sequence
  ENSG00000171735_29 (sequence is synthesized)
gggccatctcgattcccgactctctaggaaggctgcctttgggaattgccaggtcacggggtcatgtgaaattagcagagtgtctggagcacctgcagagagatgagcaggctcagctgg

SEQ ID NO: 578825 - DNA, 120 bp, Artificial Sequence
  ENSG00000171735_30 (sequence is synthesized)
gacagaaccccagaatccactgtcctgcaagcgaagagcccagcacagagagctggatggcccagtggcacagcgaagccatcagctctccagaaatacccaagggagtcactgttattg

SEQ ID NO: 578826 - DNA, 120 bp, Artificial Sequence
  ENSG00000171735_31 (sequence is synthesized)
caagcaccaacccagagctgagaagacctcgttctgaaccctctaattactacagcagtgagagccacaaagattatccggctcccaaaaagcataaattgaaccctgagtacttccaga

SEQ ID NO: 578827 - DNA, 120 bp, Artificial Sequence
  ENSG00000171735_32 (sequence is synthesized)
caaggcaggagaagctgcttcccactgcactgagtctggaagagccaaatatcaggaagcaaagccctagttctaagcagtctgtccccgagacactcagccccagtgaaggagtgaggg

SEQ ID NO: 578828 - DNA, 120 bp, Artificial Sequence
  ENSG00000171735_33 (sequence is synthesized)
acttcagccgggaactctcccctcccactccagagactgcagcatttcaagcctctggatctcagcctgtaggaaagtggaattccaaagatctttacattggtgtgtctacagtacagg

SEQ ID NO: 578829 - DNA, 120 bp, Artificial Sequence
  ENSG00000171735_34 (sequence is synthesized)
ggaggcagcaccttcacaggtgcgtccacgggaaccaatgagtgtcctgatgatggctaacagagaggtggtgaatacagagctggggtcctaccgtgatagtgcagaaaatgaagaatg

SEQ ID NO: 578830 - DNA, 120 bp, Artificial Sequence
  ENSG00000171735_35 (sequence is synthesized)
cggccagcccatggatgacatacaggtgaacatgatgaccttggcagaacacattattgaagccacacctgaccgaatcaagcaggagaattttgtgcccatggagtcctcaggattgga

SEQ ID NO: 578831 - DNA, 120 bp, Artificial Sequence
  ENSG00000171735_36 (sequence is synthesized)
aagaacagaccctgccaccattagcagtacaatgagctggctggccagttatctagcggatgctgactgccttcccagtgctgcccagatccgaagtgcatataacgagcctctaacccc

SEQ ID NO: 578832 - DNA, 120 bp, Artificial Sequence
  ENSG00000171735_37 (sequence is synthesized)
ttcttctaataccagcttgagccctgttggctctcccgtcagtgaaatcgctttcgagaaacctaaccttccctccgccgcggattggtcagaattcctgagtgcatctaccagtgagaa

SEQ ID NO: 578833 - DNA, 120 bp, Artificial Sequence
  ENSG00000171735_38 (sequence is synthesized)
ggtagagaatgagtttgctcagctcactctgtctgatcatgaacagagagaactctatgaggctgccaggcttgtccagacagctttccggaaatacaagggccgacccttgcgggaaca

SEQ ID NO: 578834 - DNA, 120 bp, Artificial Sequence
  ENSG00000171735_39 (sequence is synthesized)
gcaagaagtagctgctgctgttattcagcgttgttacagaaaatataaacagtacgcactttataaaaagatgacacaggctgccatccttatccagagcaaattccgaagttactatga

SEQ ID NO: 578835 - DNA, 120 bp, Artificial Sequence
  ENSG00000171735_40 (sequence is synthesized)
acaaaaaaaattccagcagagccgacgggctgctgtgctcatccaaaagtactaccgaagttataagaaatgtggcaaaagacggcaggctcgccggacggctgtgattgtacaacagaa

SEQ ID NO: 578836 - DNA, 120 bp, Artificial Sequence
  ENSG00000171735_41 (sequence is synthesized)
actcaggagcagtttgctaaccaaaaagcaggatcaagctgctcgaaaaataatgaggtttcttcgccgctgtcgccacagccccctggtggaccataggctgtacaaaaggagtgaaag

SEQ ID NO: 578837 - DNA, 120 bp, Artificial Sequence
  ENSG00000171735_42 (sequence is synthesized)
aattgaaaaaggccaaggaacttgaagacatacagcagcatcccttagcaatgtgacattgcttttcagactgttttcatttctgtttttagcagagacatgcaacaacaacacacacgc

SEQ ID NO: 578838 - DNA, 120 bp, Artificial Sequence
  ENSG00000171735_43 (sequence is synthesized)
acacacgcacacacacacacgtacacacacatacaaaatccctctgcagttttggggagatcagctgcaggattttaacaggaatgttttggtcattgcatttgcactttcatggacaac

SEQ ID NO: 578839 - DNA, 120 bp, Artificial Sequence
  ENSG00000171735_44 (sequence is synthesized)
ttttaatttgatcagcaagacatcttggaactcaatcttctgttggatcacgggaaatcaagacacccaggaggaattgaaagaggcttcctcttctcaggaagaagccatttccttctc

SEQ ID NO: 578840 - DNA, 120 bp, Artificial Sequence
  ENSG00000171735_45 (sequence is synthesized)
atatagggctgtattcaaacatcgtgtggaactgtacaaatatttataccaaaaatatagataagaaaaggtggggctatactagcaacaaaaaaagaatgctgttcctgcacctgccgg

SEQ ID NO: 578841 - DNA, 120 bp, Artificial Sequence
  ENSG00000171735_46 (sequence is synthesized)
ttatttccaagaagctgaatctttgggactgattctcagtggagggcttagatcatacaaaaatctttattgggtccgtgtgttctcatttccttcactgtttatttttgtttgtttgtt

SEQ ID NO: 578842 - DNA, 120 bp, Artificial Sequence
  ENSG00000171735_47 (sequence is synthesized)
tgtttgttttaatctctacagcacatttaatgcaacttttgaaatctgcaggtttttaatgtcttgtggaaatttgcagaggggcaggtgtgtggtaaacgggtaatgcatgggaaataa

SEQ ID NO: 578843 - DNA, 120 bp, Artificial Sequence
  ENSG00000171735_48 (sequence is synthesized)
tgagaagcagctcacagagtttaaactattttcttgtccccaccaccttccaagaacctgcgagggtagtaatcatcttgtcccctttttcatgttcagcactttaatttttttgcctta

SEQ ID NO: 578844 - DNA, 120 bp, Artificial Sequence
  ENSG00000171735_49 (sequence is synthesized)
ctttcatgtgcaatgagaattacttaagaattggtaacgcatgtagccttttttagtaaccttggaagctgtagtaattctaaggaatcatgaaccttgcctggacatttgccacctaaa

SEQ ID NO: 578845 - DNA, 120 bp, Artificial Sequence
  ENSG00000171735_50 (sequence is synthesized)
cgatcagtgtggtgctgcgttctggccagtaaattccatgtttttggctatatctcatccaaactgagcagtttctgtgtatatatagaaggtagaaatgaaaagtgagaaaatatttga

SEQ ID NO: 578846 - DNA, 120 bp, Artificial Sequence
  ENSG00000171735_51 (sequence is synthesized)
aagggattatattaattgctaaatattttattcacaaaggtcaataacatggcaagataaaattatttgtatagttttgtctgaatgagcgagaaaaatgtggatgtactgtttgtatat

SEQ ID NO: 578847 - DNA, 120 bp, Artificial Sequence
  ENSG00000171735_52 (sequence is synthesized)
attgtatatattaaaacagagatatgtgcatgaaatcaagaaaaaagaaatgaacaaaagcaaagcattagtggctatggtctgtaaaatgaaacaaaaaaactttatttcactataaga

SEQ ID NO: 578848 - DNA, 120 bp, Artificial Sequence
  ENSG00000171735_53 (sequence is synthesized)
gtactttattttaaatgttctttaggagaacattttgctaaagcatgactaaactgcaaaaaaaaaaaaagagctactgtatttagacttaggaaaaaaggcagagtaacattacttaaa

SEQ ID NO: 578849 - DNA, 120 bp, Artificial Sequence
  ENSG00000171735_54 (sequence is synthesized)
aaaaaaaggatatgtttacatttaattttggctaccaggagtttagtttattttatttaaaatttttttgccaatggtgccaagtaatgtgaatgctaatactgcttaagaaaattaagt

SEQ ID NO: 578850 - DNA, 120 bp, Artificial Sequence
  ENSG00000171735_55 (sequence is synthesized)
tacttttgcaaaacagataatcataagatgaatcagtatgtagcttaacaccatccactcactccaacaaagaacacttagaatgataaaaaaaaaaaaaaaaaacctgacaaaagaaat

SEQ ID NO: 578851 - DNA, 120 bp, Artificial Sequence
  ENSG00000171735_56 (sequence is synthesized)
agtatgaaaagtagaaaaatgtcacgtttccatatctcctgctggaaatcagaaaatataataaaattgcacaaaaaaaaaaatgaaaaagatgcagactggtcttttagagacggcatg

SEQ ID NO: 578852 - DNA, 120 bp, Artificial Sequence
  ENSG00000171735_57 (sequence is synthesized)
gtatattactatttccacataatgaggagccaaagaaatctgatgtttttaacaattaaactgctaatgttaaattgagagaataaagttcgtatttgctgatgccagtttaaaattccc

SEQ ID NO: 578853 - DNA, 120 bp, Artificial Sequence
  ENSG00000171735_58 (sequence is synthesized)
aggttacgtctgaggatcagttggtgtaaagctgagatgttttttcttggttctggctgccaactgtgagttaaaactcaaggcttgttgtgaagcctaaaaatattcacaaataagctt

SEQ ID NO: 578854 - DNA, 120 bp, Artificial Sequence
  ENSG00000171735_59 (sequence is synthesized)
ttaaactggtgtctttggaaggaaggtagatacaaaaagattgtggtaaaaactggggtcagtgctcttggtgccttttctataattgtacttgttttttaattacttcctttcactgcc

SEQ ID NO: 578855 - DNA, 120 bp, Artificial Sequence
  ENSG00000171735_60 (sequence is synthesized)
aacctcgaattactgtacagtatatgtctttctgcttgtgatcagctttgacaacagtgacagccccacaactagtagccacctgtacatttgtaaactgacctgactccattttgtttt

SEQ ID NO: 578856 - DNA, 120 bp, Artificial Sequence
  ENSG00000171735_61 (sequence is synthesized)
taaatgtgtgggttatgttgcagctgttgcagtcccccagatacctattattttacacaatttgacctataggaggacactgagtaatttacaaacacaactgcattcataaatgggaat

SEQ ID NO: 578857 - DNA, 120 bp, Artificial Sequence
  ENSG00000171735_62 (sequence is synthesized)
agaacgtgaaagccagctctttcagaatatcctctattaatactgaatttagatatctttattccatttattatggtacaaataactgatgttttaaccagagtaatgacctcagtggat

SEQ ID NO: 578858 - DNA, 120 bp, Artificial Sequence
  ENSG00000171735_63 (sequence is synthesized)
ttgctttaaccctcacattttttttttaatgtttcacatgttacattattagctgaatacgttagaaaatgacagatggtagagacttccatagaattaagagggttctcatggagggga

SEQ ID NO: 578859 - DNA, 120 bp, Artificial Sequence
  ENSG00000171735_64 (sequence is synthesized)
taggaagtaggtttaaagcctaccagtgtaacctaccagtacaactgtgaatcctaggcgaggcaaaaatgcacttccactgaaacgaagcatttctgaccgctttttcttggttatgaa

SEQ ID NO: 578860 - DNA, 120 bp, Artificial Sequence
  ENSG00000171735_65 (sequence is synthesized)
tcttaatttcgaatataagatgataggtaagcgcagctttcttggataatctgaattcccaagtgccaggagtaggatttcattataaaattaatagctaatcttattctatctcctgaa

SEQ ID NO: 578861 - DNA, 120 bp, Artificial Sequence
  ENSG00000171735_66 (sequence is synthesized)
gatttaattgctattgttacccattcgaaatcagctgtactgtgtgaacgaaataaagacaataatacgaacccctctctggctgcacggtcgcttatggcagttccacacagtagttgg

SEQ ID NO: 578862 - DNA, 120 bp, Artificial Sequence
  ENSG00000171735_67 (sequence is synthesized)
cgcccaatggggggtccctgagacttgcatgtaaaactagtctagatgtcttctttttttgtaagttttatttttgtaattgtgcatgtaaagcatcattgaatcaatggatctgttgaa

SEQ ID NO: 578863 - DNA, 120 bp, Artificial Sequence
  ENSG00000171735_68 (sequence is synthesized)
gaactcagctgctggaaaccatgcaaaatgttttgaattgcccttaaaatatggaaaatgttttctgaatgctttatattctttctgctgtaaattaaaaatgaagaaaatttccccata

SEQ ID NO: 578864 - DNA, 120 bp, Artificial Sequence
  ENSG00000171735_69 (sequence is synthesized)
cgctggaacactaatgagagatcatgatgcagccgtccttttggatttctttttaataatgtgtgacccttcacctttgatcccctgacctgcattaccttggtaaccatttcatttttt

SEQ ID NO: 578865 - DNA, 120 bp, Artificial Sequence
  ENSG00000171735_70 (sequence is synthesized)
agtcctcaggattggaaagaacagaccctgccaccattagcagtacaatgagctggctggccagttatctagcggatgctgactgccttcccagtgctgcccagatccgcttgagccctg

SEQ ID NO: 578866 - DNA, 120 bp, Artificial Sequence
  ENSG00000171735_71 (sequence is synthesized)
tacttctgttttatcctctgtgaaatgtagatactgtgtgtctcccacttgctttttagggttgttgggaggataaatgaaactgtatgacagacacactgggaactcagaagaaaggtg

SEQ ID NO: 578867 - DNA, 120 bp, Artificial Sequence
  ENSG00000171735_72 (sequence is synthesized)
ctgttgaaactgaacctcatcctatggctgtgccgttggcaggcataaccggtgtgctgagaggcagtggtagtgaaccccgtggtgaaaggccaggaccatgggctctggagccaggct

SEQ ID NO: 578868 - DNA, 120 bp, Artificial Sequence
  ENSG00000171735_73 (sequence is synthesized)
ctctgtgcctgagtttccccctctttaaattggggatgataatagtacccactaaaggatcctggtcttaaaattttggtagcagaaagcaaatgtgcaaagagcaatggaaaacaagtc

SEQ ID NO: 578869 - DNA, 120 bp, Artificial Sequence
  ENSG00000171735_74 (sequence is synthesized)
agaagctgctgtctgattccagaggaactcgtattttatgttaaaaaaaatgctctcaccacacacttgttcatgggcgcagcaaagaagagggatccacagagctggagccatgagggc

SEQ ID NO: 578870 - DNA, 120 bp, Artificial Sequence
  ENSG00000171735_75 (sequence is synthesized)
tgacacattggaatgaaagctggcagaattcgtagggagagctttcccatcctgccagccccatgtctggctttaagacagttctattagtgaattaactgttctcaaaaccccaaatta

SEQ ID NO: 578871 - DNA, 120 bp, Artificial Sequence
  ENSG00000171735_76 (sequence is synthesized)
aacacgctgatttcctcaaatagagatacccctttgagtgataaatttgcaaaatgctgtcttcattttctgtattaaaattcatttcagttttaaaataaagtgtaatctgtgttttca

SEQ ID NO: 578872 - DNA, 120 bp, Artificial Sequence
  ENSG00000171735_77 (sequence is synthesized)
gaggaggaggaggatgtggcgcgcggaggggaaatggctgccgaaaacaagccggaaggcacaaggaaggacagacccagtctctgtccttatggagctaagggggagacggacattaat

SEQ ID NO: 578873 - DNA, 120 bp, Artificial Sequence
  ENSG00000171735_78 (sequence is synthesized)
tatcacagagttaattacaccagacctgcactaaagggaataatagaaagattggtctttggcagaagagaaatgatcctgcatggcagctttaagatgcgtggaaaagtgaagaccaaa

SEQ ID NO: 578874 - DNA, 120 bp, Artificial Sequence
  ENSG00000171735_79 (sequence is synthesized)
tacgaaggagctccgcagcctgactgagctctggagagcagggctctgtgcacacgcctcctggtccagaggcctccgtgaccatccatgatgccactctgtcccctcagcaagctgcct

SEQ ID NO: 578875 - DNA, 120 bp, Artificial Sequence
  ENSG00000171735_80 (sequence is synthesized)
ttttcttcctagcacctgccccagcggtggtatgttttccagtcagttaccacctgtctcatcagaatggaagctccatgagagcagggcctttgtcttgtccccttgtatcttcagtgc

SEQ ID NO: 578876 - DNA, 120 bp, Artificial Sequence
  ENSG00000171735_81 (sequence is synthesized)
atagtagtcatgtaaaaatctttttaccgaaaaagctgcttgaatgtctgccgaaatgttcaagtttaccaaaagagaggcaccgctggaacactaatgaggtcttaaaattttggtagc

SEQ ID NO: 578877 - DNA, 120 bp, Artificial Sequence
  ENSG00000171747_0 (sequence is synthesized)
accatctcccactcctgcagctcttctcacaggaccagccactagcgcagcctcgagcgatggcctatgtccccgcaccgggctaccagcccacctacaacccgacgctgccttactacc

SEQ ID NO: 578878 - DNA, 120 bp, Artificial Sequence
  ENSG00000171747_1 (sequence is synthesized)
agcccatcccgggcgggctcaacgtgggaatgtctgtttacatccaaggagtggccagcgagcacatgaagcggttcttcgtgaactttgtggttgggcaggatccgggctcagacgtcg

SEQ ID NO: 578879 - DNA, 120 bp, Artificial Sequence
  ENSG00000171747_2 (sequence is synthesized)
ccttccacttcaatccgcggtttgacggctgggacaaggtggtcttcaacacgttgcagggcgggaagtggggcagcgaggagaggaagaggagcatgcccttcaaaaagggtgccgcct

SEQ ID NO: 578880 - DNA, 120 bp, Artificial Sequence
  ENSG00000171747_3 (sequence is synthesized)
ttgagctggtcttcatagtcctggctgagcactacaaggtggtggtaaatggaaatcccttctatgagtacgggcaccggcttcccctacagatggtcacccacctgcaagtggatgggg

SEQ ID NO: 578881 - DNA, 120 bp, Artificial Sequence
  ENSG00000171747_4 (sequence is synthesized)
ctccggccccagggacccccgatgatgccaccttaccctggtcccggacattgccatcaacagctgaacagcctgcccaccatggaaggacccccaaccttcaacccgcctgtgccatat

SEQ ID NO: 578882 - DNA, 120 bp, Artificial Sequence
  ENSG00000171747_5 (sequence is synthesized)
ttcgggaggctgcaaggagggctcacagctcgaagaaccatcatcatcaagggctatgtgcctcccacaggcaagagctttgctatcaacttcaaggtgggctcctcaggggacatagct

SEQ ID NO: 578883 - DNA, 120 bp, Artificial Sequence
  ENSG00000171747_6 (sequence is synthesized)
ctgcacattaatccccgcatgggcaacggtaccgtggtccggaacagccttctgaatggctcgtggggatccgaggagaagaagatcacccacaacccatttggtcccggacagttcttt

SEQ ID NO: 578884 - DNA, 120 bp, Artificial Sequence
  ENSG00000171747_7 (sequence is synthesized)
gatctgtccattcgctgtggcttggatcgcttcaaggtttacgccaatggccagcacctctttgactttgcccatcgcctctcggccttccagagggtggacacattggaaatccagggt

SEQ ID NO: 578885 - DNA, 120 bp, Artificial Sequence
  ENSG00000171747_8 (sequence is synthesized)
gatgtcaccttgtcctatgtccagatctaatctattcctggggccataactcatgggaaaacagaattatcccctaggactcctttctaagcccctaataaaatgtctgagggtgtctca

SEQ ID NO: 578886 - DNA, 120 bp, Artificial Sequence
  ENSG00000171747_9 (sequence is synthesized)
gtactaacccagcacctagagaaacgccggagtctaatgggtgtgtcatagatatctgtcgactcttggagaataatatcgcttcttcctcacttcacagaccatggaaggacccccaac

SEQ ID NO: 578887 - DNA, 120 bp, Artificial Sequence
  ENSG00000171747_10 (sequence is synthesized)
ttcaatcaatcaacttcatcggaggccagcccctccggccccagggacccccgatgatgccaccttaccctgtaagtacttgctgataggtgagggtcttcctccctagtggggtccctc

SEQ ID NO: 578888 - DNA, 120 bp, Artificial Sequence
  ENSG00000171747_11 (sequence is synthesized)
agcccctctcacccttcctgccttctgtccatcgttcagggtcccggacattgccatcaacagctgaacagcctgcccgtgagtgggagggctgggagggccccgggtgaggagtgggaa

SEQ ID NO: 578889 - DNA, 120 bp, Artificial Sequence
  ENSG00000171747_12 (sequence is synthesized)
tggatggtggggagggggcacggatctccagggaatctgagacagccagaaagggagtgggctgagggttttggggtgggaggtaggggaagggtagatagagttcgtggtcaggtttag

SEQ ID NO: 578890 - DNA, 120 bp, Artificial Sequence
  ENSG00000171747_13 (sequence is synthesized)
gaagggtagatagagttcgtggtcaggtttagggagcagaaggaattggggatgttttccaggaggagtgggacctctcagaaaatttgttcttgggctggacatggtggctcacgcctg

SEQ ID NO: 578891 - DNA, 120 bp, Artificial Sequence
  ENSG00000171747_14 (sequence is synthesized)
accatctcccactcctgcagctcttctcacaggaccagccactagcgcagcctcgagcgatggcctatgtccccgcaccgggctaccagcccacctacaacccggtgagatgccagctca

SEQ ID NO: 578892 - DNA, 120 bp, Artificial Sequence
  ENSG00000171747_15 (sequence is synthesized)
ggccccactccgcccgcagctccgtccataagccctcacaccaattttccccactctgatcctggggggccccatctgactctgtggtctgatttacccaaagctgaccccgaccctcga

SEQ ID NO: 578893 - DNA, 120 bp, Artificial Sequence
  ENSG00000171757_0 (sequence is synthesized)
agatgtcacctccttcaggaagccctccctggtggccccgccctttgggagcacaaaaccctttatgctcccaaagcccaacgcctttatcatgtgctgatgctactctgcttcttcgct

SEQ ID NO: 578894 - DNA, 120 bp, Artificial Sequence
  ENSG00000171757_1 (sequence is synthesized)
ggcccggcaggccggtgcacactttgtaggagcgggctttgtcataatcttctttgtagccccagccctagctcagcagcggagcccctcaaacctcgggaactcctccctgcaaaggag

SEQ ID NO: 578895 - DNA, 120 bp, Artificial Sequence
  ENSG00000171757_2 (sequence is synthesized)
ccaggacgccctccctcaggctgcctttaaccagggcagggtgacaaaggacctccacagagtaggcggtcactgccttagcagtgaggcctcagggcccgggcaggcacagccagcggg

SEQ ID NO: 578896 - DNA, 120 bp, Artificial Sequence
  ENSG00000171757_3 (sequence is synthesized)
actcgaagcaggctggcgccgaggctcgtgtagccgcctcacagctgcaggcggactgtaagtgcgcgcgcggtcgccatggcagcgcagccgccgcggccagtgggtgagaggagcatg

SEQ ID NO: 578897 - DNA, 120 bp, Artificial Sequence
  ENSG00000171757_4 (sequence is synthesized)
gggagctcccgggaggccgcccgtgcgccggccaggtccccggcttgggcctccactcaggccagtactccgggcgcggccctggcggtccagcgcgaatctccagaatctggtctccag

SEQ ID NO: 578898 - DNA, 120 bp, Artificial Sequence
  ENSG00000171757_5 (sequence is synthesized)
aaacattattctaatctgtgtatggaaaaatcccagaaaattaatccttttatattgcatatactccaagaagtggatgaagaaattaaaaaggggctagcagcaggaatcacattaaac

SEQ ID NO: 578899 - DNA, 120 bp, Artificial Sequence
  ENSG00000171757_6 (sequence is synthesized)
attgctggtaacaatcgcttagtgccagtagaaagagttacaggtgaagatttttggattctttccaaaattttaaagaattgtctgtatattaatggtttggatgttggatataacctt

SEQ ID NO: 578900 - DNA, 120 bp, Artificial Sequence
  ENSG00000171757_7 (sequence is synthesized)
ggagaattgattgctaaagtgctacataagaatcggactctgaaatacctaagaatgactggaaacaaaattgaaaataaaggtggaatgttttttgctgcaatgctgcaaattaattca

SEQ ID NO: 578901 - DNA, 120 bp, Artificial Sequence
  ENSG00000171757_8 (sequence is synthesized)
tcattagagaaattagatctgggtgactgtgatctggaagagtctacagtccatgtaggccgcatgttgaaagaaaatcactgtcttgttgcactacacatgtgtaagcatgatataaaa

SEQ ID NO: 578902 - DNA, 120 bp, Artificial Sequence
  ENSG00000171757_9 (sequence is synthesized)
aacagtggtatacaacagttatgtgatgcactgtatctgaacagtagcctgcgctaccttgatgtcagctgcaacaaaataactcatgatggaatggtgtatttggctgatgtactgaaa

SEQ ID NO: 578903 - DNA, 120 bp, Artificial Sequence
  ENSG00000171757_10 (sequence is synthesized)
agcaacactaccctggaagtaatagatctttcctttaacagaatagaaaatgcaggcgcaaactatctcagtgaaactcttacttcacacaacaggagtcttaaagcgttgtcagtagtc

SEQ ID NO: 578904 - DNA, 120 bp, Artificial Sequence
  ENSG00000171757_11 (sequence is synthesized)
agcaacaacatagagggagaaggacttgttgcactttcacaatcaatgaaaacaaatctcactttctctcatatctacatttggggaaacaaatttgatgaggctacgtgtatagcatat

SEQ ID NO: 578905 - DNA, 120 bp, Artificial Sequence
  ENSG00000171757_12 (sequence is synthesized)
tcagacttaattcaaatgggttgtctaaaaccagacaatacagatgtggagccatttgtggtagatggacgtgtatatcttgcagaagtctccaatggccttaaaaagcattattattgg

SEQ ID NO: 578906 - DNA, 120 bp, Artificial Sequence
  ENSG00000171757_13 (sequence is synthesized)
acatcaacttatggagaatcttatgaccactcatctaatgcaggttttgctcttgttccagtaggtcaacagccatgaaaaagtagctgtaaaataattttcatacacttgtcttattgt

SEQ ID NO: 578907 - DNA, 120 bp, Artificial Sequence
  ENSG00000171757_14 (sequence is synthesized)
ttcacagagattaatattctatagcctattttcttttataaattaaaacaagttacttttttcaaatgtgtaaaagataatgactgtattaaactttgtataactgtctattgtgaaaaa

SEQ ID NO: 578908 - DNA, 120 bp, Artificial Sequence
  ENSG00000171757_15 (sequence is synthesized)
ggtgactgtgatctgggaatgcaaagtgtgatagcatttgctacagtactaactcaaaaccaagcaattaaggcaataaacctaaaccgacctatactgtacagtgaacaggaagagtct

SEQ ID NO: 578909 - DNA, 120 bp, Artificial Sequence
  ENSG00000171757_16 (sequence is synthesized)
aaaagcaaatttttaaatactaacctcaatccccttaactcttaagattataatgaaatatgaaaactcagcttctaaactgacatagtattaagttacagtaaacatttacatttctat

SEQ ID NO: 578910 - DNA, 120 bp, Artificial Sequence
  ENSG00000171757_17 (sequence is synthesized)
ttttcaaatgtaatgtcttttacaattagactgattctattaacgattccttcaaattaatgagaaaatttgcattgcttatattacttatcctgaattctaatagaaaactcagaagca

SEQ ID NO: 578911 - DNA, 120 bp, Artificial Sequence
  ENSG00000171757_18 (sequence is synthesized)
ttcaatatgatcaagacttttaaaagtaagaatgaactaaagaataaaatacttggatgcatttatccagaaaaatatatctgctatccacccaaacatttactgaataatataaaacag

SEQ ID NO: 578912 - DNA, 120 bp, Artificial Sequence
  ENSG00000171757_19 (sequence is synthesized)
aagactttcaaaatgtagttagctctactaagtaccttaaggatctaattagaaaactaagtttcttggattttaggaattaaatggtcagtatttttaccactacattacaacatactg

SEQ ID NO: 578913 - DNA, 120 bp, Artificial Sequence
  ENSG00000171757_20 (sequence is synthesized)
cacagtgagacactgcagttttgataattaacataagtcttaaaattaactactagagagtttggtggttcaaataaccaaagatattaaaactatgtattagtattacacatcactgaa

SEQ ID NO: 578914 - DNA, 120 bp, Artificial Sequence
  ENSG00000171757_21 (sequence is synthesized)
tgacacagttctaattcctctaaggttaagaaaaatcataattattgatcagatgtagcaaaatttctgatctgctccctaataattataccaaaatatggaatgggagagatagagtac

SEQ ID NO: 578915 - DNA, 120 bp, Artificial Sequence
  ENSG00000171757_22 (sequence is synthesized)
aagctatcaaaatatttggcatgttgctcacataaatacagacagcctttgatactactttcaaaacagaaataatggtaacagttttcatttggaaagaacgagggggaaaaagtagat

SEQ ID NO: 578916 - DNA, 120 bp, Artificial Sequence
  ENSG00000171757_23 (sequence is synthesized)
gttaaaattctcaaaatttgcaaaaggactaacaaaaattccaccactaaaaagagtaataaaacatagagtgttgtctaaaccaccctcccaaaaaaaccaacccttacttttagaaaa

SEQ ID NO: 578917 - DNA, 120 bp, Artificial Sequence
  ENSG00000171757_24 (sequence is synthesized)
acatccataattctttaggttctacacatcagtagctgaataagttgagtctggaactggaactaatgatgaatgacaagctaaagcaaaaaccaacttgacttttaaatcttttaatgt

SEQ ID NO: 578918 - DNA, 120 bp, Artificial Sequence
  ENSG00000171757_25 (sequence is synthesized)
tttaatgtctaaatttccatctttctccatattgccaaccttactgacaaaccagttcaacgtatttgtatgactctgttacatagatactaaggatcgtggctcatgcctgtaatccca

SEQ ID NO: 578919 - DNA, 120 bp, Artificial Sequence
  ENSG00000171757_26 (sequence is synthesized)
caaaaaaaaaaaaaaagtataaaaattctacaatgaagaaataattaataggtccgcatccaatactatggaattgtctgttttagcctaaatctgtagattagattcaggggggtcatg

SEQ ID NO: 578920 - DNA, 120 bp, Artificial Sequence
  ENSG00000171757_27 (sequence is synthesized)
aactctatataattgtatgtccaaatctgggattcccttaatttttctgaggaatgggtaactagctatcagcagatttttgagaatgtatacaataggcctcctaccgagcccccctac

SEQ ID NO: 578921 - DNA, 120 bp, Artificial Sequence
  ENSG00000171757_28 (sequence is synthesized)
ctattccaatttatgaacatctgtgggacttgaaaattttgaccataggagctttggtccacaaaattggtagtatagaaaatcaactctaggagtcacaaaatgacaaaacatgtctaa

SEQ ID NO: 578922 - DNA, 120 bp, Artificial Sequence
  ENSG00000171757_29 (sequence is synthesized)
gagtcacaaaatgacaaaacatgtctaatacattaaaagttagaaataagttttgcaatattataatttcattctgtgtaattaaatgaataaaaatctatttacaatacctggaaaata

SEQ ID NO: 578923 - DNA, 120 bp, Artificial Sequence
  ENSG00000171757_30 (sequence is synthesized)
ttttattttaaactacaaattagcacagctaatttgaatatttaaatttccgtaagcactgtaaattgaatacattttttcttaatgatatagtttttttcctaaaaatcctaggcatat

SEQ ID NO: 578924 - DNA, 120 bp, Artificial Sequence
  ENSG00000171757_31 (sequence is synthesized)
ggagcatggggagctcccgggaggccgcccgtgcgccggccaggtccccggcttgggcctccactcaggccagtactccgggcgcggccctggcggtccagcgcggctagcagcaggaat

SEQ ID NO: 578925 - DNA, 120 bp, Artificial Sequence
  ENSG00000171757_32 (sequence is synthesized)
aacaaatgcaaattgtggactaacagttttaaccaatataatctttttaaaaagctaatttaaataacagcatatgtctgaaataaacatgtactacttcaaaattatattttagaaata

SEQ ID NO: 578926 - DNA, 120 bp, Artificial Sequence
  ENSG00000171757_33 (sequence is synthesized)
aataatctatataaatattcatggtacttgggatacgttgttagacattatttccaatgattagaaactgcaaccaattgtcaatcctttgtcctaagctttaatatttaatactgctat

SEQ ID NO: 578927 - DNA, 120 bp, Artificial Sequence
  ENSG00000171757_34 (sequence is synthesized)
cttttagtaacataaatgagcaatttagttgtgtaaacaagaatgaaagcaatattttatggtgaattttcattaactttcttggaaatcaagtggttaaaataaacctttactaaaaca

SEQ ID NO: 578928 - DNA, 120 bp, Artificial Sequence
  ENSG00000171759_0 (sequence is synthesized)
actctcttctcctccctagtgcgaggttaaaaccttcagccccacgtgctgtttgcaaacctgcctgtacctgaggccctaaaaagccagagacctcactcccggggagccagcatgtcc

SEQ ID NO: 578929 - DNA, 120 bp, Artificial Sequence
  ENSG00000171759_1 (sequence is synthesized)
actgcggtcctggaaaacccaggcttgggcaggaaactctctgactttggacaggaaacaagctatattgaagacaactgcaatcaaaatggtgccatatcactgatcttctcactcaaa

SEQ ID NO: 578930 - DNA, 120 bp, Artificial Sequence
  ENSG00000171759_2 (sequence is synthesized)
gaagaagttggtgcattggccaaagtattgcgcttatttgaggagaatgatgtaaacctgacccacattgaatctagaccttctcgtttaaagaaagatgagtatgaatttttcacccat

SEQ ID NO: 578931 - DNA, 120 bp, Artificial Sequence
  ENSG00000171759_3 (sequence is synthesized)
ttggataaacgtagcctgcctgctctgacaaacatcatcaagatcttgaggcatgacattggtgccactgtccatgagctttcacgagataagaagaaagacacagtgccctggttccca

SEQ ID NO: 578932 - DNA, 120 bp, Artificial Sequence
  ENSG00000171759_4 (sequence is synthesized)
agaaccattcaagagctggacagatttgccaatcagattctcagctatggagcggaactggatgctgaccaccctggttttaaagatcctgtgtaccgtgcaagacggaagcagtttgct

SEQ ID NO: 578933 - DNA, 120 bp, Artificial Sequence
  ENSG00000171759_5 (sequence is synthesized)
gacattgcctacaactaccgccatgggcagcccatccctcgagtggaatacatggaggaagaaaagaaaacatggggcacagtgttcaagactctgaagtccttgtataaaacccatgct

SEQ ID NO: 578934 - DNA, 120 bp, Artificial Sequence
  ENSG00000171759_6 (sequence is synthesized)
tgctatgagtacaatcacatttttccacttcttgaaaagtactgtggcttccatgaagataacattccccagctggaagacgtttctcagttcctgcagacttgcactggtttccgcctc

SEQ ID NO: 578935 - DNA, 120 bp, Artificial Sequence
  ENSG00000171759_7 (sequence is synthesized)
cgacctgtggctggcctgctttcctctcgggatttcttgggtggcctggccttccgagtcttccactgcacacagtacatcagacatggatccaagcccatgtatacccccgaacctgac

SEQ ID NO: 578936 - DNA, 120 bp, Artificial Sequence
  ENSG00000171759_8 (sequence is synthesized)
atctgccatgagctgttgggacatgtgcccttgttttcagatcgcagctttgcccagttttcccaggaaattggccttgcctctctgggtgcacctgatgaatacattgaaaagctcgcc

SEQ ID NO: 578937 - DNA, 120 bp, Artificial Sequence
  ENSG00000171759_9 (sequence is synthesized)
acaatttactggtttactgtggagtttgggctctgcaaacaaggagactccataaaggcatatggtgctgggctcctgtcatcctttggtgaattacagtactgcttatcagagaagcca

SEQ ID NO: 578938 - DNA, 120 bp, Artificial Sequence
  ENSG00000171759_10 (sequence is synthesized)
aagcttctccccctggagctggagaagacagccatccaaaattacactgtcacggagttccagcccctctattacgtggcagagagttttaatgatgccaaggagaaagtaaggaacttt

SEQ ID NO: 578939 - DNA, 120 bp, Artificial Sequence
  ENSG00000171759_11 (sequence is synthesized)
gctgccacaatacctcggcccttctcagttcgctacgacccatacacccaaaggattgaggtcttggacaatacccagcagcttaagattttggctgattccattaacagtgaaattgga

SEQ ID NO: 578940 - DNA, 120 bp, Artificial Sequence
  ENSG00000171759_12 (sequence is synthesized)
atcctttgcagtgccctccagaaaataaagtaaagccatggacagaatgtggtctgtcagctgtgaatctgttgatggagatccaactatttctttcatcagaaaaagtccgaaaagcaa

SEQ ID NO: 578941 - DNA, 120 bp, Artificial Sequence
  ENSG00000171759_13 (sequence is synthesized)
accttaatttgaaataacagccttaaatcctttacaagatggagaaacaacaaataagtcaaaataatctgaaatgacaggatatgagtacatactcaagagcataatggtaaatctttt

SEQ ID NO: 578942 - DNA, 120 bp, Artificial Sequence
  ENSG00000171759_14 (sequence is synthesized)
ggggtcatctttgatttagagatgataatcccatactctcaattgagttaaatcagtaatctgtcgcatttcatcaagattaattaaaatttgggacctgcttcattcaagcttcatata

SEQ ID NO: 578943 - DNA, 120 bp, Artificial Sequence
  ENSG00000171759_15 (sequence is synthesized)
atgtaaaacacaagactgtcattagaattgaattattgggcttaatataaatcgtaacctatgaagtttattttctattttagttaactatgattccaattactactttgttattgtacc

SEQ ID NO: 578944 - DNA, 120 bp, Artificial Sequence
  ENSG00000171759_16 (sequence is synthesized)
taagtaaattttctttaagtcagaagcccattaaaatagttacaagcattgaacttctttagtattatattaatataaaaacatttttgtatgttttattgtaatcataaatactgctgt

SEQ ID NO: 578945 - DNA, 120 bp, Artificial Sequence
  ENSG00000171759_17 (sequence is synthesized)
ataaggtaataaaactctgcacctaatccccataacttccagtatcattttccaattaattatcaagtctgttttgggaaacactttgaggacatttatgatgcagcagatgttgactaa

SEQ ID NO: 578946 - DNA, 120 bp, Artificial Sequence
  ENSG00000171759_18 (sequence is synthesized)
aggcttggttggtagatattcaggaaatgttcactgaataaataagtaaatacattattgaaaagcaaatctgtataaatgtgaaatttttatttgtattagtaataaaacattagtagt

SEQ ID NO: 578947 - DNA, 120 bp, Artificial Sequence
  ENSG00000171759_19 (sequence is synthesized)
ttaaacaatttcactgtttcagttatttcctggaatgaaatattcctctcactgccttagaaatacattagctagatagttttgtaacatgagaaaatggccagaggctcatatctccaa

SEQ ID NO: 578948 - DNA, 120 bp, Artificial Sequence
  ENSG00000171759_20 (sequence is synthesized)
ccctttgcaggggctccttgtgacactcaaagtcatgcctggacagtcaacggactttgacttttgttgattgtgtgtttgccatgaaaacatgaatatctgagaagcagtggggagaaa

SEQ ID NO: 578949 - DNA, 120 bp, Artificial Sequence
  ENSG00000171759_21 (sequence is synthesized)
aaaaacaatatctttgtagctatgatttgaaattctcatactactttacattttattttggaaatagttaagtcttaaagaatttgcatagtgtttctttgagtttagttctcagaacag

SEQ ID NO: 578950 - DNA, 120 bp, Artificial Sequence
  ENSG00000171759_22 (sequence is synthesized)
ctgtagtatcatcaacagcaaattctgggtaccttcccagctccacccaatttgaatctctgaagataaggcccagagacctgtatttttaagtaccccatttttttaattattcatagc

SEQ ID NO: 578951 - DNA, 120 bp, Artificial Sequence
  ENSG00000171759_23 (sequence is synthesized)
caaattctatcaggtacattcagtttgagaaaacctgatttgtggtggtcagtctgccactgccaatgatgtcaatgtggataagctgtttcccttctttagacctcagtgtcactctaa

SEQ ID NO: 578952 - DNA, 120 bp, Artificial Sequence
  ENSG00000171759_24 (sequence is synthesized)
caatgagggagttaaactttataaaccaaggtccattgcagccttgaaatatgattcaagtgttcatatgtgtctttatatagctatgcctgatccactgatggggtgttacaatacctg

SEQ ID NO: 578953 - DNA, 120 bp, Artificial Sequence
  ENSG00000171759_25 (sequence is synthesized)
cttatatatgccagctgggaggaaagaggaatttactgaatgtgtctgaagtttcattgttttgaagttggaattttatgcctgtatctatgtttatgcctttgtaaaacccactgattt

SEQ ID NO: 578954 - DNA, 120 bp, Artificial Sequence
  ENSG00000171759_26 (sequence is synthesized)
taaaagtgaaaaaggacttttttctctgcttttactctaaacaccaaacaatccctgcaaagggattattctgatgtttcttcatttcacatgaaaagttaattattgactctggaactt

SEQ ID NO: 578955 - DNA, 120 bp, Artificial Sequence
  ENSG00000171759_27 (sequence is synthesized)
aaatattagataatatttttgacaatattgaagagtgagttttagtccagtaaagatgttttaatgagcttgaaggtaaagtttcggttaagttatgattttcacaggaagttacatact

SEQ ID NO: 578956 - DNA, 120 bp, Artificial Sequence
  ENSG00000171759_28 (sequence is synthesized)
gaatgaaagataatatttgtatttttggtaatgtgctactcagttcttagctcttttttatccagatataaaagcccagtctatagctatgggatttaataaatttccaatatgtaagtg

SEQ ID NO: 578957 - DNA, 120 bp, Artificial Sequence
  ENSG00000171759_29 (sequence is synthesized)
tttttatttgtttaatttctagtaaatgagcaatattttagaaacagtatcagtctttactgacagatgatcttgctgagtacaatcaaaataaatacataaaaaattctaagcatgtgg

SEQ ID NO: 578958 - DNA, 120 bp, Artificial Sequence
  ENSG00000171759_30 (sequence is synthesized)
cattgatgtttaataagtttctgaaagtaggaatctgaattttaactgtaggtttctaagttatataatttagttgtgtttcaaaaaatccaccaataaaatgtcagctttataaaaaca

SEQ ID NO: 578959 - DNA, 120 bp, Artificial Sequence
  ENSG00000171759_31 (sequence is synthesized)
ggacatagcacatacagtgttaaataaatgtaggttttcttccctcactgctgtccacctccagactaacagaagagcagcactgtttttgttttagttcccagtggaatagctgagcat

SEQ ID NO: 578960 - DNA, 120 bp, Artificial Sequence
  ENSG00000171759_32 (sequence is synthesized)
attgtatctgcccagggaagtcaataccagggagaagacaggatgagaagtgttcatgactcatagctcacttaggtatatgggagcatgtccacaggaatattagctcttctgcctggt

SEQ ID NO: 578961 - DNA, 120 bp, Artificial Sequence
  ENSG00000171759_33 (sequence is synthesized)
accccactggggatactcttaagacccttggctgctgtgccctaccctgcacctgtctcttatttttccttccttttcttctttttaccttgtaccctgccttttatgatcccaacctct

SEQ ID NO: 578962 - DNA, 120 bp, Artificial Sequence
  ENSG00000171759_34 (sequence is synthesized)
gcatatcacttattcctgggagagggatcataagcctaaaagagttatttccattctttctgcccattcctcatgtagaaagactgagtctggcttggcttaaacctcctcccctccgag

SEQ ID NO: 578963 - DNA, 120 bp, Artificial Sequence
  ENSG00000171759_35 (sequence is synthesized)
attctgagtgcgtcctggcgagtctcagcccccaagcgggtggaacgcaccaagggtctcatccgcgaggaagggctttaacgctcagggtcaggaacctctgagagctcttggggactt

SEQ ID NO: 578964 - DNA, 120 bp, Artificial Sequence
  ENSG00000171759_36 (sequence is synthesized)
gcgcgcccttggatgctcttgcgttcaacagggctaggagactaccggctggggcgaggaatgcaggcgcctagagccttggagctcctgaaacgttcctgccgcctccggaaagcaagg

SEQ ID NO: 578965 - DNA, 120 bp, Artificial Sequence
  ENSG00000171759_37 (sequence is synthesized)
ggccttttgagaggaagaggaagagagaggaagagaaggatttctaatagtagatattcactctcatggactctttaggaaacagcaacaaagacaagattaagaacaccaaattgtgtg

SEQ ID NO: 578966 - DNA, 120 bp, Artificial Sequence
  ENSG00000171759_38 (sequence is synthesized)
actatccacacaaaaaagcatcttcataagaaccaaaaatcagaatggtgagaatcaaaaattttgtgcgaggttaaaaccttcagccccacgtgctgtttgcaaacctgcctgtacctg

SEQ ID NO: 578967 - DNA, 120 bp, Artificial Sequence
  ENSG00000171759_39 (sequence is synthesized)
aattgagacccaaaagagcctttaaggaagggtttaaaagggggaagaggaatagaggctgcaagagattgtgattcatggacagtatgcagagatcaaatgacctgggttcagatcctg

SEQ ID NO: 578968 - DNA, 120 bp, Artificial Sequence
  ENSG00000171759_40 (sequence is synthesized)
gcggccgccgcggctgcggccgtggcaaagaaacaggctgcgggcggcaggaagggctgctggggctgcggctggggctgctggccggcgccgccgctctccatcttggcagagctttcc

SEQ ID NO: 578969 - DNA, 120 bp, Artificial Sequence
  ENSG00000171759_41 (sequence is synthesized)
gcctggaccgatgtcaccacttatctgcagttctcctgtgatgtttccagggtacatgattaagactcatttaacattccaggaatattctgctgatgaataatcactgagctggagtca

SEQ ID NO: 578970 - DNA, 120 bp, Artificial Sequence
  ENSG00000171759_42 (sequence is synthesized)
agagaagaagctttagatactaaccgaccctgtgatcatgagcaagtcacttcccttctctgtgcctcaatttcctcacttataaagtgaaaacaaagggccaagtgagggtggaaggat

SEQ ID NO: 578971 - DNA, 120 bp, Artificial Sequence
  ENSG00000171759_43 (sequence is synthesized)
ccccctaccctggagatctgtgattctataacatatgggcaggaaagacttgataacacactcagggtctatgtgggctgttctgaaggcatctggccacccatcacctttttatggcca

SEQ ID NO: 578972 - DNA, 120 bp, Artificial Sequence
  ENSG00000171759_44 (sequence is synthesized)
agtactaggttggttctgtggttccaattacaggaacagaacaggttctattttcccccaattacaggaaattggccttgcctctctgggtgcacctgatgaatacattgaaaagctcgc

SEQ ID NO: 578973 - DNA, 120 bp, Artificial Sequence
  ENSG00000171759_45 (sequence is synthesized)
aagtatgaaagcatgtgcttgtaggaatgcatgcaggttgattcctccaggaagaactaaatttcactgtgctctgccttccctccagcccctactgtgtttatccactttcattcaatc

SEQ ID NO: 578974 - DNA, 120 bp, Artificial Sequence
  ENSG00000171759_46 (sequence is synthesized)
aaacacctgaggctgtggattttgccgtgtacctgtccctgaaaagtattttctttcacacttaaagcccaaggtgcttcactgaggtttttttttgttttgttttgttttgtttgccct

SEQ ID NO: 578975 - DNA, 120 bp, Artificial Sequence
  ENSG00000171759_47 (sequence is synthesized)
gtagttcctgctgtgttatgagttaggagtgtgtgtttgtgtaagaaatgtgctattttcggggatggtgccaagagccctgagctctgagtctgtgcatctggtatgaatcctgccttc

SEQ ID NO: 578976 - DNA, 120 bp, Artificial Sequence
  ENSG00000171759_48 (sequence is synthesized)
ctgggcatcatcagccagcctttggctcatcattcttgccaagagcttcctgaagagcattccttctccagaaagaaagtagaagctacttaaaagagaagaataaaaccctcaaaagtc

SEQ ID NO: 578977 - DNA, 120 bp, Artificial Sequence
  ENSG00000171759_49 (sequence is synthesized)
gacttaggctaatgatttagcaaactctggaatgtcagccctaaccccaaccttggttttctgtcacatgcatgtagaaacaagctatattgaagacaactgcaatcaaaatggtgccat

SEQ ID NO: 578978 - DNA, 120 bp, Artificial Sequence
  ENSG00000171759_50 (sequence is synthesized)
taagccatcacagtacgctattttagttttatatcactgaaagggacacctaagaaggtagaaaagacagtcttgaattgctgatgcaactcctcccccatcaccccaacactccagcag

SEQ ID NO: 578979 - DNA, 120 bp, Artificial Sequence
  ENSG00000171759_51 (sequence is synthesized)
cagtggacgcatggcatggacagagaatctgtgtgcttcgacacatcctgggacagaagagaccccactaccttgaagtgaaggacccagtcatggaaagaacctttgggccctgaatga

SEQ ID NO: 578980 - DNA, 120 bp, Artificial Sequence
  ENSG00000171759_52 (sequence is synthesized)
tgctgaccaccctgtgagtccatggcccgtaggatgagattttttcagtgcctctcctccactcccctcccttcctcttaccttctctacttggagcaatgtacttgttcacttgttcaa

SEQ ID NO: 578981 - DNA, 120 bp, Artificial Sequence
  ENSG00000171759_53 (sequence is synthesized)
caaacacttattgtgttcctatttacacgagggctgggaaaaattagcaagactttattgtcatcatcattatcatggtcattatttttgtaggagcaaatataaatcactgtccagaaa

SEQ ID NO: 578982 - DNA, 120 bp, Artificial Sequence
  ENSG00000171759_54 (sequence is synthesized)
actgtgtgaggtgcagtacagaagctggaagcactctatccatactcttcccttctgggaaatgaggttcaaattccctcttcactctagaagcaggagaagtagggaatcattgttcca

SEQ ID NO: 578983 - DNA, 120 bp, Artificial Sequence
  ENSG00000171759_55 (sequence is synthesized)
ccctaacaaatggtaatgaaagctaaatttattgcatgtttccaatgtgctaggctctgtgctaagtactttgtattcattagctctttttattcttggaacatttctaagaagtatcta

SEQ ID NO: 578984 - DNA, 120 bp, Artificial Sequence
  ENSG00000171759_56 (sequence is synthesized)
tccacattatgcagatgaggaaactgaggctcagaaatgggaatttacttgatccagatcacctagctagaaagcagcgaggcagacatctgaagccaagtctgcctagcgtcaaagcct

SEQ ID NO: 578985 - DNA, 120 bp, Artificial Sequence
  ENSG00000171759_57 (sequence is synthesized)
atgtccctgggcagttatgtgtactactccactacctaaaggtctcctagtgcctctgactcagtggtgatgagctttgagttttctttcttcttttcatcccagcttgcactggtttcc

SEQ ID NO: 578986 - DNA, 120 bp, Artificial Sequence
  ENSG00000171763_0 (sequence is synthesized)
aatctgcttccggcctgcgagctcggtgttccgctttttgtgggccgggtgggtttcctaatctggtttcgtctgcctggttcatctgtgtgcgatggctccggactcggatcccttccc

SEQ ID NO: 578987 - DNA, 120 bp, Artificial Sequence
  ENSG00000171763_1 (sequence is synthesized)
tgaagggccgctcttaaagctgctacccttagacgctagagaccggggcacccagcgctgccgcctgggcccggccgccctccacgccctgggcgcgcgcttgggctcggcagtgaagat

SEQ ID NO: 578988 - DNA, 120 bp, Artificial Sequence
  ENSG00000171763_2 (sequence is synthesized)
ctcgctacccgacggcggctcctgcctctgcactgcctggcctcggcgggacggagcggacggctttgtgcagctggacccgctgtgcgcgagccccggggcggcggtcggggcgtcgag

SEQ ID NO: 578989 - DNA, 120 bp, Artificial Sequence
  ENSG00000171763_3 (sequence is synthesized)
atcccggaggagtctcagcctgaatcgcctcctcctagtgccctgtccgcccctgcggcgcgtcgccgtgtggccggtgttgcgagagcgggcaggcgcgcccggtgcccggaatacagc

SEQ ID NO: 578990 - DNA, 120 bp, Artificial Sequence
  ENSG00000171763_4 (sequence is synthesized)
cgcggtgctggaggcggcacaggagctgctgagaaaccgaccgatctccctgggccacgtggtggtcgctccgccaggcgctcctggcctggtggctgccttgcacatcgtcggcgggac

SEQ ID NO: 578991 - DNA, 120 bp, Artificial Sequence
  ENSG00000171763_5 (sequence is synthesized)
gcccagtcccgatcccgctgggctggtcacccctcgtacccgcgtcagccttggcggggagcctccgtcggaagcccagccgcagcccgaggtgcccctgggaggtctttcggaggcggc

SEQ ID NO: 578992 - DNA, 120 bp, Artificial Sequence
  ENSG00000171763_6 (sequence is synthesized)
cgactcgctgcgggagctcctccgcctcccgctccgctacccgcgcgccctgaccgcgctgggcttagcggtgcctcgcggggtgctcctggcggggccccccggagtgggcaagaccca

SEQ ID NO: 578993 - DNA, 120 bp, Artificial Sequence
  ENSG00000171763_7 (sequence is synthesized)
cccagctggtgcgggccgtggcgcgcgaggcgggcgcggagctgctggcagtcagcgccccggcgctgcagggttcccggcctggggagaccgaggagaacgtgcggcgggtcttccagc

SEQ ID NO: 578994 - DNA, 120 bp, Artificial Sequence
  ENSG00000171763_8 (sequence is synthesized)
ccgggaactggccagccgcggacccagcctcctcttcctggacgagatggacgccttgtgtccccagcggggcagtcgagcacccgagagccgcgtagtggcccaggtgttgacgctgct

SEQ ID NO: 578995 - DNA, 120 bp, Artificial Sequence
  ENSG00000171763_9 (sequence is synthesized)
ggacggcgccagtggggaccgcgaggtcgtggttgtgggagccactaaccggccggacgctctagacccagcgctgcgtaggcccgggagatttgaccgagaggtggtcattgggactcc

SEQ ID NO: 578996 - DNA, 120 bp, Artificial Sequence
  ENSG00000171763_10 (sequence is synthesized)
cgaagatgcccatctccagtcatgttgatttgggccttcttgcagaaatgacagttggctatgttggtgccgacctgacagcactctgtagggaggctgccatgcatgccctccttcata

SEQ ID NO: 578997 - DNA, 120 bp, Artificial Sequence
  ENSG00000171763_11 (sequence is synthesized)
gtgagaagaaccaggacaatcctgtgattgatgaaatagacttccttgaagcttttaaaaatattcagccctcatcgtttcgaagcgtcattggattaatggatatcaagcctgttgact

SEQ ID NO: 578998 - DNA, 120 bp, Artificial Sequence
  ENSG00000171763_12 (sequence is synthesized)
gggaggagattggtggccttgaagatgtaaaactgaagttaaaacagagcattgagtggcctctgaaattcccttgggaatttgttagaatgggcctgacacaaccaaagggagttctcc

SEQ ID NO: 578999 - DNA, 120 bp, Artificial Sequence
  ENSG00000171763_13 (sequence is synthesized)
tctatgggccccctggatgtgctaaaaccactctggtgagggccctggccacaagctgtcactgctctttcgtttcagtgagtggagctgatctgttttcaccgtttgttggagattcag

SEQ ID NO: 579000 - DNA, 120 bp, Artificial Sequence
  ENSG00000171763_14 (sequence is synthesized)
aaaaagtgttgtctcagatatttcgacaagcaagagcaagcactccagcaattttgtttttggatgaaattgattcaatcttgggagctcgctcagccagcaagacaggatgtgatgttc

SEQ ID NO: 579001 - DNA, 120 bp, Artificial Sequence
  ENSG00000171763_15 (sequence is synthesized)
aagaacgagttctttctgttctcctgaatgaattagatggtgttggacttaagacaatagagagaagaggaagtaaatcaagtcaacaggagtttcaagaagtttttaaccgaagtgtca

SEQ ID NO: 579002 - DNA, 120 bp, Artificial Sequence
  ENSG00000171763_16 (sequence is synthesized)
tgattattgcagcaacaaatagacctgatgtgttagatactgctttgttacgacctggaagattagataagatcatctatatcccacctccagatcacaagggcaggctttctattttaa

SEQ ID NO: 579003 - DNA, 120 bp, Artificial Sequence
  ENSG00000171763_17 (sequence is synthesized)
aagtctgtacaaaaaccatgccaatagggcctgatgtctccttagaaaacctcgcagcagaaacctgttttttttctggagctgatcttagaaacctctgcacagaagctgctttgctgg

SEQ ID NO: 579004 - DNA, 120 bp, Artificial Sequence
  ENSG00000171763_18 (sequence is synthesized)
ctctgcaagaaaatggactagacgcaactacagtgaaacaagagcactttctaaaatcacttaagactgtaaaaccgtcgttaagttgcaaggacttggctttatatgaaaacttattta

SEQ ID NO: 579005 - DNA, 120 bp, Artificial Sequence
  ENSG00000171763_19 (sequence is synthesized)
agaaagaaggattttctaacgtggaaggtatttaaaaatcaccttaaactcttgttcagttcacattaattgaaatgtgaacttgcctgtcgtttgcaacttcacacttttagaatttgt

SEQ ID NO: 579006 - DNA, 90 bp, Artificial Sequence
  ENSG00000171763_20 (sequence is synthesized)
gtttatatttcctgtaagtgcttgtgcctgataagctaaggctcatttatttttaaaaggcatattaaataaaatactgtaatttaggaa

SEQ ID NO: 579007 - DNA, 120 bp, Artificial Sequence
  ENSG00000171763_21 (sequence is synthesized)
ttagggatatgagagtcaagactttctgtagccatatatctccaccggttggtcataagtatctgtctttttaagtagcctgtttaaggtgtaagccttcattggaggctcaggtgcact

SEQ ID NO: 579008 - DNA, 120 bp, Artificial Sequence
  ENSG00000171763_22 (sequence is synthesized)
caagtcaccagatgagtgttctcccctttgggataaggcttttcataggttctcatatggagaatgtttctcttagctactcccttagccatgcacacaaagtagctctttggttaatga

SEQ ID NO: 579009 - DNA, 120 bp, Artificial Sequence
  ENSG00000171763_23 (sequence is synthesized)
acaaggagctgaaaaaatgaagaggtatttattagccagaatgcacctaaaatccaggccaacattaaatataatgcatatatgctatagctttacctatgctgaattcatctcatagaa

SEQ ID NO: 579010 - DNA, 120 bp, Artificial Sequence
  ENSG00000171763_24 (sequence is synthesized)
cactctgtagggaggctgccatgcatgccctccttcatagtgagaagttccaggtttgaccataagcacctctcacttaggtggaccagtcagctgctgtcgtcccagggtggagcccac

SEQ ID NO: 579011 - DNA, 120 bp, Artificial Sequence
  ENSG00000171763_25 (sequence is synthesized)
ctacttcaggaggggcctgctcaggtgtagttaccacaggtgatggctgagttcagaaacaacccaggggaagtggaaggaagaaaggcaaaaagcatgaagggacagacaactgggaag

SEQ ID NO: 579012 - DNA, 120 bp, Artificial Sequence
  ENSG00000171766_0 (sequence is synthesized)
accccgctccgggcgcgctctcgggaaggcttggaccgacgcggcccagaggccaggaacattccgcgcgtggaccagccgggccagggcgatgctgcgggtgcggtgtctgcgcggcgg

SEQ ID NO: 579013 - DNA, 120 bp, Artificial Sequence
  ENSG00000171766_1 (sequence is synthesized)
gagccgcggcgccgaggcggtgcactacatcggatctcggcttggacgaaccttgacaggatgggtgcagcgaactttccagagcacccaggcagctacggcttcctcccggaactcctg

SEQ ID NO: 579014 - DNA, 120 bp, Artificial Sequence
  ENSG00000171766_2 (sequence is synthesized)
tgcagctgacgacaaagccactgagcctctgcccaaggactgccctgtctcttcttacaacgaatgggaccccttagaggaagtgatagtgggcagagcagaaaacgcctgtgttccacc

SEQ ID NO: 579015 - DNA, 120 bp, Artificial Sequence
  ENSG00000171766_3 (sequence is synthesized)
gttcaccatcgaggtgaaggccaacacatatgaaaagtactggccattttaccagaagcaaggagggcattattttcccaaagatcatttgaaaaaggctgttgctgaaattgaagaaat

SEQ ID NO: 579016 - DNA, 120 bp, Artificial Sequence
  ENSG00000171766_4 (sequence is synthesized)
gtgcaatattttaaaaacggaaggagtgacagtaaggaggcctgaccccattgactggtcattgaagtataaaactcctgattttgagtctacgggtttatacagtgcaatgcctcgaga

SEQ ID NO: 579017 - DNA, 120 bp, Artificial Sequence
  ENSG00000171766_5 (sequence is synthesized)
catcctgatagttgtgggcaatgagattatcgaggctcccatggcatggcgttcacgcttctttgagtaccgagcgtacaggtcaattatcaaagactacttccaccgtggcgccaagtg

SEQ ID NO: 579018 - DNA, 120 bp, Artificial Sequence
  ENSG00000171766_6 (sequence is synthesized)
gacaacagctcctaagcccacaatggctgatgagctttataaccaggattatcccatccactctgtagaagacagacacaaattggctgctcagggaaaatttgtgacaactgagtttga

SEQ ID NO: 579019 - DNA, 120 bp, Artificial Sequence
  ENSG00000171766_7 (sequence is synthesized)
gccatgctttgatgctgctgacttcattcgagctggaagagatatttttgcacagagaagccaggttacaaactacctaggcattgaatggatgcgtaggcatcttgctccagactacag

SEQ ID NO: 579020 - DNA, 120 bp, Artificial Sequence
  ENSG00000171766_8 (sequence is synthesized)
agtgcatatcatctcctttaaagatcccaatcccatgcatattgatgctaccttcaacatcattggacctggtattgtgctttccaaccctgaccgaccatgtcaccagattgatctttt

SEQ ID NO: 579021 - DNA, 120 bp, Artificial Sequence
  ENSG00000171766_9 (sequence is synthesized)
tgtcatccaaatggctttccatgaatgtcttaatgctagatgaaaaacgtgttatggtggatgccaatgaagttccaattcaaaagatgtttgaaaagctgggtatcactaccattaaag

SEQ ID NO: 579022 - DNA, 120 bp, Artificial Sequence
  ENSG00000171766_10 (sequence is synthesized)
ttaacattcgtaatgccaattccctgggaggaggcttccattgctggacctgcgatgtccggcgccgaggcaccttacagtcctacttggactgaacaggcctgatggagcttgtggctg

SEQ ID NO: 579023 - DNA, 120 bp, Artificial Sequence
  ENSG00000171766_11 (sequence is synthesized)
gcctcagatacacctaagaagcttaggggcaaggttcattctcctgctttaaaaagtgcatgaactgtagtgctttaaacaatcatctccttaacaggggtcgtaagcctggtttgcttc

SEQ ID NO: 579024 - DNA, 120 bp, Artificial Sequence
  ENSG00000171766_12 (sequence is synthesized)
tattacttttctttgacataaagaaaataacttctgctaggtattactctctactcctaaagttatttactatttggcttcaagtataaaattttggtgaatgtgtaccaagaaaaaatt

SEQ ID NO: 579025 - DNA, 120 bp, Artificial Sequence
  ENSG00000171766_13 (sequence is synthesized)
agtcacctgagtaacttggccactaataattaaccatctacctctgtttttaattttctttccaaaaggcagcttgaaatgttggtcctaatcttaattttttttcctcttctatagact

SEQ ID NO: 579026 - DNA, 120 bp, Artificial Sequence
  ENSG00000171766_14 (sequence is synthesized)
tgagaatgtttttctctaaatgagagaaagacttagaatgtacacagatccaaaatagaatcagattatctctttttttctaaaggagagaaagacttagaacatacacagatcctaagt

SEQ ID NO: 579027 - DNA, 120 bp, Artificial Sequence
  ENSG00000171766_15 (sequence is synthesized)
agaaccaggtaattgtctctttttctaataaggaatttgggtaatttttaattttttgttttttaaaaaataacctagactatgcaaaacatcaaagtgaattttccatgaatgttttta

SEQ ID NO: 579028 - DNA, 120 bp, Artificial Sequence
  ENSG00000171766_16 (sequence is synthesized)
atattctcatctcaacattgtgatatatgctactaaaaaccttttcatatacatcttacctcatttcaagtgaattattttaatctttttctctctttccaaaaatttaggaatgtttag

SEQ ID NO: 579029 - DNA, 120 bp, Artificial Sequence
  ENSG00000171766_17 (sequence is synthesized)
tgtaattggatttcgctatcagttcccatccttaagttttgatattcaatatctgatagatacactgcatctttggtcatctaagatttgtttacaaatgtgcaaattatttagagcata

SEQ ID NO: 579030 - DNA, 120 bp, Artificial Sequence
  ENSG00000171766_18 (sequence is synthesized)
gactttataagcattaaaaaaaactaatggaggtaaaacctaaatgcgatgtgaaataattttagtgttgataccgtatgtgtatttttattctaataaacttttgtgttccagattgaa

SEQ ID NO: 579031 - DNA, 120 bp, Artificial Sequence
  ENSG00000171766_19 (sequence is synthesized)
attcaacagatactgagtgtctgcccagagggcttatgtgctcaatgctagggatcagcactgaacatggagtggttggagtctcaattccaataccttatacaaagagctgtttactgc

SEQ ID NO: 579032 - DNA, 120 bp, Artificial Sequence
  ENSG00000171766_20 (sequence is synthesized)
actcaggaaagtccacgggatttaagagctccatgtcaggaacgagagtgaagaccaaacattagaaccaaagattctcctagcacccctgtaactcaggaaattacaagggtgttggga

SEQ ID NO: 579033 - DNA, 120 bp, Artificial Sequence
  ENSG00000171766_21 (sequence is synthesized)
gctctaggccagagactagaggcagagaccatatatatatttcttacttcacaacaggaaaggagagaaggtctctgaggaagtgacattccagctgagacgtgaaggataagtagaaac

SEQ ID NO: 579034 - DNA, 120 bp, Artificial Sequence
  ENSG00000171766_22 (sequence is synthesized)
tagataagaagacaatttgtagataaacaagagggttaaaaaaattatctgtaatcccactacccacctacacactgttaacgtcttggtttatgctgttctaaaggggtttaagtggca

SEQ ID NO: 579035 - DNA, 120 bp, Artificial Sequence
  ENSG00000171766_23 (sequence is synthesized)
atgttatgctggatttttactccatctccacttcctcctctctgtaagtactgatagagcaatgcaatacaataatcttttctttgttcttggaagcttggacgaaccttgacaggatgg

SEQ ID NO: 579036 - DNA, 120 bp, Artificial Sequence
  ENSG00000171766_24 (sequence is synthesized)
caaccctgaccgaccatgtcaccagattgatcttttcaagaaagcaggatggactatcattactcctccaacaccaatcatcccagacggtatgtttactttcatacactgttagactaa

SEQ ID NO: 579037 - DNA, 120 bp, Artificial Sequence
  ENSG00000171766_25 (sequence is synthesized)
aataattactttagtgaccaaggatctttctcctatagagagcagcccaaatgttagcagcttagagaatgtgtttcctcagtaaggtgtgaagtggtgcttgggactgtgagcatcaga

SEQ ID NO: 579038 - DNA, 120 bp, Artificial Sequence
  ENSG00000171766_26 (sequence is synthesized)
tttttttttttttgagacagtgtcttgctttgtcacccaggcttgagtgcagttgtgcagtcacagctcactgcagcctcaagactcctgggctcaagtgatctttccactccagcttcc

SEQ ID NO: 579039 - DNA, 120 bp, Artificial Sequence
  ENSG00000171766_27 (sequence is synthesized)
ttccactccagcttcctaagtagctgggactacaaatgcaggccactatgcccagcaagttatttttttttatttgtagagatgatgtcttgctgtgttccccagtgaggcaccatctct

SEQ ID NO: 579040 - DNA, 120 bp, Artificial Sequence
  ENSG00000171766_28 (sequence is synthesized)
agaagaattggaagaggaaagggaagagggaaaagcctgtgccaatgccctgagattggaatatgctttttgtgtttaagaaattaacagaagatcttggggactgagccagagagaaga

SEQ ID NO: 579041 - DNA, 120 bp, Artificial Sequence
  ENSG00000171766_29 (sequence is synthesized)
ccaggctccaggaacaaggaagatactgtccagaaatggtttattcatagcaacttcaaggagaagcacatctctggctgccctcagtacactaagagaatcagacctcagaggtggctg

SEQ ID NO: 579042 - DNA, 120 bp, Artificial Sequence
  ENSG00000171766_30 (sequence is synthesized)
tacatgaaaacgttaaatgagaagaactaaagaaatgacatgctaggtttgataaatggtttgtctaattcaattttgattccttttagaggcaccaagttattatttcacagaaagtca

SEQ ID NO: 579043 - DNA, 120 bp, Artificial Sequence
  ENSG00000171766_31 (sequence is synthesized)
gtatttttattttcaacacacgtagccccaacaagttggagatgcatcctgagctcctgagacatccccttaacaataagtttataaatcttatatgacttagccaacgttttggtgccc

SEQ ID NO: 579044 - DNA, 120 bp, Artificial Sequence
  ENSG00000171766_32 (sequence is synthesized)
aaatcgagttgcctaacccagagctttcccgagatggtcttcgttacaggtgtctgggaggcggcttaagctcacttcactaggtcattaagcatgtactttggtggttacatatatctt

SEQ ID NO: 579045 - DNA, 120 bp, Artificial Sequence
  ENSG00000171766_33 (sequence is synthesized)
ggaagtcaccggctttacattctgttttcctggccttcgaactggagcatcagtactaccgccgttggaatagcaacctagagactttgctattttgtgaagaaactctaactatccgca

SEQ ID NO: 579046 - DNA, 120 bp, Artificial Sequence
  ENSG00000171766_34 (sequence is synthesized)
tgggcacagaattttgggtgctctggtgcaaatgtctcagttctggaggctgggaagtcaaagacaaggcactggcagattccatgactggaaaggagagaaggtctctgaggaagtgac

SEQ ID NO: 579047 - DNA, 120 bp, Artificial Sequence
  ENSG00000171766_35 (sequence is synthesized)
aaattaacagaaggagaagcacatctctggctgccctcagtacactaagagaatcagacctcagaggtggctgcattttattgttgggaataagaagactgcaattcaggaagacatata

SEQ ID NO: 579048 - DNA, 120 bp, Artificial Sequence
  ENSG00000171766_36 (sequence is synthesized)
gtagtctataagtgattcaggactggaactcagttatcctaattccctctcggaggctctttccaccatgccatctgctcgtctggtgctttccatccatgaactctggaaaacaagctt

SEQ ID NO: 579049 - DNA, 120 bp, Artificial Sequence
  ENSG00000171766_37 (sequence is synthesized)
gagataccaaaattgaaaagacagctcatcaaaaatgaatagttataattctataagtacaaaaatgaaatactcaaatctcttgccccccctcctgctaggagcataaatgttaacctg

SEQ ID NO: 579050 - DNA, 120 bp, Artificial Sequence
  ENSG00000171766_38 (sequence is synthesized)
agttctctagctctgtacaaatccacagcaattaagactgcactgtgagggaaaatacttttctaaaaaagaatcctgatcaagttgaaacaaaaattttaaaacatgaaatggaaggaa

SEQ ID NO: 579051 - DNA, 120 bp, Artificial Sequence
  ENSG00000171766_39 (sequence is synthesized)
gagccgcggcgccgaggcggtgcactacatcggatctcgggtgcgtgcgccaccggcctcgtctggcggccgcgtgactcactcgatcctgcgggcggcgtggagcactcgctcgctccc

SEQ ID NO: 579052 - DNA, 120 bp, Artificial Sequence
  ENSG00000171766_40 (sequence is synthesized)
tgcccggagccgccaccttccctcgctttccctagccggaattgcacgagagtgtcccttctggtatccctgggaagctcagcttcaagagccttcgcaggctccaggagctgggcggcg

SEQ ID NO: 579053 - DNA, 120 bp, Artificial Sequence
  ENSG00000171766_41 (sequence is synthesized)
tcccccagtcagggggaacttgcgttgcggctccagcccttggggtccacttgctgtctgcgcgtccgcggcctgctggcccacggcgcagggggcgccgcccccctctaccggaccttg

SEQ ID NO: 579054 - DNA, 120 bp, Artificial Sequence
  ENSG00000171766_42 (sequence is synthesized)
gtgcgctgcaccaagcttcccgctcggagcaaggggttgggacgacggaggctcctcttagtaaaagggtggcgttattggggttcagtagcctgagtgggcgtcgagttggggagattt

SEQ ID NO: 579055 - DNA, 120 bp, Artificial Sequence
  ENSG00000171766_43 (sequence is synthesized)
ctggaaaatgcgtgtggggtagatggatggggagaagaggcaagcaaagtgggaatcggggacggggagcgagcgaccagattcactccaagtataacatgggatcccacgtctggagag

SEQ ID NO: 579056 - DNA, 120 bp, Artificial Sequence
  ENSG00000171766_44 (sequence is synthesized)
gagtcggggcgagtgcagcctgtaagcagagtttctgcgctccccgccctcggctgccctggcagcagaccctcccatgcttctagtactggaatcgctccgacattctggcttcctccc

SEQ ID NO: 579057 - DNA, 120 bp, Artificial Sequence
  ENSG00000171766_45 (sequence is synthesized)
agcaactggttcctgaacagctgtcattctccgtctttcttctgcctccacccgagttctcctcctgcccacttcctaaggcttttaacagagcaggatagagatttggggggttgaggt

SEQ ID NO: 579058 - DNA, 120 bp, Artificial Sequence
  ENSG00000171766_46 (sequence is synthesized)
ttgctcaggggttgagggaccctccctgctctagattttataggccatgcatttttaaaaggcttttgaagtttttagatctccttcttatttgtttgaatttacgcctgagctaatcct

SEQ ID NO: 579059 - DNA, 120 bp, Artificial Sequence
  ENSG00000171766_47 (sequence is synthesized)
gaccttggctagggtactgtggaccatctgtaaaatggagcagatggcagttgctcactctcagaattgaagtgccaaagaatgcgaagtgtatgtcaaagatgaaaaaaatttgatttg

SEQ ID NO: 579060 - DNA, 120 bp, Artificial Sequence
  ENSG00000171766_48 (sequence is synthesized)
aagctggttattctgaaagataaggtcctttacaaatgttcccaacttttcatttgtaaaaaaaaataaataaaaagcctaatattggtaacctttgatacttaagggaaaaggaggttc

SEQ ID NO: 579061 - DNA, 120 bp, Artificial Sequence
  ENSG00000171766_49 (sequence is synthesized)
cgtccccagctgagactggcgggaagttttagagcagctgtctatggttttctgagaggaggactgacccatctgcaaaacagttgcttaaagcttgagtgcaggaattgcattctgaga

SEQ ID NO: 579062 - DNA, 120 bp, Artificial Sequence
  ENSG00000171772_0 (sequence is synthesized)
gctcaggctggagaagggccgcgggacccggggaacgcggcctggaggacgaggaggactgggttcccggaggcaacaggaccggctcggcatctacagctactggcaggacacgtcctc

SEQ ID NO: 579063 - DNA, 120 bp, Artificial Sequence
  ENSG00000171772_1 (sequence is synthesized)
acagaaaattgaagacttgatggaaatggtgcaaaagctgcagaaagtgggaagcctagagccccgagttgaggtcctgattaaccggattaatgaggtccagcaagcaaaaaagaaagc

SEQ ID NO: 579064 - DNA, 120 bp, Artificial Sequence
  ENSG00000171772_2 (sequence is synthesized)
caataaagacctaggagaggcccggaccatctgtgaggccctgcagaaggaactggactcgctgcatggagagaaagtacacctgaaggagatcttgagcaaaaaacaagagaccctgag

SEQ ID NO: 579065 - DNA, 120 bp, Artificial Sequence
  ENSG00000171772_3 (sequence is synthesized)
gatcctccggctgcattgccaggaaaaggaaagtgaggcacacaggaagcacaccatgttgcaggagtgcaaggagagaatttctgccctgaacttgcagattgaagaagagaagaacaa

SEQ ID NO: 579066 - DNA, 120 bp, Artificial Sequence
  ENSG00000171772_4 (sequence is synthesized)
acagagacagctgaggttggcattcgaggaacagctggaagatctgatgggccagcacaaggacctctgggacttccacatgccagagcggctggcaaaggagatttgtgccctggacag

SEQ ID NO: 579067 - DNA, 120 bp, Artificial Sequence
  ENSG00000171772_5 (sequence is synthesized)
gaagcatcagctgtgctccctgtgtggggctgagggcccctccacccttgatgagggactctttctccgcagccaggaggctgcagccacagtgcagctgtttcaggaagagcacaggaa

SEQ ID NO: 579068 - DNA, 120 bp, Artificial Sequence
  ENSG00000171772_6 (sequence is synthesized)
ggctgaggagctcctagcagctgctgcccagcgccaccagcagctgcagcagaagtgccaacaacagcagcagaagcggcagaggctgaaggaagagctggaaaagcatggaatgcaagt

SEQ ID NO: 579069 - DNA, 120 bp, Artificial Sequence
  ENSG00000171772_7 (sequence is synthesized)
ccctgcccaagcccagagcacacaagaggaagaggctggcccaggagatgtggctcccagaccaggtagaccagtgacatggtggagttgaagagagaggctcactgcagagcactgttt

SEQ ID NO: 579070 - DNA, 120 bp, Artificial Sequence
  ENSG00000171772_8 (sequence is synthesized)
ccatggaaaaatggaacatggcaaagtgcagaaattcttcagtcagtccaggacagacgagttctctaagatgcagttaatcatacctgtcttaaacaaactggcaatatactatcaaac

SEQ ID NO: 579071 - DNA, 120 bp, Artificial Sequence
  ENSG00000171772_9 (sequence is synthesized)
atgacttttaaatcaagtggaagttagaaaatatattgaactgagtggcaatgaagacaccacattttaaaactgtaattcagttaagcccacaattagaaggaactttagcttttattg

SEQ ID NO: 579072 - DNA, 120 bp, Artificial Sequence
  ENSG00000171772_10 (sequence is synthesized)
gttcaccacaattttttaagaaatcaaccaatgattgttcagttaatgaataaaaggcctttgacacagttcacctattcatgtgaaaaaaaaagactaataaatagtcagcttccctta

SEQ ID NO: 579073 - DNA, 120 bp, Artificial Sequence
  ENSG00000171772_11 (sequence is synthesized)
aatcaccactggaggctccctcccgaggcaccctcgctggcgagctgagaggaaatggcggggaggtccctgacatcgaaggccgagcccaccgcaggagccgtggacagggctgagaag

SEQ ID NO: 579074 - DNA, 120 bp, Artificial Sequence
  ENSG00000171772_12 (sequence is synthesized)
aggagaaagacctggagctgcacaccaagcagggcctgatgtcctcataggccaggaggacacactccaccccgaccttagcccaaggggctttcaggaaataaaggagctattttgata

SEQ ID NO: 579075 - DNA, 120 bp, Artificial Sequence
  ENSG00000171772_13 (sequence is synthesized)
gccggagggcaggacacgtcctcacagaaaattgaagacttgatggaaatggtgcaaaagctgcagaaaggtcgtgtgtctcctttgtgtgaggcacagcctgaggtttggggccaggca

SEQ ID NO: 579076 - DNA, 120 bp, Artificial Sequence
  ENSG00000171772_14 (sequence is synthesized)
gatgtgggtttaatttcaggccccacaatgtacgaatttgggaaataatcctcttcaccttctctttcttttaaaacttaattacttaaactaaaaatagggccccatgtttcaaaatta

SEQ ID NO: 579077 - DNA, 120 bp, Artificial Sequence
  ENSG00000171772_15 (sequence is synthesized)
aagaagcaaaagggtatagaaggcaaaatgttttcccaaaaccctgtcccaaacctctcgctggtcacccatctggctccactgcagtccattagatccagaagttgccgccttcacttc

SEQ ID NO: 579078 - DNA, 120 bp, Artificial Sequence
  ENSG00000171772_16 (sequence is synthesized)
ccttccttccccctcacccgctactccctctttgctcgctaggctcctgccagccatgttcccacctcatgatgggtctttgcactgactacctcccaaccccacccaaattgctgcagg

SEQ ID NO: 579079 - DNA, 120 bp, Artificial Sequence
  ENSG00000171772_17 (sequence is synthesized)
gcctgccccccaccacttgatttggggccctcaggtcccttcccatatctcaggagcacttcccactcctttgctctttagcctcccttggcctacttcatttctcttgaacacggttac

SEQ ID NO: 579080 - DNA, 120 bp, Artificial Sequence
  ENSG00000171772_18 (sequence is synthesized)
cgcagccccattcggtatcttattgtgtctgttcccagtcttgcccacccagaacgtgagccccgtgagggccccacagagcacctgcttgcaggaggtactcaatagatctgtgttgcg

SEQ ID NO: 579081 - DNA, 120 bp, Artificial Sequence
  ENSG00000171772_19 (sequence is synthesized)
tgaaagcagcagagacacaaggctggcaaccgccccaactctgcctgccctgtcaactcaacctcctttcctccgtgcagtgggaagcctagagccccgagttgaggtcctgattaaccg

SEQ ID NO: 579082 - DNA, 120 bp, Artificial Sequence
  ENSG00000171772_20 (sequence is synthesized)
gattaatgaggtccagcaaggtgagttcaggggccttggctgccagctaggaccagctgcatggtttgcggggctcagtgccaagtgagaatgcagggtcccttgttccaaagttactgg

SEQ ID NO: 579083 - DNA, 120 bp, Artificial Sequence
  ENSG00000171772_21 (sequence is synthesized)
ttattcacaacagcaacagcagagccttaaattaagtacagggcatttcagcatgcgactgccatagttacatgcccatgatcctggccctgctatcagcagagcctggcaaggagagct

SEQ ID NO: 579084 - DNA, 120 bp, Artificial Sequence
  ENSG00000171772_22 (sequence is synthesized)
accccatcctccctgaaacaaggccggaggttgaggaggtctccgcccggccccgcagctgacaaccggtggagaaaccgcacctgccacgggaggggccgcggggtgggctcgagccac

SEQ ID NO: 579085 - DNA, 120 bp, Artificial Sequence
  ENSG00000171772_23 (sequence is synthesized)
catggggctggtacaagcaccctctccgctcaggacctcggccctcatcccagggcaccagggctcacagggggatgggcccgggtggggacgagggtgtggaggggcaggaagcacggc

SEQ ID NO: 579086 - DNA, 120 bp, Artificial Sequence
  ENSG00000171772_24 (sequence is synthesized)
gggtggagcggagccgggtgcgggggtcgcgggggaccgcggggacggggccttgtgatgcaggagacggagggggctggtgacggaggacgggaggccgcaaggatgggggacgcgaca

SEQ ID NO: 579087 - DNA, 120 bp, Artificial Sequence
  ENSG00000171772_25 (sequence is synthesized)
tccttttcccctcccaccggctcaccagggatgcgcctccgcgactgcccgccccaatcccagggcggaggcctcgcgcaaaacccaggcgccgcggctccgcgctccggctgagggtcc

SEQ ID NO: 579088 - DNA, 120 bp, Artificial Sequence
  ENSG00000171772_26 (sequence is synthesized)
gcgccgccgcccgcccgctccttcccgctcggccgcggcctcagggacggatactccagcgcgcggttccaaccgaggcccgtggcgggtttagccccatgaagatgaactgggcacccg

SEQ ID NO: 579089 - DNA, 120 bp, Artificial Sequence
  ENSG00000171772_27 (sequence is synthesized)
tccgcgggggctcgagaggggcctcgagggtgtgtgtgaggccggcgctgtgctatggtgccccgggctcctccctgcgcgtggctgcggccggggcggcgggctcaggctggagaaggg

SEQ ID NO: 579090 - DNA, 120 bp, Artificial Sequence
  ENSG00000171772_28 (sequence is synthesized)
agggccgcgggacccggggaacgcggcctggaggacgaggaggactgggttcccggaggcaacaggaccggctcggcatctacagctactgtacgtggacttcgggcgctggacccacgg

SEQ ID NO: 579091 - DNA, 120 bp, Artificial Sequence
  ENSG00000171772_29 (sequence is synthesized)
gcggcctgtgcctctgtgtcgggctgggtggcgccctcagtgccctggggctgctgcggccctaggcctggctgggctcggtgaccacatctggcccccgggccgcaccgtcccccagga

SEQ ID NO: 579092 - DNA, 120 bp, Artificial Sequence
  ENSG00000171772_30 (sequence is synthesized)
tcctccggcctgggctcccccttcctcccttgcccacagtcttggagccccagtgggtgcaggagctgctggctgcccctgtggacccgccatccaccgtcctgcccatgctgcctcgcc

SEQ ID NO: 579093 - DNA, 120 bp, Artificial Sequence
  ENSG00000171772_31 (sequence is synthesized)
atccacctgcctgcccacgccgcctcagcctcccacctcccacctagaggagaccatgggccctgccccacctgctccaggatgttagggtcccctcagccaaaaaggcagtggcctgtg

SEQ ID NO: 579094 - DNA, 120 bp, Artificial Sequence
  ENSG00000171773_0 (sequence is synthesized)
aaagatttctatttctgggagaggagccagtcagcagaccggggaccacacgccgcgctgtccccagcacccaacccaggttaccatggcctccctgttctctggccgcatcctgatccg

SEQ ID NO: 579095 - DNA, 120 bp, Artificial Sequence
  ENSG00000171773_1 (sequence is synthesized)
caacaatagcgaccaggacgagctggatacggaggctgaggtcagtcgcaggctggagaaccggctggtgctgctgttctttggtgctggggcttgtccacagtgccaggccttcgtgcc

SEQ ID NO: 579096 - DNA, 120 bp, Artificial Sequence
  ENSG00000171773_2 (sequence is synthesized)
catcctcaaggacttcttcgtgcggctcacagatgagttctatgtactgcgggcggctcagctggccctggtgtacgtgtcccaggactccacggaggagcagcaggacctgttcctcaa

SEQ ID NO: 579097 - DNA, 120 bp, Artificial Sequence
  ENSG00000171773_3 (sequence is synthesized)
ccggacggggacgtgctcactcgcgacggcgccgacgagatccagcgcctgggcaccgcctgcttcgccaactggcaggaggcggccgaggtgctggaccgcaacttccagctgccagag

SEQ ID NO: 579098 - DNA, 120 bp, Artificial Sequence
  ENSG00000171773_4 (sequence is synthesized)
gacctggaggaccaggagccacggagcctcaccgagtgcctgcgccgccacaagtaccgcgtggaaaaggcggcgcgaggcgggcgcgaccccgggggagggggtggggaggagggcggg

SEQ ID NO: 579099 - DNA, 120 bp, Artificial Sequence
  ENSG00000171773_5 (sequence is synthesized)
gaggagggcggggccggggggctgttctgacccgctagggtggaggagaggagtggggtttgttgatgaacctccacccccaccccacccccgcacgcctgtaatcccagcacttgggga

SEQ ID NO: 579100 - DNA, 120 bp, Artificial Sequence
  ENSG00000171773_6 (sequence is synthesized)
aggatcgcttgagcccagaggttcgagatcaacctgggcaagagagtgagaccctgactctacgaaaattaaaagttagcccggtgtggtggcgcgcacctgtggcttagctaccctgaa

SEQ ID NO: 579101 - DNA, 120 bp, Artificial Sequence
  ENSG00000171777_0 (sequence is synthesized)
gtcctgggcaaggggaggagctgagccctactcttgcaagacccccggcctcctcaccccacgcgggaagcatgaacagaaaagacagtaagaggaagtcccaccaggaatgcaccggaa

SEQ ID NO: 579102 - DNA, 120 bp, Artificial Sequence
  ENSG00000171777_1 (sequence is synthesized)
aaataggagggcgaggccggccccgccaagtgcgccgccacaagacatgccccagccctcgggaaatcagcaaggtcatggcttccatgaacctgggcctgctgagtgagggcggctgca

SEQ ID NO: 579103 - DNA, 120 bp, Artificial Sequence
  ENSG00000171777_2 (sequence is synthesized)
gcgaagatgagctgctggagaaatgcatccagtccttcgattcagctggcagcctgtgccacgaggaccacatgctcaacatggtgctggccatgcacagctgggtgctgccgtccgccg

SEQ ID NO: 579104 - DNA, 120 bp, Artificial Sequence
  ENSG00000171777_3 (sequence is synthesized)
acctggctgcccgcctgctgacctcataccagaaggccacaggggacacccaggagctgagacggctgcagatctgtcacctggtcaggtactggctgatgcgacaccctgaggtgatgc

SEQ ID NO: 579105 - DNA, 120 bp, Artificial Sequence
  ENSG00000171777_4 (sequence is synthesized)
accaggatccccagctagaagaagtcataggtcgtttctgggccaccgtggcccgggagggcaactcagcccagagaagactgggagactcttctgacctcctgagccctggtggccctg

SEQ ID NO: 579106 - DNA, 120 bp, Artificial Sequence
  ENSG00000171777_5 (sequence is synthesized)
gccccccactcccaatgagcagcccaggcctgggcaaaaagcgcaaagtgtccttgcttttcgaccacttggagacgggggagctggctcagcacctcacctacctggagttccggtcct

SEQ ID NO: 579107 - DNA, 120 bp, Artificial Sequence
  ENSG00000171777_6 (sequence is synthesized)
tccaggctatcacgccccaggacctgcggagctacgttttgcagggctcagtacgaggctgcccggccctggagggctccgtaggtctcagcaacagcgtgtcccgctgggtgcaggtga

SEQ ID NO: 579108 - DNA, 120 bp, Artificial Sequence
  ENSG00000171777_7 (sequence is synthesized)
tggtgctgagccgtcccgggcccctacagcgtgcacaggtgctggacaagttcattcacgtggcacagaggctccaccagctgcagaatttcaacacgctgatggcagtcacagggggcc

SEQ ID NO: 579109 - DNA, 120 bp, Artificial Sequence
  ENSG00000171777_8 (sequence is synthesized)
tgtgtcacagtgccatctccagactcaaggactcccatgcccacctgagccctgacagcaccaaggccctcctggagctcactgagctccttgcctcccacaacaactacgcccgctacc

SEQ ID NO: 579110 - DNA, 120 bp, Artificial Sequence
  ENSG00000171777_9 (sequence is synthesized)
tggctgcgcgggtttccggctgcctgtactgggcgtgcacctcaaggacctggtgtccctgcatgaggcacagcccgacaggttgcctgacggccgcctgcacctacccaagctgaacaa

SEQ ID NO: 579111 - DNA, 120 bp, Artificial Sequence
  ENSG00000171777_10 (sequence is synthesized)
cctctacctgcggctgcaggagctggtggccctccaagggcagcatccaccctgcagcgccaatgaggatctgctgcacctgctcacgctctccctggacctcttctacacggaagacga

SEQ ID NO: 579112 - DNA, 120 bp, Artificial Sequence
  ENSG00000171777_11 (sequence is synthesized)
gatctatgagctttcttatgcccgggagccgcgttgtcccaagagcctgccaccctcccccttcaatgcacctctggtggtggagtgggcccctggtgtgacacccaagccggacagggt

SEQ ID NO: 579113 - DNA, 120 bp, Artificial Sequence
  ENSG00000171777_12 (sequence is synthesized)
cacactgggtcggcatgtggagcagctggtggagtctgtgttcaagaattatgaccctgaaggccgaggaacaatctctcaggaggactttgagcgactctcgggcaattttcccttcgc

SEQ ID NO: 579114 - DNA, 120 bp, Artificial Sequence
  ENSG00000171777_13 (sequence is synthesized)
ctgccatgggcttcacccacccccacgccaggggagaggatccttcagcagagaggagctgacagggtacctgctccgggccagcgccatctgctccaagttgggcctggccttcctgca

SEQ ID NO: 579115 - DNA, 120 bp, Artificial Sequence
  ENSG00000171777_14 (sequence is synthesized)
caccttccatgaggtcaccttccgaaagcctaccttctgcgacagctgcagtggcttcctctggggtgtcaccaagcaaggctaccgctgtcgggagtgcgggctgtgttgccacaaaca

SEQ ID NO: 579116 - DNA, 120 bp, Artificial Sequence
  ENSG00000171777_15 (sequence is synthesized)
ctgcagagaccaggtgaaggtagaatgtaagaagaggccaggggccaagggcgatgcaggaccccccggagctcctgtcccatccacaccagctccccatgccagctgtggctccgagga

SEQ ID NO: 579117 - DNA, 120 bp, Artificial Sequence
  ENSG00000171777_16 (sequence is synthesized)
aaatcactcctacacgctatccctggagcctgagactgggtgccagcttcgccatgcctggacccagactgaatccccacacccttcctgggaaacagatacggtcccctgcccggtgat

SEQ ID NO: 579118 - DNA, 120 bp, Artificial Sequence
  ENSG00000171777_17 (sequence is synthesized)
ggacccaccatcaactgcatcctccaagctggattcctagacatctcttggtctcctctcttcctcactcccttcccccagtcagtcctgagtcctgccgtcagactctggcagggctcc

SEQ ID NO: 579119 - DNA, 120 bp, Artificial Sequence
  ENSG00000171777_18 (sequence is synthesized)
cagaggtaggcctccagaggcatccgccttcccatccacactgcctttagtggtacgtccgtcatctttttccctggaagtgactttcctcttttgcatcctggtggatgctaatcctgc

SEQ ID NO: 579120 - DNA, 64 bp, Artificial Sequence
  ENSG00000171777_19 (sequence is synthesized)
ctgtgcggctgtgtgttggatacatttagactcaggcctcattctaccaactccctacatctcc

SEQ ID NO: 579121 - DNA, 85 bp, Artificial Sequence
  ENSG00000171777_20 (sequence is synthesized)
cagctcctgtttttctgcatagaatgtgctccctctgacagcctatactttttccctctttatctcgttgaacgtctgtctttcc

SEQ ID NO: 579122 - DNA, 120 bp, Artificial Sequence
  ENSG00000171777_21 (sequence is synthesized)
tactttttccctctttatctcgttgaacgtctgtctttcctcaacaggagcatcaactccaggagaacagggatttctatcaatgtcattcactgctgcatccccagtgcctagaacagg

SEQ ID NO: 579123 - DNA, 120 bp, Artificial Sequence
  ENSG00000171777_22 (sequence is synthesized)
gctggcaggtggtaggcgcctgacagatgcttgtctgatgcctgaatgtctccttacccatgcccacggcacaggatagatgtgctatagggcaaagaactttgagggtcgagcagcagg

SEQ ID NO: 579124 - DNA, 120 bp, Artificial Sequence
  ENSG00000171777_23 (sequence is synthesized)
ggcccattcagtcccagggagcagagacccccccaaccccttcacaaaccccaacacccctgacttggcccccacagagagaggtcctacagctgtcataaattaaatttattctctgga

SEQ ID NO: 579125 - DNA, 120 bp, Artificial Sequence
  ENSG00000171777_24 (sequence is synthesized)
atccccgtgtgggggaggggggccttcggtctctccccagcctcttccttccccctggcctgagggtgggtggggaggggcagttcctctttccttcccaagcaccgaggaggccccagc

SEQ ID NO: 579126 - DNA, 120 bp, Artificial Sequence
  ENSG00000171777_25 (sequence is synthesized)
agactcttctgacctgtgagtcagccctgtgctcccctcttccctgccccatcgccattctgccatctccctctatatccccaagccctcaactgtgagccactccaataccctgcccct

SEQ ID NO: 579127 - DNA, 120 bp, Artificial Sequence
  ENSG00000171777_26 (sequence is synthesized)
gaagacatctgtagaaccctgagcctggaggtggggacttatggccatggggatcatatttcgacaactgggccttatctgcttccccacactcctctgaagtctgtgttcaagaattat

SEQ ID NO: 579128 - DNA, 120 bp, Artificial Sequence
  ENSG00000171777_27 (sequence is synthesized)
tgcagtggcttcgtgagcaccccaccccatcaccacccttaggttccatctgtcctgaagccggcagtccgcaaaccccagataacccccaaattccagaaatcctccagcttcaaatca

SEQ ID NO: 579129 - DNA, 120 bp, Artificial Sequence
  ENSG00000171777_28 (sequence is synthesized)
tcctgtttcatataaaccctaaacaccagacattccctatatcctggataatctccaaatgccagataatcccaaaatcccagataatgtccaccccagacaattgctgaaccatggata

SEQ ID NO: 579130 - DNA, 120 bp, Artificial Sequence
  ENSG00000171777_29 (sequence is synthesized)
caattgctgaaccatggataatacctaaaactctagataggaggccaggagatcctcccaccttggcctcccaacctcccaccttggcgtctcaaagtgctgggattactggcatgagcc

SEQ ID NO: 579131 - DNA, 120 bp, Artificial Sequence
  ENSG00000171777_30 (sequence is synthesized)
ctttaattccagttaaatctctagccttgagaatttcaaaacctgggtagcttccacacttccactccccagctgccctgccaatccacagccctccctctcctaggatgggtaaccttt

SEQ ID NO: 579132 - DNA, 120 bp, Artificial Sequence
  ENSG00000171777_31 (sequence is synthesized)
tctcctttctcttcccagctctggggtgtcaccaagcaaggctaccgctgtcggggtgagtggggtgtcagtgagtgggagggaagccttggcccgcaggctggaagaatggatgacaca

SEQ ID NO: 579133 - DNA, 120 bp, Artificial Sequence
  ENSG00000171786_0 (sequence is synthesized)
gtgtgtgtctgagggtgtgtgtgtgagtgtggctggccccagtacctggccaagcccaccacttccacctgggccctacacccccacaatgtgtacccctcttatctgccctggagcctg

SEQ ID NO: 579134 - DNA, 120 bp, Artificial Sequence
  ENSG00000171786_1 (sequence is synthesized)
tacagccatgccacgctacccctgagagtctagaaagctggtcactaactttgcagacggatgagccttgagcacccagaggagactggggctgtcaacgctgccccttgtcctgccggc

SEQ ID NO: 579135 - DNA, 120 bp, Artificial Sequence
  ENSG00000171786_2 (sequence is synthesized)
ttggatcccctgacagggtccttctaggcttcagactggcaccctgaccatggaaccctgaagtggcagtgacttctagagctcagtggcagaccccacgacccttcctcccccttcctc

SEQ ID NO: 579136 - DNA, 120 bp, Artificial Sequence
  ENSG00000171786_3 (sequence is synthesized)
cccctcccaccaccagctttcaagctcccagagggaggggtggggaggggatcctgatctcacagggcagggggcttccatcatgatgctcaactcagacaccatggagctggacctgcc

SEQ ID NO: 579137 - DNA, 120 bp, Artificial Sequence
  ENSG00000171786_4 (sequence is synthesized)
gcccacccactcagagactgagtcgggcttcagtgactgtgggggcggggcgggccctgatggtgccgggcctgggggtccgggagggggccaggcccgaggcccagagccgggagagcc

SEQ ID NO: 579138 - DNA, 120 bp, Artificial Sequence
  ENSG00000171786_5 (sequence is synthesized)
tggccggaaagacctgcagcatctgagccgcgaggagcgccggcgccggcgccgcgccacagccaagtaccgcacggcccacgccacgcgagaacgcatccgcgtggaagccttcaacct

SEQ ID NO: 579139 - DNA, 120 bp, Artificial Sequence
  ENSG00000171786_6 (sequence is synthesized)
ggccttcgccgagctgcgcaagctgctgcctacgctgccccccgacaagaagctctccaagattgagattctgcgcctggccatctgctatatctcctacctgaaccacgtgctggacgt

SEQ ID NO: 579140 - DNA, 120 bp, Artificial Sequence
  ENSG00000171786_7 (sequence is synthesized)
ctgaactcagcctgtctcccacctcccgggcctctctggggcccctttccaccgctcactgcttagaaaggccgcatcctccccgagcccttataccttggcatggagtcccaaaggccc

SEQ ID NO: 579141 - DNA, 120 bp, Artificial Sequence
  ENSG00000171786_8 (sequence is synthesized)
tgggcacaggcagagagcccaccggctggtcatgagggcctcttcctttctctgacccaggcacctcgagggctattctcctgggttccttccggggtttattgctgaggcccagctgtg

SEQ ID NO: 579142 - DNA, 120 bp, Artificial Sequence
  ENSG00000171786_9 (sequence is synthesized)
cagaattgtttgctagtgtggttggtatggaatccttgctggctttactaagccagccacacttggagtctgcccccaagctctctcactgaatgctgcctcttctacccctatgtccaa

SEQ ID NO: 579143 - DNA, 120 bp, Artificial Sequence
  ENSG00000171786_10 (sequence is synthesized)
ctgttctagcttctcctgcccctggtggggatgggctgtcagaattgcaagggaggaaggctggggttagagtggggagtgggcttcttcctccaagatctcagtctctcagtgcttggc

SEQ ID NO: 579144 - DNA, 120 bp, Artificial Sequence
  ENSG00000171786_11 (sequence is synthesized)
agaggggtgaggccctggggaggcaggggttggtgccctgactcctgtgaggggaatctcagtagctgggaattatggaaaaactcttcctgtttctgtccatcttgttcctgtggctta

SEQ ID NO: 579145 - DNA, 120 bp, Artificial Sequence
  ENSG00000171786_12 (sequence is synthesized)
gcacatacagacctcagatcttacttggtagtgagtgccttgccctctttgagctatttggctacttccctgtccctctgactcctactgtcccaattttctccctccctgtgtgtcact

SEQ ID NO: 579146 - DNA, 120 bp, Artificial Sequence
  ENSG00000171786_13 (sequence is synthesized)
agagaaaaaaaaaaacaaaaacctagattccggattaggggatgacatcccaaacagcccggagtatttgcagaaggctcaggcaacgagtgggccacatctcacttctgcttcctcatc

SEQ ID NO: 579147 - DNA, 120 bp, Artificial Sequence
  ENSG00000171786_14 (sequence is synthesized)
tcagcccactctgaaaatgtgcagcaccctcactggttcctccccccaacgcaaggaggatgcccaattgttgccctctgaaaatgcacagttctcctggccctaggacttacttattac

SEQ ID NO: 579148 - DNA, 120 bp, Artificial Sequence
  ENSG00000171786_15 (sequence is synthesized)
atttttttctctttccttgagctgcctttggcaagggaagagacccccaactctgcgcccctactccatgctgctgatccccacctgcgcactatagctcagggtcagcagtggaatgaa

SEQ ID NO: 579149 - DNA, 120 bp, Artificial Sequence
  ENSG00000171786_16 (sequence is synthesized)
gggccttagaacctgcatagaagaaatgaactcactgcatttctgtgctccctcctccctcgcaccaaactcctagctctacaagtatatttatttatttatttatttattcatctattt

SEQ ID NO: 579150 - DNA, 120 bp, Artificial Sequence
  ENSG00000171786_17 (sequence is synthesized)
atttacttatttatttatttataaatattgctatttattgccgagttgtgcactttggggtagagtgaggggctcccagcagctctagctgggtctctcttgcttcctccctgcttacgc

SEQ ID NO: 579151 - DNA, 120 bp, Artificial Sequence
  ENSG00000171786_18 (sequence is synthesized)
ctttccttttcttgctccttcttcaactcctggtgtgtgtgagcatgccctttgcttgccacaccatatcctttccccagatccacctgtcctgacactctagtcctccaggatagtgct

SEQ ID NO: 579152 - DNA, 120 bp, Artificial Sequence
  ENSG00000171786_19 (sequence is synthesized)
cctcccccagctccagggctcctggatgtccttcctcaactccctccacccctagacaatcctacctggtcccatctgcctcttttctctccccagcctgccctgtgacccttgcctctt

SEQ ID NO: 579153 - DNA, 120 bp, Artificial Sequence
  ENSG00000171786_20 (sequence is synthesized)
cctgatactcccaagagcaggccccaggggtctgtgtcacatatctctgtgtgattccttctggttgcatccccaatttcatacaaaaagaaaaataaaagtgacctcgttctagcacca

SEQ ID NO: 579154 - DNA, 120 bp, Artificial Sequence
  ENSG00000171790_0 (sequence is synthesized)
gttccctgagagctaccggccaggggtcgggaggctatgggagctcagggcaggcacctcccatgctcccgcgggagccaccaggacatgaaggtcataggagccgggacactccctgag

SEQ ID NO: 579155 - DNA, 120 bp, Artificial Sequence
  ENSG00000171790_1 (sequence is synthesized)
tcctctgggagcccttaagccacactgagaacacagaccctgggagaagcagccagcagtgaggaatcctggaaccccttcccagggagagccttcccatgacccccatgaagagatcag

SEQ ID NO: 579156 - DNA, 120 bp, Artificial Sequence
  ENSG00000171790_2 (sequence is synthesized)
tgcaaacacaggtgtcagagcccttcatggagtcctggggtgaggagtccctgccggagctacccgcagagcagtccctgacggagtactctgacctcgaggaggctccctcggcgcaca

SEQ ID NO: 579157 - DNA, 120 bp, Artificial Sequence
  ENSG00000171790_3 (sequence is synthesized)
ctctctatgtgggccatctgaacccccagttctcagtgccggtgcttgcctgcctgctgcgagacaccctggagcggctggagatgccggtggcgcgggagcacattgaagtggtgaggc

SEQ ID NO: 579158 - DNA, 120 bp, Artificial Sequence
  ENSG00000171790_4 (sequence is synthesized)
ggccgcggaaggcctatgcactggtgcaggtgactgtccacagggacaccctggcctccctcccctggcgcctgcagacggccctggaggagcacctaatcctcaaggagctggcagccc

SEQ ID NO: 579159 - DNA, 120 bp, Artificial Sequence
  ENSG00000171790_5 (sequence is synthesized)
gtgggaaggacctgctattgagtgaggcccaagggcccttcagccacagagaggagaaggaggaggaggaggaggacagtggcctgagccctggccccagtccaggctctggtgtcccgc

SEQ ID NO: 579160 - DNA, 120 bp, Artificial Sequence
  ENSG00000171790_6 (sequence is synthesized)
tgcccacctggcctacacacacgctgcctgataggccccaggcccagcagctgcagagctgccagggccggcccagcggcgtgtgctccgacagtgccattgtgcaccagcagatcgtgg

SEQ ID NO: 579161 - DNA, 120 bp, Artificial Sequence
  ENSG00000171790_7 (sequence is synthesized)
gcaaggaccagctcttccagggtgccttcctgggcagcgagacccgcaatatggagttcaagcggggtagcggcgagtacctcagcctggccttcaagcaccacgtgcggcgctacgtgt

SEQ ID NO: 579162 - DNA, 120 bp, Artificial Sequence
  ENSG00000171790_8 (sequence is synthesized)
gctcgtgggagtagaggacagcggcctggtgcagggcatccgctgcagccaccgtgacgaggaccgcgcacgcctgctggtggactccatcctgcagggcttcaagcctcagatctttcc

SEQ ID NO: 579163 - DNA, 120 bp, Artificial Sequence
  ENSG00000171790_9 (sequence is synthesized)
cgatgcctacactctcaccttcatccctgtgatcagtacctcggagaccagcgtccccctcaaggtgatccgcctgaccgtgcacacccccaaggcccagagccagccgcaactctacca

SEQ ID NO: 579164 - DNA, 120 bp, Artificial Sequence
  ENSG00000171790_10 (sequence is synthesized)
gacagaccagggggaggtgtttctgcggcgcgacgggagcatccagggcccgctgtctgccagcgccatccaggagtggtgcaggcagaggtggctggtggagctgggcaagctggaaga

SEQ ID NO: 579165 - DNA, 120 bp, Artificial Sequence
  ENSG00000171790_11 (sequence is synthesized)
gaagatgaaggcgctgatgatggagaaggagcagctccagcagcagctgcagcagcacgggcctgtgtcctgcacctgctgtgtcctgtgagggccctggggagcaggcaggacggcacg

SEQ ID NO: 579166 - DNA, 120 bp, Artificial Sequence
  ENSG00000171790_12 (sequence is synthesized)
gcactctccacctgagacccagggatttcctgtttgagtgtaaggccaaccagtaaagcccatgcgggctgctgagaggcggacagggactccttcaacatggcacatgagcaggcaccc

SEQ ID NO: 579167 - DNA, 120 bp, Artificial Sequence
  ENSG00000171790_13 (sequence is synthesized)
atgtggcttcaaccctgacagacccatctgtgtagccaagaaactgctctcagccctgtccccaaatgaccttactttcagaaagaatgtgtaaaaccctgcccagagctcccctagggc

SEQ ID NO: 579168 - DNA, 120 bp, Artificial Sequence
  ENSG00000171790_14 (sequence is synthesized)
taagctataagggattgtccttctccctaaaatgctcatttggcccaggctgaggtctgtgactccagttggctacacagtgccagaaaggaatctgtcatctcaggaaagcccctcaaa

SEQ ID NO: 579169 - DNA, 120 bp, Artificial Sequence
  ENSG00000171790_15 (sequence is synthesized)
gatggcgaggcatatttgatgactgtggttacagggcaagaggccaccctgcagcccccacccctgacttgctggaacttgtgactgtcaaagctccattaataaattacatgcacctgg

SEQ ID NO: 579170 - DNA, 120 bp, Artificial Sequence
  ENSG00000171790_16 (sequence is synthesized)
gaacccaccactccaagctgcctgcagagcacctatactttctaatactattacctaatactagagagccagagacaccgtaaataaccttgttatcttatatttatgtatttaaaagat

SEQ ID NO: 579171 - DNA, 120 bp, Artificial Sequence
  ENSG00000171790_17 (sequence is synthesized)
ggttcataaatgtgtttagtgcttaccatgaaagacaatttttacccccatctccaaaaagaagtagaactgattcagctcacagaaggctgttaaaggcgccagagaaatatgtgatgc

SEQ ID NO: 579172 - DNA, 120 bp, Artificial Sequence
  ENSG00000171790_18 (sequence is synthesized)
agtggcttaaagagactgccaggaagagtggggaaagttgctgcactcaagtcaatttgggaaatttcatgcagaacagccacccaatagcaaggcctctaggtaagtagggagaacgcc

SEQ ID NO: 579173 - DNA, 120 bp, Artificial Sequence
  ENSG00000171790_19 (sequence is synthesized)
tctggtcatgttcaggtgtttcgtctgtcaaggtgcttctcccggacagctatttctgcacagttcaacacgacttgagttggccatctcaaaacagctatagcctcagttgctgtgagg

SEQ ID NO: 579174 - DNA, 120 bp, Artificial Sequence
  ENSG00000171790_20 (sequence is synthesized)
gcacctcatggatgacagaggcaagaaaggcttgagggagagggggtgaggcagggggagcttggagccgtcattctctaaccctaagagctgtggacacaaagccgagcccaacctggc

SEQ ID NO: 579175 - DNA, 120 bp, Artificial Sequence
  ENSG00000171790_21 (sequence is synthesized)
tgctgcccgggcgggcaaggagagggcaccgaatgcactctccccagagcctcgcactgccaccagttgaggcctgcgcccctctcttccccgcacaccatagcctcttttcttgagtgc

SEQ ID NO: 579176 - DNA, 120 bp, Artificial Sequence
  ENSG00000171790_22 (sequence is synthesized)
tctacccaaactactgcctcaccccctaggaaacaaacatttggtaacatcttcagaaaggctgctttcaaggaaggcagcttctctacgctgtcaaacagctttcttagttgaagcatc

SEQ ID NO: 579177 - DNA, 120 bp, Artificial Sequence
  ENSG00000171790_23 (sequence is synthesized)
taactgtggcaccatccttactgcccccaattggggcttccagaagcagtgtgggcaagcgctgccagccttctgcagaatgatgagcactggtcagtcctgtgctgataaagactgtgt

SEQ ID NO: 579178 - DNA, 120 bp, Artificial Sequence
  ENSG00000171790_24 (sequence is synthesized)
gtcacccacgtcttggtttctccaacagcaggtaacaacctcatcttcccaaagagatagatagctacgcctgacctatttttcagggctcttctggacagcagcctctgtctccagcac

SEQ ID NO: 579179 - DNA, 120 bp, Artificial Sequence
  ENSG00000171790_25 (sequence is synthesized)
agagaagggcctggcgtcagggggagccctggagcctaccatgtgcctcctgctccatcttgggagcagctgggccctgtcagtactcagtagagcctgggattggtgactgactaaaga

SEQ ID NO: 579180 - DNA, 120 bp, Artificial Sequence
  ENSG00000171790_26 (sequence is synthesized)
gggaggtggaggctttaggcagcagcgctgaaagaggtggcaagaggtgacctgcatgggaactggggcctgaagagacatcactaagtggggaagtgtgtcccacagccaagctgcatg

SEQ ID NO: 579181 - DNA, 120 bp, Artificial Sequence
  ENSG00000171790_27 (sequence is synthesized)
gtgggtgggccgctgggtctgcttccagtgtgtggtgggacccacagggagctgagttttcctgtttgatttcccgcacccagcctgcctgtggctggccaagaaggcattgttgaacct

SEQ ID NO: 579182 - DNA, 120 bp, Artificial Sequence
  ENSG00000171790_28 (sequence is synthesized)
catgagatcacagaggtagctgtgcaggccccgcccacttcctataaccctggttctggccgtccctgtgccaagcctccaagttccctgagagctaccggccaggggtcgggaggctat

SEQ ID NO: 579183 - DNA, 120 bp, Artificial Sequence
  ENSG00000171790_29 (sequence is synthesized)
gggagctcagggcaggcacctcccatgctcccgcgggagccaccaggacatgaaggtcataggcctctcctctcctcctcttcctgtttgacctgaatgcccccaggccaactgcctcaa

SEQ ID NO: 579184 - DNA, 120 bp, Artificial Sequence
  ENSG00000171790_30 (sequence is synthesized)
ggattccatttgagaagatgcaggctgggtgtgtggggagcagtagaggggctggtgtgtgcacatatgtgcacagctcaggacagaggctccctggacttggggcgggggcactagggc

SEQ ID NO: 579185 - DNA, 120 bp, Artificial Sequence
  ENSG00000171790_31 (sequence is synthesized)
cccaactctaaccctcgttctgccctgttgacctctgctctctggaccaaaaatggaggactcagtctagactagttcttagggtctaggagccaccttaagttatgtttatatgcaaag

SEQ ID NO: 579186 - DNA, 120 bp, Artificial Sequence
  ENSG00000171790_32 (sequence is synthesized)
gccatttttctgagaggccatagctttcatcagtgtgccaaaaagcgtgagatcctctgctctaaaagcctctgccccagcgctgcctagtttcagagcccccgatggcctcacatgggg

SEQ ID NO: 579187 - DNA, 120 bp, Artificial Sequence
  ENSG00000171790_33 (sequence is synthesized)
aggcaggagtgaactggtaggcaggaaaccctgagggtacctaggaggcccctagcctgtgggttggggagggaagacaggacccctggggccactgaaatggtggagctctcagagacc

SEQ ID NO: 579188 - DNA, 120 bp, Artificial Sequence
  ENSG00000171790_34 (sequence is synthesized)
tgagttctggtcccttctgccactttttgggcagatcccgtcttcccacaggccctgtgtcttgctcagtccacgtgactctgctttctcatcctaggcctcaggtgggtggcaggccct

SEQ ID NO: 579189 - DNA, 120 bp, Artificial Sequence
  ENSG00000171791_0 (sequence is synthesized)
acccctcgccgcaccacacacagcgcgggcttctagcgctcggcaccggcgggccaggcgcgtcctgccttcatttatccagcagcttttcggaaaatgcatttgctgttcggagtttaa

SEQ ID NO: 579190 - DNA, 120 bp, Artificial Sequence
  ENSG00000171791_1 (sequence is synthesized)
tcagaagaggattcctgcctccgtccccggctccttcatcgtcccctctcccctgtctctctcctggggaggcgtgaagcggtcccgtggatagagattcatgcctgtgcccgcgcgtgt

SEQ ID NO: 579191 - DNA, 120 bp, Artificial Sequence
  ENSG00000171791_2 (sequence is synthesized)
gtgcgcgcgtgtaaattgccgagaaggggaaaacatcacaggacttctgcgaataccggactgaaaattgtaattcatctgccgccgccgctgccttttttttttctcgagctcttgaga

SEQ ID NO: 579192 - DNA, 120 bp, Artificial Sequence
  ENSG00000171791_3 (sequence is synthesized)
tctccggttgggattcctgcggattgacatttctgtgaagcagaagtctgggaatcgatctggaaatcctcctaatttttactccctctccccgcgactcctgattcattgggaagtttc

SEQ ID NO: 579193 - DNA, 120 bp, Artificial Sequence
  ENSG00000171791_4 (sequence is synthesized)
aaatcagctataactggagagtgctgaagattgatgggatcgttgccttatgcatttgttttggttttacaaaaaggaaacttgacagaggatcatgctgtacttaaaaaatacaacatc

SEQ ID NO: 579194 - DNA, 120 bp, Artificial Sequence
  ENSG00000171791_5 (sequence is synthesized)
acagaggaagtagactgatattaacaatacttactaataataacgtgcctcatgaaataaagatccgaaaggaattggaataaaaatttcctgcatctcatgccaagggggaaacaccag

SEQ ID NO: 579195 - DNA, 120 bp, Artificial Sequence
  ENSG00000171791_6 (sequence is synthesized)
aatcaagtgttccgcgtgattgaagacaccccctcgtccaagaatgcaaagcacatccaataaaatagctggattataactcctcttctttctctgggggccgtggggtgggagctgggg

SEQ ID NO: 579196 - DNA, 120 bp, Artificial Sequence
  ENSG00000171791_7 (sequence is synthesized)
cgagaggtgccgttggcccccgttgcttttcctctgggaaggatggcgcacgctgggagaacagggtacgataaccgggagatagtgatgaagtacatccattataagctgtcgcagagg

SEQ ID NO: 579197 - DNA, 120 bp, Artificial Sequence
  ENSG00000171791_8 (sequence is synthesized)
ggctacgagtgggatgcgggagatgtgggcgccgcgcccccgggggccgcccccgcaccgggcatcttctcctcccagcccgggcacacgccccatccagccgcatcccgggacccggtc

SEQ ID NO: 579198 - DNA, 120 bp, Artificial Sequence
  ENSG00000171791_9 (sequence is synthesized)
ctgcccccggcgccgccgcggggcctgcgctcagcccggtgccacctgtggtccacctgaccctccgccaggccggcgacgacttctcccgccgctaccgccgcgacttcgccgagatgt

SEQ ID NO: 579199 - DNA, 120 bp, Artificial Sequence
  ENSG00000171791_10 (sequence is synthesized)
cgctaccgccgcgacttcgccgagatgtccagccagctgcacctgacgcccttcaccgcgcggggacgctttgccacggtggtggaggagctcttcagggacggggtgaactgggggagg

SEQ ID NO: 579200 - DNA, 120 bp, Artificial Sequence
  ENSG00000171791_11 (sequence is synthesized)
attgtggccttctttgagttcggtggggtcatgtgtgtggagagcgtcaaccgggagatgtcgcccctggtggacaacatcgccctgtggatgactgagtacctgaaccggcacctgcac

SEQ ID NO: 579201 - DNA, 120 bp, Artificial Sequence
  ENSG00000171791_12 (sequence is synthesized)
acctggatccaggataacggaggctgggatgcctttgtggaactgtacggccccagcatgcggcctctgtttgatttctcctggctgtctctgaagactctgctcagtttggccctggtg

SEQ ID NO: 579202 - DNA, 120 bp, Artificial Sequence
  ENSG00000171791_13 (sequence is synthesized)
ggagcttgcatcaccctgggtgcctatctgggccacaagtgaagtcaacatgcctgccccaaacaaatatgcaaaaggttcactaaagcagtagaaataatatgcattgtcagtgatgta

SEQ ID NO: 579203 - DNA, 120 bp, Artificial Sequence
  ENSG00000171791_14 (sequence is synthesized)
ccatgaaacaaagctgcaggctgtttaagaaaaaataacacacatataaacatcacacacacagacagacacacacacacacaacaattaacagtcttcaggcaaaacgtcgaatcagct

SEQ ID NO: 579204 - DNA, 120 bp, Artificial Sequence
  ENSG00000171791_15 (sequence is synthesized)
atttactgccaaagggaaatatcatttattttttacattattaagaaaaaaagatttatttatttaagacagtcccatcaaaactcctgtctttggaaatccgaccactaattgccaagc

SEQ ID NO: 579205 - DNA, 120 bp, Artificial Sequence
  ENSG00000171791_16 (sequence is synthesized)
accgcttcgtgtggctccacctggatgttctgtgcctgtaaacatagattcgctttccatgttgttggccggatcaccatctgaagagcagacggatggaaaaaggacctgatcattggg

SEQ ID NO: 579206 - DNA, 120 bp, Artificial Sequence
  ENSG00000171791_17 (sequence is synthesized)
gaagctggctttctggctgctggaggctggggagaaggtgttcattcacttgcatttctttgccctgggggctgtgatattaacagagggagggttcctgtggggggaagtccatgcctc

SEQ ID NO: 579207 - DNA, 120 bp, Artificial Sequence
  ENSG00000171791_18 (sequence is synthesized)
cctggcctgaagaagagactctttgcatatgactcacatgatgcatacctggtgggaggaaaagagttgggaacttcagatggacctagtacccactgagatttccacgccgaaggacag

SEQ ID NO: 579208 - DNA, 120 bp, Artificial Sequence
  ENSG00000171791_19 (sequence is synthesized)
cgatgggaaaaatgcccttaaatcataggaaagtatttttttaagctaccaattgtgccgagaaaagcattttagcaatttatacaatatcatccagtaccttaagccctgattgtgtat

SEQ ID NO: 579209 - DNA, 120 bp, Artificial Sequence
  ENSG00000171791_20 (sequence is synthesized)
attcatatattttggatacgcaccccccaactcccaatactggctctgtctgagtaagaaacagaatcctctggaacttgaggaagtgaacatttcggtgacttccgcatcaggaaggct

SEQ ID NO: 579210 - DNA, 120 bp, Artificial Sequence
  ENSG00000171791_21 (sequence is synthesized)
agagttacccagagcatcaggccgccacaagtgcctgcttttaggagaccgaagtccgcagaacctgcctgtgtcccagcttggaggcctggtcctggaactgagccggggccctcactg

SEQ ID NO: 579211 - DNA, 120 bp, Artificial Sequence
  ENSG00000171791_22 (sequence is synthesized)
gcctcctccagggatgatcaacagggcagtgtggtctccgaatgtctggaagctgatggagctcagaattccactgtcaagaaagagcagtagaggggtgtggctgggcctgtcaccctg

SEQ ID NO: 579212 - DNA, 120 bp, Artificial Sequence
  ENSG00000171791_23 (sequence is synthesized)
gggccctccaggtaggcccgttttcacgtggagcatgggagccacgacccttcttaagacatgtatcactgtagagggaaggaacagaggccctgggcccttcctatcagaaggacatgg

SEQ ID NO: 579213 - DNA, 120 bp, Artificial Sequence
  ENSG00000171791_24 (sequence is synthesized)
tgaaggctgggaacgtgaggagaggcaatggccacggcccattttggctgtagcacatggcacgttggctgtgtggccttggcccacctgtgagtttaaagcaaggctttaaatgacttt

SEQ ID NO: 579214 - DNA, 120 bp, Artificial Sequence
  ENSG00000171791_25 (sequence is synthesized)
ggagagggtcacaaatcctaaaagaagcattgaagtgaggtgtcatggattaattgacccctgtctatggaattacatgtaaaacattatcttgtcactgtagtttggttttatttgaaa

SEQ ID NO: 579215 - DNA, 120 bp, Artificial Sequence
  ENSG00000171791_26 (sequence is synthesized)
acctgacaaaaaaaaagttccaggtgtggaatatgggggttatctgtacatcctggggcattaaaaaaaaaatcaatggtggggaactataaagaagtaacaaaagaagtgacatcttca

SEQ ID NO: 579216 - DNA, 120 bp, Artificial Sequence
  ENSG00000171791_27 (sequence is synthesized)
gcaaataaactaggaaatttttttttcttccagtttagaatcagccttgaaacattgatggaataactctgtggcattattgcattatataccatttatctgtattaactttggaatgta

SEQ ID NO: 579217 - DNA, 120 bp, Artificial Sequence
  ENSG00000171791_28 (sequence is synthesized)
tgctttaaaaaaatacatgcatctcagcgtttttttgtttttaattgtatttagttatggcctatacactatttgtgagcaaaggtgatcgttttctgtttgagatttttatctcttgat

SEQ ID NO: 579218 - DNA, 120 bp, Artificial Sequence
  ENSG00000171791_29 (sequence is synthesized)
tcttcaaaagcattctgagaaggtgagataagccctgagtctcagctacctaagaaaaacctggatgtcactggccactgaggagctttgtttcaaccaagtcatgtgcatttccacgtc

SEQ ID NO: 579219 - DNA, 120 bp, Artificial Sequence
  ENSG00000171791_30 (sequence is synthesized)
aacagaattgtttattgtgacagttatatctgttgtccctttgaccttgtttcttgaaggtttcctcgtccctgggcaattccgcatttaattcatggtattcaggattacatgcatgtt

SEQ ID NO: 579220 - DNA, 120 bp, Artificial Sequence
  ENSG00000171791_31 (sequence is synthesized)
tggttaaacccatgagattcattcagttaaaaatccagatggcaaatgaccagcagattcaaatctatggtggtttgacctttagagagttgctttacgtggcctgtttcaacacagacc

SEQ ID NO: 579221 - DNA, 120 bp, Artificial Sequence
  ENSG00000171791_32 (sequence is synthesized)
cacccagagccctcctgccctccttccgcgggggctttctcatggctgtccttcagggtcttcctgaaatgcagtggtgcttacgctccaccaagaaagcaggaaacctgtggtatgaag

SEQ ID NO: 579222 - DNA, 120 bp, Artificial Sequence
  ENSG00000171791_33 (sequence is synthesized)
ccagacctccccggcgggcctcagggaacagaatgatcagacctttgaatgattctaatttttaagcaaaatattattttatgaaaggtttacattgtcaaagtgatgaatatggaatat

SEQ ID NO: 579223 - DNA, 120 bp, Artificial Sequence
  ENSG00000171791_34 (sequence is synthesized)
ccaatcctgtgctgctatcctgccaaaatcattttaatggagtcagtttgcagtatgctccacgtggtaagatcctccaagctgctttagaagtaacaatgaagaacgtggacgttttta

SEQ ID NO: 579224 - DNA, 120 bp, Artificial Sequence
  ENSG00000171791_35 (sequence is synthesized)
atataaagcctgttttgtcttttgttgttgttcaaacgggattcacagagtatttgaaaaatgtatatatattaagaggtcacgggggctaattgctggctggctgccttttgctgtggg

SEQ ID NO: 579225 - DNA, 120 bp, Artificial Sequence
  ENSG00000171791_36 (sequence is synthesized)
gttttgttacctggttttaataacagtaaatgtgcccagcctcttggccccagaactgtacagtattgtggctgcacttgctctaagagtagttgatgttgcattttccttattgttaaa

SEQ ID NO: 579226 - DNA, 120 bp, Artificial Sequence
  ENSG00000171791_37 (sequence is synthesized)
aacatgttagaagcaatgaatgtatataaaagcctcaactagtcatttttttctcctcttcttttttttcattatatctaattattttgcagttgggcaacagagaaccatccctatttt

SEQ ID NO: 579227 - DNA, 120 bp, Artificial Sequence
  ENSG00000171791_38 (sequence is synthesized)
gtattgaagagggattcacatctgcatcttaactgctctttatgaatgaaaaaacagtcctctgtatgtactcctctttacactggccagggtcagagttaaatagagtatatgcacttt

SEQ ID NO: 579228 - DNA, 120 bp, Artificial Sequence
  ENSG00000171791_39 (sequence is synthesized)
ccaaattggggacaagggctctaaaaaaagccccaaaaggagaagaacatctgagaacctcctcggccctcccagtccctcgctgcacaaatactccgcaagagaggccagaatgacagc

SEQ ID NO: 579229 - DNA, 120 bp, Artificial Sequence
  ENSG00000171791_40 (sequence is synthesized)
tgacagggtctatggccatcgggtcgtctccgaagatttggcaggggcagaaaactctggcaggcttaagatttggaataaagtcacagaattaaggaagcacctcaatttagttcaaac

SEQ ID NO: 579230 - DNA, 120 bp, Artificial Sequence
  ENSG00000171791_41 (sequence is synthesized)
aagacgccaacattctctccacagctcacttacctctctgtgttcagatgtggccttccatttatatgtgatctttgttttattagtaaatgcttatcatctaaagatgtagctctggcc

SEQ ID NO: 579231 - DNA, 120 bp, Artificial Sequence
  ENSG00000171791_42 (sequence is synthesized)
cagtgggaaaaattaggaagtgattataaatcgagaggagttataataatcaagattaaatgtaaataatcagggcaatcccaacacatgtctagctttcacctccaggatctattgagt

SEQ ID NO: 579232 - DNA, 120 bp, Artificial Sequence
  ENSG00000171791_43 (sequence is synthesized)
gaacagaattgcaaatagtctctatttgtaattgaacttatcctaaaacaaatagtttataaatgtgaacttaaactctaattaattccaactgtacttttaaggcagtggctgttttta

SEQ ID NO: 579233 - DNA, 120 bp, Artificial Sequence
  ENSG00000171791_44 (sequence is synthesized)
gactttcttatcacttatagttagtaatgtacacctactctatcagagaaaaacaggaaaggctcgaaatacaagccattctaaggaaattagggagtcagttgaaattctattctgatc

SEQ ID NO: 579234 - DNA, 120 bp, Artificial Sequence
  ENSG00000171791_45 (sequence is synthesized)
ttattctgtggtgtcttttgcagcccagacaaatgtggttacacactttttaagaaatacaattctacattgtcaagcttatgaaggttccaatcagatctttattgttattcaatttgg

SEQ ID NO: 579235 - DNA, 120 bp, Artificial Sequence
  ENSG00000171791_46 (sequence is synthesized)
atctttcagggattttttttttaaattattatgggacaaaggacatttgttggaggggtgggagggaggaagaatttttaaatgtaaaacattcccaagtttggatcagggagttggaag

SEQ ID NO: 579236 - DNA, 120 bp, Artificial Sequence
  ENSG00000171791_47 (sequence is synthesized)
ttttcagaataaccagaactaagggtatgaaggacctgtattggggtcgatgtgatgcctctgcgaagaaccttgtgtgacaaatgagaaacattttgaagtttgtggtacgacctttag

SEQ ID NO: 579237 - DNA, 120 bp, Artificial Sequence
  ENSG00000171791_48 (sequence is synthesized)
attccagagacatcagcatggctcaaagtgcagctccgtttggcagtgcaatggtataaatttcaagctggatatgtctaatgggtatttaaacaataaatgtgcagttttaactaacag

SEQ ID NO: 579238 - DNA, 120 bp, Artificial Sequence
  ENSG00000171791_49 (sequence is synthesized)
gatatttaatgacaaccttctggttggtagggacatctgtttctaaatgtttattatgtacaatacagaaaaaaattttataaaattaagcaatgtgaaactgaattggagagtgataat

SEQ ID NO: 579239 - DNA, 120 bp, Artificial Sequence
  ENSG00000171791_50 (sequence is synthesized)
acaagtcctttagtcttacccagtgaatcattctgttccatgtctttggacaaccatgaccttggacaatcatgaaatatgcatctcactggatgcaaagaaaatcagatggagcatgaa

SEQ ID NO: 579240 - DNA, 120 bp, Artificial Sequence
  ENSG00000171791_51 (sequence is synthesized)
tggtactgtaccggttcatctggactgccccagaaaaataacttcaagcaaacatcctatcaacaacaaggttgttctgcataccaagctgagcacagaagatgggaacactggtggagg

SEQ ID NO: 579241 - DNA, 120 bp, Artificial Sequence
  ENSG00000171791_52 (sequence is synthesized)
atggaaaggctcgctcaatcaagaaaattctgagactattaataaataagactgtagtgtagatactgagtaaatccatgcacctaaaccttttggaaaatctgccgtgggccctccaga

SEQ ID NO: 579242 - DNA, 120 bp, Artificial Sequence
  ENSG00000171791_53 (sequence is synthesized)
tagctcatttcattaagtttttccctccaaggtagaatttgcaagagtgacagtggattgcatttcttttggggaagctttcttttggtggttttgtttattataccttcttaagttttc

SEQ ID NO: 579243 - DNA, 120 bp, Artificial Sequence
  ENSG00000171791_54 (sequence is synthesized)
aaccaaggtttgcttttgttttgagttactggggttatttttgttttaaataaaaataagtgtacaataagtgtttttgtattgaaagcttttgttatcaagattttcatacttttacct

SEQ ID NO: 579244 - DNA, 120 bp, Artificial Sequence
  ENSG00000171791_55 (sequence is synthesized)
tccatggctctttttaagattgatacttttaagaggtggctgatattctgcaacactgtacacataaaaaatacggtaaggatactttacatggttaaggtaaagtaagtctccagttgg

SEQ ID NO: 579245 - DNA, 120 bp, Artificial Sequence
  ENSG00000171791_56 (sequence is synthesized)
ccaccattagctataatggcactttgtttgtgttgttggaaaaagtcacattgccattaaactttccttgtctgtctagttaatattgtgaagaaaaataaagtacagtgtgagatactg

SEQ ID NO: 579246 - DNA, 120 bp, Artificial Sequence
  ENSG00000171791_57 (sequence is synthesized)
cgcggcgggagctccgggaggcggccgtagccagcgccgccgcgcaggaccaggaggaggagaaagggtgcgcagcccggaggcggggtgcgccggtggggtgcagcggaagagggggtc

SEQ ID NO: 579247 - DNA, 120 bp, Artificial Sequence
  ENSG00000171791_58 (sequence is synthesized)
ttctctgcacaggaaattggtttaatgtaactttcaatggaaacctttgagattttttacttaaagtgcattcgagtaaatttaatttccaggcagcttaatacattctttttagccgtg

SEQ ID NO: 579248 - DNA, 120 bp, Artificial Sequence
  ENSG00000171791_59 (sequence is synthesized)
acggaggctgggtaggtgcacttggtgatgtgagtctgggctgaggccacaggtccgagatgcgggggttggagtgcgggtgggctcctggggcaatgggaggctgtggagccggcgaaa

SEQ ID NO: 579249 - DNA, 120 bp, Artificial Sequence
  ENSG00000171791_60 (sequence is synthesized)
taaaatcagagttgttgcttcccggcgtccctacctcctcctctggacaaagcgttcactcccaacctgaccgataacgcctgccatctaaaagtctttaacttgcttgctagtcgtgga

SEQ ID NO: 579250 - DNA, 120 bp, Artificial Sequence
  ENSG00000171791_61 (sequence is synthesized)
gatccaaagatctagcgtttgtaatccagtaggatgtggtggtaaatggtaccccttcagtgtttctcaagctgaaggtccaggagtccccaggaccaccgtttcctggcttgagcagct

SEQ ID NO: 579251 - DNA, 120 bp, Artificial Sequence
  ENSG00000171791_62 (sequence is synthesized)
tgttggaaccggagggaggtttcagggactgcttatgaaccagataccaggttgggtcttgacagtctgcatcccaaacaagctcccctgaaacaagcccgttgtacactaaaattggag

SEQ ID NO: 579252 - DNA, 120 bp, Artificial Sequence
  ENSG00000171791_63 (sequence is synthesized)
aacaacccgattagaagaatagactccacagaagaccaagggcatcatcaatcggtaaaattttccaaaagaggaaaaccaatgtaagtctttttccctgaaaaacttagttgtgtttgt

SEQ ID NO: 579253 - DNA, 120 bp, Artificial Sequence
  ENSG00000171791_64 (sequence is synthesized)
aaagagctaagttgacattccaaagtccttggactggaatctccagtgtgtgccatgttcccagtgggcgtgatgaggtgtcctgaggagtatcaggctatggctttgctaccttgtcag

SEQ ID NO: 579254 - DNA, 120 bp, Artificial Sequence
  ENSG00000171791_65 (sequence is synthesized)
tgacagaatttgcatcggctgcattctttgtattctataatttgtgtatggtttaccagtttgctagaatgttagaatcttttgtttttcaccactcagagtggacctaattttgtggtc

SEQ ID NO: 579255 - DNA, 120 bp, Artificial Sequence
  ENSG00000171791_66 (sequence is synthesized)
ggctgaaaaaaatttgcatctaggtatctatgtaaagtgtagaagaattgattcttagctgtggattatcttacccttactttagttgaagtgattgatacctgtggctttgaagaacat

SEQ ID NO: 579256 - DNA, 120 bp, Artificial Sequence
  ENSG00000171791_67 (sequence is synthesized)
ttgtgagatgatctttttctcgtactgtgctagatagagctttcatcattataccatacaattgtacttttctgagattctttgttggagggggtttagttcctaagagtcaaggattgt

SEQ ID NO: 579257 - DNA, 120 bp, Artificial Sequence
  ENSG00000171791_68 (sequence is synthesized)
aatggagatctatatctcatatctaaaatgatgaatttatgaaaaagtaattcttgtgtgaagttttttttttttttacactttttgttttaatctgaagagttatctttgaaaaacagg

SEQ ID NO: 579258 - DNA, 120 bp, Artificial Sequence
  ENSG00000171791_69 (sequence is synthesized)
atgcaattcagtgcttccttttatagcctcttgggagaatgactaatgtcattattttataggacctaacaggagcaaaaagcctagaaattactgcaagtggattagatgtcaagaagc

SEQ ID NO: 579259 - DNA, 120 bp, Artificial Sequence
  ENSG00000171791_70 (sequence is synthesized)
acaccacatgtttttattacattttacaaagtgtgctcatactaggaggccaaatagagaaaaggccaagaaaagtagatgattgatgtgaacatctgatcttatttgaccaaagttgac

SEQ ID NO: 579260 - DNA, 120 bp, Artificial Sequence
  ENSG00000171791_71 (sequence is synthesized)
aaaatattgatgccactgtttggtgtttaaaagtaagattaactaaaatgccccaatttaaatttctaaaatttaaatcctcttcttgaattgtttgtttgttgagatctcacattatca

SEQ ID NO: 579261 - DNA, 120 bp, Artificial Sequence
  ENSG00000171791_72 (sequence is synthesized)
gatctttagtaattctggaagaatttgctaaagggtgaaaagaatatttttgttaaatatttggttaagtaggtggtttgatttttaatcactataactaaaggggttgggacttccaga

SEQ ID NO: 579262 - DNA, 120 bp, Artificial Sequence
  ENSG00000171791_73 (sequence is synthesized)
tttctacttgaaataaatccaaggtggtaactggtatctgtctatcaaataagttaataaaaatgtgggaaacagagacacatgtttatgacagaaattaagatacaaccttgatatttg

SEQ ID NO: 579263 - DNA, 120 bp, Artificial Sequence
  ENSG00000171791_74 (sequence is synthesized)
ttgctgaatttcagtgtgttaccctctcatgtaactgaagtttctttttaagtaaaggctcacttttttctttttgtgaaacagagttttcatagtagacctatctttgtggtcaacagg

SEQ ID NO: 579264 - DNA, 120 bp, Artificial Sequence
  ENSG00000171791_75 (sequence is synthesized)
tatctgaggttgataaatgtagaggctacattttatgatgccaaaccacaatgacataccatagaacatgataaaaattttttgacaaaactgcttctagtaaaaataaatcatgtagaa

SEQ ID NO: 579265 - DNA, 120 bp, Artificial Sequence
  ENSG00000171791_76 (sequence is synthesized)
gcacagatggttgatggtaaaatatgtaatagctttcagaacaatgcatagatggtgactatataggaaaacaaaggaatttagagaaaaaatatatatatataccaggaaatgcactca

SEQ ID NO: 579266 - DNA, 120 bp, Artificial Sequence
  ENSG00000171791_77 (sequence is synthesized)
taggacactttggaataaaagtggtagtgtttgagaatgatgaatgatttgcctatcatttcaaatgtgcattattaatctaaaagtcattttaggcatttggcatacagacagattttc

SEQ ID NO: 579267 - DNA, 120 bp, Artificial Sequence
  ENSG00000171791_78 (sequence is synthesized)
ttcacatttacaccaattggggttacatctctaataatatgttgtattttatagtgtaaggtagtcttaatggtaaagcttcagaagagagctagcatattttcttggcatgtgacaata

SEQ ID NO: 579268 - DNA, 120 bp, Artificial Sequence
  ENSG00000171791_79 (sequence is synthesized)
atctgcactgtccccagggctccgtggattagcccatctcctgaatactacactgaatactccaggctttagactgcaagtcatttctttttctttgctgctgctcgtagaaaattggaa

SEQ ID NO: 579269 - DNA, 120 bp, Artificial Sequence
  ENSG00000171791_80 (sequence is synthesized)
ccttgtgaggctgaggaaatctgtttgacttttgtgttccataacatggataaatcaggtccttggaatgatcagcctctgatagattgtcccagaagactacaaattaaataaagacta

SEQ ID NO: 579270 - DNA, 120 bp, Artificial Sequence
  ENSG00000171791_81 (sequence is synthesized)
aagaagtaattggctgtagagtggagtgtggatttattcctaggtctgaataaggcattgtgtggcatccagagagaggcaggacagaggaagcagtgagagagaagcaattctagaaaa

SEQ ID NO: 579271 - DNA, 120 bp, Artificial Sequence
  ENSG00000171791_82 (sequence is synthesized)
tgtggataccttgctgctcagtgtggcttatagacagtagcacatgcatcccccggagctttgtagagatgctaaagctcagctcccaccccagagctactgagtcagaatatgtggttt

SEQ ID NO: 579272 - DNA, 120 bp, Artificial Sequence
  ENSG00000171791_83 (sequence is synthesized)
gtgtgcacgttaaagttagcgatgctggctaccatccttggttcctggtggcatcttttaggaagagttgctacctgggatggattctgcattgtccccttccagtggccttaaagatct

SEQ ID NO: 579273 - DNA, 120 bp, Artificial Sequence
  ENSG00000171791_84 (sequence is synthesized)
atagtgttacttggaataccgagtatttcccaggtgtccactattgtgatctgactttaggaagacataaattggatgaaggagagatagcaagcaggtagatcaactataagcccagtc

SEQ ID NO: 579274 - DNA, 120 bp, Artificial Sequence
  ENSG00000171791_85 (sequence is synthesized)
ttctcatgaatatttttcgtagtagttatatagtttatattggcatcactggtcccattaaaaagtaagatagcttttcttcaattaaaggcaagagaattagctcttttaatagctctg

SEQ ID NO: 579275 - DNA, 120 bp, Artificial Sequence
  ENSG00000171791_86 (sequence is synthesized)
ttagttattattttatcccctcataacacagtttaaattctgtaaatgactttagtgaccttgcagcttctttaagacaaagggactcttgcaggcaagggattgagttttgggcaggtg

SEQ ID NO: 579276 - DNA, 120 bp, Artificial Sequence
  ENSG00000171791_87 (sequence is synthesized)
atggagagtgaccctctaaactgggaactgtgacgacattcagcttcatgtcttaggagagagtgagataggagccactagaagaatgagatgattcagacaagagattgtaggagattg

SEQ ID NO: 579277 - DNA, 120 bp, Artificial Sequence
  ENSG00000171791_88 (sequence is synthesized)
gctttattctgttgacaagatggtaatccgacttattttttggttttttggtgttggtggtttaggaagacaggaacttctccacacccggtagagttcagctgccttttcattagtcag

SEQ ID NO: 579278 - DNA, 120 bp, Artificial Sequence
  ENSG00000171791_89 (sequence is synthesized)
caagcagtttttcctttctcaaggcagtccacatccagcaaaacatttgattaactggaaagcaataccattctcatgccagtgtacaaattacatgaaagagcatcatttttctagtgt

SEQ ID NO: 579279 - DNA, 120 bp, Artificial Sequence
  ENSG00000171791_90 (sequence is synthesized)
ctgaggattggctgcttatggccaattttggcagcaagacgataggattaaaaatagcttgaagatgatctagtcttaaataatatatttcatgatgaactttccttgggaaagtgcatc

SEQ ID NO: 579280 - DNA, 120 bp, Artificial Sequence
  ENSG00000171791_91 (sequence is synthesized)
tttctgcctacaagaatcacatgacccctttcaataatttatgtagtagagaaaaacacactatttctcatagagttttcagtcatgtgctgtggtgtgattgtttctggacattcataa

SEQ ID NO: 579281 - DNA, 120 bp, Artificial Sequence
  ENSG00000171791_92 (sequence is synthesized)
aattttatagttaactgaattctcttttctgttttgttgctatttaacgtccattgaaaacatggctttcttttgcgcattctgttactttcagctgtactttctaataagaatggattg

SEQ ID NO: 579282 - DNA, 120 bp, Artificial Sequence
  ENSG00000171791_93 (sequence is synthesized)
ccctttttagcaatctttgattgaactggtacatttcagattacttaaatgtcatcaggccacacagcataccaggtaacagaaagccataaattaaaaataaaaaaaaggcaagcaaaa

SEQ ID NO: 579283 - DNA, 120 bp, Artificial Sequence
  ENSG00000171792_0 (sequence is synthesized)
attccgggctcgaaggctgtgcggtctgccaggagctgcggccccgtccggcccgggctggcatgggttggaattggagcctatcccccaacccgaaggctaacagcatcatgtggttac

SEQ ID NO: 579284 - DNA, 120 bp, Artificial Sequence
  ENSG00000171792_1 (sequence is synthesized)
taactgttcctcattcaccggttgatgcctcccagaaaaaaacgccgccagccttcccagaaagccccgctgctgttccaccaacaaccactggagggccccaaacacagctgtgcatct

SEQ ID NO: 579285 - DNA, 120 bp, Artificial Sequence
  ENSG00000171792_2 (sequence is synthesized)
acacagcttcccatcactcacactcgacaggtgcccagcaagcccattgaccacagcaccatcacttcctgggtatcacctgattttgatacagcagcaggaagcttgttcccagcctac

SEQ ID NO: 579286 - DNA, 120 bp, Artificial Sequence
  ENSG00000171792_3 (sequence is synthesized)
cagaaacaccaaaaccgggcgagacactcaagtcgaaaacctaccacctccaagtttccacatctaacttttgagagtccgcaatcttccagttcagagacattggggatccccttaatc

SEQ ID NO: 579287 - DNA, 120 bp, Artificial Sequence
  ENSG00000171792_4 (sequence is synthesized)
cgagagtgccccagtgaatcagaaaaggatgtttccagaagacccttagttccagtgctcagtccccaaagctgtgggaacatgtcagtgcaggcacttcagagcttaccttatgtgttc

SEQ ID NO: 579288 - DNA, 120 bp, Artificial Sequence
  ENSG00000171792_5 (sequence is synthesized)
attccacctgatatccagaccccagagtcatcgtctgtgaaggaagaactcattccccaagatcagaaggaaaacagccttctaagctgcactcttcacactggcactcctaatagccca

SEQ ID NO: 579289 - DNA, 120 bp, Artificial Sequence
  ENSG00000171792_6 (sequence is synthesized)
gagcctggacctgttctggttaaagacacccccgaggacaagtatggaataaaggtcacatggaggagacgacagcacctgcttgcttacctcagggagagagggaagctgagcagaagc

SEQ ID NO: 579290 - DNA, 120 bp, Artificial Sequence
  ENSG00000171792_7 (sequence is synthesized)
caattccttgtgaaaagctgactgccatcagtaatctcaatagaaaagagatatgttttctggagtcataaaggaattcaattcctagggtttttgtttttgtttttgagatgtaatatt

SEQ ID NO: 579291 - DNA, 79 bp, Artificial Sequence
  ENSG00000171792_8 (sequence is synthesized)
tccatctgctggccttgacctcacaaagtgctggcccagccgagatttgttttctaagatactttgtgtcatgaacagt

SEQ ID NO: 579292 - DNA, 120 bp, Artificial Sequence
  ENSG00000171792_9 (sequence is synthesized)
ccgagatttgttttctaagatactttgtgtcatgaacagttcagtttagtgtcatgaactattcacttcatatttttcttgtattaactgtttaaatttttaaaatatcttgtagtaact

SEQ ID NO: 579293 - DNA, 120 bp, Artificial Sequence
  ENSG00000171792_10 (sequence is synthesized)
ctttaaaatgtatgtaagtaaatggctgcagaaagtttttttagagaatcctgcttccatcagtaatacagcaatattaccccatccactaatggtctttgtttccttaaccactactca

SEQ ID NO: 579294 - DNA, 120 bp, Artificial Sequence
  ENSG00000171792_11 (sequence is synthesized)
ttaatccttaatcacctcattcaaactaattcattctgcatttttgagtaccaactcttgtcaggctcagtggcagcttctacgacctgatggatggaaaaaaatcaaactctgtgactc

SEQ ID NO: 579295 - DNA, 120 bp, Artificial Sequence
  ENSG00000171792_12 (sequence is synthesized)
tatggttgactgccacctctgcaaccttgactcatctgctgaaaaggcaagaagaagaaagggcagcaagccctgttttagggactacataagatgaggggagataagggggacatagat

SEQ ID NO: 579296 - DNA, 120 bp, Artificial Sequence
  ENSG00000171792_13 (sequence is synthesized)
gagttctttaggattgcgtgtgttttgagtttttgtttctaactgaagaaatctgtcaatattaaatagggtgggaaaatggtttcttagaataactgttcaactgtgtgtaaataagga

SEQ ID NO: 579297 - DNA, 120 bp, Artificial Sequence
  ENSG00000171792_14 (sequence is synthesized)
aagttttcaatgagtattacttattgtaattaatgcagaaggacttccccagtcaaccgaatgtctcggccttttactcagacaagtagcatctcattaaacccattcatttagcattca

SEQ ID NO: 579298 - DNA, 120 bp, Artificial Sequence
  ENSG00000171792_15 (sequence is synthesized)
aatcggcgccggccttgtctcggcattccgggctcgaaggctgtgcggtctgccaggagctgcggccccgtccggcccgggctggtataggaggctgtgctccccaaagccttgaagttt

SEQ ID NO: 579299 - DNA, 120 bp, Artificial Sequence
  ENSG00000171792_16 (sequence is synthesized)
atggtagaattggctggcagaggatcaggaagaactggggaatcatctgaattatttgctcccagcttttgtttcttctctacaggcatgggttggaattggagcctatcccccaacccg

SEQ ID NO: 579300 - DNA, 67 bp, Artificial Sequence
  ENSG00000171792_17 (sequence is synthesized)
cacctgaggccgagaggtggaggctatggcatgggttggaattggagcctatcccccaacccgaagg

SEQ ID NO: 579301 - DNA, 120 bp, Artificial Sequence
  ENSG00000171792_18 (sequence is synthesized)
cggccttgtctcggcattccgggctcgaaggctgtgcggtctgccaggagctgcggccccgtccggcccgggctggtatcacctgattttgatacagcagcaggaagcttgttcccagcc

SEQ ID NO: 579302 - DNA, 120 bp, Artificial Sequence
  ENSG00000171792_19 (sequence is synthesized)
acttcctgggcattctgctaggtgctgggaatcaagaacaagaccactggtccctaccctcatgaagtttaaagataaataagttatatctagaccaggtgttgtggcttacgcctgtaa

SEQ ID NO: 579303 - DNA, 120 bp, Artificial Sequence
  ENSG00000171792_20 (sequence is synthesized)
tcccagcactttgggaggctgaggtatcacctgattttgatacagcagcaggaagcttgttcccagcctaccagaaacaccaaaaccgggcgagacactcaagtcgaaaacctaccacct

SEQ ID NO: 579304 - DNA, 120 bp, Artificial Sequence
  ENSG00000171792_21 (sequence is synthesized)
aaatctcagttttactttcacctccgatctttccaggcttccctctctccccgcatcaatcagtagatattattcctctttttccacaggatatctaagtcttaattttctcttctactt

SEQ ID NO: 579305 - DNA, 120 bp, Artificial Sequence
  ENSG00000171792_22 (sequence is synthesized)
cctgaccagcccgttattattattgccaacactttcttgcccgggaaacttccagagtggctcctccgacccatccccatcctgagcggggaaatcttgctacattctcaagaaccagga

SEQ ID NO: 579306 - DNA, 120 bp, Artificial Sequence
  ENSG00000171792_23 (sequence is synthesized)
aatcggcgccggccttgtctcggcattccgggctcgaaggctgtgcggtctgccaggagctgcggccccgtccggcccgggctgcttttgtttcttctctacaggcatgggttggaattg

SEQ ID NO: 579307 - DNA, 120 bp, Artificial Sequence
  ENSG00000171793_0 (sequence is synthesized)
gaaactgaggcttcaagagggttcatagctaataattggcagagccagtgtttgaacccagatgagtttggtttgttgagatacatttatatcatctgtaatttttccttcttccaggtc

SEQ ID NO: 579308 - DNA, 120 bp, Artificial Sequence
  ENSG00000171793_1 (sequence is synthesized)
aaagagtaaaatgaagtacattctggttactggtggtgttatatcaggaattggaaaaggaatcattgccagcagtgtgggcacaatactcaagtcatgtggtttacatgtaacttcaat

SEQ ID NO: 579309 - DNA, 120 bp, Artificial Sequence
  ENSG00000171793_2 (sequence is synthesized)
caaaattgacccctacattaacattgatgcaggaacattctctccttatgagcatggtgaggtttttgtgctggatgatggtggggaagtagaccttgacctgggtaactatgagcggtt

SEQ ID NO: 579310 - DNA, 120 bp, Artificial Sequence
  ENSG00000171793_3 (sequence is synthesized)
ccttgacatccgcctcaccaaggacaataatctgaccactggaaagatataccagtatgtcattaacaaggaacggaaaggagattacttggggaaaactgtccaagttgtccctcatat

SEQ ID NO: 579311 - DNA, 120 bp, Artificial Sequence
  ENSG00000171793_4 (sequence is synthesized)
cacagatgcaatccaggagtgggtgatgagacaggcgttaatacctgtagatgaagatggcctggaacctcaagtgtgtgttattgagcttggtggaaccgtgggggacatagaaagcat

SEQ ID NO: 579312 - DNA, 120 bp, Artificial Sequence
  ENSG00000171793_5 (sequence is synthesized)
gccctttattgaggccttccgtcagttccaattcaaggtcaaaagagagaacttttgtaacatccacgtcagtctagttccccagccaagttcaacaggggaacagaagactaaacctac

SEQ ID NO: 579313 - DNA, 120 bp, Artificial Sequence
  ENSG00000171793_6 (sequence is synthesized)
ccagaatagtgttcgggaacttagaggacttgggctttccccagatctggttgtatgcaggtgctcaaatccacttgacacatcagtgaaggagaaaatatcaatgttctgccatgttga

SEQ ID NO: 579314 - DNA, 120 bp, Artificial Sequence
  ENSG00000171793_7 (sequence is synthesized)
gcctgaacaagtgatctgtgtccacgatgtctcatccatctaccgagtccccttgttgttagaggagcaaggggttgtagattattttcttcgaagacttgaccttcctattgagaggca

SEQ ID NO: 579315 - DNA, 120 bp, Artificial Sequence
  ENSG00000171793_8 (sequence is synthesized)
tgtcattaaggctctggagcattctgcactggccatcaaccacaaattggaaatcaagtacatagattctgcggacttggagcccatcacctcgcaagaagagcccgtgcgctaccacga

SEQ ID NO: 579316 - DNA, 120 bp, Artificial Sequence
  ENSG00000171793_9 (sequence is synthesized)
agcttggcagaagctctgtagtgctcatggagtgctggttccaggaggatttggtgttcgaggaacagaaggaaaaatccaagcaattgcctgggctcggaatcagaaaaagcctttttt

SEQ ID NO: 579317 - DNA, 120 bp, Artificial Sequence
  ENSG00000171793_10 (sequence is synthesized)
gggcgtgtgcttagggatgcagttggcagtggttgaattctcaagaaacgtgctgggatggcaagatgccaattctacagagtttgaccctacgaccagtcatcccgtggtcgtagacat

SEQ ID NO: 579318 - DNA, 120 bp, Artificial Sequence
  ENSG00000171793_11 (sequence is synthesized)
gccagaacacaacccagggcagatgggcggaaccatgaggctgggcaagaggagaaccctgttccagaccaagaactcagtcatgaggaaactctatggagacgcagactacttggaaga

SEQ ID NO: 579319 - DNA, 120 bp, Artificial Sequence
  ENSG00000171793_12 (sequence is synthesized)
gaggcaccgccaccgatttgaggtgaatccagtctggaaaaagtgtttggaagaacaaggcttgaagtttgttggccaagatgttgaaggagagagaatggaaattgtggagttagaaga

SEQ ID NO: 579320 - DNA, 120 bp, Artificial Sequence
  ENSG00000171793_13 (sequence is synthesized)
tcatcccttttttgttggggttcagtaccaccctgagttcctgtccaggcctatcaagccctccccaccatactttggcctcctcctggcctctgtggggcggctctcacattacctcca

SEQ ID NO: 579321 - DNA, 120 bp, Artificial Sequence
  ENSG00000171793_14 (sequence is synthesized)
gaaaggctgcaggctctcacccagggacacctatagtgacaggagtggaagcagctcccctgactctgaaatcaccgaactgaagtttccatcaataaatcatgactgatcttgtagcgg

SEQ ID NO: 579322 - DNA, 120 bp, Artificial Sequence
  ENSG00000171793_15 (sequence is synthesized)
atgattcttcaagagacccttcaaacttgggtagagtttacagctctgactttacactcggctttggagactttctttaaattatgtttttattaagattattttattatgcggaaaggt

SEQ ID NO: 579323 - DNA, 120 bp, Artificial Sequence
  ENSG00000171793_16 (sequence is synthesized)
aaagactgccgggcgcatgcggtcggggttgttcactggctgtccggggctccgcgcgcgtcgccggcccagctctgtcgctgacgggaggatctgaagccggccgcagctgccctgcac

SEQ ID NO: 579324 - DNA, 120 bp, Artificial Sequence
  ENSG00000171793_17 (sequence is synthesized)
ctgcctgttcaccctgttccctttcctgtgctctgagtcgtgcagtcagtccttcaaggcccattgcaagtcatatctacaaaacaggagccgcctggatccgcccactacccccaggac

SEQ ID NO: 579325 - DNA, 120 bp, Artificial Sequence
  ENSG00000171793_18 (sequence is synthesized)
tggctcctctgtggtgtctgcctgttgcgtgacactctccttgcagttcttgagttgcggcagaacatcgcgatgggaaccgatggtgggtggggctgcagagtgccccatcggtcacct

SEQ ID NO: 579326 - DNA, 120 bp, Artificial Sequence
  ENSG00000171793_19 (sequence is synthesized)
tgtttctcaactacctcgcatcattgcagatgctagcgcgttgcctgtcgctttcccttggatacctagaccgttataaagtgtgccacatggacttaccgagcatggagagaggatttt

SEQ ID NO: 579327 - DNA, 120 bp, Artificial Sequence
  ENSG00000171793_20 (sequence is synthesized)
agctaggatttgaacacttggtgctgggaacctcagggtattgcttgccactaagccatgaaaccagagacaaaatctctatactgccctgagttggggggaattctcagtgccaactgt

SEQ ID NO: 579328 - DNA, 120 bp, Artificial Sequence
  ENSG00000171793_21 (sequence is synthesized)
ggctggtcctcattcaaagggacggtcagtttggtgtcaacatgaaacaccaagatgtctgtctctgaagcgtgattttaaaatccccatgcctgtggctgcgcttcctatttctagggc

SEQ ID NO: 579329 - DNA, 120 bp, Artificial Sequence
  ENSG00000171793_22 (sequence is synthesized)
tgggaaacactccttgcatcaaggggtcacttacagaacaaagaatcttttgggggaaacttcctctaaaaccctctcatatatagacagctttgactggagggtccatttttcttccag

SEQ ID NO: 579330 - DNA, 120 bp, Artificial Sequence
  ENSG00000171793_23 (sequence is synthesized)
gatggtgttactgcagttgaaagggcaatatgaagttactttcttaatgtgacctagcaataggcatagctacgtggcactatattctggccagactcgatgtgtactctaacttaagaa

SEQ ID NO: 579331 - DNA, 120 bp, Artificial Sequence
  ENSG00000171793_24 (sequence is synthesized)
gcacagcctagagcccgcctccgtgaaagactgccgggcgcatgcggtcggggttgttcactggctgtccggggctccgcgcgcgtcgccggcccagctctgtcgctgacgggaggatct

SEQ ID NO: 579332 - DNA, 120 bp, Artificial Sequence
  ENSG00000171793_25 (sequence is synthesized)
ataagaaaaaaaagccacaggcgcctggggtgaaagtttcctctcctttcccggagctttctcacggtgtttccctggcatattggccaggtccccctttctgcagcatctgagctctgg

SEQ ID NO: 579333 - DNA, 120 bp, Artificial Sequence
  ENSG00000171793_26 (sequence is synthesized)
tggtgctgaccagatcacacttggcgtaggaccctctggtccatgttaaggggaactagtttttcctgggaagtaagccacaatgggtaggtttatgtcccattgccacctttatccaga

SEQ ID NO: 579334 - DNA, 120 bp, Artificial Sequence
  ENSG00000171793_27 (sequence is synthesized)
accagtactcagagttggtggtagggtgtgtgactgaagtataaatggaatgtatatcttttgtagctagaagaaggaaatctttctgcagtttcatgttaaatatattatgtagcaaac

SEQ ID NO: 579335 - DNA, 120 bp, Artificial Sequence
  ENSG00000171793_28 (sequence is synthesized)
aattctacagggacacctatagtgacaggagtggaagcagctcccctgactctgaaatcaccgaactgaagtttccatcaataaatcatgactgatcttgtagcgtaagtggtactttaa

SEQ ID NO: 579336 - DNA, 120 bp, Artificial Sequence
  ENSG00000171793_29 (sequence is synthesized)
agttttagtttttaaaaacatggtgataacacactgcgattgcaagaatatcatggaagtttagggctgaaaatttttatctgccaggaatgaaagtggtgaggtcttgaatataatcca

SEQ ID NO: 579337 - DNA, 120 bp, Artificial Sequence
  ENSG00000171793_30 (sequence is synthesized)
gaggttgagagagaaaagaaagtagtgaggtcattgtgggtatcaaatgggcagcccttcctccaagttgcagtgcacctcccagtcctgccctggggatgacagcttggggagcatggt

SEQ ID NO: 579338 - DNA, 120 bp, Artificial Sequence
  ENSG00000171793_31 (sequence is synthesized)
cactgggcagttgtctcaatactgattactacattctggtgccagtctgaccagttctggggcggggaaggggagggtctgaattcttagaccctattgtttgatgtagctgtaaatttt

SEQ ID NO: 579339 - DNA, 120 bp, Artificial Sequence
  ENSG00000171793_32 (sequence is synthesized)
ggagatcttgaaggaagggacagatacaacaatgtggcacttgtcatttctgcagagcctcaggttttcatcaggaagtactttaaaactgacactgcttagagaacttttttttgttga

SEQ ID NO: 579340 - DNA, 120 bp, Artificial Sequence
  ENSG00000171793_33 (sequence is synthesized)
ttgctgcttattctggaattccttcaaagttggaacaattgccaaatagacgtcgaatgtttgtctattaagtgacagggtttgtaggttcataaagtgcaataactgtgggcactgcca

SEQ ID NO: 579341 - DNA, 120 bp, Artificial Sequence
  ENSG00000171793_34 (sequence is synthesized)
cgaaatgtaaatgtcctttgagataactgtgtggactgtgttggcagaagtacgcattctgctggtgaggtatcaaatgagggagtgtcagtcatctggggtctggaataagaaccaggg

SEQ ID NO: 579342 - DNA, 120 bp, Artificial Sequence
  ENSG00000171793_35 (sequence is synthesized)
gtatgggtgtgtggttccaccgctcctgccctaaggcctgggcagggggacctccctgaatcctgcacaccgtgtgttcatcaccagtgggcctctggtgctgggtcagtgccggtctga

SEQ ID NO: 579343 - DNA, 120 bp, Artificial Sequence
  ENSG00000171793_36 (sequence is synthesized)
cctgctgatcccagctgtttcccctcctgccttggttggttgaccccctgtcctggcatagcctaagtaggtggtgggtaggcatgagaagttagtatcaggaggagggcctgtgtgcta

SEQ ID NO: 579344 - DNA, 120 bp, Artificial Sequence
  ENSG00000171793_37 (sequence is synthesized)
ggtaagcgtttaacacggatggactcattaatcccctgaccagggagtttgctataggctgtttcacagtcttaaggagctgatacaacaagaactgttaccagtgaaggaggtagatat

SEQ ID NO: 579345 - DNA, 120 bp, Artificial Sequence
  ENSG00000171793_38 (sequence is synthesized)
ttggtcagttacatggaatttctgactgcctcgcaagtggagaattgcccgttagtgacactgttacgaggtgctgtggagaaagaatgcttgcattgggtggttgtagaagtcgatgtg

SEQ ID NO: 579346 - DNA, 120 bp, Artificial Sequence
  ENSG00000171793_39 (sequence is synthesized)
tgaggtcttgaaaaggtctgattctgtaggaattataaatttagcgtctaattattcccagtaggctccttctactgctctgccatgaaaaacaggcttagtttcccatggcagctgact

SEQ ID NO: 579347 - DNA, 120 bp, Artificial Sequence
  ENSG00000171793_40 (sequence is synthesized)
aggctctggagcattctgcactggccatcaaccacaaattggaaatcaagtagaaaccactcagcaatgaaaaggaagaaaccaggctgaacactgactggctcaagcccataatcccaa

SEQ ID NO: 579348 - DNA, 120 bp, Artificial Sequence
  ENSG00000171793_41 (sequence is synthesized)
cacttagggaggctctgctgtgggaggatcgcctaagaccagtagttcgagagcagcctggtcaacatagcgagacccccgtctctgcaaaaaaaagttaaaaaagaaaaggaacaaaca

SEQ ID NO: 579349 - DNA, 120 bp, Artificial Sequence
  ENSG00000171793_42 (sequence is synthesized)
actgataaacacagcaacatggatgaacttcaaaaacactaagcaaaagaagccagacacaaaaggttatatactatttggctccatttatatgatgttctataagaggcaaaacgaatc

SEQ ID NO: 579350 - DNA, 120 bp, Artificial Sequence
  ENSG00000171793_43 (sequence is synthesized)
tataagaggcaaaacgaatctgtgatgatagaaattggatctgaggttgtttggggtaggaggtagaggggcacattctgggaagatggtaacttatgttttgttttgttttgttttgtt

SEQ ID NO: 579351 - DNA, 120 bp, Artificial Sequence
  ENSG00000171793_44 (sequence is synthesized)
attataggtgtgagccaccacgcccggctcattctatatcttggtgtgtatgtttgacaaaactcttcaaagtatgcacttaaaatgcttgtattttattgtatgtgaattatgcttcaa

SEQ ID NO: 579352 - DNA, 120 bp, Artificial Sequence
  ENSG00000171793_45 (sequence is synthesized)
aacccacaaaagctgggcggaagatgggctgaggaggctgtcattgaacagaaagccctctagagtctgctgcagaggcttagctgagacccgatcctgaacacagtagagtgcagaaag

SEQ ID NO: 579353 - DNA, 120 bp, Artificial Sequence
  ENSG00000171793_46 (sequence is synthesized)
agagagatttgggaatttaatgattttgaaggaaactgttgtattttaaaacctcatatttaaaaaatgtttaagttattaaatatattaagttgatcactttaaagccagtattaagat

SEQ ID NO: 579354 - DNA, 120 bp, Artificial Sequence
  ENSG00000171793_47 (sequence is synthesized)
gatcactttaaagccagaatcaagaaagacaactttgataaaatgataatattatttaaaaattaagaacgcacagcctggggtcacgagcctgcttttctcccctgtctgaataacatc

SEQ ID NO: 579355 - DNA, 120 bp, Artificial Sequence
  ENSG00000171793_48 (sequence is synthesized)
aaaaatgctgatgaaatggaaagagatggctgacaggtttgcctgcaatgaggagctgggagtgctagcctcctttactcttttgtagggctggtgaagccgactctagccctagcactt

SEQ ID NO: 579356 - DNA, 120 bp, Artificial Sequence
  ENSG00000171793_49 (sequence is synthesized)
ttgtacttttgcacttctgccatccactcattagaagagcctttgtagtaagagatgttcagaaaggatcttagctgtcacgtagctgtggcacagatgaggagatcctgatagggccag

SEQ ID NO: 579357 - DNA, 120 bp, Artificial Sequence
  ENSG00000171793_50 (sequence is synthesized)
gccaggtgccgggcctccagacaatgagttcgggttatgtcttaacacgcttgtctcttaccaactagatcagtgcagatgggcgtcctggtggcagcgggtgagtgtgcatatccaaag

SEQ ID NO: 579358 - DNA, 120 bp, Artificial Sequence
  ENSG00000171793_51 (sequence is synthesized)
cccacacgaatggctgacagtggctggagcactcctgggtaccactccagagttctgagctgtgtttgggaatgtgtctcaccccacaccagaaagggatcacattaggacggggatgtg

SEQ ID NO: 579359 - DNA, 120 bp, Artificial Sequence
  ENSG00000171793_52 (sequence is synthesized)
ttgctgcctactccactacatccttttaaggctcggtgatgctgtcacattccttcagaaatcttcacttcgtgtcttagagcaatgggcaggccttatcttagttgcaagatcaatatg

SEQ ID NO: 579360 - DNA, 120 bp, Artificial Sequence
  ENSG00000171793_53 (sequence is synthesized)
atggcctagaagcatttggagagggcatactcattccgttgctctgtgagaatcatttttcatttcaacattttcctttcagtctttgtctgcttacatatagctatcagaatggcagtt

SEQ ID NO: 579361 - DNA, 120 bp, Artificial Sequence
  ENSG00000171793_54 (sequence is synthesized)
ttatcatcctttttcataaaacattataagcattttgctctgttattatattttacaatgaaaacttttaatgagtgtggacttttctattttgtgaatgtcccataatttgtttgacac

SEQ ID NO: 579362 - DNA, 120 bp, Artificial Sequence
  ENSG00000171793_55 (sequence is synthesized)
ttgccttcaccccattaattcttgtgaattgtctatgtctgttattttttttggtctttggtatgaaaaaaattttttgtaggcaaatttgtgtgagacgttgaaactctttgtaagttt

SEQ ID NO: 579363 - DNA, 120 bp, Artificial Sequence
  ENSG00000171793_56 (sequence is synthesized)
caaaacaaaaacaaaaaaaaaatttttctttacaaagcctgccatgttgatctgaaaattacttcctctttactggtctgtacacagaactcagataatagctattcccgttatattctt

SEQ ID NO: 579364 - DNA, 120 bp, Artificial Sequence
  ENSG00000171793_57 (sequence is synthesized)
cccaggtgtgtttttgttgttttttgtgggggttttttgaggcagggtctcacactgttgcccaggctgtagtgcagtggtgcagtcagctcactgtaacctccaactcctgggctcaag

SEQ ID NO: 579365 - DNA, 120 bp, Artificial Sequence
  ENSG00000171793_58 (sequence is synthesized)
tcctggccagacgtggttttttttcccttgaaatagctattttggtctcatgatagcgtgtaccttctgagtaattgggtttttcttgacgtttatttgatagatatgatcgcttgctgg

SEQ ID NO: 579366 - DNA, 120 bp, Artificial Sequence
  ENSG00000171793_59 (sequence is synthesized)
cggggcctgcgctgccgcgctgggccgcgccgaatcagctcggccgggctcgtcggacggagaaggccgtaggggagtggagcggcgcccccccccacaccctccgcccttgctcttcgt

SEQ ID NO: 579367 - DNA, 120 bp, Artificial Sequence
  ENSG00000171793_60 (sequence is synthesized)
tcgtctgcgaggaagcccggcagtcgcccatccattcaagcagtgcgggcctcgggcctccggcctcggcgcgggctcagccgcccggggctgggcgcggcagctccgcgccgtaggacg

SEQ ID NO: 579368 - DNA, 120 bp, Artificial Sequence
  ENSG00000171793_61 (sequence is synthesized)
agggggcctgcgaactcgccggccctgggccccgcggctggcctttgggcctcacggcttcctcccttcccggcggccgggggtcggggcgctggcggtgtatagagctcaccacgtttg

SEQ ID NO: 579369 - DNA, 120 bp, Artificial Sequence
  ENSG00000171793_62 (sequence is synthesized)
ctgttatgcaggcacttatcaggcctgctgatgtcccgttggccaaaacaagtcacgtggccaagccccgagccggcaggggaggagaacacacatgggtgtgaagactgagcatgctgc

SEQ ID NO: 579370 - DNA, 120 bp, Artificial Sequence
  ENSG00000171793_63 (sequence is synthesized)
actggggccaccctggaatggtccaccacagcccatttattctctgtagcccacccgacaaatactagattttcagaaagaccttgtaaattctgtggaaaataaagtaacctgaaggaa

SEQ ID NO: 579371 - DNA, 120 bp, Artificial Sequence
  ENSG00000171793_64 (sequence is synthesized)
agtgtcttttagagcacagacacttttaaatttcgatgaagtccaatctgtttttttcttttatggattgtgctttcactgtcgtgtctaagaactccttgctcttaaccaaggtcatga

SEQ ID NO: 579372 - DNA, 120 bp, Artificial Sequence
  ENSG00000171793_65 (sequence is synthesized)
agattttcttgtaaaagttagttttaggtcttacatgatccattctaggttaacttttgtgtgtagtgtgaggtaagggttgaaatttttacatgtggatatctacttgcctcagcccca

SEQ ID NO: 579373 - DNA, 120 bp, Artificial Sequence
  ENSG00000171793_66 (sequence is synthesized)
cccatttgttgaaaagactatccttggatactattctgtactttttaaaaataaaggtacattatagatttactaatcttcataaagttgtttagacttatttatagctattcataattt

SEQ ID NO: 579374 - DNA, 120 bp, Artificial Sequence
  ENSG00000171793_67 (sequence is synthesized)
tactaccgtgtatttttaaaaattatattttctgattagataataccccatgtgtaggagaccctgctgacctctgtccattcatctacagcctagcaaccttactaaaattctattagt

SEQ ID NO: 579375 - DNA, 120 bp, Artificial Sequence
  ENSG00000171793_68 (sequence is synthesized)
actgattgtttacctgtaaattcttttggtttttatggataagcagtgatattgtatgcattattcagtggcaaccgcttcttgttttctggttcatttttttttcttatctaatgataa

SEQ ID NO: 579376 - DNA, 120 bp, Artificial Sequence
  ENSG00000171793_69 (sequence is synthesized)
tggctaatatcttcagtacatcattgaatagaagtactgaaagtggccattctggccttgttctggactttaaatagtaaacattaatattaaaccatgtgatgtttactgtgggttttt

SEQ ID NO: 579377 - DNA, 120 bp, Artificial Sequence
  ENSG00000171793_70 (sequence is synthesized)
tatattgccaaattttccctaatcttaatttaccaataatttttattatgaatttggttttgaatttttatcaagtctacatctactgagggaattgttttcctccttaatctgttttct

SEQ ID NO: 579378 - DNA, 120 bp, Artificial Sequence
  ENSG00000171793_71 (sequence is synthesized)
atttatgtggtgaattccactgttaaatttcctaacacagtagttctcaaacttgactgcacactggaatcacttggggagctttaaaaatactgatgcctgcctcctaccccacaagat

SEQ ID NO: 579379 - DNA, 120 bp, Artificial Sequence
  ENSG00000171793_72 (sequence is synthesized)
cctaattcaagtggtctggggtgcagcatgggcttttgaccttttataagctctgaatgattccaatatgcagctgagtttgagaaccactgttcctagttaagccattcataggttcgt

SEQ ID NO: 579380 - DNA, 120 bp, Artificial Sequence
  ENSG00000171793_73 (sequence is synthesized)
ggacatgatttttttaaagctacatttgtgatttggatcatgaattattattattattatttttaagacaggttctggctctgttgcccaggctggagtacagtgatgcgatcttggctc

SEQ ID NO: 579381 - DNA, 120 bp, Artificial Sequence
  ENSG00000171793_74 (sequence is synthesized)
gtgcagtggcacaatctcagctcactacagcttcaagctcccaggctcaagtgattctcccacctcagctaccccccagttagctgagactacatgcacatgcccaccatgcctggctaa

SEQ ID NO: 579382 - DNA, 89 bp, Artificial Sequence
  ENSG00000171793_75 (sequence is synthesized)
tttttttgtagagacagtgttttaccatagagcaatcctcctgccatggcctcccaaagtactaggattataagcataagccaccttgc

SEQ ID NO: 579383 - DNA, 120 bp, Artificial Sequence
  ENSG00000171793_76 (sequence is synthesized)
cctcccaaagtactaggattataagcataagccaccttgcccagccatgaattttttttaaaggacttttgcatccatgttcataatagattggccactaattttctattctattcttga

SEQ ID NO: 579384 - DNA, 120 bp, Artificial Sequence
  ENSG00000171793_77 (sequence is synthesized)
gtctgttttagtagtttatctagaaaattgtccttttttctgttttcaaatacataatatttttacaaggtcacgtagctagtaggaggctgtaagcctggtgagtttttgcttttattt

SEQ ID NO: 579385 - DNA, 120 bp, Artificial Sequence
  ENSG00000171793_78 (sequence is synthesized)
ctcaagtgacatgattgaggtctgcacactagtgatgggggctggcacttcatctcataacattgaaagaaaaagcatttcccccctcagtctttgttgaatttctctgatgcgtcttga

SEQ ID NO: 579386 - DNA, 120 bp, Artificial Sequence
  ENSG00000171793_79 (sequence is synthesized)
tttacgttacttctgtgccggaaaaccttcttgcgccttccgtcaccttcaggattaagttcagattgggcatgccagtttgcacatgatctggcccttgcctacctttccagtttatct

SEQ ID NO: 579387 - DNA, 120 bp, Artificial Sequence
  ENSG00000171793_80 (sequence is synthesized)
gccatggtactgaaagcgtctgctctcatcgtccccctttatagtctaaacatgttttctgtctgcttccaccgtcactgaattactcatttatttgttaatgtttcatctctccaactg

SEQ ID NO: 579388 - DNA, 80 bp, Artificial Sequence
  ENSG00000171794_0 (sequence is synthesized)
agaacgcgtgtgggcggcccgggcggcgtctggccctctccccatcctcgcgcgccgcgccccagccccgggatgctgct

SEQ ID NO: 579389 - DNA, 80 bp, Artificial Sequence
  ENSG00000171794_1 (sequence is synthesized)
gacacccggagacgccccggggaccccgccccggaggcccgcctcgcccagcgcgctgggggaactcgggttgccggtgt

SEQ ID NO: 579390 - DNA, 120 bp, Artificial Sequence
  ENSG00000171794_2 (sequence is synthesized)
gcgcacgccctggagcgcccgggagacggagctgctgctggggacgctgctgcaaccggccgtgtggcgcgcgctgctcctggaccgccgccaggccctgcccacctaccgccgcgtgtc

SEQ ID NO: 579391 - DNA, 120 bp, Artificial Sequence
  ENSG00000171794_3 (sequence is synthesized)
cgcgtgtcggccgcgctggcccagcagcaggtgcgccgcacccccgcgcagtgccgccgccgctacaagttccttaaagacaagtttcgcgaggcgcacggccagccgcccgggcccttc

SEQ ID NO: 579392 - DNA, 120 bp, Artificial Sequence
  ENSG00000171794_4 (sequence is synthesized)
cttcgacgagcagatccggaagctcatggggctgctgggcgacaacgggcgcaaacggcctcgccgccgctccccggggtccgggcgcccccagcgcgcccgccgcccggtccccaacgc

SEQ ID NO: 579393 - DNA, 120 bp, Artificial Sequence
  ENSG00000171794_5 (sequence is synthesized)
cgaaccagacgccaccccgctgcccaccgcccgcgaccgcgacgcggaccccacctggacgctccgcttcagcccgtccccaccgaagtctgcggacgcctcccccgcccccggctcccc

SEQ ID NO: 579394 - DNA, 80 bp, Artificial Sequence
  ENSG00000171794_6 (sequence is synthesized)
tctgcggacgcctcccccgcccccggctccccgccagctcccgccccgaccgccctcgccacctgcatccccgaggaccg

SEQ ID NO: 579395 - DNA, 120 bp, Artificial Sequence
  ENSG00000171794_7 (sequence is synthesized)
ccccgaggactgcgcgccccctccggccgcgcccccgtcgctgaacaccgccctgctgcagaccctggggcacctgggcgacatcgcgaacatcctgggcccgctgcgcgaccagctgct

SEQ ID NO: 579396 - DNA, 120 bp, Artificial Sequence
  ENSG00000171794_8 (sequence is synthesized)
gaccttgaaccagcacgtggagcagctgcgcggcgccttcgaccagacagtgtccctggccgtgggcttcattctgggcagcgcggccgccgagcgaggggtcctcagggacccgtgcca

SEQ ID NO: 579397 - DNA, 120 bp, Artificial Sequence
  ENSG00000171794_9 (sequence is synthesized)
gtgagtcccggctgcggccagtctcccctctccaggccgaggcccctccgccctgacccctcctgctgccttcccacccccgttcttgggtatgttcaataaaaggattgttttcctaga

SEQ ID NO: 579398 - DNA, 80 bp, Artificial Sequence
  ENSG00000171798_0 (sequence is synthesized)
gaccgcgtcccctggagacactgcggcagcggcgggcgggcgggggcgggcgagggccgggcgcgtctccatggagccag

SEQ ID NO: 579399 - DNA, 120 bp, Artificial Sequence
  ENSG00000171798_1 (sequence is synthesized)
ggccgcaggatgcaggccatggacccggccgcggcggatctttacgaggaggacggcaaagacctggacttctacgacttcgagccgctgcccaccctccccgaggacgaggagaacgtg

SEQ ID NO: 579400 - DNA, 120 bp, Artificial Sequence
  ENSG00000171798_2 (sequence is synthesized)
tctctggctgacatcctctccctgcgggaccgcggcctcagcgagcaggaagcctgggccgtgtgcctggagtgcagcctgtccatgcggagcgtggcccacgccgccatcttccagagc

SEQ ID NO: 579401 - DNA, 120 bp, Artificial Sequence
  ENSG00000171798_3 (sequence is synthesized)
ctgtgcatcacgcccgacaccctggccttcaacaccagcgggaacgtgtgtttcatggagcagctcagcgacgaccctgagggtgccttcgttccccccgagttcgacgtgaccgggaac

SEQ ID NO: 579402 - DNA, 120 bp, Artificial Sequence
  ENSG00000171798_4 (sequence is synthesized)
acctttgaggcgcacatctactctctgggggccacgctgaaggccgccctcgagtacgtggcagagcccacactggaacccaggctgagccaagacctcgaggcgctgctgagccggatg

SEQ ID NO: 579403 - DNA, 120 bp, Artificial Sequence
  ENSG00000171798_5 (sequence is synthesized)
caggcggaggaccccggggaccggccggaccttgagagcatcatcgcgctgtgtgaagagaagctgcagctcacatcctcctgtcgcgtgtgccggagcctctctgctgtggggaggagg

SEQ ID NO: 579404 - DNA, 120 bp, Artificial Sequence
  ENSG00000171798_6 (sequence is synthesized)
gtcctctccatcgagtccttcggagcgctgcaggatgtcagcgagagcagctggcgggagagacctgccccaggaaacgctgggcccaggaggccgcccggggaccccagcactgacccg

SEQ ID NO: 579405 - DNA, 120 bp, Artificial Sequence
  ENSG00000171798_7 (sequence is synthesized)
gaggttctgccgacccccgaaggcccggagtctgagacgagccggggccccagagcctccccaaccaaggctctgctgtccaccccggtgagaaatggcgagagccacagccgggagggg

SEQ ID NO: 579406 - DNA, 120 bp, Artificial Sequence
  ENSG00000171798_8 (sequence is synthesized)
ctggccggcctcgtcctggatgccgagcgcaccctcggggagctggacagagacgccctcaggagaagccgcctgcggaaggtgcagacgttccctaggctgctgtccgacagccccgag

SEQ ID NO: 579407 - DNA, 120 bp, Artificial Sequence
  ENSG00000171798_9 (sequence is synthesized)
gccaccctctgcctgccgctgacccgcgggaaaagccagctgcccatatcggaattattctctccggaccccaggaaggcctttctggacaggaaaaatggcctttctagcttccaggct

SEQ ID NO: 579408 - DNA, 120 bp, Artificial Sequence
  ENSG00000171798_10 (sequence is synthesized)
cagcccaaatgcaggctgtggccggagcaggagccggaacaccagctgggacgggttccctgtgcaggccgcagcacggacaggggccctggggtgcccggcagtccaggacagcccgag

SEQ ID NO: 579409 - DNA, 120 bp, Artificial Sequence
  ENSG00000171798_11 (sequence is synthesized)
acttcacaccccagccaggggccagcagaggcccctgcagaccctcgagatgctagcggtgaagcccagactcccagggacgatgagagaattccagaaggagctaggcagctggaaagt

SEQ ID NO: 579410 - DNA, 120 bp, Artificial Sequence
  ENSG00000171798_12 (sequence is synthesized)
gcagccgcggagcagtgggtgtccctgcaggacctcctgtcccagctgggccggcccttccgggagtacgagctgtgggccctgtgcctggcctgcctccgcgcactgcagacacgccct

SEQ ID NO: 579411 - DNA, 120 bp, Artificial Sequence
  ENSG00000171798_13 (sequence is synthesized)
gagcacccagcctacctgtgtctggactccgtgctggttgctgaggacggggctgtgctcttccagccaccccctgccaacggttcctatgactcgttctttctggctcccgagctggca

SEQ ID NO: 579412 - DNA, 120 bp, Artificial Sequence
  ENSG00000171798_14 (sequence is synthesized)
gaggagaggctggtaactgaaaaggcctctgtgtactgtgtggccgccgttctgtggaccgcagccaagttcagcgtcccccgcaaccacaagctggccctgccacgcaggctcaagacc

SEQ ID NO: 579413 - DNA, 120 bp, Artificial Sequence
  ENSG00000171798_15 (sequence is synthesized)
ctcctcctggacatggccaggcgcagtgccccggagcggccgtccgcggctgaggccatcaaggtgtgcggcagctacctcctccagcgaggcatggacagccggaaaatccttgcccac

SEQ ID NO: 579414 - DNA, 120 bp, Artificial Sequence
  ENSG00000171798_16 (sequence is synthesized)
ctcagagcttccatctgccaggtgtaccaggaggaagagaccatcagcctccaaaacgccttctcagtggttgaactgaagcccagtgtggcaccagccccagagcccagcccaggcttc

SEQ ID NO: 579415 - DNA, 120 bp, Artificial Sequence
  ENSG00000171798_17 (sequence is synthesized)
ctgccggtgaacagcgacaccgggcttgtggctgtgccagggcccgtgcccggccagcacccctgcggtgaagaagccacccagctgcctgcagcgttcacctccgaggccacgcacttc

SEQ ID NO: 579416 - DNA, 120 bp, Artificial Sequence
  ENSG00000171798_18 (sequence is synthesized)
aagcccattgtcctcgcgcagaacgcaagtgtggccagggaccagcctgccttggcccaggaggagtccgaggagaggggcggccagagggagggagaaggtgaggagaagctctccctg

SEQ ID NO: 579417 - DNA, 120 bp, Artificial Sequence
  ENSG00000171798_19 (sequence is synthesized)
gaggcccacgctgggtcccccagcctgaagacgcctgacgggccggtgcctggtccggggccacagggagcagccccagagcctcttggggcgtcagtgcagcgtgactcagcccagggc

SEQ ID NO: 579418 - DNA, 120 bp, Artificial Sequence
  ENSG00000171798_20 (sequence is synthesized)
cgcccctgccctccaccccaggccccagcaaaccagccagagggggcctcatcggcagctcccggctctccagtccccgccccgcccacgaaggcatctgcgctgcccgtagagcaaggg

SEQ ID NO: 579419 - DNA, 120 bp, Artificial Sequence
  ENSG00000171798_21 (sequence is synthesized)
ccggctgagccgatcccacctggagttgcttccgggggcctcaggcccgacgccctggggcccaccacggcccaccacggcccacgccacccgcccaagcccccacgaagcaaggccacc

SEQ ID NO: 579420 - DNA, 120 bp, Artificial Sequence
  ENSG00000171798_22 (sequence is synthesized)
gagcgcccgggccaggagccagagggccccggggccacccctgccggggaacgtgatgaccagagtccagacagtgtcccagagaggccgcggcccgcagaccggaggctctgtctgccc

SEQ ID NO: 579421 - DNA, 120 bp, Artificial Sequence
  ENSG00000171798_23 (sequence is synthesized)
tgcgtggatgcctcgccactcccagggaggacggcctgcccgtcgctgcaggaggccacgcgcctcatccaggaggaatttgccttcgatggctacctggacaatgggctggaggctctg

SEQ ID NO: 579422 - DNA, 120 bp, Artificial Sequence
  ENSG00000171798_24 (sequence is synthesized)
atcatgggggagtacatcttcgccttgaaagatctcacctttgccactttctgtggcgccatttccgagaagttctgtgacctgtactgggatgagaagttgctgcagaacctctttaag

SEQ ID NO: 579423 - DNA, 120 bp, Artificial Sequence
  ENSG00000171798_25 (sequence is synthesized)
gtggtcaacgggcaggcgtcaccctccccaagcacggccgaggaggctgggtcacagctcgagggcagccaaagcccccgctccccgtccagcaagaggccgtcgctgcaccgcctggga

SEQ ID NO: 579424 - DNA, 120 bp, Artificial Sequence
  ENSG00000171798_26 (sequence is synthesized)
aaagagaagccagccatggccaggaccagcagcagggccccctgctcacccacctcggtgtcggatgtggactcggacgcactgtcacggggaaacttcgaggtggggtttcggcctcag

SEQ ID NO: 579425 - DNA, 120 bp, Artificial Sequence
  ENSG00000171798_27 (sequence is synthesized)
aggtccgtaaaagccgagagagcgcagcagcctgaggctggcgaggacagacggccagctggcggggcctcagacgtggaggcagtgacccgactggccaggtccaaaggggtcggccca

SEQ ID NO: 579426 - DNA, 120 bp, Artificial Sequence
  ENSG00000171798_28 (sequence is synthesized)
acgaggccgactgcttcggggccgacgtccacaactacgtgaaggacctggggcggcagcaggcggacggggccctgcccgacgcccagagcccggagctggaacagcagctcatgatgg

SEQ ID NO: 579427 - DNA, 120 bp, Artificial Sequence
  ENSG00000171798_29 (sequence is synthesized)
agaaaagaaactaccgcaagaccctgaagttctaccagaaactcttacagaaggaaaagaggaacaaaggttccgacgtcaagaccatgctgtccaagctgaaagggcagctagaagaaa

SEQ ID NO: 579428 - DNA, 120 bp, Artificial Sequence
  ENSG00000171798_30 (sequence is synthesized)
tgaaatccagggtgcaattcctcagcttggtcaagaagtatctgcaggtcatgtacgcggaacgctggggcctggagccctgcaccctcccagtgatcgtgaacatcgcggccgcaccct

SEQ ID NO: 579429 - DNA, 120 bp, Artificial Sequence
  ENSG00000171798_31 (sequence is synthesized)
gcgacacgctggacttcagccccctggacgagtcctcctcgctcatcttctacaacgtcaacaagcacccgggcggccggcagaaggcccgcatcctgcaggccggcacgccgctggggc

SEQ ID NO: 579430 - DNA, 120 bp, Artificial Sequence
  ENSG00000171798_32 (sequence is synthesized)
tcatggcctacctgtactccagtgatgccttcctggagggttatgtgcagcaattcctctacaccttccgctacttctgcacaccccacgacttcctgcacttcctcctcgaccgcatca

SEQ ID NO: 579431 - DNA, 120 bp, Artificial Sequence
  ENSG00000171798_33 (sequence is synthesized)
acagcacgctgaccagggcccaccaggaccccacctcgaccttcaccaagatctacaggcggagcctctgcgtcctgcaggcctgggtggaggactgctacgctgtggacttccctcgga

SEQ ID NO: 579432 - DNA, 120 bp, Artificial Sequence
  ENSG00000171798_34 (sequence is synthesized)
acagcgggctgctggggaagctagaggacttcatctcctccaagatcctacccctggacggctctgccaagcacctgctgggcctcctggaggtgggcatggaccggcgggccgagggca

SEQ ID NO: 579433 - DNA, 120 bp, Artificial Sequence
  ENSG00000171798_35 (sequence is synthesized)
accctcgcggcacagacctggagaaccccagggaggccgaggaggatgccagacccttcaacgccctctgtaagaggctctcagaggacggcatctccaggaagagcttcccctggaggc

SEQ ID NO: 579434 - DNA, 120 bp, Artificial Sequence
  ENSG00000171798_36 (sequence is synthesized)
tgccccgaggcaacgggctggtgctgccgccacacaaggagcgcccctacaccattgctgccgccctgcccaagccctgcttcctcgaggacttctacggcccctgcgccaagaccagtg

SEQ ID NO: 579435 - DNA, 120 bp, Artificial Sequence
  ENSG00000171798_37 (sequence is synthesized)
agaaggggccctacttcctgacggagtacagcactcaccagctcttcagccagctcacgctgctacagcaggagttgtttcaaaagtgccacccggtccacttcctgaactcacgggccc

SEQ ID NO: 579436 - DNA, 120 bp, Artificial Sequence
  ENSG00000171798_38 (sequence is synthesized)
tgggcgtcatggacaagagcactgccatccccaaagccagctcttctgagtctctttcggccaaaacctgcagcttatttctgcccaattacgttcaggacaagtatctgttacagcttc

SEQ ID NO: 579437 - DNA, 120 bp, Artificial Sequence
  ENSG00000171798_39 (sequence is synthesized)
taagaaacgcagatgacgtcagcacctgggtggctgcagagattgtgaccagccacacctccaagctgcaggtgaacttgctgtccaaatttttgctgattgcaaaatcttgctatgagc

SEQ ID NO: 579438 - DNA, 120 bp, Artificial Sequence
  ENSG00000171798_40 (sequence is synthesized)
agagaaacttcgcgacagccatgcagatcctgagcgggctggagcacctggccgtgaggcagtcccctgcctggagaattctgcctgcaaagatagcagaggtcatggaggagctgaaag

SEQ ID NO: 579439 - DNA, 120 bp, Artificial Sequence
  ENSG00000171798_41 (sequence is synthesized)
ccgtggaggtcttcctgaagagcgacagcctgtgtctgatggaagggcggcgcttccgggcgcagcccaccctgccctcggcccacctcctggccatgcacatccagcagctggagacag

SEQ ID NO: 579440 - DNA, 120 bp, Artificial Sequence
  ENSG00000171798_42 (sequence is synthesized)
gcggcttcaccatgaccaacggggcccacaggtggagcaagctcaggaacatcgcaaaggtggtgagccaggtgcacgcgttccaggagaacccttacaccttcagccccgaccccaagc

SEQ ID NO: 579441 - DNA, 120 bp, Artificial Sequence
  ENSG00000171798_43 (sequence is synthesized)
tccagtcgtacctcaagcagaggattgcccgcttcagcggtgccgacatttccacactcgccgcagatagcagggccaacttccaccaggtctccagcgagaagcactcacggaagattc

SEQ ID NO: 579442 - DNA, 120 bp, Artificial Sequence
  ENSG00000171798_44 (sequence is synthesized)
aggacaagctacggaggatgaaggctacattccagtagccgagctcgggcctggtgtggaattccagatccgaatccgactgtggggggcgggctgggaggtgggagccgcgtctcaggc

SEQ ID NO: 579443 - DNA, 120 bp, Artificial Sequence
  ENSG00000171798_45 (sequence is synthesized)
ccggccgttatcaaggcccctccgcccccgaaccctggggagctggaccaggaggtggaggctcaggggaccccatggggacaggcagagctggtctcctcccagcagacggagccagga

SEQ ID NO: 579444 - DNA, 120 bp, Artificial Sequence
  ENSG00000171798_46 (sequence is synthesized)
cgggcacaagagtcttggaggtttgcgtgtttctgctagaattaaaaagttaaatttaaaaatgaaaatgaaagacagcttcccaggagttttgtgcctgtctgcgcctctcacacacag

SEQ ID NO: 579445 - DNA, 120 bp, Artificial Sequence
  ENSG00000171798_47 (sequence is synthesized)
ataagtggctcttacccagctctcagtgactcccccacaaaacagcaacagcctccaccgccaactcaacaaacttcagagtagctcctccctgagcaggtttctgagccagcctgggtt

SEQ ID NO: 579446 - DNA, 120 bp, Artificial Sequence
  ENSG00000171798_48 (sequence is synthesized)
ggctgagcaacgaagggccaaagctgacctctgagtggccaactgcagctcccagggactccgagacctccggtccgagaccctgcctgggttcaccccccacaacccagacccagaacc

SEQ ID NO: 579447 - DNA, 120 bp, Artificial Sequence
  ENSG00000171798_49 (sequence is synthesized)
gctctccccttccctgcccagtgcccctcctccccagcccagacccccaggtgcccaaggcctgctgctggagcaggcaccttgggctgggcctgctcccccagggcccagggcccccca

SEQ ID NO: 579448 - DNA, 120 bp, Artificial Sequence
  ENSG00000171798_50 (sequence is synthesized)
gcttagaacagcccttggtgaggtggtcatgcccgggcaaaggccctgcttcctggaaaggacactcagagcagctccaagacagaggctctgtggcgggggtccctgagagtgccccca

SEQ ID NO: 579449 - DNA, 120 bp, Artificial Sequence
  ENSG00000171798_51 (sequence is synthesized)
cccatctcatgccccagggaccgccactgcccaccgcctccagcagccatgcatgtgcgcccgcagccctgcctccacagctcgccacacactcacgcttcgccagagacaggaagtgcg

SEQ ID NO: 579450 - DNA, 120 bp, Artificial Sequence
  ENSG00000171798_52 (sequence is synthesized)
ctgcctccacggccccttgcccttgctcaggttcttggaccccaggcagctggtgtggagccccttggccagggccatgggagtcccgcgcagtcagctccacattggcctctgcagctg

SEQ ID NO: 579451 - DNA, 120 bp, Artificial Sequence
  ENSG00000171798_53 (sequence is synthesized)
ggtgaccagagccccgggcacggccccagctccgtggggctctcacggtgccaatcacaagacccagggttgtgcttttgagttttagaattagtcattctttagagcagccagctagtg

SEQ ID NO: 579452 - DNA, 120 bp, Artificial Sequence
  ENSG00000171798_54 (sequence is synthesized)
gcatttctaggaaaactgtgacctgtgacaaatcgctgcatttttaatgtcaagatgtgttttcccacataaattcaccggagacatccgggccccgcttcgatgtaacatgagaggaag

SEQ ID NO: 579453 - DNA, 120 bp, Artificial Sequence
  ENSG00000171798_55 (sequence is synthesized)
tcggcgtcctggccacgaaatgcagttcacttttttttaggcttttatatggattatgttttgctgacccacgcccgcattttcagattttgtatctaacagacagtgctcagtgcaaat

SEQ ID NO: 579454 - DNA, 120 bp, Artificial Sequence
  ENSG00000171798_56 (sequence is synthesized)
caacattccagcggtcaggactgaccccggggcagcactgggctcaggcttcagcgcgactgtccgcatggctccctcccgtcctggcaccaatttctgaataaagtcctttctaccagc

SEQ ID NO: 579455 - DNA, 120 bp, Artificial Sequence
  ENSG00000171798_57 (sequence is synthesized)
gttccgtggctctgacgtccagggaacagcaggacgactcttgaaacaaaatgagacgtggtctaaagccctttccctgacccacgcgttgaaacgctgccacgagtcgtccgtttcccc

SEQ ID NO: 579456 - DNA, 120 bp, Artificial Sequence
  ENSG00000171798_58 (sequence is synthesized)
ccgggccccgctctgccccgtgaggcagtagcttcagacgggcctcccactgttggatgctgtaaatctgtccgtgtgaagttataaaaggggccctgatttgagggtccaatgccagga

SEQ ID NO: 579457 - DNA, 120 bp, Artificial Sequence
  ENSG00000171798_59 (sequence is synthesized)
agccctggggcgaggggcagagtgaccaagcgcccgtgtcccgctccggcaggtcatgtacgcggaacgctggggcctggagccctgcaccctcccagtgatcgtgaacatcgcggccgc

SEQ ID NO: 579458 - DNA, 120 bp, Artificial Sequence
  ENSG00000171798_60 (sequence is synthesized)
tcaggagagccgccctcatcgacgctgggcagccgcagcagacagtccctgtggacagagaggtgggaggctcgactccttctcttcatccacctgttttcaaagcagtgagtgcatcca

SEQ ID NO: 579459 - DNA, 120 bp, Artificial Sequence
  ENSG00000171798_61 (sequence is synthesized)
gcgtcctccaacgtggaccagtgagcttggttttatgatcttatgaatttaagattcgcacgtctttgatgggattttgtctgttctgctgattccacctgaagctcagaaggcaccccg

SEQ ID NO: 579460 - DNA, 120 bp, Artificial Sequence
  ENSG00000171798_62 (sequence is synthesized)
gactccgacccctcccccatcgctggcctgtttgcttggcattcatccacgacatgcaggcttagcaagcgtctgggctcacagacagcagggtgagtggggtcctgcctcttgctggtt

SEQ ID NO: 579461 - DNA, 120 bp, Artificial Sequence
  ENSG00000171798_63 (sequence is synthesized)
ctggtctacacaagtgacagacttgatgtgagacccacaggctggggatccaataatgctgggacatgagaatggggccccaaggctcttgtttgcatcagaggcctccagaggccactg

SEQ ID NO: 579462 - DNA, 120 bp, Artificial Sequence
  ENSG00000171798_64 (sequence is synthesized)
ctttgagagccctggccagtgaggccctgtctgggcccaggcggtcctgggagcccccaggtgcgtgttcacagtgtcctcctgaggcccgggctgtggtggacccaccacgctgagtgc

SEQ ID NO: 579463 - DNA, 120 bp, Artificial Sequence
  ENSG00000171804_0 (sequence is synthesized)
acgcgcgttcagacccctggcctcgggaagtccgccggctgcggggttgggggccaaccgttctgtgggcggagtcctctcgcaacatccgccaggtagcttcttagttgctgcccctag

SEQ ID NO: 579464 - DNA, 120 bp, Artificial Sequence
  ENSG00000171804_1 (sequence is synthesized)
ctctaggagctcctgagtgcacacgccgtacccgtcccttgtcgggaatcctgtcgcaggtttttaagcaacagtcctcaggagggccaagggagtctgacggtgatgtcttcccccagg

SEQ ID NO: 579465 - DNA, 120 bp, Artificial Sequence
  ENSG00000171804_2 (sequence is synthesized)
ctcattcccctgtggaaagatttaaaactcctcctaaatgacaccataaataaaagcaagcaaccttcggaagacccaaagaactgcctgattgtgctgagtgaccggtcccaggctgta

SEQ ID NO: 579466 - DNA, 120 bp, Artificial Sequence
  ENSG00000171804_3 (sequence is synthesized)
gcatggatgaagagcaaaactgaggacatggttgagaaaagaacattctccatgactgaacgattgccacccatccagtccatggtccatgcaggctcctttcatatcctcgtggtctac

SEQ ID NO: 579467 - DNA, 120 bp, Artificial Sequence
  ENSG00000171804_4 (sequence is synthesized)
tgtggtgacctgatcctgcgactctttggggaccactttcgggcattcaaacccctgggtaaagtgccctgccgcttcaacatcagctgcctctgctatgacccggaaatgaagatgctt

SEQ ID NO: 579468 - DNA, 120 bp, Artificial Sequence
  ENSG00000171804_5 (sequence is synthesized)
ctgtctggcatcctgggggcagtggtgacctgggtcattgagctaggtggcacgggcctccaaatagcccacatggtctccatgccaggtgatgagcttgtccaggacatcgtgctgaat

SEQ ID NO: 579469 - DNA, 120 bp, Artificial Sequence
  ENSG00000171804_6 (sequence is synthesized)
ggtcccagtggctccctcctggccctgtgtgagacggtggtgagggtccttatgcaccagggcaagggccagctgggagaggtaaagaggttcacgtccaccagcagcggctcctccatc

SEQ ID NO: 579470 - DNA, 120 bp, Artificial Sequence
  ENSG00000171804_7 (sequence is synthesized)
acctgctgcttcacctgttttgatcagggctttctctatgctggaaaccaagctggggaaatccaagtttggagcctccagcagggccatccactccacagtttccaggcccatcaatca

SEQ ID NO: 579471 - DNA, 120 bp, Artificial Sequence
  ENSG00000171804_8 (sequence is synthesized)
ggagtgatctgtatccgcagccgaccagaggcccacaccctgctaacagctggtagtgacagcctaatcaaggagtggaacctgacttcagggagcctgcttcggcggctagagcttggt

SEQ ID NO: 579472 - DNA, 120 bp, Artificial Sequence
  ENSG00000171804_9 (sequence is synthesized)
gaggagctataccggctccagtttattgacagcattactttcttctgccaaactgcccatagtttttccttgcaccgcctgccctgcttctacagcctcttcaatgtctgtggctctgct

SEQ ID NO: 579473 - DNA, 120 bp, Artificial Sequence
  ENSG00000171804_10 (sequence is synthesized)
ccccagcagttgcgtcgggtctgctgtggaaataactggttccggatcctgtgtaccactgaggatggcttgttgcgctttgtgtccccagtaacaggggaccttctggttatcacctgg

SEQ ID NO: 579474 - DNA, 120 bp, Artificial Sequence
  ENSG00000171804_11 (sequence is synthesized)
cccttctcaatcctggaccaggctgtggattgggcctacgacccaggtaaagaggagctctttgtagcaacaggcagctcagaggttctggtatttgacacaacccgctgcccttgccca

SEQ ID NO: 579475 - DNA, 120 bp, Artificial Sequence
  ENSG00000171804_12 (sequence is synthesized)
gccaagtatctcttaggcacctcaccaaattctcaggactttgtacaatgcctggcttatgggcatttcaacttggggcggggtctagagggactgatattctctgggcaccagagtggt

SEQ ID NO: 579476 - DNA, 120 bp, Artificial Sequence
  ENSG00000171804_13 (sequence is synthesized)
gtgataagagtgctctcccagcacagctgtgctcgattagaaaaattcatgcactttggcgctgtactggcactctccacgctgtctggagggatttttggtggccaaggaaactctctg

SEQ ID NO: 579477 - DNA, 120 bp, Artificial Sequence
  ENSG00000171804_14 (sequence is synthesized)
ctctgttcctatggaatggatgactatgtgcacctgtcagaagctgtgcttgatggggtcaaagtacaactgcggcctctcgccagcattctcagcagctgtcacctaacacatctgata

SEQ ID NO: 579478 - DNA, 120 bp, Artificial Sequence
  ENSG00000171804_15 (sequence is synthesized)
ctcttgcccaagtctgtgggtgccatcacagagacaaactgcctgcgtctctggaagttccatgattttctgtcctctgggtcacagaatggcttgaaattcatagaaacactgcctctg

SEQ ID NO: 579479 - DNA, 120 bp, Artificial Sequence
  ENSG00000171804_16 (sequence is synthesized)
cacctgtgtgccatcacatcctttgatgtctgcctctccttgagtctttttgtcacaggttctgccgatggctctgttcggatctgggacttccatggcagactcataggcattctggac

SEQ ID NO: 579480 - DNA, 120 bp, Artificial Sequence
  ENSG00000171804_17 (sequence is synthesized)
tcatcactgcactttggcccagtctgttttgcaaatgaccggggtgacctgcttgtgacttttaaccagagtctttacctagtgtcctgtttaaaattgcttcccccagccctgctgact

SEQ ID NO: 579481 - DNA, 120 bp, Artificial Sequence
  ENSG00000171804_18 (sequence is synthesized)
cgcctttcctttatgagcatatcagatgaagtactggaagtccctaagcctttcataccaagcttcttcttctcctttgagaccatgtttgtgcccaagtacatctaccctggacaagcg

SEQ ID NO: 579482 - DNA, 120 bp, Artificial Sequence
  ENSG00000171804_19 (sequence is synthesized)
caacagaaattagtgggtctggagaaacttgtcaacaaccgggccattgcctttgaccattctgtgccacatgtgatagaagaagatgaggaagggagcccagtgttactgcgttcctcc

SEQ ID NO: 579483 - DNA, 120 bp, Artificial Sequence
  ENSG00000171804_20 (sequence is synthesized)
atgcattattctttgcaggacatggaagattggatgcaggtgagcaaacgttaccaatgccattatgtgcttcctccccagctacaactgactagctgggatggactcaacccctatcag

SEQ ID NO: 579484 - DNA, 120 bp, Artificial Sequence
  ENSG00000171804_21 (sequence is synthesized)
atattgcgatactactttggtcatgggcgggaatggctttttgcccctgactgctatatccccaattcagtgattcgtgcccgtctttggccagagggcaccccaatatacctacagtgc

SEQ ID NO: 579485 - DNA, 120 bp, Artificial Sequence
  ENSG00000171804_22 (sequence is synthesized)
aacctgcatgcaccccagcgggagctggaatgggacaggtctcaagaattctttttctggcacagcagggtaagagctataagtaatacagaatatccaaagaataaggaggaggatgaa

SEQ ID NO: 579486 - DNA, 120 bp, Artificial Sequence
  ENSG00000171804_23 (sequence is synthesized)
cacttcctagaaatgagactttccaaggatgtaacctacagtgtccttacagatggagcaaaccgaagttggctgggaagaaagatgagtgaaataaccattaatagcatgattgagaca

SEQ ID NO: 579487 - DNA, 120 bp, Artificial Sequence
  ENSG00000171804_24 (sequence is synthesized)
atgctcaatattatggtccatgcttccttgctgaagtaccagtgctgtgttggtgcactagggcaaatctttgcctcttaccaggtgtccccagccctacgctctgagacagcccgtcgg

SEQ ID NO: 579488 - DNA, 120 bp, Artificial Sequence
  ENSG00000171804_25 (sequence is synthesized)
ctactgaatgatacaaccaattccaacccgctgatccgagaactagcttgggaagggctgaagcgtctaggaatgattactcatctttttgccatgcctctggctcaaggattaatggac

SEQ ID NO: 579489 - DNA, 120 bp, Artificial Sequence
  ENSG00000171804_26 (sequence is synthesized)
aaggatgaaagagtgaggatcaagaccctaagcctcatggctgagattggaatccactctaggacctcactcttacagctgacccaaaaacaagagacttttcgggagatgcagcagcag

SEQ ID NO: 579490 - DNA, 120 bp, Artificial Sequence
  ENSG00000171804_27 (sequence is synthesized)
atgatcggggaggaacccctggaccatctactggggatgcgggccacagatctccaaatcctttccactcaagtggagcagagattgaatgaaaacctgaccctgtcacatagagatgaa

SEQ ID NO: 579491 - DNA, 120 bp, Artificial Sequence
  ENSG00000171804_28 (sequence is synthesized)
aagccggctttttctttagatgtctcaatgccttctgaacttaaatcctccctgaaacctcctacagtttctgaagaatctgaagtggccatcaagcccagcaaaggccaaagacgaggc

SEQ ID NO: 579492 - DNA, 120 bp, Artificial Sequence
  ENSG00000171804_29 (sequence is synthesized)
caagcaggggtcaaaaagcatagccaaaaatggttgcggggtctcaagaagacgaaagagagagactctaaacagatgagcacagagccaggcctcttagaggatgaaagtgggactgag

SEQ ID NO: 579493 - DNA, 120 bp, Artificial Sequence
  ENSG00000171804_30 (sequence is synthesized)
gccgcaccaattgagatggaggaagcatccgtctattcccaatggtcttcaagcaccagtgtaataaagctctcaaaagatgttgattctcaagagaaagatatctcgaaggatcacatt

SEQ ID NO: 579494 - DNA, 120 bp, Artificial Sequence
  ENSG00000171804_31 (sequence is synthesized)
gcattgaccctgaagaggctgcagaaaatacgtgacaaaagagacaagaaagcaacagctcagaaactcaaaaagaagcacaaaaagaagggaaaagaagccaaagttataaatgaggaa

SEQ ID NO: 579495 - DNA, 120 bp, Artificial Sequence
  ENSG00000171804_32 (sequence is synthesized)
actacacctcctgtaatggaacagccagttactaaaaaggttaaaatccaagggcggggagcctctggaatatctggccgcaggtcaaccgctggagatggctcatcatggagggacgat

SEQ ID NO: 579496 - DNA, 120 bp, Artificial Sequence
  ENSG00000171804_33 (sequence is synthesized)
ctatgtcgtcttatggccctgaggatatctggttcccaaacaaaaatgtcagaaaacctaaacgctgagctagtgacatttgctcaggagatgctggtagataggcaccccagctgggaa

SEQ ID NO: 579497 - DNA, 120 bp, Artificial Sequence
  ENSG00000171804_34 (sequence is synthesized)
ctctttcaggagatctgccccctattgaagaaagaaagtaaggttctgcttgaggaccttgattgggatgtagtcccgccagagaagaaaccaatttttatccaggaaggagcaattaga

SEQ ID NO: 579498 - DNA, 120 bp, Artificial Sequence
  ENSG00000171804_35 (sequence is synthesized)
gaggacatgatacaaggtgtgacccaagaggtgatcagacacaaggaagtgatgccaagggaagaagaacaagcacaaaagaaagcaagagacatgctgggcttggaggaaacccaagtg

SEQ ID NO: 579499 - DNA, 120 bp, Artificial Sequence
  ENSG00000171804_36 (sequence is synthesized)
acctttcagaagtcacctaagcaagggaggaaagctgtccagaaggaaagaaaagtaggaaaaataaagagggaaatgaccaaagaagagagggatatgagtgaggaagtggaggaaatg

SEQ ID NO: 579500 - DNA, 120 bp, Artificial Sequence
  ENSG00000171804_37 (sequence is synthesized)
gccacactagaggagaaagtggtcaaacaagaaggaaaactggttatgattgagaggacaccatcttggcaggactggaaaaaggcctgggatgagtggaaacaggtccatggtgagaca

SEQ ID NO: 579501 - DNA, 120 bp, Artificial Sequence
  ENSG00000171804_38 (sequence is synthesized)
aggaaatcctggaaggcatggaaggaagaatgggagaagaggcttcttcaggaagaggagaaactacatcaggctggagagaagctatccccggaggaggaaatgcttcaggaggacaag

SEQ ID NO: 579502 - DNA, 120 bp, Artificial Sequence
  ENSG00000171804_39 (sequence is synthesized)
aagctgaaatgggaggagtggaaacaagtctgggaaaatatgttatcatctaagtccaaggagcaacagtacaaggatgaggaagaagtgactttggaggaagaagtgtctcgggagggg

SEQ ID NO: 579503 - DNA, 120 bp, Artificial Sequence
  ENSG00000171804_40 (sequence is synthesized)
gaagaaaaagaacagcaggtcacagaagagcagagacacatccaagaagaacacaaatgggccagaatacacaggaaacgagcccgagctgaaaaaaaacgagcccaagaagagaggaaa

SEQ ID NO: 579504 - DNA, 120 bp, Artificial Sequence
  ENSG00000171804_41 (sequence is synthesized)
ttagcacaagaagaagagaaacttgcacaagaagagagacagttggcccaggaagagagaaaactggcccaggcatacgtgaaaataacccaggatgacagggaaatggcccaggcagag

SEQ ID NO: 579505 - DNA, 120 bp, Artificial Sequence
  ENSG00000171804_42 (sequence is synthesized)
ggtaagtttgcccagaaagaggaaacactggcccaaagaggggagaagctaagccaggaggcggagaaattggcccagaaaaggaagaaactggccaagaaatgggagaaagtggctaga

SEQ ID NO: 579506 - DNA, 120 bp, Artificial Sequence
  ENSG00000171804_43 (sequence is synthesized)
gaagaagagaaactagcaaagaaaggagggaaactggctgaggtgaaaaacatattggcccagaaagtggaagaactgccccagagggaacaaaatctggactggcaagaaaaggagctg

SEQ ID NO: 579507 - DNA, 120 bp, Artificial Sequence
  ENSG00000171804_44 (sequence is synthesized)
gcccaggaattggaggaactggaatgggacatggaagaactgtcttggaaagaagaggaactgaatcaggaagaggggaaactggttgaggaaaagaagaaactggctgaggaagaggag

SEQ ID NO: 579508 - DNA, 120 bp, Artificial Sequence
  ENSG00000171804_45 (sequence is synthesized)
gcattggcctggcaaagggagaaactgtctgaagaagagacaaaactggcccaggaagaagagttgctgatccaggaaaaggagaaactggcccagcacaaggaaaaaatgcctgaggaa

SEQ ID NO: 579509 - DNA, 120 bp, Artificial Sequence
  ENSG00000171804_46 (sequence is synthesized)
gaggaaagactgggacggaaaagggagcaattgattgagaagaagatgaaactggcccaaaaaagggaaagatggatcaacagcatggaagaactcacaaagaacaagatgatactgtac

SEQ ID NO: 579510 - DNA, 120 bp, Artificial Sequence
  ENSG00000171804_47 (sequence is synthesized)
cagaagaagaatctggctcaggaaaagaagaatctggcccaggagaaggaaaaattggctcagaggaaagagaacctactctataataaagaaagactcacccacagcaaaaagcaatta

SEQ ID NO: 579511 - DNA, 120 bp, Artificial Sequence
  ENSG00000171804_48 (sequence is synthesized)
gtgcaagtaaagaacaaattgggaatgttcaacaagatactggctcaggtagaggagaagctgacacaggaaaaggagactgtgatcaagaagaaggagaaactggctgaaacagagaaa

SEQ ID NO: 579512 - DNA, 120 bp, Artificial Sequence
  ENSG00000171804_49 (sequence is synthesized)
aaattggtccaagtagaggatagtttggccaaaaaacaggagaaattggcccaggaaaaaatgaaattagctctggagaaggcaatggtccaaggaaagaaacggctcagaggagagttg

SEQ ID NO: 579513 - DNA, 120 bp, Artificial Sequence
  ENSG00000171804_50 (sequence is synthesized)
gatattgctaaggaagaaaaggcattgaacctggaaatgaaaagactggctgaggagaagatgagactggttgagggaaaagaaacactgtctaagggagagactccagaaacttctaga

SEQ ID NO: 579514 - DNA, 120 bp, Artificial Sequence
  ENSG00000171804_51 (sequence is synthesized)
caaaggaaaatgactcaagttgaacaagaactatttgagagaaaattgtcactagaggagaagatactgctacatgaagacaggatattggccatggaggaaagcgaaattgccaaagga

SEQ ID NO: 579515 - DNA, 120 bp, Artificial Sequence
  ENSG00000171804_52 (sequence is synthesized)
aaactggaatttactagaggacagagaatatttgtccaggggcaaagaaagttagccaaggcttcaaggaagttgattaaaaaaagggagagcctttccaaggaaccagcaaaactgaac

SEQ ID NO: 579516 - DNA, 120 bp, Artificial Sequence
  ENSG00000171804_53 (sequence is synthesized)
aaaatcttaaaggcacttcaaaaactaaccagggatgaaaggaaactaacacaggaagaaataaaaatgacaaagatgaagagggcactctttgttaaggagcgcaggttgagtatagaa

SEQ ID NO: 579517 - DNA, 120 bp, Artificial Sequence
  ENSG00000171804_54 (sequence is synthesized)
cagagtaagctggatatcaaagagtgggatttttctgaaaaacgatcagaactgactaaagatgagaagaaactggctcggaagcagagaaaactggccaacaaaatgagaagaatgata

SEQ ID NO: 579518 - DNA, 120 bp, Artificial Sequence
  ENSG00000171804_55 (sequence is synthesized)
aacaaagaagaaaaaatgactgaggaagagagcaaattggccagaaagcattcagaagtcatactggatgatgaagaggaaggaggaatagaagaagaagaggtaatcccattccttaaa

SEQ ID NO: 579519 - DNA, 120 bp, Artificial Sequence
  ENSG00000171804_56 (sequence is synthesized)
cgaaggtggagaaagaggaaagaggccaagagaggtgacaaaccaaaagaaaagttttccagtcaagtggatgaagtggaaagtgaagagcatttttctgaagaaatggaaagcctgtta

SEQ ID NO: 579520 - DNA, 120 bp, Artificial Sequence
  ENSG00000171804_57 (sequence is synthesized)
gatgaactagaaaagcaagagagtttgtcttctgaggaggaggaggaaagggaggaagaagaggaaagggaggaggaggaggaaagggaggaggaggaggaaaggaaggaggaggaggaa

SEQ ID NO: 579521 - DNA, 120 bp, Artificial Sequence
  ENSG00000171804_58 (sequence is synthesized)
ggggaggagaagcaagtggagaaagaagaggaggagaagaagaagaagaaaaaggaaaagaagaaggaggaggttcaggagaaggaagaagtgtttgaggagaaagaagaaattatgagt

SEQ ID NO: 579522 - DNA, 120 bp, Artificial Sequence
  ENSG00000171804_59 (sequence is synthesized)
gaggaagagacagaaagtttgagtgacgaggaagaggaagaggagagctgctcattggaagaagaggtggacagggaaaaagagatcttaaaaaaagaaaaacaatttaagttacaagaa

SEQ ID NO: 579523 - DNA, 120 bp, Artificial Sequence
  ENSG00000171804_60 (sequence is synthesized)
caaagaagaaagagcctaagaggaagggaaagagtcctttccattttaagaggagttcctcatggcaaaggcagggctataagactaggagttctaaaaagccctttgaagaaactgatg

SEQ ID NO: 579524 - DNA, 120 bp, Artificial Sequence
  ENSG00000171804_61 (sequence is synthesized)
tcaacagctctggagatgaaagagaaaacaccagtgccagtgccggagaaacaaatatcctgggaagataaaaaggccacagtagttgaaatacccaggaaattcttagggacaatggat

SEQ ID NO: 579525 - DNA, 120 bp, Artificial Sequence
  ENSG00000171804_62 (sequence is synthesized)
aaagaaagagaagtgatgggaaaatatgaacccatacctccacatgttttgggtacagttttggagtcccaagcacaggacttaaagaccccatttatgtcccacatattaaggaggacc

SEQ ID NO: 579526 - DNA, 120 bp, Artificial Sequence
  ENSG00000171804_63 (sequence is synthesized)
gtggaagctgaggaactccaacacaaaccactaggtgcctggtggaagtggtttttgcagcatccacctctgatgggacagactgaggtacagttacctctctcccaaatcccagctaag

SEQ ID NO: 579527 - DNA, 120 bp, Artificial Sequence
  ENSG00000171804_64 (sequence is synthesized)
gaacaacatgcagacgtaagcctctcagatgtagagtggatccgccatgtcctagaacgaatggaagcgggagaacagctttccagggatggtttccatagactgtgccagctgctcaaa

SEQ ID NO: 579528 - DNA, 120 bp, Artificial Sequence
  ENSG00000171804_65 (sequence is synthesized)
gaccttgcctcaaagggaaacttagaatggctgcatctggccaaacatgaagccattgtgtaccgtcacagacaggccctggagtcacaagacacaaggatctcaagtagacagtccatg

SEQ ID NO: 579529 - DNA, 120 bp, Artificial Sequence
  ENSG00000171804_66 (sequence is synthesized)
agtccaaaatacctgaaagtgattcctcctataaaagcaaaggaaaaggagagctggccaaaacctttggctgtccccacacaaaagtccccattagctaccaagaggattccagaccca

SEQ ID NO: 579530 - DNA, 120 bp, Artificial Sequence
  ENSG00000171804_67 (sequence is synthesized)
agggctaaaaattggcatcttctaggagaaccttacagaagtgagagggcacagcagatatccattgctcacaaggagatggaaatgcaatacttttatcctgccaccagagacattttt

SEQ ID NO: 579531 - DNA, 120 bp, Artificial Sequence
  ENSG00000171804_68 (sequence is synthesized)
ccaagtgcccatgcctctgtggaaaaacaaaccctggcactgatgtttcaaaaggacttctgggattttaaggataaacgcaggtttcctaaactgcccaagttagagaagaagacacag

SEQ ID NO: 579532 - DNA, 120 bp, Artificial Sequence
  ENSG00000171804_69 (sequence is synthesized)
cccatttctaaaaaaaaggaagagttgcctttgtgggagacatttgtggcactgtaccatgttttgcggatgctgcagcagcgatatccaaaagacagcactgcttggatggaacagttc

SEQ ID NO: 579533 - DNA, 120 bp, Artificial Sequence
  ENSG00000171804_70 (sequence is synthesized)
taccagctcatggacctgtaccaacttaagtcccccagaatccagaagctgcttcaggagctgctaatgagagaggaacctcaaccccaagagatcatctacgaagaggccctaaaagcc

SEQ ID NO: 579534 - DNA, 120 bp, Artificial Sequence
  ENSG00000171804_71 (sequence is synthesized)
acagagctagttcccggggaacggctgttctgctgcctgttttgtggcagttctcatactcctagaagtcctcaggagttccagggtgcggtacccctcccatggcagaactgtgtgcgc

SEQ ID NO: 579535 - DNA, 120 bp, Artificial Sequence
  ENSG00000171804_72 (sequence is synthesized)
accatccttcccgtgggcattgcccggtatgggatcttagaacttgcctggaagagcctgcctgaagctgatcttcatctcaccaaggcactgacacacaccgttgctcccactctctaa

SEQ ID NO: 579536 - DNA, 120 bp, Artificial Sequence
  ENSG00000171804_73 (sequence is synthesized)
ctgttcaaagagtctcgctatcctcaaaatatgccgtgtgtatgctattacttcagtgatgcccacttcttcgcctccctctcttgggtgacatcaaacacaaaagaaatacaagtaaga

SEQ ID NO: 579537 - DNA, 120 bp, Artificial Sequence
  ENSG00000171804_74 (sequence is synthesized)
ctgcctttcttacccttcttggcccattctccaagagccatgcccatataactgttagcccagattgacaaaggaggatattccccatggatgaatgtggtctggaaccagaaatctctc

SEQ ID NO: 579538 - DNA, 120 bp, Artificial Sequence
  ENSG00000171806_0 (sequence is synthesized)
gaggaaagaggcgcgttcctagccgcgggactgggtgacccgcctctcccccaaattagctgcttggaaagaggaccaaagacgtctaaaaagtcatttggaaatatctctaaatatttg

SEQ ID NO: 579539 - DNA, 120 bp, Artificial Sequence
  ENSG00000171806_1 (sequence is synthesized)
ttaccatgtataagctgctaaagagaaattgggcccaacaaaactaattgaataattgaggcagatttgtgtgtatcatcaaattctatccagaagttgaagaatctgaatttaaagatt

SEQ ID NO: 579540 - DNA, 120 bp, Artificial Sequence
  ENSG00000171806_2 (sequence is synthesized)
gtgtgcatttaataagaggatgacctttcagtttaatttcactatagaagaccatctggaaaatgaattaacacccattagagatggagctttgaccctggattcctcaaaagagctgtc

SEQ ID NO: 579541 - DNA, 120 bp, Artificial Sequence
  ENSG00000171806_3 (sequence is synthesized)
agtctcagaaagtcaaaaaggagaagagagggacagaaaatgttctgcagaacaatttgacttgcctcaggatcacttgtgggaacataagtcaatggaaaatgcagctccctctcaaga

SEQ ID NO: 579542 - DNA, 120 bp, Artificial Sequence
  ENSG00000171806_4 (sequence is synthesized)
cacagacagtccactcagtgcagccagcagttcaaggaacttggagccacatggaaaacagccctccttgagagctgccaaagagcatgctatgcctaaagatttaaagaagatgttaga

SEQ ID NO: 579543 - DNA, 120 bp, Artificial Sequence
  ENSG00000171806_5 (sequence is synthesized)
agcttttcttctcactctgatctgattacaggtgtttatgagggaggcttaaaaatctgggaatgtacctttgacctcctggcttatttcacaaaggccaaagtgaaatttgctgggaaa

SEQ ID NO: 579544 - DNA, 120 bp, Artificial Sequence
  ENSG00000171806_6 (sequence is synthesized)
aaagtcttggatcttggttgtggatcaggtttactaggtataactgcattcaagggagggtccaaagaaattcactttcaagattataacagtatggtgattgatgaagtaaccttacct

SEQ ID NO: 579545 - DNA, 120 bp, Artificial Sequence
  ENSG00000171806_7 (sequence is synthesized)
aatgtagtagctaactccactttggaagatgaagaaaatgatgtaaatgagccagatgtgaaaagatgcaggaaaccaaaagtaacacaactatataaatgccgatttttttctggtgag

SEQ ID NO: 579546 - DNA, 120 bp, Artificial Sequence
  ENSG00000171806_8 (sequence is synthesized)
tggtctgagttttgtaagcttgtactaagtagtgaaaaactttttgtaaaatatgatctcattctcacctcagaaaccatttacaacccagattattatagtaatttgcaccagactttc

SEQ ID NO: 579547 - DNA, 120 bp, Artificial Sequence
  ENSG00000171806_9 (sequence is synthesized)
cttagactgttaagtaaaaatggacgtgtacttttggccagcaaagcacattattttggtgtaggtggaggtgttcatctctttcagaagtttgtagaagaaagagatgtttttaagacc

SEQ ID NO: 579548 - DNA, 120 bp, Artificial Sequence
  ENSG00000171806_10 (sequence is synthesized)
agaatactcaaaataattgatgaaggattgaagaggttcataattgaaataacttttaagtttcctggttaattaacattcactgagtatccaaaatgaaataaacagaaggaccaaaaa

SEQ ID NO: 579549 - DNA, 120 bp, Artificial Sequence
  ENSG00000171806_11 (sequence is synthesized)
actggtgcgcgatttaggtccggaggaggcgttgtgaggtgagctttttcagaagcgcgatcccaggacacgtcgggaagcaagcatccccagagctgcttggaaagaggaccaaagacg

SEQ ID NO: 579550 - DNA, 120 bp, Artificial Sequence
  ENSG00000171806_12 (sequence is synthesized)
gtccctcaaggccggaaagaaagtcgggcttctctagcccctggaggactcgactcactggtgcgcgatttaggtccggaggaggcgttgtgagagctgcttggaaagaggaccaaagac

SEQ ID NO: 579551 - DNA, 120 bp, Artificial Sequence
  ENSG00000171811_0 (sequence is synthesized)
cctcgcggctggagaacccaaccgacagtgggcggcaggacgcaccgcggaccccggagagagcggacgagcagggcgccggcgccatggacctggtcatcacgcaggagctggcccgcg

SEQ ID NO: 579552 - DNA, 120 bp, Artificial Sequence
  ENSG00000171811_1 (sequence is synthesized)
ccgagagccagcaagatgctgcgtccttgaagaaggcctacgagttgatcaaatcggccaacctagggaaatcggagtttgacccctcagagagcttcagcccagacctgtttgttctgt

SEQ ID NO: 579553 - DNA, 120 bp, Artificial Sequence
  ENSG00000171811_2 (sequence is synthesized)
gtgcagagcaggccctgaagatgaggcagccagaggtgagcgaggactgcatccaaatgtacttcaaggtgaaggcgcccatcacccagtttctgggccgagcgcacctgtgcagggccc

SEQ ID NO: 579554 - DNA, 120 bp, Artificial Sequence
  ENSG00000171811_3 (sequence is synthesized)
agatgtgtgccccgaagtcggcagaaaacctggaggaatttgaaaattgcgtgactgagtacatgaaggccataaactttgccaaaggagaaccgaggtactactttttggtgtacaatg

SEQ ID NO: 579555 - DNA, 120 bp, Artificial Sequence
  ENSG00000171811_4 (sequence is synthesized)
catcagtcctctactggcagatggtgaggccgttcctcaagcctggatatcgtcaccatctgatccccagcctttcccaaatcataaacgtgctgagtcagactgaggaggaagacaagg

SEQ ID NO: 579556 - DNA, 120 bp, Artificial Sequence
  ENSG00000171811_5 (sequence is synthesized)
agtggcgtgctgagctgatgctggaacttctggagtgttatctgcaagccggaagaaaggaggaggctgccaggttctgctccacggcagctccgttcattaagtctcacgtgccacaga

SEQ ID NO: 579557 - DNA, 120 bp, Artificial Sequence
  ENSG00000171811_6 (sequence is synthesized)
aataccggcagatattctctgttatggttcgtcatgaattaatggacgaacttcagttaaaggaagaaaagaaaaattccattagcctgtcagtcactttctatattaatatgctaaagg

SEQ ID NO: 579558 - DNA, 120 bp, Artificial Sequence
  ENSG00000171811_7 (sequence is synthesized)
caaaagcggagcaaaatgatttaccaggtgacatcagtgtcattctgaggaaggcctacagacacttaggtcattacaaccaccagcgctttccctctatcagtgaagaaaaaatgcttt

SEQ ID NO: 579559 - DNA, 120 bp, Artificial Sequence
  ENSG00000171811_8 (sequence is synthesized)
tgctttttgaattggcgcgtttttccttgaccttgaaatgcatggagatctcctctgcctgcctctcagacctgaagaagatggaaagcaaagatcctgggaagcttattgaaatggaat

SEQ ID NO: 579560 - DNA, 120 bp, Artificial Sequence
  ENSG00000171811_9 (sequence is synthesized)
gtctggagtgtgaatcggaagctttaagacttgaaagtaagatgaaagtgtacaaccgagcggctgttgaggcccagctggatatcatacagaggctagacgtcgcgctgcagcgagccg

SEQ ID NO: 579561 - DNA, 120 bp, Artificial Sequence
  ENSG00000171811_10 (sequence is synthesized)
tgcgcctgggcgacccccgggtcatccacgtggtgtgcgccacgcagtggaacacctgcctgcccctgctgcagcacaacctgcggcaccacctgcggaagcccctggctggcgttgcgg

SEQ ID NO: 579562 - DNA, 120 bp, Artificial Sequence
  ENSG00000171811_11 (sequence is synthesized)
acgtgctggagaagctggacagcctcatgacgcttctccgctgtcaagtgcacatggagatggcgcagatcgaggaggacgaggaccggctggagcccgccacggagcacctccggaaag

SEQ ID NO: 579563 - DNA, 120 bp, Artificial Sequence
  ENSG00000171811_12 (sequence is synthesized)
ccgcgcgcctggacagcctgggcctctaccgggacaggatccagatggcctccacccggctgcgtctgtgcaccacgctataccaggcccctgagcgcgcagaggacaaggccatcatgg

SEQ ID NO: 579564 - DNA, 120 bp, Artificial Sequence
  ENSG00000171811_13 (sequence is synthesized)
ccgttgagcaggcaaaaaaagctacaccaaaggacagcgtcaggaagaagcgggccctcctggtgaatgcaggcctggccttagcccctgacgcgtttcagattgtgctggacagtgaga

SEQ ID NO: 579565 - DNA, 120 bp, Artificial Sequence
  ENSG00000171811_14 (sequence is synthesized)
atgaggccaaagtctccaccgggaagaacaggggccggttcacctacctctgtgcgaaggcgtggcaccacaccgtcagcgtggacaaagctgccgggcacctgcggcgcctgggcaacg

SEQ ID NO: 579566 - DNA, 120 bp, Artificial Sequence
  ENSG00000171811_15 (sequence is synthesized)
aaaacgacaaggagaggatacagatttgggcagagctggccaaagtggcccggaaacaaggcgtgtgggacgtctgtcggacggcgagccgcttctgcctcctgtatgacaacgtcaagg

SEQ ID NO: 579567 - DNA, 120 bp, Artificial Sequence
  ENSG00000171811_16 (sequence is synthesized)
tgaagaagttgaggctgcggcgagggaagaagaagcgaggtagggacggctcggtgcaggacacctggagccagcctgaggtcgtcctgcagaggcaggtgtgccccgacctgctgcgga

SEQ ID NO: 579568 - DNA, 120 bp, Artificial Sequence
  ENSG00000171811_17 (sequence is synthesized)
agttcgcggaggtggggttcatccatgctgaggccacggttcatttgctgcggtcagaaggtgtagagctgaatgaccgggccatcccccccgaagacctgagccagcacccagctggct

SEQ ID NO: 579569 - DNA, 120 bp, Artificial Sequence
  ENSG00000171811_18 (sequence is synthesized)
acgtgcctgagcccccggaggtgaatgctgagtggatcacatacagaacctggatcgagagtctgtcccggtgtgccatgaataactggctgcgctccgcagagatcggacaggagatcc

SEQ ID NO: 579570 - DNA, 120 bp, Artificial Sequence
  ENSG00000171811_19 (sequence is synthesized)
aggaggcgtggattgtgcagaacgccgtggtctacgtcctgaaccacaaccaccacctgatcctggccgggcggcagaaggagctggtggacgccctgtaccacctcctgagcatcgtta

SEQ ID NO: 579571 - DNA, 120 bp, Artificial Sequence
  ENSG00000171811_20 (sequence is synthesized)
aggccacaggccacagtggggaccccgtgatgctggtgacgctctgcaacaccttggcgcgaggcctgatcatcagctggattccagtccaggctgccgagaagtccaggaaattcatgc

SEQ ID NO: 579572 - DNA, 120 bp, Artificial Sequence
  ENSG00000171811_21 (sequence is synthesized)
gaccaaacgcgtttcacagcccactggacgcaggagccacttccgagatcaaaacagcggtggaggtctgcgagtttgccctgaacctgaccaatgggagtgcgcccgaggagacggtgc

SEQ ID NO: 579573 - DNA, 120 bp, Artificial Sequence
  ENSG00000171811_22 (sequence is synthesized)
ccaccggcacccggcagcagcttatcgccacctgggtcaaggccaagcagctgctgcagcagcagattgggccacggctgggcaccgaggagcagggcaccaatgaggatgtcagctcgg

SEQ ID NO: 579574 - DNA, 120 bp, Artificial Sequence
  ENSG00000171811_23 (sequence is synthesized)
tgaccagagtcctcgttgccttggaaatgtactcatgcaacgggctgggcctcatggacttcactgtcccctccctggcccagttggtgaaaatggcttccgagtgcaactggtcggacc

SEQ ID NO: 579575 - DNA, 120 bp, Artificial Sequence
  ENSG00000171811_24 (sequence is synthesized)
ccctggtggagctgcagaccctgacgcggctgacccacttcgcccatgcagcgcgtgaccatgagaccaccatggcctgtgctcacagggctctggagatgggcatcaagtacctgaaga

SEQ ID NO: 579576 - DNA, 120 bp, Artificial Sequence
  ENSG00000171811_25 (sequence is synthesized)
aatttgggcccgaggagtcccggctggtggcagagatgctgtgcacagccacggccatccagggcaggagcatcatggaaaacctgaagggccggaagcagctgcgactggtggcagcca

SEQ ID NO: 579577 - DNA, 120 bp, Artificial Sequence
  ENSG00000171811_26 (sequence is synthesized)
aggccttcacggagagcgccaggttcggaggcatcgcgggcagcagcgccctggtgatgctggccgcgcggcattactggaacgcctggctcccactgctgtcctcagccgtctacagga

SEQ ID NO: 579578 - DNA, 120 bp, Artificial Sequence
  ENSG00000171811_27 (sequence is synthesized)
agaaggccaagggtgccctgaagaggctcatcggcatcatcaacaagacagaggccagaaagcaggagaaaggaaagacgctgcttctgcaccagtggcccacggccgacttccagggtg

SEQ ID NO: 579579 - DNA, 120 bp, Artificial Sequence
  ENSG00000171811_28 (sequence is synthesized)
gcgggacgaccgaaggatattttcttccaggggctgaggacgacctggcgctccgtgctgcgctctacggcctgctcttccacagccatgccgaccaggacgactgggagggcggcctca

SEQ ID NO: 579580 - DNA, 120 bp, Artificial Sequence
  ENSG00000171811_29 (sequence is synthesized)
aggtgctggacgaggctgtgcaggtgctgccaaggacggcccaccgcctcttgatcttcaagcacatggtcatcgtgaaggccaagctcgggcagaatttttcgatggaaatacagaaat

SEQ ID NO: 579581 - DNA, 120 bp, Artificial Sequence
  ENSG00000171811_30 (sequence is synthesized)
tcaaggccgagagtgaggactacttggcgcgcatgtggcaccgcctggccctgaactcgccgagcgtgtctggagagctggcctgctacaacaacgccatccaggccttgcagaagcctg

SEQ ID NO: 579582 - DNA, 120 bp, Artificial Sequence
  ENSG00000171811_31 (sequence is synthesized)
agatggagtggcagaaggtggagtacctcatggagttcggccagtggctccatcacagacactttcctctcgaggacgtggtcttccacctccgctgggctgtcgagatcctgctggcca

SEQ ID NO: 579583 - DNA, 120 bp, Artificial Sequence
  ENSG00000171811_32 (sequence is synthesized)
tgaagccgcccggcgatgtccctgagccacagcccacgccggatggggagtacgtggctgtggagatgcccccacggagccccgtgtccgaggccgaggaggcggtgtccttggagcagc

SEQ ID NO: 579584 - DNA, 120 bp, Artificial Sequence
  ENSG00000171811_33 (sequence is synthesized)
tgcgtagcgtgcggcagctggaggcgctggcccgcgtgcacatcctgctggccctggtgctgtcgccgggcgccgagggctacgaggactgctgccttgcagcctacgccttcttcaggc

SEQ ID NO: 579585 - DNA, 120 bp, Artificial Sequence
  ENSG00000171811_34 (sequence is synthesized)
gaatgagaggagtaaagagaaggagaaggagaggagtaaagagaaggagaatgagaggagtaaagagaaggacaaggagaagggaaaggaggagaaagtcaaggagcccaagcagtctca

SEQ ID NO: 579586 - DNA, 120 bp, Artificial Sequence
  ENSG00000171811_35 (sequence is synthesized)
aagcccagctcctatcaaacaactggaagacttacccatgagcatagaagagtgggcttcctactcctgccccgaggaagtgctgtctgtactgaaacaggacagaagtgactctactgt

SEQ ID NO: 579587 - DNA, 120 bp, Artificial Sequence
  ENSG00000171811_36 (sequence is synthesized)
gaacccctcaagtatccagaagccgacatacagtttgtatttcctggaccacctggtcaaggccctgcagaagatgtgcctgcacgaactcacggttcccgtcctgcagttgggggtgct

SEQ ID NO: 579588 - DNA, 120 bp, Artificial Sequence
  ENSG00000171811_37 (sequence is synthesized)
gatttcggactccgtggtgggaagcaagggcctgtcggatctctaccaccttcgcctcgcccacgcgtgctccgagctgaagctgagagaagcagccgcgcgccatgaagaggcggtcgg

SEQ ID NO: 579589 - DNA, 120 bp, Artificial Sequence
  ENSG00000171811_38 (sequence is synthesized)
gcaggtgtgcgtcagcgagctggagcaggccagctgcagaaaagagatcgcgttgaaaaaagagaaaaataaggagcctttattagaagaaagcctgccagcactgaatgagcagacact

SEQ ID NO: 579590 - DNA, 120 bp, Artificial Sequence
  ENSG00000171811_39 (sequence is synthesized)
tcctgtccagcctggggagatcaaaccactggacgccaaggacaagattttgaagatgaatggggagaccgggagggacctggatgggacgtcctttccccacctgtggatgctgaaggc

SEQ ID NO: 579591 - DNA, 120 bp, Artificial Sequence
  ENSG00000171811_40 (sequence is synthesized)
agaagttctgctggagatgaacctgtaccagcctgcacggctgctcctgtcggaggcttacctggctttccaggagctggatgagccttgtgcagaggcccagtgcctgctcctcctcgc

SEQ ID NO: 579592 - DNA, 120 bp, Artificial Sequence
  ENSG00000171811_41 (sequence is synthesized)
acagttggccaacaaggagaaaaactatggacaagccaagaaaatgatcgcacaggcccagcacctgggcggaagtgaggagttctggtacaattccactctgaccctggcagaggcgct

SEQ ID NO: 579593 - DNA, 120 bp, Artificial Sequence
  ENSG00000171811_42 (sequence is synthesized)
cttgtccatggaacactcaggaagggaagctacggtgtgtcacatatttcagaagctcatcaatgccttcaagatcctcaagaaagaaagaccaaaccgattgcctttactggaattcat

SEQ ID NO: 579594 - DNA, 120 bp, Artificial Sequence
  ENSG00000171811_43 (sequence is synthesized)
gatcacagatctagaagccaggtgcctgagcctgcgggtcagagttgcgcagcactcagcggtcactgaacccacagagtgctcgttgctactgaaagagatggatgatggcctgttgga

SEQ ID NO: 579595 - DNA, 120 bp, Artificial Sequence
  ENSG00000171811_44 (sequence is synthesized)
aattgagagaaagtttatcgactgtggctgcaaagagaattgtgttgacgtaaaactagagcgtgcgaagatcaagaggttacgtgcccagaacgagaaagatgaagaacaaaaaactgc

SEQ ID NO: 579596 - DNA, 120 bp, Artificial Sequence
  ENSG00000171811_45 (sequence is synthesized)
gtattacttggaagcgtatggcctggcccagggtgccgtagctgaggaagaagggaggcttcacagcatccagggcttatatggcctggcccagggcgccatggctgaggaagaagggag

SEQ ID NO: 579597 - DNA, 120 bp, Artificial Sequence
  ENSG00000171811_46 (sequence is synthesized)
gcttcacagcgtccagggcctattgtcacttcaagacttgcagaacgtcaacacgcccctgatgaggaagctggcgcgcctcaagctcggcctcgtggaaatggctctggacatgctcca

SEQ ID NO: 579598 - DNA, 120 bp, Artificial Sequence
  ENSG00000171811_47 (sequence is synthesized)
gttcatctgggaggaggcccacgggcagcagagtgagcaggggtccctggagaagctgctggcggactatctgcagaacaccagtgactacacttccgtcggcctgcaatggttcacgct

SEQ ID NO: 579599 - DNA, 120 bp, Artificial Sequence
  ENSG00000171811_48 (sequence is synthesized)
gaagcggactctagcacacggggcactggcacagctggggagcctgcagccgctgagcgtgggctgtgtggagatccgcgcccggctcctgggcctggccgggagggccctgcacctgct

SEQ ID NO: 579600 - DNA, 120 bp, Artificial Sequence
  ENSG00000171811_49 (sequence is synthesized)
ggccatgcaagctgaccctgtgcaccctacctgctactgggaggcgggcccctcggtgggcgccaagctgagcggcctcaagtctctggagctggaggtagaggaagagggtgccacaaa

SEQ ID NO: 579601 - DNA, 120 bp, Artificial Sequence
  ENSG00000171811_50 (sequence is synthesized)
gtccagcagggacccgccggcctccagggcagccccggaggagcactgcaggagaggcgaggacctgaagaggaggatggttctggcccagcagtacctggctcaggcgtcagaggtgct

SEQ ID NO: 579602 - DNA, 120 bp, Artificial Sequence
  ENSG00000171811_51 (sequence is synthesized)
gctgcagtgcctacaggtggcccttggcagtggcctcctggatgtcgcagcagccgccagcctggagatggtggagtgtgtcggcaccctggaccctgcaactacctgccagttcctggc

SEQ ID NO: 579603 - DNA, 120 bp, Artificial Sequence
  ENSG00000171811_52 (sequence is synthesized)
tctgtctcagagctgctcggcctcagagacgatgagggatgtcctgcttgcagccacagccaacaccagcagctcacagctggcggccctgctgcagctacagcaccagctccggtgcca

SEQ ID NO: 579604 - DNA, 120 bp, Artificial Sequence
  ENSG00000171811_53 (sequence is synthesized)
agacaggaccaccaccagcctgggcgcccgtgtggagcagaggctggccgccgtgtccaaggcttggcaaaatctctgcgtcactgagcagcattttaacctcttgaatgagatgcctcc

SEQ ID NO: 579605 - DNA, 120 bp, Artificial Sequence
  ENSG00000171811_54 (sequence is synthesized)
gaccttttggatcctctttctgcacctctcaggggacaggtcccgtctgtacggcgctgcctacgagaaacccaagttcattactgcagccaaaggaaaggtgcaggcggtgggaggctc

SEQ ID NO: 579606 - DNA, 120 bp, Artificial Sequence
  ENSG00000171811_55 (sequence is synthesized)
ctgcaaggtgatgcgtctggccataagtcccactgccttctcccacctgctggcctgtgcccagcagttccggaagcagacccaggcccaggtgtacagtgaggacatggccctgaacat

SEQ ID NO: 579607 - DNA, 120 bp, Artificial Sequence
  ENSG00000171811_56 (sequence is synthesized)
aggctcggaaccagaaggcctgcaggtggaagagaaggagcgccctgtgcagaggctcagtagcgtcctggggcccctggaggagcttctgcagccgctattccccctgctcagcctctc

SEQ ID NO: 579608 - DNA, 120 bp, Artificial Sequence
  ENSG00000171811_57 (sequence is synthesized)
caaggccagagtgcagacacctgcggttgttgccgattcagggaagtcgaagggcaaagacaaggagaggaaaacgtccacaggacaacacagcacagtccagcctgaggttgccgataa

SEQ ID NO: 579609 - DNA, 120 bp, Artificial Sequence
  ENSG00000171811_58 (sequence is synthesized)
gatagtcctggtcgcagacagacatctcctggagctgccactggaaggtctctctgtgttcgatgaagggacaatttcctctgtgtcacgagaattttctcttcaaatgctgtggaatcg

SEQ ID NO: 579610 - DNA, 120 bp, Artificial Sequence
  ENSG00000171811_59 (sequence is synthesized)
cctccataaagaagagacagaaggtggcgtgaaaaaggagggaagaagcagagaccccaaaaagagaagcctagcgaagaagggcaggaagggcagcatcccccggaccatcccccctga

SEQ ID NO: 579611 - DNA, 120 bp, Artificial Sequence
  ENSG00000171811_60 (sequence is synthesized)
ctgcatcatagtcgactcagacaacttcaagttcgtcgtggacccatacgaggaggcccagggcccagaaatgctaactcctgtctccatcacccaagacattttggaaagattccaaga

SEQ ID NO: 579612 - DNA, 120 bp, Artificial Sequence
  ENSG00000171811_61 (sequence is synthesized)
cacattcacgtcgcgatgggcgggacatctgggaagcaagcactttcccagccaggcccagtgggagcaggccctgggcagctgcagcggtttcttcttctatggaatggagagcttcct

SEQ ID NO: 579613 - DNA, 120 bp, Artificial Sequence
  ENSG00000171811_62 (sequence is synthesized)
gtcccatatattagtggagagattggtcgccatgaacttgcaagagtgccaggtggcagtcctgctggacctggcgcggtcctaccagagcttgaagaggcacatggagagcgtggagca

SEQ ID NO: 579614 - DNA, 120 bp, Artificial Sequence
  ENSG00000171811_63 (sequence is synthesized)
caggagatctgttggccgttgggaagccaattggagaaacagtgcgtctccttcagaagatgagtggcgacgaggcggtgaaccaagacgaggcttctcagaccttgaaggacaagctgc

SEQ ID NO: 579615 - DNA, 120 bp, Artificial Sequence
  ENSG00000171811_64 (sequence is synthesized)
tgctgctccaaagctccgagctccttcccaccacgctcaacttggtcctgtatgggctgccgcaccaagccatcgggtagtgcaggcctggacctgcctcccatcagctgctggggcccc

SEQ ID NO: 579616 - DNA, 120 bp, Artificial Sequence
  ENSG00000171811_65 (sequence is synthesized)
agcacttgcctctgcccttggctctgcccctctgccaacccatccccacctcccggctcccatccccagctcccagctcgctctccccttcctgggcctctccccagcccttggtgcagc

SEQ ID NO: 579617 - DNA, 120 bp, Artificial Sequence
  ENSG00000171811_66 (sequence is synthesized)
ctcagccagggaccctcccccagcgacttcccgcaaggcagccgcctggacctcgagctctgcctgcctgtgtgcgccatggggtctgcgtcggggctggagctgcgtctcttcccgggg

SEQ ID NO: 579618 - DNA, 120 bp, Artificial Sequence
  ENSG00000171811_67 (sequence is synthesized)
ccaggacaagggcggcctccccttggcggcgctggtgctgagttgcttagaccagaagactattcagaccgtgagcctgtttttgatttgagtgttccactaaacaaacaacaaaagcca

SEQ ID NO: 579619 - DNA, 120 bp, Artificial Sequence
  ENSG00000171811_68 (sequence is synthesized)
atttccccaaagcaaaacaaaaataaacaacatgttaaggtattaattctgtagttgactgtgtaaataataaagtccctgggacttgaacaccaagtaaataaaaatatttgaatatga

SEQ ID NO: 579620 - DNA, 120 bp, Artificial Sequence
  ENSG00000171811_69 (sequence is synthesized)
gggcacacaggagccctgagcggggagaggaggcccgcgcggagcccccggcgtccccccacgccgccttccctcccctttcttcttcccgcccctcgccgggggtcgctgccctggtgt

SEQ ID NO: 579621 - DNA, 120 bp, Artificial Sequence
  ENSG00000171811_70 (sequence is synthesized)
ctcactcccgcggagctggcggggggcagggcgggggcgcggcgttgttcgccttccccgaagtgtggccccgccgccgacccgtagccccgcgtccgcgtccctttcggtctccaggca

SEQ ID NO: 579622 - DNA, 120 bp, Artificial Sequence
  ENSG00000171811_71 (sequence is synthesized)
tgctcaccgtgcagttggacaaaaggcaaagaaaggaagagcagttcaccaggccacggcccccagggcttcggtccgtggttggcacattgccgtctttcctacctgtgttttgcacag

SEQ ID NO: 579623 - DNA, 120 bp, Artificial Sequence
  ENSG00000171811_72 (sequence is synthesized)
ttgcagttagatggtgtttgcaattttacacctgcccgtttctctttacctttcttgtggccacgggtccacagcaccacagttgtttctagagtccaatttacggacggcgtaaaattt

SEQ ID NO: 579624 - DNA, 120 bp, Artificial Sequence
  ENSG00000171811_73 (sequence is synthesized)
catgatgctgatgatccagaacatcctccaccagtcccattattggacgtgtaaatcacaccggcagtgcctcgttacccgcagttcactttctgcagtttgttacctgcagacagctac

SEQ ID NO: 579625 - DNA, 120 bp, Artificial Sequence
  ENSG00000171811_74 (sequence is synthesized)
agtatgaaaatattaagctattctgagggagaggccacagccacatcacttctgttacagtatagtgttatgattgtatcttattattagttattgttataaatatcttattgtgcctaa

SEQ ID NO: 579626 - DNA, 120 bp, Artificial Sequence
  ENSG00000171811_75 (sequence is synthesized)
acttccagcagggccccccaccccaagggcccagcctcgggcaggaagggtacaaagcccccgccgtggctctgccacgaggtctcctggaaatgaggggaacagcacagcgacgtcctt

SEQ ID NO: 579627 - DNA, 120 bp, Artificial Sequence
  ENSG00000171811_76 (sequence is synthesized)
gtaagtaaccctcatgactggacaaattccctcaaaacgggcagggagcgcaggcctgggcctcaatcacagatcagggagcaggtgagcgccccaccagttccccaaaacgggcaggga

SEQ ID NO: 579628 - DNA, 120 bp, Artificial Sequence
  ENSG00000171811_77 (sequence is synthesized)
tacataagtttgctgagagatataaaaatctatatgcatacatacatgaacaaaattacataagcatattaaaaagaaatagcagttcatccaatgcaaagatgtatagaactgtgacat

SEQ ID NO: 579629 - DNA, 120 bp, Artificial Sequence
  ENSG00000171811_78 (sequence is synthesized)
ttagaaaacaaaacagggtcttttgcctttatcgtcgctctttaaatatttcctttgtaatagctttgaatttttttaaagttaatagaaaattcacaaagatacaagtaattactacaa

SEQ ID NO: 579630 - DNA, 120 bp, Artificial Sequence
  ENSG00000171811_79 (sequence is synthesized)
gaatatgtaccaaaagcattcattcatcagcagtccattttgacatatggggaatcagcttaagttgtatctgaaaagctagatacaaaattaatgagaaaataaaatctagacacaaaa

SEQ ID NO: 579631 - DNA, 120 bp, Artificial Sequence
  ENSG00000171811_80 (sequence is synthesized)
ggtcgccatgaacttgcaagagtgccaggtggcagtcctgctggacctggcgcggtcctaccagagcttgaagaggcacatggagagcgtggagcacaggagcgcctcacagctgtccct

SEQ ID NO: 579632 - DNA, 120 bp, Artificial Sequence
  ENSG00000171811_81 (sequence is synthesized)
ggaggagcccgttgaggcggccatcctgctgagcctggtgggcgtcaagagcatcctggcaaaccagtggccgacgctgctgcaggacaacgcgctgcgggccagcgtcttatgggaaaa

SEQ ID NO: 579633 - DNA, 120 bp, Artificial Sequence
  ENSG00000171811_82 (sequence is synthesized)
tcatcggcatcatcaacaagacagaggccagaaagcaggtgcaccagccctggagggggctcctgactcccactgaggcctctagtgggtcttccagaaaggaccggagagactcccaaa

SEQ ID NO: 579634 - DNA, 120 bp, Artificial Sequence
  ENSG00000171811_83 (sequence is synthesized)
gaaagacagaccccacaggcctcccagagggtgcaccagcaccagccgaggaggggagggggttaaggggggtctccaagtcccagcactgcgggggcccctgctggactcggtgctcag

SEQ ID NO: 579635 - DNA, 120 bp, Artificial Sequence
  ENSG00000171811_84 (sequence is synthesized)
acctgacctctcccagcaacacacatgcaccgaggggctctcagccctggagacacacagcagcgggtagagtgaggccagcacagtccctgccttaagaggcttggattctaggcaggg

SEQ ID NO: 579636 - DNA, 120 bp, Artificial Sequence
  ENSG00000171811_85 (sequence is synthesized)
aggacaggccccacctgccatgagagagggtggccctgagaacagcaagcagagggcagggcagggggcgggggctgggccacaggtgcctctggcggcttaaggcagagtggggtggcg

SEQ ID NO: 579637 - DNA, 120 bp, Artificial Sequence
  ENSG00000171811_86 (sequence is synthesized)
tctgtgactgagtgctggctgtgcagacgtgccccggttgtgaagcttccccgagcgctacccttgcggtacgtgcagttttctgcacttcggtatcaaataaaattaaaaataaatcga

SEQ ID NO: 579638 - DNA, 120 bp, Artificial Sequence
  ENSG00000171812_0 (sequence is synthesized)
ggacgccatgctggggactctgacacccctgtcttcgctgctgctgctgctactggtgctggtgctggggtgtgggccgcgggcgtcctctggtggcggggccggtggggcggcgggcta

SEQ ID NO: 579639 - DNA, 120 bp, Artificial Sequence
  ENSG00000171812_1 (sequence is synthesized)
tgccccagtgaagtacatccagcccatgcagaaaggacctgtgggaccgcccttccgtgagggcaaaggccagtacctggaaatgcctctaccgctgctgccgatggacctgaagggaga

SEQ ID NO: 579640 - DNA, 120 bp, Artificial Sequence
  ENSG00000171812_2 (sequence is synthesized)
gcccggcccccctgggaagcccgggcctcggggtccccctggcccccctggcttcccaggaaaaccaggcatgggaaagccaggactccatgggcagcctggccctgctgggccccctgg

SEQ ID NO: 579641 - DNA, 120 bp, Artificial Sequence
  ENSG00000171812_3 (sequence is synthesized)
cttctcccggatgggcaaggctggtcccccagggctccctggcaaggtcgggccaccagggcagccggggcttcggggggagccaggaatacgaggggaccagggcctccggggaccccc

SEQ ID NO: 579642 - DNA, 120 bp, Artificial Sequence
  ENSG00000171812_4 (sequence is synthesized)
aggaccccctggcctcccgggcccctcaggcattactatccctggaaaaccaggtgcccaaggggtgccagggcccccaggattccagggggaaccagggccccagggggagcctgggcc

SEQ ID NO: 579643 - DNA, 120 bp, Artificial Sequence
  ENSG00000171812_5 (sequence is synthesized)
cccaggtgatcgaggcctcaagggggataatggagtgggccagcccgggctgcctggggccccagggcaggggggtgcccccggcccccccggcctccctggtccagctggcttaggcaa

SEQ ID NO: 579644 - DNA, 120 bp, Artificial Sequence
  ENSG00000171812_6 (sequence is synthesized)
acctggtttggatgggcttcctggggccccaggagacaagggtgagtctgggcctcctggagttccaggccccaggggggagccaggagctgtgggcccaaaaggacctcctggagtaga

SEQ ID NO: 579645 - DNA, 120 bp, Artificial Sequence
  ENSG00000171812_7 (sequence is synthesized)
cggtgtgggagtcccaggggcagcagggttgccaggaccacagggcccatcaggggccaaaggggagccagggacccggggcccccctgggctgataggccccactggctatgggatgcc

SEQ ID NO: 579646 - DNA, 120 bp, Artificial Sequence
  ENSG00000171812_8 (sequence is synthesized)
aggactgccaggccccaagggggacaggggcccagctggggtcccaggactcttgggggacaggggtgagccaggggaggatggggagccaggggagcagggcccacagggtcttggggg

SEQ ID NO: 579647 - DNA, 120 bp, Artificial Sequence
  ENSG00000171812_9 (sequence is synthesized)
tccccctggacttcctgggtctgcagggcttcctggcagacgtgggccccctgggcctaagggtgaggcagggcctggaggacccccaggagtgcctggcattcgaggtgaccaggggcc

SEQ ID NO: 579648 - DNA, 120 bp, Artificial Sequence
  ENSG00000171812_10 (sequence is synthesized)
tagtggcctggctgggaaaccaggggtcccaggtgagaggggacttcctggggcccatggaccccctggaccaactgggcccaagggtgagccgggtttcacgggtcgccctggaggacc

SEQ ID NO: 579649 - DNA, 120 bp, Artificial Sequence
  ENSG00000171812_11 (sequence is synthesized)
aggggtggcaggagccctggggcagaaaggtgacttggggctccctgggcagcctggcctgaggggtccctcaggaatcccaggactccagggtccagctggccctattgggccccaagg

SEQ ID NO: 579650 - DNA, 120 bp, Artificial Sequence
  ENSG00000171812_12 (sequence is synthesized)
cctgccgggcctgaagggggaaccaggcctgccagggccccctggagaggggagagcaggggaacctggcacggctgggcccacggggcccccaggggtccctggctcccctggaatcac

SEQ ID NO: 579651 - DNA, 120 bp, Artificial Sequence
  ENSG00000171812_13 (sequence is synthesized)
gggccctccggggcctcccgggcccccgggaccccctggtgcccctggggccttcgatgagactggcatcgcaggcttgcacctgcccaacggcggtgtggagggtgccgtgctgggcaa

SEQ ID NO: 579652 - DNA, 120 bp, Artificial Sequence
  ENSG00000171812_14 (sequence is synthesized)
ggggggcaagccacagtttgggctgggcgagctgtctgcccatgccacaccggccttcactgcggtgctcacctcgcccttccccgcctcgggcatgcccgtgaaatttgaccggactct

SEQ ID NO: 579653 - DNA, 120 bp, Artificial Sequence
  ENSG00000171812_15 (sequence is synthesized)
ctacaatggccacagcggctacaacccagccactggcatcttcacctgccctgtgggcggcgtctactactttgcttaccatgtgcacgtcaagggcaccaacgtgtgggtggccctgta

SEQ ID NO: 579654 - DNA, 120 bp, Artificial Sequence
  ENSG00000171812_16 (sequence is synthesized)
caagaacaacgtgccggccacctatacctacgatgagtacaagaagggctacctggaccaggcatctggtggggccgtgctccagctgcggcccaacgaccaggtctgggtgcagatgcc

SEQ ID NO: 579655 - DNA, 120 bp, Artificial Sequence
  ENSG00000171812_17 (sequence is synthesized)
gtcggaccaggccaacggcctctactccacggagtacatccactcctccttttcaggattcttgctctgccccacataacccgcggggggggtcctgctgccctggcctcctccccttta

SEQ ID NO: 579656 - DNA, 120 bp, Artificial Sequence
  ENSG00000171812_18 (sequence is synthesized)
agcgaccttttcaattacaaagaacctcctggaaaaaaaaacaaaagctgaacagaggcggccgtggccttggcccgaggagactaacttgctttctccctgcatgcaggctgagattgt

SEQ ID NO: 579657 - DNA, 120 bp, Artificial Sequence
  ENSG00000171812_19 (sequence is synthesized)
ttctggaaggggctggcctgagtttctttcccccaaatgtctgtgcagtgtcagggctgcaccccataggccctgaggcacacagcccagccccttgtgagtcctggcctctgctgggcc

SEQ ID NO: 579658 - DNA, 120 bp, Artificial Sequence
  ENSG00000171812_20 (sequence is synthesized)
ctgaaggagctgagagggagctcaactccccaccccgccacgtggggagacagcccttcccactggctccctgatggcacctgctggaggaaaggggcacggcctccctcacagcccttg

SEQ ID NO: 579659 - DNA, 120 bp, Artificial Sequence
  ENSG00000171812_21 (sequence is synthesized)
gctggggctcctccagctccccctgggacctccagcatatgacagtggactaaggactgtggggttttcctccaaggggaagggagaagaggggaccatcgaggtggcgagtgtggacac

SEQ ID NO: 579660 - DNA, 120 bp, Artificial Sequence
  ENSG00000171812_22 (sequence is synthesized)
cctgccaggactgcagcccccatggtgatgctgtggcatcagacatgtccgtggtgggcacagtgcctgttgccctgggaaagggcaacctccctttcactgctccagtggcagccatgg

SEQ ID NO: 579661 - DNA, 120 bp, Artificial Sequence
  ENSG00000171812_23 (sequence is synthesized)
ggaaggcagtttgtgagggcttggggcacagacctggggcaggaggcagctcttcacgttcatccctgtctctcccgggctgcccccgccagctctggctgtttagcttgagggcagcac

SEQ ID NO: 579662 - DNA, 120 bp, Artificial Sequence
  ENSG00000171812_24 (sequence is synthesized)
agaggcccctgggacacctacaggccagaaagatcaacctctgtgaagtgtctagaagtatctagtgcagatggtggcggaggcagaatcgaccatcagcaaacatgagcactcttccct

SEQ ID NO: 579663 - DNA, 120 bp, Artificial Sequence
  ENSG00000171812_25 (sequence is synthesized)
ttctccccttccacctgctgcgggctgggctggttttctcaatacaaaattgtaagaggatccttgtcaccccagccaggtatccccaaggcagagcacctctcgtttggccctctgaac

SEQ ID NO: 579664 - DNA, 120 bp, Artificial Sequence
  ENSG00000171812_26 (sequence is synthesized)
aaggtgcacgcgagctgggggatgaagacggctcccacttccttttccttaataagaaccatatggtgggtgtatgtgtgtacaagaggggttcatctgtgggggcttcctctccttcca

SEQ ID NO: 579665 - DNA, 120 bp, Artificial Sequence
  ENSG00000171812_27 (sequence is synthesized)
ccctctggttccaatttcctgttctaagcaggactagggcccaggaggctaaggctgggagagaaagggtgccaacaggtcccttgggaatgagttggctctggacgtttctgccctgtt

SEQ ID NO: 579666 - DNA, 120 bp, Artificial Sequence
  ENSG00000171812_28 (sequence is synthesized)
ccccgatcagagctcctctgcaggaaacaggcaggatgcccctcccaacccctcagtccctacgtcaagcggagtggataaggctgagatgagtgctgggagtggtggacattcctgctc

SEQ ID NO: 579667 - DNA, 120 bp, Artificial Sequence
  ENSG00000171812_29 (sequence is synthesized)
gtgcaaagatggccactttccccgcagctgcagggcctcgcgctcggccctcgccaggccagccccactccttgtaccaagtgtgaactggggtcattcggtctgtgatctcgttgcact

SEQ ID NO: 579668 - DNA, 120 bp, Artificial Sequence
  ENSG00000171812_30 (sequence is synthesized)
gctccaagtctggctgtgtccaggcggtccatgttgaaaatggaggatggctgctgacttctgactggctgagcagtgggttccttcaggttccttgccaaccctcctcccctgcccaca

SEQ ID NO: 579669 - DNA, 120 bp, Artificial Sequence
  ENSG00000171812_31 (sequence is synthesized)
acttctccaaacaaagcaggctgtttgctcacttcttcaaaaggaggaatgataacccaaatctgcccaagtgacacttgagaaggttttggctggggttcctggtggatttcttactac

SEQ ID NO: 579670 - DNA, 120 bp, Artificial Sequence
  ENSG00000171812_32 (sequence is synthesized)
ctaacgcccaagaaaaccaactaaggactctcaaaccatacctggtgggggttcttcgctcaacctcttcttccctaggtcaaagccactatcatctgatgtgttagggatgggttctga

SEQ ID NO: 579671 - DNA, 120 bp, Artificial Sequence
  ENSG00000171812_33 (sequence is synthesized)
ttggcagaaattaatcagctcccaatgggagcccacggaactaagtagggtcccaagaaaaaaaacgggagctatttcacagagctgagcttctgccaaatttcattcctcaaacctttc

SEQ ID NO: 579672 - DNA, 120 bp, Artificial Sequence
  ENSG00000171812_34 (sequence is synthesized)
aggaggggtggttggcgtttctaaaatgtttatgggatttgagttgcaggtgtccacttaactgactagctttgataaacaatgtcagattttaactatgaaaacgacattaccttgtgc

SEQ ID NO: 579673 - DNA, 120 bp, Artificial Sequence
  ENSG00000171812_35 (sequence is synthesized)
atttttatattgattcctattttttttttaagattaaagtttaaatgttttccactagtcatttcacttctaacttggtataggaagcttagctctctacatacctatcatgtgccctgt

SEQ ID NO: 579674 - DNA, 120 bp, Artificial Sequence
  ENSG00000171812_36 (sequence is synthesized)
atcacagaagattcaggaaaaatgcacttgggaatcaaagaaaatggaacttctttttgaaaagacaagcaaccatgttaactgtattgacacatcctcaataaaacctgttgtataaaa

SEQ ID NO: 579675 - DNA, 120 bp, Artificial Sequence
  ENSG00000171813_0 (sequence is synthesized)
gcggcctgggacgcggcgggagcatggagccgcgcgccggctgccggctgccggtgcgggtggagcaggtcgtcaacggcgcgctggtggtcacggtgagctgcggcgagcggagcttcg

SEQ ID NO: 579676 - DNA, 120 bp, Artificial Sequence
  ENSG00000171813_1 (sequence is synthesized)
ttcgcggggatcctgctggactgcacgaaaaagtccggcctctttggcctacccccgttggctccgctgccccaggtcgatgagtcccctgtcaacgacagccatggccgggctcccgag

SEQ ID NO: 579677 - DNA, 120 bp, Artificial Sequence
  ENSG00000171813_2 (sequence is synthesized)
cgaggagggggatgcagaggtgatgcagctggggtccagctccccccctcctgcccgcggggttcagccccccgagaccacccgccccgagccacccccgcccctcgtgccgccgctgcc

SEQ ID NO: 579678 - DNA, 120 bp, Artificial Sequence
  ENSG00000171813_3 (sequence is synthesized)
ggaagcctgcccccgtaccctccctacttcgaaggcgcccccttccctcacccgctgtggctccgggacacgtacaagctgtgggtgccccagccgccgcccaggaccatcaagcgcacg

SEQ ID NO: 579679 - DNA, 120 bp, Artificial Sequence
  ENSG00000171813_4 (sequence is synthesized)
cggcggcgtctgtcccgcaaccgcgacccggggcgcctcatcctcagcaccatccgcctgcggccgcgccaggtgctctgtgagaagtgcaagagcacgctgagccccccggaggccagc

SEQ ID NO: 579680 - DNA, 120 bp, Artificial Sequence
  ENSG00000171813_5 (sequence is synthesized)
cccagccgcgcccagggcccgcaggaggctgggcagcggcccggacagggagctccgcaagccggaggagccggagaacggcgagcccacggctgcggccaccgccaggaggagcaagag

SEQ ID NO: 579681 - DNA, 120 bp, Artificial Sequence
  ENSG00000171813_6 (sequence is synthesized)
agcaagagggagaggcgcgaggaggacagggccccggcagagcaggtcccgcggagcccggtcatcaagatctcctacagcacgccccagggcaagggagaggtggtcaagatcccctcc

SEQ ID NO: 579682 - DNA, 120 bp, Artificial Sequence
  ENSG00000171813_7 (sequence is synthesized)
cgcgtgcacggctctctggagcccttccgtccccagcaggccccgcaggacgacggcagccaggaccccgaggtgctggacagagagtcccgggaccggccgtcctgcgcgccctcggcc

SEQ ID NO: 579683 - DNA, 120 bp, Artificial Sequence
  ENSG00000171813_8 (sequence is synthesized)
tccatccccaagttgaaactgacacggcctgtgccggccggcgcggacctgccgccccctaagatccgcctgaagccccaccgtctgggggacagcgagcacgagcccgtgtaccgggcc

SEQ ID NO: 579684 - DNA, 120 bp, Artificial Sequence
  ENSG00000171813_9 (sequence is synthesized)
gagctggtgggggagctgaacgggtacctgcgggacagctcgccggcgccctgtgcggacggccctgccggtgggctggcggacttgtcttctggaagttcgggtgaggacgatgacttc

SEQ ID NO: 579685 - DNA, 120 bp, Artificial Sequence
  ENSG00000171813_10 (sequence is synthesized)
cagcagcgacagcctggacgaggccagatcgtccggctcggaagggacgccggcagacacgggtgacctctcgcctggccacggcgcgtcagcgccctcggtgtccagagaggctcgcca

SEQ ID NO: 579686 - DNA, 120 bp, Artificial Sequence
  ENSG00000171813_11 (sequence is synthesized)
aacggtgccgcccctgacggtcaggctgcacacacagagcgtgtcggagtgcatcacggaggacggcaggactgtggccgtgggggacatcgtctggggtaagatccatggttttccttg

SEQ ID NO: 579687 - DNA, 120 bp, Artificial Sequence
  ENSG00000171813_12 (sequence is synthesized)
gtggccggcgcgtgttcttgacatcagtctcggccagaaggaggacggagagccgtcttggcgagaagcgaaggtctcgtggtttggttctccgactacgtcgttcttgtctatttcaaa

SEQ ID NO: 579688 - DNA, 120 bp, Artificial Sequence
  ENSG00000171813_13 (sequence is synthesized)
actctcccctttctctgaatttttcaaactgagatttaatcgtaagaagaaggggatgtatcggaaagctataaccgaggctgcaaatgccgcaagacacgtggccccggaaatcaggga

SEQ ID NO: 579689 - DNA, 120 bp, Artificial Sequence
  ENSG00000171813_14 (sequence is synthesized)
gctcttaacccagtttgaaacgtaactggttccctgaccaggtcaccgacgatgagggcgcacctgctgtcctggagcttccgatctctgttcggggaccctgtgagccttctggccggc

SEQ ID NO: 579690 - DNA, 120 bp, Artificial Sequence
  ENSG00000171813_15 (sequence is synthesized)
tgcgtgcagagcccactgggcacggtggtcggcctggtgtgaggccccccggggaccggcagtgtgtccagggaggggatggccctgagcccagcggctcctcccgctgagtgtatttct

SEQ ID NO: 579691 - DNA, 120 bp, Artificial Sequence
  ENSG00000171813_16 (sequence is synthesized)
tcccaccactcagcgcatggctgccctggctcacgaggcagtcgggactcgtgacttgctggctgctggctgctgctgcctcgcgcgctggggttccatggaggaactgggcctgccgcc

SEQ ID NO: 579692 - DNA, 120 bp, Artificial Sequence
  ENSG00000171813_17 (sequence is synthesized)
ccggcctcacctgctgcccgcatgctggggtcccatggaggaaccaggcctggcgccccggcctcgcccagcggctggtgtgggcagctgttccctgcctcgcagtgtcctggaggcagc

SEQ ID NO: 579693 - DNA, 120 bp, Artificial Sequence
  ENSG00000171813_18 (sequence is synthesized)
tgtctcgcagactcagcttggtctcccgcaggcttcagaaaaacccaattgcacgtgtgggattcttccccagcccttgggtgcggggtctctgtgcacttgagagctgggggacccacc

SEQ ID NO: 579694 - DNA, 120 bp, Artificial Sequence
  ENSG00000171813_19 (sequence is synthesized)
caccgtctcccactccaagttcatcccagagcgtggggcccgctgggcacctggcacctggcctgcagatgctgctacgagtgaccagtgctgtgtggaggaggccaagggcggcccctg

SEQ ID NO: 579695 - DNA, 120 bp, Artificial Sequence
  ENSG00000171813_20 (sequence is synthesized)
ggaaaccgggcttcaacagtacaaggaaaagaaacttgctctgttttgtaagagcgtgttccttttcctcttttttgtcactttaaagaccaaaaagaataaagaaagaaaagaaaaaaa

SEQ ID NO: 579696 - DNA, 120 bp, Artificial Sequence
  ENSG00000171815_0 (sequence is synthesized)
tctcattggcttctcaattcccaaggactttttttcctgaaagggaattaacaggtgagtctgttgttgctttggcaacaaactttcaacctctacctaactctccggaatgagaacata

SEQ ID NO: 579697 - DNA, 120 bp, Artificial Sequence
  ENSG00000171815_1 (sequence is synthesized)
tctattaatacattcgctagactggggagttgagtcgctcaatgcaaattttctttcaagtgcaaaacagcttaatgggctcggctagcctttggtggtgctgcagttagaggctagtga

SEQ ID NO: 579698 - DNA, 120 bp, Artificial Sequence
  ENSG00000171815_2 (sequence is synthesized)
agcggagagcagctgttgcagtaacctgttgcagaaaagtgaaagtatatccgcaacagttggctctgattgcagagagcgcgcttgtgagaactgatggcgggtacgcgcagaaaatct

SEQ ID NO: 579699 - DNA, 120 bp, Artificial Sequence
  ENSG00000171815_3 (sequence is synthesized)
ttgcaaaacaggcaagtgggatctcttctcatttttctgtgcatatctgtgggggatgcgacaactatccgctattcagtggcagaggaaatggagagcggctcgtttgtggccaacgta

SEQ ID NO: 579700 - DNA, 120 bp, Artificial Sequence
  ENSG00000171815_4 (sequence is synthesized)
gctaaggacctaggactggaggtagggaagctggctgcgcgcggggcgcggctggtttccgagggcaacaaaatgcatttccggctccaccgcaagacgggagatttgtttgtgaaggag

SEQ ID NO: 579701 - DNA, 120 bp, Artificial Sequence
  ENSG00000171815_5 (sequence is synthesized)
aaactggatcgggagtcactttgtggcaaagccgacccttgtgttctgcactttgaagtagtcctggtggagccgctgcagtccttccgggccgaggtcagggtatttgatatcaatgac

SEQ ID NO: 579702 - DNA, 120 bp, Artificial Sequence
  ENSG00000171815_6 (sequence is synthesized)
aatgccccagttttcctaaacaaggagccgcttttaaagattccggagagcacccctttgggttcacgttttcctctgcagagcgcccaggatctggacgtgggccttaacggtctccag

SEQ ID NO: 579703 - DNA, 120 bp, Artificial Sequence
  ENSG00000171815_7 (sequence is synthesized)
aactacaccctgagtgccaatgggtatttccacctgcacacccgcttctgcagccacgggcctaaatatgctgagctggtgctgaacaaacccctggaccgagaggagcagcctgaagtc

SEQ ID NO: 579704 - DNA, 120 bp, Artificial Sequence
  ENSG00000171815_8 (sequence is synthesized)
aacttgacaattacggcggtggacggcgggtccccgcctaagtctggcacagctcacatccacgtggtggttctggatgtcaacgaccacgtgccccagttctcgcgactggtgtacaga

SEQ ID NO: 579705 - DNA, 120 bp, Artificial Sequence
  ENSG00000171815_9 (sequence is synthesized)
gcccaggtatcagagaacagccccaatggctctttggtggccacggtgactgccgtggacctagacgagggcaccaacaaagcgataacttactctttagctcaaaacccagaagcaatt

SEQ ID NO: 579706 - DNA, 120 bp, Artificial Sequence
  ENSG00000171815_10 (sequence is synthesized)
ctcaagacgtttcagattgaccctcaaaatggagaagttcgactaagaggacccctcgattttgaagccattgaaacatacgacattgacattcaagctacagatggtggaggcctctct

SEQ ID NO: 579707 - DNA, 120 bp, Artificial Sequence
  ENSG00000171815_11 (sequence is synthesized)
gcccacagcaaagtcctggtagaagtggtggatgtgaatgacaatcctcccgaagtgatggtctcctctgtgtccagcccactccctgaagactcaccaccacagacagtagtagccctt

SEQ ID NO: 579708 - DNA, 120 bp, Artificial Sequence
  ENSG00000171815_12 (sequence is synthesized)
ttcactatcagagaccgggacattcgagtgggaggaaaagtcacctgcttcctcagagaagaccttccctttgtaatcaaacctacatttgggaattcttactcactggtcactgacaga

SEQ ID NO: 579709 - DNA, 120 bp, Artificial Sequence
  ENSG00000171815_13 (sequence is synthesized)
agcttggatcgggaggaggtctcaggctataatatcaccattgttgccatggatactggaccacctagcttgtctgccgagactatgatagaggtgctaatatccgacgttaatgacaat

SEQ ID NO: 579710 - DNA, 120 bp, Artificial Sequence
  ENSG00000171815_14 (sequence is synthesized)
cctccaatatttcgggaagattcctatatcttgactgttcgagaaaacaacagtcctgcggtttttattggcaaagtccatgctgaggatcttgatttgggtgagaatgcccaaataaca

SEQ ID NO: 579711 - DNA, 120 bp, Artificial Sequence
  ENSG00000171815_15 (sequence is synthesized)
tattctctgttgcctccaaaaaacggagatctttcagtctttgcttacatatccataaattcaggcaatgggaagctctacgcgctgagaaccatggattatgaggccattcaagatttt

SEQ ID NO: 579712 - DNA, 120 bp, Artificial Sequence
  ENSG00000171815_16 (sequence is synthesized)
caatttgtggtaaaggcaactgatgggggcttcctgtcactgagtagccaagttactgtcagagtggttgtcctagatgacaatgacaatcgtccaatgatcttatacccactgcagaac

SEQ ID NO: 579713 - DNA, 120 bp, Artificial Sequence
  ENSG00000171815_17 (sequence is synthesized)
ggcaccttgccctgcaatgacctggtgcccaggtctgcagaggcaggctacctagtgaccaaagtggtggctgtggatggtgactcaggtcagaattcttggctttcatatcatctactt

SEQ ID NO: 579714 - DNA, 120 bp, Artificial Sequence
  ENSG00000171815_18 (sequence is synthesized)
aaggccactgaccttgggttattttctgttcaaagacaaaatggagaaatccatacattaaggcagatatctgagagagaccccatgatgcagaaattgatcattcttgttcaggatcac

SEQ ID NO: 579715 - DNA, 120 bp, Artificial Sequence
  ENSG00000171815_19 (sequence is synthesized)
ggccaaccagctctttccactactgtctcactcaacatcctgctggtagatggcttttcagagccctacctgcagttccaggatccaaccaagcattctagaaaggtaaatccatccact

SEQ ID NO: 579716 - DNA, 120 bp, Artificial Sequence
  ENSG00000171815_20 (sequence is synthesized)
aaatatttggtcatttctctggtcatcctttcctttctctttctcctctctgtcatagtgatcttcattatacatgtctaccaaaagattaaatatagagaaaagttcacaattcaagag

SEQ ID NO: 579717 - DNA, 120 bp, Artificial Sequence
  ENSG00000171815_21 (sequence is synthesized)
catttctatgatgactgtaatttctctaacaacctggtacaaggacaaggcaatggatccttatctcggccttgtccatatgaaatgtgttcagccactggcactggtaatagtgagttt

SEQ ID NO: 579718 - DNA, 120 bp, Artificial Sequence
  ENSG00000171815_22 (sequence is synthesized)
cgctttcttaagcgttttatgcccaacttccctttccctcatgccactggggagataaaaatggaggctggctccagtttgcccccaaattctgataggaataagtctcagagattagag

SEQ ID NO: 579719 - DNA, 120 bp, Artificial Sequence
  ENSG00000171815_23 (sequence is synthesized)
ggccatgaccaggtatctgatgactatatgtagctcctatttacaggctcagtgagagaagagaagcaaaattttatacttggtatgcaaagatgttacatcctcattaaaacaaaaact

SEQ ID NO: 579720 - DNA, 120 bp, Artificial Sequence
  ENSG00000171815_24 (sequence is synthesized)
ggtagtagattgcagctttagtaaagataagagtacttagtttggtgaaaatgggaaacctagagtgaggctaggcttactcaatacaaagcagttatcctgatccccagatcatatatc

SEQ ID NO: 579721 - DNA, 120 bp, Artificial Sequence
  ENSG00000171815_25 (sequence is synthesized)
tataaccctttctccagttggaattctgtttaaagaaatgtcaccctctataaatgcatatgtggtaggaacttctgcttttccatctctgtgctagcaagtaatgaataagccattatt

SEQ ID NO: 579722 - DNA, 120 bp, Artificial Sequence
  ENSG00000171815_26 (sequence is synthesized)
cacattttccttagaagttcattggtcctggcccaggaaatacttagttccatagagagatccttttatttgcctctaaattattttccagtagaaagttatgcatgcatagggaagaga

SEQ ID NO: 579723 - DNA, 120 bp, Artificial Sequence
  ENSG00000171815_27 (sequence is synthesized)
actaccttccctttttgatatattgggaagtgattaggtttgacaagcagagatatagtttattattcaggaatctctaaattcttgtccctgatgagtgattatctttgatcaatacct

SEQ ID NO: 579724 - DNA, 120 bp, Artificial Sequence
  ENSG00000171815_28 (sequence is synthesized)
tgcctgcaatcattcataatcataatcatggaaatgcctggtaaatggtgatcttcacaaataatcatggtgggaggaagggtggagaaagaaaaggatttcacttatttgcaaatgtga

SEQ ID NO: 579725 - DNA, 120 bp, Artificial Sequence
  ENSG00000171815_29 (sequence is synthesized)
aagaaaaggatttcacttatttgcaaatgtgaataagggcagacataaggataaagagattcagtttaggaatgttctccaaaattaaattagatgtagttgtttttttttttttttttt

SEQ ID NO: 579726 - DNA, 84 bp, Artificial Sequence
  ENSG00000171815_30 (sequence is synthesized)
catgttggccaggctggtcatgaacttctgacctcaggtgatccaccagcctcggaaacccaaagcaatttgatttcttgattg

SEQ ID NO: 579727 - DNA, 120 bp, Artificial Sequence
  ENSG00000171815_31 (sequence is synthesized)
cataagccaccacgcccagccagatttgatttcttgattgtttggagccataggcaagtctcaaatctccctcttttatatccagatgtctatccttgcagtcccagagaaaatctattt

SEQ ID NO: 579728 - DNA, 120 bp, Artificial Sequence
  ENSG00000171815_32 (sequence is synthesized)
gaaaaaacggaaatggagggtgggtgaggaaaaaaataaagtatgacggctgggcaccgtggctcatggctgtaatctcagcactctgggagacggagggaggcagatcacctgaggtca

SEQ ID NO: 579729 - DNA, 73 bp, Artificial Sequence
  ENSG00000171815_33 (sequence is synthesized)
atcaccctggctcgtggtggcacgcacctgtaatcccaggtactcaagaggctgaggctggagaatcgcttga

SEQ ID NO: 579730 - DNA, 120 bp, Artificial Sequence
  ENSG00000171815_34 (sequence is synthesized)
gcaacagagtgagacgctgtctcaaaaacataaaaataaatacataaatacataaatacataaggcctgctgtagttaataagtgttacagaacactctaaactattttgtgccattaag

SEQ ID NO: 579731 - DNA, 120 bp, Artificial Sequence
  ENSG00000171815_35 (sequence is synthesized)
attttgtgccattaagtgtacacaacatttattgtaaaccattttgtagtttgtagagcaaatataaaataaaaagacattaaaattaaaaagttcattaatactaattaagtggcatta

SEQ ID NO: 579732 - DNA, 120 bp, Artificial Sequence
  ENSG00000171815_36 (sequence is synthesized)
aggaaagacacattttcaggtagtactagatttgattgtaagccattttcctctctgagtattctgaagttaacacatgcaaactgagaaaaagtggcatttttagtaaatcattcataa

SEQ ID NO: 579733 - DNA, 120 bp, Artificial Sequence
  ENSG00000171815_37 (sequence is synthesized)
aatgaaatggagtggggagacaacttaagcttctctttgatcaccactgtttgatttcataagctattctgagccctctcattctaaaataagccaatgttaaaacattaacatatttca

SEQ ID NO: 579734 - DNA, 120 bp, Artificial Sequence
  ENSG00000171815_38 (sequence is synthesized)
taaaacattaacatatttcagggattctcccaacactgctaactgtgccttgaaagtcaaaagtttgctttagagaagggcatggtggctcatacctgtagtcccagctactcaggagtc

SEQ ID NO: 579735 - DNA, 120 bp, Artificial Sequence
  ENSG00000171815_39 (sequence is synthesized)
agcccaggagttcaggggtgcagtaagctatgattgcacttctgcactccagcctgggcaaaagagtgaaacctcatctcaaaaaaaaaaaaagtgtgctttaatgaggctttaattata

SEQ ID NO: 579736 - DNA, 120 bp, Artificial Sequence
  ENSG00000171815_40 (sequence is synthesized)
ttccttattttataaaaatgtgtgtaaattcagactcactagaatacatcctcttggtattttaagggtagagcattatcttttaaaatacttcttaaatataccaaatcatgtttattg

SEQ ID NO: 579737 - DNA, 120 bp, Artificial Sequence
  ENSG00000171815_41 (sequence is synthesized)
atacaaacttcattcttggacttaatgactgatacctaatggcaccacctggctgtttacctgttggccaggaatacactaaaatttagtgctgttattttttagatgttagagatgctt

SEQ ID NO: 579738 - DNA, 120 bp, Artificial Sequence
  ENSG00000171815_42 (sequence is synthesized)
agggcagaactggtgtaacctatggctgccttcaatgttaaaatgttaaagaacagatgaagcaaatgcactatatcaatgaattgcttttatttttaatattaaatattttacatacat

SEQ ID NO: 579739 - DNA, 120 bp, Artificial Sequence
  ENSG00000171815_43 (sequence is synthesized)
tgagttatgattccgatttagagtaaaggttttcttgcacaaaacatagaataagtgttccagtgtatttgtgttccaattggtgaaggcatgctgaaatttctatttcctttaaatgaa

SEQ ID NO: 579740 - DNA, 87 bp, Artificial Sequence
  ENSG00000171815_44 (sequence is synthesized)
ctcctgagtagctgggactacaggtatacattaccacgcccagctaaattttgtgatttcgctatgttggccaggctggtctcgagc

SEQ ID NO: 579741 - DNA, 86 bp, Artificial Sequence
  ENSG00000171815_45 (sequence is synthesized)
caccatgcccagcctagaattaatttttatgggtaagcaataattagttaataaaacatgcttaagtaaaagctactgtattaact

SEQ ID NO: 579742 - DNA, 120 bp, Artificial Sequence
  ENSG00000171815_46 (sequence is synthesized)
gttaataaaacatgcttaagtaaaagctactgtattaactgtgtttcattacacttaatgatgtgaacataatcaatggaaactggcttaatgtcaaggataggaaaagaaaatggtgta

SEQ ID NO: 579743 - DNA, 120 bp, Artificial Sequence
  ENSG00000171815_47 (sequence is synthesized)
gattcatgattttaagactttgatattcaaatagcagtgaaattcatgaatacatatatacacacatacacaatggacagaagatgtagatttgtcaactttttattttttcacattaaa

SEQ ID NO: 579744 - DNA, 120 bp, Artificial Sequence
  ENSG00000171815_48 (sequence is synthesized)
ttttattttttcacattaaatgagataaaatctaccacttcacgccaccattattccataaacgaaatggcattttaatataaaaatggttaagataggctgggcatggtggctcacacc

SEQ ID NO: 579745 - DNA, 120 bp, Artificial Sequence
  ENSG00000171815_49 (sequence is synthesized)
aagaaaaaaagaaaaaagaaaaaaaaaggtaagataacaatctcataaaagaaaccatcctttaaatttaaaaaatgtatcgatttaataaaaaattattttgccaccatttttcttatt

SEQ ID NO: 579746 - DNA, 120 bp, Artificial Sequence
  ENSG00000171815_50 (sequence is synthesized)
atttttcttatttttgccttaggtgaaaattttgtcactctaattttattcagacttcaagttcccaagaaaattccaatcctacctgataacttaaaataagaatatatcaattcactg

SEQ ID NO: 579747 - DNA, 120 bp, Artificial Sequence
  ENSG00000171815_51 (sequence is synthesized)
aatgtgaagtaggccacttgtttttggagagaactctgtacaccagctgagattaagtccaggtctctatcagcaaattaagacaaagaatggaaataattagggcaattactctctcca

SEQ ID NO: 579748 - DNA, 120 bp, Artificial Sequence
  ENSG00000171815_52 (sequence is synthesized)
aagtgtcaagtgatattataactatttctatgtattcaaagctataacctaagaaccttgaaaagtgtcttgtacaaaaaggctttttattaggaaataattctagactcataaaattgc

SEQ ID NO: 579749 - DNA, 120 bp, Artificial Sequence
  ENSG00000171815_53 (sequence is synthesized)
aaaaatactatagatagttcctgtatatccttcacctaacttcccggaatgctaacatcttatataaccatagtagttatcaaaattaagaaattaaccttggtataattctatgaagta

SEQ ID NO: 579750 - DNA, 120 bp, Artificial Sequence
  ENSG00000171815_54 (sequence is synthesized)
aactacagatcttattcaaatttaacagttttcccccaatgtcctttttctattcaaggatccaatccaggatcctgcaaagcatttgttatggctccttagtctctaccacctgtgaca

SEQ ID NO: 579751 - DNA, 120 bp, Artificial Sequence
  ENSG00000171815_55 (sequence is synthesized)
gttccttactcttaccttgtctatcatgacttgagatttttgaagagtactagccagttatttgtagaatgcccctcagtttgggattctttgttttctcattattaaactgaggtaatg

SEQ ID NO: 579752 - DNA, 120 bp, Artificial Sequence
  ENSG00000171815_56 (sequence is synthesized)
cattattgggaaaaatactgcagaaatgatattgtatccttttcagtgcatcacgtcagcaggtatgtgatgccaatgtcacactactggtgatattaatcttttttcttttattgtggt

SEQ ID NO: 579753 - DNA, 120 bp, Artificial Sequence
  ENSG00000171815_57 (sequence is synthesized)
aaagaacttataaaatgtaccatgttagccatttttaagtatgttagccatttttaagtaatgttaaggtgatgttaattttgatcgcttggttaacataatgtctgccacgtttctcta

SEQ ID NO: 579754 - DNA, 120 bp, Artificial Sequence
  ENSG00000171815_58 (sequence is synthesized)
ctataaagttacttttttctctttgtaattaataaacacttgggggatatgctttgaaactatgcaaatatgatgtttctgcttaaaccaattttagtatccattgctagatatttcctg

SEQ ID NO: 579755 - DNA, 120 bp, Artificial Sequence
  ENSG00000171815_59 (sequence is synthesized)
tggcaattaatattgtggcattctaatggtgattttctatttctctatttccttttacattaattaaaattcttctggaaggaaaacttgttactttcccccccacttatttagttagtt

SEQ ID NO: 579756 - DNA, 120 bp, Artificial Sequence
  ENSG00000171815_60 (sequence is synthesized)
atttctttacataaggatacctggatatctcctctattatttgggttacaaactaatcctatcatttactttgttgttcagcaaactcttttatctgagatgaagagcagatttttaaga

SEQ ID NO: 579757 - DNA, 120 bp, Artificial Sequence
  ENSG00000171815_61 (sequence is synthesized)
ctggaattatccatatagaatacatttttatcaaaattagtatttctttgtaactctacatgttagattattttaaacaatcataaagtaaccccattaaggttcatgcataaagtttta

SEQ ID NO: 579758 - DNA, 120 bp, Artificial Sequence
  ENSG00000171815_62 (sequence is synthesized)
cctgagatactatttaaaaatagacttatatgctgaaattagacttacagatatacaaaaaatggaattggtctgtctgatattatgtaattctcctaaaaataaagaatttctttatca

SEQ ID NO: 579759 - DNA, 120 bp, Artificial Sequence
  ENSG00000171817_0 (sequence is synthesized)
agctaagatcgggtccggcgctccagaacagaacgatccctgaggctcccttgctcgaactgtgggacttaccctactatggtccgagcctaccctatttcattatactcaagtaacgcc

SEQ ID NO: 579760 - DNA, 120 bp, Artificial Sequence
  ENSG00000171817_1 (sequence is synthesized)
ccagaaattccagagaatctcacacaaagaggttgagtcttgccgtggtgccttcaggggaatgtcatcccgggctagaagagctgcaaaaggctgtcaggcttctcagaactttgcttc

SEQ ID NO: 579761 - DNA, 120 bp, Artificial Sequence
  ENSG00000171817_2 (sequence is synthesized)
tccagcagaataatcctgcggaagactgagcagttcttgtgagtgtaaaaccatggcccatgcattggtgacgttcagggatgtggctatagacttctctcagaaggaatgggagtgcct

SEQ ID NO: 579762 - DNA, 120 bp, Artificial Sequence
  ENSG00000171817_3 (sequence is synthesized)
ggacactacccagaggaaattgtacagagatgtgatgttggagaattataataacttggtctcactgggatattctggctcaaagccagatgtgattaccttactggagcaagggaaaga

SEQ ID NO: 579763 - DNA, 120 bp, Artificial Sequence
  ENSG00000171817_4 (sequence is synthesized)
gccctgcgtggtggcgagggatgtgacaggaagacagtgccccggtttgttatccaggcataagaccaagaaattatcttcagaaaaggacattcatgaaatcagtttatccaaagagag

SEQ ID NO: 579764 - DNA, 120 bp, Artificial Sequence
  ENSG00000171817_5 (sequence is synthesized)
tataatagaaaaaagtaaaactcttcgtctgaaaggatccatttttagaaatgagtggcagaacaaaagtgagtttgagggtcaacagggacttaaagaaagatctatcagtcaaaagaa

SEQ ID NO: 579765 - DNA, 120 bp, Artificial Sequence
  ENSG00000171817_6 (sequence is synthesized)
aatcgtctctaaaaaaatgtcaactgatagaaaacgtccctcttttactctgaatcagagaattcacaatagtgagaaaagctgtgactcacacttggttcaacatgggaaaatagattc

SEQ ID NO: 579766 - DNA, 120 bp, Artificial Sequence
  ENSG00000171817_7 (sequence is synthesized)
tgatgtgaaacatgattgtaaagaatgtgggagtacttttaataatgtctatcagcttactctccatcagaaaattcatactggtgaaaaatcctgtaaatgtgagaaatgtgggaaagt

SEQ ID NO: 579767 - DNA, 120 bp, Artificial Sequence
  ENSG00000171817_8 (sequence is synthesized)
ttttagtcatagctatcaacttactctgcatcagagatttcatactggtgagaaaccctatgaatgtcaagaatgtgggaagacctttactctttacccacaacttaatcgacatcagaa

SEQ ID NO: 579768 - DNA, 120 bp, Artificial Sequence
  ENSG00000171817_9 (sequence is synthesized)
aattcacactggtaaaaaaccctatatgtgtaagaaatgtgataagggtttttttagtagattagaacttactcaacataaaagaattcatactggtaagaaatcttatgaatgtaaaga

SEQ ID NO: 579769 - DNA, 120 bp, Artificial Sequence
  ENSG00000171817_10 (sequence is synthesized)
atgtggaaaagtttttcaacttattttctactttaaagaacatgagagaattcatacaggtaagaaaccctatgaatgtaaggagtgtgggaaagcttttagtgtatgcggacaacttac

SEQ ID NO: 579770 - DNA, 120 bp, Artificial Sequence
  ENSG00000171817_11 (sequence is synthesized)
ccgtcatcagaaaattcatactggtgtaaaaccctacgaatgtaaggaatgtggaaagacctttagacttagtttttaccttactgaacacagaagaactcatgcaggtaagaaacctta

SEQ ID NO: 579771 - DNA, 120 bp, Artificial Sequence
  ENSG00000171817_12 (sequence is synthesized)
tgaatgtaaggagtgtgggaaatcatttaatgtgcgtggacagcttaatcggcataaaacaatccatactggtataaaaccttttgcatgtaaggtgtgtgagaaggcttttagttatag

SEQ ID NO: 579772 - DNA, 120 bp, Artificial Sequence
  ENSG00000171817_13 (sequence is synthesized)
cctttatgcttcgttcagtccttactgaacatcagagacttcatactggtgtgaagccctacgaatgtaaggaatgtgggaagacctttcgagttcgttctcaaattagtctacataaga

SEQ ID NO: 579773 - DNA, 120 bp, Artificial Sequence
  ENSG00000171817_14 (sequence is synthesized)
aaattcatactgatgtgaagccctacaaatgtgtacgatgtgggaagacctttagatttggtttctaccttactgaacaccagagaattcacactggtgaaaagccctataaatgtaaag

SEQ ID NO: 579774 - DNA, 120 bp, Artificial Sequence
  ENSG00000171817_15 (sequence is synthesized)
aatgtggaaaggcctttattcgtagagggaatcttaaagaacatctgaaaattcattctggtttaaaaccctatgactgtaaagaatgtgggaagtcctttagtcggcgtgggcagttca

SEQ ID NO: 579775 - DNA, 120 bp, Artificial Sequence
  ENSG00000171817_16 (sequence is synthesized)
ctgaacatcagaaaattcatacgggtgtaaaaccatacaaatgtaaagaatgtgggaaggcctttagtcgtagtgtagaccttagaatacatcaaagaattcatactggtgagaaaccct

SEQ ID NO: 579776 - DNA, 120 bp, Artificial Sequence
  ENSG00000171817_17 (sequence is synthesized)
atgagtgtaaacaatgtgggaaggcctttagacttaattcacaccttactgaacatcagagaattcacactggtgagaaaccctatgagtgtaaggtatgtagaaaggcctttagacaat

SEQ ID NO: 579777 - DNA, 120 bp, Artificial Sequence
  ENSG00000171817_18 (sequence is synthesized)
attcacatctttatcaacatcagaaaactcataatgtaatttaatataagaaaaggtttccatgtcatgctctatttatagaatatcaaaatatttatggccagaagttctgtcaatgtg

SEQ ID NO: 579778 - DNA, 120 bp, Artificial Sequence
  ENSG00000171817_19 (sequence is synthesized)
ttgatgtttttttacacatattaacttaataaatgtatgagtcttaaatacctcttagttctcattaaatttaggaaaattcacactagaaaataaagctgttaatgtaacagttgtgga

SEQ ID NO: 579779 - DNA, 120 bp, Artificial Sequence
  ENSG00000171817_20 (sequence is synthesized)
aaagtgttctagcaacagcatatacttatcatcattgcctttccactactctactatctgtgtgatattagacaaaatatttgcttcttggtacctcagctgtaaaatgaaacacaccta

SEQ ID NO: 579780 - DNA, 120 bp, Artificial Sequence
  ENSG00000171817_21 (sequence is synthesized)
aaagtgtggttgtttccaacatgtataatacagcaacaactatctggcccaaactgctttggattaatattggatattactgtttttattatcatcaacattattattagtggatttctt

SEQ ID NO: 579781 - DNA, 120 bp, Artificial Sequence
  ENSG00000171817_22 (sequence is synthesized)
aataggaagatgcaatggagatgacaaatttggaaaaaccactcatcacttacatttcatgaagtacttctttgataaaatctgttatgggctgaatgtttgtgttcccgtaacaattcc

SEQ ID NO: 579782 - DNA, 120 bp, Artificial Sequence
  ENSG00000171817_23 (sequence is synthesized)
tatgttgaaacacgaatcccaaggtgatggtatttgaaggtagggcctttaggaggaaattaggtcatgagggtggagccttcatgagtggaattactgcctttataagaagaagccaaa

SEQ ID NO: 579783 - DNA, 120 bp, Artificial Sequence
  ENSG00000171817_24 (sequence is synthesized)
gagccagctagctctttcaaccacatgaggttacagcaagaagtcagcagtctacagtgcaaaagagggccttcaccagaacccaagcatgctggcaccttgaccttggactttcagcct

SEQ ID NO: 579784 - DNA, 120 bp, Artificial Sequence
  ENSG00000171817_25 (sequence is synthesized)
ccaaaactgtgagaaataaacctcagttgtttataagccactgagtctacgatattttgttatgcagcccagataactaaggcactccattagaatataaataaaatgtaaagatctaaa

SEQ ID NO: 579785 - DNA, 120 bp, Artificial Sequence
  ENSG00000171817_26 (sequence is synthesized)
tcctctgtgggtgcagagtgggtagtggccatgcctgtgtgatgtgcgtcagattatgcttgaggctattagtggcgcatttagtattgtgtgcggaagggtcttgggaatggtttgatt

SEQ ID NO: 579786 - DNA, 120 bp, Artificial Sequence
  ENSG00000171817_27 (sequence is synthesized)
ggccctagcggcttggcggagctggagccctccctggcagtgcgtcggcgctgggctatggccccctcctctccgggggatcgtcgccttggtcccccgaccctaggagtcgggcagggc

SEQ ID NO: 579787 - DNA, 120 bp, Artificial Sequence
  ENSG00000171817_28 (sequence is synthesized)
agaaccaggctaaagaaacgtccagcgtagcttcaaggatgcaccgcgtgatccctatcggatctccccgacgcgtcaggcctgcctagacggtgctgggagcgcgtctccttgaacgtt

SEQ ID NO: 579788 - DNA, 61 bp, Artificial Sequence
  ENSG00000171817_29 (sequence is synthesized)
tgatgctcggccaattttgtatttttttttttaggagaaatggggtttcaccatgttggtc

SEQ ID NO: 579789 - DNA, 120 bp, Artificial Sequence
  ENSG00000171817_30 (sequence is synthesized)
tcatgttgcctaatttcaaattatataactttattgaaatattctttaagccactgacttctagtaagaaccgttttcactttgtttcctattttgaaaatgtaaactttatgttatgct

SEQ ID NO: 579790 - DNA, 120 bp, Artificial Sequence
  ENSG00000171819_0 (sequence is synthesized)
gggcttggaaggaaagctataggctacccattcagctcccctgtcagagactcaagctttgagaaaggctagcaaagagcaaggaaagagagaaaacaacaaagtggcgaggccctcaga

SEQ ID NO: 579791 - DNA, 120 bp, Artificial Sequence
  ENSG00000171819_1 (sequence is synthesized)
gtgaaagcgtaaggttcagtcagcctgctgcagctttgcagacctcagctgggcatctccagactcccctgaaggaagagccttcctcacccaaacccacaaaagatgctgaaaaagcct

SEQ ID NO: 579792 - DNA, 120 bp, Artificial Sequence
  ENSG00000171819_2 (sequence is synthesized)
ctctcagctgtgacctggctctgcattttcatcgtggcctttgtcagccacccagcgtggctgcagaagctctctaagcacaagacaccagcacagccacagctcaaagcggccaactgc

SEQ ID NO: 579793 - DNA, 120 bp, Artificial Sequence
  ENSG00000171819_3 (sequence is synthesized)
tgtgaggaggtgaaggagctcaaggcccaagttgccaaccttagcagcctgctgagtgaactgaacaagaagcaggagagggactgggtcagcgtggtcatgcaggtgatggagctggag

SEQ ID NO: 579794 - DNA, 120 bp, Artificial Sequence
  ENSG00000171819_4 (sequence is synthesized)
agcaacagcaagcgcatggagtcgcggctcacagatgctgagagcaagtactccgagatgaacaaccaaattgacatcatgcagctgcaggcagcacagacggtcactcagacctccgca

SEQ ID NO: 579795 - DNA, 120 bp, Artificial Sequence
  ENSG00000171819_5 (sequence is synthesized)
gatgccatctacgactgctcttccctctaccagaagaactaccgcatctctggagtgtataagcttcctcctgatgacttcctgggcagccctgaactggaggtgttctgtgacatggag

SEQ ID NO: 579796 - DNA, 120 bp, Artificial Sequence
  ENSG00000171819_6 (sequence is synthesized)
acttcaggcggaggctggaccatcatccagagacgaaaaagtggccttgtctccttctaccgggactggaagcagtacaagcagggctttggcagcatccgtggggacttctggctgggg

SEQ ID NO: 579797 - DNA, 120 bp, Artificial Sequence
  ENSG00000171819_7 (sequence is synthesized)
aacgaacacatccaccggctctccagacagccaacccggctgcgtgtagagatggaggactgggagggcaacctgcgctacgctgagtatagccactttgttttgggcaatgaactcaac

SEQ ID NO: 579798 - DNA, 120 bp, Artificial Sequence
  ENSG00000171819_8 (sequence is synthesized)
agctatcgcctcttcctggggaactacactggcaatgtggggaacgacgccctccagtatcataacaacacagccttcagcaccaaggacaaggacaatgacaactgcttggacaagtgt

SEQ ID NO: 579799 - DNA, 120 bp, Artificial Sequence
  ENSG00000171819_9 (sequence is synthesized)
actaccgcctgggtgagcacaataagcacctggatggcatcacctggtatggctggcatggatctacctactccctcaaacgggtggagatgaaaatccgcccagaagacttcaagcctt

SEQ ID NO: 579800 - DNA, 120 bp, Artificial Sequence
  ENSG00000171819_10 (sequence is synthesized)
aaaaggaggctgccgtggagcacggatacagaaactgagacacgtggagactggatgagggcagatgaggacaggaagagagtgttagaaagggtaggactgagaaacagcctataatct

SEQ ID NO: 579801 - DNA, 120 bp, Artificial Sequence
  ENSG00000171819_11 (sequence is synthesized)
ccaaagaaagaataagtctccaaggagcacaaaaaaatcatatgtaccaaggatgttacagtaaacaggatgaactatttaaacccactgggtcctgccacatccttctcaaggtggtag

SEQ ID NO: 579802 - DNA, 120 bp, Artificial Sequence
  ENSG00000171819_12 (sequence is synthesized)
actgagtggggtctctctgcccaagatccctgacatagcagtagcttgtcttttccacatgatttgtctgtgaaagaaaataattttgagatcgttttatctattttctctacggcttag

SEQ ID NO: 579803 - DNA, 120 bp, Artificial Sequence
  ENSG00000171819_13 (sequence is synthesized)
gctatgtgagggcaaaacacaaatccctttgctaaaaagaaccatattattttgattctcaaaggataggcctttgagtgttagagaaaggagtgaaggaggcaggtgggaaatggtatt

SEQ ID NO: 579804 - DNA, 120 bp, Artificial Sequence
  ENSG00000171819_14 (sequence is synthesized)
tctatttttaaatccagtgaaattatcttgagtctacacattatttttaaaacacaaaaattgttcggctggaactgacccaggctggacttgcggggaggaaactccagggcactgcat

SEQ ID NO: 579805 - DNA, 120 bp, Artificial Sequence
  ENSG00000171819_15 (sequence is synthesized)
ctggcgatcagactctgagcactgcccctgctcgccttggtcatgtacagcactgaaaggaatgaagcaccagcaggaggtggacagagtctctcatggatgccggcacaaaactgcctt

SEQ ID NO: 579806 - DNA, 120 bp, Artificial Sequence
  ENSG00000171819_16 (sequence is synthesized)
aaaatattcatagttaatacaggtatatctatttttatttactttgtaagaaacaagctcaaggagcttccttttaaattttgtctgtaggaaatggttgaaaactgaaggtagatggtg

SEQ ID NO: 579807 - DNA, 120 bp, Artificial Sequence
  ENSG00000171819_17 (sequence is synthesized)
ttatagttaataataaatgctgtaaataagcatctcactttgtaaaaataaaatattgtggttttgttttaaacattcaacgtttcttttccttctacaataaacactttcaaaatgtga

SEQ ID NO: 579808 - DNA, 80 bp, Artificial Sequence
  ENSG00000171823_0 (sequence is synthesized)
gaaaagcgggcgagagacaaaggcagcaggaagcctcctccgcgcccggagcccgtgcgcccggcccccggggccccctc

SEQ ID NO: 579809 - DNA, 80 bp, Artificial Sequence
  ENSG00000171823_1 (sequence is synthesized)
cggcgtgggtagagccgaggcggcggcggcggccggcctccgggagcgagagcgaggcgccttccccgcccgggatgtga

SEQ ID NO: 579810 - DNA, 80 bp, Artificial Sequence
  ENSG00000171823_2 (sequence is synthesized)
cgggggagggccgggccggaggcgcagccggcaggaaggaaggacggacggaccaggaggaggagcggcggcggcggccg

SEQ ID NO: 579811 - DNA, 80 bp, Artificial Sequence
  ENSG00000171823_3 (sequence is synthesized)
ctggggagaagcgctctcgtcgcctgcccgaggccggagcggcggggcccgcgcctcctccccccagcgccgcggagggg

SEQ ID NO: 579812 - DNA, 120 bp, Artificial Sequence
  ENSG00000171823_4 (sequence is synthesized)
cctccccccagcgccgcggaggggggaggaggaagatggagacccacatctcatgcctgttcccggagctgctggccatgatcttcggctacctggacgtccgggacaaggggcgcgcgg

SEQ ID NO: 579813 - DNA, 120 bp, Artificial Sequence
  ENSG00000171823_5 (sequence is synthesized)
cgcaggtgtgcaccgcctggcgggacgccgcctaccacaagtcggtgtggcggggggtggaggccaagctgcacctgcgccgggccaacccgtcgctgttccccagcctgcaggcccggg

SEQ ID NO: 579814 - DNA, 120 bp, Artificial Sequence
  ENSG00000171823_6 (sequence is synthesized)
gcatccgccgggtgcagatcctgagcctccgccgcagcctcagctacgtgatccagggcatggccaacatcgagagcctcaacctcagcggctgctacaacctcaccgacaacgggctgg

SEQ ID NO: 579815 - DNA, 120 bp, Artificial Sequence
  ENSG00000171823_7 (sequence is synthesized)
gccacgcgtttgtgcaggagatcggctccctgcgcgctctcaacctgagcctctgcaagcagatcactgacagcagcctgggccgcatagcccagtacctcaagggcctggaggtgctgg

SEQ ID NO: 579816 - DNA, 120 bp, Artificial Sequence
  ENSG00000171823_8 (sequence is synthesized)
agctgggaggttgcagcaacatcaccaacactggccttctgctcatcgcctggggtctgcagcgcctcaagagccttaacctccgcagctgccgccacctttcggatgtgggcatcgggc

SEQ ID NO: 579817 - DNA, 120 bp, Artificial Sequence
  ENSG00000171823_9 (sequence is synthesized)
acctggccggcatgacgcgcagcgcggcggagggctgcctgggcctggagcagctcacgctacaggactgccagaagctcacagatctttctctaaagcacatctcccgagggctgacgg

SEQ ID NO: 579818 - DNA, 120 bp, Artificial Sequence
  ENSG00000171823_10 (sequence is synthesized)
gctcctcaacctcagcttctgtgggggaatctcggacgctggcctcctgcacctgtcgcacatgggcagcctgcgcagcctcaacctgcgctcctgtgacaacatcagtgacacgggcat

SEQ ID NO: 579819 - DNA, 120 bp, Artificial Sequence
  ENSG00000171823_11 (sequence is synthesized)
catgcatctggccatgggcagcctgcgcctctcggggctggatgtttcgttctgtgacaaggtgggagaccagagtctggcttacatagcccaggggctggatggcctcaagtctctctc

SEQ ID NO: 579820 - DNA, 120 bp, Artificial Sequence
  ENSG00000171823_12 (sequence is synthesized)
cctctgctcctgccacatcagtgatgatggcatcaaccgcatggtgcggcagatgcacgggctgcgcacgctcaacattggacagtgtgtgcgcatcacggacaagggcctggagctgat

SEQ ID NO: 579821 - DNA, 120 bp, Artificial Sequence
  ENSG00000171823_13 (sequence is synthesized)
cgctgagcacctgagccaactcaccggcatagacctgtacggctgcacccgaatcaccaagcgcggcctggagcgcatcacgcagctgccgtgcctcaaggtactcaacctgggactctg

SEQ ID NO: 579822 - DNA, 120 bp, Artificial Sequence
  ENSG00000171823_14 (sequence is synthesized)
gcagatgacggacagtgagaaggaggcacgaggggatttttctccattattcactgtgagaactcggggaagctccagaaggtgagggagaggggacaacgacatggttcccgtggatct

SEQ ID NO: 579823 - DNA, 120 bp, Artificial Sequence
  ENSG00000171823_15 (sequence is synthesized)
ttaacttccagacttgcccgctctgcgcctccggcactctggtgatgacagctcaggtttccctgcctgtcactgctcgggcagaggctgctgcccagggcttctgctccggtaccttgt

SEQ ID NO: 579824 - DNA, 120 bp, Artificial Sequence
  ENSG00000171823_16 (sequence is synthesized)
gaagctgcattctcctgccggtttctccagttctggggacagtggtttgctctgagacctcgcttcctttatggatccaaggagacttgctttttcagtctgttcagctttttacttgct

SEQ ID NO: 579825 - DNA, 120 bp, Artificial Sequence
  ENSG00000171823_17 (sequence is synthesized)
aggatggaattgcaatttgcaagcttcttcgacaggaaactacaagttccacactttaattttatacatataaatatatacatgtgtacatatatctatgtacaggggtattatatatat

SEQ ID NO: 579826 - DNA, 120 bp, Artificial Sequence
  ENSG00000171823_18 (sequence is synthesized)
acatataagatgatgatatatataatgatgatatgtattactgagaacgtaaaatatcattacatagtgatagctggacacacaaggaattcacaactccccaaagaaaatacatctgga

SEQ ID NO: 579827 - DNA, 120 bp, Artificial Sequence
  ENSG00000171823_19 (sequence is synthesized)
tgacctgcctagcagtttccccatgagatagaggaatgtctacgtatttcattccctgttcctgccctgaaacaatttcaatcactgacaaatcattatcattcattaataatgtttact

SEQ ID NO: 579828 - DNA, 120 bp, Artificial Sequence
  ENSG00000171823_20 (sequence is synthesized)
gagtgcccatatgtgaaagaaatccactctacattccacagatgcatttcctctccccacggggtttccattttaatgggaacaatgtagaatatatctgtcttccctttatagattcca

SEQ ID NO: 579829 - DNA, 120 bp, Artificial Sequence
  ENSG00000171823_21 (sequence is synthesized)
gtatgtaaagccaagccctccagttgaggtgcaaaagaaagtaagcttgagatcttaactgagcagcaccagagtggggtatgttaaacccccactcccaataaaacaatcgaagtggaa

SEQ ID NO: 579830 - DNA, 120 bp, Artificial Sequence
  ENSG00000171824_0 (sequence is synthesized)
gacaagctctcgcgagacgagccgtgcaggctgaaaaaatggcgccacccagtacccgggagcccagggtcctgtcggcgaccagcgcaaccaaatccgacggagagatggtgctgccag

SEQ ID NO: 579831 - DNA, 120 bp, Artificial Sequence
  ENSG00000171824_1 (sequence is synthesized)
gcttcccggacgccgacagctttgtgaagtttgctcttgggtccgtggtggcagtcaccaaggcatctgggggcctaccacagtttggcgatgagtatgatttttaccgaagttttcctg

SEQ ID NO: 579832 - DNA, 120 bp, Artificial Sequence
  ENSG00000171824_2 (sequence is synthesized)
gcttccaagcattttgcgaaacacagggagacaggttgcttcagtgcatgagcagagtaatgcagtaccatgggtgtcgcagcaacattaaggatcgaagtaaagtgactgagctggaag

SEQ ID NO: 579833 - DNA, 120 bp, Artificial Sequence
  ENSG00000171824_3 (sequence is synthesized)
acaagtttgatttactagttgatgccaatgatgtaattctggagagagtgggtattttactggatgaagcctcaggtgtaaacaagaatcaacagcctgtcctccctgccggcttgcagg

SEQ ID NO: 579834 - DNA, 120 bp, Artificial Sequence
  ENSG00000171824_4 (sequence is synthesized)
tccccaaaacggtagtgtccagctggaaccgtaaggcagcagaatatggcaaaaaagcaaaatctgaaactttccggctgcttcatgcaaaaaatatcatccgacctcagctcaagtttc

SEQ ID NO: 579835 - DNA, 120 bp, Artificial Sequence
  ENSG00000171824_5 (sequence is synthesized)
gagagaagattgacaattccaacacaccatttcttcctaaaatcttcatcaaacccaatgctcagaaacctctccctcaagctctctctaaggaaaggcgggaacgcccacaggatcgtc

SEQ ID NO: 579836 - DNA, 120 bp, Artificial Sequence
  ENSG00000171824_6 (sequence is synthesized)
ctgaggacttggacgtcccccctgcactggctgatttcatccatcagcagagaacccagcaggttgagcaagacatgtttgcacatccttatcaatatgaactaaatcactttaccccag

SEQ ID NO: 579837 - DNA, 120 bp, Artificial Sequence
  ENSG00000171824_7 (sequence is synthesized)
cagatgcagtgcttcaaaagccacaaccccagttatacagacctatagaagagacaccatgccatttcatatcctccctggatgaactcgtggaactcaacgaaaagctcttgaattgtc

SEQ ID NO: 579838 - DNA, 120 bp, Artificial Sequence
  ENSG00000171824_8 (sequence is synthesized)
aggaatttgcagttgacttggagcaccactcttacaggagcttcctgggactgacctgcctgatgcaaatttctactcggacggaagacttcatcattgacaccctcgagcttcgaagtg

SEQ ID NO: 579839 - DNA, 120 bp, Artificial Sequence
  ENSG00000171824_9 (sequence is synthesized)
acatgtacattctcaatgagagcctcacagacccagccatcgttaaggtctttcatggtgctgattcagacatagaatggctacagaaagactttgggttgtatgtagtaaacatgtttg

SEQ ID NO: 579840 - DNA, 120 bp, Artificial Sequence
  ENSG00000171824_10 (sequence is synthesized)
atactcatcaggcagcacgccttcttaacctgggcaggcactcactcgatcatctcctgaaactctactgcaacgtggactcaaacaagcaatatcagctggctgattggagaatacgcc

SEQ ID NO: 579841 - DNA, 120 bp, Artificial Sequence
  ENSG00000171824_11 (sequence is synthesized)
acacccattacctgctatatatctatgacaaaatgaggctggagatgtgggagcgcggcaacgggcagccggtgcagctgcaggtggtgtggcaacggagcagggacatctgcctcaaga

SEQ ID NO: 579842 - DNA, 120 bp, Artificial Sequence
  ENSG00000171824_12 (sequence is synthesized)
aattcatcaaacctatcttcacggatgagtcctaccttgaactctataggaagcagaagaagcaccttaacacacagcagttgacagcctttcagctgctgtttgcctggagggataaaa

SEQ ID NO: 579843 - DNA, 120 bp, Artificial Sequence
  ENSG00000171824_13 (sequence is synthesized)
cagctcgcagggaagatgaaagttacggatatgtactgccaaaccacatgatgctgaaaatagctgaagaactgcctaaggaacctcagggcatcatagcttgctgcaacccagtaccgc

SEQ ID NO: 579844 - DNA, 120 bp, Artificial Sequence
  ENSG00000171824_14 (sequence is synthesized)
cccttgtgcggcagcagatcaacgaaatgcaccttttaatccagcaggcccgagagatgcccctgctcaagtctgaagttgcagccggagtgaagaagagcggaccgctgcccagtgctg

SEQ ID NO: 579845 - DNA, 120 bp, Artificial Sequence
  ENSG00000171824_15 (sequence is synthesized)
agagattggagaatgttctctttggacctcacgactgctcccatgcccctccggatggctatccaatcatcccaaccagtggatctgtgccagttcagaagcaggcgagcctcttccctg

SEQ ID NO: 579846 - DNA, 120 bp, Artificial Sequence
  ENSG00000171824_16 (sequence is synthesized)
atgaaaaagaagataacttgctgggtaccacatgcctgattgccacagctgtcatcacgttatttaatgaacctagtgctgaagacagtaaaaagggtccattgacagttgcacagaaaa

SEQ ID NO: 579847 - DNA, 120 bp, Artificial Sequence
  ENSG00000171824_17 (sequence is synthesized)
aagcccagaacatcatggagtcctttgaaaatccatttaggatgtttctgccctcactgggacaccgtgctcccgtctctcaggcagcgaagttcgatccatcaaccaaaatctatgaaa

SEQ ID NO: 579848 - DNA, 120 bp, Artificial Sequence
  ENSG00000171824_18 (sequence is synthesized)
tcagcaaccgctggaagctggcccaggtacaagtacaaaaagactctaaagaagctgtcaagaagaaggcagctgagcaaacagctgcccgggaacaggcaaaggaggcgtgcaaagctg

SEQ ID NO: 579849 - DNA, 120 bp, Artificial Sequence
  ENSG00000171824_19 (sequence is synthesized)
cagcagaacaggccatctccgtccgacagcaggtcgtgctagaaaatgctgcaaagaagagagagcgagcaacaagcgacccaaggaccacagaacagaaacaagagaagaaacgactca

SEQ ID NO: 579850 - DNA, 120 bp, Artificial Sequence
  ENSG00000171824_20 (sequence is synthesized)
aaatttccaagaagccaaaggacccagagccaccagaaaaagagtttacgccttacgactacagccagtcagacttcaaggcttttgctggaaacagcaaatccaaagtttcttctcagt

SEQ ID NO: 579851 - DNA, 120 bp, Artificial Sequence
  ENSG00000171824_21 (sequence is synthesized)
ttgatccaaataaacagaccccgtctggcaagaaatgcattgcagccaaaaaaattaaacagtcggtgggaaacaaaagcatgtcctttccaactggaaagtcagacagaggcttcaggt

SEQ ID NO: 579852 - DNA, 120 bp, Artificial Sequence
  ENSG00000171824_22 (sequence is synthesized)
acaactggccacagagatagtcctggaagacacgtggcgcctgtggaccggaagcaccaaatgctggtgctgcttttgtacatacatatttttaaaccattaaaattcttcctgaagaaa

SEQ ID NO: 579853 - DNA, 120 bp, Artificial Sequence
  ENSG00000171824_23 (sequence is synthesized)
caatcatcccaaccagtggtaaagtcgagagccctcctgactgtcccgaagaggttgggacacagctaccttgtctaaaattctgtaggcttggccgggcgtggtggcttatgcctgtaa

SEQ ID NO: 579854 - DNA, 120 bp, Artificial Sequence
  ENSG00000171824_24 (sequence is synthesized)
gatggcccagtgcctggaggacagtagcactttgtccttaatagggattttagcaataaagccagcatgaaatttatttttcatgcccttagatttgaaaatttatgacttagaatgtgt

SEQ ID NO: 579855 - DNA, 120 bp, Artificial Sequence
  ENSG00000171824_25 (sequence is synthesized)
ttatagatgtctgttactttaaggctcttaaaggtgacagctttaattttaaaacactctatcttacttatctggcttgtttttaccagcattatgagtaagaatgagagcacacctccc

SEQ ID NO: 579856 - DNA, 120 bp, Artificial Sequence
  ENSG00000171824_26 (sequence is synthesized)
ctagaccctcttgagatgttccccagagccagaacgtgaactgttgttcgcagcctccttcctccctttaggaagcgtctgctctgatgacatgggcgactggcttcctctgtgtggcag

SEQ ID NO: 579857 - DNA, 120 bp, Artificial Sequence
  ENSG00000171824_27 (sequence is synthesized)
cagagctcttttgttaggcaaaaccgagaggtcccccagccccgttcctgtccctgagttagcttgctatttttggaaatggggaatcaggtggggcttctgccttctctcctcttttcc

SEQ ID NO: 579858 - DNA, 120 bp, Artificial Sequence
  ENSG00000171824_28 (sequence is synthesized)
ccccacgggttatgtcacactgaacaactgcacgtcctgtgtgttatgcccagtgtcacctccatgtgttgtaacgccataggtccgtggggtgtcataaagaaacacagcagacttgcg

SEQ ID NO: 579859 - DNA, 120 bp, Artificial Sequence
  ENSG00000171824_29 (sequence is synthesized)
gaagcccagccttgagtctgcttctgtcatttactgaccatgtcccttggacaagttatttactctcccggagtctgtttgctcatctctaaagagagggtgatgacagtacctttttcc

SEQ ID NO: 579860 - DNA, 120 bp, Artificial Sequence
  ENSG00000171824_30 (sequence is synthesized)
actcagtcggctgttaaagaatggctgttgcacacccgctgtttcagccaagtgccagatacggcgatgaatgaagcccctgtggggcttcccttctgctgagggatggtgggcaatcag

SEQ ID NO: 579861 - DNA, 120 bp, Artificial Sequence
  ENSG00000171824_31 (sequence is synthesized)
tggttggagaaggcagtctaatgaatgcgacattgacgagacctgcagtgacctagagaagagttctggagccacagcacagcgagcccagaggccctggggctagttcactgggcatgc

SEQ ID NO: 579862 - DNA, 120 bp, Artificial Sequence
  ENSG00000171824_32 (sequence is synthesized)
tgagcagcagcaagtgggcctgcatgagcagagcgggtagagaagagcaggagatggggaaggagccagcagaggcccacgggatgacgctgccttttactctgagttcagaagccagga

SEQ ID NO: 579863 - DNA, 120 bp, Artificial Sequence
  ENSG00000171824_33 (sequence is synthesized)
gggtgctgagcagacggggggaagtgactgacatgtggcactctggctgctgtgtcaacagtagactatagaggacaggatgggagtccaggaagggataggagacatggcagtggctca

SEQ ID NO: 579864 - DNA, 120 bp, Artificial Sequence
  ENSG00000171824_34 (sequence is synthesized)
ggcgagaggggatggtggctttgagaccagcgtgggagcagaggaggtggtgagaagctgtcagagccttgatctgtcccatagcaaagctgacagcatttgatgatgaggtggatgtgg

SEQ ID NO: 579865 - DNA, 120 bp, Artificial Sequence
  ENSG00000171824_35 (sequence is synthesized)
catgtgagaaaagggaagggaaccttggatgaaggttttgtcctgagcagctggaaagctggagttgctggcagccaaagtagctggtttgagcaggtttgtccacgatggtgatggtga

SEQ ID NO: 579866 - DNA, 120 bp, Artificial Sequence
  ENSG00000171824_36 (sequence is synthesized)
cgatcctgttaaacgccctcaggtccacaggccactgagcatttaggttcacagaagaggagcaggcagggctggggaggatcagctcacgtgtagctgaaggtgggcagagcacctgag

SEQ ID NO: 579867 - DNA, 120 bp, Artificial Sequence
  ENSG00000171824_37 (sequence is synthesized)
cctgagctctgaggcagcctgtcctgcagagatgggggaccggggacctgagagggaggaggaatcagccgtgacaacccctgtggctaggccaagtcggagggggatggagatggaggg

SEQ ID NO: 579868 - DNA, 120 bp, Artificial Sequence
  ENSG00000171824_38 (sequence is synthesized)
gttttctcccccaggagggaaaacgtcaagtcacagccagtgcaagtacacctctgacagaggcctgtgctgacagctggcagaaagctactgccggcttgcacgttttacatgccagcc

SEQ ID NO: 579869 - DNA, 120 bp, Artificial Sequence
  ENSG00000171824_39 (sequence is synthesized)
agctgagagaaatgggcctggttttcagactgcccacagggaccaggatcgctatgtattcatttatgtgagccatgagccctagcccctcatcgtgacaggggtgctctcacagccaag

SEQ ID NO: 579870 - DNA, 120 bp, Artificial Sequence
  ENSG00000171824_40 (sequence is synthesized)
tccagagagacctgggtttgagccctaccacgctcattgagatgaatggcatcaggcttttcgccaggcatcttcagcagcgtaaaagtgccctctgcccgaggagatgctcagctacgc

SEQ ID NO: 579871 - DNA, 120 bp, Artificial Sequence
  ENSG00000171824_41 (sequence is synthesized)
gtaaataatgggcttttttcttttgctatgaaagctggttatttcccctatgtgacagcatctaatggaacttactggctgaatgtaatgtgtccccaccgtgtgtgtgtgtgtgtgtgt

SEQ ID NO: 579872 - DNA, 120 bp, Artificial Sequence
  ENSG00000171824_42 (sequence is synthesized)
gtttttttttttccagatatgtactgccaaaccacatgatgctgaaaatagctgaagaactgcctaaggaacctcagggcatcatagcttgctgcaacccagtaccgccccttgtgcggc

SEQ ID NO: 579873 - DNA, 120 bp, Artificial Sequence
  ENSG00000171824_43 (sequence is synthesized)
cacccggccttcccttactcttatgggtattttactggatgaagcctcaggtgtaaacaagaatcaacagcctgtcctccctgccggcttgcaggtccccaaaacggtagtgtccagctg

SEQ ID NO: 579874 - DNA, 120 bp, Artificial Sequence
  ENSG00000171827_0 (sequence is synthesized)
gtagtgtgacgctgggccccgtccctgtgaccgggccaggctcggagctgcagggaatccggactttcgggctctctggaaggccggggagaggccagtgtgggaggacctggtggggag

SEQ ID NO: 579875 - DNA, 120 bp, Artificial Sequence
  ENSG00000171827_1 (sequence is synthesized)
gaggccgtgttacaaaccctgcgcggagctgcaccgctgctgccagacactgcgacgccgcgaccttttctactccggactacgtttcccagcggaccccgcgggagttgggccggcggc

SEQ ID NO: 579876 - DNA, 120 bp, Artificial Sequence
  ENSG00000171827_2 (sequence is synthesized)
ccctttgtgtcctccgggggcggaggcagctgaggcgcttctttccgggcccgtaagggctgggttccatccaactaagggtagcggtgagacccgagtgcagattccccgagccttcgg

SEQ ID NO: 579877 - DNA, 120 bp, Artificial Sequence
  ENSG00000171827_3 (sequence is synthesized)
ggcaggaaggagatcttccaccagttctgttctgcaggtcgggagtgggctgaggagtggcgtgtgggtctccggaagctcgtcgcaggccatctgtgtgactccggtgcgagtggagtc

SEQ ID NO: 579878 - DNA, 120 bp, Artificial Sequence
  ENSG00000171827_4 (sequence is synthesized)
atctgaggccactgctatttcccaagagaagagccaggaggaagaaagaatggctgttgggcttcttaaagccatgtaccaggagttggtgaccttcagagatgtggctgtagacttctc

SEQ ID NO: 579879 - DNA, 120 bp, Artificial Sequence
  ENSG00000171827_5 (sequence is synthesized)
ccaagaggaatgggattgtctggattcttctcaaagacatctgtacagtaatgtgatgctagagaactacaggatcttggtatcactgggactttgcttttccaaaccaagtgtgatatt

SEQ ID NO: 579880 - DNA, 120 bp, Artificial Sequence
  ENSG00000171827_6 (sequence is synthesized)
attgttggaacaaggaaaagcaccctggatggtgaagagagagctgacaaaaggcttgtgctcaggctgggagcctatatgtgagactgaagaattaaccccaaagcaggatttttatga

SEQ ID NO: 579881 - DNA, 120 bp, Artificial Sequence
  ENSG00000171827_7 (sequence is synthesized)
agaacatcaatcccagaagataatagaaacacttacaagctataaccttgaatactccagtttgagagaagagtggaaatgtgagggctattttgaaaggcaaccaggtaatcagaaggc

SEQ ID NO: 579882 - DNA, 120 bp, Artificial Sequence
  ENSG00000171827_8 (sequence is synthesized)
gtgtttcaaggaagagataatcactcatgaagaacccctttttgatgagagagaacaagaatataaatcttggggaagttttcatcagaacccactgctttgtacacaaaagataatccc

SEQ ID NO: 579883 - DNA, 120 bp, Artificial Sequence
  ENSG00000171827_9 (sequence is synthesized)
caaagaggagaaagtacataaacatgacacacaaaagagaagctttaaaaaaaatttaatggctattaagcccaagagtgtctgtgcagagaagaaacttttgaaatgtaatgactgtga

SEQ ID NO: 579884 - DNA, 120 bp, Artificial Sequence
  ENSG00000171827_10 (sequence is synthesized)
aaaagtcttcagccagagttcatcccttactcttcatcaaagaattcatactggagagaaaccctataaatgtatagagtgtggaaaagccttcagccagagatcaaatcttgttcaaca

SEQ ID NO: 579885 - DNA, 120 bp, Artificial Sequence
  ENSG00000171827_11 (sequence is synthesized)
tcagaggattcatactggagaaaaaccctatgaatgtaaggaatgtaggaaagccttcagtcagaatgcacacctagttcaacatctgcgagttcatactggagaaaaaccttacgaatg

SEQ ID NO: 579886 - DNA, 120 bp, Artificial Sequence
  ENSG00000171827_12 (sequence is synthesized)
taaggtatgtcgaaaagccttcagccagtttgcctaccttgctcaacatcagagagttcacacgggagagaaaccctatgaatgtatcgaatgtgggaaagcatttagcaacagatcatc

SEQ ID NO: 579887 - DNA, 120 bp, Artificial Sequence
  ENSG00000171827_13 (sequence is synthesized)
cattgctcaacaccagagagttcatacaggagagaaaccctatgaatgtaatgtctgtgggaaagcatttagccttcgtgcataccttactgtacatcagagaatacatactggagagag

SEQ ID NO: 579888 - DNA, 120 bp, Artificial Sequence
  ENSG00000171827_14 (sequence is synthesized)
accctatgaatgtaaggaatgtgggaaggcctttagccagaattcacaccttgctcaacatcagagaattcatactggagaaaaaccttataagtgtcaggaatgtaggaaagcattcag

SEQ ID NO: 579889 - DNA, 120 bp, Artificial Sequence
  ENSG00000171827_15 (sequence is synthesized)
ccagattgcctaccttgctcagcatcaaagagttcatactggagagaaaccctatgaatgtattgaatgtgggaaggcttttagcaatgactcgtcccttactcaacatcagcgagttca

SEQ ID NO: 579890 - DNA, 120 bp, Artificial Sequence
  ENSG00000171827_16 (sequence is synthesized)
tactggagagaaaccttatgaatgtactgtttgtggaaaggcttttagttactgtggatcccttgcccaacatcagagaattcatactggagagagaccctatgaatgtaaggaatgcaa

SEQ ID NO: 579891 - DNA, 120 bp, Artificial Sequence
  ENSG00000171827_17 (sequence is synthesized)
aaaaaccttcaggcagcatgcacaccttgctcatcaccagagaattcacattggggagtcactgtcaccacccaacccagtcaatcaccaagtcctatagatcctgagtcctaaatgttt

SEQ ID NO: 579892 - DNA, 120 bp, Artificial Sequence
  ENSG00000171827_18 (sequence is synthesized)
ctagaatttatactgttttttatctttaatgttgtcaccttggtctgattcatctcactctgattactaatatagctttcaaacaggttttcctgtatttatttttgctacctttaaatc

SEQ ID NO: 579893 - DNA, 120 bp, Artificial Sequence
  ENSG00000171827_19 (sequence is synthesized)
catttcccacaatgcactcaaacggatcttttttttctttttttttctttttgagacaatgtcttgctgtgttgcccaggctggagtacagtgggacgatctcagctcactgcaacctct

SEQ ID NO: 579894 - DNA, 60 bp, Artificial Sequence
  ENSG00000171827_20 (sequence is synthesized)
ctcaagtgatctgagtgttctttttaaagaataagaaaacacacatgggctgggtgtgat

SEQ ID NO: 579895 - DNA, 90 bp, Artificial Sequence
  ENSG00000171827_21 (sequence is synthesized)
caggcatgagccaccacgcccagcctcaaagtgttctttttaaagaataagaaaacacacatggcagcgctttgggaggccaaggcaggc

SEQ ID NO: 579896 - DNA, 120 bp, Artificial Sequence
  ENSG00000171827_22 (sequence is synthesized)
acctgggcaacaaggctgcaactccgtctcaaaataaaaagaaaagaagagaaaagaaaacacatgttactatctccagttaaaactttttttttttttttgcttgttattgttcttaga

SEQ ID NO: 579897 - DNA, 120 bp, Artificial Sequence
  ENSG00000171827_23 (sequence is synthesized)
ctaatattcacagcctttaaaattgtctgcaaggcttttgttatttggttcttacacaccattcagccttattttattccagtcttcttctttgggcactaggcacttcccaggactaag

SEQ ID NO: 579898 - DNA, 120 bp, Artificial Sequence
  ENSG00000171827_24 (sequence is synthesized)
agcttagattctggaaaatcatagctccaacactactatggcattgcgtgactttgagcaatttgcttatctaaacctcagggttttctttaaatcttaaaataggaataatataggata

SEQ ID NO: 579899 - DNA, 120 bp, Artificial Sequence
  ENSG00000171827_25 (sequence is synthesized)
ctgtactgtagaaatgtaagtattaagtgaaatagtgtctgttgtagattgatgcatattaaatgagaaatttgcatgtaaaatacttcatatagtctgtcaaatatagcagatattcaa

SEQ ID NO: 579900 - DNA, 120 bp, Artificial Sequence
  ENSG00000171827_26 (sequence is synthesized)
taaatgataatagctaacatgtattgagtgcccactacacatcaggcactgtcttacatactctacatatattaactcatctactcctcacaaaacaagattccttattggacaaagtgg

SEQ ID NO: 579901 - DNA, 120 bp, Artificial Sequence
  ENSG00000171827_27 (sequence is synthesized)
agcattcctgcaaaacaccagttcagaatttggaaaatctaaaaatgttagaacataaatggcagtctttgtactgtagcttagtagttgttatgaagtcaggtagtggaactataacac

SEQ ID NO: 579902 - DNA, 120 bp, Artificial Sequence
  ENSG00000171827_28 (sequence is synthesized)
tgacagccagttttaggaagtttctacagataatgaattggataagccaattaagaaaaatagaattcactgggaagaatgcagaacctacatttaaatcaaggaaggaatagaaatggt

SEQ ID NO: 579903 - DNA, 120 bp, Artificial Sequence
  ENSG00000171827_29 (sequence is synthesized)
aatagaaatggtcacaattaaccaaaaaaaatcaataaacatagaaattcatgtgatccccttaaataggcaccacaccctggccaggtgcagtagctcattcctgtaatcccagcactt

SEQ ID NO: 579904 - DNA, 120 bp, Artificial Sequence
  ENSG00000171827_30 (sequence is synthesized)
aaaaaaaaaaaaaaaagcactacccccagctaattgtatggttaaattcgggtaatttagaaggcatgtaaagtgttccatactatagaaaaatgtaaagttttaaaattatttatccag

SEQ ID NO: 579905 - DNA, 120 bp, Artificial Sequence
  ENSG00000171827_31 (sequence is synthesized)
tggttgcaaaattgaaatcaaaaggggattaagggaagaaaacagatagatacacaaataatataggcattcattctgttaatattgagtaattactgtttgtcagacactgttttaggt

SEQ ID NO: 579906 - DNA, 120 bp, Artificial Sequence
  ENSG00000171827_32 (sequence is synthesized)
atgaggaaatgacagtgagcaatacaaaggccacattctcatggagtaaaattccagaggtggagacatgtaattaatacttaaatataaaacagtagattttctaaacgcagaaaacgg

SEQ ID NO: 579907 - DNA, 120 bp, Artificial Sequence
  ENSG00000171827_33 (sequence is synthesized)
aagagtaacaagaaactaaatcaaggagcattatatagcctagactgcagagactcaatataataaagttggcgattcttcctaattatcaaatttactgcaattccagccaaaatgttt

SEQ ID NO: 579908 - DNA, 120 bp, Artificial Sequence
  ENSG00000171827_34 (sequence is synthesized)
ttgtttgttgtttttgtttttgttttgccctttagcttcacaggtttgttctgaaatttatgaggtataaattcttaagagcagcaagaaaaatttcgaatctatttgtagaaactgcat

SEQ ID NO: 579909 - DNA, 120 bp, Artificial Sequence
  ENSG00000171827_35 (sequence is synthesized)
tagaaactgcatatgatgatggttcataccagtagagagaaagattggatttgggggtattactagtagtaaggggattcactagtagtaagggaaatgcaaaataaaatcacattgaac

SEQ ID NO: 579910 - DNA, 120 bp, Artificial Sequence
  ENSG00000171827_36 (sequence is synthesized)
tagttcaaaatcatcacattggcaaaagcattagagtgccaattactggaaagatgtggagcaataggaacactcatacggtgctataggaagtagttgtgtttagcataatttggcaat

SEQ ID NO: 579911 - DNA, 120 bp, Artificial Sequence
  ENSG00000171827_37 (sequence is synthesized)
gtctagtaaagttgaagatgtgaataatctttgacccagcaattccatgtttaaacctctacatagtctctcctcgtgtttcaaggagatacatatgatggtccattgcagaactgtgag

SEQ ID NO: 579912 - DNA, 120 bp, Artificial Sequence
  ENSG00000171827_38 (sequence is synthesized)
aatgagaagttgaaagcaatctaaccattaggttaaatacaagatagaatgcaaactaaaatgaataactagagatatttctgtcaacatgggtaaacctcaaaaatagtattaatgaaa

SEQ ID NO: 579913 - DNA, 120 bp, Artificial Sequence
  ENSG00000171827_39 (sequence is synthesized)
ttgaactacagactattttatataatacagtataacgtacaatttcaaaacatgcaaattagtgttatgtatttttgtcatggctaaatactatataaaaaggatctaaaagaattaata

SEQ ID NO: 579914 - DNA, 120 bp, Artificial Sequence
  ENSG00000171827_40 (sequence is synthesized)
aaataatcatcagattcagaacagtggtgacctgcagggagaaagacaactgagattggggaaaggatgcaaatgaaaatacctttaattattcatttcttttaaaaataagcaaatact

SEQ ID NO: 579915 - DNA, 120 bp, Artificial Sequence
  ENSG00000171827_41 (sequence is synthesized)
gtatagccaattcttaaaatttgataaagctggctgtgagtatatgagtcagttcttactctctgtatctttctgtataaactatttcataatgcaaaaaaataaagaatatttaaatga

SEQ ID NO: 579916 - DNA, 120 bp, Artificial Sequence
  ENSG00000171827_42 (sequence is synthesized)
gtctttttgggtctctacctgaggctagaatacagcggggtgaaggtggtgagagctccagggccagtgaaggccgggtcagctggagccttaaggtcctgacagcggctagaagaggga

SEQ ID NO: 579917 - DNA, 120 bp, Artificial Sequence
  ENSG00000171827_43 (sequence is synthesized)
ggagtgacgtagtgtgactgtatgtgtgaaacttcggccatggaatttggagtggggtttccagggcgagagaccctgtccagtgacatctgaggtcgtgcgaatatgcgaccttttgtg

SEQ ID NO: 579918 - DNA, 120 bp, Artificial Sequence
  ENSG00000171827_44 (sequence is synthesized)
cgattgtgagtgtgacagtgttattggatttcatgacccgggatcgtgagcgaaaagtagtgtggccagaccgcctgacttctaaacagacttggccttactagctgtgtcatctcagac

SEQ ID NO: 579919 - DNA, 120 bp, Artificial Sequence
  ENSG00000171827_45 (sequence is synthesized)
taggtcgggagtgggctgaggagtggcgtgtgggtctccggaagctcgtcgcaggccatctgtgtgactccggtgcgagtggagtcatctgaggccactgctatttcccaagagaagagc

SEQ ID NO: 579920 - DNA, 120 bp, Artificial Sequence
  ENSG00000171840_0 (sequence is synthesized)
aatttgcttgataaacatgcaggatttctttgccagtcataaagctactagctcaaagcaggctgggtgacctcagatggctccgctgggactggaaggtcactggagccactggtgaaa

SEQ ID NO: 579921 - DNA, 120 bp, Artificial Sequence
  ENSG00000171840_1 (sequence is synthesized)
atgatgctgtcactaccaactcaaaaggtcacctatcagtgtgccatgtgccacctcctggagcacacacatgtgcacacacatacactcacacgtgtgtgcaggtgcacacctccccca

SEQ ID NO: 579922 - DNA, 120 bp, Artificial Sequence
  ENSG00000171840_2 (sequence is synthesized)
gaggctgcagccaagacgggcatcccacatcagagggatgaatggcaggtctgtcccgccagctgtgtgctctctcccacccgaagaaagcagcagagactcagacggcggagcctggag

SEQ ID NO: 579923 - DNA, 120 bp, Artificial Sequence
  ENSG00000171840_3 (sequence is synthesized)
gagcccacgcagtctgttcccggcacccggtgcgtgtgaagggacttgagggcagcgagatggaatcagcaagagaaaacatcgaccttcaacctggaagctccgaccccaggagccagc

SEQ ID NO: 579924 - DNA, 120 bp, Artificial Sequence
  ENSG00000171840_4 (sequence is synthesized)
ccatcaacctgaaccattacgccaccaagaagagcgtggcggagagcatgctggacgtggccctgttcatgtccaacgccatgcggctgaaggcggtgctggagcagggaccatcctctc

SEQ ID NO: 579925 - DNA, 120 bp, Artificial Sequence
  ENSG00000171840_5 (sequence is synthesized)
ggtcatcggtgtcctgctcgtggtcattgcacggctgaacctgaatgaggtagaaaagcagtggcgactcaaccagctcaacaacgcagccaccatcttggtcttcttcactgtggtcat

SEQ ID NO: 579926 - DNA, 120 bp, Artificial Sequence
  ENSG00000171840_6 (sequence is synthesized)
caatgttttcattacagccttcggggcacataaaacagggttcctggctgccagggcctcaaggaatcctctctgaatgcagcctgggacccaggttctgggcctggaacttctgcctcc

SEQ ID NO: 579927 - DNA, 120 bp, Artificial Sequence
  ENSG00000171840_7 (sequence is synthesized)
ttcctccgtgatctgccaggctcgtgggcactttccacagcccaggagagcttctgaaaggacagtatagctgcccttgctccctacccacagcacctgagttaaaaagtgatttttatg

SEQ ID NO: 579928 - DNA, 120 bp, Artificial Sequence
  ENSG00000171840_8 (sequence is synthesized)
ttattggtctaagggacttccatcttggtctgaagtcctgagctcagacgcaggtactgccagccataccttcctggtagcatctgctggacctaagtaaggcatgtctgtctaaggcca

SEQ ID NO: 579929 - DNA, 120 bp, Artificial Sequence
  ENSG00000171840_9 (sequence is synthesized)
agtctgcccggcttaaggatgctggttctgactctaccccactgcttccttctgctccaggcctcaattttcccttcttgtaaaatggaatctatatctataaaggtttcttcaaatcca

SEQ ID NO: 579930 - DNA, 120 bp, Artificial Sequence
  ENSG00000171840_10 (sequence is synthesized)
gctaagaacaaaacgttggctttggcttcgttgcaaagcagccgctcggtggccgtacaacgcttcatctctccgagcctcggtttcctcatctccagccctaaaatgacgacacgcccc

SEQ ID NO: 579931 - DNA, 120 bp, Artificial Sequence
  ENSG00000171840_11 (sequence is synthesized)
ttggtgaggagcccagcctgcagtcagaccttctgcctcggcacccgtggctggcagaaaggccccacgtgtcccctgggccaccctgcattggcacaggcagctttgcaaccacacgct

SEQ ID NO: 579932 - DNA, 120 bp, Artificial Sequence
  ENSG00000171840_12 (sequence is synthesized)
tgctgaatgactgcgccagcacctcgctaactgctaactcactcactcgctcaccgcttctccatgagcactcgtccccacgcttacaggacccagcttaagttcccaaatcctggtggg

SEQ ID NO: 579933 - DNA, 120 bp, Artificial Sequence
  ENSG00000171840_13 (sequence is synthesized)
atgaagcacactagggtgccccattgtactggttggcgagggcagaggcatctcagcccgatgacgaccacctcccttgatttctgccacatgggtttctgaagggcccctctctccaaa

SEQ ID NO: 579934 - DNA, 120 bp, Artificial Sequence
  ENSG00000171840_14 (sequence is synthesized)
ctctggtgggtgttgtgggggcagctccgtgctgtggccccgtctctgaccctttccccccactccacttccctgcagcacggctgaacctgaatgaggtagaaaagcagtggcgactca

SEQ ID NO: 579935 - DNA, 120 bp, Artificial Sequence
  ENSG00000171843_0 (sequence is synthesized)
aatcatcttctttaccctggagctgctgctgctgctgctgcttttgcttttggggctgagtttaataagcgagcgagcgagcaagcgagcgcggggggaaaaaggcagagaatgtccgcc

SEQ ID NO: 579936 - DNA, 120 bp, Artificial Sequence
  ENSG00000171843_1 (sequence is synthesized)
atctaccctccgctcctgggcgcgctctcattcatagcagcctcttcatgaattacagctgagggggggcggaggaggggggggtaccacacaacaccccagcaaacctccgggccccca

SEQ ID NO: 579937 - DNA, 120 bp, Artificial Sequence
  ENSG00000171843_2 (sequence is synthesized)
ggcatggctagctcgtgtgccgtgcaggtgaagctggagctggggcaccgcgcccaggtgaggaaaaaacccaccgtggagggcttcacccacgactggatggtgttcgtacgcggtccg

SEQ ID NO: 579938 - DNA, 120 bp, Artificial Sequence
  ENSG00000171843_3 (sequence is synthesized)
gagcacagtaacatacagcactttgtggagaaagtcgtcttccacttgcacgaaagctttcctaggccaaaaagagtgtgcaaagatccaccttacaaagtagaagaatctgggtatgct

SEQ ID NO: 579939 - DNA, 120 bp, Artificial Sequence
  ENSG00000171843_4 (sequence is synthesized)
ggtttcattttgccaattgaagtttattttaaaaacaaggaagaacctaggaaagtccgctttgattatgacttattcctgcatcttgaaggccatccaccagtgaatcacctccgctgt

SEQ ID NO: 579940 - DNA, 120 bp, Artificial Sequence
  ENSG00000171843_5 (sequence is synthesized)
gaaaagctaactttcaacaaccccacagaggactttaggagaaagttgctgaaggcaggaggggaccctaataggagtattcataccagcagcagcagcagcagcagcagtagcagcagc

SEQ ID NO: 579941 - DNA, 120 bp, Artificial Sequence
  ENSG00000171843_6 (sequence is synthesized)
gcagcagcagcagcagcagcagcagcagtagcagcagcagtagcagcagcagcagcagcagtagtaccagtttttcaaagcctcacaaattaatgaaggagcacaaggaaaaaccttcta

SEQ ID NO: 579942 - DNA, 120 bp, Artificial Sequence
  ENSG00000171843_7 (sequence is synthesized)
atgaaggagcacaaggaaaaaccttctaaagactccagagaacataaaagtgccttcaaagaaccttccagggatcacaacaaatcttccaaagaatcctctaagaaacccaaagaaaat

SEQ ID NO: 579943 - DNA, 120 bp, Artificial Sequence
  ENSG00000171843_8 (sequence is synthesized)
aaaccactgaaagaagagaaaatagttcctaagatggccttcaaggaacctaaacccatgtcaaaagagccaaaaccagatagtaacttactcaccatcaccagtggacaagataagaag

SEQ ID NO: 579944 - DNA, 120 bp, Artificial Sequence
  ENSG00000171843_9 (sequence is synthesized)
gctcctagtaaaaggccgcccatttcagattctgaagaactctcagccaaaaaaaggaaaaagagtagctcagaggctttatttaaaagtttttctagcgcaccaccactgatactcact

SEQ ID NO: 579945 - DNA, 120 bp, Artificial Sequence
  ENSG00000171843_10 (sequence is synthesized)
tgttctgctgacaaaaaacagataaaagataaatctcatgtcaagatgggaaaggtcaaaattgaaagtgagacatcagagaagaagaaatcaacgttaccgccatttgatgatattgtg

SEQ ID NO: 579946 - DNA, 120 bp, Artificial Sequence
  ENSG00000171843_11 (sequence is synthesized)
gatcccaatgattcagatgtggaggagaatatatcctctaaatctgattctgaacaacccagtcctgccagctccagctccagctccagctccagcttcacaccatcccagaccaggcaa

SEQ ID NO: 579947 - DNA, 120 bp, Artificial Sequence
  ENSG00000171843_12 (sequence is synthesized)
caaggtcctttgaggtctataatgaaagatctgcattctgatgacaatgaggaggaatcagatgaagtggaggataacgacaatgactctgaaatggagaggcctgtaaatagaggaggc

SEQ ID NO: 579948 - DNA, 120 bp, Artificial Sequence
  ENSG00000171843_13 (sequence is synthesized)
agccgaagtcgcagagttagcttaagtgatggcagcgatagtgaaagcagttctgcttcttcacccctacatcacgaacctccaccacccttactaaaaaccaacaacaaccagattctt

SEQ ID NO: 579949 - DNA, 120 bp, Artificial Sequence
  ENSG00000171843_14 (sequence is synthesized)
gaagtgaaaagtccaataaagcaaagcaaatcagataagcaaataaagaatggtgaatgtgacaaggcatacctagatgaactggtagagcttcacagaaggttaatgacattgagagaa

SEQ ID NO: 579950 - DNA, 120 bp, Artificial Sequence
  ENSG00000171843_15 (sequence is synthesized)
agacacattctgcagcagatcgtgaaccttatagaagaaactggacactttcatatcacaaacacaacatttgattttgatctttgctcgctggacaaaaccacagtccgtaaactacag

SEQ ID NO: 579951 - DNA, 120 bp, Artificial Sequence
  ENSG00000171843_16 (sequence is synthesized)
tgctcgctggacaaaaccacagtccgtaaactacagagttacctggaaacatctggaacatcctgaggatataacaactggatgcatcaagaactattgtgttttttttttttggttttt

SEQ ID NO: 579952 - DNA, 120 bp, Artificial Sequence
  ENSG00000171843_17 (sequence is synthesized)
atatgaaaacactcaaaatgatgcaaccaaaagggaaaaaataaaaatcaaacaaccttcagctttatttttctttaaagccagtcatcatctcttgataaaggagaggttaaagcaaac

SEQ ID NO: 579953 - DNA, 120 bp, Artificial Sequence
  ENSG00000171843_18 (sequence is synthesized)
cagcctcagcggaccactcttctctccaaggaaatccccgggaagagttagcctggatagccttgaaaacaaacaaatcaaacacaacacaagaaaactcaaagaatgtgtatggtatca

SEQ ID NO: 579954 - DNA, 120 bp, Artificial Sequence
  ENSG00000171843_19 (sequence is synthesized)
tgtatctctctgtggtggttcattccacaggacgaatgcatattcaacacactgccttattacataactgatctatttattatcgcatacagatattctaagtcgttgagggaatgacac

SEQ ID NO: 579955 - DNA, 120 bp, Artificial Sequence
  ENSG00000171843_20 (sequence is synthesized)
catcagacattataagtacttggtcccgtggatgctctttcaatgcagcacccttgccatcccaagcccagtgaccttactcgtataccgtgccactttccaccaactttttccaagtcc

SEQ ID NO: 579956 - DNA, 120 bp, Artificial Sequence
  ENSG00000171843_21 (sequence is synthesized)
tttaactcgttgcagtctgtattttccaccttttgtttttccagttccaggacacagattatcaactggggggaccaaatagccaccttgattttcttctttgtggtctttttcctgaaa

SEQ ID NO: 579957 - DNA, 120 bp, Artificial Sequence
  ENSG00000171843_22 (sequence is synthesized)
gttggggcccagtccttggctgtatccatgtaatgatcttggaccatggtagaaaatgcaccaaataggatcatatgaattgctgtctagccttagtcaataaacttgtaggacttttaa

SEQ ID NO: 579958 - DNA, 120 bp, Artificial Sequence
  ENSG00000171843_23 (sequence is synthesized)
acaaaagtgtacctgtaaatgtcctgaatccagcattgttgagctgtcatcaacattcttgtgtctgttttactgttacaatattaggtgaatatggaagtaaaggcattccacaggatc

SEQ ID NO: 579959 - DNA, 120 bp, Artificial Sequence
  ENSG00000171843_24 (sequence is synthesized)
atcatttaaaaaaaaagaattctggtcctgttttctaaaaaaaaaaactgttgtagaaattcttaatttggatctatttattagtcagagtttcagctttcttcagctgccagtgtgtta

SEQ ID NO: 579960 - DNA, 120 bp, Artificial Sequence
  ENSG00000171843_25 (sequence is synthesized)
ctcatctttatcctaaaaatctggaatcagagatttttgtttgttcacatatgattctcttagacacttttatatttgaaaaaattaaaatctttctttggggaaaaattcttggttatt

SEQ ID NO: 579961 - DNA, 120 bp, Artificial Sequence
  ENSG00000171843_26 (sequence is synthesized)
ctgccataacagattatgtattaacttgtagattcagtggttcaatacctgtttagttgcttgctaatatttccagaaggatttcttgtattggtgaaagacggttggggatggggggat

SEQ ID NO: 579962 - DNA, 120 bp, Artificial Sequence
  ENSG00000171843_27 (sequence is synthesized)
ttttttgttcttgttgtacccttgttttgaaactagaaatctgtcctgtggcatgcaaaagaaagcaaattatttttaaaagaaaaaaaccaaagtacttttggtgtcattattccatct

SEQ ID NO: 579963 - DNA, 120 bp, Artificial Sequence
  ENSG00000171843_28 (sequence is synthesized)
cataagtggagaaatgaaaagtaagaacagctcatcttcaaagtttttactagaaattcagccgaaaagaagagaaatgaagaaatacttctggatccaaaggttcgtcactggatcagc

SEQ ID NO: 579964 - DNA, 120 bp, Artificial Sequence
  ENSG00000171843_29 (sequence is synthesized)
cttaagaaagtctctatgtgtgctaatagaccagtatctcccttgtttgttcccatgccagatgctgtcttttcatacagagattaactagtgtctgtacagaaaatggtctttccagac

SEQ ID NO: 579965 - DNA, 120 bp, Artificial Sequence
  ENSG00000171843_30 (sequence is synthesized)
ccattcttttgggcagttatataaatgcagattgataatggagttatttctgcattttaaaaaggggattttttacactgtttctttctatccaaagaaactatttttcctttaaaaaat

SEQ ID NO: 579966 - DNA, 120 bp, Artificial Sequence
  ENSG00000171843_31 (sequence is synthesized)
tataatacagccatgctccttgtaaattatttctctgaagcgtcctcccagaggacaagtgtactttctcaataatgttatgattcttaatgacgattggcatgaaccgtacttgaagca

SEQ ID NO: 579967 - DNA, 120 bp, Artificial Sequence
  ENSG00000171843_32 (sequence is synthesized)
tttgttgtattgtccacttcttgatgtgcagagaaactttgagtcattttggacattaggtgattgatgaattgtgtggtttcagttgcgttttgtttttaactttatagctggaagggg

SEQ ID NO: 579968 - DNA, 120 bp, Artificial Sequence
  ENSG00000171843_33 (sequence is synthesized)
agggtaatgtttatatggaaatgttgcaaatttttaaaatattttaaaatttctaactgctaacacatattctgatcaagccagaagtttatgtgatttaatatatctgtgtagtttaac

SEQ ID NO: 579969 - DNA, 120 bp, Artificial Sequence
  ENSG00000171843_34 (sequence is synthesized)
tagaaacgtatatatgtagtttgggccatttttatttctgtaactaaattgtggggcaaaaaatatgatttgccaatgtaaaaattttttcctttaagttactaaccaagaagctaggta

SEQ ID NO: 579970 - DNA, 120 bp, Artificial Sequence
  ENSG00000171843_35 (sequence is synthesized)
agataagaaatgaccaaacaaaaataatgataagaaggacagctattatatgataaactttagacttgaaaattaggtaataaagttaatttcttcagaatatcctaaaatgtaagtttg

SEQ ID NO: 579971 - DNA, 120 bp, Artificial Sequence
  ENSG00000171843_36 (sequence is synthesized)
taaattgataaagttcagaaaaacttatccatcttctactcatcaagatagcaaagtaagtttttcacaaaattaagactgagagttacgttattttttttgaagtggtaatcttgctct

SEQ ID NO: 579972 - DNA, 120 bp, Artificial Sequence
  ENSG00000171843_37 (sequence is synthesized)
catctaatttttaaatacagaaataaaaagatccctttgaattaatttcaagtagttttaatacctctcttaaagtaaccccttcagttctgtcacatttatatacacccaactttgaag

SEQ ID NO: 579973 - DNA, 120 bp, Artificial Sequence
  ENSG00000171843_38 (sequence is synthesized)
cctattaagaatatctttgacatgtgagtaccctaacagtggctctggtttcttaagcacaaagggaaaatggcagggtttaatttctttggtgtacatatataaatagatgtttcaaat

SEQ ID NO: 579974 - DNA, 120 bp, Artificial Sequence
  ENSG00000171843_39 (sequence is synthesized)
aaaattaattgggtaaatgtgaatatggtttgaaccagccagagtatgataaacttttaaaaaatttttcctcagtgatcagccaggggaaaaaatatatgtacagagctcctgcccctc

SEQ ID NO: 579975 - DNA, 120 bp, Artificial Sequence
  ENSG00000171843_40 (sequence is synthesized)
tgcccccttataacttagcttttgcctctggttttgcagcaggatgtgtgttggtgggtttggggttccttctgtcttcggatgtaacagtcatgttagcaacaatattttgcagttact

SEQ ID NO: 579976 - DNA, 120 bp, Artificial Sequence
  ENSG00000171843_41 (sequence is synthesized)
tcaccatcctcagcataatctgcctctctctcaatcttaatacagacaaataggtatgtctataaatgcgttcatatagtgtcaaggtagggaagactataaaaacttcagatcaggaaa

SEQ ID NO: 579977 - DNA, 120 bp, Artificial Sequence
  ENSG00000171843_42 (sequence is synthesized)
aaaatatctcttaagagagtgtcttaaacattttaaattgctaggcaatttaaatctctctaatctgaatattcaccttttggtggaaagagccagtaatattggttttcttccactaaa

SEQ ID NO: 579978 - DNA, 120 bp, Artificial Sequence
  ENSG00000171843_43 (sequence is synthesized)
tttttttttttttttttttttgccgatatcttttacaggcccacctaatctttaaaaaaaagagaagaaacaattttaggcctgtataacatcctatttactacttcaagctccacaaat

SEQ ID NO: 579979 - DNA, 120 bp, Artificial Sequence
  ENSG00000171843_44 (sequence is synthesized)
tttactacttcaagctccacaaatgtagttaatatatttgtttaagagagactttactcttaaatgttttaactttgcctacttaatggagttggatgtccagtgttggaaacagtcagt

SEQ ID NO: 579980 - DNA, 120 bp, Artificial Sequence
  ENSG00000171843_45 (sequence is synthesized)
gtctgtttggtggctcgtgtttatttttgtcactgtagaagtgatctgctctggagtaatttgctgtatgcttattactttccacctttagcgttttgtgtactaatgctatgtactgct

SEQ ID NO: 579981 - DNA, 120 bp, Artificial Sequence
  ENSG00000171843_46 (sequence is synthesized)
cctatatttatatatacatatatatatatatatacacatatatattatcagagtaatcttgctttggactgttgctctaaaactatgaatatgatgtagagactactacagctgcagtga

SEQ ID NO: 579982 - DNA, 120 bp, Artificial Sequence
  ENSG00000171843_47 (sequence is synthesized)
atgttaaggagtcaattcccatggtttagtttagtctcgggctggaagtctacatcttttgacctcttttgttttatatgatgctttttattatgtaggcactgccatccctgaatattc

SEQ ID NO: 579983 - DNA, 120 bp, Artificial Sequence
  ENSG00000171843_48 (sequence is synthesized)
cttgtaaagatgcagtgaagaagtcaatttaaaaggaagacaaagccaccgctgtctgtaaactgtaaatgtgtattttggcacttgtactccagtattctgaaaatagagttatgatgg

SEQ ID NO: 579984 - DNA, 120 bp, Artificial Sequence
  ENSG00000171843_49 (sequence is synthesized)
aaatgctgacagatccttaatggtggccagagctaccatgcagtgcaaaaataaattaagtgaaaatgtattattgagattaacagtgcaaggccaatacattttataaatctgtcagta

SEQ ID NO: 579985 - DNA, 120 bp, Artificial Sequence
  ENSG00000171843_50 (sequence is synthesized)
tctttttaatggactgtgtatgtgtagttatgttgaaagatacattgtgtatgtgtacatgcttttgtgtgaattcaaggcacactgtaagatgtatttcccttctctaaaatccatgtt

SEQ ID NO: 579986 - DNA, 120 bp, Artificial Sequence
  ENSG00000171843_51 (sequence is synthesized)
gaaatgtaagtacagattgatagaaataggtgttttacttaaactcatataatctgtttcagcaccttttttaaaatgtataattgtactgatttgctgagagtcatttgaccaaagttt

SEQ ID NO: 579987 - DNA, 120 bp, Artificial Sequence
  ENSG00000171843_52 (sequence is synthesized)
ggctttattttgcatacaggaaaaattagcccctagccttttctcaagaagtgatgctgtttctaaagaagaatagatggggagatctgagacatccagagagaggacaatgtgtccaaa

SEQ ID NO: 579988 - DNA, 120 bp, Artificial Sequence
  ENSG00000171843_53 (sequence is synthesized)
accagctgaaggcagagagtccatgcctcattcattttaggagtccctcatgtctaacaccatcttctgtgtcctaaagccagtatatatataatatttttaaaactctgcaaagattgg

SEQ ID NO: 579989 - DNA, 120 bp, Artificial Sequence
  ENSG00000171843_54 (sequence is synthesized)
aacaagaagtggtgggatacattttttggcataaactgggctatgtgtgcccggtattttttctttcccccctatttctttggagggttttgttcagaaacaatgtgctatagccagaga

SEQ ID NO: 579990 - DNA, 120 bp, Artificial Sequence
  ENSG00000171843_55 (sequence is synthesized)
gagtcgatcttacaaagtccctgcatttactttcacagcaagaactgctaccttgattagacaggaaggagaacaactactacaacaaagagaataaaatacattcagtttggtaaataa

SEQ ID NO: 579991 - DNA, 120 bp, Artificial Sequence
  ENSG00000171843_56 (sequence is synthesized)
tcttttcaagaagatcattcttaacagctctccattccttgctgacacacatgaacttaggggcacttctgttttcctgagggctacaccgttttcttttgaaagagtctgaacaaccca

SEQ ID NO: 579992 - DNA, 120 bp, Artificial Sequence
  ENSG00000171843_57 (sequence is synthesized)
tccttgctgacacacatgaacttaggggcacttctgttttcctgagggctacaccgttttcttttgaaagagtgtggatctggaccctcactaacttgtctgtaggaagagaaaattgaa

SEQ ID NO: 579993 - DNA, 120 bp, Artificial Sequence
  ENSG00000171843_58 (sequence is synthesized)
acaagccctgctgggataatcacagcaaaggtgtgaaacaccaaaaacggcagtagatggtcacattcatttgatgcagggtctccttggtatgcctacacacactttacagggaactgt

SEQ ID NO: 579994 - DNA, 120 bp, Artificial Sequence
  ENSG00000171843_59 (sequence is synthesized)
ttctcctttttctcagaaagaggcttttcctctaaaaatttttataggaaaaagtcacattagatgtccttgtccttggaaaagtatgccaagtggcaggactgactgttgaactaaagt

SEQ ID NO: 579995 - DNA, 120 bp, Artificial Sequence
  ENSG00000171843_60 (sequence is synthesized)
ctgttttcatttgaagagtttgtgttgatccactgctggagatagtctcagaatttgaagaaatgtgtttgctgtttgtagttagaaatacataattggctccagtgaattatgtgtgtg

SEQ ID NO: 579996 - DNA, 120 bp, Artificial Sequence
  ENSG00000171843_61 (sequence is synthesized)
acctaattaaaactaggatcacctgtgtgttttccagaaaataaattccttttaagtgtgctgacaattaagtgccttaagtagctttaatgctgtgaggcataattccatgttataaga

SEQ ID NO: 579997 - DNA, 120 bp, Artificial Sequence
  ENSG00000171843_62 (sequence is synthesized)
tggtaattcatgtcacttataattaatactcaacttgaaattgccctgaggattttatttctttatcatgaagaaaacaaataggcatgcttactttaatttgtcttgagtggaaaaaat

SEQ ID NO: 579998 - DNA, 120 bp, Artificial Sequence
  ENSG00000171843_63 (sequence is synthesized)
aaatacgaatctacttgaatttaaaatccaattacatttataatatattgcattaaatctttccctgttatccattactatgtagaagaccctaagattcaaaaaaaaaaaaaaaaaaaa

SEQ ID NO: 579999 - DNA, 120 bp, Artificial Sequence
  ENSG00000171843_64 (sequence is synthesized)
agaaggtgtgtgtgtttcttatagtggtcaaaattttgaaaggcacctttttagaatgtttgccgatttatgagaagaccaaatggcgttcataaagcatcattgaaagctctttctaca

SEQ ID NO: 580000 - DNA, 120 bp, Artificial Sequence
  ENSG00000171843_65 (sequence is synthesized)
tgaaacacagatggtcttcctctttaggattttcatatcctttgtatgtgagaagagagaaagaagttggacatccatggtttgtatgtctggctggtgtttgagggatcgatcacttat

SEQ ID NO: 580001 - DNA, 120 bp, Artificial Sequence
  ENSG00000171847_0 (sequence is synthesized)
atccgggcccttccagaagcaacccaggagccccgagacctgcagggatgtgtgcaccctgacccctgacgcatagccctgcacctgcagccagctggcctcgggcttgaaaacatggcg

SEQ ID NO: 580002 - DNA, 120 bp, Artificial Sequence
  ENSG00000171847_1 (sequence is synthesized)
ggtgcgctccaattcacggtggtttccaagcgcattctggaggagaaaacacatgagtgtgtggtcagggttctctgctgacagacctaccgtggggaagaaagagaagctctgaagatg

SEQ ID NO: 580003 - DNA, 120 bp, Artificial Sequence
  ENSG00000171847_2 (sequence is synthesized)
atggccgtgactgcatgtcaaggagaatctccatgatgacacggaggcctacgtcgagatagagtaaatatggtccaattaaaaggtgacccgacaatcaacccctgaaaaaggcggtca

SEQ ID NO: 580004 - DNA, 63 bp, Artificial Sequence
  ENSG00000171847_3 (sequence is synthesized)
aaaaggtgacccgacaatcgaccccaaacctggggcaaagagactggtgagagcccagaccct

SEQ ID NO: 580005 - DNA, 79 bp, Artificial Sequence
  ENSG00000171847_4 (sequence is synthesized)
gctggaaggcagccctggttccaccgaactttgggggttgaagcgaaccctgggcccttgaacaaggataagggagaga

SEQ ID NO: 580006 - DNA, 120 bp, Artificial Sequence
  ENSG00000171847_5 (sequence is synthesized)
acccgcagaggaaggctctcctccacatattttccaggaaacctccagagaagccgctgccaaatcaaaaaggatccacggaatcttctgattatctgagggttgcaagcgggccaatgc

SEQ ID NO: 580007 - DNA, 120 bp, Artificial Sequence
  ENSG00000171847_6 (sequence is synthesized)
ccacacaaccagtaagaggccgcgtgtggaccctgtcctctctgatcgctcagctaccgaaatgtctgacaggggctccgtcttagcttcactgtctcccctcagaaaagccagtctgag

SEQ ID NO: 580008 - DNA, 79 bp, Artificial Sequence
  ENSG00000171847_7 (sequence is synthesized)
aggggctgcggccgacatccctcagactgcagtcaggcaccagggccgcgggtggctgtcgagaagttccccaggctgc

SEQ ID NO: 580009 - DNA, 120 bp, Artificial Sequence
  ENSG00000171847_8 (sequence is synthesized)
gccagccgcaaccgaacttggaccacgtacgtcaccccagacaggcacgaggacacccgcccaggtgcttagcggcgaccggcagcctccgcacagcagaccttgcctgcctactgccca

SEQ ID NO: 580010 - DNA, 120 bp, Artificial Sequence
  ENSG00000171847_9 (sequence is synthesized)
gagccttcctcgctcagagccctcatgtctcagagaagtctgagggtccctgtgttcgtgtcccaccaagcgtcctctatgaggaccttcaggttccctcctcctcagaggacagcgatt

SEQ ID NO: 580011 - DNA, 63 bp, Artificial Sequence
  ENSG00000171847_10 (sequence is synthesized)
ccgttgaattctggtgagggacattgtagttcgcatggttctctggaaacgcgccaggaaaag

SEQ ID NO: 580012 - DNA, 120 bp, Artificial Sequence
  ENSG00000171847_11 (sequence is synthesized)
attctggtgagggacattgtagttcgcatggttctctggaaacgcgccaggaaaagcttccgtgccagtgattcgttgcctcagaaactgcatgacgcgcaggagtcagacttccgctgg

SEQ ID NO: 580013 - DNA, 85 bp, Artificial Sequence
  ENSG00000171847_12 (sequence is synthesized)
gcgcgctgtgcgtgggctctggaatccctttgtaaataggtgtgttgaatttgttttgaagtgaataaaattctcaaaaagatga

SEQ ID NO: 580014 - DNA, 120 bp, Artificial Sequence
  ENSG00000171847_13 (sequence is synthesized)
gcagcctggaaagcagaggtccctctctgccccttcctccgtcttcctggatgctgcatcgcttccagcggggctgctccagcacctgcccatctcagcgccagccggggaaagaaagta

SEQ ID NO: 580015 - DNA, 120 bp, Artificial Sequence
  ENSG00000171848_0 (sequence is synthesized)
gtgcaccctgtcccagccgtcctgtcctggctgctcgctctgcttcgctgcgcctccactatgctctccctccgtgtcccgctcgcgcccatcacggacccgcagcagctgcagctctcg

SEQ ID NO: 580016 - DNA, 120 bp, Artificial Sequence
  ENSG00000171848_1 (sequence is synthesized)
ccgctgaaggggctcagcttggtcgacaaggagaacacgccgccggccctgagcgggacccgcgtcctggccagcaagaccgcgaggaggatcttccaggagcccacggagccgaaaact

SEQ ID NO: 580017 - DNA, 120 bp, Artificial Sequence
  ENSG00000171848_2 (sequence is synthesized)
aaagcagctgcccccggcgtggaggatgagccgctgctgagagaaaacccccgccgctttgtcatcttccccatcgagtaccatgatatctggcagatgtataagaaggcagaggcttcc

SEQ ID NO: 580018 - DNA, 120 bp, Artificial Sequence
  ENSG00000171848_3 (sequence is synthesized)
ttttggaccgccgaggaggtggacctctccaaggacattcagcactgggaatccctgaaacccgaggagagatattttatatcccatgttctggctttctttgcagcaagcgatggcata

SEQ ID NO: 580019 - DNA, 120 bp, Artificial Sequence
  ENSG00000171848_4 (sequence is synthesized)
gtaaatgaaaacttggtggagcgatttagccaagaagttcagattacagaagcccgctgtttctatggcttccaaattgccatggaaaacatacattctgaaatgtatagtcttcttatt

SEQ ID NO: 580020 - DNA, 120 bp, Artificial Sequence
  ENSG00000171848_5 (sequence is synthesized)
gacacttacataaaagatcccaaagaaagggaatttctcttcaatgccattgaaacgatgccttgtgtcaagaagaaggcagactgggccttgcgctggattggggacaaagaggctacc

SEQ ID NO: 580021 - DNA, 120 bp, Artificial Sequence
  ENSG00000171848_6 (sequence is synthesized)
tatggtgaacgtgttgtagcctttgctgcagtggaaggcattttcttttccggttcttttgcgtcgatattctggctcaagaaacgaggactgatgcctggcctcacattttctaatgaa

SEQ ID NO: 580022 - DNA, 120 bp, Artificial Sequence
  ENSG00000171848_7 (sequence is synthesized)
cttattagcagagatgagggtttacactgtgattttgcttgcctgatgttcaaacacctggtacacaaaccatcggaggagagagtaagagaaataattatcaatgctgttcggatagaa

SEQ ID NO: 580023 - DNA, 120 bp, Artificial Sequence
  ENSG00000171848_8 (sequence is synthesized)
caggagttcctcactgaggccttgcctgtgaagctcattgggatgaattgcactctaatgaagcaatacattgagtttgtggcagacagacttatgctggaactgggttttagcaaggtt

SEQ ID NO: 580024 - DNA, 120 bp, Artificial Sequence
  ENSG00000171848_9 (sequence is synthesized)
ttcagagtagagaacccatttgactttatggagaatatttcactggaaggaaagactaacttctttgagaagagagtaggcgagtatcagaggatgggagtgatgtcaagtccaacagag

SEQ ID NO: 580025 - DNA, 120 bp, Artificial Sequence
  ENSG00000171848_10 (sequence is synthesized)
aattcttttaccttggatgctgacttctaaatgaactgaagatgtgcccttacttggctgattttttttttccatctcataagaaaaatcagctgaagtgttaccaactagccacaccat

SEQ ID NO: 580026 - DNA, 120 bp, Artificial Sequence
  ENSG00000171848_11 (sequence is synthesized)
gaattgtccgtaatgttcattaacagcatctttaaaactgtgtagctacctcacaaccagtcctgtctgtttatagtgctggtagtatcaccttttgccagaaggcctggctggctgtga

SEQ ID NO: 580027 - DNA, 120 bp, Artificial Sequence
  ENSG00000171848_12 (sequence is synthesized)
cttaccatagcagtgacaatggcagtcttggctttaaagtgaggggtgaccctttagtgagcttagcacagcgggattaaacagtcctttaaccagcacagccagttaaaagatgcagcc

SEQ ID NO: 580028 - DNA, 120 bp, Artificial Sequence
  ENSG00000171848_13 (sequence is synthesized)
ttttaatgtttacttaaatataaacctggcactttacaaacaaataaacattgtttgtactcacaaggcgataatagcttgatttatttggtttctacaccaaatacattctcctgacca

SEQ ID NO: 580029 - DNA, 120 bp, Artificial Sequence
  ENSG00000171848_14 (sequence is synthesized)
ctaatgggagccaattcacaattcactaagtgactaaagtaagttaaacttgtgtagactaagcatgtaatttttaagttttattttaatgaattaaaatatttgttaaccaactttaaa

SEQ ID NO: 580030 - DNA, 120 bp, Artificial Sequence
  ENSG00000171848_15 (sequence is synthesized)
gtcagtcctgtgtatacctagatattagtcagttggtgccagatagaagacaggttgtgtttttatcctgtggcttgtgtagtgtcctgggattctctgccccctctgagtagagtgttg

SEQ ID NO: 580031 - DNA, 120 bp, Artificial Sequence
  ENSG00000171848_16 (sequence is synthesized)
tgggataaaggaatctctcagggcaaggagcttcttaagttaaatcactagaaatttaggggtgatctgggccttcatatgtgtgagaagccgtttcattttatttctcactgtattttc

SEQ ID NO: 580032 - DNA, 120 bp, Artificial Sequence
  ENSG00000171848_17 (sequence is synthesized)
ctcaacgtctggttgatgagaaaaaattcttgaagagttttcatatgtgggagctaaggtagtattgtaaaatttcaagtcatccttaaacaaaatgatccacctaagatcttgcccctg

SEQ ID NO: 580033 - DNA, 120 bp, Artificial Sequence
  ENSG00000171848_18 (sequence is synthesized)
ttaagtggtgaaatcaactagaggtggttcctacaagttgttcattctagttttgtttggtgtaagtaggttgtgtgagttaattcatttatatttactatgtctgttaaatcagaaatt

SEQ ID NO: 580034 - DNA, 120 bp, Artificial Sequence
  ENSG00000171848_19 (sequence is synthesized)
ttttattatctatgttcttctagattttacctgtagttcatacttcagtcacccagtgtcttattctggcattgtctaaatctgagcattgtctagggggatcttaaactttagtaggaa

SEQ ID NO: 580035 - DNA, 120 bp, Artificial Sequence
  ENSG00000171848_20 (sequence is synthesized)
tctgagcattgtctagggggatcttaaactttagtaggaaaccatgagctgttaatacagtttccattcaaatattaatttcagaatgaaacataatttttttttttttttttgagatgg

SEQ ID NO: 580036 - DNA, 61 bp, Artificial Sequence
  ENSG00000171848_21 (sequence is synthesized)
taaacaaatattcttaatagggctactttgaattaatctgcctttatgtttgggagaagaa

SEQ ID NO: 580037 - DNA, 120 bp, Artificial Sequence
  ENSG00000171848_22 (sequence is synthesized)
gctactttgaattaatctgcctttatgtttgggagaagaaagctgagacattgcatgaaagatgatgagagataaatgttgatcttttggccccatttgttaattgtattcagtatttga

SEQ ID NO: 580038 - DNA, 120 bp, Artificial Sequence
  ENSG00000171848_23 (sequence is synthesized)
acgtcgtcctgtttattgttagttttcttcatcatttattgtatagacaatttttaaatctctgtaatatgatacattttcctatcttttaagttattgttacctaaagttaatccagat

SEQ ID NO: 580039 - DNA, 120 bp, Artificial Sequence
  ENSG00000171848_24 (sequence is synthesized)
tatatggtccttatatgtgtacaacattaaaatgaaaggctttgtcttgcattgtgaggtacaggcggaagttggaatcaggttttaggattctgtctctcattagctgaataatgtgag

SEQ ID NO: 580040 - DNA, 120 bp, Artificial Sequence
  ENSG00000171848_25 (sequence is synthesized)
gattaacttctgccagctcagaccatttcctaatcagttgaaagggaaacaagtatttcagtctcaaaattgaataatgcacaagtcttaagtgattaaaataaaactgttcttatgtca

SEQ ID NO: 580041 - DNA, 120 bp, Artificial Sequence
  ENSG00000171848_26 (sequence is synthesized)
ccggacctgggggcaggagggccacgccgagatgactcaggtttagcgcgggaggggaggatggcgacttcacccggcctttaacaacacgtacgcatctttcggcgtcttctacaatgg

SEQ ID NO: 580042 - DNA, 120 bp, Artificial Sequence
  ENSG00000171848_27 (sequence is synthesized)
cttggaggttcccgttggcaaggggggctaactgtggggcatagtaagtggtgccagcatacttaaagtttgagtgctcagtgtgagtcctgtaggctttactctcttccttttatgcta

SEQ ID NO: 580043 - DNA, 120 bp, Artificial Sequence
  ENSG00000171848_28 (sequence is synthesized)
tgagggagatggagaccaatcacccacccagtgtgcggggatgagaagctcgggaaggtctgaccagccttacgtcttgaaagggaatcccctgcttctgcgtgtcaggtgttactcggg

SEQ ID NO: 580044 - DNA, 120 bp, Artificial Sequence
  ENSG00000171848_29 (sequence is synthesized)
gtgcgccagtggaagcgggaggcagttgcagctttcagtccagaatgcctcctttctgcctaaacgcctctgatcttcatttgatcatcagcagctgcagacccatgagccactgggcct

SEQ ID NO: 580045 - DNA, 120 bp, Artificial Sequence
  ENSG00000171848_30 (sequence is synthesized)
ttcgcccagagctgcgtcccctccctgggaagcagcgctgagtcagggttacctggctccactgtgcccctagcgaggtgaaagttcgcacaatgacatgggctctctgttgaggataag

SEQ ID NO: 580046 - DNA, 120 bp, Artificial Sequence
  ENSG00000171848_31 (sequence is synthesized)
gaggctacagcccaaggagcttgtgcaccgcaggcagagccactcaggtcatcttccagagcgggatgtctgactccagagcccgccagcccacactgctctcctgaggactgggtttct

SEQ ID NO: 580047 - DNA, 120 bp, Artificial Sequence
  ENSG00000171848_32 (sequence is synthesized)
ctggcctgagtctgcctgagtctacaggaagaaccctgctggcaccccagtaagcccctctagaccttggagctctaactgctctcagagctcacttttcagttagcctgtaaggcaggg

SEQ ID NO: 580048 - DNA, 120 bp, Artificial Sequence
  ENSG00000171848_33 (sequence is synthesized)
gctctcagagctcacttttcagttagcctgtaaggcaggggtgtccaatcttttggcttcccttggccacattggaaggagaattggcttgtgtcacacataaaatacactaacactaac

SEQ ID NO: 580049 - DNA, 120 bp, Artificial Sequence
  ENSG00000171848_34 (sequence is synthesized)
cgctgattatgggaaattgaaatctgagttgagtatgagatgacaccaataaattataattttgttagataatagctttatcagccataaagtaatcaataaaaataccagtttcctgga

SEQ ID NO: 580050 - DNA, 120 bp, Artificial Sequence
  ENSG00000171848_35 (sequence is synthesized)
ccagccctcattgtgaagggagagccaccgtggtgctcacagcaagacacccagagtcccttccagacagggacacccctggagcgaccctgtttcagaatgaagttatctgggtgggaa

SEQ ID NO: 580051 - DNA, 120 bp, Artificial Sequence
  ENSG00000171848_36 (sequence is synthesized)
ctcaccaagaatgcacagagggcgctgggctccaagcttcagcatatcctttcactggactccacacaggcctgcggagcaggtggacccaccattctcagaccccccagggccccatag

SEQ ID NO: 580052 - DNA, 120 bp, Artificial Sequence
  ENSG00000171848_37 (sequence is synthesized)
ggcggcccctccccagggctgcctcccgcgcccctcggcccatttcccggttcgggcgtgcgctcctctgctgcgacccacggagtgcgacgggacagccacgttttcacatcgggcccc

SEQ ID NO: 580053 - DNA, 120 bp, Artificial Sequence
  ENSG00000171848_38 (sequence is synthesized)
agctacgctcactgacacgcatctcatgctgtgctaggatgttgtccccatgttagtgtgccctctccagggagactgccagccctcgtgggtgtgcatcttctgcttctgcatccttgg

SEQ ID NO: 580054 - DNA, 120 bp, Artificial Sequence
  ENSG00000171848_39 (sequence is synthesized)
tcactgccagcagaggtctgggcacatggtggtggacagtggctattaactgtggttgtgctggaatggaggaggcctggtgtctggtcttggagtcaagaatgcatgtgcttaaggatt

SEQ ID NO: 580055 - DNA, 120 bp, Artificial Sequence
  ENSG00000171848_40 (sequence is synthesized)
aacccctaactcccaatgtgatggtgtcaggaggtggagcctttgggaggtggttaggccgtgagggtggagacccatgctggggttggtgcccttatggttctcccatgtgaggacaca

SEQ ID NO: 580056 - DNA, 120 bp, Artificial Sequence
  ENSG00000171848_41 (sequence is synthesized)
gagggcagccatctacaagccaagaagagaggcctcaccagacaccaaacctgccggcaccttgctgtgagatttccagcccccagagctgtgagaaataaatttctgttgtttaaggca

SEQ ID NO: 580057 - DNA, 120 bp, Artificial Sequence
  ENSG00000171848_42 (sequence is synthesized)
ctcaatattttgttacagtagcccaagctgactgagcagatattcatatggaaagtgaattttgatctctacttcatgccgtacataaaagccaattccagattgactgtagatacagat

SEQ ID NO: 580058 - DNA, 120 bp, Artificial Sequence
  ENSG00000171848_43 (sequence is synthesized)
tggcaaagcaaaacagtacagtttctagaaagaaacaggaaaatatctgcatgaggtggtcaaatatttcctagagaggacacaaaaagcactaactacaaaataaacaatgataaattg

SEQ ID NO: 580059 - DNA, 120 bp, Artificial Sequence
  ENSG00000171848_44 (sequence is synthesized)
gactgcattaaaattaagaacatctgtttaacaaaagaccccacgaagagcgtgagaagccagagtgcagagtgggaggagaaatctgacctgagatgggaaattagaatatgaagaact

SEQ ID NO: 580060 - DNA, 120 bp, Artificial Sequence
  ENSG00000171848_45 (sequence is synthesized)
atatgaagaactccttcaagtcagcaagaagacaggcaagccgagaggaggacgggcaaacgacctcaacagacactttacagaagagatatccaggccaggtgcagtggctcatgcctg

SEQ ID NO: 580061 - DNA, 86 bp, Artificial Sequence
  ENSG00000171848_46 (sequence is synthesized)
ggaggctgaggccggtggatcacctgggatcaggagtccaagatcagcctggccaacatgtcgaagtgttggtggtgtgcacttgt

SEQ ID NO: 580062 - DNA, 120 bp, Artificial Sequence
  ENSG00000171848_47 (sequence is synthesized)
tacaaaaatttgctgggcttggtggtgtgcacttgtaatcccagctacatgggaagcggaggtgggagaatttcttgaacccgggaggcagactttgcagtgagctgagatcgtgccact

SEQ ID NO: 580063 - DNA, 120 bp, Artificial Sequence
  ENSG00000171848_48 (sequence is synthesized)
ggtgttactcggggtgcgccagtggaagcgggaggcagttgcagctttcagttagaacaacactggattggcaagagggagactgaggcgggaacccaggcagaggctgctgtgagtcca

SEQ ID NO: 580064 - DNA, 120 bp, Artificial Sequence
  ENSG00000171848_49 (sequence is synthesized)
gctaggatgagacgtgggtgccagacagtgggcctggggcagaccccagggactccgcagtgaagaccccacctcagtggtcctgggccccaggcctcaagagacttggggcagctccct

SEQ ID NO: 580065 - DNA, 120 bp, Artificial Sequence
  ENSG00000171848_50 (sequence is synthesized)
tttcataactccgtcactgtgtggtgtctgaaagccatttcattaaatgtcacatggaatcaaaatagaaattacatctctgggacaaagcccattgagccaggagccagggattctgaa

SEQ ID NO: 580066 - DNA, 120 bp, Artificial Sequence
  ENSG00000171848_51 (sequence is synthesized)
ttggaaccagaatagcctccgaagctgggactgtggatccaaggctgcccccaccccctgggtctcgctcacatctgcactccccagagggggcaggtggtcctggagcctagcctacct

SEQ ID NO: 580067 - DNA, 120 bp, Artificial Sequence
  ENSG00000171848_52 (sequence is synthesized)
gccgagagtcagaggtggctgcaggggaaccatggcagccctccttctcacactcatcctgggcaccctgcaccagcagaagggtttacatgtacaatcacccatccctagccccttctg

SEQ ID NO: 580068 - DNA, 120 bp, Artificial Sequence
  ENSG00000171848_53 (sequence is synthesized)
caaatttaaattctatgattcttcaaattgaacaatgatctggacttgaaataattttaaaggcaacaaatgtccctgctgtactggactatgttttactgtctgtagaccctgaagctc

SEQ ID NO: 580069 - DNA, 120 bp, Artificial Sequence
  ENSG00000171848_54 (sequence is synthesized)
aatatgaactacagaatacccaaacttgtattaatgtaaatcaagtgttgaggtttttaaaagaacactggagggaaaaactgaccagtaaaaataaaacatttcggtgtgagttcttcc

SEQ ID NO: 580070 - DNA, 120 bp, Artificial Sequence
  ENSG00000171848_55 (sequence is synthesized)
catttgacgttgacgatctgaggtcgaactagttcgctttcctcgtcttgtatgtttttccatgctgagtgcatctgtgtgtgtaagctgggttttatattacatggcatttcctgtttt

SEQ ID NO: 580071 - DNA, 120 bp, Artificial Sequence
  ENSG00000171848_56 (sequence is synthesized)
gtaacactttgcagttctttcttatggtattttcccgactctagagaagctgagacaatattaagtggtagcaatgtgatgactctttgtggccaccacatctgccccctcttttttttt

SEQ ID NO: 580072 - DNA, 120 bp, Artificial Sequence
  ENSG00000171848_57 (sequence is synthesized)
gggtgacctaaaccccaaacacaactcgggcatgctcttgtgttcactgacggggacctgagatgctagatggcatatatccacatttaatgtgtgagttcaaccatacacatacttgac

SEQ ID NO: 580073 - DNA, 86 bp, Artificial Sequence
  ENSG00000171848_58 (sequence is synthesized)
gatggggttttgtaagagttgaagaaagaagaaagaaacacgaaaagtggctcaacagtccaagacaggtttattttggagaataa

SEQ ID NO: 580074 - DNA, 120 bp, Artificial Sequence
  ENSG00000171848_59 (sequence is synthesized)
acctgagaggggcttctggccgattgctgtcaggagcactctctcttacagactaagggtatttaagggtttagggagggagagcttatcgcaggttgggaatgtttctggtcagaggag

SEQ ID NO: 580075 - DNA, 120 bp, Artificial Sequence
  ENSG00000171848_60 (sequence is synthesized)
tgggaatgtttctggtcagaggagtgtttgatttcggggtaggaatgtttctggttggagggcgctttatctcagggttggaatgtttctgattggaggtgtcatttgtggtttatggtc

SEQ ID NO: 580076 - DNA, 120 bp, Artificial Sequence
  ENSG00000171848_61 (sequence is synthesized)
atgctgacagccattaggctgattttttgggggctggatttaggcggtttttaatcaaggggaacttaaaatgctgctgtttgtccaaaatgttgatgctcctgctttgtcaatccagac

SEQ ID NO: 580077 - DNA, 120 bp, Artificial Sequence
  ENSG00000171848_62 (sequence is synthesized)
cctatagttataaaaggatgaggggcgacgtgctctttctggctacttcctgctgagagagggttgtcgttatgggacactgaacatggtgctggagtggaagaggtcgatttgttctgg

SEQ ID NO: 580078 - DNA, 120 bp, Artificial Sequence
  ENSG00000171848_63 (sequence is synthesized)
gtagcacactctgcctcagaggcccagaggcagcgcccactgaaacatctaattttcagctcacagggcttcaagaaagcacagcttaggttttagtgatctccagctagaaaaaaaaaa

SEQ ID NO: 580079 - DNA, 120 bp, Artificial Sequence
  ENSG00000171848_64 (sequence is synthesized)
ccgctgaaggggctcagcttggtcgacaaggagaacacggtgagcccgcggggagggcgctgcgggcaggggagggaggcagggaaagcgaagccgctcctcactcacacgcgtctcccc

SEQ ID NO: 580080 - DNA, 120 bp, Artificial Sequence
  ENSG00000171848_65 (sequence is synthesized)
gctcctcacgcaatcctaaacggttcccgggcgaaccggggcccgcgcgcgccaaggccgccgagaccctcaggggctgcggccctggtcccgcgggacctgtgggggcctgggcggcgg

SEQ ID NO: 580081 - DNA, 80 bp, Artificial Sequence
  ENSG00000171848_66 (sequence is synthesized)
gggaggtcccggggggcgtccacgggggtgtccccgggggtctccggaaggcgccggcggaggctcccgcgctgcgcttg

SEQ ID NO: 580082 - DNA, 120 bp, Artificial Sequence
  ENSG00000171848_67 (sequence is synthesized)
aaaatcgcgcgcggccccgcggccagcctgggtaggggcaaggcgcagccaatgggaagggtcggaggcatggcacagccaatgggaagggccggggcaccaaagccaatgggaagggcc

SEQ ID NO: 580083 - DNA, 120 bp, Artificial Sequence
  ENSG00000171853_0 (sequence is synthesized)
gcctcgggttcctgcatcgggcctgagcagaactaggcgcgccgcggcccggcacgcgcaggcgtacagagctccccgggggtgccagttcctctccgattcccggcttctgtcaccttc

SEQ ID NO: 580084 - DNA, 120 bp, Artificial Sequence
  ENSG00000171853_1 (sequence is synthesized)
ctcacggaccttggtcacggccgcaggtgaccccttagcccagctccagtgggcgggtggcagggtcatggaggacgctggcggcggcgaggagaccccggccccggaggccccgcaccc

SEQ ID NO: 580085 - DNA, 120 bp, Artificial Sequence
  ENSG00000171853_2 (sequence is synthesized)
ccctcagctcgcgcctccggaggagcaggggttgctcttccaggaggaaaccatcgatcttggcggagatgagtttggatccgaagagaacgagaccgcatcggaaggctcgagtcctct

SEQ ID NO: 580086 - DNA, 120 bp, Artificial Sequence
  ENSG00000171853_3 (sequence is synthesized)
cgcggacaagctgaacgaacacatgatggagagcgtcctcatctctgactcccccaacagcgagggcgacgcgggcgacctgggccgagtgcgggacgaagctgagcccggaggggaagg

SEQ ID NO: 580087 - DNA, 120 bp, Artificial Sequence
  ENSG00000171853_4 (sequence is synthesized)
cgaagctgagcccggaggggaaggcgacccaggcccggagcccgcgggcaccccgagtcccagcggcgaggccgacggcgactgtgcccccgaggacgcggcacccagtagcggaggggc

SEQ ID NO: 580088 - DNA, 120 bp, Artificial Sequence
  ENSG00000171853_5 (sequence is synthesized)
ggtcccaggcagcgaagccgcgcgcccggagcaggagcctcccgttgcggagccggtcccggtgtgcaccatcttcagccagcgcgcgcccccagcctccggggacggcttcgagccgca

SEQ ID NO: 580089 - DNA, 120 bp, Artificial Sequence
  ENSG00000171853_6 (sequence is synthesized)
gatggtgaagtcgcccagcttcggtggcgccagcgaggcctcggccaggacaccgccccaggtcgtgcagcccagccccagcctcagcacgttcttcggagacacggccgccagccactc

SEQ ID NO: 580090 - DNA, 120 bp, Artificial Sequence
  ENSG00000171853_7 (sequence is synthesized)
cttggcctcggacttcttcgactcctttactacctccgccttcatttccgtcagcaatcccggcgcgggctccccggcccccgccagcccgcctcccctcgctgtgcccgggaccgaggg

SEQ ID NO: 580091 - DNA, 120 bp, Artificial Sequence
  ENSG00000171853_8 (sequence is synthesized)
gcgccccgaacccgtggccatgcgagggccccaggcagctgcgcccccggcgtcgccagagcctttcgcgcacatccaggcagtgtttgcagggagtgacgacccctttgccaccgccct

SEQ ID NO: 580092 - DNA, 120 bp, Artificial Sequence
  ENSG00000171853_9 (sequence is synthesized)
gagcatgagcgagatggaccggaggaacgacgcctggcttcccggcgaggctacgcgtggagtcctgcgggccgtggccacccagcagcgcggcgccgtgttcgtggacaaggagaacct

SEQ ID NO: 580093 - DNA, 120 bp, Artificial Sequence
  ENSG00000171853_10 (sequence is synthesized)
cctaaatgccgactcagtggaacaatcttttgttggattgaaacagctaatcagctgcagaaactggagggcagcagtggacctgtgcggacgtctcctcacagcccacggccagggcta

SEQ ID NO: 580094 - DNA, 120 bp, Artificial Sequence
  ENSG00000171853_11 (sequence is synthesized)
cggcaagagcgggctgctcaccagccacacgacagattcactgcagctctggtttgtcaggctggcactactagtgaagttgggccttttccagaatgctgagatggaatttgaaccctt

SEQ ID NO: 580095 - DNA, 120 bp, Artificial Sequence
  ENSG00000171853_12 (sequence is synthesized)
cggaaatcttgatcagccagatctttattacgagtactacccgcacgtgtaccctgggcgcaggggctccatggtccccttctcgatgcgcatcttgcacgcggagcttcagcagtacct

SEQ ID NO: 580096 - DNA, 120 bp, Artificial Sequence
  ENSG00000171853_13 (sequence is synthesized)
ggggaacccacaggagtcgctggatagactgcacaaggtgaagactgtctgcagcaagatcctggccaatttggagcaaggcttagcagaagacggcggcatgagcagcgtgactcagga

SEQ ID NO: 580097 - DNA, 120 bp, Artificial Sequence
  ENSG00000171853_14 (sequence is synthesized)
gggcagacaagcctctatccggctgtggaggtcacgtctgggccgggtgatgtactccatggcaaactgtctgctcctgatgaaggattatgtgctggccgtggaggcgtatcattcggt

SEQ ID NO: 580098 - DNA, 120 bp, Artificial Sequence
  ENSG00000171853_15 (sequence is synthesized)
tatcaagtattacccagagcaagagccccagctgctcagcggcatcggccggatttccctgcagattggagacataaaaacagctgaaaagtattttcaagacgttgagaaagtaacaca

SEQ ID NO: 580099 - DNA, 120 bp, Artificial Sequence
  ENSG00000171853_16 (sequence is synthesized)
gaaattagatggactacagggtaaaatcatggttttgatgaacagcgcgttccttcacctcgggcagaataactttgcagaagcccacaggttcttcacagagatcttaaggatggatcc

SEQ ID NO: 580100 - DNA, 120 bp, Artificial Sequence
  ENSG00000171853_17 (sequence is synthesized)
aagaaacgcagtggccaacaacaacgctgccgtgtgtctgctctacctgggcaagctcaaggactccctgcggcagctggaggccatggtccagcaggaccccaggcactacctgcacga

SEQ ID NO: 580101 - DNA, 120 bp, Artificial Sequence
  ENSG00000171853_18 (sequence is synthesized)
gagcgtgctcttcaacctgaccaccatgtacgagctggagtcctcacggagcatgcagaagaaacaggccctgctggaggctgtcgccggcaaggagggggacagcttcaacacacagtg

SEQ ID NO: 580102 - DNA, 120 bp, Artificial Sequence
  ENSG00000171853_19 (sequence is synthesized)
cctcaagctggcctagctgcctccaacacactacgtcagaaggacccgggtctttgaaactgtgtcttgaagctaatgtattaatgtgacatggaggaactcaataaaactcctgcttca

SEQ ID NO: 580103 - DNA, 120 bp, Artificial Sequence
  ENSG00000171853_20 (sequence is synthesized)
cacgtcccaaacctgggccagggaaaggaggcacgagcaagggatggctgagcggggagaagcagcacagaccttccacaggcacccactcacgcgcgttccttcacctcgggcagaata

SEQ ID NO: 580104 - DNA, 76 bp, Artificial Sequence
  ENSG00000171853_21 (sequence is synthesized)
gcggagcttcagcagtacctggggaacccacaggagtcgctggatagactgcacaaggtgaagactgtctgcagca

SEQ ID NO: 580105 - DNA, 120 bp, Artificial Sequence
  ENSG00000171853_22 (sequence is synthesized)
tttgcaactcactcctttcttggggaagccaagcacatcactgggtgatgctgtgggtgcaacgtgcagcctcagacccgaaccctgcgcccggggagaagacacgccttcaccacaaaa

SEQ ID NO: 580106 - DNA, 120 bp, Artificial Sequence
  ENSG00000171853_23 (sequence is synthesized)
gcacacggcccggaacctgccacgctgagtggtctgagtgggcgcgaggaaggagcccagcccagccgaaggggcccagaggggcctctgcgtcggggagagaggcctctgcgtcgggga

SEQ ID NO: 580107 - DNA, 120 bp, Artificial Sequence
  ENSG00000171853_24 (sequence is synthesized)
cagaggcctctgcgtcggggacagaggctcgggagggtgcttcaggaggagctggagaggaaggcccagagcctggggcaggctgagggacctgggcagttccctggagcattggaaacc

SEQ ID NO: 580108 - DNA, 120 bp, Artificial Sequence
  ENSG00000171853_25 (sequence is synthesized)
ctctgctaagatggagcctctgtttctgcatttatgcatcattggggtgggaaactctgtttccttttttctagacctttctcttcctgctgcccttctgaaggacctcattcccccttc

SEQ ID NO: 580109 - DNA, 120 bp, Artificial Sequence
  ENSG00000171853_26 (sequence is synthesized)
tcccctcattggccgtgatagtccacagggaacgtcagccccagcgcagcttgtgctgagaccaccatggccctgtggtgcgggtcttctctcaggccttgcgtgctcactacagaggtc

SEQ ID NO: 580110 - DNA, 120 bp, Artificial Sequence
  ENSG00000171853_27 (sequence is synthesized)
tggggtgtttctgcagggttttctcctccactcagcacgtggagagatcgcccatggcatggagagatggcccagacccacagagacctcgccgcatagaggatttgcccagacccctag

SEQ ID NO: 580111 - DNA, 120 bp, Artificial Sequence
  ENSG00000171853_28 (sequence is synthesized)
accccgccacgtgaggaggtcacccaggcccgtagggctcccgtggtgtgcggaggcgcagaacaagctcaggagtctgctgacctggtgcgccacaccccggggaccgccagtgggcgt

SEQ ID NO: 580112 - DNA, 120 bp, Artificial Sequence
  ENSG00000171853_29 (sequence is synthesized)
gttcgaggctccgctgaccagggcgctgtcaggtctggttcgggcagcggctttgcctctgtgataggtgtcccgtccctctttcttcctgtgctccctctacactagcctaagggaagt

SEQ ID NO: 580113 - DNA, 120 bp, Artificial Sequence
  ENSG00000171853_30 (sequence is synthesized)
cagtttcctttttttaataaattttaatttttgtagatacatagtaggtgtttatgggttataggagatattttgatacaggcaggcaatgcgtaataatcccatcagggtaaatggagt

SEQ ID NO: 580114 - DNA, 120 bp, Artificial Sequence
  ENSG00000171853_31 (sequence is synthesized)
atccatcccctcaagcattgatcctttgtgttgcaacaatccaattatgctcccttagttatttttttaacgtacacttaaattactgtagtcacccttgtactagcaaacactaggtct

SEQ ID NO: 580115 - DNA, 120 bp, Artificial Sequence
  ENSG00000171853_32 (sequence is synthesized)
tatttgttctattttttttttgtacccattaccatccccactccatcccccactactgttcccagcctctggtaaccatcctcctgctctccatctccatgagttcagttgtttaaagtt

SEQ ID NO: 580116 - DNA, 120 bp, Artificial Sequence
  ENSG00000171853_33 (sequence is synthesized)
tagctcccacagataagtgagaacatacgatgtttgtctttctgtgcctggcgtatgtcacttaacacagtgacctccagttccatccatgctgttgtaaatgacaggataccattcttt

SEQ ID NO: 580117 - DNA, 120 bp, Artificial Sequence
  ENSG00000171853_34 (sequence is synthesized)
tttatggccgaagagtactccatcgtgtatatatggcaattcctttatccccttgtctgctgatggacacttaggttgcttccaagtcttggctgttgtgaacagtgctgcagcacacac

SEQ ID NO: 580118 - DNA, 120 bp, Artificial Sequence
  ENSG00000171853_35 (sequence is synthesized)
gggtgtgcagtgatctctgatagactgatttcctttcttttctttggagtatatatctaggcatggattgctgcgttgtatggtagctctattttttgtttttttgtagaaacctcaaac

SEQ ID NO: 580119 - DNA, 120 bp, Artificial Sequence
  ENSG00000171853_36 (sequence is synthesized)
tgttctccctagtggttgcactgatgtacattcccaccaactgtggacaaggggtgagggaagttaatttcatggtaacaccaagcctttcctttttgtcagtttctgttcttatgatca

SEQ ID NO: 580120 - DNA, 120 bp, Artificial Sequence
  ENSG00000171853_37 (sequence is synthesized)
ttcattagaaggcagattcactgaagaatgtcgttttacctagtttaaactggctagattcttttcaaggttacaattttgaaccccaccttgtcccctgagtcatcgaggtagcccaag

SEQ ID NO: 580121 - DNA, 120 bp, Artificial Sequence
  ENSG00000171853_38 (sequence is synthesized)
ataacggttaagaggaaacatcctttgtgttggcagcaaattgttctccagtttctgttaagtagtgtcccttgcaggtgaggagaggctgctttcatcctcagcaggtagagaccgggg

SEQ ID NO: 580122 - DNA, 120 bp, Artificial Sequence
  ENSG00000171853_39 (sequence is synthesized)
gtggggagtgttaactggcaagacgatctaaattctctacccagatcacagcggctacagcagctttgctttcagagaagaaaacacaaaaaaaagtgcccaaaagttaaaaagcaagtg

SEQ ID NO: 580123 - DNA, 120 bp, Artificial Sequence
  ENSG00000171853_40 (sequence is synthesized)
gtaaaaccgggaagcgacacgttgcacaaaacgtatttggtacgttaaaaaggccagaagcacggtgccctgtaggaatgagactgacatcttcacaaaaggtcatcatcagtctcatgt

SEQ ID NO: 580124 - DNA, 90 bp, Artificial Sequence
  ENSG00000171853_41 (sequence is synthesized)
agactgacatcttcacaaaaggtcatcatcagtctcatgtgacattctccatgctttttttttaaagacagggtctcatagtccctggtc

SEQ ID NO: 580125 - DNA, 120 bp, Artificial Sequence
  ENSG00000171853_42 (sequence is synthesized)
aagtgacccacctgcctcggcctcccaaggtgttgggattacaggcttgagccaccgctcaatcccagaagtgttgggattacaggcttgatgcttttcttaaaaaacatattccccatg

SEQ ID NO: 580126 - DNA, 120 bp, Artificial Sequence
  ENSG00000171853_43 (sequence is synthesized)
tatgatgtctgcagatacttcaagaacatcataaacaccactttcaccatcagctgggagcagagtccctccccattcactgtcgccccacgccatagggacttggtgatgtttacagtg

SEQ ID NO: 580127 - DNA, 120 bp, Artificial Sequence
  ENSG00000171853_44 (sequence is synthesized)
agtgtgtccctgtgggcgaacgggataaggaaaagatggtgcacatacactgtggaatactacgcagccgtaaaaaaagaaccaaatcatgttgtttgcagcaacatggatacagctgga

SEQ ID NO: 580128 - DNA, 120 bp, Artificial Sequence
  ENSG00000171853_45 (sequence is synthesized)
ctctggggtcgagagagcttcacagaccatttgggaaagagccaagcaaacacacttctgcaagccatttgcataagtagacataatccatacggaatgatgcactgttcggttgtagtt

SEQ ID NO: 580129 - DNA, 120 bp, Artificial Sequence
  ENSG00000171853_46 (sequence is synthesized)
cagttccgcagcctccggcttccccacctcagcttggctgagagtttcacgttcatccaagtgcttctttacagactcactcccagctggaggaggcagaggatcctggccaatttggag

SEQ ID NO: 580130 - DNA, 120 bp, Artificial Sequence
  ENSG00000171853_47 (sequence is synthesized)
gagatcaggaaccccgggccacacagggccatacgctgggtctctgtgggatccaaagcccctgtgggttgtgttgggggacagcagctcctgggctttccccgctaactgccaccgttg

SEQ ID NO: 580131 - DNA, 120 bp, Artificial Sequence
  ENSG00000171853_48 (sequence is synthesized)
attgctgtcttggtacctgcactccgcggagtcctgagttcttgtcctgcctccaagaagaacgagattatgccgacaaccagagtggagatgcagttaaagacttgatgcttcgctttc

SEQ ID NO: 580132 - DNA, 120 bp, Artificial Sequence
  ENSG00000171853_49 (sequence is synthesized)
cagctttgctccttttctcagggttctggctttggaaacggggcccccggtcggaccatttggccttgtgtctgggctgatgctgagcagccaccctcctggttctctgatgccgagggt

SEQ ID NO: 580133 - DNA, 120 bp, Artificial Sequence
  ENSG00000171853_50 (sequence is synthesized)
ctcttcccaaagccacctctggtcccaatgcgagtgctgtattttctgcctcagtgcagcctgcagcatattcagcattccaggccgaaatccagtggtgttaacaagagggatctttta

SEQ ID NO: 580134 - DNA, 120 bp, Artificial Sequence
  ENSG00000171853_51 (sequence is synthesized)
gagttggaaagctccctagagaaggcgcttctccctgtatctcctcttgccctgtgtctctcagagcggagacccaaggagtatacaggtgttttcttgaatcgcagtgatgttctttta

SEQ ID NO: 580135 - DNA, 120 bp, Artificial Sequence
  ENSG00000171853_52 (sequence is synthesized)
gtcacagaagctgatttttaaggagctattcccccttgttcttcagagaagcgcttgtattgcccccgttttcagcgtatgtgtgtgtaaaggtcaccattgctggcgtagcggccgttc

SEQ ID NO: 580136 - DNA, 120 bp, Artificial Sequence
  ENSG00000171853_53 (sequence is synthesized)
ccggcactgtgtgctcagccatgaggactgggaagagtcctgcccacagctcaagtgtctacaccgcactgccatccaggctgtgagccgctgctgagcatggggaatgtggctgctgca

SEQ ID NO: 580137 - DNA, 120 bp, Artificial Sequence
  ENSG00000171853_54 (sequence is synthesized)
tgcagagacgttatgaaacacttctaaaagaatgtaaaagatctcattaataattttgagtacctgttaaaatgatagtaattttggatctagtagattaaataaaacatattattaaaa

SEQ ID NO: 580138 - DNA, 120 bp, Artificial Sequence
  ENSG00000171853_55 (sequence is synthesized)
tagctcaacagagaccttcaaatagaaaaagaagagactgacttctggctgccagcctgagccgtggagtgtgctggctacagtcagggaaagagtggggagagcgtcctccagcccctg

SEQ ID NO: 580139 - DNA, 120 bp, Artificial Sequence
  ENSG00000171853_56 (sequence is synthesized)
aagagacaagtcctaaatgccgactcagtggaacaatcttttgttggattgaaacagctaatccgttgacaaatggcatgcccctccgtgccgtcagcacactgacgttgtcaccattac

SEQ ID NO: 580140 - DNA, 120 bp, Artificial Sequence
  ENSG00000171853_57 (sequence is synthesized)
atgccgggcctcaggttcgacaacatccaggtgagcccgggtctcccacctccgcagcccgtgcctcctctctgcgtctgtgagatacgcacagtgcccctttagggatggagaaggaga

SEQ ID NO: 580141 - DNA, 120 bp, Artificial Sequence
  ENSG00000171853_58 (sequence is synthesized)
aggccttgttttcagtaattcctaacatcccattgtgagcgcctgtgttcctctgtccctgggtaattagggatctgttggtttccccaacagaacatatttaatggactgctactcaga

SEQ ID NO: 580142 - DNA, 120 bp, Artificial Sequence
  ENSG00000171853_59 (sequence is synthesized)
gaggtagaaataaataccaccaaggcagacagttctaccgtaattctctcagtcagttctccatgtcctgtaatccatttgacatttgaactccagttaataataaatccatttctttct

SEQ ID NO: 580143 - DNA, 120 bp, Artificial Sequence
  ENSG00000171853_60 (sequence is synthesized)
atgtactccatggcaaactgtctgctcctgatgaagctcgccagtatgcacatcagaacccgccgtggctccgcacatgatggaaaggagcacgcagctgcatcagctaccttccgtctt

SEQ ID NO: 580144 - DNA, 120 bp, Artificial Sequence
  ENSG00000171853_61 (sequence is synthesized)
gctgaaattagactgcagaagtccttgctggttgcagaatggttgtaaatctagtttcacggcctgtaaacacgtgtggctgctgaaaagaaatggtgaagattgagctaaaatagactt

SEQ ID NO: 580145 - DNA, 120 bp, Artificial Sequence
  ENSG00000171853_62 (sequence is synthesized)
caggtagccccaccctagcctcactccctcactccttgtggcagcatctccccacaggcctggtggcctggtcatctcctccttcccacagcttctgtcctactcgatgtgcagcccaag

SEQ ID NO: 580146 - DNA, 120 bp, Artificial Sequence
  ENSG00000171853_63 (sequence is synthesized)
actgcattgccatctgcacatacagaaaacccagccccagtaagttccggcttgggcaggtcagtgtgttgtctgaagatgctggatctgggaagaaggatgaagcaggcaggttttgcc

SEQ ID NO: 580147 - DNA, 120 bp, Artificial Sequence
  ENSG00000171853_64 (sequence is synthesized)
cttgaagaacacagccatttgtgggagtcaaggcccgagagcaccgttgtgatcagcaagaacgaccacatatcagcccagtggatgcccgagcacacagcagacccccacccagttctg

SEQ ID NO: 580148 - DNA, 120 bp, Artificial Sequence
  ENSG00000171853_65 (sequence is synthesized)
aaacactcctgggtgcacctggacccgccctctccagacctctcctgtgttgggacctctcctcatctccgctgggttcagcagagggttgcagaggcgggaccctgtgtgtacacgtgg

SEQ ID NO: 580149 - DNA, 120 bp, Artificial Sequence
  ENSG00000171853_66 (sequence is synthesized)
tgctgagctgccagagatctcagcacgtccctcgtcccccgtcctgcgcgtagctgccattagccttccgggagtacactccaccctgccgtctctggtcagaggtcctgctagggcctt

SEQ ID NO: 580150 - DNA, 120 bp, Artificial Sequence
  ENSG00000171853_67 (sequence is synthesized)
ccctgcaggtacctgtgcacggtcagacatgagccagaaaggccttatgatagttctttgctcagatgggcgactgtttgcttttaatcattttaatataagaaagactgcagaaaatat

SEQ ID NO: 580151 - DNA, 120 bp, Artificial Sequence
  ENSG00000171853_68 (sequence is synthesized)
attttatgattgatgcttacaacacctgaagacaggcttccccacaagaccttcttaggacgtcaccccagagctctcagcccgcagggaaacagcttagaaatcaaggagctgaactga

SEQ ID NO: 580152 - DNA, 120 bp, Artificial Sequence
  ENSG00000171853_69 (sequence is synthesized)
ggctgtcatctgtttttccgtgtctcctggctctcgccagcctgtgcaacggtgttttttggctcctctctttgtttggaacgcaccccacacctggctcacctcccacactgggcatca

SEQ ID NO: 580153 - DNA, 120 bp, Artificial Sequence
  ENSG00000171855_0 (sequence is synthesized)
attctaactgcaacctttcgaagcctttgctctggcacaacaggtagtaggcgacactgttcgtgttgtcaacatgaccaacaagtgtctcctccaaattgctctcctgttgtgcttctc

SEQ ID NO: 580154 - DNA, 120 bp, Artificial Sequence
  ENSG00000171855_1 (sequence is synthesized)
cactacagctctttccatgagctacaacttgcttggattcctacaaagaagcagcaattttcagtgtcagaagctcctgtggcaattgaatgggaggcttgaatactgcctcaaggacag

SEQ ID NO: 580155 - DNA, 120 bp, Artificial Sequence
  ENSG00000171855_2 (sequence is synthesized)
gatgaactttgacatccctgaggagattaagcagctgcagcagttccagaaggaggacgccgcattgaccatctatgagatgctccagaacatctttgctattttcagacaagattcatc

SEQ ID NO: 580156 - DNA, 120 bp, Artificial Sequence
  ENSG00000171855_3 (sequence is synthesized)
aactcatgagcagtctgcacctgaaaagatattatgggaggattctgcattacctgaaggccaaggagtacagtcactgtgcctggaccatagtcagagtggaaatcctaaggaactttt

SEQ ID NO: 580157 - DNA, 120 bp, Artificial Sequence
  ENSG00000171855_4 (sequence is synthesized)
acttcattaacagacttacaggttacctccgaaactgaagatctcctagcctgtgcctctgggactggacaattgcttcaagcattcttcaaccagcagatgctgtttaagtgactgatg

SEQ ID NO: 580158 - DNA, 120 bp, Artificial Sequence
  ENSG00000171855_5 (sequence is synthesized)
gatggctaatgtactgcatatgaaaggacactagaagattttgaaatttttattaaattatgagttatttttatttatttaaattttattttggaaaataaattatttttggtgcaaaag

SEQ ID NO: 580159 - DNA, 120 bp, Artificial Sequence
  ENSG00000171858_0 (sequence is synthesized)
cctttctctctcgcgcgcggtgtggtggcagcaggcgcagcccagcctcgaaatgcagaacgacgccggcgagttcgtggacctgtacgtgccgcggaaatgctccgctagcaatcgcat

SEQ ID NO: 580160 - DNA, 120 bp, Artificial Sequence
  ENSG00000171858_1 (sequence is synthesized)
ggtgagtcagatgattccattctccgattggccaaggccgatggcatcgtctcaaagaacttttgactggagagaatcacagatgtggaatatttgtcataaataaataatgaaaaccta

SEQ ID NO: 580161 - DNA, 120 bp, Artificial Sequence
  ENSG00000171858_2 (sequence is synthesized)
ggactaggactgctccagaggcgtggtcttaacgttgtccttttcccctggttctaggaacttttgactggagagaatcacagatgtggaatatttgtcataaataaataatgaaaacct

SEQ ID NO: 580162 - DNA, 120 bp, Artificial Sequence
  ENSG00000171858_3 (sequence is synthesized)
tttaaaacttatgctatctgcggggccattcgtaggatggtgagtgtttccctgggctttgctcatcacttcgggacatcgtggactttaccgtgcgcattggagtgtgtgatggtgcct

SEQ ID NO: 580163 - DNA, 120 bp, Artificial Sequence
  ENSG00000171858_4 (sequence is synthesized)
gagtagatctgctggcagagtagtttgagccagctggactgggctggccgcctgccgcttcttgagggtggaagaggggtgctctgagaagacactcaggcagcagactctgcctctcac

SEQ ID NO: 580164 - DNA, 120 bp, Artificial Sequence
  ENSG00000171858_5 (sequence is synthesized)
aaggaccacgcatccatccagatgaacgtggccgaggtgagctgggagcccgggaggcgggaaggttgtgatatatgtgcgggaaaggcaggctgtcccattgtggaggagcccctgggg

SEQ ID NO: 580165 - DNA, 120 bp, Artificial Sequence
  ENSG00000171858_6 (sequence is synthesized)
gctgccccgggagaggtggctccccttctgcgcctgtctccattcgctcagcgggggagagacgtgggctggtggcacagctgaccttctgccatctcaggcagccggagtggaaatatt

SEQ ID NO: 580166 - DNA, 120 bp, Artificial Sequence
  ENSG00000171860_0 (sequence is synthesized)
actgtggctaagtgtggggaccagacaggactcgtggagacatccaggtgctgaagccttcagctactgtctcagttttttgaagtttagcaatggcgtctttctctgctgagaccaatt

SEQ ID NO: 580167 - DNA, 120 bp, Artificial Sequence
  ENSG00000171860_1 (sequence is synthesized)
caactgacctactctcacagccatggaatgagcccccagtaattctctccatggtcattctcagccttacttttttactgggattgccaggcaatgggctggtgctgtgggtggctggcc

SEQ ID NO: 580168 - DNA, 120 bp, Artificial Sequence
  ENSG00000171860_2 (sequence is synthesized)
tgaagatgcagcggacagtgaacacaatttggttcctccacctcaccttggcggacctcctctgctgcctctccttgcccttctcgctggctcacttggctctccagggacagtggccct

SEQ ID NO: 580169 - DNA, 120 bp, Artificial Sequence
  ENSG00000171860_3 (sequence is synthesized)
acggcaggttcctatgcaagctcatcccctccatcattgtcctcaacatgtttgccagtgtcttcctgcttactgccattagcctggatcgctgtcttgtggtattcaagccaatctggt

SEQ ID NO: 580170 - DNA, 120 bp, Artificial Sequence
  ENSG00000171860_4 (sequence is synthesized)
gtcagaatcatcgcaatgtagggatggcctgctctatctgtggatgtatctgggtggtggcttttgtgatgtgcattcctgtgttcgtgtaccgggaaatcttcactacagacaaccata

SEQ ID NO: 580171 - DNA, 120 bp, Artificial Sequence
  ENSG00000171860_5 (sequence is synthesized)
atagatgtggctacaaatttggtctctccagctcattagattatccagacttttatggagatccactagaaaacaggtctcttgaaaacattgttcagccgcctggagaaatgaatgata

SEQ ID NO: 580172 - DNA, 120 bp, Artificial Sequence
  ENSG00000171860_6 (sequence is synthesized)
ggttagatccttcctctttccaaacaaatgatcatccttggacagtccccactgtcttccaacctcaaacatttcaaagaccttctgcagattcactccctaggggttctgctaggttaa

SEQ ID NO: 580173 - DNA, 120 bp, Artificial Sequence
  ENSG00000171860_7 (sequence is synthesized)
caagtcaaaatctgtattctaatgtatttaaacctgctgatgtggtctcacctaaaatccccagtgggtttcctattgaagatcacgaaaccagcccactggataactctgatgcttttc

SEQ ID NO: 580174 - DNA, 120 bp, Artificial Sequence
  ENSG00000171860_8 (sequence is synthesized)
tctctactcatttaaagctgttccctagcgcttctagcaattccttctacgagtctgagctaccacaaggtttccaggattattacaatttaggccaattcacagatgacgatcaagtgc

SEQ ID NO: 580175 - DNA, 120 bp, Artificial Sequence
  ENSG00000171860_9 (sequence is synthesized)
caacacccctcgtggcaataacgatcactaggctagtggtgggtttcctgctgccctctgttatcatgatagcctgttacagcttcattgtcttccgaatgcaaaggggccgcttcgcca

SEQ ID NO: 580176 - DNA, 120 bp, Artificial Sequence
  ENSG00000171860_10 (sequence is synthesized)
agtctcagagcaaaacctttcgagtggccgtggtggtggtggctgtctttcttgtctgctggactccataccacatttttggagtcctgtcattgcttactgacccagaaactcccttgg

SEQ ID NO: 580177 - DNA, 120 bp, Artificial Sequence
  ENSG00000171860_11 (sequence is synthesized)
ggaaaactctgatgtcctgggatcatgtatgcattgctctagcatctgccaatagttgctttaatcccttcctttatgccctcttggggaaagattttaggaagaaagcaaggcagtcca

SEQ ID NO: 580178 - DNA, 120 bp, Artificial Sequence
  ENSG00000171860_12 (sequence is synthesized)
ttcagggaattctggaggcagccttcagtgaggagctcacacgttccacccactgtccctcaaacaatgtcatttcagaaagaaatagtacaactgtgtgaaaatgtggagcagccaaca

SEQ ID NO: 580179 - DNA, 120 bp, Artificial Sequence
  ENSG00000171860_13 (sequence is synthesized)
agcaggggctcttaggcaatcacatagtgaaagtttataagaggatgaagtgatatggtgagcagcggacttcaaaaactgtcaaagaatcaatccagcggttctcaaacggtacacaga

SEQ ID NO: 580180 - DNA, 120 bp, Artificial Sequence
  ENSG00000171860_14 (sequence is synthesized)
ggaatctctgggggttgggacccagcaagggcacttaacaaaccctcgtttctgattaatgctaaatgtaagaatcattgtaaacattagttctatttctatcccaaactaagctatgtg

SEQ ID NO: 580181 - DNA, 120 bp, Artificial Sequence
  ENSG00000171860_15 (sequence is synthesized)
aaataagagaagctactttgtttttaaatgatgttgaatatttgtcgatatttccatcattaaatttttccttagcattgtctaagtcttccagattccatttaaaaccatttcttgttc

SEQ ID NO: 580182 - DNA, 120 bp, Artificial Sequence
  ENSG00000171860_16 (sequence is synthesized)
tcctacgtgagtgaaagatgatcatatatcctaatgctttgttgtcgtgtggtgttgatggttttaaacgaaaagaaagtgcaaaaagaaaatgcctgtgaagacaagaagccatgagac

SEQ ID NO: 580183 - DNA, 120 bp, Artificial Sequence
  ENSG00000171860_17 (sequence is synthesized)
tgagtctggagcatagggttatgcaatgatgcctgtccctgggaacacccctgggtacaggatatagaaatttccactattacatagagtttccactattacaactaaataagcatctat

SEQ ID NO: 580184 - DNA, 120 bp, Artificial Sequence
  ENSG00000171860_18 (sequence is synthesized)
tgtgtgaaaactgactcatgaaatgttatgaaagctgtggtttggggagttctgtttcttctaactgcctaccggttgggcacctattttccactcctcttcctaagctccttaatttcc

SEQ ID NO: 580185 - DNA, 120 bp, Artificial Sequence
  ENSG00000171860_19 (sequence is synthesized)
ttattactccccagcctccaaatcttccacatcagactttgtgcctcaaacaacctctaatttcgtaagattctagttactcccttcctcttgctccaaatgaatactttctaagaaagt

SEQ ID NO: 580186 - DNA, 120 bp, Artificial Sequence
  ENSG00000171860_20 (sequence is synthesized)
atttcaagtggaaggagaaagagggtggaggatggagcagcaattcttctactctctgcaactgagtaccctaccaggcttgccatcacattttaaaacatgacgacaggcaacttacat

SEQ ID NO: 580187 - DNA, 120 bp, Artificial Sequence
  ENSG00000171860_21 (sequence is synthesized)
gccaaaattaccaaatatatcttctgggttttttaaatccttttctttgccaaagtaatacatgcacatagttttaaaataatttaataaggtatataatgaaatatgaggtctcctacc

SEQ ID NO: 580188 - DNA, 120 bp, Artificial Sequence
  ENSG00000171860_22 (sequence is synthesized)
tcactgtgcccaaaagttccctcctcccactctcatttcccagagataatccttgcacaattttagatgtttcctttgataattatcatgatgtttctaaatcatgtgcttatgctgctc

SEQ ID NO: 580189 - DNA, 120 bp, Artificial Sequence
  ENSG00000171860_23 (sequence is synthesized)
ttttctggaggcatgataaaacgacttcttgttttgaaagatgaagatgtttatccaagcaccccatatttttaatttgtttatccagcatcccaacattcattaataaccatattttaa

SEQ ID NO: 580190 - DNA, 120 bp, Artificial Sequence
  ENSG00000171860_24 (sequence is synthesized)
ttcattcatgaccacatatttttcttctactttgtctatacactccaaccatttatatagctttccttctgtccctttttcatttaaaacaaaattacctaactccctaccaccttctca

SEQ ID NO: 580191 - DNA, 120 bp, Artificial Sequence
  ENSG00000171860_25 (sequence is synthesized)
tttttctgtatatataaatgtttgtgtcaaacgtctgaaatttctggcttgtttgtatcacaacgtggcctcatctaaaccaaatacaatgatgtagtctaaaaacagaaaatgacatgt

SEQ ID NO: 580192 - DNA, 120 bp, Artificial Sequence
  ENSG00000171860_26 (sequence is synthesized)
gttttagacctgcaagacactatctgttcaatggctgaggtgagggtctggactacagattttttataaagtatatgcagaaaaattacaaatcactaggaattctttcagttgtgaaga

SEQ ID NO: 580193 - DNA, 120 bp, Artificial Sequence
  ENSG00000171860_27 (sequence is synthesized)
atgtctgacataagatttgaagtgctacctttccagcttatatattaatttgcttatatatttgatatgaataaatgctttttttctcatgggtccttgcgaggctcagagatttatgaa

SEQ ID NO: 580194 - DNA, 120 bp, Artificial Sequence
  ENSG00000171860_28 (sequence is synthesized)
agacaggactcgtggagacatccaggtgctgaagccttcagctactgtctcagttttttggtaagaaaacctagacctacctgatgacttgtgcttagcctgttttgctcattatagaag

SEQ ID NO: 580195 - DNA, 120 bp, Artificial Sequence
  ENSG00000171861_0 (sequence is synthesized)
gtgacgcagcccgggtctcagggaacatggcggcgctggtgagacccgcgaggtttgtcgtgcgaccgttgctgcaggtggtccaggcttgggaccttgacgcgaggcgctgggtccggg

SEQ ID NO: 580196 - DNA, 120 bp, Artificial Sequence
  ENSG00000171861_1 (sequence is synthesized)
cgctgcggcggagcccagtgaaagtggtgtttccttccggagaggtggtggaacagaagcgcgctcctgggaagcagccccgcaaggcaccatctgaggccagtgcccaggagcaacgag

SEQ ID NO: 580197 - DNA, 120 bp, Artificial Sequence
  ENSG00000171861_2 (sequence is synthesized)
agaaacaaccgctcgaggagtccgcatcccgcgctcccagcacctgggaagagtctgggcttcgctacgataaagcttatcccggggacaggaggctgagcagtgtaatgacaatagtaa

SEQ ID NO: 580198 - DNA, 120 bp, Artificial Sequence
  ENSG00000171861_3 (sequence is synthesized)
agtccaggccatttcgggaaaaacaagggaagatcctgctggaaggtcgcaggctcatttcagacgctctcaaggctggagctgtgccaaaaatgttcttctttagccgtctagaatacc

SEQ ID NO: 580199 - DNA, 120 bp, Artificial Sequence
  ENSG00000171861_4 (sequence is synthesized)
taaaggagttgccagtcgataagctgaaaggtgtcagcctcattaaggtgaaatttgaggatatcaaggattggtccgacctcgtaacgccacaaggaataatggggatttttgccaagc

SEQ ID NO: 580200 - DNA, 120 bp, Artificial Sequence
  ENSG00000171861_5 (sequence is synthesized)
ctgaccatgttaagatgacatatccaaagactcagcttcagcattcactgcctttattattgatttgtgacaatctccgtgaccctgggaacctggggacaattctgagatctgcagctg

SEQ ID NO: 580201 - DNA, 120 bp, Artificial Sequence
  ENSG00000171861_6 (sequence is synthesized)
gggcaggctgcagcaaagtgttactcaccaaaggctgtgtggatgcctgggagcccaaagtgctccgggcgggtatgggcgcacatttccggatgcccattatcaataatctggaatggg

SEQ ID NO: 580202 - DNA, 120 bp, Artificial Sequence
  ENSG00000171861_7 (sequence is synthesized)
caactgtggcctttatgcccaggctgagatgtctaataaagctagtgaccatggctgggtgtgtgatcaacgagtgatgaagtttcacaagtatgaggaagaggaagatgtagaaaccgg

SEQ ID NO: 580203 - DNA, 120 bp, Artificial Sequence
  ENSG00000171861_8 (sequence is synthesized)
agccagtcaagattggctgcctcatgttgaggttcagagttacgactcggactggacagaggcgccggcagctgtggtgattggcggggagacctacggcgtgagcctggagtccctgca

SEQ ID NO: 580204 - DNA, 120 bp, Artificial Sequence
  ENSG00000171861_9 (sequence is synthesized)
gctggccgagagcactggtggcaagaggctgctgatccccgttgtgcctggtgtggacagcctcaactcggccatggcggcaagcatcctgcttttcgaagggaaaagacagctgcgggg

SEQ ID NO: 580205 - DNA, 120 bp, Artificial Sequence
  ENSG00000171861_10 (sequence is synthesized)
gagggcggaggacttgagcagggacaggagttaccactgaggacgcagaagtgacttctgcttgaggacgtctgcagctcctcctacaccagcacactggtgggaggctggcggagtcag

SEQ ID NO: 580206 - DNA, 120 bp, Artificial Sequence
  ENSG00000171861_11 (sequence is synthesized)
tgactatggcccccacgttcaggaggaaggtgtgatgccgtcatacagttacaggaaaaataagaacttcctcagaaagaacaggtccgaattcttcctgtcgcgtcactgattttgagg

SEQ ID NO: 580207 - DNA, 120 bp, Artificial Sequence
  ENSG00000171861_12 (sequence is synthesized)
ttcttttttctcttggtgacaataggtgacccacgtggctctgtgtgtttttaaaaattgtccaccaagaagcactttgtgcccagaaagttcctgaagcatcatcctggcagggaggcg

SEQ ID NO: 580208 - DNA, 120 bp, Artificial Sequence
  ENSG00000171861_13 (sequence is synthesized)
cctgctccaccagctggtgggtgtttgtaatcgccaagcaccagctataggtcacagccacatcactcacagctgatcactggttggtggaaaataaactatgagcagcagattacgtta

SEQ ID NO: 580209 - DNA, 85 bp, Artificial Sequence
  ENSG00000171861_14 (sequence is synthesized)
tggcgcgatctcggcccactgcaacctccgcctctcgggttcaagggattctcttgcctcagcctccgcgggtgatttttgtatt

SEQ ID NO: 580210 - DNA, 120 bp, Artificial Sequence
  ENSG00000171862_0 (sequence is synthesized)
gttctctcctctcggaagctgcagccatgatggaagtttgagagttgagccgctgtgaggcgaggccgggctcaggcgagggagatgagagacggcggcggccgcggcccggagcccctc

SEQ ID NO: 580211 - DNA, 120 bp, Artificial Sequence
  ENSG00000171862_1 (sequence is synthesized)
tcagcgcctgtgagcagccgcgggggcagcgccctcggggagccggccggcctgcggcggcggcagcggcggcgtttctcgcctcctcttcgtcttttctaaccgtgcagcctcttcctc

SEQ ID NO: 580212 - DNA, 120 bp, Artificial Sequence
  ENSG00000171862_2 (sequence is synthesized)
tcttcctcggcttctcctgaaagggaaggtggaagccgtgggctcgggcgggagccggctgaggcgcggcggcggcggcggcacctcccgctcctggagcgggggggagaagcggcggcg

SEQ ID NO: 580213 - DNA, 120 bp, Artificial Sequence
  ENSG00000171862_3 (sequence is synthesized)
cgcggcggctgcagctccagggagggggtctgagtcgcctgtcaccatttccagggctgggaacgccggagagttggtctctccccttctactgcctccaacacggcggcggcggcggct

SEQ ID NO: 580214 - DNA, 120 bp, Artificial Sequence
  ENSG00000171862_4 (sequence is synthesized)
ggcacatccagggacccgggccggttttaaacctcccgtgcgccgccgccgcaccccccgtggcccgggctccggaggccgccggcggaggcagccgttcggaggattattcgtcttctc

SEQ ID NO: 580215 - DNA, 120 bp, Artificial Sequence
  ENSG00000171862_5 (sequence is synthesized)
cccattccgctgccgccgctgccaggcctctggctgctgaggagaagcaggcccagtcgctgcaaccatccagcagccgccgcagcagccattacccggctgcggtccagagccaagcgg

SEQ ID NO: 580216 - DNA, 120 bp, Artificial Sequence
  ENSG00000171862_6 (sequence is synthesized)
cggcagagcgaggggcatcagctaccgccaagtccagagccatttccatcctgcagaagaagccccgccaccagcagcttctgccatctctctcctcctttttcttcagccacaggctcc

SEQ ID NO: 580217 - DNA, 120 bp, Artificial Sequence
  ENSG00000171862_7 (sequence is synthesized)
cagacatgacagccatcatcaaagagatcgttagcagaaacaaaaggagatatcaagaggatggattcgacttagacttgacctatatttatccaaacattattgctatgggatttcctg

SEQ ID NO: 580218 - DNA, 120 bp, Artificial Sequence
  ENSG00000171862_8 (sequence is synthesized)
cagaaagacttgaaggcgtatacaggaacaatattgatgatgtagtaaggtttttggattcaaagcataaaaaccattacaagatatacaatctttgtgctgaaagacattatgacaccg

SEQ ID NO: 580219 - DNA, 120 bp, Artificial Sequence
  ENSG00000171862_9 (sequence is synthesized)
ccaaatttaattgcagagttgcacaatatccttttgaagaccataacccaccacagctagaacttatcaaacccttttgtgaagatcttgaccaatggctaagtgaagatgacaatcatg

SEQ ID NO: 580220 - DNA, 120 bp, Artificial Sequence
  ENSG00000171862_10 (sequence is synthesized)
ttgcagcaattcactgtaaagctggaaagggacgaactggtgtaatgatatgtgcatatttattacatcggggcaaatttttaaaggcacaagaggccctagatttctatggggaagtaa

SEQ ID NO: 580221 - DNA, 120 bp, Artificial Sequence
  ENSG00000171862_11 (sequence is synthesized)
ggaccagagacaaaaagggagtaactattcccagtcagaggcgctatgtgtattattatagctacctgttaaagaatcatctggattatagaccagtggcactgttgtttcacaagatga

SEQ ID NO: 580222 - DNA, 120 bp, Artificial Sequence
  ENSG00000171862_12 (sequence is synthesized)
tgtttgaaactattccaatgttcagtggcggaacttgcaatcctcagtttgtggtctgccagctaaaggtgaagatatattcctccaattcaggacccacacgacgggaagacaagttca

SEQ ID NO: 580223 - DNA, 120 bp, Artificial Sequence
  ENSG00000171862_13 (sequence is synthesized)
tgtactttgagttccctcagccgttacctgtgtgtggtgatatcaaagtagagttcttccacaaacagaacaagatgctaaaaaaggacaaaatgtttcacttttgggtaaatacattct

SEQ ID NO: 580224 - DNA, 120 bp, Artificial Sequence
  ENSG00000171862_14 (sequence is synthesized)
tcataccaggaccagaggaaacctcagaaaaagtagaaaatggaagtctatgtgatcaagaaatcgatagcatttgcagtatagagcgtgcagataatgacaaggaatatctagtactta

SEQ ID NO: 580225 - DNA, 120 bp, Artificial Sequence
  ENSG00000171862_15 (sequence is synthesized)
ctttaacaaaaaatgatcttgacaaagcaaataaagacaaagccaaccgatacttttctccaaattttaaggtgaagctgtacttcacaaaaacagtagaggagccgtcaaatccagagg

SEQ ID NO: 580226 - DNA, 120 bp, Artificial Sequence
  ENSG00000171862_16 (sequence is synthesized)
ctagcagttcaacttctgtaacaccagatgttagtgacaatgaacctgatcattatagatattctgacaccactgactctgatccagagaatgaaccttttgatgaagatcagcatacac

SEQ ID NO: 580227 - DNA, 120 bp, Artificial Sequence
  ENSG00000171862_17 (sequence is synthesized)
aaattacaaaagtctgaatttttttttatcaagagggataaaacaccatgaaaataaacttgaataaactgaaaatggacctttttttttttaatggcaataggacattgtgtcagatta

SEQ ID NO: 580228 - DNA, 120 bp, Artificial Sequence
  ENSG00000171862_18 (sequence is synthesized)
ccagttataggaacaattctcttttcctgaccaatcttgttttaccctatacatccacagggttttgacacttgttgtccagttgaaaaaaggttgtgtagctgtgtcatgtatatacct

SEQ ID NO: 580229 - DNA, 120 bp, Artificial Sequence
  ENSG00000171862_19 (sequence is synthesized)
ttttgtgtcaaaaggacatttaaaattcaattaggattaataaagatggcactttcccgttttattccagttttataaaaagtggagacagactgatgtgtatacgtaggaattttttcc

SEQ ID NO: 580230 - DNA, 120 bp, Artificial Sequence
  ENSG00000171862_20 (sequence is synthesized)
ttttgtgttctgtcaccaactgaagtggctaaagagctttgtgatatactggttcacatcctacccctttgcacttgtggcaacagataagtttgcagttggctaagagaggtttccgaa

SEQ ID NO: 580231 - DNA, 120 bp, Artificial Sequence
  ENSG00000171862_21 (sequence is synthesized)
gggttttgctacattctaatgcatgtattcgggttaggggaatggagggaatgctcagaaaggaaataattttatgctggactctggaccatataccatctccagctatttacacacacc

SEQ ID NO: 580232 - DNA, 120 bp, Artificial Sequence
  ENSG00000171862_22 (sequence is synthesized)
tttctttagcatgctacagttattaatctggacattcgaggaattggccgctgtcactgcttgttgtttgcgcatttttttttaaagcatattggtgctagaaaaggcagctaaaggaag

SEQ ID NO: 580233 - DNA, 120 bp, Artificial Sequence
  ENSG00000171862_23 (sequence is synthesized)
tgaatctgtattggggtacaggaatgaaccttctgcaacatcttaagatccacaaatgaagggatataaaaataatgtcataggtaagaaacacagcaacaatgacttaaccatataaat

SEQ ID NO: 580234 - DNA, 120 bp, Artificial Sequence
  ENSG00000171862_24 (sequence is synthesized)
gtggaggctatcaacaaagaatgggcttgaaacattataaaaattgacaatgatttattaaatatgttttctcaattgtaacgacttctccatctcctgtgtaatcaaggccagtgctaa

SEQ ID NO: 580235 - DNA, 120 bp, Artificial Sequence
  ENSG00000171862_25 (sequence is synthesized)
aattcagatgctgttagtacctacatcagtcaacaacttacacttattttactagttttcaatcataatacctgctgtggatgcttcatgtgctgcctgcaagcttcttttttctcatta

SEQ ID NO: 580236 - DNA, 120 bp, Artificial Sequence
  ENSG00000171862_26 (sequence is synthesized)
aatataaaatattttgtaatgctgcacagaaattttcaatttgagattctacagtaagcgttttttttctttgaagatttatgatgcacttattcaatagctgtcagccgttccaccctt

SEQ ID NO: 580237 - DNA, 120 bp, Artificial Sequence
  ENSG00000171862_27 (sequence is synthesized)
ttgaccttacacattctattacaatgaattttgcagttttgcacattttttaaatgtcattaactgttagggaattttacttgaatactgaatacatataatgtttatattaaaaaggac

SEQ ID NO: 580238 - DNA, 120 bp, Artificial Sequence
  ENSG00000171862_28 (sequence is synthesized)
atttgtgttaaaaaggaaattagagttgcagtaaactttcaatgctgcacacaaaaaaaagacatttgatttttcagtagaaattgtcctacatgtgctttattgatttgctattgaaag

SEQ ID NO: 580239 - DNA, 120 bp, Artificial Sequence
  ENSG00000171862_29 (sequence is synthesized)
ttttttttttttttttttttaaatgtgcagtgttgaatcatttcttcatagtgctcccccgagttgggactagggcttcaatttcacttcttaaaaaaaatcatcatatatttgatatgc

SEQ ID NO: 580240 - DNA, 120 bp, Artificial Sequence
  ENSG00000171862_30 (sequence is synthesized)
catatatttgatatgcccagactgcatacgattttaagcggagtacaactactattgtaaagctaatgtgaagatattattaaaaaggtttttttttccagaaatttggtgtcttcaaat

SEQ ID NO: 580241 - DNA, 120 bp, Artificial Sequence
  ENSG00000171862_31 (sequence is synthesized)
tataccttcaccttgacatttgaatatccagccattttgtttcttaatggtataaaattccattttcaataacttattggtgctgaaattgttcactagctgtggtctgacctagttaat

SEQ ID NO: 580242 - DNA, 120 bp, Artificial Sequence
  ENSG00000171862_32 (sequence is synthesized)
ttacaaatacagattgaataggacctactagagcagcatttatagagtttgatggcaaatagattaggcagaacttcatctaaaatattcttagtaaataatgttgacacgttttccata

SEQ ID NO: 580243 - DNA, 120 bp, Artificial Sequence
  ENSG00000171862_33 (sequence is synthesized)
ccttgtcagtttcattcaacaatttttaaatttttaacaaagctcttaggatttacacatttatatttaaacattgatatatagagtattgattgattgctcataagttaaattggtaaa

SEQ ID NO: 580244 - DNA, 120 bp, Artificial Sequence
  ENSG00000171862_34 (sequence is synthesized)
gttagagacaactattctaacacctcaccattgaaatttatatgccaccttgtctttcataaaagctgaaaattgttacctaaaatgaaaatcaacttcatgttttgaagatagttataa

SEQ ID NO: 580245 - DNA, 120 bp, Artificial Sequence
  ENSG00000171862_35 (sequence is synthesized)
tgttattatttttcctttggaatgtgaaggtctgaatgagggttttgattttgaatgtttcaatgtttttgagaagccttgcttacattttatggtgtagtcattggaaatggaaaaatg

SEQ ID NO: 580246 - DNA, 120 bp, Artificial Sequence
  ENSG00000171862_36 (sequence is synthesized)
gcattatatatattatatatataaatatatattatacatactctccttactttatttcagttaccatccccatagaatttgacaagaattgctatgactgaaaggttttcgagtcctaat

SEQ ID NO: 580247 - DNA, 120 bp, Artificial Sequence
  ENSG00000171862_37 (sequence is synthesized)
taaaactttatttatggcagtattcataattagcctgaaatgcattctgtaggtaatctctgagtttctggaatattttcttagactttttggatgtgcagcagcttacatgtctgaagt

SEQ ID NO: 580248 - DNA, 120 bp, Artificial Sequence
  ENSG00000171862_38 (sequence is synthesized)
tacttgaaggcatcacttttaagaaagcttacagttgggccctgtaccatcccaagtcctttgtagctcctcttgaacatgtttgccatacttttaaaagggtagttgaataaatagcat

SEQ ID NO: 580249 - DNA, 120 bp, Artificial Sequence
  ENSG00000171862_39 (sequence is synthesized)
caccattctttgctgtggcacaggttataaacttaagtggagtttaccggcagcatcaaatgtttcagctttaaaaaataaaagtagggtacaagtttaatgtttagttctagaaatttt

SEQ ID NO: 580250 - DNA, 120 bp, Artificial Sequence
  ENSG00000171862_40 (sequence is synthesized)
gtgcaatatgttcataacgatggctgtggttgccacaaagtgcctcgtttacctttaaatactgttaatgtgtcatgcatgcagatggaaggggtggaactgtgcactaaagtgggggct

SEQ ID NO: 580251 - DNA, 120 bp, Artificial Sequence
  ENSG00000171862_41 (sequence is synthesized)
ttaactgtagtatttggcagagttgccttctacctgccagttcaaaagttcaacctgttttcatatagaatatatatactaaaaaatttcagtctgttaaacagccttactctgattcag

SEQ ID NO: 580252 - DNA, 120 bp, Artificial Sequence
  ENSG00000171862_42 (sequence is synthesized)
cctcttcagatactcttgtgctgtgcagcagtggctctgtgtgtaaatgctatgcactgaggatacacaaaaataccaatatgatgtgtacaggataatgcctcatcccaatcagatgtc

SEQ ID NO: 580253 - DNA, 120 bp, Artificial Sequence
  ENSG00000171862_43 (sequence is synthesized)
catttgttattgtgtttgttaacaaccctttatctcttagtgttataaactccacttaaaactgattaaagtctcattcttgtcattgtgtgggtgttttattaaatgagagtttataat

SEQ ID NO: 580254 - DNA, 120 bp, Artificial Sequence
  ENSG00000171862_44 (sequence is synthesized)
tcaaattgcttaagtccattgaagttttaattaatgggcagccaaatgtgaatacaaagttttcagtttttttttttcctgctgtccttcaaagcctactgtttaaaaaaaaaaaaaaaa

SEQ ID NO: 580255 - DNA, 120 bp, Artificial Sequence
  ENSG00000171862_45 (sequence is synthesized)
aaaaacatggcctgagagtagagtatctgtctactcatgtttaattaaggaaaaacacttatttttagggctttagtcatcacttcataaattgtataagcacattaaatagcgttctag

SEQ ID NO: 580256 - DNA, 120 bp, Artificial Sequence
  ENSG00000171862_46 (sequence is synthesized)
tcctgaaaaagtccaagattcttagaaaattgtgcatatttttattatgacagatgtttgaagataattccccagaatggatttgatactttagatttcaattttgtggcttttgtctat

SEQ ID NO: 580257 - DNA, 120 bp, Artificial Sequence
  ENSG00000171862_47 (sequence is synthesized)
tattctgtactctgccatcagcatatggaaagcttcatttactcatcatgacttgtgccatataaaaattgatatttcggaatagtctaaaggactttttgtacttgaatttaatcatgt

SEQ ID NO: 580258 - DNA, 120 bp, Artificial Sequence
  ENSG00000171862_48 (sequence is synthesized)
tgtttctaatattcttaaaagcttgaagactaaagcatatcctttcaacaaagcatagtaaggtaataagaaagtgtagtttgtacaagtgttaaaaaaataaagtagacaatgttacag

SEQ ID NO: 580259 - DNA, 120 bp, Artificial Sequence
  ENSG00000171862_49 (sequence is synthesized)
tgggacttattatttcaagtttacattttctccatgtaattttttaaaaagtaaatgaaaaaatgtgcaataatgtaaaatatgaagtgtatgtgtacacacattttatttttcggtatc

SEQ ID NO: 580260 - DNA, 120 bp, Artificial Sequence
  ENSG00000171862_50 (sequence is synthesized)
ttgggtatacgtatggttgaaaactatactggagtctaaaagtattctaatttataagaagacattttggtgatgtttgaaaaatagaaatgtgctagttttgtttttatatcatgtcct

SEQ ID NO: 580261 - DNA, 120 bp, Artificial Sequence
  ENSG00000171862_51 (sequence is synthesized)
ttgtacgttgtaatatgagctggcttggttcagtaaatgccatcaccatttccattgagaatttaaaactcaccagtgtttaatatgcaggcttccaaaggcttatgaaaaaaatcaaga

SEQ ID NO: 580262 - DNA, 120 bp, Artificial Sequence
  ENSG00000171862_52 (sequence is synthesized)
cccttaaatctagttaatttgctgctaacatgaaactctttggttcttttatttttgccagataattagacacacatctaaagcttagtcttaaatggcttaagtgtagctattgattag

SEQ ID NO: 580263 - DNA, 120 bp, Artificial Sequence
  ENSG00000171862_53 (sequence is synthesized)
tgctgttgctagttcagaaagaaatgtttgtgaatggaaacaagaatattcagtccaaactgttgtaaggacagtacctgaaaaccaggaaacaggataatggaaaaagtcttttaaaga

SEQ ID NO: 580264 - DNA, 120 bp, Artificial Sequence
  ENSG00000171862_54 (sequence is synthesized)
tgaaatgttggagccaactttcttatagaattaattgtatgtggctatagaaagcctaatgattgttgcttatttttgagagcatattattcttttatgaccataatcttgctgtttttc

SEQ ID NO: 580265 - DNA, 120 bp, Artificial Sequence
  ENSG00000171862_55 (sequence is synthesized)
catcttccaaaagatcttccttctaatatgtatatcagaatgtgggtagccagtcagacaaattcatattggttggtagctttaaaaagtttgtaatgtgaagacaggaaaggacaaaat

SEQ ID NO: 580266 - DNA, 120 bp, Artificial Sequence
  ENSG00000171862_56 (sequence is synthesized)
agtttgctttggtggtagtactctggttgttaagctaggtattttgagactacttccccatcacaacaacaataaaataatcactcataatcctatcacctggagacatagccatcgtta

SEQ ID NO: 580267 - DNA, 120 bp, Artificial Sequence
  ENSG00000171862_57 (sequence is synthesized)
atatgttagtgactatacaatcatgttttcttctgtatatccatgtatattctttaaaaatgaaatttatactgtacctgatctcaaagctttttagcttagtatatctgtcatgaattt

SEQ ID NO: 580268 - DNA, 120 bp, Artificial Sequence
  ENSG00000171862_58 (sequence is synthesized)
gtaggatgttccattgcatcagaaaacggacagtgatttgattactttctaatgccacagatgcagattacatgtagttattgagaatcctttcgaattcagtggcttaatcatgaatgt

SEQ ID NO: 580269 - DNA, 120 bp, Artificial Sequence
  ENSG00000171862_59 (sequence is synthesized)
ctaaatattgttgacattaggatgatacatgtaaattaaagttacatttgtttagcatagacaagcttaacattgtagatgtttctcttcaaaaatcatcttaaacatttgcatttggaa

SEQ ID NO: 580270 - DNA, 120 bp, Artificial Sequence
  ENSG00000171862_60 (sequence is synthesized)
ttgtgttaaatagaatgtgtgaaacactgtattagtaaacttcatcacctttctacttccttatagtttgaacttttcagtttttgtagttcccaaacagttgctcaatttagagcaaat

SEQ ID NO: 580271 - DNA, 120 bp, Artificial Sequence
  ENSG00000171862_61 (sequence is synthesized)
taatttaacacctgccaaaaaaaggctgctgttggcttatcagttgtctttaaattcaaatgctcatgtgacttttatcacatcaaaaaatatttcattaatgattcacctttagctctg

SEQ ID NO: 580272 - DNA, 120 bp, Artificial Sequence
  ENSG00000171862_62 (sequence is synthesized)
aaaattaccgcgtttagtaattatagtgggcttataaaaacatgcaactctttttgatagttatttgagaattttggtgaaaaatatttagctgagggcagtatagaacttataaaccaa

SEQ ID NO: 580273 - DNA, 120 bp, Artificial Sequence
  ENSG00000171862_63 (sequence is synthesized)
taaaccaatatattgatatttttaaaacatttttacatataagtaaactgccatctttgagcataactacatttaaaaataaagctgcatatttttaaatcaagtgtttaacaagaattt

SEQ ID NO: 580274 - DNA, 120 bp, Artificial Sequence
  ENSG00000171862_64 (sequence is synthesized)
tattttttaaaattaaaaataatttatatttcctctgttgcatgaggattctcatctgtgcttataatggttagagattttatttgtgtggaatgaagtgaggcttgtagtcatggttct

SEQ ID NO: 580275 - DNA, 120 bp, Artificial Sequence
  ENSG00000171862_65 (sequence is synthesized)
agtgtttcagtttgccaagtctgtttactgcagtgaaattcatcaaatgtttcagtgtggttttctgtagcctatcatttactggctatttttttatgtacacctttaggattttctgcc

SEQ ID NO: 580276 - DNA, 120 bp, Artificial Sequence
  ENSG00000171862_66 (sequence is synthesized)
tactctatccagttgtccaaatgatatcctacattttacaaatgccctttcagtttctattttctttttccattaaattgccctcatgtcctaatgtgcagtttgtaagtgtgtgtgtgt

SEQ ID NO: 580277 - DNA, 120 bp, Artificial Sequence
  ENSG00000171862_67 (sequence is synthesized)
gtgtctgtgtgtgtgtgaatttgattttcaagagtgctagacttccaatttgagagattaaataatttaattcaggcaaacatttttcattggaatttcacagttcattgtaatgaaaat

SEQ ID NO: 580278 - DNA, 120 bp, Artificial Sequence
  ENSG00000171862_68 (sequence is synthesized)
gttaatcctggatgacctttgacatacagtaatgaatcttggatattaatgaatttgttagtagcatcttgatgtgtgttttaatgagttattttcaaagttgtgcattaaaccaaagtt

SEQ ID NO: 580279 - DNA, 120 bp, Artificial Sequence
  ENSG00000171862_69 (sequence is synthesized)
ggcatactggaagtgtttatatcaagttccatttggctactgatggacaaaaaatagaaatgccttcctatggagagtatttttcctttaaaaaattaaaaaggttaattattttgacta

SEQ ID NO: 580280 - DNA, 120 bp, Artificial Sequence
  ENSG00000171862_70 (sequence is synthesized)
gaaacaaaaggagatatcaagaggatggattcgacttagacttgacctgtatccatttctgcggctgctcctctttacctttctgtcactctcttagaacgtgggagtagacggatgcga

SEQ ID NO: 580281 - DNA, 120 bp, Artificial Sequence
  ENSG00000171862_71 (sequence is synthesized)
aaatgtccgtagtttgggtgactataacatttaaccctggtcaggttgctaggtcatatattttgtgtttcctttctgtgtattcaacctagggtgtgtttggctagacggaactcttgc

SEQ ID NO: 580282 - DNA, 120 bp, Artificial Sequence
  ENSG00000171862_72 (sequence is synthesized)
ctggttgcaagtgtcaagccaccgattgctttcttaggctatctatatggtctcttcctgagggctattgtccgttaatacagaatacagtacactgttagtggattagcgagctcggta

SEQ ID NO: 580283 - DNA, 120 bp, Artificial Sequence
  ENSG00000171862_73 (sequence is synthesized)
atccggtctcctaaatgaacaaaaaagtagacgctttttgaggttgagcatatttcgattaaatcttggcttaggccctagatcaagggtttagatcagaataaaatgaaaattagtgtt

SEQ ID NO: 580284 - DNA, 120 bp, Artificial Sequence
  ENSG00000171862_74 (sequence is synthesized)
gcacgtacgcatattgcatcagaatcttgcagtgattgttttagtttcctgagttgcattgatagattcttttaaaatatgactgatttgcataactttagaagcagaatcattttcagt

SEQ ID NO: 580285 - DNA, 120 bp, Artificial Sequence
  ENSG00000171862_75 (sequence is synthesized)
atatatggtgcacattgagggcaaaaagtagttttgttaatgtttaaacttaagttacctacaactttgaactgtatgtagaagttttgtagtttgaagtcaatagtgccataatatacc

SEQ ID NO: 580286 - DNA, 120 bp, Artificial Sequence
  ENSG00000171862_76 (sequence is synthesized)
tctttgttatatttacctttttctctccctatggggtgatgtaggatagtgcttgaaatttgcacttcagtagcatttaatgttcagtgctcttgtcataaacatagaatggatattgag

SEQ ID NO: 580287 - DNA, 120 bp, Artificial Sequence
  ENSG00000171862_77 (sequence is synthesized)
tagtttctgatcccagatggtaatgtgtaggttcaagggtattgtgtgtagcaagtgaagattgcagaaataaaacttcagttcatgcttgaaatttaagtattgttgtgatgccagaat

SEQ ID NO: 580288 - DNA, 120 bp, Artificial Sequence
  ENSG00000171862_78 (sequence is synthesized)
tgctgctcaccgtttttaggtttcaggtcctctgacaccttttggtatcgttaattttactgatttgtgtagaatgtcagttgtattttaccagctaatatctagaaatgctggcaagag

SEQ ID NO: 580289 - DNA, 120 bp, Artificial Sequence
  ENSG00000171862_79 (sequence is synthesized)
gggtttactccagctttagattgtaggtatgttagcttttttcatacagtgtattaaatttactgagtcagcttgctgaataagacagaagcccaagaattttaacagtgtgtagcttta

SEQ ID NO: 580290 - DNA, 120 bp, Artificial Sequence
  ENSG00000171862_80 (sequence is synthesized)
gttgtctaaaagttaggccttcgggcttcaaaagttagtggtcatcgaaaagcattaatctttgcagtttcaggtacaacacattggttttgattagggatggggatggggccctctttt

SEQ ID NO: 580291 - DNA, 120 bp, Artificial Sequence
  ENSG00000171862_81 (sequence is synthesized)
tgcagaatggggaaagtattgacaggaattgagagctattggtaggccagtgtataaggtatgtgaaaacagaattaagttattggtctgaagtgactgaagcatttaggctctatcaag

SEQ ID NO: 580292 - DNA, 120 bp, Artificial Sequence
  ENSG00000171862_82 (sequence is synthesized)
gcctaaaatttggtaatatgagtttggtaatgcgaattgtggcagtggacaatatttagttaaaattatgtaattgcataagtactagcacagtatttttaataaaagttatttcttagc

SEQ ID NO: 580293 - DNA, 120 bp, Artificial Sequence
  ENSG00000171862_83 (sequence is synthesized)
ttcagccacaggctcccagacatgacagccatcatcaaagagatcgttagcagaaacaaaaggagatatcaagaggatggattcgacttagacttgacctgtttttacatgtgagctgtg

SEQ ID NO: 580294 - DNA, 120 bp, Artificial Sequence
  ENSG00000171862_84 (sequence is synthesized)
tcaaatattgcgtcaaatgactaataacacttaatttctagagttgtggttttattgagccaaaagttgatatgaaaaaaagtcagtaaggaaagtcagtgaagtgcttgcttttttgat

SEQ ID NO: 580295 - DNA, 120 bp, Artificial Sequence
  ENSG00000171862_85 (sequence is synthesized)
aattgcactcccaataattttgatattccaacgtacttggtttgcttgttttcacgttaatgttttctgtttattggagtgggaaggcattaaaattgtcattgaagactttgtctttga

SEQ ID NO: 580296 - DNA, 120 bp, Artificial Sequence
  ENSG00000171862_86 (sequence is synthesized)
acagctgatgaagaacttgcttgacaagtttttaacttatgtattatttcgaagcagtgtttacgtagcagtaacatgaaagtttctaataaaatacccaatgtacacagcgtcaaaaaa

SEQ ID NO: 580297 - DNA, 120 bp, Artificial Sequence
  ENSG00000171862_87 (sequence is synthesized)
aaaggtaagttattttttgatgtttttcctttcctcttcctggatctgagaatttattggaaaacagattttgggtttctttttttccttcagttttattgaggtgtaattgacaagtaa

SEQ ID NO: 580298 - DNA, 120 bp, Artificial Sequence
  ENSG00000171862_88 (sequence is synthesized)
attgacaagtaaaaattatatataaatacaatgtataatatgatgttttgatgtatgtgtatatacattgtgaaatgattactacagtcaaactacttaacatattcatcacctcacata

SEQ ID NO: 580299 - DNA, 120 bp, Artificial Sequence
  ENSG00000171862_89 (sequence is synthesized)
aacaatattgatgatgtagtaaggtaagaatgctttgattttctatttcaaatattgatgtttatattcatgttgtgttttcatttagaaaagatttctaagccacagaaaaagatactt

SEQ ID NO: 580300 - DNA, 120 bp, Artificial Sequence
  ENSG00000171862_90 (sequence is synthesized)
tgtgatgtaaactattattgtagtgctctataatcattttttggcttaccgtacctaatggacttcagggggatacagttcatttgataagaactgaccttatacattacataatcaggt

SEQ ID NO: 580301 - DNA, 120 bp, Artificial Sequence
  ENSG00000171863_0 (sequence is synthesized)
ctcttcctaagccggcgctcggcaaggtaggttggcggcctgctctccgacagaacttttcttcttgggttgaggaaaacgccttttggagtcaggccctggaggggcgagccttgctca

SEQ ID NO: 580302 - DNA, 120 bp, Artificial Sequence
  ENSG00000171863_1 (sequence is synthesized)
caggttctcccaggagaaagccatgttcagttcgagcgccaagatcgtgaagcccaatggcgagaagccggacgagttcgagtccggcatctcccaggctcttctggagctggagatgaa

SEQ ID NO: 580303 - DNA, 120 bp, Artificial Sequence
  ENSG00000171863_2 (sequence is synthesized)
ctcggacctcaaggctcagctcagggagctgaatattacggcagctaaggaaattgaagttggtggtggtcggaaagctatcataatctttgttcccgttcctcaactgaaatctttcca

SEQ ID NO: 580304 - DNA, 120 bp, Artificial Sequence
  ENSG00000171863_3 (sequence is synthesized)
gtgggaagcatgtcgtctttatcgctcagaggagaattctgcctaagccaactcgaaaaagccgtacaaaaaataagcaaaagcgtcccaggagccgtactctgacagctgtgcacgatg

SEQ ID NO: 580305 - DNA, 120 bp, Artificial Sequence
  ENSG00000171863_4 (sequence is synthesized)
ccatccttgaggacttggtcttcccaagcgaaattgtgggcaagagaatccgcgtcaaactagatggcagccggctcataaaggttcatttggacaaagcacagcagaacaatgtggaac

SEQ ID NO: 580306 - DNA, 120 bp, Artificial Sequence
  ENSG00000171863_5 (sequence is synthesized)
acaaggttgaaactttttctggtgtctataagaagctcacgggcaaggatgttaattttgaattcccagagtttcaattgtaaacaaaaatgactaaataaaaagtatatattcacagta

SEQ ID NO: 580307 - DNA, 120 bp, Artificial Sequence
  ENSG00000171863_6 (sequence is synthesized)
cagggtggggatacagccgattacccgccctgtgctttccgatggcttctgcggggcgagcggggcctggccggggggtgcgggcgggagggcgagccagcggcgcctgcagcccgggcc

SEQ ID NO: 580308 - DNA, 120 bp, Artificial Sequence
  ENSG00000171863_7 (sequence is synthesized)
acccctcttattaacaactcttaatttgtttaagttgtagtttatgaaaacagatgttcaagtgggaatttttgagtagcagcatttggtttcctgtatagttgcacatgatacgtttta

SEQ ID NO: 580309 - DNA, 120 bp, Artificial Sequence
  ENSG00000171863_8 (sequence is synthesized)
cattccctagagatggtcactcattgccttggtgagtttgtagtttatcccagagtaacatttaaaattgactgagcttttgaaataaatcagtaagctattaccctattctaggtaggc

SEQ ID NO: 580310 - DNA, 120 bp, Artificial Sequence
  ENSG00000171863_9 (sequence is synthesized)
aaaggctttagtttggtacgtgaaatataacaagcttatttgaaaatgagtgttaatttgacttcaggaacctgggatttgcattttcattttgacttaaagaggtgccctctggagttg

SEQ ID NO: 580311 - DNA, 120 bp, Artificial Sequence
  ENSG00000171863_10 (sequence is synthesized)
tctgttctactgttgcagcacgtttctgtttgtgaattttgctaaaattgcttgtatttagactgcattggtagttggagtcatgaaaacaatccttttatgaatccaattgggtagaaa

SEQ ID NO: 580312 - DNA, 120 bp, Artificial Sequence
  ENSG00000171863_11 (sequence is synthesized)
gataaagtacaggcagagcgccgtggcttaggcctgtaatcccagcacggggaggtggaggcgggtggatcactgtagagaccagcctgggcaacatggtaagaccctgtctacaaaaaa

SEQ ID NO: 580313 - DNA, 120 bp, Artificial Sequence
  ENSG00000171863_12 (sequence is synthesized)
aaggctcagctcagggagctgaatattacggcagctaaggtaagctggcgctccctcggctgggagggaggttgcggcgcgtctccccgcgcagtgcctgagagggttggacctgggtta

SEQ ID NO: 580314 - DNA, 120 bp, Artificial Sequence
  ENSG00000171863_13 (sequence is synthesized)
cggttgatgatgacttgccgcctggccgcctaacctgaactcaggttcggccgtgttgtttgggagtgataccgcccaggtgcggggagtggggttgcaggtaccctgcggcttaagctg

SEQ ID NO: 580315 - DNA, 120 bp, Artificial Sequence
  ENSG00000171863_14 (sequence is synthesized)
tccacatgcgggcggtggagaaacgtggagtagggagggcctgggcccatttcggaccttatttgcccttacttagttatagatacggcaaagagctgtggggagctcaggatgagattc

SEQ ID NO: 580316 - DNA, 120 bp, Artificial Sequence
  ENSG00000171863_15 (sequence is synthesized)
tctctacccttagcccggagttgccgcaagtgggggtgcagaagtggtagtgattggcctcctggcctgaacagtctcccttcctggaataaggaaatgtgaaggttggagagagatgag

SEQ ID NO: 580317 - DNA, 120 bp, Artificial Sequence
  ENSG00000171863_16 (sequence is synthesized)
aacatttccgaaggatgcatttatgattaactcaaaactagtattagtttgtagtgcagctacggtgttagtgataaggtcttcttatcctctaatttgaccacaacgtttactttctga

SEQ ID NO: 580318 - DNA, 120 bp, Artificial Sequence
  ENSG00000171863_17 (sequence is synthesized)
aacaagaagtctgtaaagtgacagactgctgtgttttgagttatgaaaatgatttcccatatttaaatttccacaagtctagtgggttgcttacatagatgatcaaactaagaaacctgt

SEQ ID NO: 580319 - DNA, 120 bp, Artificial Sequence
  ENSG00000171863_18 (sequence is synthesized)
agagcgagactccatctcaaaaaaagaagaaacctgttacagttcggatgggggattggtgcaaactgaagtctatggggaatgaagtgccaggattgatctggaataaaagtagtattc

SEQ ID NO: 580320 - DNA, 120 bp, Artificial Sequence
  ENSG00000171863_19 (sequence is synthesized)
ggattgatctggaataaaagtagtattctgggtcataggcatggggaaaggcgtatctgggagattttgtccactggcgtattagtagaggctgtggattctgaatgatttattcaagaa

SEQ ID NO: 580321 - DNA, 120 bp, Artificial Sequence
  ENSG00000171863_20 (sequence is synthesized)
tcaggaagtaactccatagaagggtttgctcagtcaattgttcgtctaagttgtttagccttctcgaactttgaacttaccctgccattcttcttgcttttaaagcagtatggcagttac

SEQ ID NO: 580322 - DNA, 120 bp, Artificial Sequence
  ENSG00000171863_21 (sequence is synthesized)
agctttttgtcaatttaaagtcttttttcattttgttacatgataatttttaccttacagaggagaattctgcctaagccaactcgaaaaagccgtacaaaaaataagcaaaagcgtccc

SEQ ID NO: 580323 - DNA, 120 bp, Artificial Sequence
  ENSG00000171863_22 (sequence is synthesized)
cctccgattatttgtgcacaggataggaatgatgagaaggaaatcattactttaattctgtgatatagcatgctagacacagttgacatgggcttggatttatctttgatttttattttt

SEQ ID NO: 580324 - DNA, 120 bp, Artificial Sequence
  ENSG00000171863_23 (sequence is synthesized)
tggattttggtgataacatcacaggttaaaatatcactgcagttgaagatgctgatggaaaatgatttatgaacttgattgacttacaggttatctggcataaactcaaatattggtagt

SEQ ID NO: 580325 - DNA, 120 bp, Artificial Sequence
  ENSG00000171863_24 (sequence is synthesized)
tgtcttcttgaactagatcttttggtattttgttagtctctgattagtatgttgttttacaaatgtgaactattaaatccctgtggactcttccctaaggatgagttgaagaaaaaaaaa

SEQ ID NO: 580326 - DNA, 120 bp, Artificial Sequence
  ENSG00000171863_25 (sequence is synthesized)
atcctagtgttgcctgtgccctctaacatgtttaatttgtattgttactctcagtggatgaggaaactgatccaaggctgggataatttgctgattgcagctagtactagtagtgctaag

SEQ ID NO: 580327 - DNA, 120 bp, Artificial Sequence
  ENSG00000171863_26 (sequence is synthesized)
aatgttttttttttaactcggtcttgttctgaaaaccactagaacacagtgttgggagtctggtaatgtgttattgtgtcgagctgtggtatgtggaaaggtaggtgccagcttttctag

SEQ ID NO: 580328 - DNA, 120 bp, Artificial Sequence
  ENSG00000171863_27 (sequence is synthesized)
aacttgaattctatggcttagtactttgaaaaacttttaaaggcagagtggcataagaatttaggatttttttcccctaaatcatgacacttaaagagggttttggaaactcagttctga

SEQ ID NO: 580329 - DNA, 120 bp, Artificial Sequence
  ENSG00000171863_28 (sequence is synthesized)
gaacctcagttaggaaatgagtataagaacagtcccagaggactgtccctcaaatccatagctttagtttccctcagtacaaacctctgttttccaaattttctcagacaatggcttcag

SEQ ID NO: 580330 - DNA, 120 bp, Artificial Sequence
  ENSG00000171863_29 (sequence is synthesized)
tgtttctagtgggacctagtctgtacattgaaagccttcacactaagcctagctggtaggtcatagtgattctaccacttttccaatccggcttcctgctttcagatttattttccctat

SEQ ID NO: 580331 - DNA, 120 bp, Artificial Sequence
  ENSG00000171863_30 (sequence is synthesized)
tcagtagagctatctttatctaactcaggttaaatgctgaaattgatagtttttgggtatagcagggtttttcctctaaagcgctccagtccctgtggtttgtgatgattgagttatggt

SEQ ID NO: 580332 - DNA, 120 bp, Artificial Sequence
  ENSG00000171863_31 (sequence is synthesized)
gccattgctccccattttaaaagattgtagatgacattggaatctaatttccgtatttgggtgctttcctagtattgtaagaatatgcttaattaatgagtcgcaatgaataatccgttt

SEQ ID NO: 580333 - DNA, 120 bp, Artificial Sequence
  ENSG00000171863_32 (sequence is synthesized)
gtcttgatttgctttctgaaaggtgatgagggttttgggaaatggactttgttcaggcttttgccctttgtggctgtgacatattaagatgttggcagtaaaattgagagccaccagaag

SEQ ID NO: 580334 - DNA, 120 bp, Artificial Sequence
  ENSG00000171863_33 (sequence is synthesized)
atgttaactgtgtatatgggcgctgccagataggaaatccaaatgagtagactatagtgttattgttagctactatggggtgagacgtagacagataaccatatgtaaggcagctcccta

SEQ ID NO: 580335 - DNA, 120 bp, Artificial Sequence
  ENSG00000171863_34 (sequence is synthesized)
aatgctgaaacaaagaaccgtctcttgacttactcctgatgtctcatggtacatggtagctgccccaaaagcttgcaattaattgaaacttctcatttgttaggtggcaggtaggtaggt

SEQ ID NO: 580336 - DNA, 120 bp, Artificial Sequence
  ENSG00000171863_35 (sequence is synthesized)
tttgaacttggtagtgatattcagacgaggagcaagattccactggcagttctgtgatgctaagtaaatgatgtgatcatatccgtgctttagaaagattatcttgacattggaaggggg

SEQ ID NO: 580337 - DNA, 120 bp, Artificial Sequence
  ENSG00000171863_36 (sequence is synthesized)
gtaaccagtctccatgcgccaccatagcaatgactgtagtaaactcaggactagttcttttacccgcacttcagcctgctctcctttggattatgtgtcaggtgttaaatggagatgttt

SEQ ID NO: 580338 - DNA, 120 bp, Artificial Sequence
  ENSG00000171863_37 (sequence is synthesized)
caagaattgaacacttgaaattctctgtaccttttggaagtagactctttctgtggtcttttagttaggctgtatattcttggtgagttaggggtgggtggtgatgggatcagtgtcttg

SEQ ID NO: 580339 - DNA, 120 bp, Artificial Sequence
  ENSG00000171863_38 (sequence is synthesized)
gggggacataaccatgtgggtgactgctggggtcccctgatggcttccccggtgcagtggtgtacagttctgtcccacagcattggagaagagcttgtccccggtcgtgaagactgctgc

SEQ ID NO: 580340 - DNA, 120 bp, Artificial Sequence
  ENSG00000171863_39 (sequence is synthesized)
agacatgttgtgtgtacttagttgctgaggagaaaaacaatacagggcacaatttcacgaaactattaggttttaagctgagtgtgtatttcaaagttctgtgatgaattctttcttttc

SEQ ID NO: 580341 - DNA, 120 bp, Artificial Sequence
  ENSG00000171863_40 (sequence is synthesized)
ttgtaggttgaaactttttctggtgtctataagaagctcacgggcaaggatgttaattttgaattcccagagtttcaattgtaaacaaaaatgactaaataaaaagtatatattcacagt

SEQ ID NO: 580342 - DNA, 120 bp, Artificial Sequence
  ENSG00000171864_0 (sequence is synthesized)
agggtgtgctgggggactgtgcagctcgaggctccagaggcacactccagagagagccaaggttctgacgcgatgaggaagcacctgagctggtggtggctggccactgtctgcatgctg

SEQ ID NO: 580343 - DNA, 120 bp, Artificial Sequence
  ENSG00000171864_1 (sequence is synthesized)
ctcttcagccacctctctgcggtccagacgaggggcatcaagcacagaatcaagtggaaccggaaggccctgcccagcactgcccagatcactgaggcccaggtggctgagaaccgcccg

SEQ ID NO: 580344 - DNA, 120 bp, Artificial Sequence
  ENSG00000171864_2 (sequence is synthesized)
ggagccttcatcaagcaaggccgcaagctcgacattgacttcggagccgagggcaacaggtactacgaggccaactactggcagttccccgatggcatccactacaacggctgctctgag

SEQ ID NO: 580345 - DNA, 120 bp, Artificial Sequence
  ENSG00000171864_3 (sequence is synthesized)
gctaatgtgaccaaggaggcatttgtcaccggctgcatcaatgccacccaggcggcgaaccagggggagttccagaagccagacaacaagctccaccagcaggtgctctggcggctggtc

SEQ ID NO: 580346 - DNA, 120 bp, Artificial Sequence
  ENSG00000171864_4 (sequence is synthesized)
caggagctctgctccctcaagcattgcgagttttggttggagaggggcgcaggacttcgggtcaccatgcaccagccagtgctcctctgccttctggctttgatctggctcacggtgaaa

SEQ ID NO: 580347 - DNA, 120 bp, Artificial Sequence
  ENSG00000171864_5 (sequence is synthesized)
taagcttgccaggaggctggcagtacagagtgcagcagcgagcaaatcctggcaagtgacccagctcttctcccccaaacccacgcgtgttctgaaggtgcccaggagcggcgatgcact

SEQ ID NO: 580348 - DNA, 120 bp, Artificial Sequence
  ENSG00000171864_6 (sequence is synthesized)
cgcactgcaaatgccgctctcacgtatgcgccctggtatgtgcctgcgttctgatagatgggggactgtggcttctccgtcactccattctcagcccctagcagagcgtctggcacacta

SEQ ID NO: 580349 - DNA, 120 bp, Artificial Sequence
  ENSG00000171864_7 (sequence is synthesized)
gattagtagtaaatgcttgatgagaagaacacatcaggcactgcgccacctgcttcacagtacttcccaacaactcttagaggtaggtgtattcccgttttacagataaggaaactgagg

SEQ ID NO: 580350 - DNA, 120 bp, Artificial Sequence
  ENSG00000171864_8 (sequence is synthesized)
cccagagagctgaagtactgcacccagcatcaccagctagaaagtggcagagccaggattcaaccctggcttgtctaaccccaggttttctgctctgtccaattccagagctgtctggtg

SEQ ID NO: 580351 - DNA, 120 bp, Artificial Sequence
  ENSG00000171864_9 (sequence is synthesized)
atcactttatgtctcacagggacccacatccaaacatgtatctctaatgaaattgtgaaagctccatgtttagaaataaatgaaaacacctgagctggtggctgtgtactttgactggta

SEQ ID NO: 580352 - DNA, 120 bp, Artificial Sequence
  ENSG00000171864_10 (sequence is synthesized)
catggaggctattttaatccttctaactaaactaaaatagattaaaggaattaaactaaaatacaagtaaagctagacaaaggcccagaaatcatactgtaaggaaatgttattggaagc

SEQ ID NO: 580353 - DNA, 120 bp, Artificial Sequence
  ENSG00000171864_11 (sequence is synthesized)
aaatgttattggaagctgattcccagagcagaccacatatacagcaggatgtgcctgtggcatgaagattttctttctcttttttttttttttttagatggagttttactcttgttgccc

SEQ ID NO: 580354 - DNA, 79 bp, Artificial Sequence
  ENSG00000171864_12 (sequence is synthesized)
tagtgctgggattcaattttttttttttttttttcaaaagaagggtaagtgcttgctgttcccatccctgaaacattgc

SEQ ID NO: 580355 - DNA, 120 bp, Artificial Sequence
  ENSG00000171864_13 (sequence is synthesized)
gaagggtaagtgcttgctgttcccatccctgaaacattgcatgtatttaagaaaaacaaaatgttagtggcatatttgcttctaatgttcccctaaccctacatgcatgttttatgtgca

SEQ ID NO: 580356 - DNA, 120 bp, Artificial Sequence
  ENSG00000171864_14 (sequence is synthesized)
ctcatatgagtatctttaaatataatccctttacatctgtgttctatgcaaagtctctcatttctttcaagacagcctaatgaaggccatcatctctgtaaaccacttgtcactacaaaa

SEQ ID NO: 580357 - DNA, 120 bp, Artificial Sequence
  ENSG00000171864_15 (sequence is synthesized)
ctttaaaaaataaagctgtgtctttagggagacccaataaagaatgcaatccatgccataagcaggagttgatacaccaccttattagctaaaaatatatataacacaatatgagtaatg

SEQ ID NO: 580358 - DNA, 120 bp, Artificial Sequence
  ENSG00000171864_16 (sequence is synthesized)
tttaagatctgttttaaatttaaaacaatgaattgaatgctctaagaggctcctacaggcgctccaggccactctcagagactcccaggagttgttgaactatatttggagaaaacagcc

SEQ ID NO: 580359 - DNA, 120 bp, Artificial Sequence
  ENSG00000171864_17 (sequence is synthesized)
actgaatattatcatttctcctttaaagagagtttgtaaggggggaacatgcattttatcagacaatttatccaaagcattgcagaacatgagtgctgatgagggcacctcttgtgctga

SEQ ID NO: 580360 - DNA, 120 bp, Artificial Sequence
  ENSG00000171864_18 (sequence is synthesized)
gtcccctcagctatcagtgttcttctcaaggacacatttggaaggttttaacattgaaagtgagcggaggacttgggggcagagcagcacaaagaaacagccttacactgggcacatgga

SEQ ID NO: 580361 - DNA, 120 bp, Artificial Sequence
  ENSG00000171864_19 (sequence is synthesized)
ggagacgtccaccctgcagccaggactggggttcacgtcactgccagagctacactcgccttctgcttccacggtcctgttaattctagatcagagagcaagaaaaaagtacagaacata

SEQ ID NO: 580362 - DNA, 120 bp, Artificial Sequence
  ENSG00000171864_20 (sequence is synthesized)
tcctctacggttatttcctgctttctaattaaaaaaataataaccatggcaagagagaaagaaagagaaagtactcagaggctgacactgacatttcacttcctcgctctcctaagttta

SEQ ID NO: 580363 - DNA, 120 bp, Artificial Sequence
  ENSG00000171864_21 (sequence is synthesized)
attacaacagcacgtgcagccacgtcagccaaatgacttcatttctgatgtgaaaacgcttaggccatgatgtcgttcattttctgtaattgctgccttttctcattctgttaatagtcc

SEQ ID NO: 580364 - DNA, 120 bp, Artificial Sequence
  ENSG00000171864_22 (sequence is synthesized)
cggcaaccagatttcagtggggcatgacgtgaatgtgtatatggtgattcaaatgcaaaatttgtttatggggcttttaatcgaacgcgtgtgtgcctgaacattcttgctcaagttgat

SEQ ID NO: 580365 - DNA, 120 bp, Artificial Sequence
  ENSG00000171864_23 (sequence is synthesized)
gaatcatggggtggaataaaggctgagtttagtttttcactttagcaaaggggcaatggggtgcctactatgtgcgagacattgggaggggcttctgaattattctggatatcgtcattt

SEQ ID NO: 580366 - DNA, 120 bp, Artificial Sequence
  ENSG00000171864_24 (sequence is synthesized)
tgcagtgtgcataattttgccaaccgttgctttcgtagcccctgctaagtgttgactttttaaaatataagtttattgtaaaagtgacatgaaaattacaacagatattccagaccaaaa

SEQ ID NO: 580367 - DNA, 120 bp, Artificial Sequence
  ENSG00000171864_25 (sequence is synthesized)
taatacaacaatcccagcatctgattgagtcagtgtttgctgtttcccctgcactttcctagttcttaagcatttgcgtatgtaaacattcatatttgcaataaaaaagtgagcttttat

SEQ ID NO: 580368 - DNA, 120 bp, Artificial Sequence
  ENSG00000171864_26 (sequence is synthesized)
tatttgcaataaaaaagtgagcttttatattctaaatttttacttaacttaattcaatgctttctactcatttttctatacttttttttttgaggcagagtctcattctgttgcccaggc

SEQ ID NO: 580369 - DNA, 83 bp, Artificial Sequence
  ENSG00000171864_27 (sequence is synthesized)
gatcttggctcactacaacctccaccttccaggcttaagcgattctcatgcctcatagccctgcaaatttttttgtattttta

SEQ ID NO: 580370 - DNA, 120 bp, Artificial Sequence
  ENSG00000171864_28 (sequence is synthesized)
ctttcctccccacccattttcccccgtcctgtcccctccttccagcctgagatgtaggctccaccttaactgtgctcagatacacaagtgagggctttttaacttgattatgccttttaa

SEQ ID NO: 580371 - DNA, 120 bp, Artificial Sequence
  ENSG00000171864_29 (sequence is synthesized)
aaatactatgtatgtaaaatatttattcatctgcaatttggcttccctaacttaacattgcatcatgaaactctttggaacaacagctatctagatagctgactcattcttttggattgc

SEQ ID NO: 580372 - DNA, 120 bp, Artificial Sequence
  ENSG00000171864_30 (sequence is synthesized)
tacgtaatctcacttaatacagatgtatcatgattgattgaatcattgccttgttgatgggccttcagattatttccagttttttgccactgcaaacaataaacatccttgtacatacta

SEQ ID NO: 580373 - DNA, 120 bp, Artificial Sequence
  ENSG00000171865_0 (sequence is synthesized)
ggtgttgagcgccggcggctcgcgcccacgctgggccgggagtcgaaatgcttcccggtgccgggagtgagcgatgagctggcttctgttcctggcccacagagtcgccttggccgcctt

SEQ ID NO: 580374 - DNA, 120 bp, Artificial Sequence
  ENSG00000171865_1 (sequence is synthesized)
gccctgccgccgcggctctcgcgggttcgggatgttctatgccgtgaggaggggccgcaagaccggggtctttctgacctggaatgagtgcagagcacaggtggaccggtttcctgctgc

SEQ ID NO: 580375 - DNA, 120 bp, Artificial Sequence
  ENSG00000171865_2 (sequence is synthesized)
cagatttaagaagtttgccacagaggatgaggcctgggcctttgtcaggaaatctgcaagcccggaagtttcagaagggcatgaaaatcaacatggacaagaatcggaggcgaaagccag

SEQ ID NO: 580376 - DNA, 120 bp, Artificial Sequence
  ENSG00000171865_3 (sequence is synthesized)
caagcgactccgtgagccactggatggagatggacatgaaagcgcagagccgtatgcaaagcacatgaagccgagcgtggagccggcgcctccagttagcagagacacgttttcctacat

SEQ ID NO: 580377 - DNA, 120 bp, Artificial Sequence
  ENSG00000171865_4 (sequence is synthesized)
gggagacttcgtcgtcgtctacactgatggctgctgctccagtaatgggcgtagaaggccgcgagcaggaatcggcgtttactgggggccaggccatcctttaaatgtaggcattagact

SEQ ID NO: 580378 - DNA, 120 bp, Artificial Sequence
  ENSG00000171865_5 (sequence is synthesized)
tcctgggcggcagacaaaccaaagagcggaaattcatgcagcctgcaaagccattgaacaagcaaagactcaaaacatcaataaactggttctgtatacagacagtatgtttacgataaa

SEQ ID NO: 580379 - DNA, 120 bp, Artificial Sequence
  ENSG00000171865_6 (sequence is synthesized)
tggtataactaactgggttcaaggttggaagaaaaatgggtggaagacaagtgcagggaaagaggtgatcaacaaagaggactttgtggcactggagaggcttacccaggggatggacat

SEQ ID NO: 580380 - DNA, 120 bp, Artificial Sequence
  ENSG00000171865_7 (sequence is synthesized)
tcagtggatgcatgttcctggtcattcgggatttataggcaatgaagaagctgacagattagccagagaaggagctaaacaatcggaagactgagccatgtgactttagtccttgggaga

SEQ ID NO: 580381 - DNA, 120 bp, Artificial Sequence
  ENSG00000171865_8 (sequence is synthesized)
acttgagccagcggctgtcttgctgcctgtacttactggtgtggaaaatagcctgcaggtaggaccattgcagtgatgggcagatgcgtctttcacacggaatcaggcacagtggccttc

SEQ ID NO: 580382 - DNA, 120 bp, Artificial Sequence
  ENSG00000171865_9 (sequence is synthesized)
tgtgacatgtgtttataaaaaatggttaagtatataataaattgaacatctttgagattggagaattatgtgagatttccacattatgtttactgggttcaatactgtccttgcttgttt

SEQ ID NO: 580383 - DNA, 120 bp, Artificial Sequence
  ENSG00000171865_10 (sequence is synthesized)
tattgcaggcaagcaaggcaaatggcctaaaatgctgtggcttatattttgataagaaatcaaaaaaccattggttaaaagatgcaactcagaagtctggaagtattctgaaagcatcca

SEQ ID NO: 580384 - DNA, 120 bp, Artificial Sequence
  ENSG00000171865_11 (sequence is synthesized)
tttaccgtccagttgacaggtttgagtctcctgcttgtataggtgacttgtgcccatgggtacattaaaggaacatgctgcccagggcctgggcggacagctcagtgggcaggatgtgtg

SEQ ID NO: 580385 - DNA, 120 bp, Artificial Sequence
  ENSG00000171865_12 (sequence is synthesized)
ctgggtctcagccccatgtgcctgcttgctgggcagttagtatagggcaaagcctgcctgcggcgaccctggctgctaggccattctctaggaacagctgcgactcataaagaccaagaa

SEQ ID NO: 580386 - DNA, 120 bp, Artificial Sequence
  ENSG00000171865_13 (sequence is synthesized)
gcataaataaactttcaaaaatttatttggctctttcgttaaaaactgtgcaaattaaaaaaaaaaaaaaaaaagtaagacaccggctgggcacagtggctcacttctgtaatcctagca

SEQ ID NO: 580387 - DNA, 120 bp, Artificial Sequence
  ENSG00000171865_14 (sequence is synthesized)
tgtctcaaaaaaaaaaaaaagtagtaaaagtttgacatgattatttatttagttttaaacctttttattataaaaacatacaggaagtgacacaaaacaaatgtatagcttattgaatga

SEQ ID NO: 580388 - DNA, 120 bp, Artificial Sequence
  ENSG00000171865_15 (sequence is synthesized)
ttatgattgtaaggtgaataacctttgtgtccaccacctggtgaagaaatagtactttgccagataccccaggaggctctcccaagtgcccctccagccacagccctcttcttctccccc

SEQ ID NO: 580389 - DNA, 120 bp, Artificial Sequence
  ENSG00000171865_16 (sequence is synthesized)
tccttgccccaacaagtaatcctgacttttacagaaatgactttcttggttttttgatggcagtttagtcttgtctgcttttttttgtttatttttttatctacttcagtgtccatttgc

SEQ ID NO: 580390 - DNA, 120 bp, Artificial Sequence
  ENSG00000171865_17 (sequence is synthesized)
agtcccgtcggcctcactgttttccctgccgtttatctgttgaagagcctgggctgtttgtcccatggcttcccacagtgtagattttgctgaccacgtggtcatggtgtagttcagcat

SEQ ID NO: 580391 - DNA, 120 bp, Artificial Sequence
  ENSG00000171865_18 (sequence is synthesized)
ggtcctctatgtttcctgcacattggcagctgggtccagaggcttgatgagcctcaaatttgatccctttggcaggagaacaggcggttaggagctttcctcaggaaagtaccatgttga

SEQ ID NO: 580392 - DNA, 120 bp, Artificial Sequence
  ENSG00000171865_19 (sequence is synthesized)
cggcagctgatgctcagtgccaagatccattaattatttggggttgcaaaatggtggtattctcattctgtcgttttgcttgcctttattagctggaatggttttctaagaaagtgtttt

SEQ ID NO: 580393 - DNA, 120 bp, Artificial Sequence
  ENSG00000171865_20 (sequence is synthesized)
acttatctggttacccagtggtacagttcatataggaagggcaggataaatgcttgattctttgctcttgtacactaagtttttaagataatgcattagttgtctgtcaaggaaggtgag

SEQ ID NO: 580394 - DNA, 90 bp, Artificial Sequence
  ENSG00000171865_21 (sequence is synthesized)
ttttaagataatgcattagttgtctgtcaaggaaggtgagtggtgaagggtttttacatatatacaagaattcatgggctgggcatggtg

SEQ ID NO: 580395 - DNA, 120 bp, Artificial Sequence
  ENSG00000171865_22 (sequence is synthesized)
ctagtctgggcaacatagtgacaccctgtctctacagaaaattaaaataaaatcaggtgggtgtggtagtgcctgcctgttgtcccagctattctggaggctgagatgggaggatcgctt

SEQ ID NO: 580396 - DNA, 120 bp, Artificial Sequence
  ENSG00000171865_23 (sequence is synthesized)
gggcccaggaggtcgaggatgcgtgagctgtgaccatgccaccacattccagcctgggcgacagcaagtccttgtcttaaaaaaaaaaaagaatttgtggagttaagcatacttggtggg

SEQ ID NO: 580397 - DNA, 120 bp, Artificial Sequence
  ENSG00000171865_24 (sequence is synthesized)
tttcaatccgttgtgatttttatctttatttagctcagactagcttattcggtcagtgagagggagcctcttcagcttggctcttgctttcttttgataagtgtgcacatgtgtgcatac

SEQ ID NO: 580398 - DNA, 120 bp, Artificial Sequence
  ENSG00000171865_25 (sequence is synthesized)
atgtgtgcacagaccacacgcacagtcattgatagctccctgcagcctggcatgtcaagatgctctaggcccaatttatagagcttctgctccaaacctgtcttaaaagaaaaactttag

SEQ ID NO: 580399 - DNA, 120 bp, Artificial Sequence
  ENSG00000171865_26 (sequence is synthesized)
acaagttagcagtttaattgagcagaaaatagtttcttcagctgggtagcactcaggaccaaaagtggttcagaacgttctcctgtgcgttgtgtgcaggctgtatttatttatagccac

SEQ ID NO: 580400 - DNA, 120 bp, Artificial Sequence
  ENSG00000171865_27 (sequence is synthesized)
aggaagggaaagacacatgtacatggccagactgactgcaggtcagcctccacctcacataggcatgttttgggagccttcagcatgtgattggtgagactctgctgcttgttacagaag

SEQ ID NO: 580401 - DNA, 120 bp, Artificial Sequence
  ENSG00000171865_28 (sequence is synthesized)
tgtactctcaagtcaggtcccagtttgcttatacattaagtgaggttataagtcactatgtacagaggcagttttaggccaaacttaattccgtttaacacttggaatccattatttttc

SEQ ID NO: 580402 - DNA, 120 bp, Artificial Sequence
  ENSG00000171865_29 (sequence is synthesized)
ccagagtctctggtagagatggtatttcagatccagtttaggatgctcattgctattgcgttggtcattatttctagatttttggacggagctttaaaaaaatacaaacattgcacacac

SEQ ID NO: 580403 - DNA, 120 bp, Artificial Sequence
  ENSG00000171865_30 (sequence is synthesized)
atatttaaaggaagaatattttctgagcctatattgatattcccaatacaaattcagggtcctggggcctttacatagcctcctctatatgatgtctgtgtctcctgcactcggaatcct

SEQ ID NO: 580404 - DNA, 120 bp, Artificial Sequence
  ENSG00000171865_31 (sequence is synthesized)
gcttctcaagacacaggacaatggcatggaatatccatcccttaatcactcacttgttttattcctctttagcatttagcatttaaaaaaaatactaataccatagcattaattgtgatg

SEQ ID NO: 580405 - DNA, 120 bp, Artificial Sequence
  ENSG00000171865_32 (sequence is synthesized)
atgaaaacagcactgtgtctacgttgtcagaaaaattgctcctttttaccaccattgactcatttctgtgtgttcaggtctcataaccagtctatagtcagtgtcatcttggggacagta

SEQ ID NO: 580406 - DNA, 120 bp, Artificial Sequence
  ENSG00000171865_33 (sequence is synthesized)
ttccttgagtttctgatgttgaattcagttttgctggatacgaaattcttggcccagattttctttgagtatcttgttttattctgttttcttccagcataaagtgatgcatgaaaagcc

SEQ ID NO: 580407 - DNA, 120 bp, Artificial Sequence
  ENSG00000171865_34 (sequence is synthesized)
tgatgaatcttgttttcttcccctgacagtcatatgctgtttttccttagatgcccaaaggattttttcctttttctgtcaagtcggccgttttattcgaatgtgtcatgtgttggtatt

SEQ ID NO: 580408 - DNA, 120 bp, Artificial Sequence
  ENSG00000171865_35 (sequence is synthesized)
ggttgtcctggtccatatttgcaagcgtatggtgtgctctttctatgtgtacttcatatctgttattttaagaagatttgcttgaactggagtttagtgttacatttttcttgctttggc

SEQ ID NO: 580409 - DNA, 120 bp, Artificial Sequence
  ENSG00000171865_36 (sequence is synthesized)
ttttttctgtggggatccctgttatctgtatgttgaaatctaaattggctgttctcagtgtttgccactgtctcttgaatctcttttatctctttctttgtttctttttgagttttaaaa

SEQ ID NO: 580410 - DNA, 120 bp, Artificial Sequence
  ENSG00000171865_37 (sequence is synthesized)
tttatctctttctttgtttctttttgagttttaaaagttgttattgtaccacttttgttttgttttgttatttaaaataggaacagtgtctcactgtgttgcccaggctggtcttaaact

SEQ ID NO: 580411 - DNA, 120 bp, Artificial Sequence
  ENSG00000171865_38 (sequence is synthesized)
gctgggattacaggtgtgagccaccaaagccggccccaccttgctttttaaaacagctctgttgaggtgtaactgacaggtaatgaactgcacatacgtgaagtgaccgatgcatttgcc

SEQ ID NO: 580412 - DNA, 120 bp, Artificial Sequence
  ENSG00000171865_39 (sequence is synthesized)
tgcctgtgaagctgtcgccagaacatgtccatcaccaccaacagcagtttcacaccccggtctaaaccgtccctcgtgtcctccatgttcaggcaaccactggtctgctccctctcacta

SEQ ID NO: 580413 - DNA, 120 bp, Artificial Sequence
  ENSG00000171865_40 (sequence is synthesized)
aaggttaatttatatattctagaattttatctgagtggaatcgcagagcaagtactgtggggggaggtgcttctactcagcataattattttggcattcacccattttgtgtacatcaat

SEQ ID NO: 580414 - DNA, 120 bp, Artificial Sequence
  ENSG00000171865_41 (sequence is synthesized)
aatccacattttgtattgcatggatataccacagtttatttatttacctgttgaccgatatttcgattatttccaatttctaaataaaaataaagcaaataaagctgccgtgaacattta

SEQ ID NO: 580415 - DNA, 120 bp, Artificial Sequence
  ENSG00000171865_42 (sequence is synthesized)
cccgttaccagaagactttccgtaccagctaaattgggattggaactcagtacctaatcttcccttttaaaaaaggcaaattctaataagccagtatttgcagttggatccttgtaacaa

SEQ ID NO: 580416 - DNA, 120 bp, Artificial Sequence
  ENSG00000171865_43 (sequence is synthesized)
acgaagctgagttttactgaatcatgttccacaacttgtgaaaagatgaggcgggatctgctcattgtttgattattgggaaaacctgcagataagtagctctggcaggggtggcagagg

SEQ ID NO: 580417 - DNA, 120 bp, Artificial Sequence
  ENSG00000171865_44 (sequence is synthesized)
taagtagctctggcaggggtggcagaggagcagctttggttcgtgttggggctaagcggcattgcttttcagaacgtgaggtacctcagctttacttcctttgctttttttttttttttt

SEQ ID NO: 580418 - DNA, 120 bp, Artificial Sequence
  ENSG00000171865_45 (sequence is synthesized)
tgaggaggggccgcaagaccggggtctttctgacctggtgagtggcccgcccgccgaggcgcctccctgccggcatcggggtcgagggaggccggagcccggctaaccccggcggcggga

SEQ ID NO: 580419 - DNA, 120 bp, Artificial Sequence
  ENSG00000171865_46 (sequence is synthesized)
gcctggcggtccgagtctgtgccgcgcgctgtggctgtgggtggtcgggggaccgcctcgttttcctgctcggccggcggggttccaggaggctcatggcctgggactggaacgcaccga

SEQ ID NO: 580420 - DNA, 120 bp, Artificial Sequence
  ENSG00000171867_0 (sequence is synthesized)
gccagtcgctgacagccgcggcgccgcgagcttctcctctcctcacgaccgaggcagagcagtcattatggcgaaccttggctgctggatgctggttctctttgtggccacatggagtga

SEQ ID NO: 580421 - DNA, 120 bp, Artificial Sequence
  ENSG00000171867_1 (sequence is synthesized)
cctgggcctctgcaagaagcgcccgaagcctggaggatggaacactgggggcagccgatacccggggcagggcagccctggaggcaaccgctacccacctcagggcggtggtggctgggg

SEQ ID NO: 580422 - DNA, 120 bp, Artificial Sequence
  ENSG00000171867_2 (sequence is synthesized)
gcagcctcatggtggtggctgggggcagcctcatggtggtggctgggggcagccccatggtggtggctggggacagcctcatggtggtggctggggtcaaggaggtggcacccacagtca

SEQ ID NO: 580423 - DNA, 120 bp, Artificial Sequence
  ENSG00000171867_3 (sequence is synthesized)
gtggaacaagccgagtaagccaaaaaccaacatgaagcacatggctggtgctgcagcagctggggcagtggtggggggccttggcggctacatgctgggaagtgccatgagcaggcccat

SEQ ID NO: 580424 - DNA, 120 bp, Artificial Sequence
  ENSG00000171867_4 (sequence is synthesized)
catacatttcggcagtgactatgaggaccgttactatcgtgaaaacatgcaccgttaccccaaccaagtgtactacaggcccatggatgagtacagcaaccagaacaactttgtgcacga

SEQ ID NO: 580425 - DNA, 120 bp, Artificial Sequence
  ENSG00000171867_5 (sequence is synthesized)
ctgcgtcaatatcacaatcaagcagcacacggtcaccacaaccaccaagggggagaacttcaccgagaccgacgttaagatgatggagcgcgtggttgagcagatgtgtatcacccagta

SEQ ID NO: 580426 - DNA, 120 bp, Artificial Sequence
  ENSG00000171867_6 (sequence is synthesized)
cgagagggaatctcaggcctattaccagagaggatcgagcatggtcctcttctcctctccacctgtgatcctcctgatctctttcctcatcttcctgatagtgggatgaggaaggtcttc

SEQ ID NO: 580427 - DNA, 120 bp, Artificial Sequence
  ENSG00000171867_7 (sequence is synthesized)
ctgttttcaccatctttctaatctttttccagcttgagggaggcggtatccacctgcagcccttttagtggtggtgtctcactctttcttctctctttgtcccggataggctaatcaata

SEQ ID NO: 580428 - DNA, 120 bp, Artificial Sequence
  ENSG00000171867_8 (sequence is synthesized)
cccttggcactgatgggcactggaaaacatagagtagacctgagatgctggtcaagccccctttgattgagttcatcatgagccgttgctaatgccaggccagtaaaagtataacagcaa

SEQ ID NO: 580429 - DNA, 120 bp, Artificial Sequence
  ENSG00000171867_9 (sequence is synthesized)
ataaccattggttaatctggacttatttttggacttagtgcaacaggttgaggctaaaacaaatctcagaacagtctgaaatacctttgcctggatacctctggctccttcagcagctag

SEQ ID NO: 580430 - DNA, 120 bp, Artificial Sequence
  ENSG00000171867_10 (sequence is synthesized)
ttcatagctatttagagatattttccattttaagaaaacccgacaacatttctgccaggtttgttaggaggccacatgatacttattcaaaaaaatcctagagattcttagctcttggga

SEQ ID NO: 580431 - DNA, 120 bp, Artificial Sequence
  ENSG00000171867_11 (sequence is synthesized)
tgcaggctcagcccgctggagcatgagctctgtgtgtaccgagaactggggtgatgttttacttttcacagtatgggctacacagcagctgttcaacaagagtaaatattgtcacaacac

SEQ ID NO: 580432 - DNA, 120 bp, Artificial Sequence
  ENSG00000171867_12 (sequence is synthesized)
tgaacctctggctagaggacatattcacagtgaacataactgtaacatatatgaaaggcttctgggacttgaaatcaaatgtttgggaatggtgcccttggaggcaacctcccattttag

SEQ ID NO: 580433 - DNA, 120 bp, Artificial Sequence
  ENSG00000171867_13 (sequence is synthesized)
atgtttaaaggaccctatatgtggcattcctttctttaaactataggtaattaaggcagctgaaaagtaaattgccttctagacactgaaggcaaatctcctttgtccatttacctggaa

SEQ ID NO: 580434 - DNA, 120 bp, Artificial Sequence
  ENSG00000171867_14 (sequence is synthesized)
accagaatgattttgacatacaggagagctgcagttgtgaaagcaccatcatcatagaggatgatgtaattaaaaaatggtcagtgtgcaaagaaaagaactgcttgcatttctttattt

SEQ ID NO: 580435 - DNA, 120 bp, Artificial Sequence
  ENSG00000171867_15 (sequence is synthesized)
ctgtctcataattgtcaaaaaccagaattaggtcaagttcatagtttctgtaattggcttttgaatcaaagaatagggagacaatctaaaaaatatcttaggttggagatgacagaaata

SEQ ID NO: 580436 - DNA, 120 bp, Artificial Sequence
  ENSG00000171867_16 (sequence is synthesized)
tgattgatttgaagtggaaaaagaaattctgttaatgttaattaaagtaaaattattccctgaattgtttgatattgtcacctagcagatatgtattacttttctgcaatgttattattg

SEQ ID NO: 580437 - DNA, 120 bp, Artificial Sequence
  ENSG00000171867_17 (sequence is synthesized)
gcttgcactttgtgagtattctatgtaaaaatatatatgtatataaaatatatattgcataggacagacttaggagttttgtttagagcagttaacatctgaagtgtctaatgcattaac

SEQ ID NO: 580438 - DNA, 120 bp, Artificial Sequence
  ENSG00000171867_18 (sequence is synthesized)
ttttgtaaggtactgaatacttaatatgtgggaaacccttttgcgtggtccttaggcttacaatgtgcactgaatcgtttcatgtaagaatccaaagtggacaccattaacaggtctttg

SEQ ID NO: 580439 - DNA, 120 bp, Artificial Sequence
  ENSG00000171867_19 (sequence is synthesized)
aaatatgcatgtactttatattttctatatttgtaactttgcatgttcttgttttgttatataaaaaaattgtaaatgtttaatatctgactgaaattaaacgagcgaagatgagcacca

SEQ ID NO: 580440 - DNA, 120 bp, Artificial Sequence
  ENSG00000171867_20 (sequence is synthesized)
cccgcgagcgccgccgcttcccttccccgccccgcgtccctccccctcggccccgcgcgtcgcctgtcctccgagccagtcgctgacagccgcggcgccgcgagcttctcctctcctcac

SEQ ID NO: 580441 - DNA, 80 bp, Artificial Sequence
  ENSG00000171867_21 (sequence is synthesized)
cgggggccgagtgaggaccccgggcctcgggtcccaggcgcaagggtgcccggccgggcggggtcgggaccccagtgagg

SEQ ID NO: 580442 - DNA, 120 bp, Artificial Sequence
  ENSG00000171867_22 (sequence is synthesized)
cgcgtgacgcgtctcgggcctgcccggctgcgctggtctccgctcgggtgaggcggcttggcttcgcttttcagagcagtcattatggcgaaccttggctgctggatgctggttctcttt

SEQ ID NO: 580443 - DNA, 120 bp, Artificial Sequence
  ENSG00000171872_0 (sequence is synthesized)
gtggcgatgtaccgatacccgcctgcgacgccgtggtggctggttccctgtctcttcagtagagagtctagaccccacccagtcttcatgtacggccgaccgcaggctgagatggaacag

SEQ ID NO: 580444 - DNA, 120 bp, Artificial Sequence
  ENSG00000171872_1 (sequence is synthesized)
gaggctggggagctgagccggtggcaggcggcgcaccaggctgcccaggataacgagaactcagcgcccatcttgaacatgtcttcatcttctggaagctctggagtgcacacctcttgg

SEQ ID NO: 580445 - DNA, 120 bp, Artificial Sequence
  ENSG00000171872_2 (sequence is synthesized)
aaccaaggcctaccaagcattcagcactttcctcacagcgcagagatgctggggtcccctttggtgtctgttgaggcgccggggcagaatgtgaatgaaggggggccacagttcagtatg

SEQ ID NO: 580446 - DNA, 120 bp, Artificial Sequence
  ENSG00000171872_3 (sequence is synthesized)
ccactgcctgagcgtggtatgagctactgcccccaagcgactctcactccttcccggatgatttactgtcagagaatgtctccccctcagcaagagatgacgattttcagtgggccccaa

SEQ ID NO: 580447 - DNA, 120 bp, Artificial Sequence
  ENSG00000171872_4 (sequence is synthesized)
ctaatgcccgtaggagagcccaatattccaagggtagccaggcccttcggtgggaatctaaggatgccccccaatgggctgccagtctcggcttccactggaatcccaataatgtcccac

SEQ ID NO: 580448 - DNA, 120 bp, Artificial Sequence
  ENSG00000171872_5 (sequence is synthesized)
actgggaaccctccagtgccttaccctggcctctcgacagtaccttctgacgaaacattgttgggcccgactgtgccttccactgaggcccaggcagtgctcccctccatggctcagatg

SEQ ID NO: 580449 - DNA, 120 bp, Artificial Sequence
  ENSG00000171872_6 (sequence is synthesized)
ttgcccccgcaagatgcccatgaccttgggatgcccccagctgagtcccagtcattgctggttttaggatctcaggactctcttgtcagtcagccagactctcaagaaggcccatttcta

SEQ ID NO: 580450 - DNA, 120 bp, Artificial Sequence
  ENSG00000171872_7 (sequence is synthesized)
ccagagcagcccggacctgctccacagacagtagagaagaactccaggcctcaggaagggactggtagaaggggctcctcagaggcaaggccttactgctgcaactacgagaactgcgga

SEQ ID NO: 580451 - DNA, 120 bp, Artificial Sequence
  ENSG00000171872_8 (sequence is synthesized)
aaagcttataccaaacgctcccacctcgtgagccaccagcgcaagcacacaggtgagaggccatattcttgcaactgggaaagttgttcatggtctttcttccgttctgatgagcttaga

SEQ ID NO: 580452 - DNA, 120 bp, Artificial Sequence
  ENSG00000171872_9 (sequence is synthesized)
cgacatatgcgggtacacaccagatatcgaccatataaatgtgatcagtgcagccgggagttcatgaggtctgaccatctcaagcaacaccagaagactcatcggccgggaccctcagac

SEQ ID NO: 580453 - DNA, 120 bp, Artificial Sequence
  ENSG00000171872_10 (sequence is synthesized)
ccacaggccaacaacaacaatggagagcaggacagtcctcctgctgctggtccttaggtgaatgaagaaggaagaggattccaggctgagagcactggacgtggcaactgttcagaggag

SEQ ID NO: 580454 - DNA, 120 bp, Artificial Sequence
  ENSG00000171872_11 (sequence is synthesized)
aggcagtcttcaagttctacattcattcagaaaaatgttttttgagcctacaatactgagcgcaacaaggctgtggagacccatggtgaggagcatggagttaactaaaggatgtgtcag

SEQ ID NO: 580455 - DNA, 120 bp, Artificial Sequence
  ENSG00000171872_12 (sequence is synthesized)
ggaagaaagacttctcaaggaggtgcctccatcagacccaaaggactcatgggggctagctgcacctcacatttcttggacatataccgttggacatgtctatcttctggaaactatggc

SEQ ID NO: 580456 - DNA, 120 bp, Artificial Sequence
  ENSG00000171872_13 (sequence is synthesized)
ctctgcagagcagaaagatcatagacaacatttatgaatgtgcccagtgctgccaagaagagaagccggtcctctgcaggctcaagcctatctgggcctctggggaagccccacagcctt

SEQ ID NO: 580457 - DNA, 120 bp, Artificial Sequence
  ENSG00000171872_14 (sequence is synthesized)
ggctgtgcctgcccctgccctctcacccctaccctgaccttgtcctacttcactgcctttgtctgtgttactagtggccccagtatacctgggatggacatccaggtgcccttcatccaa

SEQ ID NO: 580458 - DNA, 120 bp, Artificial Sequence
  ENSG00000171872_15 (sequence is synthesized)
gctcctatgtgaggggaatggacattattaaaagaacaggggcagaagtggctcatttatgacccattcactagccccagggattgaagtcttgggtactcaaagtgtctttctaccagg

SEQ ID NO: 580459 - DNA, 120 bp, Artificial Sequence
  ENSG00000171872_16 (sequence is synthesized)
gcaccagatcccttccatggagcaggtcatctcgggttcactgggccagggatggtctctgttccccagcccacctggctcacacacagcctcatgggtagggtcagcaaaccagatggc

SEQ ID NO: 580460 - DNA, 120 bp, Artificial Sequence
  ENSG00000171872_17 (sequence is synthesized)
ttgttgttggaatgtaggatgagaggcctgcttggtgacctagcattttcaccaagaagtggacgtggagaggaccagagtgatcaagggtgtatgatgtgcactacaatggtgggcaaa

SEQ ID NO: 580461 - DNA, 120 bp, Artificial Sequence
  ENSG00000171872_18 (sequence is synthesized)
gcactacaatggtgggcaaaacaggctcctgctcttgtggaggtcacaatctagcggagaaaggatgttactagaagtacacaaattgggcccggcgcgatggctcacgcctgtaatccc

SEQ ID NO: 580462 - DNA, 63 bp, Artificial Sequence
  ENSG00000171872_19 (sequence is synthesized)
atggcgggtaccgtaatcctagctactcgggagactgacgggagaatcgcttgaacccaggag

SEQ ID NO: 580463 - DNA, 89 bp, Artificial Sequence
  ENSG00000171872_20 (sequence is synthesized)
aggttgcagtgagctcagatctcaccatttatctcaaaacaatcaaaacaaaaaagacctgtggactctagtagattttgaatcctgcc

SEQ ID NO: 580464 - DNA, 120 bp, Artificial Sequence
  ENSG00000171872_21 (sequence is synthesized)
aaaaaagacctgtggactctagtagattttgaatcctgcctctgccatttcctggctatgaggtgtcttgagaaatttacttgtcactcttgcttctgatagtaaaggggatggtgcgat

SEQ ID NO: 580465 - DNA, 120 bp, Artificial Sequence
  ENSG00000171872_22 (sequence is synthesized)
agattcaagatggagagataaggttaagtgttttctttggctgcaacatggagattagattagagcaaggatgtaagggagaggaagggacatagcagtatttcaggtgagagtcaaggt

SEQ ID NO: 580466 - DNA, 120 bp, Artificial Sequence
  ENSG00000171872_23 (sequence is synthesized)
ggctttggctagggtgtgagagtggaggtagggagaagtaggaaagtgatagttaactggatttgttaggtgagggtgaggccaagggtgacttccaggttcctgacttgtgttataagt

SEQ ID NO: 580467 - DNA, 120 bp, Artificial Sequence
  ENSG00000171872_24 (sequence is synthesized)
aacacagaagaagaatggatgaacttgattcgttttccattgattgtgatatctatcatacctgcaaaaaatattttgtatatatccaatttaataataaatgcactcatgttaggaagg

SEQ ID NO: 580468 - DNA, 80 bp, Artificial Sequence
  ENSG00000171873_0 (sequence is synthesized)
gggagcgccgcagtggccgctgcctgcaccgcccggccccggagccgccgctttgcccgcttgccgggcacgctcagagc

SEQ ID NO: 580469 - DNA, 120 bp, Artificial Sequence
  ENSG00000171873_1 (sequence is synthesized)
ccggcctcggggagcccggccgccgcccgggccaggcagctccgctctcggacagccgcgctccgcgtcacaggaacttgggcaggaccccgacgggacccgtgcgcggagctgcatctg

SEQ ID NO: 580470 - DNA, 120 bp, Artificial Sequence
  ENSG00000171873_2 (sequence is synthesized)
tctggagccccgcggctatgccctgtgctcccctccctgccggccgctcgttctgtgccccggcccggccaccgacggccgcgcgttgagatgactttccgcgatctcctgagcgtcagt

SEQ ID NO: 580471 - DNA, 120 bp, Artificial Sequence
  ENSG00000171873_3 (sequence is synthesized)
agatgactttccgcgatctcctgagcgtcagtttcgagggaccccgcccggacagcagcgcagggggctccagcgcgggcggcggcgggggcagcgcgggcggcgcggccccctcggagg

SEQ ID NO: 580472 - DNA, 120 bp, Artificial Sequence
  ENSG00000171873_4 (sequence is synthesized)
gaggacaaccggagctccgcgggggagccggggagcgcgggcgcgggcggcgacgtgaatggcacggcggccgtcgggggactggtggtgagcgcgcagggcgtgggcgtgggcgtcttc

SEQ ID NO: 580473 - DNA, 120 bp, Artificial Sequence
  ENSG00000171873_5 (sequence is synthesized)
gtggtgagcgcgcagggcgtgggcgtgggcgtcttcctggcagccttcatccttatggccgtggcaggtaacctgcttgtcatcctctcagtggcctgcaaccgccacctgcagaccgtc

SEQ ID NO: 580474 - DNA, 120 bp, Artificial Sequence
  ENSG00000171873_6 (sequence is synthesized)
accaactatttcatcgtgaacctggccgtggccgacctgctgctgagcgccaccgtactgcccttctcggccaccatggaggttctgggcttctgggcctttggccgcgccttctgcgac

SEQ ID NO: 580475 - DNA, 120 bp, Artificial Sequence
  ENSG00000171873_7 (sequence is synthesized)
gtatgggccgccgtggacgtgctgtgctgcacggcctccatcctcagcctctgcaccatctccgtggaccggtacgtgggcgtgcgccactcactcaagtacccagccatcatgaccgag

SEQ ID NO: 580476 - DNA, 120 bp, Artificial Sequence
  ENSG00000171873_8 (sequence is synthesized)
cgcaaggcggccgccatcctggccctgctctgggtcgtagccctggtggtgtccgtagggcccctgctgggctggaaggagcccgtgccccctgacgagcgcttctgcggtatcaccgag

SEQ ID NO: 580477 - DNA, 120 bp, Artificial Sequence
  ENSG00000171873_9 (sequence is synthesized)
gaggcgggctacgctgtcttctcctccgtgtgctccttctacctgcccatggcggtcatcgtggtcatgtactgccgcgtgtacgtggtcgcgcgcagcaccacgcgcagcctcgaggcg

SEQ ID NO: 580478 - DNA, 120 bp, Artificial Sequence
  ENSG00000171873_10 (sequence is synthesized)
ggcgtcaagcgcgagcgaggcaaggcctccgaggtggtgctgcgcatccactgtcgcggcgcggccacgggcgccgacggggcgcacggcatgcgcagcgccaagggccacaccttccgc

SEQ ID NO: 580479 - DNA, 120 bp, Artificial Sequence
  ENSG00000171873_11 (sequence is synthesized)
agctcgctctccgtgcgcctgctcaagttctcccgtgagaagaaagcggccaagactctggccatcgtcgtgggtgtcttcgtgctctgctggttccctttcttctttgtcctgccgctc

SEQ ID NO: 580480 - DNA, 120 bp, Artificial Sequence
  ENSG00000171873_12 (sequence is synthesized)
ctacttcaacagctgcgtgaacccgctcatctacccctgttccagccgcgagttcaagcgcgccttcctccgtctcctgcgctgccagtgccgtcgtcgccggcgccgccgccctctctg

SEQ ID NO: 580481 - DNA, 120 bp, Artificial Sequence
  ENSG00000171873_13 (sequence is synthesized)
cctctctggcgtgtctacggccaccactggcgggcctccaccagcggcctgcgccaggactgcgccccgagttcgggcgacgcgccccccggagcgccgctggccctcaccgcgctcccc

SEQ ID NO: 580482 - DNA, 120 bp, Artificial Sequence
  ENSG00000171873_14 (sequence is synthesized)
ccccgaacccccaggcacgcccgagatgcaggctccggtcgccagccgtcgaaagccacccagcgccttccgcgagtggaggctgctggggccgttccggagacccacgacccagctgcg

SEQ ID NO: 580483 - DNA, 120 bp, Artificial Sequence
  ENSG00000171873_15 (sequence is synthesized)
cgccaaagtctccagcctgtcgcacaagatccgcgccgggggcgcgcagcgcgcagaggcagcgtgcgcccagcgctcagaggtggaggctgtgtccctaggcgtcccacacgaggtggc

SEQ ID NO: 580484 - DNA, 120 bp, Artificial Sequence
  ENSG00000171873_16 (sequence is synthesized)
cgagggcgccacctgccaggcctacgaattggccgactacagcaacctacgggagaccgatatttaaggaccccagagctaggccgcggagtgtgctgggcttgggggtaagggggacca

SEQ ID NO: 580485 - DNA, 120 bp, Artificial Sequence
  ENSG00000171873_17 (sequence is synthesized)
gagaggcgggctggtgttctaagagcccccgtgcaaatcggagacccggaaactgatcagggcagctgctctgtgacatccctgaggaactgggcagagcttgaggctggagcccttgaa

SEQ ID NO: 580486 - DNA, 120 bp, Artificial Sequence
  ENSG00000171873_18 (sequence is synthesized)
aggtgaaaagtagtggggccccctgctggactcaggtgcccagaactcttttcttagaagggagaggctgcgggctccgtggggccttttgctcccaatccctatttgagaaacactgcc

SEQ ID NO: 580487 - DNA, 120 bp, Artificial Sequence
  ENSG00000171873_19 (sequence is synthesized)
ccatcctccatgccctgaaccctgagtagacagccccaagcatggccaggaaggcctgcccctcctcttctgggaaataggcacagaagctttggccggctaccccagtgcctcccttag

SEQ ID NO: 580488 - DNA, 120 bp, Artificial Sequence
  ENSG00000171873_20 (sequence is synthesized)
ggaaaaagtcagtgggaccagggctcctcagtggacaaatttctccttcttactgccaactggaggaacccagtggacctaccaccacccacaagctttggtggcagattgtatagccgt

SEQ ID NO: 580489 - DNA, 120 bp, Artificial Sequence
  ENSG00000171873_21 (sequence is synthesized)
catacaagcctgctgtatttatccatgggcccgctgtccgccacccaggctcctccgtgcacaccccatcacctggcccctaccccttattacttcccctcaagggccttactgtttaca

SEQ ID NO: 580490 - DNA, 120 bp, Artificial Sequence
  ENSG00000171873_22 (sequence is synthesized)
ctctgtacatagctcatcgtgcctgtgcccatcacttcttgctgggattccaagccaccaattggagagctttatttgtcattttgagacatatttattggtaagagtacttctattttg

SEQ ID NO: 580491 - DNA, 120 bp, Artificial Sequence
  ENSG00000171873_23 (sequence is synthesized)
tccaagctgtgcaaactgtccctctttagcccataacccattaaaaaaaaaatactttttcccctaaagtctgtcaagaactaaaggcccgcaacagaatagattgggtctacatttgcc

SEQ ID NO: 580492 - DNA, 120 bp, Artificial Sequence
  ENSG00000171873_24 (sequence is synthesized)
tctaactctactctggtttgttgcctacattcattgaaggtaatcctcaatatcaggtagaggctccttgttcccgcagctgaagccatcggagggcgtcttcaaggtcatcttctggct

SEQ ID NO: 580493 - DNA, 120 bp, Artificial Sequence
  ENSG00000171877_0 (sequence is synthesized)
agagcccggcgcttgatctgggctggggggaggcggtggcggctgagggaaggaggaggataaggaggaggaacgaggccagcaggaggcaacggcagcgacggggccggggtgatggtg

SEQ ID NO: 580494 - DNA, 120 bp, Artificial Sequence
  ENSG00000171877_1 (sequence is synthesized)
caggtgcctggggtcggtgcggagctgccgggctgagggacgcctggtccagggtccgcagcgccgccgcgtcgctcccgggcgggcgggcgggaagatgctgagcaggttgatgagcgg

SEQ ID NO: 580495 - DNA, 120 bp, Artificial Sequence
  ENSG00000171877_2 (sequence is synthesized)
cagcagcaggagcctggagcgcgagtacagctgcaccgtgcggctgctggacgacagcgagtacacctgcaccatccagagagatgccaaaggccagtacctgtttgaccttctttgcca

SEQ ID NO: 580496 - DNA, 120 bp, Artificial Sequence
  ENSG00000171877_3 (sequence is synthesized)
ccatctgaacctacttgagaaagactattttggtatccgctttgtagacccagataagcagcggcattggctggaatttacaaagtctgtggtgaaacaattgagatcccagcctccatt

SEQ ID NO: 580497 - DNA, 120 bp, Artificial Sequence
  ENSG00000171877_4 (sequence is synthesized)
caccatgtgcttccgtgtgaagttttatcctgcagaccctgctgctctgaaagaagaaataaccaggtatttagtcttcctgcagatcaaaagggatctctaccatggccgactcctctg

SEQ ID NO: 580498 - DNA, 120 bp, Artificial Sequence
  ENSG00000171877_5 (sequence is synthesized)
taaaacatcggatgctgccttgttagcagcttacatccttcaagcggagattggggattatgactcagggaaacaccctgaaggctacagctccaagttccagtttttccctaaacattc

SEQ ID NO: 580499 - DNA, 120 bp, Artificial Sequence
  ENSG00000171877_6 (sequence is synthesized)
agagaagctggaaaggaaaattgctgagattcacaagacggaactgagtggtcaaacaccagcaacatcagagctgaacttcttaagaaaagcacagacattggaaacatatggagtgga

SEQ ID NO: 580500 - DNA, 120 bp, Artificial Sequence
  ENSG00000171877_7 (sequence is synthesized)
tcctcacccatgtaaggacgtgtcaggaaatgctgcatttctggccttcactccttttgggtttgttgttcttcaaggaaacaagagggtccacttcattaaatggaatgaggtgaccaa

SEQ ID NO: 580501 - DNA, 120 bp, Artificial Sequence
  ENSG00000171877_8 (sequence is synthesized)
gctgaaatttgaaggaaagactttctatttatacgtaagtcagaaagaggaaaagaaaattattcttacatattttgctccaactcctgaagcgtgtaagcacctctggaaatgtggaat

SEQ ID NO: 580502 - DNA, 120 bp, Artificial Sequence
  ENSG00000171877_9 (sequence is synthesized)
cgagaaccaagccttctacaagctggagaagtcaagccaagtccgcacagtgtccagcagcaatttattctttaaagggagccggttccgatacagtggccgagttgcaaaggaagtcat

SEQ ID NO: 580503 - DNA, 120 bp, Artificial Sequence
  ENSG00000171877_10 (sequence is synthesized)
ggaatcaagtgctaagatcaaacgggagccaccggaaatacacagagcagggatggttcccagccggagctgtccctccataacccatggcccaaggctgagcagcgtccccaggacccg

SEQ ID NO: 580504 - DNA, 120 bp, Artificial Sequence
  ENSG00000171877_11 (sequence is synthesized)
cagaagagctgttcacatctccatcatggaaggcctagagtccttacgggacagtgcccattccacaccagtgcgttccacttcccatggggacaccttcctgcctcacgtgagaagcag

SEQ ID NO: 580505 - DNA, 120 bp, Artificial Sequence
  ENSG00000171877_12 (sequence is synthesized)
ccggacagatagcaatgagcgagtagctgtgattgcagacgaggcctacagccctgcagacagcgtgctgcccacccctgtggctgagcacagcctggagctgatgttgctttcccggca

SEQ ID NO: 580506 - DNA, 120 bp, Artificial Sequence
  ENSG00000171877_13 (sequence is synthesized)
gatcaatggagccacctgcagcattgaggaggagaaggaatctgaagccagcaccccaactgctacagaggtggaggcccttgggggagagctgagggccctgtgtcaggggcacagcgg

SEQ ID NO: 580507 - DNA, 120 bp, Artificial Sequence
  ENSG00000171877_14 (sequence is synthesized)
gcccgaggaggaacaggtgaataagtttgttctaagtgtcctccgtttgctccttgtgaccatgggactcctctttgttttgctcctcctcctgatcatccttaccgagtctgaccttga

SEQ ID NO: 580508 - DNA, 120 bp, Artificial Sequence
  ENSG00000171877_15 (sequence is synthesized)
cattgcctttttccgtgatatccgccagacccccgagtttgaacaattccactatcaatacttttgtcccctcaggcgatggtttgcctgcaaaatccgctcagtggtgagcctgctcat

SEQ ID NO: 580509 - DNA, 120 bp, Artificial Sequence
  ENSG00000171877_16 (sequence is synthesized)
tgacacctgagaaggcatgactcctcccaaaaactagccaggtggaccaaggaacccggctacccattcccagcaatgggacccatcgcggaaccatcggcacatataccaagtcctcct

SEQ ID NO: 580510 - DNA, 120 bp, Artificial Sequence
  ENSG00000171877_17 (sequence is synthesized)
ctcatgactcaaagtccactgcagcctaggagggtgtttcccagaagaagaaagggataggctcatgccctgtctaaacaaactgggaaaactcattttcttcagaagttatttcaagaa

SEQ ID NO: 580511 - DNA, 120 bp, Artificial Sequence
  ENSG00000171877_18 (sequence is synthesized)
aggctcagcgactctgtttctcatctttccaatttgcaggataatttttggttttgaattttgatttttcatagatgtatattattttgaagtatcaaataaaaataatttattttacta

SEQ ID NO: 580512 - DNA, 120 bp, Artificial Sequence
  ENSG00000171877_19 (sequence is synthesized)
ttactgattattgcagtagtatcacctagcagaggggacactagttgaaaactagagagctgctgtcctctgtattctgcaggagcttttcctgctggtgccactgggttccagtagact

SEQ ID NO: 580513 - DNA, 120 bp, Artificial Sequence
  ENSG00000171877_20 (sequence is synthesized)
catcactgcagcctcagcagggcaggccagggatctggacaatggggactgtttagttttttgtttgttttttttgccagccagaacttttaaaaaagtaaacatccatgtagaatgatt

SEQ ID NO: 580514 - DNA, 120 bp, Artificial Sequence
  ENSG00000171877_21 (sequence is synthesized)
tgcttcttatgatggtctgagttggattttcttttccttttgttttttcaaatctgagcagagtgggcatctgaagggaccaccgctacagcaacagcagcatcaggggtggggtaagtc

SEQ ID NO: 580515 - DNA, 120 bp, Artificial Sequence
  ENSG00000171877_22 (sequence is synthesized)
tgtccccttagtctagagcctagtgggcatcaccatagttttgtataatgaaactagacttaacgtgattttttttttccgaagaacctcaagacttttatagtgctccaggggcgttaa

SEQ ID NO: 580516 - DNA, 120 bp, Artificial Sequence
  ENSG00000171877_23 (sequence is synthesized)
acgaattcagtggtaccagagatagatagttctgtcagaaatgttggacaaagtgtagttaagagaaagcagagttaagttacctgagagactgttgagatttggatagcagtgcttatt

SEQ ID NO: 580517 - DNA, 120 bp, Artificial Sequence
  ENSG00000171877_24 (sequence is synthesized)
ttatatacacccccttgacccaaagactatttcaatttatattttaacaacgaaatgttattttcttaacaattcatattttgtttttactttatggattaagaaaatagagcctgatga

SEQ ID NO: 580518 - DNA, 120 bp, Artificial Sequence
  ENSG00000171877_25 (sequence is synthesized)
actaaacgatgcaagaaagaaactgatcctgagaatgaaaagcttcagaaaatagaattccaagatcaacagccttagaagggaccaggaaaagaatcttttaaaatagatttctaagag

SEQ ID NO: 580519 - DNA, 120 bp, Artificial Sequence
  ENSG00000171877_26 (sequence is synthesized)
atgcctacaaaacacagaatgtgaccgtggcagagaccaacacttagatgtagaaatgctgccccctagggtcatcctctgcataagttctaggaaagcatcaccatccttgcagaggga

SEQ ID NO: 580520 - DNA, 120 bp, Artificial Sequence
  ENSG00000171877_27 (sequence is synthesized)
agtcctcgaagcacgcagcacaggcatatgaagggcgagtgtgggatcctaggcccaagctcttcaactctaaaaccaatcacacacaagatcctgttttcatctcagggagagatttct

SEQ ID NO: 580521 - DNA, 120 bp, Artificial Sequence
  ENSG00000171877_28 (sequence is synthesized)
aagtcatctggggcttgagggcttatttaagggtggtcaatggacatattcctggacccacacaaaagtagagcagctgctgataccctaattggacagccccaaacgcagaacagaaca

SEQ ID NO: 580522 - DNA, 120 bp, Artificial Sequence
  ENSG00000171877_29 (sequence is synthesized)
agtcacttgtagacttgacctcccctattttgtcccccgagatggtagaaccatgtccatgtttacaatatgacaactgtggaataattggggttcttagggagagatttgcataatttt

SEQ ID NO: 580523 - DNA, 120 bp, Artificial Sequence
  ENSG00000171877_30 (sequence is synthesized)
aaagacatcctttcatctggaccagaggtcaatcaacttatgtcaagtgctacacagtaaatattttggtttagcacgccatactgtgtcacaactgctcaattctgccatcacagcaca

SEQ ID NO: 580524 - DNA, 120 bp, Artificial Sequence
  ENSG00000171877_31 (sequence is synthesized)
aaaacagccacagataatttgtaaatgaaggaacatggctgtgttccaataaaactttatgaaaacagtgagctgaatttagcctacaggccataatacgccaatcctgctctagacaat

SEQ ID NO: 580525 - DNA, 120 bp, Artificial Sequence
  ENSG00000171877_32 (sequence is synthesized)
aaaactgatccttaccagtatgttagcagaagagggtcagtcagctctgtttccatgcctgacatgtatcaaagatctgggacctcttcccagtggaggcactagggttgcttgtttaaa

SEQ ID NO: 580526 - DNA, 120 bp, Artificial Sequence
  ENSG00000171877_33 (sequence is synthesized)
gggtgcttgaacaactaaccagcaaagagatgtctgatgccaaatgggcaagatcaaatactggaatgctaaaacacagctggaatctaagaagggaagagggcttctctgaccattttc

SEQ ID NO: 580527 - DNA, 120 bp, Artificial Sequence
  ENSG00000171877_34 (sequence is synthesized)
ataccagcaacaatttaggcagaattataaacatctatttatcgagtgacaatacaaaccgaaggagatcctagtagagattaggggtcagttaaaatcaactagccactgccacttgtc

SEQ ID NO: 580528 - DNA, 120 bp, Artificial Sequence
  ENSG00000171877_35 (sequence is synthesized)
atctacatagcaaaggctttatttagcacaggactaacgtgaaaagtagacccagagatgaaaaggctgtcaggagacagggggctggtgtccacctggtatctactgtcttatgcaaca

SEQ ID NO: 580529 - DNA, 120 bp, Artificial Sequence
  ENSG00000171877_36 (sequence is synthesized)
tagaagattaccttttagtgtagtgctcctacctcagtttgtagaatctggtgtttctatgcagtgagtgatagcctcaactctgacctttcatattcacattagagacagatgcagtat

SEQ ID NO: 580530 - DNA, 120 bp, Artificial Sequence
  ENSG00000171877_37 (sequence is synthesized)
tccatatcctagtatgttccttgtgtctagagttctaacagtacagtagtctatgccatttctaacagctaaattttgctctgtaaacagaaactttagggttgtttttttccagggctc

SEQ ID NO: 580531 - DNA, 120 bp, Artificial Sequence
  ENSG00000171877_38 (sequence is synthesized)
atcccagaaaatatggatagaaaagtttccttcagtttgcttttcaaatagtgcttgaataataaacctcctttgattggtgactagtcttttttggtatatctccacctttaaaaattg

SEQ ID NO: 580532 - DNA, 120 bp, Artificial Sequence
  ENSG00000171877_39 (sequence is synthesized)
ttcaagtttttaacctggttatactgtgttctaacatgtctctcattttctctcaaaattagtttatctcattgtagaaaaagcaatggttttcatagcttcatctatcaggaaataaaa

SEQ ID NO: 580533 - DNA, 120 bp, Artificial Sequence
  ENSG00000171877_40 (sequence is synthesized)
ctcttactaaagaatagcatactgcatctttaagcagtagagggtaaactacctgcaaatgtgaatttcttagatacatttaaaaatatatagttgttaaccttctgtgtgccaaaaact

SEQ ID NO: 580534 - DNA, 120 bp, Artificial Sequence
  ENSG00000171877_41 (sequence is synthesized)
cttaagttacattttccttcaaagcaatgtacttttttctacatatgcagtatgtagttagcataaaatcattggtgccatgaagattatttttaaacttaaataaatatttaaatatca

SEQ ID NO: 580535 - DNA, 120 bp, Artificial Sequence
  ENSG00000171877_42 (sequence is synthesized)
caacagagtggacttctttccttcaagaagtgtgaatactacctcttgaactggtcactctcaaagggctctggagtaactaatcagaagcgtcttttcttttacctatgatgttgccac

SEQ ID NO: 580536 - DNA, 120 bp, Artificial Sequence
  ENSG00000171877_43 (sequence is synthesized)
tgtggacatttttggagagagctatgttgctgcttatttcggaggttgcaaatagattcaagtggtctaatggatatacttggaaaatgccaaaggcataacactgaaagataagctggg

SEQ ID NO: 580537 - DNA, 120 bp, Artificial Sequence
  ENSG00000171877_44 (sequence is synthesized)
agatactgaagatttaaaatcaaaatggataaactctgtggtgctgttggatcaggcatagaagccccaggctctgctcatctatgtggaagtggaggtggctcttgctttgcttcagaa

SEQ ID NO: 580538 - DNA, 120 bp, Artificial Sequence
  ENSG00000171877_45 (sequence is synthesized)
ctccctgcaacacgcgaggcactgccaaggggctgctatgatgtgggatctgcagaaatcctttgttcctagttggctttccatctttgcctctctgtatctctccctgcctggctggtt

SEQ ID NO: 580539 - DNA, 120 bp, Artificial Sequence
  ENSG00000171877_46 (sequence is synthesized)
tctctgaagagatcagctggtttccactgaagaagtatttgccttcctgggccaccatggggaagagtctgattaagattcacaccagagtccgggtccagctccggctgactaatcact

SEQ ID NO: 580540 - DNA, 120 bp, Artificial Sequence
  ENSG00000171877_47 (sequence is synthesized)
gctttcggcccctaagtgtgcgcatcctgaggatggggccccggctccagggtagggtcctgactgctgtgacccccgggcaagggaatcagctggagcatttccaaggcctagagtcct

SEQ ID NO: 580541 - DNA, 120 bp, Artificial Sequence
  ENSG00000171877_48 (sequence is synthesized)
agaactgaacgcgcagcccatgcggagtggcctattgaaggaagcccagtcctctgggttttagagatttaggccccctcccgccttttgatccccaaattttattgtgttgggcggttc

SEQ ID NO: 580542 - DNA, 120 bp, Artificial Sequence
  ENSG00000171877_49 (sequence is synthesized)
taggggacgtgaggtaaagatttagcaacaagtcccagcgatttggggcttggaagtggccaggaagaatcggcgacttaggaaaaacgccaacaatacggagtttcagaatcatctgta

SEQ ID NO: 580543 - DNA, 120 bp, Artificial Sequence
  ENSG00000171877_50 (sequence is synthesized)
tctaaaggttgttcttatgtgtttttttgtgatgtaattggaacatgctggaaaatgaggaattactcctaaatgagaatggaagatcctaaagactctagagatggagagagttctctc

SEQ ID NO: 580544 - DNA, 120 bp, Artificial Sequence
  ENSG00000171877_51 (sequence is synthesized)
agataggctgtcatgacagtttagaagtctaccccaccaagcaagcctttctccatgaccaaaacatcagggaaagggtgggccacagatgccatttcctgattcagggaaagcacctaa

SEQ ID NO: 580545 - DNA, 120 bp, Artificial Sequence
  ENSG00000171877_52 (sequence is synthesized)
ctgcatgacctttcctcctctagaaggcatcaggagcaagagcccccatgcctgcgctcagaggcccccttcaacgtttacatggctggcactttcagtgagatatcagagaaaatgcct

SEQ ID NO: 580546 - DNA, 120 bp, Artificial Sequence
  ENSG00000171877_53 (sequence is synthesized)
gctttgaaaactcctctggatcacatgctacataattttgtggtgccacatcaatgtcagaggaaccgaggcaaagtcaatctaaataacaaatccaaagctagggccccgcaatgggta

SEQ ID NO: 580547 - DNA, 120 bp, Artificial Sequence
  ENSG00000171885_0 (sequence is synthesized)
actctggctggggaaggcatgagtgacagacccacagcaaggcggtggggtaagtgtggacctttgtgtaccagagagaacatcatggtggctttcaaaggggtctggactcaagctttc

SEQ ID NO: 580548 - DNA, 120 bp, Artificial Sequence
  ENSG00000171885_1 (sequence is synthesized)
tggaaagcagtcacagcggaatttctggccatgcttatttttgttctcctcagcctgggatccaccatcaactggggtggaacagaaaagcctttaccggtcgacatggttctcatctcc

SEQ ID NO: 580549 - DNA, 120 bp, Artificial Sequence
  ENSG00000171885_2 (sequence is synthesized)
ctttgctttggactcagcattgcaaccatggtgcagtgctttggccatatcagcggtggccacatcaaccctgcagtgactgtggccatggtgtgcaccaggaagatcagcatcgccaag

SEQ ID NO: 580550 - DNA, 120 bp, Artificial Sequence
  ENSG00000171885_3 (sequence is synthesized)
tctgtcttctacatcgcagcccagtgcctgggggccatcattggagcaggaatcctctatctggtcacacctcccagtgtggtgggaggcctgggagtcaccatggttcatggaaatctt

SEQ ID NO: 580551 - DNA, 120 bp, Artificial Sequence
  ENSG00000171885_4 (sequence is synthesized)
accgctggtcatggtctcctggttgagttgataatcacatttcaattggtgtttactatctttgccagctgtgattccaaacggactgatgtcactggctcaatagctttagcaattgga

SEQ ID NO: 580552 - DNA, 120 bp, Artificial Sequence
  ENSG00000171885_5 (sequence is synthesized)
ttttctgttgcaattggacatttatttgcaatcaattatactggtgccagcatgaatcccgcccgatcctttggacctgcagttatcatgggaaattgggaaaaccattggatatattgg

SEQ ID NO: 580553 - DNA, 120 bp, Artificial Sequence
  ENSG00000171885_6 (sequence is synthesized)
gttgggcccatcataggagctgtcctcgctggtggcctttatgagtatgtcttctgtccagatgttgaattcaaacgtcgttttaaagaagccttcagcaaagctgcccagcaaacaaaa

SEQ ID NO: 580554 - DNA, 120 bp, Artificial Sequence
  ENSG00000171885_7 (sequence is synthesized)
ggaagctacatggaggtggaggacaacaggagtcaggtagagacggatgacctgattctaaaacctggagtggtgcatgtgattgacgttgaccggggagaggagaagaaggggaaagac

SEQ ID NO: 580555 - DNA, 120 bp, Artificial Sequence
  ENSG00000171885_8 (sequence is synthesized)
caatctggagaggtattgtcttcagtatgactagaagatcgcactgaaagcagacaagactccttagaactgtcctcagatttccttccacccattaaggaaacagatttgttataaatt

SEQ ID NO: 580556 - DNA, 120 bp, Artificial Sequence
  ENSG00000171885_9 (sequence is synthesized)
agaaatgtgcaggtttgttgtttcatgtcatattactcagtctaaacaataaatatttcataatttacaaaggaggaacggaagaaacctattgtgaattccaaatctaaaaaaagaaat

SEQ ID NO: 580557 - DNA, 120 bp, Artificial Sequence
  ENSG00000171885_10 (sequence is synthesized)
atttttaaaatgttcttaagcaaatatatacctattttatctagttacctttcattaacaaccaattttaaccgtgtgtcaagatttggttaagtcttgcctgacagaactcaaagacac

SEQ ID NO: 580558 - DNA, 120 bp, Artificial Sequence
  ENSG00000171885_11 (sequence is synthesized)
gtctatcagcttattccttctctactggaatattggtatagtcaattcttatttgaatatttattctattaaactgagtttaacaatggcaaaatacagtatgtcacagtcatgcacatt

SEQ ID NO: 580559 - DNA, 120 bp, Artificial Sequence
  ENSG00000171885_12 (sequence is synthesized)
caagagagaaaatataacaagttcttttatgagcaatcccttatgcatagactaccttggcaaaagagcattagcaagtgtcactgctcatcagttacttccttccatttatatcacaaa

SEQ ID NO: 580560 - DNA, 120 bp, Artificial Sequence
  ENSG00000171885_13 (sequence is synthesized)
tacccaagtttcaattctaacttcatttcatggtatttcttcctcctcaatgcccaaggtaatgtgggactaaagcccagaaatttgaaaagaatattcagaaatccttcccaaatcata

SEQ ID NO: 580561 - DNA, 120 bp, Artificial Sequence
  ENSG00000171885_14 (sequence is synthesized)
agggcacctattgagattcaagacaagcagactcgtaaaatcttgtagaggcagaggcaaagttatcatcatacaaaaatcacaaacaaaaaggagatctgtattcgggtatcaaacggt

SEQ ID NO: 580562 - DNA, 120 bp, Artificial Sequence
  ENSG00000171885_15 (sequence is synthesized)
tgatctgttttcagtgcacaccctcaaatgcaccacaccagttttacgatctaagcttttaacccctttaccactttgcttatttttaaaaaatttattggcaaaactggggattttgtt

SEQ ID NO: 580563 - DNA, 120 bp, Artificial Sequence
  ENSG00000171885_16 (sequence is synthesized)
tgtaactttggttatctatatttaaacattagctgagacatatttttgataacaagaacttagctagttgagtcctggctttttgttgattattaagctgtgttcactctagaaggtgta

SEQ ID NO: 580564 - DNA, 120 bp, Artificial Sequence
  ENSG00000171885_17 (sequence is synthesized)
aaggccctgtcccaatctctgctctctcacttctcgtgacatttgttgataatctttactgcaagtgtaatgatatttgagtgaattaaaatgcatgacagacaaggtacaacatggttg

SEQ ID NO: 580565 - DNA, 120 bp, Artificial Sequence
  ENSG00000171885_18 (sequence is synthesized)
cagaataaaagggtgaggacatcagatcactctgtattcaaagcttactagacgaacaatctttcatttctggatatattgtagctaacccaacacatttttaaactatttttgttactg

SEQ ID NO: 580566 - DNA, 120 bp, Artificial Sequence
  ENSG00000171885_19 (sequence is synthesized)
actcacttacttgtcaaaataattggtttttctgtcctgctttgccttttgtcactagaatgttctccagaaaccccagtttctgtcatcttaactgtctagtctagccgttaacttaga

SEQ ID NO: 580567 - DNA, 120 bp, Artificial Sequence
  ENSG00000171885_20 (sequence is synthesized)
caaagaagtgcaaatgtcaatttcactaaacaaaagctattagaagtaaagcagaaacctatcactgcaaggagtgacttgtaaataactgatgatcaagggctgtcttctctcaagcat

SEQ ID NO: 580568 - DNA, 120 bp, Artificial Sequence
  ENSG00000171885_21 (sequence is synthesized)
ttcccagagagtcgtcacaccagtgttatgcctgggagtgccactggcataccgcaggtgcctaaatcccaggcccctttctcagggggcgtggccacaccacacactgcgccagtgaca

SEQ ID NO: 580569 - DNA, 120 bp, Artificial Sequence
  ENSG00000171885_22 (sequence is synthesized)
catagttacttcctggctgggacggcacctatagaaactagggtacaaatctcccaaagatggtttgcaccgtcatttcaaatgtttgcacaatataccacttagaggcttaaaatcagg

SEQ ID NO: 580570 - DNA, 120 bp, Artificial Sequence
  ENSG00000171885_23 (sequence is synthesized)
gtggttcagttcaaaaggtaatatcaaccgtcagcaaacatgtcagtttaaaaataagttcggttaacaaggaagtgttaagcagattttttgaatacacttacaatatactggcttata

SEQ ID NO: 580571 - DNA, 120 bp, Artificial Sequence
  ENSG00000171885_24 (sequence is synthesized)
atcatttttattctgccatatggtttatttcatatacactcacttttacactcacttccaattatagcattcaataagttacggttaaagaaaagtgaatggtgtttttgtaatttgttt

SEQ ID NO: 580572 - DNA, 120 bp, Artificial Sequence
  ENSG00000171885_25 (sequence is synthesized)
tctagtagctagcagagagcctggcacatagtatgtattcaaaacaagtgtgttaattaataaaaatatataaatctcatttgagatttaagaatataaataattttcttttaatcttta

SEQ ID NO: 580573 - DNA, 120 bp, Artificial Sequence
  ENSG00000171885_26 (sequence is synthesized)
ttttgctcaatatttaataggaagtatgatttcaaggactactaaaggaaggcaatatacatgtgaaaaccataaaatacattttttgcattctactatttttaggggcatgaaatgaat

SEQ ID NO: 580574 - DNA, 120 bp, Artificial Sequence
  ENSG00000171885_27 (sequence is synthesized)
gaaagctttagcacttttttgcccctacatatgagacaacatattttgtatttcactcaaggctctgccagtaaaaagtaatgaaattgtacctttctaatgacatctatgcagcagggg

SEQ ID NO: 580575 - DNA, 120 bp, Artificial Sequence
  ENSG00000171885_28 (sequence is synthesized)
tctatcgccttgtggatggcaccaaattatccaagtgtattaggagactggggcttttttctttaatcccttcttattaatgaagtgcatagtgctgctcccaggagaccactgctgaca

SEQ ID NO: 580576 - DNA, 120 bp, Artificial Sequence
  ENSG00000171885_29 (sequence is synthesized)
gatacacagagaagagatcagagaggaaaaactgggaagacataaatgaattatacccagccatgaaacaatgccaactgtctcttccctaaggaagagtacaagtaccctaaaattgaa

SEQ ID NO: 580577 - DNA, 120 bp, Artificial Sequence
  ENSG00000171885_30 (sequence is synthesized)
aggtggtccctacactgaaaacgcacatagtttgtcaaaagtgtacaaaagggaaagagtcttattttaagctttcaggctttcttaaaaacttggggaccagaatttcaatgtatgttt

SEQ ID NO: 580578 - DNA, 120 bp, Artificial Sequence
  ENSG00000171885_31 (sequence is synthesized)
ccattgttgaagataacattttcttcaaagagccttaaccttttgtactggaaggaaatattttctggacttaagtagttgcctaaatttaagattcctacactttatttctgccattga

SEQ ID NO: 580579 - DNA, 120 bp, Artificial Sequence
  ENSG00000171885_32 (sequence is synthesized)
tgcttttcctaaacccttatactatctttttattatctgagccttttcctaatgcagctcataggtgctagctagagctgctgctcagtattgaagactttacaaggagattagaaatct

SEQ ID NO: 580580 - DNA, 120 bp, Artificial Sequence
  ENSG00000171885_33 (sequence is synthesized)
ttggaaaacatatgtgatgaaattgagctatatgatttatcagagatctgattccaaagagcacagaatactgttctcagaccatgaaaccagacaacacatgtattggtttaaactcga

SEQ ID NO: 580581 - DNA, 120 bp, Artificial Sequence
  ENSG00000171885_34 (sequence is synthesized)
taatgacaggaaaattccaaactagagcagtaaattcaaatggtaagatgaatcctagaaggcctctgattgcagcatgttgacaccaacctcacgttacgaacaattcacagagaattt

SEQ ID NO: 580582 - DNA, 120 bp, Artificial Sequence
  ENSG00000171885_35 (sequence is synthesized)
gcctttgtggcaactgaagatggaagtctggggggcacagacaaccttatcaaacaatataaaagccaatataaattctcataagcactatagaatttgcaaattcagaacattttatac

SEQ ID NO: 580583 - DNA, 120 bp, Artificial Sequence
  ENSG00000171885_36 (sequence is synthesized)
ctaaaagtaattctgtctttcctaaagtgtttttaacatgaaaattagtaggaagatgtggttactatttggaaagtgtaatgtaacaaaactctcttttgttaccacaaattttgtgag

SEQ ID NO: 580584 - DNA, 120 bp, Artificial Sequence
  ENSG00000171885_37 (sequence is synthesized)
tttagtactctacagattgccccataagagcagtagcttttgaaactcataattctctgaaataaatgaaagacatttaattcaaggatcaaaaattgtggccatctttgcaaatgacta

SEQ ID NO: 580585 - DNA, 120 bp, Artificial Sequence
  ENSG00000171885_38 (sequence is synthesized)
cctatagcctgtgaaaatacatttcaaaaaatgttatgtgcaatgaacactaaatttaagagcagttacagtgtgactcactcatgtttaaaaaaaatcgaagagctaaaaaatacgtct

SEQ ID NO: 580586 - DNA, 120 bp, Artificial Sequence
  ENSG00000171885_39 (sequence is synthesized)
aatttatgtaacccattggaatgtatttctaggttctcttcaggattaattaaataaacatgcaatttatgaaaacatataaacaattatttatcacttttatgacccaaatcacaataa

SEQ ID NO: 580587 - DNA, 120 bp, Artificial Sequence
  ENSG00000171885_40 (sequence is synthesized)
aattgtcatttaggataaactggggagaatagactgaacatatggttatattcacagttatttattaacttaaatgttattccaacattagagctaatgttaaaaagatttaaactgtaa

SEQ ID NO: 580588 - DNA, 120 bp, Artificial Sequence
  ENSG00000171885_41 (sequence is synthesized)
cgtctaatatttggaataatatattaaagtattagcactgtggttgattttcttgaattatgttgcatcttgtactactaagcttgtgaaaataaacatttggatgttttaaaaggtaaa

SEQ ID NO: 580589 - DNA, 120 bp, Artificial Sequence
  ENSG00000171885_42 (sequence is synthesized)
gttcccatcgcccttgctagtcaccagaagctcctctcccctcaatgagttcactttctcaaaagacagccttcagcaccctggtttcctagaaggcttccccctaatccagagtctggg

SEQ ID NO: 580590 - DNA, 120 bp, Artificial Sequence
  ENSG00000171885_43 (sequence is synthesized)
gggagggggagattttcagaatgccatttcaaagcaatcaaatgcaaagctagaaaagacgaccccccccccccacgcacaccttgttttaatgctttatgttcgaaattaagtgtggac

SEQ ID NO: 580591 - DNA, 120 bp, Artificial Sequence
  ENSG00000171885_44 (sequence is synthesized)
cctttctagggacagtttggataattttccgtgaaactggatgatctttgaatattaaatgaaaggagactagaataacagtctcttgactattcatgaaggagctttagcagaagcatt

SEQ ID NO: 580592 - DNA, 120 bp, Artificial Sequence
  ENSG00000171885_45 (sequence is synthesized)
ctttcttggtgtgcaaatcacgcctggcagcccctgcccacagtacccgaagatggcaggccttgttcccttcacctaaattcataaacctgggtgtagtggcttctgatgctgatttgt

SEQ ID NO: 580593 - DNA, 120 bp, Artificial Sequence
  ENSG00000171885_46 (sequence is synthesized)
atctttagctattttcaaactaggactccaagcttcttgcaaactctttgctaaataatgccttggtggcatgaggcacatccctaaaatagctaatttactcctagggaatttttgatg

SEQ ID NO: 580594 - DNA, 120 bp, Artificial Sequence
  ENSG00000171885_47 (sequence is synthesized)
agacaagtggccgtaatctgactcccagcacacagggagctgcggggcaggcaatgagagctgcactctggctggggaaggcatgagtgacagacccacagcaaggcggtggggtgtgga

SEQ ID NO: 580595 - DNA, 120 bp, Artificial Sequence
  ENSG00000171903_0 (sequence is synthesized)
agaggcaaagacctcctagcagagggggagaggagggatgccgcagctgagcctgtcctggctgggcctcgggcccgtggcagcatccccgtggctgcttctgctgctggttggaggctc

SEQ ID NO: 580596 - DNA, 120 bp, Artificial Sequence
  ENSG00000171903_1 (sequence is synthesized)
ctggctcctggcccgcgtcctggcctggacctacaccttctatgacaactgccgccgcctccagtgttttcctcaacccccgaaacagaactggttttggggacaccagggcctggtcac

SEQ ID NO: 580597 - DNA, 120 bp, Artificial Sequence
  ENSG00000171903_2 (sequence is synthesized)
tcccacggaagagggcatgaagacattgacccagctggtgaccacatatccccagggctttaagttgtggctgggtcctaccttccccctcctcattttatgccaccctgacattatccg

SEQ ID NO: 580598 - DNA, 120 bp, Artificial Sequence
  ENSG00000171903_3 (sequence is synthesized)
gcctatcaccagtgcctcagctgctgtcgcacccaaggatatgattttctatggcttcctgaagccctggctgggggatgggctcctgctgagtggtggtgacaagtggagccgccaccg

SEQ ID NO: 580599 - DNA, 120 bp, Artificial Sequence
  ENSG00000171903_4 (sequence is synthesized)
tcggatgttgacgcctgccttccatttcaacatcttgaagccttatatgaagattttcaacaagagtgtgaacatcatgcacgacaagtggcagcgcctggcctcagagggcagcgccag

SEQ ID NO: 580600 - DNA, 120 bp, Artificial Sequence
  ENSG00000171903_5 (sequence is synthesized)
actggacatgtttgaacacatcagcctcatgaccttggacagtctgcagaaatgtgtcttcagctttgaaagcaattgtcaggagaagcccagtgaatatattgccgccatcttggagct

SEQ ID NO: 580601 - DNA, 120 bp, Artificial Sequence
  ENSG00000171903_6 (sequence is synthesized)
cagtgcctttgtagaaaagagaaaccagcagattctcttgcacacggacttcctgtattatctcactcctgatgggcagcgcttccgcagggcctgccacctggtgcacgacttcacaga

SEQ ID NO: 580602 - DNA, 120 bp, Artificial Sequence
  ENSG00000171903_7 (sequence is synthesized)
tgccgtcatccaggagcggcgctgcaccctccccactcagggtattgatgatttcctcaagaacaaggcaaagtccaagactttagacttcattgatgtgcttctgctgagcaaggatga

SEQ ID NO: 580603 - DNA, 120 bp, Artificial Sequence
  ENSG00000171903_8 (sequence is synthesized)
agatgggaaggaattgtctgatgaggacataagagcagaagctgacaccttcatgtttgagggccatgacactacagccagtggtctctcctgggtcctataccaccttgcaaagcaccc

SEQ ID NO: 580604 - DNA, 120 bp, Artificial Sequence
  ENSG00000171903_9 (sequence is synthesized)
agaataccaggaacagtgccggcaagaagtgcaagagcttctgaaggaccgtgaacctatagagattgaatgggacgacctggcccagctgcccttcctgaccatgtgcattaaggagag

SEQ ID NO: 580605 - DNA, 120 bp, Artificial Sequence
  ENSG00000171903_10 (sequence is synthesized)
cctgcggttgcatcccccagtcccggtcatctcccgatgttgcacgcaggactttgtgctcccagacggccgcgtcatccccaaaggcattgtctgcctcatcaatattatcgggatcca

SEQ ID NO: 580606 - DNA, 120 bp, Artificial Sequence
  ENSG00000171903_11 (sequence is synthesized)
ttacaacccaactgtgtggccagaccctgaggtctacgaccccttccgtttcgaccaagagaacatcaaggagaggtcacctctggcttttattcccttctcggcagggcccagaaactg

SEQ ID NO: 580607 - DNA, 120 bp, Artificial Sequence
  ENSG00000171903_12 (sequence is synthesized)
aaacccgagctgatattgcgcgcagagggtggactttggctgcgggtggagcccctgggtgcgaactcacagtgactgtcctacccacccacccacctctgtagagtcccagaaacaaaa

SEQ ID NO: 580608 - DNA, 120 bp, Artificial Sequence
  ENSG00000171903_13 (sequence is synthesized)
ctatgctgacacctctgcttgagcctcgttgacagccagcatggggctcctggggactggtgggatctaagaaagggaggtgagtgggtggaggcagggtgacgtctctgaacccaaaac

SEQ ID NO: 580609 - DNA, 120 bp, Artificial Sequence
  ENSG00000171903_14 (sequence is synthesized)
cctgacggcctctctggctgagcacagggcatctaggcccttagtgggttctcccagagcccaagtaaaaactttatcctgtgggcagtagggagccctgggaggtgtttgagcaggaga

SEQ ID NO: 580610 - DNA, 120 bp, Artificial Sequence
  ENSG00000171903_15 (sequence is synthesized)
gggaacaggattaagaatgggtttaaggagcaagactgagactctgattcagcgagaaacaaccataggggcagatcccttcatctgtcctgggaatgtcctcccaagactggagtcctc

SEQ ID NO: 580611 - DNA, 120 bp, Artificial Sequence
  ENSG00000171903_16 (sequence is synthesized)
agctcagaacaaagggaaaggggtgcagcttccaccctggcaggctctcagaaatttttagttcctttttccaccaacttcccacccctgtttctccccctcccagtgcgttctctctgt

SEQ ID NO: 580612 - DNA, 120 bp, Artificial Sequence
  ENSG00000171903_17 (sequence is synthesized)
gactctcttcccttactttcagaggcataggatctggagccagactgcttgggctcaagtcctggctctgctgcgtgacttgagcaagttaattcctctctctgtgcctcggttccctca

SEQ ID NO: 580613 - DNA, 120 bp, Artificial Sequence
  ENSG00000171903_18 (sequence is synthesized)
accatataatggagacaacagcattacctatatcagggttttcctgaggtctcaatataagggactcagagctgtgcctggcacacaatgaatgctaaatatatggagccattattattt

SEQ ID NO: 580614 - DNA, 120 bp, Artificial Sequence
  ENSG00000171903_19 (sequence is synthesized)
cctgtctcagaaagtctggctgttaaagaatgttgtctttcaagatcgttatttctaccacgactttaaaggctgtgttttggaactcaaaggcaaaaattctaatatctgtgctccttg

SEQ ID NO: 580615 - DNA, 120 bp, Artificial Sequence
  ENSG00000171903_20 (sequence is synthesized)
actcaaaggcaaaaattctaatatctgtgctccttgaacaacctcttctcctagagggctgtgcatataagatatgtatatatatatatatattatatatatatatatatacacacacac

SEQ ID NO: 580616 - DNA, 120 bp, Artificial Sequence
  ENSG00000171903_21 (sequence is synthesized)
atatatatatatatttttttttttttcctgaggatggtgaaggtacctgactgtgtgaggtggtaggagaatgagagaaacctcagtcagtgtctcaaaataaaatcctgctacaaacat

SEQ ID NO: 580617 - DNA, 120 bp, Artificial Sequence
  ENSG00000171903_22 (sequence is synthesized)
agtgtctcaaaataaaatcctgctacaaacattgatctcttttcatagcctaagggatgttgcatcgctaaaccctgttgacttctctaatctcttctgtagctgatctccttcccttgc

SEQ ID NO: 580618 - DNA, 120 bp, Artificial Sequence
  ENSG00000171903_23 (sequence is synthesized)
tacactcggttactctggccttgattctgatctccaaatacattatattttttatttgggaccatcgtattgcctttgcacctttatcaaatataagttgcctatatttatttggatcta

SEQ ID NO: 580619 - DNA, 120 bp, Artificial Sequence
  ENSG00000171903_24 (sequence is synthesized)
gagggtatgtgggacaagctgcttctgataggagccaggctggcagtggcagggctggagggtcctggcctgggatggggaggggactgcccaaggttggggtgggtcaaggctgctggc

SEQ ID NO: 580620 - DNA, 120 bp, Artificial Sequence
  ENSG00000171903_25 (sequence is synthesized)
ctgggagactggtgatttcctggtaactggacccctggcaacctcccagtgattcaggctgggcctttttggattctaatcagcctctctctctctttccctttctgtgtaactggaggc

SEQ ID NO: 580621 - DNA, 120 bp, Artificial Sequence
  ENSG00000171903_26 (sequence is synthesized)
cacttggctgctggttttcattgggcatttctggactttagatctcagctcttgtttacccatctcagagccttccctgatctgcctccagcactgcccatccttgcccctttccactgt

SEQ ID NO: 580622 - DNA, 120 bp, Artificial Sequence
  ENSG00000171903_27 (sequence is synthesized)
tgagatattatttgagtcttagtatagttaggtcttagggtagatttgaattatgccgaagaataggcttggttatacccgggccatgtttaggacattagtgacatcatatttaaatgt

SEQ ID NO: 580623 - DNA, 120 bp, Artificial Sequence
  ENSG00000171903_28 (sequence is synthesized)
tatctaggacccttcactgggatacacagaagtcatatcagaccatctcaggtccatggcagagcatgttgtgtcatttagggtttgtcatatgtgttttggccatgtcagggaatgtta

SEQ ID NO: 580624 - DNA, 120 bp, Artificial Sequence
  ENSG00000171903_29 (sequence is synthesized)
acaactgtcggggcaatattccaggtcccagatccatgtcagaagatagcagagagtgctgggagtagacagagtgtcctaggtccctgtaaaggcattctgtagagtgttgagctatgc

SEQ ID NO: 580625 - DNA, 120 bp, Artificial Sequence
  ENSG00000171903_30 (sequence is synthesized)
tcaggtgttgcagaacatgttggaccttgtaggagatatgtcactgtgtgctggggcatgctgtgttattgctctactctgtcgctgcagcctggtctggtctctccttcctccaccatc

SEQ ID NO: 580626 - DNA, 120 bp, Artificial Sequence
  ENSG00000171903_31 (sequence is synthesized)
ctcccttcttcctctacccttggccttcttcctgctatgctgggtgggatgcgtggaagtgcacacccctggctgggagcattcctccatacccaaagtccttctctcacccctctccat

SEQ ID NO: 580627 - DNA, 120 bp, Artificial Sequence
  ENSG00000171914_0 (sequence is synthesized)
cttcatttcctcaagctccctccttaacagctaacgccttcgcgagaggagctgagggccctatgcggaataattaagatgccttctttagggtctctgccttggggccattttacaggt

SEQ ID NO: 580628 - DNA, 120 bp, Artificial Sequence
  ENSG00000171914_1 (sequence is synthesized)
gctgcaggaggcttctcacatgctttgggatatcttcagggaaatacgctcttaatagaaactgagaatttaagacattctaagtgagactgtccacatcatctaggaaaatggtggccc

SEQ ID NO: 580629 - DNA, 120 bp, Artificial Sequence
  ENSG00000171914_2 (sequence is synthesized)
tgtccttaaagatttgtgtgcgccactgcaacgtggtgaagaccatgcagtttgaaccatctacagctgtgtacgatgcgtgtcgagtcattcgggaacgggtgcctgaggcacaaactg

SEQ ID NO: 580630 - DNA, 120 bp, Artificial Sequence
  ENSG00000171914_3 (sequence is synthesized)
ggcaagcttctgactatggactctttctttcggatgaagacccgaggaaagggatttggctggaagcgggcagaacactggattactacatgttgcggaatggggatattttggaatata

SEQ ID NO: 580631 - DNA, 120 bp, Artificial Sequence
  ENSG00000171914_4 (sequence is synthesized)
aaaagaaacagagacctcagaaaatccggatgctggatggatctgtgaagacagtgatggtggatgattccaagactgtgggggagctcctggtcactatttgtagcagaataggaataa

SEQ ID NO: 580632 - DNA, 120 bp, Artificial Sequence
  ENSG00000171914_5 (sequence is synthesized)
caaattatgaagaatactccttaatccaagaaactattgaagaaaagaaagaggaaggaacgggcacactcaaaaaagacaggacactgttacgagatgagaggaaaatggagaagttga

SEQ ID NO: 580633 - DNA, 120 bp, Artificial Sequence
  ENSG00000171914_6 (sequence is synthesized)
aggccaagctgcacacagatgatgacctaaattggctggatcacagccgaacattcagagaacaaggagtagatgaaaacgaaacgttgctgcttagacggaagttcttttactctgatc

SEQ ID NO: 580634 - DNA, 120 bp, Artificial Sequence
  ENSG00000171914_7 (sequence is synthesized)
agaatgtagattcgagagaccccgtgcagctgaacttgctttatgttcaggcacgggatgacatcctgaatggctctcaccctgtctccttcgagaaagcttgtgagtttggtggatttc

SEQ ID NO: 580635 - DNA, 120 bp, Artificial Sequence
  ENSG00000171914_8 (sequence is synthesized)
aagcccagatacaatttggacctcatgtggaacataaacacaaacctggatttttagatctgaaggaattcctgcccaaagaatatatcaagcagagaggagctgaaaagaggatctttc

SEQ ID NO: 580636 - DNA, 120 bp, Artificial Sequence
  ENSG00000171914_9 (sequence is synthesized)
aggagcataagaactgcggagagatgagtgagatagaagccaaggtcaagtacgtcaaactcgcacggtccctccgcacatatggcgtgtccttcttcctggtgaaggagaagatgaaag

SEQ ID NO: 580637 - DNA, 120 bp, Artificial Sequence
  ENSG00000171914_10 (sequence is synthesized)
gcaagaacaagctggtgcctcgcctgctggggatcaccaaagactcggtgatgcgcgtggatgagaagaccaaggaagtgctgcaggagtggcccctcaccaccgtcaagcgctgggcag

SEQ ID NO: 580638 - DNA, 120 bp, Artificial Sequence
  ENSG00000171914_11 (sequence is synthesized)
cctcacccaagagcttcacactggattttggggagtatcaggaaagctactattcagtacaaaccaccgagggagagcagatatcccagctgattgcaggctacattgacatcatcctga

SEQ ID NO: 580639 - DNA, 120 bp, Artificial Sequence
  ENSG00000171914_12 (sequence is synthesized)
aaaagaaacaaagtaaagatcgatttggactagaaggtgatgaggagtcaaccatgttagaagagtccgtttccccaaaaaagtccaccatcttgcagcagcagttcaaccggaccggga

SEQ ID NO: 580640 - DNA, 120 bp, Artificial Sequence
  ENSG00000171914_13 (sequence is synthesized)
aggcagagcacggctcagtggcgctgccggccgtgatgcgctcgggctccagcgggcctgagaccttcaacgttggcagcatgccctcgccacagcagcaggtcatggttgggcagatgc

SEQ ID NO: 580641 - DNA, 120 bp, Artificial Sequence
  ENSG00000171914_14 (sequence is synthesized)
accgaggccacatgccgccactgacctcagcccagcaggccctgatggggaccatcaacacaagcatgcacgccgtccagcaggcccaggatgatctcagtgagctcgactcgctgccac

SEQ ID NO: 580642 - DNA, 120 bp, Artificial Sequence
  ENSG00000171914_15 (sequence is synthesized)
ctctcggccaggatatggcatctagggtatgggttcagaacaaagtcgacgaatccaaacacgaaatccattctcaagttgatgctatcacggccggaacggcttcagttgttaacctca

SEQ ID NO: 580643 - DNA, 120 bp, Artificial Sequence
  ENSG00000171914_16 (sequence is synthesized)
cagctggtgaccctgcagacactgactacacagctgtgggatgtgcgatcaccactatttcttccaacctgacggagatgtccaagggtgtgaagctattggccgccctcatggatgatg

SEQ ID NO: 580644 - DNA, 120 bp, Artificial Sequence
  ENSG00000171914_17 (sequence is synthesized)
aggtgggcagcggggaggacttgctcagagctgccaggaccctcgctggggcggtgtcagacttgctgaaagctgtgcagcctacttctggagagcctcgacagacagttttgactgctg

SEQ ID NO: 580645 - DNA, 120 bp, Artificial Sequence
  ENSG00000171914_18 (sequence is synthesized)
ctggcagcatcggacaagccagtggggatcttctgagacagattggagagaatgagactgatgagcgattccaggatgttttaatgagtttggccaaagctgttgccaatgcagctgcca

SEQ ID NO: 580646 - DNA, 120 bp, Artificial Sequence
  ENSG00000171914_19 (sequence is synthesized)
tgttggtactaaaggcaaagaatgttgcccaagtggccgaagacactgtcctacagaacagggtaattgctgctgccacccagtgtgccctctccacctcccagcttgtggcatgtgcca

SEQ ID NO: 580647 - DNA, 120 bp, Artificial Sequence
  ENSG00000171914_20 (sequence is synthesized)
aggttgtgagccccactattagctcccctgtgtgccaggagcagctgattgaagcagggaagctggtggaccgctcggtggagaactgtgtccgtgcctgccaggcggccactaccgata

SEQ ID NO: 580648 - DNA, 120 bp, Artificial Sequence
  ENSG00000171914_21 (sequence is synthesized)
gtgagctcctgaagcaggtcagcgcagcggccagcgtggtcagccaggccctccatgatctcctgcagcatgtgcggcagtttgccagccgaggcgagcccatcggccgctacgaccagg

SEQ ID NO: 580649 - DNA, 120 bp, Artificial Sequence
  ENSG00000171914_22 (sequence is synthesized)
ctactgacaccatcatgtgtgtcaccgagagcatcttcagctccatgggtgacgctggtgaaatggtgcgccaggcgcgggttctggcccaagccacatcagacctcgtcaatgccatga

SEQ ID NO: 580650 - DNA, 120 bp, Artificial Sequence
  ENSG00000171914_23 (sequence is synthesized)
ggtcagatgcagaagccgaaatcgacatggagaattcaaagaagctcctggcagcagcaaaactcttagctgactccactgctcgcatggtggaagctgcaaagggggctgcagccaacc

SEQ ID NO: 580651 - DNA, 120 bp, Artificial Sequence
  ENSG00000171914_24 (sequence is synthesized)
cagagaatgaggaccagcagcaaaggctgagagaagctgcagaaggcctccgggtagcaaccaacgcagctgcccagaatgctattaagaaaaaaattgtcaaccgactggaggttgcag

SEQ ID NO: 580652 - DNA, 120 bp, Artificial Sequence
  ENSG00000171914_25 (sequence is synthesized)
ccaagcaggccgcagcggcagccacacagaccatcgccgcctcccagaatgcagctgtttccaacaagaaccctgcggcccagcagcagctggtccagagttgcaaggcagtggctgatc

SEQ ID NO: 580653 - DNA, 120 bp, Artificial Sequence
  ENSG00000171914_26 (sequence is synthesized)
acatccctcagctggtccagggagtgagggggagccaagctcaagctgaagacctgagtgcccagctggctctcatcatctccagccagaacttcctccagcctggaagcaagatggtgt

SEQ ID NO: 580654 - DNA, 120 bp, Artificial Sequence
  ENSG00000171914_27 (sequence is synthesized)
cctctgccaaagccgcagtgcccaccgtgagtgaccaggccgcagccatgcagctgagccagtgtgccaagaacctggccaccagcttggcggagctgcgtaccgcctcgcagaaggccc

SEQ ID NO: 580655 - DNA, 120 bp, Artificial Sequence
  ENSG00000171914_28 (sequence is synthesized)
atgaagcttgtggtccgatggaaatcgattcagctctgaatacggtgcagacgcttaagaatgaactgcaggatgccaagatggcagccgtggagagccagctgaagccacttccagggg

SEQ ID NO: 580656 - DNA, 120 bp, Artificial Sequence
  ENSG00000171914_29 (sequence is synthesized)
aaacgctggaaaaatgtgctcaggacctgggaagcacatccaaggcggtgggctcctccatggcacagctgctgacctgtgctgctcaaggcaacgaacactacacaggggtggctgcta

SEQ ID NO: 580657 - DNA, 120 bp, Artificial Sequence
  ENSG00000171914_30 (sequence is synthesized)
gagagacggcccaagctctgaaaacactggcccaggccgcccgtggagtggctgcatcgacaaccgaccccgcggccgcccatgccatgttagattctgctcgagacgtgatggagggct

SEQ ID NO: 580658 - DNA, 120 bp, Artificial Sequence
  ENSG00000171914_31 (sequence is synthesized)
ccgccatgctcattcaagaggccaagcaggccctgattgcacctggagatgcagagcgtcaacaaagactggctcaggtggctaaagccgtctcacactccttgaataactgcgtaaatt

SEQ ID NO: 580659 - DNA, 120 bp, Artificial Sequence
  ENSG00000171914_32 (sequence is synthesized)
gcctccctgggcagaaggatgtggacgtggccttgaagagcatcggggagtccagcaagaagctgcttgtggattcgctacctccaagcacgaagcctttccaggaagcccagagtgaac

SEQ ID NO: 580660 - DNA, 120 bp, Artificial Sequence
  ENSG00000171914_33 (sequence is synthesized)
tgaaccaggcagcagctgatctgaaccagtctgctggggaagtggtccatgccacccggggccagagtggagagttggctgcagcctctggaaagttcagtgatgattttgatgaattcc

SEQ ID NO: 580661 - DNA, 120 bp, Artificial Sequence
  ENSG00000171914_34 (sequence is synthesized)
tcgatgctggcattgagatggctggccaagctcagacaaaagaagaccagatccaagtgatagggaacctcaagaatatctcgatggcatccagcaagctgctgttagctgccaagtctc

SEQ ID NO: 580662 - DNA, 120 bp, Artificial Sequence
  ENSG00000171914_35 (sequence is synthesized)
tctctgtagatccaggagctcccaatgcgaaaaatctcctggctgcagctgcaagagctgtgacagagagcatcaatcaactcatcactctgtgtacccaacaagctccgggccagaaag

SEQ ID NO: 580663 - DNA, 120 bp, Artificial Sequence
  ENSG00000171914_36 (sequence is synthesized)
agtgcgataatgccctgcgggagctcgagactgtgaaggggatgttggacaatcctaatgaacctgttagtgacctctcttactttgactgcattgagagtgtgatggaaaactccaagg

SEQ ID NO: 580664 - DNA, 120 bp, Artificial Sequence
  ENSG00000171914_37 (sequence is synthesized)
ttctgggtgaatcgatggcagggatttcacagaatgccaagaccggagacctccctgcctttggggaatgtgtggggattgcatccaaggctctctgtgggctgacagaggctgcagccc

SEQ ID NO: 580665 - DNA, 120 bp, Artificial Sequence
  ENSG00000171914_38 (sequence is synthesized)
aggctgcatacttggttggcatctctgatccaaacagccaggcaggccaccagggcctggtggaccccatccagtttgccagggctaaccaggccatccagatggcatgccagaacttgg

SEQ ID NO: 580666 - DNA, 120 bp, Artificial Sequence
  ENSG00000171914_39 (sequence is synthesized)
tggaccctggcagcagcccatcacaggtcctgtcagccgccacaattgttgccaagcacacgtcagccttgtgcaatgcctgccgcatcgcctcatccaagacggccaacccagtagcca

SEQ ID NO: 580667 - DNA, 120 bp, Artificial Sequence
  ENSG00000171914_40 (sequence is synthesized)
agaggcacttcgtccagtcagccaaggaagtcgccaacagcactgccaacctggtgaagaccatcaaggccctggatggggatttctctgaagacaaccgcaataagtgtcgcatcgcca

SEQ ID NO: 580668 - DNA, 120 bp, Artificial Sequence
  ENSG00000171914_41 (sequence is synthesized)
ccgcacccttgattgaagctgtggagaacctgacagcgttcgcctcaaaccctgagtttgtcagcattcctgcccagatcagctccgagggttcccaggcacaggaaccaatcctggtct

SEQ ID NO: 580669 - DNA, 120 bp, Artificial Sequence
  ENSG00000171914_42 (sequence is synthesized)
cagccaagaccatgctggagagttcatcgtacctcattcgcactgcacgctctctggccatcaaccccaaagacccacccacctggtctgtactggctggacattcccatacagtgtccg

SEQ ID NO: 580670 - DNA, 120 bp, Artificial Sequence
  ENSG00000171914_43 (sequence is synthesized)
actccatcaagagtctcatcacttctatcagggacaaggcccctggacagagggagtgtgattactccatcgatggcatcaaccggtgcatccgggacatcgagcaggcctcgctggccg

SEQ ID NO: 580671 - DNA, 120 bp, Artificial Sequence
  ENSG00000171914_44 (sequence is synthesized)
ccgtcagccagagcctggccacgagggacgacatctctgtggaggccctgcaggagcagctgacttcggtggtccaggaaatcggacaccttatcgatcccatcgccacagcggctcggg

SEQ ID NO: 580672 - DNA, 120 bp, Artificial Sequence
  ENSG00000171914_45 (sequence is synthesized)
gagaagcagctcagctgggacataaggtgacacaactggcaagctattttgagcccttgatcttagccgcagttggtgtggcctccaagattcttgatcatcagcagcagatgacggtgc

SEQ ID NO: 580673 - DNA, 120 bp, Artificial Sequence
  ENSG00000171914_46 (sequence is synthesized)
tggaccagaccaagactctcgcagagtctgccttgcagatgttgtatgcagccaaagaaggtggcggaaaccccaaggcacaacacacccatgacgccatcacagaggccgcccagttga

SEQ ID NO: 580674 - DNA, 120 bp, Artificial Sequence
  ENSG00000171914_47 (sequence is synthesized)
tgaaggaagccgtggatgacatcatggtgacgctgaacgaagctgccagtgaagtggggctggttgggggcatggtggacgccattgcagaagccatgagcaagctggatgaaggcactc

SEQ ID NO: 580675 - DNA, 120 bp, Artificial Sequence
  ENSG00000171914_48 (sequence is synthesized)
ctccagaaccaaagggaacatttgtcgactatcagacgactgtggttaaatactccaaagccattgcggtgacagctcaggaaatgatgactaagtcggttactaacccggaggagttgg

SEQ ID NO: 580676 - DNA, 120 bp, Artificial Sequence
  ENSG00000171914_49 (sequence is synthesized)
gaggactggcttcacaaatgaccagtgactatgggcacctggctttccagggccagatggcagcagccacggcggaaccagaggagatcggattccagattcgcactcgtgtgcaggacc

SEQ ID NO: 580677 - DNA, 120 bp, Artificial Sequence
  ENSG00000171914_50 (sequence is synthesized)
tgggccacggctgtatcttcctggtgcagaaggcaggggccctccaggtctgccccacagacagctacaccaagagggagctgatcgaatgcgcccgtgccgtcacggaaaaggtctcct

SEQ ID NO: 580678 - DNA, 120 bp, Artificial Sequence
  ENSG00000171914_51 (sequence is synthesized)
tggtgctctcggctctccaggccgggaacaaaggaacccaggcatgcattacagccgccaccgctgtgtctgggatcattgccgacctggacaccaccattatgtttgcaacagcgggga

SEQ ID NO: 580679 - DNA, 120 bp, Artificial Sequence
  ENSG00000171914_52 (sequence is synthesized)
cgctgaatgcagagaacagtgagaccttcgcagaccacagggagaacattctcaagacggccaaggccttggtagaagacacgaaactacttgtgtcaggagctgcgtccactcctgaca

SEQ ID NO: 580680 - DNA, 120 bp, Artificial Sequence
  ENSG00000171914_53 (sequence is synthesized)
agctggcccaggcggcccagtcctcagcagccaccatcacccagctcgcagaagtggtcaagctgggggcagccagcctgggctccgacgaccccgagacccaggtggttttgatcaatg

SEQ ID NO: 580681 - DNA, 120 bp, Artificial Sequence
  ENSG00000171914_54 (sequence is synthesized)
ccatcaaagatgtggccaaggccctttctgatctcatcagtgctaccaagggagctgccagcaagccagtggacgacccttccatgtaccagctcaagggggctgccaaggtgatggtga

SEQ ID NO: 580682 - DNA, 120 bp, Artificial Sequence
  ENSG00000171914_55 (sequence is synthesized)
ccaatgtcacctcgctcctcaagactgtaaaggcagtggaggatgaggccacccggggcaccagggcgcttgaggccacaattgaatgcataaagcaggagcttacggtgttccagtcaa

SEQ ID NO: 580683 - DNA, 120 bp, Artificial Sequence
  ENSG00000171914_56 (sequence is synthesized)
aagacgtacctgaaaagacatcatcacctgaagaatccataaggatgacgaaaggcatcaccatggcaacagccaaagccgtggcagctgggaactcatgtagacaggaggacgtgattg

SEQ ID NO: 580684 - DNA, 120 bp, Artificial Sequence
  ENSG00000171914_57 (sequence is synthesized)
ctactgccaacctgagccggaaagccgtgtcagatatgttgacggcttgcaagcaagcatccttccaccccgatgtcagtgacgaggtgagaaccagagccttgcgtttcgggacggagt

SEQ ID NO: 580685 - DNA, 120 bp, Artificial Sequence
  ENSG00000171914_58 (sequence is synthesized)
gcacccttggctacttggacctcctggagcacgtcttggtgattcttcagaaaccaaccccagaattcaagcagcagctggccgctttctccaagcgagtcgccggcgctgtgacagagc

SEQ ID NO: 580686 - DNA, 120 bp, Artificial Sequence
  ENSG00000171914_59 (sequence is synthesized)
tcatccaggcggcggaagccatgaaaggaacagagtgggtggatccagaagacccaactgtcattgcagaaacagagttactgggggctgcagcatccatcgaagctgctgctaagaagt

SEQ ID NO: 580687 - DNA, 120 bp, Artificial Sequence
  ENSG00000171914_60 (sequence is synthesized)
tagagcaactgaagccaagagcaaaaccaaaacaagcggatgagaccctggactttgaggaacagatcttggaagctgctaaatccattgctgctgccacaagcgccctggtcaaatcgg

SEQ ID NO: 580688 - DNA, 120 bp, Artificial Sequence
  ENSG00000171914_61 (sequence is synthesized)
cctcagcagcccagagggagctggtggcccaaggaaaggtgggctccatccctgccaatgctgcagacgacggacagtggtcacaggggctgatttctgctgcccggatggtggcggctg

SEQ ID NO: 580689 - DNA, 120 bp, Artificial Sequence
  ENSG00000171914_62 (sequence is synthesized)
cgaccagcagtctctgtgaggcggccaatgcctccgttcagggacacgccagcgaggagaagctcatctcatctgccaagcaggtcgccgcttccacggctcagctgctggtggcctgca

SEQ ID NO: 580690 - DNA, 120 bp, Artificial Sequence
  ENSG00000171914_63 (sequence is synthesized)
aggtgaaggccgaccaggattcagaggccatgaggcggctacaggcggcaggaaatgctgtgaaaagagcctcagacaatcttgtccgtgcagcccagaaggcagcttttggcaaagctg

SEQ ID NO: 580691 - DNA, 120 bp, Artificial Sequence
  ENSG00000171914_64 (sequence is synthesized)
atgacgacgatgttgtagtgaaaaccaagtttgtggggggcattgctcagatcatcgccgcccaggaagaaatgctaaagaaagagcgagaactggaagaagcaaggaaaaaactggccc

SEQ ID NO: 580692 - DNA, 120 bp, Artificial Sequence
  ENSG00000171914_65 (sequence is synthesized)
aaatccgccagcagcagtataagtttttacccaccgagctgagggaagatgagggctaaaggtgcgagcccagatggcgagccccaggggatggccctggctgaactggacagacagtgt

SEQ ID NO: 580693 - DNA, 120 bp, Artificial Sequence
  ENSG00000171914_66 (sequence is synthesized)
tcctgagaggctgggcacttagctggaaaccgcccacctccctcccgggtgagcctggagccctgcgtgcttgttctcacatctctgtcccgtcggcactggctgcatgatcgtgatgtc

SEQ ID NO: 580694 - DNA, 120 bp, Artificial Sequence
  ENSG00000171914_67 (sequence is synthesized)
acacggtacaatgtcctacccacaactcctctgccgcctcccctcatgcctcaccgtgtctcaggagagaggggtgcacgtttcatggactgttaccaacaaagaaaagtcagtattatg

SEQ ID NO: 580695 - DNA, 120 bp, Artificial Sequence
  ENSG00000171914_68 (sequence is synthesized)
ttgttctcagacactttggcttttgttggtccttctcttaggcctgctcctggacctctttatgatattgtgatagggaaaaaaatcattgacgtcatagaatattcttcttcctctcag

SEQ ID NO: 580696 - DNA, 120 bp, Artificial Sequence
  ENSG00000171914_69 (sequence is synthesized)
gagaagacggaagctggagttggacatggttcataaaagccagaaacacaaacccgtgtggactccgggagggtgactcaggtcctccttccatgtcttgagcactggctcacccagggg

SEQ ID NO: 580697 - DNA, 120 bp, Artificial Sequence
  ENSG00000171914_70 (sequence is synthesized)
gtgaaaaattcccgcccctgtttgcacgctttcttgcctccgtgtgtaagctccttgtacaacccagacccatcttgtattttgtggcccagaaaactgaacgattattttgttcctccg

SEQ ID NO: 580698 - DNA, 120 bp, Artificial Sequence
  ENSG00000171914_71 (sequence is synthesized)
tagtccaaagggcagagttgcggaaggccgtcggggcttggtgagcaggggctgtaatacagtctgtgggctccttaccctgcagaggctgtttcagctcacacagagtcatccacacaa

SEQ ID NO: 580699 - DNA, 120 bp, Artificial Sequence
  ENSG00000171914_72 (sequence is synthesized)
acccacggctcccagttgacagtcagtggaatgctcgtctccttagcgtccagggtggggattctgctggaataaagagcttcctcagtgactcatctttaggtcccacgctggtttctg

SEQ ID NO: 580700 - DNA, 120 bp, Artificial Sequence
  ENSG00000171914_73 (sequence is synthesized)
tgccttcagaatggtcacaagcccggattggaaaggatctgcttacaaacctgtcccctgtcctccaacccaaaacgcctttttttctgtcttaatatccagaaaatctaaatgcatcct

SEQ ID NO: 580701 - DNA, 120 bp, Artificial Sequence
  ENSG00000171914_74 (sequence is synthesized)
aaaatcaatgtgaacctttaacaagatagttttacttattatcacataagacataagatgttttcattttctggatgtcacacttccagaatttcatatttttcccctcttttctttccc

SEQ ID NO: 580702 - DNA, 120 bp, Artificial Sequence
  ENSG00000171914_75 (sequence is synthesized)
cttttcagagccctcccataggaagggaagggcttgaatttacccttaatctgcacctttagccaaggcagtgcatggaagatgaatggctcgtgggacagaatctaatgccagggagca

SEQ ID NO: 580703 - DNA, 120 bp, Artificial Sequence
  ENSG00000171914_76 (sequence is synthesized)
ggagtgtttgaaagaattcatagtggggaaggtaaaagttaatggaagtacatgattttcaaaactggtaacagttaaaggcactcaccctccgcctctctctctctctctctctctggt

SEQ ID NO: 580704 - DNA, 120 bp, Artificial Sequence
  ENSG00000171914_77 (sequence is synthesized)
gtgctatcatgtcttggactccatccacactatagtttcaaagttccactgacgggggaaagttggtgctttggtcctccgaagatgtcacctttcgaccttgcccgatcttgtttcacc

SEQ ID NO: 580705 - DNA, 120 bp, Artificial Sequence
  ENSG00000171914_78 (sequence is synthesized)
agactctagcccatgtcatggttttaaaatacataaacttctgacagcttcccatatttataagttacttataagtgctgcacgtattagaatttttttttttcagaccagtaaagttag

SEQ ID NO: 580706 - DNA, 120 bp, Artificial Sequence
  ENSG00000171914_79 (sequence is synthesized)
agaaaagacgctgtaaaggaaaagcaagtgagagtatgtgtaggacactgacagtgtgtgggcaccagttctgaagaggaggggagctgctggagccctagcctgttggggaaaagctgg

SEQ ID NO: 580707 - DNA, 120 bp, Artificial Sequence
  ENSG00000171914_80 (sequence is synthesized)
cacactcttggctcgccctctttgagtggagctgatccaacacctcatgcctgccttggccggacactgagaggaggggcacacgtgcttccagagacactcaggagtcagaccccaatg

SEQ ID NO: 580708 - DNA, 120 bp, Artificial Sequence
  ENSG00000171914_81 (sequence is synthesized)
ctcagagtcacaatgtgttcatggcctcctgtaacaggactctggggatcccctctgtggcccagcccaccccaccctctgctcttctatgctgtgcccagggcagctgccctcttctgc

SEQ ID NO: 580709 - DNA, 120 bp, Artificial Sequence
  ENSG00000171914_82 (sequence is synthesized)
ctgtgccccatcccatcctgaaaacccaggaccaaggcaggggcaggcagccagttcttccaccttgcctcagagtcatttaaaacctttactgcatttgataccagaaaagcctccaga

SEQ ID NO: 580710 - DNA, 120 bp, Artificial Sequence
  ENSG00000171914_83 (sequence is synthesized)
gacaaaccaaatgcaaaggcctttcctttataactctaaagaacaggcatcgaaagtttatttttgtaggagctatataaatactcacctttctggagtcgtccagtgctgggagctttg

SEQ ID NO: 580711 - DNA, 120 bp, Artificial Sequence
  ENSG00000171914_84 (sequence is synthesized)
gggagtttggttctcagttatcacctggtatggtcccagtttctcatctgtcctttcctcatccaccctgcacatgtgtatgtgaacggcttcgtggccggtgtggtggtttctcatttc

SEQ ID NO: 580712 - DNA, 120 bp, Artificial Sequence
  ENSG00000171914_85 (sequence is synthesized)
ataagatagttgaagggccatgccttgtctggatgttatttaataggcactactgcggtgtcctcagatggtactgagggggccttctggtccttcaaaggaaaataacacaggcatgag

SEQ ID NO: 580713 - DNA, 120 bp, Artificial Sequence
  ENSG00000171914_86 (sequence is synthesized)
ttcatttgggagtgtgaactttcagaacacctaataagagagtggtgtcagagtaaaaacggccccaggtctggagcatagaagtgtatctctgtgaagagagagccggtgtgttgacat

SEQ ID NO: 580714 - DNA, 120 bp, Artificial Sequence
  ENSG00000171914_87 (sequence is synthesized)
gtggttcttctcacacccctctactcctcgagggctttgaatccttgggctgatttttgtgccagaaattgctgttcccgatggccaaaaggggaacctgaactggatttcagaactgcc

SEQ ID NO: 580715 - DNA, 120 bp, Artificial Sequence
  ENSG00000171914_88 (sequence is synthesized)
cagtgatttgaaaatttagattttacttgggcctttcaggagtctttagatagggatgctgaggtcatatttagttcaatgaacagcccttgtttaagttttgccagtgtccagccagct

SEQ ID NO: 580716 - DNA, 120 bp, Artificial Sequence
  ENSG00000171914_89 (sequence is synthesized)
gtggccctggccatctgtgcaggcaggttcctcaattcctggttggccctgcagtcggtcaacacagtccctccaggtcggctgcagaggcagctgcccagcctgcagtctatgcacggg

SEQ ID NO: 580717 - DNA, 120 bp, Artificial Sequence
  ENSG00000171914_90 (sequence is synthesized)
ccttaagaaatgagctgcctgtagcctcacggcatatgcttttatcagggaaaacccttcgagcttcttctgattctcacctgcttgctttctggctgtcttagtcagtgtgtttacagg

SEQ ID NO: 580718 - DNA, 120 bp, Artificial Sequence
  ENSG00000171914_91 (sequence is synthesized)
caactaaagcctgttcctaatttatcaaaaaattataaccaaaattcaccatagcctaagagagtaaaccccacctccaaagtgatgccaaggccaaaacctcatcaaggaaccagacac

SEQ ID NO: 580719 - DNA, 120 bp, Artificial Sequence
  ENSG00000171914_92 (sequence is synthesized)
aggtcaaaagtggtgagcaagccatggtctctgctcctggggaactcacacgctgacccccgaggagccttggtttcctccctggcagatagtccccagaatcttctctcccagctttga

SEQ ID NO: 580720 - DNA, 120 bp, Artificial Sequence
  ENSG00000171914_93 (sequence is synthesized)
ggttctgggctctggaaaggcctctgggatgctggccttaagatctcagcacagactatcagcatgttccattctcagattcctggaggaaaggtaccctctgttgaccaaggggctggc

SEQ ID NO: 580721 - DNA, 120 bp, Artificial Sequence
  ENSG00000171914_94 (sequence is synthesized)
tgcttctgagacttaccaacccaagaaatttggagacattcccctcaggctaaaaggcagcggtccccagagttcagaaagcaaaagatcttgacaactgtgccagtagtggctctggtc

SEQ ID NO: 580722 - DNA, 120 bp, Artificial Sequence
  ENSG00000171914_95 (sequence is synthesized)
ctatctctccacagtgctggcctctgctggggaaggcatctttcccaaaggtatccccaagtaccatgttgaaaatgtcctcagtctgttgctccatctttctgagcctctgcttggtat

SEQ ID NO: 580723 - DNA, 120 bp, Artificial Sequence
  ENSG00000171914_96 (sequence is synthesized)
gtcatgtttatggtcactacggatgagtgtgtgcagagtttgggttgattcttttaaatgctacaaacaagagctatttcttttcaataaaaaaggtttggattcggcctcttcctctga

SEQ ID NO: 580724 - DNA, 120 bp, Artificial Sequence
  ENSG00000171914_97 (sequence is synthesized)
gcccacctcccagccctccagggagcatcagtgtacctgagtcactttgtctgcatctcttcatcccacaaaacacgaggctgggtctcattcagcggcctctcaccaaccttcaagatc

SEQ ID NO: 580725 - DNA, 120 bp, Artificial Sequence
  ENSG00000171914_98 (sequence is synthesized)
cagaagaaaacaggaacgttcagctctgccctgtgtcgtatctaatcacatacattaatttatctaaccacataagttatttttttttatttgccagaaataaacctttaaaggaacaaa

SEQ ID NO: 580726 - DNA, 120 bp, Artificial Sequence
  ENSG00000171914_99 (sequence is synthesized)
gtaattgaaacttggttctaagtttccctcttgtcccttcctgtttaatgcagtcagctgtcctcgaatttattttttggtggtactttgaatcagccccctgtgtgagaattcaacaaa

SEQ ID NO: 580727 - DNA, 120 bp, Artificial Sequence
  ENSG00000171914_100 (sequence is synthesized)
ttcagggaaatacgctcttaatagaaactgagaatttaagaaagtctgcctggcggaggacacctgcacttgttaccctgagttgattcctgaaacttcggacccctgggtattaacaga

SEQ ID NO: 580728 - DNA, 120 bp, Artificial Sequence
  ENSG00000171914_101 (sequence is synthesized)
ttttttttttttttgagtaaaagtcctgtgcttaagccagtgaatagaaaatccaagtccaaattgcttcctttgcagttgcctggtatcagcctaaggtggagggcaggaccatattct

SEQ ID NO: 580729 - DNA, 120 bp, Artificial Sequence
  ENSG00000171914_102 (sequence is synthesized)
ttccaccagaaataagtagagttatctgaagtgttaaattaaggaatgcatgggctgtgcagtgagacgttgccaaccaggggtcagggattcctcctgaaaggaggtgactgtgtcagg

SEQ ID NO: 580730 - DNA, 120 bp, Artificial Sequence
  ENSG00000171914_103 (sequence is synthesized)
cctgtcttctttctctttcagctttttatttttgagctaggtgtctaagatcataccctaatttcaatcatttgtgagaatgctagcttttcttccatcgagtagatgaccaaatttgca

SEQ ID NO: 580731 - DNA, 120 bp, Artificial Sequence
  ENSG00000171914_104 (sequence is synthesized)
gattttggggaaagcaagagaaattcagaagtttcttttgctgaatagaaattcagtgatctgtgtccccctccaccccctttttttccttctacttcgtcttagtgaagaggaaagtaa

SEQ ID NO: 580732 - DNA, 120 bp, Artificial Sequence
  ENSG00000171914_105 (sequence is synthesized)
tctgtttggagaagggtagacactggtcagtgtctcaacgagttaggcatctgcgggctaactgggtttaatgtgatctatacggataacctgcctgcatgtcaggatgctgctcctagc

SEQ ID NO: 580733 - DNA, 120 bp, Artificial Sequence
  ENSG00000171914_106 (sequence is synthesized)
gactatgagaaattagtaaagaatcttgttctttcagagcttgcaaaggtagctaaatgccagcattgtagataatgactcaggtgggagcaaatattgcaaaatatgatgaatctggaa

SEQ ID NO: 580734 - DNA, 120 bp, Artificial Sequence
  ENSG00000171914_107 (sequence is synthesized)
atttgtaagtgccttgaaatggggtgccagaaggcaaaaggagtgaagtaatcacagtgagattgacaaggagtcttcattcatttcaggggacgtgaattgagggcttgttctgtgctt

SEQ ID NO: 580735 - DNA, 120 bp, Artificial Sequence
  ENSG00000171914_108 (sequence is synthesized)
agctgtaagggttcaatgtgcgcagggctccgttttctaccccttggctcttagtgtgttaggcaaagtttggaaaatgcaatgaccagggcacgatgacagtgccagggatgtgcaaag

SEQ ID NO: 580736 - DNA, 120 bp, Artificial Sequence
  ENSG00000171914_109 (sequence is synthesized)
gaaggtgtgattaattctccaagggggctgtcagggctcacttcacagaagtgacggcactgaaccgggcctcaaagttgggtagaatctgcagcacagaaagaagccagaatgacattt

SEQ ID NO: 580737 - DNA, 120 bp, Artificial Sequence
  ENSG00000171914_110 (sequence is synthesized)
gaggaagagccagtacatgtgacattccataacacctctcatacctgagtggcacggggtcccagtcacttattaaaacagtgtgtactgcaaggaaggagaagtggctggaatgggggt

SEQ ID NO: 580738 - DNA, 120 bp, Artificial Sequence
  ENSG00000171914_111 (sequence is synthesized)
ggaggaggcagtcttgttagtggcatgcccaccatcaacctggggcccacgttcttgaggcaggagaagggcctgaacaaagaaggaaacacaaggaccatgtggacctaaagcagcccc

SEQ ID NO: 580739 - DNA, 120 bp, Artificial Sequence
  ENSG00000171914_112 (sequence is synthesized)
aagagctggtgtatctgggagtccttacccatccagcaaggccaaaggggtgttaccagcctcagcaaagcagaacaggtggattcaggaaagcaaatgagttgaggctggcggggtgga

SEQ ID NO: 580740 - DNA, 120 bp, Artificial Sequence
  ENSG00000171914_113 (sequence is synthesized)
gcctgtggaacttcctgagccagacacctcagtaggtgccagcagccctccatggatgaggagggagctgttgcaccttgatatgtatttttgtcatctggatctgggctctacagtatg

SEQ ID NO: 580741 - DNA, 120 bp, Artificial Sequence
  ENSG00000171914_114 (sequence is synthesized)
gtggccactggctacatgtggctgttaagcacttgaaatggaactagtccaaactgcgatgggttgtaaatatgcagtgcacactgaatttcaaagacttggtatgataaaaagattgta

SEQ ID NO: 580742 - DNA, 120 bp, Artificial Sequence
  ENSG00000171914_115 (sequence is synthesized)
aaatctcaatatttttaaattggttatatgatgaaatattttggatataccaagttaaatagaagaaattatttcattaatttctcttgtttctctacttattttaaagtgactgccaga

SEQ ID NO: 580743 - DNA, 120 bp, Artificial Sequence
  ENSG00000171914_116 (sequence is synthesized)
aaacttaaaattgggtatgtgtagaccttggtctagatgctataccctggacctcctatctggggttccaaaggctaactgattacatctcctttaagactacctggggctcagcctatc

SEQ ID NO: 580744 - DNA, 120 bp, Artificial Sequence
  ENSG00000171914_117 (sequence is synthesized)
ccaccactatgtcagcacctccttttttcttattctttctttattatctgtgcttaagatttcttgccctcctctttcttggagtgactttgagggtcgcagaactagacatgcttgtaa

SEQ ID NO: 580745 - DNA, 120 bp, Artificial Sequence
  ENSG00000171914_118 (sequence is synthesized)
ttacacaggctctgaacatgtgagttgaacaggaacccagggctgaggaccggggtggacccctctgcactgtagcatggggtacccccaacctagctccatgctttgtaggtcctgtca

SEQ ID NO: 580746 - DNA, 120 bp, Artificial Sequence
  ENSG00000171914_119 (sequence is synthesized)
ttggggatctgatcctgtagtgatgaccattgagaatgttgctgtgcgttcagccatgcaccgccatgggtgttcactgggctttctgacctctcgtggccttctttcgtccttttgatg

SEQ ID NO: 580747 - DNA, 120 bp, Artificial Sequence
  ENSG00000171914_120 (sequence is synthesized)
gcaattaagcactttcagtgtgtaccacagacacccgatccagctctctttaatcgaatttgacttggctgccctggatggggatttctctgaagacaaccgcaataagtgtcgcatcgc

SEQ ID NO: 580748 - DNA, 120 bp, Artificial Sequence
  ENSG00000171914_121 (sequence is synthesized)
gaaccagaggaggtctgccaccttaagacccctattttaagatgcacacacacactggtgcccactcctgggtatttcttcatagcttagctccactctggaagaccccagcccagtaac

SEQ ID NO: 580749 - DNA, 120 bp, Artificial Sequence
  ENSG00000171914_122 (sequence is synthesized)
cagagcccagtttatttccccaccactgcacagcacaggtccagaccaggtagccccaggctgtactcaagtctcactgccccttatggggcagactggccaagaactggggcatgggct

SEQ ID NO: 580750 - DNA, 120 bp, Artificial Sequence
  ENSG00000171914_123 (sequence is synthesized)
ttcagacagaaggactttgtatacagtgttctatcaggtcccctgtccctagccctgtcacctgtctcttttagcatgcccaagcttgggactgccatcttatcacttcctactccagtt

SEQ ID NO: 580751 - DNA, 120 bp, Artificial Sequence
  ENSG00000171914_124 (sequence is synthesized)
agcacatcccccgcaattatttttgttttccataggttcacagaagtgttgaaagattcaagtatgaaaattagctatccctctccctcgaaagagctactttcatgaaacaaagtcttg

SEQ ID NO: 580752 - DNA, 120 bp, Artificial Sequence
  ENSG00000171914_125 (sequence is synthesized)
cctgaatattctgggtggctaagaattagcccagacatacctcctgtggactccttttattacttccctgcctttcctagaccagctttccttagtggccagtgtagacttggctttaga

SEQ ID NO: 580753 - DNA, 120 bp, Artificial Sequence
  ENSG00000171914_126 (sequence is synthesized)
atgcctgtacccgtaagagtctaacggtagccaaagttgggccccaaaggccactttctaagagctgccatctctcatacttctaatggggtggtccattgggaaggacacaggtcatgt

SEQ ID NO: 580754 - DNA, 120 bp, Artificial Sequence
  ENSG00000171914_127 (sequence is synthesized)
gtggctccaaggagctttgtagcatctatatcagtgtgaacacatagaaggagtccagggcttgggggaaccacatggcttcttagagaaaggaagcccaatttaaaatgaagattaatg

SEQ ID NO: 580755 - DNA, 120 bp, Artificial Sequence
  ENSG00000171914_128 (sequence is synthesized)
gagtggattacagggacacttaaaagataaaagtaattatattctgtgaaattcagcaagctgtttattgagcgcaaaccatgttcgagacgttcctaaatgaactgagttgtcaaggca

SEQ ID NO: 580756 - DNA, 120 bp, Artificial Sequence
  ENSG00000171914_129 (sequence is synthesized)
cccggagccagcggcggcggcagcggctgaggcggctgcgggagcggagtggtcgcccagcgcgcggggggacgcgggctgcactcccgggcaggcgctctgcaatgagacagtaaatgc

SEQ ID NO: 580757 - DNA, 120 bp, Artificial Sequence
  ENSG00000171914_130 (sequence is synthesized)
ctctgcaatgagacagtaaatgcatcccccgtgcgctgctgcagggtgacatctggactggcctccttgtccctcggatgctcggctgcccagaagtttctggatcaacttgttgaagac

SEQ ID NO: 580758 - DNA, 120 bp, Artificial Sequence
  ENSG00000171914_131 (sequence is synthesized)
tgaaggccgaccaggattcagaggccatgaggcggctacaggtaatggtcactgatgctggtgggaaaatactcctgttggagcgggcggcaggaaatgctgtgaaaagagcctcagaca

SEQ ID NO: 580759 - DNA, 120 bp, Artificial Sequence
  ENSG00000171914_132 (sequence is synthesized)
aagtctggttcccgagcaaggtctggggatgaggggctgcgaccactggggctgcctgccctcatggccaatttctcgactctactctctaggtgggctccatccctgccaatgctgcag

SEQ ID NO: 580760 - DNA, 120 bp, Artificial Sequence
  ENSG00000171916_0 (sequence is synthesized)
attccttctgcaaaggactgcctggcaggtgtcaaaggcagtggtggccacagaggcggtggagagatggccttcagcggttgccaggctccctatctgagcccagccgtccccttttct

SEQ ID NO: 580761 - DNA, 120 bp, Artificial Sequence
  ENSG00000171916_1 (sequence is synthesized)
gggactatccaagggggtctccaggacggatttcagatcactgtcaatggggccgttctcagctgcagtggaaccaggtttgctgtggactttcagacgggcttcagtggaaacgacatt

SEQ ID NO: 580762 - DNA, 120 bp, Artificial Sequence
  ENSG00000171916_2 (sequence is synthesized)
gccttccacttcaaccctcggtttgaagacggagggtatgtggtgtgcaacacgaggcagaaaggaacatgggggcccgaggagaggaagatgcacatgcccttccagaaggggatgccc

SEQ ID NO: 580763 - DNA, 120 bp, Artificial Sequence
  ENSG00000171916_3 (sequence is synthesized)
tttgacctctgcttcctggtgcagagctcagatttcaaggtgatggtgaacgggagcctcttcgtgcagtacttccaccgcgtgcccttccaccgtgtggacaccatctccgtcaatggc

SEQ ID NO: 580764 - DNA, 120 bp, Artificial Sequence
  ENSG00000171916_4 (sequence is synthesized)
tctgtgcagctgtcctacatcagcttccagaatccccgcgcagtccccgttcagcctgccttctccacggtgccgttctcccagcctgtctgtttcccacccaggcccagggggcgcaga

SEQ ID NO: 580765 - DNA, 120 bp, Artificial Sequence
  ENSG00000171916_5 (sequence is synthesized)
caaaaacctcccagcgtgcggcctgccaacccagctcccattacccagacagtcatccacacggtgcagagtgcctctggacagatgttctctcagactcccgccatcccacctatgatg

SEQ ID NO: 580766 - DNA, 120 bp, Artificial Sequence
  ENSG00000171916_6 (sequence is synthesized)
tacccccaccctgcctatccgatgcctttcatcaccaccattccgggagggctgtacccatccaagtccatcatcctgtcaggcactgtcctgcccagtgctcagaggttccacatcaac

SEQ ID NO: 580767 - DNA, 120 bp, Artificial Sequence
  ENSG00000171916_7 (sequence is synthesized)
cccccgttttgatgagaatgctgtggtccgtaacacccagatcaacaactcttgggggtctgaggagcgaagtctgccccgaaaaatgcccttcgtccgaggccagagcttctcggtgtg

SEQ ID NO: 580768 - DNA, 120 bp, Artificial Sequence
  ENSG00000171916_8 (sequence is synthesized)
gatcttgtgtgaagctcactgcctcaaggtggccgtggatggtcagcacgtgtttgaatactaccatcgcctgaggaacctgcccaccatcaacaaactggaagtgggtggcgacatcca

SEQ ID NO: 580769 - DNA, 120 bp, Artificial Sequence
  ENSG00000171916_9 (sequence is synthesized)
gctgacccacgtgcagacataggcggctccctggccctggggccgggggctggggtgtggggcagtctgggtcctctcatcatccccacttcccaggcccagcctttccaaccgtgcctg

SEQ ID NO: 580770 - DNA, 120 bp, Artificial Sequence
  ENSG00000171916_10 (sequence is synthesized)
ggatctgggctttaatgcagaggccatgtccttatctggtcctgcttctggctacagccaccctggaatcgagaaggcagctgactgggattgccttcctcagccgcagcagcacctggg

SEQ ID NO: 580771 - DNA, 120 bp, Artificial Sequence
  ENSG00000171916_11 (sequence is synthesized)
gcgccagctgctggaatcctacaatcccagaaggcgggcacagccagggagaggggaggagtgggcagtgaagatgaagccccatgctcagtcccctcccatcccccacgcagctccacc

SEQ ID NO: 580772 - DNA, 120 bp, Artificial Sequence; identical to SEQ ID NO: 567127
  ENSG00000171916_12 (sequence is synthesized)

SEQ ID NO: 580773 - DNA, 120 bp, Artificial Sequence
  ENSG00000171916_13 (sequence is synthesized)
agcaggcctgatggcttcccactggcctccaccaactgaccagagtgttctcttcaggggactggctcctttcccagtgtccttaaaataaagaaatgaaaatgcttgttggcacattca

SEQ ID NO: 580774 - DNA, 120 bp, Artificial Sequence
  ENSG00000171916_14 (sequence is synthesized)
ctcaaggccctctcgggccaccatgcttttgcatatgctgtccctggtcccggaagcaccctctgccagcctgccctcagcacacgcctaatcgcccttccatgctctgccaaagtgtcg

SEQ ID NO: 580775 - DNA, 120 bp, Artificial Sequence
  ENSG00000171916_15 (sequence is synthesized)
ctcctctgggagtcctccctgcccagaatattgttggatgctccccccatgcccccacggagtctgtacatatctgtgccatgccagttcacagcaccccattgtaactgtttgcgtgtc

SEQ ID NO: 580776 - DNA, 120 bp, Artificial Sequence
  ENSG00000171916_16 (sequence is synthesized)
tgtccctgtcactccacccccatctccctatgcccatgaggccccagagggctgggactgtgggtcgttcatttgcacagtgcctggcactcacttagggactcgaagaatggatgaatg

SEQ ID NO: 580777 - DNA, 120 bp, Artificial Sequence
  ENSG00000171916_17 (sequence is synthesized)
tggaatgtggttttcgcagccagggagaatgggataccagccagggcaagaacagtctactgggtggggcaggatccacgacaaggaggtgggcagcccttcctctggccactcaagcag

SEQ ID NO: 580778 - DNA, 120 bp, Artificial Sequence
  ENSG00000171916_18 (sequence is synthesized)
tggggactgggaggaggggcgctttgtctatgtagcctttttatggcccatgatggtacagacagtgcacctgcctcctgccacgctgacttcaggactggtggagccccagggaacatt

SEQ ID NO: 580779 - DNA, 120 bp, Artificial Sequence
  ENSG00000171916_19 (sequence is synthesized)
cgcagggcagccaaactttggccctggccctggcgctggccctggccctagggatgacagaaagtgtgctggatacagtcagacagaattggctgccattttggatttgatcccttccac

SEQ ID NO: 580780 - DNA, 120 bp, Artificial Sequence
  ENSG00000171916_20 (sequence is synthesized)
ccgggcaagcttgggcaagttgcttaatctttctgagcctcattgcctcaccagggacacaggagctgaggctgcttccctctttggaaagcactgaagcccaggactcggcccacaata

SEQ ID NO: 580781 - DNA, 120 bp, Artificial Sequence
  ENSG00000171916_21 (sequence is synthesized)
ggccttcaacaaataccacttctcagcttacgggtgaaatatggcaccggaagtaatgctcttggctgtgggagctacagacagcaatgaggtctctatcaaacccagcctcctctctct

SEQ ID NO: 580782 - DNA, 120 bp, Artificial Sequence
  ENSG00000171916_22 (sequence is synthesized)
cgagaggaaccagtggggataccctacccctcaaccccaaagccttgtgcacctgagggtaaaaatctgggtgccacgggctcaggaaggcttgcttgggagcaagagggaggtgggtgt

SEQ ID NO: 580783 - DNA, 120 bp, Artificial Sequence
  ENSG00000171916_23 (sequence is synthesized)
gtctggggaggcatttctgagcacaagagcctccctggagttctgccatcgtctctccccgttctgtggtgcccgcaataaccaccgttctgactctcctcacccctccagcctcccagc

SEQ ID NO: 580784 - DNA, 120 bp, Artificial Sequence
  ENSG00000171916_24 (sequence is synthesized)
gtgcggcctgccaacccagctcccattgtaagtctcttgctttctttttggatcctcttgattttggctcttcttctgggctaatggaggatgcagggccaggcattgggcctctcccat

SEQ ID NO: 580785 - DNA, 120 bp, Artificial Sequence
  ENSG00000171916_25 (sequence is synthesized)
cgggagtggggagggcagaggccaggcccttgaccatctacccggcctggcgaggttggtgggtgaatgtggttggctggccgtgatggaacaacctgagttgccactccatgggcagcc

SEQ ID NO: 580786 - DNA, 120 bp, Artificial Sequence
  ENSG00000171916_26 (sequence is synthesized)
ccgagaggaaagatgggccagagccaccagcgtccccatctgtcttctccagggtcctaacctttgcctctccctcgtcccctggacccaccctccgtggggtctgtggggccactgggc

SEQ ID NO: 580787 - DNA, 120 bp, Artificial Sequence
  ENSG00000171916_27 (sequence is synthesized)
tggttatgcccctggagggtgcctgccgtgtggcaccctctggtgggagctggggtggtctttactcaggagagcctgggtgagacctggtttctttcttccagacccagacagtcatcc

SEQ ID NO: 580788 - DNA, 120 bp, Artificial Sequence
  ENSG00000171916_28 (sequence is synthesized)
ggcaggctggggatgatggggaggaaatggggctcagaactcagtggacaaaggtccaggtaggctgcccaccccaggttccacatcaacctgtgctctgggagccacatcgccttccac

SEQ ID NO: 580789 - DNA, 120 bp, Artificial Sequence
  ENSG00000171916_29 (sequence is synthesized)
aagtcattccttctgcaaaggactgcctggcaggtgtcaaaggcagtggtggccacagaggcggtggagagatggccttcagcggttgccaggctccctatctgagcccagtttgctgtg

SEQ ID NO: 580790 - DNA, 120 bp, Artificial Sequence; identical to SEQ ID NO: 567133
  ENSG00000171916_30 (sequence is synthesized)

SEQ ID NO: 580791 - DNA, 120 bp, Artificial Sequence
  ENSG00000171916_31 (sequence is synthesized)
tgaggagcaccggaaagttttcctttggcttttatggaaccaaggaaagatatcgtgggcttcttctcagctgacagcctaaattcatgggaactggtacaatcttccccttccatgtgg

SEQ ID NO: 580792 - DNA, 120 bp, Artificial Sequence; identical to SEQ ID NO: 567135
  ENSG00000171916_32 (sequence is synthesized)

SEQ ID NO: 580793 - DNA, 120 bp, Artificial Sequence
  ENSG00000171916_33 (sequence is synthesized)
cagaggctggggatgatggggaggaaatggggctcagaactcagtggacaaaggtccaggtaggctgcccaccccaggttccacatcaacctgtgctctgggagccacatcgccttccac

SEQ ID NO: 580794 - DNA, 120 bp, Artificial Sequence
  ENSG00000171916_34 (sequence is synthesized)
cccgaggagaggaagatgcacatgcccttccagaaggggatgccctttgacctctgcttcctggtgcagagctcagatttcaaggaacatggatggagctggaagccgttgcaggagcag

SEQ ID NO: 580795 - DNA, 120 bp, Artificial Sequence
  ENSG00000171916_35 (sequence is synthesized)
gctgaacgatgagaacacatggacacaagcggggaaacaacacacactggggcctggtcggggacggagagcatcaggaagattagctaatggatgctgggcttgataccaaggtgatgg

SEQ ID NO: 580796 - DNA, 120 bp, Artificial Sequence; identical to SEQ ID NO: 567139
  ENSG00000171916_36 (sequence is synthesized)

SEQ ID NO: 580797 - DNA, 120 bp, Artificial Sequence
  ENSG00000171916_37 (sequence is synthesized)
catccttaacccatgccacaggacagcactccacaggcacaacctgcacccagggatgccattaacctggactccaggatgaatggggccctgggagctgaaggtctaaggaaggagtgg

SEQ ID NO: 580798 - DNA, 120 bp, Artificial Sequence
  ENSG00000171916_38 (sequence is synthesized)
gatggtcagagttggatgattatgttctgggctgaaccttgcacactgtgactgagagttgcaaaaatcaaacttcctccgtttcccataactgctctcatccactctgaagctctcctt

SEQ ID NO: 580799 - DNA, 120 bp, Artificial Sequence
  ENSG00000171916_39 (sequence is synthesized)
acaaaaacacattggatccaaattagagaaacaaaaaggatgccaaccaagcagtctctgccacgcaggttgtatgcaagatcccagacaaacacagggcagaggcaccgaggccctcct

SEQ ID NO: 580800 - DNA, 120 bp, Artificial Sequence
  ENSG00000171928_0 (sequence is synthesized)
cttacagtggtccctgctggcccttggtgacgggtcgcctcagttccgacccggacccgtacgctgctgcgctgacgtggctcccggaagtagggctggcgtagggccgccatgttgcag

SEQ ID NO: 580801 - DNA, 120 bp, Artificial Sequence
  ENSG00000171928_1 (sequence is synthesized)
caggatagtaatgatgacactgaagatgtttcactgtttgatgcggaagaggagacgactaatagaccaagaaaagccaaaatcagacatccagtagcatcgtttttccacttattcttt

SEQ ID NO: 580802 - DNA, 120 bp, Artificial Sequence
  ENSG00000171928_2 (sequence is synthesized)
cgagtcagtgcaatcatcgtctatcttctctgtgggttgctcagcagcagctttattacctgtatggtgacaattatcttgttgttgtcgtgtgacttttgggcagtgaagaatgtcaca

SEQ ID NO: 580803 - DNA, 120 bp, Artificial Sequence
  ENSG00000171928_3 (sequence is synthesized)
ggtagactaatggttggcctacgttggtggaatcacattgatgaagatggaaagagccattgggtgtttgaatctagaaaggagtcctctcaagagaataaaactgtgtcagaggctgaa

SEQ ID NO: 580804 - DNA, 120 bp, Artificial Sequence
  ENSG00000171928_4 (sequence is synthesized)
tcaagaatcttttggttgggacttattgcctgtccagtactgtgggtgatatttgcttttagtgcactcttctccttcagagtaaagtggttggcggtggttatcatgggtgtggtgcta

SEQ ID NO: 580805 - DNA, 120 bp, Artificial Sequence
  ENSG00000171928_5 (sequence is synthesized)
caaggtgccaacctgtatggttacatcaggtgtaaggtgcgcagcagaaagcatttaaccagcatggctacttcatattttggaaagcagtttttaagacaaaacactggagatgatcag

SEQ ID NO: 580806 - DNA, 120 bp, Artificial Sequence
  ENSG00000171928_6 (sequence is synthesized)
acttcctgaatagagaaagcttatgtgctttgttacattggggaacaactgaagagattcttgactcaaccttttagagcttagtccatgttgcaacgaggagtgttggctttgtttttc

SEQ ID NO: 580807 - DNA, 120 bp, Artificial Sequence
  ENSG00000171928_7 (sequence is synthesized)
tagaaagtatgtgttggcactagaaacattgtcaagatttgttctgtggtgtaggtatgcacattccataggtatgcacacggccatgtaatatcagtatatcccaagttaatgaaagtg

SEQ ID NO: 580808 - DNA, 120 bp, Artificial Sequence
  ENSG00000171928_8 (sequence is synthesized)
ttcatttacataggtaatggagacctttgcattttgatccatagaacataggaggatgttcttagtctgtctcaaagctctatatgtttacatattatttctgtagattgttttcaggag

SEQ ID NO: 580809 - DNA, 120 bp, Artificial Sequence
  ENSG00000171928_9 (sequence is synthesized)
aaagttttgcttctatggtaagagtgagcactttggcttatgtataagttagaaataattgttagtttttaatatgcacttcgtggggaaatttcttagacgtatgcaagcaagtgaaaa

SEQ ID NO: 580810 - DNA, 120 bp, Artificial Sequence
  ENSG00000171928_10 (sequence is synthesized)
caattagggccagtggtattaactactttataaaattttatttttgtttgtaagaagtcatctatttaaggcccagttaatataagtggaatcatcatagtttaaggaatacccagagat

SEQ ID NO: 580811 - DNA, 120 bp, Artificial Sequence
  ENSG00000171928_11 (sequence is synthesized)
tgctgctgttctatttattttacagaaaggatagctagattgaaagctcttcagtggaccttgagctaatagatcttttaccactaaaagagcattattctcatgtcataatgagaataa

SEQ ID NO: 580812 - DNA, 120 bp, Artificial Sequence
  ENSG00000171928_12 (sequence is synthesized)
taatttacatacttggcataataaatgcctaaaagacattttattttctgaatctatttttttcttgctataatggggatattgtaaattatgcatttgtattaatggtatttcttaaag

SEQ ID NO: 580813 - DNA, 120 bp, Artificial Sequence
  ENSG00000171928_13 (sequence is synthesized)
caatctatgtaactgtaaattaaaccaatctacaaactattgtaggcatctgtaaattctgttgtaggtattataaactttgttgaagtcttaatcagcagattatgttgtgaatatatt

SEQ ID NO: 580814 - DNA, 120 bp, Artificial Sequence
  ENSG00000171928_14 (sequence is synthesized)
tgtacattgttaaaatagtttttaagattatttgtttaattgaataagtgtcttattggagtgatagctttgaaggtgcaaaactttatatttgtataaaattctactatttacaaggca

SEQ ID NO: 580815 - DNA, 120 bp, Artificial Sequence
  ENSG00000171928_15 (sequence is synthesized)
aattgttctatttttatttcttattaatctcttactgtgcattatttataaattaagcattatcataggtatgtacttacaggaaaaaatatagcatatataaggtttggtattaaccac

SEQ ID NO: 580816 - DNA, 120 bp, Artificial Sequence
  ENSG00000171928_16 (sequence is synthesized)
agcatatataaggtttggtattaaccacaatttgaggcatctgctgggggtcttggaatgtatcccctgcagataagggaggactactatactttatgaatttattaatggtaagatcta

SEQ ID NO: 580817 - DNA, 120 bp, Artificial Sequence
  ENSG00000171928_17 (sequence is synthesized)
gtggcaggtctaataactactttcaaagcagtggtgagcgtaaacaatatgttaagataactgcagcaagtatagtacaaaatgaaaaatgtctgtggtttctattgtgtcagggtgttt

SEQ ID NO: 580818 - DNA, 120 bp, Artificial Sequence
  ENSG00000171928_18 (sequence is synthesized)
ttaattttacctatattcatagtttgttgtctacattcataatttaatgatatgctaactactttcaaagcagtggtgagcataaatagtattttgaggccgtgcgtggtggcttacgcc

SEQ ID NO: 580819 - DNA, 120 bp, Artificial Sequence
  ENSG00000171928_19 (sequence is synthesized)
cgaaactctgtctcaaaaacaaaaaacaaaaccaaacaaaaaacaaaactacaatattttgaggtaactgcagcaaatatagtacaaaataaaaaaatgcctgtgatttctattgtgtca

SEQ ID NO: 580820 - DNA, 120 bp, Artificial Sequence
  ENSG00000171928_20 (sequence is synthesized)
gtcagggtgtttttaattttacctacattcatagtttgttgtctacattcataatttaaagatatgctaaattttagccagaggttaatgaaaatgaaggtaacatttttttttaaccca

SEQ ID NO: 580821 - DNA, 120 bp, Artificial Sequence
  ENSG00000171928_21 (sequence is synthesized)
tcgaggttcacagaaccactgaatctattagtggacaccattaattaaacatccatggtactgttgattcttatttatcttttatatttcattccaaatgttgactcctcagagagtcat

SEQ ID NO: 580822 - DNA, 120 bp, Artificial Sequence
  ENSG00000171928_22 (sequence is synthesized)
tttctgatacccagactagatccaatttccctgttatactcttcaagcatctcacacttttcccttgcaggacttaactcagttggtaatggtacatttgtgcattggttgtctgcctct

SEQ ID NO: 580823 - DNA, 120 bp, Artificial Sequence
  ENSG00000171928_23 (sequence is synthesized)
cttcacctctttccctgaggaaggagttggtatctgttagtcactgttgtattaccagcacatagtagatgctcagtaaatatttgttgagtaaataaagattaggaaagctatcaaact

SEQ ID NO: 580824 - DNA, 120 bp, Artificial Sequence
  ENSG00000171928_24 (sequence is synthesized)
aatttattaccttagtaagtaggaaaagagcttggtaacttgagagactgactgaaggccagtgtctataatcattttcagggatatgtagttgtaaaatacatgtagctatagtcagga

SEQ ID NO: 580825 - DNA, 120 bp, Artificial Sequence
  ENSG00000171928_25 (sequence is synthesized)
tgtaaagtaggtcacagtaaccaaatagcaaggggtttagggaaaattagggaactggagaaagggcaaattgttcatgagggaaaagagaaggtgtaatgtttatgggtggacttgttg

SEQ ID NO: 580826 - DNA, 120 bp, Artificial Sequence
  ENSG00000171928_26 (sequence is synthesized)
agccaggcctgatacatagtagtctttgctaactggatattatggaggtaaagctgaaggtttttgtttgtgaaatgttacactaagataggagcttgtgatagatctttaaataatgct

SEQ ID NO: 580827 - DNA, 120 bp, Artificial Sequence
  ENSG00000171928_27 (sequence is synthesized)
ggccgccatgttgcagcaggatagtaatgatgacactgaagatgtttcactgtttgatgcggaagaggagacgactaatagaccaagaaaagccaaaatcaggtaggaggagagaagttg

SEQ ID NO: 580828 - DNA, 120 bp, Artificial Sequence
  ENSG00000171928_28 (sequence is synthesized)
gcatgttgctaatttgacgtttagtgtacgacaaagatgacatttcagattttcttgtgaataattggcatacttaatactgagttttaaaatcagcaaatccaattatttgaacacctg

SEQ ID NO: 580829 - DNA, 120 bp, Artificial Sequence
  ENSG00000171928_29 (sequence is synthesized)
ctgagggctcgctgggagggtggcggctcctgggactggctctgcaggttccgtgggactggagcccgcgtcccccgcgcccgctactcgaactcgaggaggagcggggcggccgggagt

SEQ ID NO: 580830 - DNA, 120 bp, Artificial Sequence
  ENSG00000171928_30 (sequence is synthesized)
ggagggctgtgggtagttgtctgaggagggctgctgggggttctgaggccgctgggggcggcgtgacccgtgcggcgcagagcaagtacttcttgcggctgtggggacgcccattgttaa

SEQ ID NO: 580831 - DNA, 120 bp, Artificial Sequence
  ENSG00000171928_31 (sequence is synthesized)
ccagcgcgagtgggggtctctctttcctcaacccttattgccggggtggagttgaggaggagcggcctgcgggcctcttagcttcctgacacccaggggtgcgatgctattttgtaggaa

SEQ ID NO: 580832 - DNA, 120 bp, Artificial Sequence
  ENSG00000171928_32 (sequence is synthesized)
tcggcgacaccgccagagcctcgctttcaaattgctgtttccaaactaatgttgttggtgattctctcctttgtgctcttagagttaattgtagtccacatgttggcaaccagagactcg

SEQ ID NO: 580833 - DNA, 120 bp, Artificial Sequence
  ENSG00000171928_33 (sequence is synthesized)
taagattaataatatttttagaaaaaactactgtttatggtcacttagattgtcttaagtgtttttttctttcggttcacacaaaatttgttgagggattactatgactcagacacggtt

SEQ ID NO: 580834 - DNA, 120 bp, Artificial Sequence
  ENSG00000171928_34 (sequence is synthesized)
gtaggcccagggatagggttgtgaccagtacagacaggtttcttgccccgtatttttgggttagggaagtgggttctaggagatgggggttgggtggggagacacgataaattgtataac

SEQ ID NO: 580835 - DNA, 120 bp, Artificial Sequence
  ENSG00000171928_35 (sequence is synthesized)
caaagatattttcagataattgcaaaggcagggtgatgaaataacaagtgtctgaggataggacaactaagatttatggtcaggaaagactgcttatgaggagatgccttgagtggagaa

SEQ ID NO: 580836 - DNA, 120 bp, Artificial Sequence
  ENSG00000171928_36 (sequence is synthesized)
ttgagtggagaaaatctaataatggttaaattcagctgtattacaggaaaggtgtcccgatccagacccgaaaagagggtccttggccgggcgtggtgactcaggcctgtaatcccagca

SEQ ID NO: 580837 - DNA, 120 bp, Artificial Sequence
  ENSG00000171928_37 (sequence is synthesized)
gcaggagaatcgcttgaactggggaggctgaggttgcagtgagccgcgggccactgcactccatccagcctggctacagagggagactccgtctcaaacaaaacaaaaaaagtcttggat

SEQ ID NO: 580838 - DNA, 120 bp, Artificial Sequence
  ENSG00000171928_38 (sequence is synthesized)
ctacaactgagtccttatcattagggacctatcttgaataggcagcttcatcatgtaattcccaagttttgcttcccaactttacctttctctataatactggagaagagatcctaaaaa

SEQ ID NO: 580839 - DNA, 120 bp, Artificial Sequence
  ENSG00000171928_39 (sequence is synthesized)
tttaagacaagtaagtgttttctggatgtgatcagtgactaatgcaattatttctaactttcatagtttaatttttatgaaacgctcctgaacagaagttttaaaggcatatagttgtat

SEQ ID NO: 580840 - DNA, 120 bp, Artificial Sequence
  ENSG00000171928_40 (sequence is synthesized)
aaatataatgataaagatgttgtaattgctctttgggggtgttcaagacagtctggaagtgtattgtcagtatcctaaaattattttaaagccaggaaggataaactatcattgataata

SEQ ID NO: 580841 - DNA, 120 bp, Artificial Sequence
  ENSG00000171928_41 (sequence is synthesized)
acttattttttaaaaattacttttaagttcagttgtttttcatcaattatgggagctttaagtgaatgcccttgcagaatgtatgttgtatgttttttttttttttttttgagacagagt

SEQ ID NO: 580842 - DNA, 120 bp, Artificial Sequence
  ENSG00000171931_0 (sequence is synthesized)
agacttctgctggcagttactgagagagataggctttccatccatggcagccatttacttttgctctgggagacgtttgtaatagaaaaggcacaactggggtatttattcattcccccc

SEQ ID NO: 580843 - DNA, 120 bp, Artificial Sequence
  ENSG00000171931_1 (sequence is synthesized)
gttcctctagtgtttggtggcgttgccgttgcaagtgcgcagggctaaaatggactggttatcttaggatcatggaaaacctggaatcaaggctcaagaatgccccctattttcgttgtg

SEQ ID NO: 580844 - DNA, 120 bp, Artificial Sequence
  ENSG00000171931_2 (sequence is synthesized)
agaagggaaccgattccatccctctatgccggaagtgtgagacgtgtgtcttagcctggaagatcttctctaccaaagagtggttctgcaggatcaatgacatatcacagaggaggtttc

SEQ ID NO: 580845 - DNA, 120 bp, Artificial Sequence
  ENSG00000171931_3 (sequence is synthesized)
tagttggcattctgaagcagttaaatagcttatatttgttacactatttccaaaatatccttcagaccacacagggaaaggatttcatctataacaggtcccggatcaacctcagcaaga

SEQ ID NO: 580846 - DNA, 120 bp, Artificial Sequence
  ENSG00000171931_4 (sequence is synthesized)
aagaggggaaagttgtgaagtcctccttgaaccaaatgttggataaaacagtagaacagaagatgaaagagatcttgtactggtttgcgaacagcacccagtggaccaaggcgaattata

SEQ ID NO: 580847 - DNA, 120 bp, Artificial Sequence
  ENSG00000171931_5 (sequence is synthesized)
ctctcttactgctgcagatgtgcaaccccaaattactgctcactgctgccaatgtgatcagagtcctgtttctgagagaggagaacaatatctcagggctcaatcaagacatcacagatg

SEQ ID NO: 580848 - DNA, 120 bp, Artificial Sequence
  ENSG00000171931_6 (sequence is synthesized)
tgtgtttttcccctgagaaagaccacagctccaagtctgcgacctcacaagtctattggacagccaaaactcagcacacatcccttcctttgtccaaagccccagaaaatgaacacttgc

SEQ ID NO: 580849 - DNA, 120 bp, Artificial Sequence
  ENSG00000171931_7 (sequence is synthesized)
ttggggcagcatctaaccctgaggaaccatggaggaattcactccggtgtatatccgaaatgaataggctgttttctggaaaaggagacataaccaagccagggtacgatccctgcaatc

SEQ ID NO: 580850 - DNA, 120 bp, Artificial Sequence
  ENSG00000171931_8 (sequence is synthesized)
tattggttgacctggatgacatcagagacctgtcttctgggttcagcaaataccgagacttcatccgttacctgcccatccacctctccaagtacattctaagaatgctggatagacaca

SEQ ID NO: 580851 - DNA, 120 bp, Artificial Sequence
  ENSG00000171931_9 (sequence is synthesized)
ccctgaacaagtgcgcctctgtgagccagcactgggccgccatggctcaacaggtcaagatggacttgtcagcgcacggcttcattcagaaccagattaccttcttgcaggggtcctaca

SEQ ID NO: 580852 - DNA, 120 bp, Artificial Sequence
  ENSG00000171931_10 (sequence is synthesized)
caagaggaattgatcctaattatgccaataaggtttctatcccagttcctaaaatggtagatgacgggaagagcatgcgtgtgaaacatccgaagtggaagctgagaacgaagaatgagt

SEQ ID NO: 580853 - DNA, 120 bp, Artificial Sequence
  ENSG00000171931_11 (sequence is synthesized)
acaacctgtggactgcataccagaacgaggaaacgcagcaggtcctgatagaggagagaaatgttttctgtgggacctacaatgttcgcattctctctgacacgtgggatcaaaaccgag

SEQ ID NO: 580854 - DNA, 120 bp, Artificial Sequence
  ENSG00000171931_12 (sequence is synthesized)
tcatccactattccgggggagatctgatagctgtgtcatctaatcgaaagatccatcttctggacatcatacaagtgaaagcgatacccgttgaattccgaggccatgctgggagtgtcc

SEQ ID NO: 580855 - DNA, 120 bp, Artificial Sequence
  ENSG00000171931_13 (sequence is synthesized)
gggccctcttcctgtgtgaggaggaaaactttctcctaagcgggagctatgacctaagtatcagatactgggatctgaaaagtggggtttgcacacgaatcttcggtggtcaccagggga

SEQ ID NO: 580856 - DNA, 120 bp, Artificial Sequence
  ENSG00000171931_14 (sequence is synthesized)
ggaggaagagattgccaggtaaaagtatgggatgtagacacagggaagtgcctgaagacgtttagacacaaagaccccatcttggccaccaggatcaatgatacctacattgtgagcagc

SEQ ID NO: 580857 - DNA, 120 bp, Artificial Sequence
  ENSG00000171931_15 (sequence is synthesized)
tgtgagcgagggctggtgaaagtgtggcacattgccatggcccagttggtaaagactctcagtggccatgagggagccgtgaaatgcctgttctttgaccagtggcatctcctctcagga

SEQ ID NO: 580858 - DNA, 120 bp, Artificial Sequence
  ENSG00000171931_16 (sequence is synthesized)
agtactgatggcctggtcatggcctggagcatggtggggaagtacgagcgctgcctgatggccttcaagcatcccaaggaggtgctcgacgtgtcccttctcttcctccgggtcatcagc

SEQ ID NO: 580859 - DNA, 120 bp, Artificial Sequence
  ENSG00000171931_17 (sequence is synthesized)
gcctgtgcagatggcaagatccgaatttacaatttcctcaacgggaactgtatgaaggtgttaaaagccaatggcagaggtgatcctgtgctgtccttctttattcagggcaacaggatg

SEQ ID NO: 580860 - DNA, 120 bp, Artificial Sequence
  ENSG00000171931_18 (sequence is synthesized)
gtggtcaacacagagagcaatgttctcatgttccagtttgagcacataaagtggcagtatgccgtggaaaaaacgaaacaaaagaagaataaggagaaagaggaggaaaaagaagaaaat

SEQ ID NO: 580861 - DNA, 120 bp, Artificial Sequence
  ENSG00000171931_19 (sequence is synthesized)
agtctcatggaaattctctctaagtgtaatattcaggttcacagcccaagagagtctgtatccagtaaacaaactgtgatccaagagctcctaccaggcaaacctcccaagtcccgagta

SEQ ID NO: 580862 - DNA, 120 bp, Artificial Sequence
  ENSG00000171931_20 (sequence is synthesized)
ctcctgaagccggccaagttctcttcagcagtgttaatagaggaacttcaaagtcaaggaaagtcaaaatcaccccgaagagatgcagatgatgtggagaaagcacaaaaacaaggacaa

SEQ ID NO: 580863 - DNA, 120 bp, Artificial Sequence
  ENSG00000171931_21 (sequence is synthesized)
ttggaaactcctggaaaactgcccagtcacccaaagaaaaagtcttggaaaatccctatgtcacctgaccaattcctcctgactgttagcgccctgcagcacgcccataattccggggaa

SEQ ID NO: 580864 - DNA, 120 bp, Artificial Sequence
  ENSG00000171931_22 (sequence is synthesized)
tttgcctatccctgtaggccccaaacagaaattactgatgtctggggaccttcaatttcatacccaaggaaggtcttgaatttcaaaggaaaatcaatccaacgtgcagttgatcggttg

SEQ ID NO: 580865 - DNA, 120 bp, Artificial Sequence
  ENSG00000171931_23 (sequence is synthesized)
agattgagcaatcctcctatagatgtgaaacgaaccagtattccccttgaaatccagaaactgcagcccaacttgaagatctctttgcacagtcctagagtccagtccaccataccccag

SEQ ID NO: 580866 - DNA, 120 bp, Artificial Sequence
  ENSG00000171931_24 (sequence is synthesized)
cccatgattatccgctccaggttctctggcagcttaaagggtggagaccaagtgaccagttcaattgaaagggctgtgtgcagtacgggtcccctgaccagtatgcaggtcattaaacca

SEQ ID NO: 580867 - DNA, 120 bp, Artificial Sequence
  ENSG00000171931_25 (sequence is synthesized)
aaccgcatgctagctccacaagtgggcacagccaccctgtctcttaagaaagaacggcctcgcatctatacagcccttgatccttttagagtgaacactgagttcgtgctgttgaccgtg

SEQ ID NO: 580868 - DNA, 120 bp, Artificial Sequence
  ENSG00000171931_26 (sequence is synthesized)
aaggaggagaaggagcaccaggaagccaagatgaaggaatatcaggccagggagtccactggagtggttgatccaggaaaagtcagcaaagctgcatggatcaggaagatcaaaggcctg

SEQ ID NO: 580869 - DNA, 120 bp, Artificial Sequence
  ENSG00000171931_27 (sequence is synthesized)
cctattgataatttcacgaagcaagggaaaacagcggcccctgaacttggacaaaatgtatttatctaaaccagccttgggaaattacaatgttttacaataaacagaaagccaagcgga

SEQ ID NO: 580870 - DNA, 120 bp, Artificial Sequence
  ENSG00000171931_28 (sequence is synthesized)
cagaaggcaaggcttcagaaatctgtaaggaactgcagttgtagacaacataggtagacagagattgcacagaactcagcataggttttttgaactgacaccttgtcctgacacccgatc

SEQ ID NO: 580871 - DNA, 120 bp, Artificial Sequence
  ENSG00000171931_29 (sequence is synthesized)
ctgtttaccaaaggagaaatgactgagtgtaacttccttcttgaaaatgatcaatgcaggaggaagtacacaacttttaactcacaagcatttatcatggatttctgcatctcataggcc

SEQ ID NO: 580872 - DNA, 120 bp, Artificial Sequence
  ENSG00000171931_30 (sequence is synthesized)
cagaaatggctggtccctgcccctgaccccttaatgctggtgtcgttcctgctttagggattggactgagctcgagagggttgtaaaggggaagcttttgtttttctcttcagctgccct

SEQ ID NO: 580873 - DNA, 120 bp, Artificial Sequence
  ENSG00000171931_31 (sequence is synthesized)
gcacagaaaccagaccaagaagtcaaaacttagggctttttttttttttttcattcactctaccatgctccttgcttatccatgaaatgaaaccttaaagtagagtttctccaaggctgg

SEQ ID NO: 580874 - DNA, 120 bp, Artificial Sequence
  ENSG00000171931_32 (sequence is synthesized)
agatagcttaagggccaaataagtctagggtggtagttctccagctgtggcttgtatcaggatctccagcaggacctgttaaaacaagctcctcccccagaacttcggactcagcaggtc

SEQ ID NO: 580875 - DNA, 74 bp, Artificial Sequence
  ENSG00000171931_33 (sequence is synthesized)
tgtggtggcgcatctatctgggaggtgctcgacgtgtcccttctcttcctccgggtcatcagcgcctgtgcaga

SEQ ID NO: 580876 - DNA, 120 bp, Artificial Sequence
  ENSG00000171936_0 (sequence is synthesized)
atgcctggtcagaactacagaaccatatctgaatttatcctctctggcttctcagccttcccccagcagctcctgcctgtcttgttcctgctgtacctcctgatgttcctgttcacattg

SEQ ID NO: 580877 - DNA, 120 bp, Artificial Sequence
  ENSG00000171936_1 (sequence is synthesized)
cttggcaaccttcttatcatggccacagtttggattgaacgcagactccacacacccatgtacctcttcttgtgtgccctctccatctctgagattctgttcactgttgccatcacccct

SEQ ID NO: 580878 - DNA, 120 bp, Artificial Sequence
  ENSG00000171936_2 (sequence is synthesized)
cgcatgctggctgatctgctcttcacccatcgttccatcacctttgtggcttgtgccattcagatgttcttctccttcatgtttggcttcactcactccttccttctcatggtcatgggc

SEQ ID NO: 580879 - DNA, 120 bp, Artificial Sequence
  ENSG00000171936_3 (sequence is synthesized)
atgatggtgacaatgatggtttttcacctcactttctgtgggtctaatgtgatccaccattttctctgtcatgtgctttccctcttgaagttggcctgtgggagcaagacatcatctgtc

SEQ ID NO: 580880 - DNA, 120 bp, Artificial Sequence
  ENSG00000171936_4 (sequence is synthesized)
atcatgggtgtgatgctggtgtgtgtcacagccctgataggctgtttgttcctcatcatcctctcctttgtcttcattgtggctgccatcttgaggattccttctgctgagggccggcac

SEQ ID NO: 580881 - DNA, 120 bp, Artificial Sequence
  ENSG00000171936_5 (sequence is synthesized)
aagactttctccacttgtgtatcccacctcactgtggtggtcatgcactatagttttgcctcccttatctacctcaaacccaagggcctccattctatgtacagtgatgccttgatggcc

SEQ ID NO: 580882 - DNA, 120 bp, Artificial Sequence
  ENSG00000171936_6 (sequence is synthesized)
accacctatactgtcttcacccccttcctcagcccaatcattttcagtctaaggaacaaggagctgaagaatgccataaataaaaacttttgcagaaggttctgccctctaagctcctaa

SEQ ID NO: 580883 - DNA, 120 bp, Artificial Sequence
  ENSG00000171940_0 (sequence is synthesized)
gacaaagagaactaatgctttgtgctgattcatatttgaatcgaggcattgggaaccctgtatgccttgtttgtggaaagaaccagtgacaccatcactgagcttcctaaaagttcgaag

SEQ ID NO: 580884 - DNA, 120 bp, Artificial Sequence
  ENSG00000171940_1 (sequence is synthesized)
aagttagaggactatacactttcttttgaacttttataataaatatttgctctggtttttggaacccagggctgttagaggggtgagtgacaagtcttacaagtggccttattccaactc

SEQ ID NO: 580885 - DNA, 120 bp, Artificial Sequence
  ENSG00000171940_2 (sequence is synthesized)
cagaaattgcccaacggaactttgagattatatgcaatcgaaagtgacaggaaacatgccaactcaatccctcttaatgtacatggatgggccagaagtgattggcagctctcttggcag

SEQ ID NO: 580886 - DNA, 120 bp, Artificial Sequence
  ENSG00000171940_3 (sequence is synthesized)
tccgatggagatggaggatgccttgtcaatgaaagggaccgctgttgttccattccgagctacacaagaaaaaaatgtcatccaaatcgaggggtatatgcccttggattgcatgttctg

SEQ ID NO: 580887 - DNA, 120 bp, Artificial Sequence
  ENSG00000171940_4 (sequence is synthesized)
cagccagaccttcacacattcagaagaccttaataaacatgtcttaatgcaacaccggcctaccctctgtgaaccagcagttcttcgggttgaagcagagtatctcagtccgcttgataa

SEQ ID NO: 580888 - DNA, 120 bp, Artificial Sequence
  ENSG00000171940_5 (sequence is synthesized)
aagtcaagtgcgaacagaacctcccaaggaaaagaattgcaaggaaaatgaatttagctgtgaggtatgtgggcagacatttagagtcgcttttgatgttgagatccacatgagaacaca

SEQ ID NO: 580889 - DNA, 120 bp, Artificial Sequence
  ENSG00000171940_6 (sequence is synthesized)
caaagattctttcacttacgggtgtaacatgtgcggaagaagattcaaggagccttggtttcttaaaaatcacatgcggacacataatggcaaatcgggggccagaagcaaactgcagca

SEQ ID NO: 580890 - DNA, 120 bp, Artificial Sequence
  ENSG00000171940_7 (sequence is synthesized)
aggcttggagagtagtccagcaacgatcaacgaggtcgtccaggtgcacgcggccgagagcatctcctctccttacaaaatctgcatggtttgtggcttcctatttccaaataaagaaag

SEQ ID NO: 580891 - DNA, 120 bp, Artificial Sequence
  ENSG00000171940_8 (sequence is synthesized)
tctaattgagcaccgcaaggtgcacaccaaaaaaactgctttcggtaccagcagcgcgcagacagactctccacaaggaggaatgccgtcctcgagggaggacttcctgcagttgttcaa

SEQ ID NO: 580892 - DNA, 120 bp, Artificial Sequence
  ENSG00000171940_9 (sequence is synthesized)
cttgagaccaaaatctcaccctgaaacggggaagaagcctgtcagatgcatccctcagctcgatccgttcaccaccttccaggcttggcagctggctaccaaaggaaaagttgccatttg

SEQ ID NO: 580893 - DNA, 120 bp, Artificial Sequence
  ENSG00000171940_10 (sequence is synthesized)
ccaagaagtgaaggaatcggggcaagaagggagcaccgacaacgacgattcgagttccgagaaggagcttggagaaacaaataagggcagttgtgcaggcctctcgcaagagaaagagaa

SEQ ID NO: 580894 - DNA, 120 bp, Artificial Sequence
  ENSG00000171940_11 (sequence is synthesized)
gtgcaaacactcccacggcgaagcgccctccgtggacgcggatcccaagttacccagtagcaaggagaagcccactcactgctccgagtgcggcaaagctttcagaacctaccaccagct

SEQ ID NO: 580895 - DNA, 120 bp, Artificial Sequence
  ENSG00000171940_12 (sequence is synthesized)
ggtcttgcactccagggtccacaagaaggaccggagggccggcgcggagtcgcccaccatgtctgtggacgggaggcagccggggacgtgttctcctgacctcgccgcccctctggatga

SEQ ID NO: 580896 - DNA, 120 bp, Artificial Sequence
  ENSG00000171940_13 (sequence is synthesized)
aaatggagccgtggatcgaggggaaggtggttctgaagacggatctgaggatgggcttcccgaaggaatccatctggataaaaatgatgatggaggaaaaataaaacatcttacatcttc

SEQ ID NO: 580897 - DNA, 120 bp, Artificial Sequence
  ENSG00000171940_14 (sequence is synthesized)
aagagagtgtagttattgtggaaagtttttccgttcaaattattacctcaatattcatctcagaacgcatacaggtgaaaaaccatacaaatgtgaattttgtgaatatgctgcagccca

SEQ ID NO: 580898 - DNA, 120 bp, Artificial Sequence
  ENSG00000171940_15 (sequence is synthesized)
gaagacatctctgaggtatcacttggagagacatcacaaggaaaaacaaaccgatgttgctgctgaagtcaagaacgatggtaaaaatcaggacactgaagatgcactattaaccgctga

SEQ ID NO: 580899 - DNA, 120 bp, Artificial Sequence
  ENSG00000171940_16 (sequence is synthesized)
cagtgcgcaaaccaaaaatttgaaaagattttttgatggtgccaaagatgttacaggcagtccacctgcaaagcagcttaaggagatgccttctgtttttcagaatgttctgggcagcgc

SEQ ID NO: 580900 - DNA, 120 bp, Artificial Sequence
  ENSG00000171940_17 (sequence is synthesized)
tgtcctctcaccagcacacaaagatactcaggatttccataaaaatgcagctgatgacagtgctgataaagtgaataaaaaccctacccctgcttacctggacctgttaaaaaagagatc

SEQ ID NO: 580901 - DNA, 120 bp, Artificial Sequence
  ENSG00000171940_18 (sequence is synthesized)
agcagttgaaactcaggcaaataacctcatctgtagaaccaaggcggatgttactcctcctccggatggcagtaccacccataaccttgaagttagccccaaagagaagcaaacggagac

SEQ ID NO: 580902 - DNA, 120 bp, Artificial Sequence
  ENSG00000171940_19 (sequence is synthesized)
cgcagctgactgcagatacaggccaagtgtggattgtcacgaaaaacctttaaatttatccgtgggggctcttcacaattgcccggcaatttctttgagtaaaagtttgattccaagtat

SEQ ID NO: 580903 - DNA, 120 bp, Artificial Sequence
  ENSG00000171940_20 (sequence is synthesized)
cacctgtccattttgtaccttcaagacattttatccagaagttttaatgatgcaccagagactggagcataaatacaatcctgacgttcataaaaactgtcgaaacaagtccttgcttag

SEQ ID NO: 580904 - DNA, 120 bp, Artificial Sequence
  ENSG00000171940_21 (sequence is synthesized)
aagtcgacgtaccggatgcccgccagcgttgctgggaaaagatgtgcctcccctctctagtttctgtaaacccaagcccaagtctgctttcccggcgcagtccaaatccctgccatctgc

SEQ ID NO: 580905 - DNA, 120 bp, Artificial Sequence
  ENSG00000171940_22 (sequence is synthesized)
gaaggggaagcagagccctcctgggccaggcaaggcccctctgacttcagggatagactctagcactttagccccaagtaacctgaagtcccacagaccacagcagaatgtgggggtcca

SEQ ID NO: 580906 - DNA, 120 bp, Artificial Sequence
  ENSG00000171940_23 (sequence is synthesized)
cttctcagcccaccctcggcagcagtaacatcaatggttccatcgactaccccgccaagaacgacagcccgtgggcacctccgggaagagactatttctgtaatcggagtgccagcaata

SEQ ID NO: 580907 - DNA, 120 bp, Artificial Sequence
  ENSG00000171940_24 (sequence is synthesized)
ctgcagcagaatttggtgagccccttccaaaaagactgaagtccagcgtggttgcccttgacgttgaccagcccggggccaattacagaagaggctatgaccttcccaagtaccatatgg

SEQ ID NO: 580908 - DNA, 120 bp, Artificial Sequence
  ENSG00000171940_25 (sequence is synthesized)
tcagaggcatcacatcactgttaccgcaggactgtgtgtatccgtcgcaggcgctgcctcccaaaccaaggttcctgagctccagcgaggtcgattctccaaatgtgctgactgttcaga

SEQ ID NO: 580909 - DNA, 120 bp, Artificial Sequence
  ENSG00000171940_26 (sequence is synthesized)
agccctatggtggctccgggccactttacacttgtgtgcctgctggtagtccagcatccagctcgacgttagaaggaaaaaggcctgtgtcatatcaacacttatctaacagcatggcac

SEQ ID NO: 580910 - DNA, 120 bp, Artificial Sequence
  ENSG00000171940_27 (sequence is synthesized)
aaaagagaaactatgagaattttattgggaatgcacattatcgaccaaatgacaaaaaaacttgattcactaattagggggaaaaaaggtcttggtggatgtcagtgcttactccccatg

SEQ ID NO: 580911 - DNA, 120 bp, Artificial Sequence
  ENSG00000171940_28 (sequence is synthesized)
aaattaaattttacttcatcctttgagaagcgaatggtgaaagctactgaaataagctgtgattgtactgtacataaaacatatgaggaatctgcaaggaacactacagttgtgtaaagt

SEQ ID NO: 580912 - DNA, 120 bp, Artificial Sequence
  ENSG00000171940_29 (sequence is synthesized)
tgttctgttaacttttgtaccaaatagcaatacaaactagttggaacagttggaacttacatacatggggactggaaatctctattttgtccctgaataatatttttcttagaattgacc

SEQ ID NO: 580913 - DNA, 120 bp, Artificial Sequence
  ENSG00000171940_30 (sequence is synthesized)
aaataagaagtggaatttttgcatacttgagcgctgctgaaaagaaatcatttgggttgggtggggcgggatgggggaaaagtatataatgcttgcacctcaggtaaaaatctgtaaata

SEQ ID NO: 580914 - DNA, 120 bp, Artificial Sequence
  ENSG00000171940_31 (sequence is synthesized)
tctaagttgtaaacctgcttgttcaaatactgtgtgtattccttttctctaatgcagctcatcacttggagcagtttctgctattgtgctctttcatttaaaatgtatgttttttttttt

SEQ ID NO: 580915 - DNA, 120 bp, Artificial Sequence
  ENSG00000171940_32 (sequence is synthesized)
ttaaactgtcaatgattttgtattatgttgaatccacccaaatctattgttgtcttaaaattgttaatggaagtattgaccctctatgatatgtgctgcagatatcgaggtcagccattc

SEQ ID NO: 580916 - DNA, 120 bp, Artificial Sequence
  ENSG00000171940_33 (sequence is synthesized)
ggaagctggcagcattttatcgcaactttgagcatctcagatggggaaggcaccttcttcctcgcctctccagattgtcctggaacctccaggatccttgactgagggcgttgggatggc

SEQ ID NO: 580917 - DNA, 120 bp, Artificial Sequence
  ENSG00000171940_34 (sequence is synthesized)
ttgtaggatttttaagagagtgtgtctacagacaagcattttctctgtagagcagccacacgttgtataaacataaactgtatgtgcagttatttaaatttgtttctgtcaaattaatca

SEQ ID NO: 580918 - DNA, 120 bp, Artificial Sequence
  ENSG00000171940_35 (sequence is synthesized)
tttttgttggacgattcagtggcgggggggttttgcctaaattagtatataaaaacaaaaatgctaaattatatctgtgaattgcaggtattggggaacagttttaagggaaattttggg

SEQ ID NO: 580919 - DNA, 120 bp, Artificial Sequence
  ENSG00000171940_36 (sequence is synthesized)
gggaacattttaggtttgtatttggtagtcttaatgtatctggcatttgggtgaactgtggacatactagagttgattatagacacattgattttgaataaggaactgctggccgagccc

SEQ ID NO: 580920 - DNA, 120 bp, Artificial Sequence
  ENSG00000171940_37 (sequence is synthesized)
gctgggagtctagaaagagaaaatctgtttctagacctcagttattttcccatttttggttgttttgaagcagtaacatttttctcagtgcacatgcaatttgggttttagagaagatgg

SEQ ID NO: 580921 - DNA, 120 bp, Artificial Sequence
  ENSG00000171940_38 (sequence is synthesized)
ccaccagctggcttcctagatattttaaacttttgttctttaatatgctgtccatggctgagtttattagtacatgggcttagtgaccacaaaatattttattaagaaactgtttcaaaa

SEQ ID NO: 580922 - DNA, 120 bp, Artificial Sequence
  ENSG00000171940_39 (sequence is synthesized)
ataaatttgcactgttcatttttctggcctcgctgttctccatagagcaagggtaatcctagaaaaaattttttttttttaaattatgcaacgtaagatgtcctccttgatagaagtctt

SEQ ID NO: 580923 - DNA, 120 bp, Artificial Sequence
  ENSG00000171940_40 (sequence is synthesized)
agctcctgtgttacaagggagaactcatttgagatcagtctgttggcattgcaatgaagtgctttgtatcaggaaagtgtacactattgaccttttttcctgttcacaagctgagccata

SEQ ID NO: 580924 - DNA, 120 bp, Artificial Sequence
  ENSG00000171940_41 (sequence is synthesized)
tgtacataatctagattttgttttcatagttttgcacttttatagcctatttttgaagattaacacatttgcaagatgattgactcaatctttgcctaatccaatgagtgttacagagag

SEQ ID NO: 580925 - DNA, 120 bp, Artificial Sequence
  ENSG00000171940_42 (sequence is synthesized)
cttgctgtgactagaaccataaatcttaaagggggtatgtgataatagagggctggaatttaaacctgtatttaaaaaaaagaatcaccaaatctatttgaaaacaagtcgatttgtatt

SEQ ID NO: 580926 - DNA, 120 bp, Artificial Sequence
  ENSG00000171940_43 (sequence is synthesized)
atgctggaattttttgggctttcagatttctctttttaaccacatttctgaatgtataaaaataccaattattttcctacagccctttgtacttcaaaatatgtttttgtgtccatcagt

SEQ ID NO: 580927 - DNA, 120 bp, Artificial Sequence
  ENSG00000171940_44 (sequence is synthesized)
attaactattggtatactactggttttatatttttttttctttgagacaacagtacatataatagaggtacaattcgttggatttttgtttatgtatttatttcattccagtttgattta

SEQ ID NO: 580928 - DNA, 120 bp, Artificial Sequence
  ENSG00000171940_45 (sequence is synthesized)
ttttaattgttgatacttaagttgtcgaacagtagacattacttgttttatttatgatatatttcagcttaaagttatgttattatatgtggaagtgtaaatatagatttggtgttttgc

SEQ ID NO: 580929 - DNA, 120 bp, Artificial Sequence
  ENSG00000171940_46 (sequence is synthesized)
attcaaacccggccggcccgagtggtgtcagctcagtcccggccgccgccgcgcgaggaaatggccgaggagccggagccgcagggtttggaaatcccttgtctccaggttgctgggatt

SEQ ID NO: 580930 - DNA, 120 bp, Artificial Sequence
  ENSG00000171940_47 (sequence is synthesized)
aaccacaaagtaactttgattaaaggaggaaactggtctacttgttgaaaatgtggtaatgagatagtttccacccagccgggaagcgtggcccggagggggaggggagcctgcatttct

SEQ ID NO: 580931 - DNA, 120 bp, Artificial Sequence
  ENSG00000171940_48 (sequence is synthesized)
tcatgcctctacccatcctgaagaaggtagaaaggaacaggcctggctcgacctccactttggagaagatgctccaggaacactgaagggcaggtcgtccccgaccttctatgaggattg

SEQ ID NO: 580932 - DNA, 120 bp, Artificial Sequence
  ENSG00000171940_49 (sequence is synthesized)
accgttttaaggcttcatggtgatgagggcatttaaccctcgggacacgcccattctgcaggcctggctcgacctccactttggagaagatgctccaggaacactgaagggcaggtcgtc

SEQ ID NO: 580933 - DNA, 120 bp, Artificial Sequence
  ENSG00000171942_0 (sequence is synthesized)
cttccccaactaggggtggccgtcatgctggggctaaaccacacctccatgtctgaattcatcctcgtcggcttctctgccttcccccacctccaactgatgctcttcctgctgttcctg

SEQ ID NO: 580934 - DNA, 120 bp, Artificial Sequence
  ENSG00000171942_1 (sequence is synthesized)
ctgatgtacctgttcacgctgctgggcaacctgctcatcatggccaccgtctggagcgagcgcagcctccacacgcccatgtacctcttcctgtgcgtcctctcagtctccgagatcctc

SEQ ID NO: 580935 - DNA, 120 bp, Artificial Sequence
  ENSG00000171942_2 (sequence is synthesized)
tacaccgtggccatcatcccgcgcatgctggccgacctgctgtccacccagcgctccatcgccttcctggcctgtgccagtcagatgttcttctccttcagcttcggcttcacccactcc

SEQ ID NO: 580936 - DNA, 120 bp, Artificial Sequence
  ENSG00000171942_3 (sequence is synthesized)
ttcctgctcaccgtcatgggctacgaccgctacgtggccatctgccaccccctgcgctacaacgtgctcatgagcccacggggctgcgcctgcctggtgggctgctcctgggctggtggc

SEQ ID NO: 580937 - DNA, 120 bp, Artificial Sequence
  ENSG00000171942_4 (sequence is synthesized)
catgtgccacctctgttgaagttggcctgtggaaataatgtaccagctgtggccctgggcgtgggcttggtatgtatcatggcactgctgggctgttttctcctcatcctcctctcctat

SEQ ID NO: 580938 - DNA, 120 bp, Artificial Sequence
  ENSG00000171942_5 (sequence is synthesized)
gccttcatcgtggccgacatcttgaagatcccttctgctgaaggtcggaacaaggccttctccacctgtgcctctcaccttattgtggtcattgtgcactatggctttgcctctgtcatc

SEQ ID NO: 580939 - DNA, 120 bp, Artificial Sequence
  ENSG00000171942_6 (sequence is synthesized)
tacctcaagcccaaaggtccccactctcaggagggtgacaccctgatggccaccacctacgcagtcctcacgcccttcctcagccccatcatcttcagcctcaggaacaaagaactgaag

SEQ ID NO: 580940 - DNA, 120 bp, Artificial Sequence
  ENSG00000171942_7 (sequence is synthesized)
gttgccatgaagaggaccttcctcagcacactctattcctcaggcacctgagtagctggtgtggaagtgctgatagaatatgataggaggatgaccatcaccttgtctgcacagtgtggc

SEQ ID NO: 580941 - DNA, 120 bp, Artificial Sequence
  ENSG00000171943_0 (sequence is synthesized)
ggggtcctgcggagttggcggaggcggcggaggctcctccagggactggggcaccgatctgcgtagaaacgggtggcggggaagagaggggaggagagctctgagtgggaagcggaaccg

SEQ ID NO: 580942 - DNA, 120 bp, Artificial Sequence
  ENSG00000171943_1 (sequence is synthesized)
ggggcctgggacccgtcgcgtcagagccaggcaagtgaaccggagcaaacgacttccgatccagtctgcgctgttgcggctcccgtttgggatttgatttgcagcatctttgagcctcta

SEQ ID NO: 580943 - DNA, 120 bp, Artificial Sequence
  ENSG00000171943_2 (sequence is synthesized)
cgacaaaaaaccgcgaagcacgcccagccctcccccggcaccccgaaaagcacccactccctcccggggacacagctgggcgcgtccacacccccgcagccccacaccatgttgtgcgga

SEQ ID NO: 580944 - DNA, 120 bp, Artificial Sequence
  ENSG00000171943_3 (sequence is synthesized)
aggacttccactccccgcctgtgtcgttgatgtcagaccccaggccagcctccgggcgctgcagttctcccggctaatgctgaggctgcggctccggctctagcacaggcaccagccgcc

SEQ ID NO: 580945 - DNA, 120 bp, Artificial Sequence
  ENSG00000171943_4 (sequence is synthesized)
gccgcacccggcctcagcgcccaccgtctgcatgtgcccgccgtagccgtctgcccagcccgcagcccgcgctccacggagcgctggagaccaccgtggggggccccttctgccctcgag

SEQ ID NO: 580946 - DNA, 120 bp, Artificial Sequence
  ENSG00000171943_5 (sequence is synthesized)
agaagcggtcttggaggtattgatttaggtggttggattttttccgtggatctatcaattcacaattcgaatttggaagaaagaaggaaaacatgacgtctccagccaaattcaaaaagg

SEQ ID NO: 580947 - DNA, 120 bp, Artificial Sequence
  ENSG00000171943_6 (sequence is synthesized)
ataaggagatcatagcagagtacgatactcaggtcaaagagatccgtgctcagctcacagagcagatgaaatgcctggaccagcagtgtgagcttcgggtgcaactgttgcaggacctcc

SEQ ID NO: 580948 - DNA, 120 bp, Artificial Sequence
  ENSG00000171943_7 (sequence is synthesized)
aggacttcttccgaaagaaggcagagattgagatggactactcccgcaacctggagaagctggcagaacacttcctggccaagacacgcagcaccaaggaccagcaattcaagaaggatc

SEQ ID NO: 580949 - DNA, 120 bp, Artificial Sequence
  ENSG00000171943_8 (sequence is synthesized)
agaatgttctctctccagtcaactgctggaatctcctcttaaaccaggtgaagtgggaaagcagggaccataccaccctgagtgacatctacctgaataatatcattcctcgatttgtac

SEQ ID NO: 580950 - DNA, 120 bp, Artificial Sequence
  ENSG00000171943_9 (sequence is synthesized)
aagtcagcgaggactcaggaagactctttaaaaagagtaaagaagtcggccagcagctccaagatgatttgatgaaggtcctgaacgagctctactcggtcatgaagacatatcacatgt

SEQ ID NO: 580951 - DNA, 120 bp, Artificial Sequence
  ENSG00000171943_10 (sequence is synthesized)
acaatgccgacagcatcagtgctcagagcaaactaaaggaggcggagaagcaggaggagaagcaaattggtaaatcggtaaagcaggaggaccggcagaccccatgctcccctgactcca

SEQ ID NO: 580952 - DNA, 120 bp, Artificial Sequence
  ENSG00000171943_11 (sequence is synthesized)
cggccaacgttcgcattgaggagaaacatgtccggaggagctcagtgaagaagattgagaagatgaaggagaagcaccaagccaagtacacggagaataagctgaaggccatcaaagccc

SEQ ID NO: 580953 - DNA, 120 bp, Artificial Sequence
  ENSG00000171943_12 (sequence is synthesized)
agaatgagtacttgctggctttggaggcaaccaatgcatctgtcttcaagtactacatccatgacctatctgaccttattgatcagtgttgtgacttaggctaccatgcaagtctgaacc

SEQ ID NO: 580954 - DNA, 120 bp, Artificial Sequence
  ENSG00000171943_13 (sequence is synthesized)
gggctctacgcaccttcctctctgctgagttaaacctggaacagtcgaagcatgagggtctggatgccatcgagaatgcagtagaaaacctggatgccaccagtgacaagcagcgcctca

SEQ ID NO: 580955 - DNA, 120 bp, Artificial Sequence
  ENSG00000171943_14 (sequence is synthesized)
tggagatgtacaacaacgtcttctgcccccctatgaagtttgagtttcagccccacatgggggatatggcttcccagctctgtgcccagcagcctgtccagagtgagctggtacagagat

SEQ ID NO: 580956 - DNA, 120 bp, Artificial Sequence
  ENSG00000171943_15 (sequence is synthesized)
gccaacaactgcagtctcgcttatccactctaaagattgaaaacgaagaggtaaagaagacaatggaggccaccctgcaaaccatccaggacattgtgactgtcgaggactttgatgtgt

SEQ ID NO: 580957 - DNA, 120 bp, Artificial Sequence
  ENSG00000171943_16 (sequence is synthesized)
ctgactgcttccagtacagcaactccatggagtccgtcaagtccacggtctctgaaaccttcatgagcaagcccagcattgctaagaggagagccaaccagcaagagacagagcagtttt

SEQ ID NO: 580958 - DNA, 120 bp, Artificial Sequence
  ENSG00000171943_17 (sequence is synthesized)
atttcacagtaagggagtgctatggcttttaaagagcgtcagcatgcactgcagcactcaagggagatttggaactcagagtccttgttaagtgtctgaaggacaggcattgaatatctt

SEQ ID NO: 580959 - DNA, 120 bp, Artificial Sequence
  ENSG00000171943_18 (sequence is synthesized)
agatacgaatgtgggcatactcagagaccatccctacacttaaaggtgcaaacattaaaagttgtatatgtctaacagggatccgcccaagagaaaggatgctcccaagtatacaactaa

SEQ ID NO: 580960 - DNA, 120 bp, Artificial Sequence
  ENSG00000171943_19 (sequence is synthesized)
gaagattttcttttttaagaaatttttaactagctagtaggctttcactggaaagtttccttctcaggcacaggggatcctgaaaggggaacttcatcttttagttcttggagagtacat

SEQ ID NO: 580961 - DNA, 120 bp, Artificial Sequence
  ENSG00000171943_20 (sequence is synthesized)
tggagagtacatacaaatattcataataacacatattttgtttataaaaatctataatctcttctaggtgatatgatgacattattttataacttttattgttgggaaactattttttct

SEQ ID NO: 580962 - DNA, 120 bp, Artificial Sequence
  ENSG00000171943_21 (sequence is synthesized)
aacttaaaggatgggtaatatgcagcattactattttgcacataattccaaaacatcgtattttcttattcatgtatctctagtcttcttttagacagttggacccttttttctttttct

SEQ ID NO: 580963 - DNA, 120 bp, Artificial Sequence
  ENSG00000171943_22 (sequence is synthesized)
ttttttttttttttttttaagtattgttaacaatcctttggaagtcactactggtctttgtgtgctgctttttaataattgagttattttgagcttgccaagtaggatctattgcctgga

SEQ ID NO: 580964 - DNA, 120 bp, Artificial Sequence
  ENSG00000171943_23 (sequence is synthesized)
ctaaaatttatttcctaatcttctgatgaccaagaaaggaaaaattaagtttgcagatgtgagatgaaatatagccagtgaatatgcatactgattctgaatgaaaggaattaacttttc

SEQ ID NO: 580965 - DNA, 120 bp, Artificial Sequence
  ENSG00000171943_24 (sequence is synthesized)
agtcaagaaacagtctgcatgcagtaaattgaatttttcctgcaactggaatgatttgtttaattcttctttgaacactgccctttctccagtaagaacactaatgatttgctaatattt

SEQ ID NO: 580966 - DNA, 120 bp, Artificial Sequence
  ENSG00000171943_25 (sequence is synthesized)
tttaaagaaatctgtttttttaattagttaagctcagacttcctcttattttttatcctagagaaaactgctaaaagggaatgatatatcagtactattcttctaaaacaactttttaaa

SEQ ID NO: 580967 - DNA, 120 bp, Artificial Sequence
  ENSG00000171943_26 (sequence is synthesized)
aatgattatacaaagccaaatatgctcattatataaaatttagaagcaaaaagaaggaaataaaaattttccataattctaccagctagagataatggtgttagaatatattcctttcta

SEQ ID NO: 580968 - DNA, 120 bp, Artificial Sequence
  ENSG00000171943_27 (sequence is synthesized)
atctgttttctatgcatgcacaaacacatatgtgagcacatatttataattttattctaaaaaataggacactgctgtacatattgttttacaatctaagtcatataattataatattct

SEQ ID NO: 580969 - DNA, 120 bp, Artificial Sequence
  ENSG00000171943_28 (sequence is synthesized)
ttaagcatatttatgagtaaaatattaaaacctatacaaaaaaataacagaatggcattttagctcattcattgatttttataaaatatttaacacactccctggtttgtagttagcgtt

SEQ ID NO: 580970 - DNA, 120 bp, Artificial Sequence
  ENSG00000171943_29 (sequence is synthesized)
aaaaatttatcttcaccatcatcattaatttatttattaatcattattaaattattcattgatcattttttgaggatttactattgccagacactgtgctacaagctgggaatgctgaca

SEQ ID NO: 580971 - DNA, 120 bp, Artificial Sequence
  ENSG00000171943_30 (sequence is synthesized)
gtataagataaagagggaaatgatgggggatgggtcatgtaaagggagaactttcatttttacttcatatatatctaagcagttataataggttgatttttgtaatttaaaaaatgtaaa

SEQ ID NO: 580972 - DNA, 120 bp, Artificial Sequence
  ENSG00000171943_31 (sequence is synthesized)
aatgcatacatgcactagtgcatgaatggcagccaggatgagtggaattggagaagcatcacacacacagtgacttttgtgtttgatcttgaagaatgagcgaaccaggcagggagtcgg

SEQ ID NO: 580973 - DNA, 120 bp, Artificial Sequence
  ENSG00000171943_32 (sequence is synthesized)
ggaggagaatcgcattccttgaggaaagagcagcatgtgggaaaacataaatgcacgcaataacctggctcacatgttaagagaactttctgactataatgagggatgtgttgctgcccc

SEQ ID NO: 580974 - DNA, 120 bp, Artificial Sequence
  ENSG00000171943_33 (sequence is synthesized)
aagcttcattatctaaggagtttgttgaacactctctagaggcttttaataataggattgtttagctggtctgtctggactggttagatataacactatttaaatgacccaatctcatta

SEQ ID NO: 580975 - DNA, 120 bp, Artificial Sequence
  ENSG00000171943_34 (sequence is synthesized)
cattgtgaagatttccattttttaggttacgtaagaaattttggacctaaaaatcttgcattttaagacagtctttgtcagaattactttttggctctaaatgaattctgtaacatttgt

SEQ ID NO: 580976 - DNA, 120 bp, Artificial Sequence
  ENSG00000171943_35 (sequence is synthesized)
attctaaattgacctttagtaaaagcaggaatggccatattcaaactggtaacctcgcaaatcctgcccaccctttcactttctgtctcaatacattgatgtcctctaacccatttcctg

SEQ ID NO: 580977 - DNA, 120 bp, Artificial Sequence
  ENSG00000171943_36 (sequence is synthesized)
tcttatgtggctttagtgccacttatcaaaattgtgtgcaaatttccttggctaacagtaacagtttttgtctgggcttgtctagcagtggaattctgcctgagttcatcatttttgtga

SEQ ID NO: 580978 - DNA, 120 bp, Artificial Sequence
  ENSG00000171943_37 (sequence is synthesized)
ctggtacttgaagtgcatcagatgattaatttcatgataagagggctttttggggtggtgaaatagacatttatggaaaatgggatacccacattaagcagggtgactacctgtttacca

SEQ ID NO: 580979 - DNA, 120 bp, Artificial Sequence
  ENSG00000171943_38 (sequence is synthesized)
tacaacccacacaaagccaatacaactatagatgtgctttctttagtctgttgcctctgcaaacattgcccgtgtgtttctctatgcccttcaaaaacatcagagcagcacatcctggaa

SEQ ID NO: 580980 - DNA, 120 bp, Artificial Sequence
  ENSG00000171943_39 (sequence is synthesized)
gatcctatcttttgtaagtttaagaagcagcctcttgtcacagcttgactcctaggtagtgtgcctagtgaccaagagggctgctaagaaagctttctgaccacttgtggctgtcattgg

SEQ ID NO: 580981 - DNA, 120 bp, Artificial Sequence
  ENSG00000171943_40 (sequence is synthesized)
actgatttgcccagatgacatcaattgggaatttgaggcatgacctataaagatcagttgcttgcaagagtctcaggaaaataattgtggagttaagaaacttgaagcgatttttaaaaa

SEQ ID NO: 580982 - DNA, 120 bp, Artificial Sequence
  ENSG00000171943_41 (sequence is synthesized)
ttacctaacccaaccttctcatttgaaaaattaaaaaataaataggccagatatggcggctcatgcctgtaatcccagcgctgtgggagcctgaggcgggtgggtctcttgaggccagga

SEQ ID NO: 580983 - DNA, 74 bp, Artificial Sequence
  ENSG00000171943_42 (sequence is synthesized)
gctactcaggaggctaaggtgggaggattacttgaactggggaggcataggttgtagtgagccaaggaaaaaaa

SEQ ID NO: 580984 - DNA, 62 bp, Artificial Sequence
  ENSG00000171943_43 (sequence is synthesized)
acattcacgtacatgggagagtctacaaagtcacacgtattcataggttaagccacatgctg

SEQ ID NO: 580985 - DNA, 120 bp, Artificial Sequence
  ENSG00000171943_44 (sequence is synthesized)
gcacaaagccagtctgcatggcctacagacatattttgctggacaatgattacttgcttttctttttgtttttcttgtatatgcctgtttgattggttcctgacataccagaaaatcact

SEQ ID NO: 580986 - DNA, 68 bp, Artificial Sequence
  ENSG00000171943_45 (sequence is synthesized)
gatttaagagtatatttgcacacacagaggaagccatgaacttgaagagaagaaaatggaaaatactg

SEQ ID NO: 580987 - DNA, 62 bp, Artificial Sequence
  ENSG00000171943_46 (sequence is synthesized)
tttaccattctttcttttcacctttcttccttcttccttccccctcctcctttttacttttc

SEQ ID NO: 580988 - DNA, 70 bp, Artificial Sequence
  ENSG00000171943_47 (sequence is synthesized)
aattatgttgttaaaaagtttaccattctttcttttcacctttcttccttcttccttccccttcattatc

SEQ ID NO: 580989 - DNA, 62 bp, Artificial Sequence
  ENSG00000171943_48 (sequence is synthesized)
tttctgatgcttttaaggatgttttataacaaattgtgtagctttttccaatggaatgttta

SEQ ID NO: 580990 - DNA, 120 bp, Artificial Sequence
  ENSG00000171943_49 (sequence is synthesized)
accgcagcgcagccagcacccagccgcctctccctttcctccgcacacgggcagccgcggtccaccgtagggcagtcgtcgttggcatcgcgcgcaagtgaaccggagcaaacgacttcc

SEQ ID NO: 580991 - DNA, 120 bp, Artificial Sequence
  ENSG00000171943_50 (sequence is synthesized)
atctgtgaccacgcctcggcagtgctagtcacacctccaagttttgccagctcctccccctcattccgggcctctcggtatcagctcttcctattggctatgggccccatcggtcgatag

SEQ ID NO: 580992 - DNA, 120 bp, Artificial Sequence
  ENSG00000171944_0 (sequence is synthesized)
gagttctcctctatggcttctacttataagtccattgatatccctggctcaacagagaatagaagatgaaacagcaaatctaccacttgattctgatgaacaaatcatgccgacattcaa

SEQ ID NO: 580993 - DNA, 120 bp, Artificial Sequence
  ENSG00000171944_1 (sequence is synthesized)
tggctcagtcttcatgccctctgcgtttatactaattgggattcctggtctggagtcagtgcagtgttggattgggattcctttctctgccatgtatcttattggtgtgattggaaattc

SEQ ID NO: 580994 - DNA, 120 bp, Artificial Sequence
  ENSG00000171944_2 (sequence is synthesized)
cctaattttagttataatcaaatatgaaaacagcctccatatacccatgtacatttttttggccatgttggcagccacagacattgcacttaacacctgcattcttcccaaaatgttagg

SEQ ID NO: 580995 - DNA, 120 bp, Artificial Sequence
  ENSG00000171944_3 (sequence is synthesized)
catcttctggtttcatttgccagagatttcttttgatgcctgtctttttcaaatgtggcttattcactcattccaggcaattgaatcgggtatccttctggcaatggccctggatcgcta

SEQ ID NO: 580996 - DNA, 120 bp, Artificial Sequence
  ENSG00000171944_4 (sequence is synthesized)
tgtggccatctgtatccccttgagacatgccaccatcttttcccagcagttcttaactcatattggacttggggtgacactcagggctgccattcttataataccttccttagggctcat

SEQ ID NO: 580997 - DNA, 120 bp, Artificial Sequence
  ENSG00000171944_5 (sequence is synthesized)
caaatgctgtctgaaacactatcgaactacagtcatctctcactcttactgtgagcacatggccatcgtgaagctggctactgaagatatccgagtcaacaagatatatggcctatttgt

SEQ ID NO: 580998 - DNA, 120 bp, Artificial Sequence
  ENSG00000171944_6 (sequence is synthesized)
tgcctttgcaatcctagggtttgacataatatttataaccttgtcctatgtccaaatttttatcactgtctttcagctgccccagaaggaggcacgattcaaggcctttaatacatgcat

SEQ ID NO: 580999 - DNA, 120 bp, Artificial Sequence
  ENSG00000171944_7 (sequence is synthesized)
tgcccacatttgtgtcttcctacagttctaccttcttgccttcttctctttcttcacacacaggtttggttcacacataccaccatatattcatatcctcttgtcaaatctttacctgtt

SEQ ID NO: 581000 - DNA, 120 bp, Artificial Sequence
  ENSG00000171944_8 (sequence is synthesized)
agtcccaccttttctcaaccctattgtctatggagtgaagaccaagcaaattcgtgaccatattgtgaaagtgtttttcttcaaaaaagtaacttgatcgttagtgactcctatagagat

SEQ ID NO: 581001 - DNA, 120 bp, Artificial Sequence
  ENSG00000171944_9 (sequence is synthesized)
ttagggttggttctaagtaaaaacctaaatataatgaaagtcacagatcaatattctcaaactactagctcaacacatacctgtaattctagctatgtctcactttttagtatttgcttt

SEQ ID NO: 581002 - DNA, 120 bp, Artificial Sequence
  ENSG00000171944_10 (sequence is synthesized)
aaatttggaatcatttatctgtgtcttatttactttatctgaaatacttatcaatataaaaataatatgaaatcagtaataccgatatctacaacataaaacttatgtaatgcaaccaat

SEQ ID NO: 581003 - DNA, 120 bp, Artificial Sequence
  ENSG00000171944_11 (sequence is synthesized)
atgtaatgcaaccaatgactataaacactaaggaatttacacaggagagaatgcaaaaaaaattgaaaaatattaaacatattcacaaatatcattttcaggaaaataaaatcagtgatc

SEQ ID NO: 581004 - DNA, 120 bp, Artificial Sequence
  ENSG00000171944_12 (sequence is synthesized)
tgggcttacatatcaaatatccttctagaaccacacaattttattgatttttacctaacttgagttttactcaaatttggaagtttaagttctaaaattgaacatacaaattctgttacc

SEQ ID NO: 581005 - DNA, 120 bp, Artificial Sequence
  ENSG00000171944_13 (sequence is synthesized)
cactgaaagcatcttgagtacagaaactatcttatttaccctttatcaggaaaacagtggacaatgcctgagaattcttagaatctaagtaaaaatgacattgaataatgaacagagtaa

SEQ ID NO: 581006 - DNA, 120 bp, Artificial Sequence
  ENSG00000171944_14 (sequence is synthesized)
acattttctttgtgtcaattaatggtattcaaaagccacaaatttggaggctctaagtaatatgcaatcttaccatacagaaaaccatgctagagattttattccaatattatcagggta

SEQ ID NO: 581007 - DNA, 120 bp, Artificial Sequence
  ENSG00000171944_15 (sequence is synthesized)
aaagaaaggtgaagacttgaaataatcattatgcaaacctgaaataatatattagctaaacacagaactggcatataagaaaccacctcctgaataaggactttagtcaagacttagaac

SEQ ID NO: 581008 - DNA, 120 bp, Artificial Sequence
  ENSG00000171944_16 (sequence is synthesized)
ttttccttaagaatcaagttgacagagtcatctgaatcactaattttgaaaagatgcatggtcaaagaaagaaataatatggtaaaacgttctgatgtaaaaaatcatatcattcaagag

SEQ ID NO: 581009 - DNA, 120 bp, Artificial Sequence
  ENSG00000171944_17 (sequence is synthesized)
gcagacatagatacatacaattttggggaaaaatcttgtcaataatgtagaaatgactttgagtcataatttttttaataaagtttatgtaaacattatatttagaaagaatcaaaaata

SEQ ID NO: 581010 - DNA, 120 bp, Artificial Sequence
  ENSG00000171944_18 (sequence is synthesized)
catgacaaaagataaaacaacatgttagttgataggcagacatattaaaaattgttgaattagataagcaaaacttaataatgaaataaccattttaattctggattagagcattaaata

SEQ ID NO: 581011 - DNA, 120 bp, Artificial Sequence
  ENSG00000171944_19 (sequence is synthesized)
tttcagtggttgtgccattaataacgcagaatgaataattaatgaggagtcattctcccaaaagaaaaaaaaatcataaatatatgaattctttcagaaaagttagtatacatgaaggat

SEQ ID NO: 581012 - DNA, 120 bp, Artificial Sequence
  ENSG00000171944_20 (sequence is synthesized)
aaagaatgaagataataagtaagtgatactcctaaataagaaaccaaaacaaacaatatgatgataactacagattaatcatgagtgaatgaaaaaactgtatttcaaagtatctggtat

SEQ ID NO: 581013 - DNA, 120 bp, Artificial Sequence
  ENSG00000171944_21 (sequence is synthesized)
aaaaatgcaccaaattatataaatgaaaatagacaaaacacccatattggaaaaaaatcaacagaaaataaaaatttcaacataggtctatcagaaaaaaacacattacatatcctaaaa

SEQ ID NO: 581014 - DNA, 120 bp, Artificial Sequence
  ENSG00000171944_22 (sequence is synthesized)
gacatatttttttttcattctctggagtatgagggaagacaaacaacaaagatcttaaaaatgcacattatctaatggaaaaaaattaaatgaaaaatttgtgtcataattagactgtgg

SEQ ID NO: 581015 - DNA, 120 bp, Artificial Sequence
  ENSG00000171944_23 (sequence is synthesized)
gttggcatttcaagccatttaaacctgtaattaataaaaagaacaattacagtgcataataatattactagtttctgaaacaatgttgtccctgtccagtgttctctgctaaagaaaccc

SEQ ID NO: 581016 - DNA, 120 bp, Artificial Sequence
  ENSG00000171944_24 (sequence is synthesized)
cagctgaagcaatttccacatggagtacagcacctggtccagctgatttcagctaggtcccagtcagcacacagatctgtttgacttcttggttgctttttggtcttctttacaggtcaa

SEQ ID NO: 581017 - DNA, 120 bp, Artificial Sequence
  ENSG00000171944_25 (sequence is synthesized)
atttgttccatgctgaagatctgggttcatattacctttttttaaggtataaaaaaagacctggcctcaaaatgaggttgtacacgtagtttctgagagtctgctccattgctcttcaat

SEQ ID NO: 581018 - DNA, 120 bp, Artificial Sequence
  ENSG00000171944_26 (sequence is synthesized)
tgagggctctggctaattggatgcagaatccgagataaaggacagccacctacagcagctagagggctgagatatgagtcagactgatatgccctgactatgatgcaatgaacatcttaa

SEQ ID NO: 581019 - DNA, 120 bp, Artificial Sequence
  ENSG00000171944_27 (sequence is synthesized)
aaagagaaatttattccaagaataaattgtttgagggctcgaagggattgccttaagttaaagatggataaataggtatcctagctaggaatcaaaaaggtctgagtttctccattaccc

SEQ ID NO: 581020 - DNA, 120 bp, Artificial Sequence
  ENSG00000171944_28 (sequence is synthesized)
ttcctttaacattctacatactcctgggcatgttatttcctcttctctacaatggggctaacaatacgagcctcagagacttgtgaggaatatgtgagaaaaggctcaccaagcatgtag

SEQ ID NO: 581021 - DNA, 120 bp, Artificial Sequence
  ENSG00000171944_29 (sequence is synthesized)
cacagatccaggctaaaacacaccttaaacatgtaggccaaggtgtacatactctgagaattaagatgcagagaaaaatgatttcaggattaagtgcaaagagacggaaatgaatggagc

SEQ ID NO: 581022 - DNA, 120 bp, Artificial Sequence
  ENSG00000171944_30 (sequence is synthesized)
agagtgccgggatagctgtgtggctgatgatcctctagctggagctaggtcagtgtctttgggcagagctgtgtgtaacattctcagaagcatgctgagacaacagaataccttggtgat

SEQ ID NO: 581023 - DNA, 120 bp, Artificial Sequence
  ENSG00000171944_31 (sequence is synthesized)
ctttattcaattgtttatttttactgagatggaattcacatgccataatatttgcaattttaaagtatgcaatttgatgatttttagtgtattataaaggctgtgcaaccatcatcacta

SEQ ID NO: 581024 - DNA, 120 bp, Artificial Sequence
  ENSG00000171944_32 (sequence is synthesized)
cctaattgaaaatactttcgtcatcctaaaaaaaaatctatatacattagtagtcacatcccattacttctgctccccccatctccagtcttagcaactgctaatctcttttctgtttca

SEQ ID NO: 581025 - DNA, 120 bp, Artificial Sequence
  ENSG00000171951_0 (sequence is synthesized)
gaaacggcccgagaagctcgcccggagaacggggaggaatatgctgtggagctcctctgccatataaacaaaaagaggaaatctttcaaacatggctgaagcaaagacccactggcttgg

SEQ ID NO: 581026 - DNA, 120 bp, Artificial Sequence
  ENSG00000171951_1 (sequence is synthesized)
agcagccctgtctcttatccctttaattttcctcatctctggggctgaagcagcttcatttcagagaaaccagctgcttcagaaagaaccagacctcaggttggaaaatgtccaaaagtt

SEQ ID NO: 581027 - DNA, 120 bp, Artificial Sequence
  ENSG00000171951_2 (sequence is synthesized)
tcccagtcctgaaatgatcagggctttggagtacatagaaaacctccgacaacaagctcataaggaagaaagcagcccagattataatccctaccaaggtgtctctgtcccccttcagca

SEQ ID NO: 581028 - DNA, 120 bp, Artificial Sequence
  ENSG00000171951_3 (sequence is synthesized)
aaaagaaaatggcgatgaaagccacttgcccgagagggattcactgagtgaagaagactggatgagaataatactcgaagctttgagacaggctgaaaatgagcctcagtctgcaccaaa

SEQ ID NO: 581029 - DNA, 120 bp, Artificial Sequence
  ENSG00000171951_4 (sequence is synthesized)
agaaaataagccctatgccttgaattcagaaaagaactttccaatggacatgagtgatgattatgagacacagcagtggccagaaagaaagcttaagcacatgcaattccctcctatgta

SEQ ID NO: 581030 - DNA, 120 bp, Artificial Sequence
  ENSG00000171951_5 (sequence is synthesized)
tgaagagaattccagggataacccctttaaacgcacaaatgaaatagtggaggaacaatatactcctcaaagccttgctacattggaatctgtcttccaagagctggggaaactgacagg

SEQ ID NO: 581031 - DNA, 120 bp, Artificial Sequence
  ENSG00000171951_6 (sequence is synthesized)
accaaacaaccagaaacgtgagaggatggatgaggagcaaaaactttatacggatgatgaagatgatatctacaaggctaataacattgcctatgaagatgtggtcgggggagaagactg

SEQ ID NO: 581032 - DNA, 120 bp, Artificial Sequence
  ENSG00000171951_7 (sequence is synthesized)
gaacccagtagaggagaaaatagagagtcaaacccaggaagaggtgagagacagcaaagagaatatagaaaaaaatgaacaaatcaacgatgagatgaaacgctcagggcagcttggcat

SEQ ID NO: 581033 - DNA, 120 bp, Artificial Sequence
  ENSG00000171951_8 (sequence is synthesized)
ccaggaagaagatcttcggaaagagagtaaagaccaactctcagatgatgtctccaaagtaattgcctatttgaaaaggttagtaaatgctgcaggaagtgggaggttacagaatgggca

SEQ ID NO: 581034 - DNA, 120 bp, Artificial Sequence
  ENSG00000171951_9 (sequence is synthesized)
aaatggggaaagggccaccaggctttttgagaaacctcttgattctcagtctatttatcagctgattgaaatctcaaggaatttacagatacccccagaagacttaattgagatgctcaa

SEQ ID NO: 581035 - DNA, 120 bp, Artificial Sequence
  ENSG00000171951_10 (sequence is synthesized)
gagcgggagcttgaccttcctgttgacctagatgacatctcagaggctgacttagaccatccagacctgttccaaaataggatgctctccaagagtggctaccctaaaacacctggtcgt

SEQ ID NO: 581036 - DNA, 120 bp, Artificial Sequence
  ENSG00000171951_11 (sequence is synthesized)
gctgggactgaggccctaccagacgggctcagtgttgaggatattttaaatcttttagggatggagagtgcagcaaatcagaaaacgtcgtattttcccaatccatataaccaggagaaa

SEQ ID NO: 581037 - DNA, 120 bp, Artificial Sequence
  ENSG00000171951_12 (sequence is synthesized)
gttctgccaaggctcccttatggtgctggaagatctagatcgaaccagcttcccaaagctgcctggattccacatgttgaaaacagacagatggcatatgaaaacctgaacgacaaggat

SEQ ID NO: 581038 - DNA, 120 bp, Artificial Sequence
  ENSG00000171951_13 (sequence is synthesized)
caagaattaggtgagtacttggccaggatgctagttaaataccctgagatcattaattcaaaccaagtgaagcgagttcctggtcaaggctcatctgaagatgacctgcaggaagaggaa

SEQ ID NO: 581039 - DNA, 120 bp, Artificial Sequence
  ENSG00000171951_14 (sequence is synthesized)
caaattgagcaggccatcaaagagcatttgaatcaaggcagctctcaggagactgacaagctggccccggtgagcaaaaggttccctgtggggcccccgaagaatgatgataccccaaat

SEQ ID NO: 581040 - DNA, 120 bp, Artificial Sequence
  ENSG00000171951_15 (sequence is synthesized)
aggcagtactgggatgaagatctgttaatgaaagtgctggaatacctcaaccaagaaaaggcagaaaagggaagggagcatattgctaagagagcaatggaaaatatgtaagctgctttc

SEQ ID NO: 581041 - DNA, 120 bp, Artificial Sequence
  ENSG00000171951_16 (sequence is synthesized)
attaattaccctactttcattcctcccaccccaagcaaatcccaacatttctcttcagtgtgttgacttctatcctgttaacactgtaatatctttaaatgatgtacaggcagatgaaac

SEQ ID NO: 581042 - DNA, 120 bp, Artificial Sequence
  ENSG00000171951_17 (sequence is synthesized)
caggtcactggggagtctgcttcatttcctctgagctgttatcttgtgtatggatatgtgtaaatgttatgactccttgataaaaaatttattatgtccattattcaagaaagatatcta

SEQ ID NO: 581043 - DNA, 120 bp, Artificial Sequence
  ENSG00000171951_18 (sequence is synthesized)
tgactgtgtttaatagtatatctaatggctgtggcattgttgatgctcacatatgataaaaaagtgtcctataattctattgaaagtttttaatatttattgaattattttgttactgtc

SEQ ID NO: 581044 - DNA, 120 bp, Artificial Sequence
  ENSG00000171951_19 (sequence is synthesized)
tgtagtgttttgtggagtactggaccaaaaaaataaagcattataaatatatagttttatttataaggccttttctattgtgtgttttactgttgattaataaatgttatttctggacaa

SEQ ID NO: 581045 - DNA, 120 bp, Artificial Sequence
  ENSG00000171951_20 (sequence is synthesized)
gaaacggcccgagaagctcgcccggagaacggggaggaatatgctgtggagctcctctgccatataaacaaaaagagctgagaagaaaaagactgtttggcaagcttatgtcgataggat

SEQ ID NO: 581046 - DNA, 120 bp, Artificial Sequence
  ENSG00000171951_21 (sequence is synthesized)
gtaaggctgcttttctctttgatttattggaaagttccaaattgcatgctcttcttttaattcctagctgagaagaaaaagactgtttggcaagcttatgtcgataggataactgaatag

SEQ ID NO: 581047 - DNA, 120 bp, Artificial Sequence
  ENSG00000171953_0 (sequence is synthesized)
atgcggaagatggcggcgtccaagggaggttgagggctctgaggaggcgttgagaggtttccgtacagcccgaccgtgcggctttggggatcccatcgctctgtgtttcctgctccaggt

SEQ ID NO: 581048 - DNA, 120 bp, Artificial Sequence
  ENSG00000171953_1 (sequence is synthesized)
ttcgcgtctcgcatcttcccagaccctcgggcgcgatgtggaggagctgcctccggctgcgggacgggggacgccgtctcctgaatcggccggcgggtggccccagcgcttctatgagtc

SEQ ID NO: 581049 - DNA, 120 bp, Artificial Sequence
  ENSG00000171953_2 (sequence is synthesized)
cggggccaaccatcccgtctccagcccgggcttacgccccgccgacagaaaggaagaggttttatcagaatgtcagcatcacacagggtgaaggtggctttgagataaacctggaccaca

SEQ ID NO: 581050 - DNA, 120 bp, Artificial Sequence
  ENSG00000171953_3 (sequence is synthesized)
ggaagctgaaaactccccaagccaagctctttaccgtccccagcgaggccctggccattgcagtggctactgagtgggattcccagcaggataccatcaagtactacaccatgcacctga

SEQ ID NO: 581051 - DNA, 120 bp, Artificial Sequence
  ENSG00000171953_4 (sequence is synthesized)
ccacattgtgcaacacatcattggacaacccaacccagagaaacaaggatcagctgatccgggcagccgtgaagtttctggacaccgacaccatctgctacagggtggaggagcccgaga

SEQ ID NO: 581052 - DNA, 120 bp, Artificial Sequence
  ENSG00000171953_5 (sequence is synthesized)
cattagtggaacttcaaaggaatgagtgggatccaatcatcgaatgggctgagaaaagatacggcgtggagatcagctcctccaccagcataatgggacccagcatccctgccaaaactc

SEQ ID NO: 581053 - DNA, 120 bp, Artificial Sequence
  ENSG00000171953_6 (sequence is synthesized)
cgcctgacagtggagcaggccgtgctgctgtcacgcctggaggaggagtaccagatccagaagtggggcaacattgagtgggcccatgactatgagctgcaggagctgcgggcccgcacc

SEQ ID NO: 581054 - DNA, 120 bp, Artificial Sequence
  ENSG00000171953_7 (sequence is synthesized)
gccgccggcaccctcttcatccatctctgctccgagagcaccacagtcaagcacaagctcctgaaggagtgaggcctgggcagagcacactcagcaggatagaggcagtgcagccacagc

SEQ ID NO: 581055 - DNA, 120 bp, Artificial Sequence
  ENSG00000171953_8 (sequence is synthesized)
tcccccggccttcagggctccccagcctgtggggctggcttccttggcttttggggactcggcctcagcgtcaccctgagattccccccgagacacagtgcgctagtacggctgtccgga

SEQ ID NO: 581056 - DNA, 120 bp, Artificial Sequence
  ENSG00000171953_9 (sequence is synthesized)
ggtcagcctgatttcaacccaggtgcccctggcctggccagcagtgaatgtaggagatgaattgtgcaagtgactttctctcgactctgattttattaaatatttctccaccctggaaat

SEQ ID NO: 581057 - DNA, 120 bp, Artificial Sequence
  ENSG00000171953_10 (sequence is synthesized)
gtgctgagccctgttttcacgtatgcctctgcacttctccattcttcctgttttgtctaggttccagagggttaaacagcttatctcccatggcgtgtttggatatctgctgcctgtggt

SEQ ID NO: 581058 - DNA, 120 bp, Artificial Sequence
  ENSG00000171953_11 (sequence is synthesized)
caggaaccttgcactggggaaacaatcatgtaatccacagacaactctatttgtgttcttcagcctcagcctgaaggcttttttttggctggcttttaatcaaacaatcttttgaaacaa

SEQ ID NO: 581059 - DNA, 120 bp, Artificial Sequence
  ENSG00000171953_12 (sequence is synthesized)
ggaggtgctcgtcagccacctggcatcttacaacacatgggctttacaaggtcctgtgagtggagaggcacagagtgttctgggctagctgagtgtggaggctgggtggctctgatgcta

SEQ ID NO: 581060 - DNA, 120 bp, Artificial Sequence
  ENSG00000171953_13 (sequence is synthesized)
gccaatcactctacgctctaggctcacacctttccaccttcgacttcgccagcagaagtcttgagttcaatctcattgccctggcttgggtcacatgtccatccatgaaccaatcactag

SEQ ID NO: 581061 - DNA, 120 bp, Artificial Sequence
  ENSG00000171953_14 (sequence is synthesized)
actgggtgcggaaagctctgatttgccaagttcgggtcatgtgtctcactaggtaagagcagaggaggatcacccccagggaagaccagagtgctctttcagaagagtgggacaatcgct

SEQ ID NO: 581062 - DNA, 120 bp, Artificial Sequence
  ENSG00000171953_15 (sequence is synthesized)
caaggggtaggttgtggcagctgccctgttttgggttctgacttggcttgtgtccctgcagggattgagtttgtagctgcccagctcaagtccatggtgctaaccttgggcctgattgac

SEQ ID NO: 581063 - DNA, 120 bp, Artificial Sequence
  ENSG00000171953_16 (sequence is synthesized)
ctgcgcctgacagtggagcaggccgtgctgctgtcacgcctggaggaggagtaccagaaatcaaaatcaaggaccagcagaagtattgtcaagtaggcctggcatggtggttcacacctg

SEQ ID NO: 581064 - DNA, 70 bp, Artificial Sequence
  ENSG00000171953_17 (sequence is synthesized)
ctacaaaaatacaaaaattagcacctgtagtctcagctacttgggaagctgacgtgggaggattgcttga

SEQ ID NO: 581065 - DNA, 82 bp, Artificial Sequence
  ENSG00000171953_18 (sequence is synthesized)
aaccctctctctacaaaaatacaaaaattagcacctgtagtctcagctacttgggaagctgacgtgggaggggattgtgcca

SEQ ID NO: 581066 - DNA, 120 bp, Artificial Sequence
  ENSG00000171953_19 (sequence is synthesized)
gcgcctgacagtggagcaggccgtgctgctgtcacgcctggaggaggagtaccagggaggatttccatgtcagctagaaaagttcatccagcctgctaggatggcttgggattgactcac

SEQ ID NO: 581067 - DNA, 120 bp, Artificial Sequence
  ENSG00000171953_20 (sequence is synthesized)
cctgtctattaaacgtgtacaccaagagttgattctggtcaccagctcatcttctcgattgtcaatcttcaggaggtggatgtcgtgcgatgccccgacagcattaacaatcgtatcttt

SEQ ID NO: 581068 - DNA, 120 bp, Artificial Sequence
  ENSG00000171953_21 (sequence is synthesized)
atcgacaaaaagctggtgagtgaaaagaatccaatgagaaagtgtgtgtcattataccgtgaacacaaagggagctgaacagagaaggagcatttggaagtcccctggctgtgcaggcca

SEQ ID NO: 581069 - DNA, 120 bp, Artificial Sequence
  ENSG00000171953_22 (sequence is synthesized)
catctgtgacagccgcttccccaactgcacagggcaggtgttgtggggaaagggccaaccagggtgttactttgcagtccccgctggaagcatgtttcctccagggtgaaggcagatggc

SEQ ID NO: 581070 - DNA, 120 bp, Artificial Sequence
  ENSG00000171953_23 (sequence is synthesized)
tgcccagggggcacctcacccaggacatctgttctcacaatgcttctctctcaattactctcaagtctaacttgcccaaaacctctgcctgctgggtggaagcatgaggctggctgaggg

SEQ ID NO: 581071 - DNA, 120 bp, Artificial Sequence
  ENSG00000171953_24 (sequence is synthesized)
tctcgaggctgctctgaagacagcaggccctacaaactcatgggtgttcaccccacagttgtctctccactgccactcatgtcaacaaaaccaaactttggattccatttggagtatcct

SEQ ID NO: 581072 - DNA, 120 bp, Artificial Sequence
  ENSG00000171953_25 (sequence is synthesized)
tctgccttctcttgttcctgactttgctgtcttgtaaaaagttgttagaaacaaccaccttctaataggcctcactggttctaggtgttgacactgtggctattgttgcctgggatggtt

SEQ ID NO: 581073 - DNA, 120 bp, Artificial Sequence
  ENSG00000171953_26 (sequence is synthesized)
gaaatggagtcatttcccagagcagggcaaggccactgaagcactcagtaagcagttgcttccaccttgaagcagaggcgcttggtaaggcagagcacctgaatgctctgtattgcaggg

SEQ ID NO: 581074 - DNA, 120 bp, Artificial Sequence
  ENSG00000171953_27 (sequence is synthesized)
aggatttgcaagtggagtgtgcattttttgttctttcctgtagtggcagttaacttaatggtctctaaaacgttctgtgcaatcttaagatgttaatatttctgccaaaaaaagtattct

SEQ ID NO: 581075 - DNA, 120 bp, Artificial Sequence
  ENSG00000171953_28 (sequence is synthesized)
ttggtcaaatacatttgggaaagccagcacatcctaggcccctcctaaagatttgctgggcacaaagtattctgaaggctctacaaagtcctgtggaaaataaaccctttaagctttgtc

SEQ ID NO: 581076 - DNA, 120 bp, Artificial Sequence
  ENSG00000171953_29 (sequence is synthesized)
tgggatccaatcatcgaatgggctgagaaaagcttcctgaagccacctctcaaaccagccacctgcgtgcaagtccctgccttacctctgcttccagccagtttggggccagcttctctt

SEQ ID NO: 581077 - DNA, 120 bp, Artificial Sequence
  ENSG00000171953_30 (sequence is synthesized)
gtgagcacaggacatacgcccaacactaacagaatccggagcgtcgtggatattcaaatgatgaagacactaagtatgacgctttacaaacatctgtgctgctcctatgccttgtaaccc

SEQ ID NO: 581078 - DNA, 120 bp, Artificial Sequence
  ENSG00000171953_31 (sequence is synthesized)
aggtaggccctaatgctgatgtgggaacctcgaccgtggactttgcatggaatcctggggcttgaagatggagcagagaaagccagggagggcccaccctggccaccacccctgaacctt

SEQ ID NO: 581079 - DNA, 120 bp, Artificial Sequence
  ENSG00000171953_32 (sequence is synthesized)
ggatacatactccgaaagtccagctgcagggacaggacatccttgaagaggatgccctcctgcttggccagctgcccggcctcctcctgggggccctggtccccgacggccagcttgagc

SEQ ID NO: 581080 - DNA, 120 bp, Artificial Sequence
  ENSG00000171953_33 (sequence is synthesized)
atgtcatcgtccatcaccctcggctccatcgagttgcacggctggttcatcttcccccacgttttccctaaaaaacaccgcattcttccttcacggcctgcttctttctctgtttgaggg

SEQ ID NO: 581081 - DNA, 120 bp, Artificial Sequence
  ENSG00000171953_34 (sequence is synthesized)
cagggtctggctgaggtttccccctgtagtgtcttgtggccactggcactctgaggaatgccccacgcccagccctgggtctgctgcatctcggggtttgtatacttacgccaaggctgc

SEQ ID NO: 581082 - DNA, 120 bp, Artificial Sequence
  ENSG00000171953_35 (sequence is synthesized)
ctatacagggatcctgacaggaaatgaaggacagttgggtcaccaggaaaggtagctggaagatccaatgtcagagctcctccctgtgccctactagggtgagaggaaggtgagggagga

SEQ ID NO: 581083 - DNA, 120 bp, Artificial Sequence
  ENSG00000171953_36 (sequence is synthesized)
aaggctggttgtccatctgcccctcccagcaccccagcttttcctgcataactcatgacctctcttccccactttgcttacacaagacagtggatttccatagtgcccacttggattccc

SEQ ID NO: 581084 - DNA, 120 bp, Artificial Sequence
  ENSG00000171953_37 (sequence is synthesized)
atcccatgaggccctgcagctcagctcctctcaactggctcatgtctgtgtctcttggtcaaacaaatggcacagcctgacctctagcttggtcccatcaggtctggcatctgtgccagc

SEQ ID NO: 581085 - DNA, 120 bp, Artificial Sequence
  ENSG00000171953_38 (sequence is synthesized)
agctgcatctgtagccaggaggtgggtggacttatgaggtataaacaggctatttggtctgtgaccaggggcacagtctcttggagggggtgagggtagagatgcaaagactgagcatct

SEQ ID NO: 581086 - DNA, 120 bp, Artificial Sequence
  ENSG00000171953_39 (sequence is synthesized)
ggcacagcattcccattcagcatctgggtcaagcgggtgtggacccagggttgcagttagtagattggatctgctttaggatggcagtaacagtgtggcaagcttggacctgtcaaatat

SEQ ID NO: 581087 - DNA, 120 bp, Artificial Sequence
  ENSG00000171953_40 (sequence is synthesized)
ttgggggcatttagggtagtggttctcaaactcaagcttacactagaatcccctagagggcttgttaaaacagattgctgggcccccctccagaggttctgatttctgtaggcatgcaac

SEQ ID NO: 581088 - DNA, 120 bp, Artificial Sequence
  ENSG00000171953_41 (sequence is synthesized)
tggtggtgaagtttttgctgttgtcctttgtgtttttccttttctatcactgaatgaaggaattgtacttttttattaatgaaggttatttttacaatgaattagctacagggtggagga

SEQ ID NO: 581089 - DNA, 120 bp, Artificial Sequence
  ENSG00000171953_42 (sequence is synthesized)
taacaagttcacagtgtgaacctggaccctgagacccacccagggcttcgtagggtagaccctttaccaaattccgacaaggccctgggggctggtcctttgcctgtctggcccccaggg

SEQ ID NO: 581090 - DNA, 120 bp, Artificial Sequence
  ENSG00000171953_43 (sequence is synthesized)
tggtggagggctgtgctgtggtgctgtctgctatgtgtcagatgtggtgtcctcaggaaagcagggcttttgcctgagccccgcaggcagtgacagggtggtttttgcctttgattcaga

SEQ ID NO: 581091 - DNA, 120 bp, Artificial Sequence
  ENSG00000171954_0 (sequence is synthesized)
agatcccaggtagtggcgccggtggatccggatcgagggcaggaggctgagacccgcgggagctggccctaaagcaaggacctgagtgcaagtaatttttttgggaagtaataacagaaa

SEQ ID NO: 581092 - DNA, 120 bp, Artificial Sequence
  ENSG00000171954_1 (sequence is synthesized)
ataccagcaaggaagaagacagtgaacccaaaagaattgaaaacaggatgctgcccatcacagaccgcctgctgcacctcctggggctggagaagacggcgttccgcatatacgcggtgt

SEQ ID NO: 581093 - DNA, 120 bp, Artificial Sequence
  ENSG00000171954_2 (sequence is synthesized)
ccacccttctcctcttcctgctcttcttcctgttccgcctgctgctgcggttcctgaggctctgcaggagcttctacatcacctgccgccggctgcgctgcttcccccagcctccccggc

SEQ ID NO: 581094 - DNA, 120 bp, Artificial Sequence
  ENSG00000171954_3 (sequence is synthesized)
gcaactggctgctgggccacctgggcatgtaccttccaaatgaggcgggccttcaagatgagaagaaggtactggacaacatgcaccatgtactcttggtatggatgggacctgtcctgc

SEQ ID NO: 581095 - DNA, 120 bp, Artificial Sequence
  ENSG00000171954_4 (sequence is synthesized)
cgctgttggttctggtgcaccctgattacatcaaaccccttttgggagcctcagctgccatcgcccccaaggatgacctcttctatggcttcctaaaaccttggctaggggatgggctgc

SEQ ID NO: 581096 - DNA, 120 bp, Artificial Sequence
  ENSG00000171954_5 (sequence is synthesized)
tgctcagcaaaggtgacaagtggagccggcaccgtcgcctgctgacacccgccttccactttgacatcctgaagccttacatgaagatcttcaaccagagcgctgacattatgcatgcta

SEQ ID NO: 581097 - DNA, 120 bp, Artificial Sequence
  ENSG00000171954_6 (sequence is synthesized)
aatggcggcatctggcagagggctcagcggtctcccttgatatgtttgagcatatcagcctcatgaccctggacagtcttcagaaatgtgtcttcagctacaacagcaactgccaagaga

SEQ ID NO: 581098 - DNA, 120 bp, Artificial Sequence
  ENSG00000171954_7 (sequence is synthesized)
agatgagtgattatatctccgctatcattgaactgagcgctctgtctgtccggcgccagtatcgcttgcaccactacctcgacttcatttactaccgctcggcggatgggcggaggttcc

SEQ ID NO: 581099 - DNA, 120 bp, Artificial Sequence
  ENSG00000171954_8 (sequence is synthesized)
ggcaggcctgtgacatggtgcaccacttcaccactgaagtcatccaggaacggcggcgggcactgcgtcagcagggggccgaggcctggcttaaggccaagcaggggaagaccttggact

SEQ ID NO: 581100 - DNA, 120 bp, Artificial Sequence
  ENSG00000171954_9 (sequence is synthesized)
ttattgatgtgctgctcctggccagggatgaagatggaaaggaactgtcagacgaggatatccgagccgaagcagacaccttcatgtttgagggtcacgacacaacatccagtgggatct

SEQ ID NO: 581101 - DNA, 120 bp, Artificial Sequence
  ENSG00000171954_10 (sequence is synthesized)
gaggagctggagtgggacgatctgactcagctgccctttacaactatgtgcattaaggagagcctgcgccagtacccacctgtcactcttgtctctcgccaatgcacggaggacatcaag

SEQ ID NO: 581102 - DNA, 120 bp, Artificial Sequence
  ENSG00000171954_11 (sequence is synthesized)
ctcccagatgggcgcatcatccccaaaggaatcatctgcttggtcagcatctatggaacccaccacaaccccacagtgtggcctgactccaaggtgtacaacccctaccgctttgacccg

SEQ ID NO: 581103 - DNA, 120 bp, Artificial Sequence
  ENSG00000171954_12 (sequence is synthesized)
gacaacccacagcagcgctctccactggcctatgtgcccttctctgcaggacccaggaattgcatcggacagagcttcgccatggccgagttgcgcgtggttgtggcactaacactgcta

SEQ ID NO: 581104 - DNA, 120 bp, Artificial Sequence
  ENSG00000171954_13 (sequence is synthesized)
cgtttccgcctgagcgtggaccgaacgcgcaaggtgcggcggaagccggagctcatactgcgcacggagaacgggctctggctcaaggtggagccgctgcctccgcgggcctgagcgtgg

SEQ ID NO: 581105 - DNA, 120 bp, Artificial Sequence
  ENSG00000171954_14 (sequence is synthesized)
gcgcgcccctgcggctcccgagggtccaggccccgcccccaaaggaccaggactcgccccaaagatcccgagggcataggccacccccctcgaagttcaggttcagctcctggatgacca

SEQ ID NO: 581106 - DNA, 120 bp, Artificial Sequence
  ENSG00000171954_15 (sequence is synthesized)
ggcaccgctgttgagcagcctggtggtactggccacgcccctcaaggcaaggctcctccccttagggggcctgatcccgccccttgaggcttaggtcccgccccctgacttctcgcacct

SEQ ID NO: 581107 - DNA, 120 bp, Artificial Sequence
  ENSG00000171954_16 (sequence is synthesized)
gtcctgtttgagggaccagggtcgaccctgcccccttgggctcaggccccgcccccaggatcctacggattgaggtcctcaggccacgcccctgcagatccaggtctccaggccttgccc

SEQ ID NO: 581108 - DNA, 120 bp, Artificial Sequence
  ENSG00000171954_17 (sequence is synthesized)
actgagccttcagaggacctaagacccacctatgactcagggcccaccacaccccacccccccccaactggctgaacccctggcaggcttccaaactgaggaaagctggagcctgacgtc

SEQ ID NO: 581109 - DNA, 120 bp, Artificial Sequence
  ENSG00000171954_18 (sequence is synthesized)
agagcttttaactcggacatcaccctcctgaggccctcagctcatacgggcagactgctcaggcgtgaggctggatcgtagggttcgaggctgcttgcttttgttgttgttttgtaaact

SEQ ID NO: 581110 - DNA, 120 bp, Artificial Sequence
  ENSG00000171954_19 (sequence is synthesized)
cagacccttgtaagccccttccttcctcccttgcccaaagatcctttgctgagtgttctgtttttgcagaataaaagcaaaggatgcagacttaccccaccctccacccctagctcagcc

SEQ ID NO: 581111 - DNA, 120 bp, Artificial Sequence
  ENSG00000171954_20 (sequence is synthesized)
agatccttacacgtggagcccccagcatgggaatgaggggctctgcaactgagcgaagctgcgggctaggaggctggaaagccatttatcctaggacataaactcagattttgggggtca

SEQ ID NO: 581112 - DNA, 120 bp, Artificial Sequence
  ENSG00000171956_0 (sequence is synthesized)
atcagatggttcgagggaggacatggaggcagccacctagctcagcggagacgcggagcccacagcagcgccctccggagccctaacacgtcgctgccaccatccgcgccgggactccgc

SEQ ID NO: 581113 - DNA, 120 bp, Artificial Sequence
  ENSG00000171956_1 (sequence is synthesized)
agccgagctcggccgcccgcaggacgctccaggagcgtcgcggaccgggcggcacgggacgctgcggggctgagctcaagagcccaggttcgcgccgagtccaaccggacccggacgctg

SEQ ID NO: 581114 - DNA, 120 bp, Artificial Sequence
  ENSG00000171956_2 (sequence is synthesized)
cgcgcggagtgcgcgtcgagtgcgcgccgagagagaagcggcgcgcagcggcgtcctcccggatgcggacgcgcaacttgaagcaactttaagatccgagcagtccgccggcccgcgcgg

SEQ ID NO: 581115 - DNA, 120 bp, Artificial Sequence
  ENSG00000171956_3 (sequence is synthesized)
acccagagcaagaagagggcgaggaagaagatgcctcggcccggccgcaacacgtacagcgaccagaagccgccctactcgtacatctcgctgaccgctatggccatccagagctctccc

SEQ ID NO: 581116 - DNA, 120 bp, Artificial Sequence
  ENSG00000171956_4 (sequence is synthesized)
gagaagatgctgccgctgagcgagatctacaagttcatcatggaccgcttcccctactacagggagaacacgcagcgctggcagaacagtctgcgccacaacctctccttcaacgactgc

SEQ ID NO: 581117 - DNA, 120 bp, Artificial Sequence
  ENSG00000171956_5 (sequence is synthesized)
ttcatcaagatcccgcggcggccggaccagccaggcaagggcagcttctgggcgctgcacccaagctgcggggacatgttcgagaacggcagcttcctgcggcgccgcaagcgcttcaag

SEQ ID NO: 581118 - DNA, 120 bp, Artificial Sequence
  ENSG00000171956_6 (sequence is synthesized)
gtgcttaagtccgaccacctggcgcccagcaagccagccgacgcggcgcagtacctgcagcagcaggccaagctgcggctcagcgcgctggcggcctcgggcacgcacctgccacagatg

SEQ ID NO: 581119 - DNA, 120 bp, Artificial Sequence
  ENSG00000171956_7 (sequence is synthesized)
cccgccgccgcctacaacttgggcggcgtggcgcagccctcgggcttcaagcaccccttcgccatcgagaacatcatcgcgcgggaatacaagatgcctggggggctggccttctccgcc

SEQ ID NO: 581120 - DNA, 120 bp, Artificial Sequence
  ENSG00000171956_8 (sequence is synthesized)
atgcagccggtgcccgctgcctacccgctccccaaccagttgactaccatgggcagctcgctgggcaccggctggccacacgtgtatggctccgccggcatgatcgactcggccaccccc

SEQ ID NO: 581121 - DNA, 120 bp, Artificial Sequence
  ENSG00000171956_9 (sequence is synthesized)
atctccatggcgagtggcgactacagcgcctacggcgtgccgttgaagccgctgtgccacgcggcgggccaaacgctgcccgccatccccgtgcccattaagcccacgccggccgccgtg

SEQ ID NO: 581122 - DNA, 120 bp, Artificial Sequence
  ENSG00000171956_10 (sequence is synthesized)
cccgcgctgcctgcgctgccagcgcccatccccaccttgctctcgaactcgccgccctcgctcagccccacgtcctcgcaaacagccaccagccaaagcagccccgccacccccagcgaa

SEQ ID NO: 581123 - DNA, 120 bp, Artificial Sequence
  ENSG00000171956_11 (sequence is synthesized)
ccagtcctgccggcccccacctgggaccgccaccctaacttgttcatttcaccttcggccaacccgccttgccccaagagaactttgttttggacccaggagaccaaacacaaacttgca

SEQ ID NO: 581124 - DNA, 120 bp, Artificial Sequence
  ENSG00000171956_12 (sequence is synthesized)
gatgggccgagaggcgcgtgggagttgtcctcgcccccacatcaaggaaggccggggccacctgagccgaaccatcccctccctgaggccccgaaaccccctcctatttgaccggcgggg

SEQ ID NO: 581125 - DNA, 120 bp, Artificial Sequence
  ENSG00000171956_13 (sequence is synthesized)
gaaaccctgtcaccccctcttcgccgagaaaagcgcgtcttccctccgcccagatcggcggagccccgaactctgcgcagtttcaagactagagaaactgcctcagatgtttccaggaac

SEQ ID NO: 581126 - DNA, 120 bp, Artificial Sequence
  ENSG00000171956_14 (sequence is synthesized)
agatcccccccacaccccctccccgcgagggctgcaacagcgcaggggagggccggatctctttacgtcttggaaatctgcagcaaaaaggagccactaatcttcctaccccactcgcct

SEQ ID NO: 581127 - DNA, 120 bp, Artificial Sequence
  ENSG00000171956_15 (sequence is synthesized)
ccgcccatccggcaggggctgggccgaccacagcttcccggggttgcggccctgcctcctaggcttctgcggagattttgttgttgtttggggttttgtttccttccagaggctccaggc

SEQ ID NO: 581128 - DNA, 120 bp, Artificial Sequence
  ENSG00000171956_16 (sequence is synthesized)
gctgggagttaggaaagaggctgccaagctgagaaagcgacgctcgtcctcacacagcaaaacaaaactaaaagtaaccttgtattgtttacaaagcgcccagtaatatgtaaacagtga

SEQ ID NO: 581129 - DNA, 120 bp, Artificial Sequence
  ENSG00000171956_17 (sequence is synthesized)
acttgaatctgtcttgctaggcggacgaacgggcaaagcccacattataagtacctgttgtaatgtgaatgtttactcttcatttctggccaggtttagaaagggagggaagtggggatg

SEQ ID NO: 581130 - DNA, 120 bp, Artificial Sequence
  ENSG00000171956_18 (sequence is synthesized)
tagaaagggagggaagtggggatgggaaagttaattgggatgttaactttccgatgacttagagacctttttagctatttattttattgttgggaaaaaaaaaaaaaaaaaagaaggaaa

SEQ ID NO: 581131 - DNA, 120 bp, Artificial Sequence
  ENSG00000171956_19 (sequence is synthesized)
gaaagcatcaagggcaacccgggaagaacttagataagctgactggtaacatgaagggatgtcaccggatagctctcccacggacaagtctttctgtttgctaccagaacttttccaaga

SEQ ID NO: 581132 - DNA, 120 bp, Artificial Sequence
  ENSG00000171956_20 (sequence is synthesized)
agctaaagggctgcaaagagatgtaaatacttgtgaataggaatgattatacactgtgtaaaatgcacttttgtttgctgtattcctttagaatcttagataattggctggaaaacgaac

SEQ ID NO: 581133 - DNA, 120 bp, Artificial Sequence
  ENSG00000171956_21 (sequence is synthesized)
tgttgttctggtgtgacctgcttaagttaaaaaaaaaaaaagttgtagtgtcatcagagctgtaaaatttttacctttcattttccctccctgtacagaattagcgtggcattttaaata

SEQ ID NO: 581134 - DNA, 120 bp, Artificial Sequence
  ENSG00000171956_22 (sequence is synthesized)
ttgatgttcttgttcccagcatgcctgttttaaaacaaaggatttaaaaaaaaagggtgtctacattaaattatgacctagtccaaataatattttctcattaaaatatgtaaattcaaa

SEQ ID NO: 581135 - DNA, 120 bp, Artificial Sequence
  ENSG00000171956_23 (sequence is synthesized)
aagcagagaatgtggatttaaatgggataaagcaacaaagtcgacttagggtcagaaagcccatcggaaccttccacttcctttgcaagcagagataactggctacagtcagcctcccca

SEQ ID NO: 581136 - DNA, 120 bp, Artificial Sequence
  ENSG00000171956_24 (sequence is synthesized)
ggacctgatgccaatggataactgcaagatcagaaggagatggttcttgccatgttgtgctggctggactcgaactcctggattcaagcaatcctcctgcggactcagatgatccttctg

SEQ ID NO: 581137 - DNA, 120 bp, Artificial Sequence
  ENSG00000171956_25 (sequence is synthesized)
cctcagcttcctgagtagctggggtaaagcttataaaataacatcattattgccaaaacctaagattggatgcaagatatttttggacctttgcattctgcctaccaactgactccaccc

SEQ ID NO: 581138 - DNA, 120 bp, Artificial Sequence
  ENSG00000171956_26 (sequence is synthesized)
tgctggctggactcgaactcctggattcaagcaatcctcctgcggactcagatgatccttctgcctcagcttcctgagtagctggggtaaagcttataaagtaaaaactttgatatcccc

SEQ ID NO: 581139 - DNA, 120 bp, Artificial Sequence
  ENSG00000171956_27 (sequence is synthesized)
ccttaaagcagaagagaaacgtctttcaaattttcctatgacggtcaaggagtgggggttgtggaatgtatatacttagatgaattaaactcagaccttctccggttggatgtttgagcc

SEQ ID NO: 581140 - DNA, 120 bp, Artificial Sequence
  ENSG00000171956_28 (sequence is synthesized)
gcccagacaaagatgaagattaacacagtttaaggatgaaatatagaccatcctgtgcaaaaccaccgtgttgcagtttaattaaaagaattcattaaagtggtgccccatccagggtaa

SEQ ID NO: 581141 - DNA, 120 bp, Artificial Sequence
  ENSG00000171960_0 (sequence is synthesized)
gacttctgcttccgggtcggagccatggcggtggcaaattcaagtcctgttaaccccgtggtgttctttgatgtcagtattggcggtcaggaagttggccgcatgaagatcgagctcttt

SEQ ID NO: 581142 - DNA, 120 bp, Artificial Sequence
  ENSG00000171960_1 (sequence is synthesized)
gcagacgttgtgcctaagacggccgagaactttaggcagttctgcaccggagaattcaggaaagatggggttccaataggatacaaaggaagcaccttccacagggtcataaaggatttc

SEQ ID NO: 581143 - DNA, 120 bp, Artificial Sequence
  ENSG00000171960_2 (sequence is synthesized)
atgattcagggtggagattttgttaatggagatggtactggagtcgccagtatttaccgggggccatttgcagatgaaaattttaaacttagacactcagctccaggcctgctttccatg

SEQ ID NO: 581144 - DNA, 120 bp, Artificial Sequence
  ENSG00000171960_3 (sequence is synthesized)
tctttatcacctgctctaagtgcgattggctggatgggaagcatgtggtgtttggaaaaatcatcgatggacttctagtgatgagaaagattgagaatgttcccacaggccccaacaata

SEQ ID NO: 581145 - DNA, 120 bp, Artificial Sequence
  ENSG00000171960_4 (sequence is synthesized)
agcccaagctacctgtggtgatctcgcagtgtggggagatgtagtccagacaaagactgaatcaggccttcccttcttcttggtggtgttcttgagtaagataatctggactggcccccg

SEQ ID NO: 581146 - DNA, 120 bp, Artificial Sequence
  ENSG00000171960_5 (sequence is synthesized)
tctttgcttccctgcctgctgctgccccatttgatcaagagaccatggaagtgtcagagattcagaatccaagattgtctttaagttttcaactgtaaataaagtttttttgtatgcgta

SEQ ID NO: 581147 - DNA, 120 bp, Artificial Sequence
  ENSG00000171960_6 (sequence is synthesized)
actagggaggcggaggtgggagataccgagcggcagggtggtgggtcagcccatcatgccccctgctccgtgaagccctcatggtcttggactgggccttctgacactctcccgctgatt

SEQ ID NO: 581148 - DNA, 120 bp, Artificial Sequence
  ENSG00000171960_7 (sequence is synthesized)
attcaggtcagtttcagatgtgtttgacttctttgcctgctccagaggggtgttctggggctgcagtgagggtatcggtgaaccacctgctggccttgaatgattgctggtgacagtgat

SEQ ID NO: 581149 - DNA, 120 bp, Artificial Sequence
  ENSG00000171960_8 (sequence is synthesized)
ggtgagatccaggaggctgcccacacctgcgccgaagggaaactgctcggggctaggcaggcagaactcacccagagagagcggactcgggaagccagccagaaagtgaaattgcacccg

SEQ ID NO: 581150 - DNA, 120 bp, Artificial Sequence
  ENSG00000171960_9 (sequence is synthesized)
aacctaccgacctgccgggcggggggaaaggaggaggaggagtctccccaatcctagcgccccgcttctggaggaactgggcggttagactagggaggcggaggaagttggccgcatgaa

SEQ ID NO: 581151 - DNA, 120 bp, Artificial Sequence
  ENSG00000171960_10 (sequence is synthesized)
caaccatctttaggagagtccttttggctccagtgcatggtaaactggaaaggccttgtgctacctgctgtcactccaagtctctttcttttcggttataggaaagatggggttccaata

SEQ ID NO: 581152 - DNA, 120 bp, Artificial Sequence
  ENSG00000171960_11 (sequence is synthesized)
ggatacaaaggaagcaccttccacagggtcataaaggatttcatgattcagggtggagattttgttaatgtaagtactattcctttcctatcaaagacccgtagttttagtttttgttgt

SEQ ID NO: 581153 - DNA, 120 bp, Artificial Sequence
  ENSG00000171960_12 (sequence is synthesized)
gtagtccagacaaagactgaatcagcacttcccaggagcctgcccacagctgtggctaacatcaggccttcccttcttcttggtggtgttcttgagtaagataatctggactggcccccg

SEQ ID NO: 581154 - DNA, 120 bp, Artificial Sequence
  ENSG00000171962_0 (sequence is synthesized)
aggatgtctcccttctgacttccccttagcaaccaagtcgcggcgcttggttccccagcaaccgggagacgcgtctgctgcgtggaaccgccgagttcccagcgcttgagaaggaaaatt

SEQ ID NO: 581155 - DNA, 120 bp, Artificial Sequence
  ENSG00000171962_1 (sequence is synthesized)
ctggatctgttatctgtgaggaggccactccgttgacagttgtgtaaaactctgctgctttccccagctccaacctctctggtcttcaacaacactatcatcagggaaaacgtgggggaa

SEQ ID NO: 581156 - DNA, 120 bp, Artificial Sequence
  ENSG00000171962_2 (sequence is synthesized)
gatgaaccagccgtgcaactcgatggagccgagggtgatggacgatgacatgctcaagctggccgtcggggaccagggcccccaggaggaggccgggcagctggccaagcaggagggcat

SEQ ID NO: 581157 - DNA, 120 bp, Artificial Sequence
  ENSG00000171962_3 (sequence is synthesized)
cctcttcaaggatgtcctgtccctgcagctggactttcggaacatcctccgcatagacaacctctggcagtttgagaacttgaggaagctgcagctggacaataacatcattgagaagat

SEQ ID NO: 581158 - DNA, 120 bp, Artificial Sequence
  ENSG00000171962_4 (sequence is synthesized)
cgagggcctggagaacctcgcacacctggtctggctggatctgtctttcaacaacattgagaccatcgaggggctggacacactggtgaacctggaggacctgagcttgttcaacaaccg

SEQ ID NO: 581159 - DNA, 120 bp, Artificial Sequence
  ENSG00000171962_5 (sequence is synthesized)
gatctccaagatcgactccctggacgccctcgtcaagctgcaggtgttgtcgctgggcaacaaccggattgacaacatgatgaacatcatctacctccggcggttcaagtgcctgcggac

SEQ ID NO: 581160 - DNA, 120 bp, Artificial Sequence
  ENSG00000171962_6 (sequence is synthesized)
gctcagcctctctaggaaccctatctctgaggcagaggattacaagatgttcatctgtgcctaccttcctgacctcatgtacctggactaccggcgcattgatgaccacacaaaaaagct

SEQ ID NO: 581161 - DNA, 120 bp, Artificial Sequence
  ENSG00000171962_7 (sequence is synthesized)
tgcggaggctaagcaccagtacagcatcgacgagctgaagcaccaggagaacctgatgcaggcccagctggaggacgagcaggcgcagcgggaggagctagagaagcacaagactgcgtt

SEQ ID NO: 581162 - DNA, 120 bp, Artificial Sequence
  ENSG00000171962_8 (sequence is synthesized)
ggacaagtttgtcatcatctgcgtgaatatttttgagtatggcctgaaacagcaggagaagcggaaaacagagcttgacaccttcagtgaatgtgtccgtgaggccatccaggaaaacca

SEQ ID NO: 581163 - DNA, 120 bp, Artificial Sequence
  ENSG00000171962_9 (sequence is synthesized)
ggagcagggcaaacgcaagattgccaaattcgaggagaagcacttgtcgagtttaagtgccattcgagaggagttggaactgcccaacattgagaagatgatcctagaatgcagtgctga

SEQ ID NO: 581164 - DNA, 120 bp, Artificial Sequence
  ENSG00000171962_10 (sequence is synthesized)
catcagtgagttgttcgatgcgctcatgacgctggagatgcagctggtggagcagctggaggagactataaacatgtttgaaaggaacattgttgacatggtaggactgtttatcgaaaa

SEQ ID NO: 581165 - DNA, 120 bp, Artificial Sequence
  ENSG00000171962_11 (sequence is synthesized)
tgtccaaagcctgatggctcagtgccgggacctggagaatcaccaccacgagaagctcctggagatctctatcagcaccctggagaagattgtcgagggcgacctggacgaggacctgcc

SEQ ID NO: 581166 - DNA, 120 bp, Artificial Sequence
  ENSG00000171962_12 (sequence is synthesized)
taacgacctgcgcgcgctttttgtcgataaagatacgattgttaatgctgtcggggcatcgcacgacatccacctcctgaagattgacaatcgagaagatgagctggtgaccagaatcaa

SEQ ID NO: 581167 - DNA, 120 bp, Artificial Sequence
  ENSG00000171962_13 (sequence is synthesized)
ctcttggtgtacacgtttaatagacaggattcacaaggatgagatcatgaggaaccgcaagcgcgtgaaggagatcaatcagtacatcgaccacatgcagagcgaactggacaacctgga

SEQ ID NO: 581168 - DNA, 120 bp, Artificial Sequence
  ENSG00000171962_14 (sequence is synthesized)
atgtggcgacatcctagactagatgaatgtcagccacaggagcttcttcaaaacatagcaccagccccagccaggagaaggaagtgcacacgcctcacccgcacctctagagagttgctg

SEQ ID NO: 581169 - DNA, 120 bp, Artificial Sequence
  ENSG00000171962_15 (sequence is synthesized)
ggcatctctcaaccgcgatccccaacaccattcttcccccacccctggaaaaacttccaaaagtagagaaaataaaggactcatttcacatttcccctactcataaaaaaaaaaaaaaaa

SEQ ID NO: 581170 - DNA, 120 bp, Artificial Sequence
  ENSG00000171962_16 (sequence is synthesized)
tgaagtctgagatttcccctggaggtcttcttaaccttagagtctgtataatgagtactgtgggggtgttggaaccaccatttctgatcctgcacaatgccatccggtttgcaccagcac

SEQ ID NO: 581171 - DNA, 120 bp, Artificial Sequence
  ENSG00000171962_17 (sequence is synthesized)
atccactgatgaatggtcacaaaatcagcagggtcggcctgaggaacctggctccatccctggggtctgcacgctaagaaggctctcccggatgtctgcgctgggtcccgcggcagcatg

SEQ ID NO: 581172 - DNA, 120 bp, Artificial Sequence
  ENSG00000171962_18 (sequence is synthesized)
tctatgtctctggaaggagtgtgggcatcaagggcccagacagagatactatgttgtcagggcccagacagagatactatgttgtcagggcctgctttagtgcatgcatcattcactcca

SEQ ID NO: 581173 - DNA, 120 bp, Artificial Sequence
  ENSG00000171962_19 (sequence is synthesized)
agcaaccaagtcgcggcgcttggttccccagcaaccgggagacgcgtctgctgcgtggaaccgccgagttcccagcgcttgagaagggtcttcctatgttgcccgggctggtcttgaact

SEQ ID NO: 581174 - DNA, 120 bp, Artificial Sequence
  ENSG00000171962_20 (sequence is synthesized)
tccagcggggactgcaaagtaacaccctggttggccctttccccacaacacctgccctgtgcagttggggaagcggctgtcacagatgaattcacagatgaatcggcagagtgcgctgat

SEQ ID NO: 581175 - DNA, 120 bp, Artificial Sequence
  ENSG00000171962_21 (sequence is synthesized)
acaaaggtgggctctgctctgagtgtggcctgcacagccaggggacttccaaatgctccttctctgttcagctccctttgtgttcacggtataatgacacacactttctcattggattct

SEQ ID NO: 581176 - DNA, 120 bp, Artificial Sequence
  ENSG00000171962_22 (sequence is synthesized)
ttggaaaaggggcattgaagagtagcttcccctgcccacaactaggagagaaagggcagctccctcttcctaatccctttacctgactctgtcagagtgattccagcagcacccttgtaa

SEQ ID NO: 581177 - DNA, 87 bp, Artificial Sequence
  ENSG00000171962_23 (sequence is synthesized)
caggggccaggcctcttccacacactgtcccagggccacctcacagccatcctgcactgtctagttttccagatgaagaagctgagg

SEQ ID NO: 581178 - DNA, 70 bp, Artificial Sequence
  ENSG00000171962_24 (sequence is synthesized)
aaactaccaaaattagccagaaaaagcttgcggaggctaagcaccagtacagcatcgacgagctgaagca

SEQ ID NO: 581179 - DNA, 120 bp, Artificial Sequence
  ENSG00000171962_25 (sequence is synthesized)
agcgcttgagaaggtgagacctgggagctgaggctcccggaggacttgcagggacagatagtgcccgacgtaactctttcctgtgacctttttctcggagaacgccggcccggcccttct

SEQ ID NO: 581180 - DNA, 120 bp, Artificial Sequence
  ENSG00000171962_26 (sequence is synthesized)
tgtcctgtccctgcagctggactttcggagaaaaacagcagatgaacccaaaggggaacaggatgatggccaggaggattcccaggaagacatcctccgcatagacaacctctggcagtt

SEQ ID NO: 581181 - DNA, 120 bp, Artificial Sequence
  ENSG00000171962_27 (sequence is synthesized)
acagaaactaccaaaattagccaggtgtggtggcacacaccagtaatcctggctactcacaaggccgaggtagaagaatcgcttgagactaggagtttgaggctgcagtgaactaagaag

SEQ ID NO: 581182 - DNA, 120 bp, Artificial Sequence
  ENSG00000171962_28 (sequence is synthesized)
gcactccagcctgggcaacagagtgaaaaaattaaaaaattagaaaagaaaagaagttgaggaggcccaaggagggcaagcagccaggatcactggctcaaggccaagccaggattcacc

SEQ ID NO: 581183 - DNA, 120 bp, Artificial Sequence
  ENSG00000171962_29 (sequence is synthesized)
gattcaccctaagttggtgtcatcccaggagcaatattaacagctgagctccagagggaaccaggccatcagaggctcaggcctggctctcaggggcagagtcagggctggaggtagaga

SEQ ID NO: 581184 - DNA, 120 bp, Artificial Sequence
  ENSG00000171962_30 (sequence is synthesized)
cctgagtgtcatctgaggattgccaattggcagtagttgaagccatggtacaggtgggatcacctggggcacatggagtgagctgggggacggggactaagttctagaggtgccagcatt

SEQ ID NO: 581185 - DNA, 120 bp, Artificial Sequence
  ENSG00000171962_31 (sequence is synthesized)
cctggccaggtacagggggatgagccagtgcggtggagagagccaagggccagaccctcgtgaccagccctatggcctcactctacctctgtcctgttgtcctccttccctaaaagaggg

SEQ ID NO: 581186 - DNA, 120 bp, Artificial Sequence
  ENSG00000171962_32 (sequence is synthesized)
ccagaaggcctgctgagggctgttgggagtgagagagcaagtcctctgtggagaacacccagtctggggcgaggggagcgctccattgctgtggctcctgccctggagatggccccggga

SEQ ID NO: 581187 - DNA, 120 bp, Artificial Sequence
  ENSG00000171962_33 (sequence is synthesized)
accccagcctgccacgctgccttccgctcctcctggtctttccctgatttccctgcgctcacaaaaacctggtgagggtcatcaggagatgggcattctcatccacgagacctcatggct

SEQ ID NO: 581188 - DNA, 120 bp, Artificial Sequence
  ENSG00000171962_34 (sequence is synthesized)
ttcacagccttcatgcaggcccctgtgcaacacccctgcccatgcgcgggaggctgcagcatggcagaggcggcatggcagaggcggtgtggctcggaggaacctctggtaacaatgcca

SEQ ID NO: 581189 - DNA, 120 bp, Artificial Sequence
  ENSG00000171962_35 (sequence is synthesized)
cagctgcacatccataggtgaactgtagccttcatgggcacgcctctgctggaaacgtccagcacgactcagcgtggcaggctgtagctttcttgctcatcagtcctgtttgcttttatt

SEQ ID NO: 581190 - DNA, 120 bp, Artificial Sequence
  ENSG00000171962_36 (sequence is synthesized)
aggtgagctcattcttctgaaatggtccccctatcctggaagtcagtggggagaggtttttgattagacccctggagctatccgggtactctaaaggcaaagcgcacccccacttgggga

SEQ ID NO: 581191 - DNA, 120 bp, Artificial Sequence
  ENSG00000171962_37 (sequence is synthesized)
ccaaacaaagacccctccgcattgcagcctgcagttgccgcttctcaggtgacgtgaggaggctgcaactcagcactaagtagtgaaaatgaaaagcgccgctgtctgaaattcattagc

SEQ ID NO: 581192 - DNA, 120 bp, Artificial Sequence
  ENSG00000171962_38 (sequence is synthesized)
agccagagtatgtgttacaaggcagcggaggctgggagtctgaagtggtgtgatgaattgaacctcatcggatgctgctgtggctgggccaagtgatagcacctaatcaattcctcacac

SEQ ID NO: 581193 - DNA, 120 bp, Artificial Sequence
  ENSG00000171962_39 (sequence is synthesized)
gtcaagtgacacctcagacatgggatagatttccccatcacatcacagggcaggtgctccctccctgctggagagcacaggcactgcagaagcagcgcacagtgccaggggcgagtgagg

SEQ ID NO: 581194 - DNA, 120 bp, Artificial Sequence
  ENSG00000171962_40 (sequence is synthesized)
cagcagctcccagccttttcaggcacggagattgcctttcaacatccaaacatttcccagaacccatgtgccatcctacttgtattactggtggccagaaagccacaagcgcaatcatgc

SEQ ID NO: 581195 - DNA, 120 bp, Artificial Sequence
  ENSG00000171962_41 (sequence is synthesized)
ttttcaatgaccctatttttattcacgagaacagcacatacatgtgtttgaaaattatgtgaggtgctcactctgcagacagtactcacattcctatagattccacccctgcccaccttg

SEQ ID NO: 581196 - DNA, 120 bp, Artificial Sequence
  ENSG00000171962_42 (sequence is synthesized)
cagcccctggagtctatagcagatgggagtggggcactccgagagtggcaggcctggagatcacatcttccattgttccttcaatcaacactaactcccatttgggccttaggtgccttg

SEQ ID NO: 581197 - DNA, 120 bp, Artificial Sequence
  ENSG00000171962_43 (sequence is synthesized)
ctaagcaccacaaaacagcaactaactgaaagagatctggagtgccagcccgctcctactgagggcctcctctctgtcaggcaccttgcaaagcattttgtgtgaagtgactcatttaac

SEQ ID NO: 581198 - DNA, 120 bp, Artificial Sequence
  ENSG00000171962_44 (sequence is synthesized)
ctcaccacaacgccacaacgcagggattatgcaggtaacctatttcccagatgaggaagataaggcccaaggaggtgaaatgcctttcccagagttacacagagtgctggagctgggaat

SEQ ID NO: 581199 - DNA, 120 bp, Artificial Sequence
  ENSG00000171962_45 (sequence is synthesized)
actgacccaggcagtctagctcttaacagctcactccactgtttccctggaggtgatgcacagatgtcactgggaaacccaaaggagagggggttggctgtgtgtgtgtgtgttgggcag

SEQ ID NO: 581200 - DNA, 120 bp, Artificial Sequence
  ENSG00000171962_46 (sequence is synthesized)
gcaggtaaggggagtaagaccaggacaagtgttcctggcaaagttccggtgacagcattaaacattcagatggtgagggagttaatatggttggagaacaacaactttagagagagcaga

SEQ ID NO: 581201 - DNA, 120 bp, Artificial Sequence
  ENSG00000171962_47 (sequence is synthesized)
ggggtcagttcacaaccatctgctcaggagggtcaagatgggtggtctttatgctgaaggtctgtgattagaggagctggttgctaaattttgaggagtaccttttgctctgtgctggac

SEQ ID NO: 581202 - DNA, 120 bp, Artificial Sequence
  ENSG00000171962_48 (sequence is synthesized)
atctaaatatgcatgttaactgtgttctttaacatttccaggagactataaacatgtttgaaaggaacattgttgacatggtaggactgtttatcgaaaatgtccaaagcctatatcctt

SEQ ID NO: 581203 - DNA, 120 bp, Artificial Sequence
  ENSG00000171962_49 (sequence is synthesized)
tctgtgatgaccttccccatggggaggtgctacagagcccctgggcttgtcccggcctctggacaaaagaatgttccacagggtctgaggaggtttcccgaccctcagaacaatgatggc

SEQ ID NO: 581204 - DNA, 120 bp, Artificial Sequence
  ENSG00000171962_50 (sequence is synthesized)
ctggttagagctgtggtttggatgcccagagggacaacatccaaactgtttgcagtaggctcccagcatgattgttctcatatgagtgatgttcactaggaaatgacgccccctgtgttg

SEQ ID NO: 581205 - DNA, 120 bp, Artificial Sequence
  ENSG00000171962_51 (sequence is synthesized)
caggcaagcacactctggggttgaggcaacccccacgtggaagacactataaggagtacatcaggtgaaatgttagggtgaggagccaacatcggagcatggccaacccttcttccaccc

SEQ ID NO: 581206 - DNA, 120 bp, Artificial Sequence
  ENSG00000171962_52 (sequence is synthesized)
gaactcagggcactccacatggggcaaactgctgtgctccagctagcagcagccctgtggtcctgccctcctggggctcacagtccctcagggagacaagttgtagaggcaacaagtggt

SEQ ID NO: 581207 - DNA, 120 bp, Artificial Sequence
  ENSG00000171962_53 (sequence is synthesized)
gccaaatgcacagggtgagaagcagttaacccagaggccaggagcctccatgcaggagggagagaagagtgtgatggcaggggccgagggtccgtccgaggtgtggggcaggggcaggga

SEQ ID NO: 581208 - DNA, 120 bp, Artificial Sequence
  ENSG00000171962_54 (sequence is synthesized)
gtcgaggaaggcccagggttcggagcttgtgagtggacggtgctgccagccagaatttccgagctcgccttgggcccttaaagtctgtctcccgccgtctgagagcatcagggacgcgcc

SEQ ID NO: 581209 - DNA, 120 bp, Artificial Sequence
  ENSG00000171962_55 (sequence is synthesized)
cttctgacttccccttagcaaccaagtcgcggcgcttggttccccagcaaccgggagacgcgtctgctgcgtggaaccgccgagttcccagcgcttgagaagctccaacctctctggtct

SEQ ID NO: 581210 - DNA, 90 bp, Artificial Sequence
  ENSG00000171962_56 (sequence is synthesized)
gagaacgccggcccggcccttctcatttataaaatgagcacggtcttcctactcaagcagtccttccacctcggcctcccaaagagctgg

SEQ ID NO: 581211 - DNA, 120 bp, Artificial Sequence
  ENSG00000171962_57 (sequence is synthesized)
ggactcagagggcaacaatctgtcctacctgcctggtgtcgttgcctggagcccagaggacgtggttggtacctgtcattagggctgaggctgtgaccatcgatcaatgggcttaagttg

SEQ ID NO: 581212 - DNA, 120 bp, Artificial Sequence
  ENSG00000171970_0 (sequence is synthesized)
ctccctgccgcgcgtgccctgcctaccacgagcggcccgggagtacctgtacctttcagctgcgccggccgcgaggccacggagagctcgccttggagagcccaggagcaggggagacat

SEQ ID NO: 581213 - DNA, 120 bp, Artificial Sequence
  ENSG00000171970_1 (sequence is synthesized)
ggactcagtggtctttgaggatgtggctgtggacttcaccctggaggagtgggctttgctggattctgctcagagggacctctacagagatgtgatgctggagaccttccggaacctggc

SEQ ID NO: 581214 - DNA, 120 bp, Artificial Sequence
  ENSG00000171970_2 (sequence is synthesized)
ctcagtagatgatgggactcaatttaaagccaatgggtcagtttctctgcaggatatgtacgggcaagaaaaatctaaggaacagacaataccaaacttcacaggaaataattcctgtgc

SEQ ID NO: 581215 - DNA, 120 bp, Artificial Sequence
  ENSG00000171970_3 (sequence is synthesized)
ctacactttagaaaaaaattgtgaaggctatggcactgaagaccaccacaaaaatctgagaaatcatatggtggacagattctgtacacataatgaaggtaatcaatatggagaagccat

SEQ ID NO: 581216 - DNA, 120 bp, Artificial Sequence
  ENSG00000171970_4 (sequence is synthesized)
ccatcaaatgccagatcttaccctgcacaagaaagtttctgctggagaaaaaccatatgaatgcaccaagtgcaggacagtcttcacgcatctttcttctcttaaaaggcacgtcaagtc

SEQ ID NO: 581217 - DNA, 120 bp, Artificial Sequence
  ENSG00000171970_5 (sequence is synthesized)
tcactgtggacgaaaagcacctccaggtgaggaatgtaagcaggcctgcatttgtccctcacacctacacagtcacggaagaactgacactgaggagaagccgtataagtgtcaagcatg

SEQ ID NO: 581218 - DNA, 120 bp, Artificial Sequence
  ENSG00000171970_6 (sequence is synthesized)
tgggcaaactttccaacatcctcgttacctctcccaccacgtaaagactcacacagcagagaaaacctacaaatgcgagcagtgtcggatggcgtttaatgggttcgcaagcttcactag

SEQ ID NO: 581219 - DNA, 120 bp, Artificial Sequence
  ENSG00000171970_7 (sequence is synthesized)
acatgtgagaactcacacaaaagacaggccatataaatgtcaggaatgtgggagagccttcatttatccctcgacatttcaaagacacatgacaacacacactggagagaagccctataa

SEQ ID NO: 581220 - DNA, 120 bp, Artificial Sequence
  ENSG00000171970_8 (sequence is synthesized)
atgagaagacgcacacgggagagaagccctatgaatgcaagcagtgtgggaaaacattcagttggtctgaaaccttgcgagtccacatgaggatccacactggggacaaactctataaat

SEQ ID NO: 581221 - DNA, 120 bp, Artificial Sequence
  ENSG00000171970_9 (sequence is synthesized)
gtgaacactgtgggaaggcttttacctcttccagatcattccaaggtcatttgaggacgcacactggagagaaaccttatgagtgtaaacaatgtgggaaagccttcacttggtcctcaa

SEQ ID NO: 581222 - DNA, 120 bp, Artificial Sequence
  ENSG00000171970_10 (sequence is synthesized)
cgtttagagaacatgtgagaattcacacgcaagagcagctctataaatgtgaacaatgtgggaaggcttttacctcttccagatcattccgaggtcatttgaggacgcacactggagaga

SEQ ID NO: 581223 - DNA, 120 bp, Artificial Sequence
  ENSG00000171970_11 (sequence is synthesized)
agccttatgagtgtaaacaatgtggaaaaaccttcacttggtcctcaacgtttagagaacatgtgagaattcacacgcaagagcagctccataaatgtgaacactgtgggaaggccttta

SEQ ID NO: 581224 - DNA, 120 bp, Artificial Sequence
  ENSG00000171970_12 (sequence is synthesized)
cctcttccagagcattccaaggtcatttgaggatgcacactggagagaagccttatgagtgtaaacaatgtggaaaaaccttcacttggtcctcaaccttacataatcatgtgaggatgc

SEQ ID NO: 581225 - DNA, 120 bp, Artificial Sequence
  ENSG00000171970_13 (sequence is synthesized)
acactggagagaaacctcacaaatgtaaacaatgtgggatgtccttcaagtggcactcctccttccggaaccatctgaggatgcacacaggacagaaatcccacgaatgtcagtcatact

SEQ ID NO: 581226 - DNA, 120 bp, Artificial Sequence
  ENSG00000171970_14 (sequence is synthesized)
caaaagccttcagttgccaagtcattctttctaaaaccagtgagagcacacactaaagagaaattctataactttaatggggtaacctcacattaattcatgtataatgctccagaaaat

SEQ ID NO: 581227 - DNA, 120 bp, Artificial Sequence
  ENSG00000171970_15 (sequence is synthesized)
tcacaccaggagagaaatcttacaagtatgatattgtctttgtcaatacctcatttgtaaaacagacccattagtcgtgaatttccagctctttcaaaaataaatgtttatgtgagaaaa

SEQ ID NO: 581228 - DNA, 120 bp, Artificial Sequence
  ENSG00000171970_16 (sequence is synthesized)
accaaacttcacaggaaataattcctgtgcctacactttagaaaaaaagcggatcacgaggtcaggagatcaatcccagctacctgtgaggcggagaaatcatatggtggacagattctg

SEQ ID NO: 581229 - DNA, 120 bp, Artificial Sequence
  ENSG00000171970_17 (sequence is synthesized)
gtcccacaagtaggctgatttctgatcgcacagatgggtcagagtaaaaccttctattcttgagcctgtgccccgcgacactgaacttcacaagtgcttctcagttcttccttctcctct

SEQ ID NO: 581230 - DNA, 120 bp, Artificial Sequence
  ENSG00000171984_0 (sequence is synthesized)
gttccggttgcggatggtgagtgtgtcggggggcttggcggcttttctcctcagttttctggagtgctttggaggagaggactatggcagccagggacgccacttcaggcagcctgtcag

SEQ ID NO: 581231 - DNA, 120 bp, Artificial Sequence
  ENSG00000171984_1 (sequence is synthesized)
aggagagcagtgctttggacctgccatcagcgtgtgacataagagattacgtcctgcagggacccagccaagaagccaacagcgaggctttcagttctttggaattccattcttttcctt

SEQ ID NO: 581232 - DNA, 120 bp, Artificial Sequence
  ENSG00000171984_2 (sequence is synthesized)
attcttctgatgtggatccagacaccagtaacttaaatatagaacaaaataactcctggaccgctgagaacttctggcttgaccctgctgtgaaaggccagtcagagaaggaagaggatg

SEQ ID NO: 581233 - DNA, 120 bp, Artificial Sequence
  ENSG00000171984_3 (sequence is synthesized)
atggccttcggaaatccctggatagattctatgaaatgtttggtcatccacagccaggctctgcaaactcactctctgcatctgtctgcaagtgcctgtctcagaaaatcactcaactaa

SEQ ID NO: 581234 - DNA, 120 bp, Artificial Sequence
  ENSG00000171984_4 (sequence is synthesized)
gaggccaggagagccaaaagtatgccctccgcagttttcaaatggcccgggtgatcttcaaccgggacggctgctccgtcttacagaggcattccagggacacccacttctacccactgg

SEQ ID NO: 581235 - DNA, 120 bp, Artificial Sequence
  ENSG00000171984_5 (sequence is synthesized)
aggaaggaagtacatctttggatgatgaaaagccaaacccaggactgtcaaaggatattactcatttcctcttgcagcagaatgtaatgaaagacctgtaactggtgccgggcagtgtgc

SEQ ID NO: 581236 - DNA, 120 bp, Artificial Sequence
  ENSG00000171984_6 (sequence is synthesized)
agctctgtgtgcccaatcccaattaagtgctttgaggttaaaggctggcacctgtgacctggtattggagccagtcagcccatatggagagccagcagggtctgggagttctccgtcctc

SEQ ID NO: 581237 - DNA, 120 bp, Artificial Sequence
  ENSG00000171984_7 (sequence is synthesized)
ttggccaaggccgctgactgactgggctacgagtcaaaagcccagctcccttgcctcaaggaaggacattctctgaggagtaatttatgctctagcactccctttcctctagatcggcct

SEQ ID NO: 581238 - DNA, 120 bp, Artificial Sequence
  ENSG00000171984_8 (sequence is synthesized)
gaggctgggacattacatgaaatcacacccttgctgggcttaatccctttccctaccctcccatttatttactggtgtctctgggagcctttccttaataaacctcttatatctgaatcc

SEQ ID NO: 581239 - DNA, 120 bp, Artificial Sequence
  ENSG00000171984_9 (sequence is synthesized)
ttgactcagagtctacttctgggagaattcaccctgagagaacatgcttctgtgagatgaggttttagaaggatacaaagctctacaccgaatcaggtataaggaattatatcaagttgt

SEQ ID NO: 581240 - DNA, 120 bp, Artificial Sequence
  ENSG00000171984_10 (sequence is synthesized)
aaaactgagaccatgtcattgagaatacatgtcctaaaataatataaagattgaaatacagttgagaaaagtatatcacatcttgatcacacccttgcctcctctccaaagctagaaatc

SEQ ID NO: 581241 - DNA, 120 bp, Artificial Sequence
  ENSG00000171984_11 (sequence is synthesized)
catgttttatcatactaactgggtgtggaaggaacatttggacaatctaaaataacagcgaaaattcacaattctttttaaaatctcttgtcttttatcagattgcaaacgtgaaaggtg

SEQ ID NO: 581242 - DNA, 120 bp, Artificial Sequence
  ENSG00000171984_12 (sequence is synthesized)
agaaggtaacaaatgtgcaccacccaccacagtatatgtaagcacaattatgctacgctaggctgatgccacgtggccttgtcaagttgtgtttgaagagaataaataatcctttgccca

SEQ ID NO: 581243 - DNA, 120 bp, Artificial Sequence
  ENSG00000171984_13 (sequence is synthesized)
agttttctggagtgctttggaggagagatggagtctcactcttgtagcccaagctggagtacaatgacaatctcagctcactgcaacctccgtcttccatcagcttcccaaagtgttggg

SEQ ID NO: 581244 - DNA, 120 bp, Artificial Sequence
  ENSG00000171984_14 (sequence is synthesized)
aggacagcttacctggcacagcaatgacaaggagctgtttcctggatgtctttttgttattgttgctgttaatctcaggtctctttctaatctccctcaaaatgaattcagaagcagggg

SEQ ID NO: 581245 - DNA, 120 bp, Artificial Sequence
  ENSG00000171984_15 (sequence is synthesized)
aatatttggttcaacaaagagagagtggaatttttttttgttttgttcttttaaaacttcagaaaatagcaatgtgggcctgttatgtgtgatgagtaataaaaatagagactttagcat

SEQ ID NO: 581246 - DNA, 120 bp, Artificial Sequence
  ENSG00000171987_0 (sequence is synthesized)
atggctctagtgcaggcgctggtgcccagagaaagagagccaaagctgtccattttgcagatggacagaggggacccacaacacagctcacactggtgcccagagagagaaaaagttaag

SEQ ID NO: 581247 - DNA, 120 bp, Artificial Sequence
  ENSG00000171987_1 (sequence is synthesized)
ctgctgaccctgaagccaagggaaacatccaaaaatatccttataaacttctacagagcctttaacttagataaggatgtgttcatacaccaggccaaccacccactaacagtgccgtct

SEQ ID NO: 581248 - DNA, 120 bp, Artificial Sequence
  ENSG00000171987_2 (sequence is synthesized)
tgctttagggtactaccttgctatctggaacgtgtttccagtggaatctctatttcctggatctcagcccctctacctgtgggagcaatgaaacaccagcttctatgtgacttaatggat

SEQ ID NO: 581249 - DNA, 120 bp, Artificial Sequence
  ENSG00000171987_3 (sequence is synthesized)
cttatcacgctttctttctggttagcaggtcagtgtatgagccttaaagctaccaacatgcaacactgcaagtgttcaatagccacaagtgactgggccattgaattggaccgcactgat

SEQ ID NO: 581250 - DNA, 120 bp, Artificial Sequence
  ENSG00000171987_4 (sequence is synthesized)
tacaaaacacttccatcagaatattccatcctagcactgctccaggtctttgcagggaaaaactgtatggatcgtgttctacttcatgtggatgtgaactacttgaagtccctgccctga

SEQ ID NO: 581251 - DNA, 120 bp, Artificial Sequence
  ENSG00000171988_0 (sequence is synthesized)
agtactggccgcggcgcggtggcggcggctgggctgcctcggggtcttcgacggccgcgttgggttttgtttcagttttcttgtgtggcgctgcagcacaaggctgcgaatctgggagtc

SEQ ID NO: 581252 - DNA, 120 bp, Artificial Sequence
  ENSG00000171988_1 (sequence is synthesized)
caaaggagtgtttgcggggagggcccgaggtcgctgtgtccggggcagagcggccggttcgtcccgagtctgcgctctttcgggtccgctgctgtgtcccggtccgctctcctcagcatg

SEQ ID NO: 581253 - DNA, 120 bp, Artificial Sequence
  ENSG00000171988_2 (sequence is synthesized)
agcggccggtaggagtgaggtttcatcggttccctcgcactggaggaggcagcggccgcttcggcagcgacagctatggcggtagagacgcgggcagagctggtgggtaagcggttcctg

SEQ ID NO: 581254 - DNA, 120 bp, Artificial Sequence
  ENSG00000171988_3 (sequence is synthesized)
tgtgtggcggtcggcgacgaggcacgttcggagcgctgggagagcggacgcggctggcgaagctggcgagcgggggtcatccgagccgtgtcacacagggacagccgcaatccggacctg

SEQ ID NO: 581255 - DNA, 120 bp, Artificial Sequence
  ENSG00000171988_4 (sequence is synthesized)
gcggtgtatgtggaatttgatgatcttgaatgggataaacgagagtgggttaaagtttatgaagatttttcaactttcttggtggaataccacttaatctgggccaaaaggaatgaccct

SEQ ID NO: 581256 - DNA, 120 bp, Artificial Sequence
  ENSG00000171988_5 (sequence is synthesized)
agccagactcagggatcaaagagcaaacagattcagtggcctgcattgactttcaaacctctggttgaaagaaatatacccagttcagtcactgcagtagaattccttgtagataagcaa

SEQ ID NO: 581257 - DNA, 120 bp, Artificial Sequence
  ENSG00000171988_6 (sequence is synthesized)
ctggattttttaactgaagatagtgcctttcagccctaccaggacgacatagacagcctaaacccagttctcagggacaacccgcagcttcatgaggaagtgaaagtctgggtaaaggaa

SEQ ID NO: 581258 - DNA, 120 bp, Artificial Sequence
  ENSG00000171988_7 (sequence is synthesized)
caaaaggttcaggagatttttatgcaaggtccttattccttaaatggatacagagtgagagtatatagacaagactctgccacccagtggtttactggcataattactcatcatgatctc

SEQ ID NO: 581259 - DNA, 120 bp, Artificial Sequence
  ENSG00000171988_8 (sequence is synthesized)
ttcacccgcaccatgatcgttatgaatgatcaggtactagaaccacagaatgtcgatccttctatggttcaaatgacctttctagatgatgttgttcactctttgttaaaaggtgaaaat

SEQ ID NO: 581260 - DNA, 120 bp, Artificial Sequence
  ENSG00000171988_9 (sequence is synthesized)
attggcattacatcacgacgcaggtctcgtgccaatcaaaacgtcaacgctgttcacagccattatacacgtgcccaagcaaatagtcccagaccagcaatgaactcccaagctgctgta

SEQ ID NO: 581261 - DNA, 120 bp, Artificial Sequence
  ENSG00000171988_10 (sequence is synthesized)
ccaaaacagaatacacaccagcaacagcaacaaagaagtatccgtccaaataagaggaagggctcagatagcagtataccagatgaagagaagatgaaggaggaaaaatatgattatata

SEQ ID NO: 581262 - DNA, 120 bp, Artificial Sequence
  ENSG00000171988_11 (sequence is synthesized)
tcacgaggagaaaatcctaaaggtaaaaacaaacacttgatgaataaaagaaggaaacctgaggaggatgaaaagaaactaaatatgaaaagacttcgaactgacaatgtttcagacttt

SEQ ID NO: 581263 - DNA, 120 bp, Artificial Sequence
  ENSG00000171988_12 (sequence is synthesized)
tctgagagcagtgactcagaaaattcaaataagagaataatagataattcctcagaacagaagccagagaatgaattgaaaaataaaaatacttcaaaaataaatggagaagaaggaaaa

SEQ ID NO: 581264 - DNA, 120 bp, Artificial Sequence
  ENSG00000171988_13 (sequence is synthesized)
ccccataataatgagaaggcaggagaagagaccctaaaaaatagccagcctccctgggatcaaatacaggaagataaaaaacatgaagaagcagagaagcggaagtctgttgacactcag

SEQ ID NO: 581265 - DNA, 120 bp, Artificial Sequence
  ENSG00000171988_14 (sequence is synthesized)
cttcaagaagatatgattattcattcgtcagaacagtccacagtttctgatcataattctaatgatttacttcctcaggaatgcaatatggataaaacacataccatggaattgctacca

SEQ ID NO: 581266 - DNA, 120 bp, Artificial Sequence
  ENSG00000171988_15 (sequence is synthesized)
aaggagaagtttgtatccagaccacccacaccaaaatgtgttattgatattacaaatgacactaatttagaaaaggtggctcaggaaaactcaagtacctttggccttcagacacttcag

SEQ ID NO: 581267 - DNA, 120 bp, Artificial Sequence
  ENSG00000171988_16 (sequence is synthesized)
aaaatggatcctaatgttagtgattcaaaacactctattgcaaatgcaaaattcttggaaacagcaaaaaaagattctgaccagagctgggtcagtgatgtagttaaagtggatctaacc

SEQ ID NO: 581268 - DNA, 120 bp, Artificial Sequence
  ENSG00000171988_17 (sequence is synthesized)
caatcaagtgttacaaatgcttcttcaggaaatgatcacttgaacatggaaaaagagaagtatgtctcttacatttctcctttaagtgcagtttctgtcatggaagataagctgcataag

SEQ ID NO: 581269 - DNA, 120 bp, Artificial Sequence
  ENSG00000171988_18 (sequence is synthesized)
cgaagtccacctccagagactataaaatctaaacttaatacttcagtagatactcacaagataaaatccagcccatcacctgaagttgttaaacccaaaataactcattctcctgattct

SEQ ID NO: 581270 - DNA, 120 bp, Artificial Sequence
  ENSG00000171988_19 (sequence is synthesized)
gtaaagtctaaggccacttatgtgaacagccaagctactggtgaaagaagattggcaaataagatagaacatgagctatcaagatgcagttttcatccaattcctactcgaagcagtaca

SEQ ID NO: 581271 - DNA, 120 bp, Artificial Sequence
  ENSG00000171988_20 (sequence is synthesized)
ttagaaactacaaagagtcctcttatcattgataaaaatgagcattttacagtttacagagatcctgcacttattgggtcagaaacaggagctaatcatatttcacctttcctaagccag

SEQ ID NO: 581272 - DNA, 120 bp, Artificial Sequence
  ENSG00000171988_21 (sequence is synthesized)
catccttttcctcttcactcctcatctcatagaacctgtttaaatccaggtacccatcatcctgccttaactcctgcaccccatttactagccggatcatctagtcaaactccattacct

SEQ ID NO: 581273 - DNA, 120 bp, Artificial Sequence
  ENSG00000171988_22 (sequence is synthesized)
accattaacactcatcctctgactagtggtccacaccatgctgttcatcaccctcatttacttcccactgtgttacctggagtgcctactgcctccttacttggtggccacccacgacta

SEQ ID NO: 581274 - DNA, 120 bp, Artificial Sequence
  ENSG00000171988_23 (sequence is synthesized)
gagagtgctcatgccagcagcttgagccacttagcgctagcacaccagcaacaacaacagttgttacagcaccagtcacctcatcttcttggacaagcccatccttctgcttcatataat

SEQ ID NO: 581275 - DNA, 120 bp, Artificial Sequence
  ENSG00000171988_24 (sequence is synthesized)
cagcttggactttatccaattatttggcagtatccaaatggaacacatgcatactcaggacttggtttgccttcttctaagtgggttcacccagaaaatgcagttaatgctgaagcttca

SEQ ID NO: 581276 - DNA, 120 bp, Artificial Sequence
  ENSG00000171988_25 (sequence is synthesized)
ttaaggaggaattctcccagtccttggctacatcagcccacccctgtgacctcagcagatggtattggattacttagtcacattcctgtcagaccttccagtgcagagcctcatcggcct

SEQ ID NO: 581277 - DNA, 120 bp, Artificial Sequence
  ENSG00000171988_26 (sequence is synthesized)
cttaaaattacagcccattccagtccaccattgacaaaaactttagtagatcatcataaggaagaattagaaagaaaagcttttatggaaccattacggtctgttgcatccacatcagcc

SEQ ID NO: 581278 - DNA, 120 bp, Artificial Sequence
  ENSG00000171988_27 (sequence is synthesized)
aaaaatgacctggatctaaataggtcacagactggaaaagattgtcacttacataggcattttgtggatccagtattaaatcagttacagaggccaccccaggagactggagagaggtta

SEQ ID NO: 581279 - DNA, 120 bp, Artificial Sequence
  ENSG00000171988_28 (sequence is synthesized)
aacaaatacaaagaggaacaccgtcgaattcttcaagaaagtattgatgttgctccctttacaactaaaatcaagggacttgagggtgagagagagaattattccagagtggcatcatca

SEQ ID NO: 581280 - DNA, 120 bp, Artificial Sequence
  ENSG00000171988_29 (sequence is synthesized)
tcttccagtcctaaaagccatatcatcaaacaagatatggatgtagaacgctcagtatcagatctttataaaatgaagcactcagtgcctcagagtttaccccaaagtaactatttcact

SEQ ID NO: 581281 - DNA, 120 bp, Artificial Sequence
  ENSG00000171988_30 (sequence is synthesized)
acattgtctaatagtgtggtcaatgaaccaccaagatcatacccatccaaagaagtttcaaatatttacggtgataaacagagtaatgcccttgcagcggcagcagctaatcctcaaact

SEQ ID NO: 581282 - DNA, 120 bp, Artificial Sequence
  ENSG00000171988_31 (sequence is synthesized)
ctgacttcatttataacatctctttcaaagcctccacctttgattaaacaccaaccagaaagtgaaggtttagtaggcaagataccagaacatcttccacatcagattgcatctcactca

SEQ ID NO: 581283 - DNA, 120 bp, Artificial Sequence
  ENSG00000171988_32 (sequence is synthesized)
gtaacaaccttcagaaatgattgtaggagtcctacccatttgacagtttcttctacaaatacactccgcagtatgcctgcattacatagagcaccagtatttcacccaccaatccatcac

SEQ ID NO: 581284 - DNA, 120 bp, Artificial Sequence
  ENSG00000171988_33 (sequence is synthesized)
agcctggaaagaaaggaaggcagctatagtagtctttcccctccaactttaactccggtgatgccagtaaatgctggtggtaaagttcaagaatcacagaagcctccaactctaataccc

SEQ ID NO: 581285 - DNA, 120 bp, Artificial Sequence
  ENSG00000171988_34 (sequence is synthesized)
gaaccaaaagactcccaggcaaattttaagagttcttcagaacagagtttgacggagatgtggagacctaataataacctcagcaaagagaaaactgaatggcatgtggagaaaagcagc

SEQ ID NO: 581286 - DNA, 120 bp, Artificial Sequence
  ENSG00000171988_35 (sequence is synthesized)
ggaaagttacaggctgctatggcatctgtcattgtgcgtccatcttctagtacaaaaactgatagtatgccagcaatgcagttagcttctaaagatcgtgttagtgaaagatcttcagct

SEQ ID NO: 581287 - DNA, 120 bp, Artificial Sequence
  ENSG00000171988_36 (sequence is synthesized)
tctcacagggcagtgttcccagttcagtcatgtctgctgtaaatacgatgtgtaataccaaaacggatgtaatcacatctgctgccgatactaccagtgtttccagctggggtggttcag

SEQ ID NO: 581288 - DNA, 120 bp, Artificial Sequence
  ENSG00000171988_37 (sequence is synthesized)
aagtaatttcctctttatcaaataccattttggcctctacatcatcagaatgtgtatcttcaaaaagtgtcagtcagccagtggctcaaaaacaagaatgcaaggtcagcaccacagcac

SEQ ID NO: 581289 - DNA, 120 bp, Artificial Sequence
  ENSG00000171988_38 (sequence is synthesized)
cagttacattagccagtagtaagacaggaagtgttgttcaacccagttctgggttctcaggcacaactgattttatccatttaaaaaagcacaaggcagcattggctgcagctcagtata

SEQ ID NO: 581290 - DNA, 120 bp, Artificial Sequence
  ENSG00000171988_39 (sequence is synthesized)
aaagtagtaatgccagtgagactgaacctaatgctataaaaaatcagacactttcagcctcccttcctctggatagcactgtaatctgtagtacaattaacaaagcaaactctgtaggaa

SEQ ID NO: 581291 - DNA, 120 bp, Artificial Sequence
  ENSG00000171988_40 (sequence is synthesized)
atgggcaagcttcccagacaagtcaaccaaactaccatactaaactgaaaaaggcctggctcaccagacactcagaagaagataaaaatactaataaaatggaaaattcagggaattctg

SEQ ID NO: 581292 - DNA, 120 bp, Artificial Sequence
  ENSG00000171988_41 (sequence is synthesized)
tatcagaaattattaagccatgttctgtcaacttaatagcctctacatctagtgatatacaaaatagtgtagatagtaagatcatagttgataaatatgtaaaagatgataaagtcaaca

SEQ ID NO: 581293 - DNA, 120 bp, Artificial Sequence
  ENSG00000171988_42 (sequence is synthesized)
ggagaaaagccaaaagaacttatgaatctggctctgaaagtggagactcagatgaaagtgaaagcaagtcagagcaaaggactaaaagacaacctaagccaacttacaaaaagaagcaaa

SEQ ID NO: 581294 - DNA, 120 bp, Artificial Sequence
  ENSG00000171988_43 (sequence is synthesized)
atgatttgcaaaagagaaaaggtgaaatagaagaagatttgaaacccaatggagttctcagcaggagtgccaaagaaagaagtaaactgaagttgcaaagcaacagtaatactggcattc

SEQ ID NO: 581295 - DNA, 120 bp, Artificial Sequence
  ENSG00000171988_44 (sequence is synthesized)
ctcgttcagtattgaaagattggcgtaaagtcaagaagctgaagcaaactggggaatcctttttacaggatgactcctgctgtgagatagggcctaatttacaaaagtgtcgagaatgta

SEQ ID NO: 581296 - DNA, 120 bp, Artificial Sequence
  ENSG00000171988_45 (sequence is synthesized)
gacttattcgcagtaaaaaaggagaagaaccagctcactcaccagtattttgtagattttactactttagacggttgtcatttagtaaaaacggagtagttagaatagatggtttctctt

SEQ ID NO: 581297 - DNA, 120 bp, Artificial Sequence
  ENSG00000171988_46 (sequence is synthesized)
ctcctgaccaatatgatgatgaagctatgagtttgtggacacatgaaaattttgaagatgatgaactagatatagagacttctaaatatatcttggatataataggtgataagttctgtc

SEQ ID NO: 581298 - DNA, 120 bp, Artificial Sequence
  ENSG00000171988_47 (sequence is synthesized)
aattagtaacatctgaaaaaacagctttgtcctgggtgaaaaaggatgccaaaattgcctggaaaagagcagtgagaggagtccgggagatgtgtgatgcatgtgaagcaacattgttta

SEQ ID NO: 581299 - DNA, 120 bp, Artificial Sequence
  ENSG00000171988_48 (sequence is synthesized)
acattcactgggtctgccaaaaatgtggatttgtggtctgcttagattgttacaaggcaaaggaaaggaagagttctagagataaagaactatatgcttggatgaagtgtgtgaagggac

SEQ ID NO: 581300 - DNA, 120 bp, Artificial Sequence
  ENSG00000171988_49 (sequence is synthesized)
agcctcatgatcacaaacatttaatgccaacccaaattatacctggttctgttttgacagatcttctagatgccatgcacactcttagggaaaaatatggtattaaatcccattgtcatt

SEQ ID NO: 581301 - DNA, 120 bp, Artificial Sequence
  ENSG00000171988_50 (sequence is synthesized)
gtactaacaaacagaatttacaagttggaaattttcctacaatgaatggtgtatctcaagttttacagaatgttcttaatcacagtaataaaatttctctgtgcatgcctgagtctcagc

SEQ ID NO: 581302 - DNA, 120 bp, Artificial Sequence
  ENSG00000171988_51 (sequence is synthesized)
agcaaaatactcctccgaagtctgagaaaaatggtggcagcagcccagagagtgatgtaggcacagataacaagttaactcctccagaatcccagtcaccactgcactggttagcagatc

SEQ ID NO: 581303 - DNA, 120 bp, Artificial Sequence
  ENSG00000171988_52 (sequence is synthesized)
ttgcagagcaaaaagccagagaggaaaaaaaagaaaacaaagaacttacccttgaaaaccaaattaaagaagaaagagaacaagacaactctgaatctccaaatggcagaacatcacctc

SEQ ID NO: 581304 - DNA, 120 bp, Artificial Sequence
  ENSG00000171988_53 (sequence is synthesized)
ttgtgtcccagaataatgaacaaggctcaaccttacgggatttgctgactacaacagctggaaagctacgtgtggggtctacagatgctggcattgcctttgccccagtatattcaatgg

SEQ ID NO: 581305 - DNA, 120 bp, Artificial Sequence
  ENSG00000171988_54 (sequence is synthesized)
gagccccaagtagcaaaagtggacggactatgcctaacattcttgatgacataattgcttcagttgttgaaaacaaaattccaccaagtaaaacctccaagataaatgtaaaaccagagc

SEQ ID NO: 581306 - DNA, 120 bp, Artificial Sequence
  ENSG00000171988_55 (sequence is synthesized)
ttaaagaagagcctgaagaaagcataatatctgcagtggatgaaaataataaattatacagtgatataccacattcttggatctgtgagaagcatattttatggcttaaggattataaga

SEQ ID NO: 581307 - DNA, 120 bp, Artificial Sequence
  ENSG00000171988_56 (sequence is synthesized)
atagcagtaattggaagcttttcaaagaatgttggaaacaaggacagcctgcagtggtttctggtgtgcataagaaaatgaacattagcctatggaaggcggaatcaattagtcttgatt

SEQ ID NO: 581308 - DNA, 120 bp, Artificial Sequence
  ENSG00000171988_57 (sequence is synthesized)
ttggagaccaccaagctgatctcctgaactgcaaagatagcatcatttcaaatgccaatgttaaggaattctgggatggttttgaagaagtttcaaaacggcagaaaaacaagagtggag

SEQ ID NO: 581309 - DNA, 120 bp, Artificial Sequence
  ENSG00000171988_58 (sequence is synthesized)
aaacagttgttttaaaattgaaagactggccttcaggagaagacttcaagactatgatgccagcaagatacgaagatcttttaaaaagtctgccattgccagaatattgtaatccagaag

SEQ ID NO: 581310 - DNA, 120 bp, Artificial Sequence
  ENSG00000171988_59 (sequence is synthesized)
gaaaattcaatttggcctctcatttgccaggattttttgtacgtcctgatctaggacccaggttgtgcagtgcctatggtgtagttgctgctaaagatcatgatataggaacaacaaatc

SEQ ID NO: 581311 - DNA, 120 bp, Artificial Sequence
  ENSG00000171988_60 (sequence is synthesized)
tccatattgaagtttctgatgttgtaaatatactagtttatgttggcatagcaaaaggaaatggcattctctcaaaagcaggaattctcaagaaatttgaggaagaagatttggatgaca

SEQ ID NO: 581312 - DNA, 120 bp, Artificial Sequence
  ENSG00000171988_61 (sequence is synthesized)
ttttaaggaaaagattgaaggactcaagtgaaatacctggtgctctgtggcatatttatgctgggaaagatgttgacaagataagggaatttcttcaaaagatttcaaaagaacaaggcc

SEQ ID NO: 581313 - DNA, 120 bp, Artificial Sequence
  ENSG00000171988_62 (sequence is synthesized)
ttgaagttctaccagaacatgatccaatacgtgaccaaagttggtatgtgaacaaaaagctccgtcaaaggctgcttgaagaatatggagtcagaacctgtactcttattcagttccttg

SEQ ID NO: 581314 - DNA, 120 bp, Artificial Sequence
  ENSG00000171988_63 (sequence is synthesized)
gtgatgctattgttttgccagcgggagcacttcatcaggttcagaattttcacagctgtattcaggtaactgaagattttgtgtctccagaacatcttgtagagtcatttcatttaacac

SEQ ID NO: 581315 - DNA, 120 bp, Artificial Sequence
  ENSG00000171988_64 (sequence is synthesized)
aggaactgagacttttgaaggaagaaatcaattatgatgataaactacaggttaaaaatattttgtatcatgcagtcaaagaaatggtgagagccttgaagatacacgaggatgaagtag

SEQ ID NO: 581316 - DNA, 120 bp, Artificial Sequence
  ENSG00000171988_65 (sequence is synthesized)
aggatatggaagaaaattaagtgtgatccagtttgatatttttaggttgttgaactgggattacttaaccttgaatgatgatatgtatgcacactgactttaagcttcataaaaccatca

SEQ ID NO: 581317 - DNA, 120 bp, Artificial Sequence
  ENSG00000171988_66 (sequence is synthesized)
gtgccaagaaattctctttgtagtaattacttgttactgacaccacagcagtatagcatatgtcacagctcctgtgattcaatgttataaaacaagcagaattttaaaagcagcactata

SEQ ID NO: 581318 - DNA, 120 bp, Artificial Sequence
  ENSG00000171988_67 (sequence is synthesized)
tagctgttttgtattatagtgtatatgatgtttgtgaaaatgccagatttaaaatgatgtatttatttttggtaaaaaataaaaaattctatgctatattgttgatcaagtgtaaatgtg

SEQ ID NO: 581319 - DNA, 120 bp, Artificial Sequence
  ENSG00000171988_68 (sequence is synthesized)
accttgtacagtttactaaaattactgatatttttcactacattgagacagttactgtgagaataggacacaaacaccagctattgcctgcatctgggaaattgctgaatcgcacagcag

SEQ ID NO: 581320 - DNA, 120 bp, Artificial Sequence
  ENSG00000171988_69 (sequence is synthesized)
tcatgtcataatcagaaaattactgccaaataattgtaaaatttgtaaagtataaagtatataaagtagatactaaatacagacacttcaatattttgttgaagctattgactgtacaat

SEQ ID NO: 581321 - DNA, 120 bp, Artificial Sequence
  ENSG00000171988_70 (sequence is synthesized)
gaagctattgactgtacaattaaacattttcaaaaggtgtaatttatttaaaattgtctcattttggtaaaatttatgtgaacttttaaagctaaatattaaacttaatatgctatgtaa

SEQ ID NO: 581322 - DNA, 120 bp, Artificial Sequence
  ENSG00000171988_71 (sequence is synthesized)
aatgatgtatttttttaaaacattggcttgcttttgttaaagtgcaagtgttacatatggctttgtacattaaagttgaaaggggttttacattttccattaaaaggactttatcaaaaa

SEQ ID NO: 581323 - DNA, 120 bp, Artificial Sequence
  ENSG00000171988_72 (sequence is synthesized)
cctgacccagatcggaggatgcagtagtgcttcagctgcaggatttcttagtcgttaacaccacagtgctgatgacaaagagcgagttgtaatcctcatcactgccagggctgagccaga

SEQ ID NO: 581324 - DNA, 120 bp, Artificial Sequence
  ENSG00000171988_73 (sequence is synthesized)
gcagacagaaaatcgtcatttgctcgttggagacttgttaggttacagctcctgcttcgttctgtggtcttggcttttcttcctatacaatgacgccgctgcaagtgagctcagaaatgc

SEQ ID NO: 581325 - DNA, 120 bp, Artificial Sequence
  ENSG00000171988_74 (sequence is synthesized)
ttggtttgagagccatttgcctgtgatttttgaagactaaagaagtatttacactagatactcttccagaacaaaatagaaatttcagcaaatacttactgacctttaaagccttgttgt

SEQ ID NO: 581326 - DNA, 120 bp, Artificial Sequence
  ENSG00000171988_75 (sequence is synthesized)
tagaagattagctacaaagatagaggtcactaataataatgactggtaatttttagaaaggctatcattatatccattttgtgtcagtgtttttataaaatcaggaaatggtggaactgt

SEQ ID NO: 581327 - DNA, 120 bp, Artificial Sequence
  ENSG00000171988_76 (sequence is synthesized)
ttttcctgacttgtttcagaaccaaacatctaaagcatatcattgacattttatttcattatttttatttttttctttttctctttggctgtgactctagccaactatgaaacattttat

SEQ ID NO: 581328 - DNA, 120 bp, Artificial Sequence
  ENSG00000171988_77 (sequence is synthesized)
ctcaagtgagtaaaaatctctggttattcaaataaaatctgtggttaaattagtcaactttgatatttatttgaaatttggtttaggacttatgtatgaattaggtttgctgtgtttctg

SEQ ID NO: 581329 - DNA, 120 bp, Artificial Sequence
  ENSG00000171988_78 (sequence is synthesized)
tgtaaattttttgtatctatactactaattgaattattgaagaaagtgtttaaaaatgtaattgttctacctttgtaggttttacagaatgttcttaatcacagtaataaaatttctctg

SEQ ID NO: 581330 - DNA, 120 bp, Artificial Sequence
  ENSG00000171988_79 (sequence is synthesized)
cccttctctcagtgtgccctaagccaagtactcgttctcatttgggtgtctgcactgttggaagctactgcactgtgtttccacgcagacagagtacagtgggaaaggctttctccagct

SEQ ID NO: 581331 - DNA, 120 bp, Artificial Sequence
  ENSG00000171988_80 (sequence is synthesized)
ttcaacaatataagaccattacataatttttacttcaaagtagatgggagtttttgttgaaagtcaaaaccctgtttctcttgctcctctttgaaagtctgttaacattttgagggtttt

SEQ ID NO: 581332 - DNA, 120 bp, Artificial Sequence
  ENSG00000171988_81 (sequence is synthesized)
gaatggtgatttgttcccagttggtagtgtgcctccattccctgttaataaaagactgatctgttcttgagccagatattagttgggtggcgaaaagtagctatctggagtcgcgggatg

SEQ ID NO: 581333 - DNA, 120 bp, Artificial Sequence
  ENSG00000171988_82 (sequence is synthesized)
taaaaacaaatatttcatggaaacgtctaaagaaggtaggatctttattttctttgaatctgatagatatttttggctgctgacctagggaatgattctactctatcacatctgatacta

SEQ ID NO: 581334 - DNA, 120 bp, Artificial Sequence
  ENSG00000171988_83 (sequence is synthesized)
tgatacttactgagtagactcagattttgagtaatcataccttgactgtagttggcatatactctgaaagaaatttatatatcaacctgaaataattggttgaaaccctttgctcaggta

SEQ ID NO: 581335 - DNA, 120 bp, Artificial Sequence
  ENSG00000171988_84 (sequence is synthesized)
ctttttaaacttcgtaattatggaaatttgttttaagaaatgttcagtgctgatacatcatctttctgaaaggatgtaagttctgtctgtgatcaatgtgaagtaaaagagttacagcct

SEQ ID NO: 581336 - DNA, 120 bp, Artificial Sequence
  ENSG00000171988_85 (sequence is synthesized)
tttttgtaccattttatccctgaatacttacctgtattttaatctgaagtatgatcatttgtgccttctaaagcagattatttaactgattaaagagtcccttgaaattgatttttcaag

SEQ ID NO: 581337 - DNA, 120 bp, Artificial Sequence
  ENSG00000171988_86 (sequence is synthesized)
tgttagaaggttagccatgtaaaggtatttatacttacctcaaaaaaggatcaataaatgtttatgaaatccatacatatgaatggtttggcttttggtaaaaaaaaaaaaaaaaaaaaa

SEQ ID NO: 581338 - DNA, 120 bp, Artificial Sequence
  ENSG00000171988_87 (sequence is synthesized)
ggttgaataatcaaaactgtaatagatggaagagaatggagaaaaatggaagaaatttaaagggcacaagaaaacctccgttattcccaattataatacaaaatattgtaagaaaaaaat

SEQ ID NO: 581339 - DNA, 120 bp, Artificial Sequence
  ENSG00000171989_0 (sequence is synthesized)
agagtgctgaaggtcctgccaacggctctcttggcgtctcaacgttcggatcagcagcttttttccattctctctctccacttcttcagtgagcagccatgagttggactgtgcctgttg

SEQ ID NO: 581340 - DNA, 120 bp, Artificial Sequence
  ENSG00000171989_1 (sequence is synthesized)
tgcgggccagccagagagtgagctcggtgggagcgaatttcctatgcctggggatggccctgtgtccgcgtcaagcaacgcgcatcccgctcaacggcacctggctcttcacccccgtga

SEQ ID NO: 581341 - DNA, 120 bp, Artificial Sequence
  ENSG00000171989_2 (sequence is synthesized)
gcaagatggcgactgtgaagagtgagcttattgagcgtttcacttccgagaagcccgttcatcacagtaaggtctccatcataggaactggatcggtgggcatggcctgcgctatcagca

SEQ ID NO: 581342 - DNA, 120 bp, Artificial Sequence
  ENSG00000171989_3 (sequence is synthesized)
tcttattaaaaggcttgagtgatgaacttgcccttgtggatcttgatgaagacaaactgaagggtgagacgatggatcttcaacatggcagccctttcacgaaaatgccaaatattgttt

SEQ ID NO: 581343 - DNA, 120 bp, Artificial Sequence
  ENSG00000171989_4 (sequence is synthesized)
gtagcaaagattactttgtcacagcaaactccaacctagtgattatcacagcaggtgcacgccaagaaaagggagaaacgcgccttaatttagtccagcgaaatgtggccatcttcaagt

SEQ ID NO: 581344 - DNA, 120 bp, Artificial Sequence
  ENSG00000171989_5 (sequence is synthesized)
taatgatttccagtattgtccagtacagcccccactgcaaactgattattgtttccaatccagtggatatcttaacttatgtagcttggaagttgagtgcatttcccaaaaaccgtatta

SEQ ID NO: 581345 - DNA, 120 bp, Artificial Sequence
  ENSG00000171989_6 (sequence is synthesized)
ttggaagcggctgtaatctggatactgctcgttttcgtttcttgattggacaaaagcttggtatccattctgaaagctgccatggatggatcctcggagagcatggagactcaagtgttc

SEQ ID NO: 581346 - DNA, 120 bp, Artificial Sequence
  ENSG00000171989_7 (sequence is synthesized)
ataaagatcctgagcaatggaaaaatgtccacaaagaagtgactgcaactgcctatgagattattaaaatgaaaggttatacttcttgggccattggcctatctgtggccgatttaacag

SEQ ID NO: 581347 - DNA, 120 bp, Artificial Sequence
  ENSG00000171989_8 (sequence is synthesized)
aaagtattttgaagaatcttaggagaatacatccagtttccaccataattaagggcctctatggaatagatgaagaagtattcctcagtattccttgtatcctgggagagaacggtatta

SEQ ID NO: 581348 - DNA, 120 bp, Artificial Sequence
  ENSG00000171989_9 (sequence is synthesized)
ccaaccttataaagataaagctgacccctgaagaagaggcccatctgaaaaaaagtgcaaaaacactctgggaaattcagaataagcttaagctttaaagttgcctaaaactaccattcc

SEQ ID NO: 581349 - DNA, 120 bp, Artificial Sequence
  ENSG00000171989_10 (sequence is synthesized)
gaaattattgaagagatcatagatacaggattatataacgaaattttgaataaacttgaattcctaaaagatggaaacaggaaagtaggtagagtgattttcctatttatttagtcctcc

SEQ ID NO: 581350 - DNA, 120 bp, Artificial Sequence
  ENSG00000171989_11 (sequence is synthesized)
agctcttttattgagcatccacgtgctggacgatacttatttacaattcctaagtatttttggtacctctgatgtagcagcacttgccatgttatatatatgtagttggcatttggttcc

SEQ ID NO: 581351 - DNA, 120 bp, Artificial Sequence
  ENSG00000171989_12 (sequence is synthesized)
caaaaagtaggatgtaggtatttattgtgttctagaaattccgactcttttcattagatatatgctatttctttcattcttgctggtttatacctatgttcatttatatgctgtaaaaaa

SEQ ID NO: 581352 - DNA, 120 bp, Artificial Sequence
  ENSG00000171989_13 (sequence is synthesized)
gtagtagcttcttctacaatgtaaaaataaatgtacatacaaaaaaatgcagtagtatatacaatcttttgttttgcttcctttgatagttaataaattccgtttgttgaatcaataaaa

SEQ ID NO: 581353 - DNA, 120 bp, Artificial Sequence
  ENSG00000171992_0 (sequence is synthesized)
gataaagagctgggctgagtcatctgtggaggagaaaagtcacatccagctccttcatgttgctgccgatgtgggattttcctggcttcgtcagccaagcaattggctgcctttgccgga

SEQ ID NO: 581354 - DNA, 120 bp, Artificial Sequence
  ENSG00000171992_1 (sequence is synthesized)
ggctttgagaaccaaggcttgaaggccggcaggagcatccagggggaagcttggcttcagggaggacctagcagacgttgggccggagcactagcctcacggagaaggatctgaaagaag

SEQ ID NO: 581355 - DNA, 120 bp, Artificial Sequence
  ENSG00000171992_2 (sequence is synthesized)
ccaaggcgcggagccagcagattgcagcccagctgaccacccctcccagctccaattcccgtggcgtccagctcttcaacaggcgccggcagagggtgaacgagttcaccttggagagcc

SEQ ID NO: 581356 - DNA, 120 bp, Artificial Sequence
  ENSG00000171992_3 (sequence is synthesized)
acggccagaggggacagaagcccagccaggagtccctcagagtgctcccttcaagcctcccaggccatgcaccggggctcagcctgagttccacctcgctgccggagccaggccctccac

SEQ ID NO: 581357 - DNA, 120 bp, Artificial Sequence
  ENSG00000171992_4 (sequence is synthesized)
ggcaccccagtccccagagccccgacagaggggtccctggccacagcatggaggggtactcagaggaggctagcttgctgcggcacctggagaaggtggccagtgaggaggaagaggtac

SEQ ID NO: 581358 - DNA, 120 bp, Artificial Sequence
  ENSG00000171992_5 (sequence is synthesized)
cactggtggtttatctaaaggagaatgcagcactgctgacagccaatgggctgcacctgtcccaaaaccgagaggcccagcagtcctcaccggccccacctccagctgaggtccacagcc

SEQ ID NO: 581359 - DNA, 120 bp, Artificial Sequence
  ENSG00000171992_6 (sequence is synthesized)
cagctgcagatgtcaaccaaaaccttgcctcgcccagtgccacgctcaccacaccaacttctaacagcagccacaatccgccagccaccgatgtcaatcagaacccaccggcaactgttg

SEQ ID NO: 581360 - DNA, 120 bp, Artificial Sequence
  ENSG00000171992_7 (sequence is synthesized)
tcccacagagcctgccactttctagcatccaacagaattcctcagaggcccaactcccatctaatggcacagggcctgcttccaaacccagcaccctgtgtgctgatgggcaaccccagg

SEQ ID NO: 581361 - DNA, 120 bp, Artificial Sequence
  ENSG00000171992_8 (sequence is synthesized)
caccggctgaggaggtgagatgcagcacactcctaattgacaaggtatcaactccagctaccaccaccagcaccttctccagagaagctacgctcatccccagctccaggcccccagcct

SEQ ID NO: 581362 - DNA, 120 bp, Artificial Sequence
  ENSG00000171992_9 (sequence is synthesized)
cagatttcatgtccagctccctgctcattgacatccagcccaacaccctagtggtgtcagcagatcaagagatgtctgggcgagcagctgccaccacgcccaccaaggtctacagtgagg

SEQ ID NO: 581363 - DNA, 120 bp, Artificial Sequence
  ENSG00000171992_10 (sequence is synthesized)
tccacttcacactggccaagcccccatcagtggtcaacaggacggccaggccttttgggatccaggcgccagggggcaccagccagatggagaggagccccatgctagagagacgacatt

SEQ ID NO: 581364 - DNA, 120 bp, Artificial Sequence
  ENSG00000171992_11 (sequence is synthesized)
ttggggagaaggccccggctccccagccccccagtttgccagacaggagcccccggccacagagacacataatgtcccgcagccccatggtggaaaggaggatgatggggcagcgaagcc

SEQ ID NO: 581365 - DNA, 120 bp, Artificial Sequence
  ENSG00000171992_12 (sequence is synthesized)
cggcctcagagagacgccccttggggaacttcactgcaccccccacctacactgagaccttgtccacagcccctctggcttcctgggtgaggtctcctccctcatattctgtcctgtatc

SEQ ID NO: 581366 - DNA, 120 bp, Artificial Sequence
  ENSG00000171992_13 (sequence is synthesized)
ccagctccgaccccaagtcttctcatctgaagggccaggcggttcctgccagcaagacgggcattctggaggagtcgatggcccgccggggcagccgcaaatccatgtttactttcgtgg

SEQ ID NO: 581367 - DNA, 120 bp, Artificial Sequence
  ENSG00000171992_14 (sequence is synthesized)
agaagcccaaggtgaccccgaatccagacttgctggatctggtacagacagcggatgagaagcggcggcagagggaccagggggaggtaggcgtggaggaggagcccttcgcactggggg

SEQ ID NO: 581368 - DNA, 120 bp, Artificial Sequence
  ENSG00000171992_15 (sequence is synthesized)
ccgaggcctccaacttccagcaggagccagcacctcgtgacagggccagccccgcggcggcggaggaggtggtaccagagtgggcctcctgcctcaagtcaccccgcatccaggccaagc

SEQ ID NO: 581369 - DNA, 120 bp, Artificial Sequence
  ENSG00000171992_16 (sequence is synthesized)
cgaagcccaaacccaaccagaacctctccgaggcctctgggaagggagctgagctctacgcccgccgccagtcacggatggagaaatatgtcatcgagtcttcaagccacacgccagagc

SEQ ID NO: 581370 - DNA, 120 bp, Artificial Sequence
  ENSG00000171992_17 (sequence is synthesized)
tggcccgctgcccatcacctaccatgtccctgccttcctcctggaaataccccactaacgcccccggggccttccgagtggcatcccgaagcccagcccggaccccgcctgcctccctct

SEQ ID NO: 581371 - DNA, 120 bp, Artificial Sequence
  ENSG00000171992_18 (sequence is synthesized)
accatggctacctgcctgagaacggggtcctgcgcccagagcccaccaagcagccgccataccagctgcgcccctcgctctttgtcctctcacctatcaaggagcctgccaaggtctcac

SEQ ID NO: 581372 - DNA, 120 bp, Artificial Sequence
  ENSG00000171992_19 (sequence is synthesized)
caagagctgcctcgcccgccaagcccagctccttggacctggtgcccaacctgcccaagggggctctccctccatctcctgccctgcctcggccctcgcgctcctcaccgggcctctaca

SEQ ID NO: 581373 - DNA, 120 bp, Artificial Sequence
  ENSG00000171992_20 (sequence is synthesized)
cctcccccggccaggacagcctgcagcccactgccgtgagccctccttacggcggtgacatctcccccgtgtctccctccagggcgtggtctccccgagccaagcaggcccccaggccct

SEQ ID NO: 581374 - DNA, 120 bp, Artificial Sequence
  ENSG00000171992_21 (sequence is synthesized)
ccttctctacccggaacgccgggatcgaggctcaggaccgccgggagagcctgcccacctccccaccctggacgccgggcgcgtcccggccccccagcagcctagacggctgggtgagcc

SEQ ID NO: 581375 - DNA, 120 bp, Artificial Sequence
  ENSG00000171992_22 (sequence is synthesized)
gtggagcgagcgctcggtgtccccgctgcgacctgagaccgaggcgcggccccccagccgccagctgcaggcgcttctggcgcgaaacatcatcaatgcggcccggcgcaagagcgcctc

SEQ ID NO: 581376 - DNA, 80 bp, Artificial Sequence
  ENSG00000171992_23 (sequence is synthesized)
tcaatgcggcccggcgcaagagcgcctccccgcggtcggcgggcgccgagaacccgcggcccttctccccgccgagggcg

SEQ ID NO: 581377 - DNA, 120 bp, Artificial Sequence
  ENSG00000171992_24 (sequence is synthesized)
ctcggctgctgtgccgggggcagccttcgcgcccatcccgcggagcccgttgcccgccggtccttcgtcctgcaccagtccccggagcccgctgcccgcgcctcccaggcccttcctcta

SEQ ID NO: 581378 - DNA, 120 bp, Artificial Sequence
  ENSG00000171992_25 (sequence is synthesized)
ccgccgctcgcccacggactccgacgtgtccctcgactccgaggactccggggctaagtctccaggcatcctgggctacaatatctgtccccgcgggtggaatggcagccttcggctcaa

SEQ ID NO: 581379 - DNA, 120 bp, Artificial Sequence
  ENSG00000171992_26 (sequence is synthesized)
gcgtggcagcctccccgccgaggcctcctgcaccacctagagccccacccccgaccccaccccgggagggcagagccagaagaaggctcattagacctgggggacccaaagggtctggcc

SEQ ID NO: 581380 - DNA, 120 bp, Artificial Sequence
  ENSG00000171992_27 (sequence is synthesized)
tctttgggcagccccagagatgaggggtcagcagaggagagctctggggttggggatgggttagggacgcaagcttgagttctagcccttgctctcattcagctgttgtgtgaccctggg

SEQ ID NO: 581381 - DNA, 120 bp, Artificial Sequence
  ENSG00000171992_28 (sequence is synthesized)
taagacccttccttgtttgaccctcagctttcccatctgtttaatggtggctttggccaaggcaatccacaaacgtcaaaattccccttcccatcagtacacacaccgatgcacacacac

SEQ ID NO: 581382 - DNA, 85 bp, Artificial Sequence
  ENSG00000171992_29 (sequence is synthesized)
agtgccttggatgaggcggggcagtgtgtatatggacccctggacttgctaccttcagggttccatactcgtccctcccctcctg

SEQ ID NO: 581383 - DNA, 120 bp, Artificial Sequence
  ENSG00000171992_30 (sequence is synthesized)
ttgctaccttcagggttccatactcgtccctcccctcctggctctgctgtctggagtctggcaagcggggtgtgttcagaaggtcctaggcctgtgtcgcatgtccaggcactggcctga

SEQ ID NO: 581384 - DNA, 120 bp, Artificial Sequence
  ENSG00000171992_31 (sequence is synthesized)
ccatccggctccctggcaccaagtcccaggcaggagcagctgttttccatcccttcccagacaagctctatttttatcacaatgacctttagagaggtctcccaggccagctcaaggtgt

SEQ ID NO: 581385 - DNA, 120 bp, Artificial Sequence
  ENSG00000171992_32 (sequence is synthesized)
cccactatcccctctggagggaagaggcaggaaaattctccccgggtccctgtcatgctactttctccatcccagttcagactgtccaggacatcttatctgcagccataagagaattat

SEQ ID NO: 581386 - DNA, 120 bp, Artificial Sequence
  ENSG00000171992_33 (sequence is synthesized)
aaggcagtgatttcccttaggcccaggacttgggcctccagctcatctgttccttctgggcccattcatggcaggttctgggctcaaagctgaactggggagagaagagatacagagcta

SEQ ID NO: 581387 - DNA, 120 bp, Artificial Sequence
  ENSG00000171992_34 (sequence is synthesized)
ccatgtgactttacctgattgccctcagtttggggttgcttattgggaaagagagagacaaagagttacttgttacgggaaatatgaaaagcatggccaggatgcatagaggagattcta

SEQ ID NO: 581388 - DNA, 120 bp, Artificial Sequence
  ENSG00000171992_35 (sequence is synthesized)
gcaggggacaggattggctcagatgacccctgagggctcttccagtcttgaaatgcattccatgatattaggaagtcgggggtgggtggtggtggtgggctagttgggcttgaatttagg

SEQ ID NO: 581389 - DNA, 120 bp, Artificial Sequence
  ENSG00000171992_36 (sequence is synthesized)
ggccgatgagcttgggtacgtgagcagggtgttaagttagggtctgcctgtatttctggtccccttggaaatgtccccttcttcagtgtcagacctcagtcccagtgtccatatcgtgcc

SEQ ID NO: 581390 - DNA, 120 bp, Artificial Sequence
  ENSG00000171992_37 (sequence is synthesized)
cagaaaagtagacattatcctgccccatcccttccccagtgcactctgacctagctagtgcctggtgcccagtgacctgggggagcctggctgcaggccctcactggttccctaaacctt

SEQ ID NO: 581391 - DNA, 120 bp, Artificial Sequence
  ENSG00000171992_38 (sequence is synthesized)
ggtggctgtgattcaggtccccaggggggactcagggaggaatatggctgagttctgtagtttccagagttggctggtagagccttctagaggttcagaatattagcttcaggatcagct

SEQ ID NO: 581392 - DNA, 120 bp, Artificial Sequence
  ENSG00000171992_39 (sequence is synthesized)
gggggtatggaattggctgaggatcaaacgtatgtaggtgaaaggataccaggatgttgctaaaggtgagggacagtttgggtttgggacttaccggggtgatgttagatctggaacccc

SEQ ID NO: 581393 - DNA, 120 bp, Artificial Sequence
  ENSG00000171992_40 (sequence is synthesized)
caagtgaggctggagggagttaaggtcagtatggaagatagggttgggacagggtgctttggaatgaaagagtgaccttagagggctccttgggcctcaggaatgctcctgctgctgtga

SEQ ID NO: 581394 - DNA, 120 bp, Artificial Sequence
  ENSG00000171992_41 (sequence is synthesized)
agatgagaaggtgctcttactcagttaatgatgagtgactatatttaccaaagcccctacctgctgctgggtcccttgtagcacaggagactggggctaagggcccctcccagggaaggg

SEQ ID NO: 581395 - DNA, 120 bp, Artificial Sequence
  ENSG00000171992_42 (sequence is synthesized)
acaccatcaggcctctggctgaggcagtagcatagaggatccatttctacctgcatttcccagaggactagcaggaggcagccttgagaaaccggcagttcccaagccagcgcctggctg

SEQ ID NO: 581396 - DNA, 120 bp, Artificial Sequence
  ENSG00000171992_43 (sequence is synthesized)
ttctctcattgtcactgccctctccccaacctctcctctaacccactagagattgcctgtgtcctgcctcttgcctcttgtagaatgcagctctggccctcaataaatgcttcctgcatt

SEQ ID NO: 581397 - DNA, 120 bp, Artificial Sequence
  ENSG00000171992_44 (sequence is synthesized)
agagcgcgagtgaggagcaggcgggcaggcggcgggcagccgggcagccgtggacagaggcccgggcacagccagttgctgtgccagagggtgtggtgtccggctacagattgccccaaa

SEQ ID NO: 581398 - DNA, 120 bp, Artificial Sequence
  ENSG00000171992_45 (sequence is synthesized)
gcggcctcacaccagagacgggttaagaagagggattggaggtccaccactccactagcccaggaaggacttatctttcgtctcagccagacctcaccccaattctgtgaatcagcggag

SEQ ID NO: 581399 - DNA, 120 bp, Artificial Sequence
  ENSG00000171992_46 (sequence is synthesized)
gaaggcaaaagtgcagagagtcagaggaggctgtgtaaggagcagagaccagggctcacacagctggccccagcccaggccctggcccaggcccaggagcctgcttccctgcatcgctga

SEQ ID NO: 581400 - DNA, 120 bp, Artificial Sequence
  ENSG00000171992_47 (sequence is synthesized)
ggaagaacagcaccatgctgggtcctcacctcccacctccgccccttgcacccagcgaagggaggcctaccccctgcgccttccagatccctgatggaagctacaggtgtctggctctgg

SEQ ID NO: 581401 - DNA, 120 bp, Artificial Sequence
  ENSG00000171992_48 (sequence is synthesized)
aagccgaggagagcagcggtgaggagggcctgcagggagaggtggggcctaccgacctggaagaggatgagggggtcagcaggagtggggacgactctgcctgcagagtcacccagggga

SEQ ID NO: 581402 - DNA, 120 bp, Artificial Sequence
  ENSG00000171992_49 (sequence is synthesized)
caccgcagctgcccaaagccctgggcatccaaccacccagctgctccagagaggaacaaggggcgtcccagcacgacgacagggccagccaggactgggatgtagtgaaggccgggcaga

SEQ ID NO: 581403 - DNA, 120 bp, Artificial Sequence
  ENSG00000171992_50 (sequence is synthesized)
ggatcgaggctcaggtgtggaagccttccttctgcttcaagtaacgaaccccacgggggtcccactgccggtcaagttcccctccttgagggccagatggagagcagatgtggcaggaaa

SEQ ID NO: 581404 - DNA, 120 bp, Artificial Sequence
  ENSG00000171992_51 (sequence is synthesized)
tggcacagagctgagtgaggagaatggggagtccatggttcaaggtcagatgcggccaccagctggctttgtgaccttgggcgagtcgcctcccctctctgagctgaagccgcccctccc

SEQ ID NO: 581405 - DNA, 120 bp, Artificial Sequence
  ENSG00000171992_52 (sequence is synthesized)
ctactacaacaggggtcggactccatgtctgagcggggaggagggtcatggagagagaactgtctggcagccctgatgcggtagaggggcatcctctggcctttgtgagctgtagggatg

SEQ ID NO: 581406 - DNA, 120 bp, Artificial Sequence
  ENSG00000171992_53 (sequence is synthesized)
gccgagggtctgcctcctcagctgccccaggggggcctccctcctgaggctcaagctcctggcgtctttcttcctgttgctggattctcacctccatgggcctgtctcttctgcctctgc

SEQ ID NO: 581407 - DNA, 120 bp, Artificial Sequence
  ENSG00000171992_54 (sequence is synthesized)
cttctggacaccgtttcctctccgctgcttcagagagctttgcctcgcctccgcctgcgctcccctccagggtccttctgctggctgcggactcggcccaccactgctgtctgacgcttt

SEQ ID NO: 581408 - DNA, 120 bp, Artificial Sequence
  ENSG00000171992_55 (sequence is synthesized)
tcttcctgccccctctgaggcctggctctgttttagggagatcactgggcccaggcctcagccccagttctacctggcttgctgtcaccgctctaggggtgggggacgtcccaggggatc

SEQ ID NO: 581409 - DNA, 120 bp, Artificial Sequence
  ENSG00000171992_56 (sequence is synthesized)
cccaggagaaggagagccctgtagggggctgtgcagatgtgggtgtgccacagggagggtggcccctagccatgtatccattggctgttttggcttcagattcaaccaagatctgcctga

SEQ ID NO: 581410 - DNA, 120 bp, Artificial Sequence
  ENSG00000171992_57 (sequence is synthesized)
ctaaaagaagccacctcagcgcagtggaacggggcccagggggaggcaggagaggagggttccggtcccatgtcaccttctcatttgctgtgtgactttggcccactcacattctctttg

SEQ ID NO: 581411 - DNA, 120 bp, Artificial Sequence
  ENSG00000171992_58 (sequence is synthesized)
ggcctcagttttatcatttatacaaggagggcttttctagctgtaacaatctgtgaggattgagaggataggctggtgctttgaagaaaggccttgtaagtgacaagacagtcccctggg

SEQ ID NO: 581412 - DNA, 120 bp, Artificial Sequence
  ENSG00000171992_59 (sequence is synthesized)
aagaaagagaaaggaaatgggctattgccaaaggacaggtggcgttagatggctgtgagggtgacctggtgagggaagggttggaatgagctgctgcaggaggccaagggatgcctgggc

SEQ ID NO: 581413 - DNA, 120 bp, Artificial Sequence
  ENSG00000171992_60 (sequence is synthesized)
tgggctgggctgggctggcttaggctcaggattgcctggggacagtaggagcatggcaggagctggggcaggtgcatagcagtgcagtgggaagggacagaggagatcttagaattttga

SEQ ID NO: 581414 - DNA, 120 bp, Artificial Sequence
  ENSG00000171992_61 (sequence is synthesized)
ggaaaatctgggacttgagacctggattctaacagaccaactgcatgtgtgtctgtaggtctcagtttccacattcatacagtgagggtgttaagtcaggtagctggagacttcccatcg

SEQ ID NO: 581415 - DNA, 120 bp, Artificial Sequence
  ENSG00000171992_62 (sequence is synthesized)
cctctgacacttttggaggtgatatgatacagcccccgaccaaaccaggctttgtggggggtgagagaatacagacacaagtggcaggattcagatggaagcttcgcaaggctgggggcc

SEQ ID NO: 581416 - DNA, 120 bp, Artificial Sequence
  ENSG00000171992_63 (sequence is synthesized)
gaggaccacccacttctctttcccagccctagttctgggttccccagtggggcaaggggtggtggaggcagtgcccatgctgggctgagcctgcagtttttgtgagctctgggcttgtct

SEQ ID NO: 581417 - DNA, 120 bp, Artificial Sequence
  ENSG00000171992_64 (sequence is synthesized)
ccatgggaacaggggtgccttcttagtgagctcatttcacacagatcgagggggtatgcgtgggggagttgtgagtgagctcagctccttcaggcctggcctctcccagaacagagtgaa

SEQ ID NO: 581418 - DNA, 120 bp, Artificial Sequence
  ENSG00000171992_65 (sequence is synthesized)
gcccctgccctggacccctgctcccttctacccttgagggccaccaatggaagagcccgcccttcattctgcagctcctgcggccaggctgagctctgcccccaactttgttttctctca

SEQ ID NO: 581419 - DNA, 120 bp, Artificial Sequence
  ENSG00000171992_66 (sequence is synthesized)
tgttctcaatacactctgcctcaaatccgtcttgcttctttctttcttccgtgctgctaggggtcagggttcccttcctcctgcctgattctagcctgggaagtggagtgggcctgctca

SEQ ID NO: 581420 - DNA, 120 bp, Artificial Sequence
  ENSG00000171992_67 (sequence is synthesized)
attactgtgtgtgaaagtgtggctgtgtcctgcgtgctgcctgcacctgccgtgtgtctggttctgcactggtacagacgtgtgctgggttggaaatgagggcttcctctctacagcact

SEQ ID NO: 581421 - DNA, 120 bp, Artificial Sequence
  ENSG00000171992_68 (sequence is synthesized)
cagggagccagaaccctgtgcaaatcgcaaccttttgttctttccttccctcagagtttggccaaaaatactttagaggatttttggggaaaatgcactacctcttctcgttgaggtttg

SEQ ID NO: 581422 - DNA, 120 bp, Artificial Sequence
  ENSG00000171992_69 (sequence is synthesized)
tttgggttctttacaagtggaatagaaattcctctagccagcattcgctctccagttccctcaggtcccctccctgctccccattatctaaatttggccatttcccacatttgccattgt

SEQ ID NO: 581423 - DNA, 120 bp, Artificial Sequence
  ENSG00000171992_70 (sequence is synthesized)
tttcactgtctggatcctaaaagcatggagtttctgcccctggtggggaggaaagaactgccatcaagggtcaggagagctgggttctagccccaggtctgcatctgattcgtgtgtgac

SEQ ID NO: 581424 - DNA, 120 bp, Artificial Sequence
  ENSG00000171992_71 (sequence is synthesized)
ctcagacaacctcttccaatctctgggcctcagtttccccttctgtgcagtgaaaggattacagaaggaggtcagagaccatttggtctccgacagtccaggtttgactgtgttctactt

SEQ ID NO: 581425 - DNA, 120 bp, Artificial Sequence
  ENSG00000171992_72 (sequence is synthesized)
atgtattcaccccacacatgtgccctgctttgggtctggggttgggttgagtggatgctactttttgaattttcacccaccgcattcccaaggagctctggtgtgcacggtgcattgagc

SEQ ID NO: 581426 - DNA, 120 bp, Artificial Sequence
  ENSG00000171992_73 (sequence is synthesized)
tctctgtcagaaagtgaacagttctgatttcctgcagccttttcgtactgtgcacacccccgactcaaaaacatacacacagagtcagtgcccaggcatggctgttagggtgaggtcagg

SEQ ID NO: 581427 - DNA, 120 bp, Artificial Sequence
  ENSG00000171992_74 (sequence is synthesized)
ctctggcccatctccagatgatggggatctgcttaccactgccctcaacattcaatcccgtttgagcccttctgttttgtagtcttggctgaattgttatttcttccacttgttggcctc

SEQ ID NO: 581428 - DNA, 120 bp, Artificial Sequence
  ENSG00000171992_75 (sequence is synthesized)
agcattccccttgtggccaccaaaggcagaaacaatgctttagagatttttaggtagttatcatagctctcctgtgcagcctactctcctggctgaagaccccaggttccgctgccttgg

SEQ ID NO: 581429 - DNA, 120 bp, Artificial Sequence
  ENSG00000171992_76 (sequence is synthesized)
gtggttattgactggcttgggtcatgaactctaggccctacctccctgctcagggtggcactgtggtcaggtgttgggtcatgccagagcccaccctgatttggcatttggccctagccc

SEQ ID NO: 581430 - DNA, 120 bp, Artificial Sequence
  ENSG00000171992_77 (sequence is synthesized)
tcctcttctagccctggagctgggaccttcctcccagctcctctccctaaactgtggggtctgccttctgcggccagcctgactgggatgttccactggcacagagaagctcccagtgtc

SEQ ID NO: 581431 - DNA, 120 bp, Artificial Sequence
  ENSG00000171992_78 (sequence is synthesized)
tctggctcatgtatacacaattctgaccctgggaagaaaacagtgggatcccaggctgagccttaactttcagcttgatgactgggagcttggatgtccctagggagtctctaagggtca

SEQ ID NO: 581432 - DNA, 120 bp, Artificial Sequence
  ENSG00000171992_79 (sequence is synthesized)
ctccagcattagtatcccatgaaaaatgtcctgctcaggctgttgtataacattcttctttaggttaaagggctccagtttggagtctgggctcatctagcagctgctacattctgtttg

SEQ ID NO: 581433 - DNA, 120 bp, Artificial Sequence
  ENSG00000171992_80 (sequence is synthesized)
gataaaacatacaattggtgtctatttcctttggattgggaggaattagaagactctcagttggatgagaggatgactggcttggttatggctgatcactgattggatgaaagaataaat

SEQ ID NO: 581434 - DNA, 120 bp, Artificial Sequence
  ENSG00000171992_81 (sequence is synthesized)
ctttggatggttctagattttgatcgggtaggaagcatggaatggactggctagctctgaactctggtggatgactgctagtgaatttggattggattaaatggcaaggtggactggtta

SEQ ID NO: 581435 - DNA, 80 bp, Artificial Sequence
  ENSG00000171992_82 (sequence is synthesized)
tggcgcggggcgggggtggcggggacctcggggcggggcgcgctgacggacgcggccagtgccacgctcaccacaccaac

SEQ ID NO: 581436 - DNA, 120 bp, Artificial Sequence
  ENSG00000172000_0 (sequence is synthesized)
gagtgaccacaggtgtccccgtcgtgctcacctgcaccggctgcgaggagcagggagctcctcaaagagctcaggaacggacaggacatggacacagtggtctttgaagacgtggttgtg

SEQ ID NO: 581437 - DNA, 120 bp, Artificial Sequence
  ENSG00000172000_1 (sequence is synthesized)
gatttcacgctggaggagtgggccttgctgaatcctgctcagagaaaactctacagagatgtcatgctggagaccttcaagcacctggcctcagtagataatgaggctcagcttaaagcc

SEQ ID NO: 581438 - DNA, 120 bp, Artificial Sequence
  ENSG00000172000_2 (sequence is synthesized)
agtgggtctatttctcagcaggatacttctggagaaaaattatccctcaaacagaaaatagaaaagttcacaagaaagaatatatgggcctcccttttaggaaaaaattgggaagaacat

SEQ ID NO: 581439 - DNA, 120 bp, Artificial Sequence
  ENSG00000172000_3 (sequence is synthesized)
agcgttaaagacaagcacaacaccaaggagagacatttgagcagaaatccaagggtggagagaccatgtaaaagcagtaaaggtaataaacgtggaagaaccttcagaaagactcgaaat

SEQ ID NO: 581440 - DNA, 120 bp, Artificial Sequence
  ENSG00000172000_4 (sequence is synthesized)
tgtaatcgtcatctgcgcaagaattgttgtactagtgtaagacggtacgaatgcagtcagtgtggaaaactcttcacccattcctcatccctgataaggcacaaaagagctcactctgga

SEQ ID NO: 581441 - DNA, 120 bp, Artificial Sequence
  ENSG00000172000_5 (sequence is synthesized)
caaaaattatataaatgtaaggaatgtgggaaagccttcagtcgcccttcctacctacagacgcatgagaaaactcacagtggagagaaaccctatgcctgtcaatcttgcgggaagaca

SEQ ID NO: 581442 - DNA, 120 bp, Artificial Sequence
  ENSG00000172000_6 (sequence is synthesized)
tttcttcgttcccactctctcactgaacatgtaaggactcacactggagagaaaccctacgaatgtgggcagtgtgggaaaggcttcagttgtcccaaatcctttcgcgcacatgtgatg

SEQ ID NO: 581443 - DNA, 120 bp, Artificial Sequence
  ENSG00000172000_7 (sequence is synthesized)
atgcacgccggagggagaccgtatgagtgcaagcactgtgggaaagccttcaggtgtcagaaatcctttcgagtccatatgatcatgcacgccggagggagaccgtatgagtgcaagcag

SEQ ID NO: 581444 - DNA, 120 bp, Artificial Sequence
  ENSG00000172000_8 (sequence is synthesized)
tgtgggaaagcctactgctgggcaacatcctttcaacgacacgtgagaattcacaacggggagaaaccctataagtgtggaaaatgcgggaaagcattcggttggccctcatccttacac

SEQ ID NO: 581445 - DNA, 120 bp, Artificial Sequence
  ENSG00000172000_9 (sequence is synthesized)
aaacacgcgagaacgcatgctaaaaagaaacctgtgagtgggggcagcgtgggaaagtcttccgcgaggcctcgcccctccacagatgtcaaatcacaaactagagagaaagtctataaa

SEQ ID NO: 581446 - DNA, 120 bp, Artificial Sequence
  ENSG00000172000_10 (sequence is synthesized)
tgtgaaacgtgtgggaaaacgtatggttggtcctcatctttacacaaacatgagagaaagcacactggggagaaacctgtaaatgcagccagtgtgggaaaaccttcaggcgggctttgc

SEQ ID NO: 581447 - DNA, 120 bp, Artificial Sequence
  ENSG00000172000_11 (sequence is synthesized)
tcttccaaaaatgtaagaacgcagattggacagaagcccagtaaatgcgaaaaatgtgggaaagctttcagttgtcccaaagcctttcaaggtcatgtgagaagtcacacaggaaagaaa

SEQ ID NO: 581448 - DNA, 120 bp, Artificial Sequence
  ENSG00000172000_12 (sequence is synthesized)
gaagtcacacaggaaagaaatcctgtacatctaagtaatgggggaaaacctgtgcaaattaattcacatacatggttcagaaaattcacagcaggagggccgggcgcagtggctcacgcc

SEQ ID NO: 581449 - DNA, 120 bp, Artificial Sequence
  ENSG00000172000_13 (sequence is synthesized)
tctccaaaaaaagaaaattcatggcaggagaagaatctcatgacgtttataaatatggtattgcctttatcaggaccacatcctaaaagtgggcctctagcaaatgaatttgcagttctc

SEQ ID NO: 581450 - DNA, 120 bp, Artificial Sequence
  ENSG00000172000_14 (sequence is synthesized)
ttgcaggtaaagttgaggggagaatcctgtaagtcctctctcacctatagtactgaaattttgatacataatggttttttcttataaattactaatgtttctcttttcatttagaagtgt

SEQ ID NO: 581451 - DNA, 120 bp, Artificial Sequence
  ENSG00000172000_15 (sequence is synthesized)
attgcacccatgggtgatctgatgtattttaatatgcattaactttaatttttatatattttttttgttactccgtgtgaggccattagaccaatgaaatatgggtgtttgttgacattt

SEQ ID NO: 581452 - DNA, 120 bp, Artificial Sequence
  ENSG00000172000_16 (sequence is synthesized)
tctgactggccctgtgtgttccaagctggatattactaccatgttacttttattccacctttccattttacagggaaaaactatttttaatgttaatactttctacttatacaggcaagt

SEQ ID NO: 581453 - DNA, 120 bp, Artificial Sequence
  ENSG00000172000_17 (sequence is synthesized)
aattcagtggctttatgctattggtcagagaatccttcttcattttgcttgtggactaataggtagttggtagaaatacgtatgcatgcaaattcttggaggagtgtagtctcgtgggaa

SEQ ID NO: 581454 - DNA, 120 bp, Artificial Sequence
  ENSG00000172000_18 (sequence is synthesized)
ttcttggaggagtgtagtctcgtgggaactatttttttcatctgttgctgtttgctctttgacctggcttctgggttggaattggaaaataggtttttttgggttttttttctttttctt

SEQ ID NO: 581455 - DNA, 120 bp, Artificial Sequence
  ENSG00000172000_19 (sequence is synthesized)
atgcctggccatattatcattatcttaatacctcattgtctcagtatttcttgtgcttctgtgttcctgcttccatgacagatacaatggtacaaccataaaaacacaggggattgcggc

SEQ ID NO: 581456 - DNA, 120 bp, Artificial Sequence
  ENSG00000172000_20 (sequence is synthesized)
actctgtctcaaaaataaataaataaagaataattttttaaaaaagcacaggggattgtttccctactgcatctactgtgacctagtattcttcgtgagataaatcttacctttcatgag

SEQ ID NO: 581457 - DNA, 120 bp, Artificial Sequence
  ENSG00000172000_21 (sequence is synthesized)
caatctctcagtatgtgttcagttattatgtttgattatgtattattaaaacaaaagtttctgtttctgagaaatatctatttactgtgtttgtgtttttaaagaagttggattctatac

SEQ ID NO: 581458 - DNA, 120 bp, Artificial Sequence
  ENSG00000172000_22 (sequence is synthesized)
aaatggataaaatgtttcttagaaatagcctatttaactgagtttttcaaataagttgtatactaacaaatgtcaatctctgttttttatttactgggagaatgtattaaaatattgaaa

SEQ ID NO: 581459 - DNA, 76 bp, Artificial Sequence
  ENSG00000172000_23 (sequence is synthesized)
tgttttttatttactgggagaatgtattaaaatattgaaaattgccaaatcaacatggtgactttaaaaatgatac

SEQ ID NO: 581460 - DNA, 64 bp, Artificial Sequence
  ENSG00000172000_24 (sequence is synthesized)
gagcttgccaagattttatacttctgaattaatattaccagatgcattcagatttagacatttt

SEQ ID NO: 581461 - DNA, 120 bp, Artificial Sequence
  ENSG00000172000_25 (sequence is synthesized)
tgaattaatattaccagatgcattcagatttagacattttctttctagtacatttgtttcctatactgttataattttgtctaagaaattcttttttttttttttgagacagattctcgc

SEQ ID NO: 581462 - DNA, 120 bp, Artificial Sequence
  ENSG00000172000_26 (sequence is synthesized)
agcctaataaattcttgtttattcataatgacaaaaacttacgtaacggttttataaatttaagtattaaataagtctagcaaaagacataaaaagataactaataaaacaagtttaaac

SEQ ID NO: 581463 - DNA, 120 bp, Artificial Sequence
  ENSG00000172000_27 (sequence is synthesized)
ttggagcccagtagcaatggctcacgcctgtaatcccaggacccaccgaggcgggtggatcacctgatgtgaggagttcgagaccacgctggccaacatggtgaacatggtgaaaccttg

SEQ ID NO: 581464 - DNA, 120 bp, Artificial Sequence
  ENSG00000172000_28 (sequence is synthesized)
agtaagactccatctcaaaaaaaaaaaaattttttttttggataatatcaaggcagaataaagtatagtatcaaacttgacaaggtagataatagggaatgcagaataaaggatcgggct

SEQ ID NO: 581465 - DNA, 120 bp, Artificial Sequence
  ENSG00000172000_29 (sequence is synthesized)
gtagataatagggaatgcagaataaaggatcgggcttcagtaagtgacaatctcatcatgaattcatttatagttccaccatgtaatatgtcttaaatactatttctttttttttaatac

SEQ ID NO: 581466 - DNA, 120 bp, Artificial Sequence
  ENSG00000172000_30 (sequence is synthesized)
tatttcaagaactgctcatgagttaggaaatagtgagcagtaatacagaaataacggcaggaccaggggcagtggctcacacttgtaattccaaagcttcgggaggctgaggcaggagga

SEQ ID NO: 581467 - DNA, 120 bp, Artificial Sequence
  ENSG00000172000_31 (sequence is synthesized)
tcacttgagcacaggagttcaaggccagtctgggcacatagtgagacacagtctctataaaaagaaatttttaaaagtatctaggcatggtgatgtgcacttgtagagccagctactcag

SEQ ID NO: 581468 - DNA, 120 bp, Artificial Sequence
  ENSG00000172000_32 (sequence is synthesized)
gaggctgagggtggaggatggcttgagaccaagaggtccaggctgcaatgagttatcttgccactgtactccagccagggtgacagaatgagaccgtgtgtcaaattaaaaagaaaaaaa

SEQ ID NO: 581469 - DNA, 120 bp, Artificial Sequence
  ENSG00000172000_33 (sequence is synthesized)
tgcagtgagcagagatcgaaccactacactccagcctgggcgactgagtgggactctgtctcaaaaaaaaaaagagacaaaaggtatatttatggttcagcctcatttctgcaaatatta

SEQ ID NO: 581470 - DNA, 67 bp, Artificial Sequence
  ENSG00000172000_34 (sequence is synthesized)
aaggtatatttatggttcagcctcatttctgcaaatattaaaaattttagggcatgatgtatacatt

SEQ ID NO: 581471 - DNA, 67 bp, Artificial Sequence
  ENSG00000172000_35 (sequence is synthesized)
ttttttgtatttttagtacagtgcccgccttggcctcccgcagagctgggattacaggcgtgagcca

SEQ ID NO: 581472 - DNA, 120 bp, Artificial Sequence
  ENSG00000172000_36 (sequence is synthesized)
accaggcccatgtcatatgtttttatgagtttggacattggcatctgggaccaggtacttcatctggatttgaaccacaatgtgggtgtttgtttttaatacctttgtgaaataatttta

SEQ ID NO: 581473 - DNA, 120 bp, Artificial Sequence
  ENSG00000172000_37 (sequence is synthesized)
aattgccttatatatttggcattgtcactttgctgcccctacacactgatggaaaaattgtgttctgcagaaaactagagttcctcacagggtgaggaagagttatggtcatctgcacag

SEQ ID NO: 581474 - DNA, 120 bp, Artificial Sequence
  ENSG00000172000_38 (sequence is synthesized)
ttgtagcccgttgcgagtgttttcccatgtgcacagtgatatctaggcaagtgtgccatgatttcctggtgaggataaaatctatggacggtgagagaactagtcaaggaataactgaag

SEQ ID NO: 581475 - DNA, 120 bp, Artificial Sequence
  ENSG00000172000_39 (sequence is synthesized)
tgagctgcagacaggattatcattttgagtaacatcccaatgtatttgtcatcctttaattaatttttatttttttaattaaaaaataatttttaagtgtaaacctttaatgatccacaa

SEQ ID NO: 581476 - DNA, 120 bp, Artificial Sequence
  ENSG00000172000_40 (sequence is synthesized)
agcccaaaatgtccatttgattttcataggtatcgtttccatatgcttagacttccagcagctattagaagagaaaaatatgtaacagctttgtgtttaattaaaggcaaatgaaatcca

SEQ ID NO: 581477 - DNA, 120 bp, Artificial Sequence
  ENSG00000172005_0 (sequence is synthesized)
actgggctccgcggagccagcgagaggtctgcgcggagtctgagcggcgctcgtcccgtcccaaggccgacgccagcacgccgtcatggcccccgcagcggcgacggggggcagcaccct

SEQ ID NO: 581478 - DNA, 120 bp, Artificial Sequence
  ENSG00000172005_1 (sequence is synthesized)
gcccagtggcttctcggtcttcaccaccttgcccgacttgctcttcatctttgagtttatcttcgggggcctggtgtggatcctggtggcctcctccctggtgccctggcccctggtcca

SEQ ID NO: 581479 - DNA, 120 bp, Artificial Sequence
  ENSG00000172005_2 (sequence is synthesized)
gggctgggtgatgttcgtgtctgtgttctgcttcgtggccaccaccaccttgatcatcctgtacataattggagcccacggtggagagacttcctgggtcaccttggacgcagcctacca

SEQ ID NO: 581480 - DNA, 120 bp, Artificial Sequence
  ENSG00000172005_3 (sequence is synthesized)
ctgcaccgctgccctcttttacctcagcgcctcagtcctggaggccctggccaccatcacgatgcaagacggcttcacctacaggcactaccatgaaaacattgctgccgtggtgttctc

SEQ ID NO: 581481 - DNA, 120 bp, Artificial Sequence
  ENSG00000172005_4 (sequence is synthesized)
atagccactctgctctacgtggtccatgcggtgttctctttaatcagatggaagtcttcataaagccgcagtagaacttgagctgaaaacccagatggtgttaactggccgccccacttt

SEQ ID NO: 581482 - DNA, 120 bp, Artificial Sequence
  ENSG00000172005_5 (sequence is synthesized)
ccggcataactttttagaaaacagaaatgcccttgatggtggaaaaaagaaaacaaccacccccccactgcccaaaaaaaaaagccctgccctgttgctcgtgggtgctgtgtttactct

SEQ ID NO: 581483 - DNA, 120 bp, Artificial Sequence
  ENSG00000172005_6 (sequence is synthesized)
cccgtgtgccttcgcgtccgggttgggagcttgctgtgtctaacctccaactgctgtgctgtctgctagggtcacctcctgtttgtgaaaggggaccttcttgttcgggggtgggaagtg

SEQ ID NO: 581484 - DNA, 120 bp, Artificial Sequence
  ENSG00000172005_7 (sequence is synthesized)
gcgaccgtgacctgagaaggaaagaaagatcctctgctgacccctggagcagctctcgagaactacctgttggtattgtccacaagctctcccgagcgccccatcttgtgccatgtttta

SEQ ID NO: 581485 - DNA, 120 bp, Artificial Sequence
  ENSG00000172005_8 (sequence is synthesized)
agtcttcatggatgttctgcatgtcatggggactaaaactcacccaacagatctttccagaggtccatggtggaagacgataaccctgtgaaatactttataaaatgtcttaatgttcaa

SEQ ID NO: 581486 - DNA, 120 bp, Artificial Sequence
  ENSG00000172005_9 (sequence is synthesized)
atgggctgtgaattatagctcataaagctgtttaagaaaagaaaaagataatgtctccccaccatctcactatgaaacatactgctataaatataccatgcaaaggaaaaaagtcggcct

SEQ ID NO: 581487 - DNA, 120 bp, Artificial Sequence
  ENSG00000172005_10 (sequence is synthesized)
cattttttaaaggactcacttgcaaggtgatgcccccagaggctgggtggggtcctgagatctgtcaggagctggggttaaacccatagtgggctttgttctatggacaactgtggacaa

SEQ ID NO: 581488 - DNA, 120 bp, Artificial Sequence
  ENSG00000172006_0 (sequence is synthesized)
agtgccgagtttacctctgcgcgcgtcggggttggtggcggcggctgcggcgagttcctgaggggcgcctgcggggggcgtccgctccgagcgccgaggagccgagcggaggaggcgtcc

SEQ ID NO: 581489 - DNA, 80 bp, Artificial Sequence
  ENSG00000172006_1 (sequence is synthesized)
gtcccagggacacgcaggggaggccggccggcctgcacggggcgctcccgcctcgggggccctgtctggcgcctcagcgc

SEQ ID NO: 581490 - DNA, 120 bp, Artificial Sequence
  ENSG00000172006_2 (sequence is synthesized)
ctcccggcagctcagccctctgcctgcccaggaacctgcttttcccaagaggagagaatggctgctgggtacctgccccgctggtcccaggaattagtaacctttgaggacgtgtccatg

SEQ ID NO: 581491 - DNA, 120 bp, Artificial Sequence
  ENSG00000172006_3 (sequence is synthesized)
gacttctcccaggaggagtgggagttgctggagcctgctcagaagaacctgtacagagaggtgatgctggagaactacaggaacgtggtctccctggaagccttgaagaaccaatgtact

SEQ ID NO: 581492 - DNA, 120 bp, Artificial Sequence
  ENSG00000172006_4 (sequence is synthesized)
gatgtggggattaaagagggtccactttccccagcacaaacctcacaagtcactagtctttcctcatggacggggtatttactttttcaaccagtggcttcttcccacttggagcaaaga

SEQ ID NO: 581493 - DNA, 120 bp, Artificial Sequence
  ENSG00000172006_5 (sequence is synthesized)
gaagccctgtggatagaggaaaaaggaactcctcaagcctcctgttcagattggatgactgtactaagaaaccaagactcaacttacaagaaggtggctttgcaggaggaaccagccagt

SEQ ID NO: 581494 - DNA, 120 bp, Artificial Sequence
  ENSG00000172006_6 (sequence is synthesized)
ggtataaatatgataaagcttatcagagaagatgggggatggaagcagttagaggacagccatgaagacccccaggggcttttgagccaaaaggcatcccttcacgtagtggccgttcct

SEQ ID NO: 581495 - DNA, 120 bp, Artificial Sequence
  ENSG00000172006_7 (sequence is synthesized)
caggagaaggctactgcatggcatggatttggggaaaatggtaatctgagcccagcccttgttttatcacagggaagctctaaagggaaccacttgtgtggcagcgagttagatattaca

SEQ ID NO: 581496 - DNA, 120 bp, Artificial Sequence
  ENSG00000172006_8 (sequence is synthesized)
agcttggcatccgattcagtcttaaaccaccatcagctgggatatgcagatcggagaccttgtgaaagtaatgaatgtggaaatgccatccgccagaacagtcactttattcaacacggg

SEQ ID NO: 581497 - DNA, 120 bp, Artificial Sequence
  ENSG00000172006_9 (sequence is synthesized)
gggaagatgtttgtgtatttggaaaatgggcagtcattgaaccacggtatggccctgactatccacaacaaaatcaacacggcagagaaaccctttgagtgccaccagtgtgggaaggtg

SEQ ID NO: 581498 - DNA, 120 bp, Artificial Sequence
  ENSG00000172006_10 (sequence is synthesized)
ttcaaccggaggcattctttgagcgaacatcaaagaattcacacgggggagaaaccctacgagtgtcaggagtgtgggcgagcctttacgcacagctccaccctcacgcgccatctgaga

SEQ ID NO: 581499 - DNA, 120 bp, Artificial Sequence
  ENSG00000172006_11 (sequence is synthesized)
actcatactggagagaagccctacgggtgcggtgagtgcgggaaagccttcaacaggatctcatcgctgactcagcatcagaggattcacaccggggaaaagccctataaatgtgaagac

SEQ ID NO: 581500 - DNA, 120 bp, Artificial Sequence
  ENSG00000172006_12 (sequence is synthesized)
tgtgggaaatccttctgccagagctcttacctgatcttgcacaagaggacacacaccggagagaagccctacgaatgcagtgaatgtggaaaggccttcagtgaccgttcctctctcaac

SEQ ID NO: 581501 - DNA, 120 bp, Artificial Sequence
  ENSG00000172006_13 (sequence is synthesized)
cagcacgagcgaactcacacgggcgagaacccctatgaatgtaagcagtgtgggagagccttcagccagaggtcttcccttgtgaggcacgagagaactcacactggagagaaaccctac

SEQ ID NO: 581502 - DNA, 120 bp, Artificial Sequence
  ENSG00000172006_14 (sequence is synthesized)
aggtgtcaggaatgtgggaaagccttcagccagagctcatcccttgtcacacatcagaaaactcacagcagccagaaaacctataaaatcattgactgtgggaaagcgttctaccagaac

SEQ ID NO: 581503 - DNA, 120 bp, Artificial Sequence
  ENSG00000172006_15 (sequence is synthesized)
ttgaaaagaagtgggtttatgtcaccttctcaccttcttataagaaagctctgagaatgggcatttttgtattttgttgttgttgttgagatggagtctgccacccaggctggagtccag

SEQ ID NO: 581504 - DNA, 120 bp, Artificial Sequence
  ENSG00000172006_16 (sequence is synthesized)
tggcgtgatcatacctcactgcagcttcaacttcctgggctcaagtaatcctcccaccccagcctcccaggtagctagtactataggtgtgcaccaccacgcccagcaaatttttaaatt

SEQ ID NO: 581505 - DNA, 65 bp, Artificial Sequence
  ENSG00000172006_17 (sequence is synthesized)
ctataggtgtgcaccaccacgcccagcaaatttttaaatttattatagagtgggaggcagggtgc

SEQ ID NO: 581506 - DNA, 84 bp, Artificial Sequence
  ENSG00000172006_18 (sequence is synthesized)
agagttggggtcttgctacattgccaagactggtcttgaactcctggggtcaagcatcctcctgtcttggcctcccaaagtgtt

SEQ ID NO: 581507 - DNA, 120 bp, Artificial Sequence
  ENSG00000172006_19 (sequence is synthesized)
tcttggcctcccaaagtgttgggattagaagcatgagccgctgtgcccagcctgacggggccttttagtgggaggagttgccattacactacgtccagtaagctccagactttcggaaaa

SEQ ID NO: 581508 - DNA, 120 bp, Artificial Sequence
  ENSG00000172006_20 (sequence is synthesized)
agctccagactttcggaaaagattggtggacgggaatgctgtcatggatgggatcttgccaagaaccatcacgtgttaatttagttgcttaaacaaaaggtgttctgtttcttaactact

SEQ ID NO: 581509 - DNA, 120 bp, Artificial Sequence
  ENSG00000172006_21 (sequence is synthesized)
tctgtgtctttactttttatttcattgttcattgtttttattttaatattcttttctgggtttatatgagacgagttttcactctgttgctgaggctgaagtgcagtggcgtgatcatag

SEQ ID NO: 581510 - DNA, 120 bp, Artificial Sequence
  ENSG00000172006_22 (sequence is synthesized)
actcaagcaatcctcccacctcagcctctccggtagctgggactacacatgtgcaccgctaccacacccagctaaattttttttttgtatttttgtagtgatgggctttcaccaggttgc

SEQ ID NO: 581511 - DNA, 63 bp, Artificial Sequence
  ENSG00000172006_23 (sequence is synthesized)
gcaccgctaccacacccagctaaattttttttttgtatttttgtagtgatgggctttcaccag

SEQ ID NO: 581512 - DNA, 90 bp, Artificial Sequence
  ENSG00000172006_24 (sequence is synthesized)
tggtattacaggtgtgagccaccgtgctggtattacgggtgtgagccactgtgctgggattacgggcgtgagctgcccatggtattacgg

SEQ ID NO: 581513 - DNA, 120 bp, Artificial Sequence
  ENSG00000172006_25 (sequence is synthesized)
gctgggattacaggtgtgagccaccctgctgggattatgggtgcgagccgccgtgctgggattacaggtgtgaaccactgctcctggcctttatttcagcattctgtttcagtgtttcac

SEQ ID NO: 581514 - DNA, 120 bp, Artificial Sequence
  ENSG00000172006_26 (sequence is synthesized)
tggcctttatttcagcattctgtttcagtgtttcacattggccacttagctagatccgtttgtcttctgcagtactgtgctgatccagagtatatgctaagacggaaagcgctttggagg

SEQ ID NO: 581515 - DNA, 120 bp, Artificial Sequence
  ENSG00000172006_27 (sequence is synthesized)
taaagtttaaaaaatacaagggcttcaaaatagtactagtaatttgatccattcacaaaaggacaaaggctggacagagacgtgaagaaatgaatcatttacgcaatgattggggtgttc

SEQ ID NO: 581516 - DNA, 120 bp, Artificial Sequence
  ENSG00000172006_28 (sequence is synthesized)
caattatgtgtgattttgtgttttctgccgtttcattttgtattgccataatcattttgacaatgaatacaaatcaaatagcacccaaaattgtgaaggatacggaacctcattgatgag

SEQ ID NO: 581517 - DNA, 70 bp, Artificial Sequence
  ENSG00000172006_29 (sequence is synthesized)
tttgttttttttctctcaggtcactgcaacctctgcctccgcagttcaagtgattctcatgcctcagcct

SEQ ID NO: 581518 - DNA, 120 bp, Artificial Sequence
  ENSG00000172006_30 (sequence is synthesized)
gcctcccaagtagctggaattacaagtgtgcaccaccacacctgtttttgtatttttttttttttatgagacggagtttcgctctcgttgcccaggctgaagtgcagtggtacaatctag

SEQ ID NO: 581519 - DNA, 74 bp, Artificial Sequence
  ENSG00000172006_31 (sequence is synthesized)
tttttgtatttttttttttttatgagacggagtttcgctctcgttgcccaggctgaagtgcagtggtacaatct

SEQ ID NO: 581520 - DNA, 120 bp, Artificial Sequence
  ENSG00000172006_32 (sequence is synthesized)
cacacccggctactgtttttgtatttttaatagagatggatttttgccatgttggccagggtggtgttgaactcatgacctctagtgatccacctacttccgcttcccaaagtgctggga

SEQ ID NO: 581521 - DNA, 120 bp, Artificial Sequence
  ENSG00000172006_33 (sequence is synthesized)
ttacagacgtgagccactgtgcccagccccatactgggttttgtatcagcatgtatattttccattcccaccagcagtgcagactgttgcaatttctccacatccttggcaacacttact

SEQ ID NO: 581522 - DNA, 120 bp, Artificial Sequence
  ENSG00000172006_34 (sequence is synthesized)
attttttattatggcctttctaatatgtgtgaagtggtatctcattgcggttttgatatgcattcccctaatgaccaatgacatcgagcatccattcctgtgtttattgaccatttgtgt

SEQ ID NO: 581523 - DNA, 120 bp, Artificial Sequence
  ENSG00000172006_35 (sequence is synthesized)
atcgatttttgggggaaatgtaagatctgtaattttttttttttttttactctgtcgcccatgctggaatgcagtgctgcaatctcggctcactgcaagccctgcctcccgagttcatgt

SEQ ID NO: 581524 - DNA, 120 bp, Artificial Sequence
  ENSG00000172006_36 (sequence is synthesized)
atcacagctcactgcagccttgacctccccagggctcaagtgatcttcccacctcaatctcccaggtagctgggactataggcttagaccaccacacctggctagtttttttgtttgttt

SEQ ID NO: 581525 - DNA, 88 bp, Artificial Sequence
  ENSG00000172006_37 (sequence is synthesized)
atctcccaggtagctgggactataggcttagaccaccacacctggctagggtaggtccggggtcttgtcatgttgctcaggctggtct

SEQ ID NO: 581526 - DNA, 75 bp, Artificial Sequence
  ENSG00000172006_38 (sequence is synthesized)
gattacaggtgtgagccaccacgcccaaccagatctgtaattttttttttccacgacctcggctcactgcaacct

SEQ ID NO: 581527 - DNA, 72 bp, Artificial Sequence
  ENSG00000172006_39 (sequence is synthesized)
ggagcaaagagaagccctgtggatagaggaaaaaggaactcctcaagcctcctgttcagtctcgctcttgtt

SEQ ID NO: 581528 - DNA, 120 bp, Artificial Sequence
  ENSG00000172007_0 (sequence is synthesized)
gctcttgcggtggcgtaatctctcagcctttctgtgtctcctttcctccgcctcagtttggggcgggtcgggggaatggctgaggagatggagtcgtcgctcgaggcaagcttttcgtcc

SEQ ID NO: 581529 - DNA, 120 bp, Artificial Sequence
  ENSG00000172007_1 (sequence is synthesized)
agcggggcagtgtcaggggcctcagggtttttgcctcctgcccgctcccgcatcttcaagataatcgtgatcggcgactccaatgtgggcaagacatgcctgacctaccgcttctgcgct

SEQ ID NO: 581530 - DNA, 120 bp, Artificial Sequence
  ENSG00000172007_2 (sequence is synthesized)
ggccgcttccccgaccgcaccgaggccacgataggggtggatttccgagaacgagcggtggagattgatggggagcgcatcaagatccagctatgggacacagcaggacaagaacgattc

SEQ ID NO: 581531 - DNA, 120 bp, Artificial Sequence
  ENSG00000172007_3 (sequence is synthesized)
agaaagagcatggttcagcactactacagaaatgtacatgctgttgtcttcgtgtatgatatgaccaacatggctagttttcatagcctaccatcttggatagaagaatgcaaacaacat

SEQ ID NO: 581532 - DNA, 120 bp, Artificial Sequence
  ENSG00000172007_4 (sequence is synthesized)
ttgctagccaatgatataccacggattcttgttggaaataaatgtgacttgagaagtgccatacaggtacccacagacttggcacaaaaatttgctgacacacacagtatgcctttgttt

SEQ ID NO: 581533 - DNA, 120 bp, Artificial Sequence
  ENSG00000172007_5 (sequence is synthesized)
gaaacgtctgctaaaaaccccaatgataatgaccatgtggaagctatatttatgaccttggctcataagcttaagagccacaaaccattaatgcttagtcagccccctgataatggaatt

SEQ ID NO: 581534 - DNA, 120 bp, Artificial Sequence
  ENSG00000172007_6 (sequence is synthesized)
atcctgaagcctgaaccaaagcctgcaatgacgtgctggtgctaaataacagtctttattatattatctaattttgactaaagaaatacttttgaagtatgacagtattaagtcataaga

SEQ ID NO: 581535 - DNA, 120 bp, Artificial Sequence
  ENSG00000172007_7 (sequence is synthesized)
tttaatctcaactataatgggtcatcttgacactttgctgtttgtcattgtcacgcttttgtattttgtatctacttaagtttgtcactgtgacaacacaggaaaagttggttttcaggt

SEQ ID NO: 581536 - DNA, 120 bp, Artificial Sequence
  ENSG00000172007_8 (sequence is synthesized)
gagattgaaaatgaagcaaagataggatgaatctgaacatctctccatctagagcccaatgaaggaagcttcaaatgagaacatgatggaatcagtaaccattcaatcttttgtcctagg

SEQ ID NO: 581537 - DNA, 120 bp, Artificial Sequence
  ENSG00000172007_9 (sequence is synthesized)
attggaaaaaaatgttaaaggtttaggacacacctaatagtatgtcctttgaatgggaagtgttcttaataggataaaaactggtatttgcctctccccagagtactttttttgtttttt

SEQ ID NO: 581538 - DNA, 82 bp, Artificial Sequence
  ENSG00000172007_10 (sequence is synthesized)
ctggtatttgcctctccccagagtactttttttgttttttcatagagacggggtcttgctatgttgtccaggctggccttga

SEQ ID NO: 581539 - DNA, 120 bp, Artificial Sequence
  ENSG00000172007_11 (sequence is synthesized)
ttctttgttttattaacatatttagttttgttattattggtatgttttagagccaagactttagttccagtgggataagaaggcatagaatgttttctggttcccagtccataaagaatg

SEQ ID NO: 581540 - DNA, 120 bp, Artificial Sequence
  ENSG00000172007_12 (sequence is synthesized)
aaagaatgacttttccaagagttctagatgtttgattttctaattaatacttatcagatctacaaaaatcattattattttaaaagagttatttgagtttctttctttcttttttttttt

SEQ ID NO: 581541 - DNA, 120 bp, Artificial Sequence
  ENSG00000172007_13 (sequence is synthesized)
attacaggtgtgagtcactgcacccagccgagttgctttcttactaaatcctattaaaatatgcaaaaataagtcagattttaaggcaaataaagtgacataaggtgctttatattttat

SEQ ID NO: 581542 - DNA, 120 bp, Artificial Sequence
  ENSG00000172007_14 (sequence is synthesized)
tttatattttattttggtatatttaaacagtgaaaaactaactgaaagcacatgaagagttgtaacttgggggaaaataggtaaacatagcttctagctaacacaggagacctattctta

SEQ ID NO: 581543 - DNA, 120 bp, Artificial Sequence
  ENSG00000172007_15 (sequence is synthesized)
tccttcaactccaataaatttaatgactaaatgccaagttaacaaatcaacttccatttggattgtaggtgtgaaggcacaactctaattgctattagtctacatgtatttctgtaatag

SEQ ID NO: 581544 - DNA, 120 bp, Artificial Sequence
  ENSG00000172007_16 (sequence is synthesized)
tattgtgtcatatcaatttttaagatgtctaaattttatggtcacaagttatccctcctcagtatgaaaaataaattagatattgaaaaatgtctaaacttcagtgatggaaagaatatt

SEQ ID NO: 581545 - DNA, 120 bp, Artificial Sequence
  ENSG00000172007_17 (sequence is synthesized)
tcaagaagttttttaacctaaatacttttattttgaatttaagtctttgcacataaaatatagcaagcttacatattaaactatttacgtaaatggaatgtaagccatgactttaactga

SEQ ID NO: 581546 - DNA, 120 bp, Artificial Sequence
  ENSG00000172007_18 (sequence is synthesized)
agtgttcacattcactaattttgatagattgctgtccttaataattttggaggaaattaagccaaatgattattgtactacagtattttcagaatatgggaaatcaattaaaaatgtaat

SEQ ID NO: 581547 - DNA, 120 bp, Artificial Sequence
  ENSG00000172007_19 (sequence is synthesized)
ctaatctagtttaagatttttgtttaatcatcatggtggtcctacctggataatttaactataaagacaaagtaattctattaaatgaactaactgaaaataataattataggaagtgat

SEQ ID NO: 581548 - DNA, 120 bp, Artificial Sequence
  ENSG00000172007_20 (sequence is synthesized)
tattccattttaagtattagagctcaaattggctttatttgcatttagggagatcatgttttcttaatcatgctggaatttaaaaattgttttacttgtatcgaaattaaccttgattta

SEQ ID NO: 581549 - DNA, 120 bp, Artificial Sequence
  ENSG00000172007_21 (sequence is synthesized)
taactatttttgtaataaaacaatgacagctgtagtaactatgatgggtgtaacaacatttttttaaagaagggaatctgtttatcgcttttcaaaatattttctaaagtgggggaagaa

SEQ ID NO: 581550 - DNA, 120 bp, Artificial Sequence
  ENSG00000172007_22 (sequence is synthesized)
agtttatagactttccaagcacatttatggttttttattactattattatggttttaaaaagagtaactttatttctttttgtaaggaattaagtaatatcctttacagttctgtgaaag

SEQ ID NO: 581551 - DNA, 120 bp, Artificial Sequence
  ENSG00000172007_23 (sequence is synthesized)
gttaaagctttcaatatcttaaaatatttataaaacatttcactgttgcaaaatcacttccaaaatgatagctatctaacaactaattactaatttttaaagaacaaatcacacatttaa

SEQ ID NO: 581552 - DNA, 120 bp, Artificial Sequence
  ENSG00000172007_24 (sequence is synthesized)
aaaatctgtagaatttattttaactatgacctttaattgaaaataaataattaaaatatcagacatgttttggaaaagtcttaatttgagaacaccaaaggaaactaccccagaatctaa

SEQ ID NO: 581553 - DNA, 120 bp, Artificial Sequence
  ENSG00000172007_25 (sequence is synthesized)
tgtagttcgctattaataacaatgcattattgaaagtatattgcaaatacatgtttcctcatgaaatctaagtaattttgttgtggaatagtgtcactgttacatttcccccatgaagtt

SEQ ID NO: 581554 - DNA, 120 bp, Artificial Sequence
  ENSG00000172007_26 (sequence is synthesized)
caataaaccagcttagccacaaagaaattgtgttttattttctttgtttggttactgggtagagtataaaataaaacaatctttttttcctcctggtttccagataatattatatatatg

SEQ ID NO: 581555 - DNA, 120 bp, Artificial Sequence
  ENSG00000172007_27 (sequence is synthesized)
atacacttttgaaaacaacaaaaagcccccaacccattggacaattattttcttgtatacatttgaggtcaaagaacacttcaggaaaaaaactcaacaaagtattaaaattagctgata

SEQ ID NO: 581556 - DNA, 120 bp, Artificial Sequence
  ENSG00000172007_28 (sequence is synthesized)
acacagcttttgtatttgtgtgttttagtaatccagcttgttttagaatagttcagtgcaaaaagcaaatggtgcaagaggagttgatgtgtatttagacgtaaaagcatttaacagaat

SEQ ID NO: 581557 - DNA, 120 bp, Artificial Sequence
  ENSG00000172007_29 (sequence is synthesized)
gaataactatagaaagtatgagaaaagagaacgaactacgtctcaggtataagattgcagttactgatttagacaccataggattagggatgtgggggcctctgatgttgattctgcttc

SEQ ID NO: 581558 - DNA, 120 bp, Artificial Sequence
  ENSG00000172007_30 (sequence is synthesized)
ccctggtcagtttattttacgtataagttacccttgtgttcaaacacaaaattgacattattcatgaaggactgctttcttaatcagatattaagaagttcgtcatgtattttgggagca

SEQ ID NO: 581559 - DNA, 120 bp, Artificial Sequence
  ENSG00000172007_31 (sequence is synthesized)
cgtttgctacagcctgtgtggcaagggcgaatgcacttggtttgttggaataacctgatttatcaaacatttatcaagtatgggtcatgtgttctctatttgtgttagtggagctacata

SEQ ID NO: 581560 - DNA, 120 bp, Artificial Sequence
  ENSG00000172007_32 (sequence is synthesized)
ggctgcaaaactcgccacggcccagagctcgcctccaagtgcgccccgcacagggcaagctttcggcgaggactcgcgtcccacccatctagccctggccgctgtcccaactcccgcagt

SEQ ID NO: 581561 - DNA, 120 bp, Artificial Sequence
  ENSG00000172007_33 (sequence is synthesized)
tcacagaggcggcggcggtgagcgcagccgatgccacatcctcagcggcaagctgaagaaacctgtctcctctctggggcgaccaaacgatacgtcgatgccggaaccgacccgacgccg

SEQ ID NO: 581562 - DNA, 120 bp, Artificial Sequence
  ENSG00000172007_34 (sequence is synthesized)
gtgctctactgtttgggctggggatattagctcaacaaactctggccacaaggatcacgcggatattcttggggatgcctagcgaaatgcgctgtacctaggcctcgaactctcgcctgc

SEQ ID NO: 581563 - DNA, 120 bp, Artificial Sequence
  ENSG00000172009_0 (sequence is synthesized)
gcggcgggccccttggtcctcaggcggccgtggcggcggtggcggcggttgggccgaggcaggcggcctcagtggccgaggtggctggacgcgtagcaggtggaaggagggagggagccg

SEQ ID NO: 581564 - DNA, 120 bp, Artificial Sequence
  ENSG00000172009_1 (sequence is synthesized)
tggaaggagggagggagccgcaggcgcagacccacccgccatgaagccccccgcagcctgtgcaggagacatggcggacgcagcatctccgtgctctgtggtaaacgacctgcggtggga

SEQ ID NO: 581565 - DNA, 120 bp, Artificial Sequence
  ENSG00000172009_2 (sequence is synthesized)
cctgagtgcccagcagatagaggagcgcaccagggagctcatcgagcagaccaagcgcgtgtatgaccaggttggcacccaggagtttgaggacgtgtcctacgagagcacgctcaaggc

SEQ ID NO: 581566 - DNA, 120 bp, Artificial Sequence
  ENSG00000172009_3 (sequence is synthesized)
gctggccgatgtggaggtcacctacacagttcagaggaatatccttgacttcccccagcatgtttccccctccaaggacatccggacagccagcacagaggccgacaagaagctctctga

SEQ ID NO: 581567 - DNA, 120 bp, Artificial Sequence
  ENSG00000172009_4 (sequence is synthesized)
gttcgacgtggagatgagcatgagggaggacgtgtaccagaggatcgtgtggctccaggagaaagttcagaaggactcactgaggcccgaggctgcgcggtacctggagcggctaatcaa

SEQ ID NO: 581568 - DNA, 120 bp, Artificial Sequence
  ENSG00000172009_5 (sequence is synthesized)
gctgggccggagaaatgggcttcacctccccagagagactcaggaaaacatcaaacgcatcaagaagaagctgagccttctgtgcatcgacttcaacaagaacctgaacgaggacacgac

SEQ ID NO: 581569 - DNA, 120 bp, Artificial Sequence
  ENSG00000172009_6 (sequence is synthesized)
cttcctgcccttcacgctccaggagctaggagggctccccgaggactttctgaactccctggagaagatggaggacggcaagttgaaggtcaccctcaagtacccccattacttccccct

SEQ ID NO: 581570 - DNA, 120 bp, Artificial Sequence
  ENSG00000172009_7 (sequence is synthesized)
cctgaagaaatgccacgtgcctgagaccaggaggaaagtggaggaggccttcaactgccggtgcaaggaggagaactgcgctatcctcaaggagctggtgacgctgcgggcccagaagtc

SEQ ID NO: 581571 - DNA, 120 bp, Artificial Sequence
  ENSG00000172009_8 (sequence is synthesized)
ccgcctgctggggttccacacgcacgccgactatgtcctggagatgaacatggccaagaccagccagaccgtggccaccttcctagatgagctggcgcagaagctgaagcccctggggga

SEQ ID NO: 581572 - DNA, 120 bp, Artificial Sequence
  ENSG00000172009_9 (sequence is synthesized)
gcaggagcgtgcggtgattctggagctgaagcgtgcggagtgcgagcgccggggcctgcccttcgacggccgcatccgtgcctgggacatgcgctactacatgaaccaggtggaggagac

SEQ ID NO: 581573 - DNA, 120 bp, Artificial Sequence
  ENSG00000172009_10 (sequence is synthesized)
gcgctactgcgtggaccagaacctgctcaaggagtacttccccgtgcaggtggtcacgcacgggctgctgggcatctaccaggagctcctggggctggccttccaccacgaggagggcgc

SEQ ID NO: 581574 - DNA, 120 bp, Artificial Sequence
  ENSG00000172009_11 (sequence is synthesized)
cagtgcctggcatgaggacgtgcggctctacaccgcgagggacgcggcctcgggggaggtggtcggcaagttctacctggacctgtacccgcgggaaggaaagtacgggcacgcggcctg

SEQ ID NO: 581575 - DNA, 120 bp, Artificial Sequence
  ENSG00000172009_12 (sequence is synthesized)
ctttggcctgcagcccggctgcctgcggcaggatgggagccgccagatcgccatcgcggccatggtggccaacttcaccaagcccacagccgacgcgccctcgctgctgcagcatgacga

SEQ ID NO: 581576 - DNA, 120 bp, Artificial Sequence
  ENSG00000172009_13 (sequence is synthesized)
ggtggagacctacttccatgagtttggccacgtgatgcaccagctctgctcccaggcggagttcgccatgttcagcgggacccacgtggagcgggactttgtggaggcgccgtcgcagat

SEQ ID NO: 581577 - DNA, 120 bp, Artificial Sequence
  ENSG00000172009_14 (sequence is synthesized)
gctggagaactgggtgtgggagcaggagccgctgctgcggatgtcgcggcactaccgcacaggcagcgccgtgccccgggagctcctggagaagctcattgagtcccggcaggccaacac

SEQ ID NO: 581578 - DNA, 120 bp, Artificial Sequence
  ENSG00000172009_15 (sequence is synthesized)
aggcctcttcaacctgcgccagatcgtcctcgccaaggtggaccaggccctgcacacgcagacggacgcagaccccgccgaggagtatgcgcggctctgccaggagatcctcggggtccc

SEQ ID NO: 581579 - DNA, 120 bp, Artificial Sequence
  ENSG00000172009_16 (sequence is synthesized)
ggccacgccaggaaccaacatgcctgcaaccttcggccatctggcaggtggctacgacgcccagtactacgggtacctgtggagcgaggtgtattccatggacatgttccacacgcgctt

SEQ ID NO: 581580 - DNA, 120 bp, Artificial Sequence
  ENSG00000172009_17 (sequence is synthesized)
caagcaggagggtgtcctgaacagcaaggttggcatggattacagaagctgcatcctgagacccggcggttccgaggatgccagcgccatgctgaggcgcttcctgggccgtgaccccaa

SEQ ID NO: 581581 - DNA, 120 bp, Artificial Sequence
  ENSG00000172009_18 (sequence is synthesized)
gcaggacgccttcctcctgagcaaggggctgcaggtcgggggctgcgagcccgagccgcaggtctgctgaggcctggcactgcgactgcccagtctggcctgcgctcccgccgccctggt

SEQ ID NO: 581582 - DNA, 120 bp, Artificial Sequence
  ENSG00000172009_19 (sequence is synthesized)
cttgtcattgtctgtccccacccggtcgtggcccacccggctagagacggcgtcctcaaggcatctggagggctttcgtggctgccagggcctggtctttgttgcactaacacgtctcct

SEQ ID NO: 581583 - DNA, 120 bp, Artificial Sequence
  ENSG00000172009_20 (sequence is synthesized)
ctctgggaaacgtcccttgtcaggagacggctcttctttgaaatgaggtcattaaaaggaaacagaaaaagagagaggctccctggcctggtcactggctcctgcgcttttttggtccga

SEQ ID NO: 581584 - DNA, 120 bp, Artificial Sequence
  ENSG00000172009_21 (sequence is synthesized)
ggacggtgggacggcgggtcagggtccagccctcgggctgttgccacaccaggccctggattggggctcaggtccttgtgggggcggggggtgggggagtaaagggctgggaaccagttc

SEQ ID NO: 581585 - DNA, 120 bp, Artificial Sequence
  ENSG00000172009_22 (sequence is synthesized)
tgccagccaggccggcctggggggtctgagagacttcggcttcctgcatgcttctcacctgttgtcattctggaacattccccccgccctgctcagctctggccatcaaggaccaggctc

SEQ ID NO: 581586 - DNA, 120 bp, Artificial Sequence
  ENSG00000172009_23 (sequence is synthesized)
cactggtcagagagtctggaaagtcagggcaggccctgtgcgcacaggcagccggggcggggctgggggtcagcagctgcccaccctctcatccacaggggaaggccgggctcactccag

SEQ ID NO: 581587 - DNA, 120 bp, Artificial Sequence
  ENSG00000172009_24 (sequence is synthesized)
cttcctaggcagagtctctgggggttcctgttggacacaagtgaaccaggtgaaccagggcagctgctggaagctcggccatggccctcatcctcatggccttggggactgcctgtgcct

SEQ ID NO: 581588 - DNA, 120 bp, Artificial Sequence
  ENSG00000172009_25 (sequence is synthesized)
gccctccctggcggccccactcccctggctgtgggcaacatggcaaagtcttgatcgggggtgcagggtcgggggggcgcttcctggaccctccaacagtgctcagagatgcctcaggga

SEQ ID NO: 581589 - DNA, 120 bp, Artificial Sequence
  ENSG00000172009_26 (sequence is synthesized)
tagctgtcggctgtgtccccacctcccgagcaagacaagtggatgctccccgtctcttcagtcccagtgctctgatgttttctcccgcgactgtgagtttctcaggagcccccctcgtgc

SEQ ID NO: 581590 - DNA, 120 bp, Artificial Sequence
  ENSG00000172009_27 (sequence is synthesized)
cctgggagcgtccctccccagtcttagtcctccacgaaggacgctggtcagcagaacctgtgaccctgcttcccgaggcctatgggtggccagacatccgcctcgtcctcacctccattt

SEQ ID NO: 581591 - DNA, 120 bp, Artificial Sequence
  ENSG00000172009_28 (sequence is synthesized)
ggacaggactccgagggctgtgccatctgcttcagcccctcctgtcccattcccacccagcccaggtcagtgtggctgtggccactgccatggggcctgctttgcaccttacgcacgcct

SEQ ID NO: 581592 - DNA, 120 bp, Artificial Sequence
  ENSG00000172009_29 (sequence is synthesized)
ggctctgctccatgcacctgcttctgtgtctttccaactctgggggctaaggggtgagtcttgtctttgcagagctggacggcacagcctgtggccaggagggttatgccagcgaggcgg

SEQ ID NO: 581593 - DNA, 120 bp, Artificial Sequence
  ENSG00000172009_30 (sequence is synthesized)
gaatccataagtgggaacaccacagtggtcacgtttcagatactcacagctcagagcgggtcccatagcttgcacctgaagccccaactactcaggaggctgaggcggaaggattgcttg

SEQ ID NO: 581594 - DNA, 120 bp, Artificial Sequence
  ENSG00000172009_31 (sequence is synthesized)
agcccaggagggcaaggccagcctgggcaacgtggcaagaccccatctctaaaaaaaataagttcggtgggtgtggggccagtgcctgtggtctgttttttgggaggctgaggcaggagg

SEQ ID NO: 581595 - DNA, 83 bp, Artificial Sequence
  ENSG00000172009_32 (sequence is synthesized)
atccgtctctaaaataacaataataataaaatacctggggttcagaaaagaaaagctggaaggcaaagccgaccgcactgggc

SEQ ID NO: 581596 - DNA, 120 bp, Artificial Sequence
  ENSG00000172009_33 (sequence is synthesized)
agaaaagaaaagctggaaggcaaagccgaccgcactgggcagaggtggagatggcaagtctgggggctccctcatcttcccctgccccgagccctcaggtggcctccacctggtccccag

SEQ ID NO: 581597 - DNA, 120 bp, Artificial Sequence
  ENSG00000172009_34 (sequence is synthesized)
cgaagtcccagttgtgcaagagcaccccagctgggccctgggccatcacagccttgtcacacacacagcctggcccatcacagcagagctggggtcacagccttgggctgctgggccgtg

SEQ ID NO: 581598 - DNA, 120 bp, Artificial Sequence
  ENSG00000172009_35 (sequence is synthesized)
ggcggatggcctggaccatccacaccccactcccctggaagtcaccaactgggcttagttgccggataccccaggcagccccccgcggtgcttcgcaagttgggccgcctcccccagcat

SEQ ID NO: 581599 - DNA, 120 bp, Artificial Sequence
  ENSG00000172009_36 (sequence is synthesized)
gtcccctgctctgtggacacccagggatgtggaggtagtagcacagagtctcggtccagggccctgttccccagggagctgggcgtcctcagagccttcccaaatgcccacaccgggggc

SEQ ID NO: 581600 - DNA, 120 bp, Artificial Sequence
  ENSG00000172009_37 (sequence is synthesized)
acccgggtttccccaaacactccaggacagagcgggggctttgatcacagggagggggctgcagagctgctgtgtctcctggctcctctgccccatgctccccactcagggctccagcag

SEQ ID NO: 581601 - DNA, 120 bp, Artificial Sequence
  ENSG00000172009_38 (sequence is synthesized)
tgggctcagaggacagtgtggcattagcatcccctgcccgtccaggttgtcactctccttggccccttgctgctccccagtggaaaaaaaagggggaaataaagaatcgtaaaaaataca

SEQ ID NO: 581602 - DNA, 120 bp, Artificial Sequence
  ENSG00000172009_39 (sequence is synthesized)
aagaaactgccaaactgctctttggagcggctgcactggcccacgtcctacatgctttgatgtttttattccaggagaaagttcagaaggactcactgaggcccgaggctgcgcggtacc

SEQ ID NO: 581603 - DNA, 120 bp, Artificial Sequence
  ENSG00000172009_40 (sequence is synthesized)
caacctgcgccagatcggcctggtctttgttgcactaacacgtctcctctctgggaaacgtcccttgtcaggagacggctcttctttgaaatgaggtcattaaaaggaaacagaaaaaga

SEQ ID NO: 581604 - DNA, 120 bp, Artificial Sequence
  ENSG00000172009_41 (sequence is synthesized)
ccaggagttccctcgccgttggctgcctgccatggttccagcgggactcagtcaagggctgtgcttttagggaaggttccacacacacacgagcagggagatgcagcatgcctcacagcg

SEQ ID NO: 581605 - DNA, 120 bp, Artificial Sequence
  ENSG00000172009_42 (sequence is synthesized)
cttagtaggcgagtttgaaaacacggagtccaggaatgaggatcgaccgtgtgtccacctttcctggcttccctgccacactgtttgcacagcactcgtagccagcacacgcgtgtgcac

SEQ ID NO: 581606 - DNA, 120 bp, Artificial Sequence
  ENSG00000172009_43 (sequence is synthesized)
atccacacaggtgctcacacaggtgcccacgcacgtgcctgcaggcctgctttgcatgctgctttctgcgtgtccctggcgcctggcacggcgagtcccttggtgcattccgtcgggaca

SEQ ID NO: 581607 - DNA, 120 bp, Artificial Sequence
  ENSG00000172009_44 (sequence is synthesized)
tttcagggagcagcagctctgtggctagaggagaagcgtgggtggcctccagggacggggtcatgtggccggcatcttcaggtgtgtcctgctgccaccggcagccagcagcagcccagg

SEQ ID NO: 581608 - DNA, 120 bp, Artificial Sequence
  ENSG00000172009_45 (sequence is synthesized)
ggcctccgggtcccggtcgttttccagttttggggtgggagggccgggcccagcgcatcacctgtgcactcgccctgtttgcactgtggcagctgacacgggccaggccggcgggaacgg

SEQ ID NO: 581609 - DNA, 120 bp, Artificial Sequence
  ENSG00000172009_46 (sequence is synthesized)
ggtgtgacccaggctcgggacagccgccagagtccctcacaaggaacaggtggctaccagctttgagggccggccctgccctgcctgggtgcaacattgcactgggcagcctgcaggttg

SEQ ID NO: 581610 - DNA, 120 bp, Artificial Sequence
  ENSG00000172009_47 (sequence is synthesized)
ccgatgtggaggtcacctacacagcatgtttccccctccaaggacatccggacagccagcacagaggccgacaagaagctctctgagttcgacgtggagatgagcatgagggaggacgtg

SEQ ID NO: 581611 - DNA, 120 bp, Artificial Sequence
  ENSG00000172009_48 (sequence is synthesized)
gggagctccgtgtcttcccatacgagtccttccgggatctgcgtgatcggcctcagagccatgggctgagacagacccttctctggagaaggcttggcgtttgccattcatttgctcctc

SEQ ID NO: 581612 - DNA, 120 bp, Artificial Sequence
  ENSG00000172009_49 (sequence is synthesized)
gggtacaggtgggcaccgatcactgcaaggcaggggggtgctcctcgctgttcagggaccgggaactcagtctgctcagatggggcgtggcctgccctctacatgttggctatgaattca

SEQ ID NO: 581613 - DNA, 120 bp, Artificial Sequence
  ENSG00000172009_50 (sequence is synthesized)
tgttgctgttaagcctaagtaggtggacccgtggactgggcacacctcgacttccccactgcgccttagaaggtcaactgggcaatcccgtcctggtccccaggcttgggtcctagtggc

SEQ ID NO: 581614 - DNA, 120 bp, Artificial Sequence
  ENSG00000172009_51 (sequence is synthesized)
agagtgagggccaggccaagagggcgcacacgggtgggctgagttccaggtcccgggggatgtgccgcctcagagaccttgctgctggcggtcggcctggcccctatttggctggctgct

SEQ ID NO: 581615 - DNA, 120 bp, Artificial Sequence
  ENSG00000172009_52 (sequence is synthesized)
ctgcacgcacctgctggttacagctgggtttcctgtggacccagctggtgggcacatctgtcctgaacaggcctctgtttctcctcgtaaacgcctcacgtggctttcatgcgtcctccc

SEQ ID NO: 581616 - DNA, 120 bp, Artificial Sequence
  ENSG00000172009_53 (sequence is synthesized)
ccacccccactggcttggttggcagtgccagtcctcagaagtgaggctgtgtgcatgtcatttgctggtggcgataggcagagcccgtgagactgggaaccaaggcctggacatggaggt

SEQ ID NO: 581617 - DNA, 120 bp, Artificial Sequence
  ENSG00000172009_54 (sequence is synthesized)
gtccccacatgcagcagtgatgccctcggaggctcctcggacagcccctggtccccataccacgttccgtgtgaggccttagagtcatctgcaccccttctggttccaaaaaggccttgg

SEQ ID NO: 581618 - DNA, 120 bp, Artificial Sequence
  ENSG00000172009_55 (sequence is synthesized)
gattatgataacgctggtggcatgaccagaggagttgtgtagtaacacaggccgagaggggcagggaccggaggtcagacggagctggatatgagcctttggccctgggacagggcgtgc

SEQ ID NO: 581619 - DNA, 120 bp, Artificial Sequence
  ENSG00000172009_56 (sequence is synthesized)
cccgtgggcacaccacaggggccgaaaatgcagctgtccccgtttccagtctcactcagccaccccgacagggcgcagctctgcccaggccggagtcctttaggggagggatggcagccg

SEQ ID NO: 581620 - DNA, 120 bp, Artificial Sequence
  ENSG00000172009_57 (sequence is synthesized)
gggcctggccgtggttttcatgctgccctgcgccaagccacctctgctgagagggaggtttagaacctcagaggtgcccggcggtctgggttagcagtcaggtgggctgagggatgcgga

SEQ ID NO: 581621 - DNA, 63 bp, Artificial Sequence
  ENSG00000172009_58 (sequence is synthesized)
ggagggagggagccgcaggcgcagacccacccgccatgaagccccccgcagtagagacggtgc

SEQ ID NO: 581622 - DNA, 120 bp, Artificial Sequence
  ENSG00000172014_0 (sequence is synthesized)
gatttgaaatagcggagttggggttggatcggggctttggggttggataggggatttggggctgggtcggccggggtcggggaggggggtggtgaaaaggtgacagggagctgccctcgc

SEQ ID NO: 581623 - DNA, 120 bp, Artificial Sequence
  ENSG00000172014_1 (sequence is synthesized)
tcaagagccggtggttgggggtctgagaagaagtcaccaatatgaagttattcggcttcgggagccgcaggggccagacggcccagggctccatagaccacgtctacacgggttccggat

SEQ ID NO: 581624 - DNA, 120 bp, Artificial Sequence
  ENSG00000172014_2 (sequence is synthesized)
agaagatccacagggcagctgtcaaaggcgacgccgcggaggtggagcgctgcttggcgcgcaggagcggagaactggacgccctggacaagcagcacagaactgctctacacttggcct

SEQ ID NO: 581625 - DNA, 120 bp, Artificial Sequence
  ENSG00000172014_3 (sequence is synthesized)
acagaactgctctacacttggcctgtgccagtggccatgtgcaagtggtcactctcctggttaacagaaaatgccagattgatgtctgtgacaaagaaaacagaacgcctttgatacagg

SEQ ID NO: 581626 - DNA, 120 bp, Artificial Sequence
  ENSG00000172014_4 (sequence is synthesized)
tgccaggaagaggcttgtgccgttattctgctggaacatggcgccaatccaaaccttaaggatatctacggcaacactgctctccattatgccgtgtatagtgagagcacctcactggca

SEQ ID NO: 581627 - DNA, 120 bp, Artificial Sequence
  ENSG00000172014_5 (sequence is synthesized)
gtgagagcacctcactggcagaaaaactgctttcccatggtgcacatattgaagcactggacaaggacaataataccccacttttatttgctataatttgcaagaaagagaaaatggtgg

SEQ ID NO: 581628 - DNA, 120 bp, Artificial Sequence
  ENSG00000172014_6 (sequence is synthesized)
aaaagaaagcaagttcacatgccgttgataggctgagacggtcagctctcatgcttgctgtatactatgactcaccaggtattgtcaatatccttcttaagcaaaatattgatgtcttcg

SEQ ID NO: 581629 - DNA, 120 bp, Artificial Sequence
  ENSG00000172014_7 (sequence is synthesized)
ctcaagacatgtgtggacgagatgcagaagattatgctatttctcatcatttgacaaaaattcaacaacaaattttggaacataaaaagaagatacttaaaaaggagaaatcagatgttg

SEQ ID NO: 581630 - DNA, 120 bp, Artificial Sequence
  ENSG00000172014_8 (sequence is synthesized)
gaagttctgatgaatctgcagtcagcattttccatgaactgcgtgtggattcattgcctgcatcggatgacaaagacttgaatgttgctactaagcagtgtgtccccgagaaagtgtcag

SEQ ID NO: 581631 - DNA, 120 bp, Artificial Sequence
  ENSG00000172014_9 (sequence is synthesized)
tcagagcctttacctggatcttcgcatgaaaaaggaaacagaatagtcaatggacaaggagaagggcctcctgcaaaacatccttccttgaagcctagcactgaagtggaagatcctgct

SEQ ID NO: 581632 - DNA, 120 bp, Artificial Sequence
  ENSG00000172014_10 (sequence is synthesized)
aaagaatgtacagacattgagagcagaacaagccttaccagtggcttcagaggaagagcaacaaaggcatgaaagaagtgaaaagaagcaaccacaggtcaaagaaggaaataatacaaa

SEQ ID NO: 581633 - DNA, 82 bp, Artificial Sequence
  ENSG00000172014_11 (sequence is synthesized)
tcagaaaatatatgtgatagtacatcttctgctgctgctggcagattaacccaacaaagaaagattgggaaaacgtatcctc

SEQ ID NO: 581634 - DNA, 80 bp, Artificial Sequence
  ENSG00000172014_12 (sequence is synthesized)
aaacgtatcctcagcaatttcccaagaagctgaaggaagagcatgagttaatatgctgtacaaaaaaaatagagaagaat

SEQ ID NO: 581635 - DNA, 120 bp, Artificial Sequence
  ENSG00000172014_13 (sequence is synthesized)
gttgaagcaaaacaacttgaaccaactgttcagtcactagagatgaaatcaaagactgcaagaaatactccaaattgggattttcataatcatgaagaaatgaaaggtctgatggatgaa

SEQ ID NO: 581636 - DNA, 120 bp, Artificial Sequence
  ENSG00000172014_14 (sequence is synthesized)
tgaaaggtctgatggatgaaaattgcattttgaaggcagatattgctatactcagacaggaaatatgtacaatgaaaaatgacaacttggaaaaagaaaataaatatcttaaggacatta

SEQ ID NO: 581637 - DNA, 120 bp, Artificial Sequence
  ENSG00000172014_15 (sequence is synthesized)
aaagaaaataaatatcttaaggacattaaaattgttaaagaaacaaatgctgcccttgaaaagtatataaaactcaatgaggaaatgataacagaaacagcattccggtatcaacaagag

SEQ ID NO: 581638 - DNA, 77 bp, Artificial Sequence
  ENSG00000172014_16 (sequence is synthesized)
ttgaaggaaaaagaaagcaagaaaagactggaagctgacattgaatcttatcagtctagactggctgctgctataag

SEQ ID NO: 581639 - DNA, 120 bp, Artificial Sequence
  ENSG00000172014_17 (sequence is synthesized)
tgagttctgctatttccaaagtaaaagatgagaatgagtttcttactgaacaactttctgaaacacaaattaaattcaatgccttaaaagataagttccgtaagacaagagatagtctca

SEQ ID NO: 581640 - DNA, 120 bp, Artificial Sequence
  ENSG00000172014_18 (sequence is synthesized)
tagtctcagaaaaaagtcattggctttagaaactgtacaaaacaacctaagccaaacacagcagcaaacacaggaaatgaaagagatgtatcaaaatgcagaagctaaagtgaataattc

SEQ ID NO: 581641 - DNA, 120 bp, Artificial Sequence
  ENSG00000172014_19 (sequence is synthesized)
agtgaataattccactggaaagtggaactgtgtagaagagaggatatgtcacctccaacgtgaaaatgcgtggcttgtacagcaactagatgacgttcatcagaaagaggatcataaaga

SEQ ID NO: 581642 - DNA, 70 bp, Artificial Sequence
  ENSG00000172014_20 (sequence is synthesized)
cttcgtgctagaagagaaaatatgagagagagaaaacagaagtagtagtaagtatcaaggaagataaata

SEQ ID NO: 581643 - DNA, 120 bp, Artificial Sequence
  ENSG00000172014_21 (sequence is synthesized)
ttacatgaagcatccagaaaagataaatgtatagggacaaaaagtagattcatgtttgcaaggggctggggctggaagctggtagtgactgctaatgggcatgaggaatcttacagtgat

SEQ ID NO: 581644 - DNA, 77 bp, Artificial Sequence
  ENSG00000172014_22 (sequence is synthesized)
aggggctggggctggaagctggtagtgactgctaatgggcatgaggaatcttacagtgatggaaatgctactaaaaa

SEQ ID NO: 581645 - DNA, 85 bp, Artificial Sequence
  ENSG00000172014_23 (sequence is synthesized)
gaaaaatgtgtttactatatcggcttagaaacatgcctcatttctaggaaataaaagatagaggtgagagatgatttactttgag

SEQ ID NO: 581646 - DNA, 86 bp, Artificial Sequence
  ENSG00000172014_24 (sequence is synthesized)
tgctgaaatagtaattttaatgtctttatgttgccacatgttaagaccataatgtagttataaatggaaatgtttacacctgaagt

SEQ ID NO: 581647 - DNA, 120 bp, Artificial Sequence
  ENSG00000172014_25 (sequence is synthesized)
ccataatgtagttataaatggaaatgtttacacctgaagtgagtattttcaaattaaaatttaattaagtgattttcttcgacacttaattctagattccccagatgaattgaagtgtat

SEQ ID NO: 581648 - DNA, 120 bp, Artificial Sequence
  ENSG00000172014_26 (sequence is synthesized)
tgctgtgtcttgtaataccttgctttaactagctttttatgtattttagttggtatagctttgttattattcatattaacaaatctgaaaatatgtcaaattacgtatttttatgaccac

SEQ ID NO: 581649 - DNA, 120 bp, Artificial Sequence
  ENSG00000172014_27 (sequence is synthesized)
atgaccacgtaatgttttaaaggcacctactggttataaaatcataatttaggataaatgtggtaaaacttagcaaaactatatttggtttagttttcccactggtatttatagtttact

SEQ ID NO: 581650 - DNA, 74 bp, Artificial Sequence
  ENSG00000172014_28 (sequence is synthesized)
aatgactctgtgatttacgagttaggcactacatctccattttcagactgaggggtggcaggcttcacatacag

SEQ ID NO: 581651 - DNA, 78 bp, Artificial Sequence
  ENSG00000172014_29 (sequence is synthesized)
tacttgtagctgtctgtgatttacgagttaggcactacatctccattttcagactgaggggtggcaggcttcaccttt

SEQ ID NO: 581652 - DNA, 82 bp, Artificial Sequence
  ENSG00000172014_30 (sequence is synthesized)
aggaactttgaggctgagttgagcttctgagatgattgaatgttggaatgaatctgttgtgtaaaagagaataccaatttgg

SEQ ID NO: 581653 - DNA, 120 bp, Artificial Sequence
  ENSG00000172014_31 (sequence is synthesized)
tttgaggctgagttgagcttctgagatgattgaatgttggaatgaatctgttgtgtaaaagagaataccaatttggcaggaagagaacatattctgcatccctcactgaattcagtaata

SEQ ID NO: 581654 - DNA, 120 bp, Artificial Sequence
  ENSG00000172014_32 (sequence is synthesized)
atcaaatcatcaaacactctaaaagtgggcaaagtacctttttccagatctacaagttacttatatacataggaaaaaatccttcgcatttctggtataagaatttaaactaaaagagga

SEQ ID NO: 581655 - DNA, 120 bp, Artificial Sequence
  ENSG00000172016_0 (sequence is synthesized)
cataccatatcccaccagagagtgactcctgattgcctcctcaagtcgcagacactatgctgcctcccatggccctgcccagtgtatcttggatgctgctttcctgcctcatgctgctgt

SEQ ID NO: 581656 - DNA, 120 bp, Artificial Sequence
  ENSG00000172016_1 (sequence is synthesized)
ctcaggttcaaggtgaagaaccccagagggaactgccctctgcacggatccgctgtcccaaaggctccaaggcctatggctcccactgctatgccttgtttttgtcaccaaaatcctgga

SEQ ID NO: 581657 - DNA, 120 bp, Artificial Sequence
  ENSG00000172016_2 (sequence is synthesized)
cgtctggattgggctccatgaccccacacagggcaccgagcccaatggagaaggttgggagtggagtagcagtgatgtgatgaattactttgcatgggagagaaatccctccaccatctc

SEQ ID NO: 581658 - DNA, 120 bp, Artificial Sequence
  ENSG00000172016_3 (sequence is synthesized)
aagccccggccactgtgcgagcctgtcgagaagcacagcatttctgaggtggaaagattataactgtaatgtgaggttaccctatgtctgcaagttcactgactagtgcaggagggaagt

SEQ ID NO: 581659 - DNA, 120 bp, Artificial Sequence
  ENSG00000172016_4 (sequence is synthesized)
cagcagcctgtgtttggtgtgcaactcatcatgggcatgagaccagtgtgaggactcaccctggaagagaatattcgcttaattcccccaacctgaccacctcattcttatctttcttct

SEQ ID NO: 581660 - DNA, 120 bp, Artificial Sequence
  ENSG00000172016_5 (sequence is synthesized)
aaaccataccatatcccaccagagaggtaagtgggagctgagagaagatgagacccagggaggagctactgcacatgacacaggagaatacatgggagggtcccttcctcagggagcaca

SEQ ID NO: 581661 - DNA, 120 bp, Artificial Sequence
  ENSG00000172016_6 (sequence is synthesized)
ggaactctgagactcagcaagggtgtcctgggagggctcggggatgggagagtacacagattcacaactcattcagaactgtagaagatgatggatgtgaccaagatcactttagtccta

SEQ ID NO: 581662 - DNA, 120 bp, Artificial Sequence
  ENSG00000172016_7 (sequence is synthesized)
catatcccaccagagagtcgcagacactatgctgcctcccatggccctgcccagtgtatcttggatgctgctttcctgcctcatgctgctgtctcaggttcaaggtgagattgctttgcc

SEQ ID NO: 581663 - DNA, 120 bp, Artificial Sequence
  ENSG00000172016_8 (sequence is synthesized)
tctagcactgggttccctatgaatcctcagagctaacaagaggaggaaggctcctgtgtgtcatgtgaggtaatgacgtggtgtctaatgaacctgcctgcagttcttgcatcatctctc

SEQ ID NO: 581664 - DNA, 120 bp, Artificial Sequence
  ENSG00000172016_9 (sequence is synthesized)
agtggactctaatatacactggagggtcagtaatgagatgtggggagggacaatgattggaggacccaatgtagagacagcccagagtgaggagagtattgaatggttgaataaggggaa

SEQ ID NO: 581665 - DNA, 120 bp, Artificial Sequence
  ENSG00000172016_10 (sequence is synthesized)
agggtaataagagactggatggtgctccatttactacggctattttgagataaagaatttctgaaaacataagggaagatgaaggggtgtcaggaatgtggtcttcctccccaaggacat

SEQ ID NO: 581666 - DNA, 120 bp, Artificial Sequence
  ENSG00000172020_0 (sequence is synthesized)
tccgagaaagagacggagagagagggaagaaaaagacagatagatagatattggggggaaggagaaaaaaggagaagagagggaagagaggacagcggagagagagcaccagagagagag

SEQ ID NO: 581667 - DNA, 120 bp, Artificial Sequence
  ENSG00000172020_1 (sequence is synthesized)
ggagagagagagagagcgctagagagagggagcgagcatgtgcgatgagcaatagctgtggaccttacagttgctgctaactgccctggtgtgtgtgagggagagagagggagggaggga

SEQ ID NO: 581668 - DNA, 120 bp, Artificial Sequence
  ENSG00000172020_2 (sequence is synthesized)
gagagagcgcgctagcgcgagagagcgagtgagcaagcgagcagaaaagaggtggagagggggggaataagaaagagagagaaggaaaggagagaaggcaggaagaaggcaagggacgag

SEQ ID NO: 581669 - DNA, 120 bp, Artificial Sequence
  ENSG00000172020_3 (sequence is synthesized)
acaaccatgctgtgctgtatgagaagaaccaaacaggttgaaaaaaatgatgacgaccaaaagattgaacaagatggtatcaaaccagaagataaagctcataaggccgcaaccaaaatt

SEQ ID NO: 581670 - DNA, 120 bp, Artificial Sequence
  ENSG00000172020_4 (sequence is synthesized)
caggctagcttccgtggacacataacaaggaaaaagctcaaaggagagaagaaggatgatgtccaagctgctgaggctgaagctaataagaaggatgaagcccctgttgccgatggggtg

SEQ ID NO: 581671 - DNA, 120 bp, Artificial Sequence
  ENSG00000172020_5 (sequence is synthesized)
gagaagaagggagaaggcaccactactgccgaagcagccccagccactggctccaagcctgatgagcccggcaaagcaggagaaactccttccgaggagaagaagggggagggtgatgct

SEQ ID NO: 581672 - DNA, 120 bp, Artificial Sequence
  ENSG00000172020_6 (sequence is synthesized)
gccacagagcaggcagccccccaggctcctgcatcctcagaggagaaggccggctcagctgagacagaaagtgccactaaagcttccactgataactcgccgtcctccaaggctgaagat

SEQ ID NO: 581673 - DNA, 120 bp, Artificial Sequence
  ENSG00000172020_7 (sequence is synthesized)
ggaggagcctaaacaagccgatgtgcctgctgctgtcactgctgctgctgccaccacccctgccgcagaggatgctgctgccaaggcaacagcccagcctccaacggagactggggagag

SEQ ID NO: 581674 - DNA, 120 bp, Artificial Sequence
  ENSG00000172020_8 (sequence is synthesized)
cagccaagctgaagagaacatagaagctgtagatgaaaccaaacctaaggaaagtgcccggcaggacgagggtaaagaagaggaacctgaggctgaccaagaacatgcctgaactctaag

SEQ ID NO: 581675 - DNA, 120 bp, Artificial Sequence
  ENSG00000172020_9 (sequence is synthesized)
aaatggctttccacatccccaccctcccctctcctgagcctgtctctccctaccctcttctcagctccactctgaagtcccttcctgtcctgctcacgtctgtgagtctgtcctttccca

SEQ ID NO: 581676 - DNA, 120 bp, Artificial Sequence
  ENSG00000172020_10 (sequence is synthesized)
cccactagccctctttctctctgtgtggcaaacatttaaaaaaaaaaaaaaaaagcaggaaagatcccaagtcaaacagtgtggcttaaacattttttgtttcttggtgttgttatggca

SEQ ID NO: 581677 - DNA, 120 bp, Artificial Sequence
  ENSG00000172020_11 (sequence is synthesized)
agtttttggtaatgatgattcaatcattttgggaaattcttgcactgtatccaagttatttgatctggtgcgtgtggccctgtgggagtccactttcctctctctctctctctctgttcc

SEQ ID NO: 581678 - DNA, 120 bp, Artificial Sequence
  ENSG00000172020_12 (sequence is synthesized)
aagtgtgtgtgcaatgttccgttcatctgaggagtccaaaatatcgagtgaattcaaaatcatttttgttttcctccttttcaatgtgatggaatgaacaaaaaggaaaaaattcaaaaa

SEQ ID NO: 581679 - DNA, 120 bp, Artificial Sequence
  ENSG00000172020_13 (sequence is synthesized)
acccagtttgttttaaaaataaataaataaagcaaatgtgccaattagcgtaaacttgcggctctaaggctcctttttcaacccgaatattaataaatcatgagagtaatcaaggtccaa

SEQ ID NO: 581680 - DNA, 120 bp, Artificial Sequence
  ENSG00000172020_14 (sequence is synthesized)
tttcaacatctcaagtgtgaattttccctgtcaaaatcttcacaaggaaaatgagtcacagcatcacctgggtgacgaggtcataacacctcagcccttgcttaaaaaattttatttcta

SEQ ID NO: 581681 - DNA, 120 bp, Artificial Sequence
  ENSG00000172020_15 (sequence is synthesized)
cttttctattgtaaagagatctcaaaacaggaagataaaattggactgacagctctacagcctagtcttttagacagtgaactaggccagcattggcagacactggcgatgacaaagtcc

SEQ ID NO: 581682 - DNA, 120 bp, Artificial Sequence
  ENSG00000172020_16 (sequence is synthesized)
tgctctgaattatgccaccccgcactccactttttaccttgcctgggaggcttgaggaaaaatcttcagagagcagttcgacctagtccttattcacttggcttcttgactttctggatt

SEQ ID NO: 581683 - DNA, 120 bp, Artificial Sequence
  ENSG00000172023_0 (sequence is synthesized)
aagccacctcaagtggacaaggcacttaccaacagagattgctgatttgctccttaagcaagagattcactgccgctaagcatggctcagaccaactcgttcttcatgctgatctcctcc

SEQ ID NO: 581684 - DNA, 120 bp, Artificial Sequence
  ENSG00000172023_1 (sequence is synthesized)
ctgatgttcctgtctctgagccaaggccaggagtcccagacagagctgcctaatccccgaatcagctgcccagaaggcaccaatgcctatcgctcctactgctactactttaatgaagac

SEQ ID NO: 581685 - DNA, 120 bp, Artificial Sequence
  ENSG00000172023_2 (sequence is synthesized)
cctgagacctgggttgatgcagatctctattgccagaacatgaattcaggcaacctggtgtctgtgctcacccaggcggagggtgccttcgtggcctcactgattaaggagagtagcact

SEQ ID NO: 581686 - DNA, 120 bp, Artificial Sequence
  ENSG00000172023_3 (sequence is synthesized)
actggagtagtgggtccctggtctcctacaagtcctgggacactggatccccgagcagtgctaatgctggctactgtgcaagcctgacttcatgctcaggattcaagaaatggaaggatg

SEQ ID NO: 581687 - DNA, 120 bp, Artificial Sequence
  ENSG00000172023_4 (sequence is synthesized)
aatcttgtgagaagaagttctcctttgtttgcaagttcaaaaactagaggaagctgaaaaatggatgtctagaactggtcctgcaattactatgaagtcaaaaattaaactagactatgt

SEQ ID NO: 581688 - DNA, 120 bp, Artificial Sequence
  ENSG00000172023_5 (sequence is synthesized)
ctccaactcagttcagaccatctcctccctaatgagtttgcatcgctgatcttcagtaccttcacctgtctcagtctctagagccctgaaaaataaaaacaaacttatttttatccagtg

SEQ ID NO: 581689 - DNA, 120 bp, Artificial Sequence
  ENSG00000172023_6 (sequence is synthesized)
gtggctgcaatgagataagattgatcccttccctattccaccactggtcccaaacttcccaatctactttatcccatcatttgacacattcccagcacagagatgctggtggtcagtgac

SEQ ID NO: 581690 - DNA, 120 bp, Artificial Sequence
  ENSG00000172023_7 (sequence is synthesized)
agcatcatcagggacatttctgtgctgtcctttttctgttacatcctctggaaggtctcagtatatccctcacaccttccttctccactgagtgctccattttcttctccaacagctcta

SEQ ID NO: 581691 - DNA, 120 bp, Artificial Sequence
  ENSG00000172023_8 (sequence is synthesized)
ccacctctatctccttataaacatttttgagaggtaagagggacgtttaaggtctggcaccgcaatcaccaacttttatctttttgtttgtttaaataaaagcaacctctttatagatcc

SEQ ID NO: 581692 - DNA, 120 bp, Artificial Sequence
  ENSG00000172023_9 (sequence is synthesized)
tataatgtatgagttgtgaagttcagtgtaggtagttagagacatgagctgaaggctgaattttctgggctctgggaattcatgcacccactcattgtgtctacttctagaaatgcatct

SEQ ID NO: 581693 - DNA, 120 bp, Artificial Sequence
  ENSG00000172023_10 (sequence is synthesized)
ttatgtacaactttttccctattttgctattgtctgtcttggaagaggtccctctgtagactatatagaaaatgagtagtggaggagaatctactgctggcatttgttatacattttata

SEQ ID NO: 581694 - DNA, 120 bp, Artificial Sequence
  ENSG00000172023_11 (sequence is synthesized)
caagtgtataaaactgtacagtatattatttagtttaacactataaactaaataatatatcaacgactactctacagccaatgttatgctggatatgagagttctgagattcaggaaaaa

SEQ ID NO: 581695 - DNA, 120 bp, Artificial Sequence
  ENSG00000172023_12 (sequence is synthesized)
ttctagagaaggagaagcttagagcaaaagcagaggaaatgatatgatattcatggtgacaacaatgtttattctttctgctataacttggcctgtttctgagtgtgcacacaggcctgg

SEQ ID NO: 581696 - DNA, 120 bp, Artificial Sequence
  ENSG00000172023_13 (sequence is synthesized)
ttattctattgatttttgagtgaccatggcccctgttctggcccttctccatctagaaccgccgctggcactggagtagtgggtccctggtctcctacaagtcctgggacactggatccc

SEQ ID NO: 581697 - DNA, 120 bp, Artificial Sequence
  ENSG00000172023_14 (sequence is synthesized)
ctgatgttcctgtctctgagccaaggtgagattttcccccacacttcccacaaccccaactctgaattcttccctccatcctcatgtataaggttcacttgaaaaaaagcagagtcaaca

SEQ ID NO: 581698 - DNA, 120 bp, Artificial Sequence
  ENSG00000172023_15 (sequence is synthesized)
gaccacttataggtgaccattgtggttgagtttatctgattgaatctatatgcgatggcagtttgggggatgtttttatgtagtcattgctaggatggagagctaaggcaaacgtgtgca

SEQ ID NO: 581699 - DNA, 120 bp, Artificial Sequence
  ENSG00000172023_16 (sequence is synthesized)
gggaaaccgagagaaacttgagaaaggaggaagcctgggtctttaaaggcagaagcctcagcctcagaattaaaggaaaacgaggactcatttatttagcctattcattgtgagctcttg

SEQ ID NO: 581700 - DNA, 120 bp, Artificial Sequence
  ENSG00000172031_0 (sequence is synthesized)
gggctggcctggcgcgctgcggcgctcgctcacccgctcccgaggaagggcagtgggccccgccgccgcctcccaatggcgaggctgcgggattgcctgccccgcctgatgctcacgctc

SEQ ID NO: 581701 - DNA, 120 bp, Artificial Sequence
  ENSG00000172031_1 (sequence is synthesized)
cccgcctgatgctcacgctccggtccctgctcttctggtccctggtctactgctactgcgggctctgcgcctccatccacctgctcaaacttttgtggagcctcggcaaggggccggcgc

SEQ ID NO: 581702 - DNA, 120 bp, Artificial Sequence
  ENSG00000172031_2 (sequence is synthesized)
agaccttccggcggcccgcccgggagcaccctcccgcgtgcctgagcgacccctccttgggcacccactgctacgtgcggatcaaggattcagggttaagatttcactatgttgctgctg

SEQ ID NO: 581703 - DNA, 120 bp, Artificial Sequence
  ENSG00000172031_3 (sequence is synthesized)
gagaaagaggcaaaccacttatgctgctgcttcatggatttccagaattctggtattcttggcgttaccaactgagagaatttaaaagtgaatatcgagttgtagcactggatttgagag

SEQ ID NO: 581704 - DNA, 120 bp, Artificial Sequence
  ENSG00000172031_4 (sequence is synthesized)
gttatggagaaacagatgctcccattcatcgacagaattataaattggattgtctaattacagatataaaggatattttagattctttagggtatagcaaatgtgttcttattggccatg

SEQ ID NO: 581705 - DNA, 120 bp, Artificial Sequence
  ENSG00000172031_5 (sequence is synthesized)
cctgctcagctgttgaaatccagttattattacttcttccaaataccatggttcccagaatttatgttctcaataaatgatttcaaggttttgaaacatctgtttaccagtcacagcact

SEQ ID NO: 581706 - DNA, 120 bp, Artificial Sequence
  ENSG00000172031_6 (sequence is synthesized)
ggcattggaagaaaaggatgccaattaacaacagaggatcttgaagcttatatttatgtcttttctcagcctggagcattaagtggcccaattaaccattaccgaaatatcttcagctgc

SEQ ID NO: 581707 - DNA, 120 bp, Artificial Sequence
  ENSG00000172031_7 (sequence is synthesized)
ctgcctctcaaacatcacatggtgaccactccaacactactactgtggggagagaatgacgcattcatggaggttgagatggctgaagtcacaaagatttatgttaaaaactatttcagg

SEQ ID NO: 581708 - DNA, 120 bp, Artificial Sequence
  ENSG00000172031_8 (sequence is synthesized)
ctaactattttgtcagaagccagtcattggcttcagcaagaccaacctgacatagtgaacaaattgatatggacatttctaaaagaagaaacaagaaaaaaagattgacttttctttatc

SEQ ID NO: 581709 - DNA, 120 bp, Artificial Sequence
  ENSG00000172031_9 (sequence is synthesized)
ttctatgaagggtctgtaatgaaatctctaaataatttttaaaaattgttcatcaacttctttatgttttattagaaaaaaactgttttaatgtgctttatcataaataaatatcctgac

SEQ ID NO: 581710 - DNA, 120 bp, Artificial Sequence
  ENSG00000172031_10 (sequence is synthesized)
aaatggtattgaaaaaaatctgagatcatgtgaacatataatacaatgttgattttcttctggtgtattttgcacagacaagcatctgccttaaaatatatacacttgtacaaaaaggaa

SEQ ID NO: 581711 - DNA, 120 bp, Artificial Sequence
  ENSG00000172031_11 (sequence is synthesized)
attgtgaatcaatgacttcttttcttgggaggatgcatattccatctacccaaattatctggatcctgtcactatggtttcagttagtcagcccaaaatatctgtacaggaaatttaaaa

SEQ ID NO: 581712 - DNA, 120 bp, Artificial Sequence
  ENSG00000172031_12 (sequence is synthesized)
tgatgcatctagagcaactattctgtctaccagccaagaatgacttttcagatttgtttttaaacatagacctaatggcccgggtgctgtggcttgcgcctataatcccagcactttgag

SEQ ID NO: 581713 - DNA, 89 bp, Artificial Sequence
  ENSG00000172031_13 (sequence is synthesized)
acaaaaattagccaggcgaagatcgtgccgttgcactccaacctgggcaacaagaatgagactctgtttaaaaaaaaaaaaaaaaaaaa

SEQ ID NO: 581714 - DNA, 120 bp, Artificial Sequence
  ENSG00000172031_14 (sequence is synthesized)
ggcaacaagaatgagactctgtttaaaaaaaaaaaaaaaaaaaatagacctaatgtatgctgtttattattttgagaaataattattgaaaagtttatacttagaaagtttatttcttta

SEQ ID NO: 581715 - DNA, 120 bp, Artificial Sequence
  ENSG00000172031_15 (sequence is synthesized)
acacacctaaatattcattttaaaatgttatacagatgcacttgcattatttctgttgtatcaatcagttagaaccacataatattgtggaacaaaccaccccagattcggtggcatagg

SEQ ID NO: 581716 - DNA, 120 bp, Artificial Sequence
  ENSG00000172031_16 (sequence is synthesized)
gtcataaccattttttcctgtgctcatggatctgcaggttaaccgtaggctggactcctctggtctttgcctcaggctgcaggtccagctgggactggcttctctctgtgagttgggctg

SEQ ID NO: 581717 - DNA, 120 bp, Artificial Sequence
  ENSG00000172037_0 (sequence is synthesized)
gctcaaagtcgctggactctaagctgtcggagggaccgctggacagacctgggaactgacagagggcctggagggaaacaggccaaagacccacaggcagagttgacacggaaccccaaa

SEQ ID NO: 581718 - DNA, 120 bp, Artificial Sequence
  ENSG00000172037_1 (sequence is synthesized)
gcaaggaggagggctcgggcccgagaccgttcacctccccttatccctgttcccctcttcaggatggagctgacctcaagggaaagagggaggggacagcctctgccctgggaacttcga

SEQ ID NO: 581719 - DNA, 120 bp, Artificial Sequence
  ENSG00000172037_2 (sequence is synthesized)
ctgggcctactgctaagcgtgctggctgccacactggcacaggcccctgccccggatgtgcctggctgttccaggggaagctgctaccccgccacgggcgacctgctggtgggccgagct

SEQ ID NO: 581720 - DNA, 120 bp, Artificial Sequence
  ENSG00000172037_3 (sequence is synthesized)
gacagactgactgcctcatccacttgtggcctgaatggcccccagccctactgcatcgtcagtcacctgcaggacgaaaagaagtgcttcctttgtgactcccggcgccccttctctgct

SEQ ID NO: 581721 - DNA, 120 bp, Artificial Sequence
  ENSG00000172037_4 (sequence is synthesized)
agagacaacccacacagccatcgcatccagaatgtagtcaccagctttgcaccacagcggcgggcagcctggtggcagtcagagaatggtatccctgcggtcaccatccagctggacctg

SEQ ID NO: 581722 - DNA, 120 bp, Artificial Sequence
  ENSG00000172037_5 (sequence is synthesized)
gaggctgagtttcatttcacacacctcattatgaccttcaagacatttcgccctgctgccatgctggtggaacgctcagcagactttggccgcacctggcatgtgtaccgatatttctcc

SEQ ID NO: 581723 - DNA, 120 bp, Artificial Sequence
  ENSG00000172037_6 (sequence is synthesized)
tatgactgtggggctgacttcccaggagtcccactagcacccccacggcactgggatgatgtagtctgtgagtcccgctactcagagattgagccatccactgaaggcgaggtcatctat

SEQ ID NO: 581724 - DNA, 120 bp, Artificial Sequence
  ENSG00000172037_7 (sequence is synthesized)
cgtgtgctggaccctgccatccctatcccagacccctacagctcacggattcagaacctgttgaagatcaccaacctacgggtgaacctgactcgtctacacacgttgggagacaaccta

SEQ ID NO: 581725 - DNA, 120 bp, Artificial Sequence
  ENSG00000172037_8 (sequence is synthesized)
ctcgacccacggagggagatccgagagaagtactactatgccctctatgagctggttgtacgtggcaactgcttctgctacggacacgcctcagagtgtgcacccgccccaggggcacca

SEQ ID NO: 581726 - DNA, 120 bp, Artificial Sequence
  ENSG00000172037_9 (sequence is synthesized)
gcccatgctgagggcatggtgcacggagcttgcatctgcaaacacaacacacgtggcctcaactgcgagcagtgtcaggatttctatcgtgacctgccctggcgtccggctgaggacggc

SEQ ID NO: 581727 - DNA, 120 bp, Artificial Sequence
  ENSG00000172037_10 (sequence is synthesized)
catagtcatgcctgtaggaagtgtgagtgccatgggcacacccacagctgccacttcgacatggccgtatacctggcatctggcaatgtgagtggaggtgtgtgtgatggatgtcagcat

SEQ ID NO: 581728 - DNA, 120 bp, Artificial Sequence
  ENSG00000172037_11 (sequence is synthesized)
aacacagctgggcgccactgtgagctctgtcggcccttcttctaccgtgacccaaccaaggacctgcgggatccggctgtgtgccgctcctgtgattgtgaccccatgggttctcaagac

SEQ ID NO: 581729 - DNA, 120 bp, Artificial Sequence
  ENSG00000172037_12 (sequence is synthesized)
ggtggtcgctgtgattcccatgatgaccctgcactgggactggtctccggccagtgtcgctgcaaagaacatgtggtgggcactcgctgccagcaatgccgtgatggcttctttgggctc

SEQ ID NO: 581730 - DNA, 120 bp, Artificial Sequence
  ENSG00000172037_13 (sequence is synthesized)
agcatcagtgaccgtctgggctgccggcgatgtcaatgtaatgcacggggcacagtgcctgggagcactccttgtgaccccaacagtggatcctgttactgcaaacgtctagtgactgga

SEQ ID NO: 581731 - DNA, 120 bp, Artificial Sequence
  ENSG00000172037_14 (sequence is synthesized)
cgtggatgtgaccgctgcctgcctggccactggggcctgagccacgacctgctcggctgccgcccctgtgactgcgacgtgggtggtgctttggatccccagtgtgatgagggcacaggt

SEQ ID NO: 581732 - DNA, 120 bp, Artificial Sequence
  ENSG00000172037_15 (sequence is synthesized)
caatgccactgccgccagcacatggttgggcgacgctgtgagcaggtgcaacctggctacttccggcccttcctggaccacctaatttgggaggctgaggacacccgagggcaggtgctc

SEQ ID NO: 581733 - DNA, 120 bp, Artificial Sequence
  ENSG00000172037_16 (sequence is synthesized)
gatgtggtggagcgcctggtgacccccggggaaactccatcctggactggctcaggcttcgtgcggctacaggaaggtcagaccctggagttcctggtggcctctgtgccgaaggctatg

SEQ ID NO: 581734 - DNA, 120 bp, Artificial Sequence
  ENSG00000172037_17 (sequence is synthesized)
gactatgacctgctgctgcgcttagagccccaggtccctgagcaatgggcagagttggaactgattgtgcagcgtccagggcctgtgcctgcccacagcctgtgtgggcatttggtgccc

SEQ ID NO: 581735 - DNA, 120 bp, Artificial Sequence
  ENSG00000172037_18 (sequence is synthesized)
aaggatgatcgcatccaagggactctgcaaccacatgccaggtacttgatatttcctaatcctgtctgccttgagcctggtatctcctacaagctgcatctgaagctggtacggacaggg

SEQ ID NO: 581736 - DNA, 120 bp, Artificial Sequence
  ENSG00000172037_19 (sequence is synthesized)
ggaagtgcccagcctgagactccctactctggacctggcctgctcattgactcgctggtgctgctgccccgtgtcctggtgctagagatgtttagtgggggtgatgctgctgccctggag

SEQ ID NO: 581737 - DNA, 120 bp, Artificial Sequence
  ENSG00000172037_20 (sequence is synthesized)
cgccaggccacctttgaacgctaccaatgccatgaggagggtctggtgcccagcaagacttctccctctgaggcctgcgcacccctcctcatcagcctgtccaccctcatctacaatggt

SEQ ID NO: 581738 - DNA, 120 bp, Artificial Sequence
  ENSG00000172037_21 (sequence is synthesized)
gccctgccatgtcagtgcaaccctcaaggttcactgagttctgagtgcaaccctcatggtggtcagtgcctgtgcaagcctggagtggttgggcgccgctgtgacctctgtgcccctggc

SEQ ID NO: 581739 - DNA, 120 bp, Artificial Sequence
  ENSG00000172037_22 (sequence is synthesized)
tactatggctttggccccacaggctgtcaagcctgccagtgcagccacgagggggcactcagcagtctctgtgaaaagaccagtgggcaatgtctctgtcgaactggtgcctttgggctt

SEQ ID NO: 581740 - DNA, 120 bp, Artificial Sequence
  ENSG00000172037_23 (sequence is synthesized)
gtgtctgcaatgggcatgcagatgagtgcaacacccacacaggcgcttgcctgggctgccgtgatcacacagggggtgagcactgtgaaaggtgcattgctggtttccacggggacccac

SEQ ID NO: 581741 - DNA, 120 bp, Artificial Sequence
  ENSG00000172037_24 (sequence is synthesized)
ggctgccatatgggggccagtgccggccctgtccctgtcctgaaggccctgggagccaacggcactttgctacttcttgccaccaggatgaatattcccagcagattgtgtgccactgcc

SEQ ID NO: 581742 - DNA, 120 bp, Artificial Sequence
  ENSG00000172037_25 (sequence is synthesized)
gggcaggctatacggggctgcgatgtgaagcttgtgcccctgggcactttggggacccatcaaggccaggtggccggtgccaactgtgtgagtgcagtgggaacattgacccaatggatc

SEQ ID NO: 581743 - DNA, 120 bp, Artificial Sequence
  ENSG00000172037_26 (sequence is synthesized)
ctgatgcctgtgacccccacacggggcaatgcctgcgctgtttacaccacacagagggtccacactgtgcccactgcaagcctggcttccatgggcaggctgcccgacagagctgtcacc

SEQ ID NO: 581744 - DNA, 120 bp, Artificial Sequence
  ENSG00000172037_27 (sequence is synthesized)
gctgcacatgcaacctgctgggcacaaatccgcagcagtgcccatctcctgaccagtgccactgtgatccaagcagtgggcagtgcccatgcctccccaatgtccagggccctagctgtg

SEQ ID NO: 581745 - DNA, 120 bp, Artificial Sequence
  ENSG00000172037_28 (sequence is synthesized)
accgctgtgcccccaacttctggaacctcaccagtggccatggttgccagccttgtgcctgccacccaagccgggccagaggccccacctgcaacgagttcacagggcagtgccactgcc

SEQ ID NO: 581746 - DNA, 120 bp, Artificial Sequence
  ENSG00000172037_29 (sequence is synthesized)
gtgccggctttggagggcggacttgttctgagtgccaagagctccactggggagaccctgggttgcagtgccatgcctgtgattgtgactctcgtggaatagatacacctcagtgtcacc

SEQ ID NO: 581747 - DNA, 120 bp, Artificial Sequence
  ENSG00000172037_30 (sequence is synthesized)
gcttcacaggtcactgcagctgccgcccaggggtgtctggtgtgcgctgtgaccagtgtgcccgtggcttctcaggaatctttcctgcctgccatccctgccatgcatgcttcggggatt

SEQ ID NO: 581748 - DNA, 120 bp, Artificial Sequence
  ENSG00000172037_31 (sequence is synthesized)
gggaccgagtggtgcaggacttggcagcccgtacacagcgcctagagcagcgggcgcaggagttgcaacagacgggtgtgctgggtgcctttgagagcagcttctggcacatgcaggaga

SEQ ID NO: 581749 - DNA, 120 bp, Artificial Sequence
  ENSG00000172037_32 (sequence is synthesized)
agctgggcattgtgcagggcatcgtaggtgcccgcaacacctcagccgcctccactgcacagcttgtggaggccacagaggagctgcggcgtgaaattggggaggccactgagcacctga

SEQ ID NO: 581750 - DNA, 120 bp, Artificial Sequence
  ENSG00000172037_33 (sequence is synthesized)
ctcagctcgaggcagacctgacagatgtgcaagatgagaacttcaatgccaaccatgcactaagtggtctggagcgagataggcttgcacttaatctcacactgcggcagctcgaccagc

SEQ ID NO: 581751 - DNA, 120 bp, Artificial Sequence
  ENSG00000172037_34 (sequence is synthesized)
atcttgacttgctcaaacattcaaacttcctgggtgcctatgacagcatccggcatgcccatagccagtctgcagaggcagaacgtcgtgccaatacctcagccctggcagtacctagcc

SEQ ID NO: 581752 - DNA, 120 bp, Artificial Sequence
  ENSG00000172037_35 (sequence is synthesized)
ctgtgagcaactcggcaagtgctcggcatcggacagaggcactgatggatgctcagaaggaggacttcaacagcaaacacatggccaaccagcgggcacttggcaagctctctgcccata

SEQ ID NO: 581753 - DNA, 120 bp, Artificial Sequence
  ENSG00000172037_36 (sequence is synthesized)
cccacaccctgagcctgacagacataaatgagctggtgtgtggggcaccaggggatgcaccctgtgctacaagcccttgtgggggtgccggctgtcgagatgaggatgggcagccgcgct

SEQ ID NO: 581754 - DNA, 120 bp, Artificial Sequence
  ENSG00000172037_37 (sequence is synthesized)
gtgggggcctcagctgcaatggggcagcggctacagcagacctagcactgggccgggcccggcacacacaggcagagctgcagcgggcactggcagaaggtggtagcatcctcagcagag

SEQ ID NO: 581755 - DNA, 120 bp, Artificial Sequence
  ENSG00000172037_38 (sequence is synthesized)
tggctgagactcgtcggcaggcaagcgaggcacagcagcgggcccaggcagccctggacaaggctaatgcttccaggggacaggtggaacaggccaaccaggaacttcaagaacttatcc

SEQ ID NO: 581756 - DNA, 120 bp, Artificial Sequence
  ENSG00000172037_39 (sequence is synthesized)
agagtgtgaaggacttcctcaaccaggagggggctgatcctgatagcattgaaatggtggccacacgggtgctagagctctccatcccagcttcagctgagcagatccagcacctggcgg

SEQ ID NO: 581757 - DNA, 120 bp, Artificial Sequence
  ENSG00000172037_40 (sequence is synthesized)
gtgcgattgcagagcgagtccggagcctggcagatgtggatgcgatcctggcacgtactgtaggagatgtgcgtcgtgccgagcagctactgcaggatgcacggcgggcaaggagctggg

SEQ ID NO: 581758 - DNA, 120 bp, Artificial Sequence
  ENSG00000172037_41 (sequence is synthesized)
ctgaggatgagaaacagaaggcagagacagtacaggcagcactggaggaggcccagcgggcacagggtattgcccagggtgccatccggggggcagtggctgacacacgggacacagagc

SEQ ID NO: 581759 - DNA, 120 bp, Artificial Sequence
  ENSG00000172037_42 (sequence is synthesized)
agaccctgtaccaggtacaggagaggatggcaggtgcagagcgggcactgagctctgcaggtgaaagggctcggcagttggatgctctcctggaggctctgaaattgaaacgggcaggaa

SEQ ID NO: 581760 - DNA, 120 bp, Artificial Sequence
  ENSG00000172037_43 (sequence is synthesized)
atagtctggcagcctctacagcagaagaaacggcaggcagtgcccagggtcgtgcccaggaggctgagcagctgctacgcggtcctctgggtgatcagtaccagacggtgaaggccctag

SEQ ID NO: 581761 - DNA, 120 bp, Artificial Sequence
  ENSG00000172037_44 (sequence is synthesized)
ctgagcgcaaggcccaaggtgtgctggctgcacaggcaagggcagaacaactgcgggatgaggctcgggacctgttgcaagccgctcaggacaagctgcagcggctacaggaattggaag

SEQ ID NO: 581762 - DNA, 120 bp, Artificial Sequence
  ENSG00000172037_45 (sequence is synthesized)
gcacctatgaggaaaatgagcgggcactggagagtaaggcagcccagttggacgggttggaggccaggatgcgcagcgtgcttcaagccatcaacttgcaggtgcagatctacaacacct

SEQ ID NO: 581763 - DNA, 120 bp, Artificial Sequence
  ENSG00000172037_46 (sequence is synthesized)
gccagtgacccctgcccaaggcctaccccagttcctagcactgccccacatgcatgtctgcctatgcactgaagagctcttggcccggcagggcccccaataaaccagtgtgaaccccca

SEQ ID NO: 581764 - DNA, 120 bp, Artificial Sequence
  ENSG00000172037_47 (sequence is synthesized)
ccgcccggtgttgcgctccttcccagaatccgctccggcctttccttcctgccgcgattcccaactttgctcaaagtcgctggactctaagctgtcggagggaccgctggacagacctgg

SEQ ID NO: 581765 - DNA, 120 bp, Artificial Sequence
  ENSG00000172037_48 (sequence is synthesized)
gagttgttagccaactaggcaggtggaccagggtcagtcttcagctgactgtctgcctctgcccaatttaggtgcctatgacagcatccggcatgcccatagccagtctgcagaggcaga

SEQ ID NO: 581766 - DNA, 120 bp, Artificial Sequence
  ENSG00000172037_49 (sequence is synthesized)
actatgacctgctgctgcgcttagagccccaggttagaccctgttatctaatctggggctgaacctctgggtgtgggagcatctcctccatcatcccgttttcccaggtccctgagcaat

SEQ ID NO: 581767 - DNA, 120 bp, Artificial Sequence
  ENSG00000172037_50 (sequence is synthesized)
agtgtttatgatcccttgactggctcctgagttattgcccatatgtggtcccaggtccatgttcttgagtctgagccccttgtatagtccctgtccttgtgattatatccttatgcctgg

SEQ ID NO: 581768 - DNA, 120 bp, Artificial Sequence
  ENSG00000172037_51 (sequence is synthesized)
taacaaacccctatcccatgtacatgtcctgagtccataccccaaaactgtatcctcatgcccatgctggagaatctatgttcttaagttcttgctgtgtccctatagaggagggggctg

SEQ ID NO: 581769 - DNA, 120 bp, Artificial Sequence
  ENSG00000172037_52 (sequence is synthesized)
ggactacactggattagtgtttatgatcccttgactggctcctgagttattgcccatatgtggtcccaggtccatgttcttgagtctgagccccttgtatagtccctgtccttgtgatta

SEQ ID NO: 581770 - DNA, 120 bp, Artificial Sequence
  ENSG00000172037_53 (sequence is synthesized)
ctatgcttctctctccttcccattactgttctctctcctccttctggacctgctgctggtttcctcaaactaagtcttggaccctctactctcaacctgggtcagttgtagttctcttcc

SEQ ID NO: 581771 - DNA, 120 bp, Artificial Sequence
  ENSG00000172037_54 (sequence is synthesized)
atttcctgaccttcccacctagactcccactactcacactcccctgagaccctcccccacccacactcccctcagaccccctcccctggctctggctcagctctgccttgctcctagcct

SEQ ID NO: 581772 - DNA, 120 bp, Artificial Sequence
  ENSG00000172046_0 (sequence is synthesized)
agcttggcgctccgcctccctcggccttagctagaagtcgaaacaaaacaagccgctaaggcggtggcggcggcgccgggacgggggaggggcgcgccggaaccggaaccgacctgcgcc

SEQ ID NO: 581773 - DNA, 120 bp, Artificial Sequence
  ENSG00000172046_1 (sequence is synthesized)
ggaaccggaacggagagcgggttgccagggcccgaagagggctggctgcggcggtctcgctcggctgtccgttccttgctggagaatttggccacaaagagttgccaagatagctgggcc

SEQ ID NO: 581774 - DNA, 120 bp, Artificial Sequence
  ENSG00000172046_2 (sequence is synthesized)
aggaagaaagcgccgcagccctgacccagacgctgttgccgaccccggggcactctggctgtcgaccaagcggctcaagatgtctggcggggccagtgccacaggcccaaggagagggcc

SEQ ID NO: 581775 - DNA, 120 bp, Artificial Sequence
  ENSG00000172046_3 (sequence is synthesized)
cccaggactggaggacaccactagtaagaagaagcagaaggatcgagcaaaccaggagagcaaggatggagatcctaggaaagagacagggtctcgatatgttgcccaggctggtcttga

SEQ ID NO: 581776 - DNA, 120 bp, Artificial Sequence
  ENSG00000172046_4 (sequence is synthesized)
acctctggcctcaggtgatccttctgcctcagcctcccatgcagctgggatcacaggctcacgccaccgtacccggctgttctttccttcatcgtcagggtcagcatccactcctcaaga

SEQ ID NO: 581777 - DNA, 120 bp, Artificial Sequence
  ENSG00000172046_5 (sequence is synthesized)
ggagcagaccaaagagggagcttgtgaagaccctcatgatctcttggctactcccactccagagttgttgctcgattggaggcagagtgcagaagaggtgattgtcaagcttcgtgtggg

SEQ ID NO: 581778 - DNA, 120 bp, Artificial Sequence
  ENSG00000172046_6 (sequence is synthesized)
agtaggtcccctgcagctggaggatgtagatgctgctttcacagatacagactgtgtggtgcggtttgcaggtggtcagcagtggggtggtgtcttctatgctgagataaaaagctcttg

SEQ ID NO: 581779 - DNA, 120 bp, Artificial Sequence
  ENSG00000172046_7 (sequence is synthesized)
tgctaaagtgcaaacccgcaagggcagtctcctgcacctgacactgcccaaaaaggtgcctatgctcacgtggccctccctcctggttgaggctgatgaacagctttgcataccaccgct

SEQ ID NO: 581780 - DNA, 120 bp, Artificial Sequence
  ENSG00000172046_8 (sequence is synthesized)
gaactcccaaacctgcctcctgggctcagaggagaatttagcccctttggcaggagagaaagcagtgcctcccgggaatgacccagtctctccagccatggtccggagcagaaaccctgg

SEQ ID NO: 581781 - DNA, 120 bp, Artificial Sequence
  ENSG00000172046_9 (sequence is synthesized)
gaaagatgactgtgccaaggaggagatggcagtggcagcagatgctgcaaccttggtggatgagcccgagtcgatggtgaacctggcgtttgtcaagaatgactcgtatgagaagggccc

SEQ ID NO: 581782 - DNA, 120 bp, Artificial Sequence
  ENSG00000172046_10 (sequence is synthesized)
ggattcagtggtggtgcacgtgtacgtgaaggagatctgcagggacacctcaagagtacttttccgtgagcaggacttcacgctcatcttccagaccagggatggaaacttcctgaggct

SEQ ID NO: 581783 - DNA, 120 bp, Artificial Sequence
  ENSG00000172046_11 (sequence is synthesized)
gcacccgggctgtgggccccacaccaccttccgttggcaggtgaagctcaggaatctgattgagccagagcagtgcaccttctgtttcacggcttctcgcatcgacatctgccttcgtaa

SEQ ID NO: 581784 - DNA, 120 bp, Artificial Sequence
  ENSG00000172046_12 (sequence is synthesized)
gaggcagagtcagcgctgggggggcctggaggccccggctgcacgagtgggtggtgcaaaggttgccgtgccgacaggtccaacccctctggattcaaccccaccaggaggtgctcccca

SEQ ID NO: 581785 - DNA, 120 bp, Artificial Sequence
  ENSG00000172046_13 (sequence is synthesized)
ccccctgacaggccaggaggaggcccgggctgtggagaaggataaatccaaggcacgatctgaggacacagggctagacagtgtggcaacccgcacacccatggagcatgtaaccccaaa

SEQ ID NO: 581786 - DNA, 120 bp, Artificial Sequence
  ENSG00000172046_14 (sequence is synthesized)
gccagagacacacctggcctcgcccaagcctacatgcatggtgcctcccatgccccacagcccagttagtggagacagcgtggaggaggaggaagaggaagagaagaaggtgtgtctgcc

SEQ ID NO: 581787 - DNA, 120 bp, Artificial Sequence
  ENSG00000172046_15 (sequence is synthesized)
aggcttcactggccttgtcaatttaggcaacacctgcttcatgaacagcgtcattcagtctctgtccaacactcgggaactccgggacttcttccatgaccgctcctttgaggctgagat

SEQ ID NO: 581788 - DNA, 120 bp, Artificial Sequence
  ENSG00000172046_16 (sequence is synthesized)
caactacaacaacccactagggactggtgggcgtctggccattggctttgccgtgctgcttcgggcgctgtggaagggcacccaccatgccttccagccttccaagttgaaggccattgt

SEQ ID NO: 581789 - DNA, 120 bp, Artificial Sequence
  ENSG00000172046_17 (sequence is synthesized)
ggcgagtaaggccagccagttcacaggctatgcacagcatgatgcccaggagttcatggctttcctgctggatgggctgcacgaggacctgaatcgcattcagaacaagccctacacaga

SEQ ID NO: 581790 - DNA, 120 bp, Artificial Sequence
  ENSG00000172046_18 (sequence is synthesized)
tggtgtgccctgtgtgtgccaaggtctccatcacttttgacccgtttctttatctgccggtgcccttgccacaaaagcaaaaggttctccctgtcttttattttgcccgagagccccaca

SEQ ID NO: 581791 - DNA, 120 bp, Artificial Sequence
  ENSG00000172046_19 (sequence is synthesized)
gcaagcccatcaagttcctggtgagcgtcagcaaggagaactccactgcgagcgaagtattggactccctctctcagagtgttcatgtgaagcctgagaacctgcgtttggcggaggtaa

SEQ ID NO: 581792 - DNA, 120 bp, Artificial Sequence
  ENSG00000172046_20 (sequence is synthesized)
ttaagaatcgttttcatcgtgtgttcctaccctcccactcactggacactgtgtccccatctgatacgctcctctgctttgagctgctatcctcagagttggctaaggagcgggtagtgg

SEQ ID NO: 581793 - DNA, 120 bp, Artificial Sequence
  ENSG00000172046_21 (sequence is synthesized)
tgctagaggtgcaacagcgcccccaggtgcccagcgtccccatctccaagtgtgcagcctgccagcggaagcaacagtcggaggatgaaaagctgaagcgctgtacccggtgctaccgtg

SEQ ID NO: 581794 - DNA, 120 bp, Artificial Sequence
  ENSG00000172046_22 (sequence is synthesized)
tgggctactgcaaccagctctgccagaaaacccactggcctgaccacaagggcctctgccgacctgagaacattggctaccccttcctggtcagtgtacctgcctcacgcctcacttatg

SEQ ID NO: 581795 - DNA, 120 bp, Artificial Sequence
  ENSG00000172046_23 (sequence is synthesized)
cccgcctcgctcagttgctagagggctatgcccggtactctgtgagtgtattccagccaccctttcagccaggccgcatggccttggagtctcagagccctggctgcaccacactgctct

SEQ ID NO: 581796 - DNA, 120 bp, Artificial Sequence
  ENSG00000172046_24 (sequence is synthesized)
ccacaggttccctggaggctggggacagcgagagagaccccattcagccacctgagctccagctggtgacccctatggctgagggggacacagggcttccccgggtgtgggcagcccctg

SEQ ID NO: 581797 - DNA, 120 bp, Artificial Sequence
  ENSG00000172046_25 (sequence is synthesized)
accggggtcctgtgcccagcaccagtggaatttcttctgagatgctggccagtgggcccattgaggttggctccttgccagctggcgagagggtgtcccgacccgaagctgctgtgcctg

SEQ ID NO: 581798 - DNA, 120 bp, Artificial Sequence
  ENSG00000172046_26 (sequence is synthesized)
ggtaccagcatccaagtgaagctatgaatgcccacacaccccagttcttcatctataaaattgattcatccaaccgagagcagcggctagaggacaaaggagacaccccactggagctgg

SEQ ID NO: 581799 - DNA, 120 bp, Artificial Sequence
  ENSG00000172046_27 (sequence is synthesized)
gtgacgactgtagcctggctctcgtctggcggaacaatgagcgcttgcaggagtttgtgttggtagcctccaaggagctggaatgtgctgaggatccaggctctgccggtgaggctgccc

SEQ ID NO: 581800 - DNA, 120 bp, Artificial Sequence
  ENSG00000172046_28 (sequence is synthesized)
gggccggccacttcaccctggaccagtgcctcaacctcttcacacggcctgaggtgctggcacccgaggaggcctggtactgcccacagtgcaaacagcaccgtgaggcctccaagcagc

SEQ ID NO: 581801 - DNA, 120 bp, Artificial Sequence
  ENSG00000172046_29 (sequence is synthesized)
tgttgctatggcgcctgccaaatgttctcatcgtgcagctcaagcgcttctcctttcgtagttttatctggcgtgacaagatcaatgacttggtggagttccctgttaggaacctggacc

SEQ ID NO: 581802 - DNA, 120 bp, Artificial Sequence
  ENSG00000172046_30 (sequence is synthesized)
tgagcaagttctgcattggtcagaaagaggagcagctgcccagctacgatctatatgctgtcatcaaccactatggaggcatgattggtggccactacactgcctgtgcacgcctgccca

SEQ ID NO: 581803 - DNA, 120 bp, Artificial Sequence
  ENSG00000172046_31 (sequence is synthesized)
atgatcgtagcagtcagcgcagtgacgtgggctggcgcttgtttgatgacagcacagtgacaacggtagacgagagccaggttgtgacgcgttatgcctatgtactcttctaccgccggc

SEQ ID NO: 581804 - DNA, 120 bp, Artificial Sequence
  ENSG00000172046_32 (sequence is synthesized)
ggaactctcctgtggagaggccccccagggcaggtcactctgagcaccacccagacctaggccctgcagctgaggctgctgccagccaggcttcccggatttggcaggagctggaggctg

SEQ ID NO: 581805 - DNA, 120 bp, Artificial Sequence
  ENSG00000172046_33 (sequence is synthesized)
aggaggagccggtgcctgaggggtctgggcccctgggtccctgggggccccaagactgggtgggccccctaccacgtggccctaccacaccagatgagggctgcctccggtactttgtcc

SEQ ID NO: 581806 - DNA, 120 bp, Artificial Sequence
  ENSG00000172046_34 (sequence is synthesized)
tgggcaccgtggcggctttggtggccctcgtgctcaacgtgttctatcctctggtatcccagagtcgctggagatgagctcgcctgcaggcagctgctgtgagctggcctacctgcctgc

SEQ ID NO: 581807 - DNA, 120 bp, Artificial Sequence
  ENSG00000172046_35 (sequence is synthesized)
cccaggccatgcctgcctttgttgtggggaacacctctgggctttgggcctcagcttatgcatctggtgggagagggtggggaggttgtggcccctgcaggggcagagtatcctagggtg

SEQ ID NO: 581808 - DNA, 120 bp, Artificial Sequence
  ENSG00000172046_36 (sequence is synthesized)
tgtatccatctggctgtctgtccattcatcctgctgctctgacccttggcctcaggcttggccctgcccaagctacttcctgtacttaaaagtgttaataaaaccagactattcaggccc

SEQ ID NO: 581809 - DNA, 120 bp, Artificial Sequence
  ENSG00000172046_37 (sequence is synthesized)
caggagaatgggcaggaactgtctcccattgccctggagccaggccctgagccccaccgggctaagcaggaggcccggaaccagaagcgggcccagggccgtggtgaggtaggcgcaggg

SEQ ID NO: 581810 - DNA, 120 bp, Artificial Sequence
  ENSG00000172046_38 (sequence is synthesized)
gctggccccggggcccaggcagggcccagcgccaagagggctgtgcatctctgcagagggccagagggggacgggtccagggatgaccctggaccccggggtgatgccccacccttcgtg

SEQ ID NO: 581811 - DNA, 120 bp, Artificial Sequence
  ENSG00000172046_39 (sequence is synthesized)
gggactaggccctggccaggcccccgaggtggcccccacgcggacagcccctgaacgcttcgccccccctgtggatcggccagcccccacctacagcaacatggaggaggtggattagca

SEQ ID NO: 581812 - DNA, 120 bp, Artificial Sequence
  ENSG00000172046_40 (sequence is synthesized)
ggtccctggctgatgggggggactgggtttgggacacccacacagagggccagctccttgccgcttctccttctctaacccagaggacactggctctgtcaatgggaagctgaggggtat

SEQ ID NO: 581813 - DNA, 120 bp, Artificial Sequence
  ENSG00000172046_41 (sequence is synthesized)
gatttgggtgtggagacctctcaggttgggacttcttgtcagcttggacccctgaccagtgggctttggcttctccagccgcctccagtgctgcgtgatttgattctgttgtaccttcaa

SEQ ID NO: 581814 - DNA, 120 bp, Artificial Sequence
  ENSG00000172046_42 (sequence is synthesized)
ttcttctgacccgcattataaacattataattttattctaaaaattgtaattttttttgcattttggaagtgactgctgctgtttaaatatattttaaaaataaataataagtaagtaga

SEQ ID NO: 581815 - DNA, 120 bp, Artificial Sequence
  ENSG00000172046_43 (sequence is synthesized)
ccgtgccagtccctacccctagtgccccgcagcgtgccagcccactgatgccggcagggccgttacgctatgcctgtggccagcctcccacctgggagaggactggcggccagcgagggc

SEQ ID NO: 581816 - DNA, 120 bp, Artificial Sequence
  ENSG00000172046_44 (sequence is synthesized)
aacttcgtgggagaggtggtggcgggctcggggttcagaggctgaagctgggtcgcagctcgaccggggcgctgatctgtggctgtccgttccttgctggagaatttggccacaaagagt

SEQ ID NO: 581817 - DNA, 120 bp, Artificial Sequence
  ENSG00000172046_45 (sequence is synthesized)
gggccgggttgggggatatagcttcctctcctccagccacaggcccattgagccttgggattcatgagaattgcagagttctcttaacatcaaagctttagccagaggcatccccatgcc

SEQ ID NO: 581818 - DNA, 120 bp, Artificial Sequence
  ENSG00000172053_0 (sequence is synthesized)
cttttagtttccggtgtctctgcaatggcggctctagactccctgtcgctcttcactagcctcggcctgagcgagcagaaggcccgcgagacgctcaagaactcggctctgagcgcgcag

SEQ ID NO: 581819 - DNA, 120 bp, Artificial Sequence
  ENSG00000172053_1 (sequence is synthesized)
ctgcgcgaggccgctactcaggctcagcagaccctgggttccaccattgacaaagctaccgggatcctgttatatggcttggcctcccgactcagggatacccggcgtctctccttcctt

SEQ ID NO: 581820 - DNA, 120 bp, Artificial Sequence
  ENSG00000172053_2 (sequence is synthesized)
gtaagctacatagccagtaagaagatccacactgagccccagctaagcgctgcccttgagtatgtgcggagtcaccccttggaccccatcgacactgtggacttcgagcgggaatgtggc

SEQ ID NO: 581821 - DNA, 120 bp, Artificial Sequence
  ENSG00000172053_3 (sequence is synthesized)
gtgggtgtcattgtgaccccagagcagattgaggaggctgtggaggctgctattaacaggcaccggccccagctcctggtggaacgttaccatttcaacatggggctgctgatgggagag

SEQ ID NO: 581822 - DNA, 120 bp, Artificial Sequence
  ENSG00000172053_4 (sequence is synthesized)
gctcgggctgtgctgaagtgggcagatggcaaaatgatcaagaatgaagtggacatgcaggtcctccaccttctgggccccaagttggaggctgatctggagaagaagttcaaggtggca

SEQ ID NO: 581823 - DNA, 120 bp, Artificial Sequence
  ENSG00000172053_5 (sequence is synthesized)
aaagctcggctagaagaaacagaccggaggacggcaaaggatgtggtggagaatggcgagactgctgaccagaccctgtctctgatggagcagctccggggggaggcccttaagttccac

SEQ ID NO: 581824 - DNA, 120 bp, Artificial Sequence
  ENSG00000172053_6 (sequence is synthesized)
aagcctggtgagaactacaagaccccaggctatgtggtcactccacacaccatgaatctactaaagcagcacctggagattactggtgggcaggtacgtacccggttcccgccagaaccc

SEQ ID NO: 581825 - DNA, 120 bp, Artificial Sequence
  ENSG00000172053_7 (sequence is synthesized)
aatggaatcctgcatattggacatgccaaagccatcaatttcaactttggctatgccaaggccaacaatggcatctgttttctgcgttttgatgacaccaaccctgagaaggaggaagca

SEQ ID NO: 581826 - DNA, 120 bp, Artificial Sequence
  ENSG00000172053_8 (sequence is synthesized)
aagttcttcacggccatctgtgacatggtagcctggctaggctacacaccttacaaagtcacatatgcgtctgactattttgaccagctatatgcgtgggctgtggagctcatccgcagg

SEQ ID NO: 581827 - DNA, 120 bp, Artificial Sequence
  ENSG00000172053_9 (sequence is synthesized)
ggtctggcttatgtgtgccaccagcgaggagaggagctcaaaggccataatactctgccttcaccctggagagaccgtcccatggaggagtcactgctgctctttgaggcaatgcgcaag

SEQ ID NO: 581828 - DNA, 120 bp, Artificial Sequence
  ENSG00000172053_10 (sequence is synthesized)
aggatggcaagatggaccctgtagcctatcgagtcaagtatacaccacaccaccgcacaggggacaaatggtgcatctatcccacctacgactacacacactgcctctgtgactccatcg

SEQ ID NO: 581829 - DNA, 120 bp, Artificial Sequence
  ENSG00000172053_11 (sequence is synthesized)
agcacatcactcactcactctgcaccaaggaattccaggcccgacgctcttcctacttctggctttgcaatgcactggacgtctattgccctgtgcagtgggagtatggccgcctcaacc

SEQ ID NO: 581830 - DNA, 120 bp, Artificial Sequence
  ENSG00000172053_12 (sequence is synthesized)
tgcactatgctgttgtctctaagaggaagatcctccagcttgtagcaactggtgctgtgcgggactgggatgacccacggctctttacactcacggccctgcgacggcggggcttcccac

SEQ ID NO: 581831 - DNA, 120 bp, Artificial Sequence
  ENSG00000172053_13 (sequence is synthesized)
ctgaggccatcaacaacttctgtgcccgggtgggagtgactgtggcacaaaccacaatggagccacatcttctagaagcctgtgtgcgtgatgtgctgaatgacacagccccacgagcca

SEQ ID NO: 581832 - DNA, 120 bp, Artificial Sequence
  ENSG00000172053_14 (sequence is synthesized)
tggctgtgctggagtcactacgggtcatcatcaccaactttcctgctgccaagtccttggacatccaggtgcccaacttcccagctgatgagaccaaaggcttccatcaggttccctttg

SEQ ID NO: 581833 - DNA, 120 bp, Artificial Sequence
  ENSG00000172053_15 (sequence is synthesized)
cacccattgtcttcattgagaggactgacttcaaggaggagccagagccaggatttaagcgcctggcttggggccagcctgtgggcctgaggcatacaggctacgtcattgagctgcagc

SEQ ID NO: 581834 - DNA, 120 bp, Artificial Sequence
  ENSG00000172053_16 (sequence is synthesized)
atgttgtcaagggccccagtggttgtgtagagagtctggaggtgacctgcagacgggcagatgctggagagaagccaaaggcctttattcactgggtgtcacagcctttgatgtgtgagg

SEQ ID NO: 581835 - DNA, 120 bp, Artificial Sequence
  ENSG00000172053_17 (sequence is synthesized)
ttcgcctctatgagcgactattccagcacaagaaccctgaagatcctactgaggtgcctggtggatttttaagtgacctgaacctggcatcactacacgtggtggatgcagcattagtgg

SEQ ID NO: 581836 - DNA, 120 bp, Artificial Sequence
  ENSG00000172053_18 (sequence is synthesized)
actgctctgtggccctggcaaaacccttcgacaagttccagtttgagcgtcttggatatttctccgtggatccagacagccatcagggaaagcttgtctttaaccgaactgtcacactga

SEQ ID NO: 581837 - DNA, 120 bp, Artificial Sequence
  ENSG00000172053_19 (sequence is synthesized)
aggaagacccaggaaaggtgtgagctggaagcactgaacctacctcatcctcctggagggtgtggctaccctcgccaccccaaattccatgtcaataaagaacagctaaattctcctaga

SEQ ID NO: 581838 - DNA, 120 bp, Artificial Sequence
  ENSG00000172053_20 (sequence is synthesized)
tttgccaagtcctccagtttctttctagacacctagttctgcacaggcactgaggcatggaaggggtggcctatggtgagactgacacgggaactgtcagggtctgaggggggatccact

SEQ ID NO: 581839 - DNA, 120 bp, Artificial Sequence
  ENSG00000172053_21 (sequence is synthesized)
ctcgacacgtgcttctttcttccctgtgttctctagggtggtggtgccagggcttaacttttcaggaggccagactatccttggagtttcatgagattaggaccctgtctgtccacttct

SEQ ID NO: 581840 - DNA, 120 bp, Artificial Sequence
  ENSG00000172053_22 (sequence is synthesized)
gcagatggcaaaatgatcaagaatgaagtggacatgcagcctgggcaacatgagcaagactccagtctgggcaacaagagcaagagcattttaagctagcagacccacatgagaagagat

SEQ ID NO: 581841 - DNA, 120 bp, Artificial Sequence
  ENSG00000172053_23 (sequence is synthesized)
ctatattgttctctctggtcatgccttttcttctgggcacgagtgagaaggaggtgggggaaggaacaggagtgacttaaagtggtctggctgggctcaggctctggttctggtggtcag

SEQ ID NO: 581842 - DNA, 120 bp, Artificial Sequence
  ENSG00000172053_24 (sequence is synthesized)
agagaccgtcccatggaggagtcactgctgctctttgaggtggggtcctagaggagcatctgggtttgggtgggccaaggtgctgagaatgagatgctcctgtgcttagagacagcctga

SEQ ID NO: 581843 - DNA, 120 bp, Artificial Sequence
  ENSG00000172053_25 (sequence is synthesized)
tctgtcagtccatctacttcctgcttcagatgaaccaatctttgccagacacgggggtagggaagcttccccacttgtttgacccttgcagcctcatgtgtctaccccacttcctatctc

SEQ ID NO: 581844 - DNA, 120 bp, Artificial Sequence
  ENSG00000172053_26 (sequence is synthesized)
tggtggatttttaagtgacctgaacctggtaggttcatgaggtttggggtgagggaggtaggcctccctggttggatggttgcctgagttccctgcctgcaggcatcactacacgtggtg

SEQ ID NO: 581845 - DNA, 120 bp, Artificial Sequence
  ENSG00000172053_27 (sequence is synthesized)
gtaagctacatagccagtaagaagatccacactgagccccagctaagcgggtggtggtgccagggcttaacttttcaggaggccagactatccttggagtttcatgagattaggaccctg

SEQ ID NO: 581846 - DNA, 120 bp, Artificial Sequence
  ENSG00000172053_28 (sequence is synthesized)
tttgcccccgaggacaattactatattgagatggagttaccagggctgaagtagaaaagtcagagcaaaaccacgcctgtgtcttcctcctgcctcagggacgaacaccttccttccagg

SEQ ID NO: 581847 - DNA, 120 bp, Artificial Sequence
  ENSG00000172053_29 (sequence is synthesized)
tccgtggcaaatatctccaaaagccctgccgcctgccaacaccccttcaagttcccagttccacggaggcggaagcaaagcccccggaaaggccggtttgtccgccctgtgttgtttaaa

SEQ ID NO: 581848 - DNA, 120 bp, Artificial Sequence
  ENSG00000172053_30 (sequence is synthesized)
ggggatagacgaccttggagcgccccgccccctcccgccaaggaaggaccccattggctctccccggaggcttcactctcattggtcagcgagtgaatgccgacctgcagactggggcct

SEQ ID NO: 581849 - DNA, 120 bp, Artificial Sequence
  ENSG00000172053_31 (sequence is synthesized)
ctatgccaagtttgataaacaggattgtggggctgatggatgatgtgggagttcacagatggtgcaactttcctaggccaacaatggcatctgttttctgcgttttgatgacaccaaccc

SEQ ID NO: 581850 - DNA, 120 bp, Artificial Sequence
  ENSG00000172053_32 (sequence is synthesized)
ggggtggtggggctgccgagcagggcgatgggccatggggtagggcagagtagggctggatggtagggcccactgcctatgccccacaggtgcatctatcccacctacgactacacacac

SEQ ID NO: 581851 - DNA, 120 bp, Artificial Sequence
  ENSG00000172053_33 (sequence is synthesized)
gaggctgtgagtctttccccaggcatcgtctgcctccccagtcctggccatggaaaggagtggctcagtttccctcctcaggaagacccagagtgagggtgtgggttcccagaatatctc

SEQ ID NO: 581852 - DNA, 120 bp, Artificial Sequence
  ENSG00000172053_34 (sequence is synthesized)
aagtttcttttagtttccggtgtctctgcaatggcggctctagactccctgtcgctcttcactagcctcggcctgagcgagcagaaggcccgcgagacgctcaagaactcggctcagcag

SEQ ID NO: 581853 - DNA, 120 bp, Artificial Sequence
  ENSG00000172053_35 (sequence is synthesized)
tctcctgccttagctgagactacatgtgcacactaccatgcctggctaattttaaaactttttgtagaggcaagttctcactatgttgcccagcttgtctttaaccgaactgtcacactg

SEQ ID NO: 581854 - DNA, 120 bp, Artificial Sequence
  ENSG00000172053_36 (sequence is synthesized)
gaggcggaggttgcagtgagcggagactgtgccattgcattccagcctgggcaacatgagcaagactccagtctgggcaacaagagcaagagcattttaagctagcagacccacatgaga

SEQ ID NO: 581855 - DNA, 120 bp, Artificial Sequence
  ENSG00000172053_37 (sequence is synthesized)
agaaaagtcagagcaaaaccacgcctgtgtcttcctcctgcctcagggacgaacaccttccttccagcctcggcctgagcgagcagaaggcccgcgagacgctcaagaactcggctctga

SEQ ID NO: 581856 - DNA, 120 bp, Artificial Sequence
  ENSG00000172053_38 (sequence is synthesized)
gccttcctactgcagtgcctgctggggccaagatcttgtctttaaccgaactgtcacactgaaggaagacccaggaaaggtgtgagctggaagcactgaacctacctcatcctcctggag

SEQ ID NO: 581857 - DNA, 120 bp, Artificial Sequence
  ENSG00000172053_39 (sequence is synthesized)
ctgtgctgaagtgggcagatggcaaaatgatcaagaatgaagtggacatgcaggaggcggaggttgcagtgagcggagactgtgccattgcattccagcctgggcaacatgagcaagact

SEQ ID NO: 581858 - DNA, 120 bp, Artificial Sequence
  ENSG00000172053_40 (sequence is synthesized)
ggctatattgttctctctggtcatgccttttcttctgggcacgagtgagaaggaggagaggctcgggctgtgctgaagtgggcagatggcaaaatgatcaagaatgaagtggacatgcag

SEQ ID NO: 581859 - DNA, 120 bp, Artificial Sequence
  ENSG00000172057_0 (sequence is synthesized)
gattcggccggagctgccagcggggaggctgcagccgcgggttgttacagctgctggagcagcagcggcccccgctcccgggaaccgttcccgggccgttgatcttcggccccacacgaa

SEQ ID NO: 581860 - DNA, 120 bp, Artificial Sequence
  ENSG00000172057_1 (sequence is synthesized)
cagcagagaggggcagcaggatgaatgtgggcacagcgcacagcgaggtgaaccccaacacgcgggtgatgaacagccgtggcatctggctctcctacgtgctggccatcggtctcctcc

SEQ ID NO: 581861 - DNA, 120 bp, Artificial Sequence
  ENSG00000172057_2 (sequence is synthesized)
acatcgtgctgctgagcatcccgtttgtgagtgtccctgtcgtctggaccctcaccaacctcattcacaacatgggcatgtatatcttcctgcacacggtgaaggggacaccctttgaga

SEQ ID NO: 581862 - DNA, 120 bp, Artificial Sequence
  ENSG00000172057_3 (sequence is synthesized)
ccccggaccagggcaaggcgaggctgctaacccactgggagcagatggattatggggtccagttcacggcctctcggaagttcttgaccatcacacccatcgtgctgtacttcctcacca

SEQ ID NO: 581863 - DNA, 120 bp, Artificial Sequence
  ENSG00000172057_4 (sequence is synthesized)
gcttctacactaagtacgaccagatccattttgtgctcaacaccgtgtccctgatgagcgtgcttatccccaagctgccccagctccacggagtccggatttttggaatcaataagtact

SEQ ID NO: 581864 - DNA, 120 bp, Artificial Sequence
  ENSG00000172057_5 (sequence is synthesized)
gagagtgcagccccttcccctgcccagggtggcaggggaggggtagggtaaaaggcatgtgctgcaacactgaagacagaaagaagaagcctctggacactgccagagatgggggttgag

SEQ ID NO: 581865 - DNA, 120 bp, Artificial Sequence
  ENSG00000172057_6 (sequence is synthesized)
cctctggcctaatttcccccctcgcttcccccagtagccaacttggagtagcttgtagtggggttggggtaggccccctgggctctgaccttttctgaattttttgatcttttccttttg

SEQ ID NO: 581866 - DNA, 120 bp, Artificial Sequence
  ENSG00000172057_7 (sequence is synthesized)
ctttttgaatagagactccatggagttggtcatggaatgggctgggctcctgggctgaacatggaccacgcagttgcgacaggaggccaggggaaaaacccctgctcacttgtttgccct

SEQ ID NO: 581867 - DNA, 120 bp, Artificial Sequence
  ENSG00000172057_8 (sequence is synthesized)
gtgattcctaggttttttcgatgccacgcagtgtgtgcttttgtgtatggaagcaagtgtgggatgggtctttgcctttctgggtagggagctgtctaatccaagtcccaggcttttggc

SEQ ID NO: 581868 - DNA, 120 bp, Artificial Sequence
  ENSG00000172057_9 (sequence is synthesized)
agcttctctgcaacccaccgtgggtcctggttgggagtggggagggtcaggttggggaaagatggggtagagtgtagatggcttggttccagaggtgagggggccagggctgctgccatc

SEQ ID NO: 581869 - DNA, 120 bp, Artificial Sequence
  ENSG00000172057_10 (sequence is synthesized)
ctggcctggtggaggttggggagctgtaggagagctagtgagtcgagacttagaagaatggggccacatagcagcagaggactggtgtaagggagggaggggtagggacagaagctagac

SEQ ID NO: 581870 - DNA, 120 bp, Artificial Sequence
  ENSG00000172057_11 (sequence is synthesized)
ccaatctcctttgggatgtgggcagggagggaagcaggcttggagggttaatttacccacagaatgtgatagtaataggggagggaggctgctgtgggtttaactcctgggttggctgtt

SEQ ID NO: 581871 - DNA, 120 bp, Artificial Sequence
  ENSG00000172057_12 (sequence is synthesized)
gggtagacaggtggggaaaaggcccgtgagtcattgtaagcacaggtccaacttggccctgactcctgcgggggtatggggaagctgtgacagaaacgatgggtgctgtggtcctctgca

SEQ ID NO: 581872 - DNA, 120 bp, Artificial Sequence
  ENSG00000172057_13 (sequence is synthesized)
ggccctcaccccttaacttcctcatacagactggcactgggcagggcctctcatgtggcagccacatgtggcgttgtgaggccaccccatgtggggtctgtggtgagagtcctgtaggat

SEQ ID NO: 581873 - DNA, 120 bp, Artificial Sequence
  ENSG00000172057_14 (sequence is synthesized)
ccctgctcaagcagcacagaggaaggggcaagacgtggcctgtaggcactgtctcagcctgcagagaagaaagtgaggccgggagcctgagcctgggctggagccttctcccctccccag

SEQ ID NO: 581874 - DNA, 120 bp, Artificial Sequence
  ENSG00000172057_15 (sequence is synthesized)
ttggactaggggcagtgttaattttgaaaaggtgtgggtccctgtgtcctcttccaggggtccaagggaacgggagaggtcactgggcctgttttctccctcctgaccctgcatctccca

SEQ ID NO: 581875 - DNA, 120 bp, Artificial Sequence
  ENSG00000172057_16 (sequence is synthesized)
ccccgtgtatcatagggaactttcaccttaaaatctttctaagcaaagtgtgaataggatttttactccctttgtacagtattctgagaaacgcaaataaaagggcaacatgtttctgtt

SEQ ID NO: 581876 - DNA, 120 bp, Artificial Sequence
  ENSG00000172057_17 (sequence is synthesized)
gtgctcctcttccagaagacaggaggtttgctgttgtgagggctgctctttcctgggggagggaatgggaagggctcacctggtggctgccctggtggtgctcagccttggcttgagtgt

SEQ ID NO: 581877 - DNA, 120 bp, Artificial Sequence
  ENSG00000172057_18 (sequence is synthesized)
ctggcatactggctgggcccggatatttgtatgtggagccaagagggtggggcgggaaggagggggaaagagctaccagcaaaaaagtggttaacacaacagagttgctgcaggctctgg

SEQ ID NO: 581878 - DNA, 120 bp, Artificial Sequence
  ENSG00000172057_19 (sequence is synthesized)
tttgaggcaggttatgaaaccacatcagggcccagcactaagcagccacctgccagctatggcagcagaagttttcggctcaactcctgtagacctagtcgacctctgccagcctcttct

SEQ ID NO: 581879 - DNA, 120 bp, Artificial Sequence
  ENSG00000172057_20 (sequence is synthesized)
ctctgtttctccccatctagggtaggggccagttggttgttttactaatggaagtgatatgtatccatagtcacacgaaagtctcaagagtgtttcctcattgccagtctttttgttagt

SEQ ID NO: 581880 - DNA, 120 bp, Artificial Sequence
  ENSG00000172057_21 (sequence is synthesized)
ttattgatctcttctttttcaggggtctctggtggtttcctgctctcagggcacctagtgtttaggcttcaggaagaagcttctgagggtgttggctaggacctaggtctaggcttttcc

SEQ ID NO: 581881 - DNA, 120 bp, Artificial Sequence
  ENSG00000172057_22 (sequence is synthesized)
taggctcatcaagttttgttggctgccctgtgaaagccagaaaggcgtatggggtcctgtgatctgggattccccaaggcttttggcactcctggacaaatactaggaagggttagtgga

SEQ ID NO: 581882 - DNA, 120 bp, Artificial Sequence
  ENSG00000172057_23 (sequence is synthesized)
ctttctataccagcacccctgtaggtgcgggttacagagaggtgatggggtggcagtttcaggtcagacttgggaagctctttccctctccttagtcagagttaagtccttcagagccct

SEQ ID NO: 581883 - DNA, 120 bp, Artificial Sequence
  ENSG00000172057_24 (sequence is synthesized)
cacttgtcagccacatgccgccctcccctctcaggtggaggcttttgcgtagcagctgtcccaggggctgctagagtaactgaagccccaaggccctgggaagataaacaatctgagcca

SEQ ID NO: 581884 - DNA, 120 bp, Artificial Sequence
  ENSG00000172057_25 (sequence is synthesized)
gctctggctttctagatacttgaatttctgttaggctcaattatccagcctagtgggctgcgctgatgggtcccaggagcatctcttcaatcagaatgcgccccaggctggcgcacgggt

SEQ ID NO: 581885 - DNA, 120 bp, Artificial Sequence
  ENSG00000172057_26 (sequence is synthesized)
aagaggaaacttgctcctgttatcctggaagtaaataactggcccctgaggactcagtctcctgtgcagggccctcagggatctggggacagccaaactctggataaggggcagatcatt

SEQ ID NO: 581886 - DNA, 120 bp, Artificial Sequence
  ENSG00000172057_27 (sequence is synthesized)
ccaccccttccttctctacttccctctgctcactgtgggttgcggccacctcctggttcctcctgctgcaggactcctaccgttggtgctgggcaggggaaggcatggtgctaatataca

SEQ ID NO: 581887 - DNA, 120 bp, Artificial Sequence
  ENSG00000172057_28 (sequence is synthesized)
gataaacgtttggctgcctccagggctgggtgaacgcgtggagatggctgtggggtcccggaccggaccgggttccgagtgcgaagacccaggctggggaacagagcgggacccctcccc

SEQ ID NO: 581888 - DNA, 120 bp, Artificial Sequence
  ENSG00000172058_0 (sequence is synthesized)
gccatgccggcggctgttgtcgggcctccagcgggcggggccgttggcggagcagaggggaggcgcagccgggcggagggcccacgagggctcagccttcccggtcagcggtggtgacgg

SEQ ID NO: 581889 - DNA, 120 bp, Artificial Sequence
  ENSG00000172058_1 (sequence is synthesized)
tcagcggtggtgacggtatcccagagtgccagagaaccgttgcttttccgagttgctcttcttccaggctccgttggtggtcggcatggcccgtggaaatcaacgagaacttgcccgcca

SEQ ID NO: 581890 - DNA, 120 bp, Artificial Sequence
  ENSG00000172058_2 (sequence is synthesized)
gaaaaacatgaagaaaacccaggaaattagcaagggaaagaggaaagaggatagcttgactgcctctcagagaaagcagagggactctgagatcatgcaagaaaagcagaaggcagctaa

SEQ ID NO: 581891 - DNA, 120 bp, Artificial Sequence
  ENSG00000172058_3 (sequence is synthesized)
tgagaagaagtctatgcagacaagagaaaagtgatgactggctatttggaaaacctgggtgctactgccaactgggtgtatcataagctctaagatcaagattttgtagagtggacagtc

SEQ ID NO: 581892 - DNA, 120 bp, Artificial Sequence
  ENSG00000172058_4 (sequence is synthesized)
acatatgttataacttatcctttaaaaactattttaaactttatcctttcagctttacttagtgcgatgttttagaagcagtcttcaaagaataaaacactaaccatgcatgtgacatat

SEQ ID NO: 581893 - DNA, 120 bp, Artificial Sequence
  ENSG00000172058_5 (sequence is synthesized)
catgtgacatattggtgaacattatttttattattgaacattcatatataatttattaggtaatatgatcagataataggatctcttatataataaagaatctttgtcatcagctttgtt

SEQ ID NO: 581894 - DNA, 120 bp, Artificial Sequence
  ENSG00000172058_6 (sequence is synthesized)
ttttcctcacagtttctaaggataaggataaaatagatctttgaagtaaacttaaatatataatagaagttagggtccatttgtataattttgctttgaaatcaagttaaagggccaggt

SEQ ID NO: 581895 - DNA, 120 bp, Artificial Sequence
  ENSG00000172058_7 (sequence is synthesized)
ccaagggagaatccttgctttcctcttccagctgctggtggctccaggtattacttggcttatggcagcataactcctatctctgcctttgtctttgtggtcttcttttctgtcttcttc

SEQ ID NO: 581896 - DNA, 120 bp, Artificial Sequence
  ENSG00000172058_8 (sequence is synthesized)
ccttctttttatgaggacttttgctgttggatttaggttccattctaacctaggatgatctcatttggaaatccttaatttcatctacaaaaactgttttcccaaataggtcacattcac

SEQ ID NO: 581897 - DNA, 120 bp, Artificial Sequence
  ENSG00000172058_9 (sequence is synthesized)
gcatatcagatggacagatgtatcattttggggtccaccattcaacccactacaaggagttttttaaacaaaaataggaaacttagatgtaacttagcactttttttttttttttttgag

SEQ ID NO: 581898 - DNA, 72 bp, Artificial Sequence
  ENSG00000172058_10 (sequence is synthesized)
gctgggattacaggcgtgagtcacagcccccggccataatttagcactttaaaaaataatagccatgaccaa

SEQ ID NO: 581899 - DNA, 120 bp, Artificial Sequence
  ENSG00000172058_11 (sequence is synthesized)
tctactaaaaatacaaaaattagctggggcgaggggataggccgagttccgggtgtaagggggccattagggagagcagagcgaggcagctgatcttccggattgggggccttgcccgga

SEQ ID NO: 581900 - DNA, 120 bp, Artificial Sequence
  ENSG00000172058_12 (sequence is synthesized)
tccggattgggggccttgcccggaagctggacctcacggagatgaaacggaagatgcacgaggatatgatctccatacagaactttctcatctacgtggccctgctgcgagtcactccat

SEQ ID NO: 581901 - DNA, 120 bp, Artificial Sequence
  ENSG00000172058_13 (sequence is synthesized)
ttatcttaaagaaattggacagcatatgaagattggacatcacatgtgaatgcatgatatgaagagcctggttacagtttctactgttctctgcaagtaaataggcccagaaaggtataa

SEQ ID NO: 581902 - DNA, 120 bp, Artificial Sequence
  ENSG00000172058_14 (sequence is synthesized)
gagactctttgaatggacataaaaattctgcttgttaagaacaagttgagctctggtaactgatcttaatagctaaaatataaaaatatttgggaagtctgaaatgaggtctcctggccc

SEQ ID NO: 581903 - DNA, 120 bp, Artificial Sequence
  ENSG00000172058_15 (sequence is synthesized)
tggtgtgcccttaatgcctgtgacagttggcctctgtgaatattggtataattgtaaataatgtcaaactccattttctagcaagtattaataattaagggaagtatgtctgaaatggca

SEQ ID NO: 581904 - DNA, 120 bp, Artificial Sequence
  ENSG00000172058_16 (sequence is synthesized)
agatctaggagcaccatcaatctgttactctgctagtttatctatgaaaacacaaactaaagatgcatttaaataaggcctgtttattggaattattaataattttggagatgggaaaag

SEQ ID NO: 581905 - DNA, 120 bp, Artificial Sequence
  ENSG00000172058_17 (sequence is synthesized)
gcgcagtgcggggatccccgcttcagtcggcagagagagagctcgcgggtggttccggtccggcttttcaggccggacgggtgcctgcccctcaggtgcgagtttgtgcggtaaagaaca

SEQ ID NO: 581906 - DNA, 120 bp, Artificial Sequence
  ENSG00000172058_18 (sequence is synthesized)
caccccggagatgtggacacggccgccccaggagggtccttgtttggagacttaccttcaatctgttcagtctccatccacccctctccgcctctgcatggggataaaggtggaaatcaa

SEQ ID NO: 581907 - DNA, 120 bp, Artificial Sequence
  ENSG00000172058_19 (sequence is synthesized)
actacaagggcacaccaccaagcccagatagtttttatattttttgtagaaacggggtttcatcatgttgtccaggcaggtcttgaacttctggggtcaagtgatttgcccacctcagtc

SEQ ID NO: 581908 - DNA, 86 bp, Artificial Sequence
  ENSG00000172058_20 (sequence is synthesized)
atgcccggccctaacatttattattaaagtgataagctttgtcttcaatttctgttgactcacattagagtaaaaatgaacatggt

SEQ ID NO: 581909 - DNA, 120 bp, Artificial Sequence
  ENSG00000172059_0 (sequence is synthesized)
gagctcacgccccgcggccgctttgttgctcccggccggcctgcacgatgcacacgccggacttcgcaggcccagacgacgcgcgcgcagttgacatcatggacatatgtgagtccatcc

SEQ ID NO: 581910 - DNA, 120 bp, Artificial Sequence
  ENSG00000172059_1 (sequence is synthesized)
tggagaggaagcggcatgacagcgaaaggtctacttgcagcatcttggagcagacagacatggaagctgtcgaggctcttgtttgtatgagctcctggggtcaaagatcccagaaaggtg

SEQ ID NO: 581911 - DNA, 120 bp, Artificial Sequence
  ENSG00000172059_2 (sequence is synthesized)
acctgttgcggataagacccctcacgcctgtctctgactctggggatgtcaccaccactgtgcatatggatgcagccacacctgaactaccaaaagacttccattctttatcgactctgt

SEQ ID NO: 581912 - DNA, 120 bp, Artificial Sequence
  ENSG00000172059_3 (sequence is synthesized)
gcataactcctcctcagagccctgatctcgtggagccatcgacaaggacacctgtttctccccaagtaacagattccaaagcatgtacagccacggatgttctccagtcctctgccgtag

SEQ ID NO: 581913 - DNA, 120 bp, Artificial Sequence
  ENSG00000172059_4 (sequence is synthesized)
tggccagagctctgagcgggggcgcggagaggggcttgctgggtttggagccagtgcccagctctccctgcagggccaaggggactagcgtgatccgacacactggggagagccctgctg

SEQ ID NO: 581914 - DNA, 120 bp, Artificial Sequence
  ENSG00000172059_5 (sequence is synthesized)
cctgctttcccaccatccagactccagattgccggctttctgacagcagagaaggagaagagcagcttctgggacactttgaaactttgcaggacacacacctcacggacagtttactca

SEQ ID NO: 581915 - DNA, 120 bp, Artificial Sequence
  ENSG00000172059_6 (sequence is synthesized)
gcactaacttggtgtcctgtcagccctgcttgcacaagtctggtggcctgctgctcactgacaaaggccagcaggcagggtggcctggtgcagttcagacttgctcaccaaagaattatg

SEQ ID NO: 581916 - DNA, 120 bp, Artificial Sequence
  ENSG00000172059_7 (sequence is synthesized)
aaaatgacctgcccaggaaaaccacccctctgatttctgtctctgtccctgctccccctgtcctttgccagatgatccctgtgactggacaaagtagcatgttaccagcttttttgaagc

SEQ ID NO: 581917 - DNA, 120 bp, Artificial Sequence
  ENSG00000172059_8 (sequence is synthesized)
cccctccccagttgtctgtggggactgtgagacccatcctagctcaggctgctccagcgcctcaacctgtgttcgtgggacctgctgtgcctcagggagctgtgatgttggtcctgcccc

SEQ ID NO: 581918 - DNA, 120 bp, Artificial Sequence
  ENSG00000172059_9 (sequence is synthesized)
agggagccctccctccgcctgccccctgtgcagccaatgtcatggctgccgggaataccaagttgttgccccttgcccctgctccagtgttcatcacctctagccaaaactgtgtccctc

SEQ ID NO: 581919 - DNA, 120 bp, Artificial Sequence
  ENSG00000172059_10 (sequence is synthesized)
aggtagacttttcccgaaggaggaactatgtatgcagcttcccaggttgccggaagacctacttcaaaagttcccaccttaaggcccatcttcgcactcacacaggggagaagcctttca

SEQ ID NO: 581920 - DNA, 120 bp, Artificial Sequence
  ENSG00000172059_11 (sequence is synthesized)
actgcagctgggatggctgtgataaaaagtttgctcgttcggatgagctgtcacgccaccgcagaactcacacaggggagaagaagtttgtgtgcccggtgtgtgaccgacgtttcatgc

SEQ ID NO: 581921 - DNA, 120 bp, Artificial Sequence
  ENSG00000172059_12 (sequence is synthesized)
gcagtgaccacctgacgaagcatgcccggcgccacatgacgaccaagaagatcccaggctggcaggcagaggttggcaagctgaacagaatcgcctctgcagagagcccggggagcccac

SEQ ID NO: 581922 - DNA, 120 bp, Artificial Sequence
  ENSG00000172059_13 (sequence is synthesized)
tggtgagcatgccagcctctgcctgaaaggtccattaggacatcactcatgggatttttaaaaagcctctttccaggaatggaactgatggattcctctcccactgcctcacccaaaaaa

SEQ ID NO: 581923 - DNA, 120 bp, Artificial Sequence
  ENSG00000172059_14 (sequence is synthesized)
aacggtcttggcggcctaggggaagatcggggagctggttttgatgaaagtatgttaacttttcttttccacttgggaccctgttcagtatcttttgtagtttcagaagtttttttgttt

SEQ ID NO: 581924 - DNA, 120 bp, Artificial Sequence
  ENSG00000172059_15 (sequence is synthesized)
aaagtttacaaaatctggatttttacaaccttttctattgatgttttgtagaaataagacagggtactaatttttatactggtttttagaaaaatatttatattgttggtgctcaaatca

SEQ ID NO: 581925 - DNA, 120 bp, Artificial Sequence
  ENSG00000172059_16 (sequence is synthesized)
ccaatttctagctagatcattttgcagccttcttttcagtgtttaataacaaagtttttcctaatggcccttcttttagtaaactggacatgttattccactacaaaaaccacaagttat

SEQ ID NO: 581926 - DNA, 120 bp, Artificial Sequence
  ENSG00000172059_17 (sequence is synthesized)
ctggccttttagatctttttggaatcggacctggttgagtaaggacctcttaaaagggaaaaataaattttgccgtcagcttcttcataacgttttcaaggaaattctaggcaatcattc

SEQ ID NO: 581927 - DNA, 120 bp, Artificial Sequence
  ENSG00000172059_18 (sequence is synthesized)
ctgtcaccaaagaactaaaattttggttgactggaactagtgagctgtgtccatggtgtgtcatgaaggatgtaccccagagagtaacatgagccactgggcagatcccagggaccagta

SEQ ID NO: 581928 - DNA, 120 bp, Artificial Sequence
  ENSG00000172059_19 (sequence is synthesized)
cttgctgcaggatctagtctgtaatagtcttggccatggctctgctgaaagcaagccattcagtttcttgtttgtacctaaaacaccaaaaaagaaacactcaaatccagctgctttgtc

SEQ ID NO: 581929 - DNA, 120 bp, Artificial Sequence
  ENSG00000172059_20 (sequence is synthesized)
aattgtcagttctgactccttttgctgtggccttatccgtactatattgtgggtagagtaacttctcagaaaaaaaggaaatgtctgtattggttggatgaaactccaccagagcacagc

SEQ ID NO: 581930 - DNA, 120 bp, Artificial Sequence
  ENSG00000172059_21 (sequence is synthesized)
ttagctggggcgagatgcatgtgaaggcaggcagtgccaagattccgcttcctttgtttgccaaatactagaaacacaaggaaatgcaagttacgctaaatggcagtaatactacccaac

SEQ ID NO: 581931 - DNA, 120 bp, Artificial Sequence
  ENSG00000172059_22 (sequence is synthesized)
tgcctttctgttcattttgtttgaaggaaattgttttgaccaaacagaaaattacttggaatggtgtgttttacagtctacctagaaaatagatggacaatatttttcaactgtatgagc

SEQ ID NO: 581932 - DNA, 120 bp, Artificial Sequence
  ENSG00000172059_23 (sequence is synthesized)
acgtagataaccgagagaatgtggccacctgtgttcaagaagccactgatactggtttttgttaaacattggaagttcaggcaatggaataaatgtaggaacatacagaatgttgcacta

SEQ ID NO: 581933 - DNA, 120 bp, Artificial Sequence
  ENSG00000172059_24 (sequence is synthesized)
atttggtagcctgggaattttttttattgtgcagtatgtatttaaattttgtctatgttaattaccagcatttacctttatttaaatgatggtaaggtggaatattgaataaaattaggt

SEQ ID NO: 581934 - DNA, 120 bp, Artificial Sequence
  ENSG00000172059_25 (sequence is synthesized)
tttgtgttttgttctttgtagtctgataaaatctccacctggtcattcattgtgtgtgacttgatacctgttaacttgccccttagtatcagctgttacttgacacaaatgtgtgtgtta

SEQ ID NO: 581935 - DNA, 120 bp, Artificial Sequence
  ENSG00000172059_26 (sequence is synthesized)
ttcagaggttttcagtctggacactccataggtgagtgtcgtgtcttcgtgagacagcacagttgtctcatgttgtgcatagttcatgtttcctcaccacccagtcctttctcctgctca

SEQ ID NO: 581936 - DNA, 120 bp, Artificial Sequence
  ENSG00000172059_27 (sequence is synthesized)
tcaaaatcagcatacacatttttgactgtacacactataaatggcatcaaatttggatatttttcttaattatgacatgcaaagtaatgtgagtcctgccagtattctggtggataaggt

SEQ ID NO: 581937 - DNA, 120 bp, Artificial Sequence
  ENSG00000172059_28 (sequence is synthesized)
cttttgagtatttggttgcttgtcacaacattctccaagcagtgatatttctaaagaggagatacatgttgaaaacggttttaatttacacttccatttcctgattacatttggaaatac

SEQ ID NO: 581938 - DNA, 120 bp, Artificial Sequence
  ENSG00000172059_29 (sequence is synthesized)
tttgtgtaaaccatcccccttccacctccatttgtctgttgaaagattttaagttggaaacagttcctgtctgaaaactcttctgagaaccacaaaccttgtgtatggattcggcatgga

SEQ ID NO: 581939 - DNA, 120 bp, Artificial Sequence
  ENSG00000172059_30 (sequence is synthesized)
gccctcagctggcggctctgggtgctgacggccgctggagaggtgggctcccctcgtgcactttattgcctgggcagttttgcttgatcttttgtgactttgagccttttaagtagtttg

SEQ ID NO: 581940 - DNA, 120 bp, Artificial Sequence
  ENSG00000172059_31 (sequence is synthesized)
aatgataagacttaaaatgtttcataattatgttttatgtaacagactttgacattatttaaacgagcatgtgtaatgtaacttttctctttgaatcatataaaacttgattttacattg

SEQ ID NO: 581941 - DNA, 120 bp, Artificial Sequence
  ENSG00000172059_32 (sequence is synthesized)
ggggccggggcaacgacgggaggcgggagcgccgcactgccttggaggcggggcaacgcttggaggcgggaacgcggcacgcgagcgttgggggccctaagcgtcgcgacctgggggctt

SEQ ID NO: 581942 - DNA, 120 bp, Artificial Sequence
  ENSG00000172059_33 (sequence is synthesized)
acagagcggaagaggcccagagacgccagaggaggggcgtcagcgggacactcaggccaataagctctgactcccgctgtctgcaaaaatgaccggatgcaggaatgtcacctagaaccg

SEQ ID NO: 581943 - DNA, 120 bp, Artificial Sequence
  ENSG00000172059_34 (sequence is synthesized)
gccagctttccgacctctccggtcaaggacgcattcctaagagacgaagggagaatgacagaagttaaaaacaaccaaacaaaagccaggttgaggcctctaggttgacatcatggacat

SEQ ID NO: 581944 - DNA, 120 bp, Artificial Sequence
  ENSG00000172061_0 (sequence is synthesized)
acactcatgctgcagccttgagccgtccctcgtcctcctctcaggctccctcttgtccacggcgggcgggcgccgagctgctggctatgccactgaagcattatctccttttgctggtgg

SEQ ID NO: 581945 - DNA, 120 bp, Artificial Sequence
  ENSG00000172061_1 (sequence is synthesized)
gctgccaagcctggggtgcagggttggcctaccatggctgccctagcgagtgtacctgctccagggcctcccaggtggagtgcaccggggcacgcattgtggcagtgcccacccctctgc

SEQ ID NO: 581946 - DNA, 120 bp, Artificial Sequence
  ENSG00000172061_2 (sequence is synthesized)
cctggaacgccatgagcctgcagatcctcaacacgcacatcactgaactcaatgagtccccgttcctcaatatctcagccctcatcgccctgaggattgagaagaatgagctgtcgcgca

SEQ ID NO: 581947 - DNA, 120 bp, Artificial Sequence
  ENSG00000172061_3 (sequence is synthesized)
tcacgcctggggccttccgaaacctgggctcgctgcgctatctcagcctcgccaacaacaagctgcaggttctgcccatcggcctcttccagggcctggacagcctcgagtctctccttc

SEQ ID NO: 581948 - DNA, 120 bp, Artificial Sequence
  ENSG00000172061_4 (sequence is synthesized)
tgtccagtaaccagctgttgcagatccagccggcccacttctcccagtgcagcaacctcaaggagctgcagttgcacggcaaccacctggaatacatccctgacggagccttcgaccacc

SEQ ID NO: 581949 - DNA, 120 bp, Artificial Sequence
  ENSG00000172061_5 (sequence is synthesized)
tggtaggactcacgaagctcaatctgggcaagaatagcctcacccacatctcacccagggtcttccagcacctgggcaacctccaggtcctccggctgtatgagaacaggctcacggata

SEQ ID NO: 581950 - DNA, 120 bp, Artificial Sequence
  ENSG00000172061_6 (sequence is synthesized)
tccccatgggcacttttgatgggcttgttaacctgcaggaactggctctgcagcagaaccagattggactgctctcccctggtctcttccacaacaaccacaacctccagagactctacc

SEQ ID NO: 581951 - DNA, 120 bp, Artificial Sequence
  ENSG00000172061_7 (sequence is synthesized)
tgtccaacaaccacatctcccagctgccacccagcgtcttcatgcagctgccccagctcaaccgtcttactctctttgggaattccctgaaggagctctctccggggatcttcgggccca

SEQ ID NO: 581952 - DNA, 120 bp, Artificial Sequence
  ENSG00000172061_8 (sequence is synthesized)
tgcccaacctgcgggagctttggctctatgacaaccacatctcttctctacccgacaatgtcttcagcaacctccgccagttgcaggtcctgattcttagccgcaatcagatcagcttca

SEQ ID NO: 581953 - DNA, 120 bp, Artificial Sequence
  ENSG00000172061_9 (sequence is synthesized)
tctccccgggtgccttcaacgggctaacggagcttcgggagctgtccctccacaccaacgcactgcaggacctggacgggaacgtcttccgcatgttggccaacctgcagaacatctccc

SEQ ID NO: 581954 - DNA, 120 bp, Artificial Sequence
  ENSG00000172061_10 (sequence is synthesized)
tgcagaacaaccgcctcagacagctcccagggaatatcttcgccaacgtcaatggcctcatggccatccagctgcagaacaaccagctggagaacttgcccctcggcatcttcgatcacc

SEQ ID NO: 581955 - DNA, 120 bp, Artificial Sequence
  ENSG00000172061_11 (sequence is synthesized)
tggggaaactgtgtgagctgcggctgtatgacaatccctggaggtgtgactcagacatccttccgctccgcaactggctcctgctcaaccagcctaggttagggacggacactgtacctg

SEQ ID NO: 581956 - DNA, 120 bp, Artificial Sequence
  ENSG00000172061_12 (sequence is synthesized)
tgtgtttcagcccagccaatgtccgaggccagtccctcattatcatcaatgtcaacgttgctgttccaagcgtccatgtccccgaggtgcctagttacccagaaacaccatggtacccag

SEQ ID NO: 581957 - DNA, 120 bp, Artificial Sequence
  ENSG00000172061_13 (sequence is synthesized)
acacacccagttaccctgacaccacatccgtctcttctaccactgagctaaccagccctgtggaagactacactgatctgactaccattcaggtcactgatgaccgcagcgtttggggca

SEQ ID NO: 581958 - DNA, 120 bp, Artificial Sequence
  ENSG00000172061_14 (sequence is synthesized)
tgacccaggcccagagcgggctggccattgccgccattgtaattggcattgtcgccctggcctgctccctggctgcctgcgtcggctgttgctgctgcaagaagaggagccaagctgtcc

SEQ ID NO: 581959 - DNA, 120 bp, Artificial Sequence
  ENSG00000172061_15 (sequence is synthesized)
tgatgcagatgaaggcacccaatgagtgttaaagaggcaggctggagcagggctggggaatgatgggactggaggacctgggaatttcatctttctgcctccacccctgggtccatggag

SEQ ID NO: 581960 - DNA, 120 bp, Artificial Sequence
  ENSG00000172061_16 (sequence is synthesized)
ctttcccgtgattgctctttctggccccagagaaaggtgagcctacctcttcctgacttgcctgattctcccgtagagaagcaggtcgtgccggaccttcctacaatcaggaagatagat

SEQ ID NO: 581961 - DNA, 120 bp, Artificial Sequence
  ENSG00000172061_17 (sequence is synthesized)
ccaactggccatggcaaaagccctggggatttccgattcatacccctgggcttccttcgagagggctcttcctccaaatcctccccacctgtcctccaagaacagccttccctgcgccca

SEQ ID NO: 581962 - DNA, 120 bp, Artificial Sequence
  ENSG00000172061_18 (sequence is synthesized)
ggccccctccgggcctctgtagactcagttagtccacagcctgctcacttcgtgggaatagttctccgctgagatagcccctctcgcctaagtattatgtaagttgatttcccttctttt

SEQ ID NO: 581963 - DNA, 120 bp, Artificial Sequence
  ENSG00000172061_19 (sequence is synthesized)
gtttctcttgtttgtgctacggcttgacccagcatgtcccctcaaatgaaagttctccccttgattttctgctcctgaaggcagggtgagttctctcctcaaagaagacttcaaaccatt

SEQ ID NO: 581964 - DNA, 120 bp, Artificial Sequence
  ENSG00000172061_20 (sequence is synthesized)
taactggtttcttaagagccgtcaatcagcctggttttggggatgctatgaaagagagaaggaaaatcatgccgctcagttcctggagacagaagagccgtcatcagtgtctcacttgtg

SEQ ID NO: 581965 - DNA, 120 bp, Artificial Sequence
  ENSG00000172061_21 (sequence is synthesized)
atttttatctggaaaaggaagaaacaccccagcacagcaagctcagccttttagagaaggatatttccaaactgcaaactttgctttgaaaagtttagccctttaaggaatgaaatcatg

SEQ ID NO: 581966 - DNA, 120 bp, Artificial Sequence
  ENSG00000172061_22 (sequence is synthesized)
tagaattttggacttctaaaaacattaaaatcagcttattaatacgggatagagaaagaaatctggtgcctgggggtccctgtgttcacccctagagtttgttttaaaatttttaattga

SEQ ID NO: 581967 - DNA, 120 bp, Artificial Sequence
  ENSG00000172061_23 (sequence is synthesized)
agcatgtgaagtgtacgtgcagaaaagtgggaacatgatagtgtatggcttggtggattttcacaaactgaacatacctgtgtaatcagcatctagacccagacccagagcatcacaaat

SEQ ID NO: 581968 - DNA, 120 bp, Artificial Sequence
  ENSG00000172061_24 (sequence is synthesized)
ccccatcctgggcttttcccagaggagatgggggcttctgaagatggacttacctgggacctgccccccatgagccaggacggtccccccacagtcagcctgtgcaaaggccccgtggcc

SEQ ID NO: 581969 - DNA, 120 bp, Artificial Sequence
  ENSG00000172061_25 (sequence is synthesized)
aggggtggaggagaatatgtgggtgtggacaggatgggagactgtggcctgaacaggagattttattatatctggagaccctgagagaccctgagacctggggcaccatggctggccagg

SEQ ID NO: 581970 - DNA, 120 bp, Artificial Sequence
  ENSG00000172061_26 (sequence is synthesized)
tcagaagcatcctgactgcagaggtccgtgcagccacaccctcttccctgccagcaagctgtctgcggctcatcggaggcccctccgcctggagccttctatggacgtgatatgcctgta

SEQ ID NO: 581971 - DNA, 120 bp, Artificial Sequence
  ENSG00000172061_27 (sequence is synthesized)
tctgtttttaattttcattcttcacttaggggaagtgaaatcgctcagagatgagatcctttaattgaaaacgaagtgtaacggaatctagtgtctttctaatgtggtaaaattctccat

SEQ ID NO: 581972 - DNA, 120 bp, Artificial Sequence
  ENSG00000172061_28 (sequence is synthesized)
caacatcacagtcagctggcagctgaacttcagaatctcacttacagcaggcgacacgggggtacaccgatgggtcacactgggtctgggggctccctggagctcctcctgcgtgtggtc

SEQ ID NO: 581973 - DNA, 120 bp, Artificial Sequence
  ENSG00000172061_29 (sequence is synthesized)
tggttaggagttgagttgtttgctccagggttattctcctcctcgagtcacagtcacacgaatacctgccttctctggctttcctgctatacacatattcacatggcgctcaagaagtta

SEQ ID NO: 581974 - DNA, 120 bp, Artificial Sequence
  ENSG00000172061_30 (sequence is synthesized)
ggctcatggcaacgtgtgtctttctctggacaactggcccagtttacagtgaaatggagaatttcaggtctccacgtctgcccaggaaagaacttcagctgactccacggggatctggaa

SEQ ID NO: 581975 - DNA, 120 bp, Artificial Sequence
  ENSG00000172061_31 (sequence is synthesized)
atccacgaccaatcccgatcggctcttattagctccccgctccacaagacacctgtgctttggaaatccaccaccaatcccgatcggctcttattagctccccgctccacaagacacctg

SEQ ID NO: 581976 - DNA, 120 bp, Artificial Sequence
  ENSG00000172061_32 (sequence is synthesized)
tgatctggaaatctaccaccaatcccgatcggctcttattagctccccgctccacaagacacctgtgacatcctccagggccacaggagcacgtgctgaccagttttcccttccagttcc

SEQ ID NO: 581977 - DNA, 120 bp, Artificial Sequence
  ENSG00000172061_33 (sequence is synthesized)
tgcacaaaaagtgtccagagggctgtttgcaaacactagtgcactttgtagcttttcaccctctgtcccagggaatctaggagagatgaggcccgtcagagtcaagagatgtcatccccc

SEQ ID NO: 581978 - DNA, 120 bp, Artificial Sequence
  ENSG00000172061_34 (sequence is synthesized)
cagggtctccaaggcatttccacactattggtggcacctggaggacatgcaccaaggcttgccagagccaacaggaagtgagcccagagcatggcacatgagcatcacccgctgatggtg

SEQ ID NO: 581979 - DNA, 120 bp, Artificial Sequence
  ENSG00000172061_35 (sequence is synthesized)
gcctgctgtgcctggtgccaacaggggcatcccggcccgtacccctccagacaggaagcatgggtttgcccacagacctgtcgggtgctcctgtgagtggcctccagatgtctttgtgca

SEQ ID NO: 581980 - DNA, 120 bp, Artificial Sequence
  ENSG00000172061_36 (sequence is synthesized)
taggcacaagtgggccagggctggagggaggtgggaaacctcatcatccggtgggccctgccaatcttaacccagaacccttaggtattcctggcagtagccatgacattggagcacctt

SEQ ID NO: 581981 - DNA, 120 bp, Artificial Sequence
  ENSG00000172061_37 (sequence is synthesized)
cctctccagccagaggctgacctgagggccactgtcctcagatgacaccacccaggagcaccctaggtgaggggtgagggcccccttatgtgaacctcttgcctcttcctttctcccatc

SEQ ID NO: 581982 - DNA, 120 bp, Artificial Sequence
  ENSG00000172061_38 (sequence is synthesized)
agagtggttggatggagccattggcctccttttcttcagcgggcccttcaacctctctgcaccatgttgtctggctgaggagctactagaaaagctgagtggagtctcctttccaacagg

SEQ ID NO: 581983 - DNA, 120 bp, Artificial Sequence
  ENSG00000172061_39 (sequence is synthesized)
atgatgcatttgctcaattctcagggctggaatgagccggctggtcccccagaaagctggagtggggtacagagttcagttttcctctctgtttacagctccttgacagtcccacgccca

SEQ ID NO: 581984 - DNA, 120 bp, Artificial Sequence
  ENSG00000172061_40 (sequence is synthesized)
tctggagtgggagctgggagtcagtgttggagaagaaacaacaaaagccaattagaaccactatttttaaaaagtgcttactgtgcacagatactcttcaagcactggacgtggattctc

SEQ ID NO: 581985 - DNA, 120 bp, Artificial Sequence
  ENSG00000172061_41 (sequence is synthesized)
tctctagccctcagcacccctgcggtaggagtgccgcctctacccacttgtgatggggtacagaggcacttgctcttctgcatggtgttcaataggctgggagttttatttatctcttca

SEQ ID NO: 581986 - DNA, 120 bp, Artificial Sequence
  ENSG00000172061_42 (sequence is synthesized)
aactttgtacaagagctcatggcttgtcttgggctttcgtcattaaaccaaaggaaatggaagccattcccctgttgctctccttagtcttggtcatcagaacctcacttggtaccatat

SEQ ID NO: 581987 - DNA, 120 bp, Artificial Sequence
  ENSG00000172061_43 (sequence is synthesized)
agatcaaaagctttgtaaccacaggaaaaaataaactcttccatcccttaaagaatagaatagtttgtccctctcatgggaattgggctgtatgtatattgttcttcctccttagaattt

SEQ ID NO: 581988 - DNA, 120 bp, Artificial Sequence
  ENSG00000172061_44 (sequence is synthesized)
agagatacaagagttctacttagaacttttcatggacacaatttccacaacctttcagatgctgatgtagagctattgggaaagaacttccaaactcaggaagtttgcagagagcagaca

SEQ ID NO: 581989 - DNA, 120 bp, Artificial Sequence
  ENSG00000172061_45 (sequence is synthesized)
gctagagataactcgggacccagagttggtcgacagatgttagatgtatcctagcttttagctataaaccactcaaagattcagcccccagatcccacagtcagaactgaatctgcgttg

SEQ ID NO: 581990 - DNA, 120 bp, Artificial Sequence
  ENSG00000172061_46 (sequence is synthesized)
ttgggaagccagcagtggccttgggaaggaagccatggctgtggttcagagagggtgggctggcaagccacttccggggaaaactccttccgccccaggtttcttcttctcttaaggaga

SEQ ID NO: 581991 - DNA, 120 bp, Artificial Sequence
  ENSG00000172061_47 (sequence is synthesized)
gattgttctcaccaacccgctgccttcatgctgccttcaaagctagatcatgtttgccttgcttagagaattactgcaaatcagccccagtgcttggcgatgcatttacagatttctagg

SEQ ID NO: 581992 - DNA, 120 bp, Artificial Sequence
  ENSG00000172061_48 (sequence is synthesized)
ccctcagggttttgtagagtgtgagccctggtgggcagggttggggggtctgtcttctgctggatgctgcttgtaatccatttggtgtacagaatcaacaataaataatatacatgtata

SEQ ID NO: 581993 - DNA, 120 bp, Artificial Sequence
  ENSG00000172061_49 (sequence is synthesized)
cagccttgagccgtccctcgtcctcctctcaggctccctcttgtccacggcgggcgggcgccgagctgctgatgtgtccctagcataacctggccccattcctttgcatctagatgcctt

SEQ ID NO: 581994 - DNA, 120 bp, Artificial Sequence
  ENSG00000172062_0 (sequence is synthesized)
atggcgatgagcagcggcggcagtggtggcggcgtcccggagcaggaggattccgtgctgttccggcgcggcacaggccagagcgatgattctgacatttgggatgatacagcactgata

SEQ ID NO: 581995 - DNA, 120 bp, Artificial Sequence
  ENSG00000172062_1 (sequence is synthesized)
aaagcatatgataaagctgtggcttcatttaagcatgctctaaagaatggtgacatttgtgaaacttcgggtaaaccaaaaaccacacctaaaagaaaacctgctaagaagaataaaagc

SEQ ID NO: 581996 - DNA, 120 bp, Artificial Sequence
  ENSG00000172062_2 (sequence is synthesized)
caaaagaagaatactgcagcttccttacaacagtggaaagttggggacaaatgttctgccatttggtcagaagacggttgcatttacccagctaccattgcttcaattgattttaagaga

SEQ ID NO: 581997 - DNA, 120 bp, Artificial Sequence
  ENSG00000172062_3 (sequence is synthesized)
ctactttccccaatctgtgaagtagctaataatatagaacaaaatgctcaagagaatgaaaatgaaagccaagtttcaacagatgaaagtgagaactccaggtctcctggaaataaatca

SEQ ID NO: 581998 - DNA, 120 bp, Artificial Sequence
  ENSG00000172062_4 (sequence is synthesized)
gataacatcaagcccaaatctgctccatggaactcttttctccctccaccaccccccatgccagggccaagactgggaccaggaaagccaggtctaaaattcaatggcccaccaccgcca

SEQ ID NO: 581999 - DNA, 120 bp, Artificial Sequence
  ENSG00000172062_5 (sequence is synthesized)
ccgccaccaccaccaccccacttactatcatgctggctgcctccatttccttctggaccaccaataattcccccaccacctcccatatgtccagattctcttgatgatgctgatgctttg

SEQ ID NO: 582000 - DNA, 120 bp, Artificial Sequence
  ENSG00000172062_6 (sequence is synthesized)
ggaagtatgttaatttcatggtacatgagtggctatcatactggctattatatgggtttcagacaaaatcaaaaagaaggaaggtgctcacattccttaaattaaggagtaagtctgcca

SEQ ID NO: 582001 - DNA, 120 bp, Artificial Sequence
  ENSG00000172062_7 (sequence is synthesized)
tttcttcaaaatatcaagtgttgggaaagaaaaaaggaagtggaatgggtaactcttcttgattaaaagttatgtaataaccaaatgcaatgtgaaatattttactggactctattttga

SEQ ID NO: 582002 - DNA, 120 bp, Artificial Sequence
  ENSG00000172062_8 (sequence is synthesized)
aaaaccatctgtaaaagactggggtgggggtgggaggccagcacggtggtgaggcagttgagaaaatttgaatgtggattagattttgaatgatattggataattattggtaattttatg

SEQ ID NO: 582003 - DNA, 120 bp, Artificial Sequence
  ENSG00000172062_9 (sequence is synthesized)
agctgtgagaagggtgttgtagtttataaaagactgtcttaatttgcatacttaagcatttaggaatgaagtgttagagtgtcttaaaatgtttcaaatggtttaacaaaatgtatgtga

SEQ ID NO: 582004 - DNA, 120 bp, Artificial Sequence
  ENSG00000172062_10 (sequence is synthesized)
ggcgtatgtggcaaaatgttacagaatctaactggtggacatggctgttcattgtactgtttttttctatcttctatatgtttaaaagtatataataaaaatatttaatttttttttaaa

SEQ ID NO: 582005 - DNA, 120 bp, Artificial Sequence
  ENSG00000172062_11 (sequence is synthesized)
gggaccaggaaagaaaggaaatgagaaaaatccagaggttgtcatttgacttatgagtctgtttgacttcaggatttggtacatgaaatttcacttaatctttttgatatgtataaaaca

SEQ ID NO: 582006 - DNA, 120 bp, Artificial Sequence
  ENSG00000172062_12 (sequence is synthesized)
aatattctggccaggtctaaaattcaatggcccaccaccgccaccgccaccaccaccaccccacttactatcatgctggctgcctccatttccttctggaccaccaataattcccccacc

SEQ ID NO: 582007 - DNA, 120 bp, Artificial Sequence
  ENSG00000172062_13 (sequence is synthesized)
atgttaaaaagttgaaaggttaatgtaaaacaatcaatattaaagaattttgatgccaaaactattagataaaaggttaatctacatccctactagaattctcatacttaactggttggt

SEQ ID NO: 582008 - DNA, 120 bp, Artificial Sequence
  ENSG00000172062_14 (sequence is synthesized)
tatgtggaagaaacatactttcacaataaagagctttaggatatgatgccattttatatcactagtaggcagaccagcagacttttttttattgtgatatgggataacctaggcatactg

SEQ ID NO: 582009 - DNA, 120 bp, Artificial Sequence
  ENSG00000172062_15 (sequence is synthesized)
cactgtacactctgacatatgaagtgctctagtcaagtttaactggtgtccacagaggacatggtttaactggaattcgtcaagcctctggttctaatttctcatttgcaggaaatgctg

SEQ ID NO: 582010 - DNA, 72 bp, Artificial Sequence
  ENSG00000172062_16 (sequence is synthesized)
tgatgatgctgatgctttgggaagtatgttaatttcatggtacatgagtggctatcatactggctattatat

SEQ ID NO: 582011 - DNA, 120 bp, Artificial Sequence
  ENSG00000172062_17 (sequence is synthesized)
atgtgaagcgttatagaagataactggcctcatttcttcaaaatatcaagtgttgggaaagaaaaaaggaagtggaatggagtctcgctctgctgcccacgctggagtgcagtggtgcaa

SEQ ID NO: 582012 - DNA, 120 bp, Artificial Sequence
  ENSG00000172062_18 (sequence is synthesized)
agctcactgcaacctgtgctatccgggttcaagcggttctcgtgcctcagccacgtgagtagttgggattacaggcatgtggcaccatgccccactaagttttgtatttttagtagagat

SEQ ID NO: 582013 - DNA, 120 bp, Artificial Sequence
  ENSG00000172062_19 (sequence is synthesized)
tttatttctatacatagcttttcacattatattatgtttatatattgtttatatctgtatttcctctttcattagagaaaaggtagtacatcttattcttcatggtgtctacaatatctg

SEQ ID NO: 582014 - DNA, 120 bp, Artificial Sequence
  ENSG00000172062_20 (sequence is synthesized)
gcagtttttggaagtcaagcgtgagcttagagcatagactggtgggattgtcaaagaagagggcaactggaagagaactgtcagttatttttggatcagtctttaattcatcatgacggg

SEQ ID NO: 582015 - DNA, 120 bp, Artificial Sequence
  ENSG00000172062_21 (sequence is synthesized)
ttaggcattagttgtatttcttgctaattttgaagaagacttattaacaaatcctacattaggtaaatggttttgaaagttgagttaatcataatggtgtttgacctaggactattttta

SEQ ID NO: 582016 - DNA, 120 bp, Artificial Sequence
  ENSG00000172062_22 (sequence is synthesized)
ggccctatttatcttaatatcgaataatgaagcagcttcccccttagatatagacagaaaacatcaaagccaccacactacctggctggatttatcctagtaataaaatcaaaactgagc

SEQ ID NO: 582017 - DNA, 120 bp, Artificial Sequence
  ENSG00000172062_23 (sequence is synthesized)
ctatcatactggctattatatggtaagtaatcactcagcatcttttcctgacaatttttttgtagttatgtgactttgttttgtaaatttataaaatactacttgcttctctctttatat

SEQ ID NO: 582018 - DNA, 120 bp, Artificial Sequence
  ENSG00000172071_0 (sequence is synthesized)
aggctgtcactcaggtggcagcggcagaggccgggctgagacgtggccaggggaacacggctggctgtccaggccgtcggggcggcagtagggtccctagcacgtccttgccttcttggg

SEQ ID NO: 582019 - DNA, 120 bp, Artificial Sequence
  ENSG00000172071_1 (sequence is synthesized)
agctccaagcggcgggagaggcaggcgtcagtggctgcgcctccatgcctgcgcgcggggcgggacgctgatggagcgcgccatcagcccggggctgctggtacgggcgctgctgctgct

SEQ ID NO: 582020 - DNA, 80 bp, Artificial Sequence
  ENSG00000172071_2 (sequence is synthesized)
tgctgctgctgctgctggggctcgcggcaaggacggtggccgcggggcgcgcccgtggcctcccagcgccgacggcggag

SEQ ID NO: 582021 - DNA, 120 bp, Artificial Sequence
  ENSG00000172071_3 (sequence is synthesized)
gcgagtaccggcggcgggcgccgtggctgcggccgaggtgactgtggaggacgctgaggcgctgccggcagccgcgggagagcaggagcctcggggtccggaaccagacgatgagacaga

SEQ ID NO: 582022 - DNA, 120 bp, Artificial Sequence
  ENSG00000172071_4 (sequence is synthesized)
gttgcgaccgcgcggcaggtcattagtaattatcagcactttagatgggagaattgctgccttggatcctgaaaatcatggtaaaaagcagtgggatttggatgtgggatccggttcctt

SEQ ID NO: 582023 - DNA, 120 bp, Artificial Sequence
  ENSG00000172071_5 (sequence is synthesized)
ggtgtcatccagccttagcaaaccagaggtatttgggaataagatgatcattccttccctggatggagccctcttccagtgggaccaagaccgtgaaagcatggaaacagttcctttcac

SEQ ID NO: 582024 - DNA, 120 bp, Artificial Sequence
  ENSG00000172071_6 (sequence is synthesized)
agttgaatcacttcttgaatcttcttataaatttggagatgatgttgttttggttggaggaaaatctctgactacatatggactcagtgcatatagtggaaaggtgaggtatatctgttc

SEQ ID NO: 582025 - DNA, 120 bp, Artificial Sequence
  ENSG00000172071_7 (sequence is synthesized)
agctctgggttgtcgccaatgggatagtgacgaaatggaacaagaggaagacatcctgcttctacagcgtacccaaaaaactgttagagctgtcggacctcgcagtggcaatgagaagtg

SEQ ID NO: 582026 - DNA, 120 bp, Artificial Sequence
  ENSG00000172071_8 (sequence is synthesized)
gaatttcagtgttggccactttgaacttcggtatattccagacatggaaacgagagccggatttattgaaagcacctttaagcccaatgagaacacagaagagtctaaaattatttcaga

SEQ ID NO: 582027 - DNA, 120 bp, Artificial Sequence
  ENSG00000172071_9 (sequence is synthesized)
tgtggaagaacaggaagctgccataatggacatagtgataaaggtttcggttgctgactggaaagttatggcattcagtaagaagggaggacatctggaatgggagtaccagttttgtac

SEQ ID NO: 582028 - DNA, 120 bp, Artificial Sequence
  ENSG00000172071_10 (sequence is synthesized)
tccaattgcatctgcctggttacttaaggatgggaaagtcattcccatcagtctttttgatgatacaagttatacatctaatgatgatgttttagaagatgaagaagacattgtagaagc

SEQ ID NO: 582029 - DNA, 120 bp, Artificial Sequence
  ENSG00000172071_11 (sequence is synthesized)
tgccagaggagccacagaaaacagtgtttacttgggaatgtatagaggccagctgtatctgcagtcatcagtcagaatttcagaaaagtttccttcaagtcccaaggctttggaatctgt

SEQ ID NO: 582030 - DNA, 120 bp, Artificial Sequence
  ENSG00000172071_12 (sequence is synthesized)
cactaatgaaaacgcaattattcctttaccaacaatcaaatggaaacccttaattcattctccttccagaactcctgtcttggtaggatctgatgaatttgacaaatgtctcagtaatga

SEQ ID NO: 582031 - DNA, 120 bp, Artificial Sequence
  ENSG00000172071_13 (sequence is synthesized)
taagttttctcatgaagaatatagtaatggtgcactttcaatcttgcagtatccatatgataatggttattatctaccatactacaagagggagaggaacaaacgaagcacacagattac

SEQ ID NO: 582032 - DNA, 120 bp, Artificial Sequence
  ENSG00000172071_14 (sequence is synthesized)
agtcagattcctcgacaacccacattacaacaagaatatccgcaaaaaggatcctgttcttcttttacactggtggaaagaaatagttgcaacgattttgttttgtatcatagcaacaac

SEQ ID NO: 582033 - DNA, 120 bp, Artificial Sequence
  ENSG00000172071_15 (sequence is synthesized)
gtttattgtgcgcaggcttttccatcctcatcctcacaggcaaaggaaggagtctgaaactcagtgtcaaactgaaaataaatatgattctgtaagtggtgaagccaatgacagtagctg

SEQ ID NO: 582034 - DNA, 120 bp, Artificial Sequence
  ENSG00000172071_16 (sequence is synthesized)
gaatgacataaaaaactctggatatatatcacgatatctaactgattttgagccaattcaatgcctgggacgtggtggctttggagttgtttttgaagctaaaaacaaagtagatgactg

SEQ ID NO: 582035 - DNA, 120 bp, Artificial Sequence
  ENSG00000172071_17 (sequence is synthesized)
caattatgctatcaagaggatccgtctccccaatagggaattggctcgggaaaaggtaatgcgagaagttaaagccttagccaagcttgaacacccgggcattgttagatatttcaatgc

SEQ ID NO: 582036 - DNA, 120 bp, Artificial Sequence
  ENSG00000172071_18 (sequence is synthesized)
aatggatgcaccatcagttaaaatacgcagaatggatcctttcgctacaaaagaacatattgaaatcatagctccttcaccacaaagaagcaggtctttttcagtagggatttcctgtga

SEQ ID NO: 582037 - DNA, 120 bp, Artificial Sequence
  ENSG00000172071_19 (sequence is synthesized)
ccagacaagttcatctgagagccagttctcaccactggaattctcaggaatggaccatgaggacatcagtgagtcagtggatgcagcatacaacctccaggacagttgccttacagactg

SEQ ID NO: 582038 - DNA, 120 bp, Artificial Sequence
  ENSG00000172071_20 (sequence is synthesized)
tgatgtggaagatgggactatggatggcaatgatgaggggcactcctttgaactttgtccttctgaagcttctccttatgtaaggtcaagggagagaacctcctcttcaatagtatttga

SEQ ID NO: 582039 - DNA, 120 bp, Artificial Sequence
  ENSG00000172071_21 (sequence is synthesized)
agattctggctgtgataatgcttccagtaaagaagagccgaaaactaatcgattgcatattggcaaccattgtgctaataaactaactgctttcaagcccaccagtagcaaatcttcttc

SEQ ID NO: 582040 - DNA, 120 bp, Artificial Sequence
  ENSG00000172071_22 (sequence is synthesized)
tgaagctacattgtctatttctcctccaagaccaaccactttaagtttagatctcactaaaaacaccacagaaaaactccagcccagttcaccaaaggtgtatctttacattcaaatgca

SEQ ID NO: 582041 - DNA, 120 bp, Artificial Sequence
  ENSG00000172071_23 (sequence is synthesized)
gctgtgcagaaaagaaaacctcaaagactggatgaatggacgatgtaccatagaggagagagagaggagcgtgtgtctgcacatcttcctgcagatcgcagaggcagtggagtttcttca

SEQ ID NO: 582042 - DNA, 120 bp, Artificial Sequence
  ENSG00000172071_24 (sequence is synthesized)
cagtaaaggactgatgcacagggacctcaagccatccaacatattctttacaatggatgatgtggtcaaggttggagactttgggttagtgactgcaatggaccaggatgaggaagagca

SEQ ID NO: 582043 - DNA, 120 bp, Artificial Sequence
  ENSG00000172071_25 (sequence is synthesized)
gacggttctgaccccaatgccagcttatgccagacacacaggacaagtagggaccaaactgtatatgagcccagagcagattcatggaaacagctattctcataaagtggacatcttttc

SEQ ID NO: 582044 - DNA, 120 bp, Artificial Sequence
  ENSG00000172071_26 (sequence is synthesized)
tttaggcctgattctatttgaattgctgtatccattcagcactcagatggagagagtcaggaccttaactgatgtaagaaatctcaaatttccaccattatttactcagaaatatccttg

SEQ ID NO: 582045 - DNA, 120 bp, Artificial Sequence
  ENSG00000172071_27 (sequence is synthesized)
tgagtacgtgatggttcaagacatgctctctccatcccccatggaacgacctgaagctataaacatcattgaaaatgctgtatttgaggacttggactttccaggaaaaacagtgctcag

SEQ ID NO: 582046 - DNA, 120 bp, Artificial Sequence
  ENSG00000172071_28 (sequence is synthesized)
acagaggtctcgctccttgagttcatcgggaacaaaacattcaagacagtccaacaactcccatagccctttgccaagcaattagccttaagttgtgctagcaaccctaataggtgatgc

SEQ ID NO: 582047 - DNA, 120 bp, Artificial Sequence
  ENSG00000172071_29 (sequence is synthesized)
agataatagcctacttcttagaatatgcctgtccaaaattgcagacttgaaaagtttgttcttcgctcaatttttttgtggactactttttttatatcaaatttaagctggatttggggg

SEQ ID NO: 582048 - DNA, 120 bp, Artificial Sequence
  ENSG00000172071_30 (sequence is synthesized)
cataacctaatttgagccaactcctgagttttgctatacttaaggaaagggctatctttgttctttgttagtctcttgaaactggctgctggccaagctttatagccctcaccatttgcc

SEQ ID NO: 582049 - DNA, 120 bp, Artificial Sequence
  ENSG00000172071_31 (sequence is synthesized)
taaggaggtagcagcaatccctaatatatatatatagtgagaactaaaatggatatatttttataatgcagaagaaggaaagtccccctgtgtggtaactgtattgttctagaaatatgc

SEQ ID NO: 582050 - DNA, 120 bp, Artificial Sequence
  ENSG00000172071_32 (sequence is synthesized)
tttctagagatatgatgattttgaaactgatttctagaaaaagctgactccatttttgtccctggcgggtaaattaggaatctgcactattttggaggacaagtagcacaaactgtataa

SEQ ID NO: 582051 - DNA, 120 bp, Artificial Sequence
  ENSG00000172071_33 (sequence is synthesized)
cggtttatgtccgtagttttatagtcctatttgtagcattcaatagctttattccttagatggttctagggtgggtttacagctttttgtacttttacctccaataaagggaaaatgaag

SEQ ID NO: 582052 - DNA, 120 bp, Artificial Sequence
  ENSG00000172071_34 (sequence is synthesized)
ctttttatgtaaattggttgaaaggtctagttttgggaggaaaaaagccgtagtaagaaatggatcatatatattacaactaacttcttcaactatggactttttaagcctaatgaaatc

SEQ ID NO: 582053 - DNA, 120 bp, Artificial Sequence
  ENSG00000172071_35 (sequence is synthesized)
ttaagtgtcttatatgtaatcctgtaggttggtacttcccccaaactgattataggtaacagtttaatcatctcacttgctaacatgtttttatttttcactgtaaatatgtttatgttt

SEQ ID NO: 582054 - DNA, 120 bp, Artificial Sequence
  ENSG00000172071_36 (sequence is synthesized)
tatttataaaaattctgaaatcaatccatttgggttggtggtgtacagaacacacttaagtgtgttaacttgtgacttctttcaagtctaaatgatttaataaaactttttttaaattaa

SEQ ID NO: 582055 - DNA, 120 bp, Artificial Sequence
  ENSG00000172071_37 (sequence is synthesized)
ataaattttccatttgatagatgtacaacctcttagtcattttgttagagtatcaaaaaatattttcatgttgtatgtcaaaataaacttaataagtgatactttttttctttttagacc

SEQ ID NO: 582056 - DNA, 120 bp, Artificial Sequence
  ENSG00000172071_38 (sequence is synthesized)
tcaatctctgtttacttcggtagtctcatctgtaaacaacaggattgaacccgatcacctggttttccgatttgatgtgctgctacataattctggtattgtagaaggtgaggtatatct

SEQ ID NO: 582057 - DNA, 120 bp, Artificial Sequence
  ENSG00000172071_39 (sequence is synthesized)
agttcagatgagaggtttagtgtaaagtggtataggacagaggggacagagttgagatatttgatgcaaaatctaggttcctggcaagtgaatgcattcttcctttcttggtacccttgt

SEQ ID NO: 582058 - DNA, 120 bp, Artificial Sequence
  ENSG00000172071_40 (sequence is synthesized)
ggaatatgatattttggtagatgataggaagtattggacagcacacatcactagtgcagcagttgtaagaaaaagtgattaacaagtgattcccaattaaacatgtcttttttattttta

SEQ ID NO: 582059 - DNA, 120 bp, Artificial Sequence
  ENSG00000172071_41 (sequence is synthesized)
atttttttctaggaaacataagaatgtgtttgcttcatttatacaaacaggactaaaaatgctgttaatcaaattcaaaatatactatttattaagatgagttctatgagtttatacatt

SEQ ID NO: 582060 - DNA, 120 bp, Artificial Sequence
  ENSG00000172071_42 (sequence is synthesized)
aattacttttggttgatggactgcactgcttcatgtgctactcagaaggaggctggagtacatcaggatcaagactccagctcttaattactattattcttttaaaggtatttgggaata

SEQ ID NO: 582061 - DNA, 120 bp, Artificial Sequence
  ENSG00000172073_0 (sequence is synthesized)
acagcaacaggactctccatgtggcaagggcacctggaggtgggagggcaggagcgtcgtcttgccctggcagaagaagcggtaggctctgtctgcgtggcagctggtccccagccctag

SEQ ID NO: 582062 - DNA, 120 bp, Artificial Sequence
  ENSG00000172073_1 (sequence is synthesized)
gagagaagctgtctgtcgtttgccatggcaggtgtgaaatacccgggacaggaccctgtggatttagacatataccaaagctcccacatggtcgactatcagccctacaggaagcacaaa

SEQ ID NO: 582063 - DNA, 120 bp, Artificial Sequence
  ENSG00000172073_2 (sequence is synthesized)
tactccagggtcacgccgcaagagcaggcaaagctcgatgctcaactccgggacaaagagttttacaggcccatccctaaccccaaccccaagctaacagatgggtaccctgctttcaaa

SEQ ID NO: 582064 - DNA, 120 bp, Artificial Sequence
  ENSG00000172073_3 (sequence is synthesized)
gagcgcaagttcaccagcacctgccatttcacatatccagcttcccacgatctgcacctggcccagggtgaccccaaccaggtcctccagagtgctgactttccgtgcctcgtggatccc

SEQ ID NO: 582065 - DNA, 120 bp, Artificial Sequence
  ENSG00000172073_4 (sequence is synthesized)
aaacaccagcctgctgcagagatggccaaaggctacctgctactgccagggtgtccctgtcttcattgccatatagtcaaggtccccatcttgaaccggtggggacccttgatgccattt

SEQ ID NO: 582066 - DNA, 120 bp, Artificial Sequence
  ENSG00000172073_5 (sequence is synthesized)
taccagtaggaaggatgaaaataccttccaaaggctcttccaagggcatgtggaaatcctatgaccttggagtgcagagaggagaactgaaaataaaactggaaagatgttccaactgca

SEQ ID NO: 582067 - DNA, 120 bp, Artificial Sequence
  ENSG00000172081_0 (sequence is synthesized)
gtgtccctccgcggcggctgcgaggcggtgcggcggctgaggcggccgaggcggccagttgggtaccgggaggggcgaaggcgggcggcagaggcgatcagaagtttccaagggtcactt

SEQ ID NO: 582068 - DNA, 120 bp, Artificial Sequence
  ENSG00000172081_1 (sequence is synthesized)
gtgtctcgtccgtgggaagaccgggggagcccagaaggccttggtgtggaattctgagagctgattcctgccttgtcttctccactgttcctggaggaatccgagaagagcagagcggag

SEQ ID NO: 582069 - DNA, 120 bp, Artificial Sequence
  ENSG00000172081_2 (sequence is synthesized)
ggagccccagacacggtccgcgggagagctgtggggcttggtgagtgtttcgtggcctctcgggttggtcagcacccccagccagctggcccaggacccctctacagaagtccaggagag

SEQ ID NO: 582070 - DNA, 120 bp, Artificial Sequence
  ENSG00000172081_3 (sequence is synthesized)
caggcgtcaccaagatgtccaaccccttcctgaagcaagtcttcaacaaggacaagacattccgccccaagcgcaagtttgagccaggcacccagcgcttcgagctgcacaagaaggcgc

SEQ ID NO: 582071 - DNA, 120 bp, Artificial Sequence
  ENSG00000172081_4 (sequence is synthesized)
aggcgtcgctgaacgccgggctggacctgcggctggccgtgcagttgcccccgggcgaggacctgaacgactgggtggctgttcacgtggtggacttctttaaccgcgtcaacctcatct

SEQ ID NO: 582072 - DNA, 120 bp, Artificial Sequence
  ENSG00000172081_5 (sequence is synthesized)
acggcaccatcagcgacggctgcacggagcagtcctgccccgtcatgtcggggggccccaagtatgagtaccgctggcaggatgagcataagttccggaagcccacggcactctccgcgc

SEQ ID NO: 582073 - DNA, 120 bp, Artificial Sequence
  ENSG00000172081_6 (sequence is synthesized)
ccaggtacatggacctgctgatggactggatcgaggcgcagatcaacaacgaggacctcttccccaccaacgttggcactccgtttcccaagaacttcctgcagacggtgcggaagatcc

SEQ ID NO: 582074 - DNA, 120 bp, Artificial Sequence
  ENSG00000172081_7 (sequence is synthesized)
tgtcgcggctgttccgcgtgttcgtgcacgtctacatccaccactttgaccgcatcgcgcagatgggctccgaggcccacgtgaacacctgctacaagcacttctactatttcgtcaagg

SEQ ID NO: 582075 - DNA, 120 bp, Artificial Sequence
  ENSG00000172081_8 (sequence is synthesized)
agttcggcctcatcgacaccaaggagctggagccactgaaagaaatgaccgcccggatgtgccactgagagccccgcgggtctcccggtgcccgaaccgccgctggggcctcggagactt

SEQ ID NO: 582076 - DNA, 120 bp, Artificial Sequence
  ENSG00000172081_9 (sequence is synthesized)
ggaggaggacgctctggaaccatcatcccgcttctctccggcctgagcatctcagggagaccaggggccgagccgctgagcaggtgttggtcctcaggagctccaaccccggacggcaga

SEQ ID NO: 582077 - DNA, 120 bp, Artificial Sequence
  ENSG00000172081_10 (sequence is synthesized)
tgccttcctcagtctcgagcctcagtctcccgtctgggactaaaacgtgaactctgtaattctatgtgttactagcaaccggaaaagcccactgtgtttttaaaccacttccactttcca

SEQ ID NO: 582078 - DNA, 120 bp, Artificial Sequence
  ENSG00000172081_11 (sequence is synthesized)
ggaggctggatggcttccagggtcactccttgccctgggtggctcccaggctcctggaacttctgcctccacctcgctggggagcccccagggctgctgtggccacagccctgcctgggc

SEQ ID NO: 582079 - DNA, 120 bp, Artificial Sequence
  ENSG00000172081_12 (sequence is synthesized)
ctgtctctcaagggcacccagcttgctcggcctcctacatgtctcccgttggggaggcaagaggctgaggggcttccgagcccctgagagcggacatctcctcccgcaggcctttactcc

SEQ ID NO: 582080 - DNA, 120 bp, Artificial Sequence
  ENSG00000172081_13 (sequence is synthesized)
gcactccccactggcagccgctggtgtctcttcacacagaggcacaacctggacccaggcagcctctttcctccctccccaatctcttccatttttctacagatttttttttttttggtc

SEQ ID NO: 582081 - DNA, 120 bp, Artificial Sequence
  ENSG00000172081_14 (sequence is synthesized)
tcctggcctccagtgatcctccatcctcggcctcccaaagtgctggaatcacaggggtgagccaccgcacccagccctctctcttcctcaatgcactctgcttcttccgttcttccgaaa

SEQ ID NO: 582082 - DNA, 120 bp, Artificial Sequence
  ENSG00000172081_15 (sequence is synthesized)
cattcagctgactgtatccagggcttcctggactcctgggaccccacgtcctgcaccccggcttctgactcatttcctaagggcccctttgtgtatcataaagggtttgatttttatagt

SEQ ID NO: 582083 - DNA, 120 bp, Artificial Sequence
  ENSG00000172081_16 (sequence is synthesized)
gtatcataaagggtttgatttttatagtcacatttacaaccatcttgagatttttattttttttgaacggagtctcccactgtcgcccagactggagtccagtggcacaatctcggctca

SEQ ID NO: 582084 - DNA, 120 bp, Artificial Sequence
  ENSG00000172081_17 (sequence is synthesized)
tagtgagctctctgcctcttcggaacgatgtccactttgcttatgatcaacccaagcaggactcttctctccctggacgcctctcccctggtctggaatcttccagttctgccagaattg

SEQ ID NO: 582085 - DNA, 120 bp, Artificial Sequence
  ENSG00000172081_18 (sequence is synthesized)
gcctttcccagatgctgcaaacttccagttgaacccctttttctgtgtggcccctggggctgcgagaccaaaatccatgagttctgtgtaccctagacctttggaaggtgagagcagggc

SEQ ID NO: 582086 - DNA, 120 bp, Artificial Sequence
  ENSG00000172081_19 (sequence is synthesized)
cctgagaaaaggcagccacctcctctccctggctgaacccctgccaccctactcctcaccagaattgtcagtggcctttcaccacagtggtccttcctgcctgagccctgcactgtccca

SEQ ID NO: 582087 - DNA, 120 bp, Artificial Sequence
  ENSG00000172081_20 (sequence is synthesized)
gaccacacagaagtctggtcacctctgggcgcctgggatggtcaccgaagagaagcacgctgtccccgtctctcctggcttctgccagaaaatcgaacaagtgcaattaacacactgtta

SEQ ID NO: 582088 - DNA, 120 bp, Artificial Sequence
  ENSG00000172081_21 (sequence is synthesized)
ctgccgaagcctgaaactcccaggacttgtccttgatccttccagaaaccaccaggtccggcacttggagccccccggagagggacctcccagccgagccctcaaagaactccatgaaat

SEQ ID NO: 582089 - DNA, 120 bp, Artificial Sequence
  ENSG00000172081_22 (sequence is synthesized)
caggaactgcttgatgaaatgtatctccttgtacctggaagatgaagcccaaacacccacacctctgtctcccccagggctcgggatgtctccagcagcccggccacgcagcttcccagg

SEQ ID NO: 582090 - DNA, 120 bp, Artificial Sequence
  ENSG00000172081_23 (sequence is synthesized)
tgggctcggggaggtgggagcagggaccatctctgtcccctccaccctcactccatccacctcggagaccaccctcccccagccagatacggaataaaactacagacgcagacgtcggaa

SEQ ID NO: 582091 - DNA, 120 bp, Artificial Sequence
  ENSG00000172081_24 (sequence is synthesized)
cctgtgccaatggccggtgcccgctcctcggccggctcccgctgaggccccgccccgtgtcgcagccacggtgcaggctccgcccacaggccgcggccccggttgctaggcaacggagac

SEQ ID NO: 582092 - DNA, 120 bp, Artificial Sequence
  ENSG00000172081_25 (sequence is synthesized)
ggttgctaggcaacggagacctccgcccggcccggctcagggcatcccagggctgctgcccggaacttggctccgtgcgccttcgccgcccgggccccttaaagcccgcgggaccgagtc

SEQ ID NO: 582093 - DNA, 120 bp, Artificial Sequence
  ENSG00000172081_26 (sequence is synthesized)
agttgggtaccgggaggggcgaaggcgggcggcagaggcgatcaggagtcactgagaggggaggggaaattggaaaatgcagtcacagagcagaaaatcagtgctccaagccgcagctca

SEQ ID NO: 582094 - DNA, 120 bp, Artificial Sequence
  ENSG00000172081_27 (sequence is synthesized)
gtcaccatgccagctctgccgggctgcagatgctggtttcagaagcgcctggcagctgcggagctctggggatgcggacttggctgggctaagatggatcggaagtttccaagggtcact

SEQ ID NO: 582095 - DNA, 120 bp, Artificial Sequence
  ENSG00000172081_28 (sequence is synthesized)
agcatcttccagccaagtatgagggctgggctgccaggccgggagccagtgttgtgcactgacctagaacatatggaactgacttctccactcagggcttgtctctcaggcgcctcccgt

SEQ ID NO: 582096 - DNA, 120 bp, Artificial Sequence
  ENSG00000172086_0 (sequence is synthesized)
ctcctcctcccatccagcctgctcggcggcggaggcggcggtggcggcagcggttgttcctgcctctccgccacctccaccgcggcttatcccctggctggcggcgttggcggggcgggg

SEQ ID NO: 582097 - DNA, 120 bp, Artificial Sequence
  ENSG00000172086_1 (sequence is synthesized)
gacagtagttgtagacgcccgcccctgcctcagagaagataccacattgaatgaacaaagactgaactttgtttacagataccttttataaaagatgtctgtggagtagtgttacagttc

SEQ ID NO: 582098 - DNA, 120 bp, Artificial Sequence
  ENSG00000172086_2 (sequence is synthesized)
aaataacaaaggattttgcattatgagatgagtgagagtggagaattggacaaaaattgatttttgatctctgaattgtggtttttagctcaccagttattgtgtagtctcactatttga

SEQ ID NO: 582099 - DNA, 120 bp, Artificial Sequence
  ENSG00000172086_3 (sequence is synthesized)
aaattcatgctgaaaaactgagtgaatatgatcagatttctccaccaaattctcagcctgataaggaaaatcccgttttgtcaacctaatgaagcattcaaagaagacatatgactcttt

SEQ ID NO: 582100 - DNA, 120 bp, Artificial Sequence
  ENSG00000172086_4 (sequence is synthesized)
tcaagatgaacttgaagattatattaaagtacagaaagccagaggcttagagccaaagacttgtttcagaaagatgaaaggggactatttggaaacctgtgggtacaaaggagaggttaa

SEQ ID NO: 582101 - DNA, 120 bp, Artificial Sequence
  ENSG00000172086_5 (sequence is synthesized)
ttccagacccacgtatagaatgtttgaccagagactcccatctgaaaccatccagacctacccaagatcatgcaatattccacaaacagtggaaaatcggttgcctcagtggttaccagc

SEQ ID NO: 582102 - DNA, 120 bp, Artificial Sequence
  ENSG00000172086_6 (sequence is synthesized)
ccatgacagcagattgagactagactctctgagctactgtcagttcacgagggactgtttctcagaaaaaccagtacccctgaactttaatcaacaagaatatatttgtggctcacatgg

SEQ ID NO: 582103 - DNA, 120 bp, Artificial Sequence
  ENSG00000172086_7 (sequence is synthesized)
catagagtttacaagcacttctcctcagataacagtaccagtactcatcaagccagtcacaaacagatacatcagaagaggaaaaggcacccagaggaaggcagagaaaaatcagaggag

SEQ ID NO: 582104 - DNA, 120 bp, Artificial Sequence
  ENSG00000172086_8 (sequence is synthesized)
gagcggtctaagcataagagaaaaaaaagctgcgaggaaattgacttagacaaacacaagagcatccaaagaaagaaaacagaggtggaaatagaaaccgtacatgtcagtacagaaaag

SEQ ID NO: 582105 - DNA, 120 bp, Artificial Sequence
  ENSG00000172086_9 (sequence is synthesized)
cttaagaatcgaaaggagaaaaaaagccgagatgtagtctctaagaaagaggaacgtaagcgtacaaaaaagaaaaaggaacaaggccaagaaaggacagaggaggaaatgctttgggac

SEQ ID NO: 582106 - DNA, 120 bp, Artificial Sequence
  ENSG00000172086_10 (sequence is synthesized)
cagtctattcttggattttgaagctttcaaagttggttctcccaaagttaaattgaaaaaataggtgagagcttggttttatgatatccgtgttcataccacttttcttatgtgaatagg

SEQ ID NO: 582107 - DNA, 120 bp, Artificial Sequence
  ENSG00000172086_11 (sequence is synthesized)
ttctttaacttctaacaaaggcctagtaaacaaagtgtttagcatgcttgctctccaacacagaaattgcttttcctcattttctaaaagcattattacattttttgaacatatagtgta

SEQ ID NO: 582108 - DNA, 120 bp, Artificial Sequence
  ENSG00000172086_12 (sequence is synthesized)
atttcctttaatgaaagtgactctgcttttattcatcaaattgctttgatggtggaaatattttctgttgggaggttatttattttaaattggaggattaatgacctttgcacaatctgt

SEQ ID NO: 582109 - DNA, 120 bp, Artificial Sequence
  ENSG00000172086_13 (sequence is synthesized)
ttcttgattgggtttgttatagttttgagttgggtattttatgttcattggtttttctctgtgaagcaatttttttctcctttattagatctaacttgcagtgtattttctaggctggaa

SEQ ID NO: 582110 - DNA, 120 bp, Artificial Sequence
  ENSG00000172086_14 (sequence is synthesized)
ggctggaaagtggaaaatgaaatatattataatcttaggttacataaagtttctaaagtttcaaagagtcttgatacaaaatcagtttatattctgaaaatatttataataaagtattct

SEQ ID NO: 582111 - DNA, 120 bp, Artificial Sequence
  ENSG00000172086_15 (sequence is synthesized)
gtcagaggagatgcgacaatgcaaccaagagggtcagagtcagagagatattgaaggggctgtgttgctgactttaaagatggaagaagcggccatgagccaagaaactggaaaaggcca

SEQ ID NO: 582112 - DNA, 120 bp, Artificial Sequence
  ENSG00000172086_16 (sequence is synthesized)
gggaacagattcttaccctagaacctccagagggaacacagccctgcggaccttgatttcagccatgtaaagtccatttctggcttctgaccaccagaactaaaatcccgttttgtcaac

SEQ ID NO: 582113 - DNA, 120 bp, Artificial Sequence
  ENSG00000172113_0 (sequence is synthesized)
gacaaggtgaacccgcagccggacttctgctgcactggggctccgaatgacccagaatctggggagtgagatggcctcaatcttgcgaagccctcaggctctccagctcactctagccct

SEQ ID NO: 582114 - DNA, 120 bp, Artificial Sequence
  ENSG00000172113_1 (sequence is synthesized)
gatcaagcctgacgcagtcgcccatccactgattctggaggctgttcatcagcagattctaagcaacaagttcctgattgtacgaatgagagaactactgtggagaaaggaagattgcca

SEQ ID NO: 582115 - DNA, 120 bp, Artificial Sequence
  ENSG00000172113_2 (sequence is synthesized)
gaggttttaccgagagcatgaagggcgttttttctatcagaggctggtggagttcatggccagcgggccaatccgagcctacatccttgcccacaaggatgccatccagctctggaggac

SEQ ID NO: 582116 - DNA, 120 bp, Artificial Sequence
  ENSG00000172113_3 (sequence is synthesized)
gctcatgggacccaccagagtgttccgagcacgccatgtggccccagattctatccgtgggagtttcggcctcactgacacccgcaacaccacccatggttcggactctgtggtttcagc

SEQ ID NO: 582117 - DNA, 120 bp, Artificial Sequence
  ENSG00000172113_4 (sequence is synthesized)
cagcagagagattgcagccttcttccctgacttcagtgaacagcgctggtatgaggaggaagagccccagttgcgctgtggccctgtgtgctatagcccagagggaggtgtccactatgt

SEQ ID NO: 582118 - DNA, 120 bp, Artificial Sequence
  ENSG00000172113_5 (sequence is synthesized)
agctggaacaggaggcctaggaccagcctgatgcaggtctatgaagaccagtggtagtgcccagacttctcctagacatctagtctaaaacattctcctaggaccagggaagcctggctt

SEQ ID NO: 582119 - DNA, 120 bp, Artificial Sequence
  ENSG00000172113_6 (sequence is synthesized)
acagtgccatttctgctgggcaccaccacctgcctgagggcctagctcaccacagcacatcctccaggatctagccttctatctacctcttctctggaatgtttatggtggttcagaaga

SEQ ID NO: 582120 - DNA, 120 bp, Artificial Sequence
  ENSG00000172113_7 (sequence is synthesized)
atctacctcttctctggaatgtttatggtggttcagaagaatgatgactcctctttgctgagaactgttcatccttcttcaagaagaagcttgccaggccgggcacggtggctcacgcct

SEQ ID NO: 582121 - DNA, 120 bp, Artificial Sequence
  ENSG00000172113_8 (sequence is synthesized)
ctcaaaaaaaaaaaaaaagaagcttgtctaattgacttgcctaaaaaatgcagtgactccaaacaacatttgacctgtcttcctcaataaaagtcagtgttctcctgaatcctttatgct

SEQ ID NO: 582122 - DNA, 120 bp, Artificial Sequence
  ENSG00000172113_9 (sequence is synthesized)
gccacatttaggggaaacttttcaggcttcatcattctgacttctcagcagcattcagttattgcttcattctccagaaacactctcttctcttggattttctgatcccacacccttggt

SEQ ID NO: 582123 - DNA, 120 bp, Artificial Sequence
  ENSG00000172113_10 (sequence is synthesized)
tttctccttctgtgtgtttttcttcatctcctttatcagcttatgcaaacatttattttcataaattctctattcaagacatactgaaaaatgcaaagatggttaagacatgattgggtc

SEQ ID NO: 582124 - DNA, 120 bp, Artificial Sequence
  ENSG00000172113_11 (sequence is synthesized)
ctcaagttgctaattatgaatttgggtggtcagccagctataacgtggcagagatggagaagtgccctaacagaggtataaagtcctgtgggagaacagaggaaagaaggtttcctttgg

SEQ ID NO: 582125 - DNA, 120 bp, Artificial Sequence
  ENSG00000172113_12 (sequence is synthesized)
ctgggtgaggaggtgaaggagatagggtggaaagtcttttataaaagatatagctggctttggaactaagcctgaaggtcaaatagggtatccatagcaggggtctggggcactagacag

SEQ ID NO: 582126 - DNA, 120 bp, Artificial Sequence
  ENSG00000172113_13 (sequence is synthesized)
tctgttcattttcaggaatatatgggtcagttttgtatgtgtgacctaagaaacctgtgacacttcttacaggtcttgacttttctttctcagtacatgtgtatttctctttttggtggc

SEQ ID NO: 582127 - DNA, 120 bp, Artificial Sequence
  ENSG00000172113_14 (sequence is synthesized)
cttgaaacctttgagttgaaaattgccttcaccatctgccactttcactaatggtagaccaggaaatttggacccactgaacatagagaacaactagaaaagctgtgcaaaatataaaca

SEQ ID NO: 582128 - DNA, 120 bp, Artificial Sequence
  ENSG00000172113_15 (sequence is synthesized)
actggggctccgaatgacccagaatctggggtgggcttaggccccgggccgcgtgttcttgccacgagaacccctagcagcctggccttggaatggctggatgaggtgcattcgttggtt

SEQ ID NO: 582129 - DNA, 120 bp, Artificial Sequence
  ENSG00000172113_16 (sequence is synthesized)
gaaggaccctgcgagggccgcaggctatccagcgtggcgcctggtggccgggccctgtgccggaggacaaggagtgagatggcctcaatcttgcgaagccctcaggctctccagctcact

SEQ ID NO: 582130 - DNA, 120 bp, Artificial Sequence
  ENSG00000172113_17 (sequence is synthesized)
ccagctgtgtgctaggtactgcttacaccttctggtggtgaagacggaactgaagggaacttgcaaggagctgtgagaaagtgtaacgggaagtgagctaagatcactaaggagtgagat

SEQ ID NO: 582131 - DNA, 120 bp, Artificial Sequence
  ENSG00000172113_18 (sequence is synthesized)
ggcgcctggtggccgggccctgtgccggaggacaaggtgaacccgcagccggacttctgctgcactggggctccgaatgacccagaatctggggtgggcttaggccccgggagtgagatg

SEQ ID NO: 582132 - DNA, 120 bp, Artificial Sequence
  ENSG00000172113_19 (sequence is synthesized)
tcaggtgccattgggccatttatggtgactgacaacacagacttgtgctggatgctgtggaggcaaagctagaagccatgaactctgacctaaggagactaagaatccattggagacttg

SEQ ID NO: 582133 - DNA, 120 bp, Artificial Sequence
  ENSG00000172113_20 (sequence is synthesized)
ggtgaacccgcagccggacttctgctgcactggggctccgaatgacccagaatctggggtgggcttaggccccgggtacgaggggagtgagatggcctcaatcttgcgaagccctcaggc

SEQ ID NO: 582134 - DNA, 120 bp, Artificial Sequence
  ENSG00000172113_21 (sequence is synthesized)
ggaggacaaggtgaacccgcagccggacttctgctgcactggggctccgaatgacccagaatctggggtgggcttaggccccgggtacgaggggccgcgtgttcttgccacgagaacccc

SEQ ID NO: 582135 - DNA, 120 bp, Artificial Sequence
  ENSG00000172113_22 (sequence is synthesized)
atatcaagacaatgtgtatttgttagtttctattgctacataacacattactccagacttgagagcttaaaacaacacttatttgttatttcacagttcagtagtttagaggtccagtag

SEQ ID NO: 582136 - DNA, 120 bp, Artificial Sequence
  ENSG00000172113_23 (sequence is synthesized)
ttgtttgcttaaggtctcacaaggccaaagtcaaggtattggctgaccaggtccttatctggagggtctgggggaagaattcacttccagactcattcaggttgttggcagagttgattt

SEQ ID NO: 582137 - DNA, 120 bp, Artificial Sequence
  ENSG00000172113_24 (sequence is synthesized)
cttatgatggtaggactgaggctgccatttccctgttggccttcaggcaggaactcctttcagtttctagataccactcacatccctcatcacatggcccagtctgtcttcaagacagct

SEQ ID NO: 582138 - DNA, 120 bp, Artificial Sequence
  ENSG00000172113_25 (sequence is synthesized)
gcagtgcattgaatccttctcatgctttgaatctctctgacttcttcagcctctagccagagaaaatgcctggcattgagaagccttcacaattctaatcccacagggctcatgtgatta

SEQ ID NO: 582139 - DNA, 120 bp, Artificial Sequence
  ENSG00000172113_26 (sequence is synthesized)
attaggcccacctggataatctcccttttgattacagcagaatcaactgattagtaaccttaatttccctcaaaatccctgttgttatgtaatgtaacataatcatattgcatcatattc

SEQ ID NO: 582140 - DNA, 120 bp, Artificial Sequence
  ENSG00000172113_27 (sequence is synthesized)
acagtcctggagattagggtgggaaatcttggtggggctcggggtcattttcacattctgtgtaccatagtttgataaatactaactgagtagcactgctaagtaagcccactatggtgc

SEQ ID NO: 582141 - DNA, 120 bp, Artificial Sequence
  ENSG00000172113_28 (sequence is synthesized)
gtgccggaggacaaggtgaacccgcagccggacttctgctgcactggggctccgaatgacccagaatctgggcgggccaatccgagcctacatccttgcccacaaggatgccatccagct

SEQ ID NO: 582142 - DNA, 120 bp, Artificial Sequence
  ENSG00000172113_29 (sequence is synthesized)
catctatctgaaagcatcagctggcaatatagaaccaaaattcaggacacgaaggaaactcaagagaagtgagcctgggacttagagctacttttcccataagggcacctgctgattctg

SEQ ID NO: 582143 - DNA, 120 bp, Artificial Sequence
  ENSG00000172113_30 (sequence is synthesized)
gaagaggcagctaagaagctgagtagaactttcaacaacttcttgtgttagggagccagcttcatgaatgctggcagaaaacacaggattacttgggcagagactactgctcagggcaca

SEQ ID NO: 582144 - DNA, 120 bp, Artificial Sequence
  ENSG00000172113_31 (sequence is synthesized)
gcaggcagtgtgttagccttggtctcccttgccctccaagtcccacagggcaatactggcaggcccaggaaagtgttacacactgcaggtttgcatgacggctaaggaaccacaatctta

SEQ ID NO: 582145 - DNA, 120 bp, Artificial Sequence
  ENSG00000172113_32 (sequence is synthesized)
gacggctaaggaaccacaatcttagggagatactatctctgtcttctaaggccatttgctgtacaaaaatccttgaaatacctgggcacagtggcacacctataatcctagcactttggg

SEQ ID NO: 582146 - DNA, 120 bp, Artificial Sequence
  ENSG00000172113_33 (sequence is synthesized)
ccagcacccggcccagcactccctcccgccgagggcgcccaggccggcttccgagggcgcccaggccggcttccgaggggcggttcccacaagcgagttccggcgcccagaacggcttca

SEQ ID NO: 582147 - DNA, 120 bp, Artificial Sequence
  ENSG00000172113_34 (sequence is synthesized)
agaacggcttcatcctctcgtcccgtccgcggcaaatgcatgcgcctggaaaacccgccaccctccagggcaactcacacctcacctcacgccgcggcgcaaccggactaggaccccgag

SEQ ID NO: 582148 - DNA, 73 bp, Artificial Sequence
  ENSG00000172113_35 (sequence is synthesized)
tccttgaaatagtctggaacaaaatctgtcaacatctcagcccacaaagtatcaacaaaattgatattttgtt

SEQ ID NO: 582149 - DNA, 120 bp, Artificial Sequence
  ENSG00000172113_36 (sequence is synthesized)
atctcagcccacaaagtatcaacaaaattgatattttgttgcatttaaaaaatttaaatggtggtcaaagcgtacaaaatctgacaattaagacacccacaagagacacagaattatctc

SEQ ID NO: 582150 - DNA, 120 bp, Artificial Sequence
  ENSG00000172113_37 (sequence is synthesized)
ccaataaaattgtctcataaaaacctggctcccacaaatatggaaagggagaaaactagaataaaccctgtggtgtcgaattggagatatcagtgtgaactcgtgtatttcagtctatag

SEQ ID NO: 582151 - DNA, 120 bp, Artificial Sequence
  ENSG00000172113_38 (sequence is synthesized)
agatagatgtaaatatgtttttgtatgtatagtcctttgcactgatgtgagagcaatgacactccaatagtaatgaccacacccagcacccaggtccaccaaaagacaaagtgctatgga

SEQ ID NO: 582152 - DNA, 120 bp, Artificial Sequence
  ENSG00000172113_39 (sequence is synthesized)
ctgaattatatccccctaaaattcatatgttgaagccctaacccccaatgtgatgatatttggaaatgggacatttgggagataattaagtttagatggccaggtatggtggctcacgcc

SEQ ID NO: 582153 - DNA, 81 bp, Artificial Sequence
  ENSG00000172113_40 (sequence is synthesized)
gggtgaaagagcgagactccgtctcaaaacaaaatgaaacaaaacaaaacaaactattgcctatagcaaaccaattgctaa

SEQ ID NO: 582154 - DNA, 89 bp, Artificial Sequence
  ENSG00000172113_41 (sequence is synthesized)
acatagtgagaccctgtctctataaaaactaaaaataggctgggcgcagtggctcattggggaggatcacttaagtccaggagtttgag

SEQ ID NO: 582155 - DNA, 120 bp, Artificial Sequence
  ENSG00000172113_42 (sequence is synthesized)
aataaaaataaaaaacttagctgggtgtggtggtgcatgcttgtgtcccagctacttgggaggcaaagtgggaggattgcttgagcctgagagattgaggcttcagtgcagtttgagcca

SEQ ID NO: 582156 - DNA, 120 bp, Artificial Sequence
  ENSG00000172113_43 (sequence is synthesized)
cagcctgggtgacagtgagaccctgtcttaaaaaaataagagtatgacatgagcatgtgagagcaaaagaaaacaaggaagtctgcgaccatgaagcgaatgcttagtctctgatatcac

SEQ ID NO: 582157 - DNA, 120 bp, Artificial Sequence
  ENSG00000172113_44 (sequence is synthesized)
ctctgatatcacaggcttaaagaaaatgataaagacctaaaaagaaaagaaatatcccagcatgctgaaggaaagaaaagttccccaatacccttcctgcttatttttccaatatattac

SEQ ID NO: 582158 - DNA, 120 bp, Artificial Sequence
  ENSG00000172113_45 (sequence is synthesized)
acagctgggtccaccttaccacgtcctgtttgattccagcgttaccaacttttctattggagccaaataagacatactgcaatcagtgatgaactgtctatatgccaagtgtatcccttg

SEQ ID NO: 582159 - DNA, 120 bp, Artificial Sequence
  ENSG00000172113_46 (sequence is synthesized)
tgtaactgtgtaatggctgaaactgagaaattggggcgaagtatcaagtggcttaaaggattgccaaggatccaaaatttgaacgattaccaaattaccacgcacaggaaggaatctatg

SEQ ID NO: 582160 - DNA, 120 bp, Artificial Sequence
  ENSG00000172113_47 (sequence is synthesized)
cagatgactgcttagcacagagagttactcagcataagtgttgtagccacgaacctgggaccttaaaagaagaatcctaagattcttggagttcctatcatgtacatttctaaccataga

SEQ ID NO: 582161 - DNA, 120 bp, Artificial Sequence
  ENSG00000172113_48 (sequence is synthesized)
tacaacatgggaactgatgtcagatgattatggagccccttggttctaattcttgcccaagttcctctgcctttcttccaccaactttctcttgttgccagttcattaaacatggaatag

SEQ ID NO: 582162 - DNA, 120 bp, Artificial Sequence
  ENSG00000172113_49 (sequence is synthesized)
caaatttggttccagcatctttatccactgaggctaatctcccctgcccctaaatggatttgttcatttcactgccattctttaaagttgtaatcaggccaggcacggtggctcatgcct

SEQ ID NO: 582163 - DNA, 75 bp, Artificial Sequence
  ENSG00000172113_50 (sequence is synthesized)
acctgggaggtggaggttgaagtgagccaagatcgtggcacaacaacaacagcaaaaaattagccaggcatggtg

SEQ ID NO: 582164 - DNA, 120 bp, Artificial Sequence
  ENSG00000172113_51 (sequence is synthesized)
atctcaaaaaataaagttgtaaacaatgtcaaatctgaagaaacacgggtttggggctgtcactgagccgatgctgacctgttaggcacctgtcctctggtggttagaagagtccccttg

SEQ ID NO: 582165 - DNA, 120 bp, Artificial Sequence
  ENSG00000172113_52 (sequence is synthesized)
aatgctgcatagccaccctgctgatctctgcaggcttgatgtacaccagcaggggccctgcatcacctatttgaagcagcattggtactcagctggaaaggcaggaaaactctcagaacg

SEQ ID NO: 582166 - DNA, 120 bp, Artificial Sequence
  ENSG00000172113_53 (sequence is synthesized)
tagagtgtgtttttattcaggccctgctcacagcacaccctcctagtctagatggccaggttctttacatgtgcttgttttgttcacagcgggccaatccgagcctacatccttgcccac

SEQ ID NO: 582167 - DNA, 120 bp, Artificial Sequence
  ENSG00000172113_54 (sequence is synthesized)
gctccgaatgacccagaatctggggtgggcttaggccccgggtacgaggggattctcgacttgtcagtttgttgtaaaccaagagtcaagacagccacaacttagctgcgttagtaaagg

SEQ ID NO: 582168 - DNA, 120 bp, Artificial Sequence
  ENSG00000172113_55 (sequence is synthesized)
actgaaaggcccatgaggttggagctagagaaacttaaggagtgtggggttccagatgaggctagagaggagtgagatggcctcaatcttgcgaagccctcaggctctccagctcactct

SEQ ID NO: 582169 - DNA, 120 bp, Artificial Sequence
  ENSG00000172115_0 (sequence is synthesized)
gtagccgccagctcggccgcacgtcagggcgcgggagcgcggagcgagtttggttgcacttacaccggtacttaagcgcggaccggcgtgtccttggacttagagagtggggacgtccgg

SEQ ID NO: 582170 - DNA, 120 bp, Artificial Sequence
  ENSG00000172115_1 (sequence is synthesized)
cttcggagcgggagtgttcgttgtgccagcgactaaaaagagaattaaatatgggtgatgttgagaaaggcaagaagatttttattatgaagtgttcccagtgccacaccgttgaaaagg

SEQ ID NO: 582171 - DNA, 120 bp, Artificial Sequence
  ENSG00000172115_2 (sequence is synthesized)
gaggcaagcacaagactgggccaaatctccatggtctctttgggcggaagacaggtcaggcccctggatactcttacacagccgccaataagaacaaaggcatcatctggggagaggata

SEQ ID NO: 582172 - DNA, 120 bp, Artificial Sequence
  ENSG00000172115_3 (sequence is synthesized)
cactgatggagtatttggagaatcccaagaagtacatccctggaacaaaaatgatctttgtcggcattaagaagaaggaagaaagggcagacttaatagcttatctcaaaaaagctacta

SEQ ID NO: 582173 - DNA, 120 bp, Artificial Sequence
  ENSG00000172115_4 (sequence is synthesized)
aaaaagctactaatgagtaataattggccactgccttatttattacaaaacagaaatgtctcatgacttttttatgtgtaccatcctttaatagatctcatacaccagaattcagatcat

SEQ ID NO: 582174 - DNA, 120 bp, Artificial Sequence
  ENSG00000172115_5 (sequence is synthesized)
gaatattttgttgggcagtcctgatttaaaactaagactggcttgtggttaaatgaatatgttcagtttttgaattttaatagtaactccaattcagtaaatggtatcactgtttacccc

SEQ ID NO: 582175 - DNA, 120 bp, Artificial Sequence
  ENSG00000172115_6 (sequence is synthesized)
ttttaaagatatgattagacttcgttagtaatgttcaacttttcacaaagatggtgagtgccatcttaaaacttactggagattggttttatatttagatttatataactggttatgtga

SEQ ID NO: 582176 - DNA, 120 bp, Artificial Sequence
  ENSG00000172115_7 (sequence is synthesized)
atatatttaaatactggggaaattgcttcactgtcttagaaccaagcaagattcacctgtgttttgtgttcatgttcatttgcctcttaaaggcaagggttgaagataaataaggtagca

SEQ ID NO: 582177 - DNA, 120 bp, Artificial Sequence
  ENSG00000172115_8 (sequence is synthesized)
atgtctatagttttggccttaactatgccaatctaattataattccctgtatttaaaatggtttcttttacttattgaaaggcattttagtgtggtttatgtgtaatattaaagattatt

SEQ ID NO: 582178 - DNA, 120 bp, Artificial Sequence
  ENSG00000172115_9 (sequence is synthesized)
caacacctctcacatcttacagatctataaggtcacatgcttttaaaatagtagcaagttaaacttcactcttgaattctttacaatctaagtcaaactaagttataatttaggattgtc

SEQ ID NO: 582179 - DNA, 120 bp, Artificial Sequence
  ENSG00000172115_10 (sequence is synthesized)
tttaaacagccattcagaaacaaaactgtagaactgtgtatttgattgggaatggtgcttttgccaacttaaaaggattaaagtaacggagatatacacaaattttaaaattatgtgtga

SEQ ID NO: 582180 - DNA, 120 bp, Artificial Sequence
  ENSG00000172115_11 (sequence is synthesized)
tcacaagactaaagataattaaaaagaaaaccacagatcatgactttttgactgtgcttgatttcatgactgatgcacaaattttaatgattaaaaagtgcaggagccctaaatgtcagt

SEQ ID NO: 582181 - DNA, 120 bp, Artificial Sequence
  ENSG00000172115_12 (sequence is synthesized)
gcagcagccctaaatgtcagtgcagcagtgttaaccagtcatggtgctagattgtttacttggttttctaggactgcctcaactagaataacacttcactaattgactcttagtttcttt

SEQ ID NO: 582182 - DNA, 120 bp, Artificial Sequence
  ENSG00000172115_13 (sequence is synthesized)
gctcagattgagaactgcagcatttatgccagacatggacagaggaatgcctgtggtcatagttttgtgatgtgtaacagtgtataattacatactgaattatttcatgcatagtctgtg

SEQ ID NO: 582183 - DNA, 120 bp, Artificial Sequence
  ENSG00000172115_14 (sequence is synthesized)
ccatacacatttagagtagtccttggagattttatggagatggtgagcacaaggtaagtcataaagaataatgagaaaataaatctatgctggtgcagctgagaactgtatctttgtggg

SEQ ID NO: 582184 - DNA, 120 bp, Artificial Sequence
  ENSG00000172115_15 (sequence is synthesized)
acagtgagaagactgagaagatgtgaatccatggtctcaaaggtgatagggacgattagataggtgttttaaggcctgaaagcaatttataacatatgagtcttatttttatttatagaa

SEQ ID NO: 582185 - DNA, 120 bp, Artificial Sequence
  ENSG00000172115_16 (sequence is synthesized)
atgtggaaagcttgctgtaattcatatttgaagtcctagtctgagttctggtggggaatttaaaaatgcatcctggaaatcctttaaagatttcagactttgaaaggccttgtagcagag

SEQ ID NO: 582186 - DNA, 120 bp, Artificial Sequence
  ENSG00000172115_17 (sequence is synthesized)
agttagtggtattcagggacagtgtagcaagtagcttacaaggggacaattctggactaatgagaaagacctgaagtgaaggctagagagttgattttttttttttttggcatcctggaa

SEQ ID NO: 582187 - DNA, 120 bp, Artificial Sequence
  ENSG00000172115_18 (sequence is synthesized)
atgatacaggaaacatattaagatagatacagaaatgtgttcaaccttccatcttggctagttgtggcgtttagtttgttttttgagacatggtcacgctgtgtcgccaaggctggagtg

SEQ ID NO: 582188 - DNA, 88 bp, Artificial Sequence
  ENSG00000172115_19 (sequence is synthesized)
gagacatggtcacgctgtgtcgcggctgcaacctctatttcccaggctcaagcgattctctcacttcagcttcccaagtagctgggac

SEQ ID NO: 582189 - DNA, 78 bp, Artificial Sequence
  ENSG00000172115_20 (sequence is synthesized)
tctcaaactcctgagctcaagcaatccgtccacttgccttggtgcctggttttcaaattcagaaatcttattatttaa

SEQ ID NO: 582190 - DNA, 120 bp, Artificial Sequence
  ENSG00000172115_21 (sequence is synthesized)
tgcctggttttcaaattcagaaatcttattatttaacccagaagtaatcagcccagtagtaacttaggtttaattttttttcaggtttaaaatttttctcatttattttttctgagacgg

SEQ ID NO: 582191 - DNA, 120 bp, Artificial Sequence
  ENSG00000172115_22 (sequence is synthesized)
tttttctcatttattttttctgagacggagtttcgcccttttcgcccaggctgagtacagtggtgcaatctcactgcaacctccgccttccagttgcaagtgattctcctgcctcagcct

SEQ ID NO: 582192 - DNA, 120 bp, Artificial Sequence
  ENSG00000172115_23 (sequence is synthesized)
ttacaggtgtgagccaccacgtccggccaatttttctcatttctatgcctcctatattaaggtctgtgttggcacagatgagtaactgccatgttctaggtcagttatacccaagcactt

SEQ ID NO: 582193 - DNA, 120 bp, Artificial Sequence
  ENSG00000172115_24 (sequence is synthesized)
agtaactgccatgttctaggtcagttatacccaagcacttctggtggtttaaaatgtgattctgtaacttttttatttttatttttttgagataatttcactcttgttgcccaggctgga

SEQ ID NO: 582194 - DNA, 68 bp, Artificial Sequence
  ENSG00000172115_25 (sequence is synthesized)
atgtaattttttaaaaaggacatttctatcagggatatataccttcagaaataaggaaataggggaaa

SEQ ID NO: 582195 - DNA, 120 bp, Artificial Sequence
  ENSG00000172115_26 (sequence is synthesized)
tcagggatatataccttcagaaataaggaaataggggaaaaaaagagcactataaaccacatgttttcatttctagtgcttcgctgtaagtggctaggttggtagaatcaaaaacaaggg

SEQ ID NO: 582196 - DNA, 120 bp, Artificial Sequence
  ENSG00000172115_27 (sequence is synthesized)
ccagatgtatttaaggggtattcagatgccacctacatgcttattttgtctagaacagtgctgtctaatagaactttctgtgacgatggatattttgtagacttttgctgtccagtgtgg

SEQ ID NO: 582197 - DNA, 120 bp, Artificial Sequence
  ENSG00000172115_28 (sequence is synthesized)
tagccactaaccacatgtggctgttaagcccttgaaatatagctagtgtgactagaaagtattttattttaaatttacataggcacaagtggctagtggctactgtattgacattctggg

SEQ ID NO: 582198 - DNA, 120 bp, Artificial Sequence
  ENSG00000172115_29 (sequence is synthesized)
tggctactgtattgacattctgggtctaggactagaaccagtggtctgtaacaaaagtactttctctttactctattaaatctagaattagccgggcatggtcgctcatgcctgtaatcc

SEQ ID NO: 582199 - DNA, 120 bp, Artificial Sequence
  ENSG00000172115_30 (sequence is synthesized)
acgtccggcttcggagcgggagtgttcgttgtgccagcgactaaaaagaggtgagagcgggtcgcggaggccgcacctggttagaggcagagctgtgggaggcgcgcacttgcgagcgac

SEQ ID NO: 582200 - DNA, 120 bp, Artificial Sequence
  ENSG00000172115_31 (sequence is synthesized)
cgaaacccaagcggggagcattcgagtggagcccgcgctgggtgggagggcggggagtgaagaccctggactgtggtcagaccgagctgggcgagtaacggcttgaggtgcggcggagcc

SEQ ID NO: 582201 - DNA, 120 bp, Artificial Sequence
  ENSG00000172115_32 (sequence is synthesized)
agagagtggggacgtccggcttcggagcgggagtgttcgttgtgccagcgactaaaaagagagggcaaaagctgttgctcttctaataaggggccagttcttttcgtgggcacatgtttc

SEQ ID NO: 582202 - DNA, 120 bp, Artificial Sequence
  ENSG00000172115_33 (sequence is synthesized)
ttccgtcagtcgttctgacatcctagaaggagtttcatcaatcaccttgaaaccgacctggacgggtgacctcgtggtcgccccaggagatcacagaattaaatatgggtgatgttgaga

SEQ ID NO: 582203 - DNA, 120 bp, Artificial Sequence
  ENSG00000172116_0 (sequence is synthesized)
gcgactgtctccgccgagcccccggggccaggtgtcccgggcgcgccacgatgcggccgcggctgtggctcctcttggccgcgcagctgacagttctccatggcaactcagtcctccagc

SEQ ID NO: 582204 - DNA, 120 bp, Artificial Sequence
  ENSG00000172116_1 (sequence is synthesized)
agacccctgcatacataaaggtgcaaaccaacaagatggtgatgctgtcctgcgaggctaaaatctccctcagtaacatgcgcatctactggctgagacagcgccaggcaccgagcagtg

SEQ ID NO: 582205 - DNA, 120 bp, Artificial Sequence
  ENSG00000172116_2 (sequence is synthesized)
acagtcaccacgagttcctggccctctgggattccgcaaaagggactatccacggtgaagaggtggaacaggagaagatagctgtgtttcgggatgcaagccggttcattctcaatctca

SEQ ID NO: 582206 - DNA, 120 bp, Artificial Sequence
  ENSG00000172116_3 (sequence is synthesized)
tgcccagcccaccaagaagtccaccctcaagaagagagtgtgccggttacccaggccagagacccagaagggcccactttgtagccccatcacccttggcctgctggtggctggcgtcct

SEQ ID NO: 582207 - DNA, 120 bp, Artificial Sequence
  ENSG00000172116_4 (sequence is synthesized)
ggttctgctggtttccctgggagtggccatccacctgtgctgccggcggaggagagcccggcttcgtttcatgaaacagcctcaaggggaaggtatatcaggaacctttgtcccccaatg

SEQ ID NO: 582208 - DNA, 120 bp, Artificial Sequence
  ENSG00000172116_5 (sequence is synthesized)
cctgcatggatactacagcaatactacaacctcacagaagctgcttaacccatggatcctgaaaacataggcaagaagcacaggtcctgatgagtggatctttactacttttaccagatt

SEQ ID NO: 582209 - DNA, 120 bp, Artificial Sequence
  ENSG00000172116_6 (sequence is synthesized)
tgctgccggcggaggagagcccggcttcgtttcatgaaacaattttacaaatgagcagagaatacggttttggtgtcctgctacaaaaagacatcggtcagtaacgagcacgatgtggaa

SEQ ID NO: 582210 - DNA, 120 bp, Artificial Sequence
  ENSG00000172116_7 (sequence is synthesized)
aaatgagagaagggacacattcaaccctggagagttcaatggctgctgaagctgcctgcttttcactgctgcaaggcctttctgtgtgtgatgtgcatgggagcaacttgttcgtgggtc

SEQ ID NO: 582211 - DNA, 120 bp, Artificial Sequence
  ENSG00000172116_8 (sequence is synthesized)
atcgggaatactagggagaaggtttcattgcccccagggcacttcacagagtgtgctggaggactgagtaagaaatgctgcccatgccaccgcttccggctcctgtgctttccctgaact

SEQ ID NO: 582212 - DNA, 120 bp, Artificial Sequence
  ENSG00000172116_9 (sequence is synthesized)
gggacctttagtggtggccatttagccaccatctttgcaggttgctttgccctggtagggcagtaacattgggtcctgggtctttcatggggtgatgctgggctggctccctcttggtct

SEQ ID NO: 582213 - DNA, 120 bp, Artificial Sequence
  ENSG00000172116_10 (sequence is synthesized)
tcccaggctggggctgaccttcctcgcagagaggccaggtgcaggttgggaatgaggcttgctgagaggggctgtccagttcccagaaggcatatcagtctctgagggcttcctttgggg

SEQ ID NO: 582214 - DNA, 120 bp, Artificial Sequence
  ENSG00000172116_11 (sequence is synthesized)
ccgggaacttgcgggtttgaggataggagttcacttcatcttctcagctcccatttctactcttaagtttctcagctcccatttctactctcccatggcttaatgcttctttcattttct

SEQ ID NO: 582215 - DNA, 120 bp, Artificial Sequence
  ENSG00000172116_12 (sequence is synthesized)
gtttgttttatacaaatgtcttagttgtacaaataaagtcccaggttaaagataacaaacggctcctgtgacataaacgtgcgaaagcccatctacagcaaagacatcagtgctccgtgg

SEQ ID NO: 582216 - DNA, 120 bp, Artificial Sequence
  ENSG00000172116_13 (sequence is synthesized)
aacagaaaccagaaggagaaaatttgtacatcctccttttgcacctgagatcctcatttgcccgacgttgtaggtgtggagagtcctagagaggctaggaagcgcccagggcacccagag

SEQ ID NO: 582217 - DNA, 120 bp, Artificial Sequence
  ENSG00000172116_14 (sequence is synthesized)
ccaggctgcaggtgcctcaggcccctctcccagcccactcccaagctgaactagcacgtgttcatttctaccgcgggttgaaccgcagggatccctggcttcaagtcaggcaccaaacag

SEQ ID NO: 582218 - DNA, 120 bp, Artificial Sequence
  ENSG00000172116_15 (sequence is synthesized)
aaggtaggaggcatgaggggttctgtcacatgtctcttcattttcttattgattcttagccttgacagttggagaaggaaaaagcaaggagaaagtgctgagcaggagtggagagtgaag

SEQ ID NO: 582219 - DNA, 120 bp, Artificial Sequence
  ENSG00000172116_16 (sequence is synthesized)
agcaggacctcgtgcctgggtttgaaaaagtgcctgagacccatcttagccgcccctacctgagctttagcagcctaggagctattgcaccataaaacactgcaacctgaggctgcatta

SEQ ID NO: 582220 - DNA, 120 bp, Artificial Sequence
  ENSG00000172116_17 (sequence is synthesized)
acagaagcaccacgtccaggtccagggagaatccagcctcacctgcttttcctggccagctcaaagaaggacattgacaaatcaggttatgttcagttacctgtgacaaccacagaatgt

SEQ ID NO: 582221 - DNA, 120 bp, Artificial Sequence
  ENSG00000172116_18 (sequence is synthesized)
aagaaatgttacaaaaaaaacaggaaaggaaagacgactctggggaaggggcagtgtgaccttctcctggcatctggggtgcggccgcagcagaatgaggtgtggtgggtggagttagaa

SEQ ID NO: 582222 - DNA, 120 bp, Artificial Sequence
  ENSG00000172116_19 (sequence is synthesized)
aggcatagatgcagtgttaccggaaggagggccttgagtgtaagttgtccaggtccttggcattttgaacaaagaactgaacaaaacatacaaagtaataaaggaataaaagcagcaaaa

SEQ ID NO: 582223 - DNA, 120 bp, Artificial Sequence
  ENSG00000172116_20 (sequence is synthesized)
cctgttggctaccccttatctgggtgaaggatttggtccatggctaatgaaaggctgaggtgaattgacgccctatgcggatgaagggatggcccgtgcttggtctgtggtcaatccagg

SEQ ID NO: 582224 - DNA, 120 bp, Artificial Sequence
  ENSG00000172116_21 (sequence is synthesized)
gccgtctccctttccatctgagatgcagtggaagggggagggttgtagggagagtagcctttgatccttggttactcagtgtggggagatggggtttttccttttggtgtatgttaattg

SEQ ID NO: 582225 - DNA, 120 bp, Artificial Sequence
  ENSG00000172116_22 (sequence is synthesized)
gccttagatgccctgcccccagacccaggtgttttccgtttgctccagctttgagaagtcagcacaaattggcctcagattccctgcccccagacgtaggtgtttctccttcattcagca

SEQ ID NO: 582226 - DNA, 120 bp, Artificial Sequence
  ENSG00000172116_23 (sequence is synthesized)
cgaattggccttagatgccctgcccccagacccaggtgttttccatttgatccagctttgagaagtcagcacaaattggcctcagattccctgcccccggacatagatgtttctccttga

SEQ ID NO: 582227 - DNA, 120 bp, Artificial Sequence
  ENSG00000172116_24 (sequence is synthesized)
ttcagcacgaattggccttagattccctgcccccagaccctagactcctgcctcagcaagaggtgttcaaaagaaacaaaagctctgcccatcagctctgaggacaagggacaggctgcc

SEQ ID NO: 582228 - DNA, 120 bp, Artificial Sequence
  ENSG00000172116_25 (sequence is synthesized)
ttccaaggctgaggggaggggtgaaagaattggggtcagctggaccagactcctctagggttcgtgtttcaggtgggcccctcacccggcccatcacaaacaaataagagattaaggcct

SEQ ID NO: 582229 - DNA, 120 bp, Artificial Sequence
  ENSG00000172116_26 (sequence is synthesized)
gcagtgcacatggtctgccctccttgaaggctcacacccagtgcacagcggaagtaagaacaggccacaaggcctcttgtcccactgcaggctttgaaatttgaccgtctccctgctgct

SEQ ID NO: 582230 - DNA, 120 bp, Artificial Sequence
  ENSG00000172116_27 (sequence is synthesized)
gtctttgcaattgcatgtacttgttcacaagttctcatggggttgggctgggggcaggggtggtttgcgctcctctgtcagttttctgtgcagcaggcacctgccgaggcgggctcagct

SEQ ID NO: 582231 - DNA, 120 bp, Artificial Sequence
  ENSG00000172116_28 (sequence is synthesized)
ccggctgcccagggagctggagcaggctgggctgccaatggtgggggctgcggtgagaaggtctgcacccagcacctgacctttgtttgaagaaggagctgagctgctactacactctat

SEQ ID NO: 582232 - DNA, 120 bp, Artificial Sequence
  ENSG00000172116_29 (sequence is synthesized)
agggccattatgatgaaatatgccccccaaactccatccagctatcttttgactagcaattccacttgttggcatttatctgaaagaaatacatcaaaaagtggcatgcacaaagaaata

SEQ ID NO: 582233 - DNA, 120 bp, Artificial Sequence
  ENSG00000172116_30 (sequence is synthesized)
cgcatcagattgttccttctagtgttgcttactagctaaaaatgggaaataatccaaatgtccatcaaaagggactggtcagataaattcagacacagtctaataagggggtttaggcgg

SEQ ID NO: 582234 - DNA, 120 bp, Artificial Sequence
  ENSG00000172116_31 (sequence is synthesized)
ctgctaaggaatgagctagatccatatatgctgatatcaaatgatggttatgacaaatgcatatatttttaaaacatctgtatagattattcttaatacaatatatggcacaatatgtag

SEQ ID NO: 582235 - DNA, 120 bp, Artificial Sequence
  ENSG00000172116_32 (sequence is synthesized)
tcactgttaaaattcaagcacaaaagaaaacaagcaaaacaaatatatgttgttagaagttaggatacagttacccttggtccagtggtggtcattaggagggagcatgaggtttgaagg

SEQ ID NO: 582236 - DNA, 120 bp, Artificial Sequence
  ENSG00000172116_33 (sequence is synthesized)
tgagcatttctgcttctcaatctgggaatcacttatatgagtgtgtttcattagtaaaagtcatcaagctgtacactcagatatgttgactttagagctatggatatagatgtaaattat

SEQ ID NO: 582237 - DNA, 120 bp, Artificial Sequence
  ENSG00000172116_34 (sequence is synthesized)
acttcaagaaagagactttttaaaatccaagtacagaacattgtagaaatgtgtaaaattggtatttggaagtttcttcagcaagcacatgggattacagctcacgcctgtaatcccagt

SEQ ID NO: 582238 - DNA, 120 bp, Artificial Sequence
  ENSG00000172116_35 (sequence is synthesized)
actttgggaggcccacacagaatgatcacttgagctcaggagtttgagagcagcctaggcaacatagcaagacctcgactctacaaaaaatttttaaatttttttctgggcatggtggtg

SEQ ID NO: 582239 - DNA, 88 bp, Artificial Sequence
  ENSG00000172116_36 (sequence is synthesized)
tttaaatttttttctgttagggaggatgaggtgggaggatctcctgaccccaggagtttcagactgcagtgagctgtgatcacgccac

SEQ ID NO: 582240 - DNA, 120 bp, Artificial Sequence
  ENSG00000172116_37 (sequence is synthesized)
acagacagaccttgtctcaaaaataaattttttctaaaaagtttcttgtttttttttcttcccatattttttaaaacataaaattgaaatcttgagaatataatacataaaatagagaat

SEQ ID NO: 582241 - DNA, 120 bp, Artificial Sequence
  ENSG00000172116_38 (sequence is synthesized)
ttacatcttctaatattgttctgcagatttgatcttttttctctaataataaatcaaggcctccgggtatatttgtttgtatatgtacaggaaaaggtctgtaaggatttactttcagct

SEQ ID NO: 582242 - DNA, 120 bp, Artificial Sequence
  ENSG00000172116_39 (sequence is synthesized)
gttaattgcagttactctgcggaatttccacttctgctttgtacagttccttgtgtgaatttttacatcatgtattacttttgtagttggggaaaaagcaattaaaagtttggaaaaaaa

SEQ ID NO: 582243 - DNA, 120 bp, Artificial Sequence
  ENSG00000172116_40 (sequence is synthesized)
ccctggtgagctgtggcccccatccttgtgaaccccaaagtgtcccccttgtggaaccaaatgtatccatcttgaataaatttgcccaaaatcctaaagaccgggaaaagggaaccattg

SEQ ID NO: 582244 - DNA, 120 bp, Artificial Sequence
  ENSG00000172123_0 (sequence is synthesized)
tttgtaacttcacttcagcctcccattgatcgctttctgcaaccattcagactgatctcgggctcctatttcatttacattgtgtgcacaccaagtaaccagtgggaaaactttagaggg

SEQ ID NO: 582245 - DNA, 120 bp, Artificial Sequence
  ENSG00000172123_1 (sequence is synthesized)
aactttagagggtacttaaaccccagaaaattctgaaaccgggctcttgagccgctatcctcgggcctgctcccaccctgtggagtgcactttcgttttcaataaatctctgcttttgtt

SEQ ID NO: 582246 - DNA, 120 bp, Artificial Sequence
  ENSG00000172123_2 (sequence is synthesized)
ccttgctttgtttgtgtgtttgtccagttctttgttcaacacgccaagaacctggacactcttcactggtaacatattttggcaagccaaccaggagaaaagaatttctgcttggacact

SEQ ID NO: 582247 - DNA, 120 bp, Artificial Sequence
  ENSG00000172123_3 (sequence is synthesized)
gcatagctgctgggaaaatgaacatcagtgttgatttggaaacgaattatgccgagttggttctagatgtgggaagagtcactcttggagagaacagtaggaaaaaaatgaaggattgta

SEQ ID NO: 582248 - DNA, 120 bp, Artificial Sequence
  ENSG00000172123_4 (sequence is synthesized)
aactgagaaaaaagcagaatgaaagtgtctcacgagctatgtgtgctctgctcaattctggagggggagtgatcaaggctgaaattgagaatgaagactatagttatacaaaagatggaa

SEQ ID NO: 582249 - DNA, 120 bp, Artificial Sequence
  ENSG00000172123_5 (sequence is synthesized)
taggactagatttggaaaattcttttagtaacattctgttatttgttcctgagtacttagacttcatgcagaatggtaactactttctgatttttgtgaagtcatggagcttgaacacct

SEQ ID NO: 582250 - DNA, 120 bp, Artificial Sequence
  ENSG00000172123_6 (sequence is synthesized)
ctggtctgcggattaccaccttgagctccaatttgtacaaaagagatataacatctgcaaaagtcatgaatgccactgctgcactggagttcctcaaagacatgaaaaagactagaggga

SEQ ID NO: 582251 - DNA, 120 bp, Artificial Sequence
  ENSG00000172123_7 (sequence is synthesized)
gattgtatttaagaccagaattgctggcaaagaggccctgtgttgatatacaagaagaaaataacatgaaggccttggccggggttttttttgatagaacagaacttgatcggaaagaaa

SEQ ID NO: 582252 - DNA, 120 bp, Artificial Sequence
  ENSG00000172123_8 (sequence is synthesized)
aattgacctttactgaatccacacatgttgaaattaaaaacttctcgacagaaaagttgttacaacgaattaaagagattctccctcaatatgtttctgcatttgcaaatactgatggag

SEQ ID NO: 582253 - DNA, 120 bp, Artificial Sequence
  ENSG00000172123_9 (sequence is synthesized)
gaagatgcctgtgcatcacttctgtatggagaagaagaagataaattattcatgcaaattccttggagtatatgataaaggaagtctttgtggatatgtctgtgcactcagagtggagcg

SEQ ID NO: 582254 - DNA, 120 bp, Artificial Sequence
  ENSG00000172123_10 (sequence is synthesized)
cttctgctgtgcagtgtttgctaaagagcctgattcctggcatgtgaaagataaccgtgtgatgcagttgaccaggaaggaatggatccagttcatggtggaggctgaaccaaaattttc

SEQ ID NO: 582255 - DNA, 120 bp, Artificial Sequence
  ENSG00000172123_11 (sequence is synthesized)
cagttcatatgaagaggtgatctctcaaataaatacgtcattacctgctccccacagttggcctcttttggaatggcaacggcagagacatcactgtccagggctatcaggaaggataac

SEQ ID NO: 582256 - DNA, 120 bp, Artificial Sequence
  ENSG00000172123_12 (sequence is synthesized)
gtatactccagaaaacctttgcagaaaactgttcttacaacatgaaggacttaagcaattaatatgtgaagaaatggactctgtcagaaagggctcactgatcttctctaggagctggtc

SEQ ID NO: 582257 - DNA, 120 bp, Artificial Sequence
  ENSG00000172123_13 (sequence is synthesized)
tgtggatctgggcttgcaagagaaccacaaagtcctctgtgatgctcttctgatttcccaggacagtcctccagtcctatacaccttccacatggtacaggatgaggagtttaaaggcta

SEQ ID NO: 582258 - DNA, 120 bp, Artificial Sequence
  ENSG00000172123_14 (sequence is synthesized)
ttctacacaaactgccctaaccttaaagcagaagctggcaaaaattggtggttacactaaaaaagtgtgtgtcatgacaaagatcttctacttgagccctgaaggcatgacaagctgcca

SEQ ID NO: 582259 - DNA, 120 bp, Artificial Sequence
  ENSG00000172123_15 (sequence is synthesized)
gtatgatttaaggtcgcaagtaatttaccctgaatcctactattttacaagaaggaaatacttgctgaaagccctttttaaagccttaaagagactcaagtctctgagagaccagttttc

SEQ ID NO: 582260 - DNA, 120 bp, Artificial Sequence
  ENSG00000172123_16 (sequence is synthesized)
ctttgcagaaaatctataccagataatcggtatagattgctttcagaagaatgataaaaagatgtttaaatcttgtcgaaggctcacctgatggaaaatggactgggctactgagatatt

SEQ ID NO: 582261 - DNA, 120 bp, Artificial Sequence
  ENSG00000172123_17 (sequence is synthesized)
tttcattatatatttgataacattctctaattctgtgaaaatatttctttgaaaactttgcaagttaagcaacttaatgtgatgttggataattgggttttgtctattttcacttctccc

SEQ ID NO: 582262 - DNA, 120 bp, Artificial Sequence
  ENSG00000172123_18 (sequence is synthesized)
taaataatcttcacagatattgtttgagggatattaggaaaattaatttgttaactcgtctgtgcacagtattatttactctgtctgtagttcctgaataaattttcttccatgcttgaa

SEQ ID NO: 582263 - DNA, 120 bp, Artificial Sequence
  ENSG00000172123_19 (sequence is synthesized)
gagggccggaaaacagaaaaggattcgcgttctttttactctgtggagagtgagcccgcggactgtagcctgggcctcgccaagttcctttgttctttgttttctttaaattaccttttt

SEQ ID NO: 582264 - DNA, 120 bp, Artificial Sequence
  ENSG00000172123_20 (sequence is synthesized)
tctttttgtcttaaaaaatacacatgggtgaaaaagaaacgagagctccctagagatcactcagagctgttttcgtgggtttttaacttccagttgctcaagggtccacgctggcatctg

SEQ ID NO: 582265 - DNA, 120 bp, Artificial Sequence
  ENSG00000172123_21 (sequence is synthesized)
tcaaatggtctctcttcaactggaatgatgagaagtgaaacaaatatgcgaccatgaggacactgtaacctatggatggtgtgctgagactggaaacccaaaatgatgaaaagaatttct

SEQ ID NO: 582266 - DNA, 120 bp, Artificial Sequence
  ENSG00000172123_22 (sequence is synthesized)
ggaataatgctggtattttctctgcgtttgggaaaagaaagcctcaaatgaaattggaccagtactagcaattggaccagtactagcagcttataaaatgtctgaaaatgtaagcttctt

SEQ ID NO: 582267 - DNA, 120 bp, Artificial Sequence
  ENSG00000172123_23 (sequence is synthesized)
cctcagaatctgcacaaaagtcagctttccttcactagccatcacgtctcattttaactgctttaaaaataaacccaattatatggtaatgtattaaattactattaatgcatttttact

SEQ ID NO: 582268 - DNA, 120 bp, Artificial Sequence
  ENSG00000172123_24 (sequence is synthesized)
gttaattttcatttgaaatatagtgtgtcagtggcatcaaaagttaattttgcaatttgtatctgacctaagaatctaaccacaatatctaacattaatttttttttggaaaacagaatc

SEQ ID NO: 582269 - DNA, 120 bp, Artificial Sequence
  ENSG00000172123_25 (sequence is synthesized)
acctggacactcttcactggtaacatattttggcaagccaaccaggagcgcctagacacggaggcgactgcaggtttctggccgggggctactctccagtgctgccttgaaggccaagga

SEQ ID NO: 582270 - DNA, 120 bp, Artificial Sequence
  ENSG00000172123_26 (sequence is synthesized)
gtgaatggggatagttgccctgcccagaagcgggaagggctcttttctgtcttttctggttgtggtccctgatccctatgtgtgacgcagcttctccagggcgaactcacacgtgtttca

SEQ ID NO: 582271 - DNA, 120 bp, Artificial Sequence
  ENSG00000172137_0 (sequence is synthesized)
agcgcgagtgccagagcccagccggcgcggagcgggagcggtgcaggctgaggtctccgagcggctcgccatggctggcccgcagcagcagcccccttacctgcacctggccgagctgac

SEQ ID NO: 582272 - DNA, 120 bp, Artificial Sequence
  ENSG00000172137_1 (sequence is synthesized)
ggcgtcccagttcctggaaatatggaagcactttgacgcagacggaaatgggtatattgaaggtaaagagctagaaaactttttccaagagctggagaaggcaaggaaaggctctggcat

SEQ ID NO: 582273 - DNA, 120 bp, Artificial Sequence
  ENSG00000172137_2 (sequence is synthesized)
gatgtcaaagagtgacaactttggagaaaagatgaaggagttcatgcagaagtatgataaaaactcagatgggaaaatcgagatggcagagctggcgcagatcctgccaaccgaagagaa

SEQ ID NO: 582274 - DNA, 120 bp, Artificial Sequence
  ENSG00000172137_3 (sequence is synthesized)
cttccttctgtgcttcaggcagcacgtgggctccagcgccgagtttatggaggcttggcggaagtacgacacagacaggagtggctacatcgaagccaatgagctcaagggattcctgtc

SEQ ID NO: 582275 - DNA, 120 bp, Artificial Sequence
  ENSG00000172137_4 (sequence is synthesized)
agacctgctgaagaaggcgaaccggccgtacgatgagcccaagctccaggaatacacccaaaccatactacggatgtttgacttgaacggggatggcaaattgggcctctcagagatgtc

SEQ ID NO: 582276 - DNA, 120 bp, Artificial Sequence
  ENSG00000172137_5 (sequence is synthesized)
ccgactcctgcctgtccaggaaaacttcctgcttaaatttcagggcatgaagctgacctcagaggagtttaacgcgatcttcacattttacgacaaggatagaagcggctacattgacga

SEQ ID NO: 582277 - DNA, 120 bp, Artificial Sequence
  ENSG00000172137_6 (sequence is synthesized)
cccttttgaaggatctgtacgagaaaaacaaaaaggaaatgaatattcaacagctcaccaactacagaaagagcgtcatgtccttggcagaggcagggaagctctaccgcaaggacctgg

SEQ ID NO: 582278 - DNA, 120 bp, Artificial Sequence
  ENSG00000172137_7 (sequence is synthesized)
agattgtgctctgcagcgagccccccatgtaaagtggggacgggggctgcttctccacctcccccaaaccctgcttctgctgccctgatgcgtctacccagactcagagaccgtgagcgc

SEQ ID NO: 582279 - DNA, 120 bp, Artificial Sequence
  ENSG00000172137_8 (sequence is synthesized)
cccgcccccacccctacagcctgcacacacctgcctgcagagcaggaaatgagagatagaggatgggcagctggggggctgtcctgagccccctgcacccacccctgcccaggcagtctt

SEQ ID NO: 582280 - DNA, 120 bp, Artificial Sequence
  ENSG00000172137_9 (sequence is synthesized)
tgctcagtggatcacacacatggaaggtgatgggggcatgggtggagggtccctaattctcttcgctgtgatgcatgagctccctcgctgtatgatttaggcttctatgtccaacagagt

SEQ ID NO: 582281 - DNA, 120 bp, Artificial Sequence
  ENSG00000172137_10 (sequence is synthesized)
ggactcttccctctcgctcccctctgccggtcccccatgccaccacccaccccaaacttccaggttccatccaccaccttgccaatggtgtagctgtcctctcagaactcctgtgtgtgg

SEQ ID NO: 582282 - DNA, 120 bp, Artificial Sequence
  ENSG00000172137_11 (sequence is synthesized)
aaggcacccgccctttccttgccttctttactcggcgtgctccttttctctttgggtttcttgtttaccaaagaagagtttacagacaataaaatggaaaggtcctgctgtggaaactta

SEQ ID NO: 582283 - DNA, 120 bp, Artificial Sequence
  ENSG00000172137_12 (sequence is synthesized)
aacgcacatgaaaagcaccacaatgaaaggctacccaaagcttgcacccactgccaccttcctgccatgactggttaaggcagaagggacacattattttgtcattacacgatctgaaca

SEQ ID NO: 582284 - DNA, 120 bp, Artificial Sequence
  ENSG00000172139_0 (sequence is synthesized)
gagtttggagcaagtaactgtcagtgaggttgcagttggtctgggctgtttggctgtgagcgaaatagctgccccccacttctcacttgcacaccacgggatactcctcctgaggctccg

SEQ ID NO: 582285 - DNA, 120 bp, Artificial Sequence
  ENSG00000172139_1 (sequence is synthesized)
gatgattcagatggactgtgaaaaacaacaagatggatgatcatatggagattgcttctaacataaatctgcataaaaatttttctgaaacatggctggaatatttaaggagtttttttt

SEQ ID NO: 582286 - DNA, 120 bp, Artificial Sequence
  ENSG00000172139_2 (sequence is synthesized)
cagtactgaggacctccctgaagtcattctaacattgtctttgatcagctccattggagcatttttgaaccggcacttggaagactttccaattcctgtccctgtgatattatttttact

SEQ ID NO: 582287 - DNA, 120 bp, Artificial Sequence
  ENSG00000172139_3 (sequence is synthesized)
tggatgcagttttgaagtattaagctttacatcttcacaggtccaaagatacgcaaacgccatacaatggatgagtccagacttattttttcgtatatttacaccagtagttttctttac

SEQ ID NO: 582288 - DNA, 120 bp, Artificial Sequence
  ENSG00000172139_4 (sequence is synthesized)
tactgcatttgacatggatacgtacatgcttcaaaagttattttggcagatacttttaatttcaattcccggctttttggttaattatatcttagttctttggcatctggcatctgtaaa

SEQ ID NO: 582289 - DNA, 120 bp, Artificial Sequence
  ENSG00000172139_5 (sequence is synthesized)
tcaattacttttgaagcctacccaatggttattattttcagctatccttgtgagttcagatcccatgctaaccgcagctgctataagagaccttgggctttctagaagcctcatcagttt

SEQ ID NO: 582290 - DNA, 120 bp, Artificial Sequence
  ENSG00000172139_6 (sequence is synthesized)
aattaatggagaaagtctgatgacctctgttatatcattaattacatttactagtattatggattttgaccaaagactacaaagtaaaagaaaccataccttagctgaagagatcgtggg

SEQ ID NO: 582291 - DNA, 120 bp, Artificial Sequence
  ENSG00000172139_7 (sequence is synthesized)
tggaatttgttcatatattatagcaagtttcttgtttggaattctaagttcaaaactgattcaattttggatgtcaactgtttttggtgatgatgtcaatcatataagtctcatcttttc

SEQ ID NO: 582292 - DNA, 120 bp, Artificial Sequence
  ENSG00000172139_8 (sequence is synthesized)
aattctgtatctcatcttttatatttgtgagttagttggaatgtcaggaatatttactctggccattgtgggacttcttttaaattctacaagttttaaagcagcaattgaagaaacact

SEQ ID NO: 582293 - DNA, 120 bp, Artificial Sequence
  ENSG00000172139_9 (sequence is synthesized)
tcttcttgaattctggacttttctatcacgtattgcttttctcatggtgtttactttctttggacttctaattcctgcacatacatatttgtatatagaatttgttgatatatactattc

SEQ ID NO: 582294 - DNA, 120 bp, Artificial Sequence
  ENSG00000172139_10 (sequence is synthesized)
attaaatatctacttaacattgattgttttaagatttctgacccttcttttaataagccctgttttgtctcgagttggtcatgagttcagttggcgctggatattcataatggtctgtag

SEQ ID NO: 582295 - DNA, 120 bp, Artificial Sequence
  ENSG00000172139_11 (sequence is synthesized)
tgaaatgaaggggatgcctaatataaacatggcccttctgcttgcctactctgatctttattttggatctgacaaagaaaaatctcaaatattatttcatggagtgttagtatgcctaat

SEQ ID NO: 582296 - DNA, 120 bp, Artificial Sequence
  ENSG00000172139_12 (sequence is synthesized)
aacccttgttgtcaatagatttattttgccagtggcagttactatactaggtcttcgtgatgccacatcaacaaaatataaatcggtttgttgcacatttcaacactttcaagagctaac

SEQ ID NO: 582297 - DNA, 120 bp, Artificial Sequence
  ENSG00000172139_13 (sequence is synthesized)
caagtctgcagcctctgcccttaaatttgacaaagatcttgctaatgctgattggaacatgattgagaaagcaattacacttgaaaacccatacatgttgaacgaagaagaaacaacaga

SEQ ID NO: 582298 - DNA, 120 bp, Artificial Sequence
  ENSG00000172139_14 (sequence is synthesized)
acatcagaaggtgaaatgtccacactgtaacaaggaaatagatgagatctttaacactgaagcaatggagctggccaacaggcgtctcttgtcagcacaaatagcaagctaccagagaca

SEQ ID NO: 582299 - DNA, 120 bp, Artificial Sequence
  ENSG00000172139_15 (sequence is synthesized)
atacaggaatgagattctgtcccagagtgctgtccaggtgttggttggtgcagcagaaagttttggtgagaagaagggaaaatgtatgagtcttgatacaataaagaattattctgaaag

SEQ ID NO: 582300 - DNA, 120 bp, Artificial Sequence
  ENSG00000172139_16 (sequence is synthesized)
ccaaaaaacagttacctttgctagaaaactactacttaattgggtgtataataccagaaaggaaaaagagggcccatcaaaatacttcttttttcgtatatgccatacaatagtatttac

SEQ ID NO: 582301 - DNA, 120 bp, Artificial Sequence
  ENSG00000172139_17 (sequence is synthesized)
gaatatatttccctttataatctcttggatatcccagttaaatgtaatctaccacagcgaattaaaacacactaactactgttttcttacactttatattctagaggcactacttaagat

SEQ ID NO: 582302 - DNA, 120 bp, Artificial Sequence
  ENSG00000172139_18 (sequence is synthesized)
agcagcaatgaggaaggactttttttcacatgcctggaacatattcgagttagcaattacattaattggcatcttacatgtaatacttattgaaatagacaccattaagtatatttttaa

SEQ ID NO: 582303 - DNA, 120 bp, Artificial Sequence
  ENSG00000172139_19 (sequence is synthesized)
tgagactgaagtaatagtctttataaaagttgttcaattttttcgtatactacgcattttcaagctcatagcaccaaagttgctgcaaataatagataaaagaatgagtcatcagaagac

SEQ ID NO: 582304 - DNA, 120 bp, Artificial Sequence
  ENSG00000172139_20 (sequence is synthesized)
cttttggtatggaatactaaaaggctatgtccaaggcgaagcagacataatgaccataattgatcagattacaagttctaaacagattaaacagatgttattaaagcaagtgataaggaa

SEQ ID NO: 582305 - DNA, 120 bp, Artificial Sequence
  ENSG00000172139_21 (sequence is synthesized)
tatggaacatgctataaaagagctaggctacttagagtatgatcacccagaaattgctgtcactgtgaaaacaaaggaagaaattaatgttatgctcaatatggctacagaaattcttaa

SEQ ID NO: 582306 - DNA, 120 bp, Artificial Sequence
  ENSG00000172139_22 (sequence is synthesized)
ggcttttggcttaaaaggaattattagtaaaactgaaggtgctggaattaataagttaatcatggccaaaaagaaagaggtgcttgattctcaatctattatcaggcctcttactgttga

SEQ ID NO: 582307 - DNA, 120 bp, Artificial Sequence
  ENSG00000172139_23 (sequence is synthesized)
agaagttctatatcatattccgtggctagataaaaacaaagattatataaacttcattcaggaaaaagccaaagttgtaacatttgattgtggaaatgatatatttgaagaaggtgatga

SEQ ID NO: 582308 - DNA, 120 bp, Artificial Sequence
  ENSG00000172139_24 (sequence is synthesized)
gcccaaaggaatctatatcattatttcaggcatggtaaagcttgaaaaatcaaagccaggtttagggattgatcaaatggtggagtcaaaggagaaagattttccgataattgacacaga

SEQ ID NO: 582309 - DNA, 120 bp, Artificial Sequence
  ENSG00000172139_25 (sequence is synthesized)
ctatatgctcagtggagaaataataggagagataaactgcttaactaatgaacctatgaaatattctgccacctgcaaaactgtagtggagacatgttttattcccaaaactcacttgta

SEQ ID NO: 582310 - DNA, 120 bp, Artificial Sequence
  ENSG00000172139_26 (sequence is synthesized)
tgatgcttttgagcaatgctctcctctcattaaacaaaaaatgtggctaaaacttggactcgctattacagccagaaaaatcagagaacacttatcttatgaggattggaactacaatat

SEQ ID NO: 582311 - DNA, 120 bp, Artificial Sequence
  ENSG00000172139_27 (sequence is synthesized)
gcaactaaagctctctaatatttatgtagtagatataccaatgagtaccaaaactgatatttatgatgaaaatctaatctatgttatcctcatacatggagctgtagaagattgtctgtt

SEQ ID NO: 582312 - DNA, 120 bp, Artificial Sequence
  ENSG00000172139_28 (sequence is synthesized)
acgaaaaacttatagagcacctttcttaattcctataacatgccatcagatacaaagtattgaagatttcacaaaagtagtgattattcaaactccgattaacatgaaaacattcagaag

SEQ ID NO: 582313 - DNA, 120 bp, Artificial Sequence
  ENSG00000172139_29 (sequence is synthesized)
gaatattagaaagtttgttcctaaacataaaagttatcttacaccaggattaataggttcagttggaacattggaagaaggcattcaagaagaaagaaatgttaaggaggatggagcaca

SEQ ID NO: 582314 - DNA, 120 bp, Artificial Sequence
  ENSG00000172139_30 (sequence is synthesized)
cagtgccgccactgccaggagtccccagccttgctccctgctggggacaaagttcaactgtaaggagtcccctagaataaacctaaggaaagtcaggaaagagtaagactgttaagaaga

SEQ ID NO: 582315 - DNA, 120 bp, Artificial Sequence
  ENSG00000172139_31 (sequence is synthesized)
ccgaagcatgtattaatgctgtggctatgagaggcctcctgctgcagaaacacacttccctacatcaagaaggagtaacttcaggttggatcctgtgtggatgatcttggtgctaagcag

SEQ ID NO: 582316 - DNA, 120 bp, Artificial Sequence
  ENSG00000172139_32 (sequence is synthesized)
aaaagaaatttggaccttgaaaccagcagttcaacatatatactttttgcaaaatttccttgatttaaaatatttgttattttaaatatacaaaacattttagaaaatcttagagtaaat

SEQ ID NO: 582317 - DNA, 120 bp, Artificial Sequence
  ENSG00000172139_33 (sequence is synthesized)
tttagtcttaaagccagaaaataagtttatagccatctagatattttgcatattgctcttacagcaataatggtttggttcactttatgaaaaataaaatgtattaaaatatagtttaaa

SEQ ID NO: 582318 - DNA, 120 bp, Artificial Sequence
  ENSG00000172139_34 (sequence is synthesized)
aggaatatttactctggccattgtgggacttcttttaaattctacaagttttaaagcagcaattgaagaaacacttcttcttgagtcttcgtgatgccacatcaacaaaatataaatcgg

SEQ ID NO: 582319 - DNA, 120 bp, Artificial Sequence
  ENSG00000172139_35 (sequence is synthesized)
tgagaagatgatatatttgtataatattaggtccaaagatacgcaaacgccatacaatggatgagtccagacttattttttcgtatatttacaccagtagttttctttactactgcattt

SEQ ID NO: 582320 - DNA, 120 bp, Artificial Sequence
  ENSG00000172146_0 (sequence is synthesized)
atgagggaaaataaccagtcctctacactggaattcatcctcctgggagttactggtcagcaggaacaggaagatttcttctacatcctcttcttgttcatttaccccatcacattgatt

SEQ ID NO: 582321 - DNA, 120 bp, Artificial Sequence
  ENSG00000172146_1 (sequence is synthesized)
ggaaacctgctcatcgtcctagccatttgctctgatgttcgccttcacaaccccatgtattttctccttgccaacctctccttggttgacatcttcttctcatcggtaaccatccctaag

SEQ ID NO: 582322 - DNA, 120 bp, Artificial Sequence
  ENSG00000172146_2 (sequence is synthesized)
atgctggccaaccatctcttgggcagcaaatccatctcttttgggggatgcctaacgcagatgtatttcatgatagccttgggtaacacagacagctatattttggctgcaatggcatat

SEQ ID NO: 582323 - DNA, 120 bp, Artificial Sequence
  ENSG00000172146_3 (sequence is synthesized)
attggaaatgccaatgccctcccccacactctgctcacagctagtctgtccttctgtggcaaccaggaagtggccaacttctactgtgacattacccccttgctgaagttatcctgttct

SEQ ID NO: 582324 - DNA, 120 bp, Artificial Sequence
  ENSG00000172146_4 (sequence is synthesized)
gacatccactttcatgtgaagatgatgtacctaggggttggcattttctctgtgccattactatgcatcattgtctcctatattcgagtcttctccacagtcttccaggttccttccacc

SEQ ID NO: 582325 - DNA, 120 bp, Artificial Sequence
  ENSG00000172146_5 (sequence is synthesized)
aagggcgtgctcaaggccttctccacctgtggttcccacctcacggttgtctctttgtattatggtacagtcatgggcacgtatttccgccctttgaccaattatagcctaaaagacgca

SEQ ID NO: 582326 - DNA, 120 bp, Artificial Sequence
  ENSG00000172146_6 (sequence is synthesized)
gtgatcactgtaatgtacacggcagtgaccccaatgttaaatcctttcatctacagtctgagaaatcgggacatgaaggctgccctgcggaaactcttcaacaagagaatctcctcgtaa

SEQ ID NO: 582327 - DNA, 120 bp, Artificial Sequence
  ENSG00000172146_7 (sequence is synthesized)
ggaggaatcacctttccagagacttgataaccgggtgactaatgcccacttttctctatgctgtgacctgcctgcttccttgaggaggaaactcgactccttgtcctcaagctctttcgg

SEQ ID NO: 582328 - DNA, 120 bp, Artificial Sequence
  ENSG00000172146_8 (sequence is synthesized)
ggtagctcctcttgtcccttcggctcccctgttgggaaactggggactcctccttctaaaccatcccattcctgtgtcctccacctcaggaacagaggattgttccccatcctgccactg

SEQ ID NO: 582329 - DNA, 120 bp, Artificial Sequence
  ENSG00000172146_9 (sequence is synthesized)
cttctccagcatggctgccctcaaacgggatgctagcaggtgctagatgaactaactgcaaacttcctttctgtggaggagaagtgaaggccacagggccaggaccctttttaaaagcat

SEQ ID NO: 582330 - DNA, 120 bp, Artificial Sequence
  ENSG00000172146_10 (sequence is synthesized)
gtatattggaaatccagttctgatgtcatcctcctacgagaggcagtctctgatctttctagcctgaaattcctaatctcagaactcttataacattttaataagttaataataagtgat

SEQ ID NO: 582331 - DNA, 120 bp, Artificial Sequence
  ENSG00000172146_11 (sequence is synthesized)
tattgaaattaccactttcaactcattgctgctctttttggcagagtggcagcacagggatatagggcatatgtcctgatgagcagagtcaagttgggaagatctgagcctcagctttca

SEQ ID NO: 582332 - DNA, 120 bp, Artificial Sequence
  ENSG00000172146_12 (sequence is synthesized)
catctacatgttaggaataataagtgccctacatgggtcacatggtgtgttgattacaatagctcatgcttccaagattataaatcactattcatgtgtccatttttatttgactgttaa

SEQ ID NO: 582333 - DNA, 120 bp, Artificial Sequence
  ENSG00000172146_13 (sequence is synthesized)
gcaagcctctgagggcaggagttgtttttacacatcactgtaccttcccaatcttggtcagataaagtgcatccaataaatactggtggaagtggaatgaataagatattaatatctgaa

SEQ ID NO: 582334 - DNA, 120 bp, Artificial Sequence
  ENSG00000172146_14 (sequence is synthesized)
acgtaatattataattagggataatcaaaccagacattattttctcatcctttaaacctttcaagaaactcccattcacaaatgctacaaagggaataaaatacctaggaatacagctta

SEQ ID NO: 582335 - DNA, 77 bp, Artificial Sequence
  ENSG00000172146_15 (sequence is synthesized)
aatgctacaaagggaataaaatacctaggaatacagcttacaagggacatgaaggaactcttcaaggaaaactaaaa

SEQ ID NO: 582336 - DNA, 71 bp, Artificial Sequence
  ENSG00000172146_16 (sequence is synthesized)
cacttctttaaatttcgtatggaactaaaaaagagcccgtatatccaagacaatcataagcaaaaagaaca

SEQ ID NO: 582337 - DNA, 120 bp, Artificial Sequence
  ENSG00000172146_17 (sequence is synthesized)
ccacaatgagacaccatctcatgccagttggaatggcgatcattaaaaagtaaggaaacaacatatgctggagaggatgtggagaaataggaaggtttttacactgttggtgggagtgta

SEQ ID NO: 582338 - DNA, 80 bp, Artificial Sequence
  ENSG00000172146_18 (sequence is synthesized)
aaataggaaggcatggaagacagtgtggtgactcctcaaggatctagaaccacaaataccatttgatccagtgatcccat

SEQ ID NO: 582339 - DNA, 120 bp, Artificial Sequence
  ENSG00000172146_19 (sequence is synthesized)
actaacacaagaaaagaaaaccaaacactgcacgttctcactcataagtgtgagttaaacaatgagaacacatggacacaaggaagggcacatcacacaccagggcctgtcagcgggttg

SEQ ID NO: 582340 - DNA, 89 bp, Artificial Sequence
  ENSG00000172146_20 (sequence is synthesized)
aggaagggcacatcacacaccagggcctgtcagcgggttgggggcaagacagatgtcaggctgatggatgcagcaaaccaccatggcac

SEQ ID NO: 582341 - DNA, 120 bp, Artificial Sequence
  ENSG00000172146_21 (sequence is synthesized)
aattgttctcagcaccaccccattcacatggctgatatctcagaggatgacgctttccaggaaagtgggtattaaaggcgccgcaatgttcaaggccctgacgtcatcccagtgaactca

SEQ ID NO: 582342 - DNA, 120 bp, Artificial Sequence
  ENSG00000172146_22 (sequence is synthesized)
aggcccgctacgtctccagcatgcatgttgaggcacctcctggcttctcttcttggtggtagagggtctttttacctctttcccctagtctgatatatggcccctgggtccctcttccag

SEQ ID NO: 582343 - DNA, 120 bp, Artificial Sequence
  ENSG00000172146_23 (sequence is synthesized)
tataaataaacctccatttattctcaacctctttacaaggaacattctatctcctaccttaaatgaaacatgaacttgagccacccagctccatcgctgtcctctggaccaaatcatcac

SEQ ID NO: 582344 - DNA, 120 bp, Artificial Sequence
  ENSG00000172146_24 (sequence is synthesized)
agaacatgtgaaataacaacagaagctcatcatctagattatacaaatggaacattagcaatgggaactgtcaacatcaacttagtctgccatgatgccaagagctccacctctgaactc

SEQ ID NO: 582345 - DNA, 120 bp, Artificial Sequence
  ENSG00000172146_25 (sequence is synthesized)
agctaaccatgctctctgcctctccagatttactgaacgatttgacacctgaggtattatgattctatttgaagaagggggagggcatctcaagagagaaaatcaaacttctttaggcgc

SEQ ID NO: 582346 - DNA, 120 bp, Artificial Sequence
  ENSG00000172146_26 (sequence is synthesized)
agagatgagaaagtacatcataattatgaaatggcctccttgtctggggtaatacccgaggttccttgcctcacagccaaggaaatcaaggacgtggatacacacagagtgaggataaga

SEQ ID NO: 582347 - DNA, 120 bp, Artificial Sequence
  ENSG00000172146_27 (sequence is synthesized)
gtggaagtttaataggtgaaagaaagaggatagctctctgctggagagagggttcttggagaaatgggctgccggatctgcagtgaaatggaggcagggggttagacgcctggtgaggag

SEQ ID NO: 582348 - DNA, 120 bp, Artificial Sequence
  ENSG00000172146_28 (sequence is synthesized)
gtagagtctgatttacatggagcaggaaagactggctggaccaggtgtgtcattagcatagggtgtgaaaaactgattaggactagatgtgccatttgcatagggcatgaatttctggta

SEQ ID NO: 582349 - DNA, 120 bp, Artificial Sequence
  ENSG00000172146_29 (sequence is synthesized)
gcccccaccctaatctttaattatgcaggtaggttctccgtctggcctgcaccacgttgcccattcccttattgtacacatgataacaaaaaaaggaagatggagcctccatgttggata

SEQ ID NO: 582350 - DNA, 120 bp, Artificial Sequence
  ENSG00000172146_30 (sequence is synthesized)
tgtctggcccccaggtagccctttcctattggcacagctgccagccttcccctgtgcaggcttccggcttgcttgtctatgtctgcagctcaatttctcaggctgctctttgttagaaaa

SEQ ID NO: 582351 - DNA, 120 bp, Artificial Sequence
  ENSG00000172146_31 (sequence is synthesized)
aaagtaatttattgggctgctttttgttaaaagggaagctctgccaaagactcttttactttcactatctgcctaaataatttctttctacctcctgtatcaatgagaaatgataaagat

SEQ ID NO: 582352 - DNA, 120 bp, Artificial Sequence
  ENSG00000172146_32 (sequence is synthesized)
ctacatccctcatacctagcacatgattcaaacatgtactacaagagatgctgagaagtgaggattgaattaattacagatctaatatatttttgagtcaatatctctttagaaaaatta

SEQ ID NO: 582353 - DNA, 120 bp, Artificial Sequence
  ENSG00000172146_33 (sequence is synthesized)
gtaaatgctagatattctgcagaactgtcacaagttgatcacaaaatgtaaaatggcttaaacaaagtaaaggtttatttctctcctacataatggttacaataaatgtttttgtttggg

SEQ ID NO: 582354 - DNA, 120 bp, Artificial Sequence
  ENSG00000172146_34 (sequence is synthesized)
ggaggttctcctgagtgtggagtactggggatacaggttcattccatcatgtgtctccatcatcctgttcagcctcctctccatttgcatccaactggcacaagggtaagaaggtgtgga

SEQ ID NO: 582355 - DNA, 120 bp, Artificial Sequence
  ENSG00000172146_35 (sequence is synthesized)
ggagcccagaactgggacacgtgtggaatggctagaactcagtcacatgagcacacctcactgcaagggagtctgggaaatgtagtctaattgaacgtccaagaagaagagaacaacacg

SEQ ID NO: 582356 - DNA, 120 bp, Artificial Sequence
  ENSG00000172146_36 (sequence is synthesized)
gatttgactaagcagctgatcgttgccgctgtaatttaagtcttagagtacaagacggatcaaagaggaggaaacctggagtcaagcagttgagttagcattacaatacttcagggagaa

SEQ ID NO: 582357 - DNA, 120 bp, Artificial Sequence
  ENSG00000172146_37 (sequence is synthesized)
aacaatgatggagctgaagcactgggacatttagtagaaaggctgaattatgtaataattattttaaaggaagaatcaacaagattagatgtagaggtgagagagaaactgagtcattaa

SEQ ID NO: 582358 - DNA, 120 bp, Artificial Sequence
  ENSG00000172146_38 (sequence is synthesized)
gcttgtgagcatcccacatatggggagtacaagaaatatacctggatttgactcaaaaaatattaagagaaaacttattgatacatacaatagaaaatatttggctgggcacggtggctc

SEQ ID NO: 582359 - DNA, 69 bp, Artificial Sequence
  ENSG00000172146_39 (sequence is synthesized)
tccatctctactaaaaatacaaacaataacaacaacaacaacaaaaaactagccaggcgtagtggcaca

SEQ ID NO: 582360 - DNA, 80 bp, Artificial Sequence
  ENSG00000172146_40 (sequence is synthesized)
actccccataatagtctatctgaaggaggtaaaaataaacaagatatggttttccttcccctaaaatcttgccctcatct

SEQ ID NO: 582361 - DNA, 120 bp, Artificial Sequence
  ENSG00000172146_41 (sequence is synthesized)
aagatatggttttccttcccctaaaatcttgccctcatcttaggttggatgtgcagtttggtcacgttggcagtatgagtgaagtggaaatacggagggaaaagttcacacctacagatg

SEQ ID NO: 582362 - DNA, 120 bp, Artificial Sequence
  ENSG00000172146_42 (sequence is synthesized)
taaacctcacagtttactaagcaatggttgaagccactaagcagttgcttgagtcacccaaagaaataattaagaacaggaagagaaggctgagagaaaggcattgtgattgtatatact

SEQ ID NO: 582363 - DNA, 120 bp, Artificial Sequence
  ENSG00000172146_43 (sequence is synthesized)
tgagggcttgccaaagagagaaaaaaaaccaacaactcttttttcctttcttttaaaggaaatggtgaaaatttactttgaaaatgagacacctggggagaaaattctccagactgtttt

SEQ ID NO: 582364 - DNA, 120 bp, Artificial Sequence
  ENSG00000172146_44 (sequence is synthesized)
agtaggatctaaatgcactggtccctgtgatttacaatcttccgacacagtgtagatacatgttacctcctgggctctgggatccctctgagttttttcaatggaaaaattcctaatttc

SEQ ID NO: 582365 - DNA, 120 bp, Artificial Sequence
  ENSG00000172146_45 (sequence is synthesized)
tgggctggccctttcaccagcagaccttttgcactggaatattttgtcaaagacttcaaaatgctgtcctctccttatcatgggtaataaaattagtgtgtgattttggcttctccacta

SEQ ID NO: 582366 - DNA, 120 bp, Artificial Sequence
  ENSG00000172150_0 (sequence is synthesized)
atgaagaaagaaaatcaatcctttaacctggattttattctcctgggagttactagtcagcaagaacagaataatgtcttctttgtgatttttttgtgcatttaccccatcacactgact

SEQ ID NO: 582367 - DNA, 120 bp, Artificial Sequence
  ENSG00000172150_1 (sequence is synthesized)
ggaaatctgctcatcatcttggccatctgtgctgacattcgccttcacaaccccatgtattttctccttgccaacctctccttggttgacatcatcttctcatccgtaaccatccctaag

SEQ ID NO: 582368 - DNA, 120 bp, Artificial Sequence
  ENSG00000172150_2 (sequence is synthesized)
gtgctggccaaccatctcttggggagcaagttcatctcctttgggggatgcctaatgcagatgtatttcatgatagccttggccaaggcagacagctataccttggctgcaatggcatac

SEQ ID NO: 582369 - DNA, 120 bp, Artificial Sequence
  ENSG00000172150_3 (sequence is synthesized)
attggaaacaccagtgctctcccccacactctgctcacagctagtttgtccttctgtggcaaccaggaagtagccaatttctactgtgacattatgcctttgctgaagttgtcctgttct

SEQ ID NO: 582370 - DNA, 120 bp, Artificial Sequence
  ENSG00000172150_4 (sequence is synthesized)
gacgtccactttaatgtgaagatgatgtacctaggggtcggcgttttctctttgccattactatgcatcattgtctcctatgttcaggtcttttccacagtcttccaagttccatctacc

SEQ ID NO: 582371 - DNA, 120 bp, Artificial Sequence
  ENSG00000172150_5 (sequence is synthesized)
aagagtctattcaaagccttctgcacctgtggctcccacctcacagttgtttttttatattatggtacaacgatgggcatgtatttccgccctctgaccagttacagccccaaagatgca

SEQ ID NO: 582372 - DNA, 120 bp, Artificial Sequence
  ENSG00000172150_6 (sequence is synthesized)
gtgataactgtgatgtatgtggcagtgaccccagcattaaatcctttcatctatagtctgagaaattgggatatgaaggcagccctacagaaactcttcagcaagagaatctcctcatag

SEQ ID NO: 582373 - DNA, 120 bp, Artificial Sequence
  ENSG00000172154_0 (sequence is synthesized)
gcaggtaagtcaaaggcctgagttgatgtaaatggctggcaacaatttcactgaggttaccgtcttcatcctctctggatttgcaaatcaccctgaattacaagtcagtcttttcttgat

SEQ ID NO: 582374 - DNA, 120 bp, Artificial Sequence
  ENSG00000172154_1 (sequence is synthesized)
gtttctcttcatttatctattcactgttttgggaaacctgggactgatcacgttaatcagaatggattctcagcttcacacccctatgtactttttcctgagcaatttagcatttattga

SEQ ID NO: 582375 - DNA, 120 bp, Artificial Sequence
  ENSG00000172154_2 (sequence is synthesized)
catattttactcctctactgtaacacctaaggcattggtgaatttccaatccaatcggagatccatctcctttgttggctgctttgttcaaatgtacttttttgttggattggtgtgttg

SEQ ID NO: 582376 - DNA, 120 bp, Artificial Sequence
  ENSG00000172154_3 (sequence is synthesized)
tgagtgtttccttctgggatcaatggcctacaatcgctacatagcaatctgcaatcccttactgtattcagtagtcatgtcccaaaaagtgtccaactggctgggagtaatgccatatgt

SEQ ID NO: 582377 - DNA, 120 bp, Artificial Sequence
  ENSG00000172154_4 (sequence is synthesized)
cgttctgtgattccagcatcaatcattttttttgtgacaccacagctcttttagcactctcctgtgtagatacattcggcacagaaatggtgagctttgtcttagctggattcactcttc

SEQ ID NO: 582378 - DNA, 120 bp, Artificial Sequence
  ENSG00000172154_5 (sequence is synthesized)
ttagctctctccttatcatcacagtcacttatatcatcatcatctcagccatcctgaggatccagtcagcagcaggcaggcagaaggccttctccacctgcgcatcccacctcatggctg

SEQ ID NO: 582379 - DNA, 120 bp, Artificial Sequence
  ENSG00000172154_6 (sequence is synthesized)
taactatcttttatgggtctctgattttcacctatttgcaacctgataacacatcatcgctgacccaggcgcaggtggcatctgtattctatacgattgtcattcccatgctgaatccac

SEQ ID NO: 582380 - DNA, 120 bp, Artificial Sequence
  ENSG00000172154_7 (sequence is synthesized)
tcatctacagtctgaggaacaaagatgtgaaaaatgctcttctgagagtcatacatagaaaactttttccatgacaaatttatgtatgttacaattaaaacaaaggtggatggcttcagg

SEQ ID NO: 582381 - DNA, 120 bp, Artificial Sequence
  ENSG00000172155_0 (sequence is synthesized)
atccactcacctcctgaggtgctaaagaaccctgtgctgcctgtgactccgctcctgaacacccaccaccgagatgtcctgccagcagagccagcagcagtgccagccccctcccaagtg

SEQ ID NO: 582382 - DNA, 120 bp, Artificial Sequence
  ENSG00000172155_1 (sequence is synthesized)
tccagctctgggggcggctgtggctccaactctgggggctgctgcagctctgggggtggtggctgctgcctgagccaccacaggcgccacaggtcccaccgtcgcagaccccagagctct

SEQ ID NO: 582383 - DNA, 120 bp, Artificial Sequence
  ENSG00000172155_2 (sequence is synthesized)
gactgctgcagccagccctcggggggctccagctgctgcggtgggggcagcagccagcactctggaggctgctgctgaagtggaccttgacttcctcttccttctgattctgcctgaata

SEQ ID NO: 582384 - DNA, 120 bp, Artificial Sequence
  ENSG00000172156_0 (sequence is synthesized)
agagaggctgagaccaacccagaaaccaccacctctcacgccaaagctcacaccttcagcctccaacatgaaggtctccgcagcacttctgtggctgctgctcatagcagctgccttcag

SEQ ID NO: 582385 - DNA, 120 bp, Artificial Sequence
  ENSG00000172156_1 (sequence is synthesized)
cccccaggggctcgctgggccagcttctgtcccaaccacctgctgctttaacctggccaataggaagataccccttcagcgactagagagctacaggagaatcaccagtggcaaatgtcc

SEQ ID NO: 582386 - DNA, 120 bp, Artificial Sequence
  ENSG00000172156_2 (sequence is synthesized)
ccagaaagctgtgatcttcaagaccaaactggccaaggatatctgtgccgaccccaagaagaagtgggtgcaggattccatgaagtatctggaccaaaaatctccaactccaaagccata

SEQ ID NO: 582387 - DNA, 120 bp, Artificial Sequence
  ENSG00000172156_3 (sequence is synthesized)
aataatcaccatttttgaaaccaaaccagagcctgagtgttgcctaatttgttttcccttcttacaatgcattctgaggtaacctcattatcagtccaaagggcatgggttttattatat

SEQ ID NO: 582388 - DNA, 120 bp, Artificial Sequence
  ENSG00000172156_4 (sequence is synthesized)
attgaggctttaaaacttatcctccatgaatatcagttatttttaaactgtaaagctttgtgcagattctttaccccctgggagccccaattcgatcccctgtcacgtgtgggcaatgtt

SEQ ID NO: 582389 - DNA, 120 bp, Artificial Sequence
  ENSG00000172156_5 (sequence is synthesized)
ccccctctcctctcttcctccctggaatcttgtaaaggtcctggcaaagatgatcagtatgaaaatgtcattgttcttgtgaacccaaagtgtgactcattaaatggaagtaaatgttgt

SEQ ID NO: 582390 - DNA, 120 bp, Artificial Sequence
  ENSG00000172156_6 (sequence is synthesized)
tttaggaatacataaagtatgtgcatattttattatagtcactagttgtaatttttttgtgggaaatccacactgagctgagggggacaaagatggctgtggccaagaggggcttggtta

SEQ ID NO: 582391 - DNA, 120 bp, Artificial Sequence
  ENSG00000172156_7 (sequence is synthesized)
agggggtgggaactatgtccctgggaaatgagtttttggcttagctggtcttcattgaaatgcagggtgaaactgacaaacccattccagccctctattcccattttcaacagtatttcc

SEQ ID NO: 582392 - DNA, 120 bp, Artificial Sequence
  ENSG00000172159_0 (sequence is synthesized)
gccgcgccccggccgctgggcatgtgtgtccgcaggcgcccgacgctgccgatgtcccggggctgagccgcgcccaggtgtcccggacagtgcgtgcgagcgtgtgtgtccgcgcaggcg

SEQ ID NO: 582393 - DNA, 120 bp, Artificial Sequence
  ENSG00000172159_1 (sequence is synthesized)
agcaccgcgccggccctgagcctcccgctcgctccccacggccgcggtgcatgttcgcctcctgccactgtgtgccgagaggcaggaggaccatgaaaatgatccactttcggagctcca

SEQ ID NO: 582394 - DNA, 120 bp, Artificial Sequence
  ENSG00000172159_2 (sequence is synthesized)
gcgtcaaatcgctcagccaggagatgagatgcaccatccggctgctggacgactcggagatctcctgccacatccagagggaaaccaaagggcagtttctcattgaccacatctgcaact

SEQ ID NO: 582395 - DNA, 120 bp, Artificial Sequence
  ENSG00000172159_3 (sequence is synthesized)
actacagcctgctggagaaggactactttggcattcgctatgtggacccagagaagcaaaggcactggcttgaacctaacaagtccatcttcaagcaaatgaaaactcatccaccataca

SEQ ID NO: 582396 - DNA, 120 bp, Artificial Sequence
  ENSG00000172159_4 (sequence is synthesized)
ccatgtgctttagagtgaaattctacccacatgaacccttgaagattaaagaagagctcacaagataccttttataccttcagattaaaagggacatttttcatggccgcctgctgtgct

SEQ ID NO: 582397 - DNA, 120 bp, Artificial Sequence
  ENSG00000172159_5 (sequence is synthesized)
ccttttctgatgctgcctacctgggtgcctgtattgttcaagctgagcttggtgattacgatcctgatgagcatcctgagaattacatcagtgagtttgagattttccccaagcagtcac

SEQ ID NO: 582398 - DNA, 120 bp, Artificial Sequence
  ENSG00000172159_6 (sequence is synthesized)
agaagctggaaagaaaaatagtggaaattcataaaaatgaactcagggggcagagcccaccagttgctgaatttaacttgctcctgaaagctcacactttggaaacctacggggtggatc

SEQ ID NO: 582399 - DNA, 120 bp, Artificial Sequence
  ENSG00000172159_7 (sequence is synthesized)
ctcacccatgcaaggattcaacaggcacaacaacatttttaggattcacagctgcaggctttgtggtctttcagggaaataagagaatccatttgataaaatggccagatgtctgcaaat

SEQ ID NO: 582400 - DNA, 120 bp, Artificial Sequence
  ENSG00000172159_8 (sequence is synthesized)
tgaagtttgaagggaagacattttatgtgattggcacccagaaggagaaaaaagccatgttggcattccatacttcaacaccagctgcctgcaaacatctttggaagtgtggagtggaaa

SEQ ID NO: 582401 - DNA, 120 bp, Artificial Sequence
  ENSG00000172159_9 (sequence is synthesized)
accaggccttttataagtatgcaaaatccagtcagatcaagactgtatcaagcagcaagatattttttaaaggaagtagatttcgatatagtgggaaagttgccaaagaggtggtggagg

SEQ ID NO: 582402 - DNA, 120 bp, Artificial Sequence
  ENSG00000172159_10 (sequence is synthesized)
ccagttccaagatccagagggagcctcctgaggtgcacagagccaacattactcagagccgcagttcccactccttgaacaaacagctcatcattaacatggaacccctgcagcccctgc

SEQ ID NO: 582403 - DNA, 120 bp, Artificial Sequence
  ENSG00000172159_11 (sequence is synthesized)
ttccttcccccagcgagcaagaagaagaacttcctctgggtgagggtgttccattgcctaaagaggagaacatttctgctcccttgatctccagctccccagtgaaggcagcccgggagt

SEQ ID NO: 582404 - DNA, 120 bp, Artificial Sequence
  ENSG00000172159_12 (sequence is synthesized)
atgaagatccccctagtgaagaggaagataaaataaaagaagaacctttaaccatctctgaactagtgtacaacccaagtgccagcctgctccccacccctgtggatgacgatgagattg

SEQ ID NO: 582405 - DNA, 120 bp, Artificial Sequence
  ENSG00000172159_13 (sequence is synthesized)
acatgctctttgactgtccttctaggcttgagttggaaagagaagacacagattcatttgaggatctggaagcagatgaaaacgcctttttgattgctgaagaagaggagctgaaggagg

SEQ ID NO: 582406 - DNA, 120 bp, Artificial Sequence
  ENSG00000172159_14 (sequence is synthesized)
ctcgccgtgctttgtcgtggagctatgacattctgactggccatattcgggtgaacccactggtcaagagtttttccaggctccttgtggtgggcctgggactgctgctctttgtatttc

SEQ ID NO: 582407 - DNA, 120 bp, Artificial Sequence
  ENSG00000172159_15 (sequence is synthesized)
ccctgctcctcctccttttggagtcaggtattgatctctccttcttatgcgaaatccgccagacaccagagtttgagcagtttcactatgaatactactgtcccctcaaggagtgggtgg

SEQ ID NO: 582408 - DNA, 120 bp, Artificial Sequence
  ENSG00000172159_16 (sequence is synthesized)
ctgggaaagtccacctcatcctctacatgctgggttgctcatgaagttaatctctcacgtgactaagggctatattcaatgctagtgatttctttttttcagcaaatgcctggttctgaa

SEQ ID NO: 582409 - DNA, 120 bp, Artificial Sequence
  ENSG00000172159_17 (sequence is synthesized)
gggtcacggggctgtcaacaggtgttccttactcataattgattattcaaacctttaagttagctttccataattcactgcacttaaataagtttaaatcaaatacagttattttagtta

SEQ ID NO: 582410 - DNA, 120 bp, Artificial Sequence
  ENSG00000172159_18 (sequence is synthesized)
caggttaggaagatggtctttaaataaccaaaaatatgtttattttttattatagtgtagacatacccttcatctattatatcataatacatgttacattggactgaattagattttccc

SEQ ID NO: 582411 - DNA, 120 bp, Artificial Sequence
  ENSG00000172159_19 (sequence is synthesized)
atttctaatagttggcaccattataagctataaggttcagaatcagaattttagtaacaactcaagagaaagttgttgaatataatccttagtgaaaacagtgtcctctaaccaatgcct

SEQ ID NO: 582412 - DNA, 120 bp, Artificial Sequence
  ENSG00000172159_20 (sequence is synthesized)
atacaactaaatttatgctgggtttttggttctgtttttttaaaaatatttttatgtgttcaaactattttggtaaatttttagcaaaaaaaaaaaagaagcctcctggagttatttaca

SEQ ID NO: 582413 - DNA, 120 bp, Artificial Sequence
  ENSG00000172159_21 (sequence is synthesized)
taatttgttatgatctgcataggagatagaaaatgggtagaaagacactatagtaagtaagctgctaaaacagaggatggaactggaggatgtagaaactgagagcatcaagtggactca

SEQ ID NO: 582414 - DNA, 120 bp, Artificial Sequence
  ENSG00000172159_22 (sequence is synthesized)
gggtggtccatttttcaaagtatttggacaagaggacttgttattttcatttgtattctgtccgtatattttggctggagaagcagatgttttaaaaagaaagtgagagtttaaaggaaa

SEQ ID NO: 582415 - DNA, 120 bp, Artificial Sequence
  ENSG00000172159_23 (sequence is synthesized)
aaaggtaacagatgtgctagtcagttgcatatcaatgtacattaacccaagagtgaaggcagataggaactggagaaatggaaagtggcaaaaatgagttctggtgaggctggcaggcaa

SEQ ID NO: 582416 - DNA, 120 bp, Artificial Sequence
  ENSG00000172159_24 (sequence is synthesized)
atggtgacaggcgaatggtctattttatgaaagtgatggtgatgccagcgttcgatgatgtgaagagcagtgcagtcgctgtctgagttaacatgaacatgtttaagtggatctaaataa

SEQ ID NO: 582417 - DNA, 120 bp, Artificial Sequence
  ENSG00000172159_25 (sequence is synthesized)
aagtggagaaactttaaggtaaatattttgatccctcatgccatttgttgtgattctgtagaagaaacttcaaaaatgtgtttgtatgtgagtgtgcgtgtgtgtgtgtgtgagagagag

SEQ ID NO: 582418 - DNA, 120 bp, Artificial Sequence
  ENSG00000172159_26 (sequence is synthesized)
agagagagagagagagagaatatgaatggctttttgatacatgtccatgatcatgttttgcggtggtcattatactcctttcctttcccagttgttttaaaatttgacttccatagagaa

SEQ ID NO: 582419 - DNA, 120 bp, Artificial Sequence
  ENSG00000172159_27 (sequence is synthesized)
actggagaggcctcatgagatgacataccagttcagcctgggtaaagtagtgacatgaccctaaccagactgtagaggggaccagtgctctagtaccttccttgataccattaaatccat

SEQ ID NO: 582420 - DNA, 120 bp, Artificial Sequence
  ENSG00000172159_28 (sequence is synthesized)
gatggaaaggatttaatccaacaatttaatggtatcaaggaaggtactagagcattgtaccatcagcaacgtactgatgccttcccatgcagactacctgctgatactgtgttatgtggg

SEQ ID NO: 582421 - DNA, 120 bp, Artificial Sequence
  ENSG00000172159_29 (sequence is synthesized)
agaaagataagagtctagaacttatgccatggagcatagagcttctctgtggattgaaaacattccactgccctaatgtacaaagttacagggcccacttggaatcgctctctctagcta

SEQ ID NO: 582422 - DNA, 120 bp, Artificial Sequence
  ENSG00000172159_30 (sequence is synthesized)
atgacattccaaccctatcattagcatgatttctaaattgggcaatacatttccactcactcagtggagctctgagtacttcactggacatttaattttggaaatgagttttgaaactca

SEQ ID NO: 582423 - DNA, 120 bp, Artificial Sequence
  ENSG00000172159_31 (sequence is synthesized)
gttcgtgaagcctgcagtcgagcaaatgactatatatttgccattaagtttgaggggtttcctttcctatatgctttcagtgatttattttgctttttaaataaagattgtttgtttatt

SEQ ID NO: 582424 - DNA, 120 bp, Artificial Sequence
  ENSG00000172159_32 (sequence is synthesized)
acctgaaagttgatactgatttaggaatatattttctgtgattggaatcctcaacaatttattttggaagcttgcagatggctaggtttgaaattgaaatttgtgtttttctccttcttt

SEQ ID NO: 582425 - DNA, 120 bp, Artificial Sequence
  ENSG00000172159_33 (sequence is synthesized)
tctcatacgacttctaagtcatcctttctgacataaggcaactttagtgtagtctgcacaaaattagtccccttctgatcatgcgtcatataattttctctaaagttctgactatgacaa

SEQ ID NO: 582426 - DNA, 120 bp, Artificial Sequence
  ENSG00000172159_34 (sequence is synthesized)
attttctctaaagttctgactatgacaaatcatctggccctcagtctttcaaaataatattatataatattttttaaattatggaactaatatattttccattgtaaaatacttaaaaaa

SEQ ID NO: 582427 - DNA, 120 bp, Artificial Sequence
  ENSG00000172159_35 (sequence is synthesized)
caacgatgcagatttatcttaaggagtaataaatatattattttaacatttccagctaacatctcttttctcttaggtggaaacttcattgttgaatagaaatgtttttaagtgaagaag

SEQ ID NO: 582428 - DNA, 120 bp, Artificial Sequence
  ENSG00000172159_36 (sequence is synthesized)
ttgacagaatagggtctgctgaatttaaacagccatcaaaagttaaactggaatcttgaaatgccatttgctcggcatagaatcagagccttttagaaacatccatttaagttttgttag

SEQ ID NO: 582429 - DNA, 120 bp, Artificial Sequence
  ENSG00000172159_37 (sequence is synthesized)
aagatagtcaccagttgcctgaatcgaatgaggaaaagcctgcttccagagatggacagtatattatagagtgagatatagagtttaaagcaagtgtgtgagtatatgtatattccatat

SEQ ID NO: 582430 - DNA, 120 bp, Artificial Sequence
  ENSG00000172159_38 (sequence is synthesized)
tattggtatatgtgtgtttatatatgaatctgtatatatgtgtgtctttgaatagacacaacatatatgcccctcatgcataattgtgcttattttgccctaattgaggaatttgagatg

SEQ ID NO: 582431 - DNA, 120 bp, Artificial Sequence
  ENSG00000172159_39 (sequence is synthesized)
tattattggttcttctccctctcagatactatggtgggtaaaacccacagcctgaaagggttaaattttccataaatgccactgagtgtacatttgtggatataaataaatatatataat

SEQ ID NO: 582432 - DNA, 120 bp, Artificial Sequence
  ENSG00000172159_40 (sequence is synthesized)
acacacacacatatggcaaatacatatacacacacaatattgcctttagtgctaatgcaagttggatcatgaaaacaatgtaggtaaagtaaagtatgtatttgtctgtgcttgaaaaat

SEQ ID NO: 582433 - DNA, 120 bp, Artificial Sequence
  ENSG00000172159_41 (sequence is synthesized)
attgtaaaatgttatgtatttggaatatattttgtggtttgtctaatatttataaacacaactcggggtgaattcacaatgagtttatttcattgaaatactagagatatgggggccatg

SEQ ID NO: 582434 - DNA, 120 bp, Artificial Sequence
  ENSG00000172159_42 (sequence is synthesized)
ttactgtgattggagccttacctttgtatagtgaaatttgcatttctatgtcaacatccagattgttttatatgttaatatggtggcaggaatccctaataaaaatactctggggtaaaa

SEQ ID NO: 582435 - DNA, 120 bp, Artificial Sequence
  ENSG00000172159_43 (sequence is synthesized)
aggagctgtaatgtgaaagtctgcaaaaccaggctatcacactgtaagaagcagaagactacaggatgagagaagctggagaatcttggctccaggcatgttggtgcagatcctgaaagt

SEQ ID NO: 582436 - DNA, 120 bp, Artificial Sequence
  ENSG00000172159_44 (sequence is synthesized)
gcagcctgcccaccaatgagaaaagtctttatggttccctcctcttccccaaattgtacttattcaatgcagcagaaatgaagaggaaatgataaaacatatcattcatctgtttcagaa

SEQ ID NO: 582437 - DNA, 120 bp, Artificial Sequence
  ENSG00000172159_45 (sequence is synthesized)
gcttcatttcggaagtgattcatagcacttctgcttacaactctctgatcaggactcatcccaagatcttacccaggatcaaggaaatgcaattctatggtgttcagaagggggcagagc

SEQ ID NO: 582438 - DNA, 120 bp, Artificial Sequence
  ENSG00000172159_46 (sequence is synthesized)
ccttttggagtcagtctccatgcagtaaacagacccagcagaacctgcccgtggtgagctcagccaagacttggctctccatgttccagcctccgtctgtgactgggtgggtaagttcgg

SEQ ID NO: 582439 - DNA, 120 bp, Artificial Sequence
  ENSG00000172159_47 (sequence is synthesized)
tgggccccacccagtgggctcggcagccgtcacttcacagaagaagaaaggaaccttgcttaggcctcagatcccagctgtgctctccaatccattaataaagctgcttttaaccctctc

SEQ ID NO: 582440 - DNA, 120 bp, Artificial Sequence
  ENSG00000172159_48 (sequence is synthesized)
cgcgagcccgccgggggtctcaggctctgggcgtcctcggcgagcgagcccgggcagagggaggcgcacgagcgcgcgcgacagaaggaggcggggaaaggagggggcgaggcggaggcg

SEQ ID NO: 582441 - DNA, 120 bp, Artificial Sequence
  ENSG00000172159_49 (sequence is synthesized)
tgagttatttctgttggccgcattaggaacctgacatttgattcattcagtgggtcctgcctaggtcctttaaaacagaatggactgttagggaaaggctgccctgggccatgcaggccg

SEQ ID NO: 582442 - DNA, 120 bp, Artificial Sequence
  ENSG00000172159_50 (sequence is synthesized)
aggagaccaaggggattggaataaccagtatggcaaaatgcttggtcaagatccagactcgacgaagcctccaattgcacatggtgaaccactgcaacagtaatgtgtttgttcgtctgc

SEQ ID NO: 582443 - DNA, 120 bp, Artificial Sequence
  ENSG00000172159_51 (sequence is synthesized)
agccctagagctcccagagacagaagacgagatggcagtattttaaggcactagcagatcacggcactgcaaatcctttttgtcttggcaaggcacaaggagacctgcttatgcagcttt

SEQ ID NO: 582444 - DNA, 120 bp, Artificial Sequence
  ENSG00000172164_0 (sequence is synthesized)
gtgttgtgtttggagagagggtagacagcagtgggaaggggacgtaactgagaagcatgaaacaccttgagtggaccatgagacctgcttagagttaggggaaagcttgagaggttcaag

SEQ ID NO: 582445 - DNA, 120 bp, Artificial Sequence
  ENSG00000172164_1 (sequence is synthesized)
gatagaagaactcagggtggttcaggtgtgacatgggttatgtgggcatttctggattgctctgggaaggttgctccaccccggtcaggatcaggcgagggggaaccagcctgagtgcag

SEQ ID NO: 582446 - DNA, 120 bp, Artificial Sequence
  ENSG00000172164_2 (sequence is synthesized)
ctgccaactcccgccgagtgcgtctgcgaactcccggagcggagtcccgcgtgccgccacctccccgcgggacgcactctcctcgctcccccgggccccgcgtcctccccccggccaccc

SEQ ID NO: 582447 - DNA, 120 bp, Artificial Sequence
  ENSG00000172164_3 (sequence is synthesized)
ttccccacttttccccccttttccaatcacatggcattttaagaatgccggaaagatggcggtagcggcggcggcggcggcggctgggccggctggcgcgggaggcggccgggcgcagcg

SEQ ID NO: 582448 - DNA, 120 bp, Artificial Sequence
  ENSG00000172164_4 (sequence is synthesized)
gagcgggctgctggaagttttggtgcgggatcgctggcacaaagttctggtgaacttgagcgaggacgccctggttctgagcagcgaggagggcgctgcggcgtacaacggcatcgggac

SEQ ID NO: 582449 - DNA, 120 bp, Artificial Sequence
  ENSG00000172164_5 (sequence is synthesized)
gggctgggcacccgggcgcgggcggcgcgcagcccccggactcgcccgccggggtccgcaccgctttcaccgacctgcccgagcaggtgcccgagtccatctcgaaccagaagcgtggcg

SEQ ID NO: 582450 - DNA, 120 bp, Artificial Sequence
  ENSG00000172164_6 (sequence is synthesized)
gcccgagtccatctcgaaccagaagcgtggcgtgaaggtgctgaagcaggagctgggcgggctggggatcagcatcaaggggggcaaggagaacaagatgcccatcctcatcagcaagat

SEQ ID NO: 582451 - DNA, 120 bp, Artificial Sequence
  ENSG00000172164_7 (sequence is synthesized)
cttcaaggggctggcggcggaccagacccaagccctgtacgtgggcgacgccatcctgtccgtgaacggagccgacctgcgggacgccacccacgacgaggcggtgcaggcgttgaagcg

SEQ ID NO: 582452 - DNA, 120 bp, Artificial Sequence
  ENSG00000172164_8 (sequence is synthesized)
cgcgggcaaggaagtgctgctggaagtgaagtacatgcgagaagccacgccctatgtgaagaaaggatccccagtatccgagattgggtgggaaacacctccgcctgaatcccctcggtt

SEQ ID NO: 582453 - DNA, 120 bp, Artificial Sequence
  ENSG00000172164_9 (sequence is synthesized)
agggggcagcacctcagaccccccgtcatcgcagtccttctccttccacagagaccggaaaagcatccccctcaaaatgtgctacgtcactcggagtatggccttggccgaccctgagaa

SEQ ID NO: 582454 - DNA, 120 bp, Artificial Sequence
  ENSG00000172164_10 (sequence is synthesized)
caggcagcttgaaatccactctccagatgctaagcacacggtgatcctaaggagcaaggactcagccacggcccaggcatggttcagtgccatccattccaacgttaatgacctgctgac

SEQ ID NO: 582455 - DNA, 120 bp, Artificial Sequence
  ENSG00000172164_11 (sequence is synthesized)
ccgagtgattgctgaggtcagagagcagctggggaaaacaggcattgctgggagccgagagattaggcatcttggctggcttgcagaaaaggtgccaggggagagcaagaaacagtggaa

SEQ ID NO: 582456 - DNA, 120 bp, Artificial Sequence
  ENSG00000172164_12 (sequence is synthesized)
accagccctggttgtgctgactgagaaagaccttttaatctatgacagcatgccacggaggaaggaagcctggttcagcccagttcacacataccctcttcttgccaccaggctggtcca

SEQ ID NO: 582457 - DNA, 120 bp, Artificial Sequence
  ENSG00000172164_13 (sequence is synthesized)
ttcaggtccaggaaagggatcaccccaggctggtgtggatctgtcctttgcaacgcgaactggtaccaggcaagggattgaaacacatctcttcagagcagagaccagcagggacctctc

SEQ ID NO: 582458 - DNA, 120 bp, Artificial Sequence
  ENSG00000172164_14 (sequence is synthesized)
ccactggacaaggagcatagtacagggttgccacaattctgctgaactcattgctgaaatcagcactgcttgcacctacaaaaaccaggagtgccgtttgaccatacattatgagaatgg

SEQ ID NO: 582459 - DNA, 120 bp, Artificial Sequence
  ENSG00000172164_15 (sequence is synthesized)
attttctattaccactgaaccacaggagggtgcctttcccaagaccatcatacagtctccttatgaaaagctcaaaatgtcttcagatgatggaatcaggatgctgtatttagattttgg

SEQ ID NO: 582460 - DNA, 120 bp, Artificial Sequence
  ENSG00000172164_16 (sequence is synthesized)
aggcaaagatggagagattcaactggaccttcattcctgccccaagccaattgttttcatcattcattccttcctgtcagctaagattacaagactgggcttggtggcctgaagacaggg

SEQ ID NO: 582461 - DNA, 120 bp, Artificial Sequence
  ENSG00000172164_17 (sequence is synthesized)
gtgacttgcctttgagaaaagaagggctgcaatgccaccagagaacgtgatgtcagacaccatctgtagtgagcagcgcaccagatgtagcgtgctacagtcagctttagctctcaagag

SEQ ID NO: 582462 - DNA, 120 bp, Artificial Sequence
  ENSG00000172164_18 (sequence is synthesized)
tcgtatgtaactgtcccagactcctctgtcagtttcagcaactacaagggataccctgcgaaagtaccatgagaaatatcagagtaaaactttctagaacagtacaaggttaaagaggtg

SEQ ID NO: 582463 - DNA, 120 bp, Artificial Sequence
  ENSG00000172164_19 (sequence is synthesized)
aggtgacgggaaatacacagcatagctttgaaataatgacaaccaaggacatgaccattagaacagcatgtgcagatcttaatcatcccagttcctaggcaacttgttcaccaggtacgc

SEQ ID NO: 582464 - DNA, 120 bp, Artificial Sequence
  ENSG00000172164_20 (sequence is synthesized)
aagggccgaatagttgagaaatggacattcttacctactcctcctagccccctatccccagtaacagtgatcccttttcttattgtgatttatttcctaattcttgctgagttgactttc

SEQ ID NO: 582465 - DNA, 120 bp, Artificial Sequence
  ENSG00000172164_21 (sequence is synthesized)
gtaggaaaagaaaaatatttcaaatagaaacccaccttttatttaagtatgaagcagctgttactttttaaaaaatgaattatctttcaatggtgtagaatgattccaaagtgtctccat

SEQ ID NO: 582466 - DNA, 120 bp, Artificial Sequence
  ENSG00000172164_22 (sequence is synthesized)
tagcatatactgagcaggaattaaataaagcatcagatactgatctgagctgtaagctggtagaatctgagccaaagtagactgcttaaattgataagctttgctaaagagttgtatgca

SEQ ID NO: 582467 - DNA, 120 bp, Artificial Sequence
  ENSG00000172164_23 (sequence is synthesized)
caaaggatgattaattctgggactatactcacaccaaggtctgctgtcttatagccaagaattacagctttatttatagagagtgaattatgggtattttttcagaaaatattgtcatct

SEQ ID NO: 582468 - DNA, 120 bp, Artificial Sequence
  ENSG00000172164_24 (sequence is synthesized)
gatatacacataaaacaactcacattgttggagttaactaattatccccatttcatggttttcagtggcaacttactgacccttgtttttgcctgtgcttgtatgcatgcattttcaagc

SEQ ID NO: 582469 - DNA, 120 bp, Artificial Sequence
  ENSG00000172164_25 (sequence is synthesized)
aagtaataaagcagcctcatttaattctggataatgctgggttttacatatagactgaatgctataatcaaatctattgacagtatctgcagttctttcagaattccagggaaataatat

SEQ ID NO: 582470 - DNA, 120 bp, Artificial Sequence
  ENSG00000172164_26 (sequence is synthesized)
aacgacctgatatctttctacaggaatattttcagacattatatagcacattactgatttaatgcttttacttttatctttcaaaacaaattcactaaaaataacacctattgattttga

SEQ ID NO: 582471 - DNA, 120 bp, Artificial Sequence
  ENSG00000172164_27 (sequence is synthesized)
agtcacttttctcaaaccttgaaaatgagctctaggatctctataaacatttctaacacttttcctgtagtttacatagacagacatctgttgttagacctgtgtgtttttaaagaatca

SEQ ID NO: 582472 - DNA, 120 bp, Artificial Sequence
  ENSG00000172164_28 (sequence is synthesized)
tatgttaacaaatacccatgcaaagagcttcaaaaagtgaaaccgtgttaaaggaacacaatttttctcactcagacatatttgtttattgaattgcaaagttttattttaaatcagcat

SEQ ID NO: 582473 - DNA, 120 bp, Artificial Sequence
  ENSG00000172164_29 (sequence is synthesized)
ttccccaaagaatatatcatatgacgctagttccaaggggcttgactgagtggtgttttgctggggggagacaggggtttgttaatacactttactaaatactgagctgaaaaatgttaa

SEQ ID NO: 582474 - DNA, 120 bp, Artificial Sequence
  ENSG00000172164_30 (sequence is synthesized)
atagatttcacgattgcctccttgaagattttaaagttcattgtggttcttcaaggcgaaatccggtgaaccattcctcacacttacctacaggactcttttctaatggagcatcttgtg

SEQ ID NO: 582475 - DNA, 120 bp, Artificial Sequence
  ENSG00000172164_31 (sequence is synthesized)
ttgttgttgttatttgttttttttttttaatgctttagaaaacacagctttaggatattgactttttgtttatttctattttcaaatgctgaaaagtcaagtcccagtttgaataccata

SEQ ID NO: 582476 - DNA, 120 bp, Artificial Sequence
  ENSG00000172164_32 (sequence is synthesized)
cagtttgaataccatagaaaagctttgatgcatttgtaaattatattgcactctttcactatatattttcaaaatcactggaatgttgttatacaagagaattataattgtgtattgtaa

SEQ ID NO: 582477 - DNA, 120 bp, Artificial Sequence
  ENSG00000172164_33 (sequence is synthesized)
ataacatattaaaatacatatattaatgccaatagttaaattcaacaatatgtaatctaaggtgctcggttctacatgaagtatgagttaactgctcataattaagttgccaagattcta

SEQ ID NO: 582478 - DNA, 120 bp, Artificial Sequence
  ENSG00000172164_34 (sequence is synthesized)
ttatatatttatagacaaattaaaatgatcataattacaaatatgatttctttatcacttaagctttgggctgattaatatctgtgtgggggtcaatggaaactacattctctacattta

SEQ ID NO: 582479 - DNA, 120 bp, Artificial Sequence
  ENSG00000172164_35 (sequence is synthesized)
attttaggaaaatatatttgaataaaattaatgcattttctagagtaaattaaaatgttattagcaagaaatagaaaatttgactaagataattgtgtatatgaatcatttttcccccaa

SEQ ID NO: 582480 - DNA, 120 bp, Artificial Sequence
  ENSG00000172164_36 (sequence is synthesized)
gtatatgaatcatttttcccccaagttaaaatgtatcataatagagaggctctaatgaatcaatttccaatactcatttctttcttattttgaattcaagttacaatgactttacactgt

SEQ ID NO: 582481 - DNA, 120 bp, Artificial Sequence
  ENSG00000172164_37 (sequence is synthesized)
agattttaatcttgtctgatgtgtgctggtgtgtatgacacaaactcataagtctggatcatgcttgggtacagtcaatgaatcaaccgagtcactttgaggaatttgtttttgtccaat

SEQ ID NO: 582482 - DNA, 120 bp, Artificial Sequence
  ENSG00000172164_38 (sequence is synthesized)
ttgctctgtgctcaatcccatgaattattaaatttacaatgtttgtccccaaatgaaaaccaatataaatgaatgatgttttaatctgtactttatgggaagttgcctatttgtcagtag

SEQ ID NO: 582483 - DNA, 120 bp, Artificial Sequence
  ENSG00000172164_39 (sequence is synthesized)
atgtggttaagtgagtcctctggtgcagtgacatccttttaagccatctcatagggatttaaagaaggccaataggaatatagatattggtttttctttctctgacttgaactaagtagg

SEQ ID NO: 582484 - DNA, 120 bp, Artificial Sequence
  ENSG00000172164_40 (sequence is synthesized)
agaaaccaaaccataaacctattacaaactacccaggcagaggcatttacttaattcatcaactagtgcaattaaaaccctgaaaacacatgatccttgttgactctgcttggttgaagc

SEQ ID NO: 582485 - DNA, 120 bp, Artificial Sequence
  ENSG00000172164_41 (sequence is synthesized)
aggaaagaatggtcttgatggtcagaaagttttaaaattaatgggcagggcctttctggaccctgttttccaaacacgttagatattccgtcttgaggggattggagtaggctacagtga

SEQ ID NO: 582486 - DNA, 120 bp, Artificial Sequence
  ENSG00000172164_42 (sequence is synthesized)
gggggtaatttttggatgtatctggacttttaaaaaatgtgcctatatttatagcaccatgaatattatgtaaaatttatatatgaattaaataaatattcacctctgatttccagtgca

SEQ ID NO: 582487 - DNA, 120 bp, Artificial Sequence
  ENSG00000172164_43 (sequence is synthesized)
gaaataaggtagtttctgcaactctcaggcaacatgaaaataaaatttaccctcgtacatagccttgttctcacagtttctgggcattatgaacaatggggactgctttttcattcattc

SEQ ID NO: 582488 - DNA, 120 bp, Artificial Sequence
  ENSG00000172164_44 (sequence is synthesized)
attcattcatcagtcaacatttataaatcatctactatgtgccaggagttataattgggacaagggataaagaggtgaaaaaaattcaaacttgtgaacctagcattatctggaacaaag

SEQ ID NO: 582489 - DNA, 120 bp, Artificial Sequence
  ENSG00000172164_45 (sequence is synthesized)
tgtgttgatgtgcaggaacacataaggaaccatttgcagtaaagacaacaaaaaatgccaaactctgcctggacagtggtggaggactccttgcagtagaagtcatgttgaattgaagcc

SEQ ID NO: 582490 - DNA, 120 bp, Artificial Sequence
  ENSG00000172164_46 (sequence is synthesized)
tgagggaaaactcaccagaggaacaagggaagggagcccagagaggggcatgagcattccagacttagggaagatccaagcacagagctcgtgcactgctgcatggcccagttagagcac

SEQ ID NO: 582491 - DNA, 120 bp, Artificial Sequence
  ENSG00000172164_47 (sequence is synthesized)
cacatacggccctggggaatgaggggaaatgaatcagatactcactaagtacccagcacttgacacaagttaccacttacaacgtgtgtatccattctgcaaggccggtattagtgtgcc

SEQ ID NO: 582492 - DNA, 120 bp, Artificial Sequence
  ENSG00000172164_48 (sequence is synthesized)
cattttgcagattaggtacctgaggctcaaaagagttcaggaatcaccccaggtggtgtagcttctgagagatggaggtgggattccagttccgggactgtgtgtcacttgcatacctgt

SEQ ID NO: 582493 - DNA, 120 bp, Artificial Sequence
  ENSG00000172164_49 (sequence is synthesized)
gccttggtaccacagggggttgacacagaggtgggagatggggaggaagacttttcactagcgtatccttttctaccttttgaaattggaaccatggggaacagcaggagtctttgggga

SEQ ID NO: 582494 - DNA, 120 bp, Artificial Sequence
  ENSG00000172164_50 (sequence is synthesized)
tgataagagtcatggatgtgatctgggtagatatttttatatttggtgtcaaataacaaatgtccaaggagtgactgctgaatccaattttgcagtgatcctgattccattgtaaagaaa

SEQ ID NO: 582495 - DNA, 120 bp, Artificial Sequence
  ENSG00000172164_51 (sequence is synthesized)
aacatttgtccctggggtctgaggcaggcatgacctgttgaaaaccccaggccagcagagacacctgtccagggctcgatagaaaacatttcttgcatttaaggacaggaggtttaagcc

SEQ ID NO: 582496 - DNA, 120 bp, Artificial Sequence
  ENSG00000172164_52 (sequence is synthesized)
actcgggctacgttgactcttcattctagaatcttgggacagcgtattcccttttaactcctggggagcccagggccttggtctgagtttagcttcctccagggaacccgggtggaaagg

SEQ ID NO: 582497 - DNA, 120 bp, Artificial Sequence
  ENSG00000172164_53 (sequence is synthesized)
gttgctgcaagccagcaagacttcatcctcctgactagtttcatctgtgttttctccagagtcacttggaggggaaaggcagcttgaaatccactctccagatgctaagcacacggtgat

SEQ ID NO: 582498 - DNA, 120 bp, Artificial Sequence
  ENSG00000172167_0 (sequence is synthesized)
ctgtttggatgtggaagccgagacctaaagttggggggtgatctctgaggagatggatcggtacctgctgctggtgatctggggggaaggaaaattcccgtcggcggccagtagggaggc

SEQ ID NO: 582499 - DNA, 120 bp, Artificial Sequence
  ENSG00000172167_1 (sequence is synthesized)
agaacatgggccagaggtgtcgtcgggtgagggtactgagaatcagccggacttcacagcagcaaatgtttatcacctcttgaaaagaagcattagtgcttcaattaatccagaagatag

SEQ ID NO: 582500 - DNA, 120 bp, Artificial Sequence
  ENSG00000172167_2 (sequence is synthesized)
tactttccctgcctgttcagtgggaggtatacctggttccaagaagtggttctttgcagtgcaggcaatatatggattttatcagttttgtagttctgattggcaagagatacattttga

SEQ ID NO: 582501 - DNA, 120 bp, Artificial Sequence
  ENSG00000172167_3 (sequence is synthesized)
tacagaaaaagataaaattgaagatgttcttcaaacgaatatcgaagaatgtttgggtgctgttgagtgttttgaagaagaagacagtaatagcagggaatcattatccttggctgatct

SEQ ID NO: 582502 - DNA, 120 bp, Artificial Sequence
  ENSG00000172167_4 (sequence is synthesized)
ctatgaagaagctgcagaaaatttgcatcagctgtcagacaagcttcctgctcctggtagagcaatggtagatataatactgttgctttctgacaaagatcctcctaaattgaaagacta

SEQ ID NO: 582503 - DNA, 120 bp, Artificial Sequence
  ENSG00000172167_5 (sequence is synthesized)
tttacctactgtaggagcattaaaacatttgagagaatggtattcagcaaagatcactatagcaggaaatcattgtgaaataaactgtcagaaaattgcagaatacctttctgctaatgt

SEQ ID NO: 582504 - DNA, 120 bp, Artificial Sequence
  ENSG00000172167_6 (sequence is synthesized)
tgtatctttagaagatctcagaaatgttattgactcaaaggaattatggagggggaaaatacagatatgggaaagaaagtttggatttgaaattagttttcctgaattttgtttaaaggg

SEQ ID NO: 582505 - DNA, 120 bp, Artificial Sequence
  ENSG00000172167_7 (sequence is synthesized)
agtcacacttaagaattttagtacttctaatttaaatactgacttccttgccaaaaagatcataccatcaaaggataagaatattttgccaaaggttttccattattatggccctgcttt

SEQ ID NO: 582506 - DNA, 120 bp, Artificial Sequence
  ENSG00000172167_8 (sequence is synthesized)
agaatttgtgcagatgataaaattatcagatctaccctcctgctatatgtcggatattgaatttgagttaggattgacaaacagtaccaaacagaattctgtgttgctgttggagcagat

SEQ ID NO: 582507 - DNA, 120 bp, Artificial Sequence
  ENSG00000172167_9 (sequence is synthesized)
ttcttctctgtgtagcaaggttggtgctctttttgtattgccatgtaccattagtaacatactgattccacctcccaaccaactcagttcaagaaaatggaaggaatatatagctaaaaa

SEQ ID NO: 582508 - DNA, 120 bp, Artificial Sequence
  ENSG00000172167_10 (sequence is synthesized)
gcctaaaacaatcagtgttccagatgttgaagtgaaaggagagtgttctagctattatctcttgttacaaggtaatggcaatagaagatgtaaagccacattgattcactcagccaacca

SEQ ID NO: 582509 - DNA, 120 bp, Artificial Sequence
  ENSG00000172167_11 (sequence is synthesized)
gatcaatggctcatttgcactcaatttaattcatggaaagatgaaaacaaagacagaagaagccaaattgagttttccttttgacttattatcacttccacatttttctggggagcagat

SEQ ID NO: 582510 - DNA, 120 bp, Artificial Sequence
  ENSG00000172167_12 (sequence is synthesized)
aagttggcaaagcagcctgaaacagtttctgttgctgaactcaaaagtctgttagtactcacaaggaaacactttttagattattttgatgctgtgattcctaaaatgattctaagaaag

SEQ ID NO: 582511 - DNA, 120 bp, Artificial Sequence
  ENSG00000172167_13 (sequence is synthesized)
atggacaaaattaaaaccttcaatatattaaatgattttagtccagtggaacctaattcctcaagtctaatggaaaccaatcctctggaatggccagaaaggcatgttcttcaaaatttg

SEQ ID NO: 582512 - DNA, 120 bp, Artificial Sequence
  ENSG00000172167_14 (sequence is synthesized)
gaaacttttgaaaaaactaaacaaaaaatgagaactggttcattacctcattcatctgaacagttgctgggccacaaagagggtcctcgggactcaatcacattgttggatgctaaagaa

SEQ ID NO: 582513 - DNA, 120 bp, Artificial Sequence
  ENSG00000172167_15 (sequence is synthesized)
ttgctgaagtactttacctcagatggattacccattggagatcttcaacctttaccgattcaaaagggggaaaagacttttgttttgacaccagaacttagtcctgggaaacttcaggtc

SEQ ID NO: 582514 - DNA, 120 bp, Artificial Sequence
  ENSG00000172167_16 (sequence is synthesized)
ttaccttttgagaaagcctcagtatgtcattatcatggaattgaatattgcttggatgaccgaaaagctttggaaagagatggaggattttctgaacttcagtctcgtcttattcgttat

SEQ ID NO: 582515 - DNA, 120 bp, Artificial Sequence
  ENSG00000172167_17 (sequence is synthesized)
gaaactcaaactacctgcaccagagaaagttttccagtacctactgtgttgagccctcttccatctcctgtagtttcgtcagatcctggaagtgtccctgacggagaagttttacaaaat

SEQ ID NO: 582516 - DNA, 120 bp, Artificial Sequence
  ENSG00000172167_18 (sequence is synthesized)
gaacttcgaactgaagtatcccgattgaaacggagatctaaagatctgaattgcctttatcccagaaaaagacttgtgaaatctgaaagttcagagtctcttctttctcagacaactggt

SEQ ID NO: 582517 - DNA, 120 bp, Artificial Sequence
  ENSG00000172167_19 (sequence is synthesized)
aatagtaatcactatcatcatcatgtgacatccagaaagccacaaacagaacggtccttaccagtgacttgtccattggttccaattcctagctgtgaaactccaaaacttgctacaaag

SEQ ID NO: 582518 - DNA, 120 bp, Artificial Sequence
  ENSG00000172167_20 (sequence is synthesized)
accagttcaggtcaaaaaagtatgcatgaatcaaaaacatcaaggcaaattaaggaatcaagatcacagaaacacacacggatactgaaagaagtagttactgaaaccctgaagaaacac

SEQ ID NO: 582519 - DNA, 120 bp, Artificial Sequence
  ENSG00000172167_21 (sequence is synthesized)
agtattaccgagactcatgaatgtttcactgcatgcagccagcgtctctttgaaatctctaagttctatctaaaggatcttaaaacttcaaggggtctatttgaagaaatgaagaaaaca

SEQ ID NO: 582520 - DNA, 120 bp, Artificial Sequence
  ENSG00000172167_22 (sequence is synthesized)
gcaaacaacaatgctgtacaggtgattgactgggtattagaaaagacaagcaagaaatgatacataatcattctctttaagacaattataaattggatggagctattattcactacttct

SEQ ID NO: 582521 - DNA, 120 bp, Artificial Sequence
  ENSG00000172167_23 (sequence is synthesized)
tacatacgactcttgagagctaaagctgactgtagcacgctacatctggtgcgctgctcactacagatggtgtctgacatcacgttctctggtggcattgcagcccttcttttctcaaag

SEQ ID NO: 582522 - DNA, 120 bp, Artificial Sequence
  ENSG00000172167_24 (sequence is synthesized)
catcctgattccatcatctgaagacattttgagcttttcataaggagactgtatgatggtcttgggaaaggcaccctcctgtggttcagtggtaatagaaaatccattctcataatgtat

SEQ ID NO: 582523 - DNA, 120 bp, Artificial Sequence
  ENSG00000172167_25 (sequence is synthesized)
tgtgtattttatcctaccctaaaaatgttgacttgtttggacataagctacctttatttgcacactttttcatatatagtttatcttttagttatgctacttaattatagaactattttt

SEQ ID NO: 582524 - DNA, 120 bp, Artificial Sequence
  ENSG00000172167_26 (sequence is synthesized)
ggctgagtatgcttatatggtttttgtattatcattaaaatacttaatattagacagttattttaatccatgagaatgaagattatatattttagcatctttactgaagaaactctagtt

SEQ ID NO: 582525 - DNA, 120 bp, Artificial Sequence
  ENSG00000172167_27 (sequence is synthesized)
tgactctcaatttgggccttttatttgaataaaattctttaaaatgcatgtttcttaagcttacataatgtcaagaatcataaaaagtgatattttaataaacatgttcctttcttgaag

SEQ ID NO: 582526 - DNA, 120 bp, Artificial Sequence
  ENSG00000172167_28 (sequence is synthesized)
ataaattctgcctaatattttattttatttttgaaacagggtcttgctgtgtcacccaggctgcagtgcagtggtgcagtcacggcttgctacagcctagacctgggctcaagcgatcct

SEQ ID NO: 582527 - DNA, 69 bp, Artificial Sequence
  ENSG00000172167_29 (sequence is synthesized)
gtagaaatatcatttcgccatgttgttcaggctgacctcgaattcctgagctcaagcaatctgcctgcc

SEQ ID NO: 582528 - DNA, 120 bp, Artificial Sequence
  ENSG00000172167_30 (sequence is synthesized)
accgtgcctggccaataatgtattttaaaagcttgaatagaaatgttatttaatgttaatagctagcattcataccaaagtatcattttcattttgctatttgaggctgaaatatgtgac

SEQ ID NO: 582529 - DNA, 120 bp, Artificial Sequence
  ENSG00000172167_31 (sequence is synthesized)
ttctttaatttatgtgtatttgcagcatttcaggtaccttttaaaatccatagagtttgtgaggattatatgtacatgattgagttcacttttaggtttttttcaattgtggtacaatat

SEQ ID NO: 582530 - DNA, 120 bp, Artificial Sequence
  ENSG00000172167_32 (sequence is synthesized)
gtaagttgatccaggtgacataagttgtgataataatttttctcttgatgaaatatcccacctcttatagttaataccttttattttagtctttcataacatttcatgacaaaactgctc

SEQ ID NO: 582531 - DNA, 120 bp, Artificial Sequence
  ENSG00000172167_33 (sequence is synthesized)
ttattttagtattcacatattatatctgtaagtagctgtagacttaaaaattttcattttcctttttccagatcatatttgtttgtactgattaataaaaggagacctttccaaaccaga

SEQ ID NO: 582532 - DNA, 120 bp, Artificial Sequence
  ENSG00000172167_34 (sequence is synthesized)
gaaatatcattgaaccagggattagtagaggtagactttatttacacaatcttaggccagtcacgtaacttctctggtcgtttgttttctcatccataaagtattgaagtacttttagat

SEQ ID NO: 582533 - DNA, 120 bp, Artificial Sequence
  ENSG00000172167_35 (sequence is synthesized)
tgaagtacttttagataatttcttaggtgctttcatttacccttaaaaactcttatcatcccatatgttttcctaccactgttaaagacaagtatagccaggcacagtggctcacgcctg

SEQ ID NO: 582534 - DNA, 89 bp, Artificial Sequence
  ENSG00000172167_36 (sequence is synthesized)
accagcctggctaacatggtgaaaccccttttctactgaggtgtctgtaatctcagctactcgggagcctgaggctggagaattgcttg

SEQ ID NO: 582535 - DNA, 63 bp, Artificial Sequence
  ENSG00000172167_37 (sequence is synthesized)
aatagaaaaaattagccgggcgtggtggcaggtgtctgtaatctcagctactcgggagctgcc

SEQ ID NO: 582536 - DNA, 120 bp, Artificial Sequence
  ENSG00000172167_38 (sequence is synthesized)
agagagaaaaagagacaagtatgaaccatggcaatcaatccattttcccaatcactcacttcttgcctcctcagtcccagcgatcagctacgaatttcttgctaaaataaaaatatagtc

SEQ ID NO: 582537 - DNA, 120 bp, Artificial Sequence
  ENSG00000172167_39 (sequence is synthesized)
tggtaagtattacatgtttcggttgttttaatgatgcagcatagttaatgtatgtatcaaatttgaagtgaagataacatttctatatgagaaaacaggatttcatattattgctactga

SEQ ID NO: 582538 - DNA, 120 bp, Artificial Sequence
  ENSG00000172167_40 (sequence is synthesized)
ttaccaggagtccacatcattttaagatttttaattgcaacctactgtaacataaagtatctctaaccatattcatttaaaatgctagtgatctaaaggcagaactcttggttcattaga

SEQ ID NO: 582539 - DNA, 120 bp, Artificial Sequence
  ENSG00000172167_41 (sequence is synthesized)
tagctaattatactgaacatgggttttttagagacatttcaggaatcaaatttgtgaaaagagcagttcatttattatatggtacataaaaaacctgtgataattttttgaagaaattag

SEQ ID NO: 582540 - DNA, 120 bp, Artificial Sequence
  ENSG00000172167_42 (sequence is synthesized)
acctgtgataattttttgaagaaattagtagaagttatttatttatttatttagagatagagtctcgctttgtcacccaggctagagtgcggtggcacgatcttggttcactgcaacctc

SEQ ID NO: 582541 - DNA, 120 bp, Artificial Sequence
  ENSG00000172167_43 (sequence is synthesized)
cccagagtgctaggattacaggcgtgggccaccgcacttgacctaaagttttttatttaacagtttaactgtatgttacacagtattccaagtattctattttagaaatattgattcatt

SEQ ID NO: 582542 - DNA, 120 bp, Artificial Sequence
  ENSG00000172167_44 (sequence is synthesized)
ctattttagaaatattgattcatttaatttttgtaataaccccatatacttatttttatccccattttacagatgaaggaattggagcttagagaagtgacagagctgttaattggcaga

SEQ ID NO: 582543 - DNA, 120 bp, Artificial Sequence
  ENSG00000172167_45 (sequence is synthesized)
acctacggctctgtcacttctccaagggtttgaatctgtgctcttgtgctctttaccactacactgtgtttccactctgttcctctagtatgttcaagatgtctttatccaaatgaaaat

SEQ ID NO: 582544 - DNA, 120 bp, Artificial Sequence
  ENSG00000172167_46 (sequence is synthesized)
ttctgttataaaatcagagattaagtccaaaccctagtatttcatgaggtgattctggcttagaatgttaaaattgctttcccaaagtcacattggtgaagtgtgttccatcatactttg

SEQ ID NO: 582545 - DNA, 120 bp, Artificial Sequence
  ENSG00000172167_47 (sequence is synthesized)
gccttgatgtgtgttttttaaattgaacaaaaattgtttactttttttttagcttatagtttttgtgacccataatgtgatgggactaagaactgtaattgaaactattatgaagaaatc

SEQ ID NO: 582546 - DNA, 120 bp, Artificial Sequence
  ENSG00000172167_48 (sequence is synthesized)
tgtagaaatactccacagcgcccttgaattttgaggaatacagttttaaaatcagtagcttatacagtacagattttctatttttctgtataagaaacaggagagatactgaattctatt

SEQ ID NO: 582547 - DNA, 120 bp, Artificial Sequence
  ENSG00000172167_49 (sequence is synthesized)
tttcaaatgtaggtaagatatctatgtggaaatttaaatgtagagtttgaaatttagatacagatctctaggtaatagtcagggctggagatctagattttgagttttccagcagttttg

SEQ ID NO: 582548 - DNA, 120 bp, Artificial Sequence
  ENSG00000172167_50 (sequence is synthesized)
tttatctattgcgtaataagccaccccgaaacttagtggcttgaaagagcaaacattttatttgcttatagtttgcagtctgagctgccctcagcagagtagttctactgatctcacgag

SEQ ID NO: 582549 - DNA, 120 bp, Artificial Sequence
  ENSG00000172167_51 (sequence is synthesized)
aagtcattgatgtgggtgttttgaacttgcagatgatttggaggctgggttcagtggagctggctggctttctctctccgtttagtcttagagccttttccttgccacatggtcttctca

SEQ ID NO: 582550 - DNA, 120 bp, Artificial Sequence
  ENSG00000172167_52 (sequence is synthesized)
gatgatctctcctgcaagttagctggaatttttccatggtggctcaggacaaacatatagaacttgaaactaccaagactttttaaggcttaatcccaggactagcccagtcttacttct

SEQ ID NO: 582551 - DNA, 120 bp, Artificial Sequence
  ENSG00000172167_53 (sequence is synthesized)
gttacattccgttatttagagctagttacaagaatagtctaaattcaagggggaagtacctatccaaaggtgtgaataataggaagccaccaatgtaaaaagtctaccataggtgcctgt

SEQ ID NO: 582552 - DNA, 120 bp, Artificial Sequence
  ENSG00000172167_54 (sequence is synthesized)
aagttaggaatgtagaatgttagttaggaatggttgaaaacaacaatacataaagaacatggctagagaagagagccaaggatagggtctttagaaatatagtcatccctcagtatccac

SEQ ID NO: 582553 - DNA, 120 bp, Artificial Sequence
  ENSG00000172167_55 (sequence is synthesized)
tggggattggttccaggacccctgtggataacaaaattcctagatgctcaaacccctcatataaaatggagtaggagttgtatataacttctgcacatcctcctgtatattttacatcat

SEQ ID NO: 582554 - DNA, 120 bp, Artificial Sequence
  ENSG00000172167_56 (sequence is synthesized)
attttacatcatctctagattacttataatgcctgatacaatgtaaatgctatgtaaatacttgttatgctatattctttttttaaatttgtattcttcttggttattaatttgttattt

SEQ ID NO: 582555 - DNA, 120 bp, Artificial Sequence
  ENSG00000172167_57 (sequence is synthesized)
tggaatattttcaattcgtggttggttgaatccacagtgtgaaacccatggatgtagaggcaaattgtacctgcatgtaaggtgaaagtggagaaaagttaggaaatgatatggtaaatg

SEQ ID NO: 582556 - DNA, 120 bp, Artificial Sequence
  ENSG00000172167_58 (sequence is synthesized)
gtctttggaagaccctagcaagttatcgttaacatcagcattaaaataccatttatacagagcgtggtgcaaagtgtgggaaataaaggagcatcaaactgggtttttacacttaaggaa

SEQ ID NO: 582557 - DNA, 120 bp, Artificial Sequence
  ENSG00000172167_59 (sequence is synthesized)
gtagattcattgtctttttcgctgtgaaatttatactcaagtgaggaatgtacctaggacaataattataagtctgtttggccaacactgtgaaggcaaaatggaaggtacttccagagt

SEQ ID NO: 582558 - DNA, 120 bp, Artificial Sequence
  ENSG00000172167_60 (sequence is synthesized)
gtatgacctaacatagccttaagagctcaagaaaagtttcctataggaggagacattattactgtaacttactgcaccatactaatacatgaataagtgcagcttttaacccttctcatc

SEQ ID NO: 582559 - DNA, 120 bp, Artificial Sequence
  ENSG00000172167_61 (sequence is synthesized)
tcacagggaacaaatatatatttggtaattttggcacttgctaaaacaaaatcagaaatagattttctgagtggcaatatagtcaatttcgcttattctacatatagtcatgggataata

SEQ ID NO: 582560 - DNA, 120 bp, Artificial Sequence
  ENSG00000172167_62 (sequence is synthesized)
ctgatccatttctcagctttacatatgtctaaaattgattagacatatgtagacatatgcaatcagttaatcataatattaacatctccttaataaacttgagtgtattctggcaaccca

SEQ ID NO: 582561 - DNA, 120 bp, Artificial Sequence
  ENSG00000172171_0 (sequence is synthesized)
gtcaatggaggaagactggacctactgattcaacttggagatgagcgggtctgtcctcttcacggcgggagagaggtggagatgctttctgaccccgtcgaggtcatccctgtactgggc

SEQ ID NO: 582562 - DNA, 120 bp, Artificial Sequence
  ENSG00000172171_1 (sequence is synthesized)
cttacataatttctgctgtcggaaaaaatccactacacctaagaaaattactcccaatgttactttttgtgatgaaaatgcaaaggagcccgaaaatgcacttgacaagctcttctcttc

SEQ ID NO: 582563 - DNA, 120 bp, Artificial Sequence
  ENSG00000172171_2 (sequence is synthesized)
agaacagcaggcttccatcttgcatgtgttgaatacagcatctactaaagaacttgaagctttccgattgcttcgtggaagaaggtccatcaatatcgtagagcacagagaaaactttgg

SEQ ID NO: 582564 - DNA, 120 bp, Artificial Sequence
  ENSG00000172171_3 (sequence is synthesized)
gccatttcagaatttagagagtttaatgaatgtgcccttgtttaagtataaaagtacagttcaagtttgtaactccatactttgtccaaagactggacgggaaaaaagaaagtcaccgga

SEQ ID NO: 582565 - DNA, 120 bp, Artificial Sequence
  ENSG00000172171_4 (sequence is synthesized)
aaaccggttcctgagaaagctcctcaaaccagacatagaaagagaaagacttaaggcagttaatagtatcatatctatcgtttttggtactcgaagaattgcctgggctcaccttgatcg

SEQ ID NO: 582566 - DNA, 120 bp, Artificial Sequence
  ENSG00000172171_5 (sequence is synthesized)
atgcctaaagcagatttctatgttctggaaaaaacaggactttccattcagaactcatctctgtttccaatactgttacattttcatatcatggaagccatgctgtatgccttattaaat

SEQ ID NO: 582567 - DNA, 120 bp, Artificial Sequence
  ENSG00000172171_6 (sequence is synthesized)
aaaacttttgcccaggatgggcagcatcaggtgctgagcatgaatcgaaatgcagtggggaagcattttgaactgatgattggtgactcccggactagtggaaaagagctagtgaagcag

SEQ ID NO: 582568 - DNA, 120 bp, Artificial Sequence
  ENSG00000172171_7 (sequence is synthesized)
tttctcttcgattctatactgaaggcggatcctcgggtgttcttcccatcagataaaatagttcactacagacagatgtttttatctactgaactacaaagagtagaagagctttatgat

SEQ ID NO: 582569 - DNA, 120 bp, Artificial Sequence
  ENSG00000172171_8 (sequence is synthesized)
tcattattacaagctattgccttctatgaattagcagtgtttgactctcagccttagaattctgaggttaacgtgctaaagtataattattagctctaacgtaacaccaactgttgtgaa

SEQ ID NO: 582570 - DNA, 120 bp, Artificial Sequence
  ENSG00000172171_9 (sequence is synthesized)
catccatgttattggaaaagaacacattttcagtgtattttagatgtttaaattctgacttttggctattaaatggtttacacaataagccaagaccaaatcaataaacattttatgaga

SEQ ID NO: 582571 - DNA, 120 bp, Artificial Sequence
  ENSG00000172171_10 (sequence is synthesized)
gttgacagtgctggactggcagcaaagtgaccgttggagtttaatgagaggaatatactcatcatcagtctatttagaagaggtaaggcagttgcacctccagattcctacctgctagag

SEQ ID NO: 582572 - DNA, 120 bp, Artificial Sequence
  ENSG00000172171_11 (sequence is synthesized)
ctccttgtgtagtttaatcttctggtcccaaaaggaatgtaataaaatagtaaagatgggttttcttctggtacttgttactcacttattcctattatgttttccatcacctttgatttt

SEQ ID NO: 582573 - DNA, 120 bp, Artificial Sequence
  ENSG00000172171_12 (sequence is synthesized)
taaaaattcaacctttagttagttcaagaaatgccttatgcatcgaaggcagatactgagaaaatcaatggtatttcattctaaatgttatagaacattatcactcttttatttataaag

SEQ ID NO: 582574 - DNA, 120 bp, Artificial Sequence
  ENSG00000172171_13 (sequence is synthesized)
atcaccttaatggtcaggaattaccaccttgattatacatatgaaatctgtggttcagtcaagcatctgatgtgattagtcagttgcagaggtgattgattcttgctagttattctaacc

SEQ ID NO: 582575 - DNA, 120 bp, Artificial Sequence
  ENSG00000172171_14 (sequence is synthesized)
gtatgctctatcccagaaaatgtttgaaggtttagtaaaacagttttaagttgtctaaccttaaagccaatacatattttagaaattatgaagtccactgtacagatcaagaaactggta

SEQ ID NO: 582576 - DNA, 120 bp, Artificial Sequence
  ENSG00000172171_15 (sequence is synthesized)
cttaggaggactaaacagcttagcttagctgttgttgtgacataaccatgaccagaaccagactgctcataaaatggctttttcagttatttcaaaattgtcaatatagtataaattaac

SEQ ID NO: 582577 - DNA, 120 bp, Artificial Sequence
  ENSG00000172171_16 (sequence is synthesized)
taattataatatttttaaatagaagtgggacagagaggggaccaaacataaaatgtaatgaattatttctgttcctttattttgtctttttttaaaaagatttcctcgatcatttcaaag

SEQ ID NO: 582578 - DNA, 120 bp, Artificial Sequence
  ENSG00000172171_17 (sequence is synthesized)
ctttgcaatattttaacttgacagaccatcgtttgatgtccattttaccactgtctacattagttgaggtcctcaatatatcttctttatgaacctaagtctctttgatgtcaaagtatt

SEQ ID NO: 582579 - DNA, 73 bp, Artificial Sequence
  ENSG00000172171_18 (sequence is synthesized)
tcttctttatgaacctaagtctctttgatgtcaaagtattaaatatcattggtgcatgccttttgaagccaga

SEQ ID NO: 582580 - DNA, 120 bp, Artificial Sequence
  ENSG00000172172_0 (sequence is synthesized)
gagtgacccggcgtggctactaggagaaggacgtacggtcctgctagtagaggaatatgtcgagtttctctagggcgccccagcaatgggccacttttgctagaatatggtatctcttag

SEQ ID NO: 582581 - DNA, 120 bp, Artificial Sequence
  ENSG00000172172_1 (sequence is synthesized)
atgggaaaatgcagccacctggcaaacttgctgctatggcatctataagacttcagggattacataaacctgtgtaccatgcactgagtgactgtggggatcatgttgttataatgaaca

SEQ ID NO: 582582 - DNA, 120 bp, Artificial Sequence
  ENSG00000172172_2 (sequence is synthesized)
caagacacattgcattttctggaaacaaatgggaacaaaaagtatactcttcgcatactggctacccaggtggatttagacaagtaacagctgctcagcttcacctgagggatccagtgg

SEQ ID NO: 582583 - DNA, 120 bp, Artificial Sequence
  ENSG00000172172_3 (sequence is synthesized)
caattgtaaaactagctatttatggcatgctgccaaaaaaccttcacagaagaacaatgatggaaaggttgcatctttttccagatgagtatattccagaagatattcttaagaatttag

SEQ ID NO: 582584 - DNA, 120 bp, Artificial Sequence
  ENSG00000172172_4 (sequence is synthesized)
tagaggagcttcctcaaccacgaaaaatacctaaacgtctagatgagtacacacaagaagaaatagacgccttcccaagattgtggactccacctgaagattatcggctataagagaata

SEQ ID NO: 582585 - DNA, 120 bp, Artificial Sequence
  ENSG00000172172_5 (sequence is synthesized)
tacaggatggagtaaaacaactgctacagttcagcacctgttttatgtgccgaatcactgtggggaaaggtcaggaaggtatagtccttcaataggaaattgtaattaaaatataatttt

SEQ ID NO: 582586 - DNA, 120 bp, Artificial Sequence
  ENSG00000172172_6 (sequence is synthesized)
atagaaccatttttatgtaatctgatttgaatgttatagttgataataataaaatcacttacttggttgactatttagtgttgcatttaatgataaaaaacagaccctgtgtatagaatt

SEQ ID NO: 582587 - DNA, 120 bp, Artificial Sequence
  ENSG00000172172_7 (sequence is synthesized)
gcagttacacattccaaaaatgcctctccatgcagattttctcaagtttgcaggtcactattcttgtcccttgtgaacaagctctaccttcacttttcatttcagtggctttttttatct

SEQ ID NO: 582588 - DNA, 120 bp, Artificial Sequence
  ENSG00000172172_8 (sequence is synthesized)
aacttgtcatccatctaaattcatatttgcagcttagtagggtaaagtttgccctgaaatatttataaactgctatctttttctgtgtcccatatagcctcttggccccacaatgacacc

SEQ ID NO: 582589 - DNA, 120 bp, Artificial Sequence
  ENSG00000172172_9 (sequence is synthesized)
agaatacataatgcctgtctgctcgttagaaatccctcttccctgccagtgattctgtttgtagactctccacactgttttcccatatctgtcctgttggcttccattcatctctgtact

SEQ ID NO: 582590 - DNA, 120 bp, Artificial Sequence
  ENSG00000172172_10 (sequence is synthesized)
ctcattttgcattgattttaaccattcagcaaaatcctctaatagtaaagaaatttggctcattgtattcaaaattctattccattcagcaaacattagctaggaagccactgtgttcca

SEQ ID NO: 582591 - DNA, 120 bp, Artificial Sequence
  ENSG00000172172_11 (sequence is synthesized)
catgctctacgctgaatgagcacttagcagctttttgaaattgtctttacaactgatctagggaattttatactggctttccaaagaagtatgaaatatttatacatctttggaaatatc

SEQ ID NO: 582592 - DNA, 120 bp, Artificial Sequence
  ENSG00000172172_12 (sequence is synthesized)
tgacaggtaggcgccttcaataagtaaaaaataagtatcaccaacaatcttttatatgtccaggcatcctctgcttgccctgactctgtaattattgtgcagatttgaatatactgagaa

SEQ ID NO: 582593 - DNA, 120 bp, Artificial Sequence
  ENSG00000172172_13 (sequence is synthesized)
agtgataacaataggagaaaggatgttaaatattgttaaatgcttttcagtgaagaagcacattatcaagagtatctattgtgttttctgtatgttgatagtgacccagcctatccaaac

SEQ ID NO: 582594 - DNA, 120 bp, Artificial Sequence
  ENSG00000172172_14 (sequence is synthesized)
cacaatttttaaaattcatttaaattgcctaaaatattataaatattttgctatattgggttttagaacaagcttacaggacagtagagctctgtgatcctaaagttataaaattttatc

SEQ ID NO: 582595 - DNA, 120 bp, Artificial Sequence
  ENSG00000172172_15 (sequence is synthesized)
ctgattcttaagacaacatgtcttaagacaacatgtcttaagaattgatcaaagtgctgccttatttgatgccatgtccttggccagatattggattcccacttgtaatagtgcgctctg

SEQ ID NO: 582596 - DNA, 120 bp, Artificial Sequence
  ENSG00000172172_16 (sequence is synthesized)
cagagagctgtaatttactgtgtgataatccttttatcgaaaattcctgtacacatactataatgagaagagggaattatatctactctccttataagaatgcctataagacacttccat

SEQ ID NO: 582597 - DNA, 120 bp, Artificial Sequence
  ENSG00000172172_17 (sequence is synthesized)
actgatatcttaccgttatttaaaaagagttcccaaaatcaatttatcatccagtctcaatacagttcattctcccagctgccttatttctgcatcatgagtacaatataaatgttcatt

SEQ ID NO: 582598 - DNA, 120 bp, Artificial Sequence
  ENSG00000172172_18 (sequence is synthesized)
cttttggttacccacactcttcattttatcattcctccttagtctgtctaattccaatgctttcttcttttaaaatgtcttagatatgtgctttactctttagtgtgcctttcagtatct

SEQ ID NO: 582599 - DNA, 120 bp, Artificial Sequence
  ENSG00000172172_19 (sequence is synthesized)
tgtgtctactgttggcaggtcaatcttccaactcttcatttttctgaatattggatacatagtagggggaaagtggtcctggtcaggggaatacaattaataaagatatcatgatttgag

SEQ ID NO: 582600 - DNA, 120 bp, Artificial Sequence
  ENSG00000172172_20 (sequence is synthesized)
tctagagcaacacatgaaaggttgaggaggttgattagacagaaaccatggttgtgtctgtggagagtgacattggagaggtggactagtggtaacgacactgtctagctaagcaaattt

SEQ ID NO: 582601 - DNA, 120 bp, Artificial Sequence
  ENSG00000172172_21 (sequence is synthesized)
agcaaaggagttagagctttatcctgaaaaattttaagctgagaggtgactttttaaaaattataagcctttagaaggcttgatctttttattttcctttatatggccagcacctggcac

SEQ ID NO: 582602 - DNA, 120 bp, Artificial Sequence
  ENSG00000172172_22 (sequence is synthesized)
aatttttggttcttagaagttcaataaatgtttcttagataaataaatgactcaaagattttcattttcaaatttttttctggccacagttggagcactgattgaaaggtagtggcacta

SEQ ID NO: 582603 - DNA, 120 bp, Artificial Sequence
  ENSG00000172172_23 (sequence is synthesized)
aacccggtagacccagtacatatacttgtcagatgagaaagcatgagaatgagccatagcagtgtctttttgcaattgaaaagagggaaataaacagcacattttaaaaaataggtatct

SEQ ID NO: 582604 - DNA, 120 bp, Artificial Sequence
  ENSG00000172172_24 (sequence is synthesized)
tattataatgggattacttgtattattaacctaatgtacttttggggaatttttataaggtttttattttaaagattttatgttttccttattctacgagcattcttttgcttatttttt

SEQ ID NO: 582605 - DNA, 120 bp, Artificial Sequence
  ENSG00000172172_25 (sequence is synthesized)
gtcgagtttctctagggcgccccaggtgagctcggactcttatggcttgatggggttcattatactggcagaaggagagcgttggttccggcagattaagtagtgaagctggggcggcag

SEQ ID NO: 582606 - DNA, 120 bp, Artificial Sequence
  ENSG00000172172_26 (sequence is synthesized)
tgcagcagactcactggcactggcaggtgctcatgtctcatgcatatgcaaggagcttctgggttctgtctcagggtactcatgccaagacagcctccgagattgaaagttaacaccctg

SEQ ID NO: 582607 - DNA, 120 bp, Artificial Sequence
  ENSG00000172172_27 (sequence is synthesized)
agaaacaaggctcaaccacaaggattcaggaatcagtgaaggaaagcttcaacctcccatcctctaggggacagttctaagaaggatcttctcacttctcagaagtcaaggtagaattga

SEQ ID NO: 582608 - DNA, 120 bp, Artificial Sequence
  ENSG00000172172_28 (sequence is synthesized)
atccccactgcctatagctgctgctgataatgcacctttaggttggcttttccttgttccctgtctcatttgtgctgctccctcactgctatttcctttagtcacttttcaaataaactg

SEQ ID NO: 582609 - DNA, 120 bp, Artificial Sequence
  ENSG00000172172_29 (sequence is synthesized)
atttccggttcccttcgtttaggtcggctggaaattatgtcctccgtcggttttccgcagtttttccaccaagcgagatatttttgggagttattccctaaataactgcattatatgctc

SEQ ID NO: 582610 - DNA, 120 bp, Artificial Sequence
  ENSG00000172172_30 (sequence is synthesized)
ctttcatgacgaaattgctgccgtggagaagactggaggaaactcgaggaagagggagaagccgacaagtgctcgacgggctaggaactgtcctgcttgggtgttagcgtttcccgccgg

SEQ ID NO: 582611 - DNA, 120 bp, Artificial Sequence
  ENSG00000172175_0 (sequence is synthesized)
aaacctgtctaattggggcggggagcggagcttcctcctctgagggccgtgccgcgctgccagatttgttcttccgcccctgcctccgcggctcggaggcgagcggaaggtgccccgggg

SEQ ID NO: 582612 - DNA, 80 bp, Artificial Sequence
  ENSG00000172175_1 (sequence is synthesized)
ccgaggcccgtgacggggcgggcgggagccccggcagtccggggtcgccggcgagggccatgtcgctgttgggggacccg

SEQ ID NO: 582613 - DNA, 120 bp, Artificial Sequence
  ENSG00000172175_2 (sequence is synthesized)
tgctcgcccctccggccggcgcgaccctcaaccgcctgcgggagccgctgctgcggaggctcagcgagctcctggatcaggcgcccgagggccggggctggaggagactggcggagctgg

SEQ ID NO: 582614 - DNA, 120 bp, Artificial Sequence
  ENSG00000172175_3 (sequence is synthesized)
cggggagtcgcgggcgcctccgcctcagttgcctagacctggagcagtgttctcttaaggtactggagcctgaaggaagccccagcctgtgtctgctgaagttaatgggtgaaaaaggtt

SEQ ID NO: 582615 - DNA, 120 bp, Artificial Sequence
  ENSG00000172175_4 (sequence is synthesized)
gcacagtcacagaattgagtgatttcctgcaggctatggaacacactgaagttcttcagcttctcagccccccaggaataaagattactgtaaacccagagtcaaaggcagtcttggctg

SEQ ID NO: 582616 - DNA, 120 bp, Artificial Sequence
  ENSG00000172175_5 (sequence is synthesized)
gacagtttgtgaaactgtgttgccgggcaactggacatccttttgttcaatatcagtggttcaaaatgaataaagagattccaaatggaaatacatcagagcttatttttaatgcagtgc

SEQ ID NO: 582617 - DNA, 120 bp, Artificial Sequence
  ENSG00000172175_6 (sequence is synthesized)
atgtaaaagatgcaggcttttatgtctgtcgagttaataacaatttcacctttgaattcagccagtggtcacagctggatgtttgcgacatcccagagagcttccagagaagtgttgatg

SEQ ID NO: 582618 - DNA, 120 bp, Artificial Sequence
  ENSG00000172175_7 (sequence is synthesized)
gcgtctctgaatccaagttgcaaatctgtgttgaaccaacttcccaaaagctgatgccaggcagcacattggttttacagtgtgttgctgttggaagccctattcctcactaccagtggt

SEQ ID NO: 582619 - DNA, 120 bp, Artificial Sequence
  ENSG00000172175_8 (sequence is synthesized)
tcaaaaatgaattaccattaacacatgagaccaaaaagctatacatggtgccttatgtggatttggaacaccaaggaacctactggtgtcatgtatataatgatcgagacagtcaagata

SEQ ID NO: 582620 - DNA, 120 bp, Artificial Sequence
  ENSG00000172175_9 (sequence is synthesized)
gcaagaaggtagaaatcatcataggaagaacagatgaggcagtggagtgcactgaagatgaattaaataatcttggtcatcctgataataaagagcaaacaactgaccagcctttggcga

SEQ ID NO: 582621 - DNA, 120 bp, Artificial Sequence
  ENSG00000172175_10 (sequence is synthesized)
aggacaaggttgcccttttgataggaaatatgaattaccgggagcaccccaagctcaaagctcctttggtggatgtgtacgaattgactaacttactgagacagctggacttcaaagtgg

SEQ ID NO: 582622 - DNA, 120 bp, Artificial Sequence
  ENSG00000172175_11 (sequence is synthesized)
tttcactgttggatcttactgaatatgagatgcgtaatgctgtggatgagtttttactccttttagacaagggagtatatgggttattatattatgcaggacatggttatgaaaattttg

SEQ ID NO: 582623 - DNA, 120 bp, Artificial Sequence
  ENSG00000172175_12 (sequence is synthesized)
ggaacagcttcatggtccccgttgatgctccaaatccatataggtctgaaaattgtctgtgtgtacaaaatatactgaaattgatgcaagaaaaagaaactggacttaatgtgttcttat

SEQ ID NO: 582624 - DNA, 120 bp, Artificial Sequence
  ENSG00000172175_13 (sequence is synthesized)
tggatatgtgtaggaaaagaaatgactacgatgataccattccaatcttggatgcactaaaagtcaccgccaatattgtgtttggatatgccacgtgtcaaggagcagaagcttttgaaa

SEQ ID NO: 582625 - DNA, 120 bp, Artificial Sequence
  ENSG00000172175_14 (sequence is synthesized)
tccagcattctggattggcaaatggaatctttatgaaatttttaaaagacagattattagaagataagaaaatcactgtgttactggatgaagttgcagaagatatgggtaagtgtcacc

SEQ ID NO: 582626 - DNA, 120 bp, Artificial Sequence
  ENSG00000172175_15 (sequence is synthesized)
ttaccaaaggcaaacaggctctagagattcgaagtagtttatctgagaagagagcacttactgatccaatacagggaacagaatattctgctgaatctcttgtgcggaatctacagtggg

SEQ ID NO: 582627 - DNA, 120 bp, Artificial Sequence
  ENSG00000172175_16 (sequence is synthesized)
ccaaggctcatgaacttccagaaagtatgtgtcttaagtttgactgtggtgttcagattcaattaggatttgcagctgagttttccaatgtcatgatcatctatacaagtatagtttaca

SEQ ID NO: 582628 - DNA, 120 bp, Artificial Sequence
  ENSG00000172175_17 (sequence is synthesized)
aaccaccggagataataatgtgtgatgcctacgttactgattttccacttgatctagatattgatccaaaagatgcaaataaaggcacacctgaagaaactggcagctacttggtatcaa

SEQ ID NO: 582629 - DNA, 120 bp, Artificial Sequence
  ENSG00000172175_18 (sequence is synthesized)
aggatcttcccaagcattgcctctataccagactcagttcactgcaaaaattaaaggaacatctagtcttcacagtatgtttatcatatcagtactcaggattggaagatactgtagagg

SEQ ID NO: 582630 - DNA, 120 bp, Artificial Sequence
  ENSG00000172175_19 (sequence is synthesized)
acaagcaggaagtgaatgttgggaaacctctcattgctaaattagacatgcatcgaggtttgggaaggaagacttgctttcaaacttgtcttatgtctaatggtccttaccagagttctg

SEQ ID NO: 582631 - DNA, 120 bp, Artificial Sequence
  ENSG00000172175_20 (sequence is synthesized)
cagccacctcaggaggagcagggcattatcactcattgcaagacccattccatggtgtttaccattcacatcctggtaatccaagtaatgttacaccagcagatagctgtcattgcagcc

SEQ ID NO: 582632 - DNA, 120 bp, Artificial Sequence
  ENSG00000172175_21 (sequence is synthesized)
ggactccagatgcatttatttcaagtttcgctcaccatgcttcatgtcattttagtagaagtaatgtgccagtagagacaactgatgaaataccatttagtttctctgacaggctcagaa

SEQ ID NO: 582633 - DNA, 120 bp, Artificial Sequence
  ENSG00000172175_22 (sequence is synthesized)
tttctgaaaaatgacctccttgtttttgaaagttagcataattttagatgcctgtgaaatagtactgcacttacataaagtgagacattgtgaaaaggcaaatttgtatatgtagagaaa

SEQ ID NO: 582634 - DNA, 120 bp, Artificial Sequence
  ENSG00000172175_23 (sequence is synthesized)
gaatagtagtaactgtttcatagcaaacttcaggactttgagatgttgaaattacattatttaattacagacttcctctttctaagattttgtgaattggttgaatagttctatacaaat

SEQ ID NO: 582635 - DNA, 120 bp, Artificial Sequence
  ENSG00000172175_24 (sequence is synthesized)
gaagtatggaggtgtgtatgtttatatgtatataacaaaatattttcattgtgaccactctgaagtaagagcaatgggaatggcattattgtagaataagtcattgtatttttaacacca

SEQ ID NO: 582636 - DNA, 120 bp, Artificial Sequence
  ENSG00000172175_25 (sequence is synthesized)
gaaagaaccttgccgatcaccaggcataacctaattttatccatggaagaaacacagaaaggcatctaagttagagctggcaccagaactgagacctccagaaatctattccagtatttt

SEQ ID NO: 582637 - DNA, 120 bp, Artificial Sequence
  ENSG00000172175_26 (sequence is synthesized)
ttccactacacaactgccttcctgacaggttctgagataagtgttatgtttgtagatagagtgaaatatatttatatatatataaatatatacagatacatatctgtgtattatctcaag

SEQ ID NO: 582638 - DNA, 120 bp, Artificial Sequence
  ENSG00000172175_27 (sequence is synthesized)
gaatgtacaaactttagtttttgattataaggacttcactgcaagttttagttaagaggtttgtatataaatctgttatagaacaggctgaaatttcttgttcataagattatgaaacca

SEQ ID NO: 582639 - DNA, 120 bp, Artificial Sequence
  ENSG00000172175_28 (sequence is synthesized)
catgagaagtgataaaatgtttgttaaagctagatagaggttaagaatcaagatataatggataattttcatagctgcctatcagaatttcccaaatatttagcatcttccttgataata

SEQ ID NO: 582640 - DNA, 120 bp, Artificial Sequence
  ENSG00000172175_29 (sequence is synthesized)
tgtattttcttcttgaatttcactggcctaatgagataatactcttatctttggctctacctaaaagttggttaaaaatgcaattggcattaacaaggaaaaatactgaattagtaattt

SEQ ID NO: 582641 - DNA, 120 bp, Artificial Sequence
  ENSG00000172175_30 (sequence is synthesized)
taaaagtctcacaaagaaaatcccaggcctagatggctgcattgttgaattctgccaaacattaaaattagcactaattttttgcacactgtttctaaaagtaggagaggaaagaacact

SEQ ID NO: 582642 - DNA, 120 bp, Artificial Sequence
  ENSG00000172175_31 (sequence is synthesized)
tcccaacttactctaggtcagtattaccctgatactagactagacatcacaagaaaactataagccaatattccttattaatacaaacacaaaaatcattaacaaaaatattagcaaact

SEQ ID NO: 582643 - DNA, 120 bp, Artificial Sequence
  ENSG00000172175_32 (sequence is synthesized)
gaatccagcaacctataaaaaggattctatatcatgaccaagtggaatttatcccaggaattcaaggttggttcaacatctaaaaatcaaataagctaatatacagtcagttctcattat

SEQ ID NO: 582644 - DNA, 120 bp, Artificial Sequence
  ENSG00000172175_33 (sequence is synthesized)
tcacagtaattatgttctacagaatattctcccataaacactgaattaaatatggaacaactgcttttaggagaaagtgtatttgtgtatatgtgtgtatacatatgtttatctcacaca

SEQ ID NO: 582645 - DNA, 120 bp, Artificial Sequence
  ENSG00000172175_34 (sequence is synthesized)
cattatgagcttgaattcttaattcatcctagcaaattctaccttattttacagaagtgaaagtgaggtatcagaagtgttaagtgacatgcctgaggcacccccctaacaggtgtcaga

SEQ ID NO: 582646 - DNA, 120 bp, Artificial Sequence
  ENSG00000172175_35 (sequence is synthesized)
gctgaaattcaaaccccatccagctggccccggagccagagcttcttgtactacacagaattgcccctgccatttccaccctccagtcatttctctatgagactgaagcaggaaggcaga

SEQ ID NO: 582647 - DNA, 120 bp, Artificial Sequence
  ENSG00000172175_36 (sequence is synthesized)
gcatcatcttgttcagcctcagctgggaacatgtgtactgggtgactcaaatttttcacccatttacacatatccacaaatgactgcaaaagtgccacggatatcaatttgagggttata

SEQ ID NO: 582648 - DNA, 120 bp, Artificial Sequence
  ENSG00000172175_37 (sequence is synthesized)
aattttagcaagttggtaaattcacaaatacataaccttgaataatgaggatcaactgtaccatatttaataaagcacaaaacccacacagattgtcttattacagcatttgataaaatc

SEQ ID NO: 582649 - DNA, 120 bp, Artificial Sequence
  ENSG00000172175_38 (sequence is synthesized)
ttcctagatatgataaatataacatctatgaaaagcccacacctaacattatacttcatggtgatagactgaaggctgaatgttttccccttaagattgggaagaaggacaaggatgttc

SEQ ID NO: 582650 - DNA, 120 bp, Artificial Sequence
  ENSG00000172175_39 (sequence is synthesized)
actcggcactacttctattcagcattgtacttgaagttctagccacagcagttaggttaggaattcaaggtttgttcaacatctaaaaatcaaataagctaataaagaaaagaggtttat

SEQ ID NO: 582651 - DNA, 120 bp, Artificial Sequence
  ENSG00000172175_40 (sequence is synthesized)
actgcaaaagaagtgaaactatatgtattcacagttgatacatagttgtatatagaaaatgctaaagaatccataaaaagtaataaatgagttcaacaggttgcaggatacaagatcagt

SEQ ID NO: 582652 - DNA, 120 bp, Artificial Sequence
  ENSG00000172175_41 (sequence is synthesized)
tttatttctctactaacagcaaacattctgaaaatgagaataaagaaatcctatatacagtagcatcaagaataaaactccaacacgtttaaagaaattaagatccagataaatggaaag

SEQ ID NO: 582653 - DNA, 120 bp, Artificial Sequence
  ENSG00000172175_42 (sequence is synthesized)
acatccatgttcatggattggaagactgaatattggtaagatggcaatgctgcccaaattagtctacatattcaacaattcctatcaaaatcctagctgtattttttgcagaaattgaca

SEQ ID NO: 582654 - DNA, 120 bp, Artificial Sequence
  ENSG00000172175_43 (sequence is synthesized)
aactggtaaaattggtagggaaacgcaggggacccagaatagccaaaaaaccttggaaaagaacaaagttggaagacgtaccaatttcaaaaagtgctaccaagctacaataagacagtg

SEQ ID NO: 582655 - DNA, 120 bp, Artificial Sequence
  ENSG00000172175_44 (sequence is synthesized)
taggcatatggatagacatatcgatcagaggaatggaactgaacatccagaaataaacccatacatttctggtcaacttgttttcaacaaggatgccaataccatcaatagagaaggagt

SEQ ID NO: 582656 - DNA, 120 bp, Artificial Sequence
  ENSG00000172175_45 (sequence is synthesized)
ggtcttttcaacaaacggtgctgggacaactaactggtagctacgtgcacagcaaaaggatccctaccttcctaccacattacaaattctaactcaaaatggatcatagacctcaatata

SEQ ID NO: 582657 - DNA, 120 bp, Artificial Sequence
  ENSG00000172175_46 (sequence is synthesized)
agagtttaaactcttagaagaaaacagaagtaaatctttgtgatgttgggcttaggaatggtttcttagacataataccaaaagcacaagcaacaaaggcaaacagtagataaatgggac

SEQ ID NO: 582658 - DNA, 120 bp, Artificial Sequence
  ENSG00000172175_47 (sequence is synthesized)
ttcatcaaaattaactttagcgccttaaaggacaccattaagaaagtgaagttaaccctcagaatgggagaaaaatttttgaaaaatcatgtatctgataaaaaaacaaacaaacatgca

SEQ ID NO: 582659 - DNA, 120 bp, Artificial Sequence
  ENSG00000172175_48 (sequence is synthesized)
ggtgctcagctgtggttaccaccgagcagcactgtccagtgaacttgctgtgatgatgggatgcttggtatccgcactcccagtgtgatagcctttagcctcatggggttgttgagcagt

SEQ ID NO: 582660 - DNA, 90 bp, Artificial Sequence
  ENSG00000172175_49 (sequence is synthesized)
cagtgtgatagcctttagcctcatggggttgttgagcagttgaaataatagctagtgtgaggaactgaacataaaattttagttttagga

SEQ ID NO: 582661 - DNA, 120 bp, Artificial Sequence
  ENSG00000172175_50 (sequence is synthesized)
agaatcgtacttcccctttatactcttctgtatatttgatttttttttttttaagacagagtcctggctctgtcgcccaggctggagtgcagcgacatagtctcagctcactgcagcatc

SEQ ID NO: 582662 - DNA, 120 bp, Artificial Sequence
  ENSG00000172175_51 (sequence is synthesized)
cgtggaggctgaaacaggagaatcgcatgaattttttaaaaaatctaaacatgtaattttaaaacgggcttaagaagaatgataacagttttggtcttcttttttatcaaccatgctttt

SEQ ID NO: 582663 - DNA, 120 bp, Artificial Sequence
  ENSG00000172175_52 (sequence is synthesized)
attttacttgaatctcgtgccaattgctttgtaatattaaagtaggatttacacaagtggaatttagaaaagatgataatctatcaaatctgtcaataccaattagaatgtaataaagaa

SEQ ID NO: 582664 - DNA, 120 bp, Artificial Sequence
  ENSG00000172175_53 (sequence is synthesized)
attaggatagtggaggtttgagcaagtaaaggctcacccaaattcaaagccaatacttgatgctgagaggggatattttctggaaggtaatttttaaaaattaaagtcacaattataaat

SEQ ID NO: 582665 - DNA, 120 bp, Artificial Sequence
  ENSG00000172175_54 (sequence is synthesized)
tgtatatttcctaataaaagaaatctcaactcatgggacaatttgaatttaaaacactattgttcctcattcagtgatgaacaagtcaaaacgtttcagaaaagaaagcctttaaagaag

SEQ ID NO: 582666 - DNA, 120 bp, Artificial Sequence
  ENSG00000172175_55 (sequence is synthesized)
aatcctggcacagaaaaggtccatttagacattgccttcttcccccatctctaatgcctcttttcaaatctctgacttgcacatgaagtaacagtgaggtgtcctgtgcagcagtcgcaa

SEQ ID NO: 582667 - DNA, 120 bp, Artificial Sequence
  ENSG00000172175_56 (sequence is synthesized)
ttttttgacttgtcaaattgaagaaattcaattatgtagccagagcttagatcactgacatgtatactggcataagcttttttttgtttgtttttaattttattagaagtgggatctcat

SEQ ID NO: 582668 - DNA, 120 bp, Artificial Sequence
  ENSG00000172175_57 (sequence is synthesized)
tttgttgcccatgctggtctcaaacacctgtcttcaagtgatcctcctgcctcagcagcatcagtttaatatctagataaaatctgatgtatgtaattttacttttaagggtttttttcc

SEQ ID NO: 582669 - DNA, 120 bp, Artificial Sequence
  ENSG00000172175_58 (sequence is synthesized)
aaacagacgtcctgacaatgttgtttcctattccttgaacattcacctgacgcttatatactgtcattacttttatctgtcaactgatgtcagctactcaatttacacattacttttgtg

SEQ ID NO: 582670 - DNA, 120 bp, Artificial Sequence
  ENSG00000172175_59 (sequence is synthesized)
gtcagctactcaatttacacattacttttgtgcatttcatcctgtttctcagtttgacattgtcattcaaattcagagtttgacactgaaaccctgggcatggtggctcacacctgtaat

SEQ ID NO: 582671 - DNA, 71 bp, Artificial Sequence
  ENSG00000172175_60 (sequence is synthesized)
cctgtaatcccagcacttcgggagactgcggtaagcagatcatttgaacccaggagtttgagactagcctt

SEQ ID NO: 582672 - DNA, 84 bp, Artificial Sequence
  ENSG00000172175_61 (sequence is synthesized)
cccagctactcaggaggctgaagtgggacgatcgcttgagcccagaaggcagaggttacggtgagtagcaagacgctgtctcaa

SEQ ID NO: 582673 - DNA, 120 bp, Artificial Sequence
  ENSG00000172175_62 (sequence is synthesized)
tcaaaaataaaatattagtaaagaagagtacaatcagaatatgaaaatgtgtaaatgtgcatattctctttttttctaatttggtagcattaaaaatacttaagcatcaaagtttggctt

SEQ ID NO: 582674 - DNA, 120 bp, Artificial Sequence
  ENSG00000172175_63 (sequence is synthesized)
tatgaagaaggagtctgagacacctcaggtttcagcccttactaatagcgtggctcaaagagcgttaacttgcctgtgcttctgtttccttatctgtaaaatggggatgatgctgtaaca

SEQ ID NO: 582675 - DNA, 120 bp, Artificial Sequence
  ENSG00000172175_64 (sequence is synthesized)
tcaaagagcttataatactttccagagctggcagtactaaataagaccattcctctaaagtgccagcattttgaaaagcatcaacccatcaaccttgtgctttaaatctggcattcttaa

SEQ ID NO: 582676 - DNA, 120 bp, Artificial Sequence
  ENSG00000172175_65 (sequence is synthesized)
agctatacctgtaggcagtatagagtgtttttttttatttgtttttttgttgttgtcttttgagtctcactctgtctcccaggctgtagtgcagtggcacgtcttggttcgccgcaacct

SEQ ID NO: 582677 - DNA, 74 bp, Artificial Sequence
  ENSG00000172175_66 (sequence is synthesized)
aggctgtagtgcagtggcacgtcttggttcgccccgcatagctggcattacaggcacacaccaccacgcccagc

SEQ ID NO: 582678 - DNA, 120 bp, Artificial Sequence
  ENSG00000172175_67 (sequence is synthesized)
tcttctaaagttgcaatttttgttcactccagaatcacttttcaaaaagcatgcagatttaatgccaccagtttgtgttatgtatctatcccgcaaaacagctctaaaggtgatttacta

SEQ ID NO: 582679 - DNA, 120 bp, Artificial Sequence
  ENSG00000172175_68 (sequence is synthesized)
aaagattaacagcatttatctctggtgggataatttttctttgcttgtttacctgtgtcttgcagattttacacagtgaacaatgactgtataattttaaaatacagatatgcacaattg

SEQ ID NO: 582680 - DNA, 120 bp, Artificial Sequence
  ENSG00000172175_69 (sequence is synthesized)
tgtaatgtaaatatgctcagcttcaatacatttaagaacacatttttaacttttcgtaaggagtcttcagtttaaaagtacagtgtcattacagagtgcttattctgttacaaaattagt

SEQ ID NO: 582681 - DNA, 120 bp, Artificial Sequence
  ENSG00000172175_70 (sequence is synthesized)
aaagctgattctgcctctaaatctgaagtaattcccactttttttcatgcttgagtttagttgataaatagcattttagatactaaaaatgattggatgagtatttctacattaataagt

SEQ ID NO: 582682 - DNA, 120 bp, Artificial Sequence
  ENSG00000172175_71 (sequence is synthesized)
tgctaattaggcaccagggtagcagatagaatgcctttctgtgtgctaggtttaaacattttacacacagtcttatttaaaacagccttgcagtttatagatgaactgattgttaggcta

SEQ ID NO: 582683 - DNA, 120 bp, Artificial Sequence
  ENSG00000172175_72 (sequence is synthesized)
accagaggtgttactataccctccaggataacccagctagtaagggcagagccaggatgattcagacccagaccagagccgggtgttttgtccacagtactgctgctgcttataccgtaa

SEQ ID NO: 582684 - DNA, 120 bp, Artificial Sequence
  ENSG00000172175_73 (sequence is synthesized)
cgggaaaagtacacaacagtgtcttaatatttcattcttccatgaaaaacacttttaaaatattgaaacattataggagcagaagtacatctctaaatatacttttaggtcacattgaaa

SEQ ID NO: 582685 - DNA, 120 bp, Artificial Sequence
  ENSG00000172175_74 (sequence is synthesized)
acatttccaaaggatttgacctgaagttaatgttgctacattatgctcaatacagcaggctgttctgctagggaaattgttaatattttaaaaatattttcctaagctttagctttacca

SEQ ID NO: 582686 - DNA, 120 bp, Artificial Sequence
  ENSG00000172175_75 (sequence is synthesized)
aagttgattttggggtcttttgggggagttaacatgtaaaacaaatggtacaattgaaatataaggtgaacattaaaactcatatcctttcagatgttttaatgttttcagtatttttat

SEQ ID NO: 582687 - DNA, 120 bp, Artificial Sequence
  ENSG00000172175_76 (sequence is synthesized)
ttaaagtcccttatgatttcatattaactagctcttatatttgctaaagtgctagaattcaactcaggcttatatgtaaaatgtcaaatagtattgcatgaaactcagcactgttggaat

SEQ ID NO: 582688 - DNA, 120 bp, Artificial Sequence
  ENSG00000172175_77 (sequence is synthesized)
cattacaacatttacttgctggtatttaacctgatgaatggagctaatgtaacaaatgtctaaagccttctaagatgttatgttttggagcgtatttttaaaacacaaaatgattttttc

SEQ ID NO: 582689 - DNA, 71 bp, Artificial Sequence
  ENSG00000172175_78 (sequence is synthesized)
atccaccgggcccaccttaccaatttcaactgtgtgcaaggaaaacaaaatatgagatatgggtaagtgtc

SEQ ID NO: 582690 - DNA, 120 bp, Artificial Sequence
  ENSG00000172175_79 (sequence is synthesized)
agaggacttaaaatgcaaaagaaagggatgtggacactgctctgggagacctaaggaaggctgggaagaagcgcaggcgaggtgatgaatgcagagggtggggtgcaggaattcatgaac

SEQ ID NO: 582691 - DNA, 120 bp, Artificial Sequence
  ENSG00000172175_80 (sequence is synthesized)
gtatccatatacattagtctatctaaaacatgttgaatgaaaatggtacattacaaagacatacatagaacatttttgttgaattcaaaaacctaaaacattggcatatactatttatga

SEQ ID NO: 582692 - DNA, 120 bp, Artificial Sequence
  ENSG00000172175_81 (sequence is synthesized)
acacttacacacatgagtaaaaattaaaacatgcctgatatgtctggcacataataggtgctcaggaaatatttgttgagtgaataaatgatactgagaatataacctgataatgtagga

SEQ ID NO: 582693 - DNA, 120 bp, Artificial Sequence
  ENSG00000172175_82 (sequence is synthesized)
ctgaaattgatgcaagaaaaagaaactggacttaatgtgttcttattggatatgtgtaggaaaaggtaagttttctaatctttattaaagaattgttggagttaaatatcgaccatgaca

SEQ ID NO: 582694 - DNA, 120 bp, Artificial Sequence
  ENSG00000172175_83 (sequence is synthesized)
aactagagaaacctgtgaaatgctaaaagccatttgcgtttgtgaattttagtttatacattgaaactggaagaacaaaactagaggaaaatacatttactccatgtatatctaattatt

SEQ ID NO: 582695 - DNA, 120 bp, Artificial Sequence
  ENSG00000172175_84 (sequence is synthesized)
ttaactcttcatatttgctatagaacacaaatgaagaactaaagggcatgggcatttactcacactacaggggattcaactctccagaatgcctttagatgactttaataatcactatag

SEQ ID NO: 582696 - DNA, 120 bp, Artificial Sequence
  ENSG00000172175_85 (sequence is synthesized)
ttattccctcaggaattaacaaaaccaacacccatggagttgggatctctgctcactagtcagtcctggtcttccagacatggaatgagtagccgaagcagatgtttggaggtttggatc

SEQ ID NO: 582697 - DNA, 120 bp, Artificial Sequence
  ENSG00000172175_86 (sequence is synthesized)
ccatttgtctgccattgcctttctaaggagtagaaccaatgactgttcctctagatttactatttttttgcttgctcagcatttaccaatcaaaatccaatgccagagttcaaatgcaac

SEQ ID NO: 582698 - DNA, 120 bp, Artificial Sequence
  ENSG00000172175_87 (sequence is synthesized)
tctagttttaaagctaacaaggagttagtgggttattttgggtagatatgtagctacctagatgaaaaattttgaatctataattttaaattatgtattctaaaaaactgttgtattttc

SEQ ID NO: 582699 - DNA, 120 bp, Artificial Sequence
  ENSG00000172175_88 (sequence is synthesized)
tcattatttatacccttttaagaatgctctttaacttttcatatttctatctgccctcctccgcctcccttaaatagaaatgactacgatgataccattccaatcttggatgcactaaaa

SEQ ID NO: 582700 - DNA, 79 bp, Artificial Sequence
  ENSG00000172175_89 (sequence is synthesized)
tgcgctgggattacaggtgtcaaggagcagaagcttttgaaatccagcattctggattggcaaatggaatctttatgaa

SEQ ID NO: 582701 - DNA, 120 bp, Artificial Sequence
  ENSG00000172179_0 (sequence is synthesized)
gtgagacttccagatcttctctggtgaagtgtgtttcctgcaacgatcacgaacatgaacatcaaaggatcgccatggaaagggtccctcctgctgctgctggtgtcaaacctgctcctg

SEQ ID NO: 582702 - DNA, 120 bp, Artificial Sequence
  ENSG00000172179_1 (sequence is synthesized)
tgccagagcgtggcccccttgcccatctgtcccggcggggctgcccgatgccaggtgacccttcgagacctgtttgaccgcgccgtcgtcctgtcccactacatccataacctctcctca

SEQ ID NO: 582703 - DNA, 120 bp, Artificial Sequence
  ENSG00000172179_2 (sequence is synthesized)
gaaatgttcagcgaattcgataaacggtatacccatggccgggggttcattaccaaggccatcaacagctgccacacttcttcccttgccacccccgaagacaaggagcaagcccaacag

SEQ ID NO: 582704 - DNA, 120 bp, Artificial Sequence
  ENSG00000172179_3 (sequence is synthesized)
gagcctctgtatcatctggtcacggaagtacgtggtatgcaagaagccccggaggctatcctatccaaagctgtagagattgaggagcaaaccaaacggcttctagagggcatggagctg

SEQ ID NO: 582705 - DNA, 120 bp, Artificial Sequence
  ENSG00000172179_4 (sequence is synthesized)
atagtcagccaggttcatcctgaaaccaaagaaaatgagatctaccctgtctggtcgggacttccatccctgcagatggctgatgaagagtctcgcctttctgcttattataacctgctc

SEQ ID NO: 582706 - DNA, 120 bp, Artificial Sequence
  ENSG00000172179_5 (sequence is synthesized)
cactgcctacgcagggattcacataaaatcgacaattatctcaagctcctgaagtgccgaatcatccacaacaacaactgctaagcccacatccatttcatctatttctgagaaggtcct

SEQ ID NO: 582707 - DNA, 120 bp, Artificial Sequence
  ENSG00000172179_6 (sequence is synthesized)
taatgatccgttccattgcaagcttcttttagttgtatctcttttgaatccatgcttgggtgtaacaggtctcctcttaaaaaataaaaactgactccttagagacatcaaaatctaaaa

SEQ ID NO: 582708 - DNA, 120 bp, Artificial Sequence
  ENSG00000172179_7 (sequence is synthesized)
atccttattctatatctcttggtatttagtgtaaaaattttaaaatctttacctagcaatcttgaggaagaaacttgataactgataatacatgagattgttacctaagtgaaatataat

SEQ ID NO: 582709 - DNA, 120 bp, Artificial Sequence
  ENSG00000172179_8 (sequence is synthesized)
cctatatattcaacaaactttagagaaataagataaattttaaagtaaatgacttctgtagttttatagatcctccaaaccaatctagtctcagatctcaccttcatcatttctctcatt

SEQ ID NO: 582710 - DNA, 120 bp, Artificial Sequence
  ENSG00000172179_9 (sequence is synthesized)
tccttttggcctaattaatcaaaatccttcctagaatgttcatttctggccagtatgtcttcctgaatatgaataagaaataaaataccatttgatgtttgaaattatgggggtaatctc

SEQ ID NO: 582711 - DNA, 120 bp, Artificial Sequence
  ENSG00000172183_0 (sequence is synthesized)
gcagtagctgagcagtggcagcagagaggcagacgtgagctgagggcgcagaggcaggcagcatctctgagggtccccaaggaacatggctgggagccgtgaggtggtggccatggactg

SEQ ID NO: 582712 - DNA, 120 bp, Artificial Sequence
  ENSG00000172183_1 (sequence is synthesized)
cgagatggtggggctggggccccaccgggagagtggcctggctcgttgcagcctcgtgaacgtccacggtgctgtgctgtacgacaagttcatccggcctgagggagagatcaccgatta

SEQ ID NO: 582713 - DNA, 120 bp, Artificial Sequence
  ENSG00000172183_2 (sequence is synthesized)
cagaacccgggtcagcggggtcacccctcagcacatggtgggggccacaccatttgccgtggccaggctagagatcctgcagctcctgaaaggcaagctggtggtgggtcatgacctgaa

SEQ ID NO: 582714 - DNA, 120 bp, Artificial Sequence
  ENSG00000172183_3 (sequence is synthesized)
gcacgacttccaggcactgaaagaggacatgagcggctacacaatctacgacacgtccactgacaggctgttgtggcgtgaggccaagctggaccactgcaggcgtgtctccctgcgggt

SEQ ID NO: 582715 - DNA, 120 bp, Artificial Sequence
  ENSG00000172183_4 (sequence is synthesized)
gctgagtgagcgcctcctacacaagagcatccagaacagcctgcttggacacagctcggtggaagatgcgagggcaacgatggagctctatcaaatctcccagagaatccgagcccgccg

SEQ ID NO: 582716 - DNA, 120 bp, Artificial Sequence
  ENSG00000172183_5 (sequence is synthesized)
agggctgccccgcctggctgtgtcagactgaagccccatccagcccgttccgcagggactagaggctttcggctttttgggacagcaactaccttgcttttggaaaatacatttttaata

SEQ ID NO: 582717 - DNA, 120 bp, Artificial Sequence
  ENSG00000172183_6 (sequence is synthesized)
tacgccatcactgggtcctcttcttattcttctctccaagctgggttaacagtagacaggacccatttctgtgtgatgttaggagggaatgaagtcttatgctggggaggtgggcaagta

SEQ ID NO: 582718 - DNA, 120 bp, Artificial Sequence
  ENSG00000172183_7 (sequence is synthesized)
tcaatttccttaatatcttgaatcctgtgggtccaaaatgtggcttggaaatctaagtagcatgtggcttaattactaatcccaccctttgctgttgcatcccagccctattcctggtgc

SEQ ID NO: 582719 - DNA, 120 bp, Artificial Sequence
  ENSG00000172183_8 (sequence is synthesized)
atttatgcccagagaggtggcattatttcctggggtggcattcagctcctcttgagttggtgccacagcatttgtgggctttgaagcaaaggtacaggaaatgtcaagggtgccaccccg

SEQ ID NO: 582720 - DNA, 120 bp, Artificial Sequence
  ENSG00000172183_9 (sequence is synthesized)
gcaaccttgagcaagtcacccctcctatttgtaaaatgaggaaggaaaggtaacaaactgtggagtcagagagaagtaggttggaatcctctttgtcatttagtagctgtttgacctaag

SEQ ID NO: 582721 - DNA, 120 bp, Artificial Sequence
  ENSG00000172183_10 (sequence is synthesized)
gtggtttactgaacttctcagtttctccatctgtaaaatgagaattctagcaactcgtagggtatttgtgagatgttgcaggcaaagcccccagcaccatgcctgtcctagcttaagcac

SEQ ID NO: 582722 - DNA, 120 bp, Artificial Sequence
  ENSG00000172183_11 (sequence is synthesized)
ccaccaggtgtcgataagtaattgttcttccctggactgcctgcacatctagggcaccccaggaagagtcaccgcactctgtttcggggctcggctctctgaggggagggcatcctgtat

SEQ ID NO: 582723 - DNA, 120 bp, Artificial Sequence
  ENSG00000172183_12 (sequence is synthesized)
ggggaggagggtctggaccagagctgtccctgatcgctagaatcaacggcagaattcttgttattttaataataattaataatttagtgcttccactaaataaaaatcattggaatggtg

SEQ ID NO: 582724 - DNA, 120 bp, Artificial Sequence
  ENSG00000172183_13 (sequence is synthesized)
tatggtcattacaggtggtcagctgtagctggatgtgtgccttgaaaggctgacaagtttgccctgagtgactcacctactgtcacctgatccaacaagatttgtgggcgtagcctgccg

SEQ ID NO: 582725 - DNA, 120 bp, Artificial Sequence
  ENSG00000172183_14 (sequence is synthesized)
ggcagacgtgagctgagggcgcagaggcaggcaggtgagagcgggagctggagcagcagctggggaggcagcgggaggggccttcccggtccccaggctgcggggcaggccagaggccct

SEQ ID NO: 582726 - DNA, 120 bp, Artificial Sequence
  ENSG00000172183_15 (sequence is synthesized)
cacaccatttgccgtggccaggctagaggtccccttcccatcctctccaacggcagctgagtgaaagcaagctgactggcctgtgtgaccagagcagggcaggctgtccatgtgggaggc

SEQ ID NO: 582727 - DNA, 120 bp, Artificial Sequence
  ENSG00000172183_16 (sequence is synthesized)
gaggcgaggaacgcggggctggggcagtcacagctgggcgcctgggctgctggaggcctggagtggtcgttcactcttctggctcagtgtggcagtggcaggcgggctctggattcatcc

SEQ ID NO: 582728 - DNA, 120 bp, Artificial Sequence
  ENSG00000172183_17 (sequence is synthesized)
cactggcttcaaggcctggctttgccactaactagccgtgtgactgtcccagttatcaaatggtgcttggcaaatcacaccaaaacttaccggttcaaacaatgtcaatacttatttcgc

SEQ ID NO: 582729 - DNA, 120 bp, Artificial Sequence
  ENSG00000172183_18 (sequence is synthesized)
tcggccacctgcagtttgggcaggtgctctgcagcaggacaggccgtcagttaaggcaccttgaaggctgggggctggaaccattggaaggtttgctcacccacctgtctggtggctggt

SEQ ID NO: 582730 - DNA, 120 bp, Artificial Sequence
  ENSG00000172183_19 (sequence is synthesized)
ctggtggctggtgctggcctgccttggacacatcactatctcggtggcttttccccgtggtctttccagcatggtggctttggggtggccagacatttatttatttatttatttattgag

SEQ ID NO: 582731 - DNA, 69 bp, Artificial Sequence
  ENSG00000172183_20 (sequence is synthesized)
cacttgcaatctatagccacggcgcatgggtaatttttgcatttttagtagagacagagtctcaccatg

SEQ ID NO: 582732 - DNA, 120 bp, Artificial Sequence
  ENSG00000172183_21 (sequence is synthesized)
gacaccgtgcctggctggtggccggacttcttatagaattgcggtcccagagagaagtcagaagtcatacaggccagcccatatgcaatgggaggggagtttgattccatcttttttaag

SEQ ID NO: 582733 - DNA, 120 bp, Artificial Sequence
  ENSG00000172183_22 (sequence is synthesized)
tcactcctctgcatttcagatatttcctttgtaaaactcagttaaatgcagtgctccctcctcactgttagttttctgtggctgccgtaaggaagccatcaacttagtgattcacagcaa

SEQ ID NO: 582734 - DNA, 120 bp, Artificial Sequence
  ENSG00000172183_23 (sequence is synthesized)
cacagatgtcttctcttacagttctgtagtttcgaagttcagcgtgggtctcactggtctaaaatcaaagtgtcagtggggctaggttccttctggatgctctggggaagaatccatttc

SEQ ID NO: 582735 - DNA, 120 bp, Artificial Sequence
  ENSG00000172183_24 (sequence is synthesized)
ctcgccctttctggcttctagaggctgcctgaataccttaactcacggcccctccctccatcttcaaagccagcaacagcctgttttcctcatgtggattcactctgacctccacatgta

SEQ ID NO: 582736 - DNA, 120 bp, Artificial Sequence
  ENSG00000172183_25 (sequence is synthesized)
aggaggcttgtgattatgttgggaccacatgggtaggccaggtgatctccccatttgaaggtcgactgattagcaatctaagttctgcccggaactttaattcctctttgccaggtaatg

SEQ ID NO: 582737 - DNA, 120 bp, Artificial Sequence
  ENSG00000172183_26 (sequence is synthesized)
cattcacagatcctggggactagggtgtggacatctttgggaggtcattattctgcctgccataatagaattgttgggaagattaaacaacataatatacatgacgtatgttgaggcacg

SEQ ID NO: 582738 - DNA, 120 bp, Artificial Sequence
  ENSG00000172183_27 (sequence is synthesized)
cttggcacctgggaaatactcaggatgtactaaccattgctcctacacagttcagctcctgaaggagtccaggtgggcttttggcacagaatgaaactatcaggtgtgaggagggtccta

SEQ ID NO: 582739 - DNA, 120 bp, Artificial Sequence
  ENSG00000172183_28 (sequence is synthesized)
gtgcaatctcttcttttcaaagatgatacatttgaagcccagggaggactgataatttgcccaaggtcacacagccagtcaaggagggattgctcccttgccagccccagccccacccag

SEQ ID NO: 582740 - DNA, 120 bp, Artificial Sequence
  ENSG00000172183_29 (sequence is synthesized)
ggcacagatgcagacagaagggaagtcatggtagcttgtgaacagggagaggtttcagctgtagccagcctggtagcccttgcacaggtgggagtgtcctgttggggccctgccacctgg

SEQ ID NO: 582741 - DNA, 120 bp, Artificial Sequence
  ENSG00000172183_30 (sequence is synthesized)
ccagatgaaggaggaaggcttcaatatccagatttgccccaggatcctgcagctcctgaaaggcaagctggtggtgggtcatgacctgaagcacgacttccaggcactgaaagaggacat

SEQ ID NO: 582742 - DNA, 120 bp, Artificial Sequence
  ENSG00000172183_31 (sequence is synthesized)
tataggcatgagccactgcgcctggctatgcaggcatttttcaaaggcccctcacctctccgtctcctcccagtaaggagtagtgagtgtgcccagccagcagccagcaatcaagtagcc

SEQ ID NO: 582743 - DNA, 120 bp, Artificial Sequence
  ENSG00000172183_32 (sequence is synthesized)
aatcaagtagcccatggtggccaggaggctccggggagtcccaagtccacccaggagtgctttaggccactgatgtgagtgggaccccccccccactccacccctttttatttattgtaa

SEQ ID NO: 582744 - DNA, 120 bp, Artificial Sequence
  ENSG00000172183_33 (sequence is synthesized)
tgtggcgacattacttttataatgtaagtgcttatgatcttctgacatctctgtgtctgaccattatatagaggggatatttagcaatgttgggagacatttctggttgtcacagtggcc

SEQ ID NO: 582745 - DNA, 120 bp, Artificial Sequence
  ENSG00000172183_34 (sequence is synthesized)
ggtatctagtgggtagagaccagagagctcccaaacatctcacaatgcccagggcagctccctcccctgccacgcacacataacaaagaagtatctggccccacatggcaacagtgctaa

SEQ ID NO: 582746 - DNA, 120 bp, Artificial Sequence
  ENSG00000172183_35 (sequence is synthesized)
ggctaagaaaccctggtctataagagagcgccacaaatcagactgtcagcacaggagggaatccatgcactggagactggcgtccagagaggggcagtgatttgcctaaggacatacagg

SEQ ID NO: 582747 - DNA, 120 bp, Artificial Sequence
  ENSG00000172183_36 (sequence is synthesized)
aagctatgatacaaatcactgctcagattcatgggtcccacctggcgagttaatgtttttcttcttcctttttaaaaaatctaacagtaatttttagtaacttgtaaatcagttttgtga

SEQ ID NO: 582748 - DNA, 120 bp, Artificial Sequence
  ENSG00000172183_37 (sequence is synthesized)
tttgccccagggtaagtggccttgtgggaaccaggcactagccggggggcggggacaccaggggagcttggcaggggacaagagcaaagaatggggctggagccactccagaaggtgata

SEQ ID NO: 582749 - DNA, 120 bp, Artificial Sequence
  ENSG00000172183_38 (sequence is synthesized)
gtaagggacctgtcctctgtaagaacaagattcttcagggccccttactcatagcctcctctcctggcagccaagaatgaatgaatgggtacgtgaactagtgtataatggatgaatgaa

SEQ ID NO: 582750 - DNA, 120 bp, Artificial Sequence
  ENSG00000172183_39 (sequence is synthesized)
tgcatggtagaggcagcaggctctggactgctcagcgggattcagtgcagagatgtgcagacttgttagatgggaagaatcccctgaaacagttgctgacacccctccctggatatttca

SEQ ID NO: 582751 - DNA, 120 bp, Artificial Sequence
  ENSG00000172183_40 (sequence is synthesized)
attcagtaggtctgtgtagggcctggccctcctggatttttggatcaggcacatctgggaaatacttggagtagagtggaaacacagtggaaggtgtgtgcaggcagacagccgcacctg

SEQ ID NO: 582752 - DNA, 120 bp, Artificial Sequence
  ENSG00000172183_41 (sequence is synthesized)
gtctggcactcccctgcttgtgacctgggtgcacaccgccctgcgccccgctttgctggcgggtcagatggtatggaagtcaccgccttgcaccgttatcattgtgtgcctggtagtgcc

SEQ ID NO: 582753 - DNA, 120 bp, Artificial Sequence
  ENSG00000172183_42 (sequence is synthesized)
ctgtcccttggtccttgtgctaataataacaactacagtaacaatgatggggtcaggtggatccagacacggcactgcagctttcagctgactagctgtgtgacttgggcaagcccctta

SEQ ID NO: 582754 - DNA, 120 bp, Artificial Sequence
  ENSG00000172183_43 (sequence is synthesized)
atctctctgatctcgggctccctcctctgtaaaatggaattaagaataacctcattgaggagcttcctgaggaggtaaggaaagtgcctggcacagtgccaggctgctaagagatcaata

SEQ ID NO: 582755 - DNA, 120 bp, Artificial Sequence
  ENSG00000172183_44 (sequence is synthesized)
aatgtcccatcccccagccccaccccagttctttccaggaatttgagagactcctccccctgtgtttgaaagtggcaaagtctggcacacttgcctcatgacactgactcagggcaggtc

SEQ ID NO: 582756 - DNA, 120 bp, Artificial Sequence
  ENSG00000172183_45 (sequence is synthesized)
ctgtggccagcaggtcacacagccccgaggccagcctgccagtgcctttctccgactcctgggctccagcaggtgcccgactccttcccttttcagacctgcctcagtctgtggagccct

SEQ ID NO: 582757 - DNA, 120 bp, Artificial Sequence
  ENSG00000172183_46 (sequence is synthesized)
ggctgctaaagggccactcaagcctcaccagtctgggccctcaccttacaaatgggaaaactgaagcccagagagggtctttgacatccctgaggtcacacagcaagttccagcatctct

SEQ ID NO: 582758 - DNA, 120 bp, Artificial Sequence
  ENSG00000172183_47 (sequence is synthesized)
tccttcccagaatctttgtcccaaagagtggtgtctctttgctaaatagatggttctgttctttcccttcttcctcttctttcctcggcttgtcctctccctcttattctatttgtctcg

SEQ ID NO: 582759 - DNA, 120 bp, Artificial Sequence
  ENSG00000172183_48 (sequence is synthesized)
tggtgagtcacatagtgcctcatgtagacccccacttcccctctccagactctcaggctcgggaagtgatgggtttcctgggaatccacaccatgatgactcgtaccttctacgtctgtg

SEQ ID NO: 582760 - DNA, 120 bp, Artificial Sequence
  ENSG00000172183_49 (sequence is synthesized)
cccagctgtggctgcctctgggatggtggatgagttccttcagggctttgtgtgaactgggcctgagccaagcccctagatggggaaaacaggccacattgttcaggagcacaaaggatg

SEQ ID NO: 582761 - DNA, 120 bp, Artificial Sequence
  ENSG00000172183_50 (sequence is synthesized)
ttagcaagaaaagacacatgacccatggccgcccacacacccacatctctccacgccccgtgccatttctgcccgccgctgcgtgctgggtggtttcctctgcacagagtttcccttgag

SEQ ID NO: 582762 - DNA, 120 bp, Artificial Sequence
  ENSG00000172183_51 (sequence is synthesized)
gcagcgccccttcattctccagcacactctccccagtcctctaagtcgagcgtgagctctgtccagagaaggcctccaaccagaccatgtggaccgcggggcaggctggtgacactgcct

SEQ ID NO: 582763 - DNA, 120 bp, Artificial Sequence
  ENSG00000172183_52 (sequence is synthesized)
gttgacagtggatggacagactgcttcccgcatagtgaccctgggcaagtcacatctcctctctgagcctcagtctcctgtggttgccaggggagaacatgtaaaagggaacacatgatg

SEQ ID NO: 582764 - DNA, 120 bp, Artificial Sequence
  ENSG00000172183_53 (sequence is synthesized)
ttccaggaggccgctggctatctagaaggagaagcaggctacggggaaggtgttaggcaccagaaggctctttcctggtgtacaggctaaggtcgtgggctacatgcagagaaggagacg

SEQ ID NO: 582765 - DNA, 120 bp, Artificial Sequence
  ENSG00000172188_0 (sequence is synthesized)
tggtttcttcacatcaactgaaacaatgcagcaaaataacagtgtgcctgaattcatactgttaggattaacacaggatcccttgaggcagaaaatagtgtttgtaatcttcttaatttt

SEQ ID NO: 582766 - DNA, 120 bp, Artificial Sequence
  ENSG00000172188_1 (sequence is synthesized)
ctatatgggaactgtggtggggaatatgctcattattgtgaccatcaagtccagccggacactaggaagccccatgtacttctttctattttatttgtcctttgcagattcttgcttttc

SEQ ID NO: 582767 - DNA, 120 bp, Artificial Sequence
  ENSG00000172188_2 (sequence is synthesized)
aacttccacagcccctagattaattgtggatgctctctctgaaaagaaaattataacctacaatgagtgcatgacacaagtctttgcactacatttatttggctgcatggagatctttgt

SEQ ID NO: 582768 - DNA, 120 bp, Artificial Sequence
  ENSG00000172188_3 (sequence is synthesized)
cctcattctcatggctgttgatcgctatgtggccatctgtaagcccttgcgttacccaaccatcatgagccagcaggtctgcatcatcctgattgttcttgcctggatagggtctttaat

SEQ ID NO: 582769 - DNA, 120 bp, Artificial Sequence
  ENSG00000172188_4 (sequence is synthesized)
cccttgttgaaacttgcctgcatggacacttacatgatcaacctgctgttggtgtctaacagtggggcaatttgctcaagtagtttcatgattttgataatttcatatattgtcatcttg

SEQ ID NO: 582770 - DNA, 120 bp, Artificial Sequence
  ENSG00000172188_5 (sequence is synthesized)
cattcactgagaaaccacagtgccaaagggaagaaaaaggctctctccgcttgcacgtctcacataattgtagtcatcttattctttggcccatgtatattcatatatacacgccccccg

SEQ ID NO: 582771 - DNA, 120 bp, Artificial Sequence
  ENSG00000172188_6 (sequence is synthesized)
accactttccccatggacaagatggtggcagtattttatactattggaacaccctttctcaatccactcatctacacactgaggaatgcagaagtgaaaaatgccatgagaaagttatgg

SEQ ID NO: 582772 - DNA, 120 bp, Artificial Sequence
  ENSG00000172188_7 (sequence is synthesized)
catggcaaaattatttcagaaaacaaaggataaattgagggcctgacctgattactttttcagtcaaatcatgatttaacagagtaagtatagacagcaaataggaaagtacctgaatgc

SEQ ID NO: 582773 - DNA, 120 bp, Artificial Sequence
  ENSG00000172188_8 (sequence is synthesized)
accaaagagagcctcgtatcagaatagttatatattaatttataagcacttttaaaattctcatttgaataagtagcctccaaattatattgggaagaaaagagggcaattgaacatcct

SEQ ID NO: 582774 - DNA, 120 bp, Artificial Sequence
  ENSG00000172188_9 (sequence is synthesized)
aatatagcatactctcttatcaaagctggtaaggtctgtataggagaataacttagtcgtatctaacattcagagaaggtggatctgatcaatacaacagccaggaactaacatatacaa

SEQ ID NO: 582775 - DNA, 120 bp, Artificial Sequence
  ENSG00000172188_10 (sequence is synthesized)
gacactggtgggaggtggggaaattcaaggacttttctagaagtgctttacaatctaaagtgaaaagatggaaataaaaatcatgcacagaatttcttgatggaaatgggcactaccaga

SEQ ID NO: 582776 - DNA, 120 bp, Artificial Sequence
  ENSG00000172188_11 (sequence is synthesized)
gccctgagtttcaacactactgctatatctgacttactcaaatttgtgaggcttaatgtagccctaagaataccactagaattcctgtctacaacaagacagttgtgatggctcagggat

SEQ ID NO: 582777 - DNA, 120 bp, Artificial Sequence
  ENSG00000172188_12 (sequence is synthesized)
atgccatcacaaggtgaataacaacccatctcccaagcctcagtgtctacttgtctcttaagaaaactttatgaagaacccagaaaaataaggaaagatggacgaatttaactttggaca

SEQ ID NO: 582778 - DNA, 120 bp, Artificial Sequence
  ENSG00000172188_13 (sequence is synthesized)
gggttcctatgttttctagttaacaggagttgtgactaccaagacattgtcttttgtgccagaactaggtagaatatagattaattcaggtgattacctaccagtagtcttttcttttca

SEQ ID NO: 582779 - DNA, 120 bp, Artificial Sequence
  ENSG00000172188_14 (sequence is synthesized)
gattatcttcctttccagccatgcattttctaaagtgtaagcctgactatctctatgcactctaatctaatgcatctgattttcttacttctttcctgtgcttttgaccacagactgata

SEQ ID NO: 582780 - DNA, 120 bp, Artificial Sequence
  ENSG00000172188_15 (sequence is synthesized)
aactccctgaaatcttcaatttggctcttccttttcctaagagcccaattctgccattgctggttgtgaactacacatcacaactctgtctacactctggtttaataaaaagaaagacat

SEQ ID NO: 582781 - DNA, 120 bp, Artificial Sequence
  ENSG00000172188_16 (sequence is synthesized)
ttatacaatcacaagtgttcaaatttgtgagcaccaacaaagaaatgtcaaattccttccctaatgcatttgcaataaggtatcaagcttcctcctgaacacttctagggaaaaggaact

SEQ ID NO: 582782 - DNA, 120 bp, Artificial Sequence
  ENSG00000172188_17 (sequence is synthesized)
aactcagtatatcaagatgcccatttacattttatcactactttgtatttaaaaagttctgtatttttgagtcagaggctaatatactggagatacaacatatttcctgagcctgaagtg

SEQ ID NO: 582783 - DNA, 120 bp, Artificial Sequence
  ENSG00000172188_18 (sequence is synthesized)
cagaagggtagaacatggttgaaaccaaaaatggtatgatctattgtgtttaaagttgggtgatgtcaatgaaataaataaaattatcacaggaattcagaaaacactcaggacacttgt

SEQ ID NO: 582784 - DNA, 120 bp, Artificial Sequence
  ENSG00000172188_19 (sequence is synthesized)
ctctagtgggttctccctaaacagggaacccactactgctataggaagttacatctctatttattctgtcctaataattggggctgcatagaatcacaagttagaattggcaatggaatt

SEQ ID NO: 582785 - DNA, 120 bp, Artificial Sequence
  ENSG00000172188_20 (sequence is synthesized)
ttcatgcccagagtgaggacagcagataaaaagcggcactttagatattcatattatggacttttaatattcatctgtttcagtgtaataagtgtaccacatctttaataactgttgaca

SEQ ID NO: 582786 - DNA, 120 bp, Artificial Sequence
  ENSG00000172197_0 (sequence is synthesized)
ccctcctacggcgcccgtggctgcagcgccagcgccaaagccaagtttgcgcctcgagagtttgcgcctcgagagtttgcgccggttcgcattccccggcctcccgttcgctcccccgcg

SEQ ID NO: 582787 - DNA, 120 bp, Artificial Sequence
  ENSG00000172197_1 (sequence is synthesized)
aaccaggcggccgtgcgcctctcggggcaaccacccaagagcacccgggcgggaggacgccgagcagggggtgttgcgggctgggacaggggcagccacctcccgaagatgcaggatggc

SEQ ID NO: 582788 - DNA, 120 bp, Artificial Sequence
  ENSG00000172197_2 (sequence is synthesized)
agcagagccgcagccgtccagcctttcctaccgcaccacgggctccacctacctgcacccgctcagcgagctcctgggcatcccgctggaccaggtgaattttgtggtatgccagcttgt

SEQ ID NO: 582789 - DNA, 120 bp, Artificial Sequence
  ENSG00000172197_3 (sequence is synthesized)
tgctctgtttgctgctttctggtttcgcatctacttacgtcctggtacaaccagctctgatgtccggcatgcggttgccaccatttttggcatctattttgtcatcttttgtttcggctg

SEQ ID NO: 582790 - DNA, 120 bp, Artificial Sequence
  ENSG00000172197_4 (sequence is synthesized)
gtactctgtgcatctttttgtgctggtgttaatgtgctatgcaatcatggtcactgctagtgtatccaatattcacagatattccttttttgtagcaatgggatatcttacaatatgcca

SEQ ID NO: 582791 - DNA, 120 bp, Artificial Sequence
  ENSG00000172197_5 (sequence is synthesized)
catcagccgaatatacatcttccactatggaattctcactacggatttttctgggcctctgatgattgtcactcagaagatcacaaccttggcattccaggttcatgatggattaggtcg

SEQ ID NO: 582792 - DNA, 120 bp, Artificial Sequence
  ENSG00000172197_6 (sequence is synthesized)
aagagctgaagacctttctgctgaacaacatcgacttgctatcaaagtgaaaccctcttttttggaatacttaagttaccttctcaatttcatgagtgtcatagctggtccttgtaacaa

SEQ ID NO: 582793 - DNA, 120 bp, Artificial Sequence
  ENSG00000172197_7 (sequence is synthesized)
tttcaaggactacatagccttcattgaggggaagcatatacacatgaagttgctggaggtgaactggaagcgaaaaggtttccacagcttgccagaaccttctcccacaggagctgtgat

SEQ ID NO: 582794 - DNA, 120 bp, Artificial Sequence
  ENSG00000172197_8 (sequence is synthesized)
acacaagttgggcatcaccttggtgtctctccttttgtttttgacgctaacgaagacctttcctgtcacctgccttgtggatgactggtttgtccataaagcaagctttccggctcgact

SEQ ID NO: 582795 - DNA, 120 bp, Artificial Sequence
  ENSG00000172197_9 (sequence is synthesized)
ctgctacttatatgttgtcatgcaagcctcaaagcccaagtattactttgcatggacattagctgatgcagtgaataacgcagctggctttgggttcagcggagtggataagaatgggaa

SEQ ID NO: 582796 - DNA, 120 bp, Artificial Sequence
  ENSG00000172197_10 (sequence is synthesized)
tttctgttgggatctgctttcgaacctaaacatctggaaaattgagactgccacaagtttcaaaatgtacttggaaaactggaatattcagacagctacttggctaaagtgtgtgtgcta

SEQ ID NO: 582797 - DNA, 120 bp, Artificial Sequence
  ENSG00000172197_11 (sequence is synthesized)
tcagcgggttccatggtaccccacggtgctaaccttcatcctgtctgctttgtggcatggtgtctaccctggatactattttaccttcttaactggaattcttgtcacattagcagctag

SEQ ID NO: 582798 - DNA, 120 bp, Artificial Sequence
  ENSG00000172197_12 (sequence is synthesized)
agcggtcaggaacaactacagacattacttcctttcttcaagagctctcaaggctgtgtatgatgcaggcacctgggccgtcactcagctggctgtctcttacacggtagcaccctttgt

SEQ ID NO: 582799 - DNA, 120 bp, Artificial Sequence
  ENSG00000172197_13 (sequence is synthesized)
gatgttggcagttgaaccgaccatcagcttatacaagtccatgtacttttatttgcacatcataagtctcctgataatactatttctgccaatgaaaccacaagctcatacgcaaaggcg

SEQ ID NO: 582800 - DNA, 120 bp, Artificial Sequence
  ENSG00000172197_14 (sequence is synthesized)
gcctcagactctgaactctattaataagagaaaaacagattgatacctccaagagaagcggaacaagcaaaactgcagaacgttcgaaagatgagatgacaaggcttcaagggctcctcc

SEQ ID NO: 582801 - DNA, 120 bp, Artificial Sequence
  ENSG00000172197_15 (sequence is synthesized)
cgaaagatgagatgacaaggcttcaagggctcctccggtggcttagaggcgatgtttacatgcatctttattttgttcttttttaaagtgcagggagtattttttttttttttttttttt

SEQ ID NO: 582802 - DNA, 120 bp, Artificial Sequence
  ENSG00000172197_16 (sequence is synthesized)
gcgcccggccgggagtatttttataaagcctttttgtacagattaatcggccatgtccaggttattggttttgatattttataggacatttgagtggtgtggcgatgtgtagagaatgtg

SEQ ID NO: 582803 - DNA, 120 bp, Artificial Sequence
  ENSG00000172197_17 (sequence is synthesized)
ccagagctgcagagacagtccattctgggctgctggctttttgcccttcctgcatgatttccagctactgtgacctggatgctgggaacccaggcatcggctccaaaaattagaaggcga

SEQ ID NO: 582804 - DNA, 120 bp, Artificial Sequence
  ENSG00000172197_18 (sequence is synthesized)
gtgctgagaagacttgtcacaggtttctcaaatcagaatatactcagtcatagtggttccctgggaagccccagaccctttgacttgtgacattactggtttgcagacataataactaca

SEQ ID NO: 582805 - DNA, 120 bp, Artificial Sequence
  ENSG00000172197_19 (sequence is synthesized)
ctcagaggaccatggaggcagagggatcatggtttcagggcactgaaaactctacgagccaagaggactagtgcatggactgaaagtcaggcatgccctcaaataggctgtattttcttt

SEQ ID NO: 582806 - DNA, 120 bp, Artificial Sequence
  ENSG00000172197_20 (sequence is synthesized)
ccaggaatgtaacctttcccctttttcttctgacctgagccaagattggaaatcagaaagtctcctgtacatggagctgaagaggggctgctgttttccgaatgttttccatttcacagg

SEQ ID NO: 582807 - DNA, 120 bp, Artificial Sequence
  ENSG00000172197_21 (sequence is synthesized)
cgccacctgcttgcccggggttggtcttgagaagacacccaaatgttcatgcctcagaaaggcagcagaatgccttttaggaaatttttttaaagtaatttgaagttatatagaagtttg

SEQ ID NO: 582808 - DNA, 120 bp, Artificial Sequence
  ENSG00000172197_22 (sequence is synthesized)
gtaagaagaagcagttgtttctctcttttctccctcatttcatggaggtgttaatgatcatggctggccgtgatgtacacatgggctgattttcattttttcagtttcatagctgagaaa

SEQ ID NO: 582809 - DNA, 120 bp, Artificial Sequence
  ENSG00000172197_23 (sequence is synthesized)
ttcagctttgttttagttgaatcatcatattggaaagcagacattgaaagttttcttttctatctttgttatgaatgtgctatggccccttttggagacttctattgggtaatattctat

SEQ ID NO: 582810 - DNA, 120 bp, Artificial Sequence
  ENSG00000172197_24 (sequence is synthesized)
gtgagagaaggaaacttggtattaaatgttgtggaaaataataatgatgataataataaagtatatgctgcaatggtgtactgccaatcagattgcttgggagaagaaaatttattcaaa

SEQ ID NO: 582811 - DNA, 120 bp, Artificial Sequence
  ENSG00000172197_25 (sequence is synthesized)
tccaacgataaaaaattaatttcttattgaataaacagtatgttcccatataaaagaaatgtttctgatgggaataattgctttttgtctgtgtcaatagagacacaggtccataaggtg

SEQ ID NO: 582812 - DNA, 120 bp, Artificial Sequence
  ENSG00000172197_26 (sequence is synthesized)
tcctactgctgcttctcttaggatagtgaaatgtgaatgtgatgtgcctgttcctctacagcatgtaaacagtcctggtgctgggggagagtactagaacccaaactttagtccttattt

SEQ ID NO: 582813 - DNA, 120 bp, Artificial Sequence
  ENSG00000172197_27 (sequence is synthesized)
gggacagtggaagttaagaagtagtagatgtgagctagtgcatgagtctcaccccactttaacaaggaaatcttggggcaaccctacttcgctgtcccaggaagaatcttagatagtggg

SEQ ID NO: 582814 - DNA, 120 bp, Artificial Sequence
  ENSG00000172197_28 (sequence is synthesized)
taggggaagggggttgtaggtatctaaaatctgtcagagtttgtctccaccaagaatagtttgaggtacgagaccaagaaaaatgtacatcttgcaaactagcaaaaatggtaaatatta

SEQ ID NO: 582815 - DNA, 120 bp, Artificial Sequence
  ENSG00000172197_29 (sequence is synthesized)
ccattggtgtggagtatgtggaataatcatattacagtgaagtctttgaatttacaatgtgattgatgatcaggtttcactgtatgtaatgtaagtatcctcatgtctgaaagaagaact

SEQ ID NO: 582816 - DNA, 120 bp, Artificial Sequence
  ENSG00000172197_30 (sequence is synthesized)
tggtaatgagagcagaggtgtctgctttggtgaccagctgccctggtttgccaaggactctctcaagccctcagtcctgggcaagctggggccattggtcccactagtgactgcccagaa

SEQ ID NO: 582817 - DNA, 120 bp, Artificial Sequence
  ENSG00000172197_31 (sequence is synthesized)
ttgattactccttatgggatgaggagaagtcaaacctctaggagttgagcttatggatgctatatgtcagacttggtgttaggccctgggacacaaacatgaggctttattctgtataaa

SEQ ID NO: 582818 - DNA, 120 bp, Artificial Sequence
  ENSG00000172197_32 (sequence is synthesized)
aagaacaacacataggagactgattagcatcctttttcttctgaaaaccacttacccatagaaaaagatttcaactgaggaccaacatttagacggaaggttgggactgtttttattacc

SEQ ID NO: 582819 - DNA, 120 bp, Artificial Sequence
  ENSG00000172197_33 (sequence is synthesized)
ttagatttccaagttgtcctaaatataagatgcagttcataaatacttattggaatgtgagctttcagttgaaaataaatacactttctggttttgtttttgaaaaagccaaatctaaaa

SEQ ID NO: 582820 - DNA, 120 bp, Artificial Sequence
  ENSG00000172199_0 (sequence is synthesized)
atggctcacatcaattgcacccaggcgacagagtttattcttgtgggcctcacagaccatcaggagttgaagatgcccctctttgtgctattcttatccatctacctcttcacagtggta

SEQ ID NO: 582821 - DNA, 120 bp, Artificial Sequence
  ENSG00000172199_1 (sequence is synthesized)
ggcaacttgggtttgatcctactcattagagcggatacaagtctcaacacaccaatgtacttctttcttagcaacctagcttttgtggatttctgttactcttctgtcattacacccaaa

SEQ ID NO: 582822 - DNA, 120 bp, Artificial Sequence
  ENSG00000172199_2 (sequence is synthesized)
atgcttgggaatttcttgtacaaacaaaatgttatatcctttgatgcatgtgctactcaactgggctgctttctcaccttcatgatatcagaatccttgctactggcttccatggcctat

SEQ ID NO: 582823 - DNA, 120 bp, Artificial Sequence
  ENSG00000172199_3 (sequence is synthesized)
tatagcttcctaatggcactatttcacaccatcctcaccttccgcctctcctattgccactccaacattgtcaaccatttctattgtgatgacatgcctctcctcaggctaacttgctca

SEQ ID NO: 582824 - DNA, 120 bp, Artificial Sequence
  ENSG00000172199_4 (sequence is synthesized)
gacactcgcttcaaacagctctggatctttgcctgtgctggtatcatgttcatttcctcccttctgattgtctttgtctcctacatgttcatcatttctgccatcctgaggatgcattca

SEQ ID NO: 582825 - DNA, 120 bp, Artificial Sequence
  ENSG00000172199_5 (sequence is synthesized)
gctgagggaagacagaaggctttctcgacgtgtggctctcacatgctggcagtcaccatattctatgggaccctcatttttatgtacttacagcctagctctagccatgccctggacaca

SEQ ID NO: 582826 - DNA, 120 bp, Artificial Sequence
  ENSG00000172199_6 (sequence is synthesized)
gacaagatggcctctgtcttctacacagtgatcattcccatgttgaatcccttaatctatagcctccagaataaggaggtgaaagaagctctgaagaaaatcattatcaataaaaactag

SEQ ID NO: 582827 - DNA, 120 bp, Artificial Sequence
  ENSG00000172201_0 (sequence is synthesized)
gagagcgtagtggaggaggcgcggttgtgagtagtaccgggagtggggtgatcccgggctaggggagcgcggcggccgcgatcgggcttagtcggagctccgaagggagtgactaggaca

SEQ ID NO: 582828 - DNA, 120 bp, Artificial Sequence
  ENSG00000172201_1 (sequence is synthesized)
cccgggtgggctacttttcttccggtgcttttgctttttttttcctttgggctcgggctgagtgtcgcccactgagcaaagattccctcgtaaaacccagagcgaccctcccgtcaattg

SEQ ID NO: 582829 - DNA, 120 bp, Artificial Sequence
  ENSG00000172201_2 (sequence is synthesized)
gtcaattgttgggctcgggagtgtcgcggtgccccgagcgcgccgggcgcggaggcaaagggagcggagccggccgcggacggggcccggagcttgcctgcctccctcgctcgccccagc

SEQ ID NO: 582830 - DNA, 120 bp, Artificial Sequence
  ENSG00000172201_3 (sequence is synthesized)
cttgcctgcctccctcgctcgccccagcgggttcgctcgcgtagagcgcagggcgcgcgcgatgaaggcggtgagcccggtgcgcccctcgggccgcaaggcgccgtcgggctgcggcgg

SEQ ID NO: 582831 - DNA, 120 bp, Artificial Sequence
  ENSG00000172201_4 (sequence is synthesized)
ccacagcctgggtggctccgcagccgcggcggcggcggcggcggcagcgcgctgtaaggcggccgaggcggcggccgacgagccggcgctgtgcctgcagtgcgatatgaacgactgcta

SEQ ID NO: 582832 - DNA, 120 bp, Artificial Sequence
  ENSG00000172201_5 (sequence is synthesized)
tagccgcctgcggaggctggtgcccaccatcccgcccaacaagaaagtcagcaaagtggagatcctgcagcacgttatcgactacatcctggacctgcagctggcgctggagacgcaccc

SEQ ID NO: 582833 - DNA, 120 bp, Artificial Sequence
  ENSG00000172201_6 (sequence is synthesized)
ctgctgaggcagccaccaccgcccgcgccgccacaccacccggccgggacctgtccagccgcgccgccgcggaccccgctcactgcgctcaacaccgacccggccggcgcggtgaacaag

SEQ ID NO: 582834 - DNA, 120 bp, Artificial Sequence
  ENSG00000172201_7 (sequence is synthesized)
caagcagggcgacagcattctgtgccgctgagccgcgctgtccaggtgtgcggccgcctgagcccgagccaggagcactagagagggagggggaagagcagaagttagagaaaaaaagcc

SEQ ID NO: 582835 - DNA, 120 bp, Artificial Sequence
  ENSG00000172201_8 (sequence is synthesized)
accggaggaaaggaaaaaacatcggccaacctagaaacgttttcattcgtcattccaagagagagagaggaaagaaaaatacaactttcattctttctttgcacgttcataaacattcta

SEQ ID NO: 582836 - DNA, 120 bp, Artificial Sequence
  ENSG00000172201_9 (sequence is synthesized)
catacgtattctcttttgtctcttcatttataactgctgtgaattgtacatttctgtgttttttggaggtgcagttaaacttttaagcttaagtgtgacaggactgataaatagaagatc

SEQ ID NO: 582837 - DNA, 120 bp, Artificial Sequence
  ENSG00000172201_10 (sequence is synthesized)
aagagtagatccgactttagaagcctactttgtgaccaaggagctcaatttttgttttgaagctttactaatctaccagagcattgtagatattttttttttacatctattgtttaaaat

SEQ ID NO: 582838 - DNA, 120 bp, Artificial Sequence
  ENSG00000172201_11 (sequence is synthesized)
agatgattataacggggcagagaactttcttttctctgcaagaatgttacatattgtatagataaatgagtgacatttcataccatgtatatatagagatgttctataagtgtgagaaag

SEQ ID NO: 582839 - DNA, 120 bp, Artificial Sequence
  ENSG00000172201_12 (sequence is synthesized)
aagatatttttaattaaatatttttttgtaaatattatgtgtgtgtttttttttaatctatgggaatatttcttttggaaaatcatttttcagctcaattacagagctcttgatatcttg

SEQ ID NO: 582840 - DNA, 120 bp, Artificial Sequence
  ENSG00000172201_13 (sequence is synthesized)
gctcaattacagagctcttgatatcttgaatgtcttttctgtttggcctggctcttaatttgcttttgttttgcccagtatagactcggaagtaacagttatagctagtggtcttgcatg

SEQ ID NO: 582841 - DNA, 120 bp, Artificial Sequence
  ENSG00000172201_14 (sequence is synthesized)
attgcatgagatgtttaatcacaaattaaacttgttctgagtccattcaaatgtgtttttttaaatgtagattgaaatctttgtatttgaagcatacatgttgaaaatacaccttatcag

SEQ ID NO: 582842 - DNA, 120 bp, Artificial Sequence
  ENSG00000172201_15 (sequence is synthesized)
tttttaagtacagggttttatagtgtaatatatacagagtaagtgtttgtttttgtttttcaactgaggtcaaaatggattctgaatgattttgcatatgggatgaggaaatgcttggat

SEQ ID NO: 582843 - DNA, 120 bp, Artificial Sequence
  ENSG00000172201_16 (sequence is synthesized)
aaagtgaaaaaaaattgcttattactcttcattttacactaaagcttaatgtcactaagtttcatgtctgtacagattatttaaatcatggaaatgaaaaaaatgttctctgcttgctac

SEQ ID NO: 582844 - DNA, 120 bp, Artificial Sequence
  ENSG00000172201_17 (sequence is synthesized)
caaaggacaaactcttggaaatgaacactttctgctttccttcctccaaagaattaataggcaacagtgggagaaaaaaaaggcataatggcaaatccttcaagcagggataaaagtcga

SEQ ID NO: 582845 - DNA, 120 bp, Artificial Sequence
  ENSG00000172201_18 (sequence is synthesized)
tcttcaaacattaacttaagcagaccaaaaattctgatgaccgcatctagattatttttttataaaaatgattttcactatagctatgttacgctaagctactgtccaatctcttgtgat

SEQ ID NO: 582846 - DNA, 120 bp, Artificial Sequence
  ENSG00000172201_19 (sequence is synthesized)
gtgtaacttttacatgtgaatattaaagtagatttctctgtcttgtactgtgatttctggtctcatttctttaaaaccttactcttatttttcttttaaggctcttttttctccttaagg

SEQ ID NO: 582847 - DNA, 120 bp, Artificial Sequence
  ENSG00000172201_20 (sequence is synthesized)
aaggtaatattttctaggttagataggactatcagggtttgtgaacattatgcatttaatgttatgggtactttacacacaagttagatggaatttttagagtgaaagaattaagtagga

SEQ ID NO: 582848 - DNA, 120 bp, Artificial Sequence
  ENSG00000172201_21 (sequence is synthesized)
tttaattgggtgctttgtaaatagtcaactgtgtgtataacgtggtctgtttgatttttaaaaggaaaggatttgtttcagattatacaagaataaaagtattatagacccaagggactt

SEQ ID NO: 582849 - DNA, 120 bp, Artificial Sequence
  ENSG00000172201_22 (sequence is synthesized)
cttatgaggtcaaattcagatatttatatgaatatgaaataccatggtccctagtagtcagttgaagtggcaatgtctaaacagaaatgaacaaaactaatgctagcaggttaaaatcaa

SEQ ID NO: 582850 - DNA, 120 bp, Artificial Sequence
  ENSG00000172201_23 (sequence is synthesized)
tcaaaatgtttaaaaattgattctgtcctcagcatgttatttcctcagctctgataatttactggtcttgagtattttgagaatttgatgttgaacgttataaagtcaaagaactgcttg

SEQ ID NO: 582851 - DNA, 120 bp, Artificial Sequence
  ENSG00000172201_24 (sequence is synthesized)
tttagatgaggtttatttttatttttgatattattcattcttgtcacacatcaagaagaaaacactagagtgctgctggaattccaaatctgaagaattctaacgactgcattctttgtt

SEQ ID NO: 582852 - DNA, 120 bp, Artificial Sequence
  ENSG00000172201_25 (sequence is synthesized)
attaaaaagggcacaatccttcctttttatttggcagtttaatttcagtaggaagcatgtcacatgtgcactgttggttagaattatgcatctgtcatgcctgactgctgaaccctacct

SEQ ID NO: 582853 - DNA, 120 bp, Artificial Sequence
  ENSG00000172201_26 (sequence is synthesized)
aagccttttggcgcagtttaaaacttatactggtggactgtgaacctcaaaacaaatgggtatttttgggttttgaggatagatgttactccttaaagtttgtatttggggcatgaaaaa

SEQ ID NO: 582854 - DNA, 120 bp, Artificial Sequence
  ENSG00000172201_27 (sequence is synthesized)
ctactgaaagaagaaaagtgctacagatactacatttcaaagagttggcattttccctttggccactcaagcagcatttgatgtatctaaagaaacaaagtcattgtttattttttaaaa

SEQ ID NO: 582855 - DNA, 120 bp, Artificial Sequence
  ENSG00000172201_28 (sequence is synthesized)
aattatatgcagttgtacaagatactacattccattgaaatgttggctatgtcctaaccaggcaaccagataacaaaaacattttgagtcttttatctaggtagttctaattattcagct

SEQ ID NO: 582856 - DNA, 120 bp, Artificial Sequence
  ENSG00000172201_29 (sequence is synthesized)
acttagtttaacaaaggaaaatatcctgacttctctcatttcatttgtagacttttcattgtataggcacaaccaaagagtcagactggtttaaaactccagaaggaaaaaaagtatccc

SEQ ID NO: 582857 - DNA, 120 bp, Artificial Sequence
  ENSG00000172201_30 (sequence is synthesized)
acacagtggatgttgtttctaagaatgctacaaaatcctgacatctcagacatctcaatgttaaaggaagaaaaaaaataccttttcatttcaaagaactaatatactttgatattgtgt

SEQ ID NO: 582858 - DNA, 120 bp, Artificial Sequence
  ENSG00000172201_31 (sequence is synthesized)
aaaccttactcaagtttattgtcaagctttaactgcctttttagaactttttaaaatttcgagcccacaaatctattgtattagttgccttctataacaataaatcttcactgagcaaaa

SEQ ID NO: 582859 - DNA, 120 bp, Artificial Sequence
  ENSG00000172208_0 (sequence is synthesized)
cccaaattgctgcctcttgatgatgacctcttggctaacatacacaacatgactgaattcatttttctggtactttctcccaaccaggaggtgcagagggtttgctttgtgatatttctg

SEQ ID NO: 582860 - DNA, 120 bp, Artificial Sequence
  ENSG00000172208_1 (sequence is synthesized)
ttcttgtacacagcaattgtgctggggaatttcctcattgtgctcactgtcatgaccagcagaagccttggttcccccatgtacttcttcctcagctacctctccttcatggagatctgc

SEQ ID NO: 582861 - DNA, 120 bp, Artificial Sequence
  ENSG00000172208_2 (sequence is synthesized)
tactcctccgctacagcccccaaactcatctcagatctgctggctgaaaggaaagtcatatcttggtggggctgcatggcacagcttttcttcttgcacttctttggtggcactgagatt

SEQ ID NO: 582862 - DNA, 120 bp, Artificial Sequence
  ENSG00000172208_3 (sequence is synthesized)
ttcctgctcactgtgatggcctatgaccactatgtggccatctgcaagcccctcagctacaccaccatcatgaactggcaggtgtgtactgtccttgtaggaatagcatgggtgggaggc

SEQ ID NO: 582863 - DNA, 120 bp, Artificial Sequence
  ENSG00000172208_4 (sequence is synthesized)
caatcactatttctgtgacctagttccccttctcaaacttgcctgctctgacaccttcctcattggtctgctgattgttgccaatggaggcaccctgtctgtgatcagttttggggtcct

SEQ ID NO: 582864 - DNA, 120 bp, Artificial Sequence
  ENSG00000172208_5 (sequence is synthesized)
cttagcatcctatatggtcatcttgctccatctgagaacctggagctctgaagggtggtgcaaagccctctccacctgtgggtcccatttcgctgtggttatcttgttctttgggccctg

SEQ ID NO: 582865 - DNA, 120 bp, Artificial Sequence
  ENSG00000172208_6 (sequence is synthesized)
cgtcttcaactctctgaggccttctaccactctgcccatagacaagatggtggctgtgttctacacagtgataaccgcgatcctgaaccctgtcatctactctctgagaaatgctgaaat

SEQ ID NO: 582866 - DNA, 120 bp, Artificial Sequence
  ENSG00000172208_7 (sequence is synthesized)
gaggaaggccatgaagaggctgtggattaggacattgagactaaatgagaaatagaggctgagtctttgtattgatacttgggtttagaatgactgttgagtccaaactgaaggagcaga

SEQ ID NO: 582867 - DNA, 120 bp, Artificial Sequence
  ENSG00000172209_0 (sequence is synthesized)
gtcattctgcaaaagctgcccgaacaggctttcctctgaaaagcagtgccgttcctttttagaaagactgaatctaaatgttgtctctggagacaagaagccttcagtatgttaaattac

SEQ ID NO: 582868 - DNA, 120 bp, Artificial Sequence
  ENSG00000172209_1 (sequence is synthesized)
tttcattatgtattttcagatgcttattgattccacagtaggaagagtgagagactgcagcagcctctaagcagcactacatgttccatacattagcagtactgctgaaacaatggcaca

SEQ ID NO: 582869 - DNA, 120 bp, Artificial Sequence
  ENSG00000172209_2 (sequence is synthesized)
ctacagacacatattttcattaaggtcattttcgaagagatgtttatgaccctcttcccccagtcctctactaacaagtgaacaaaatgaatcaatccaaactggaaatgcttcaactac

SEQ ID NO: 582870 - DNA, 120 bp, Artificial Sequence
  ENSG00000172209_3 (sequence is synthesized)
atcaagaatttatcaaatctttagcagagggccaatagcagctaattcagtatttacaactgacaatatgaagaatgcaattgactgagcatctccctagctgtctgaactacgaactgc

SEQ ID NO: 582871 - DNA, 120 bp, Artificial Sequence
  ENSG00000172209_4 (sequence is synthesized)
aagatgttcttgtaacacgactttaagacattaaggagttaaaaccagggaataggtctacattactgatggaatataaaaaatcaactgtatcctaagaagatgctacataaaataacc

SEQ ID NO: 582872 - DNA, 120 bp, Artificial Sequence
  ENSG00000172209_5 (sequence is synthesized)
acaaaaagaaaaacaatataactgtaaaagcctgaaaagaatttttaaaaggggaagtttatactttcatataccagaattgtggaagttactgattctggaagacataatgaaacatga

SEQ ID NO: 582873 - DNA, 120 bp, Artificial Sequence
  ENSG00000172209_6 (sequence is synthesized)
atttccaaaaagaaaagaaaatactttatcagcacacaaaaggaagatttaggaagtgttttctgcactaaatattcagatattcatatcaattggtatgactaatggatttttctatct

SEQ ID NO: 582874 - DNA, 120 bp, Artificial Sequence
  ENSG00000172209_7 (sequence is synthesized)
gacttttatgaccaattatgtatcctcttctaatgaaaacaaacaaaattaaacagcagatggtttttatcaaaaggacatggcctggatttataatataaagcaagttatgtgatcaag

SEQ ID NO: 582875 - DNA, 120 bp, Artificial Sequence
  ENSG00000172209_8 (sequence is synthesized)
aaatcatttcaaaatagtgagcactgctattaaaaacagatttacaatggtaacaaaaggatgtctaaatatattttagaagctacaaacgttatgtttccttttttgttttcacatatt

SEQ ID NO: 582876 - DNA, 120 bp, Artificial Sequence
  ENSG00000172209_9 (sequence is synthesized)
ctggaaaataaagaaatattatcatgtactccatcaaagggaaacataattcctatcatctgaggaaattcctcttggccgtgactttttaaagcaaaacaaatacaaatattatgtact

SEQ ID NO: 582877 - DNA, 120 bp, Artificial Sequence
  ENSG00000172209_10 (sequence is synthesized)
gttctttagaaatccatcagccaactaaatctcataatgcatgcagttgaagtattggagagaaaacgaaagaattcctacaagacatgaaataaaacacagctacttcactgttgtcag

SEQ ID NO: 582878 - DNA, 120 bp, Artificial Sequence
  ENSG00000172209_11 (sequence is synthesized)
ggaaaaaaaccaactgctccaaaagaatgtgtttttctcccattctggaaatcaacatgcagtctgaatctaacattacagtgcgagatgacattgatgacatcaacaccaatatgtacc

SEQ ID NO: 582879 - DNA, 120 bp, Artificial Sequence
  ENSG00000172209_12 (sequence is synthesized)
tattggtactttactgcatgaaatccaacttaatcaactctgtcagtaacattattacaatgaatcttcatgtacttgatgtaataatttgtgtgggatgtattcctctaactatagtta

SEQ ID NO: 582880 - DNA, 120 bp, Artificial Sequence
  ENSG00000172209_13 (sequence is synthesized)
tccttctgctttcactggagagtaacactgctctcatttgctgtttccatgaggcttgtgtatcttttgcaagtgtctcaacagcaatcaacgtttttgctatcactttggacagatatg

SEQ ID NO: 582881 - DNA, 120 bp, Artificial Sequence
  ENSG00000172209_14 (sequence is synthesized)
acatctctgtaaaacctgcaaaccgaattctgacaatgggcagagctgtaatgttaatgatatccatttggattttttcttttttctctttcctgattccttttattgaggtaaattttt

SEQ ID NO: 582882 - DNA, 120 bp, Artificial Sequence
  ENSG00000172209_15 (sequence is synthesized)
tcagtcttcaaagtggaaatacctgggaaaacaagacacttttatgtgtcagtacaaatgaatactacactgaactgggaatgtattatcacctgttagtacagatcccaatattctttt

SEQ ID NO: 582883 - DNA, 120 bp, Artificial Sequence
  ENSG00000172209_16 (sequence is synthesized)
tcactgttgtagtaatgttaatcacatacaccaaaatacttcaggctcttaatattcgaataggcacaagattttcaacagggcagaagaagaaagcaagaaagaaaaagacaatttctc

SEQ ID NO: 582884 - DNA, 120 bp, Artificial Sequence
  ENSG00000172209_17 (sequence is synthesized)
taaccacacaacatgaggctacagacatgtcacaaagcagtggtgggagaaatgtagtctttggtgtaagaacttcagtttctgtaataattgccctccggcgagctgtgaaacgacacc

SEQ ID NO: 582885 - DNA, 120 bp, Artificial Sequence
  ENSG00000172209_18 (sequence is synthesized)
gtgaacgacgagaaagacaaaagagagtcttcaggatgtctttattgattatttctacatttcttctctgctggacaccaatttctgttttaaataccaccattttatgtttaggcccaa

SEQ ID NO: 582886 - DNA, 120 bp, Artificial Sequence
  ENSG00000172209_19 (sequence is synthesized)
gtgaccttttagtaaaattaagattgtgttttttagtcatggcttatggaacaactatatttcaccctctattatatgcattcactagacaaaaatttcaaaaggtcttgaaaagtaaaa

SEQ ID NO: 582887 - DNA, 120 bp, Artificial Sequence
  ENSG00000172209_20 (sequence is synthesized)
tgaaaaagcgagttgtttctatagtagaagctgatcccctgcctaataatgctgtaatacacaactcttggatagatcctaaaagaaacaaaaaaattacctttgaagatagtgaaataa

SEQ ID NO: 582888 - DNA, 120 bp, Artificial Sequence
  ENSG00000172209_21 (sequence is synthesized)
gagaaaaatgtttagtgcctcaggttgtcacagactagagaaaagtctcagtttcaccaaatccacattcaaatgagttttaaatttaaattgtaaaaactgatattactgccaaatata

SEQ ID NO: 582889 - DNA, 120 bp, Artificial Sequence
  ENSG00000172209_22 (sequence is synthesized)
agaaaaatattttaagtattggttatgttgtaaattttcaatgtgaatgtcaattagataggtcatatatattcaatttcttcattacttaatgtatttgttgcatggcagtttgttaaa

SEQ ID NO: 582890 - DNA, 120 bp, Artificial Sequence
  ENSG00000172209_23 (sequence is synthesized)
gtactatcatgtgtatattttgtcaatattatgtccaacagaaaatattcatgtaagtcatattttttaaggaataaatacatagccttaaaacagtgtataactttaaaatgtaactga

SEQ ID NO: 582891 - DNA, 120 bp, Artificial Sequence
  ENSG00000172209_24 (sequence is synthesized)
atgcatgcaccccaccacactgtttaacatttacgaaagaacagaatcttgctctagagaaaatgtatttttcttaatcatcatttaacttgacatttctgctttatttaattataaatc

SEQ ID NO: 582892 - DNA, 120 bp, Artificial Sequence
  ENSG00000172209_25 (sequence is synthesized)
taactgatgtgacaaagacctgatgtttaatctgtcagttcagaaaatttggcacacttaaaattttccatttttataggatttcaatgttagctaagaccttaacttactcgaataaat

SEQ ID NO: 582893 - DNA, 120 bp, Artificial Sequence
  ENSG00000172209_26 (sequence is synthesized)
atacctctagtaatacttcatactaattcaaaagaaataatgttaccatttgtgtttctgcaatattattcccaaaaaagttcataaataaaactgtattctaaaacttgtcaaatataa

SEQ ID NO: 582894 - DNA, 120 bp, Artificial Sequence
  ENSG00000172209_27 (sequence is synthesized)
cattaagtgaaagttaacatgaattttgaaaattattagcttttataatttatgttgaatatgattttgcagttgaaatgctgtatttgaaatgtgaaatatagttggttgtatgagttc

SEQ ID NO: 582895 - DNA, 120 bp, Artificial Sequence
  ENSG00000172209_28 (sequence is synthesized)
atattttaaaatgaatatactgattaactgacattttagcccagaacattagacattattttttacaaattattctaaacccctatatattaaaatatagatttgcatgaattagcaaaa

SEQ ID NO: 582896 - DNA, 120 bp, Artificial Sequence
  ENSG00000172215_0 (sequence is synthesized)
acatcacagaagtagaggcagaccttgcttcatgagcaagctcatctctggaacaaactggcaaagcatctctgctggtgttcatcagaacagacaccatggcagagcatgattaccatg

SEQ ID NO: 582897 - DNA, 120 bp, Artificial Sequence
  ENSG00000172215_1 (sequence is synthesized)
aagactatgggttcagcagtttcaatgacagcagccaggaggagcatcaagacttcctgcagttcagcaaggtctttctgccctgcatgtacctggtggtgtttgtctgtggtctggtgg

SEQ ID NO: 582898 - DNA, 120 bp, Artificial Sequence
  ENSG00000172215_2 (sequence is synthesized)
ggaactctctggtgctggtcatatccatcttctaccataagttgcagagcctgacggatgtgttcctggtgaacctacccctggctgacctggtgtttgtctgcactctgcccttctggg

SEQ ID NO: 582899 - DNA, 120 bp, Artificial Sequence
  ENSG00000172215_3 (sequence is synthesized)
cctatgcaggcatccatgaatgggtgtttggccaggtcatgtgcaagagcctactgggcatctacactattaacttctacacgtccatgctcatcctcacctgcatcactgtggatcgtt

SEQ ID NO: 582900 - DNA, 120 bp, Artificial Sequence
  ENSG00000172215_4 (sequence is synthesized)
tcattgtagtggttaaggccaccaaggcctacaaccagcaagccaagaggatgacctggggcaaggtcaccagcttgctcatctgggtgatatccctgctggtttccttgccccaaatta

SEQ ID NO: 582901 - DNA, 120 bp, Artificial Sequence
  ENSG00000172215_5 (sequence is synthesized)
tctatggcaatgtctttaatctcgacaagctcatatgtggttaccatgacgaggcaatttccactgtggttcttgccacccagatgacactggggttcttcttgccactgctcaccatga

SEQ ID NO: 582902 - DNA, 120 bp, Artificial Sequence
  ENSG00000172215_6 (sequence is synthesized)
ttgtctgctattcagtcataatcaaaacactgcttcatgctggaggcttccagaagcacagatctctaaagatcatcttcctggtgatggctgtgttcctgctgacccagatgcccttca

SEQ ID NO: 582903 - DNA, 120 bp, Artificial Sequence
  ENSG00000172215_7 (sequence is synthesized)
acctcatgaagttcatccgcagcacacactgggaatactatgccatgaccagctttcactacaccatcatggtgacagaggccatcgcatacctgagggcctgccttaaccctgtgctct

SEQ ID NO: 582904 - DNA, 120 bp, Artificial Sequence
  ENSG00000172215_8 (sequence is synthesized)
aggacattggttgcctcccttaccttggggtctcacatcaatggaaatcttctgaggacaattccaagactttttctgcctcccacaatgtggaggccaccagcatgttccagttatagg

SEQ ID NO: 582905 - DNA, 120 bp, Artificial Sequence
  ENSG00000172215_9 (sequence is synthesized)
ccttgccagggtttcgagaagctgctctggaatttgcaagtcatggctgtgccctcttgatgtggtgaggcaggctttgtttatagcttgcgcattctcatggagaagttatcagacact

SEQ ID NO: 582906 - DNA, 120 bp, Artificial Sequence
  ENSG00000172215_10 (sequence is synthesized)
ctggctggtttggaatgcttcttctcaggcatgaacatgtactgttctcttcttgaacactcatgctgaaagcccaagtagggggtctaaaatttttaaggactttccttcctccatctc

SEQ ID NO: 582907 - DNA, 120 bp, Artificial Sequence
  ENSG00000172215_11 (sequence is synthesized)
caagaatgctgaaaccaagggggatgacatgtgactcctatgatctcaggttctccttgattgggactggggctgaaggttgaagaggtgagcacggccaacaaagctgttgatggtagg

SEQ ID NO: 582908 - DNA, 120 bp, Artificial Sequence
  ENSG00000172215_12 (sequence is synthesized)
tggcacactgggtgcccaagctcagaaggctcttctgactactgggcaaagagtgtagatcagagcagcagtgaaaacaagtgctggcaccaccaggcacctcacagaaatgagatcagg

SEQ ID NO: 582909 - DNA, 120 bp, Artificial Sequence
  ENSG00000172215_13 (sequence is synthesized)
ctctgcctcaccttggggcttgacttttgtataggtagatgttcagattgctttgattaatccagaataactagcaccagggactatgaatgggcaaaactgaattataagaggctgata

SEQ ID NO: 582910 - DNA, 120 bp, Artificial Sequence
  ENSG00000172215_14 (sequence is synthesized)
attccagtggtccatggaatgcttgaaaaatgtgcaaaacagcgtttaagactgtaatgaatctaagcagcatttctgaagtggactctttggtggctttgcattttaaaaatgaaattt

SEQ ID NO: 582911 - DNA, 120 bp, Artificial Sequence
  ENSG00000172215_15 (sequence is synthesized)
tccaatgtctgccacacaaacgtatgtaaatgtatatacccacacacatacacacatatgtcatatattactagcatatgagtttcatagctaagaaataaaactgttaaagtctccaaa

SEQ ID NO: 582912 - DNA, 120 bp, Artificial Sequence
  ENSG00000172215_16 (sequence is synthesized)
gtcaacccctgtacgcggtttccttctcctgctctcctgcttatagaacaattgttcctccagaacaattcctctcagccatagtggctctgctcccaccagatgatctctcagctcatc

SEQ ID NO: 582913 - DNA, 120 bp, Artificial Sequence
  ENSG00000172215_17 (sequence is synthesized)
ttgcccaggctggcctcaaactcctggcttcaatgatcctctcatcttagcctcttgagtactgggactataagtgcccactgccacgcctggctggttaggctacttttctgtggatca

SEQ ID NO: 582914 - DNA, 120 bp, Artificial Sequence
  ENSG00000172215_18 (sequence is synthesized)
cacgcctggctggttaggctacttttctgtggatcacagcccatcatccaccaatgccttgccaacaactgtaaatgtctcatccctgaatcctggaactgataacagctctgccaggtc

SEQ ID NO: 582915 - DNA, 120 bp, Artificial Sequence
  ENSG00000172215_19 (sequence is synthesized)
agcatccttccttgctagagagaaagggcactttggtccctggaaagacagaggcaagcagcagcatcggagacactgctcccagtcaggactcaaagtcagcgacagaagtgtttctga

SEQ ID NO: 582916 - DNA, 120 bp, Artificial Sequence
  ENSG00000172215_20 (sequence is synthesized)
ctgctcttcttcatacatcttctagaggtgctggccagacatggctccaggtcactggaaatgagctgctgcatgttgagtatctgcagtcctgtagcaagggcagacttggcactcatg

SEQ ID NO: 582917 - DNA, 120 bp, Artificial Sequence
  ENSG00000172215_21 (sequence is synthesized)
ggctgatgttgccgcagctgcccctgctcccacaccacaggttacatgatcccttgtcctgtccatggtctttggcagggtcacagggcagagggaagggtcagagagaagtgacatctt

SEQ ID NO: 582918 - DNA, 120 bp, Artificial Sequence
  ENSG00000172215_22 (sequence is synthesized)
gaagggctggtgccctgggtaagaaaggttgcccatctggcatcccatttcaattgggttttctgcttgttaaatgaggcccctaagtcctaacctgccaatcacaggagctaaggcaag

SEQ ID NO: 582919 - DNA, 120 bp, Artificial Sequence
  ENSG00000172215_23 (sequence is synthesized)
gttccgctttggggaaatctaccttttaagagacttcttgttcagaagtcttcaggaaatgaggctctgatggtagaatgccataaactgtgttaactgatgaaggggaaagtttagttg

SEQ ID NO: 582920 - DNA, 120 bp, Artificial Sequence
  ENSG00000172215_24 (sequence is synthesized)
ggaagtgaggagaaccacccaatgctttaaccatgaagccagctcagccaaagtgctgggcagtcgtgggcttttctatgctttgtttccccattagtagcctttgaaaatctatgcaat

SEQ ID NO: 582921 - DNA, 120 bp, Artificial Sequence
  ENSG00000172215_25 (sequence is synthesized)
tgaggggaagtaaaggcaggaaggactacctacccaggcagagcagtcttgccatccccaaacacctgtggtctccaggagtctccttgataggagagccccctggtaggggcacttgct

SEQ ID NO: 582922 - DNA, 120 bp, Artificial Sequence
  ENSG00000172215_26 (sequence is synthesized)
ttagctttcacaatttattaggaaatggggctcaggatgggtgggcaactgtggtgaggcagggggagatgaaaacaggcatgttccattgatgagctcatattatcagtgggctcaacc

SEQ ID NO: 582923 - DNA, 120 bp, Artificial Sequence
  ENSG00000172215_27 (sequence is synthesized)
atccatcatcagtgttgctcttccaaacagcactgtgcccacctggcagcaaagcgacttttggtttcaaaataattgagcacaggattttatggaatgtgcttaggggtcagttatgag

SEQ ID NO: 582924 - DNA, 120 bp, Artificial Sequence
  ENSG00000172215_28 (sequence is synthesized)
ttgtctcccagatgggtgagatcctgagaattttcaggctaatggagagtcctcatcctgtctgagcaatttcccctcagaattggttatcttcaatatactggactgtgctgtttctac

SEQ ID NO: 582925 - DNA, 120 bp, Artificial Sequence
  ENSG00000172215_29 (sequence is synthesized)
tgtggtcaatgggatagcaggaagacaaagaatgccatcctcagccccaaatataattcctgggttctgactcacaggtgttcatcagaacagacaccatggcagagcatgattaccatg

SEQ ID NO: 582926 - DNA, 120 bp, Artificial Sequence
  ENSG00000172216_0 (sequence is synthesized)
agcgagtcagagccgcgcacgggactgggaaggggacccacccgagggtccagccaccagccccctcactaatagcggccaccccggcagcggcggcagcagcagcagcgacgcagcggc

SEQ ID NO: 582927 - DNA, 120 bp, Artificial Sequence
  ENSG00000172216_1 (sequence is synthesized)
gacagctcagagcagggaggccgcgccacctgcgggccggccggagcgggcagccccaggccccctccccgggcacccgcgttcatgcaacgcctggtggcctgggacccagcatgtctc

SEQ ID NO: 582928 - DNA, 120 bp, Artificial Sequence
  ENSG00000172216_2 (sequence is synthesized)
cccctgccgccgccgccgcctgcctttaaatccatggaagtggccaacttctactacgaggcggactgcttggctgctgcgtacggcggcaaggcggcccccgcggcgccccccgcggcc

SEQ ID NO: 582929 - DNA, 120 bp, Artificial Sequence
  ENSG00000172216_3 (sequence is synthesized)
cccccgccggcgagctgggcagcatcggcgaccacgagcgcgccatcgacttcagcccgtacctggagccgctgggcgcgccgcaggccccggcgcccgccacggccacggacaccttcg

SEQ ID NO: 582930 - DNA, 120 bp, Artificial Sequence
  ENSG00000172216_4 (sequence is synthesized)
gccacggacaccttcgaggcggctccgcccgcgcccgcccccgcgcccgcctcctccgggcagcaccacgacttcctctccgacctcttctccgacgactacgggggcaagaactgcaag

SEQ ID NO: 582931 - DNA, 120 bp, Artificial Sequence
  ENSG00000172216_5 (sequence is synthesized)
gggcaagaactgcaagaagccggccgagtacggctacgtgagcctggggcgcctgggggccgccaagggcgcgctgcaccccggctgcttcgcgcccctgcacccaccgcccccgccgcc

SEQ ID NO: 582932 - DNA, 120 bp, Artificial Sequence
  ENSG00000172216_6 (sequence is synthesized)
ctcaaggcggagccgggcttcgagcccgcggactgcaagcggaaggaggaggccggggcgccgggcggcggcgcaggcatggcggcgggcttcccgtacgcgctgcgcgcttacctcggc

SEQ ID NO: 582933 - DNA, 120 bp, Artificial Sequence
  ENSG00000172216_7 (sequence is synthesized)
acgtcctcctcgtccagcccgcccggcacgccgagccccgctgacgccaaggcgcccccgaccgcctgctacgcgggggccgcgccggcgccctcgcaggtcaagagcaaggccaagaag

SEQ ID NO: 582934 - DNA, 120 bp, Artificial Sequence
  ENSG00000172216_8 (sequence is synthesized)
accgtggacaagcacagcgacgagtacaagatccggcgcgagcgcaacaacatcgccgtgcgcaagagccgcgacaaggccaagatgcgcaacctggagacgcagcacaaggtcctggag

SEQ ID NO: 582935 - DNA, 120 bp, Artificial Sequence
  ENSG00000172216_9 (sequence is synthesized)
ctcacggccgagaacgagcggctgcagaagaaggtggagcagctgtcgcgcgagctcagcaccctgcggaacttgttcaagcagctgcccgagcccctgctcgcctcctccggccactgc

SEQ ID NO: 582936 - DNA, 120 bp, Artificial Sequence
  ENSG00000172216_10 (sequence is synthesized)
ccggggctgagactccggggagcgcccgcgcccgcgccctcgcccccgcccccggcggcgccggcaaaactttggcactggggcacttggcagcgcggggagcccgtcggtaattttaat

SEQ ID NO: 582937 - DNA, 120 bp, Artificial Sequence
  ENSG00000172216_11 (sequence is synthesized)
ggcagcgcggggagcccgtcggtaattttaatattttattatatatatatatctatatttttgtccaaaccaaccgcacatgcagatggggctcccgcccgtggtgttatttaaagaaga

SEQ ID NO: 582938 - DNA, 120 bp, Artificial Sequence
  ENSG00000172216_12 (sequence is synthesized)
aacgtctatgtgtacagatgaatgataaactctctgcttctccctctgcccctctccaggcgccggcgggcgggccggtttcgaagttgatgcaatcggtttaaacatggctgaacgcgt

SEQ ID NO: 582939 - DNA, 120 bp, Artificial Sequence
  ENSG00000172216_13 (sequence is synthesized)
gtgtacacgggactgacgcaacccacgtgtaactgtcagccgggccctgagtaatcgcttaaagatgttcctacgggcttgttgctgttgatgttttgttttgttttgttttttggtctt

SEQ ID NO: 582940 - DNA, 120 bp, Artificial Sequence
  ENSG00000172216_14 (sequence is synthesized)
tttttgtattataaaaaataatctatttctatgagaaaagaggcgtctgtatattttgggaatcttttccgtttcaagcattaagaacacttttaataaacttttttttgagaatggtta

SEQ ID NO: 582941 - DNA, 120 bp, Artificial Sequence
  ENSG00000172232_0 (sequence is synthesized)
ctgccccgccatgacccggctgacagtcctggccctgctggctggtctgctggcgtcctcgagggccggctccagcccccttttggacatcgttggcggccggaaggcgaggccccgcca

SEQ ID NO: 582942 - DNA, 120 bp, Artificial Sequence
  ENSG00000172232_1 (sequence is synthesized)
gttcccgttcctggcctccattcagaatcaaggcaggcacttctgcgggggtgccctgatccatgcccgcttcgtgatgaccgcggccagctgcttccaaagccagaaccccggggttag

SEQ ID NO: 582943 - DNA, 120 bp, Artificial Sequence
  ENSG00000172232_2 (sequence is synthesized)
caccgtggtgctgggtgcctatgacctgaggcggcgggagaggcagtcccgccagacgttttccatcagcagcatgagcgagaatggctacgacccccagcagaacctgaacgacctgat

SEQ ID NO: 582944 - DNA, 120 bp, Artificial Sequence
  ENSG00000172232_3 (sequence is synthesized)
aacgccacggtggaagccggcaccagatgccaggtggccggctgggggagccagcgcagtggggggcgtctctcccgttttcccaggtttgtcaacgtgactgtgacccccgaggaccag

SEQ ID NO: 582945 - DNA, 120 bp, Artificial Sequence
  ENSG00000172232_4 (sequence is synthesized)
tgtcgccccaacaacgtgtgcaccggtgtgctcacccgccgcggtggcatctgcaatggggacgggggcacccccctcgtctgcgagggcctggcccacggcgtggcctccttttccctg

SEQ ID NO: 582946 - DNA, 120 bp, Artificial Sequence
  ENSG00000172232_5 (sequence is synthesized)
gggccctgtggccgaggccctgacttcttcacccgagtggcgctcttccgagactggatcgatggtgttctcaacaacccgggaccggggccagcctaggggggcctgtgacctcccatg

SEQ ID NO: 582947 - DNA, 120 bp, Artificial Sequence
  ENSG00000172232_6 (sequence is synthesized)
gagcccagccccgccctccacacctccggcgctccgcacccacctcccacggccccgcccctgcccccgctccggccagaggggccctggctgtaataaagaagccgatctctcctctgc

SEQ ID NO: 582948 - DNA, 120 bp, Artificial Sequence
  ENSG00000172232_7 (sequence is synthesized)
ggcagaggggaaatggggcctggcccacgggagagctgaggcccacgtttggccaggacagggtggatggaggctggggcctccgcagggaagatggacaggctccagcccccttttgga

SEQ ID NO: 582949 - DNA, 120 bp, Artificial Sequence
  ENSG00000172232_8 (sequence is synthesized)
caccggtgtgctcacccgccgcggtggcatctgcaatgtgagtgctccctgtggcgggaggaggggtcctgagaggtactgagctctccgtggcaggagaaagcaagtgcaggctgaggg

SEQ ID NO: 582950 - DNA, 120 bp, Artificial Sequence
  ENSG00000172232_9 (sequence is synthesized)
gagctctccgtggcaggagaaagcaagtgcaggctgagggcggcacagcaggggggccccaggattgagcattttcacggtaggagaaacagtatctttttttttttttttgagacagag

SEQ ID NO: 582951 - DNA, 90 bp, Artificial Sequence
  ENSG00000172232_10 (sequence is synthesized)
aaagtgttatgagaaacagtagctatcaaacgccggctgtgagccacgtctgtgctgggggttggggacccagcaggcatggtagagccg

SEQ ID NO: 582952 - DNA, 120 bp, Artificial Sequence
  ENSG00000172232_11 (sequence is synthesized)
tgtgctgggggttggggacccagcaggcatggtagagccggtcactgagggactcaggcgtgtgattgccaggggaggggcacctggcccagcctggaggtgccaggaagctccagaaag

SEQ ID NO: 582953 - DNA, 120 bp, Artificial Sequence
  ENSG00000172232_12 (sequence is synthesized)
caactgatcccaaagtccactagcagttaaccagggcagagaaagagaagagccatgcaaaggccctggggctggatcaggacttgtaggttccaggggcagcaagaggcctctgcagtt

SEQ ID NO: 582954 - DNA, 120 bp, Artificial Sequence
  ENSG00000172236_0 (sequence is synthesized)
tagaaggaacagggagcggccaggatgctgaatctgctgctgctggcgctgcccgtcctggcgagccgcgcctacgcggcccctgccccaggccaggccctgcagcgagtgggcatcgtc

SEQ ID NO: 582955 - DNA, 120 bp, Artificial Sequence
  ENSG00000172236_1 (sequence is synthesized)
gggggtcaggaggcccccaggagcaagtggccctggcaggtgagcctgagagtccacggcccatactggatgcacttctgcgggggctccctcatccacccccagtgggtgctgaccgca

SEQ ID NO: 582956 - DNA, 120 bp, Artificial Sequence
  ENSG00000172236_2 (sequence is synthesized)
gcgcactgcgtgggaccggacgtcaaggatctggccgccctcagggtgcaactgcgggagcagcacctctactaccaggaccagctgctgccggtcagcaggatcatcgtgcacccacag

SEQ ID NO: 582957 - DNA, 120 bp, Artificial Sequence
  ENSG00000172236_3 (sequence is synthesized)
ttctacaccgcccagatcggagcggacatcgccctgctggagctggaggagccggtgaacgtctccagccacgtccacacggtcaccctgccccctgcctcagagaccttccccccgggg

SEQ ID NO: 582958 - DNA, 120 bp, Artificial Sequence
  ENSG00000172236_4 (sequence is synthesized)
cataatggaaaaccacatttgtgacgcaaaataccaccttggcgcctacacgggagacgacgtccgcatcgtccgtgacgacatgctgtgtgccgggaacacccggagggactcatgcca

SEQ ID NO: 582959 - DNA, 120 bp, Artificial Sequence
  ENSG00000172236_5 (sequence is synthesized)
gggcgactccggagggcccctggtgtgcaaggtgaatggcacctggctgcaggcgggcgtggtcagctggggcgagggctgtgcccagcccaaccggcctggcatctacacccgtgtcac

SEQ ID NO: 582960 - DNA, 120 bp, Artificial Sequence
  ENSG00000172236_6 (sequence is synthesized)
ctactacttggactggatccaccactatgtccccaaaaagccgtgagtcaggcctgggttggccacctgggtcactggaggaccaacccctgctgtccaaaacaccactgcttcctaccc

SEQ ID NO: 582961 - DNA, 120 bp, Artificial Sequence
  ENSG00000172236_7 (sequence is synthesized)
aggtggcgactgccccccacaccttccctgccccgtcctgagtgccccttcctgtcctaagccccctgctctcttctgagccccttcccctgtcctgaggacccttccctatcctgagcc

SEQ ID NO: 582962 - DNA, 120 bp, Artificial Sequence
  ENSG00000172236_8 (sequence is synthesized)
cccttccctgtcctaagcctgacgcctgcaccgggccctccagccctcccctgcccagatagctggtggtgggcgctaatcctcctgagtgctggacctcattaaagtgcatggaaatca

SEQ ID NO: 582963 - DNA, 120 bp, Artificial Sequence
  ENSG00000172236_9 (sequence is synthesized)
ccagggtaagtccccactctcagagaccctgacatcagcgtcacctggagcagagtggcccagcctcagactcagagcaccaagacccaggcccgcaggcctggacccaccccggtcccc

SEQ ID NO: 582964 - DNA, 120 bp, Artificial Sequence
  ENSG00000172238_0 (sequence is synthesized)
ggagaagcatagttgcacgcgacctggtgtgtgatctccgagtgggtgggggagggtcgaggagggaaaaaaaaataagacgttgcagaagagacccggaaagggccttttttttggttg

SEQ ID NO: 582965 - DNA, 120 bp, Artificial Sequence
  ENSG00000172238_1 (sequence is synthesized)
agctggtgtcccagtgctgcctccgatcctgagcctccgagcctttgcagtgcaatgtcccgcctgctgcatgcagaagagtgggctgaagtgaaggagttgggagaccaccatcgccag

SEQ ID NO: 582966 - DNA, 120 bp, Artificial Sequence
  ENSG00000172238_2 (sequence is synthesized)
ccccagccgcatcatctcccgcaaccgccgccgccgccgcagccacctgcaactttgcaggcgagagagcatcccgtctacccgcctgagctgtccctcctggacagcaccgacccacgc

SEQ ID NO: 582967 - DNA, 120 bp, Artificial Sequence
  ENSG00000172238_3 (sequence is synthesized)
gcctggctggctcccactttgcagggcatctgcacggcacgcgccgcccagtatttgctacattccccggagctgggtgcctcagaggccgctgcgccccgggacgaggtggacggccgg

SEQ ID NO: 582968 - DNA, 120 bp, Artificial Sequence
  ENSG00000172238_4 (sequence is synthesized)
ggggagctggtaaggaggagcagcggcggtgccagcagcagcaagagccccgggccggtgaaagtgcgggaacagctgtgcaagctgaaaggcggggtggtggtagacgagctgggctgc

SEQ ID NO: 582969 - DNA, 120 bp, Artificial Sequence
  ENSG00000172238_5 (sequence is synthesized)
agccgccaacgggccccttccagcaaacaggtgaatggggtgcagaagcagagacggctagcagccaacgccagggagcggcgcaggatgcatgggctgaaccacgccttcgaccagctg

SEQ ID NO: 582970 - DNA, 120 bp, Artificial Sequence
  ENSG00000172238_6 (sequence is synthesized)
cgcaatgttatcccgtcgttcaacaacgacaagaagctgtccaaatatgagaccctgcagatggcccaaatctacatcaacgccttgtccgagctgctacaaacgcccagcggaggggaa

SEQ ID NO: 582971 - DNA, 120 bp, Artificial Sequence
  ENSG00000172238_7 (sequence is synthesized)
cagccaccgccgcctccagcctcctgcaaaagcgaccaccaccaccttcgcaccgcggcctcctatgaagggggcgcgggcaacgcgaccgcagctggggctcagcaggcttccggaggg

SEQ ID NO: 582972 - DNA, 120 bp, Artificial Sequence
  ENSG00000172238_8 (sequence is synthesized)
agccagcggccgaccccgcccgggagttgccggactcgcttctcagccccagcttctgcgggagggtactcggtgcagctggacgctctgcacttctcgactttcgaggacagcgccctg

SEQ ID NO: 582973 - DNA, 120 bp, Artificial Sequence
  ENSG00000172238_9 (sequence is synthesized)
cagccagtgcaggaggaaaacagcaaaacttcgcctcggtcccacagaagcgacggggaattttccccccattcccattacagtgactcggatgaggcaagttaggaaggtgacagaagc

SEQ ID NO: 582974 - DNA, 120 bp, Artificial Sequence
  ENSG00000172238_10 (sequence is synthesized)
ctgaaaactgagacagaaacaaaactgccctttcccagtgcgcgggaagccccgcggttaaagatccccgcaccctttaatttttgctctgcgatggtcgttgtttagcaacgacttggc

SEQ ID NO: 582975 - DNA, 120 bp, Artificial Sequence
  ENSG00000172238_11 (sequence is synthesized)
ttcagatggcagctacatttgatggtttgcaaatgccgccgctgttccaaacttcctacggtccatattgtttgatgaaaactttctgttaaaattgtgtcctttccgcccaccttctgc

SEQ ID NO: 582976 - DNA, 120 bp, Artificial Sequence
  ENSG00000172238_12 (sequence is synthesized)
tccccctttagatagatacggtataattgtaggtacccgtatatggcatcattattctagttccctgctgccaatacgctgctaaaacgtcgcatcttctctgtcactggtttgggttta

SEQ ID NO: 582977 - DNA, 120 bp, Artificial Sequence
  ENSG00000172238_13 (sequence is synthesized)
atttattttacgccctgggcatccatccttgtgtgttgcgcactcaagtgtgggagatttagtcttccgaagttgttttccaaaatgcacaatgaaacgcaaaattagtgcttccaaagt

SEQ ID NO: 582978 - DNA, 120 bp, Artificial Sequence
  ENSG00000172238_14 (sequence is synthesized)
ggataacttttgactatggaattgttagaaaacaagaaactttaaggtttatatattgtataaacatacccagtatgtgcatccgatcgcgagaacgttggcgtcttttaggaaactccg

SEQ ID NO: 582979 - DNA, 120 bp, Artificial Sequence
  ENSG00000172238_15 (sequence is synthesized)
cgcacgcactttatcagccgctgctgcggtggtggctccaggagaaactcaactgccaattgcagaccagtttttttttttttaaacacagccacttataattcttaagctctttgcaaa

SEQ ID NO: 582980 - DNA, 120 bp, Artificial Sequence
  ENSG00000172238_16 (sequence is synthesized)
tgtttgtttaaaaaatgaaaaattaaaaaaaatctagtagtgtcaaacgcatttggtcaattttattttgctttgttaatattagaaaacttatttattattgtttgctaccatttctac

SEQ ID NO: 582981 - DNA, 120 bp, Artificial Sequence
  ENSG00000172238_17 (sequence is synthesized)
ttatcttgattcattttttacgttttctactcgagatcattttattttaatttagcaaagccaactgcccttgtttaatgtattttgttttgcaaatgattaaaataaatgtgaaaagaa

SEQ ID NO: 582982 - DNA, 120 bp, Artificial Sequence
  ENSG00000172239_0 (sequence is synthesized)
acattttcttgaaatttctggaggggaaggttaacgggaagagaacgaagcttgttaaacgtaggtgtgacctactgtggtaaacacctagggtgaattaaagaggggacacatattttg

SEQ ID NO: 582983 - DNA, 120 bp, Artificial Sequence
  ENSG00000172239_1 (sequence is synthesized)
attccgtttctactcccttcccccgatgctaacggagcaggtgacagtctcccagggaccactcctcagcagtccgcgggtctcggccggagccgagtcattgaacacacctgtgcgcca

SEQ ID NO: 582984 - DNA, 120 bp, Artificial Sequence
  ENSG00000172239_2 (sequence is synthesized)
gcgaaccctggcgcagggtccacgccccctccccccgtgtttttatttcccgggcgtcaactgtcggtctcgcacgtctctcctgagaactaccgagtaggtcgggcctgcctgtgagca

SEQ ID NO: 582985 - DNA, 120 bp, Artificial Sequence
  ENSG00000172239_3 (sequence is synthesized)
aacgaggcccctgagagctccacctagttcacaggataaaatcccacagcagaactcggagtcagcaatggctaagccccaggtggttgtagctcctgtattaatgtctaagctgtctgt

SEQ ID NO: 582986 - DNA, 120 bp, Artificial Sequence
  ENSG00000172239_4 (sequence is synthesized)
gaatgcccctgaattttacccttcaggttattcttccagttacacagaatcctatgaggatggttgtgaggattatcctactctatcagaatatgttcaggattttttgaatcatcttac

SEQ ID NO: 582987 - DNA, 120 bp, Artificial Sequence
  ENSG00000172239_5 (sequence is synthesized)
agagcagcctggcagttttgaaactgaaattgaacagtttgcagagaccctgaatggttgtgttacaacagatgatgctttgcaagaacttgtggaactcatctatcaacaggccacatc

SEQ ID NO: 582988 - DNA, 120 bp, Artificial Sequence
  ENSG00000172239_6 (sequence is synthesized)
tatcccaaatttctcttatatgggagctcgcctgtgtaattacctgtcccatcatctgacaattagcccacagagtggcaacttccgccaattgctacttcaaagatgtcggactgaata

SEQ ID NO: 582989 - DNA, 120 bp, Artificial Sequence
  ENSG00000172239_7 (sequence is synthesized)
aagctgcaaaaggggatgaagttactcgaaaacgatttcatgcatttgtactctttctgggagaactttatcttaacctggagatcaagggaacaaatggacaggttacaagagcagata

SEQ ID NO: 582990 - DNA, 120 bp, Artificial Sequence
  ENSG00000172239_8 (sequence is synthesized)
ttcttcaggttggtcttcgagaattgctgaatgccctgttttctaatcctatggatgacaatttaatttgtgcagtaaaattgttaaagttgacaggatcagttttggaagatgcttgga

SEQ ID NO: 582991 - DNA, 120 bp, Artificial Sequence
  ENSG00000172239_9 (sequence is synthesized)
aggaaaaaggaaagatggatatggaagaaattattcagagaattgaaaacgttgtcctagatgcaaactgcagtagagatgtaaaacagatgctcttgaagcttgtagaactccggtcaa

SEQ ID NO: 582992 - DNA, 120 bp, Artificial Sequence
  ENSG00000172239_10 (sequence is synthesized)
gtaactggggcagagtccatgcaacttcaacatatagagaagcaacaccagaaaatgatcctaactactttatgaatgaaccaacattttatacatctgatggtgttcctttcactgcag

SEQ ID NO: 582993 - DNA, 120 bp, Artificial Sequence
  ENSG00000172239_11 (sequence is synthesized)
ctgatccagattaccaagagaaataccaagaattacttgaaagagaggacttttttccagattatgaagaaaatggaacagatttatccggggctggtgatccatacttggatgatattg

SEQ ID NO: 582994 - DNA, 120 bp, Artificial Sequence
  ENSG00000172239_12 (sequence is synthesized)
atgatgagatggacccagagatagaagaagcttatgaaaagttttgtttggaatcagagcgtaagcgaaaacagtaaagttaaatttcagcatatcagttttataaagcagtttaggtat

SEQ ID NO: 582995 - DNA, 120 bp, Artificial Sequence
  ENSG00000172239_13 (sequence is synthesized)
ggtgatttagcagaacacaagagagcaagaaaatgtcacatctataccaaattaaggatgttgagttatgttactaatgtatgcaactttaattttgtttaacactatctgccaaaataa

SEQ ID NO: 582996 - DNA, 120 bp, Artificial Sequence
  ENSG00000172239_14 (sequence is synthesized)
ctgccaaaataaactttattccctataacttaaaatgtgtatatatatataatagtttattatgtacagttaattctactgttttggctgcaataaaatcgattttgaaataaatgaaat

SEQ ID NO: 582997 - DNA, 120 bp, Artificial Sequence
  ENSG00000172239_15 (sequence is synthesized)
gttttgggggagaactggaaagccgagggtagccgagcggggcgggcgctctggagcggcgggtgctcgggctgccgtccgctccgccagaagcaccgagcagccgagccggggcccgcc

SEQ ID NO: 582998 - DNA, 120 bp, Artificial Sequence
  ENSG00000172239_16 (sequence is synthesized)
gccctcctcctccatgaggcccgagtgaggcgcggcggctatagccgacccgcggcgccttccccccgcgtcctatcgcgagcgcagcggcagcggcccctggaggaggaggcggaggag

SEQ ID NO: 582999 - DNA, 120 bp, Artificial Sequence
  ENSG00000172239_17 (sequence is synthesized)
tggggggaggggccgggtgcgcggtctcggagttcggggtcccgggaggaagtaaaaatcgcctcccctcagcagccctctaaagcgagaccctagcgagtaaccacctcttttccaccg

SEQ ID NO: 583000 - DNA, 120 bp, Artificial Sequence
  ENSG00000172239_18 (sequence is synthesized)
agcatgtcggacggtttcgatcgggccccaggtgctggtcggggccggagccggggcctgggccgcggagggggcgggcctgagggcggcggtttcccgaacggagcggggcctgctgag

SEQ ID NO: 583001 - DNA, 120 bp, Artificial Sequence
  ENSG00000172239_19 (sequence is synthesized)
aggagtattatagctttcattttagtttgacatttagtgtcccaatgaattgaatttcaaatatgaatcataatcttgaaaatctttagcactaaagtcttggaatatatcaacaactga

SEQ ID NO: 583002 - DNA, 120 bp, Artificial Sequence
  ENSG00000172239_20 (sequence is synthesized)
tttacatatgcagatgctatttgataccaagggctttttaaatgtcatgggggggaaaaacccaacttggtgaactcccagctaaacaaccaagacttcactgaagatttattccaattc

SEQ ID NO: 583003 - DNA, 120 bp, Artificial Sequence
  ENSG00000172239_21 (sequence is synthesized)
tagaattgttcttttttatttttattttttcaactgactaacttcattaccttaaaggctagaacattattctgctttatttatatggctttctcacttttattttgtagcatgggttgc

SEQ ID NO: 583004 - DNA, 120 bp, Artificial Sequence
  ENSG00000172239_22 (sequence is synthesized)
atcgacttttttactagagaattttactagatatttgtcattcaagttttcatctgctttataattgatacaccttgagggtcacttttctaatacttttactataatgtggtaccacct

SEQ ID NO: 583005 - DNA, 120 bp, Artificial Sequence
  ENSG00000172239_23 (sequence is synthesized)
cagccctaataaataatatttttacctaatgtcaaatctttttccagctaactaaaaactgtgtacaaaaggattgcttgtaaatatgcatgtaaatagttctgttaataacccactgtt

SEQ ID NO: 583006 - DNA, 120 bp, Artificial Sequence
  ENSG00000172239_24 (sequence is synthesized)
ttacatttggtacatctgtgtctgctaatacagttagctttctcacttttctgcttgtttgttcagtctgaattaaaattagactttgaaaataaagcttaaatagttgtttcctctaaa

SEQ ID NO: 583007 - DNA, 120 bp, Artificial Sequence
  ENSG00000172243_0 (sequence is synthesized)
atctggttgaactacttaagcttaatttgttaaactccggtaagtacctagcccacatgatttgactcagagattctcttttgtccacagacagtcatctcaggagcagaaagaaaagag

SEQ ID NO: 583008 - DNA, 120 bp, Artificial Sequence
  ENSG00000172243_1 (sequence is synthesized)
ctcccaaatgctatatctattcaggggctctcaagaacaatggaatatcatcctgatttagaaaatttggatgaagatggatatactcaattacacttcgactctcaaagcaataccagg

SEQ ID NO: 583009 - DNA, 120 bp, Artificial Sequence
  ENSG00000172243_2 (sequence is synthesized)
atagctgttgtttcagagaaaggatcgtgtgctgcatctcctccttggcgcctcattgctgtaattttgggaatcctatgcttggtaatactggtgatagctgtggtcctgggtaccatg

SEQ ID NO: 583010 - DNA, 120 bp, Artificial Sequence
  ENSG00000172243_3 (sequence is synthesized)
ggggttctttccagcccttgtcctcctaattggattatatatgagaagagctgttatctattcagcatgtcactaaattcctgggatggaagtaaaagacaatgctggcaactgggctct

SEQ ID NO: 583011 - DNA, 120 bp, Artificial Sequence
  ENSG00000172243_4 (sequence is synthesized)
aatctcctaaagatagacagctcaaatgaattgggatttatagtaaaacaagtgtcttcccaacctgataattcattttggataggcctttctcggccccagactgaggtaccatggctc

SEQ ID NO: 583012 - DNA, 120 bp, Artificial Sequence
  ENSG00000172243_5 (sequence is synthesized)
tgggaggatggatcaacattctcttctaacttatttcagatcagaaccacagctacccaagaaaacccatctccaaattgtgtatggattcacgtgtcagtcatttatgaccaactgtgt

SEQ ID NO: 583013 - DNA, 120 bp, Artificial Sequence
  ENSG00000172243_6 (sequence is synthesized)
agtgtgccctcatatagtatttgtgagaagaagttttcaatgtaagaggaagggtggagaaggagagagaaatatgtgaggtagtaaggaggacagaaaacagaacagaaaagagtaaca

SEQ ID NO: 583014 - DNA, 120 bp, Artificial Sequence
  ENSG00000172243_7 (sequence is synthesized)
gctgaggtcaagataaatgcagaaaatgtttagagagcttggccaactgtaatcttaaccaagaaattgaagggagaggctgtgatttctgtatttgtcgacctacaggtaggctagtat

SEQ ID NO: 583015 - DNA, 120 bp, Artificial Sequence
  ENSG00000172243_8 (sequence is synthesized)
tatttttctagttagtagatccctagacatggaatcagggcagccaagcttgagtttttattttttatttatttatttttttgagatagggtctcactttgttacccaggctggagtgca

SEQ ID NO: 583016 - DNA, 61 bp, Artificial Sequence
  ENSG00000172243_9 (sequence is synthesized)
gtggcacaatctcgactcactgcagctatctctcgggtgttttttgtagagactgggtttt

SEQ ID NO: 583017 - DNA, 120 bp, Artificial Sequence
  ENSG00000172243_10 (sequence is synthesized)
cagatgtgagccaccacacctggccccaagcttgaattttcattctgccattgacttggcatttaccttgggtaagccataagcgaatcttaatttctggctctatcagagttgtttcat

SEQ ID NO: 583018 - DNA, 120 bp, Artificial Sequence
  ENSG00000172243_11 (sequence is synthesized)
cttaatttctggctctatcagagttgtttcatgctcaacaatgccattgaagtgcacggtgtgttgccacgatttgaccctcaacttctagcagtatatcagttatgaactgagggtgaa

SEQ ID NO: 583019 - DNA, 120 bp, Artificial Sequence
  ENSG00000172243_12 (sequence is synthesized)
atatatttctgaatagctaaatgaagaaatgggaaaaaatcttcaccacagtcagagcaattttattattttcatcagtatgatcataattatgattatcatcttagtaaaaagcaggaa

SEQ ID NO: 583020 - DNA, 120 bp, Artificial Sequence
  ENSG00000172243_13 (sequence is synthesized)
attatgattatcatcttagtaaaaagcaggaactcctactttttctttatcaattaaatagctcagagagtacatctgccatatctctaatagaatctttttttttttttttttttttga

SEQ ID NO: 583021 - DNA, 120 bp, Artificial Sequence
  ENSG00000172243_14 (sequence is synthesized)
cacccagcctagaatcttgtataatatgtaattgtagggaaactgctctcataggaaagttttctgctttttaaatacaaaaatacataaaaatacataaaatctgatgatgaatataaa

SEQ ID NO: 583022 - DNA, 120 bp, Artificial Sequence
  ENSG00000172243_15 (sequence is synthesized)
aaagtaaccaacctcattggaacaagtattaacattttggaatatgttttattagttttgtgatgtactgttttacaatttttaccatttttttcagtaattactgtaaaatggtattat

SEQ ID NO: 583023 - DNA, 120 bp, Artificial Sequence
  ENSG00000172243_16 (sequence is synthesized)
tggaatgaaactatatttcctcatgtgctgatttgtcttatttttttcatactttcccactggtgctatttttatttccaatggatatttctgtattactagggaggcatttacagtcct

SEQ ID NO: 583024 - DNA, 120 bp, Artificial Sequence
  ENSG00000172243_17 (sequence is synthesized)
ctaatgttgattaatatgtgaaaagaaattgtaccaattttactaaattatgcagtttaaaatggatgattttatgttatgtggatttcatttcaataaaaaaaaactcttatcaaaaaa

SEQ ID NO: 583025 - DNA, 120 bp, Artificial Sequence
  ENSG00000172243_18 (sequence is synthesized)
tttggagatccaattcaggaagcaacacattggagaatggctactttctatcaagaaataaagagaaccacagtcaacccacacaatcatctttagaagacagtgtgactcctaccaaag

SEQ ID NO: 583026 - DNA, 73 bp, Artificial Sequence
  ENSG00000172243_19 (sequence is synthesized)
ggtgtgtatcctgaaggaagatagagggagattccaggtaatgacaatttttcctaaaatgaagagctagagt

SEQ ID NO: 583027 - DNA, 120 bp, Artificial Sequence
  ENSG00000172243_20 (sequence is synthesized)
acctcagcttcctgagtaggtaggactacagggtgcaccaccacactcgtctaatgtttttttgtatttttcatagagacgaggtttctccatatcatctgggctggtctcaaaatcctg

SEQ ID NO: 583028 - DNA, 120 bp, Artificial Sequence
  ENSG00000172243_21 (sequence is synthesized)
gtgttgggattacaggtgtaagccaccatacttggccaaaattcatttttaatatctctataattataatcatagcatgccttaagcacataaagtgcatagtatatgcttttattttta

SEQ ID NO: 583029 - DNA, 120 bp, Artificial Sequence
  ENSG00000172243_22 (sequence is synthesized)
cataaagtgcatagtatatgcttttatttttaactaatttaaaaaactgtgtttcgccttaaaacaaatcctttcaaacatactccatgtatgcatgactacaataatcaggacactacc

SEQ ID NO: 583030 - DNA, 120 bp, Artificial Sequence
  ENSG00000172243_23 (sequence is synthesized)
gtatataatctggttttatctgtattgggttggtgctgttaatgcccatttcacttataaagggtgtgagagactgagaggttattttacctttccagggttataagctagttagtggtg

SEQ ID NO: 583031 - DNA, 120 bp, Artificial Sequence
  ENSG00000172243_24 (sequence is synthesized)
ggaccatgattagaaatttgggtgatctgtctaaaaaactcatactcttaactacattgctctcctacctcccttacatagctggtttcaaagctgtggaattcaaaggataaattaatg

SEQ ID NO: 583032 - DNA, 120 bp, Artificial Sequence
  ENSG00000172243_25 (sequence is synthesized)
aagaaaacaagcggagctgaagaagaaagtacaatatggtgctgtcttcctaatgaaataaattcactaaatggacattaagctatttttatgattcacattatttaaggaaattatttc

SEQ ID NO: 583033 - DNA, 120 bp, Artificial Sequence
  ENSG00000172243_26 (sequence is synthesized)
cgatctttaatataaacacctttgaatacaccagaaatttcctgaggcacttggtcttaagtcgatattttgtaatggattaatattttttttacattttatatcacatgcaatctgttg

SEQ ID NO: 583034 - DNA, 120 bp, Artificial Sequence
  ENSG00000172243_27 (sequence is synthesized)
tcagtcaccttcagagagtcttcatgacattccttaattagtcaaatgtttattgagtgcgttctatgttataggtactgggcagtttctcaaggatctctcatttttaaataacagaag

SEQ ID NO: 583035 - DNA, 120 bp, Artificial Sequence
  ENSG00000172243_28 (sequence is synthesized)
aaaggtgaaagatgttgctatttcaaatctgtcatgggtccaattgactctatgacatttgcctcttgctgcctccctcattctatttcttcttctccaccttcttttttcttttctttt

SEQ ID NO: 583036 - DNA, 120 bp, Artificial Sequence
  ENSG00000172243_29 (sequence is synthesized)
tttttttttactatacctcctttataaaagttatgtatttcttttcatctattctatcaatcgtctttatctctccacagcaatatatcatctatttatcattaatcaataatgtattct

SEQ ID NO: 583037 - DNA, 120 bp, Artificial Sequence
  ENSG00000172243_30 (sequence is synthesized)
ctggcaactgggctctaatctcctaaagatagacagctcaaatgaattgagtctcactctgttgcccaagctagagtgcagtgaagccgcgacatcccaggctcaagtgatcctcccacc

SEQ ID NO: 583038 - DNA, 120 bp, Artificial Sequence
  ENSG00000172243_31 (sequence is synthesized)
atggaatatcatcctgatttagaaaatttggatgaagatggatatactcaattacacttcgactctcaaagcaataccaggatagctgttgtttcagagaaagggatttatagtaaaaca

SEQ ID NO: 583039 - DNA, 120 bp, Artificial Sequence
  ENSG00000172244_0 (sequence is synthesized)
gttgcggagctctgaagcggctccctgagggcgctggttttgaactggtcttgtgcggtttgcgctttctcttagtggttacagttggcgctgtctccgctttcctgtttcgtggcgggc

SEQ ID NO: 583040 - DNA, 120 bp, Artificial Sequence
  ENSG00000172244_1 (sequence is synthesized)
atcttggccaaaacactctccctgccaccttattcctctagggttgtgatttttttctttcaccaagaaatatcactcgctggtaatttgtcaaactgaagaaacccctgaagaagcagt

SEQ ID NO: 583041 - DNA, 120 bp, Artificial Sequence
  ENSG00000172244_2 (sequence is synthesized)
ggtgggcaggcgccgacgctgcggcttccagagcattttggcaaatcaaagccagggaccgttgctgggcctcatttccgcaacttttcggctccgaactgcttctttgacttagaagat

SEQ ID NO: 583042 - DNA, 120 bp, Artificial Sequence
  ENSG00000172244_3 (sequence is synthesized)
atcttatcctgccgttgtaatggcagctgaactgcgaatgatactttatgaagatgattcagtacaagtacaatatgttgatggttccacattgcaactttctccctgtggctctgaatt

SEQ ID NO: 583043 - DNA, 120 bp, Artificial Sequence
  ENSG00000172244_4 (sequence is synthesized)
tttatttgaaaagtcaccacctgtttcagcacatcctttagaacaaccagaaagaattcgtcaaaggacacattttgtcattagcacttacagagagcaactacagcgagccctagattt

SEQ ID NO: 583044 - DNA, 120 bp, Artificial Sequence
  ENSG00000172244_5 (sequence is synthesized)
tcgaaactcttcagctacttgcccttttttatctgaaaccatcataccttctgaaagaaaaaagcatatcttcattgacataacagaagtgagatggcccagtcttgatacagatggtac

SEQ ID NO: 583045 - DNA, 120 bp, Artificial Sequence
  ENSG00000172244_6 (sequence is synthesized)
catgatatatatggagagtggcattgtgaagataacatctttagatggtcatgcatacctctgcctgcccagatctcagcatgaatttacagtacattttttgtgtaaagttagccagaa

SEQ ID NO: 583046 - DNA, 120 bp, Artificial Sequence
  ENSG00000172244_7 (sequence is synthesized)
gtcagactcatctgcagtgttgtcagaaacaaataataaagccccaaaagataaactagttgaaaaaactggcaaaatctgtatacgtggaaatttaccaggacagagactgaagaataa

SEQ ID NO: 583047 - DNA, 120 bp, Artificial Sequence
  ENSG00000172244_8 (sequence is synthesized)
agaaaatgagtttcattgccagatcatgaaatccaaagaaactttaaagaagatgagttgtgtaaatggaactgaagggagggaagagctgccttcgcctggtacaaagcacacatgtgt

SEQ ID NO: 583048 - DNA, 120 bp, Artificial Sequence
  ENSG00000172244_9 (sequence is synthesized)
atacacatgggtcaagcagtgctggtctgtggctgcctgtccagaggaatggaaatatcctttgtctttagcacttcattttcataataaaatcagcaatatgtctaaaattgatgcaca

SEQ ID NO: 583049 - DNA, 120 bp, Artificial Sequence
  ENSG00000172244_10 (sequence is synthesized)
cctacacaggtggaatttttgtgattcacttttacagagacaatctgatgaatattcctatcctgaactagtgaaaatggtttggtacaaaggtgttacatatagacttacccatcaaaa

SEQ ID NO: 583050 - DNA, 120 bp, Artificial Sequence
  ENSG00000172244_11 (sequence is synthesized)
tatgaactcaatagagatttattctggggatggatctgttttcaaatcagaaggggcttattttgggaactattttacttattattctattcaagaaggatcaggaaagagagaagagaa

SEQ ID NO: 583051 - DNA, 120 bp, Artificial Sequence
  ENSG00000172244_12 (sequence is synthesized)
aacttactcagtaaataaccttcctccagatagaccgggaagtccattcactgtcggttctctaattaaacaggcaacaagaattcttcaacattgtgtgaagatgagactttctttaag

SEQ ID NO: 583052 - DNA, 120 bp, Artificial Sequence
  ENSG00000172244_13 (sequence is synthesized)
ccataactatcgtatatgctgctggaaaatggtacctgggataaatgatagcaatatactgcctttggttttgaaagagtcactcatacccagtgtgggaagatttcttgcctactctga

SEQ ID NO: 583053 - DNA, 120 bp, Artificial Sequence
  ENSG00000172244_14 (sequence is synthesized)
tgacaaagtacatgctatctttttagatggcattactctaaccctaaattggaatttcagctctcctattgagaagagacaggtaaatcaaggtcttaacttaggttggtgtaagttaac

SEQ ID NO: 583054 - DNA, 120 bp, Artificial Sequence
  ENSG00000172244_15 (sequence is synthesized)
ttttcctgatggacaagagcagttaattcagattgaacaccctgaaccatatgaaagatatgtgacaacagtaacatcatggtgcaggagactgacccagactagtcccagagagatgcc

SEQ ID NO: 583055 - DNA, 120 bp, Artificial Sequence
  ENSG00000172244_16 (sequence is synthesized)
cactcattcgtcatcttctgttctccaagaaaattggtctgttgcttctgaacttgaaaagatacagaagtttaacttgctactagaaaatagtggtatcctaaaccagatttctaacaa

SEQ ID NO: 583056 - DNA, 120 bp, Artificial Sequence
  ENSG00000172244_17 (sequence is synthesized)
gaaaaatgaacaacagtcttttgatcattataaaccaggatcttcagaaaccttgctaggagaagttaatgaaaatagagtatcaatagcattgaaaaaaacctctgaaatccttcacga

SEQ ID NO: 583057 - DNA, 120 bp, Artificial Sequence
  ENSG00000172244_18 (sequence is synthesized)
tattgactgtcttctatcaaactctaaaaagtgaaaaatggaattattacaacatattattaaagtttaaggatgttgtttcaagtgactggtataaaattactagtaagccaagatatt

SEQ ID NO: 583058 - DNA, 120 bp, Artificial Sequence
  ENSG00000172244_19 (sequence is synthesized)
gtacgtattaccccggcacaatgattgtgaaagaactgacatttaactttgaaggtatttttaacttgtacatttttaaaatatgtatttatatcttaataataaatatttcgaagtttt

SEQ ID NO: 583059 - DNA, 120 bp, Artificial Sequence
  ENSG00000172244_20 (sequence is synthesized)
tcaaatggtaaactgagacttttttccccaaaaaaactttcttagttttgaatatgtttaactcctaaagtatttttgatagcttaagcttgaaaataatttctaatcagacatctaatt

SEQ ID NO: 583060 - DNA, 120 bp, Artificial Sequence
  ENSG00000172244_21 (sequence is synthesized)
tattacatttcatcatattctattttacctaaaggtaagaaaaccttgcattgaaaacttaacatgaaaatgagtggctctttttatgtgacaaattcatcctgaaaactttatggaaaa

SEQ ID NO: 583061 - DNA, 120 bp, Artificial Sequence
  ENSG00000172244_22 (sequence is synthesized)
cagggccctgtcactcagctgtccagtcccacacctacacaggtaatgcagtaatggctattggtcatgaagctttttatcagaaccagtcttaacctggataattttctttttatctga

SEQ ID NO: 583062 - DNA, 120 bp, Artificial Sequence
  ENSG00000172244_23 (sequence is synthesized)
taccattcacaaggaaagtttatctcatccaaaattttgcttttaactgatagtaaataatttccctagcaaatgtgttgcttatgttttttactctgtgtccatgcattgaatgtagaa

SEQ ID NO: 583063 - DNA, 120 bp, Artificial Sequence
  ENSG00000172247_0 (sequence is synthesized)
ctcttcgctctcgctcggctccctctctagctgaccttccctttccctcacgcctccccacgcccggcccctggccccagcaccctgtccgctgccgcctcagagccgggaaaagcagcc

SEQ ID NO: 583064 - DNA, 120 bp, Artificial Sequence
  ENSG00000172247_1 (sequence is synthesized)
ggtcagcgcgcagcccggcacccgcagcctgcagcctgcagcccgcagcccgcagcccggagccagatcgcgggctcagaccgaacccgactcgaccgccgcccccagccaggcgccatg

SEQ ID NO: 583065 - DNA, 120 bp, Artificial Sequence
  ENSG00000172247_2 (sequence is synthesized)
ccggagccagatcgcgggctcagaccgaacccgactcgaccgccgcccccagccaggcgccatgctgccgcttctgctgggcctgctgggcccagcggcctgctgggccctgggcccgac

SEQ ID NO: 583066 - DNA, 120 bp, Artificial Sequence
  ENSG00000172247_3 (sequence is synthesized)
ccttctcggcggcacgcaccacccccctggagggcacgtcggagatggcggtgaccttcgacaaggtgtacgtgaacatcgggggcgacttcgatgtggccaccggccagtttcgctgcc

SEQ ID NO: 583067 - DNA, 120 bp, Artificial Sequence
  ENSG00000172247_4 (sequence is synthesized)
gcgtgcccggcgcctacttcttctccttcacggctggcaaggccccgcacaagagcctgtcggtgatgctggtgcgaaaccgcgacgaggtgcaggcgctggccttcgacgagcagcggc

SEQ ID NO: 583068 - DNA, 120 bp, Artificial Sequence
  ENSG00000172247_5 (sequence is synthesized)
cagtacgcgctaggcgcgcccggcgccaccttcagcggctacctagtctacgccgacgccgacgctgacgcgcctgcgcgcgggccgcccgcgccccccgagccgcgctcggccttctcg

SEQ ID NO: 583069 - DNA, 120 bp, Artificial Sequence
  ENSG00000172247_6 (sequence is synthesized)
cgcgcacgcgcagcttggtgggctcggacgctggccccgggccgcggcaccaaccactcgccttcgacaccgagttcgtcaacattggcggcgacttcgacgcggcggccggcgtgttcc

SEQ ID NO: 583070 - DNA, 120 bp, Artificial Sequence
  ENSG00000172247_7 (sequence is synthesized)
gctgccgtctgcccggcgcctacttcttctccttcacgctgggcaagctgccgcgtaagacgctgtcggttaagctgatgaagaaccgcgacgaggtgcaggccatgatttacgacgacg

SEQ ID NO: 583071 - DNA, 120 bp, Artificial Sequence
  ENSG00000172247_8 (sequence is synthesized)
gcgcgtcgcggcgccgcgagatgcagagccagagcgtgatgctggccctgcggcgcggcgacgccgtctggctgctcagccacgaccacgacggctacggcgcctacagcaaccacggca

SEQ ID NO: 583072 - DNA, 120 bp, Artificial Sequence
  ENSG00000172247_9 (sequence is synthesized)
agtacatcaccttctccggcttcctggtgtaccccgacctcgcccccgccgccccgccgggcctcggggcctcggagctactgtgagccccgggccagagaagagcccgggagggccagg

SEQ ID NO: 583073 - DNA, 120 bp, Artificial Sequence
  ENSG00000172247_10 (sequence is synthesized)
ggcgtgcatgccaggccgggccggaggctcgaaagtcccgcgcgagcgccacggcctccgggcgcgcctggactctgccaataaagcggaaagcgggcacgcgcagcgcccggcagccca

SEQ ID NO: 583074 - DNA, 120 bp, Artificial Sequence
  ENSG00000172260_0 (sequence is synthesized)
gagtgcgagctgaaagctgctggagagtgagcagccctagcagggatggacatgatgctgttggtgcagggtgcttgttgctcgaaccagtggctggcggcggtgctcctcagcctgtgc

SEQ ID NO: 583075 - DNA, 120 bp, Artificial Sequence
  ENSG00000172260_1 (sequence is synthesized)
tgcctgctaccctcctgcctcccggctggacagagtgtggacttcccctgggcggccgtggacaacatgatggtcagaaaaggggacacggcggtgcttaggtgttatttggaagatgga

SEQ ID NO: 583076 - DNA, 120 bp, Artificial Sequence
  ENSG00000172260_2 (sequence is synthesized)
gcttcaaagggtgcctggctgaaccggtcaagtattatttttgcgggaggtgataagtggtcagtggatcctcgagtttcaatttcaacattgaataaaagggactacagcctccagata

SEQ ID NO: 583077 - DNA, 120 bp, Artificial Sequence
  ENSG00000172260_3 (sequence is synthesized)
cagaatgtagatgtgacagatgatggcccatacacgtgttctgttcagactcaacatacacccagaacaatgcaggtgcatctaactgtgcaagttcctcctaagatatatgacatctca

SEQ ID NO: 583078 - DNA, 120 bp, Artificial Sequence
  ENSG00000172260_4 (sequence is synthesized)
aatgatatgaccgtcaatgaaggaaccaacgtcactcttacttgtttggccactgggaaaccagagccttccatttcttggcgacacatctccccatcagcaaaaccatttgaaaatgga

SEQ ID NO: 583079 - DNA, 120 bp, Artificial Sequence
  ENSG00000172260_5 (sequence is synthesized)
caatatttggacatttatggaattacaagggaccaggctggggaatatgaatgcagtgcggaaaatgatgtgtcattcccagatgtgaggaaagtaaaagttgttgtcaactttgctcct

SEQ ID NO: 583080 - DNA, 120 bp, Artificial Sequence
  ENSG00000172260_6 (sequence is synthesized)
actattcaggaaattaaatctggcaccgtgacccccggacgcagtggcctgataagatgtgaaggtgcaggtgtgccgcctccagcctttgaatggtacaaaggagagaagaagctcttc

SEQ ID NO: 583081 - DNA, 120 bp, Artificial Sequence
  ENSG00000172260_7 (sequence is synthesized)
aatggccaacaaggaattattattcaaaattttagcacaagatccattctcactgttaccaacgtgacacaggagcacttcggcaattatacctgtgtggctgccaacaagctaggcaca

SEQ ID NO: 583082 - DNA, 120 bp, Artificial Sequence
  ENSG00000172260_8 (sequence is synthesized)
accaatgcgagcctgcctcttaaccctccaagtacagcccagtatggaattaccgggagcgctgatgttcttttctcctgctggtaccttgtgttgacactgtcctctttcaccagcata

SEQ ID NO: 583083 - DNA, 120 bp, Artificial Sequence
  ENSG00000172260_9 (sequence is synthesized)
ttctacctgaagaatgccattctacaataaattcaaagacccataaaaggcttttaaggattctctgaaagtgctgatggctggatccaatctggtacagtttgttaaaagcagcgtggg

SEQ ID NO: 583084 - DNA, 120 bp, Artificial Sequence
  ENSG00000172260_10 (sequence is synthesized)
atataatcagcagtgcttacatggggatgatcgccttctgtagaattgctcattatgtaaatactttaattctactcttttttgattagctacattaccttgtgaagcagtacacattgt

SEQ ID NO: 583085 - DNA, 120 bp, Artificial Sequence
  ENSG00000172260_11 (sequence is synthesized)
cctttttttaagacgtgaaagctctgaaattacttttagaggatattaattgtgatttcatgtttgtaatctacaacttttcaaaagcattcagtcatggtctgctaggttgcaggctgt

SEQ ID NO: 583086 - DNA, 120 bp, Artificial Sequence
  ENSG00000172260_12 (sequence is synthesized)
agtttacaaaaacgaatattgcagtgaatatgtgattctttaaggctgcaatacaagcattcagttccctgtttcaataagagtcaatccacatttacaaagatgcatttttttcttttt

SEQ ID NO: 583087 - DNA, 120 bp, Artificial Sequence
  ENSG00000172260_13 (sequence is synthesized)
tgataaaaaagcaaataatattgccttcagattatttcttcaaaatataacacatatctagatttttctgctcgcatgatattcaggtttcaggaatgagccttgtaatataactggctg

SEQ ID NO: 583088 - DNA, 120 bp, Artificial Sequence
  ENSG00000172260_14 (sequence is synthesized)
tgcagctctgcttctctttcctgtaagttcagcatgggtgtgccttcatacaataatatttttctctttgtctccaactaatataaaatgttttgctaaatcttacaatttgaaagtaaa

SEQ ID NO: 583089 - DNA, 120 bp, Artificial Sequence
  ENSG00000172260_15 (sequence is synthesized)
aataaaccagagtgatcaagttaaaccatacactatctctaagtaacgaaggagctattggactgtaaaaatctcttcctgcactgacaatggggtttgagaattttgccccacactaac

SEQ ID NO: 583090 - DNA, 120 bp, Artificial Sequence
  ENSG00000172260_16 (sequence is synthesized)
tcagttcttgtgatgagagacaatttaataacagtatagtaaatataccatatgatttctttagttgtagctaaatgttagatccaccgtgggaaatcattccctttaaaatgacagcac

SEQ ID NO: 583091 - DNA, 120 bp, Artificial Sequence
  ENSG00000172260_17 (sequence is synthesized)
agtccactcaaaggattgcctagcaatacagcatcttttcctttcactagtccaagccaaaaattttaagatgatttgtcagaaagggcacaaagtcctatcacctaatattacaagagt

SEQ ID NO: 583092 - DNA, 120 bp, Artificial Sequence
  ENSG00000172260_18 (sequence is synthesized)
tggtaagcgctcatcattaattttattttgtggcagctaagttagtatgacagaggcagtgctcctgtggacaggagcattttgcatattttccatctgaaagtatcactcagttgatag

SEQ ID NO: 583093 - DNA, 120 bp, Artificial Sequence
  ENSG00000172260_19 (sequence is synthesized)
tctggaatgcatgttatatattttaaaacttccaaaatatattataacaaacattctatatcggtatgtagcagaccaatctctaaaatagctaattcttcaataaaatctttctatata

SEQ ID NO: 583094 - DNA, 120 bp, Artificial Sequence
  ENSG00000172260_20 (sequence is synthesized)
gccatttcagtgcaaacaagtaaaatcaaaaaagaccatcctttatttttccttacatgatatatgtaagatgcgatcaaataaagacaaaacaccagtgatgagaatatcttaagataa

SEQ ID NO: 583095 - DNA, 120 bp, Artificial Sequence
  ENSG00000172260_21 (sequence is synthesized)
gtaattatcaaattattgtgaatgttaaattatttctactataaagaagcaaaactacatttttgaaggaaaatgctgttactctaacattaatttacaggaatagtttgatggtttcac

SEQ ID NO: 583096 - DNA, 120 bp, Artificial Sequence
  ENSG00000172260_22 (sequence is synthesized)
tctttactaaagaaaggccatcaccttgaaagccattttacaggtttgatgaagttaccaatttcagtacacctaaatttctacaaatagtccccttttacaagttgtaacaacaaagac

SEQ ID NO: 583097 - DNA, 120 bp, Artificial Sequence
  ENSG00000172260_23 (sequence is synthesized)
cctataataaaattagatacaagaaattttgcagtggttatacatatttgagatatctagtatgttgccctagcagggatggcttaaaaactgtgattttttttcttcaagtaaaactta

SEQ ID NO: 583098 - DNA, 120 bp, Artificial Sequence
  ENSG00000172260_24 (sequence is synthesized)
gtcccaaagtacatcataaatcaattttaattagaaaaatgaatcttaaatgaggggacataagtatactctttccacaaaatggcaataataaggcataaagctagtaaatctactaac

SEQ ID NO: 583099 - DNA, 120 bp, Artificial Sequence
  ENSG00000172260_25 (sequence is synthesized)
tgtaataaatgtatgacattattttgattgatacattaaaaaagagtttttagaacaaatatggcatttaactttattatttatttgcttttaagaaatattctttgtggaattgttgaa

SEQ ID NO: 583100 - DNA, 120 bp, Artificial Sequence
  ENSG00000172260_26 (sequence is synthesized)
taaactataaaatattattttgtattgcagctttaaagtggcacactccataataatctacttactagaaatagtggtgctaccacaaaaaatgttaaccatcagtaccattgtttggga

SEQ ID NO: 583101 - DNA, 120 bp, Artificial Sequence
  ENSG00000172260_27 (sequence is synthesized)
gaaagaaacagatcaagaatgcatattattcagtgaccgctttcctagagttaaaatacctcctctttgtaaggtttgtaggtaaattgaggtataaactatggatgaaccaaataatta

SEQ ID NO: 583102 - DNA, 120 bp, Artificial Sequence
  ENSG00000172260_28 (sequence is synthesized)
gttcaaagtgttgtcatgattccaaatttgtggagtctggtgtttttaccatagaatgtgacagaagtacagtcatagctcagtagctatatgtatttgcctttatgttagaagagactt

SEQ ID NO: 583103 - DNA, 120 bp, Artificial Sequence
  ENSG00000172260_29 (sequence is synthesized)
tcttgagtgacatttttaaatagaggaggtattcactatgtttttctgtatcacagcagcattcctagtccttaggccctcggacagagtgaaatcatgagtatttatgagttcaatatt

SEQ ID NO: 583104 - DNA, 120 bp, Artificial Sequence
  ENSG00000172260_30 (sequence is synthesized)
gtcaaataaggctacagtatttgcttttttgtgtgaatgtattgcatataatgttcaagtagatgattttacatttatggacatataaaatgtctgattaccccattttatcagtcctga

SEQ ID NO: 583105 - DNA, 120 bp, Artificial Sequence
  ENSG00000172260_31 (sequence is synthesized)
ctgtacaagattgttgcaatttcagaatagcagttttataaattgatttatcttttaatctataacaatttgtgttagctgttcatttcaggattatattttctacaagttccacttgtg

SEQ ID NO: 583106 - DNA, 120 bp, Artificial Sequence
  ENSG00000172260_32 (sequence is synthesized)
ggactccttttgttgcccctatttttttttaaagaaggaagaaagaaaaataagtagcagtttaaaaatgagaatggagagaaaagaaaaagaatgaaaaggaaaggcagtaaagaggga

SEQ ID NO: 583107 - DNA, 120 bp, Artificial Sequence
  ENSG00000172260_33 (sequence is synthesized)
aaaaaaggaaggatggaaggaatgaaggaaggaagggaggaaggggagaaggtaggaagaaagaaaggatgagagggaaggaagaatcagagtattagggtagttaacttacacatttgc

SEQ ID NO: 583108 - DNA, 120 bp, Artificial Sequence
  ENSG00000172260_34 (sequence is synthesized)
attcttagtttaactgcaagtggtgtaactacgtttttcaatgatcgcatttgaaacataagtcctattataccattaagttcctattatgcagcaattatataataaaaagtactgccc

SEQ ID NO: 583109 - DNA, 120 bp, Artificial Sequence
  ENSG00000172260_35 (sequence is synthesized)
aagttatagtaatgtgggtgtttttgagacactaaaagatttgagagggagaatttcaaacttaaagccacttttggggggtttataacttaactgaaaaattaatgcttcatcataaca

SEQ ID NO: 583110 - DNA, 120 bp, Artificial Sequence
  ENSG00000172260_36 (sequence is synthesized)
tttaagctatatctagaaagtagactggagaactgagaaaattacccaggtaattcagggaaaaaaaaaaatatatatatatataaatacccctacatttgaagtcagaaaactctgaaa

SEQ ID NO: 583111 - DNA, 120 bp, Artificial Sequence
  ENSG00000172260_37 (sequence is synthesized)
aactgaattatcaaagtcaatcatctataatgatcaaatttactgaacaattgttaatttatccattgtgcttagctttgtgacacagccaaaagttacctatttaatcttttcaataaa

SEQ ID NO: 583112 - DNA, 120 bp, Artificial Sequence
  ENSG00000172260_38 (sequence is synthesized)
aattgttttttgaaatccagaaatgatttaaaaagaggtcaggtttttaactatttattgaagtatgtggatgtacagtatttcaatagatatgaatatgaataaatggtatgccttaag

SEQ ID NO: 583113 - DNA, 120 bp, Artificial Sequence
  ENSG00000172260_39 (sequence is synthesized)
attctttgaatatgtatttactttaaagactggaaaaagctcttcctgtcttttagtaaaacatccatatttcataacctgatgtaaaatatgttgtactgtttccaataggtgaatata

SEQ ID NO: 583114 - DNA, 120 bp, Artificial Sequence
  ENSG00000172260_40 (sequence is synthesized)
aactcagtttatcaattaaaatatgtatttgactcattttaaaactctattagcttaagagaaagaaggaagaaataataatttgaagatatttctgctattctctttatttcctgtatt

SEQ ID NO: 583115 - DNA, 120 bp, Artificial Sequence
  ENSG00000172260_41 (sequence is synthesized)
acactcatctttctgcttactctaaagcagtacagggtaaaaattctagatgctacagtttcaaatgactccacactatattctttcttgctgttgctgattcctaaaaggtttgatgag

SEQ ID NO: 583116 - DNA, 120 bp, Artificial Sequence
  ENSG00000172260_42 (sequence is synthesized)
ctgaactacatctaaactaaaaataaattttctggaaacattttattattaattatttagaacctttacctggtaaaatacagcagagttagcaacagagactaaatatcctgttgataa

SEQ ID NO: 583117 - DNA, 120 bp, Artificial Sequence
  ENSG00000172260_43 (sequence is synthesized)
aatcctgatgatcttacaggctaaacaactgaaaactcaaacgcttgtaagagccaggcagagtgtaatttcttaacagctgggtataaaacaacgggcacctgaaggtattcagataca

SEQ ID NO: 583118 - DNA, 120 bp, Artificial Sequence
  ENSG00000172260_44 (sequence is synthesized)
atttccttaaaaataccttggtttccaagcaaaacacgttatttggctgagaacctttagtttgtaaataccaaaccataatatacaaatgagatctcaagccaaatgaattttttaagc

SEQ ID NO: 583119 - DNA, 120 bp, Artificial Sequence
  ENSG00000172260_45 (sequence is synthesized)
cctctttcccatatctgttcatctatgatagtcaactgaataaatgagaacaatgtgatagataaaacaacaaagcataaaaaagattcatgcttggttttataagctattttgaaatat

SEQ ID NO: 583120 - DNA, 120 bp, Artificial Sequence
  ENSG00000172260_46 (sequence is synthesized)
aagtatcattgctattctgagaaatctatatacaccaaagccctccctccacaaaaaaactggaaatgttctaataaatgtctgatttcccccacagcttcattatttcttcccttttca

SEQ ID NO: 583121 - DNA, 120 bp, Artificial Sequence
  ENSG00000172260_47 (sequence is synthesized)
acatctatcttatctatcttgcataaattacatcacagaaacagaaacatcaagtatcagacatggaaaaccagcacatgaaacagagctagtttccctctcaaaagaatagggcaaaac

SEQ ID NO: 583122 - DNA, 120 bp, Artificial Sequence
  ENSG00000172260_48 (sequence is synthesized)
atagatgcttcaaaatcatatcttggtatacagaaaataattattcactttaacctgacagtcagaaatgtaagtaagaatttgtagagataattttccaaggtaattcattcaagttag

SEQ ID NO: 583123 - DNA, 120 bp, Artificial Sequence
  ENSG00000172260_49 (sequence is synthesized)
tggaatttgatccaaacacccgtcaatgtactccctctgaactttccaagaatcatacaccttcacatttacattcactgtttttctagtaattccaaacttactcaaaagtatttcaga

SEQ ID NO: 583124 - DNA, 120 bp, Artificial Sequence
  ENSG00000172260_50 (sequence is synthesized)
attgatatcactggtggaaagagagcaatttagcaaacaaatacatgctttccggtattcctagagaaaaggaaaagaggaatacgtttcattcttctccctagaagctctacccacagt

SEQ ID NO: 583125 - DNA, 120 bp, Artificial Sequence
  ENSG00000172260_51 (sequence is synthesized)
catcctaaagctagaccaatctctcccagggctttccttcagtctaagaaacatgcttcatttcagagacaattgtggcaactatagttttccccaaagggtcacaactacctctccttt

SEQ ID NO: 583126 - DNA, 120 bp, Artificial Sequence
  ENSG00000172260_52 (sequence is synthesized)
gagcacttttgcaagtgttgctattgtggctttctcaacactttcaaatacttaaaggagaaaatattactattgtcatgtattgatggtgaaaacgagattcagaaattttgagtcact

SEQ ID NO: 583127 - DNA, 120 bp, Artificial Sequence
  ENSG00000172260_53 (sequence is synthesized)
tgctgaagattatacttcaactaagtggcagatctgagccaaatatgcaatgaaaaatgttcccaatttgtttccagtcccagactacctaggaaaaagaaaagcatataatcacattgc

SEQ ID NO: 583128 - DNA, 120 bp, Artificial Sequence
  ENSG00000172260_54 (sequence is synthesized)
tagcttcatagacaactatttgcatatttttatttatatatttatataaatataagcacattttaaatataaatatagatatttatgacatccttgtattttccaatacctgcagagggt

SEQ ID NO: 583129 - DNA, 120 bp, Artificial Sequence
  ENSG00000172260_55 (sequence is synthesized)
atgagatttaaaggctaatcagattgtacatgtcatctaaaactttggaaacgtgaaactcacagtacagttgcctttggacacacagccttgggttgtatgagactggtcacaccaagt

SEQ ID NO: 583130 - DNA, 120 bp, Artificial Sequence
  ENSG00000172260_56 (sequence is synthesized)
ggagaatcttgtcataatcgcatgtatcttctttttgtatagcattttgcaaaaaatgtgtcaagtttgggataatccactaagactattcctcagacatctgcaatcaacagaattttg

SEQ ID NO: 583131 - DNA, 120 bp, Artificial Sequence
  ENSG00000172260_57 (sequence is synthesized)
ggggaaatggagatcagaatacatacacacttttaaaaaaattcacaatactgattttaatctgagtgatgttgtttgaggccatttatattgaaatactaacatgaacatctgtttgtg

SEQ ID NO: 583132 - DNA, 120 bp, Artificial Sequence
  ENSG00000172260_58 (sequence is synthesized)
ctgggacagtagaacaagagaaagattctaattctagaaattaaatgatatgcaacctaagaaatacatttgtactttgttttcaaaatatgaatataatacaaatcctatggatatcac

SEQ ID NO: 583133 - DNA, 120 bp, Artificial Sequence
  ENSG00000172260_59 (sequence is synthesized)
cacttagtttgaaaaacataaaaagtgtgattttcatacacttatgaaatgaataaattaattcattaatgaaggacctgataagacattacaaccagataaaaggataatttaaagaac

SEQ ID NO: 583134 - DNA, 120 bp, Artificial Sequence
  ENSG00000172260_60 (sequence is synthesized)
atacacatttatagatcaaaaaccttgaaattaatgtactaatagaggcaaaactggcttccagagtgaggaggagaattcaattgaatctttacccctcagaatttatttccatatctg

SEQ ID NO: 583135 - DNA, 120 bp, Artificial Sequence
  ENSG00000172260_61 (sequence is synthesized)
tagacgagaaatattttgccttagtattatttatttacaacttgaaaaagagttcaaatataatgaaaaatacagaggctccaaaagaatcagaatcaggtaacctgtaaaagtgtgttc

SEQ ID NO: 583136 - DNA, 120 bp, Artificial Sequence
  ENSG00000172260_62 (sequence is synthesized)
caagtaattagtggtttttcatttcagcaaaaattcttctctgcaatgaagagacataatttttttttctttttcagagttttgctcggttgccctggatggagtgcagtggtgtgatct

SEQ ID NO: 583137 - DNA, 70 bp, Artificial Sequence
  ENSG00000172260_63 (sequence is synthesized)
gacctcaagtgatccacttcacgagatgtaaaatttttaaagccattgaattaaattcattgctaacatt

SEQ ID NO: 583138 - DNA, 120 bp, Artificial Sequence
  ENSG00000172260_64 (sequence is synthesized)
aaatttttaaagccattgaattaaattcattgctaacattttgagctttgataatgtaatgcctactttaatgacccaaaaaaaaaaaaacccaagtaacctatctatctaataatctat

SEQ ID NO: 583139 - DNA, 120 bp, Artificial Sequence
  ENSG00000172260_65 (sequence is synthesized)
gttttttaattactccttttcttccttatctcacaaaccataatccaatagtctaggacatgtgaaagagaaagtaaacagtcacaagaactaccttgcttcgagaatccaccttgttga

SEQ ID NO: 583140 - DNA, 120 bp, Artificial Sequence
  ENSG00000172260_66 (sequence is synthesized)
aaaaataatatattttgggcacttgttaaaaagaattaacagaaaaagtctttttttttttgtcacaggggcatttaattcatggtataacaggaattttatatcaaaaacagtaagaaa

SEQ ID NO: 583141 - DNA, 120 bp, Artificial Sequence
  ENSG00000172260_67 (sequence is synthesized)
aatgaagtaacagttgagatagcaataattcatcaaccaaatactatgataatgataaaaacattgcaagaagctatagccagaactgagtgttctgctcctacttagtgctaatgagcc

SEQ ID NO: 583142 - DNA, 120 bp, Artificial Sequence
  ENSG00000172260_68 (sequence is synthesized)
cagtcctagcacacatcttggtttggtagaaactacaggaggtagcatggttcattacaccttcaaaactttaaaatgttaaagagggtggtttccctccttcatttcaaatggattgct

SEQ ID NO: 583143 - DNA, 120 bp, Artificial Sequence
  ENSG00000172260_69 (sequence is synthesized)
aaaagcactgggctattccttggtggaaatttgaatttgccagtttcttcatcaattttgactttttacattcaaaaaggagttaactttacactaagtcacagcagacttagacctccc

SEQ ID NO: 583144 - DNA, 120 bp, Artificial Sequence
  ENSG00000172260_70 (sequence is synthesized)
gcagttctgaattgtgcttaaacaagtattcaagcacatggggatttctcaagaaaatttggggaccatatcttagaaaaaaaacttacaaaatattcgttgaagactataatatgctaa

SEQ ID NO: 583145 - DNA, 120 bp, Artificial Sequence
  ENSG00000172260_71 (sequence is synthesized)
agctaaggaacaaaattctcttgattgttctaaaaatacctagtaagagccacagaactcttccatagttttctaagtagtttcataagtgtggattgtggttgccctgaaacttgacat

SEQ ID NO: 583146 - DNA, 120 bp, Artificial Sequence
  ENSG00000172260_72 (sequence is synthesized)
ctccctaccaagtacttgacaagtgacctggcaaaaatgtgttcaatagctcatttttgacatactccttaagaaatcattgccagagatttgaaactgcttcaagctgatgtctttttc

SEQ ID NO: 583147 - DNA, 120 bp, Artificial Sequence
  ENSG00000172260_73 (sequence is synthesized)
aaaacaaaacacatactcacacacaaatacaaaatcgcattgctatcagtgatctggaaaataagcttgcaagctggccatgtggtgttctgaataatttttttaaagtagaagaagaaa

SEQ ID NO: 583148 - DNA, 120 bp, Artificial Sequence
  ENSG00000172260_74 (sequence is synthesized)
tgacaacagtgcaaccaacagtttctgtttaagttttatttgctaagacgttagcataaggaacatcttgtgatttaattaatcagaagatggcacctgctgtaaatactgacatggaga

SEQ ID NO: 583149 - DNA, 120 bp, Artificial Sequence
  ENSG00000172260_75 (sequence is synthesized)
aaagcagatttttaaaaaaatttggaataaattaatttcttgtaatacatttttcttgttgataaacaactaaattatgctttgaaatgtgttactgtctaataactttaaatgttgaca

SEQ ID NO: 583150 - DNA, 120 bp, Artificial Sequence
  ENSG00000172260_76 (sequence is synthesized)
aggagaaagactgggtttttttttttacatttgaataagcaatttttttctggaaacatatatatttctaatttatagataaactagtatgtgtgttcagaattcctgctctctcattat

SEQ ID NO: 583151 - DNA, 120 bp, Artificial Sequence
  ENSG00000172260_77 (sequence is synthesized)
tcaggtttcaaaatgtattaacaaagcttttatggttttataatagacaattagatatctttcatcaggtaatgtaagaacttgtatagtggtatattagtcagttttcacactgctgat

SEQ ID NO: 583152 - DNA, 120 bp, Artificial Sequence
  ENSG00000172260_78 (sequence is synthesized)
cttgtatagtggtatattagtcagttttcacactgctgataaagatatacccgagacagggcaatatgcaaaagaaagaggtttttttggacctacagttccatgtggctggggaagcct

SEQ ID NO: 583153 - DNA, 76 bp, Artificial Sequence
  ENSG00000172260_79 (sequence is synthesized)
cacaatcacagtggaaggtgaaaggcacgtctcatatggcagcagacaagagaaaagagcttgtgcagataaactc

SEQ ID NO: 583154 - DNA, 61 bp, Artificial Sequence
  ENSG00000172260_80 (sequence is synthesized)
tccctcaaagtcttaactcatttcagcactatctagccagtaaaatcaaaagcaagttagt

SEQ ID NO: 583155 - DNA, 120 bp, Artificial Sequence
  ENSG00000172260_81 (sequence is synthesized)
aagttagttacttcctagatgcaatggaagtacaggcattgggtaagcatagccattccaagtggaagaaattggccagaacaaagggactacaggggcggtcaagtcttaaagctccaa

SEQ ID NO: 583156 - DNA, 74 bp, Artificial Sequence
  ENSG00000172260_82 (sequence is synthesized)
aggcagctccgcctctgcagctttgcagggtatagccctcctcctggctgctttcaccagctggcattgagtgt

SEQ ID NO: 583157 - DNA, 120 bp, Artificial Sequence
  ENSG00000172260_83 (sequence is synthesized)
gccctcctcctggctgctttcaccagctggcattgagtgtctgtgccttttccaggtgcatggtgcaagctgttagtggatttatgattctgggatctggaggacagtggcccacttctc

SEQ ID NO: 583158 - DNA, 88 bp, Artificial Sequence
  ENSG00000172260_84 (sequence is synthesized)
tttatgattctgggatctggaggacagtggcccacttctcacagctccactacgtggtgtcccagtagggactctgtgtggggctcac

SEQ ID NO: 583159 - DNA, 120 bp, Artificial Sequence
  ENSG00000172260_85 (sequence is synthesized)
ctccatgaggagaacttcattctgggcatccaggcatttctatacatcctctgaaatttaggtggtggtttccaagcctcaatttttgacttccatgcacccacaggctcaacaccatgt

SEQ ID NO: 583160 - DNA, 120 bp, Artificial Sequence
  ENSG00000172260_86 (sequence is synthesized)
gcaacagcccaagctgtaccttggcttcatttaaatcatcctgggagcaactgggaggcagagcaccaagttcctagactgcacatagcagagggaccctgggccaggcccacaaaacca

SEQ ID NO: 583161 - DNA, 120 bp, Artificial Sequence
  ENSG00000172260_87 (sequence is synthesized)
tttttttcctccaaaacctaggggcctgtgatggcaggggctgctgcaaaggtctctgacgtgccctggagacatattccccactgtcttggtgacattcagctcctcattacttatgca

SEQ ID NO: 583162 - DNA, 120 bp, Artificial Sequence
  ENSG00000172260_88 (sequence is synthesized)
tctgcagccagcttgaatttctcctcaggaaatgggattttcttttctatcacattttcagtctgtaaatttttcaaacttttatactgtttcccttttaaaactgaatgccagccaggt

SEQ ID NO: 583163 - DNA, 120 bp, Artificial Sequence
  ENSG00000172260_89 (sequence is synthesized)
tcatgcttgtaatctcagcactttgggagtctgagacaggcagatcacctgaggtcacgaatttgagaccaacctggccaacatgataaaaccccaactctactaaaaatataaaaatta

SEQ ID NO: 583164 - DNA, 120 bp, Artificial Sequence
  ENSG00000172260_90 (sequence is synthesized)
ccaacctggccaacatgataaaaccccaactctactaaaaatataaaaattagtgaggcatggtggcacatgcctgtaatctcaactgcttgggaggctgaagcagaagaattgcttgaa

SEQ ID NO: 583165 - DNA, 89 bp, Artificial Sequence
  ENSG00000172260_91 (sequence is synthesized)
actctgtctcaaaaacaaaacaaaacagaacagaacactgaatgcctttaacaacacccaagtcacctgtccaaatatcctaaatcacc

SEQ ID NO: 583166 - DNA, 120 bp, Artificial Sequence
  ENSG00000172260_92 (sequence is synthesized)
gctgcttagaaatttcttcctccaaatatcctaaatcacctctctcaacttcaaagttctacacatctctagggcaagggcaaaatgctacccatctctttgctaaaacataacaagagt

SEQ ID NO: 583167 - DNA, 88 bp, Artificial Sequence
  ENSG00000172260_93 (sequence is synthesized)
attttcaggtatcttttcagcagcactccactcctgatactaatttactatattagtcagctgggcaatttacaaaagaaagaggttt

SEQ ID NO: 583168 - DNA, 82 bp, Artificial Sequence
  ENSG00000172260_94 (sequence is synthesized)
gtgaaaggcacatctcacatggcagcagagaagagaagagaacttgtgaaggaaaactcccgtcatgagaacagcatgggaa

SEQ ID NO: 583169 - DNA, 120 bp, Artificial Sequence
  ENSG00000172260_95 (sequence is synthesized)
acagcatgggaaagacctgcccccatggttcaattacctcccaccaagtccctctcacaatatgtgggaattcaaaatgagatttgtgtggggacatggccaaacaatatcaaatggttt

SEQ ID NO: 583170 - DNA, 120 bp, Artificial Sequence
  ENSG00000172260_96 (sequence is synthesized)
tgatttttatgttgaggcacattctcaagctagtatcatttcaagaagaacctgttatttgttgattttggaaattttaaaaatcagatttaatttacactgaaaagtggttgaccttaa

SEQ ID NO: 583171 - DNA, 120 bp, Artificial Sequence
  ENSG00000172260_97 (sequence is synthesized)
cgtttctcagataacctgaaatgttcatgtggcattcattcattcattaatccatccacttatttgacaataaaatatgatttaggtgacctctgaagagctgtctaaaaagaattacct

SEQ ID NO: 583172 - DNA, 120 bp, Artificial Sequence
  ENSG00000172260_98 (sequence is synthesized)
ggtagagttaatctggatgtttaggacactatgatcaaactgaagaaaaaggcacccatttctctaatcctttctttgggaagctgatttcactttaaactgaaagtgagaaaggaaaag

SEQ ID NO: 583173 - DNA, 120 bp, Artificial Sequence
  ENSG00000172260_99 (sequence is synthesized)
gaagaagaaaagaaacagagggtaaaagaagagaaagaggaagggaaagaaagagattaatgtatattttctcctaagaaaggctcttttgtgtgtgtcggtgtgtgtgtgcatgtgtgt

SEQ ID NO: 583174 - DNA, 120 bp, Artificial Sequence
  ENSG00000172260_100 (sequence is synthesized)
ttcctgttgcctggatctatcataaaaagcaatgtcttctctggaatggggcttcagtttccacatttacaattagtacatattacaattagtgatatgaataaaggctgttatcctaca

SEQ ID NO: 583175 - DNA, 120 bp, Artificial Sequence
  ENSG00000172260_101 (sequence is synthesized)
agccagagtcccatccagaatctttaataaagcatggtaagctccaagtacagcccagtatggaattaccgggagcgctgatgttcttttctcctgctggtaccttgtgttgacactgtc

SEQ ID NO: 583176 - DNA, 120 bp, Artificial Sequence
  ENSG00000172260_102 (sequence is synthesized)
acagagagaaggcagccatctgcaagccaggaatagagccctcaccagagacctaatttgccagcatcttgatcatgtacttccagcctccagaactgtgagaaaatgcatttctgttgt

SEQ ID NO: 583177 - DNA, 120 bp, Artificial Sequence
  ENSG00000172260_103 (sequence is synthesized)
attggatattggacattatgttgttaagtgtttagattttgttttgttcccttaaagagtgttggattttttttaaacaggctcctgtatcacctgcaaattattttggtccattaaacc

SEQ ID NO: 583178 - DNA, 120 bp, Artificial Sequence
  ENSG00000172262_0 (sequence is synthesized)
gcaagcctgggccgctcctccttccctcaagcagcccgacggccatggaggctgaagagacgatggaatgccttcaggagttccctgaacatcataaaatgatcctcgaccgattgaatg

SEQ ID NO: 583179 - DNA, 120 bp, Artificial Sequence
  ENSG00000172262_1 (sequence is synthesized)
aacagcgagagcaggaccggtttactgacatcaccctaattgtcgacggacaccattttaaggctcacaaggctgttttggctgcttgtagtaagttcttctacaaattctttcaggagt

SEQ ID NO: 583180 - DNA, 120 bp, Artificial Sequence
  ENSG00000172262_2 (sequence is synthesized)
ttacccaagaaccattggtggagatagaaggtgttagtaaaatggcctttcgccatttaattgagttcacatatacagcaaaattaatgatacaaggagaagaagaagccaatgatgtat

SEQ ID NO: 583181 - DNA, 120 bp, Artificial Sequence
  ENSG00000172262_3 (sequence is synthesized)
ggaaagcagcagagtttctacaaatgctagaagctatcaaagcccttgaagtcaggaacaaagaaaactcagctcccttagaggaaaataccacaggaaaaaatgaggccaaaaaaagga

SEQ ID NO: 583182 - DNA, 120 bp, Artificial Sequence
  ENSG00000172262_4 (sequence is synthesized)
agattgcagaaacttcaaatgttatcactgagtcattgccatctgcagaatcagaacctgttgaaattgaggtagagattgccgaaggcaccattgaagtggaagatgaaggcatcgaaa

SEQ ID NO: 583183 - DNA, 120 bp, Artificial Sequence
  ENSG00000172262_5 (sequence is synthesized)
cattagaggaagtggcttctgccaagcagtccgtaaagtacatacagagcacaggttcctctgatgattctgctctagcactgttggcagatattaccagcaagtaccgtcaaggtgaca

SEQ ID NO: 583184 - DNA, 120 bp, Artificial Sequence
  ENSG00000172262_6 (sequence is synthesized)
gaaaagggcagattaaagaagatggctgtccatctgaccccacgagcaaacaggagcacatgaaatcacactccactgagagtttcaagtgtgaaatatgcaataaacgatatcttcgag

SEQ ID NO: 583185 - DNA, 120 bp, Artificial Sequence
  ENSG00000172262_7 (sequence is synthesized)
agagcgcatggaaacagcacctaaattgttaccaccttgaagaaggtggagtcagtaagaagcaaagaactgggaaaaaaattcatgtatgtcagtactgtgagaaacagtttgaccatt

SEQ ID NO: 583186 - DNA, 120 bp, Artificial Sequence
  ENSG00000172262_8 (sequence is synthesized)
ttggacattttaaagaacatcttcgaaaacatacaggtgaaaaaccttttgaatgtccaaattgtcatgaacgatttgctagaaatagcactctgaaatgtcacctcactgcatgccaaa

SEQ ID NO: 583187 - DNA, 120 bp, Artificial Sequence
  ENSG00000172262_9 (sequence is synthesized)
ctggagtaggggcaaaaaaaggaaggaagaagctctacgaatgccaggtctgcaacagtgtgtttaacagctgggaccagttcaaagatcacttggtaatacacactggagataaaccca

SEQ ID NO: 583188 - DNA, 120 bp, Artificial Sequence
  ENSG00000172262_10 (sequence is synthesized)
accattgtactttatgtgatttgtggtttatgcaaggaaatgaattaaggaggcatctcagtgatgctcacaatatttcagagcgtctagtaacggaagaagttctttcagtagaaacac

SEQ ID NO: 583189 - DNA, 120 bp, Artificial Sequence
  ENSG00000172262_11 (sequence is synthesized)
gtgtgcaaactgaacctgtaacatcaatgactattatagaacaagttgggaaggtgcatgtgctaccattgcttcaggttcaggtggattcagcacaagtgactgtggaacaagtccatc

SEQ ID NO: 583190 - DNA, 120 bp, Artificial Sequence
  ENSG00000172262_12 (sequence is synthesized)
cagatctgctccaggacagccaggtgcacgattcacacatgagtgagcttccagagcaggtccaagtgagttatctagaagtgggccgaattcagactgaagaaggtactgaagtacatg

SEQ ID NO: 583191 - DNA, 120 bp, Artificial Sequence
  ENSG00000172262_13 (sequence is synthesized)
tagaggagctgcatgttgaacgggtcaatcaaatgccagtggaagtacaaactgaacttctagaagcagatttggaccacgtgaccccagaaatcatgaaccaagaggagagagagtcta

SEQ ID NO: 583192 - DNA, 120 bp, Artificial Sequence
  ENSG00000172262_14 (sequence is synthesized)
gccaagcagatgctgctgaggctgccagggaagatcacgaagatgctgaggatttagagaccaagccaacagtggattctgaagcagaaaaggcagagaatgaggacagaacagctctgc

SEQ ID NO: 583193 - DNA, 120 bp, Artificial Sequence
  ENSG00000172262_15 (sequence is synthesized)
cagttttagaatgaaattacacatgaatatatttttaaatttacttgttgggtttttgaactgattatgggcagtttgactgtccttaattaagcctaacagacaagtggaccaaagtta

SEQ ID NO: 583194 - DNA, 120 bp, Artificial Sequence
  ENSG00000172262_16 (sequence is synthesized)
agctgtttcctgttgtgctgaactgttgtccgttgaaacacattgattcccctccccctacttattgccacagaggagggatcttttccataactgaaggggagttttgagaagtatatt

SEQ ID NO: 583195 - DNA, 120 bp, Artificial Sequence
  ENSG00000172262_17 (sequence is synthesized)
tctggaaacttaaatggattatattcttattatatagttgggtacgaatgtatctattttcattgtggtaaaagttcttccttttctctttcccaggtcatgttcttcctcaaatttttt

SEQ ID NO: 583196 - DNA, 120 bp, Artificial Sequence
  ENSG00000172262_18 (sequence is synthesized)
ccatattgtaaaatcaaacttaaatcattagaatacaagtttatgtattctaatgcatgttagaaaattgaataatataggaaacacaaggctgcatgatgaaaagtgcattgttactgt

SEQ ID NO: 583197 - DNA, 120 bp, Artificial Sequence
  ENSG00000172262_19 (sequence is synthesized)
gcagttaaattttggcttctggctttctttagtttgaacaaacgttcttgtctaccccagtagtcacagatgccatctttgcaacagaaagagtggtggtggcaaaatttctagaatgtt

SEQ ID NO: 583198 - DNA, 120 bp, Artificial Sequence
  ENSG00000172262_20 (sequence is synthesized)
gagaagagggagggcgggggagggagaggcgacccgagagtcgttgtgggtcgcgggccggaccgggtcccggggcggtgggagccccggccgggcagaagggcttggcgggccgttaga

SEQ ID NO: 583199 - DNA, 120 bp, Artificial Sequence
  ENSG00000172262_21 (sequence is synthesized)
ggaccgccacggctgtcgagtcccctcccttgttggacttgcgcgccctggcgctcggaacctccggcgctgtgcccaccccgctctagctcgcgtctcccgactccaattagagcagcc

SEQ ID NO: 583200 - DNA, 120 bp, Artificial Sequence
  ENSG00000172262_22 (sequence is synthesized)
aaaaaaaaaatccacacccatgtgccttctcaaaaccaactgaacttctataaagcatctctggttctttcaaagtttgtgttgtaaggagcaatgtagatgatgctataatactttata

SEQ ID NO: 583201 - DNA, 120 bp, Artificial Sequence
  ENSG00000172262_23 (sequence is synthesized)
tttttggttataatgacaaccaccagttctttttcacttaagttaggttgagaaattttatttaatggccactgaagggccattttcaattgggaaaatttatttacatctgtggtaaac

SEQ ID NO: 583202 - DNA, 120 bp, Artificial Sequence
  ENSG00000172262_24 (sequence is synthesized)
tttattttgatgaaaagttgcactagtattttaccaccagatgagaaaaagatgagcagcatttaaaaattaatgtatttaaaataaagtacagagaaagacatgtatataattatcagg

SEQ ID NO: 583203 - DNA, 120 bp, Artificial Sequence
  ENSG00000172262_25 (sequence is synthesized)
ctttgttttgaatggaatcttttcccccaattcttaatgtaaagatcttgtgctataacttttaaagccatacaaataagagtgctaaactgtggacttaaaagtaggtgtgtaaatatt

SEQ ID NO: 583204 - DNA, 120 bp, Artificial Sequence
  ENSG00000172262_26 (sequence is synthesized)
tttaatcagtattacttggaaaataaaatataacaaacccatagaccaatatgctattttttttacctgttaaatattgggagttctttacattttttaagtaaactttaaaattatgtg

SEQ ID NO: 583205 - DNA, 120 bp, Artificial Sequence
  ENSG00000172262_27 (sequence is synthesized)
ggagtcccgcggccgcggctccggtctcaacgctccggggccgctcggctcgcctttcttccctcgcctttctctcctcttgcttcaccctccccccttcttttcacgttgctggttttt

SEQ ID NO: 583206 - DNA, 120 bp, Artificial Sequence
  ENSG00000172262_28 (sequence is synthesized)
cagattaaagaagatggctgtccatctgaccccacgagcaaacaggtagaaggtattgaaattgtggaacttcagctgtcacatgtgaaggacttgttccattgtgagaaatgtaaccgt

SEQ ID NO: 583207 - DNA, 120 bp, Artificial Sequence
  ENSG00000172262_29 (sequence is synthesized)
taatcctcaccctagcttatcctgttcaaatcatttccatctttttctggatgaacctgggcggatgtcagaccagagaagagcacagaatgtaccagagagagtcttgctctgtcaccc

SEQ ID NO: 583208 - DNA, 120 bp, Artificial Sequence
  ENSG00000172262_30 (sequence is synthesized)
aaagacacagtgaagagatcattcagaatacagtccaactccaagatcattgggagagcttatttgaagaccagaaaggttactgaacatggtgactctcttcaaagccagacctttgtc

SEQ ID NO: 583209 - DNA, 70 bp, Artificial Sequence
  ENSG00000172262_31 (sequence is synthesized)
tactgaacatggtgactctcttcaaagccagacctttgtccttgaatttagggcttcaaaaaacaatagt

SEQ ID NO: 583210 - DNA, 120 bp, Artificial Sequence
  ENSG00000172262_32 (sequence is synthesized)
ccgcggccgcccgggtgcccaaccgaacgcacgtgcgccagcggggcccgagcagaaggggagccccggctctcacgaagaaaatggagggcgacccacgggttaggggtcaggaaaggc

SEQ ID NO: 583211 - DNA, 120 bp, Artificial Sequence
  ENSG00000172262_33 (sequence is synthesized)
gtggcacaatctcggcttactgcaacctttaacttctgggctcaagcaaccctcccacttcagcctcctgagtagctacgactacagaacctaaaccctgcccgactcacccggaggagc

SEQ ID NO: 583212 - DNA, 120 bp, Artificial Sequence
  ENSG00000172262_34 (sequence is synthesized)
gagctgtcacggtggtttgctggaaaccccctttctgttgggaggattactgggtcacggtttcccaaggacatggaaacccttgctgaagcgctggaaccgctcggcacgaggcgtacg

SEQ ID NO: 583213 - DNA, 120 bp, Artificial Sequence
  ENSG00000172262_35 (sequence is synthesized)
tcggtgggagctgtgtcagcccgctttcggccgtgtagctgctcccatccagactctagaaggggtcctctttgcgtcaggcccaatcacccccctccccgagcgactgcactgggtgtc

SEQ ID NO: 583214 - DNA, 120 bp, Artificial Sequence
  ENSG00000172262_36 (sequence is synthesized)
tatttaaatgcttgttttaaatacaatacttagcaaacaattggtgaagcagttttagacagtttatcaagacaccataggaaataggcatcagtagttcctgtaggtaaaggtagataa

SEQ ID NO: 583215 - DNA, 120 bp, Artificial Sequence
  ENSG00000172262_37 (sequence is synthesized)
attgttcttttgatacctgagaagtcttactttcagtgaagtgcttggttgaatgatctgccaggaaaaacttagatggtagatgttggtcttttccattgtggaaactggtggtcattg

SEQ ID NO: 583216 - DNA, 120 bp, Artificial Sequence
  ENSG00000172262_38 (sequence is synthesized)
ttttttgaaaacaagtattaaacgtgaattactatctttgttcagtgggcttatgtttcagactgctggagatgctgcaggttacagtagaagcttttactgtactctatagcagaagta

SEQ ID NO: 583217 - DNA, 120 bp, Artificial Sequence
  ENSG00000172262_39 (sequence is synthesized)
gtgatgtattagcagaggtacagatgacatgcagtgtgaagtgggctgccataatagggagaaagctaggaaaaatgaactgaagtagcatttagaggaaattctggctctacaatggga

SEQ ID NO: 583218 - DNA, 120 bp, Artificial Sequence
  ENSG00000172262_40 (sequence is synthesized)
tggatcaatacctgttaccttgaagcaaaaagtgatttttgtactttctagacatttttctaataataacctgccaagtgccaggcgttgtgatatgtagttttgtgtattgtctaaggc

SEQ ID NO: 583219 - DNA, 73 bp, Artificial Sequence
  ENSG00000172262_41 (sequence is synthesized)
ccaggcgttgtgatatgtagttttgtgtattgtctaaggctcacagcaatcgtttgatgttgggcaggatggc

SEQ ID NO: 583220 - DNA, 120 bp, Artificial Sequence
  ENSG00000172262_42 (sequence is synthesized)
cttttcttttcttttcttttcttttcaaaaagggaagtggtgttatttgtaataatttacacttcaggaagcaggctctaaaaggttacttgcccagggttgtccaactagcaaggaatt

SEQ ID NO: 583221 - DNA, 120 bp, Artificial Sequence
  ENSG00000172262_43 (sequence is synthesized)
aagtttgtgctattaattaccatgctttttcttctgctactgcagtaactcctcccctaccaccagcatcaaaatctaaaacagcaggaaataaatgtttgcctacgtaattacagaatt

SEQ ID NO: 583222 - DNA, 120 bp, Artificial Sequence
  ENSG00000172262_44 (sequence is synthesized)
ttagcttcttttagggttcttgggttttggttttatatctatttcattgtgtacgtattctttgttctgaatgggttgcctagaaactccttttttccctttgatgcctaggggagtaaa

SEQ ID NO: 583223 - DNA, 120 bp, Artificial Sequence
  ENSG00000172262_45 (sequence is synthesized)
gaaaacaaaaaagagttaagaatattctttaattttggtatattccagtttagcattatagctgatatatttacagctagagtatcttttaatatctataatcaggacagagacataatt

SEQ ID NO: 583224 - DNA, 120 bp, Artificial Sequence
  ENSG00000172262_46 (sequence is synthesized)
atgaaaatccacaaaacttaataaagtgagaatctaactgcccagatgatagtggtttctactacaaagcaagcctccatgaattcattcacacctgaggtttattaaatatgtgacccc

SEQ ID NO: 583225 - DNA, 120 bp, Artificial Sequence
  ENSG00000172262_47 (sequence is synthesized)
aggcgggttactttacctcaattgcatacttttctcctcatctgaaaagtgggttcataggattataaagactaattgcgataacatgcagagtgcatggcatgatatttggtgccttgt

SEQ ID NO: 583226 - DNA, 120 bp, Artificial Sequence
  ENSG00000172262_48 (sequence is synthesized)
caaagcttgataaacagggtccagtctaagaaacattagggagacctcttctctacaaaaaatttaaaaaattattagctgagtctgatggcacatgcctgtggtcccagctattcagga

SEQ ID NO: 583227 - DNA, 120 bp, Artificial Sequence
  ENSG00000172262_49 (sequence is synthesized)
ggctgaggcgggaggattgctggggcccaggaggtcaaagctgcagtgagccatgattttgccactgcattgtagcctgggcgacagagcaaggccctgtctcaaaaaaaaaaaaaaaaa

SEQ ID NO: 583228 - DNA, 120 bp, Artificial Sequence
  ENSG00000172262_50 (sequence is synthesized)
aagccaccttacctgacaacttgataggagccttatggggtctcgctatgtgcccaggctggcctcaaactcctgggctgaactcctcctccccaactcggcctcccaaagtgctgggat

SEQ ID NO: 583229 - DNA, 120 bp, Artificial Sequence
  ENSG00000172262_51 (sequence is synthesized)
tcttcttacagagcagcccgacggccatggaggctgaagagacgatggaatgccttcaggagttccctgaacatcataaaatgatcctcgaccgattgaatgaacagcgagagcaggacc

SEQ ID NO: 583230 - DNA, 120 bp, Artificial Sequence
  ENSG00000172262_52 (sequence is synthesized)
agtgaaagactcaatgcctcctgaccgaggcttcaggcctgccccggcagctaggtacctctccaggggatggaactctgtgggaactgctatttaattctgatggttaactctgtcaga

SEQ ID NO: 583231 - DNA, 120 bp, Artificial Sequence
  ENSG00000172262_53 (sequence is synthesized)
tggccttgatatatgggaataatcgttgcaggagggtaggggaaataagaatcgcaagactctagcacaggacgtgtggattgatggaaacctgaaactgccattgagcagaaggaaaac

SEQ ID NO: 583232 - DNA, 120 bp, Artificial Sequence
  ENSG00000172262_54 (sequence is synthesized)
ttaggtgacagaaagtctcctacctcttcaaaagcacaaacatactttatttctgttaaagaaaaaatgtaacacagttgttaggatggtaaagcagacttcattcagcattattgccat

SEQ ID NO: 583233 - DNA, 120 bp, Artificial Sequence
  ENSG00000172262_55 (sequence is synthesized)
aggtgtactttgcagtagaggattgagattgggatcagctcctaatacaaggaaaataagggatttacagccaaagactgagaggtagggatggaacgtggggcaggacaggggttagtg

SEQ ID NO: 583234 - DNA, 120 bp, Artificial Sequence
  ENSG00000172262_56 (sequence is synthesized)
aatggaaaattactaaaaggatacgttaattttttctaaagtgacctaacagtattcttgctataggcagaccagggtgatcagatatcaattggagaataaggaatgtggtcagatatc

SEQ ID NO: 583235 - DNA, 120 bp, Artificial Sequence
  ENSG00000172262_57 (sequence is synthesized)
gagggcgaatcagatattgaagataggggatgctggctaaaactgggctcttgaggcaatgtccaaggtccaagcataggtgggaaaggggtgaggagactgtgtctagggtttggtcaa

SEQ ID NO: 583236 - DNA, 120 bp, Artificial Sequence
  ENSG00000172262_58 (sequence is synthesized)
gacactgaaaatcagtagaagaaatacgccacatttattctaccggggaagacagtgggaaacctgaaactgccattgagcagaaggaaaacatccctttccagaacctttctcgttttt

SEQ ID NO: 583237 - DNA, 75 bp, Artificial Sequence
  ENSG00000172262_59 (sequence is synthesized)
tggaggctatggtgagctgcaccactacaccactatgggaggccgaggcgatgtgaaaccccgtctctactaaaa

SEQ ID NO: 583238 - DNA, 120 bp, Artificial Sequence
  ENSG00000172262_60 (sequence is synthesized)
aaaaaaacaatataaggtgaaggccaagcagggtggcacatacctgttgtctcacctactcaaaaggctgaggccagaggaggattgctggaagtgagttcaaagccagcctagagaata

SEQ ID NO: 583239 - DNA, 120 bp, Artificial Sequence
  ENSG00000172262_61 (sequence is synthesized)
attcacctttaccatatcttttatgtataagcaatgggattgattagcaagtaatgggactctgaaatcaaaggggtaaatttgggtagatctttataaatataataaccttgaacccca

SEQ ID NO: 583240 - DNA, 120 bp, Artificial Sequence
  ENSG00000172262_62 (sequence is synthesized)
taagaagcaaagaactgggaaaaaaattcatgtatgtcagtactgtgagaaacagtttgaccattttggacattttaaagaacatcttcgaaaacatacagttctggatgctaagaagtt

SEQ ID NO: 583241 - DNA, 120 bp, Artificial Sequence
  ENSG00000172262_63 (sequence is synthesized)
ttattatttttgctacctctagaaaagtctttggaatatggtgaaaatatttgaattctgaattgtgatttctccttttaggaatttagtattaaaattacccaaaaagaaaaagtaaac

SEQ ID NO: 583242 - DNA, 120 bp, Artificial Sequence
  ENSG00000172264_0 (sequence is synthesized)
gcgtgcgccctggggcccaagttggggcgcgccgtggctagaacacggagagcggcgggcagtgcagccaatgggaggcggcgctgcctagcggctggtaggcggtgcctgcgcgggtgt

SEQ ID NO: 583243 - DNA, 120 bp, Artificial Sequence
  ENSG00000172264_1 (sequence is synthesized)
taggttagcgcgaggcgtgacctagttgacaggctctgaggtgctgctgtggcggcgtccgcggggctgaggcgggtgggagccggagccgagcgcgggctgagggaggagggcggcgac

SEQ ID NO: 583244 - DNA, 120 bp, Artificial Sequence
  ENSG00000172264_2 (sequence is synthesized)
tggagagcggcgagcggcgagcagcgcaggacgcagagcctctttcactttttccctgctgagtgccccctcccacccctcccactccacacacaccctgtttgcccgtgagcctgggga

SEQ ID NO: 583245 - DNA, 120 bp, Artificial Sequence
  ENSG00000172264_3 (sequence is synthesized)
acttgcagcttaaagccagccacccccacggcaacatgtaccccagcaacaagaagaaaaaggtgtggagagaggagaaagaacgtttattgaagatgaccttagaagagagacgcaaag

SEQ ID NO: 583246 - DNA, 120 bp, Artificial Sequence
  ENSG00000172264_4 (sequence is synthesized)
aatacctaagagactatattcccctgaacagcattctatcatggaaggaggagatgaagggcaagggccaaaatgatgaagaaaatactcaggaaacatcccaggtgaagaaaagtttga

SEQ ID NO: 583247 - DNA, 120 bp, Artificial Sequence
  ENSG00000172264_5 (sequence is synthesized)
ctgaaaaagtttctctctatagaggtgacatcacattgctagaggtagatgctatagtcaatgccgcaaatgccagtcttcttggaggaggaggtgtggatggctgtattcatagagcag

SEQ ID NO: 583248 - DNA, 120 bp, Artificial Sequence
  ENSG00000172264_6 (sequence is synthesized)
ccggcccctgtttgctagctgaatgtcgtaacctgaatggctgtgatactggacatgcaaaaatcacatgtggctatgaccttcctgcaaaatatgtcatccatactgtagggccaatag

SEQ ID NO: 583249 - DNA, 120 bp, Artificial Sequence
  ENSG00000172264_7 (sequence is synthesized)
ccaggggccatattaatggttcccacaaggaagaccttgcaaattgctataaatcatctctgaagctcgtgaaagaaaataacatccgatcagttgcatttccctgcatctcaacaggca

SEQ ID NO: 583250 - DNA, 120 bp, Artificial Sequence
  ENSG00000172264_8 (sequence is synthesized)
tttatggctttcccaacgagcctgctgcagtcattgccctcaacaccattaaggaatggcttgccaagaatcaccatgaggtggatcggatcattttctgtgtcttcttagaagttgact

SEQ ID NO: 583251 - DNA, 120 bp, Artificial Sequence
  ENSG00000172264_9 (sequence is synthesized)
tcaaaatctacaaaaagaaaatgaatgagtttttctccgtagacgataataatgaagaagaagaggatgttgaaatgaaagaagattcagatgagaacggtccagaggagaagcaaagtg

SEQ ID NO: 583252 - DNA, 120 bp, Artificial Sequence
  ENSG00000172264_10 (sequence is synthesized)
tggaagaaatggaagagcagagccaagatgcagatggtgtcaacactgtcactgtgcccggccctgcttcagaagaggcagttgaagactgtaaagatgaagattttgcaaaggatgaaa

SEQ ID NO: 583253 - DNA, 120 bp, Artificial Sequence
  ENSG00000172264_11 (sequence is synthesized)
atattacaaaaggcggtgaagtgacagatcattctgtgcgtgaccaagatcatcccgatggacaagagaatgattcaacgaagaatgaaataaaaattgaaacagaatcgcagagctcat

SEQ ID NO: 583254 - DNA, 120 bp, Artificial Sequence
  ENSG00000172264_12 (sequence is synthesized)
atatggaaacagaagaactttcatcaaaccaagaagatgccgtgattgtggagcaaccagaagtgattccattaacagaggaccaagaagaaaaagaaggtgaaaaagctccaggcgagg

SEQ ID NO: 583255 - DNA, 120 bp, Artificial Sequence
  ENSG00000172264_13 (sequence is synthesized)
acacacctaggatgcctgggaaaagtgaaggctccagtgacctagaaaatactccaggtcctgatgcaggggcacaagatgaagcgaaggaacaaagaaatggaactaaatgacaatcct

SEQ ID NO: 583256 - DNA, 120 bp, Artificial Sequence
  ENSG00000172264_14 (sequence is synthesized)
cagcatcgcaaggcctctcctggctctgggggagctcgggaagatagcagcacacgctgtggaggagggtgggggtggggggaaggcaagtcccatggaaggacggggaatcctttactc

SEQ ID NO: 583257 - DNA, 120 bp, Artificial Sequence
  ENSG00000172264_15 (sequence is synthesized)
aaagaaagaaaaaaaagaaaaaaaaagtttcctttaatttggtggagggacccatgttgacgcatctttcaggcattatccttgtaatttctgtcttttctcttacaactttgccccagg

SEQ ID NO: 583258 - DNA, 120 bp, Artificial Sequence
  ENSG00000172264_16 (sequence is synthesized)
cttgtaatttctgtcttttctcttacaactttgccccagggtcacagtggcttgattgaacactcacatgtgtatcctggcccctgtctgctttcttggttatttcacaaagctggtcac

SEQ ID NO: 583259 - DNA, 120 bp, Artificial Sequence
  ENSG00000172264_17 (sequence is synthesized)
acagtggtttattcaaaggaaggggaggaagacagtggtttgataagctgcaggataaattttaggaatcaatgagcccagcagcagtataatccccagacagaggaggcaggatagaaa

SEQ ID NO: 583260 - DNA, 120 bp, Artificial Sequence
  ENSG00000172264_18 (sequence is synthesized)
atgggcaaaagcctcggaaaccacttggaaaaggtctggacaatgaggtgaaaatattttcttcagggttcccaaggcacaatttgttccaagtggctaatgagaaatatggaagctgaa

SEQ ID NO: 583261 - DNA, 120 bp, Artificial Sequence
  ENSG00000172264_19 (sequence is synthesized)
ttttttccagagcagagtgcagaggcataacagaagggtgggccctggcagccatctgggtctcttccttcctaaccatggtggcaggtgcatccttctttgacactgactttcagcaga

SEQ ID NO: 583262 - DNA, 120 bp, Artificial Sequence
  ENSG00000172264_20 (sequence is synthesized)
atggccctttgctaggtgttacagttaaaagctaagaaaaggggcagtgcatttaggacccaaacatatgcctatgaatatcaaaagctcctcctgaaattgctgtgagttttccataaa

SEQ ID NO: 583263 - DNA, 120 bp, Artificial Sequence
  ENSG00000172264_21 (sequence is synthesized)
agaatatcctgtcttcacccaaggcttgacagcccacagagtggtctcatttgaaattacaggaaattagagcttttgcttgcagttctgccttcctggcctgtgtttaaatgctgtcac

SEQ ID NO: 583264 - DNA, 120 bp, Artificial Sequence
  ENSG00000172264_22 (sequence is synthesized)
ttgtttatgccaagttcaaggctgattcaatggttggtcccctcacccagaaaaccctgaaggggaggatacagctctgaaggggggcagcagtactaaaaacccaagatgccagtggta

SEQ ID NO: 583265 - DNA, 120 bp, Artificial Sequence
  ENSG00000172264_23 (sequence is synthesized)
tagtgggcacaagggatggcgaccatgaggatgccaggcatcatcaccaatatctatcctagagccagtataaggccagatgcctacttcccacagcctccccgggttccaaagtcatgt

SEQ ID NO: 583266 - DNA, 120 bp, Artificial Sequence
  ENSG00000172264_24 (sequence is synthesized)
cattgttttcagtggaaacatatcgtttgttgcatatcttcttaaatccatcttccttgtaagggctttagaactaaaacttacttatattgtttttccttaacagagggagaaaaatag

SEQ ID NO: 583267 - DNA, 120 bp, Artificial Sequence
  ENSG00000172264_25 (sequence is synthesized)
tggattattatttctaaaataaaaggatgttctgctttctaaatatcccatcaaaatcttcagttttgcacttttttgatggaaaattcatcttatcttcctatgactttggttttagcc

SEQ ID NO: 583268 - DNA, 120 bp, Artificial Sequence
  ENSG00000172264_26 (sequence is synthesized)
tttctgaatttgttaccccttctggatggcttatttgatatactggaatagttaacaagctatacttcagcatatgcactatattctaacaaattttttttaataaaatcaagacatcag

SEQ ID NO: 583269 - DNA, 120 bp, Artificial Sequence
  ENSG00000172264_27 (sequence is synthesized)
caagaatgacatttacgtgacctcataatgtgggattatggccttctgttgctattccagtttgatatggaagcatctatatcctctattgccgttagatgttgttgcttttcagaaaag

SEQ ID NO: 583270 - DNA, 120 bp, Artificial Sequence
  ENSG00000172264_28 (sequence is synthesized)
taacgaaaaggctcattttaaagaatccaagaaacgatgtcatccaaatattgacagtttctacatttcatgccatctttataactcaattgaaagttgccgtcattcttgtgaagtatt

SEQ ID NO: 583271 - DNA, 120 bp, Artificial Sequence
  ENSG00000172264_29 (sequence is synthesized)
tgacaagtgcaatctgctagaagctcgtttttcttgtgactcccaaatgttagtgctacttagcctcagtaatgagttacagttgaaaaaaacatgagggaaacagagggacagagattt

SEQ ID NO: 583272 - DNA, 120 bp, Artificial Sequence
  ENSG00000172264_30 (sequence is synthesized)
tctaatgaacaatgatggaagagacctaatgtccttgctagaaacagccaggatggaaattatccagccctggcattctccttatcatcaatgacagtcattttattcatttatttcaaa

SEQ ID NO: 583273 - DNA, 120 bp, Artificial Sequence
  ENSG00000172264_31 (sequence is synthesized)
tgtgggtgggctagaagtggaaggagggaattctctctgcctaaaaattctagaagaatgaaagtaatctttgtatccaggaaactaagagaatgaggaataaatatcttcagcccgact

SEQ ID NO: 583274 - DNA, 120 bp, Artificial Sequence
  ENSG00000172264_32 (sequence is synthesized)
cctgaatttgtttattcttccatctataattagattgtgttttcatttttgctttgtcatgctttttggttgttatttggctatacagttttatgctttaaaacaaatgataaagttaat

SEQ ID NO: 583275 - DNA, 120 bp, Artificial Sequence
  ENSG00000172264_33 (sequence is synthesized)
ttccaattcaatagtgaaatattaacaatctaactatagccagatcaaagacacctgaacacagaaaacctttatttgctggtgctgccattgcacaggctgtacaatgaaatagatttg

SEQ ID NO: 583276 - DNA, 120 bp, Artificial Sequence
  ENSG00000172264_34 (sequence is synthesized)
aaaagctgattgattttcccgcacataaattctggatgtcaatttccaaccaaactccaatacagctatgtggcatgaagagttacaggagggagggaggaaaatagccctatgttagtc

SEQ ID NO: 583277 - DNA, 120 bp, Artificial Sequence
  ENSG00000172264_35 (sequence is synthesized)
atgtttgcatacagaggatcaaagtaggccttcaccataatagttctaattaaaatggtcctcgctgtaggagagacaaaggggcttttcctctagctggtaactattcagatgatggac

SEQ ID NO: 583278 - DNA, 120 bp, Artificial Sequence
  ENSG00000172264_36 (sequence is synthesized)
aagtcttctttcataaaagattacaaagaaggcatccgaatcactgtctgtgatactgggtcacatattaatcactgcagctaattgtaaatctttctatgaaacactgaaaagcctctt

SEQ ID NO: 583279 - DNA, 120 bp, Artificial Sequence
  ENSG00000172264_37 (sequence is synthesized)
tgtgaattaatacagttctgcttgatgcacttgatttgaaaagacatttctctgtatgtggcgcatgtcggctttgctttgaaaaataacaaagttagcagaatatgttcaatatatttt

SEQ ID NO: 583280 - DNA, 120 bp, Artificial Sequence
  ENSG00000172264_38 (sequence is synthesized)
cttggggaatagggtttttattacatgattcattaaggatttgccttaccctgacatttgtgatataaaggaaaatcagaaaaaaagtaattttcttgatcaagatatgtttttacttaa

SEQ ID NO: 583281 - DNA, 120 bp, Artificial Sequence
  ENSG00000172264_39 (sequence is synthesized)
tgcaaataaatgtagtctgttgcttgcaaggaaaaaaaaatggcttctgatatctggtataaactgctaaataggataatacgtgcctcttttgttaaaccggcatttaaatgctggact

SEQ ID NO: 583282 - DNA, 120 bp, Artificial Sequence
  ENSG00000172264_40 (sequence is synthesized)
gcttctaaatctgtttgtttcttttcatctgtgccatacactaaaaaacaactgttgccttcatactatatttgttagagcagaatacaaataaaatttgtttgagaggataatgtgaaa

SEQ ID NO: 583283 - DNA, 120 bp, Artificial Sequence
  ENSG00000172264_41 (sequence is synthesized)
gtgagtacaactgaatactgtttcaaaaccagatgagacatcttaacttgttttactccagtgtataactggaaaaggaaatggcagtggtggtatttaattaaatgtgcttgagttcag

SEQ ID NO: 583284 - DNA, 120 bp, Artificial Sequence
  ENSG00000172264_42 (sequence is synthesized)
catgtggctatgaccttcctgcaaaatcaaatttggatgcaagaaagctattgaaactgaatcttctcctacacctgaagagatctattacttcaatcactccaccgaaaaatctaccaa

SEQ ID NO: 583285 - DNA, 120 bp, Artificial Sequence
  ENSG00000172264_43 (sequence is synthesized)
agattaaacacgctgttatcagtcctggagcctgagtacactgtgatggcttcatgttgtcagctgcgttttctcatgccctacactgcagactgaaaaaggatgctccacagccagctt

SEQ ID NO: 583286 - DNA, 120 bp, Artificial Sequence
  ENSG00000172264_44 (sequence is synthesized)
tgagagacaggaaatggaggttctgagttttgaggcttgcagggtttgtctgcactgcattcagcttgccagtccccaggagagctggcatgctgcttcagatccagaaagaaaaggaga

SEQ ID NO: 583287 - DNA, 120 bp, Artificial Sequence
  ENSG00000172264_45 (sequence is synthesized)
gtgccaatcagatatatacacttctgtaaatctccagttagttccagagctgtcatttgcctgtagaaattttaccacgtttacatgactgacccagacagcaagagctagtgatgcccc

SEQ ID NO: 583288 - DNA, 120 bp, Artificial Sequence
  ENSG00000172264_46 (sequence is synthesized)
tctgttgtaactacatggccagagggacatgcaacccaattaaataaaattaattttaagcacacatcctgatttggagaagcatttggacaataacatagtgtcagtgtgagtcactta

SEQ ID NO: 583289 - DNA, 120 bp, Artificial Sequence
  ENSG00000172264_47 (sequence is synthesized)
tggaaagaaagtcttacagcttgggctctaggaaaagagccttttatcccaccttgtcttccagtccattttgaatcaagaaagactcattgaagactcctttgagaaaagtctgttttg

SEQ ID NO: 583290 - DNA, 120 bp, Artificial Sequence
  ENSG00000172264_48 (sequence is synthesized)
aagaaggaaaaagaaatactgtttgagagaaggcaaacagacaaaaagggtgatagaaatatgtatttttgttgtatatgtaactctaagagaccttcctagagtgaatgaaggtagaaa

SEQ ID NO: 583291 - DNA, 120 bp, Artificial Sequence
  ENSG00000172264_49 (sequence is synthesized)
actgaaaagggagtaaattaaggaatgattgaattttgtgggtcttgatggaaaaacgctggtcttcttttaatgtggaaaaacagctagtgcttcagtcctaggaattatgtctctgct

SEQ ID NO: 583292 - DNA, 120 bp, Artificial Sequence
  ENSG00000172264_50 (sequence is synthesized)
gtgggcagttgtcataaactcttctcacaatccgagctgctctttgtcctctgtgaatgaaggtacttttgcttccatttcatccaaggatgaatgaaaatgtatagcatctgcccaaac

SEQ ID NO: 583293 - DNA, 120 bp, Artificial Sequence
  ENSG00000172264_51 (sequence is synthesized)
ctaaaaagtacagtgtgtttatcacgagagctttgtaaggtacttcacttccactttaaaattctttagtgctcaaaaccaactattgtgggtttttgtcaataaatactaatttttcaa

SEQ ID NO: 583294 - DNA, 120 bp, Artificial Sequence
  ENSG00000172264_52 (sequence is synthesized)
actgaaattctgcttgcaacttgtttagctggaaaacaaaaagcatgaagataagactggaagatgaacatctcataccatcaatatatgggtgattagaagctctacaacaattctaaa

SEQ ID NO: 583295 - DNA, 120 bp, Artificial Sequence
  ENSG00000172264_53 (sequence is synthesized)
acccagcctaataaagtatgaaacattctgaggaatgttcataaagatatgcaaatggactttgaaatggaaaaaatgcaaatcagttgaggtggcacaggcctaatttacccattctct

SEQ ID NO: 583296 - DNA, 120 bp, Artificial Sequence
  ENSG00000172264_54 (sequence is synthesized)
ctcagggaatatcagagcttcacacatttaacaggaaatgtacacatgctgacttccttcaggtgaaaaaaagattccacctgcaactagtattaaatatttgagatttgtttgccactg

SEQ ID NO: 583297 - DNA, 120 bp, Artificial Sequence
  ENSG00000172264_55 (sequence is synthesized)
tgcctgggaaaagtgaaggctccagtgacctagaaaatactccaggtcctgatgttgaaatgaatagtcaggttgacaaggtaaatgacccaacagagagtcaacaagaagatcaactaa

SEQ ID NO: 583298 - DNA, 120 bp, Artificial Sequence
  ENSG00000172264_56 (sequence is synthesized)
gattcccctttaggactgaagcactctcccttctgctgagagtttggtcaggcaataattttcagctgattccttctccaagaattttcctcagagacagctgccttgcctaagattatg

SEQ ID NO: 583299 - DNA, 120 bp, Artificial Sequence
  ENSG00000172264_57 (sequence is synthesized)
gcctctccctgaggatggcctgccagcaattactcatgatgtaacatacgaaagtccaactgccttgcctgtaggttggaaaactctaaagggctattttccagggaacccaaaccacag

SEQ ID NO: 583300 - DNA, 120 bp, Artificial Sequence
  ENSG00000172264_58 (sequence is synthesized)
cacagcattaacacttaccatgtgtaatccttaggaacataggaattctaatagtataaattgttgcaatgtctttttaaagcaatctcacataatcagttaaaaagacaaacacataaa

SEQ ID NO: 583301 - DNA, 120 bp, Artificial Sequence
  ENSG00000172264_59 (sequence is synthesized)
atgagaacggtccagaggagaagcaaagtgtggaagaaatggaagagcagagccaagatgcaggtaggctcagatttcttttgagaagtcacctaggcctcatctgcagagatggtgtca

SEQ ID NO: 583302 - DNA, 120 bp, Artificial Sequence
  ENSG00000172264_60 (sequence is synthesized)
gtcttcttggaggaggaggtggtaagtcctgaacatcacttaacttaaaatacattttaattgttataccaactacaagatatttagtaagttctgtgacacttaaaagaaaattaattt

SEQ ID NO: 583303 - DNA, 120 bp, Artificial Sequence
  ENSG00000172264_61 (sequence is synthesized)
tgctgtagtcatcaattacaaaaatgttaatctttcaaaaataatttataatataaataccttggtttgcttaaatgttattttaattgacttcgagatatatacagtactcttgtcaaa

SEQ ID NO: 583304 - DNA, 120 bp, Artificial Sequence
  ENSG00000172264_62 (sequence is synthesized)
ctttgtatttctgcttttggcataaggtgtaacagctataagctatatgaacacacatgtaatacatgtgtgtgcatagttacagagtaactatgtacatattacagagttacttttaat

SEQ ID NO: 583305 - DNA, 120 bp, Artificial Sequence
  ENSG00000172264_63 (sequence is synthesized)
atgaattctaaaacaacagaacatttggaggctatggtttctttttccactataatgactttcttttgcttttcatgactttgtagcctgagagcttaatatatcagccacttactttga

SEQ ID NO: 583306 - DNA, 120 bp, Artificial Sequence
  ENSG00000172264_64 (sequence is synthesized)
aaaataaaaaagaaattactgttgacactctgctttttctttctgctcagttagaggagaaagagaaggagatcaaagtgagctgagggagacagagattcctgtactgggaattttttt

SEQ ID NO: 583307 - DNA, 88 bp, Artificial Sequence
  ENSG00000172264_65 (sequence is synthesized)
gagttttgagccaccacgcccagcccatgattctactttctgtttgtatgagtttgattactttagataccatttatgaggggaatta

SEQ ID NO: 583308 - DNA, 120 bp, Artificial Sequence
  ENSG00000172264_66 (sequence is synthesized)
tgagtttgattactttagataccatttatgaggggaattatacaatagttaccttttgtgactggcttatttctcttagcataatgtcttcaaggtttagccatattatagagtgtgata

SEQ ID NO: 583309 - DNA, 120 bp, Artificial Sequence
  ENSG00000172264_67 (sequence is synthesized)
ggaattcttcttttttaaggctgaataatatatctctttgtatgtatataccacatattgtttatccatttatcttttgatgaacatttgggttacttccaccccttggttcttgtgaat

SEQ ID NO: 583310 - DNA, 120 bp, Artificial Sequence
  ENSG00000172264_68 (sequence is synthesized)
aatgctgtagtgaacatggatgtgcagatatctcttggagaccctgctatcaattcttttcattatacgcccagaagtggaattgctgggtcatatggtgattccatgtttaattttttt

SEQ ID NO: 583311 - DNA, 120 bp, Artificial Sequence
  ENSG00000172264_69 (sequence is synthesized)
gaggaaatttaatactgtttttgatagtggctaacactattttacattcccaataacaatgtacatcttcactaacacttgttactttccgttttttgataatagccatcctaatgaatg

SEQ ID NO: 583312 - DNA, 120 bp, Artificial Sequence
  ENSG00000172264_70 (sequence is synthesized)
tgatatgcatacacggctttaaaaaaacttgtttcttcagaatatttgcatatggagattagcatatattatttacctttaatattatatattttgtccttgcttatttgatagataaaa

SEQ ID NO: 583313 - DNA, 120 bp, Artificial Sequence
  ENSG00000172264_71 (sequence is synthesized)
atttgtatttatttgactactagtaaaatttaatatttttaatacttggttactagccagtttatatttttcttttgtgatttgtaagttcataatctatacctcattttgtattgggtt

SEQ ID NO: 583314 - DNA, 120 bp, Artificial Sequence
  ENSG00000172264_72 (sequence is synthesized)
cattttgtattgggttttctccacccttcttatttatttataagagctattaatataatacattatccttttatcttttatttatttatttttaagacagagcctcgctctgttgcccag

SEQ ID NO: 583315 - DNA, 73 bp, Artificial Sequence
  ENSG00000172264_73 (sequence is synthesized)
cttgtaccaccatttctggcaaattattaaatttttatgtagagatagggactcaccatctcgcccaggctgg

SEQ ID NO: 583316 - DNA, 120 bp, Artificial Sequence
  ENSG00000172264_74 (sequence is synthesized)
gcaatcctcttgccttgacttcctaaagtgctgaggttacaagcatgagccaccatgtctggctgttatttcatgtttttttacaaacattattttcatgtttcagatacatttcaactt

SEQ ID NO: 583317 - DNA, 120 bp, Artificial Sequence
  ENSG00000172264_75 (sequence is synthesized)
tgtttattgcaatttttgcttctataatactgatagaatcaaactgaaacttaagactattttatttctcatttacccctactttttttttgtttgttttgttttttgagatggagtctc

SEQ ID NO: 583318 - DNA, 120 bp, Artificial Sequence
  ENSG00000172264_76 (sequence is synthesized)
catgagccactgtgcctggcttttacctctacttttatatgaagaaaatccatgctcatgtaatagccaaatacagtcaaattcatttttctctagtgttaatatttcagtcaaattcta

SEQ ID NO: 583319 - DNA, 120 bp, Artificial Sequence
  ENSG00000172264_77 (sequence is synthesized)
atgcattaggaatttgttaatattgcatttaatattatttttccccaatctttttttatttgaaaaatattataatccagtcaaatagcaaataacataacaaaatgagaatttcttacc

SEQ ID NO: 583320 - DNA, 120 bp, Artificial Sequence
  ENSG00000172264_78 (sequence is synthesized)
aaggattaattcatattaacattttatcatattgatttcagatcttgtgtgtgtgtgatgtttactgataaattttgtgtccttgtacagcttttgtggatcagggacaaggggagcatg

SEQ ID NO: 583321 - DNA, 120 bp, Artificial Sequence
  ENSG00000172264_79 (sequence is synthesized)
ttgccgaacaaaaatatattaacatgtttgggactaatgcacactgattttcacagaaagtaactgattgattgcaatcaagtatgggagactagagggtggcaagagttttgataaaat

SEQ ID NO: 583322 - DNA, 120 bp, Artificial Sequence
  ENSG00000172264_80 (sequence is synthesized)
tcagttcaataaacttgtgaatttaagagcatagagattctattaacgagaatgaatagaagaagatttagacatggtgatttaaaggggatatcaagttagtgttgaagagtaaccatc

SEQ ID NO: 583323 - DNA, 120 bp, Artificial Sequence
  ENSG00000172264_81 (sequence is synthesized)
tcaggaaaacagtaggaattagagccagttctgagaatattctgtgtgagatctatggaaataaaaaagctaggaagggaaaagcttaaaggaatgtgtgttgggaagtgcttatagaag

SEQ ID NO: 583324 - DNA, 120 bp, Artificial Sequence
  ENSG00000172264_82 (sequence is synthesized)
agagcaagcaaagtgccttcctgttgtcgtttagacttttccttaatctgcattcctgcagttaggtttactgagctctatggcctgagttattgctcttctatgtagttccagattaag

SEQ ID NO: 583325 - DNA, 120 bp, Artificial Sequence
  ENSG00000172264_83 (sequence is synthesized)
ggttaagaattctagtagagcaggagtatttctggaaaagatggttggggggcaagtatagggatggggagaagcggagggcttactctccacctcccaaaattttcatggaaatgacat

SEQ ID NO: 583326 - DNA, 120 bp, Artificial Sequence
  ENSG00000172264_84 (sequence is synthesized)
tcagtaaaagtaaatatccatataacaatggtggtggaaaggaaaatgtaggggtagatggcttttgcggatcaggaacaaagggtatcataatgctaaataaaaatatgttaacatgta

SEQ ID NO: 583327 - DNA, 120 bp, Artificial Sequence
  ENSG00000172264_85 (sequence is synthesized)
actatcgagaagcagatgacaggctcaggccttaccagggatgcacttgccacattttggaaagactacataaaaaacctttaaaaattggagccctttgggcctcaggtatccaaagag

SEQ ID NO: 583328 - DNA, 120 bp, Artificial Sequence
  ENSG00000172269_0 (sequence is synthesized)
agaacataggttgccttagagaggttccccggtgtcccgacggcggctcaagtcagagttgctgggttttgctcagattggtgtgggaagagcctgcctgtggggagcggccactccata

SEQ ID NO: 583329 - DNA, 120 bp, Artificial Sequence
  ENSG00000172269_1 (sequence is synthesized)
ctgctgaggcctcaggactgctgctcagcttgcccgttacctgaagaggcggcggagccgggcccctgaccggtcaccatgtgggccttctcggaattgcccatgccgctgctgatcaat

SEQ ID NO: 583330 - DNA, 120 bp, Artificial Sequence
  ENSG00000172269_2 (sequence is synthesized)
ttgatcgtctcgctgctgggatttgtggccacagtcaccctcatcccggccttccggggccacttcattgctgcgcgcctctgtggtcaggacctcaacaaaaccagccgacagcagatc

SEQ ID NO: 583331 - DNA, 120 bp, Artificial Sequence
  ENSG00000172269_3 (sequence is synthesized)
ccagaatcccagggagtgatcagcggtgctgttttccttatcatcctcttctgcttcatccctttccccttcctgaactgctttgtgaaggagcagtgtaaggcattcccccaccatgaa

SEQ ID NO: 583332 - DNA, 120 bp, Artificial Sequence
  ENSG00000172269_4 (sequence is synthesized)
tttgtggccctgataggtgccctccttgccatctgctgcatgatcttcctgggctttgcggatgatgtactgaatctgcgctggcgccataagctgctgctacctacagctgcctcacta

SEQ ID NO: 583333 - DNA, 120 bp, Artificial Sequence
  ENSG00000172269_5 (sequence is synthesized)
cctctcctcatggtctatttcaccaactttggcaacacgaccattgtggtgcccaagcccttccgcccgatacttggcctgcatctggacttgggaatcctgtactatgtctacatgggg

SEQ ID NO: 583334 - DNA, 120 bp, Artificial Sequence
  ENSG00000172269_6 (sequence is synthesized)
ctgctggcagtgttctgtaccaatgccatcaatatcctagcaggaattaacggcctagaggctggccagtcactagtcatttctgcttccatcattgtcttcaacctggtagagttggaa

SEQ ID NO: 583335 - DNA, 120 bp, Artificial Sequence
  ENSG00000172269_7 (sequence is synthesized)
taccttctgttactttgctggcatgacctttgccgtggtgggcatcttgggacacttcagcaagaccatgctactattcttcatgccccaggtgttcaacttcctctactcactgcctca

SEQ ID NO: 583336 - DNA, 120 bp, Artificial Sequence
  ENSG00000172269_8 (sequence is synthesized)
gctcctgcatatcatcccctgccctcgccaccgcatacccagactcaatatcaagacaggcaaactggagatgagctattccaagttcaagaccaagagcctctctttcttgggcacctt

SEQ ID NO: 583337 - DNA, 120 bp, Artificial Sequence
  ENSG00000172269_9 (sequence is synthesized)
tattttaaaggtggcagagagcctccagctggtgacagtacaccagagtgagactgaagatggtgaattcactgaatgtaacaacatgaccctcatcaacttgctacttaaagtccttgg

SEQ ID NO: 583338 - DNA, 120 bp, Artificial Sequence
  ENSG00000172269_10 (sequence is synthesized)
gcccatacatgagagaaacctcacattgctcctgctgctgctgcagatcctgggcagtgccatcaccttctccattcgatatcagctcgttcgactcttctatgatgtctgagtcccttg

SEQ ID NO: 583339 - DNA, 120 bp, Artificial Sequence
  ENSG00000172269_11 (sequence is synthesized)
atcattgtcctttacctcacagtctctaggattcctgactcaggctgacctctctctctggtcccagactgcctccttgcccaggcctctctcactcttcatactcctccagattttgtt

SEQ ID NO: 583340 - DNA, 120 bp, Artificial Sequence
  ENSG00000172269_12 (sequence is synthesized)
ctcagcattttcctttctctgtgatcattggcatcctgggcgtttcttgccctctgctgactactgattggattttacctatggctttctgcaacttgctactctctccctctccatccc

SEQ ID NO: 583341 - DNA, 120 bp, Artificial Sequence
  ENSG00000172269_13 (sequence is synthesized)
atctttgcagcctcatagggtgggatacagcagctttttttgcagttatccacactcacatttcagagtcctgactctcaaggaaccactggtttttgggatagaacttgggccagggct

SEQ ID NO: 583342 - DNA, 120 bp, Artificial Sequence
  ENSG00000172269_14 (sequence is synthesized)
aggaacacaggctccacggtgacatgtcatttgattgtaaattaagtgttctgattagtaagaactaagcagggggccacatgctctcaatggagacaataaagtgttgtctttttctta

SEQ ID NO: 583343 - DNA, 120 bp, Artificial Sequence
  ENSG00000172269_15 (sequence is synthesized)
gtgcatgggtttggaaccagagtaccttgcccacagaaatggaagtctggggacccagttggatttctacaacctccagccttagcggcacccttttctctgatccgggaggggaagaga

SEQ ID NO: 583344 - DNA, 120 bp, Artificial Sequence
  ENSG00000172269_16 (sequence is synthesized)
agccatagggttccccagtttatgcccaccctcgtctggcctcctagcacgagcagtcagtccctcccctggaaggaaaggctgaagggaccacccaagcgcttggtccaactcaccccg

SEQ ID NO: 583345 - DNA, 120 bp, Artificial Sequence
  ENSG00000172269_17 (sequence is synthesized)
tttctgcaggcctgctcgttcagcgctcgcacccaagcccgctgccagttctcccggaaagacttgaaggcgaagagtgacgccaggaggccccggactcctggctcctcggcggcgcca

SEQ ID NO: 583346 - DNA, 120 bp, Artificial Sequence
  ENSG00000172269_18 (sequence is synthesized)
ccagctcccgcagggaacccgcgggttccccggctaaggcgggtcccgggccccggtccccgcgggcccgcgccagccacaagccccgggcatattgcagcagccaggcgaacaccgtga

SEQ ID NO: 583347 - DNA, 120 bp, Artificial Sequence
  ENSG00000172269_19 (sequence is synthesized)
aagccccgggcatattgcagcagccaggcgaacaccgtgagcagcgaggcggcgaagaggatcagcaaggccgcccagcccacgtcccgctgcccccagcccggatccatgctccgcgcg

SEQ ID NO: 583348 - DNA, 80 bp, Artificial Sequence
  ENSG00000172269_20 (sequence is synthesized)
atccatgctccgcgcgggctccgatcccggtcccggctggggctcacccgctgccccgggggagcatggcccgggcgggc

SEQ ID NO: 583349 - DNA, 120 bp, Artificial Sequence
  ENSG00000172269_21 (sequence is synthesized)
cggctgagtgcccaggactagtgggtgccacagggcgaggagaggaggtcctcgggggtcgcgatgccggggtctctgtctccgtggtccgggtctctcctagcttggtcagcagtcgga

SEQ ID NO: 583350 - DNA, 120 bp, Artificial Sequence
  ENSG00000172269_22 (sequence is synthesized)
cccgttagtcgccggccagtgcccgactcctcccaccgcgcgggccccgccggaccctggaggggactggtctgcagagacgctggggctcgcgggccggcaccggctccgggagggctg

SEQ ID NO: 583351 - DNA, 120 bp, Artificial Sequence
  ENSG00000172269_23 (sequence is synthesized)
cgtgcgcagagctgacactgacaacaccgccggcgccccgcccccacccgcccttaaaggagccgcacccgcgccgggcggggccaggacagcctggcgctccctcgctggaggagggcg

SEQ ID NO: 583352 - DNA, 120 bp, Artificial Sequence
  ENSG00000172269_24 (sequence is synthesized)
ggagggctagcagcgagcggaggaggttccggggttgaaaataggcgggatctttgatcacctcgccccatcttgcaatcgcggtgctcccacactcagctcaaggtttcctgcaagaaa

SEQ ID NO: 583353 - DNA, 120 bp, Artificial Sequence
  ENSG00000172269_25 (sequence is synthesized)
caggcgcgtctccacaccctcgtccctcctccccaccccctgcctttcaatagccatcttcctggagccggaggcatcccagattaagggagaggtacgggccctttaagcttgacctat

SEQ ID NO: 583354 - DNA, 120 bp, Artificial Sequence
  ENSG00000172269_26 (sequence is synthesized)
ggaggcggacggagctaaaactgacgtggaaccggaatgtgagcggtgtcagacacgtggtacaaggaggcattcatcttggaaccgggcaattggcatttccgctctggattggtgtgg

SEQ ID NO: 583355 - DNA, 120 bp, Artificial Sequence
  ENSG00000172269_27 (sequence is synthesized)
attcatcttggaaccgggcaattggcatttccgctctgggtagtacatctttaacataatgttagggaagtatccgttcttggctgcctttctttaattgcgtttccagtactctctcgg

SEQ ID NO: 583356 - DNA, 120 bp, Artificial Sequence
  ENSG00000172269_28 (sequence is synthesized)
tgattctactcttgaacataggatgaaatttggaatcacacttctcttccacttccatccccaccctctaatgcccatattaaaaatggcggccgccgccttccgcagtaatggttgttc

SEQ ID NO: 583357 - DNA, 120 bp, Artificial Sequence
  ENSG00000172269_29 (sequence is synthesized)
cggggtgcttgaccacacgtgaagactcagaactaacccaggcagcctggaactcggagaggtgatgagcagaacttactcgcattggggaaaggatgggtagggacccttgggtatatc

SEQ ID NO: 583358 - DNA, 120 bp, Artificial Sequence
  ENSG00000172269_30 (sequence is synthesized)
tgggactctggcagtggtgctttcctccctccgcccccctcaccacttaccagaataaaaaaccgggaatgagaagaccactttgggttactgtaacacctgcactagtgagtgaccacg

SEQ ID NO: 583359 - DNA, 120 bp, Artificial Sequence
  ENSG00000172269_31 (sequence is synthesized)
ggtaacaaggaggtaaggccctaggctgccatcctgaccttgaggaatggggaacctagtcctacatcagatccaaggggaacttgaaagcattaaatagatccacattcctaaagcata

SEQ ID NO: 583360 - DNA, 120 bp, Artificial Sequence
  ENSG00000172269_32 (sequence is synthesized)
ttcgtgggggtgattgcctgtggctgggacctgggaggtacctgagagaactggggttatttgggcttgtggggaggggctaagaaattatcagaaaagacaggaattcttaaaaggtgg

SEQ ID NO: 583361 - DNA, 120 bp, Artificial Sequence
  ENSG00000172269_33 (sequence is synthesized)
ccaagtgttccttttttgtctctgtgtcttcccagatcctttctggtagcccttcatcctatcgtccgtcctcaccacttttctaaaaattcttaaatcctcctcccctaggtggcacta

SEQ ID NO: 583362 - DNA, 120 bp, Artificial Sequence
  ENSG00000172269_34 (sequence is synthesized)
tcaccactttgggattgctctaccacaactggtaagtaggcctgtggataaggggacaactacctgaacacatggcaaagatggcccttatcataacccaccttgtggtggtgaagctaa

SEQ ID NO: 583363 - DNA, 120 bp, Artificial Sequence
  ENSG00000172269_35 (sequence is synthesized)
acctgcgcatacctctatggagttttctgcgtcttcagttggtcgtattctgaaatttctctctacccagtagtagttagggatgagtgcgtggaggccccaggaatagatgaattcagg

SEQ ID NO: 583364 - DNA, 120 bp, Artificial Sequence
  ENSG00000172269_36 (sequence is synthesized)
gccttggatcctgcagagttgctgcacaactggagtctcctctgagtcagaactagggtcagggctagtccagtgcccatagggtgtgatgtgagagaagggattggtaatgcctcttgc

SEQ ID NO: 583365 - DNA, 120 bp, Artificial Sequence
  ENSG00000172269_37 (sequence is synthesized)
gcttccgactatgttggcaacaggtttcctgcaagaaacaggcgcgtctccacaccctcgtccctcctccccaccccctgcctttcaatagccatcttcctggagccggaggcatcccag

SEQ ID NO: 583366 - DNA, 120 bp, Artificial Sequence
  ENSG00000172269_38 (sequence is synthesized)
cagcctatacatttgctgtgcaaagggagtgggcccaaagaagggctatttccatgtgagtagccctttataacttacaaagcacatttatttgcataatctgctacagtggttctgata

SEQ ID NO: 583367 - DNA, 120 bp, Artificial Sequence
  ENSG00000172270_0 (sequence is synthesized)
gctttttatagcggccgcgggcggcggcggcagcggttggaggttgtaggaccggcgaggaataggaatcatggcggctgcgctgttcgtgctgctgggattcgcgctgctgggcaccca

SEQ ID NO: 583368 - DNA, 120 bp, Artificial Sequence
  ENSG00000172270_1 (sequence is synthesized)
cggagcctccggggctgccggcttcgtccaggcgccgctgtcccagcagaggtgggtggggggcagtgtggagctgcactgcgaggccgtgggcagcccggtgcccgagatccagtggtg

SEQ ID NO: 583369 - DNA, 120 bp, Artificial Sequence
  ENSG00000172270_2 (sequence is synthesized)
gtttgaagggcagggtcccaacgacacctgctcccagctctgggacggcgcccggctggaccgcgtccacatccacgccacctaccaccagcacgcggccagcaccatctccatcgacac

SEQ ID NO: 583370 - DNA, 120 bp, Artificial Sequence
  ENSG00000172270_3 (sequence is synthesized)
gctcgtggaggaggacacgggcacttacgagtgccgggccagcaacgacccggatcgcaaccacctgacccgggcgcccagggtcaagtgggtccgcgcccaggcagtcgtgctagtcct

SEQ ID NO: 583371 - DNA, 120 bp, Artificial Sequence
  ENSG00000172270_4 (sequence is synthesized)
ggaacccggcacagtcttcactaccgtagaagaccttggctccaagatactcctcacctgctccttgaatgacagcgccacagaggtcacagggcaccgctggctgaaggggggcgtggt

SEQ ID NO: 583372 - DNA, 120 bp, Artificial Sequence
  ENSG00000172270_5 (sequence is synthesized)
gctgaaggaggacgcgctgcccggccagaaaacggagttcaaggtggactccgacgaccagtggggagagtactcctgcgtcttcctccccgagcccatgggcacggccaacatccagct

SEQ ID NO: 583373 - DNA, 120 bp, Artificial Sequence
  ENSG00000172270_6 (sequence is synthesized)
ccacgggcctcccagagtgaaggctgtgaagtcgtcagaacacatcaacgagggggagacggccatgctggtctgcaagtcagagtccgtgccacctgtcactgactgggcctggtacaa

SEQ ID NO: 583374 - DNA, 120 bp, Artificial Sequence
  ENSG00000172270_7 (sequence is synthesized)
gatcactgactctgaggacaaggccctcatgaacggctccgagagcaggttcttcgtgagttcctcgcagggccggtcagagctacacattgagaacctgaacatggaggccgaccccgg

SEQ ID NO: 583375 - DNA, 120 bp, Artificial Sequence
  ENSG00000172270_8 (sequence is synthesized)
ccgcgtgcgcagccacctggccgccctctggcccttcctgggcatcgtggctgaggtgctggtgctggtcaccatcatcttcatctacgagaagcgccggaagcccgaggacgtcctgga

SEQ ID NO: 583376 - DNA, 120 bp, Artificial Sequence
  ENSG00000172270_9 (sequence is synthesized)
tgatgacgacgccggctctgcacccctgaagagcagcgggcagcaccagaatgacaaaggcaagaacgtccgccagaggaactcttcctgaggcaggtggcccgaggacgctccctgctc

SEQ ID NO: 583377 - DNA, 120 bp, Artificial Sequence
  ENSG00000172270_10 (sequence is synthesized)
cacgtctgcgccgccgccggagtccactcccagtgcttgcaagattccaagttctcacctcttaaagaaaacccaccccgtagattcccatcatacacttccttcttttttaaaaaagtt

SEQ ID NO: 583378 - DNA, 120 bp, Artificial Sequence
  ENSG00000172270_11 (sequence is synthesized)
gggttttctccattcaggattctgttccttaggtttttttccttctgaagtgtttcacgagagcccgggagctgctgccctgcggccccgtctgtggctttcagcctctgggtctgagtc

SEQ ID NO: 583379 - DNA, 120 bp, Artificial Sequence
  ENSG00000172270_12 (sequence is synthesized)
atggccgggtgggcggcacagccttctccactggccggagtcagtgccaggtccttgccctttgtggaaagtcacaggtcacacgaggggccccgtgtcctgcctgtctgaagccaatgc

SEQ ID NO: 583380 - DNA, 120 bp, Artificial Sequence
  ENSG00000172270_13 (sequence is synthesized)
tgtctggttgcgccatttttgtgcttttatgtttaattttatgagggccacgggtctgtgttcgactcagcctcagggacgactctgacctcttggccacagaggactcacttgcccaca

SEQ ID NO: 583381 - DNA, 120 bp, Artificial Sequence
  ENSG00000172270_14 (sequence is synthesized)
ccgagggcgaccccgtcacagcctcaagtcactcccaagccccctccttgtctgtgcatccgggggcagctctggagggggtttgctggggaactggcgccatcgccgggactccagaac

SEQ ID NO: 583382 - DNA, 120 bp, Artificial Sequence
  ENSG00000172270_15 (sequence is synthesized)
cgcagaagcctccccagctcacccctggaggacggccggctctctatagcaccagggctcacgtgggaacccccctcccacccaccgccacaataaagatcgcccccacctccaccctca

SEQ ID NO: 583383 - DNA, 120 bp, Artificial Sequence
  ENSG00000172270_16 (sequence is synthesized)
cccgccagtgtagccacattcctgcccctttccagttagcccttcgcgttcggcttagtctgcggtcctcttgcattgcgactccgagtttaacttccaacacacactttcaacctccaa

SEQ ID NO: 583384 - DNA, 120 bp, Artificial Sequence
  ENSG00000172270_17 (sequence is synthesized)
gagacgcccccacctgtgtcgccccaatagcgacttttctcaccgtggtcgccgcggaacttcaagggtccttcctacccgcgttgctgagagtctgggtttacgcgtcacctcgggcgg

SEQ ID NO: 583385 - DNA, 120 bp, Artificial Sequence
  ENSG00000172270_18 (sequence is synthesized)
ggaggacgcgctgcccggccagaaaacggagttcaagtgagtgcctgaccacgccatgccgccacctgccccttctcacggctctcttgccgccagcggcctgtggtccgtgagaacaaa

SEQ ID NO: 583386 - DNA, 120 bp, Artificial Sequence
  ENSG00000172270_19 (sequence is synthesized)
agaccggtcggcaggcttgatccaggcggaagttagggaccagctccgcgcagacccccagagggaaaccccagggaggggtctgaggggcgtccttgtgaggcagggggctccagcagc

SEQ ID NO: 583387 - DNA, 120 bp, Artificial Sequence
  ENSG00000172270_20 (sequence is synthesized)
cctggcaggagtccccattgcttgctcctcactaggtcccgggcacgaaagggcgccacactgccaggtcccgggcacgtgtgcgggcctcccaggctctgtgctcctggcacaagaggg

SEQ ID NO: 583388 - DNA, 120 bp, Artificial Sequence
  ENSG00000172270_21 (sequence is synthesized)
ttacaggcgtgagcctccgcgcccggccaccaccgcgcccagctggctacgtttttagaaaagaatttccagtttgtgctggggctgctacaagagctcgatgccctggtccctgctcag

SEQ ID NO: 583389 - DNA, 120 bp, Artificial Sequence
  ENSG00000172270_22 (sequence is synthesized)
tacaagagctcgatgccctggtccctgctcagggacgtgggtgggtgccttgtctgtccccacaccctggtcccagcctcgtgtgtctctgggcaggaacatcgccaggcggggcctctg

SEQ ID NO: 583390 - DNA, 120 bp, Artificial Sequence
  ENSG00000172270_23 (sequence is synthesized)
ggttcccagcgccttagcccagggcccgccagctgccagcgaagggtgccttcccgaagggggtgccttcccgaaggggcctcctcagcaggcgctgggctcttcccttcccggaggcgt

SEQ ID NO: 583391 - DNA, 120 bp, Artificial Sequence
  ENSG00000172270_24 (sequence is synthesized)
ggccagaagttccccttgggcctccggtcctcggggcgtaagggccacggtgtatttttgggatgaaaaccagtccttcccggggaggagccgcaggttcctgggggtcaggcaggcagc

SEQ ID NO: 583392 - DNA, 120 bp, Artificial Sequence
  ENSG00000172270_25 (sequence is synthesized)
cctcctgcgggaggccggggatgggggcgggcctgcggttccaggctcctctctctcaccctcctgtcagggcctcccagagtgaaggctgtgaagtcgtcagaacacatcaacgagggg

SEQ ID NO: 583393 - DNA, 120 bp, Artificial Sequence
  ENSG00000172270_26 (sequence is synthesized)
gaaaccccacttttgctggggactgactcgtgaagaccacaaggtctgggcaacacagccttggcccgtgtggggtggacactgctgtttgctctgtgaattcgtgactgtgtttgcctc

SEQ ID NO: 583394 - DNA, 120 bp, Artificial Sequence
  ENSG00000172273_0 (sequence is synthesized)
gcctctccggagatggtctgaggtgggagaagagctgaagagacctggagccgacagacgggtgaaggccatgccgcctcctgggaaagttccccgaaaggagaatctgtggctacagtg

SEQ ID NO: 583395 - DNA, 120 bp, Artificial Sequence
  ENSG00000172273_1 (sequence is synthesized)
tgagtgggggtcctgctcctttgtgtgctcaaccatggaaaagttctttgagcatgtcactcagcacctgcagcagcacctgcatggctctggggaggaggaggaagaggaagaggagga

SEQ ID NO: 583396 - DNA, 120 bp, Artificial Sequence
  ENSG00000172273_2 (sequence is synthesized)
tgacccacttgaggaagaattctcctgcttgtggcaggaatgtggcttttgttctctggacagttctgctgacctcatccgccatgtctacttccactgctaccacaccaagctgaaaca

SEQ ID NO: 583397 - DNA, 120 bp, Artificial Sequence
  ENSG00000172273_3 (sequence is synthesized)
gtgggggctgcaggccttgcaaagccaggctgaccttggcccctgcatcctggacttccagagccggaacgtcatccctgatatccctgaccacttcctgtgtctgtgggagcactgtga

SEQ ID NO: 583398 - DNA, 120 bp, Artificial Sequence
  ENSG00000172273_4 (sequence is synthesized)
gaattccttcgacaatcctgagtggttttatcggcatgtggaagcacacagtctgtgctgtgaatacgaagcagtcggcaaggacaacccggtggtgctgtgtggctggaaaggctgtac

SEQ ID NO: 583399 - DNA, 120 bp, Artificial Sequence
  ENSG00000172273_5 (sequence is synthesized)
ctgcaccttcaaggaccgcagtaaacttcgagagcacctccgcagccatacccaggagaaagtggtagcctgccccacctgtgggggcatgtttgccaacaataccaagttcttagatca

SEQ ID NO: 583400 - DNA, 120 bp, Artificial Sequence
  ENSG00000172273_6 (sequence is synthesized)
catccgtcgccagacctcattggatcagcagcacttccagtgttctcactgttccaagagatttgccacagagcggctattgcgggaccacatgcgcaaccatgtgaatcactataagtg

SEQ ID NO: 583401 - DNA, 120 bp, Artificial Sequence
  ENSG00000172273_7 (sequence is synthesized)
ccctctgtgtgacatgacctgcccgctgccttcctccctccgcaaccacatgcgctttcgtcacagtgaggaccggccctttaaatgtgactgttgtgactacagctgcaagaatcttat

SEQ ID NO: 583402 - DNA, 120 bp, Artificial Sequence
  ENSG00000172273_8 (sequence is synthesized)
tgacctccagaagcacctggatacccacagcgaggagccagcctacaggtgtgattttgagaactgcaccttcagtgcccgatccctctgctctatcaagtcccattaccgcaaagtaca

SEQ ID NO: 583403 - DNA, 120 bp, Artificial Sequence
  ENSG00000172273_9 (sequence is synthesized)
tgaaggagactctgagccaaggtacaaatgtcatgtgtgtgacaaatgcttcacacggggcaacaacctcaccgtgcaccttcgcaagaagcaccagttcaagtggccctcagggcatcc

SEQ ID NO: 583404 - DNA, 120 bp, Artificial Sequence
  ENSG00000172273_10 (sequence is synthesized)
ccgttttcggtacaaggaacatgaagatggctatatgcggctgcagctggttcgctacgagagtgtagagctgacacagcaactgctgcggcaaccacaagagggatcgggcctgggaac

SEQ ID NO: 583405 - DNA, 120 bp, Artificial Sequence
  ENSG00000172273_11 (sequence is synthesized)
gtcgctgaacgagagcagcctgcagggcattattctagaaacagtgccaggggagccaggacgtaaggaagaggaagaggagggcaagggtagcgaagggacagccctctcagcctctca

SEQ ID NO: 583406 - DNA, 120 bp, Artificial Sequence
  ENSG00000172273_12 (sequence is synthesized)
ggacaaccccagttctgtcatccacgtggtgaatcagaccaatgcccaaggccagcaagagatcgtctactatgtgctgtctgaagccccaggggagcctcccccagcccctgagccacc

SEQ ID NO: 583407 - DNA, 120 bp, Artificial Sequence
  ENSG00000172273_13 (sequence is synthesized)
ggccgcagagccagaccatttcttccccaggtcctgaagtttgagccaggcaagtggcagtgcccctagtgggcagccgttgccaatggatgcctttaggagtggtgccgagagcagtgt

SEQ ID NO: 583408 - DNA, 120 bp, Artificial Sequence
  ENSG00000172273_14 (sequence is synthesized)
ggtccactctggcctgggtttgcatcattctgcagactctaaagacttcccttttctgccagactacattttgtggggagcctgaggactctggattctttgaggggatcctggatgtgt

SEQ ID NO: 583409 - DNA, 120 bp, Artificial Sequence
  ENSG00000172273_15 (sequence is synthesized)
gtgttcttgttaaagaggctgttatcaggcttaaccataaccctcaagatctgcttgacagtgattaaatccttagctcacatccattcccatctttcgggctccttaggcccaaggatg

SEQ ID NO: 583410 - DNA, 120 bp, Artificial Sequence
  ENSG00000172273_16 (sequence is synthesized)
gcatgtgactggtccctgcaagggtcctttctttgtcaccagccaaggcattgataaccaagtagccattttcctcttaaggtttcctctacaaccccaaggactttcatgattatcctc

SEQ ID NO: 583411 - DNA, 120 bp, Artificial Sequence
  ENSG00000172273_17 (sequence is synthesized)
agggacaggattggaggcattgagcgtgtttattaacaaattgtttttggtaataaaataaatgcttggactcttatttatttcttcttacatttggtggcagtttactaggtaatgagg

SEQ ID NO: 583412 - DNA, 120 bp, Artificial Sequence
  ENSG00000172273_18 (sequence is synthesized)
agatacagccacccagaagaggagctgaatagttaggcttgttccccttctggtgactcaggtggtttgttttttgtttgcttaactgtcctgttgtcttctcctcctccccttggtgaa

SEQ ID NO: 583413 - DNA, 120 bp, Artificial Sequence
  ENSG00000172273_19 (sequence is synthesized)
acttcgctattctcagagcgtatgccatttccatggaggtcccaggtgtttggctgtgagtgggcagtagtggtgctatagaatgaacaagaatgggctcactgggaggatagggcagct

SEQ ID NO: 583414 - DNA, 120 bp, Artificial Sequence
  ENSG00000172273_20 (sequence is synthesized)
gaccatggcctcactctgaatactgattagaacccagtgcctctagggtaggggttctttacctgggagtgggaaggaagctggggggtggagaggattgggaagcctcccagggaaggg

SEQ ID NO: 583415 - DNA, 120 bp, Artificial Sequence
  ENSG00000172273_21 (sequence is synthesized)
aggcaatcaagtggtccaggaaccaaactagaaaattgtgtgtctgaatgtgcattttcctggggaaaggatctgttttttgctagattatcaaagagattgaaacctcccaaaataaga

SEQ ID NO: 583416 - DNA, 120 bp, Artificial Sequence
  ENSG00000172273_22 (sequence is synthesized)
atcatcatttcgtctggttcagctgcttctcagcaccctgtgtccatttttatggtctactgctatgctggagaggtcaaggaaatagtcttggggacaggaagctgcccaaaaaggatc

SEQ ID NO: 583417 - DNA, 120 bp, Artificial Sequence
  ENSG00000172273_23 (sequence is synthesized)
ggaaatagtcttggggacaggaagctgcccaaaaaggatctctgggcctttttttgtaagacctaattctattactagaaaaactaaggctgaatgcagtggttcacgcctgtaatccca

SEQ ID NO: 583418 - DNA, 120 bp, Artificial Sequence
  ENSG00000172273_24 (sequence is synthesized)
aagtagctaggactacaggcatgtaccaccatgccctgctaacttctaaattttttgtagagacaaggtctgggtgtgttgcccaggccggtctcgaactcttggcctcaagtgattctc

SEQ ID NO: 583419 - DNA, 120 bp, Artificial Sequence
  ENSG00000172273_25 (sequence is synthesized)
gcctctcaaagtgctgggattacagggtttagcaaccgcacccggccactcctccatttctgtgcagtgcctttcctcaaaatttcccatccccatcaagttaatttgggagagagccaa

SEQ ID NO: 583420 - DNA, 120 bp, Artificial Sequence
  ENSG00000172273_26 (sequence is synthesized)
tggtggtttattttcctaattgtgtttttgttgtatataaaaacattgtaaactcatttatagaaaactcagtcaacaaggatataaggaataaatctgccatcctgccatcaagaagta

SEQ ID NO: 583421 - DNA, 120 bp, Artificial Sequence
  ENSG00000172273_27 (sequence is synthesized)
attgctgacagtactttagtgaacattgtttttgacatctctctgcctgtgtttacatatatttaaatacagatgaatgtgcttttttttaatcattctgtacaagttgttggcaacctg

SEQ ID NO: 583422 - DNA, 120 bp, Artificial Sequence
  ENSG00000172273_28 (sequence is synthesized)
agctcaagccatttgctcacctcagcctcccaaagtgctaagatcgtgagccactgcactcggcccagcagtcaatatttgtaatagggattcactagtagtctgtgagcagctcagcaa

SEQ ID NO: 583423 - DNA, 120 bp, Artificial Sequence
  ENSG00000172273_29 (sequence is synthesized)
ccctatatgcaccccagagtgttaaggatgactggattcttctctgaggaggagaaaaggctatgtagggtgaaggccatgccgcctcctgggaaagttccccgaaaggagaatctgtgg

SEQ ID NO: 583424 - DNA, 120 bp, Artificial Sequence
  ENSG00000172273_30 (sequence is synthesized)
agtatctctcttccatttcttttgctcttttaaaatttgtttattttttacacacaggctcttgatctgaagcccaggctagagtgcagtggtacaatcatagctcactgtaaccttgaa

SEQ ID NO: 583425 - DNA, 120 bp, Artificial Sequence
  ENSG00000172273_31 (sequence is synthesized)
aagagctgaagagacctggagccgacagacgtctaggggcttcgctgcggctgagactcggtcgccgccacgccttagcgtgaaggattccgggaagcctgcgggactgcgagtggagag

SEQ ID NO: 583426 - DNA, 120 bp, Artificial Sequence
  ENSG00000172273_32 (sequence is synthesized)
gttttgcccaacgggacggtctccttccttctgtccaaattctacctgtccttcgaggcgtggtgcgggccccactgcttaggggagacttccttttcgcctgaccgcggaggtgtctct

SEQ ID NO: 583427 - DNA, 120 bp, Artificial Sequence
  ENSG00000172273_33 (sequence is synthesized)
ggaaacgctggggttcctgaagagctgggacagaaagggataggggtcctacaggggcaaggttgactgccggctggagagactcaggggtaccagatcctaggcaaaactggggttttg

SEQ ID NO: 583428 - DNA, 120 bp, Artificial Sequence
  ENSG00000172273_34 (sequence is synthesized)
gggcatgtttctagtgggggtggccactgaagagacctgccttttggctgcctcttctttttgggctcaggcacctcccatagtctctttgctgattcagattcgtaggcattgttattc

SEQ ID NO: 583429 - DNA, 120 bp, Artificial Sequence
  ENSG00000172273_35 (sequence is synthesized)
agtacttactgtacctcgtatcagttacttagggaatcctcacaacagccccatgaggtaggcttcttatccccctttttgcagatgaggaaactgaggctcagagaggttaaatcactt

SEQ ID NO: 583430 - DNA, 120 bp, Artificial Sequence
  ENSG00000172273_36 (sequence is synthesized)
acctgagatcacacagctagtaagtggtgaagctggaattctaactcaggttctctaagtcccatgctctttccatgatactgtgtccattcatagctccctaagctctccttttctcct

SEQ ID NO: 583431 - DNA, 120 bp, Artificial Sequence
  ENSG00000172273_37 (sequence is synthesized)
tgggtggttcccttctgcctgggatggttcccctctcctttctgtgcctctccactatcacctacagccctcctttcttctgcctgccccaccccagagcagcacttccagtgttctcac

SEQ ID NO: 583432 - DNA, 120 bp, Artificial Sequence
  ENSG00000172273_38 (sequence is synthesized)
gctatgtaggtacagtaggtatagtgggttcagaaaagcctgtattgggggcatgaaggatcttctgttttttcgtattttctgttttttttccttttagtattcagtaaaggccttttt

SEQ ID NO: 583433 - DNA, 120 bp, Artificial Sequence
  ENSG00000172273_39 (sequence is synthesized)
tcagagttcccacctgtctcaggtaggccagagagagcaacatggtggggtcagcaagaatccgtgagaattcctgaggagaaggtgacactcaggagacagagccaaggccggctagtg

SEQ ID NO: 583434 - DNA, 120 bp, Artificial Sequence
  ENSG00000172273_40 (sequence is synthesized)
tcctctctctagcagaaattttgcttgcaacgtcaccctctgttctgtgtttcgtttattctttaattgttactcaaagtatgcttctggaactgcttgcatcacaactggggtgctgag

SEQ ID NO: 583435 - DNA, 120 bp, Artificial Sequence
  ENSG00000172273_41 (sequence is synthesized)
ttaaaagggcagatttctaggcttaactcctgccttcctgaatccgaacttctcacgcaggcgctggataactacattcgtgtgcagatctaaaattgagagctacctgggcatggtggc

SEQ ID NO: 583436 - DNA, 87 bp, Artificial Sequence
  ENSG00000172273_42 (sequence is synthesized)
actgcattccagcctgggtaactgaaataaaattgagaacctttagttttttgtttgtgtgtgtgtgtgtgtttttttttttttttt

SEQ ID NO: 583437 - DNA, 66 bp, Artificial Sequence
  ENSG00000172273_43 (sequence is synthesized)
acctgtcttggcctcccagagtgctgggattagaggtgtgcaccagtgcgcacagccgagaacctt

SEQ ID NO: 583438 - DNA, 120 bp, Artificial Sequence
  ENSG00000172273_44 (sequence is synthesized)
ggattagaggtgtgcaccagtgcgcacagccgagaaccttcagtttcatgtttatctttcttcaataaatatttattacagactgggtgcagtggctcatgcctgtaactccaacacttt

SEQ ID NO: 583439 - DNA, 86 bp, Artificial Sequence
  ENSG00000172273_45 (sequence is synthesized)
actacaaaaacaaaacaaaacaaaaattagacagatgtggtggcgcatgcctgtggtcccagttacttgggaggctgaggtaggag

SEQ ID NO: 583440 - DNA, 120 bp, Artificial Sequence
  ENSG00000172273_46 (sequence is synthesized)
aaaattagacagatgtggtggcgcatgcctgtggtcccagttacttgggaggctgaggtaggaggatctcctgagcctggggaggtcgaagcttcagtgagctgtgattgtgccactgta

SEQ ID NO: 583441 - DNA, 120 bp, Artificial Sequence
  ENSG00000172273_47 (sequence is synthesized)
tctcaagaaaaaaaatatttattacatgcctaagcatgcctagcagtgtatagacacccaaggtgcagtataaactacacagatacggctttttatgttcaaatggaatctacattttaa

SEQ ID NO: 583442 - DNA, 120 bp, Artificial Sequence
  ENSG00000172273_48 (sequence is synthesized)
cagaaggtattagcagagtggtggagtaaaccgttggataggttaggtaaaggcagattgtatggcactgtgaaagtctggcaggggacttatgattcaataagaaataaggagcttcta

SEQ ID NO: 583443 - DNA, 120 bp, Artificial Sequence
  ENSG00000172273_49 (sequence is synthesized)
ggctcatctgtaggctctatggagtagaaccgtatatggactagagtcagcccaacatgaccctaccattaccactagtgtgtggccgtgagcaagtcagttgacctctggaacttcagg

SEQ ID NO: 583444 - DNA, 120 bp, Artificial Sequence
  ENSG00000172273_50 (sequence is synthesized)
caagtcagttgacctctggaacttcaggtgtttatctataaatgaggttaaaaatagcacctaccagctgggcgtggtggctcacacctatgatcccagcactttgggaagccaaggtgg

SEQ ID NO: 583445 - DNA, 120 bp, Artificial Sequence
  ENSG00000172273_51 (sequence is synthesized)
gcggaggttgcagtgagccaaaatcgagccattgcactccagcctgggagatgagcgaaactcaatctcaaaaaaaaaaaaaaaaaaagcacctacggcaaagggtggtgttggtaatta

SEQ ID NO: 583446 - DNA, 120 bp, Artificial Sequence
  ENSG00000172273_52 (sequence is synthesized)
tgttggtaattaaatgacataatgcaaataaaatgcttactgtggtgcttgacatatagtaagtgtgaaattaaaaacaaaaagatttattatcttcattttgcagatgagagtattcag

SEQ ID NO: 583447 - DNA, 120 bp, Artificial Sequence
  ENSG00000172273_53 (sequence is synthesized)
aagttaagttcttgacaaaggtcatacagctagtagatggtagacagtggagccaggatttgaaccctgatccttctcaaaagccatctgtttgaacctgagcattgttctgcctcacag

SEQ ID NO: 583448 - DNA, 120 bp, Artificial Sequence
  ENSG00000172273_54 (sequence is synthesized)
aggaataattccttcttggtgggttgctctgaagcttcatgagaaaatgtctgttaaagcgtttagctcagtgcctggcacacactcaatagtgttagtttttgttttccctttccacaa

SEQ ID NO: 583449 - DNA, 120 bp, Artificial Sequence
  ENSG00000172273_55 (sequence is synthesized)
acaccagacatcttccagggatttaaggaattactccatccttactgtaaaagggcagggtttctcatgggtcactggaacaacacgtgctgattctaggcaggctgcctgcccagcttt

SEQ ID NO: 583450 - DNA, 120 bp, Artificial Sequence
  ENSG00000172273_56 (sequence is synthesized)
aaaaataaataaataaataaataaaaccttaatttgatggtggttttatgtctgccatttccatttagattcaaagaatcctaagaataatggtggagcaaagcttatttttctgttttt

SEQ ID NO: 583451 - DNA, 120 bp, Artificial Sequence
  ENSG00000172273_57 (sequence is synthesized)
ctaagaataatggtggagcaaagcttatttttctgttttttgaatcttgtaaggcatggtgccaaacccaataaatggtgccaaaaagtcctgcagctggaactagagctagagtctaag

SEQ ID NO: 583452 - DNA, 120 bp, Artificial Sequence
  ENSG00000172273_58 (sequence is synthesized)
ggttctgatccttagctccaaggccttctcataaatcctttgacactttcaccctccaacacagtcagtcagtctctgtttttctggttgggtttctatataaaactttccattttgagt

SEQ ID NO: 583453 - DNA, 120 bp, Artificial Sequence
  ENSG00000172273_59 (sequence is synthesized)
agctctccttctcccaccccaaattctgttttaagtctgatgactatgaaccataattgatagtttcaaaattcaagtcatatttatacaaaggcaaaattggggaatgattatattttc

SEQ ID NO: 583454 - DNA, 120 bp, Artificial Sequence
  ENSG00000172273_60 (sequence is synthesized)
taaagtatctgtgtttcaaaacaagttaacttatataaagcgctgaaaatacagtgcttagggatgctagagagataggaaatggattggaagagttgatggggccttcttggagaaggc

SEQ ID NO: 583455 - DNA, 120 bp, Artificial Sequence
  ENSG00000172273_61 (sequence is synthesized)
agatcttgagcaaaacatgaggggaaggaggagtggtggttttacaaggagaagtgggaggtgtcagatcgagaggcagcatcttcatcaggaactgcagaaactcaagtcagaggactt

SEQ ID NO: 583456 - DNA, 120 bp, Artificial Sequence
  ENSG00000172273_62 (sequence is synthesized)
gcgtgccggccatttctgctgtctgtttctggcataggccttgcacacactctcacctctgcctagaccacacttcttcacctatttacagatactcatccatcgtacttcagagttcaa

SEQ ID NO: 583457 - DNA, 120 bp, Artificial Sequence
  ENSG00000172273_63 (sequence is synthesized)
catggggacgtttctcagaacaccatgtcaaatgacctctgtttaatgcttttatagcaccatgtatatccccgctttgtaacactcatcactggttgcagttttatatttatagatctg

SEQ ID NO: 583458 - DNA, 120 bp, Artificial Sequence
  ENSG00000172273_64 (sequence is synthesized)
attatttgatgaatatgctttctccctgactgaaagctatgtgagggcaaggagtgggacactttttacttgttatagtccctctaactggcacacaatttatggtcattaaatactggt

SEQ ID NO: 583459 - DNA, 120 bp, Artificial Sequence
  ENSG00000172273_65 (sequence is synthesized)
atttgctaaatgaaccctggtaatttggttagagtccagcctcctcacgagtccagcctcctcactctctgtttagtgctgcaggtggaaggtgacctgagccttggaaagtgtcagact

SEQ ID NO: 583460 - DNA, 120 bp, Artificial Sequence
  ENSG00000172288_0 (sequence is synthesized)
ctgtggatttagctactctcacctgaggctactgagcaagttgtcatgcaccatgagacaaagcccaagctgtcccaccaggcagtaagtatggagaggttcaggcacatggcatagctg

SEQ ID NO: 583461 - DNA, 120 bp, Artificial Sequence
  ENSG00000172288_1 (sequence is synthesized)
ctatttcgcacaattttcactacaccagtggtgacaaaatagaagaggttcatccatacacagaacctggtgaagagctggaggcagaaagaagtgtctatgtggagacgcaactgaaac

SEQ ID NO: 583462 - DNA, 120 bp, Artificial Sequence
  ENSG00000172288_2 (sequence is synthesized)
aaaggtggcacagcaactgttccaatcccgtgtctttcctcatggcttcccaggagtttgaggttgaagctattgttgacaaaagacaggataaaaatgggaatacacagtatttggttc

SEQ ID NO: 583463 - DNA, 120 bp, Artificial Sequence
  ENSG00000172288_3 (sequence is synthesized)
ggtggaaaggttatgacaaacaggatgacacttgggaaccagagcagcacctcatgaactgtgaaaaatgtgtacatgattttaatagacgacagactgaaaaacagaaaaaactgacat

SEQ ID NO: 583464 - DNA, 120 bp, Artificial Sequence
  ENSG00000172288_4 (sequence is synthesized)
ggactacaaccagtagaattttttcaaacaatgccagaagaagaacttccagatctacaaaagcaaactattctaagaactctcctaaaacgccagtgactgataaacaccacaggtcca

SEQ ID NO: 583465 - DNA, 120 bp, Artificial Sequence
  ENSG00000172288_5 (sequence is synthesized)
aaaaccgcaagttatttgctgccagcaagaacgttaggagaaaggcagcttcaattctctccgacacaaagaatatggagataataaattcaactattgagacccttgcacctgacagcc

SEQ ID NO: 583466 - DNA, 120 bp, Artificial Sequence
  ENSG00000172288_6 (sequence is synthesized)
cctttgaccacaaaactgtgagtggctttcagaaacttgagaaactggaccctattgcagcagatcagcaggacacggtggtcttcaaggtgacagaagggaaactcctccgggaccctt

SEQ ID NO: 583467 - DNA, 120 bp, Artificial Sequence
  ENSG00000172288_7 (sequence is synthesized)
tgtcacgtcctggtgcagaacagactggaatacagaacaagactcagatacacccactaatgtcgcagatgtctggctcagttactgcttctatggccacaggttcagctacccgaaagg

SEQ ID NO: 583468 - DNA, 120 bp, Artificial Sequence
  ENSG00000172288_8 (sequence is synthesized)
gtatagtggtattaatagacccattagcagccaatgggacaacagacatgcatacctcagttccaagagtgaaaggtgggcaaagaaatattactgatgacagcagagaccagcctttta

SEQ ID NO: 583469 - DNA, 120 bp, Artificial Sequence
  ENSG00000172288_9 (sequence is synthesized)
agcacatacagagacattgtagtgaagaaagaggatggattcacccagatagtgctatcaactagatcgacagaaaaaaatgcactgaatacagaagtaattaaagaaatagttaatgct

SEQ ID NO: 583470 - DNA, 120 bp, Artificial Sequence
  ENSG00000172288_10 (sequence is synthesized)
ctgaatagcgctgctgcagatgacagcaagctcgtgctgttcagtgcagctggaagtgtcttttgctgcggtcttgattttgggtactttgtgaagcacttaaggaataacagaaacaca

SEQ ID NO: 583471 - DNA, 120 bp, Artificial Sequence
  ENSG00000172288_11 (sequence is synthesized)
gcaagccttgaaatggtggacaccatcaagaactttgtgaatacttttattcaatttaaaaagcctattgttgtatcagtcaatggccctgcgattggactaggtgcatccatcctgcct

SEQ ID NO: 583472 - DNA, 120 bp, Artificial Sequence; identical to SEQ ID NO: 282206
  ENSG00000172288_12 (sequence is synthesized)

SEQ ID NO: 583473 - DNA, 120 bp, Artificial Sequence
  ENSG00000172288_13 (sequence is synthesized)
gccaatgaaatgttaattgctgggcgaaagctgacagcaagggaggcatgcgccaaaggcctggtctctcaggtatttttgactggaactttcacccaagaggttatgattcaaattaag

SEQ ID NO: 583474 - DNA, 120 bp, Artificial Sequence
  ENSG00000172288_14 (sequence is synthesized)
gagcttgcctcatacaatccaattgtactggaagaatgtaaggccctcgttcgctgtaatattaagttggagttggaacaggccaatgagagagagtgtgaggtgctgaggaagatctgg

SEQ ID NO: 583475 - DNA, 120 bp, Artificial Sequence
  ENSG00000172288_15 (sequence is synthesized)
agctcagcccaagggatagaatccatgttaaaaatacctctgttgggatataaagcagccttccctcccagaaagacacagaatgatcagagatggtgcccttgactttatagtggcaca

SEQ ID NO: 583476 - DNA, 120 bp, Artificial Sequence
  ENSG00000172288_16 (sequence is synthesized)
aacgcttcagagacacacaattataagagacttatcttttagcataaatacttatggctcaaaatccactgacgatcattctcctaaactgaacacatgactagaattggtggtgagata

SEQ ID NO: 583477 - DNA, 120 bp, Artificial Sequence
  ENSG00000172288_17 (sequence is synthesized)
tcgcttgattttcttttcctttataaatgtctagttcttacccagttaacaaaagaaaactttatcgctctaaagtaaaacttgttacaccacattagtgaattatggaatgattttggt

SEQ ID NO: 583478 - DNA, 120 bp, Artificial Sequence
  ENSG00000172288_18 (sequence is synthesized)
ggaaatatccaggttctaatgtgtggaatgtgcagatttaggttactttagtgtatgttctagttaataagttaaaattctggacacattattaaaggcagaaacttctttcaaagcaaa

SEQ ID NO: 583479 - DNA, 120 bp, Artificial Sequence
  ENSG00000172288_19 (sequence is synthesized)
aggggcaacaaatgcatcatgagttgcaagatgccctaatccatcttcatagcccaaaacaatttcacccatagctaaggcttggaaacagaactggaaatgtccaagctatgtatttaa

SEQ ID NO: 583480 - DNA, 120 bp, Artificial Sequence
  ENSG00000172288_20 (sequence is synthesized)
attatcacatcatttttaagcactgtagctttacaaggagtaacaaaacagcctctttgcccaaatgtgattattttatgcacacctaagcccaaatataaaaacagactcttcttgcaa

SEQ ID NO: 583481 - DNA, 120 bp, Artificial Sequence
  ENSG00000172289_0 (sequence is synthesized)
atggaaggaataaataaaactgcaaagatgcagtttttctttcgtccattctcacctgaccctgaggtccagatgctgatttttgtggtcttcctgatgatgtatctgaccagcctcggt

SEQ ID NO: 583482 - DNA, 120 bp, Artificial Sequence
  ENSG00000172289_1 (sequence is synthesized)
ggaaatgctacaattgcagtcattgttcagatcaatcattccctccacacccccatgtactttttcctggctaatctggcagttctagaaatcttctatacatcttccatcaccccattg

SEQ ID NO: 583483 - DNA, 120 bp, Artificial Sequence
  ENSG00000172289_2 (sequence is synthesized)
gccttggcaaacctcctttcaatgggcaaaactcctgtttccatcacgggatgtggcacccagatgtttttctttgtcttcttgggtggggctgattgtgtcctgctggtagtcatggct

SEQ ID NO: 583484 - DNA, 120 bp, Artificial Sequence
  ENSG00000172289_3 (sequence is synthesized)
gtgctggggttcctgttgtcactgccactcaccattttaatcttccatctcccattctgccacaatgatgagatctaccacttctactgtgacatgcctgcagtcatgcgcctggcttgt

SEQ ID NO: 583485 - DNA, 120 bp, Artificial Sequence
  ENSG00000172289_4 (sequence is synthesized)
gcagacacacgcgttcacaagactgctctgtatatcatcagcttcatcgtccttagcatccccctctcattgatctccatctcctatgtcttcatcgtggtagccattttacggatccgg

SEQ ID NO: 583486 - DNA, 120 bp, Artificial Sequence
  ENSG00000172289_5 (sequence is synthesized)
tcagcagaagggcgccagcaagcctactctacctgctcttctcacatcttagtggtcctcctgcagtatggctgcaccagctttatatacttgtcccccagttccagctactctcctgag

SEQ ID NO: 583487 - DNA, 120 bp, Artificial Sequence
  ENSG00000172289_6 (sequence is synthesized)
atgggccgggtggtatctgtggcctacacatttatcactcccattttaaaccccttgatctatagtttgaggaacaaggaactgaaagatgccctaaggaaagcattgagaaaattctag

SEQ ID NO: 583488 - DNA, 120 bp, Artificial Sequence
  ENSG00000172292_0 (sequence is synthesized)
agggctggttctgaagcttggcggcagcccctacctgctgacccaccgcctccgggcgcacgggaagaggactgagagccctgaaaccccagcggggcaggagccagcattctgagcatg

SEQ ID NO: 583489 - DNA, 120 bp, Artificial Sequence
  ENSG00000172292_1 (sequence is synthesized)
tgcgagccagccagggggctagggcggatttggggggtcgactttaggtcgtcgccctaagcgcaaagcgaaagagcggtgagagcaggggcgggcgacactccccggagcggtgcccct

SEQ ID NO: 583490 - DNA, 120 bp, Artificial Sequence
  ENSG00000172292_2 (sequence is synthesized)
gcgcccagggcgcagcgactgcgccctgccctgcgggtgtgggcgagttggccgcgtgtgtgcctcgctgtttgacgcgaagacgagccaatcagggcgggcggcccgagctgccatgtg

SEQ ID NO: 583491 - DNA, 120 bp, Artificial Sequence
  ENSG00000172292_3 (sequence is synthesized)
tgtgacgggcaaggcggcccctttccccagcgcggccagagggaggagagaaccggggctcgccgcgagccttcgagagcagcggccgcggaggaggcggcggcggcgggcgggagcagc

SEQ ID NO: 583492 - DNA, 120 bp, Artificial Sequence
  ENSG00000172292_4 (sequence is synthesized)
gcggcggcacaggctcggggccagccgggcgcgcatccccgggcgccctgcgcggtggagagcttggcgggctgcgggtgccgcaggacaggagtggacaaagcaagatggcagggatct

SEQ ID NO: 583493 - DNA, 120 bp, Artificial Sequence
  ENSG00000172292_5 (sequence is synthesized)
tagcctggttctggaacgagaggttttggctcccgcacaatgtcacctgggcggacctgaagaacacggaggaggccaccttcccgcaggctgaggacctctatctcgcttttcccctgg

SEQ ID NO: 583494 - DNA, 120 bp, Artificial Sequence
  ENSG00000172292_6 (sequence is synthesized)
ccttctgtatcttcatggtgcggctcatcttcgagagatttgtagccaaaccgtgcgccatagccctcaacattcaggccaatggaccacaaattgctccgcccaatgccattctggaaa

SEQ ID NO: 583495 - DNA, 120 bp, Artificial Sequence
  ENSG00000172292_7 (sequence is synthesized)
aggtcttcactgcaattacaaagcatcctgatgaaaagagattggaaggcctctccaagcaactggactgggatgttcgaagcattcagcgctggtttcgacaaagacgcaatcaggaga

SEQ ID NO: 583496 - DNA, 120 bp, Artificial Sequence
  ENSG00000172292_8 (sequence is synthesized)
agccaagcacgctgacgaggttctgtgagagcatgtggagattttcattttacctttatgtatttacctacggagtcagattcctgaaaaagaccccctggttgtggaatacgaggcatt

SEQ ID NO: 583497 - DNA, 120 bp, Artificial Sequence
  ENSG00000172292_9 (sequence is synthesized)
gctggtacaactacccctatcagccactcacaactgaccttcactactattacatcctggagctgtcgttttattggtctttgatgttttctcagttcactgatatcaaaagaaaggact

SEQ ID NO: 583498 - DNA, 120 bp, Artificial Sequence
  ENSG00000172292_10 (sequence is synthesized)
ttggcattatgttcctgcaccaccttgtatctattttcttgattaccttttcatatgtcaacaatatggcccgagtaggaacgctggtcctttgtcttcatgattcagctgatgctcttc

SEQ ID NO: 583499 - DNA, 120 bp, Artificial Sequence
  ENSG00000172292_11 (sequence is synthesized)
tggaggctgccaaaatggcaaattatgccaagtttcagaaaatgtgtgatctcctgtttgttatgtttgccgtggtttttatcaccacacgactgggtatatttcctctctgggtgttaa

SEQ ID NO: 583500 - DNA, 120 bp, Artificial Sequence
  ENSG00000172292_12 (sequence is synthesized)
ataccacattatttgaaagctgggagatcgttggaccttacccttcctggtgggtttttaacctactgctattgctagtacaagggttgaactgcttctggtcttacttgattgtgaaaa

SEQ ID NO: 583501 - DNA, 120 bp, Artificial Sequence
  ENSG00000172292_13 (sequence is synthesized)
tagcttgcaaagctgtttcaagaggcaaggtgtccaaggatgatcgaagtgatattgagtctagctcagatgaggaggactcagaacctccgggaaagaatccccacactgcgacaacca

SEQ ID NO: 583502 - DNA, 120 bp, Artificial Sequence
  ENSG00000172292_14 (sequence is synthesized)
ccaatgggaccagtggtaccaacgggtatctcctgactggctcctgctccatggatgattaattactcaaaactacaagtcccaagcaaagtgaactatttgttcctggaagtatttaat

SEQ ID NO: 583503 - DNA, 120 bp, Artificial Sequence
  ENSG00000172292_15 (sequence is synthesized)
aagttgcaaatgcagttcctttcataatatctcagcaccagaaacaaaaattaagattatcaaagcattttgaatagtgcactgccatgtgtcctgtctgtgaatgaagaagaattacca

SEQ ID NO: 583504 - DNA, 120 bp, Artificial Sequence
  ENSG00000172292_16 (sequence is synthesized)
ttctctctttgtaggcatgctgtatgtaattgacacaagggaacagtatttgcatttgtactgtcttagaatattatttatttttttgtatttgtaaatctgtggacaaaagagggtttc

SEQ ID NO: 583505 - DNA, 120 bp, Artificial Sequence
  ENSG00000172292_17 (sequence is synthesized)
ctcactccttttactcactgggctcatgacagtgaaggagatgctccatctgcttctccccctttctcttgctgtagtccaatgtgctatgagcatcagcttactttgtcacttagagca

SEQ ID NO: 583506 - DNA, 120 bp, Artificial Sequence
  ENSG00000172292_18 (sequence is synthesized)
agcaaaacccagtgcaagagtctcgttcagctctaaataggtttgctttcttttagttacagtgcccattttgaaattgcctatacagtcttagtgaccatttaaaccggacgaactagg

SEQ ID NO: 583507 - DNA, 120 bp, Artificial Sequence
  ENSG00000172292_19 (sequence is synthesized)
tgtttaattttcactcttcatgttcaattagcagttcaaattaaagaagatggttattggagaacttttttgaatggttttgtattaaattgctttgaaatagatttcatttcttgtgca

SEQ ID NO: 583508 - DNA, 120 bp, Artificial Sequence
  ENSG00000172292_20 (sequence is synthesized)
cacagccaagatttcttcaatgggtgtgagctagttgagggttaaccttgtaggttgcagagtgtatttgtttgtttgtttgtttttctctgtgatgaggtcagtgctctgattttgaag

SEQ ID NO: 583509 - DNA, 120 bp, Artificial Sequence
  ENSG00000172292_21 (sequence is synthesized)
gaggatattcactgaagctcatagttataaacaaggaaatcactgttaagaatgggaatttgtcctgtgttctgggaataacataaagagagcaactgatttcagccaggttttgccact

SEQ ID NO: 583510 - DNA, 120 bp, Artificial Sequence
  ENSG00000172292_22 (sequence is synthesized)
accctataattagtgcagtcttatgttataaaagaaagaagttaactatatttggggacaaaaaaatatttcaagagttgataaagattacctgtgcagtgcagagcactttaatgcaac

SEQ ID NO: 583511 - DNA, 120 bp, Artificial Sequence
  ENSG00000172292_23 (sequence is synthesized)
cagctttcaagaaaaagccctatctagtacttgatgttgatgtttttattttgctgagcaaaataaagccaatgggagaaagactattttaccctttgcttttctccttaaacgtaatcc

SEQ ID NO: 583512 - DNA, 120 bp, Artificial Sequence
  ENSG00000172292_24 (sequence is synthesized)
agatgactttcctgttactaaacactgagcagcattacactacaatgcttctttggtttccaggaatttttttcaaatggggctgtttctggaaaaatgaaaaattctattggacaatgg

SEQ ID NO: 583513 - DNA, 120 bp, Artificial Sequence
  ENSG00000172292_25 (sequence is synthesized)
caatatcaacaatgaggaaaattactgaagaataagtttccataagtctcctacatagcagtgttatttatgtacagataagaaaaccatatgtcagccaaagattttatctcttcttct

SEQ ID NO: 583514 - DNA, 120 bp, Artificial Sequence
  ENSG00000172292_26 (sequence is synthesized)
aacttttagtaagaggaaaaagggattataaaacccttcataaatcaagaaggccatcacttagaacgaaccccaaacaaaaatgccataatataaatgtgtgaatcagggctgtgaaga

SEQ ID NO: 583515 - DNA, 120 bp, Artificial Sequence
  ENSG00000172292_27 (sequence is synthesized)
caacagcagaaatgctaacaagcgtgcagaaacaccagagagtgcgtatcctgctcagaaccattcacatttaattcaattcttggaaaaaattaaagctttttgcccacaatttgcaat

SEQ ID NO: 583516 - DNA, 120 bp, Artificial Sequence
  ENSG00000172292_28 (sequence is synthesized)
ctgtgggttaatagttaaaagaatgttcccaaccaaaaaattcttaccgtaatattatatcttgccctacttatttacaaaataatatgtttctgttatggtccttagtaataattgaag

SEQ ID NO: 583517 - DNA, 120 bp, Artificial Sequence
  ENSG00000172292_29 (sequence is synthesized)
aggcttagaaatacatctgcttgtttattgagaaaacgatgcaaataattctgcttttagagccttgttattttatttcacaaaacaggcatatgtctaggagtgtaatttgtggatggt

SEQ ID NO: 583518 - DNA, 120 bp, Artificial Sequence
  ENSG00000172292_30 (sequence is synthesized)
tcataaaaggacttgttagtctccagaacatctgctaaaatgcaagtatatgtataaggtaatagcatattacagctgaaaattttgagaaggtaaaagtttcttaattaaaatatgaac

SEQ ID NO: 583519 - DNA, 120 bp, Artificial Sequence
  ENSG00000172292_31 (sequence is synthesized)
atatttagcttgctttagtgtctggggcaagtcctctcaatggctaaaattaactttagagatccatgtgttcaggtttagatcatatgacactcgagcacagaagaataatttcaagga

SEQ ID NO: 583520 - DNA, 120 bp, Artificial Sequence
  ENSG00000172292_32 (sequence is synthesized)
ggtcatcttgtaaattaaaggtttagaagaattgcataaaacgtagtaaatggggtctgtcattagcaaaggcaaatctaagcaatcatttttccccccagaagttacttagaaggagaa

SEQ ID NO: 583521 - DNA, 120 bp, Artificial Sequence
  ENSG00000172292_33 (sequence is synthesized)
ctgggaacacttggggtctctctaactgatggcattcacttcacacagtcgtctatgttatccagagatttttatttcattttacattttagggcacagttctttggggctaattaaaat

SEQ ID NO: 583522 - DNA, 120 bp, Artificial Sequence
  ENSG00000172292_34 (sequence is synthesized)
ggggtttgcaggctttttatggtgaagaataatatatctctgtctatagctttcccatggtagcctgataaggctgagagagaaaaatatgtgcagtatctcatcctccccctgtaccag

SEQ ID NO: 583523 - DNA, 120 bp, Artificial Sequence
  ENSG00000172292_35 (sequence is synthesized)
gccatagctttgaagtgtattttgtaaattcaactataggttagtcagaatgctgtttttcgttaattaacttagcctgtgttgatatctcctccttcctggtcacattcaaaccttccc

SEQ ID NO: 583524 - DNA, 120 bp, Artificial Sequence
  ENSG00000172292_36 (sequence is synthesized)
agagtacaaaggggtatgtagaaaggattccagaagaagtaatactttattctctaatgttaatagcttttctggatctcttagtagggggaaagtagaaaatcgagtagaatttggcct

SEQ ID NO: 583525 - DNA, 120 bp, Artificial Sequence
  ENSG00000172292_37 (sequence is synthesized)
caggtcaataaatgatataaaaacatgtgttctatttatgtatatatatgtatgtttctccaaaaagtgataaaaccaaaatatcactgactcatccctacccatattcttttcataaaa

SEQ ID NO: 583526 - DNA, 120 bp, Artificial Sequence
  ENSG00000172292_38 (sequence is synthesized)
cccactcaccaggtacaatagaaacttccctccttgtttgtcagcctcctgttcatgttccccacacacctgaaggtggtagaatcttttcagcctcttagccagtgagctaaatatggc

SEQ ID NO: 583527 - DNA, 120 bp, Artificial Sequence
  ENSG00000172292_39 (sequence is synthesized)
taagcacaggtcataagagcacctaaggccagcatataagccaactacagttcacctttccaaatttggtcctatggatgttgagcatagggaagcaactctcagtattttggattattc

SEQ ID NO: 583528 - DNA, 120 bp, Artificial Sequence
  ENSG00000172292_40 (sequence is synthesized)
aagtgtatgtggtaaaaatgcagatgattgctgctttaccccagggtttattagcatcctacttctgctgggctgcatcattatataatgccacaggcatctagtcaaggtaaagaagcc

SEQ ID NO: 583529 - DNA, 120 bp, Artificial Sequence
  ENSG00000172292_41 (sequence is synthesized)
agaaaggttaggcaagaagtgagataaaatcagatcacctttgatcaaaatggttggtgaacctccacatgtccagttctgttgccaaactttccattcagagtatttggtggagtttga

SEQ ID NO: 583530 - DNA, 120 bp, Artificial Sequence
  ENSG00000172292_42 (sequence is synthesized)
atttgagcaaactaaatgccttcatcttaggtagaaagggcctgaatcttccattttatattcaaacctcattgttatttggcctaagtaaaaagtcagatttcatttccatttacctga
